United States Patent Application Publication US 2005/0244851 A1 - sequence listing, part 72

SEQ ID NO: 2801101 - DNA, 25 bp, Homo sapien
ccagcgcccagccggcacctcctgc

SEQ ID NO: 2801102 - DNA, 25 bp, Homo sapien
ctgcaaagggctccgcagtccccag

SEQ ID NO: 2801103 - DNA, 25 bp, Homo sapien
aagggctccgcagtccccagcccgc

SEQ ID NO: 2801104 - DNA, 25 bp, Homo sapien
ccgcgcgctcttgcggcccagcgcg

SEQ ID NO: 2801105 - DNA, 25 bp, Homo sapien
cgcgcgctcttgcggcccagcgcgc

SEQ ID NO: 2801106 - DNA, 25 bp, Homo sapien
gcgcgctcttgcggcccagcgcgcg

SEQ ID NO: 2801107 - DNA, 25 bp, Homo sapien
cgcgctcttgcggcccagcgcgcgc

SEQ ID NO: 2801108 - DNA, 25 bp, Homo sapien
agtccaagccccagcggccgcaaaa

SEQ ID NO: 2801109 - DNA, 25 bp, Homo sapien
gccgctcggcgaggctgagaaggag

SEQ ID NO: 2801110 - DNA, 25 bp, Homo sapien
agccctcgccggttcccgccgctcg

SEQ ID NO: 2801111 - DNA, 25 bp, Homo sapien
aacccgcatccccgcggagtccaag

SEQ ID NO: 2801112 - DNA, 25 bp, Homo sapien
gggttccacgctgcgccctcgatgt

SEQ ID NO: 2801113 - DNA, 25 bp, Homo sapien
cactgaggccgtgcgggccgctggg

SEQ ID NO: 2801114 - DNA, 25 bp, Homo sapien
gtgcgggccgctgggttccacgctg

SEQ ID NO: 2801115 - DNA, 25 bp, Homo sapien
cagggagcactgaggccgtgcgggc

SEQ ID NO: 2801116 - DNA, 25 bp, Homo sapien
ctgcaagccaaagtttcccaagtgc

SEQ ID NO: 2801117 - DNA, 25 bp, Homo sapien
ttcccaagtgcagccggcagggacg

SEQ ID NO: 2801118 - DNA, 25 bp, Homo sapien
tgagctgtggtcttcggctcctcgg

SEQ ID NO: 2801119 - DNA, 25 bp, Homo sapien
tcggcgcctcgaatcgcagatctcg

SEQ ID NO: 2801120 - DNA, 25 bp, Homo sapien
tctgtgcggccctagggcgccgtct

SEQ ID NO: 2801121 - DNA, 25 bp, Homo sapien
agatctcggtagatgccgcccagtc

SEQ ID NO: 2801122 - DNA, 25 bp, Homo sapien
ctgcttgcggaaagaggcgggcgac

SEQ ID NO: 2801123 - DNA, 25 bp, Homo sapien
ggcgggcgactgccgcgaagcgctg

SEQ ID NO: 2801124 - DNA, 25 bp, Homo sapien
cttgcggaaagaggcgggcgactgc

SEQ ID NO: 2801125 - DNA, 25 bp, Homo sapien
cgggcgactgccgcgaagcgctgga

SEQ ID NO: 2801126 - DNA, 25 bp, Homo sapien
agctgctggaagctccgccttctgt

SEQ ID NO: 2801127 - DNA, 25 bp, Homo sapien
tacgtcacgggctttggctcctcca

SEQ ID NO: 2801128 - DNA, 25 bp, Homo sapien
tggttcatgggtccatctgtcccca

SEQ ID NO: 2801129 - DNA, 25 bp, Homo sapien
ggccacggcgacttggccaacaaca

SEQ ID NO: 2801130 - DNA, 25 bp, Homo sapien
caagtggttcttcactgtcattctc

SEQ ID NO: 2801131 - DNA, 25 bp, Homo sapien
cactgtcattctctgcacaggctcc

SEQ ID NO: 2801132 - DNA, 25 bp, Homo sapien
tcaccaagtggttcttcactgtcat

SEQ ID NO: 2801133 - DNA, 25 bp, Homo sapien
cttttcaccaagtggttcttcactg

SEQ ID NO: 2801134 - DNA, 25 bp, Homo sapien
caaggtgcttaatatccttggcagc

SEQ ID NO: 2801135 - DNA, 25 bp, Homo sapien
tgcctttgaggtctaacatcctggg

SEQ ID NO: 2801136 - DNA, 25 bp, Homo sapien
ttgcagcggctgtagatgaacatcc

SEQ ID NO: 2801137 - DNA, 25 bp, Homo sapien
tgtatttaagtcatgcacagtcgct

SEQ ID NO: 2801138 - DNA, 25 bp, Homo sapien
tgttgcaaggattcctgggagccca

SEQ ID NO: 2801139 - DNA, 25 bp, Homo sapien
agttgttgcaaggattcctgggagc

SEQ ID NO: 2801140 - DNA, 25 bp, Homo sapien
ctgagacatactggcagttgttgca

SEQ ID NO: 2801141 - DNA, 25 bp, Homo sapien
tggcagttgttgcaaggattcctgg

SEQ ID NO: 2801142 - DNA, 25 bp, Homo sapien
gagcaggaagctattggaacttaat

SEQ ID NO: 2801143 - DNA, 25 bp, Homo sapien
aggtacagagcaggaagctattgga

SEQ ID NO: 2801144 - DNA, 25 bp, Homo sapien
gaagctattggaacttaatttttca

SEQ ID NO: 2801145 - DNA, 25 bp, Homo sapien
tgagaaggtacagagcaggaagcta

SEQ ID NO: 2801146 - DNA, 25 bp, Homo sapien
gaactactgtaagcctgtgtaccac

SEQ ID NO: 2801147 - DNA, 25 bp, Homo sapien
caggagtcggaatcatgggaactac

SEQ ID NO: 2801148 - DNA, 25 bp, Homo sapien
taagagtatgaacaccaggagtcgg

SEQ ID NO: 2801149 - DNA, 25 bp, Homo sapien
aacttctgtggctcaagatgctggc

SEQ ID NO: 2801150 - DNA, 25 bp, Homo sapien
ctttatggtctaagcatgtgttgcc

SEQ ID NO: 2801151 - DNA, 25 bp, Homo sapien
agcaggaatatgtgagatgttgtcc

SEQ ID NO: 2801152 - DNA, 25 bp, Homo sapien
gcttgtgtaaacctcaacaattgtg

SEQ ID NO: 2801153 - DNA, 25 bp, Homo sapien
gccctgacctttacatatctatagt

SEQ ID NO: 2801154 - DNA, 25 bp, Homo sapien
cagttctggggctcacattcttcaa

SEQ ID NO: 2801155 - DNA, 25 bp, Homo sapien
cacattcttcaagcatgtgctcctc

SEQ ID NO: 2801156 - DNA, 25 bp, Homo sapien
gggctcacattcttcaagcatgtgc

SEQ ID NO: 2801157 - DNA, 25 bp, Homo sapien
tctggggctcacattcttcaagcat

SEQ ID NO: 2801158 - DNA, 25 bp, Homo sapien
gctgagagtccaaggttgaggagcc

SEQ ID NO: 2801159 - DNA, 25 bp, Homo sapien
attcatggatgtccaaagaaaacag

SEQ ID NO: 2801160 - DNA, 25 bp, Homo sapien
tgagagtccaaggttgaggagcctc

SEQ ID NO: 2801161 - DNA, 25 bp, Homo sapien
catggatgtccaaagaaaacagtcc

SEQ ID NO: 2801162 - DNA, 25 bp, Homo sapien
tatgccagacccagatgatgaatca

SEQ ID NO: 2801163 - DNA, 25 bp, Homo sapien
taagccagtgctcctaaattctgat

SEQ ID NO: 2801164 - DNA, 25 bp, Homo sapien
tcttcttcctactgtgaacatgggc

SEQ ID NO: 2801165 - DNA, 25 bp, Homo sapien
tgaagccagacgttgaagaatccct

SEQ ID NO: 2801166 - DNA, 25 bp, Homo sapien
tttagaatctggagatgaagtttct

SEQ ID NO: 2801167 - DNA, 25 bp, Homo sapien
acccttgctaagggcttgtcctggg

SEQ ID NO: 2801168 - DNA, 25 bp, Homo sapien
ccacccttgctaagggcttgtcctg

SEQ ID NO: 2801169 - DNA, 25 bp, Homo sapien
agaatctggagatgaagtttcttca

SEQ ID NO: 2801170 - DNA, 25 bp, Homo sapien
cactgagatgttctagagacgggaa

SEQ ID NO: 2801171 - DNA, 25 bp, Homo sapien
gcagtgccttacaaacttaagcagg

SEQ ID NO: 2801172 - DNA, 25 bp, Homo sapien
taaggaagcgggtatgtcacacaca

SEQ ID NO: 2801173 - DNA, 25 bp, Homo sapien
tccttagagtgcaaaagcagtgcct

SEQ ID NO: 2801174 - DNA, 25 bp, Homo sapien
cctctggatatacacgtaggaagct

SEQ ID NO: 2801175 - DNA, 25 bp, Homo sapien
gagcagctggactatgttccgccca

SEQ ID NO: 2801176 - DNA, 25 bp, Homo sapien
tcttgcaatctgctttgggttcccc

SEQ ID NO: 2801177 - DNA, 25 bp, Homo sapien
tatcaatgagaacctgctcgctgac

SEQ ID NO: 2801178 - DNA, 25 bp, Homo sapien
accaacatgtgaaaagcccgacaat

SEQ ID NO: 2801179 - DNA, 25 bp, Homo sapien
gagaagcacttagttatagcaagaa

SEQ ID NO: 2801180 - DNA, 25 bp, Homo sapien
ggagaagcacttagttatagcaaga

SEQ ID NO: 2801181 - DNA, 25 bp, Homo sapien
agaagcacttagttatagcaagaat

SEQ ID NO: 2801182 - DNA, 25 bp, Homo sapien
ctgatagagacaagagtagtgggga

SEQ ID NO: 2801183 - DNA, 25 bp, Homo sapien
gagacaagagtagtggggaataaaa

SEQ ID NO: 2801184 - DNA, 25 bp, Homo sapien
aactagttgcttagaaataattata

SEQ ID NO: 2801185 - DNA, 25 bp, Homo sapien
taattatagatctaaagtcaacaaa

SEQ ID NO: 2801186 - DNA, 25 bp, Homo sapien
atttgtacttaatgcctttctcctc

SEQ ID NO: 2801187 - DNA, 25 bp, Homo sapien
taatcattcttctcatatacttcaa

SEQ ID NO: 2801188 - DNA, 25 bp, Homo sapien
tcaaatttgtacttaatgcctttct

SEQ ID NO: 2801189 - DNA, 25 bp, Homo sapien
tctcctcctggacatcagagagaac

SEQ ID NO: 2801190 - DNA, 25 bp, Homo sapien
agttctcctgcctgagcctcccaag

SEQ ID NO: 2801191 - DNA, 25 bp, Homo sapien
ctctgcctcccaggaacaagcagtt

SEQ ID NO: 2801192 - DNA, 25 bp, Homo sapien
gtgatctgcccctgcctcgacctcc

SEQ ID NO: 2801193 - DNA, 25 bp, Homo sapien
tgatcttggcttactacgacctctg

SEQ ID NO: 2801194 - DNA, 25 bp, Homo sapien
acccatcatcctagcagtacacagt

SEQ ID NO: 2801195 - DNA, 25 bp, Homo sapien
gatggcctgggtgattcatggcttc

SEQ ID NO: 2801196 - DNA, 25 bp, Homo sapien
cactttcaaagtcttgcatgatcct

SEQ ID NO: 2801197 - DNA, 25 bp, Homo sapien
caaatagtttaagatggcctgggtg

SEQ ID NO: 2801198 - DNA, 25 bp, Homo sapien
ttcaaagtcttgcatgatccttgtc

SEQ ID NO: 2801199 - DNA, 25 bp, Homo sapien
aacagaactgccaccaactatccag

SEQ ID NO: 2801200 - DNA, 25 bp, Homo sapien
ccaactatccagaccatgtctactt

SEQ ID NO: 2801201 - DNA, 25 bp, Homo sapien
tgctaattctggttgttcagtaagt

SEQ ID NO: 2801202 - DNA, 25 bp, Homo sapien
taagttttaaggcatcatctagact

SEQ ID NO: 2801203 - DNA, 25 bp, Homo sapien
gaaaatgagctccttgtggaggttc

SEQ ID NO: 2801204 - DNA, 25 bp, Homo sapien
aaaatgagctccttgtggaggttcc

SEQ ID NO: 2801205 - DNA, 25 bp, Homo sapien
gaaagaaaatgagctccttgtggag

SEQ ID NO: 2801206 - DNA, 25 bp, Homo sapien
ctggaaagaaaatgagctccttgtg

SEQ ID NO: 2801207 - DNA, 25 bp, Homo sapien
gccatgcctcttgcatctaacagcc

SEQ ID NO: 2801208 - DNA, 25 bp, Homo sapien
aagccatgcctcttgcatctaacag

SEQ ID NO: 2801209 - DNA, 25 bp, Homo sapien
aaggaagagtcgcatatttctcatg

SEQ ID NO: 2801210 - DNA, 25 bp, Homo sapien
ggaagagtcgcatatttctcatgta

SEQ ID NO: 2801211 - DNA, 25 bp, Homo sapien
aacttgactaggatatagtccttgg

SEQ ID NO: 2801212 - DNA, 25 bp, Homo sapien
ctgtgcccggtcagactttaatctg

SEQ ID NO: 2801213 - DNA, 25 bp, Homo sapien
cagatactgtatctaggtgttgctt

SEQ ID NO: 2801214 - DNA, 25 bp, Homo sapien
tctgcctcctggaaactacaggtac

SEQ ID NO: 2801215 - DNA, 25 bp, Homo sapien
ccctttaaaggtcgattcttctcag

SEQ ID NO: 2801216 - DNA, 25 bp, Homo sapien
cgattcttctcaggaatggagaacc

SEQ ID NO: 2801217 - DNA, 25 bp, Homo sapien
tggagaaccaggtcttcttacccat

SEQ ID NO: 2801218 - DNA, 25 bp, Homo sapien
ctgagaactaaattaattctaccct

SEQ ID NO: 2801219 - DNA, 25 bp, Homo sapien
tgtttgggatttttcggatgatagg

SEQ ID NO: 2801220 - DNA, 25 bp, Homo sapien
ccaattgggtgcaaggagttcagtc

SEQ ID NO: 2801221 - DNA, 25 bp, Homo sapien
gcaaggagttcagtcatatgtttgg

SEQ ID NO: 2801222 - DNA, 25 bp, Homo sapien
tttgggatttttcggatgataggtg

SEQ ID NO: 2801223 - DNA, 25 bp, Homo sapien
ctcctaagtgtaagttgggtgcttt

SEQ ID NO: 2801224 - DNA, 25 bp, Homo sapien
tatgagcctgtcgaaacattttcag

SEQ ID NO: 2801225 - DNA, 25 bp, Homo sapien
tttcagtgtattgctttgaggaagt

SEQ ID NO: 2801226 - DNA, 25 bp, Homo sapien
gggtggtatgagcctgtcgaaacat

SEQ ID NO: 2801227 - DNA, 25 bp, Homo sapien
tttatggggtggtatgagcctgtcg

SEQ ID NO: 2801228 - DNA, 25 bp, Homo sapien
cttctactgaagaggttgtggtcat

SEQ ID NO: 2801229 - DNA, 25 bp, Homo sapien
tctactgaagaggttgtggtcattc

SEQ ID NO: 2801230 - DNA, 25 bp, Homo sapien
tactgaagaggttgtggtcattctc

SEQ ID NO: 2801231 - DNA, 25 bp, Homo sapien
gtggtcattctctggaaatatctga

SEQ ID NO: 2801232 - DNA, 25 bp, Homo sapien
ctaaggcacctgacaaacggagcgc

SEQ ID NO: 2801233 - DNA, 25 bp, Homo sapien
cctgacaaacggagcgctgtgggta

SEQ ID NO: 2801234 - DNA, 25 bp, Homo sapien
aggcacctgacaaacggagcgctgt

SEQ ID NO: 2801235 - DNA, 25 bp, Homo sapien
gcacctgacaaacggagcgctgtgg

SEQ ID NO: 2801236 - DNA, 25 bp, Homo sapien
cgcagcagaaaaggggaatccagtc

SEQ ID NO: 2801237 - DNA, 25 bp, Homo sapien
ctgccagcgcagaccgcaagtctgg

SEQ ID NO: 2801238 - DNA, 25 bp, Homo sapien
agaaatcagcaactgggcctcccgc

SEQ ID NO: 2801239 - DNA, 25 bp, Homo sapien
agcctgcgcccgtttgggtcccatc

SEQ ID NO: 2801240 - DNA, 25 bp, Homo sapien
gacacagcgacgatgcagtttagcg

SEQ ID NO: 2801241 - DNA, 25 bp, Homo sapien
cgatgcagtttagcgaaccaaccat

SEQ ID NO: 2801242 - DNA, 25 bp, Homo sapien
tgttctgggacacagcgacgatgca

SEQ ID NO: 2801243 - DNA, 25 bp, Homo sapien
cccatgttctgggacacagcgacga

SEQ ID NO: 2801244 - DNA, 25 bp, Homo sapien
caagtttggcgcgaaattgtggccg

SEQ ID NO: 2801245 - DNA, 25 bp, Homo sapien
tacaaattgggtgaagcgctgaggt

SEQ ID NO: 2801246 - DNA, 25 bp, Homo sapien
cagctgccgccgcacatagtaggtt

SEQ ID NO: 2801247 - DNA, 25 bp, Homo sapien
gagccgattcttccagtctacggga

SEQ ID NO: 2801248 - DNA, 25 bp, Homo sapien
tatgtgtcatggaacatatatcttt

SEQ ID NO: 2801249 - DNA, 25 bp, Homo sapien
caggttaattctgaagtcctgtgta

SEQ ID NO: 2801250 - DNA, 25 bp, Homo sapien
gtgtatgctgaagtctgcttgaaga

SEQ ID NO: 2801251 - DNA, 25 bp, Homo sapien
aagggctccctcaggttaattctga

SEQ ID NO: 2801252 - DNA, 25 bp, Homo sapien
aattctgaagtcctgtgtatgctga

SEQ ID NO: 2801253 - DNA, 25 bp, Homo sapien
tagtatgtgtagattcgtggtaaaa

SEQ ID NO: 2801254 - DNA, 25 bp, Homo sapien
cgtggtaaaaagacttgggattgtg

SEQ ID NO: 2801255 - DNA, 25 bp, Homo sapien
tgtagattcgtggtaaaaagacttg

SEQ ID NO: 2801256 - DNA, 25 bp, Homo sapien
gggtatagtatgtgtagattcgtgg

SEQ ID NO: 2801257 - DNA, 25 bp, Homo sapien
cttggttcactgttggccatgtgga

SEQ ID NO: 2801258 - DNA, 25 bp, Homo sapien
actgttggccatgtggacttcagta

SEQ ID NO: 2801259 - DNA, 25 bp, Homo sapien
tcactgttggccatgtggacttcag

SEQ ID NO: 2801260 - DNA, 25 bp, Homo sapien
ttcactgttggccatgtggacttca

SEQ ID NO: 2801261 - DNA, 25 bp, Homo sapien
gccctggcattgtaagcgttccctg

SEQ ID NO: 2801262 - DNA, 25 bp, Homo sapien
taaagagacatttctcggctgaagg

SEQ ID NO: 2801263 - DNA, 25 bp, Homo sapien
gtctgtctcgtcaactctgtagcca

SEQ ID NO: 2801264 - DNA, 25 bp, Homo sapien
cagtctgttctagtatgctgaattc

SEQ ID NO: 2801265 - DNA, 25 bp, Homo sapien
aagtattccttgatcgactttcagg

SEQ ID NO: 2801266 - DNA, 25 bp, Homo sapien
tcaggaattgttggtcctaaggagg

SEQ ID NO: 2801267 - DNA, 25 bp, Homo sapien
ttgcaggcagaagtagtacaaaaag

SEQ ID NO: 2801268 - DNA, 25 bp, Homo sapien
cctaaggagggatctcctctgttcg

SEQ ID NO: 2801269 - DNA, 25 bp, Homo sapien
ctcgggaggaggacggccatttttg

SEQ ID NO: 2801270 - DNA, 25 bp, Homo sapien
tgtggtgggtacaccaccaaatgac

SEQ ID NO: 2801271 - DNA, 25 bp, Homo sapien
catttttgtggtgggtacaccacca

SEQ ID NO: 2801272 - DNA, 25 bp, Homo sapien
gaggaggacggccatttttgtggtg

SEQ ID NO: 2801273 - DNA, 25 bp, Homo sapien
gggtcgttatctccatcatccattc

SEQ ID NO: 2801274 - DNA, 25 bp, Homo sapien
tagaggagctgggtcgttatctcca

SEQ ID NO: 2801275 - DNA, 25 bp, Homo sapien
tccacatcaaatatctccgcatcaa

SEQ ID NO: 2801276 - DNA, 25 bp, Homo sapien
aaactcagcatcttaattgacggca

SEQ ID NO: 2801277 - DNA, 25 bp, Homo sapien
ggcacgctctatattttttgaaccg

SEQ ID NO: 2801278 - DNA, 25 bp, Homo sapien
tgaaccgattcttaagggtatccca

SEQ ID NO: 2801279 - DNA, 25 bp, Homo sapien
tctagtgacagtactcaatctctct

SEQ ID NO: 2801280 - DNA, 25 bp, Homo sapien
tcaatcttgtagactagaagctcct

SEQ ID NO: 2801281 - DNA, 25 bp, Homo sapien
tgtattcttttaggaatggagtttc

SEQ ID NO: 2801282 - DNA, 25 bp, Homo sapien
gctagtcttgaactttcaggctcca

SEQ ID NO: 2801283 - DNA, 25 bp, Homo sapien
gtattcttttaggaatggagtttca

SEQ ID NO: 2801284 - DNA, 25 bp, Homo sapien
agtcttgaactttcaggctccagtg

SEQ ID NO: 2801285 - DNA, 25 bp, Homo sapien
gatgtttcacaccaaggatatgggt

SEQ ID NO: 2801286 - DNA, 25 bp, Homo sapien
gagtgtagcatactgtagaccctaa

SEQ ID NO: 2801287 - DNA, 25 bp, Homo sapien
aagtttgtgcctgtcgtcatcatgg

SEQ ID NO: 2801288 - DNA, 25 bp, Homo sapien
cactgctttatctgtcacttagggc

SEQ ID NO: 2801289 - DNA, 25 bp, Homo sapien
actggtgctttcacactgatggcag

SEQ ID NO: 2801290 - DNA, 25 bp, Homo sapien
tgttggcatcatccttatggccctt

SEQ ID NO: 2801291 - DNA, 25 bp, Homo sapien
gatggcagcggcttaatgcagtcct

SEQ ID NO: 2801292 - DNA, 25 bp, Homo sapien
tctttgggcacttagcgcgttggct

SEQ ID NO: 2801293 - DNA, 25 bp, Homo sapien
cttgaagcagggagcgatgatactg

SEQ ID NO: 2801294 - DNA, 25 bp, Homo sapien
caaacagttgtagtacagtgcactc

SEQ ID NO: 2801295 - DNA, 25 bp, Homo sapien
tgaccctgctgccttcaacatgtgg

SEQ ID NO: 2801296 - DNA, 25 bp, Homo sapien
gatactgggaccctggttcttccat

SEQ ID NO: 2801297 - DNA, 25 bp, Homo sapien
aagagacggcagagatgattatgac

SEQ ID NO: 2801298 - DNA, 25 bp, Homo sapien
ggatctttaataaggagttgcccac

SEQ ID NO: 2801299 - DNA, 25 bp, Homo sapien
cagggaggttggcaaatatagtcct

SEQ ID NO: 2801300 - DNA, 25 bp, Homo sapien
cccttaggccaaatggcagggaggt

SEQ ID NO: 2801301 - DNA, 25 bp, Homo sapien
gacttcttctcatgaaggaatagtt

SEQ ID NO: 2801302 - DNA, 25 bp, Homo sapien
acttcttctcatgaaggaatagttt

SEQ ID NO: 2801303 - DNA, 25 bp, Homo sapien
cttcttctcatgaaggaatagtttc

SEQ ID NO: 2801304 - DNA, 25 bp, Homo sapien
ctaaagagcctatttaaggacttct

SEQ ID NO: 2801305 - DNA, 25 bp, Homo sapien
cagctatgtgccctatgccatctgc

SEQ ID NO: 2801306 - DNA, 25 bp, Homo sapien
agagtccagtctgagcaaggtctgc

SEQ ID NO: 2801307 - DNA, 25 bp, Homo sapien
tgcagctatgtgccctatgccatct

SEQ ID NO: 2801308 - DNA, 25 bp, Homo sapien
agtccagtctgagcaaggtctgcag

SEQ ID NO: 2801309 - DNA, 25 bp, Homo sapien
tctaatcagtagacaagactcgttg

SEQ ID NO: 2801310 - DNA, 25 bp, Homo sapien
gactcgttgattcctccaatttggc

SEQ ID NO: 2801311 - DNA, 25 bp, Homo sapien
taccacgtgtcaggtactgtggaag

SEQ ID NO: 2801312 - DNA, 25 bp, Homo sapien
tcaggccagatacctagagccatct

SEQ ID NO: 2801313 - DNA, 25 bp, Homo sapien
ctgtatctccagttcagtgatgaga

SEQ ID NO: 2801314 - DNA, 25 bp, Homo sapien
ccatatggccagtcatcagctctgg

SEQ ID NO: 2801315 - DNA, 25 bp, Homo sapien
gcagaaagtaatgtcccactctgtg

SEQ ID NO: 2801316 - DNA, 25 bp, Homo sapien
tccttcagagatgcccgagtcggag

SEQ ID NO: 2801317 - DNA, 25 bp, Homo sapien
cacattgtgcgcgtgtatcctagaa

SEQ ID NO: 2801318 - DNA, 25 bp, Homo sapien
aaggaaatcatctctagcggtcaaa

SEQ ID NO: 2801319 - DNA, 25 bp, Homo sapien
caattcccgtgtattcctagctaga

SEQ ID NO: 2801320 - DNA, 25 bp, Homo sapien
taaaggcacagctgttcgtggccac

SEQ ID NO: 2801321 - DNA, 25 bp, Homo sapien
tagtcagaccttacatgttcagagc

SEQ ID NO: 2801322 - DNA, 25 bp, Homo sapien
cagctggcctttggggttggattct

SEQ ID NO: 2801323 - DNA, 25 bp, Homo sapien
gcagcaaagtgtcccttatttgggt

SEQ ID NO: 2801324 - DNA, 25 bp, Homo sapien
tccaggttgaaaactcggcacttaa

SEQ ID NO: 2801325 - DNA, 25 bp, Homo sapien
ctacaaacgatgagcctgtgacagc

SEQ ID NO: 2801326 - DNA, 25 bp, Homo sapien
cactctccttaacctttaccggcag

SEQ ID NO: 2801327 - DNA, 25 bp, Homo sapien
ggcattccgaaagaacttcggcatc

SEQ ID NO: 2801328 - DNA, 25 bp, Homo sapien
ttccgggaacacttgggccactctc

SEQ ID NO: 2801329 - DNA, 25 bp, Homo sapien
ctgatgcctttccgggaacacttgg

SEQ ID NO: 2801330 - DNA, 25 bp, Homo sapien
tgctcttctacttcgagggcgagca

SEQ ID NO: 2801331 - DNA, 25 bp, Homo sapien
gcttcctgagtaagaagacggccga

SEQ ID NO: 2801332 - DNA, 25 bp, Homo sapien
ggttcgccctctaccagaatgtgct

SEQ ID NO: 2801333 - DNA, 25 bp, Homo sapien
gctggcacgagaagtggttcgccct

SEQ ID NO: 2801334 - DNA, 25 bp, Homo sapien
ctgccgcccggcgggcatgtacctc

SEQ ID NO: 2801335 - DNA, 25 bp, Homo sapien
ccgcccggcgggcatgtacctcctg

SEQ ID NO: 2801336 - DNA, 25 bp, Homo sapien
gccgcccggcgggcatgtacctcct

SEQ ID NO: 2801337 - DNA, 25 bp, Homo sapien
tgccgcccggcgggcatgtacctcc

SEQ ID NO: 2801338 - DNA, 25 bp, Homo sapien
ccgcgtcaccagtggcgggacatct

SEQ ID NO: 2801339 - DNA, 25 bp, Homo sapien
ttgccgtcctaatccggggatcagg

SEQ ID NO: 2801340 - DNA, 25 bp, Homo sapien
ccgagacgcgctggacaagcaggta

SEQ ID NO: 2801341 - DNA, 25 bp, Homo sapien
gagtgcggggactatgctccgaaat

SEQ ID NO: 2801342 - DNA, 25 bp, Homo sapien
ggctggcgcgtgtagatttctttgc

SEQ ID NO: 2801343 - DNA, 25 bp, Homo sapien
gaacaagcggggctcccaagccgga

SEQ ID NO: 2801344 - DNA, 25 bp, Homo sapien
tttgcctgcagatgtttgaccactg

SEQ ID NO: 2801345 - DNA, 25 bp, Homo sapien
tcccaagccggacagacactttctg

SEQ ID NO: 2801346 - DNA, 25 bp, Homo sapien
tactcaggcctatgaaagaagttta

SEQ ID NO: 2801347 - DNA, 25 bp, Homo sapien
ctactcaggcctatgaaagaagttt

SEQ ID NO: 2801348 - DNA, 25 bp, Homo sapien
tcatctctgccgtcctgaaagcccg

SEQ ID NO: 2801349 - DNA, 25 bp, Homo sapien
tctctgccgtcctgaaagcccgtat

SEQ ID NO: 2801350 - DNA, 25 bp, Homo sapien
caggaacatctgaaatcacccttga

SEQ ID NO: 2801351 - DNA, 25 bp, Homo sapien
tcacccttgatgaaagagccatgtt

SEQ ID NO: 2801352 - DNA, 25 bp, Homo sapien
tctgaaatcacccttgatgaaagag

SEQ ID NO: 2801353 - DNA, 25 bp, Homo sapien
ccttgatgaaagagccatgtttaac

SEQ ID NO: 2801354 - DNA, 25 bp, Homo sapien
agttggtaataatggttgggcaaga

SEQ ID NO: 2801355 - DNA, 25 bp, Homo sapien
cattttggcttaagttgaaagtgtt

SEQ ID NO: 2801356 - DNA, 25 bp, Homo sapien
tcattttggcttaagttgaaagtgt

SEQ ID NO: 2801357 - DNA, 25 bp, Homo sapien
gaatgtcgacggactggcgtcagca

SEQ ID NO: 2801358 - DNA, 25 bp, Homo sapien
tctgccctctgaatgtcgacggact

SEQ ID NO: 2801359 - DNA, 25 bp, Homo sapien
gacggactggcgtcagcaatgacag

SEQ ID NO: 2801360 - DNA, 25 bp, Homo sapien
cgtcagcaatgacagagaccaagct

SEQ ID NO: 2801361 - DNA, 25 bp, Homo sapien
ttaggagctctttgtggcaggagcc

SEQ ID NO: 2801362 - DNA, 25 bp, Homo sapien
agctctttgtggcaggagccctgtt

SEQ ID NO: 2801363 - DNA, 25 bp, Homo sapien
cctgttatgttgagcagggctgtcg

SEQ ID NO: 2801364 - DNA, 25 bp, Homo sapien
caggagccctgttatgttgagcagg

SEQ ID NO: 2801365 - DNA, 25 bp, Homo sapien
tctaaactccagtgggaattccttg

SEQ ID NO: 2801366 - DNA, 25 bp, Homo sapien
tccttcccatgggttgaattgctgg

SEQ ID NO: 2801367 - DNA, 25 bp, Homo sapien
ctaaactccagtgggaattccttgg

SEQ ID NO: 2801368 - DNA, 25 bp, Homo sapien
cttcccatgggttgaattgctggct

SEQ ID NO: 2801369 - DNA, 25 bp, Homo sapien
tgacttcatcatctagcatctggct

SEQ ID NO: 2801370 - DNA, 25 bp, Homo sapien
cttcatcatctagcatctggcttcc

SEQ ID NO: 2801371 - DNA, 25 bp, Homo sapien
cttcttgaaatcttggaagttgtag

SEQ ID NO: 2801372 - DNA, 25 bp, Homo sapien
gaagttgtaggatttgacttcatca

SEQ ID NO: 2801373 - DNA, 25 bp, Homo sapien
tttgttcatcgagctgcttatgggg

SEQ ID NO: 2801374 - DNA, 25 bp, Homo sapien
atgccttttggatatcttcaaacca

SEQ ID NO: 2801375 - DNA, 25 bp, Homo sapien
gaaaaaatgccttttggatatcttc

SEQ ID NO: 2801376 - DNA, 25 bp, Homo sapien
ccttttggatatcttcaaaccacat

SEQ ID NO: 2801377 - DNA, 25 bp, Homo sapien
gatggtgacaatggcgactgaactc

SEQ ID NO: 2801378 - DNA, 25 bp, Homo sapien
tatgtgcgctcagtcagtggctctg

SEQ ID NO: 2801379 - DNA, 25 bp, Homo sapien
gctctgaagctgacgagagttggct

SEQ ID NO: 2801380 - DNA, 25 bp, Homo sapien
gaagctgacgagagttggctatctc

SEQ ID NO: 2801381 - DNA, 25 bp, Homo sapien
ttgtatgtgctggttgataattgtc

SEQ ID NO: 2801382 - DNA, 25 bp, Homo sapien
tgtatgtgctggttgataattgtca

SEQ ID NO: 2801383 - DNA, 25 bp, Homo sapien
gttgataattgtcatacatcccttt

SEQ ID NO: 2801384 - DNA, 25 bp, Homo sapien
gataattgtcatacatccctttctt

SEQ ID NO: 2801385 - DNA, 25 bp, Homo sapien
ttcccttagttcatgccgtcctcct

SEQ ID NO: 2801386 - DNA, 25 bp, Homo sapien
gggcactagcttcgacctttgggct

SEQ ID NO: 2801387 - DNA, 25 bp, Homo sapien
tccttgtgctcccaactcactggga

SEQ ID NO: 2801388 - DNA, 25 bp, Homo sapien
ccaactcactgggacttcccttagt

SEQ ID NO: 2801389 - DNA, 25 bp, Homo sapien
tgtgacatctgctatcccagtgaca

SEQ ID NO: 2801390 - DNA, 25 bp, Homo sapien
tctaggtgagggctaataaattcca

SEQ ID NO: 2801391 - DNA, 25 bp, Homo sapien
ttggaaagtgtttcaccgctgtgac

SEQ ID NO: 2801392 - DNA, 25 bp, Homo sapien
cccagtgacaaagggttgcgtcagt

SEQ ID NO: 2801393 - DNA, 25 bp, Homo sapien
acaaaatatggactgctgctgtcac

SEQ ID NO: 2801394 - DNA, 25 bp, Homo sapien
tgcctttggctacattgcccgttat

SEQ ID NO: 2801395 - DNA, 25 bp, Homo sapien
ttctgtttgttgtccggaggcagca

SEQ ID NO: 2801396 - DNA, 25 bp, Homo sapien
atatagtatgattcttagagacaaa

SEQ ID NO: 2801397 - DNA, 25 bp, Homo sapien
tttctgctatgcgaaacctgaagtt

SEQ ID NO: 2801398 - DNA, 25 bp, Homo sapien
aagttccaggtctgtaaactctgca

SEQ ID NO: 2801399 - DNA, 25 bp, Homo sapien
ttccaggtctgtaaactctgcagca

SEQ ID NO: 2801400 - DNA, 25 bp, Homo sapien
caggcagagtcagctgcgagtttga

SEQ ID NO: 2801401 - DNA, 25 bp, Homo sapien
cactctagacgagcctgaaaactga

SEQ ID NO: 2801402 - DNA, 25 bp, Homo sapien
gatctgccagtcaaagagctggttc

SEQ ID NO: 2801403 - DNA, 25 bp, Homo sapien
tcttgagggtccagataaatataca

SEQ ID NO: 2801404 - DNA, 25 bp, Homo sapien
gagaggctcaatgactatatcggca

SEQ ID NO: 2801405 - DNA, 25 bp, Homo sapien
tggccatgaaggtcagaagccactg

SEQ ID NO: 2801406 - DNA, 25 bp, Homo sapien
taaagagtggatggaggccattcac

SEQ ID NO: 2801407 - DNA, 25 bp, Homo sapien
tctttttggccatgaaggtcagaag

SEQ ID NO: 2801408 - DNA, 25 bp, Homo sapien
gaggagcaggatggtaaagagtgga

SEQ ID NO: 2801409 - DNA, 25 bp, Homo sapien
tcagatcagatacctcgaaggagcc

SEQ ID NO: 2801410 - DNA, 25 bp, Homo sapien
gaagggcagcacttaaggaattctc

SEQ ID NO: 2801411 - DNA, 25 bp, Homo sapien
caaggcactttactcctggtgcgtg

SEQ ID NO: 2801412 - DNA, 25 bp, Homo sapien
ttgcttgtatacctctctctcctgg

SEQ ID NO: 2801413 - DNA, 25 bp, Homo sapien
gactgtaaagtaggaggatgctgca

SEQ ID NO: 2801414 - DNA, 25 bp, Homo sapien
taggtttcgaaaggattgctgtggc

SEQ ID NO: 2801415 - DNA, 25 bp, Homo sapien
tccaggcgagagatgttgagagcct

SEQ ID NO: 2801416 - DNA, 25 bp, Homo sapien
gataccgtgtgaatatgtgatgcca

SEQ ID NO: 2801417 - DNA, 25 bp, Homo sapien
ctcttctgtttttctccacaaagcc

SEQ ID NO: 2801418 - DNA, 25 bp, Homo sapien
tttttctccacaaagcctttccaga

SEQ ID NO: 2801419 - DNA, 25 bp, Homo sapien
cttctgtttttctccacaaagcctt

SEQ ID NO: 2801420 - DNA, 25 bp, Homo sapien
tttctccacaaagcctttccagatc

SEQ ID NO: 2801421 - DNA, 25 bp, Homo sapien
ccaaggggcttcctcagtgtgattc

SEQ ID NO: 2801422 - DNA, 25 bp, Homo sapien
caaggggcttcctcagtgtgattca

SEQ ID NO: 2801423 - DNA, 25 bp, Homo sapien
aggggcttcctcagtgtgattcaga

SEQ ID NO: 2801424 - DNA, 25 bp, Homo sapien
aaggggcttcctcagtgtgattcag

SEQ ID NO: 2801425 - DNA, 25 bp, Homo sapien
tattattctgatcatcccttgggtc

SEQ ID NO: 2801426 - DNA, 25 bp, Homo sapien
tttagatctttcagcgtaagtgagc

SEQ ID NO: 2801427 - DNA, 25 bp, Homo sapien
taccaccatgaggtcagtttagatc

SEQ ID NO: 2801428 - DNA, 25 bp, Homo sapien
gagctgcttagaaaccctcagtggc

SEQ ID NO: 2801429 - DNA, 25 bp, Homo sapien
tctccattatgaatgcgtgcaccag

SEQ ID NO: 2801430 - DNA, 25 bp, Homo sapien
tcttctccattatgaatgcgtgcac

SEQ ID NO: 2801431 - DNA, 25 bp, Homo sapien
attatgaatgcgtgcaccagccagc

SEQ ID NO: 2801432 - DNA, 25 bp, Homo sapien
tccattatgaatgcgtgcaccagcc

SEQ ID NO: 2801433 - DNA, 25 bp, Homo sapien
ataaccaggacagacggcggacaat

SEQ ID NO: 2801434 - DNA, 25 bp, Homo sapien
gacatgggagtccaccaggtgagta

SEQ ID NO: 2801435 - DNA, 25 bp, Homo sapien
tgctctgtttcaccggcttctgctt

SEQ ID NO: 2801436 - DNA, 25 bp, Homo sapien
acggcggacaatgcccactgctctg

SEQ ID NO: 2801437 - DNA, 25 bp, Homo sapien
catctggcaaataatgttacactgc

SEQ ID NO: 2801438 - DNA, 25 bp, Homo sapien
ccatagtcccctttagaggcaggca

SEQ ID NO: 2801439 - DNA, 25 bp, Homo sapien
tgccagagatttcctctgccaaagt

SEQ ID NO: 2801440 - DNA, 25 bp, Homo sapien
gttctcttaattcccgtagatgtgt

SEQ ID NO: 2801441 - DNA, 25 bp, Homo sapien
gtgttaatgacctgcaagtgatgtt

SEQ ID NO: 2801442 - DNA, 25 bp, Homo sapien
tcactgggtgttaatgacctgcaag

SEQ ID NO: 2801443 - DNA, 25 bp, Homo sapien
ctgggtgttaatgacctgcaagtga

SEQ ID NO: 2801444 - DNA, 25 bp, Homo sapien
gggtgttaatgacctgcaagtgatg

SEQ ID NO: 2801445 - DNA, 25 bp, Homo sapien
ctctacaaccacctgccagctgaga

SEQ ID NO: 2801446 - DNA, 25 bp, Homo sapien
catttgcacttggaacctgagttgc

SEQ ID NO: 2801447 - DNA, 25 bp, Homo sapien
gcagcagcaggaaaatagcctccac

SEQ ID NO: 2801448 - DNA, 25 bp, Homo sapien
tgggccttgatactccatttgcact

SEQ ID NO: 2801449 - DNA, 25 bp, Homo sapien
gtaatcagtatggatcatcacagga

SEQ ID NO: 2801450 - DNA, 25 bp, Homo sapien
ttgtaatcagtatggatcatcacag

SEQ ID NO: 2801451 - DNA, 25 bp, Homo sapien
tgtaatcagtatggatcatcacagg

SEQ ID NO: 2801452 - DNA, 25 bp, Homo sapien
aatcagtatggatcatcacaggaaa

SEQ ID NO: 2801453 - DNA, 25 bp, Homo sapien
ctccagaggtgtttctgtgatgccc

SEQ ID NO: 2801454 - DNA, 25 bp, Homo sapien
tcgtgccaaagctttgactcatctc

SEQ ID NO: 2801455 - DNA, 25 bp, Homo sapien
ctctgctgctcgtgccaaagctttg

SEQ ID NO: 2801456 - DNA, 25 bp, Homo sapien
gaggtgtttctgtgatgcccactct

SEQ ID NO: 2801457 - DNA, 25 bp, Homo sapien
gtcaccatgagggcaggctcctgaa

SEQ ID NO: 2801458 - DNA, 25 bp, Homo sapien
tcctcggtagtgacagtctgttcaa

SEQ ID NO: 2801459 - DNA, 25 bp, Homo sapien
gggtcaccatgagggcaggctcctg

SEQ ID NO: 2801460 - DNA, 25 bp, Homo sapien
cagtctgttcaatagggtcaccatg

SEQ ID NO: 2801461 - DNA, 25 bp, Homo sapien
taacgtaattatgtgtgtggccggc

SEQ ID NO: 2801462 - DNA, 25 bp, Homo sapien
tgtggccggctgttaaatcgaattc

SEQ ID NO: 2801463 - DNA, 25 bp, Homo sapien
ttctgacgttcaggcagaggaccaa

SEQ ID NO: 2801464 - DNA, 25 bp, Homo sapien
caggtaaaataggtagcagcaacag

SEQ ID NO: 2801465 - DNA, 25 bp, Homo sapien
actgaaccagaagtgcagaggcctc

SEQ ID NO: 2801466 - DNA, 25 bp, Homo sapien
cagaggcctccacatctgaagggaa

SEQ ID NO: 2801467 - DNA, 25 bp, Homo sapien
caagcatcgccagaagactagaagc

SEQ ID NO: 2801468 - DNA, 25 bp, Homo sapien
tggaatgttcatcaatgcccaagca

SEQ ID NO: 2801469 - DNA, 25 bp, Homo sapien
tgagagttaatcagctcagaatttg

SEQ ID NO: 2801470 - DNA, 25 bp, Homo sapien
gagtgagtaatcacacactgttggg

SEQ ID NO: 2801471 - DNA, 25 bp, Homo sapien
actataggtccttttaactgctggt

SEQ ID NO: 2801472 - DNA, 25 bp, Homo sapien
atgttcttttccttgcagccaagtg

SEQ ID NO: 2801473 - DNA, 25 bp, Homo sapien
cagttatttcctaatctaagcacaa

SEQ ID NO: 2801474 - DNA, 25 bp, Homo sapien
gacctaccacctactttgctttgaa

SEQ ID NO: 2801475 - DNA, 25 bp, Homo sapien
tatggatatactcatggcatgcaga

SEQ ID NO: 2801476 - DNA, 25 bp, Homo sapien
taaatcggactatcttttactgtaa

SEQ ID NO: 2801477 - DNA, 25 bp, Homo sapien
tgctcttcagtaccaaaggaggata

SEQ ID NO: 2801478 - DNA, 25 bp, Homo sapien
ttcaaatgagtctcagaacagtgcc

SEQ ID NO: 2801479 - DNA, 25 bp, Homo sapien
tccttatcttgggatgtacttgaca

SEQ ID NO: 2801480 - DNA, 25 bp, Homo sapien
tggtcttgcagttgtaaccctcctg

SEQ ID NO: 2801481 - DNA, 25 bp, Homo sapien
ttttctctgttagatatcacacatc

SEQ ID NO: 2801482 - DNA, 25 bp, Homo sapien
tcatcagagagatacgccagttcca

SEQ ID NO: 2801483 - DNA, 25 bp, Homo sapien
gaatagatcatcagccaaaggtaat

SEQ ID NO: 2801484 - DNA, 25 bp, Homo sapien
gacttcctacagaatagatcatcag

SEQ ID NO: 2801485 - DNA, 25 bp, Homo sapien
tatagccaggctaatgtgcacagag

SEQ ID NO: 2801486 - DNA, 25 bp, Homo sapien
ggctccattatagataccaccgtgt

SEQ ID NO: 2801487 - DNA, 25 bp, Homo sapien
tctccaactggaaaaccttaggctg

SEQ ID NO: 2801488 - DNA, 25 bp, Homo sapien
tgtaaactgcaaagtgctgtccgca

SEQ ID NO: 2801489 - DNA, 25 bp, Homo sapien
gagaactcactactacctggaacag

SEQ ID NO: 2801490 - DNA, 25 bp, Homo sapien
taacgatgagaagggaatagatgcc

SEQ ID NO: 2801491 - DNA, 25 bp, Homo sapien
gcagctcaacgctcctgaatgggtg

SEQ ID NO: 2801492 - DNA, 25 bp, Homo sapien
taataagcttgaagaggaccagtcc

SEQ ID NO: 2801493 - DNA, 25 bp, Homo sapien
cagaagctgagtacgtgacggtcac

SEQ ID NO: 2801494 - DNA, 25 bp, Homo sapien
gaataaaccgagactgccctgatga

SEQ ID NO: 2801495 - DNA, 25 bp, Homo sapien
gaaccaattggtcatgtccacgtgg

SEQ ID NO: 2801496 - DNA, 25 bp, Homo sapien
aattttctggatctgggagctgggc

SEQ ID NO: 2801497 - DNA, 25 bp, Homo sapien
cccgttaggacgctgactgcgagga

SEQ ID NO: 2801498 - DNA, 25 bp, Homo sapien
tccggcttcaaggtcggtgagtccg

SEQ ID NO: 2801499 - DNA, 25 bp, Homo sapien
tacgctgggattggtgaggtcctct

SEQ ID NO: 2801500 - DNA, 25 bp, Homo sapien
gaggcaatggtgactcgctaaagcc

SEQ ID NO: 2801501 - DNA, 25 bp, Homo sapien
gtctacggctctcacattttctctg

SEQ ID NO: 2801502 - DNA, 25 bp, Homo sapien
cacattttctctgttctgaactcgt

SEQ ID NO: 2801503 - DNA, 25 bp, Homo sapien
tgaactcgtgtccttggtctgttct

SEQ ID NO: 2801504 - DNA, 25 bp, Homo sapien
ggctgcttttcctgtctacggctct

SEQ ID NO: 2801505 - DNA, 25 bp, Homo sapien
caattttagcctagatgctgtaagc

SEQ ID NO: 2801506 - DNA, 25 bp, Homo sapien
ggagcccaggtattctgccaatttt

SEQ ID NO: 2801507 - DNA, 25 bp, Homo sapien
gcctggcaggcacattgagcactag

SEQ ID NO: 2801508 - DNA, 25 bp, Homo sapien
agagatatccctggcgtctgggtta

SEQ ID NO: 2801509 - DNA, 25 bp, Homo sapien
ggtgaagtgatagccccgaagattt

SEQ ID NO: 2801510 - DNA, 25 bp, Homo sapien
taatctttgctgtacacaggccgtg

SEQ ID NO: 2801511 - DNA, 25 bp, Homo sapien
tgaactgggtggttggccttgccca

SEQ ID NO: 2801512 - DNA, 25 bp, Homo sapien
ggtacgtagccaccacaaattccag

SEQ ID NO: 2801513 - DNA, 25 bp, Homo sapien
tactctttgatgacatccttgggct

SEQ ID NO: 2801514 - DNA, 25 bp, Homo sapien
cctctctgtcaattttacagaggtc

SEQ ID NO: 2801515 - DNA, 25 bp, Homo sapien
tttgatgacatccttgggctgagac

SEQ ID NO: 2801516 - DNA, 25 bp, Homo sapien
tctctgtcaattttacagaggtcgc

SEQ ID NO: 2801517 - DNA, 25 bp, Homo sapien
tttacccgcagatgccaaaaaggca

SEQ ID NO: 2801518 - DNA, 25 bp, Homo sapien
cccagcagggccataagagaggtcc

SEQ ID NO: 2801519 - DNA, 25 bp, Homo sapien
cagtcatcttgagctagaagggaac

SEQ ID NO: 2801520 - DNA, 25 bp, Homo sapien
catgagtacactgcgaactgagaga

SEQ ID NO: 2801521 - DNA, 25 bp, Homo sapien
gcccagtccctaatatgatcttatt

SEQ ID NO: 2801522 - DNA, 25 bp, Homo sapien
catgcccagtccctaatatgatctt

SEQ ID NO: 2801523 - DNA, 25 bp, Homo sapien
tgatcttatttagttgacatttgcc

SEQ ID NO: 2801524 - DNA, 25 bp, Homo sapien
tatttagttgacatttgcctctttc

SEQ ID NO: 2801525 - DNA, 25 bp, Homo sapien
taggaatcctggctttagatcaagg

SEQ ID NO: 2801526 - DNA, 25 bp, Homo sapien
catgatgtaggtccaaagtatgcct

SEQ ID NO: 2801527 - DNA, 25 bp, Homo sapien
gaaagagggagtagccacctcccag

SEQ ID NO: 2801528 - DNA, 25 bp, Homo sapien
tcagacaggtgtgcgttcaaattcc

SEQ ID NO: 2801529 - DNA, 25 bp, Homo sapien
taaaatgagctcagcacgtctcctg

SEQ ID NO: 2801530 - DNA, 25 bp, Homo sapien
gtacagcaggtacccgatggttccc

SEQ ID NO: 2801531 - DNA, 25 bp, Homo sapien
tagggcacaatgtcatcactgggtc

SEQ ID NO: 2801532 - DNA, 25 bp, Homo sapien
aaaccattagcacgacctgtcagca

SEQ ID NO: 2801533 - DNA, 25 bp, Homo sapien
ccgaactgctcaccatatgctgacg

SEQ ID NO: 2801534 - DNA, 25 bp, Homo sapien
tgccagtattggaagtgtggtcctc

SEQ ID NO: 2801535 - DNA, 25 bp, Homo sapien
tgtggtcctctcaccgaactgctca

SEQ ID NO: 2801536 - DNA, 25 bp, Homo sapien
gggaagctggatcagccagcaagga

SEQ ID NO: 2801537 - DNA, 25 bp, Homo sapien
ttatcccagggagaaacatcctggc

SEQ ID NO: 2801538 - DNA, 25 bp, Homo sapien
tctagctacagaagtggagcccaca

SEQ ID NO: 2801539 - DNA, 25 bp, Homo sapien
gatgtgtgcttcctacaagctgtga

SEQ ID NO: 2801540 - DNA, 25 bp, Homo sapien
tccctagtggtctctgaacagaaca

SEQ ID NO: 2801541 - DNA, 25 bp, Homo sapien
tggcccaaaggatgtatgctagcgt

SEQ ID NO: 2801542 - DNA, 25 bp, Homo sapien
tatgtttaggcccatactgcctgga

SEQ ID NO: 2801543 - DNA, 25 bp, Homo sapien
tcagacactgacttgggcacatatc

SEQ ID NO: 2801544 - DNA, 25 bp, Homo sapien
aaacctctagagtgacagcattgcc

SEQ ID NO: 2801545 - DNA, 25 bp, Homo sapien
agctccctgctaggtgatactgtgg

SEQ ID NO: 2801546 - DNA, 25 bp, Homo sapien
cattatggagatcaaatagagtact

SEQ ID NO: 2801547 - DNA, 25 bp, Homo sapien
aaagacagctaacaatgttggccag

SEQ ID NO: 2801548 - DNA, 25 bp, Homo sapien
tactgagaactacgtactcttttgt

SEQ ID NO: 2801549 - DNA, 25 bp, Homo sapien
cctgttcagggtctagttgtgatgc

SEQ ID NO: 2801550 - DNA, 25 bp, Homo sapien
agtccagaaatccatcctgttcagg

SEQ ID NO: 2801551 - DNA, 25 bp, Homo sapien
caatagagcatatggtctgtcaaat

SEQ ID NO: 2801552 - DNA, 25 bp, Homo sapien
gtggcaaagttcaatagagcatatg

SEQ ID NO: 2801553 - DNA, 25 bp, Homo sapien
cctatatgatagtcctgaaaatttc

SEQ ID NO: 2801554 - DNA, 25 bp, Homo sapien
taaccaatccattctcacatccatt

SEQ ID NO: 2801555 - DNA, 25 bp, Homo sapien
gagaaggagggcatcaactttggct

SEQ ID NO: 2801556 - DNA, 25 bp, Homo sapien
gttgttattaaccaatccattctca

SEQ ID NO: 2801557 - DNA, 25 bp, Homo sapien
ccgctgtaagtcagatacccctgga

SEQ ID NO: 2801558 - DNA, 25 bp, Homo sapien
aggggttccccgctgtaagtcagat

SEQ ID NO: 2801559 - DNA, 25 bp, Homo sapien
cccgctgtaagtcagatacccctgg

SEQ ID NO: 2801560 - DNA, 25 bp, Homo sapien
gttccccgctgtaagtcagataccc

SEQ ID NO: 2801561 - DNA, 25 bp, Homo sapien
tcgaaggtccgtgccccaagacttc

SEQ ID NO: 2801562 - DNA, 25 bp, Homo sapien
tccaatttacggattgtgcagtcgt

SEQ ID NO: 2801563 - DNA, 25 bp, Homo sapien
ccaagacttccggaatgtgtccaat

SEQ ID NO: 2801564 - DNA, 25 bp, Homo sapien
ttactagtcgaaggtccgtgcccca

SEQ ID NO: 2801565 - DNA, 25 bp, Homo sapien
tggagttgctgtgtactgcagttga

SEQ ID NO: 2801566 - DNA, 25 bp, Homo sapien
ctggagttgctgtgtactgcagttg

SEQ ID NO: 2801567 - DNA, 25 bp, Homo sapien
tgcccaaggtgtgaaagtgtgaaag

SEQ ID NO: 2801568 - DNA, 25 bp, Homo sapien
attagaacccagtacacaaacaggc

SEQ ID NO: 2801569 - DNA, 25 bp, Homo sapien
aacctgaaggtccagatcacagaag

SEQ ID NO: 2801570 - DNA, 25 bp, Homo sapien
ggcatgaaatctgaaagccttgctt

SEQ ID NO: 2801571 - DNA, 25 bp, Homo sapien
actacagacagggttgcatcatgtt

SEQ ID NO: 2801572 - DNA, 25 bp, Homo sapien
ttttttactacagacagggttgcat

SEQ ID NO: 2801573 - DNA, 25 bp, Homo sapien
gcacctggccttgccatttgttttt

SEQ ID NO: 2801574 - DNA, 25 bp, Homo sapien
ttctttttctagacaggttctctgt

SEQ ID NO: 2801575 - DNA, 25 bp, Homo sapien
gatttgagcagagttcatccagaga

SEQ ID NO: 2801576 - DNA, 25 bp, Homo sapien
tataacctgagttctaccgtattgc

SEQ ID NO: 2801577 - DNA, 25 bp, Homo sapien
taagttacttaagcctcagtggttg

SEQ ID NO: 2801578 - DNA, 25 bp, Homo sapien
caaactgtggtctcacctgcaatga

SEQ ID NO: 2801579 - DNA, 25 bp, Homo sapien
tccagcaatcctcccacctcagcca

SEQ ID NO: 2801580 - DNA, 25 bp, Homo sapien
atgaagtctcactacattgcctagg

SEQ ID NO: 2801581 - DNA, 25 bp, Homo sapien
cacaatcatagctcaatctcctggg

SEQ ID NO: 2801582 - DNA, 25 bp, Homo sapien
cccgagtggctgggacttcaggtat

SEQ ID NO: 2801583 - DNA, 25 bp, Homo sapien
tgaaaggccactacaaggagaacta

SEQ ID NO: 2801584 - DNA, 25 bp, Homo sapien
gtacctaagaacatatctaaccaag

SEQ ID NO: 2801585 - DNA, 25 bp, Homo sapien
tgctattcttaccaaattaccaatg

SEQ ID NO: 2801586 - DNA, 25 bp, Homo sapien
gagagaagtacctaagaacatatct

SEQ ID NO: 2801587 - DNA, 25 bp, Homo sapien
gctagctagcaacatgtggaagaat

SEQ ID NO: 2801588 - DNA, 25 bp, Homo sapien
ccctattcaatagtgttgggatggc

SEQ ID NO: 2801589 - DNA, 25 bp, Homo sapien
gaaactggatcatacctttcaaaaa

SEQ ID NO: 2801590 - DNA, 25 bp, Homo sapien
gctgcacaaccatcttatattcaag

SEQ ID NO: 2801591 - DNA, 25 bp, Homo sapien
cagcgtgtgtcagtcttatctgcaa

SEQ ID NO: 2801592 - DNA, 25 bp, Homo sapien
tggacagtctaaggcccgtatctgg

SEQ ID NO: 2801593 - DNA, 25 bp, Homo sapien
actgcccggagaatgcattaggtac

SEQ ID NO: 2801594 - DNA, 25 bp, Homo sapien
tatttagcacttaaggtactggcaa

SEQ ID NO: 2801595 - DNA, 25 bp, Homo sapien
tcatcttttcgtgtcggcgtcctgc

SEQ ID NO: 2801596 - DNA, 25 bp, Homo sapien
tctatctcgcctgctacactgtgag

SEQ ID NO: 2801597 - DNA, 25 bp, Homo sapien
tcttatccagtctcacgggaagcct

SEQ ID NO: 2801598 - DNA, 25 bp, Homo sapien
tgtgagttcagacagcacggattga

SEQ ID NO: 2801599 - DNA, 25 bp, Homo sapien
taaagaccgtctgtgacgccggaag

SEQ ID NO: 2801600 - DNA, 25 bp, Homo sapien
tattgacgcccacgagtcgcttgta

SEQ ID NO: 2801601 - DNA, 25 bp, Homo sapien
aaagctgcagggtctcgtcgttcgt

SEQ ID NO: 2801602 - DNA, 25 bp, Homo sapien
ggcactatgtgcttccggtctccaa

SEQ ID NO: 2801603 - DNA, 25 bp, Homo sapien
tccttttgaacagcttcggtcccca

SEQ ID NO: 2801604 - DNA, 25 bp, Homo sapien
gacagtcgcataaacttcagcgaag

SEQ ID NO: 2801605 - DNA, 25 bp, Homo sapien
tatgacagtcgcataaacttcagcg

SEQ ID NO: 2801606 - DNA, 25 bp, Homo sapien
gtcgcataaacttcagcgaagagtg

SEQ ID NO: 2801607 - DNA, 25 bp, Homo sapien
cgcataaacttcagcgaagagtgcg

SEQ ID NO: 2801608 - DNA, 25 bp, Homo sapien
taaagtggcatggagtttctcacac

SEQ ID NO: 2801609 - DNA, 25 bp, Homo sapien
ggtaaagtggcatggagtttctcac

SEQ ID NO: 2801610 - DNA, 25 bp, Homo sapien
gtaaagtggcatggagtttctcaca

SEQ ID NO: 2801611 - DNA, 25 bp, Homo sapien
ctggtaaagtggcatggagtttctc

SEQ ID NO: 2801612 - DNA, 25 bp, Homo sapien
acattgtgcctacaccgggtcagga

SEQ ID NO: 2801613 - DNA, 25 bp, Homo sapien
cactacaagttatgagggctacaaa

SEQ ID NO: 2801614 - DNA, 25 bp, Homo sapien
gaccagtatcatgtgtgcagtcgct

SEQ ID NO: 2801615 - DNA, 25 bp, Homo sapien
gcagtcgctgttgacctaaatgtta

SEQ ID NO: 2801616 - DNA, 25 bp, Homo sapien
ccttgcctgcaacatcatgggagga

SEQ ID NO: 2801617 - DNA, 25 bp, Homo sapien
gggcccgagttagtaccacatataa

SEQ ID NO: 2801618 - DNA, 25 bp, Homo sapien
cgtaaacaacttgaagccaataggc

SEQ ID NO: 2801619 - DNA, 25 bp, Homo sapien
gaaattatgaccaggtgggcccgag

SEQ ID NO: 2801620 - DNA, 25 bp, Homo sapien
tgttacttaaccagaatgatggcag

SEQ ID NO: 2801621 - DNA, 25 bp, Homo sapien
gattagttactgatgcctcaaaagc

SEQ ID NO: 2801622 - DNA, 25 bp, Homo sapien
tgtataatggaatgactctagtggt

SEQ ID NO: 2801623 - DNA, 25 bp, Homo sapien
gttagaacactaatcagagacccat

SEQ ID NO: 2801624 - DNA, 25 bp, Homo sapien
gtaaactcaaagacctaggctaggc

SEQ ID NO: 2801625 - DNA, 25 bp, Homo sapien
gctgcacgaggaagaatgccataca

SEQ ID NO: 2801626 - DNA, 25 bp, Homo sapien
gacactaaattggtcagccacctgg

SEQ ID NO: 2801627 - DNA, 25 bp, Homo sapien
gacatatagacacctgctgcacgag

SEQ ID NO: 2801628 - DNA, 25 bp, Homo sapien
ttttatagaacacatagtactgcat

SEQ ID NO: 2801629 - DNA, 25 bp, Homo sapien
tttggaatttcacacagaatgcatg

SEQ ID NO: 2801630 - DNA, 25 bp, Homo sapien
catgtttcacctctgtaacctaaaa

SEQ ID NO: 2801631 - DNA, 25 bp, Homo sapien
aaactaaattcatgccattttatag

SEQ ID NO: 2801632 - DNA, 25 bp, Homo sapien
cactggtatttgacttaagatgcat

SEQ ID NO: 2801633 - DNA, 25 bp, Homo sapien
tgtggccccaaagcttgacagatgt

SEQ ID NO: 2801634 - DNA, 25 bp, Homo sapien
cagggctaagggtgcttggaattaa

SEQ ID NO: 2801635 - DNA, 25 bp, Homo sapien
gagccacagatgacttacaacagaa

SEQ ID NO: 2801636 - DNA, 25 bp, Homo sapien
gaccagccaccaagatttccagcaa

SEQ ID NO: 2801637 - DNA, 25 bp, Homo sapien
ggattttgaccagccaccaagattt

SEQ ID NO: 2801638 - DNA, 25 bp, Homo sapien
ttcaatggattttgaccagccacca

SEQ ID NO: 2801639 - DNA, 25 bp, Homo sapien
tttgaccagccaccaagatttccag

SEQ ID NO: 2801640 - DNA, 25 bp, Homo sapien
tagcagacatatggttaaagtaaga

SEQ ID NO: 2801641 - DNA, 25 bp, Homo sapien
gcagacatatggttaaagtaagata

SEQ ID NO: 2801642 - DNA, 25 bp, Homo sapien
cagacatatggttaaagtaagatac

SEQ ID NO: 2801643 - DNA, 25 bp, Homo sapien
ctagcagacatatggttaaagtaag

SEQ ID NO: 2801644 - DNA, 25 bp, Homo sapien
tctgggggaccttctggaatagatg

SEQ ID NO: 2801645 - DNA, 25 bp, Homo sapien
ggaatagatgatccgaaaggatgac

SEQ ID NO: 2801646 - DNA, 25 bp, Homo sapien
aaaggatgaccttaggattcccata

SEQ ID NO: 2801647 - DNA, 25 bp, Homo sapien
gggaggctaagaccctaatcttctg

SEQ ID NO: 2801648 - DNA, 25 bp, Homo sapien
gatttttcgctatctggcagagcca

SEQ ID NO: 2801649 - DNA, 25 bp, Homo sapien
taggacatctgggtaaattaagaga

SEQ ID NO: 2801650 - DNA, 25 bp, Homo sapien
caattaattaggacatctgggtaaa

SEQ ID NO: 2801651 - DNA, 25 bp, Homo sapien
attaagagatttttcgctatctggc

SEQ ID NO: 2801652 - DNA, 25 bp, Homo sapien
gggaccgatggcaaaatgaccgact

SEQ ID NO: 2801653 - DNA, 25 bp, Homo sapien
tgatttcacttctgatgtactgtgg

SEQ ID NO: 2801654 - DNA, 25 bp, Homo sapien
gctgtcaatagcatggatgagaaat

SEQ ID NO: 2801655 - DNA, 25 bp, Homo sapien
gaaatccggcacatatgatttcact

SEQ ID NO: 2801656 - DNA, 25 bp, Homo sapien
cattcagtataggacaggtgatgtg

SEQ ID NO: 2801657 - DNA, 25 bp, Homo sapien
gatacgagtactaccaagtctttgg

SEQ ID NO: 2801658 - DNA, 25 bp, Homo sapien
tcacccagtctatgacttcacagga

SEQ ID NO: 2801659 - DNA, 25 bp, Homo sapien
ggttttcttcgtgatacgagtacta

SEQ ID NO: 2801660 - DNA, 25 bp, Homo sapien
gatggtggccatctgacttcaagtt

SEQ ID NO: 2801661 - DNA, 25 bp, Homo sapien
tgactcccagattgccacttactcg

SEQ ID NO: 2801662 - DNA, 25 bp, Homo sapien
tacttcagtgaaaggcattgagctg

SEQ ID NO: 2801663 - DNA, 25 bp, Homo sapien
gaaaccgcactagctttggagtcac

SEQ ID NO: 2801664 - DNA, 25 bp, Homo sapien
ccacgtgcttttcaacccaaacaga

SEQ ID NO: 2801665 - DNA, 25 bp, Homo sapien
aaaggtcgctttgtaaagtcagaca

SEQ ID NO: 2801666 - DNA, 25 bp, Homo sapien
tcagacaagagacgataagccaaat

SEQ ID NO: 2801667 - DNA, 25 bp, Homo sapien
tcatgctcttccagagtatatattt

SEQ ID NO: 2801668 - DNA, 25 bp, Homo sapien
ccaaggaatgccaaagactgacaga

SEQ ID NO: 2801669 - DNA, 25 bp, Homo sapien
taggagacaagcatggaacagattg

SEQ ID NO: 2801670 - DNA, 25 bp, Homo sapien
caaggaatgccaaagactgacagaa

SEQ ID NO: 2801671 - DNA, 25 bp, Homo sapien
gcatggaacagattgtccctcacag

SEQ ID NO: 2801672 - DNA, 25 bp, Homo sapien
cctcccaaccccttttggctgccag

SEQ ID NO: 2801673 - DNA, 25 bp, Homo sapien
ctcccaaccccttttggctgccagt

SEQ ID NO: 2801674 - DNA, 25 bp, Homo sapien
ttttgagggcctccacattgctgtc

SEQ ID NO: 2801675 - DNA, 25 bp, Homo sapien
gttttttgagggcctccacattgct

SEQ ID NO: 2801676 - DNA, 25 bp, Homo sapien
ctgcttgctgatatcccagtgtatg

SEQ ID NO: 2801677 - DNA, 25 bp, Homo sapien
gcaaagtggaacctcttctttgtgg

SEQ ID NO: 2801678 - DNA, 25 bp, Homo sapien
gatatcccagtgtatgcaaagtgga

SEQ ID NO: 2801679 - DNA, 25 bp, Homo sapien
cagtgtatgcaaagtggaacctctt

SEQ ID NO: 2801680 - DNA, 25 bp, Homo sapien
ctgcctaggcgaattcgcttgcgtg

SEQ ID NO: 2801681 - DNA, 25 bp, Homo sapien
cctaggcgaattcgcttgcgtgcaa

SEQ ID NO: 2801682 - DNA, 25 bp, Homo sapien
tagctccccgatagcgtctgaaatc

SEQ ID NO: 2801683 - DNA, 25 bp, Homo sapien
cttgcgtgcaatagctccccgatag

SEQ ID NO: 2801684 - DNA, 25 bp, Homo sapien
cctcggcccattcctgacagtcaaa

SEQ ID NO: 2801685 - DNA, 25 bp, Homo sapien
gtcaaaggcctccacgcgaactcca

SEQ ID NO: 2801686 - DNA, 25 bp, Homo sapien
tctgggaaacgtgatgagattttcc

SEQ ID NO: 2801687 - DNA, 25 bp, Homo sapien
agcactgttgatgtgacgccctcgg

SEQ ID NO: 2801688 - DNA, 25 bp, Homo sapien
ggtgatgcagggcggtgggcaaaga

SEQ ID NO: 2801689 - DNA, 25 bp, Homo sapien
ctgtgaagggtgatgcagggcggtg

SEQ ID NO: 2801690 - DNA, 25 bp, Homo sapien
aagaggatcttgacccatcaggccc

SEQ ID NO: 2801691 - DNA, 25 bp, Homo sapien
agaggatcttgacccatcaggccct

SEQ ID NO: 2801692 - DNA, 25 bp, Homo sapien
acatatctacggacttcagaaaggg

SEQ ID NO: 2801693 - DNA, 25 bp, Homo sapien
caactgtagatggtccccggaactt

SEQ ID NO: 2801694 - DNA, 25 bp, Homo sapien
tcagaaagggatgagcccaacacag

SEQ ID NO: 2801695 - DNA, 25 bp, Homo sapien
caatggcagtgaagacaagacgatc

SEQ ID NO: 2801696 - DNA, 25 bp, Homo sapien
gtcagacctaactgtaaattgtctt

SEQ ID NO: 2801697 - DNA, 25 bp, Homo sapien
cagacctaactgtaaattgtcttta

SEQ ID NO: 2801698 - DNA, 25 bp, Homo sapien
cacctttaaaggtcagacctaactg

SEQ ID NO: 2801699 - DNA, 25 bp, Homo sapien
ggtcagacctaactgtaaattgtct

SEQ ID NO: 2801700 - DNA, 25 bp, Homo sapien
ggtgggaggaccagttcaatgctct

SEQ ID NO: 2801701 - DNA, 25 bp, Homo sapien
tgtctccatccacgccataatctgg

SEQ ID NO: 2801702 - DNA, 25 bp, Homo sapien
gaggtgccccttgtggaaaccgctc

SEQ ID NO: 2801703 - DNA, 25 bp, Homo sapien
tcaatgctctgaacggaggtgcccc

SEQ ID NO: 2801704 - DNA, 25 bp, Homo sapien
gatggtggagtgaaccataggccct

SEQ ID NO: 2801705 - DNA, 25 bp, Homo sapien
cggcagtacattcaactcggattta

SEQ ID NO: 2801706 - DNA, 25 bp, Homo sapien
aaattgacaggttctacagagtgac

SEQ ID NO: 2801707 - DNA, 25 bp, Homo sapien
tgggttaagataatcagaaagggcc

SEQ ID NO: 2801708 - DNA, 25 bp, Homo sapien
gtttgtaatgattgcagtcacaagc

SEQ ID NO: 2801709 - DNA, 25 bp, Homo sapien
gaaaaatcatttactctggctgcaa

SEQ ID NO: 2801710 - DNA, 25 bp, Homo sapien
tctgctccgtttactaacaaattgg

SEQ ID NO: 2801711 - DNA, 25 bp, Homo sapien
tgagctacaaaggaccagagacacc

SEQ ID NO: 2801712 - DNA, 25 bp, Homo sapien
aatttattgagcagtaccccacaag

SEQ ID NO: 2801713 - DNA, 25 bp, Homo sapien
cacccacagtgaactcatatttgac

SEQ ID NO: 2801714 - DNA, 25 bp, Homo sapien
caaattatgctacagagttgtagta

SEQ ID NO: 2801715 - DNA, 25 bp, Homo sapien
gaccactatctcttaccatacacaa

SEQ ID NO: 2801716 - DNA, 25 bp, Homo sapien
tcctccaagataaaaacatgacaac

SEQ ID NO: 2801717 - DNA, 25 bp, Homo sapien
ctagcaacccttcccaatagacgaa

SEQ ID NO: 2801718 - DNA, 25 bp, Homo sapien
tcagggtagcagagatccccattcc

SEQ ID NO: 2801719 - DNA, 25 bp, Homo sapien
gaaccctcgcaagggagctcagggt

SEQ ID NO: 2801720 - DNA, 25 bp, Homo sapien
caattcgcctttaggagtaagtccg

SEQ ID NO: 2801721 - DNA, 25 bp, Homo sapien
gtttgggttgagtgggccgatggat

SEQ ID NO: 2801722 - DNA, 25 bp, Homo sapien
tgggccgatggatgcctcctgcttc

SEQ ID NO: 2801723 - DNA, 25 bp, Homo sapien
ctagcaattcgcctttaggagtaag

SEQ ID NO: 2801724 - DNA, 25 bp, Homo sapien
tacatgtgcttcaaacaagcctggt

SEQ ID NO: 2801725 - DNA, 25 bp, Homo sapien
atgaggctcgcagctctacttccct

SEQ ID NO: 2801726 - DNA, 25 bp, Homo sapien
caagcctggtgataggagtgtttac

SEQ ID NO: 2801727 - DNA, 25 bp, Homo sapien
tcctgcaacagatgacactcgggct

SEQ ID NO: 2801728 - DNA, 25 bp, Homo sapien
aaattcttataagtggatttactga

SEQ ID NO: 2801729 - DNA, 25 bp, Homo sapien
aattcttataagtggatttactgac

SEQ ID NO: 2801730 - DNA, 25 bp, Homo sapien
aaaattcttataagtggatttactg

SEQ ID NO: 2801731 - DNA, 25 bp, Homo sapien
cttgttcagttagaagtgtgactgg

SEQ ID NO: 2801732 - DNA, 25 bp, Homo sapien
tcttcatgttgtaatcgaactttcc

SEQ ID NO: 2801733 - DNA, 25 bp, Homo sapien
gttccacatgatcttgttcagttag

SEQ ID NO: 2801734 - DNA, 25 bp, Homo sapien
cagcagccagattatgttccacatg

SEQ ID NO: 2801735 - DNA, 25 bp, Homo sapien
cacactaacaagcttctcaatgcca

SEQ ID NO: 2801736 - DNA, 25 bp, Homo sapien
tttggctacaaatgtggagaaagcc

SEQ ID NO: 2801737 - DNA, 25 bp, Homo sapien
taacaagcttctcaatgccagtgag

SEQ ID NO: 2801738 - DNA, 25 bp, Homo sapien
cttctcaatgccagtgagcatatcc

SEQ ID NO: 2801739 - DNA, 25 bp, Homo sapien
tgctgaatgctctagtaacttttgc

SEQ ID NO: 2801740 - DNA, 25 bp, Homo sapien
cttttgctttgatggttataacttg

SEQ ID NO: 2801741 - DNA, 25 bp, Homo sapien
gcttgtgctgaatgctctagtaact

SEQ ID NO: 2801742 - DNA, 25 bp, Homo sapien
taacttttgctttgatggttataac

SEQ ID NO: 2801743 - DNA, 25 bp, Homo sapien
agtcagctctaattccttcccctta

SEQ ID NO: 2801744 - DNA, 25 bp, Homo sapien
cttttgtattcaggcccttcagtca

SEQ ID NO: 2801745 - DNA, 25 bp, Homo sapien
gaaacttcgatcatgtaacctgaag

SEQ ID NO: 2801746 - DNA, 25 bp, Homo sapien
ttagcagaaggtaagaggtaaccca

SEQ ID NO: 2801747 - DNA, 25 bp, Homo sapien
catccactgaggctgtaacgcagga

SEQ ID NO: 2801748 - DNA, 25 bp, Homo sapien
tatgtcatccactgaggctgtaacg

SEQ ID NO: 2801749 - DNA, 25 bp, Homo sapien
gtctcctcaaactgtatgtcatcca

SEQ ID NO: 2801750 - DNA, 25 bp, Homo sapien
tgtaacgcaggaaactccagcatgt

SEQ ID NO: 2801751 - DNA, 25 bp, Homo sapien
acgagtgtcaattagatgacatgaa

SEQ ID NO: 2801752 - DNA, 25 bp, Homo sapien
cattacatgcgtgctgtgtttttaa

SEQ ID NO: 2801753 - DNA, 25 bp, Homo sapien
gctgtgtttttaaacgagtgtcaat

SEQ ID NO: 2801754 - DNA, 25 bp, Homo sapien
atgtcattacatgcgtgctgtgttt

SEQ ID NO: 2801755 - DNA, 25 bp, Homo sapien
ggttcttgattttgattgcccttca

SEQ ID NO: 2801756 - DNA, 25 bp, Homo sapien
ccttcataccagcagaagtggaaaa

SEQ ID NO: 2801757 - DNA, 25 bp, Homo sapien
taccagcagaagtggaaaaccctaa

SEQ ID NO: 2801758 - DNA, 25 bp, Homo sapien
cagaagtggaaaaccctaaagctgt

SEQ ID NO: 2801759 - DNA, 25 bp, Homo sapien
tggagatgagtttggaaatcactgc

SEQ ID NO: 2801760 - DNA, 25 bp, Homo sapien
agtaggaagcacttgaacatcttag

SEQ ID NO: 2801761 - DNA, 25 bp, Homo sapien
ctgaagtctgcatgaaacatgatga

SEQ ID NO: 2801762 - DNA, 25 bp, Homo sapien
agaggagaccagaacgaatggagat

SEQ ID NO: 2801763 - DNA, 25 bp, Homo sapien
ccgccaggcaggcggtggtgtcgat

SEQ ID NO: 2801764 - DNA, 25 bp, Homo sapien
caggcaggcggtggtgtcgatccac

SEQ ID NO: 2801765 - DNA, 25 bp, Homo sapien
gccaggcaggcggtggtgtcgatcc

SEQ ID NO: 2801766 - DNA, 25 bp, Homo sapien
ccaggcaggcggtggtgtcgatcca

SEQ ID NO: 2801767 - DNA, 25 bp, Homo sapien
ttggctcatgaccacctcgccgggc

SEQ ID NO: 2801768 - DNA, 25 bp, Homo sapien
gcagctgccccgcgctcagctcgcc

SEQ ID NO: 2801769 - DNA, 25 bp, Homo sapien
cgtgcgccggctggatggcttggct

SEQ ID NO: 2801770 - DNA, 25 bp, Homo sapien
gcgcgcagtggcgtgcgccggctgg

SEQ ID NO: 2801771 - DNA, 25 bp, Homo sapien
gcgagagcgctacgcctgcggcccc

SEQ ID NO: 2801772 - DNA, 25 bp, Homo sapien
gccagggcgagagcgctacgcctgc

SEQ ID NO: 2801773 - DNA, 25 bp, Homo sapien
gggcgagagcgctacgcctgcggcc

SEQ ID NO: 2801774 - DNA, 25 bp, Homo sapien
cagggcgagagcgctacgcctgcgg

SEQ ID NO: 2801775 - DNA, 25 bp, Homo sapien
catcttcagtttaacagggggcctt

SEQ ID NO: 2801776 - DNA, 25 bp, Homo sapien
caagaacatcttcagtttaacaggg

SEQ ID NO: 2801777 - DNA, 25 bp, Homo sapien
acatcttcagtttaacagggggcct

SEQ ID NO: 2801778 - DNA, 25 bp, Homo sapien
gaacatcttcagtttaacagggggc

SEQ ID NO: 2801779 - DNA, 25 bp, Homo sapien
tatttatggagggtcaagtctcaca

SEQ ID NO: 2801780 - DNA, 25 bp, Homo sapien
gattcaaatctagaaagtctggctc

SEQ ID NO: 2801781 - DNA, 25 bp, Homo sapien
ctaggaagttgatgcatgtggtgca

SEQ ID NO: 2801782 - DNA, 25 bp, Homo sapien
caagcccagataattcataagcact

SEQ ID NO: 2801783 - DNA, 25 bp, Homo sapien
actccacctgaagggataattctag

SEQ ID NO: 2801784 - DNA, 25 bp, Homo sapien
gactcagtgttgtggagccactaga

SEQ ID NO: 2801785 - DNA, 25 bp, Homo sapien
tggctagacacacattactcggagg

SEQ ID NO: 2801786 - DNA, 25 bp, Homo sapien
tcaatttgtcttcagccccgcagtt

SEQ ID NO: 2801787 - DNA, 25 bp, Homo sapien
tactaagattaaacacactagggag

SEQ ID NO: 2801788 - DNA, 25 bp, Homo sapien
actggtgcctggaataattaccttc

SEQ ID NO: 2801789 - DNA, 25 bp, Homo sapien
tccctttcagtagagatgaaactgg

SEQ ID NO: 2801790 - DNA, 25 bp, Homo sapien
cactagggagttattctctaaaagg

SEQ ID NO: 2801791 - DNA, 25 bp, Homo sapien
tgttaggattgcttgtgtaggccac

SEQ ID NO: 2801792 - DNA, 25 bp, Homo sapien
tacctgaaaccaactgaccttggag

SEQ ID NO: 2801793 - DNA, 25 bp, Homo sapien
tgaacaagtaagtgtcccctatgcc

SEQ ID NO: 2801794 - DNA, 25 bp, Homo sapien
taatactgctgaactgctggatcaa

SEQ ID NO: 2801795 - DNA, 25 bp, Homo sapien
tgactgtgctaaagatgcagaaacc

SEQ ID NO: 2801796 - DNA, 25 bp, Homo sapien
ccctatgtgatctggcaactgcctc

SEQ ID NO: 2801797 - DNA, 25 bp, Homo sapien
taaaccataattcggctttgggcat

SEQ ID NO: 2801798 - DNA, 25 bp, Homo sapien
tgcgtcctcaaatcaggcaggttgg

SEQ ID NO: 2801799 - DNA, 25 bp, Homo sapien
gctggtggccatcgttgaattaaga

SEQ ID NO: 2801800 - DNA, 25 bp, Homo sapien
aaaatgtgtcaggtagctggtggcc

SEQ ID NO: 2801801 - DNA, 25 bp, Homo sapien
gtagattactaagagtcatcccaga

SEQ ID NO: 2801802 - DNA, 25 bp, Homo sapien
aatgcagtaatgtgcacatgcacgc

SEQ ID NO: 2801803 - DNA, 25 bp, Homo sapien
caccttgtagtatcagtgaagtggc

SEQ ID NO: 2801804 - DNA, 25 bp, Homo sapien
taaacaggtctcaggtgtctttttc

SEQ ID NO: 2801805 - DNA, 25 bp, Homo sapien
tagccagtaaatttgcaaagagagg

SEQ ID NO: 2801806 - DNA, 25 bp, Homo sapien
gggtaggtcaccttatcaatctgaa

SEQ ID NO: 2801807 - DNA, 25 bp, Homo sapien
taacatgggtgtgctaaacctacgc

SEQ ID NO: 2801808 - DNA, 25 bp, Homo sapien
ccagggagacctttacacatgctta

SEQ ID NO: 2801809 - DNA, 25 bp, Homo sapien
agttgtccctccgtatccaagggag

SEQ ID NO: 2801810 - DNA, 25 bp, Homo sapien
caataaacttattccaccaggaggg

SEQ ID NO: 2801811 - DNA, 25 bp, Homo sapien
tgtggcactccttcgaattagcagt

SEQ ID NO: 2801812 - DNA, 25 bp, Homo sapien
aagccacggaagaagtaatcaagac

SEQ ID NO: 2801813 - DNA, 25 bp, Homo sapien
tgaataaccctatgaaatgcaatgg

SEQ ID NO: 2801814 - DNA, 25 bp, Homo sapien
gctttgctatacattcctagggaca

SEQ ID NO: 2801815 - DNA, 25 bp, Homo sapien
caaaggagtgctaataagattcacc

SEQ ID NO: 2801816 - DNA, 25 bp, Homo sapien
caagatcggtaacaatggagaagag

SEQ ID NO: 2801817 - DNA, 25 bp, Homo sapien
catgggcaactttgctgtaagacac

SEQ ID NO: 2801818 - DNA, 25 bp, Homo sapien
tcaatgacaccctacagcctttgtt

SEQ ID NO: 2801819 - DNA, 25 bp, Homo sapien
cctaggcacctgaatactgtgtgtg

SEQ ID NO: 2801820 - DNA, 25 bp, Homo sapien
gttctccggtgtgcactcctaggca

SEQ ID NO: 2801821 - DNA, 25 bp, Homo sapien
catctgaatttgcatgaaaggtttc

SEQ ID NO: 2801822 - DNA, 25 bp, Homo sapien
gacagcatgaggctgttctccggtg

SEQ ID NO: 2801823 - DNA, 25 bp, Homo sapien
agttctgcctagtatccctgtttag

SEQ ID NO: 2801824 - DNA, 25 bp, Homo sapien
caggcaatattgtccttgtctgaac

SEQ ID NO: 2801825 - DNA, 25 bp, Homo sapien
cagtctgtggttgattggaatgtca

SEQ ID NO: 2801826 - DNA, 25 bp, Homo sapien
tcatcaggaactagtacatacagtc

SEQ ID NO: 2801827 - DNA, 25 bp, Homo sapien
caaagtctctagagtttggattcat

SEQ ID NO: 2801828 - DNA, 25 bp, Homo sapien
tcaaagtctctagagtttggattca

SEQ ID NO: 2801829 - DNA, 25 bp, Homo sapien
ttcaaagtctctagagtttggattc

SEQ ID NO: 2801830 - DNA, 25 bp, Homo sapien
cacaatgtagttttagcctgctgaa

SEQ ID NO: 2801831 - DNA, 25 bp, Homo sapien
tacctctagtactcctggtgagaag

SEQ ID NO: 2801832 - DNA, 25 bp, Homo sapien
tgtgaggccccagttaagcttttac

SEQ ID NO: 2801833 - DNA, 25 bp, Homo sapien
tctggaaagtgccatagagcaaggt

SEQ ID NO: 2801834 - DNA, 25 bp, Homo sapien
tataaagcagtgatatacacagcac

SEQ ID NO: 2801835 - DNA, 25 bp, Homo sapien
aattatttgcagttcagtttagggc

SEQ ID NO: 2801836 - DNA, 25 bp, Homo sapien
catgattgcagacatttacaaaacc

SEQ ID NO: 2801837 - DNA, 25 bp, Homo sapien
cactccgtacagttgtttgaatcac

SEQ ID NO: 2801838 - DNA, 25 bp, Homo sapien
cactgtggttttcatgaggagactt

SEQ ID NO: 2801839 - DNA, 25 bp, Homo sapien
gtacactgtgatgaataattttctt

SEQ ID NO: 2801840 - DNA, 25 bp, Homo sapien
gttggtttggtgtgactgagattcc

SEQ ID NO: 2801841 - DNA, 25 bp, Homo sapien
cttccgtagtagttctgtgaagggc

SEQ ID NO: 2801842 - DNA, 25 bp, Homo sapien
cgctcattgtcatgctaggggagta

SEQ ID NO: 2801843 - DNA, 25 bp, Homo sapien
tcacacgctcattgtcatgctaggg

SEQ ID NO: 2801844 - DNA, 25 bp, Homo sapien
cacacgctcattgtcatgctagggg

SEQ ID NO: 2801845 - DNA, 25 bp, Homo sapien
cacgctcattgtcatgctaggggag

SEQ ID NO: 2801846 - DNA, 25 bp, Homo sapien
tatggatggattatagtgtgaaagc

SEQ ID NO: 2801847 - DNA, 25 bp, Homo sapien
tgtcattagggctcaaaccaaaaac

SEQ ID NO: 2801848 - DNA, 25 bp, Homo sapien
gagaccggctgcagaaatcagaaag

SEQ ID NO: 2801849 - DNA, 25 bp, Homo sapien
cactggaccataggaagaggattgt

SEQ ID NO: 2801850 - DNA, 25 bp, Homo sapien
cactcctgaggctgtaaaatgctca

SEQ ID NO: 2801851 - DNA, 25 bp, Homo sapien
tgggtgtctacatatgcaacgtgct

SEQ ID NO: 2801852 - DNA, 25 bp, Homo sapien
catggtgtactgtactgagaccaca

SEQ ID NO: 2801853 - DNA, 25 bp, Homo sapien
gaagtggcttacaattttccagaag

SEQ ID NO: 2801854 - DNA, 25 bp, Homo sapien
tatctgaatctttgccccagtgaag

SEQ ID NO: 2801855 - DNA, 25 bp, Homo sapien
tgccagttctgaattggtacccctc

SEQ ID NO: 2801856 - DNA, 25 bp, Homo sapien
ccctcttccaactgttaagacagca

SEQ ID NO: 2801857 - DNA, 25 bp, Homo sapien
tccaactgttaagacagcagtcact

SEQ ID NO: 2801858 - DNA, 25 bp, Homo sapien
ctagttttgcagcaacctgagacat

SEQ ID NO: 2801859 - DNA, 25 bp, Homo sapien
ggagtgcccggttgattactcaggc

SEQ ID NO: 2801860 - DNA, 25 bp, Homo sapien
ctcaggctcatattattgggagaat

SEQ ID NO: 2801861 - DNA, 25 bp, Homo sapien
gccatcatcccttggagtgcccggt

SEQ ID NO: 2801862 - DNA, 25 bp, Homo sapien
ctctcactctgaaaaggatttaaga

SEQ ID NO: 2801863 - DNA, 25 bp, Homo sapien
cctcttgcactgtactgtttcgaat

SEQ ID NO: 2801864 - DNA, 25 bp, Homo sapien
tttccctcttgcactgtactgtttc

SEQ ID NO: 2801865 - DNA, 25 bp, Homo sapien
gcactgtactgtttcgaatattgaa

SEQ ID NO: 2801866 - DNA, 25 bp, Homo sapien
tactgtttcgaatattgaaacagca

SEQ ID NO: 2801867 - DNA, 25 bp, Homo sapien
gaaatactgtccatatctcctgagc

SEQ ID NO: 2801868 - DNA, 25 bp, Homo sapien
cttggaaatactgtccatatctcct

SEQ ID NO: 2801869 - DNA, 25 bp, Homo sapien
tggaaatactgtccatatctcctga

SEQ ID NO: 2801870 - DNA, 25 bp, Homo sapien
ggaaatactgtccatatctcctgag

SEQ ID NO: 2801871 - DNA, 25 bp, Homo sapien
cagcatatagctcctgagtttttaa

SEQ ID NO: 2801872 - DNA, 25 bp, Homo sapien
gtattttccagcatatagctcctga

SEQ ID NO: 2801873 - DNA, 25 bp, Homo sapien
aaaatgcaaggagttctatccttag

SEQ ID NO: 2801874 - DNA, 25 bp, Homo sapien
gtgaatcagtaccatctgatggaaa

SEQ ID NO: 2801875 - DNA, 25 bp, Homo sapien
taatccacccatgggaccatctgac

SEQ ID NO: 2801876 - DNA, 25 bp, Homo sapien
ctcctaatccacccatgggaccatc

SEQ ID NO: 2801877 - DNA, 25 bp, Homo sapien
aatccacccatgggaccatctgacc

SEQ ID NO: 2801878 - DNA, 25 bp, Homo sapien
cctaatccacccatgggaccatctg

SEQ ID NO: 2801879 - DNA, 25 bp, Homo sapien
catgttatcaccagagttggttgaa

SEQ ID NO: 2801880 - DNA, 25 bp, Homo sapien
tactgcattcattaaagtatacatg

SEQ ID NO: 2801881 - DNA, 25 bp, Homo sapien
acatgttatcaccagagttggttga

SEQ ID NO: 2801882 - DNA, 25 bp, Homo sapien
taggtctgttaggtccaggaggtac

SEQ ID NO: 2801883 - DNA, 25 bp, Homo sapien
gatacctctctctatataagctgca

SEQ ID NO: 2801884 - DNA, 25 bp, Homo sapien
tagtgaaagctggtggactatcctg

SEQ ID NO: 2801885 - DNA, 25 bp, Homo sapien
gactatcctggcttaattccgaaag

SEQ ID NO: 2801886 - DNA, 25 bp, Homo sapien
ttagagtctatacccaattcatcac

SEQ ID NO: 2801887 - DNA, 25 bp, Homo sapien
atgggtgttcctggtggccctccac

SEQ ID NO: 2801888 - DNA, 25 bp, Homo sapien
ggtgttcctggtggccctccacctc

SEQ ID NO: 2801889 - DNA, 25 bp, Homo sapien
gatgggtgttcctggtggccctcca

SEQ ID NO: 2801890 - DNA, 25 bp, Homo sapien
tgggtgttcctggtggccctccacc

SEQ ID NO: 2801891 - DNA, 25 bp, Homo sapien
ttccatggagagtgaaatgctcact

SEQ ID NO: 2801892 - DNA, 25 bp, Homo sapien
cagtgtgtgcttttcactatgttaa

SEQ ID NO: 2801893 - DNA, 25 bp, Homo sapien
tcacaggtccaaagcagtgtgtgct

SEQ ID NO: 2801894 - DNA, 25 bp, Homo sapien
actgaacactaagttcacaggtcca

SEQ ID NO: 2801895 - DNA, 25 bp, Homo sapien
tgttgactttgagatgtagctagga

SEQ ID NO: 2801896 - DNA, 25 bp, Homo sapien
taggtgtttccctctaaatggtgta

SEQ ID NO: 2801897 - DNA, 25 bp, Homo sapien
aaatggtgtaacgtattttcctctg

SEQ ID NO: 2801898 - DNA, 25 bp, Homo sapien
gctcaggaggtcatataaaacttat

SEQ ID NO: 2801899 - DNA, 25 bp, Homo sapien
tctggacaactgtttcattgcccaa

SEQ ID NO: 2801900 - DNA, 25 bp, Homo sapien
tactgaggttggcagatgaaacaac

SEQ ID NO: 2801901 - DNA, 25 bp, Homo sapien
gggctcttcttaacatctggacaac

SEQ ID NO: 2801902 - DNA, 25 bp, Homo sapien
actcaagatgttcacttcttggcca

SEQ ID NO: 2801903 - DNA, 25 bp, Homo sapien
caggagatgctgaggagtatggtat

SEQ ID NO: 2801904 - DNA, 25 bp, Homo sapien
ttcccaggagatgctgaggagtatg

SEQ ID NO: 2801905 - DNA, 25 bp, Homo sapien
cccaggagatgctgaggagtatggt

SEQ ID NO: 2801906 - DNA, 25 bp, Homo sapien
tacataattcccaggagatgctgag

SEQ ID NO: 2801907 - DNA, 25 bp, Homo sapien
tagcaatatggacactgacctaaaa

SEQ ID NO: 2801908 - DNA, 25 bp, Homo sapien
tcatgtagcaatatggacactgacc

SEQ ID NO: 2801909 - DNA, 25 bp, Homo sapien
gattcatgtagcaatatggacactg

SEQ ID NO: 2801910 - DNA, 25 bp, Homo sapien
ttttgattcatgtagcaatatggac

SEQ ID NO: 2801911 - DNA, 25 bp, Homo sapien
ctttctgttttaatgcacagatttc

SEQ ID NO: 2801912 - DNA, 25 bp, Homo sapien
cggaccttgtaatcaaaagtgtcta

SEQ ID NO: 2801913 - DNA, 25 bp, Homo sapien
tataagtctagtttggttggtgttc

SEQ ID NO: 2801914 - DNA, 25 bp, Homo sapien
ggaaccaagtgtgctcaaaaccaaa

SEQ ID NO: 2801915 - DNA, 25 bp, Homo sapien
gttggtgttccggaccttgtaatca

SEQ ID NO: 2801916 - DNA, 25 bp, Homo sapien
tacttcaatatgctgccttgaggag

SEQ ID NO: 2801917 - DNA, 25 bp, Homo sapien
gacattaacaattgggaatctgggt

SEQ ID NO: 2801918 - DNA, 25 bp, Homo sapien
gactaactgtattggtacgaactga

SEQ ID NO: 2801919 - DNA, 25 bp, Homo sapien
tattgagccaattagtgaaatctga

SEQ ID NO: 2801920 - DNA, 25 bp, Homo sapien
tggccaaggtctaccaccacctgga

SEQ ID NO: 2801921 - DNA, 25 bp, Homo sapien
tgttgggtttggccaaggtctacca

SEQ ID NO: 2801922 - DNA, 25 bp, Homo sapien
tgggtttggccaaggtctaccacca

SEQ ID NO: 2801923 - DNA, 25 bp, Homo sapien
tgaattggcatttgttgggtttggc

SEQ ID NO: 2801924 - DNA, 25 bp, Homo sapien
aaacttcataattctgcaggatata

SEQ ID NO: 2801925 - DNA, 25 bp, Homo sapien
atacagaataagaagatcctctgaa

SEQ ID NO: 2801926 - DNA, 25 bp, Homo sapien
taatgtatacaaagttgagttaggg

SEQ ID NO: 2801927 - DNA, 25 bp, Homo sapien
tctgaaatccttttggcctcgtagt

SEQ ID NO: 2801928 - DNA, 25 bp, Homo sapien
gacatgaagctacaaatacgttagg

SEQ ID NO: 2801929 - DNA, 25 bp, Homo sapien
tattgtcatcatactctcatggcaa

SEQ ID NO: 2801930 - DNA, 25 bp, Homo sapien
caagacagagcgtaaggtaacacct

SEQ ID NO: 2801931 - DNA, 25 bp, Homo sapien
tgagtctctggcatgctcctcctaa

SEQ ID NO: 2801932 - DNA, 25 bp, Homo sapien
ccatagtctaggaaattaaatgcat

SEQ ID NO: 2801933 - DNA, 25 bp, Homo sapien
atatgcttaagtatatctgggaaag

SEQ ID NO: 2801934 - DNA, 25 bp, Homo sapien
agtctccatagtctaggaaattaaa

SEQ ID NO: 2801935 - DNA, 25 bp, Homo sapien
agtctaggaaattaaatgcatgcac

SEQ ID NO: 2801936 - DNA, 25 bp, Homo sapien
ggccgtatgatcaattataatgcag

SEQ ID NO: 2801937 - DNA, 25 bp, Homo sapien
taatacaaggccaagcctttgagga

SEQ ID NO: 2801938 - DNA, 25 bp, Homo sapien
tagttttaagcctagctggtaccca

SEQ ID NO: 2801939 - DNA, 25 bp, Homo sapien
tccatcctattggtaagagcttcag

SEQ ID NO: 2801940 - DNA, 25 bp, Homo sapien
atttttataccacacagagactgtg

SEQ ID NO: 2801941 - DNA, 25 bp, Homo sapien
aatgaagcaaacactacagctcttg

SEQ ID NO: 2801942 - DNA, 25 bp, Homo sapien
tagaggccagaaaatagaacacttt

SEQ ID NO: 2801943 - DNA, 25 bp, Homo sapien
aaattaacgtcattttagaggccag

SEQ ID NO: 2801944 - DNA, 25 bp, Homo sapien
ggggtctcattgcacctccatagtt

SEQ ID NO: 2801945 - DNA, 25 bp, Homo sapien
gggggtctcattgcacctccatagt

SEQ ID NO: 2801946 - DNA, 25 bp, Homo sapien
gatttccctacataactccaattgg

SEQ ID NO: 2801947 - DNA, 25 bp, Homo sapien
ggagagcacgttaatgatttcccta

SEQ ID NO: 2801948 - DNA, 25 bp, Homo sapien
gaatatgtatgatcactggagcacg

SEQ ID NO: 2801949 - DNA, 25 bp, Homo sapien
tagcaattactttggtctatgtctt

SEQ ID NO: 2801950 - DNA, 25 bp, Homo sapien
ggttaatcacgtggcacttactgcc

SEQ ID NO: 2801951 - DNA, 25 bp, Homo sapien
gacaaaatggctgttcagactctgc

SEQ ID NO: 2801952 - DNA, 25 bp, Homo sapien
tagttcaactgaattgacccaggaa

SEQ ID NO: 2801953 - DNA, 25 bp, Homo sapien
ttccaagtgctagcaacaaaggcag

SEQ ID NO: 2801954 - DNA, 25 bp, Homo sapien
aatataccaggtcttatgaaataaa

SEQ ID NO: 2801955 - DNA, 25 bp, Homo sapien
aataaatacgtcataagattcccct

SEQ ID NO: 2801956 - DNA, 25 bp, Homo sapien
atagtaagaacactgccaatccaaa

SEQ ID NO: 2801957 - DNA, 25 bp, Homo sapien
acgtcataagattcccctgattcca

SEQ ID NO: 2801958 - DNA, 25 bp, Homo sapien
gctcagcatctaggtttctgcactg

SEQ ID NO: 2801959 - DNA, 25 bp, Homo sapien
aaagctcagcatctaggtttctgca

SEQ ID NO: 2801960 - DNA, 25 bp, Homo sapien
tcagcatctaggtttctgcactgat

SEQ ID NO: 2801961 - DNA, 25 bp, Homo sapien
ctcagcatctaggtttctgcactga

SEQ ID NO: 2801962 - DNA, 25 bp, Homo sapien
cttggaggagtcattctctgcattg

SEQ ID NO: 2801963 - DNA, 25 bp, Homo sapien
gaggagtcattctctgcattggccc

SEQ ID NO: 2801964 - DNA, 25 bp, Homo sapien
gagtcattctctgcattggcccacc

SEQ ID NO: 2801965 - DNA, 25 bp, Homo sapien
tggaggagtcattctctgcattggc

SEQ ID NO: 2801966 - DNA, 25 bp, Homo sapien
ttgttgtcgagttggatccattcca

SEQ ID NO: 2801967 - DNA, 25 bp, Homo sapien
cttgttgtcgagttggatccattcc

SEQ ID NO: 2801968 - DNA, 25 bp, Homo sapien
tgacctcatcatcggcccgtctcag

SEQ ID NO: 2801969 - DNA, 25 bp, Homo sapien
ttttttatacagatagggtatcact

SEQ ID NO: 2801970 - DNA, 25 bp, Homo sapien
attatgggcacccaccaccgtgccc

SEQ ID NO: 2801971 - DNA, 25 bp, Homo sapien
atttttttatacagatagggtatca

SEQ ID NO: 2801972 - DNA, 25 bp, Homo sapien
gccccaggtattcactaattttcac

SEQ ID NO: 2801973 - DNA, 25 bp, Homo sapien
cagccccaggtattcactaattttc

SEQ ID NO: 2801974 - DNA, 25 bp, Homo sapien
ccaggtattcactaattttcactaa

SEQ ID NO: 2801975 - DNA, 25 bp, Homo sapien
atttcccattccccatgaccagcac

SEQ ID NO: 2801976 - DNA, 25 bp, Homo sapien
ccagggtaccgaggtgacataaaag

SEQ ID NO: 2801977 - DNA, 25 bp, Homo sapien
cagggtaccgaggtgacataaaagg

SEQ ID NO: 2801978 - DNA, 25 bp, Homo sapien
ctgattaggtatcctcaatgggggc

SEQ ID NO: 2801979 - DNA, 25 bp, Homo sapien
atcctcaatgggggccttggacctc

SEQ ID NO: 2801980 - DNA, 25 bp, Homo sapien
gaactgctaacaattctatatagca

SEQ ID NO: 2801981 - DNA, 25 bp, Homo sapien
tctatatagcagtttgcctctcagg

SEQ ID NO: 2801982 - DNA, 25 bp, Homo sapien
cagtcacaagaactgctaacaattc

SEQ ID NO: 2801983 - DNA, 25 bp, Homo sapien
tgaagcatacaccagtcacaagaac

SEQ ID NO: 2801984 - DNA, 25 bp, Homo sapien
gaatattacgttgaaaaatcactag

SEQ ID NO: 2801985 - DNA, 25 bp, Homo sapien
aaatcactagagtattgtgacatcc

SEQ ID NO: 2801986 - DNA, 25 bp, Homo sapien
atcagacattactgacaccccagtg

SEQ ID NO: 2801987 - DNA, 25 bp, Homo sapien
caccccagtggataagacattcctg

SEQ ID NO: 2801988 - DNA, 25 bp, Homo sapien
tgctttaacattcctagtcagagtt

SEQ ID NO: 2801989 - DNA, 25 bp, Homo sapien
ctatgctttaacattcctagtcaga

SEQ ID NO: 2801990 - DNA, 25 bp, Homo sapien
tttaacattcctagtcagagtttct

SEQ ID NO: 2801991 - DNA, 25 bp, Homo sapien
tatgctttaacattcctagtcagag

SEQ ID NO: 2801992 - DNA, 25 bp, Homo sapien
accctggtggtacaggacctactgg

SEQ ID NO: 2801993 - DNA, 25 bp, Homo sapien
acctactggcatgccatctcctggg

SEQ ID NO: 2801994 - DNA, 25 bp, Homo sapien
aatgtttcctagcactggactggga

SEQ ID NO: 2801995 - DNA, 25 bp, Homo sapien
gggaatgtttcctagcactggactg

SEQ ID NO: 2801996 - DNA, 25 bp, Homo sapien
tgttctcaaatcaattaaagtatgg

SEQ ID NO: 2801997 - DNA, 25 bp, Homo sapien
ttggtgttctcaaatcaattaaagt

SEQ ID NO: 2801998 - DNA, 25 bp, Homo sapien
gttctcaaatcaattaaagtatgga

SEQ ID NO: 2801999 - DNA, 25 bp, Homo sapien
gccttatacaatggcagagcacctg

SEQ ID NO: 2802000 - DNA, 25 bp, Homo sapien
tatcactgttggtctctggtaggga

SEQ ID NO: 2802001 - DNA, 25 bp, Homo sapien
ccactgtagcaggtgtgagagacac

SEQ ID NO: 2802002 - DNA, 25 bp, Homo sapien
agatgctatggtacgaatgtgtccc

SEQ ID NO: 2802003 - DNA, 25 bp, Homo sapien
gatctacttcctgccaatggtctgc

SEQ ID NO: 2802004 - DNA, 25 bp, Homo sapien
tctgctgtgggacctctctcatctg

SEQ ID NO: 2802005 - DNA, 25 bp, Homo sapien
ccaatggtctgctgtgggacctctc

SEQ ID NO: 2802006 - DNA, 25 bp, Homo sapien
tcctgccaatggtctgctgtgggac

SEQ ID NO: 2802007 - DNA, 25 bp, Homo sapien
tagaaatcatagaagaggccaggcg

SEQ ID NO: 2802008 - DNA, 25 bp, Homo sapien
tttgcacaaatggtctagaacctca

SEQ ID NO: 2802009 - DNA, 25 bp, Homo sapien
tgagcagaatgggacaatctgactc

SEQ ID NO: 2802010 - DNA, 25 bp, Homo sapien
ccaaactaattctgagctccccaaa

SEQ ID NO: 2802011 - DNA, 25 bp, Homo sapien
gttctttgactatcttggatctcta

SEQ ID NO: 2802012 - DNA, 25 bp, Homo sapien
ggctttttgaggataccccagagct

SEQ ID NO: 2802013 - DNA, 25 bp, Homo sapien
tatgtaagcgttttttctgtcctcc

SEQ ID NO: 2802014 - DNA, 25 bp, Homo sapien
aaatttggaagacttttggcagtga

SEQ ID NO: 2802015 - DNA, 25 bp, Homo sapien
tttgccactgttactacttattttc

SEQ ID NO: 2802016 - DNA, 25 bp, Homo sapien
acttattttcattgcctaccataag

SEQ ID NO: 2802017 - DNA, 25 bp, Homo sapien
ttgcctaccataagtaagatataca

SEQ ID NO: 2802018 - DNA, 25 bp, Homo sapien
ttcccatatgctatctttcatgaaa

SEQ ID NO: 2802019 - DNA, 25 bp, Homo sapien
cattatctacatataaactccaaag

SEQ ID NO: 2802020 - DNA, 25 bp, Homo sapien
aatcctaaaggacatcattatctac

SEQ ID NO: 2802021 - DNA, 25 bp, Homo sapien
tatgggcaacgaataatcagatatt

SEQ ID NO: 2802022 - DNA, 25 bp, Homo sapien
tggtgtagagctaacaaaatatgtg

SEQ ID NO: 2802023 - DNA, 25 bp, Homo sapien
tcaacttataatgacctaaaactcc

SEQ ID NO: 2802024 - DNA, 25 bp, Homo sapien
ccactgtttaggcaggtctccagat

SEQ ID NO: 2802025 - DNA, 25 bp, Homo sapien
ggtacatgaaagattcgcttacctt

SEQ ID NO: 2802026 - DNA, 25 bp, Homo sapien
tcagagttctaacaaaccaaaagga

SEQ ID NO: 2802027 - DNA, 25 bp, Homo sapien
tacctagtgaatgagtacttttgcc

SEQ ID NO: 2802028 - DNA, 25 bp, Homo sapien
tggaagctgtcaaatagcccctaga

SEQ ID NO: 2802029 - DNA, 25 bp, Homo sapien
ttattctggcaacagggaaggtagc

SEQ ID NO: 2802030 - DNA, 25 bp, Homo sapien
tggaccagctgccaatgacagtttt

SEQ ID NO: 2802031 - DNA, 25 bp, Homo sapien
tgaatcagggtgatcttggagaccc

SEQ ID NO: 2802032 - DNA, 25 bp, Homo sapien
taaatagggtatcagtgtgtacacg

SEQ ID NO: 2802033 - DNA, 25 bp, Homo sapien
tccttcgtacaagtaaactagtatg

SEQ ID NO: 2802034 - DNA, 25 bp, Homo sapien
gtggttcacgcgtgaaatcccaaaa

SEQ ID NO: 2802035 - DNA, 25 bp, Homo sapien
ttatctagcttctgggaggagccac

SEQ ID NO: 2802036 - DNA, 25 bp, Homo sapien
cagacagtagtcacagtccgctgat

SEQ ID NO: 2802037 - DNA, 25 bp, Homo sapien
tggaaacaacagacagtagtcacag

SEQ ID NO: 2802038 - DNA, 25 bp, Homo sapien
aattccttgcagcaatttgcttgga

SEQ ID NO: 2802039 - DNA, 25 bp, Homo sapien
tcatcatcaactaagttagccaaaa

SEQ ID NO: 2802040 - DNA, 25 bp, Homo sapien
tggtgtgctttgtactgaccacatt

SEQ ID NO: 2802041 - DNA, 25 bp, Homo sapien
ccaaaatgtggtgtgctttgtactg

SEQ ID NO: 2802042 - DNA, 25 bp, Homo sapien
aaatgtttacactcactcttatcac

SEQ ID NO: 2802043 - DNA, 25 bp, Homo sapien
cttaaactcaatctgtccctctttt

SEQ ID NO: 2802044 - DNA, 25 bp, Homo sapien
tcctccatcttaaactcaatctgtc

SEQ ID NO: 2802045 - DNA, 25 bp, Homo sapien
tccatcttaaactcaatctgtccct

SEQ ID NO: 2802046 - DNA, 25 bp, Homo sapien
catcttaaactcaatctgtccctct

SEQ ID NO: 2802047 - DNA, 25 bp, Homo sapien
ggacactccactgccgttccttaag

SEQ ID NO: 2802048 - DNA, 25 bp, Homo sapien
aaatgctcaagccaaggacactcca

SEQ ID NO: 2802049 - DNA, 25 bp, Homo sapien
aattcagcagggaagatatttagcc

SEQ ID NO: 2802050 - DNA, 25 bp, Homo sapien
taatagcttagaattaggcctacgc

SEQ ID NO: 2802051 - DNA, 25 bp, Homo sapien
ctggagctgcacagtagagatccca

SEQ ID NO: 2802052 - DNA, 25 bp, Homo sapien
cgcgcccggtccattgtagtacttt

SEQ ID NO: 2802053 - DNA, 25 bp, Homo sapien
aagattacctcacacaatggactgg

SEQ ID NO: 2802054 - DNA, 25 bp, Homo sapien
tattgttggcgtatgccctaagagt

SEQ ID NO: 2802055 - DNA, 25 bp, Homo sapien
attgatttattgttggcgtatgccc

SEQ ID NO: 2802056 - DNA, 25 bp, Homo sapien
acaggcctattgaaatgcatcatca

SEQ ID NO: 2802057 - DNA, 25 bp, Homo sapien
tagtacaggcctattgaaatgcatc

SEQ ID NO: 2802058 - DNA, 25 bp, Homo sapien
tatagtacaggcctattgaaatgca

SEQ ID NO: 2802059 - DNA, 25 bp, Homo sapien
aggtatagtacaggcctattgaaat

SEQ ID NO: 2802060 - DNA, 25 bp, Homo sapien
tggtggttcccccaatgtgatgttt

SEQ ID NO: 2802061 - DNA, 25 bp, Homo sapien
ctggtggttcccccaatgtgatgtt

SEQ ID NO: 2802062 - DNA, 25 bp, Homo sapien
ggaggtaggattagactcacagtct

SEQ ID NO: 2802063 - DNA, 25 bp, Homo sapien
gacatagcttatggaggagtgaaaa

SEQ ID NO: 2802064 - DNA, 25 bp, Homo sapien
ctgtctcgggagataaaggactaaa

SEQ ID NO: 2802065 - DNA, 25 bp, Homo sapien
catgactaggtttcaatgccagggt

SEQ ID NO: 2802066 - DNA, 25 bp, Homo sapien
aaagctgactatactttgaagcaga

SEQ ID NO: 2802067 - DNA, 25 bp, Homo sapien
gtcacgtgtggctatttcagtttaa

SEQ ID NO: 2802068 - DNA, 25 bp, Homo sapien
tgctgttcaacatgatactcggtag

SEQ ID NO: 2802069 - DNA, 25 bp, Homo sapien
gatcatctaaaactgtgctgttcaa

SEQ ID NO: 2802070 - DNA, 25 bp, Homo sapien
tcaagaactctaggatgtactcagc

SEQ ID NO: 2802071 - DNA, 25 bp, Homo sapien
gcaaaggtcttcatgtgcaggtccc

SEQ ID NO: 2802072 - DNA, 25 bp, Homo sapien
tactagggtttccagatacatggca

SEQ ID NO: 2802073 - DNA, 25 bp, Homo sapien
cagaagccccatggtatacaggaaa

SEQ ID NO: 2802074 - DNA, 25 bp, Homo sapien
tttttacagcaccattcagagtttg

SEQ ID NO: 2802075 - DNA, 25 bp, Homo sapien
ttagccattcccctacattggttat

SEQ ID NO: 2802076 - DNA, 25 bp, Homo sapien
gcatttttacagcaccattcagagt

SEQ ID NO: 2802077 - DNA, 25 bp, Homo sapien
cctacattggttatttaggtattga

SEQ ID NO: 2802078 - DNA, 25 bp, Homo sapien
tacttgtcaatatgtgtgaatctct

SEQ ID NO: 2802079 - DNA, 25 bp, Homo sapien
tctcgtgtgaaagtgaggtagacta

SEQ ID NO: 2802080 - DNA, 25 bp, Homo sapien
gataatagttcgttttcagtttgac

SEQ ID NO: 2802081 - DNA, 25 bp, Homo sapien
gaaaatcacatacacttatctccaa

SEQ ID NO: 2802082 - DNA, 25 bp, Homo sapien
tcagtgaatgcgacttagaaaggtc

SEQ ID NO: 2802083 - DNA, 25 bp, Homo sapien
tagaaaggtcattgccctaagtctt

SEQ ID NO: 2802084 - DNA, 25 bp, Homo sapien
tccaggattaagtgaattgagccaa

SEQ ID NO: 2802085 - DNA, 25 bp, Homo sapien
tttccagagtgcactatagattcct

SEQ ID NO: 2802086 - DNA, 25 bp, Homo sapien
ctcctacatggagcagatattcata

SEQ ID NO: 2802087 - DNA, 25 bp, Homo sapien
ctccttgtaacgtcttctttttcat

SEQ ID NO: 2802088 - DNA, 25 bp, Homo sapien
tccttgtaacgtcttctttttcata

SEQ ID NO: 2802089 - DNA, 25 bp, Homo sapien
ggggtaatatagttagaagcttcta

SEQ ID NO: 2802090 - DNA, 25 bp, Homo sapien
tatagttagaagcttctaagttttc

SEQ ID NO: 2802091 - DNA, 25 bp, Homo sapien
ggcgccttgccaccacgatggctaa

SEQ ID NO: 2802092 - DNA, 25 bp, Homo sapien
taagaagcatttagcacccatgggt

SEQ ID NO: 2802093 - DNA, 25 bp, Homo sapien
gacctcaggtagtgatctgccgtcc

SEQ ID NO: 2802094 - DNA, 25 bp, Homo sapien
gacagtaagctaagacgtcttgact

SEQ ID NO: 2802095 - DNA, 25 bp, Homo sapien
cttcaagttgcttccccatcatcgg

SEQ ID NO: 2802096 - DNA, 25 bp, Homo sapien
atagtgaagtcaaaagatgatgtga

SEQ ID NO: 2802097 - DNA, 25 bp, Homo sapien
tccccatcatcggtagaccttcata

SEQ ID NO: 2802098 - DNA, 25 bp, Homo sapien
aagttgcttccccatcatcggtaga

SEQ ID NO: 2802099 - DNA, 25 bp, Homo sapien
accaggaaaatggctcctcctcctt

SEQ ID NO: 2802100 - DNA, 25 bp, Homo sapien
tcctccttgaagagcctaatccagt

SEQ ID NO: 2802101 - DNA, 25 bp, Homo sapien
cagtatttcttaaccgtgaagcctt

SEQ ID NO: 2802102 - DNA, 25 bp, Homo sapien
ccaggaaaatggctcctcctccttg

SEQ ID NO: 2802103 - DNA, 25 bp, Homo sapien
tcagcgccagggaaggaaaatctaa

SEQ ID NO: 2802104 - DNA, 25 bp, Homo sapien
ggtcactcagtaattaatacgcagg

SEQ ID NO: 2802105 - DNA, 25 bp, Homo sapien
aaaaagttgcctattggacatccag

SEQ ID NO: 2802106 - DNA, 25 bp, Homo sapien
aaaccactgccctccaaaactgaag

SEQ ID NO: 2802107 - DNA, 25 bp, Homo sapien
actgcttaatccataggttacagaa

SEQ ID NO: 2802108 - DNA, 25 bp, Homo sapien
cacctgaagtggctacaggcacctg

SEQ ID NO: 2802109 - DNA, 25 bp, Homo sapien
gacaaagtgcactgtcaaggagcag

SEQ ID NO: 2802110 - DNA, 25 bp, Homo sapien
gggaaacaatatcaatctctttgca

SEQ ID NO: 2802111 - DNA, 25 bp, Homo sapien
aaatctcttgtttagggtagcctca

SEQ ID NO: 2802112 - DNA, 25 bp, Homo sapien
tctagctgtgaagtcctacatggca

SEQ ID NO: 2802113 - DNA, 25 bp, Homo sapien
ggatctccctctggatttggctttg

SEQ ID NO: 2802114 - DNA, 25 bp, Homo sapien
cacaaactgaagagttaggatctcc

SEQ ID NO: 2802115 - DNA, 25 bp, Homo sapien
caaaagctatagatagaatctgcct

SEQ ID NO: 2802116 - DNA, 25 bp, Homo sapien
tcacttatataagggctctcatgca

SEQ ID NO: 2802117 - DNA, 25 bp, Homo sapien
catccagacatttgagtgtgagctc

SEQ ID NO: 2802118 - DNA, 25 bp, Homo sapien
tctgctagtgctcaatcccaataga

SEQ ID NO: 2802119 - DNA, 25 bp, Homo sapien
tgagccacgtggaacagtcacatca

SEQ ID NO: 2802120 - DNA, 25 bp, Homo sapien
tactgctgctttagtcccttggaca

SEQ ID NO: 2802121 - DNA, 25 bp, Homo sapien
catctgactatggagctttactgct

SEQ ID NO: 2802122 - DNA, 25 bp, Homo sapien
gaagatacttgctacctaaaatggg

SEQ ID NO: 2802123 - DNA, 25 bp, Homo sapien
gtctgtatgtatgggcaatgtgtcc

SEQ ID NO: 2802124 - DNA, 25 bp, Homo sapien
agttgagtatcagtgatccaggtaa

SEQ ID NO: 2802125 - DNA, 25 bp, Homo sapien
tttccaagtctttaggagtgagttg

SEQ ID NO: 2802126 - DNA, 25 bp, Homo sapien
caatgtgtcccaattgaagctgtct

SEQ ID NO: 2802127 - DNA, 25 bp, Homo sapien
gaactggaataaggcacagatgaat

SEQ ID NO: 2802128 - DNA, 25 bp, Homo sapien
caagcatcacccttacaagagtgaa

SEQ ID NO: 2802129 - DNA, 25 bp, Homo sapien
tataatacgaatgaatacatgaggg

SEQ ID NO: 2802130 - DNA, 25 bp, Homo sapien
caagagtgaactggaataaggcaca

SEQ ID NO: 2802131 - DNA, 25 bp, Homo sapien
caaatcgtaaggagcagaaggctcc

SEQ ID NO: 2802132 - DNA, 25 bp, Homo sapien
aatcgtaaggagcagaaggctccac

SEQ ID NO: 2802133 - DNA, 25 bp, Homo sapien
tcgtaaggagcagaaggctccacac

SEQ ID NO: 2802134 - DNA, 25 bp, Homo sapien
tcaaatcgtaaggagcagaaggctc

SEQ ID NO: 2802135 - DNA, 25 bp, Homo sapien
tccccgcttcctccaagagctaaag

SEQ ID NO: 2802136 - DNA, 25 bp, Homo sapien
ttgacctttccccatgcccatcccc

SEQ ID NO: 2802137 - DNA, 25 bp, Homo sapien
gcttcctccaagagctaaagccaat

SEQ ID NO: 2802138 - DNA, 25 bp, Homo sapien
gctccaggacttatagccaccactg

SEQ ID NO: 2802139 - DNA, 25 bp, Homo sapien
cagataatacctagccaatgaagat

SEQ ID NO: 2802140 - DNA, 25 bp, Homo sapien
tcatttctgggctaggagacctacc

SEQ ID NO: 2802141 - DNA, 25 bp, Homo sapien
aagggcctggcataatgtgtgctac

SEQ ID NO: 2802142 - DNA, 25 bp, Homo sapien
tacaccagtgtaaatgaagggcctg

SEQ ID NO: 2802143 - DNA, 25 bp, Homo sapien
ccagagatgtggtaagtgcattcac

SEQ ID NO: 2802144 - DNA, 25 bp, Homo sapien
gttctcccaaaagcccataagagga

SEQ ID NO: 2802145 - DNA, 25 bp, Homo sapien
gaccatcaccagagggccagagatg

SEQ ID NO: 2802146 - DNA, 25 bp, Homo sapien
tacagacaaactaggtgaccatcac

SEQ ID NO: 2802147 - DNA, 25 bp, Homo sapien
cttttgcacttactctgtacgccat

SEQ ID NO: 2802148 - DNA, 25 bp, Homo sapien
tcttttgcacttactctgtacgcca

SEQ ID NO: 2802149 - DNA, 25 bp, Homo sapien
gcaacattctttaaatcatgactac

SEQ ID NO: 2802150 - DNA, 25 bp, Homo sapien
aatcatgactacaactattaggcac

SEQ ID NO: 2802151 - DNA, 25 bp, Homo sapien
tgggggtattaatcacatatgaaga

SEQ ID NO: 2802152 - DNA, 25 bp, Homo sapien
gaatatactactaacttcacaacat

SEQ ID NO: 2802153 - DNA, 25 bp, Homo sapien
ctacttcaagtgttccagtagccat

SEQ ID NO: 2802154 - DNA, 25 bp, Homo sapien
caacacatctatagaagagattatc

SEQ ID NO: 2802155 - DNA, 25 bp, Homo sapien
catctatagaagagattatcatcca

SEQ ID NO: 2802156 - DNA, 25 bp, Homo sapien
ggtttcaacacatctatagaagaga

SEQ ID NO: 2802157 - DNA, 25 bp, Homo sapien
tccaggtttcaacacatctatagaa

SEQ ID NO: 2802158 - DNA, 25 bp, Homo sapien
cagctattttggaagtcttgtgcac

SEQ ID NO: 2802159 - DNA, 25 bp, Homo sapien
tgtcaatcggcaagatgactgaagg

SEQ ID NO: 2802160 - DNA, 25 bp, Homo sapien
gcactgctgggtaagtgatctcttg

SEQ ID NO: 2802161 - DNA, 25 bp, Homo sapien
gcctggttactttgggtgggtcata

SEQ ID NO: 2802162 - DNA, 25 bp, Homo sapien
gccacacagacggaaactcattggt

SEQ ID NO: 2802163 - DNA, 25 bp, Homo sapien
caaacagccccaggaattgttgtct

SEQ ID NO: 2802164 - DNA, 25 bp, Homo sapien
gctacagtccctagttttgtctgaa

SEQ ID NO: 2802165 - DNA, 25 bp, Homo sapien
caaatgccatagttagacagtactg

SEQ ID NO: 2802166 - DNA, 25 bp, Homo sapien
ttatctcctaggtcaagttgtcatt

SEQ ID NO: 2802167 - DNA, 25 bp, Homo sapien
tcaagttgtcatttaaggctgttct

SEQ ID NO: 2802168 - DNA, 25 bp, Homo sapien
tgaaatagttcgtatttaatctgcc

SEQ ID NO: 2802169 - DNA, 25 bp, Homo sapien
taatctgccagatttatccctacca

SEQ ID NO: 2802170 - DNA, 25 bp, Homo sapien
tggtgagcacctacatccatgttgt

SEQ ID NO: 2802171 - DNA, 25 bp, Homo sapien
taacttatgccggattactctgcct

SEQ ID NO: 2802172 - DNA, 25 bp, Homo sapien
tatcacacggagcttctcaggtgcc

SEQ ID NO: 2802173 - DNA, 25 bp, Homo sapien
caataggccatacgctgcttggaag

SEQ ID NO: 2802174 - DNA, 25 bp, Homo sapien
aacatcacacaaatggccgggctca

SEQ ID NO: 2802175 - DNA, 25 bp, Homo sapien
caccatggtccttgctcttatggag

SEQ ID NO: 2802176 - DNA, 25 bp, Homo sapien
gctcttatggagcttccaatctaac

SEQ ID NO: 2802177 - DNA, 25 bp, Homo sapien
tggaagatgaggcattaaacatcac

SEQ ID NO: 2802178 - DNA, 25 bp, Homo sapien
gctgtcaagtaagtttctgaagaga

SEQ ID NO: 2802179 - DNA, 25 bp, Homo sapien
tagttttggaaatcctgaattgtgc

SEQ ID NO: 2802180 - DNA, 25 bp, Homo sapien
tgcgaattgctgtcaagtaagtttc

SEQ ID NO: 2802181 - DNA, 25 bp, Homo sapien
cctgaattgtgcgaattgctgtcaa

SEQ ID NO: 2802182 - DNA, 25 bp, Homo sapien
tccaactttcctaaaatttctgtgc

SEQ ID NO: 2802183 - DNA, 25 bp, Homo sapien
cctaaaatttctgtgccttctccca

SEQ ID NO: 2802184 - DNA, 25 bp, Homo sapien
tgtgccttctcccacaccatacaca

SEQ ID NO: 2802185 - DNA, 25 bp, Homo sapien
tgccttctcccacaccatacacaga

SEQ ID NO: 2802186 - DNA, 25 bp, Homo sapien
acaggaattgtgtaaaaccaataat

SEQ ID NO: 2802187 - DNA, 25 bp, Homo sapien
taaaaccaataattcacttcaaata

SEQ ID NO: 2802188 - DNA, 25 bp, Homo sapien
attacaggaattgtgtaaaaccaat

SEQ ID NO: 2802189 - DNA, 25 bp, Homo sapien
aaaaccaataattcacttcaaatat

SEQ ID NO: 2802190 - DNA, 25 bp, Homo sapien
cctcccgggaaagcgcagctccccg

SEQ ID NO: 2802191 - DNA, 25 bp, Homo sapien
cgcacctcccgggaaagcgcagctc

SEQ ID NO: 2802192 - DNA, 25 bp, Homo sapien
agcgcccgcacctcccgggaaagcg

SEQ ID NO: 2802193 - DNA, 25 bp, Homo sapien
ggaaagcgcagctccccgcaccaca

SEQ ID NO: 2802194 - DNA, 25 bp, Homo sapien
gctgtcggacgggacggcgctgctg

SEQ ID NO: 2802195 - DNA, 25 bp, Homo sapien
tggctgtcggacgggacggcgctgc

SEQ ID NO: 2802196 - DNA, 25 bp, Homo sapien
tgtcggacgggacggcgctgctgtt

SEQ ID NO: 2802197 - DNA, 25 bp, Homo sapien
acgggacggcgctgctgttactctt

SEQ ID NO: 2802198 - DNA, 25 bp, Homo sapien
tctggccttccgaagcgcgcggtgg

SEQ ID NO: 2802199 - DNA, 25 bp, Homo sapien
gggaacagccccgtccccatggcga

SEQ ID NO: 2802200 - DNA, 25 bp, Homo sapien
gtccccatggcgacccacgcagcca

SEQ ID NO: 2802201 - DNA, 25 bp, Homo sapien
ggcaacgcgcgagactgacaggcct

SEQ ID NO: 2802202 - DNA, 25 bp, Homo sapien
cagccctactccctggggtgtcgcc

SEQ ID NO: 2802203 - DNA, 25 bp, Homo sapien
gattgatttttgcggtcctcagccc

SEQ ID NO: 2802204 - DNA, 25 bp, Homo sapien
cgcgcggttccctcgaccttctggc

SEQ ID NO: 2802205 - DNA, 25 bp, Homo sapien
gctggcgagggacacccgcgcggtt

SEQ ID NO: 2802206 - DNA, 25 bp, Homo sapien
cctggctccagagtcgtcttggtct

SEQ ID NO: 2802207 - DNA, 25 bp, Homo sapien
catggattattgtagttcactgtta

SEQ ID NO: 2802208 - DNA, 25 bp, Homo sapien
ggaagagcaatcttatgccaaatag

SEQ ID NO: 2802209 - DNA, 25 bp, Homo sapien
tgccttgtttttcgggcttcacttc

SEQ ID NO: 2802210 - DNA, 25 bp, Homo sapien
gcggaagttgatgaggaaatcaaca

SEQ ID NO: 2802211 - DNA, 25 bp, Homo sapien
caacagcggaagttgatgaggaaat

SEQ ID NO: 2802212 - DNA, 25 bp, Homo sapien
cagcggaagttgatgaggaaatcaa

SEQ ID NO: 2802213 - DNA, 25 bp, Homo sapien
ctttttaacaacagcggaagttgat

SEQ ID NO: 2802214 - DNA, 25 bp, Homo sapien
catactttggaaaggccggactcct

SEQ ID NO: 2802215 - DNA, 25 bp, Homo sapien
gctgggtctaggtcacatgtgtgta

SEQ ID NO: 2802216 - DNA, 25 bp, Homo sapien
tcatgagtataacaagaagacccct

SEQ ID NO: 2802217 - DNA, 25 bp, Homo sapien
ggtcttaggcacagtatccatcatg

SEQ ID NO: 2802218 - DNA, 25 bp, Homo sapien
tatttgttgacatcctgatttataa

SEQ ID NO: 2802219 - DNA, 25 bp, Homo sapien
aaacctgaacaagttcagtttcaat

SEQ ID NO: 2802220 - DNA, 25 bp, Homo sapien
gcttgtatttgttgacatcctgatt

SEQ ID NO: 2802221 - DNA, 25 bp, Homo sapien
gtgcttgtatttgttgacatcctga

SEQ ID NO: 2802222 - DNA, 25 bp, Homo sapien
ttcaatgacatcgaatctttcaaag

SEQ ID NO: 2802223 - DNA, 25 bp, Homo sapien
tttctgacagcttacctcccactgt

SEQ ID NO: 2802224 - DNA, 25 bp, Homo sapien
ttccacagaggacttagcatttctg

SEQ ID NO: 2802225 - DNA, 25 bp, Homo sapien
ttcaaagggaatgtaataattccac

SEQ ID NO: 2802226 - DNA, 25 bp, Homo sapien
ctccgcaatagttttggtctctcct

SEQ ID NO: 2802227 - DNA, 25 bp, Homo sapien
cattcttggtccaaggcgggagagc

SEQ ID NO: 2802228 - DNA, 25 bp, Homo sapien
gcattcttggtccaaggcgggagag

SEQ ID NO: 2802229 - DNA, 25 bp, Homo sapien
tccgcaatagttttggtctctcctc

SEQ ID NO: 2802230 - DNA, 25 bp, Homo sapien
gaaacctgtctgtacatgttgagca

SEQ ID NO: 2802231 - DNA, 25 bp, Homo sapien
gaagtttctggagggttctctgcct

SEQ ID NO: 2802232 - DNA, 25 bp, Homo sapien
tcatcaggaatggagcctaggccct

SEQ ID NO: 2802233 - DNA, 25 bp, Homo sapien
gaaggcccagcatggcatcatcagg

SEQ ID NO: 2802234 - DNA, 25 bp, Homo sapien
tccagtgtaggcaagcaagaagctt

SEQ ID NO: 2802235 - DNA, 25 bp, Homo sapien
taggcaagcaagaagcttggagacc

SEQ ID NO: 2802236 - DNA, 25 bp, Homo sapien
gatatgggacatccagtgtaggcaa

SEQ ID NO: 2802237 - DNA, 25 bp, Homo sapien
gagttggagcccagatatgggacat

SEQ ID NO: 2802238 - DNA, 25 bp, Homo sapien
tgtggccccaagcatcaccataagc

SEQ ID NO: 2802239 - DNA, 25 bp, Homo sapien
taagcaatcaggcagacaaaatgag

SEQ ID NO: 2802240 - DNA, 25 bp, Homo sapien
gatgtgatctttagaatgggagaac

SEQ ID NO: 2802241 - DNA, 25 bp, Homo sapien
gaattgcctacgttcaaatccccat

SEQ ID NO: 2802242 - DNA, 25 bp, Homo sapien
cactttgtaacttataataactgaa

SEQ ID NO: 2802243 - DNA, 25 bp, Homo sapien
taattgaaacatacagtctgacctc

SEQ ID NO: 2802244 - DNA, 25 bp, Homo sapien
tctgacctcacattgctctgataaa

SEQ ID NO: 2802245 - DNA, 25 bp, Homo sapien
tagcttattcactttgtaacttata

SEQ ID NO: 2802246 - DNA, 25 bp, Homo sapien
ttttcctggcacttgcctgagggct

SEQ ID NO: 2802247 - DNA, 25 bp, Homo sapien
ttcctggcacttgcctgagggcttg

SEQ ID NO: 2802248 - DNA, 25 bp, Homo sapien
cagttttcctggcacttgcctgagg

SEQ ID NO: 2802249 - DNA, 25 bp, Homo sapien
ttctcagttttcctggcacttgcct

SEQ ID NO: 2802250 - DNA, 25 bp, Homo sapien
aaacaacatcgctatccgtgaaatc

SEQ ID NO: 2802251 - DNA, 25 bp, Homo sapien
tggataagaggttgccaagatttct

SEQ ID NO: 2802252 - DNA, 25 bp, Homo sapien
tctgtagacatggtcttcctttcca

SEQ ID NO: 2802253 - DNA, 25 bp, Homo sapien
gaaatctctacagtctttctggata

SEQ ID NO: 2802254 - DNA, 25 bp, Homo sapien
catgcaattccgtacaaaggacaat

SEQ ID NO: 2802255 - DNA, 25 bp, Homo sapien
aaaaccagcacaggatttcatgcaa

SEQ ID NO: 2802256 - DNA, 25 bp, Homo sapien
agcctccctagtagacattttccca

SEQ ID NO: 2802257 - DNA, 25 bp, Homo sapien
tagtttggtggtcttagcctcccta

SEQ ID NO: 2802258 - DNA, 25 bp, Homo sapien
ggattgcattagcaggactcagaga

SEQ ID NO: 2802259 - DNA, 25 bp, Homo sapien
ccccgctagatgctgagattggcct

SEQ ID NO: 2802260 - DNA, 25 bp, Homo sapien
tgcccttgtgccaaccaagctggga

SEQ ID NO: 2802261 - DNA, 25 bp, Homo sapien
gaatttaagtcaattggctgctgga

SEQ ID NO: 2802262 - DNA, 25 bp, Homo sapien
ctgtttaaagaagccaccaggcagt

SEQ ID NO: 2802263 - DNA, 25 bp, Homo sapien
catcagacgaagtgggaggaagaaa

SEQ ID NO: 2802264 - DNA, 25 bp, Homo sapien
cccggctgtcagtcttcccaagaat

SEQ ID NO: 2802265 - DNA, 25 bp, Homo sapien
gcagggcacaaccatcagacgaagt

SEQ ID NO: 2802266 - DNA, 25 bp, Homo sapien
cagggaacaagatgtttgcagttac

SEQ ID NO: 2802267 - DNA, 25 bp, Homo sapien
tggttggttccagggcgaccgccca

SEQ ID NO: 2802268 - DNA, 25 bp, Homo sapien
tccagggcgaccgcccaaagaagca

SEQ ID NO: 2802269 - DNA, 25 bp, Homo sapien
agcagggaacaagatgtttgcagtt

SEQ ID NO: 2802270 - DNA, 25 bp, Homo sapien
gcagggatggagcaaagtaacttga

SEQ ID NO: 2802271 - DNA, 25 bp, Homo sapien
taacttgaaagctcccctctcggcg

SEQ ID NO: 2802272 - DNA, 25 bp, Homo sapien
ggatggagcaaagtaacttgaaagc

SEQ ID NO: 2802273 - DNA, 25 bp, Homo sapien
agtaacttgaaagctcccctctcgg

SEQ ID NO: 2802274 - DNA, 25 bp, Homo sapien
gcaaagcagctctcattatcccgga

SEQ ID NO: 2802275 - DNA, 25 bp, Homo sapien
tagcatttgctgttccgtcctgcgg

SEQ ID NO: 2802276 - DNA, 25 bp, Homo sapien
tatcccggaagttgtgctgacacag

SEQ ID NO: 2802277 - DNA, 25 bp, Homo sapien
gcggcttgaaactgctcgggctgaa

SEQ ID NO: 2802278 - DNA, 25 bp, Homo sapien
tttaatcgagccaacaagcaaacaa

SEQ ID NO: 2802279 - DNA, 25 bp, Homo sapien
cttccacgagtatttaatcgagcca

SEQ ID NO: 2802280 - DNA, 25 bp, Homo sapien
aacccaaataaacctgcccgtgatg

SEQ ID NO: 2802281 - DNA, 25 bp, Homo sapien
taaacctgcccgtgatgttgtggtc

SEQ ID NO: 2802282 - DNA, 25 bp, Homo sapien
catctttcggaataaagggcattgg

SEQ ID NO: 2802283 - DNA, 25 bp, Homo sapien
gcagacatctcacggcatctttcgg

SEQ ID NO: 2802284 - DNA, 25 bp, Homo sapien
gggcagggatgcaccatcatttctg

SEQ ID NO: 2802285 - DNA, 25 bp, Homo sapien
ccaggtctcggcgtttagttcaagt

SEQ ID NO: 2802286 - DNA, 25 bp, Homo sapien
caaggagaagattggaggacaggca

SEQ ID NO: 2802287 - DNA, 25 bp, Homo sapien
gaagggacagataccctgtccagac

SEQ ID NO: 2802288 - DNA, 25 bp, Homo sapien
taccctgtccagacacttgacaact

SEQ ID NO: 2802289 - DNA, 25 bp, Homo sapien
ggcagctgaagggacagataccctg

SEQ ID NO: 2802290 - DNA, 25 bp, Homo sapien
tcagcaaatgatcttggcgtcagac

SEQ ID NO: 2802291 - DNA, 25 bp, Homo sapien
cttgtggcttgttctgcatccattc

SEQ ID NO: 2802292 - DNA, 25 bp, Homo sapien
gtggcttgttctgcatccattctcc

SEQ ID NO: 2802293 - DNA, 25 bp, Homo sapien
gatcttggcgtcagacatctcttgt

SEQ ID NO: 2802294 - DNA, 25 bp, Homo sapien
gtaaactgattagccagcagctgct

SEQ ID NO: 2802295 - DNA, 25 bp, Homo sapien
tatattttgggtaaactgattagcc

SEQ ID NO: 2802296 - DNA, 25 bp, Homo sapien
ttttgggtaaactgattagccagca

SEQ ID NO: 2802297 - DNA, 25 bp, Homo sapien
gggtaaactgattagccagcagctg

SEQ ID NO: 2802298 - DNA, 25 bp, Homo sapien
ctaattgtctgctattggtgccttc

SEQ ID NO: 2802299 - DNA, 25 bp, Homo sapien
cactgtaaggtgaatactttgctac

SEQ ID NO: 2802300 - DNA, 25 bp, Homo sapien
gaatactttgctaccttggtttctg

SEQ ID NO: 2802301 - DNA, 25 bp, Homo sapien
taaggtgaatactttgctaccttgg

SEQ ID NO: 2802302 - DNA, 25 bp, Homo sapien
ttcctcactgtaaggtgaatacttt

SEQ ID NO: 2802303 - DNA, 25 bp, Homo sapien
tcagcacatataaaccttgtttagg

SEQ ID NO: 2802304 - DNA, 25 bp, Homo sapien
catcttactggtagggggctgttgt

SEQ ID NO: 2802305 - DNA, 25 bp, Homo sapien
ttaggtgtcatcttactggtagggg

SEQ ID NO: 2802306 - DNA, 25 bp, Homo sapien
ctaagggatgttcagcacatataaa

SEQ ID NO: 2802307 - DNA, 25 bp, Homo sapien
taacgacgtgtgcacagtggcgcat

SEQ ID NO: 2802308 - DNA, 25 bp, Homo sapien
cccgccaacagagtaacgacgtgtg

SEQ ID NO: 2802309 - DNA, 25 bp, Homo sapien
ctggaggcatctcagtggagattcc

SEQ ID NO: 2802310 - DNA, 25 bp, Homo sapien
gcccaagagcgaagggtcagccctg

SEQ ID NO: 2802311 - DNA, 25 bp, Homo sapien
tcagcatgaagtaatagtacaaaag

SEQ ID NO: 2802312 - DNA, 25 bp, Homo sapien
taatagtacaaaagagggtcatcat

SEQ ID NO: 2802313 - DNA, 25 bp, Homo sapien
tttttaggccagtcatctgcatcaa

SEQ ID NO: 2802314 - DNA, 25 bp, Homo sapien
cctgggccaaggagtaattttcctg

SEQ ID NO: 2802315 - DNA, 25 bp, Homo sapien
cttttcacccttgttatcataattg

SEQ ID NO: 2802316 - DNA, 25 bp, Homo sapien
tggcaagaggcttcttattcccttt

SEQ ID NO: 2802317 - DNA, 25 bp, Homo sapien
ttctgttgaaagcttaagcgtcctt

SEQ ID NO: 2802318 - DNA, 25 bp, Homo sapien
taagcgtcctttgtgcacaagaagc

SEQ ID NO: 2802319 - DNA, 25 bp, Homo sapien
caaagaggcttagggtggacaccag

SEQ ID NO: 2802320 - DNA, 25 bp, Homo sapien
agcagtggcacttggcaaaggtgtt

SEQ ID NO: 2802321 - DNA, 25 bp, Homo sapien
catggctactatggatttccctttg

SEQ ID NO: 2802322 - DNA, 25 bp, Homo sapien
ggtgttcagcaggtacacaggtccc

SEQ ID NO: 2802323 - DNA, 25 bp, Homo sapien
tgcagcagcgattgccgtagcatct

SEQ ID NO: 2802324 - DNA, 25 bp, Homo sapien
agcaggaggattgccccattgtgta

SEQ ID NO: 2802325 - DNA, 25 bp, Homo sapien
gaagatgcctacaatctcatacagc

SEQ ID NO: 2802326 - DNA, 25 bp, Homo sapien
aaatatggtgtgctgacaacttgca

SEQ ID NO: 2802327 - DNA, 25 bp, Homo sapien
ctcccttccttatagcctagaggta

SEQ ID NO: 2802328 - DNA, 25 bp, Homo sapien
gaaacaggtctccttgagatcccca

SEQ ID NO: 2802329 - DNA, 25 bp, Homo sapien
ttctctgagtgccaatgtgccgatt

SEQ ID NO: 2802330 - DNA, 25 bp, Homo sapien
gcctagaggtattgctgatattctc

SEQ ID NO: 2802331 - DNA, 25 bp, Homo sapien
ctttttgtagcgtaagcatgctggc

SEQ ID NO: 2802332 - DNA, 25 bp, Homo sapien
tgtagcgtaagcatgctggcatggt

SEQ ID NO: 2802333 - DNA, 25 bp, Homo sapien
cgtaagcatgctggcatggttcccc

SEQ ID NO: 2802334 - DNA, 25 bp, Homo sapien
tacaggactttttgtagcgtaagca

SEQ ID NO: 2802335 - DNA, 25 bp, Homo sapien
ccccgtcaacgagccgcctttgtgc

SEQ ID NO: 2802336 - DNA, 25 bp, Homo sapien
cgcctttgtgctccgcggagggcac

SEQ ID NO: 2802337 - DNA, 25 bp, Homo sapien
acgagccgcctttgtgctccgcgga

SEQ ID NO: 2802338 - DNA, 25 bp, Homo sapien
gtcaacgagccgcctttgtgctccg

SEQ ID NO: 2802339 - DNA, 25 bp, Homo sapien
cacgctccgactcggccgtggcgga

SEQ ID NO: 2802340 - DNA, 25 bp, Homo sapien
agtgcgcacgctccgactcggccgt

SEQ ID NO: 2802341 - DNA, 25 bp, Homo sapien
cgggaaggcgcagtgcgcacgctcc

SEQ ID NO: 2802342 - DNA, 25 bp, Homo sapien
cgcgggaaggcgcagtgcgcacgct

SEQ ID NO: 2802343 - DNA, 25 bp, Homo sapien
gaggccacggccacttctggttggc

SEQ ID NO: 2802344 - DNA, 25 bp, Homo sapien
cctccgccctcgaggcccccgcagt

SEQ ID NO: 2802345 - DNA, 25 bp, Homo sapien
ggccacggccacttctggttggcct

SEQ ID NO: 2802346 - DNA, 25 bp, Homo sapien
tccgccctcgaggcccccgcagtcc

SEQ ID NO: 2802347 - DNA, 25 bp, Homo sapien
caagaattgaattcatgtgttcaga

SEQ ID NO: 2802348 - DNA, 25 bp, Homo sapien
tcaagaattgaattcatgtgttcag

SEQ ID NO: 2802349 - DNA, 25 bp, Homo sapien
ctccaagttttggagtcttccccag

SEQ ID NO: 2802350 - DNA, 25 bp, Homo sapien
tgcacactgcactactgggagagaa

SEQ ID NO: 2802351 - DNA, 25 bp, Homo sapien
ggccatgcacactgcactactggga

SEQ ID NO: 2802352 - DNA, 25 bp, Homo sapien
gaattaccagtggagctagaaacca

SEQ ID NO: 2802353 - DNA, 25 bp, Homo sapien
tgggagagaactgccttgaaagaga

SEQ ID NO: 2802354 - DNA, 25 bp, Homo sapien
gtggtacacttgttacacccattgt

SEQ ID NO: 2802355 - DNA, 25 bp, Homo sapien
acttgttacacccattgtttaccat

SEQ ID NO: 2802356 - DNA, 25 bp, Homo sapien
gaaggtggtacacttgttacaccca

SEQ ID NO: 2802357 - DNA, 25 bp, Homo sapien
cctcaggaaggtggtacacttgtta

SEQ ID NO: 2802358 - DNA, 25 bp, Homo sapien
taaataggcacaagctgaaagcttc

SEQ ID NO: 2802359 - DNA, 25 bp, Homo sapien
gcagaagaccttttgatacaattca

SEQ ID NO: 2802360 - DNA, 25 bp, Homo sapien
tctataccaagaaaaccctatggtc

SEQ ID NO: 2802361 - DNA, 25 bp, Homo sapien
aagaaagagcatccagataggaaga

SEQ ID NO: 2802362 - DNA, 25 bp, Homo sapien
ctgcgagcaaatgggatggaggggt

SEQ ID NO: 2802363 - DNA, 25 bp, Homo sapien
tctaggatactgcgagcaaatggga

SEQ ID NO: 2802364 - DNA, 25 bp, Homo sapien
tccagctaggcatgggagggaacaa

SEQ ID NO: 2802365 - DNA, 25 bp, Homo sapien
taggatactgcgagcaaatgggatg

SEQ ID NO: 2802366 - DNA, 25 bp, Homo sapien
tttgccacagatcacatgcatgcca

SEQ ID NO: 2802367 - DNA, 25 bp, Homo sapien
tcactttgccacagatcacatgcat

SEQ ID NO: 2802368 - DNA, 25 bp, Homo sapien
ggaccttgtcagctaacagctcaaa

SEQ ID NO: 2802369 - DNA, 25 bp, Homo sapien
gggaccttgtcagctaacagctcaa

SEQ ID NO: 2802370 - DNA, 25 bp, Homo sapien
agtacacagttttcctcggcggcgt

SEQ ID NO: 2802371 - DNA, 25 bp, Homo sapien
atagtacacagttttcctcggcggc

SEQ ID NO: 2802372 - DNA, 25 bp, Homo sapien
acacagttttcctcggcggcgtcat

SEQ ID NO: 2802373 - DNA, 25 bp, Homo sapien
ggctaatagtacacagttttcctcg

SEQ ID NO: 2802374 - DNA, 25 bp, Homo sapien
tggatgctacatacagtagggcctc

SEQ ID NO: 2802375 - DNA, 25 bp, Homo sapien
catcgcagttgtttgtgggaaagct

SEQ ID NO: 2802376 - DNA, 25 bp, Homo sapien
ttctgggcttcatcgcagttgtttg

SEQ ID NO: 2802377 - DNA, 25 bp, Homo sapien
ggatgtggcctacaatggatgctac

SEQ ID NO: 2802378 - DNA, 25 bp, Homo sapien
tcttgaccctacagcaggatccttt

SEQ ID NO: 2802379 - DNA, 25 bp, Homo sapien
cagcctaaagagagagcacggctct

SEQ ID NO: 2802380 - DNA, 25 bp, Homo sapien
tggtactttgtacagcccatcccag

SEQ ID NO: 2802381 - DNA, 25 bp, Homo sapien
gagtaataagtttccaagttggcaa

SEQ ID NO: 2802382 - DNA, 25 bp, Homo sapien
aaaatagccaatggttcaaaaagca

SEQ ID NO: 2802383 - DNA, 25 bp, Homo sapien
gttagtgccgatacttatattttgc

SEQ ID NO: 2802384 - DNA, 25 bp, Homo sapien
tatcttttgagcatcgggtaccgtg

SEQ ID NO: 2802385 - DNA, 25 bp, Homo sapien
ctaggagttagtgccgatacttata

SEQ ID NO: 2802386 - DNA, 25 bp, Homo sapien
ccgtgctgaaggatacaggcataaa

SEQ ID NO: 2802387 - DNA, 25 bp, Homo sapien
tcttctgggagatatgaactatatt

SEQ ID NO: 2802388 - DNA, 25 bp, Homo sapien
cagattttggatacagagagagtta

SEQ ID NO: 2802389 - DNA, 25 bp, Homo sapien
ctgcttaagttagccccagaatcag

SEQ ID NO: 2802390 - DNA, 25 bp, Homo sapien
taattgaattaaggtgattgcaggg

SEQ ID NO: 2802391 - DNA, 25 bp, Homo sapien
atggcccagtagttggcccctgaat

SEQ ID NO: 2802392 - DNA, 25 bp, Homo sapien
tgccagtctctctctaggtggtagt

SEQ ID NO: 2802393 - DNA, 25 bp, Homo sapien
catggcccagtagttggcccctgaa

SEQ ID NO: 2802394 - DNA, 25 bp, Homo sapien
tggcccagtagttggcccctgaatt

SEQ ID NO: 2802395 - DNA, 25 bp, Homo sapien
gattctgtactggttttggttgtca

SEQ ID NO: 2802396 - DNA, 25 bp, Homo sapien
gatttaacatccgattttataggta

SEQ ID NO: 2802397 - DNA, 25 bp, Homo sapien
aactgatttaacatccgattttata

SEQ ID NO: 2802398 - DNA, 25 bp, Homo sapien
agtagtaatgttaactgaccagatt

SEQ ID NO: 2802399 - DNA, 25 bp, Homo sapien
agtgcttctttactacacacaatag

SEQ ID NO: 2802400 - DNA, 25 bp, Homo sapien
ggtagaagatctgtctgaagttaag

SEQ ID NO: 2802401 - DNA, 25 bp, Homo sapien
ctaaaggtacctaatcaaattgtag

SEQ ID NO: 2802402 - DNA, 25 bp, Homo sapien
tgtcaattttgtatgcctgttattt

SEQ ID NO: 2802403 - DNA, 25 bp, Homo sapien
ctgaagcacaagaagtgtcctccca

SEQ ID NO: 2802404 - DNA, 25 bp, Homo sapien
gaagcacaagaagtgtcctcccaca

SEQ ID NO: 2802405 - DNA, 25 bp, Homo sapien
agcacaagaagtgtcctcccacatt

SEQ ID NO: 2802406 - DNA, 25 bp, Homo sapien
tgaagcacaagaagtgtcctcccac

SEQ ID NO: 2802407 - DNA, 25 bp, Homo sapien
gagctggccacatagatcagcagag

SEQ ID NO: 2802408 - DNA, 25 bp, Homo sapien
ttggatcaggctgggatttcactgg

SEQ ID NO: 2802409 - DNA, 25 bp, Homo sapien
ttcaagggctgaatacaagtagtag

SEQ ID NO: 2802410 - DNA, 25 bp, Homo sapien
gccaaatttgttagcagagctggcc

SEQ ID NO: 2802411 - DNA, 25 bp, Homo sapien
cagatacagtcattagagctactag

SEQ ID NO: 2802412 - DNA, 25 bp, Homo sapien
aacatctatgccaaagtttttatca

SEQ ID NO: 2802413 - DNA, 25 bp, Homo sapien
ccttccttgtgagtaagtgagacca

SEQ ID NO: 2802414 - DNA, 25 bp, Homo sapien
gaacaagttagaacatctatgccaa

SEQ ID NO: 2802415 - DNA, 25 bp, Homo sapien
ttcttgtactgtcagatttcgtcat

SEQ ID NO: 2802416 - DNA, 25 bp, Homo sapien
cctttaaggcacaaataaattgatc

SEQ ID NO: 2802417 - DNA, 25 bp, Homo sapien
gatctccaatggcaaattctctgtc

SEQ ID NO: 2802418 - DNA, 25 bp, Homo sapien
gaaaggcctttcttgtactgtcaga

SEQ ID NO: 2802419 - DNA, 25 bp, Homo sapien
ttgcctgctatttacatctgtcaca

SEQ ID NO: 2802420 - DNA, 25 bp, Homo sapien
cacattttgaggtgctaacttttca

SEQ ID NO: 2802421 - DNA, 25 bp, Homo sapien
gcactgactctgaagcgtggagtcc

SEQ ID NO: 2802422 - DNA, 25 bp, Homo sapien
gaggtgctaacttttcaatgggcac

SEQ ID NO: 2802423 - DNA, 25 bp, Homo sapien
ctgtccagaggacggggcatccatt

SEQ ID NO: 2802424 - DNA, 25 bp, Homo sapien
gcttcactgtccagaggacggggca

SEQ ID NO: 2802425 - DNA, 25 bp, Homo sapien
aggtggccacatacggtcaggtttt

SEQ ID NO: 2802426 - DNA, 25 bp, Homo sapien
tggagtggggatgtgattctagaat

SEQ ID NO: 2802427 - DNA, 25 bp, Homo sapien
tggcaaggactgttgggccaatcac

SEQ ID NO: 2802428 - DNA, 25 bp, Homo sapien
aaggactgttgggccaatcaccagc

SEQ ID NO: 2802429 - DNA, 25 bp, Homo sapien
gcaaggactgttgggccaatcacca

SEQ ID NO: 2802430 - DNA, 25 bp, Homo sapien
ggactgttgggccaatcaccagcaa

SEQ ID NO: 2802431 - DNA, 25 bp, Homo sapien
cagaatatgagaatagtagaacctt

SEQ ID NO: 2802432 - DNA, 25 bp, Homo sapien
tgaccatgggtcgacagaatatgag

SEQ ID NO: 2802433 - DNA, 25 bp, Homo sapien
ctttggaaataaccagcagtcggcc

SEQ ID NO: 2802434 - DNA, 25 bp, Homo sapien
tgtatttagggcttagaatagtccg

SEQ ID NO: 2802435 - DNA, 25 bp, Homo sapien
tccttgccgatttccacaatggcag

SEQ ID NO: 2802436 - DNA, 25 bp, Homo sapien
tgtctctgtgcctaccgggtgatgg

SEQ ID NO: 2802437 - DNA, 25 bp, Homo sapien
tggcaggtacattaaggagtgtctc

SEQ ID NO: 2802438 - DNA, 25 bp, Homo sapien
atggatggctctctggcggtctctg

SEQ ID NO: 2802439 - DNA, 25 bp, Homo sapien
accagtggatcaccgagcaccgtga

SEQ ID NO: 2802440 - DNA, 25 bp, Homo sapien
tggatcaccgagcaccgtgacagca

SEQ ID NO: 2802441 - DNA, 25 bp, Homo sapien
gaggacatcattcaccagtggatca

SEQ ID NO: 2802442 - DNA, 25 bp, Homo sapien
aggtgaggacatcattcaccagtgg

SEQ ID NO: 2802443 - DNA, 25 bp, Homo sapien
cgacactagcatccctactcctctc

SEQ ID NO: 2802444 - DNA, 25 bp, Homo sapien
ctgctccttcagcgacactagcatc

SEQ ID NO: 2802445 - DNA, 25 bp, Homo sapien
tgctccttcagcgacactagcatcc

SEQ ID NO: 2802446 - DNA, 25 bp, Homo sapien
agaccccaatcagtgctcccttcat

SEQ ID NO: 2802447 - DNA, 25 bp, Homo sapien
caggtctacccaattcccaccctgg

SEQ ID NO: 2802448 - DNA, 25 bp, Homo sapien
agtgccaagcgctctctgatctggg

SEQ ID NO: 2802449 - DNA, 25 bp, Homo sapien
tcacacccttagctgactgttgctt

SEQ ID NO: 2802450 - DNA, 25 bp, Homo sapien
tggtacttctgtggctagatctgac

SEQ ID NO: 2802451 - DNA, 25 bp, Homo sapien
ggtgctcatcgcacacatctgagag

SEQ ID NO: 2802452 - DNA, 25 bp, Homo sapien
cacactgtgactagattagagaaca

SEQ ID NO: 2802453 - DNA, 25 bp, Homo sapien
caagcttcaggtcagctggaaagca

SEQ ID NO: 2802454 - DNA, 25 bp, Homo sapien
cattgggttcgaagtcatgagttga

SEQ ID NO: 2802455 - DNA, 25 bp, Homo sapien
ttgtagagatagtgtagcaggatga

SEQ ID NO: 2802456 - DNA, 25 bp, Homo sapien
atcctctgaccctctcaagtacctg

SEQ ID NO: 2802457 - DNA, 25 bp, Homo sapien
gaatctatggataacattgggttcg

SEQ ID NO: 2802458 - DNA, 25 bp, Homo sapien
ttactttgcacctgacctatgtttg

SEQ ID NO: 2802459 - DNA, 25 bp, Homo sapien
ggtgggcttactttgcacctgacct

SEQ ID NO: 2802460 - DNA, 25 bp, Homo sapien
gcttactttgcacctgacctatgtt

SEQ ID NO: 2802461 - DNA, 25 bp, Homo sapien
gggcttactttgcacctgacctatg

SEQ ID NO: 2802462 - DNA, 25 bp, Homo sapien
ccaaaatcacgaaattcaaaatccg

SEQ ID NO: 2802463 - DNA, 25 bp, Homo sapien
attatttatgggtcaatctggcagc

SEQ ID NO: 2802464 - DNA, 25 bp, Homo sapien
gataaatccgttggccatacttctg

SEQ ID NO: 2802465 - DNA, 25 bp, Homo sapien
gaaggcactaagatcaggctcagca

SEQ ID NO: 2802466 - DNA, 25 bp, Homo sapien
tctgaggcgccggagattatttatg

SEQ ID NO: 2802467 - DNA, 25 bp, Homo sapien
gtgtcttgacgtatcagagaaggca

SEQ ID NO: 2802468 - DNA, 25 bp, Homo sapien
agaaggcaggtaaccaggccacatc

SEQ ID NO: 2802469 - DNA, 25 bp, Homo sapien
gtgaaaagggcgtcctgggtgcagc

SEQ ID NO: 2802470 - DNA, 25 bp, Homo sapien
cagctgcaagccattgttgaaggtg

SEQ ID NO: 2802471 - DNA, 25 bp, Homo sapien
tgggcgcccgcgctgtcccactccc

SEQ ID NO: 2802472 - DNA, 25 bp, Homo sapien
ctgggcgcccgcgctgtcccactcc

SEQ ID NO: 2802473 - DNA, 25 bp, Homo sapien
gcccgcgctgtcccactcccttcct

SEQ ID NO: 2802474 - DNA, 25 bp, Homo sapien
ggcgcccgcgctgtcccactccctt

SEQ ID NO: 2802475 - DNA, 25 bp, Homo sapien
gccccaccgcccggggagagctgcc

SEQ ID NO: 2802476 - DNA, 25 bp, Homo sapien
cgcctcgcggtcacaagggccccac

SEQ ID NO: 2802477 - DNA, 25 bp, Homo sapien
agctgcccaccccgcgcctgacgcc

SEQ ID NO: 2802478 - DNA, 25 bp, Homo sapien
tcgcggtcacaagggccccaccgcc

SEQ ID NO: 2802479 - DNA, 25 bp, Homo sapien
tcctgaggctggatatggaacccaa

SEQ ID NO: 2802480 - DNA, 25 bp, Homo sapien
caaaggattgggtcagttaaggctc

SEQ ID NO: 2802481 - DNA, 25 bp, Homo sapien
ccttgcggagggagagactagcatc

SEQ ID NO: 2802482 - DNA, 25 bp, Homo sapien
aaagcatctgttgagcccctgggaa

SEQ ID NO: 2802483 - DNA, 25 bp, Homo sapien
gctttgatcaaagggctaattaacc

SEQ ID NO: 2802484 - DNA, 25 bp, Homo sapien
caatgtaaagctaggctttgatcaa

SEQ ID NO: 2802485 - DNA, 25 bp, Homo sapien
ctaaacaatgtaaagctaggctttg

SEQ ID NO: 2802486 - DNA, 25 bp, Homo sapien
gatcaaagggctaattaacccatac

SEQ ID NO: 2802487 - DNA, 25 bp, Homo sapien
tgttaacaggagtttcttacatcag

SEQ ID NO: 2802488 - DNA, 25 bp, Homo sapien
ctatttatcatcttgggcccctgta

SEQ ID NO: 2802489 - DNA, 25 bp, Homo sapien
taccttatctcccttgcctggcata

SEQ ID NO: 2802490 - DNA, 25 bp, Homo sapien
tttggtaactgaagtgttgcacccg

SEQ ID NO: 2802491 - DNA, 25 bp, Homo sapien
tgtgcatttccaagggtacctaaga

SEQ ID NO: 2802492 - DNA, 25 bp, Homo sapien
gggaaactgtgccaggttacaaatg

SEQ ID NO: 2802493 - DNA, 25 bp, Homo sapien
tagagaatcctgaaacaaccctgtc

SEQ ID NO: 2802494 - DNA, 25 bp, Homo sapien
catgatcttcgtggtgagaacaggg

SEQ ID NO: 2802495 - DNA, 25 bp, Homo sapien
tcctaaaattggtacaggtcctgcg

SEQ ID NO: 2802496 - DNA, 25 bp, Homo sapien
tattactacagtgttttcaccatta

SEQ ID NO: 2802497 - DNA, 25 bp, Homo sapien
actacagtgttttcaccattaatat

SEQ ID NO: 2802498 - DNA, 25 bp, Homo sapien
atttattactacagtgttttcacca

SEQ ID NO: 2802499 - DNA, 25 bp, Homo sapien
ttactacagtgttttcaccattaat

SEQ ID NO: 2802500 - DNA, 25 bp, Homo sapien
cttcttgcctttgtatagggccaaa

SEQ ID NO: 2802501 - DNA, 25 bp, Homo sapien
aagagaaacattggctactttgaca

SEQ ID NO: 2802502 - DNA, 25 bp, Homo sapien
tagggccaaaagagaaacattggct

SEQ ID NO: 2802503 - DNA, 25 bp, Homo sapien
gggccaaaagagaaacattggctac

SEQ ID NO: 2802504 - DNA, 25 bp, Homo sapien
tccagcaaccagaacttcatcattt

SEQ ID NO: 2802505 - DNA, 25 bp, Homo sapien
cagcaaccagaacttcatcattttc

SEQ ID NO: 2802506 - DNA, 25 bp, Homo sapien
ccagcaaccagaacttcatcatttt

SEQ ID NO: 2802507 - DNA, 25 bp, Homo sapien
tctggtgttggtggcgatcacaaaa

SEQ ID NO: 2802508 - DNA, 25 bp, Homo sapien
gttggtggcgatcacaaaaatactt

SEQ ID NO: 2802509 - DNA, 25 bp, Homo sapien
ggtgttggtggcgatcacaaaaata

SEQ ID NO: 2802510 - DNA, 25 bp, Homo sapien
atttctggtgttggtggcgatcaca

SEQ ID NO: 2802511 - DNA, 25 bp, Homo sapien
gataaaaatgtgagggaggccaccc

SEQ ID NO: 2802512 - DNA, 25 bp, Homo sapien
accccaagaacagaaggtacgatag

SEQ ID NO: 2802513 - DNA, 25 bp, Homo sapien
cagaaggtacgatagagttgaaata

SEQ ID NO: 2802514 - DNA, 25 bp, Homo sapien
ccaagaacagaaggtacgatagagt

SEQ ID NO: 2802515 - DNA, 25 bp, Homo sapien
caagcaaccgtcattgggtacaaag

SEQ ID NO: 2802516 - DNA, 25 bp, Homo sapien
taaagttcaagcaaccgtcattggg

SEQ ID NO: 2802517 - DNA, 25 bp, Homo sapien
cccttacacacttcctaatggcaga

SEQ ID NO: 2802518 - DNA, 25 bp, Homo sapien
cttgatcagctggacccttacacac

SEQ ID NO: 2802519 - DNA, 25 bp, Homo sapien
gggagtcttgcgctactgcacacca

SEQ ID NO: 2802520 - DNA, 25 bp, Homo sapien
gcagggagtcttgcgctactgcaca

SEQ ID NO: 2802521 - DNA, 25 bp, Homo sapien
aggttgcagggagtcttgcgctact

SEQ ID NO: 2802522 - DNA, 25 bp, Homo sapien
gttgcagggagtcttgcgctactgc

SEQ ID NO: 2802523 - DNA, 25 bp, Homo sapien
caagaattcgtaagttcatgtctcg

SEQ ID NO: 2802524 - DNA, 25 bp, Homo sapien
caatagctgacacgtgccatttact

SEQ ID NO: 2802525 - DNA, 25 bp, Homo sapien
aactaaaacttgacgggagcaatgg

SEQ ID NO: 2802526 - DNA, 25 bp, Homo sapien
tataacaactcccacagtaaaggtg

SEQ ID NO: 2802527 - DNA, 25 bp, Homo sapien
tgagaagcacctccaaaagggttgg

SEQ ID NO: 2802528 - DNA, 25 bp, Homo sapien
gagctttcttatactgtttatcatg

SEQ ID NO: 2802529 - DNA, 25 bp, Homo sapien
gcacgattccttttgcatgagaagc

SEQ ID NO: 2802530 - DNA, 25 bp, Homo sapien
gcctttagggctgtgcccaaatgag

SEQ ID NO: 2802531 - DNA, 25 bp, Homo sapien
tggtctcgtcggtgactacggagct

SEQ ID NO: 2802532 - DNA, 25 bp, Homo sapien
cttctggtctcgtcggtgactacgg

SEQ ID NO: 2802533 - DNA, 25 bp, Homo sapien
ttctggtctcgtcggtgactacgga

SEQ ID NO: 2802534 - DNA, 25 bp, Homo sapien
ctggtctcgtcggtgactacggagc

SEQ ID NO: 2802535 - DNA, 25 bp, Homo sapien
agcagtacgaagtccacgacacttg

SEQ ID NO: 2802536 - DNA, 25 bp, Homo sapien
gcagtacgaagtccacgacacttgc

SEQ ID NO: 2802537 - DNA, 25 bp, Homo sapien
tagcagtacgaagtccacgacactt

SEQ ID NO: 2802538 - DNA, 25 bp, Homo sapien
ctagcagtacgaagtccacgacact

SEQ ID NO: 2802539 - DNA, 25 bp, Homo sapien
ttcttccgtaaaaacacgccatcta

SEQ ID NO: 2802540 - DNA, 25 bp, Homo sapien
acgccatctacgtgtttcccatctt

SEQ ID NO: 2802541 - DNA, 25 bp, Homo sapien
tacgtgtttcccatcttctaagaca

SEQ ID NO: 2802542 - DNA, 25 bp, Homo sapien
tccgtaaaaacacgccatctacgtg

SEQ ID NO: 2802543 - DNA, 25 bp, Homo sapien
cccttaagccgattggctctcgtac

SEQ ID NO: 2802544 - DNA, 25 bp, Homo sapien
aacccttaagccgattggctctcgt

SEQ ID NO: 2802545 - DNA, 25 bp, Homo sapien
ataaacccttaagccgattggctct

SEQ ID NO: 2802546 - DNA, 25 bp, Homo sapien
aaacccttaagccgattggctctcg

SEQ ID NO: 2802547 - DNA, 25 bp, Homo sapien
caagttgccctgaaccgactaataa

SEQ ID NO: 2802548 - DNA, 25 bp, Homo sapien
acgttcgaagagggctccggagaat

SEQ ID NO: 2802549 - DNA, 25 bp, Homo sapien
agggctccggagaatgtgttctccc

SEQ ID NO: 2802550 - DNA, 25 bp, Homo sapien
ccccgctcgaatgcccgggaggaag

SEQ ID NO: 2802551 - DNA, 25 bp, Homo sapien
ccacgggcctgagcgaaagagagaa

SEQ ID NO: 2802552 - DNA, 25 bp, Homo sapien
cgccacgggcctgagcgaaagagag

SEQ ID NO: 2802553 - DNA, 25 bp, Homo sapien
ggcgccacgggcctgagcgaaagag

SEQ ID NO: 2802554 - DNA, 25 bp, Homo sapien
gccacgggcctgagcgaaagagaga

SEQ ID NO: 2802555 - DNA, 25 bp, Homo sapien
gaatctgcgtcttatttaatttgca

SEQ ID NO: 2802556 - DNA, 25 bp, Homo sapien
ctctcctttgaaaacgacgcgtttg

SEQ ID NO: 2802557 - DNA, 25 bp, Homo sapien
gagccagaatctgcgtcttatttaa

SEQ ID NO: 2802558 - DNA, 25 bp, Homo sapien
gacgcgtttgcatcactttcctgag

SEQ ID NO: 2802559 - DNA, 25 bp, Homo sapien
ttggaccatatatttgccaggaaga

SEQ ID NO: 2802560 - DNA, 25 bp, Homo sapien
gccaggaagaatgtaaggtgagtaa

SEQ ID NO: 2802561 - DNA, 25 bp, Homo sapien
gaatgtaaggtgagtaactgcacat

SEQ ID NO: 2802562 - DNA, 25 bp, Homo sapien
cttggaccatatatttgccaggaag

SEQ ID NO: 2802563 - DNA, 25 bp, Homo sapien
tacgtgttgtgagtattttctcctg

SEQ ID NO: 2802564 - DNA, 25 bp, Homo sapien
gctcgagtcttctgacaatttttat

SEQ ID NO: 2802565 - DNA, 25 bp, Homo sapien
ttctttaaaacatgctcgagtcttc

SEQ ID NO: 2802566 - DNA, 25 bp, Homo sapien
ctcctgttgcgtggcttgcctttct

SEQ ID NO: 2802567 - DNA, 25 bp, Homo sapien
tgctctatgggacacttctgctctg

SEQ ID NO: 2802568 - DNA, 25 bp, Homo sapien
caaggtgaccaaacacacatgtctg

SEQ ID NO: 2802569 - DNA, 25 bp, Homo sapien
tctgggaacgactctaaaccatgtc

SEQ ID NO: 2802570 - DNA, 25 bp, Homo sapien
caggattgtgctagggcagtctttc

SEQ ID NO: 2802571 - DNA, 25 bp, Homo sapien
ccttcttcttagagtggtatttttg

SEQ ID NO: 2802572 - DNA, 25 bp, Homo sapien
cagctgcgtccctcttcttgttgag

SEQ ID NO: 2802573 - DNA, 25 bp, Homo sapien
attctgagactgaacctgattttcc

SEQ ID NO: 2802574 - DNA, 25 bp, Homo sapien
gggtgctactttctctgccttggtg

SEQ ID NO: 2802575 - DNA, 25 bp, Homo sapien
gacccagctaggtcttcttgaatga

SEQ ID NO: 2802576 - DNA, 25 bp, Homo sapien
tatctcatggatctcaaggtctgga

SEQ ID NO: 2802577 - DNA, 25 bp, Homo sapien
acagtctggaatgaagggtgctact

SEQ ID NO: 2802578 - DNA, 25 bp, Homo sapien
cagtgattggcaaggtcaataaaaa

SEQ ID NO: 2802579 - DNA, 25 bp, Homo sapien
attggcaaggtcaataaaaatgccc

SEQ ID NO: 2802580 - DNA, 25 bp, Homo sapien
actgtggtcagtcaggtgtgcctga

SEQ ID NO: 2802581 - DNA, 25 bp, Homo sapien
cccactgtggtcagtcaggtgtgcc

SEQ ID NO: 2802582 - DNA, 25 bp, Homo sapien
tttcttcatgtctactgttggcaga

SEQ ID NO: 2802583 - DNA, 25 bp, Homo sapien
gaatgcgggtaagcagtaaattcct

SEQ ID NO: 2802584 - DNA, 25 bp, Homo sapien
aaatgaatgcgggtaagcagtaaat

SEQ ID NO: 2802585 - DNA, 25 bp, Homo sapien
ggccaatcagcttctgtgccttcca

SEQ ID NO: 2802586 - DNA, 25 bp, Homo sapien
ttgctgtctagtggccaatcagctt

SEQ ID NO: 2802587 - DNA, 25 bp, Homo sapien
cctgtggcatgcctgactgtctggg

SEQ ID NO: 2802588 - DNA, 25 bp, Homo sapien
gggtcaccatggctacatgtgtgct

SEQ ID NO: 2802589 - DNA, 25 bp, Homo sapien
cagatttccaaggtgttgttatcgg

SEQ ID NO: 2802590 - DNA, 25 bp, Homo sapien
tgaggagcagcaaatccaactgtgg

SEQ ID NO: 2802591 - DNA, 25 bp, Homo sapien
ctgaattggcctttcccggaagatt

SEQ ID NO: 2802592 - DNA, 25 bp, Homo sapien
catgctgagcatccgatcctgctgc

SEQ ID NO: 2802593 - DNA, 25 bp, Homo sapien
caaacatgaataaccgcaggctgaa

SEQ ID NO: 2802594 - DNA, 25 bp, Homo sapien
gaagattcgaccttggcagtttggg

SEQ ID NO: 2802595 - DNA, 25 bp, Homo sapien
gagccgtgtggtctcccattcagca

SEQ ID NO: 2802596 - DNA, 25 bp, Homo sapien
ccattcagcaacagagtacgggatg

SEQ ID NO: 2802597 - DNA, 25 bp, Homo sapien
ggagctcagtcccagactgttctgg

SEQ ID NO: 2802598 - DNA, 25 bp, Homo sapien
gctgaaatgctgaatgatgcaatga

SEQ ID NO: 2802599 - DNA, 25 bp, Homo sapien
cttccttgacttcctggccgtacat

SEQ ID NO: 2802600 - DNA, 25 bp, Homo sapien
gattcttccttgacttcctggccgt

SEQ ID NO: 2802601 - DNA, 25 bp, Homo sapien
tcttccttgacttcctggccgtaca

SEQ ID NO: 2802602 - DNA, 25 bp, Homo sapien
cacttttggattcttccttgacttc

SEQ ID NO: 2802603 - DNA, 25 bp, Homo sapien
tgtttggcctccaagacttcagcca

SEQ ID NO: 2802604 - DNA, 25 bp, Homo sapien
gggctagcaccaccaacatttggat

SEQ ID NO: 2802605 - DNA, 25 bp, Homo sapien
gtgcaatttggtcatgggtctcttc

SEQ ID NO: 2802606 - DNA, 25 bp, Homo sapien
tttgagagcggagatggataacttg

SEQ ID NO: 2802607 - DNA, 25 bp, Homo sapien
ttgtctatgatatcgaagactttca

SEQ ID NO: 2802608 - DNA, 25 bp, Homo sapien
gtctatgatatcgaagactttcaat

SEQ ID NO: 2802609 - DNA, 25 bp, Homo sapien
ctttgtctatgatatcgaagacttt

SEQ ID NO: 2802610 - DNA, 25 bp, Homo sapien
tgtctatgatatcgaagactttcaa

SEQ ID NO: 2802611 - DNA, 25 bp, Homo sapien
cattgattctgagtagaggccaaca

SEQ ID NO: 2802612 - DNA, 25 bp, Homo sapien
tggagggccccttaaattcaggatc

SEQ ID NO: 2802613 - DNA, 25 bp, Homo sapien
gacacgggtcttcgctcttttacaa

SEQ ID NO: 2802614 - DNA, 25 bp, Homo sapien
cctttggaacttctgtgacccaagt

SEQ ID NO: 2802615 - DNA, 25 bp, Homo sapien
aaggtttccgaagataatacagcaa

SEQ ID NO: 2802616 - DNA, 25 bp, Homo sapien
ataaaggtttccgaagataatacag

SEQ ID NO: 2802617 - DNA, 25 bp, Homo sapien
taaaggtttccgaagataatacagc

SEQ ID NO: 2802618 - DNA, 25 bp, Homo sapien
ggtttccgaagataatacagcaaga

SEQ ID NO: 2802619 - DNA, 25 bp, Homo sapien
acaccgggtatgtcagtgctgtcct

SEQ ID NO: 2802620 - DNA, 25 bp, Homo sapien
cacaccgggtatgtcagtgctgtcc

SEQ ID NO: 2802621 - DNA, 25 bp, Homo sapien
tcacaccgggtatgtcagtgctgtc

SEQ ID NO: 2802622 - DNA, 25 bp, Homo sapien
gtcagtgctgtcctagtatttgtgc

SEQ ID NO: 2802623 - DNA, 25 bp, Homo sapien
caggatgagagccacacccgagaga

SEQ ID NO: 2802624 - DNA, 25 bp, Homo sapien
agagccacacccgagagaaccctgt

SEQ ID NO: 2802625 - DNA, 25 bp, Homo sapien
ggatgagagccacacccgagagaac

SEQ ID NO: 2802626 - DNA, 25 bp, Homo sapien
atgagagccacacccgagagaaccc

SEQ ID NO: 2802627 - DNA, 25 bp, Homo sapien
ccaaagtatttaaggaggacaagtg

SEQ ID NO: 2802628 - DNA, 25 bp, Homo sapien
ggctttaacgccaagctaagaagct

SEQ ID NO: 2802629 - DNA, 25 bp, Homo sapien
tgataagaactgtacttttgggaac

SEQ ID NO: 2802630 - DNA, 25 bp, Homo sapien
taagcacctccagggattcatgtcc

SEQ ID NO: 2802631 - DNA, 25 bp, Homo sapien
tctttggggagctttaatcttttca

SEQ ID NO: 2802632 - DNA, 25 bp, Homo sapien
ctgacatccaggaagacggtaacca

SEQ ID NO: 2802633 - DNA, 25 bp, Homo sapien
tcttttcactgacatccaggaagac

SEQ ID NO: 2802634 - DNA, 25 bp, Homo sapien
ttttcactgacatccaggaagacgg

SEQ ID NO: 2802635 - DNA, 25 bp, Homo sapien
tctccaaagtcaatacaaattggct

SEQ ID NO: 2802636 - DNA, 25 bp, Homo sapien
caaattggctggtcgcagttcttca

SEQ ID NO: 2802637 - DNA, 25 bp, Homo sapien
gagagcttcggacccattcattagg

SEQ ID NO: 2802638 - DNA, 25 bp, Homo sapien
caggggaccactcctgggcaatgac

SEQ ID NO: 2802639 - DNA, 25 bp, Homo sapien
caggtgactcctgtgcccatgaatc

SEQ ID NO: 2802640 - DNA, 25 bp, Homo sapien
tggctctccatgggtctcctggata

SEQ ID NO: 2802641 - DNA, 25 bp, Homo sapien
ggaacatgcactaggcatggcggta

SEQ ID NO: 2802642 - DNA, 25 bp, Homo sapien
catggcggtatcataggtggcaggg

SEQ ID NO: 2802643 - DNA, 25 bp, Homo sapien
tgcatgtttcaggactgacaaaagt

SEQ ID NO: 2802644 - DNA, 25 bp, Homo sapien
tgtttcaggactgacaaaagtggga

SEQ ID NO: 2802645 - DNA, 25 bp, Homo sapien
gtgcatgtttcaggactgacaaaag

SEQ ID NO: 2802646 - DNA, 25 bp, Homo sapien
catgtttcaggactgacaaaagtgg

SEQ ID NO: 2802647 - DNA, 25 bp, Homo sapien
cccggcatccattaggcaccatgag

SEQ ID NO: 2802648 - DNA, 25 bp, Homo sapien
ggcatccattaggcaccatgagcat

SEQ ID NO: 2802649 - DNA, 25 bp, Homo sapien
tctcaaccagggcccggcatccatt

SEQ ID NO: 2802650 - DNA, 25 bp, Homo sapien
ctcaaccagggcccggcatccatta

SEQ ID NO: 2802651 - DNA, 25 bp, Homo sapien
tgttcccaaccacactgggaagagg

SEQ ID NO: 2802652 - DNA, 25 bp, Homo sapien
ctggctggatgcaaagtagggaatc

SEQ ID NO: 2802653 - DNA, 25 bp, Homo sapien
tcaggatgacagagtcccaaacttg

SEQ ID NO: 2802654 - DNA, 25 bp, Homo sapien
gaaagctcaagattgctgctcctgc

SEQ ID NO: 2802655 - DNA, 25 bp, Homo sapien
gcaaatggataatcttgctctcggg

SEQ ID NO: 2802656 - DNA, 25 bp, Homo sapien
tgcaaatggataatcttgctctcgg

SEQ ID NO: 2802657 - DNA, 25 bp, Homo sapien
ctgcaaatggataatcttgctctcg

SEQ ID NO: 2802658 - DNA, 25 bp, Homo sapien
caaatggataatcttgctctcgggt

SEQ ID NO: 2802659 - DNA, 25 bp, Homo sapien
caaagctctatacgaaaactgcctg

SEQ ID NO: 2802660 - DNA, 25 bp, Homo sapien
gaagcaaagctctatacgaaaactg

SEQ ID NO: 2802661 - DNA, 25 bp, Homo sapien
tatacgaaaactgcctgttctatct

SEQ ID NO: 2802662 - DNA, 25 bp, Homo sapien
ctgagaagcaaagctctatacgaaa

SEQ ID NO: 2802663 - DNA, 25 bp, Homo sapien
cagtggtcatgttaatggagtcatg

SEQ ID NO: 2802664 - DNA, 25 bp, Homo sapien
tcatgttaatggagtcatgggccat

SEQ ID NO: 2802665 - DNA, 25 bp, Homo sapien
tggtcatgttaatggagtcatgggc

SEQ ID NO: 2802666 - DNA, 25 bp, Homo sapien
gtcatgttaatggagtcatgggcca

SEQ ID NO: 2802667 - DNA, 25 bp, Homo sapien
ctcagttggtcagctgcaggtgtca

SEQ ID NO: 2802668 - DNA, 25 bp, Homo sapien
cctcagttggtcagctgcaggtgtc

SEQ ID NO: 2802669 - DNA, 25 bp, Homo sapien
tcagttggtcagctgcaggtgtcat

SEQ ID NO: 2802670 - DNA, 25 bp, Homo sapien
tgcctcagttggtcagctgcaggtg

SEQ ID NO: 2802671 - DNA, 25 bp, Homo sapien
gtcaatagagcaggatgatgcctca

SEQ ID NO: 2802672 - DNA, 25 bp, Homo sapien
attttaactgcatatgtgatatgaa

SEQ ID NO: 2802673 - DNA, 25 bp, Homo sapien
gctgtgaccgattcctatcagtagg

SEQ ID NO: 2802674 - DNA, 25 bp, Homo sapien
tggaagagctcagtgccagtcacag

SEQ ID NO: 2802675 - DNA, 25 bp, Homo sapien
gggtctgtagtatacttcccagctg

SEQ ID NO: 2802676 - DNA, 25 bp, Homo sapien
ttgcaacctgagatgcaatctcagg

SEQ ID NO: 2802677 - DNA, 25 bp, Homo sapien
accttcttagctgacttccaggcag

SEQ ID NO: 2802678 - DNA, 25 bp, Homo sapien
tctcttctcagtaatagcgtgtcca

SEQ ID NO: 2802679 - DNA, 25 bp, Homo sapien
ttcttccggtcacccacatttggaa

SEQ ID NO: 2802680 - DNA, 25 bp, Homo sapien
gaaatctaagcattccccctgccat

SEQ ID NO: 2802681 - DNA, 25 bp, Homo sapien
gagagtagaatacactggcatctgc

SEQ ID NO: 2802682 - DNA, 25 bp, Homo sapien
actggcatctgcagatccttgacat

SEQ ID NO: 2802683 - DNA, 25 bp, Homo sapien
ctgttaggagagtagaatacactgg

SEQ ID NO: 2802684 - DNA, 25 bp, Homo sapien
ctgggaatggattcctaagacttcc

SEQ ID NO: 2802685 - DNA, 25 bp, Homo sapien
caggtttcggcaagcttggtgttta

SEQ ID NO: 2802686 - DNA, 25 bp, Homo sapien
accaggtttcggcaagcttggtgtt

SEQ ID NO: 2802687 - DNA, 25 bp, Homo sapien
ctccaccaggtttcggcaagcttgg

SEQ ID NO: 2802688 - DNA, 25 bp, Homo sapien
tttcggcaagcttggtgtttattct

SEQ ID NO: 2802689 - DNA, 25 bp, Homo sapien
gttgtcagcacccttgcgatgtctt

SEQ ID NO: 2802690 - DNA, 25 bp, Homo sapien
agtgggttgtcagcacccttgcgat

SEQ ID NO: 2802691 - DNA, 25 bp, Homo sapien
tttgcacatgcagggtgatcaacat

SEQ ID NO: 2802692 - DNA, 25 bp, Homo sapien
ctagtcactatatttggtttgcaca

SEQ ID NO: 2802693 - DNA, 25 bp, Homo sapien
tcttctagatctgcataatcctgaa

SEQ ID NO: 2802694 - DNA, 25 bp, Homo sapien
ataatcctgaagagtggaagctatc

SEQ ID NO: 2802695 - DNA, 25 bp, Homo sapien
taatcctgaagagtggaagctatca

SEQ ID NO: 2802696 - DNA, 25 bp, Homo sapien
cccaagccgccaattcagaaagtct

SEQ ID NO: 2802697 - DNA, 25 bp, Homo sapien
tcgcttggatgcaaggtgactttca

SEQ ID NO: 2802698 - DNA, 25 bp, Homo sapien
tgatagagttgatgaacccaagccg

SEQ ID NO: 2802699 - DNA, 25 bp, Homo sapien
tctgggatatccatagagactcctt

SEQ ID NO: 2802700 - DNA, 25 bp, Homo sapien
tttcaggagctttagaacctgtgat

SEQ ID NO: 2802701 - DNA, 25 bp, Homo sapien
gttttcaggagctttagaacctgtg

SEQ ID NO: 2802702 - DNA, 25 bp, Homo sapien
ttttcaggagctttagaacctgtga

SEQ ID NO: 2802703 - DNA, 25 bp, Homo sapien
ctggggtctcttctgttgaacagaa

SEQ ID NO: 2802704 - DNA, 25 bp, Homo sapien
tctcttctgttgaacagaaggctga

SEQ ID NO: 2802705 - DNA, 25 bp, Homo sapien
gactggggtctcttctgttgaacag

SEQ ID NO: 2802706 - DNA, 25 bp, Homo sapien
gggtctcttctgttgaacagaaggc

SEQ ID NO: 2802707 - DNA, 25 bp, Homo sapien
gcacaaagcccagctttccacacca

SEQ ID NO: 2802708 - DNA, 25 bp, Homo sapien
tttccacaccaacagttactattag

SEQ ID NO: 2802709 - DNA, 25 bp, Homo sapien
aaaagaatcactctcctcatttcca

SEQ ID NO: 2802710 - DNA, 25 bp, Homo sapien
attagctaggctctcaattacagta

SEQ ID NO: 2802711 - DNA, 25 bp, Homo sapien
cctgagtgaagcccaacttttccat

SEQ ID NO: 2802712 - DNA, 25 bp, Homo sapien
tgaggacagttctatgttgtctcag

SEQ ID NO: 2802713 - DNA, 25 bp, Homo sapien
aggacagttctatgttgtctcagca

SEQ ID NO: 2802714 - DNA, 25 bp, Homo sapien
gaggacagttctatgttgtctcagc

SEQ ID NO: 2802715 - DNA, 25 bp, Homo sapien
caaatctcaaagatggtgggtcacc

SEQ ID NO: 2802716 - DNA, 25 bp, Homo sapien
ttttggaagcatctaaaccctgact

SEQ ID NO: 2802717 - DNA, 25 bp, Homo sapien
caaagggctgaatggacttgatacc

SEQ ID NO: 2802718 - DNA, 25 bp, Homo sapien
tccactgggatccagttagggctcc

SEQ ID NO: 2802719 - DNA, 25 bp, Homo sapien
agagttttcaggtggcgctctagaa

SEQ ID NO: 2802720 - DNA, 25 bp, Homo sapien
tagaaatagtcactgtggcacaggt

SEQ ID NO: 2802721 - DNA, 25 bp, Homo sapien
caggtggcgctctagaaatagtcac

SEQ ID NO: 2802722 - DNA, 25 bp, Homo sapien
gcgctctagaaatagtcactgtggc

SEQ ID NO: 2802723 - DNA, 25 bp, Homo sapien
gttcactaggatcagcctcatcaga

SEQ ID NO: 2802724 - DNA, 25 bp, Homo sapien
ggctctggcaaactatctctgaaac

SEQ ID NO: 2802725 - DNA, 25 bp, Homo sapien
ggcaaactatctctgaaacagttgc

SEQ ID NO: 2802726 - DNA, 25 bp, Homo sapien
atgacatggctctggcaaactatct

SEQ ID NO: 2802727 - DNA, 25 bp, Homo sapien
tatctctgaaacagttgctccccac

SEQ ID NO: 2802728 - DNA, 25 bp, Homo sapien
tttgcattgttcacagaaggtggtg

SEQ ID NO: 2802729 - DNA, 25 bp, Homo sapien
ctttgcattgttcacagaaggtggt

SEQ ID NO: 2802730 - DNA, 25 bp, Homo sapien
cctgataggtgcgtagatgacagca

SEQ ID NO: 2802731 - DNA, 25 bp, Homo sapien
tggacggcactgactgcacggatga

SEQ ID NO: 2802732 - DNA, 25 bp, Homo sapien
aggtgagcggagtggctggacggca

SEQ ID NO: 2802733 - DNA, 25 bp, Homo sapien
ccaggacgatagtaggccttggagc

SEQ ID NO: 2802734 - DNA, 25 bp, Homo sapien
ctctaattgccctcagggctatgca

SEQ ID NO: 2802735 - DNA, 25 bp, Homo sapien
tctaattgccctcagggctatgcag

SEQ ID NO: 2802736 - DNA, 25 bp, Homo sapien
tctctaattgccctcagggctatgc

SEQ ID NO: 2802737 - DNA, 25 bp, Homo sapien
ttaggaaaaattgcatatttgcttc

SEQ ID NO: 2802738 - DNA, 25 bp, Homo sapien
tatcacatagcggttttaggaaaaa

SEQ ID NO: 2802739 - DNA, 25 bp, Homo sapien
catggtacaccattacatgggcccc

SEQ ID NO: 2802740 - DNA, 25 bp, Homo sapien
caaagctgatgctttcaatatcaca

SEQ ID NO: 2802741 - DNA, 25 bp, Homo sapien
tcggtcatcagctcacctcttactg

SEQ ID NO: 2802742 - DNA, 25 bp, Homo sapien
tcatcagctcacctcttactgtctg

SEQ ID NO: 2802743 - DNA, 25 bp, Homo sapien
ctcggtcatcagctcacctcttact

SEQ ID NO: 2802744 - DNA, 25 bp, Homo sapien
ggtcatcagctcacctcttactgtc

SEQ ID NO: 2802745 - DNA, 25 bp, Homo sapien
aagagtaagttaccacccttgaatg

SEQ ID NO: 2802746 - DNA, 25 bp, Homo sapien
cctttaattgtaccatgggctgtgc

SEQ ID NO: 2802747 - DNA, 25 bp, Homo sapien
ttatacgtcaggaatgtcagacacc

SEQ ID NO: 2802748 - DNA, 25 bp, Homo sapien
aaatactgcagatttggagaagagt

SEQ ID NO: 2802749 - DNA, 25 bp, Homo sapien
taagacagagcctcctttgtttaaa

SEQ ID NO: 2802750 - DNA, 25 bp, Homo sapien
gtaagaaaccaggtaccacagcagc

SEQ ID NO: 2802751 - DNA, 25 bp, Homo sapien
tctgttctgaacttgcaattaaatc

SEQ ID NO: 2802752 - DNA, 25 bp, Homo sapien
ctaaggtaagacagagcctcctttg

SEQ ID NO: 2802753 - DNA, 25 bp, Homo sapien
tgccttccaggagactgctaaaccg

SEQ ID NO: 2802754 - DNA, 25 bp, Homo sapien
ctgccttccaggagactgctaaacc

SEQ ID NO: 2802755 - DNA, 25 bp, Homo sapien
cttccaggagactgctaaaccgcat

SEQ ID NO: 2802756 - DNA, 25 bp, Homo sapien
ccttccaggagactgctaaaccgca

SEQ ID NO: 2802757 - DNA, 25 bp, Homo sapien
atctcccgcgaactcacagtttcta

SEQ ID NO: 2802758 - DNA, 25 bp, Homo sapien
aagctgctggaaaatctcccgcgaa

SEQ ID NO: 2802759 - DNA, 25 bp, Homo sapien
ccctggcagaagtttctacactgga

SEQ ID NO: 2802760 - DNA, 25 bp, Homo sapien
tgagttccctggcagaagtttctac

SEQ ID NO: 2802761 - DNA, 25 bp, Homo sapien
taagccccgcaagggacaaatccaa

SEQ ID NO: 2802762 - DNA, 25 bp, Homo sapien
gtccaccatgaaagccaactcattt

SEQ ID NO: 2802763 - DNA, 25 bp, Homo sapien
cctgcccgggcacatgtagattctt

SEQ ID NO: 2802764 - DNA, 25 bp, Homo sapien
tcagacaaggtccatatctgtggca

SEQ ID NO: 2802765 - DNA, 25 bp, Homo sapien
ctgagtgggcaagtgtgtctgtgcc

SEQ ID NO: 2802766 - DNA, 25 bp, Homo sapien
gatggaccgggagtacttccttgcc

SEQ ID NO: 2802767 - DNA, 25 bp, Homo sapien
tgcctacgaaggagtttctctacag

SEQ ID NO: 2802768 - DNA, 25 bp, Homo sapien
tgtccgcagagcagctgatttgcct

SEQ ID NO: 2802769 - DNA, 25 bp, Homo sapien
agcaagttcactggcacctgtccca

SEQ ID NO: 2802770 - DNA, 25 bp, Homo sapien
acctgtcccacatagaataggttga

SEQ ID NO: 2802771 - DNA, 25 bp, Homo sapien
gttcactggcacctgtcccacatag

SEQ ID NO: 2802772 - DNA, 25 bp, Homo sapien
tcttctcagggatgttaggtttcat

SEQ ID NO: 2802773 - DNA, 25 bp, Homo sapien
tgaaagatgatagtgttaccaacag

SEQ ID NO: 2802774 - DNA, 25 bp, Homo sapien
tgttaccaacagaggagtcatttga

SEQ ID NO: 2802775 - DNA, 25 bp, Homo sapien
gctcatgaattctcaaagtgtgaag

SEQ ID NO: 2802776 - DNA, 25 bp, Homo sapien
aagtgcttatgctcatgaattctca

SEQ ID NO: 2802777 - DNA, 25 bp, Homo sapien
aatgtcagtttcatccaaagtctgg

SEQ ID NO: 2802778 - DNA, 25 bp, Homo sapien
gaccgtcgatgtccaatatagtggc

SEQ ID NO: 2802779 - DNA, 25 bp, Homo sapien
tagtggccattagccatactgagcc

SEQ ID NO: 2802780 - DNA, 25 bp, Homo sapien
tgtcagcctagttgggccatcatag

SEQ ID NO: 2802781 - DNA, 25 bp, Homo sapien
caacgaagaacaaggatttggtaga

SEQ ID NO: 2802782 - DNA, 25 bp, Homo sapien
gtaggtaacctctgtctgtttcaca

SEQ ID NO: 2802783 - DNA, 25 bp, Homo sapien
agagttggtagaataatcgggaagc

SEQ ID NO: 2802784 - DNA, 25 bp, Homo sapien
cacagctaattgtgcaacgaagaac

SEQ ID NO: 2802785 - DNA, 25 bp, Homo sapien
ctgggcaccaccccagataaaggac

SEQ ID NO: 2802786 - DNA, 25 bp, Homo sapien
gggcaccaccccagataaaggacat

SEQ ID NO: 2802787 - DNA, 25 bp, Homo sapien
taaaggacatgtagggtggagtcct

SEQ ID NO: 2802788 - DNA, 25 bp, Homo sapien
ctggcttttgggaactgctggtctg

SEQ ID NO: 2802789 - DNA, 25 bp, Homo sapien
tcgctgaactaagtaatttaaagta

SEQ ID NO: 2802790 - DNA, 25 bp, Homo sapien
caatagttgggcctccgtttcttga

SEQ ID NO: 2802791 - DNA, 25 bp, Homo sapien
tggttttatatttccggactgcaaa

SEQ ID NO: 2802792 - DNA, 25 bp, Homo sapien
tatttccggactgcaaacaaatgat

SEQ ID NO: 2802793 - DNA, 25 bp, Homo sapien
agttgggcctccgtttcttgaatgg

SEQ ID NO: 2802794 - DNA, 25 bp, Homo sapien
cctgtgtttcctaagtcataccagc

SEQ ID NO: 2802795 - DNA, 25 bp, Homo sapien
gctggtatggtacctgtttcctgtg

SEQ ID NO: 2802796 - DNA, 25 bp, Homo sapien
cagtgagtgacttcagccagaaagg

SEQ ID NO: 2802797 - DNA, 25 bp, Homo sapien
ttcctgtgtttcctaagtcatacca

SEQ ID NO: 2802798 - DNA, 25 bp, Homo sapien
atgtttttcaaggtccaccctcttg

SEQ ID NO: 2802799 - DNA, 25 bp, Homo sapien
cattccaggctgagactactcctac

SEQ ID NO: 2802800 - DNA, 25 bp, Homo sapien
tcctatgtgtggtgagaagtaagcc

SEQ ID NO: 2802801 - DNA, 25 bp, Homo sapien
ccctggctgcagttgatgccaacag

SEQ ID NO: 2802802 - DNA, 25 bp, Homo sapien
gaatccttgcaatgaataccctggc

SEQ ID NO: 2802803 - DNA, 25 bp, Homo sapien
agagcgctgacatccagccacagct

SEQ ID NO: 2802804 - DNA, 25 bp, Homo sapien
tatgtccaatgtcgagagcgctgac

SEQ ID NO: 2802805 - DNA, 25 bp, Homo sapien
taaatatcaagggtaactatgtcca

SEQ ID NO: 2802806 - DNA, 25 bp, Homo sapien
caagggtaactatgtccaatgtcga

SEQ ID NO: 2802807 - DNA, 25 bp, Homo sapien
tcttgctttactttctctggcattc

SEQ ID NO: 2802808 - DNA, 25 bp, Homo sapien
ttgctttactttctctggcattcat

SEQ ID NO: 2802809 - DNA, 25 bp, Homo sapien
ctttcttgctttactttctctggca

SEQ ID NO: 2802810 - DNA, 25 bp, Homo sapien
tttcttgctttactttctctggcat

SEQ ID NO: 2802811 - DNA, 25 bp, Homo sapien
ccttagagtgttcgcttaataccat

SEQ ID NO: 2802812 - DNA, 25 bp, Homo sapien
tatttgctgtagaagtacatccctg

SEQ ID NO: 2802813 - DNA, 25 bp, Homo sapien
tgacactacacagagggcatttgct

SEQ ID NO: 2802814 - DNA, 25 bp, Homo sapien
taataccatgagtagagacctttct

SEQ ID NO: 2802815 - DNA, 25 bp, Homo sapien
atggccagacgccaagtgaaatttc

SEQ ID NO: 2802816 - DNA, 25 bp, Homo sapien
tgaaaagcctaatgtgattgaactc

SEQ ID NO: 2802817 - DNA, 25 bp, Homo sapien
tgattgaactctaaataaccatggc

SEQ ID NO: 2802818 - DNA, 25 bp, Homo sapien
gccagacgccaagtgaaatttcccc

SEQ ID NO: 2802819 - DNA, 25 bp, Homo sapien
cttccaatatggctcatctgtgtgg

SEQ ID NO: 2802820 - DNA, 25 bp, Homo sapien
agtcactgggtccatgaaggctctt

SEQ ID NO: 2802821 - DNA, 25 bp, Homo sapien
catctgtgtggttcttccatagccc

SEQ ID NO: 2802822 - DNA, 25 bp, Homo sapien
tccatagccctgcacttttgtttct

SEQ ID NO: 2802823 - DNA, 25 bp, Homo sapien
aggatctacacccattgctgccagc

SEQ ID NO: 2802824 - DNA, 25 bp, Homo sapien
acacaggatctacacccattgctgc

SEQ ID NO: 2802825 - DNA, 25 bp, Homo sapien
acaggatctacacccattgctgcca

SEQ ID NO: 2802826 - DNA, 25 bp, Homo sapien
tcacacaggatctacacccattgct

SEQ ID NO: 2802827 - DNA, 25 bp, Homo sapien
ccatgggatcctctcgtgagtctct

SEQ ID NO: 2802828 - DNA, 25 bp, Homo sapien
tgtggcttttgtctggtcttgttgc

SEQ ID NO: 2802829 - DNA, 25 bp, Homo sapien
atatgtggcttttgtctggtcttgt

SEQ ID NO: 2802830 - DNA, 25 bp, Homo sapien
tgctgccatgggatcctctcgtgag

SEQ ID NO: 2802831 - DNA, 25 bp, Homo sapien
agaggccacatttgtggcttgtcaa

SEQ ID NO: 2802832 - DNA, 25 bp, Homo sapien
gccattatctaatctgtgtggaaac

SEQ ID NO: 2802833 - DNA, 25 bp, Homo sapien
cacatttgtggcttgtcaacatttt

SEQ ID NO: 2802834 - DNA, 25 bp, Homo sapien
aggccacatttgtggcttgtcaaca

SEQ ID NO: 2802835 - DNA, 25 bp, Homo sapien
taagtgaaatagctagggctcaaca

SEQ ID NO: 2802836 - DNA, 25 bp, Homo sapien
tatagggttactttgagagaggcac

SEQ ID NO: 2802837 - DNA, 25 bp, Homo sapien
caaactctagagtctgtgttcctaa

SEQ ID NO: 2802838 - DNA, 25 bp, Homo sapien
gagaggcactcttctacgggcttta

SEQ ID NO: 2802839 - DNA, 25 bp, Homo sapien
tgcctcatttgccaacttcatttgg

SEQ ID NO: 2802840 - DNA, 25 bp, Homo sapien
agacctccggataatcccgtttgct

SEQ ID NO: 2802841 - DNA, 25 bp, Homo sapien
tttgctcgacttcccatgtctgcct

SEQ ID NO: 2802842 - DNA, 25 bp, Homo sapien
gagattccacttgctggtgtaggga

SEQ ID NO: 2802843 - DNA, 25 bp, Homo sapien
tgtggatggctcctaacatagctct

SEQ ID NO: 2802844 - DNA, 25 bp, Homo sapien
tgagcttccatgaccggcagatgga

SEQ ID NO: 2802845 - DNA, 25 bp, Homo sapien
tccattcctataagtgcccagtagt

SEQ ID NO: 2802846 - DNA, 25 bp, Homo sapien
gcacaaaacgaaaaggctccctcag

SEQ ID NO: 2802847 - DNA, 25 bp, Homo sapien
ttcaatatctatagaggacctccga

SEQ ID NO: 2802848 - DNA, 25 bp, Homo sapien
tatgtactggatgaccagggctgag

SEQ ID NO: 2802849 - DNA, 25 bp, Homo sapien
ccgatgtgttatgtactggatgacc

SEQ ID NO: 2802850 - DNA, 25 bp, Homo sapien
agaggacctccgatgtgttatgtac

SEQ ID NO: 2802851 - DNA, 25 bp, Homo sapien
tctcgggatcgcctccattcagtgt

SEQ ID NO: 2802852 - DNA, 25 bp, Homo sapien
tctgtcagaggattagcccccgctg

SEQ ID NO: 2802853 - DNA, 25 bp, Homo sapien
cattcagtgtttcgtgtgagaggtg

SEQ ID NO: 2802854 - DNA, 25 bp, Homo sapien
gctgctgctccatccatctcgggat

SEQ ID NO: 2802855 - DNA, 25 bp, Homo sapien
caccagtgcatacagttagatacag

SEQ ID NO: 2802856 - DNA, 25 bp, Homo sapien
tacagctcccaagtcagataccctg

SEQ ID NO: 2802857 - DNA, 25 bp, Homo sapien
caaggactccggcattactacagct

SEQ ID NO: 2802858 - DNA, 25 bp, Homo sapien
cctgagccccataaacatgcatatt

SEQ ID NO: 2802859 - DNA, 25 bp, Homo sapien
tctccctgtgcctgtatatgctgcc

SEQ ID NO: 2802860 - DNA, 25 bp, Homo sapien
aattccacgctttccgcttatttct

SEQ ID NO: 2802861 - DNA, 25 bp, Homo sapien
tccctgtgcctgtatatgctgcctg

SEQ ID NO: 2802862 - DNA, 25 bp, Homo sapien
tcatgaccgggaaattccacgcttt

SEQ ID NO: 2802863 - DNA, 25 bp, Homo sapien
ctttcagagtaaccgcctttcgtgt

SEQ ID NO: 2802864 - DNA, 25 bp, Homo sapien
tttcagagtaaccgcctttcgtgtc

SEQ ID NO: 2802865 - DNA, 25 bp, Homo sapien
gctctttcagagtaaccgcctttcg

SEQ ID NO: 2802866 - DNA, 25 bp, Homo sapien
tctttcagagtaaccgcctttcgtg

SEQ ID NO: 2802867 - DNA, 25 bp, Homo sapien
ggtgacattggatagttgctgtgta

SEQ ID NO: 2802868 - DNA, 25 bp, Homo sapien
gatttttcataagggtgacattgga

SEQ ID NO: 2802869 - DNA, 25 bp, Homo sapien
ggtctgacttcgatgcacaccttca

SEQ ID NO: 2802870 - DNA, 25 bp, Homo sapien
agcaaagcactgagggcaaaccatg

SEQ ID NO: 2802871 - DNA, 25 bp, Homo sapien
ctacaatttctctgttccgtttcat

SEQ ID NO: 2802872 - DNA, 25 bp, Homo sapien
gtttcacccactggtctgactgagg

SEQ ID NO: 2802873 - DNA, 25 bp, Homo sapien
gaggttacatgctctgtctcacgta

SEQ ID NO: 2802874 - DNA, 25 bp, Homo sapien
gtctcacgtatttgtgctgatggaa

SEQ ID NO: 2802875 - DNA, 25 bp, Homo sapien
cattctgctcaatctcacctgctag

SEQ ID NO: 2802876 - DNA, 25 bp, Homo sapien
accaatttgttgctgtttccttagg

SEQ ID NO: 2802877 - DNA, 25 bp, Homo sapien
ttgttgctgtttccttaggtttctg

SEQ ID NO: 2802878 - DNA, 25 bp, Homo sapien
cacaccaatttgttgctgtttcctt

SEQ ID NO: 2802879 - DNA, 25 bp, Homo sapien
tgctgtttccttaggtttctggtcc

SEQ ID NO: 2802880 - DNA, 25 bp, Homo sapien
agagcaaatactgactgcaaaaaca

SEQ ID NO: 2802881 - DNA, 25 bp, Homo sapien
ttcagagcaaatactgactgcaaaa

SEQ ID NO: 2802882 - DNA, 25 bp, Homo sapien
aaagtctcacaagtctcctgtgatg

SEQ ID NO: 2802883 - DNA, 25 bp, Homo sapien
aagtctcacaagtctcctgtgatgc

SEQ ID NO: 2802884 - DNA, 25 bp, Homo sapien
gattaagaatctaggcatctctgct

SEQ ID NO: 2802885 - DNA, 25 bp, Homo sapien
caggttcctttcacaacatatggga

SEQ ID NO: 2802886 - DNA, 25 bp, Homo sapien
ggttcacgatatcaagttccctaat

SEQ ID NO: 2802887 - DNA, 25 bp, Homo sapien
caagtgtggaccagtctgaaattca

SEQ ID NO: 2802888 - DNA, 25 bp, Homo sapien
tgtgattgcccctgggaaaggtagc

SEQ ID NO: 2802889 - DNA, 25 bp, Homo sapien
gtttgtaatacccttgtcatcctgg

SEQ ID NO: 2802890 - DNA, 25 bp, Homo sapien
gtcatcctggttaagtcgtctctgg

SEQ ID NO: 2802891 - DNA, 25 bp, Homo sapien
tgtgattgcagtcaactgaaacccc

SEQ ID NO: 2802892 - DNA, 25 bp, Homo sapien
ctgcaataaaacggagcctgttgaa

SEQ ID NO: 2802893 - DNA, 25 bp, Homo sapien
ccccaccaggcataactcttaatat

SEQ ID NO: 2802894 - DNA, 25 bp, Homo sapien
ctaattagcatgatcttttggttgg

SEQ ID NO: 2802895 - DNA, 25 bp, Homo sapien
tgaacagtagtgtgtacaataaata

SEQ ID NO: 2802896 - DNA, 25 bp, Homo sapien
tggttgggctaagagcatgttataa

SEQ ID NO: 2802897 - DNA, 25 bp, Homo sapien
taagcatgggaatctcatcaggcct

SEQ ID NO: 2802898 - DNA, 25 bp, Homo sapien
gtaagcatgggaatctcatcaggcc

SEQ ID NO: 2802899 - DNA, 25 bp, Homo sapien
gaagctttaatgactgattccaaaa

SEQ ID NO: 2802900 - DNA, 25 bp, Homo sapien
acgaagctttaatgactgattccaa

SEQ ID NO: 2802901 - DNA, 25 bp, Homo sapien
tccatgattcgaggccttggcacat

SEQ ID NO: 2802902 - DNA, 25 bp, Homo sapien
gaagcttaggtaccatattggccac

SEQ ID NO: 2802903 - DNA, 25 bp, Homo sapien
gaaaggagcacttccaaaacctgtg

SEQ ID NO: 2802904 - DNA, 25 bp, Homo sapien
tcacaaagaagtaagctccacacag

SEQ ID NO: 2802905 - DNA, 25 bp, Homo sapien
tgagcagggaacgtcagttaatcac

SEQ ID NO: 2802906 - DNA, 25 bp, Homo sapien
gccaattaataaagtgccccttcac

SEQ ID NO: 2802907 - DNA, 25 bp, Homo sapien
agccaacatttgtggtgagcaggga

SEQ ID NO: 2802908 - DNA, 25 bp, Homo sapien
tcttctgaaagccaaacgaattcaa

SEQ ID NO: 2802909 - DNA, 25 bp, Homo sapien
cgttctccagggtttaaaagcatca

SEQ ID NO: 2802910 - DNA, 25 bp, Homo sapien
atcactaagctgttgcttgacctca

SEQ ID NO: 2802911 - DNA, 25 bp, Homo sapien
ttagtcaagtctttcagcgttctcc

SEQ ID NO: 2802912 - DNA, 25 bp, Homo sapien
caagtagagttaaatgccactttag

SEQ ID NO: 2802913 - DNA, 25 bp, Homo sapien
taggtgggctaggtgtcacccacac

SEQ ID NO: 2802914 - DNA, 25 bp, Homo sapien
tgcctaggtgggctaggtgtcaccc

SEQ ID NO: 2802915 - DNA, 25 bp, Homo sapien
gagtgcctaggtgggctaggtgtca

SEQ ID NO: 2802916 - DNA, 25 bp, Homo sapien
ggcagaaagaatctgagtgcctagg

SEQ ID NO: 2802917 - DNA, 25 bp, Homo sapien
ccaaccaaaggtgctttcacacctg

SEQ ID NO: 2802918 - DNA, 25 bp, Homo sapien
aaccaaaggtgctttcacacctgac

SEQ ID NO: 2802919 - DNA, 25 bp, Homo sapien
tgacttattttgcttggcagctgaa

SEQ ID NO: 2802920 - DNA, 25 bp, Homo sapien
gcttggcagctgaatgtaaaacatt

SEQ ID NO: 2802921 - DNA, 25 bp, Homo sapien
gctcttaggttacgtgtatgcaggg

SEQ ID NO: 2802922 - DNA, 25 bp, Homo sapien
tgttgctcttaggttacgtgtatgc

SEQ ID NO: 2802923 - DNA, 25 bp, Homo sapien
aattgttgctcttaggttacgtgta

SEQ ID NO: 2802924 - DNA, 25 bp, Homo sapien
ttaattgttgctcttaggttacgtg

SEQ ID NO: 2802925 - DNA, 25 bp, Homo sapien
tgaaactgggcaatcgtggagaaag

SEQ ID NO: 2802926 - DNA, 25 bp, Homo sapien
gagattgaactcacctgaagtccag

SEQ ID NO: 2802927 - DNA, 25 bp, Homo sapien
gccaacagaatgtccgcagatgtga

SEQ ID NO: 2802928 - DNA, 25 bp, Homo sapien
cattagtccatgagtccacagttct

SEQ ID NO: 2802929 - DNA, 25 bp, Homo sapien
tgagttgtcaagagaagtataaaca

SEQ ID NO: 2802930 - DNA, 25 bp, Homo sapien
gaagtgaatgtagatatgtttgcca

SEQ ID NO: 2802931 - DNA, 25 bp, Homo sapien
tcttcaggctttcatgagcctcaaa

SEQ ID NO: 2802932 - DNA, 25 bp, Homo sapien
tacataactgagtggtgtaataaat

SEQ ID NO: 2802933 - DNA, 25 bp, Homo sapien
tggccacatatagcttcaagaaggg

SEQ ID NO: 2802934 - DNA, 25 bp, Homo sapien
tgatagcagcatactagctcctcgt

SEQ ID NO: 2802935 - DNA, 25 bp, Homo sapien
ggtgtgatactaagactgtccaaga

SEQ ID NO: 2802936 - DNA, 25 bp, Homo sapien
taatgtgtcaacttggttaggctgc

SEQ ID NO: 2802937 - DNA, 25 bp, Homo sapien
aaatttggtggtcttaagcacagcc

SEQ ID NO: 2802938 - DNA, 25 bp, Homo sapien
tacaggtctgacaaaggttggtctg

SEQ ID NO: 2802939 - DNA, 25 bp, Homo sapien
aacagtagtgtctgggtatcacgca

SEQ ID NO: 2802940 - DNA, 25 bp, Homo sapien
gaatcggatttccaccatctctggg

SEQ ID NO: 2802941 - DNA, 25 bp, Homo sapien
gacaacgcccttcctattagcacag

SEQ ID NO: 2802942 - DNA, 25 bp, Homo sapien
tcccgaagtggcacaagctaggtta

SEQ ID NO: 2802943 - DNA, 25 bp, Homo sapien
tactacgaggaagaatctgtgtgcc

SEQ ID NO: 2802944 - DNA, 25 bp, Homo sapien
ccaaaaggaggctagggagagcaac

SEQ ID NO: 2802945 - DNA, 25 bp, Homo sapien
cagatggccacccagaaattagagc

SEQ ID NO: 2802946 - DNA, 25 bp, Homo sapien
tgccccttgggttagagaacaggat

SEQ ID NO: 2802947 - DNA, 25 bp, Homo sapien
cagcagagctggacaacagatggcc

SEQ ID NO: 2802948 - DNA, 25 bp, Homo sapien
gacaagatgtttcagagcctactat

SEQ ID NO: 2802949 - DNA, 25 bp, Homo sapien
caatcaaatctgatggcaactacat

SEQ ID NO: 2802950 - DNA, 25 bp, Homo sapien
cacaatcaaatctgatggcaactac

SEQ ID NO: 2802951 - DNA, 25 bp, Homo sapien
tgaaaggaacttgagtaattaacca

SEQ ID NO: 2802952 - DNA, 25 bp, Homo sapien
atcaaatctgatggcaactacattc

SEQ ID NO: 2802953 - DNA, 25 bp, Homo sapien
agcatactgcaacataaggactctt

SEQ ID NO: 2802954 - DNA, 25 bp, Homo sapien
aaggccattactatacagcatactg

SEQ ID NO: 2802955 - DNA, 25 bp, Homo sapien
ggccattactatacagcatactgca

SEQ ID NO: 2802956 - DNA, 25 bp, Homo sapien
gcaacataaggactcttccgttcac

SEQ ID NO: 2802957 - DNA, 25 bp, Homo sapien
aattctggcacacttccaaaatata

SEQ ID NO: 2802958 - DNA, 25 bp, Homo sapien
acacttccaaaatatacccaacaat

SEQ ID NO: 2802959 - DNA, 25 bp, Homo sapien
ggcacacttccaaaatatacccaac

SEQ ID NO: 2802960 - DNA, 25 bp, Homo sapien
caattctggcacacttccaaaatat

SEQ ID NO: 2802961 - DNA, 25 bp, Homo sapien
cacaggtacatataagcagcaagat

SEQ ID NO: 2802962 - DNA, 25 bp, Homo sapien
gggtgccaaggatcgaatataagca

SEQ ID NO: 2802963 - DNA, 25 bp, Homo sapien
caaggatcgaatataagcacaggta

SEQ ID NO: 2802964 - DNA, 25 bp, Homo sapien
cagcaagattacagtcaatagactc

SEQ ID NO: 2802965 - DNA, 25 bp, Homo sapien
tatttggccaccactacaggagatg

SEQ ID NO: 2802966 - DNA, 25 bp, Homo sapien
caaatgttgactgcctcctatatgg

SEQ ID NO: 2802967 - DNA, 25 bp, Homo sapien
tattagtcttggatcacttgggcac

SEQ ID NO: 2802968 - DNA, 25 bp, Homo sapien
tcaatatgctaaacaagctgtggct

SEQ ID NO: 2802969 - DNA, 25 bp, Homo sapien
tgcaggcatgcatcctttgtccaga

SEQ ID NO: 2802970 - DNA, 25 bp, Homo sapien
tctttgacttgcactacgagtagaa

SEQ ID NO: 2802971 - DNA, 25 bp, Homo sapien
gagtggcagtcttcctagtctcaac

SEQ ID NO: 2802972 - DNA, 25 bp, Homo sapien
caggtggtaaattcgtccagagaag

SEQ ID NO: 2802973 - DNA, 25 bp, Homo sapien
tagtctagatccacaaccccttctc

SEQ ID NO: 2802974 - DNA, 25 bp, Homo sapien
cgcgacctgggagccccacttctta

SEQ ID NO: 2802975 - DNA, 25 bp, Homo sapien
ttctcgaagatcaaccgcgacctgg

SEQ ID NO: 2802976 - DNA, 25 bp, Homo sapien
aaccccttctcgaagatcaaccgcg

SEQ ID NO: 2802977 - DNA, 25 bp, Homo sapien
ctctccagccgtccggttgggcttg

SEQ ID NO: 2802978 - DNA, 25 bp, Homo sapien
gaggctgcatgtcccgtctgccctt

SEQ ID NO: 2802979 - DNA, 25 bp, Homo sapien
tccggttgggcttgtcacggcaccg

SEQ ID NO: 2802980 - DNA, 25 bp, Homo sapien
cgaggccggcgatgccgcagccaca

SEQ ID NO: 2802981 - DNA, 25 bp, Homo sapien
caagacgggcggttaagacactagg

SEQ ID NO: 2802982 - DNA, 25 bp, Homo sapien
aaaccttgatctgtgaaagcgggcg

SEQ ID NO: 2802983 - DNA, 25 bp, Homo sapien
caggccggcggaagtagctgatact

SEQ ID NO: 2802984 - DNA, 25 bp, Homo sapien
ggatttagatcacgtcccgcaggcc

SEQ ID NO: 2802985 - DNA, 25 bp, Homo sapien
gatgctagggttctcggcattatcc

SEQ ID NO: 2802986 - DNA, 25 bp, Homo sapien
cctcaatttgtgagctcccgcgact

SEQ ID NO: 2802987 - DNA, 25 bp, Homo sapien
cagtttctccgtttgcatctgaggg

SEQ ID NO: 2802988 - DNA, 25 bp, Homo sapien
tatcctcagggtgcgacctgttcac

SEQ ID NO: 2802989 - DNA, 25 bp, Homo sapien
cactggcctgtcctttcaatcccca

SEQ ID NO: 2802990 - DNA, 25 bp, Homo sapien
agcactggcctgtcctttcaatccc

SEQ ID NO: 2802991 - DNA, 25 bp, Homo sapien
ttccccagcactggcctgtcctttc

SEQ ID NO: 2802992 - DNA, 25 bp, Homo sapien
tccccagatattggtaaactgtggg

SEQ ID NO: 2802993 - DNA, 25 bp, Homo sapien
gattcttggtcagacttccttggag

SEQ ID NO: 2802994 - DNA, 25 bp, Homo sapien
gattctttgaggaggaactttgatg

SEQ ID NO: 2802995 - DNA, 25 bp, Homo sapien
caaagtttgttgtagtcttgcttac

SEQ ID NO: 2802996 - DNA, 25 bp, Homo sapien
ccttggaggactactcatcagattc

SEQ ID NO: 2802997 - DNA, 25 bp, Homo sapien
gagtaccagttacctctaaatgtgg

SEQ ID NO: 2802998 - DNA, 25 bp, Homo sapien
tggactgtacaaagaacgtgaggat

SEQ ID NO: 2802999 - DNA, 25 bp, Homo sapien
gaccatcagatattgacagtcaggg

SEQ ID NO: 2803000 - DNA, 25 bp, Homo sapien
cccaagtaaagagtaagctgatcca

SEQ ID NO: 2803001 - DNA, 25 bp, Homo sapien
cgtcatcttctgtaatggtctttta

SEQ ID NO: 2803002 - DNA, 25 bp, Homo sapien
ctttaactttgtgaggtgatggcgt

SEQ ID NO: 2803003 - DNA, 25 bp, Homo sapien
tgatggcgtttctaccaagtaaagg

SEQ ID NO: 2803004 - DNA, 25 bp, Homo sapien
caagtaaaggacgaataacgtcatc

SEQ ID NO: 2803005 - DNA, 25 bp, Homo sapien
ttggataaaactgagtgaaaccaaa

SEQ ID NO: 2803006 - DNA, 25 bp, Homo sapien
tttggataaaactgagtgaaaccaa

SEQ ID NO: 2803007 - DNA, 25 bp, Homo sapien
atttggataaaactgagtgaaacca

SEQ ID NO: 2803008 - DNA, 25 bp, Homo sapien
gtggctgttcttagtgatgacatca

SEQ ID NO: 2803009 - DNA, 25 bp, Homo sapien
tttcagtggctgttcttagtgatga

SEQ ID NO: 2803010 - DNA, 25 bp, Homo sapien
tttttcagtggctgttcttagtgat

SEQ ID NO: 2803011 - DNA, 25 bp, Homo sapien
tcagtggctgttcttagtgatgaca

SEQ ID NO: 2803012 - DNA, 25 bp, Homo sapien
taaagacctttacatcccataatag

SEQ ID NO: 2803013 - DNA, 25 bp, Homo sapien
aaagacctttacatcccataatagg

SEQ ID NO: 2803014 - DNA, 25 bp, Homo sapien
ttcttgtatctcattccagttatag

SEQ ID NO: 2803015 - DNA, 25 bp, Homo sapien
tgtatctcattccagttatagctcc

SEQ ID NO: 2803016 - DNA, 25 bp, Homo sapien
ctggggtcaacgttgtaaacagtcg

SEQ ID NO: 2803017 - DNA, 25 bp, Homo sapien
gctttaacttcttggctctgtttgc

SEQ ID NO: 2803018 - DNA, 25 bp, Homo sapien
tgcagactgactttgtctgcttcat

SEQ ID NO: 2803019 - DNA, 25 bp, Homo sapien
tcttggctctgtttgcagactgact

SEQ ID NO: 2803020 - DNA, 25 bp, Homo sapien
cataaattgtttcttctacagtcag

SEQ ID NO: 2803021 - DNA, 25 bp, Homo sapien
tgtttcttctacagtcagattagtc

SEQ ID NO: 2803022 - DNA, 25 bp, Homo sapien
ggataggctcaacccatcataaatt

SEQ ID NO: 2803023 - DNA, 25 bp, Homo sapien
ttgcattattcacagagaactggat

SEQ ID NO: 2803024 - DNA, 25 bp, Homo sapien
tgagccaattcatcagcatcgcctg

SEQ ID NO: 2803025 - DNA, 25 bp, Homo sapien
gatacttgccacgacttaactctga

SEQ ID NO: 2803026 - DNA, 25 bp, Homo sapien
gatcaaaaggatagacaaggttacc

SEQ ID NO: 2803027 - DNA, 25 bp, Homo sapien
ggaatgttgccagcgcatcagcact

SEQ ID NO: 2803028 - DNA, 25 bp, Homo sapien
ggatggatatcagcaggctctctaa

SEQ ID NO: 2803029 - DNA, 25 bp, Homo sapien
gatgtgtgaaggatggatatcagca

SEQ ID NO: 2803030 - DNA, 25 bp, Homo sapien
tgtgaaggatggatatcagcaggct

SEQ ID NO: 2803031 - DNA, 25 bp, Homo sapien
tggatatcagcaggctctctaagca

SEQ ID NO: 2803032 - DNA, 25 bp, Homo sapien
aatgttgctcattacagtaggaatt

SEQ ID NO: 2803033 - DNA, 25 bp, Homo sapien
caatgttgctcattacagtaggaat

SEQ ID NO: 2803034 - DNA, 25 bp, Homo sapien
tgttgctcattacagtaggaattta

SEQ ID NO: 2803035 - DNA, 25 bp, Homo sapien
gttgctcattacagtaggaatttaa

SEQ ID NO: 2803036 - DNA, 25 bp, Homo sapien
taccatctgctttacaacttcatca

SEQ ID NO: 2803037 - DNA, 25 bp, Homo sapien
ggcagctaccatctgctttacaact

SEQ ID NO: 2803038 - DNA, 25 bp, Homo sapien
ttctttcaaggcagctaccatctgc

SEQ ID NO: 2803039 - DNA, 25 bp, Homo sapien
caaggcagctaccatctgctttaca

SEQ ID NO: 2803040 - DNA, 25 bp, Homo sapien
tgtagaagagattgcaattcaaaag

SEQ ID NO: 2803041 - DNA, 25 bp, Homo sapien
gtgtagaagagattgcaattcaaaa

SEQ ID NO: 2803042 - DNA, 25 bp, Homo sapien
agtgtagaagagattgcaattcaaa

SEQ ID NO: 2803043 - DNA, 25 bp, Homo sapien
gtagaagagattgcaattcaaaaga

SEQ ID NO: 2803044 - DNA, 25 bp, Homo sapien
taaaacaccagtctccaaatgatcg

SEQ ID NO: 2803045 - DNA, 25 bp, Homo sapien
tgtaatcctctattcctgatactag

SEQ ID NO: 2803046 - DNA, 25 bp, Homo sapien
tgtgttttacaatatccggatgtct

SEQ ID NO: 2803047 - DNA, 25 bp, Homo sapien
tacatttgatgttttacaccaagga

SEQ ID NO: 2803048 - DNA, 25 bp, Homo sapien
tttattaatggtgccgcaattttga

SEQ ID NO: 2803049 - DNA, 25 bp, Homo sapien
gtttattaatggtgccgcaattttg

SEQ ID NO: 2803050 - DNA, 25 bp, Homo sapien
ttaatggtgccgcaattttgaagaa

SEQ ID NO: 2803051 - DNA, 25 bp, Homo sapien
atggtgccgcaattttgaagaaagt

SEQ ID NO: 2803052 - DNA, 25 bp, Homo sapien
caatgtgaacgaggtagagttgacg

SEQ ID NO: 2803053 - DNA, 25 bp, Homo sapien
gacaaataatgtaatcagtagtagg

SEQ ID NO: 2803054 - DNA, 25 bp, Homo sapien
tagtaggagactgccaccaataata

SEQ ID NO: 2803055 - DNA, 25 bp, Homo sapien
caataataaattcattgaccatcag

SEQ ID NO: 2803056 - DNA, 25 bp, Homo sapien
agctgactaagcctaccttcccatg

SEQ ID NO: 2803057 - DNA, 25 bp, Homo sapien
tgtgatgacaggataaaatactctt

SEQ ID NO: 2803058 - DNA, 25 bp, Homo sapien
catggttttattcccaggccaccac

SEQ ID NO: 2803059 - DNA, 25 bp, Homo sapien
gaactcgggatttgtcagctgacta

SEQ ID NO: 2803060 - DNA, 25 bp, Homo sapien
gcttgtaggctgctaagcacatcct

SEQ ID NO: 2803061 - DNA, 25 bp, Homo sapien
gcacatcctctaatatcgaacccat

SEQ ID NO: 2803062 - DNA, 25 bp, Homo sapien
ctaagcacatcctctaatatcgaac

SEQ ID NO: 2803063 - DNA, 25 bp, Homo sapien
agcttgtaggctgctaagcacatcc

SEQ ID NO: 2803064 - DNA, 25 bp, Homo sapien
tggtttccatatgcttttgaacaga

SEQ ID NO: 2803065 - DNA, 25 bp, Homo sapien
tttgaacagaattatatgtgggtct

SEQ ID NO: 2803066 - DNA, 25 bp, Homo sapien
cagaattatatgtgggtcttctaga

SEQ ID NO: 2803067 - DNA, 25 bp, Homo sapien
tattgaaatatcgacactgaaattt

SEQ ID NO: 2803068 - DNA, 25 bp, Homo sapien
aacataaacgtgttcaaaatattct

SEQ ID NO: 2803069 - DNA, 25 bp, Homo sapien
aaactaatctttatgttatgggaca

SEQ ID NO: 2803070 - DNA, 25 bp, Homo sapien
tataccatctatcacatctctgcag

SEQ ID NO: 2803071 - DNA, 25 bp, Homo sapien
tgaaagtaccacaagttagtaagat

SEQ ID NO: 2803072 - DNA, 25 bp, Homo sapien
tcctgttggggataaaagatgtagt

SEQ ID NO: 2803073 - DNA, 25 bp, Homo sapien
tgttggggataaaagatgtagtcat

SEQ ID NO: 2803074 - DNA, 25 bp, Homo sapien
gggataaaagatgtagtcatattta

SEQ ID NO: 2803075 - DNA, 25 bp, Homo sapien
tggggataaaagatgtagtcatatt

SEQ ID NO: 2803076 - DNA, 25 bp, Homo sapien
cttatgcggtaaaggcatctggcta

SEQ ID NO: 2803077 - DNA, 25 bp, Homo sapien
gcggtaaaggcatctggctacagga

SEQ ID NO: 2803078 - DNA, 25 bp, Homo sapien
attttaggaagcagtaagaatattt

SEQ ID NO: 2803079 - DNA, 25 bp, Homo sapien
atgcggtaaaggcatctggctacag

SEQ ID NO: 2803080 - DNA, 25 bp, Homo sapien
cattcaactaagaggagcaagatga

SEQ ID NO: 2803081 - DNA, 25 bp, Homo sapien
aagtagggaggctggatctactcca

SEQ ID NO: 2803082 - DNA, 25 bp, Homo sapien
caagatgagccaaagtagggaggct

SEQ ID NO: 2803083 - DNA, 25 bp, Homo sapien
ggaggaggaggccattcaactaaga

SEQ ID NO: 2803084 - DNA, 25 bp, Homo sapien
aatttgtcgaggcttgattggctcc

SEQ ID NO: 2803085 - DNA, 25 bp, Homo sapien
ttgtcgaggcttgattggctccagt

SEQ ID NO: 2803086 - DNA, 25 bp, Homo sapien
ctaatttgtcgaggcttgattggct

SEQ ID NO: 2803087 - DNA, 25 bp, Homo sapien
gagaggtttctctaggagaacagca

SEQ ID NO: 2803088 - DNA, 25 bp, Homo sapien
ttgtgttatctgaagaattttttcc

SEQ ID NO: 2803089 - DNA, 25 bp, Homo sapien
aagaattttttccatatctgatgtc

SEQ ID NO: 2803090 - DNA, 25 bp, Homo sapien
ttttttccatatctgatgtctgcat

SEQ ID NO: 2803091 - DNA, 25 bp, Homo sapien
ttgtaaattgtgttatctgaagaat

SEQ ID NO: 2803092 - DNA, 25 bp, Homo sapien
tctgctgtgaattcctgcttctaca

SEQ ID NO: 2803093 - DNA, 25 bp, Homo sapien
catgttttgacaacccttactttct

SEQ ID NO: 2803094 - DNA, 25 bp, Homo sapien
catcatggaacttatctccctttct

SEQ ID NO: 2803095 - DNA, 25 bp, Homo sapien
ttctgtaggatatattttcatagcc

SEQ ID NO: 2803096 - DNA, 25 bp, Homo sapien
gaatgctgctcctgtataccttgaa

SEQ ID NO: 2803097 - DNA, 25 bp, Homo sapien
gctgtcactgtcgtcattaattcgc

SEQ ID NO: 2803098 - DNA, 25 bp, Homo sapien
tctttctggagtctgtaggtgcaac

SEQ ID NO: 2803099 - DNA, 25 bp, Homo sapien
ggcccttgggctttgatataagcag

SEQ ID NO: 2803100 - DNA, 25 bp, Homo sapien
ccaccatactgcctcatcccaaaag

SEQ ID NO: 2803101 - DNA, 25 bp, Homo sapien
ggcctctgctccttgcacgggccac

SEQ ID NO: 2803102 - DNA, 25 bp, Homo sapien
cctcatcccaaaagtgggcatcaag

SEQ ID NO: 2803103 - DNA, 25 bp, Homo sapien
tctgctccttgcacgggccactctg

SEQ ID NO: 2803104 - DNA, 25 bp, Homo sapien
tggtgtgtgtcatcactgaatacct

SEQ ID NO: 2803105 - DNA, 25 bp, Homo sapien
ttgggcttcttcaacttggtgtgtg

SEQ ID NO: 2803106 - DNA, 25 bp, Homo sapien
gtcaccaaagttggaaacctcattg

SEQ ID NO: 2803107 - DNA, 25 bp, Homo sapien
cactgaatacctggtcaccaaagtt

SEQ ID NO: 2803108 - DNA, 25 bp, Homo sapien
gaccccaattccagcccccaatcca

SEQ ID NO: 2803109 - DNA, 25 bp, Homo sapien
tgaccccaattccagcccccaatcc

SEQ ID NO: 2803110 - DNA, 25 bp, Homo sapien
accccaattccagcccccaatccat

SEQ ID NO: 2803111 - DNA, 25 bp, Homo sapien
tatccatctcagttggcttctcggg

SEQ ID NO: 2803112 - DNA, 25 bp, Homo sapien
gagagtctccgtatttccattcagc

SEQ ID NO: 2803113 - DNA, 25 bp, Homo sapien
tagttaaatcctcaggtacggcttg

SEQ ID NO: 2803114 - DNA, 25 bp, Homo sapien
gaattgacctgtatcgctgagaaac

SEQ ID NO: 2803115 - DNA, 25 bp, Homo sapien
taaagctgccgtctaatcgaagtac

SEQ ID NO: 2803116 - DNA, 25 bp, Homo sapien
attcaaaataaagctgccgtctaat

SEQ ID NO: 2803117 - DNA, 25 bp, Homo sapien
cttgtcatgcttgaatgagccattc

SEQ ID NO: 2803118 - DNA, 25 bp, Homo sapien
tggcatcttgtcatgcttgaatgag

SEQ ID NO: 2803119 - DNA, 25 bp, Homo sapien
ttacaggatacattctgccctgggt

SEQ ID NO: 2803120 - DNA, 25 bp, Homo sapien
tacattctgccctgggtaccaggca

SEQ ID NO: 2803121 - DNA, 25 bp, Homo sapien
gccctgggtaccaggcagacatcat

SEQ ID NO: 2803122 - DNA, 25 bp, Homo sapien
aggatacattctgccctgggtacca

SEQ ID NO: 2803123 - DNA, 25 bp, Homo sapien
tccaggtgaacaacactgggccatc

SEQ ID NO: 2803124 - DNA, 25 bp, Homo sapien
ttacgttgtactcggactggcagca

SEQ ID NO: 2803125 - DNA, 25 bp, Homo sapien
tatgaagcatgtcagctggcacaga

SEQ ID NO: 2803126 - DNA, 25 bp, Homo sapien
tgcattttaggaaagtgcgcatgtg

SEQ ID NO: 2803127 - DNA, 25 bp, Homo sapien
tctgtagtcacaccacatgttcctt

SEQ ID NO: 2803128 - DNA, 25 bp, Homo sapien
acactggagccactactgctgcaaa

SEQ ID NO: 2803129 - DNA, 25 bp, Homo sapien
tctcccttggcctcatagctgaggc

SEQ ID NO: 2803130 - DNA, 25 bp, Homo sapien
gctgaggccactctgtgtgcatctg

SEQ ID NO: 2803131 - DNA, 25 bp, Homo sapien
tgggaccaagatcttcggccagccc

SEQ ID NO: 2803132 - DNA, 25 bp, Homo sapien
acgcttcctatgtgacccgcctggg

SEQ ID NO: 2803133 - DNA, 25 bp, Homo sapien
caaactgcaataagccgccttccaa

SEQ ID NO: 2803134 - DNA, 25 bp, Homo sapien
cgcagcgctgcagtgaattttcccc

SEQ ID NO: 2803135 - DNA, 25 bp, Homo sapien
gggtctgtcgctcccatctcaacaa

SEQ ID NO: 2803136 - DNA, 25 bp, Homo sapien
caggagtcctccgtttccttacata

SEQ ID NO: 2803137 - DNA, 25 bp, Homo sapien
tagttgagcaactttactggcaggt

SEQ ID NO: 2803138 - DNA, 25 bp, Homo sapien
ccagagcgcactgcagacaaaggtg

SEQ ID NO: 2803139 - DNA, 25 bp, Homo sapien
ccgggggacgtcctcggctggagcg

SEQ ID NO: 2803140 - DNA, 25 bp, Homo sapien
gcggcgcgcgcgtgtgccgggagcc

SEQ ID NO: 2803141 - DNA, 25 bp, Homo sapien
gcagcggcgcgcgcgtgtgccggga

SEQ ID NO: 2803142 - DNA, 25 bp, Homo sapien
ggacgtcctcggctggagcgcccca

SEQ ID NO: 2803143 - DNA, 25 bp, Homo sapien
ctgtagggcgacatccctggtgcgt

SEQ ID NO: 2803144 - DNA, 25 bp, Homo sapien
gacctagggcatccgggttgttctg

SEQ ID NO: 2803145 - DNA, 25 bp, Homo sapien
cctggtgcgtgcagacctagggcat

SEQ ID NO: 2803146 - DNA, 25 bp, Homo sapien
ttgttctggcccgcggtctgtgtca

SEQ ID NO: 2803147 - DNA, 25 bp, Homo sapien
gaaaaatagtgtcatagcctaaact

SEQ ID NO: 2803148 - DNA, 25 bp, Homo sapien
agagcggggtagaaaaatagtgtca

SEQ ID NO: 2803149 - DNA, 25 bp, Homo sapien
tccaatccaactgcgtctcggcaag

SEQ ID NO: 2803150 - DNA, 25 bp, Homo sapien
tccaactgcgtctcggcaagtcctg

SEQ ID NO: 2803151 - DNA, 25 bp, Homo sapien
ttagccagccgccacgtgggttggc

SEQ ID NO: 2803152 - DNA, 25 bp, Homo sapien
tcccagccgagacgggtgtgacttc

SEQ ID NO: 2803153 - DNA, 25 bp, Homo sapien
tccccgcagcggctgggttagccag

SEQ ID NO: 2803154 - DNA, 25 bp, Homo sapien
gtgggttggcgcttcggctcccagc

SEQ ID NO: 2803155 - DNA, 25 bp, Homo sapien
tggagtctgttactcaggttggagt

SEQ ID NO: 2803156 - DNA, 25 bp, Homo sapien
tgcttggctaattttcgtgttttta

SEQ ID NO: 2803157 - DNA, 25 bp, Homo sapien
ttgagatggagtctgttactcaggt

SEQ ID NO: 2803158 - DNA, 25 bp, Homo sapien
ttggagtgcagtggcacgatctcag

SEQ ID NO: 2803159 - DNA, 25 bp, Homo sapien
ctctcatatctctcaggtctttcca

SEQ ID NO: 2803160 - DNA, 25 bp, Homo sapien
cattgacttcactggagtagaaggc

SEQ ID NO: 2803161 - DNA, 25 bp, Homo sapien
ttctcattgacttcactggagtaga

SEQ ID NO: 2803162 - DNA, 25 bp, Homo sapien
gacttcactggagtagaaggctaaa

SEQ ID NO: 2803163 - DNA, 25 bp, Homo sapien
tagccaacaacattgagtaatttct

SEQ ID NO: 2803164 - DNA, 25 bp, Homo sapien
acaataattttgatagccaacaaca

SEQ ID NO: 2803165 - DNA, 25 bp, Homo sapien
gcatgtctttacctattctttgtaa

SEQ ID NO: 2803166 - DNA, 25 bp, Homo sapien
ctgcatgtctttacctattctttgt

SEQ ID NO: 2803167 - DNA, 25 bp, Homo sapien
aagcagagaagatggcccataggac

SEQ ID NO: 2803168 - DNA, 25 bp, Homo sapien
cgtgttgatttatgttggcttcctc

SEQ ID NO: 2803169 - DNA, 25 bp, Homo sapien
tctcatgtctcgcaacagaagcaga

SEQ ID NO: 2803170 - DNA, 25 bp, Homo sapien
caaaaatgccataagtacagtgatg

SEQ ID NO: 2803171 - DNA, 25 bp, Homo sapien
ggaaagctagacatatcagaaatta

SEQ ID NO: 2803172 - DNA, 25 bp, Homo sapien
aggaagaagtgctccagagtacaac

SEQ ID NO: 2803173 - DNA, 25 bp, Homo sapien
cttcaggacctcttggaaagctaga

SEQ ID NO: 2803174 - DNA, 25 bp, Homo sapien
agtacaactggcgtctctcattatg

SEQ ID NO: 2803175 - DNA, 25 bp, Homo sapien
gtcattacggtgtcaaagacttcag

SEQ ID NO: 2803176 - DNA, 25 bp, Homo sapien
cattacggtgtcaaagacttcagaa

SEQ ID NO: 2803177 - DNA, 25 bp, Homo sapien
ttcagaagacaccatccacactcat

SEQ ID NO: 2803178 - DNA, 25 bp, Homo sapien
tcattacggtgtcaaagacttcaga

SEQ ID NO: 2803179 - DNA, 25 bp, Homo sapien
tgttgtctaccaaagaaagctgggt

SEQ ID NO: 2803180 - DNA, 25 bp, Homo sapien
cataaatgggaagcatctcgttacc

SEQ ID NO: 2803181 - DNA, 25 bp, Homo sapien
aaacggaattgtctactgctgtgca

SEQ ID NO: 2803182 - DNA, 25 bp, Homo sapien
ggaagcctgagacttaccctgaaac

SEQ ID NO: 2803183 - DNA, 25 bp, Homo sapien
agagtttacatcctcagctgagggc

SEQ ID NO: 2803184 - DNA, 25 bp, Homo sapien
gaaggacccagtagcaccatggtca

SEQ ID NO: 2803185 - DNA, 25 bp, Homo sapien
gaaggtacgaaagctccagtagaga

SEQ ID NO: 2803186 - DNA, 25 bp, Homo sapien
gaagatccaccattttaccaacagc

SEQ ID NO: 2803187 - DNA, 25 bp, Homo sapien
ccaattcctcgtaagtctgccacag

SEQ ID NO: 2803188 - DNA, 25 bp, Homo sapien
ttcccacggcaacatccctgccaat

SEQ ID NO: 2803189 - DNA, 25 bp, Homo sapien
aagctgaagcaaaagccctggatga

SEQ ID NO: 2803190 - DNA, 25 bp, Homo sapien
tccagagattgaaggaataaaagct

SEQ ID NO: 2803191 - DNA, 25 bp, Homo sapien
gcgactttcaaaccatcaagtgagg

SEQ ID NO: 2803192 - DNA, 25 bp, Homo sapien
tggatcagagtgtaacagaggtgcc

SEQ ID NO: 2803193 - DNA, 25 bp, Homo sapien
tctgccaggaatagacgtcggctca

SEQ ID NO: 2803194 - DNA, 25 bp, Homo sapien
tcatctgtaatgtccccacaggatt

SEQ ID NO: 2803195 - DNA, 25 bp, Homo sapien
tgtagcatctgcataccaaaggact

SEQ ID NO: 2803196 - DNA, 25 bp, Homo sapien
catgatcatcgttggagccggaggt

SEQ ID NO: 2803197 - DNA, 25 bp, Homo sapien
tcgaggcgctgatccctaaaatggc

SEQ ID NO: 2803198 - DNA, 25 bp, Homo sapien
tcaatttcagcaccgatggccatgt

SEQ ID NO: 2803199 - DNA, 25 bp, Homo sapien
ggaactaaggactccaatgtcgaac

SEQ ID NO: 2803200 - DNA, 25 bp, Homo sapien
gatgctaaaggctgcgaatgggatc

SEQ ID NO: 2803201 - DNA, 25 bp, Homo sapien
gcgaatgggatcctgatggaactaa

SEQ ID NO: 2803202 - DNA, 25 bp, Homo sapien
gatcctgatggaactaaggactcca

SEQ ID NO: 2803203 - DNA, 25 bp, Homo sapien
taaggttaccgatcaatgcatttca

SEQ ID NO: 2803204 - DNA, 25 bp, Homo sapien
tcttcacttacaagaaaggcctgaa

SEQ ID NO: 2803205 - DNA, 25 bp, Homo sapien
tacggatatagacctagggctctgg

SEQ ID NO: 2803206 - DNA, 25 bp, Homo sapien
taataattaactcaaccaggtctac

SEQ ID NO: 2803207 - DNA, 25 bp, Homo sapien
cactgtgttgatctagtaggtttct

SEQ ID NO: 2803208 - DNA, 25 bp, Homo sapien
gtgtatagtgtaaaatgtgaatgac

SEQ ID NO: 2803209 - DNA, 25 bp, Homo sapien
tcctgtatttatatcataacgtgta

SEQ ID NO: 2803210 - DNA, 25 bp, Homo sapien
acctttaggtattttagagcacaga

SEQ ID NO: 2803211 - DNA, 25 bp, Homo sapien
taaagctatcgtaacatgtgaaaga

SEQ ID NO: 2803212 - DNA, 25 bp, Homo sapien
tcccaattcacatttccgtagggaa

SEQ ID NO: 2803213 - DNA, 25 bp, Homo sapien
tggcatggcttagcacatttcactc

SEQ ID NO: 2803214 - DNA, 25 bp, Homo sapien
ccttaaaactagaatgtggcatggc

SEQ ID NO: 2803215 - DNA, 25 bp, Homo sapien
tgctaagttgccaagcagttccaag

SEQ ID NO: 2803216 - DNA, 25 bp, Homo sapien
ctgctaagttgccaagcagttccaa

SEQ ID NO: 2803217 - DNA, 25 bp, Homo sapien
ctgggcagagtcttttggtacaaac

SEQ ID NO: 2803218 - DNA, 25 bp, Homo sapien
cacaattcagaaggggctttcctcc

SEQ ID NO: 2803219 - DNA, 25 bp, Homo sapien
cactgttcgggatatgtcggttaag

SEQ ID NO: 2803220 - DNA, 25 bp, Homo sapien
ggctgggcagagtcttttggtacaa

SEQ ID NO: 2803221 - DNA, 25 bp, Homo sapien
agtttatagtaggatgtctggcaaa

SEQ ID NO: 2803222 - DNA, 25 bp, Homo sapien
tatagtaggatgtctggcaaacacc

SEQ ID NO: 2803223 - DNA, 25 bp, Homo sapien
agtaggatgtctggcaaacaccaat

SEQ ID NO: 2803224 - DNA, 25 bp, Homo sapien
tttatagtaggatgtctggcaaaca

SEQ ID NO: 2803225 - DNA, 25 bp, Homo sapien
aacatcaaaaccctgatgtctgaaa

SEQ ID NO: 2803226 - DNA, 25 bp, Homo sapien
tttccagagcacatcctgaacagtg

SEQ ID NO: 2803227 - DNA, 25 bp, Homo sapien
tccagagcacatcctgaacagtgct

SEQ ID NO: 2803228 - DNA, 25 bp, Homo sapien
tcctgccaaaacatcaaaaccctga

SEQ ID NO: 2803229 - DNA, 25 bp, Homo sapien
gtttctgttcaagtcattgcaccag

SEQ ID NO: 2803230 - DNA, 25 bp, Homo sapien
tctgttcaagtcattgcaccagcaa

SEQ ID NO: 2803231 - DNA, 25 bp, Homo sapien
gttcaagtcattgcaccagcaatag

SEQ ID NO: 2803232 - DNA, 25 bp, Homo sapien
caatgacaaactcatttaggtgtgt

SEQ ID NO: 2803233 - DNA, 25 bp, Homo sapien
tactatagttgatttagcgacacca

SEQ ID NO: 2803234 - DNA, 25 bp, Homo sapien
caatagatttctgggattgctgaac

SEQ ID NO: 2803235 - DNA, 25 bp, Homo sapien
cagcactcatgattaagttataaag

SEQ ID NO: 2803236 - DNA, 25 bp, Homo sapien
gactttgcaagagtactaggaaatg

SEQ ID NO: 2803237 - DNA, 25 bp, Homo sapien
ggctgccagcaaccaaattgtaatc

SEQ ID NO: 2803238 - DNA, 25 bp, Homo sapien
ctaagtctgaggagcgatttctgaa

SEQ ID NO: 2803239 - DNA, 25 bp, Homo sapien
taatcagctaacagtcactccagag

SEQ ID NO: 2803240 - DNA, 25 bp, Homo sapien
tataaagggcatggaaattctggtc

SEQ ID NO: 2803241 - DNA, 25 bp, Homo sapien
ttacagagctttaaatgcaaccaca

SEQ ID NO: 2803242 - DNA, 25 bp, Homo sapien
gagctttaaatgcaaccacaatcca

SEQ ID NO: 2803243 - DNA, 25 bp, Homo sapien
gaattattacagagctttaaatgca

SEQ ID NO: 2803244 - DNA, 25 bp, Homo sapien
tattagaattattacagagctttaa

SEQ ID NO: 2803245 - DNA, 25 bp, Homo sapien
tgctgcttagcaaatggcccttaga

SEQ ID NO: 2803246 - DNA, 25 bp, Homo sapien
tgccctgagtagatgctaaatgctg

SEQ ID NO: 2803247 - DNA, 25 bp, Homo sapien
tttaaaactgatgcgctctaagggc

SEQ ID NO: 2803248 - DNA, 25 bp, Homo sapien
gaatacaaatattggtccctgtggg

SEQ ID NO: 2803249 - DNA, 25 bp, Homo sapien
tatccgagaattttccaggcagcaa

SEQ ID NO: 2803250 - DNA, 25 bp, Homo sapien
ccatcattgagacaagcttgcaccg

SEQ ID NO: 2803251 - DNA, 25 bp, Homo sapien
tttatctgggaaacccacgaagcgc

SEQ ID NO: 2803252 - DNA, 25 bp, Homo sapien
gcatcacagcggtcatatccgagaa

SEQ ID NO: 2803253 - DNA, 25 bp, Homo sapien
gtagttcctgactccgggcactgtg

SEQ ID NO: 2803254 - DNA, 25 bp, Homo sapien
cctgctgcgcctcgtgaaaattgag

SEQ ID NO: 2803255 - DNA, 25 bp, Homo sapien
aaaattgagattgtagcgccccagt

SEQ ID NO: 2803256 - DNA, 25 bp, Homo sapien
cagctggtcgaaggaggcgatcaca

SEQ ID NO: 2803257 - DNA, 25 bp, Homo sapien
cacacttatatctcccataatcttc

SEQ ID NO: 2803258 - DNA, 25 bp, Homo sapien
gctaccacaacagtatcatcttcta

SEQ ID NO: 2803259 - DNA, 25 bp, Homo sapien
taatccttcaatcacctcacactta

SEQ ID NO: 2803260 - DNA, 25 bp, Homo sapien
taagtccagtgctaccacaacagta

SEQ ID NO: 2803261 - DNA, 25 bp, Homo sapien
tgctctgcttccacaagtagatggg

SEQ ID NO: 2803262 - DNA, 25 bp, Homo sapien
tctgtgtgaaaacaccttggcttgc

SEQ ID NO: 2803263 - DNA, 25 bp, Homo sapien
tccttgaggtaatccgaagttagct

SEQ ID NO: 2803264 - DNA, 25 bp, Homo sapien
gccaaatgctgtagggtctcgataa

SEQ ID NO: 2803265 - DNA, 25 bp, Homo sapien
caccacaatatcctgagcctgccaa

SEQ ID NO: 2803266 - DNA, 25 bp, Homo sapien
ctccaaggactctattgccttccaa

SEQ ID NO: 2803267 - DNA, 25 bp, Homo sapien
gccgttttctacataccagctgtta

SEQ ID NO: 2803268 - DNA, 25 bp, Homo sapien
agtcagcaggtctgccgttttctac

SEQ ID NO: 2803269 - DNA, 25 bp, Homo sapien
tctattgcaaacaatcactctgcct

SEQ ID NO: 2803270 - DNA, 25 bp, Homo sapien
ctgccttgtttatgttgtttctcca

SEQ ID NO: 2803271 - DNA, 25 bp, Homo sapien
ctattgcaaacaatcactctgcctt

SEQ ID NO: 2803272 - DNA, 25 bp, Homo sapien
tgcctgaatttaatctcatcctcag

SEQ ID NO: 2803273 - DNA, 25 bp, Homo sapien
catgtatgggtttggagcacaagag

SEQ ID NO: 2803274 - DNA, 25 bp, Homo sapien
aagcttctctaaagcccaagaccaa

SEQ ID NO: 2803275 - DNA, 25 bp, Homo sapien
tcctgctctgttgcgaaggccggag

SEQ ID NO: 2803276 - DNA, 25 bp, Homo sapien
ggatgtgaatagctctgtcatgatc

SEQ ID NO: 2803277 - DNA, 25 bp, Homo sapien
ctctgtcatgatccagagtatagtt

SEQ ID NO: 2803278 - DNA, 25 bp, Homo sapien
cttggatgtgaatagctctgtcatg

SEQ ID NO: 2803279 - DNA, 25 bp, Homo sapien
gctctgtcatgatccagagtatagt

SEQ ID NO: 2803280 - DNA, 25 bp, Homo sapien
gcaccagaagaagtagactcttcat

SEQ ID NO: 2803281 - DNA, 25 bp, Homo sapien
agcaccagaagaagtagactcttca

SEQ ID NO: 2803282 - DNA, 25 bp, Homo sapien
cagcaccagaagaagtagactcttc

SEQ ID NO: 2803283 - DNA, 25 bp, Homo sapien
tttatagcccaaagaatcttcttca

SEQ ID NO: 2803284 - DNA, 25 bp, Homo sapien
ctttatagcccaaagaatcttcttc

SEQ ID NO: 2803285 - DNA, 25 bp, Homo sapien
cgagagcatcacatacaaagaggct

SEQ ID NO: 2803286 - DNA, 25 bp, Homo sapien
cggctctctcttagccagtcttgca

SEQ ID NO: 2803287 - DNA, 25 bp, Homo sapien
tcccctgacgagtgctgtcggctct

SEQ ID NO: 2803288 - DNA, 25 bp, Homo sapien
cattgtcgtgggtcccctgacgagt

SEQ ID NO: 2803289 - DNA, 25 bp, Homo sapien
ttagccagtcttgcacctcctttaa

SEQ ID NO: 2803290 - DNA, 25 bp, Homo sapien
tttgcccacgctatacatcatttga

SEQ ID NO: 2803291 - DNA, 25 bp, Homo sapien
gactcttgtgctcatatgcacacaa

SEQ ID NO: 2803292 - DNA, 25 bp, Homo sapien
ggtcaggcgtggtggaggaaattta

SEQ ID NO: 2803293 - DNA, 25 bp, Homo sapien
taactctcctcttcatattataatg

SEQ ID NO: 2803294 - DNA, 25 bp, Homo sapien
ctatggatgcgctacctgtccaggg

SEQ ID NO: 2803295 - DNA, 25 bp, Homo sapien
ggatgcgctacctgtccaggggcca

SEQ ID NO: 2803296 - DNA, 25 bp, Homo sapien
gatgcgctacctgtccaggggccac

SEQ ID NO: 2803297 - DNA, 25 bp, Homo sapien
atggatgcgctacctgtccaggggc

SEQ ID NO: 2803298 - DNA, 25 bp, Homo sapien
cattcctgtcgagaatactggcctc

SEQ ID NO: 2803299 - DNA, 25 bp, Homo sapien
gtcgagaatactggcctctgggtac

SEQ ID NO: 2803300 - DNA, 25 bp, Homo sapien
taaggcattcctgtcgagaatactg

SEQ ID NO: 2803301 - DNA, 25 bp, Homo sapien
cccataaggcattcctgtcgagaat

SEQ ID NO: 2803302 - DNA, 25 bp, Homo sapien
gagatcaagtgaagctagcgctctt

SEQ ID NO: 2803303 - DNA, 25 bp, Homo sapien
gcagcggtgtgagcagactcctcag

SEQ ID NO: 2803304 - DNA, 25 bp, Homo sapien
tgaaatccaggagttcggatgctct

SEQ ID NO: 2803305 - DNA, 25 bp, Homo sapien
aaagcaaagcgtcaccaggaaagtt

SEQ ID NO: 2803306 - DNA, 25 bp, Homo sapien
tatttatagaacgaggaatgcgagg

SEQ ID NO: 2803307 - DNA, 25 bp, Homo sapien
gagctcaaagaacctggatttattt

SEQ ID NO: 2803308 - DNA, 25 bp, Homo sapien
ggttgtggatccataaccaggatta

SEQ ID NO: 2803309 - DNA, 25 bp, Homo sapien
tactggactcagtattggtgttgag

SEQ ID NO: 2803310 - DNA, 25 bp, Homo sapien
aagatgctgggacacgcgggaaaac

SEQ ID NO: 2803311 - DNA, 25 bp, Homo sapien
tgattcccgccttgagtaaccaagg

SEQ ID NO: 2803312 - DNA, 25 bp, Homo sapien
cacgcgggaaaacgcctcctgaaca

SEQ ID NO: 2803313 - DNA, 25 bp, Homo sapien
cttctgggagagtatataggtccat

SEQ ID NO: 2803314 - DNA, 25 bp, Homo sapien
gctctggccgacaatgcaggtggcc

SEQ ID NO: 2803315 - DNA, 25 bp, Homo sapien
cttaaagataaagcctaagccacgg

SEQ ID NO: 2803316 - DNA, 25 bp, Homo sapien
gagcggcgctattgtcttaaagata

SEQ ID NO: 2803317 - DNA, 25 bp, Homo sapien
caggtggccggtgtgcagatgagcc

SEQ ID NO: 2803318 - DNA, 25 bp, Homo sapien
cctgatcctcccctatttccagcct

SEQ ID NO: 2803319 - DNA, 25 bp, Homo sapien
tgtccctcctgatcctcccctattt

SEQ ID NO: 2803320 - DNA, 25 bp, Homo sapien
gatcctcccctatttccagccttcc

SEQ ID NO: 2803321 - DNA, 25 bp, Homo sapien
tctgagtcatcctgtccctcctgat

SEQ ID NO: 2803322 - DNA, 25 bp, Homo sapien
tcaggagtccctgggtcttgaggac

SEQ ID NO: 2803323 - DNA, 25 bp, Homo sapien
tttattcttccggtagtggatctcg

SEQ ID NO: 2803324 - DNA, 25 bp, Homo sapien
ggtagtggatctcggctttctcttt

SEQ ID NO: 2803325 - DNA, 25 bp, Homo sapien
tcatgttcttctcggcctgtttctg

SEQ ID NO: 2803326 - DNA, 25 bp, Homo sapien
attcttccggtagtggatctcggct

SEQ ID NO: 2803327 - DNA, 25 bp, Homo sapien
gcaaactttcttgtaggcttcagac

SEQ ID NO: 2803328 - DNA, 25 bp, Homo sapien
agataggcaaactttcttgtaggct

SEQ ID NO: 2803329 - DNA, 25 bp, Homo sapien
ctcgtgaggcgccccagataggcaa

SEQ ID NO: 2803330 - DNA, 25 bp, Homo sapien
ataggcaaactttcttgtaggcttc

SEQ ID NO: 2803331 - DNA, 25 bp, Homo sapien
catctgctttttcttgtcctagggc

SEQ ID NO: 2803332 - DNA, 25 bp, Homo sapien
tgctttttcttgtcctagggcggtg

SEQ ID NO: 2803333 - DNA, 25 bp, Homo sapien
accatctgctttttcttgtcctagg

SEQ ID NO: 2803334 - DNA, 25 bp, Homo sapien
tctgctttttcttgtcctagggcgg

SEQ ID NO: 2803335 - DNA, 25 bp, Homo sapien
aggcggtccagagcagcctggcctc

SEQ ID NO: 2803336 - DNA, 25 bp, Homo sapien
cttgaggcggtccagagcagcctgg

SEQ ID NO: 2803337 - DNA, 25 bp, Homo sapien
ggcggtccagagcagcctggcctca

SEQ ID NO: 2803338 - DNA, 25 bp, Homo sapien
tgaggcggtccagagcagcctggcc

SEQ ID NO: 2803339 - DNA, 25 bp, Homo sapien
ggtcttgtggggcagcatgccttgc

SEQ ID NO: 2803340 - DNA, 25 bp, Homo sapien
tcttgtggggcagcatgccttgcac

SEQ ID NO: 2803341 - DNA, 25 bp, Homo sapien
gtcttgtggggcagcatgccttgca

SEQ ID NO: 2803342 - DNA, 25 bp, Homo sapien
ttggtcttgtggggcagcatgcctt

SEQ ID NO: 2803343 - DNA, 25 bp, Homo sapien
gacctggaagtggtaggggcgtcga

SEQ ID NO: 2803344 - DNA, 25 bp, Homo sapien
ctggaagtggtaggggcgtcgagaa

SEQ ID NO: 2803345 - DNA, 25 bp, Homo sapien
tacgccagaagatgcggctggggac

SEQ ID NO: 2803346 - DNA, 25 bp, Homo sapien
cgtcgagaagggttggtgttcatcc

SEQ ID NO: 2803347 - DNA, 25 bp, Homo sapien
cttcgcagcttacgaccaccgcctt

SEQ ID NO: 2803348 - DNA, 25 bp, Homo sapien
cgcagcttacgaccaccgccttccg

SEQ ID NO: 2803349 - DNA, 25 bp, Homo sapien
gccttcgcagcttacgaccaccgcc

SEQ ID NO: 2803350 - DNA, 25 bp, Homo sapien
ttcgcagcttacgaccaccgccttc

SEQ ID NO: 2803351 - DNA, 25 bp, Homo sapien
cccaggagatggcctcaaccatcaa

SEQ ID NO: 2803352 - DNA, 25 bp, Homo sapien
ctgtttagccacgatggccgccagg

SEQ ID NO: 2803353 - DNA, 25 bp, Homo sapien
gcccaggagatggcctcaaccatca

SEQ ID NO: 2803354 - DNA, 25 bp, Homo sapien
tttagccacgatggccgccaggcgg

SEQ ID NO: 2803355 - DNA, 25 bp, Homo sapien
tagaagctgtagcagcaaggagacc

SEQ ID NO: 2803356 - DNA, 25 bp, Homo sapien
tgggaggaagttcagtcctgagtat

SEQ ID NO: 2803357 - DNA, 25 bp, Homo sapien
tttgcagtcattaagaatttgtggg

SEQ ID NO: 2803358 - DNA, 25 bp, Homo sapien
cctaatgaagatgaataaagtggga

SEQ ID NO: 2803359 - DNA, 25 bp, Homo sapien
aaacatcctttgatgtccacatttt

SEQ ID NO: 2803360 - DNA, 25 bp, Homo sapien
aaaacatcctttgatgtccacattt

SEQ ID NO: 2803361 - DNA, 25 bp, Homo sapien
gctccatccgctgtgagatcaatca

SEQ ID NO: 2803362 - DNA, 25 bp, Homo sapien
tatcctctcctttaatcaggcattc

SEQ ID NO: 2803363 - DNA, 25 bp, Homo sapien
cactgatagatactgcgccagctcc

SEQ ID NO: 2803364 - DNA, 25 bp, Homo sapien
gccacccagacgcagaaagtctgat

SEQ ID NO: 2803365 - DNA, 25 bp, Homo sapien
tgctaggcgtgaatttctttgttgg

SEQ ID NO: 2803366 - DNA, 25 bp, Homo sapien
ctgctaggcgtgaatttctttgttg

SEQ ID NO: 2803367 - DNA, 25 bp, Homo sapien
tctgaggttggtctgcgtctgtcca

SEQ ID NO: 2803368 - DNA, 25 bp, Homo sapien
tcaaacttaggttatcaatcctggg

SEQ ID NO: 2803369 - DNA, 25 bp, Homo sapien
tgtctgtcttgccaatagtgttaga

SEQ ID NO: 2803370 - DNA, 25 bp, Homo sapien
tgaacaaagatgtagacctcaaact

SEQ ID NO: 2803371 - DNA, 25 bp, Homo sapien
gttaatctgatcatttggggcagcc

SEQ ID NO: 2803372 - DNA, 25 bp, Homo sapien
ttagttaatctgatcatttggggca

SEQ ID NO: 2803373 - DNA, 25 bp, Homo sapien
caggtcccggttgaaatacgattga

SEQ ID NO: 2803374 - DNA, 25 bp, Homo sapien
agttaatctgatcatttggggcagc

SEQ ID NO: 2803375 - DNA, 25 bp, Homo sapien
tgcaattatccagttgacccagata

SEQ ID NO: 2803376 - DNA, 25 bp, Homo sapien
gccggtttgcaattatccagttgac

SEQ ID NO: 2803377 - DNA, 25 bp, Homo sapien
cctggtttgccggtttgcaattatc

SEQ ID NO: 2803378 - DNA, 25 bp, Homo sapien
atccagttgacccagatattgccaa

SEQ ID NO: 2803379 - DNA, 25 bp, Homo sapien
catatccttgattggtgatggagaa

SEQ ID NO: 2803380 - DNA, 25 bp, Homo sapien
tttagcaccaagattgtagcccagc

SEQ ID NO: 2803381 - DNA, 25 bp, Homo sapien
cttcagaaatagaatgtcagggact

SEQ ID NO: 2803382 - DNA, 25 bp, Homo sapien
tggacttcagaaatagaatgtcagg

SEQ ID NO: 2803383 - DNA, 25 bp, Homo sapien
ggagtgtgttcatttcctacttcga

SEQ ID NO: 2803384 - DNA, 25 bp, Homo sapien
ccctctcagatgacaagttcgtgga

SEQ ID NO: 2803385 - DNA, 25 bp, Homo sapien
tcctacttcgattgattcttccctc

SEQ ID NO: 2803386 - DNA, 25 bp, Homo sapien
caaggactgataacccaatggagtg

SEQ ID NO: 2803387 - DNA, 25 bp, Homo sapien
ccaacaccacaagggtatgggcaga

SEQ ID NO: 2803388 - DNA, 25 bp, Homo sapien
tatgggcagaagaggtccacctttc

SEQ ID NO: 2803389 - DNA, 25 bp, Homo sapien
tcagtggccccatagtgaggtatgc

SEQ ID NO: 2803390 - DNA, 25 bp, Homo sapien
tagaagcagatttgtgccacagtgg

SEQ ID NO: 2803391 - DNA, 25 bp, Homo sapien
tactggggaccagctattggaaaac

SEQ ID NO: 2803392 - DNA, 25 bp, Homo sapien
gaccagctattggaaaacttgctga

SEQ ID NO: 2803393 - DNA, 25 bp, Homo sapien
cacagtcaccctattaaggtgatat

SEQ ID NO: 2803394 - DNA, 25 bp, Homo sapien
gtgtcttctactggggaccagctat

SEQ ID NO: 2803395 - DNA, 25 bp, Homo sapien
ggtcaaccagattgaccttcagata

SEQ ID NO: 2803396 - DNA, 25 bp, Homo sapien
gaagaggcatccaagagaccatcca

SEQ ID NO: 2803397 - DNA, 25 bp, Homo sapien
aggctttgtttagttgatctgggac

SEQ ID NO: 2803398 - DNA, 25 bp, Homo sapien
cactgtgaatgggaaagcctggtaa

SEQ ID NO: 2803399 - DNA, 25 bp, Homo sapien
ggtggtgtggagaggcactttctcc

SEQ ID NO: 2803400 - DNA, 25 bp, Homo sapien
gtggtgtggagaggcactttctcct

SEQ ID NO: 2803401 - DNA, 25 bp, Homo sapien
taccagcaagccagtaattttggct

SEQ ID NO: 2803402 - DNA, 25 bp, Homo sapien
gcaagccagtaattttggctgcaag

SEQ ID NO: 2803403 - DNA, 25 bp, Homo sapien
taaggcattaccagcaagccagtaa

SEQ ID NO: 2803404 - DNA, 25 bp, Homo sapien
ttaaggcattaccagcaagccagta

SEQ ID NO: 2803405 - DNA, 25 bp, Homo sapien
ccagtattttgttcctactagcttc

SEQ ID NO: 2803406 - DNA, 25 bp, Homo sapien
caccacttccagtattttgttccta

SEQ ID NO: 2803407 - DNA, 25 bp, Homo sapien
cacttccagtattttgttcctacta

SEQ ID NO: 2803408 - DNA, 25 bp, Homo sapien
gtattttgttcctactagcttctgc

SEQ ID NO: 2803409 - DNA, 25 bp, Homo sapien
tcacagcgtgactacaccctcctgg

SEQ ID NO: 2803410 - DNA, 25 bp, Homo sapien
agcgtgactacaccctcctggagca

SEQ ID NO: 2803411 - DNA, 25 bp, Homo sapien
tccttaaggctgtctctccacaggc

SEQ ID NO: 2803412 - DNA, 25 bp, Homo sapien
caagaagcagatagggtctgctgtc

SEQ ID NO: 2803413 - DNA, 25 bp, Homo sapien
cttggctccagtgtttacagtctcc

SEQ ID NO: 2803414 - DNA, 25 bp, Homo sapien
gtgtttacagtctcctcttactgca

SEQ ID NO: 2803415 - DNA, 25 bp, Homo sapien
tacagtctcctcttactgcatccat

SEQ ID NO: 2803416 - DNA, 25 bp, Homo sapien
gctccagtgtttacagtctcctctt

SEQ ID NO: 2803417 - DNA, 25 bp, Homo sapien
gtaggttagttgctcatgtgctggt

SEQ ID NO: 2803418 - DNA, 25 bp, Homo sapien
agtaggttagttgctcatgtgctgg

SEQ ID NO: 2803419 - DNA, 25 bp, Homo sapien
gtgctggtgttggaatcttgctaat

SEQ ID NO: 2803420 - DNA, 25 bp, Homo sapien
tctatgctggacatgccagcttctg

SEQ ID NO: 2803421 - DNA, 25 bp, Homo sapien
catgccagcttctggacctttctga

SEQ ID NO: 2803422 - DNA, 25 bp, Homo sapien
tctggacctttctgatgtatggcca

SEQ ID NO: 2803423 - DNA, 25 bp, Homo sapien
ccagcttctggacctttctgatgta

SEQ ID NO: 2803424 - DNA, 25 bp, Homo sapien
cctgctttaatcatatcatcagcac

SEQ ID NO: 2803425 - DNA, 25 bp, Homo sapien
ctttaatcatatcatcagcacacat

SEQ ID NO: 2803426 - DNA, 25 bp, Homo sapien
ccctgctttaatcatatcatcagca

SEQ ID NO: 2803427 - DNA, 25 bp, Homo sapien
tgctttaatcatatcatcagcacac

SEQ ID NO: 2803428 - DNA, 25 bp, Homo sapien
caatcaagacaggaagggacctgtg

SEQ ID NO: 2803429 - DNA, 25 bp, Homo sapien
gctgtgggggatatcaatcaagaca

SEQ ID NO: 2803430 - DNA, 25 bp, Homo sapien
ccagaatcatgggagttggtagcct

SEQ ID NO: 2803431 - DNA, 25 bp, Homo sapien
ctggttctccctttggtgctgtggg

SEQ ID NO: 2803432 - DNA, 25 bp, Homo sapien
caatgggcagatcagtcctggtgca

SEQ ID NO: 2803433 - DNA, 25 bp, Homo sapien
tatccgttcaactgtcctgtgcaag

SEQ ID NO: 2803434 - DNA, 25 bp, Homo sapien
tagtgggcattcacattcagacaat

SEQ ID NO: 2803435 - DNA, 25 bp, Homo sapien
caatgctttatacatgaggccaaaa

SEQ ID NO: 2803436 - DNA, 25 bp, Homo sapien
tgtgtttaattacaactgcttcaaa

SEQ ID NO: 2803437 - DNA, 25 bp, Homo sapien
ttataaatgtgtttaattacaactg

SEQ ID NO: 2803438 - DNA, 25 bp, Homo sapien
aatgtgtttaattacaactgcttca

SEQ ID NO: 2803439 - DNA, 25 bp, Homo sapien
ataaatgtgtttaattacaactgct

SEQ ID NO: 2803440 - DNA, 25 bp, Homo sapien
aacatttccatatggtgcgacccct

SEQ ID NO: 2803441 - DNA, 25 bp, Homo sapien
ggaacaaatatgtggccagccagtc

SEQ ID NO: 2803442 - DNA, 25 bp, Homo sapien
tagcagtgttgcgtaggatcttaac

SEQ ID NO: 2803443 - DNA, 25 bp, Homo sapien
gagaacaataggtatcccgttggac

SEQ ID NO: 2803444 - DNA, 25 bp, Homo sapien
tacagatcaatctactgataggcag

SEQ ID NO: 2803445 - DNA, 25 bp, Homo sapien
tgcacagttcattccatggagatac

SEQ ID NO: 2803446 - DNA, 25 bp, Homo sapien
gagggttgtgaaatgtagcctcccc

SEQ ID NO: 2803447 - DNA, 25 bp, Homo sapien
aaatgatgagtatgcttggccaaac

SEQ ID NO: 2803448 - DNA, 25 bp, Homo sapien
cagcagctctgaccgcaatgtgatc

SEQ ID NO: 2803449 - DNA, 25 bp, Homo sapien
agctctgaccgcaatgtgatcctcc

SEQ ID NO: 2803450 - DNA, 25 bp, Homo sapien
ctgaccgcaatgtgatcctcccgta

SEQ ID NO: 2803451 - DNA, 25 bp, Homo sapien
cccagcagctctgaccgcaatgtga

SEQ ID NO: 2803452 - DNA, 25 bp, Homo sapien
cttatgtgtcgtgcatagatgggag

SEQ ID NO: 2803453 - DNA, 25 bp, Homo sapien
caaggaaggattcttatgtgtcgtg

SEQ ID NO: 2803454 - DNA, 25 bp, Homo sapien
tagatgggagggtcgatgacatttt

SEQ ID NO: 2803455 - DNA, 25 bp, Homo sapien
gtgtcattgtcaaaatttccctgga

SEQ ID NO: 2803456 - DNA, 25 bp, Homo sapien
tatgactccagcctaacagcaaagg

SEQ ID NO: 2803457 - DNA, 25 bp, Homo sapien
gctatctggtgagcactaacggcct

SEQ ID NO: 2803458 - DNA, 25 bp, Homo sapien
gtgactcagagatccaagctgcttg

SEQ ID NO: 2803459 - DNA, 25 bp, Homo sapien
gcaaagtacagctatcatctggagc

SEQ ID NO: 2803460 - DNA, 25 bp, Homo sapien
ttatctcaagcactaggaagcccct

SEQ ID NO: 2803461 - DNA, 25 bp, Homo sapien
gaagcccctgcttaagaatgccacc

SEQ ID NO: 2803462 - DNA, 25 bp, Homo sapien
gatgcgaactatcaacccagaaagt

SEQ ID NO: 2803463 - DNA, 25 bp, Homo sapien
tcagaggcctctcagtaatgacacg

SEQ ID NO: 2803464 - DNA, 25 bp, Homo sapien
aaaaactcaacttcagcgctctagg

SEQ ID NO: 2803465 - DNA, 25 bp, Homo sapien
gaacagtctttggtagctctgatcc

SEQ ID NO: 2803466 - DNA, 25 bp, Homo sapien
tttcctagggcagcatgtatgtgtc

SEQ ID NO: 2803467 - DNA, 25 bp, Homo sapien
gagctttcatccagagcactaatgg

SEQ ID NO: 2803468 - DNA, 25 bp, Homo sapien
gtctaaaagccagtaggtaggatac

SEQ ID NO: 2803469 - DNA, 25 bp, Homo sapien
gctgtcatttagaatgtagagtcta

SEQ ID NO: 2803470 - DNA, 25 bp, Homo sapien
ggtaggatacaccaccatatttaac

SEQ ID NO: 2803471 - DNA, 25 bp, Homo sapien
tttagaatgtagagtctaaaagcca

SEQ ID NO: 2803472 - DNA, 25 bp, Homo sapien
gaaatatatcacataggatgattgc

SEQ ID NO: 2803473 - DNA, 25 bp, Homo sapien
atgatgccagtcactttggttggaa

SEQ ID NO: 2803474 - DNA, 25 bp, Homo sapien
tgtacatgaccaaaatctttagctc

SEQ ID NO: 2803475 - DNA, 25 bp, Homo sapien
ctccttgtgtaatgatgccagtcac

SEQ ID NO: 2803476 - DNA, 25 bp, Homo sapien
taggagccaacaaactgtacatgac

SEQ ID NO: 2803477 - DNA, 25 bp, Homo sapien
cagacgttggttacacttttcatcc

SEQ ID NO: 2803478 - DNA, 25 bp, Homo sapien
caactatgtgcagtgctcttaaggg

SEQ ID NO: 2803479 - DNA, 25 bp, Homo sapien
ggtccctaatgctttccacaactat

SEQ ID NO: 2803480 - DNA, 25 bp, Homo sapien
ttttggccactgtggtccctaatgc

SEQ ID NO: 2803481 - DNA, 25 bp, Homo sapien
gaatgtcttagtagtatgctccaac

SEQ ID NO: 2803482 - DNA, 25 bp, Homo sapien
gaaactattcccaacccagtctgtg

SEQ ID NO: 2803483 - DNA, 25 bp, Homo sapien
tacagcattttcctctagtccaggg

SEQ ID NO: 2803484 - DNA, 25 bp, Homo sapien
ggcctgttaggacttgggttgcaac

SEQ ID NO: 2803485 - DNA, 25 bp, Homo sapien
cagtgacctcggctaagcaactcaa

SEQ ID NO: 2803486 - DNA, 25 bp, Homo sapien
gggacatatcttgctttagctctgg

SEQ ID NO: 2803487 - DNA, 25 bp, Homo sapien
tagtgctttttatgggacaccatcc

SEQ ID NO: 2803488 - DNA, 25 bp, Homo sapien
tgacatgcgcctgtactctgagctg

SEQ ID NO: 2803489 - DNA, 25 bp, Homo sapien
cagcatgtgtcgcttactataagag

SEQ ID NO: 2803490 - DNA, 25 bp, Homo sapien
tacacttctgtatgcttgactagag

SEQ ID NO: 2803491 - DNA, 25 bp, Homo sapien
taagggctgggaagcaatcacagcc

SEQ ID NO: 2803492 - DNA, 25 bp, Homo sapien
ttgtactagtgtgctagggctgcca

SEQ ID NO: 2803493 - DNA, 25 bp, Homo sapien
cagcctagtgagtggtgttagccta

SEQ ID NO: 2803494 - DNA, 25 bp, Homo sapien
aatctcgttgaaggctccatgagcc

SEQ ID NO: 2803495 - DNA, 25 bp, Homo sapien
ttctcgagacaggacaaaatcagtg

SEQ ID NO: 2803496 - DNA, 25 bp, Homo sapien
ccaatatgctggatatgttaccaca

SEQ ID NO: 2803497 - DNA, 25 bp, Homo sapien
gtaagatagctaaatgccattcccc

SEQ ID NO: 2803498 - DNA, 25 bp, Homo sapien
cattttcaagcactgttctgaaaca

SEQ ID NO: 2803499 - DNA, 25 bp, Homo sapien
aatagtttggaagaaaagctttcat

SEQ ID NO: 2803500 - DNA, 25 bp, Homo sapien
ttttcaagcactgttctgaaacatc

SEQ ID NO: 2803501 - DNA, 25 bp, Homo sapien
tttcaagcactgttctgaaacatcc

SEQ ID NO: 2803502 - DNA, 25 bp, Homo sapien
caagctaatacgactttgggaatga

SEQ ID NO: 2803503 - DNA, 25 bp, Homo sapien
gcggtaccagggagcaaagttcatc

SEQ ID NO: 2803504 - DNA, 25 bp, Homo sapien
gacttgatgcaactttagcggtacc

SEQ ID NO: 2803505 - DNA, 25 bp, Homo sapien
tacttgtagacacaactaagtcctg

SEQ ID NO: 2803506 - DNA, 25 bp, Homo sapien
ttttacagggaacttagtcattcta

SEQ ID NO: 2803507 - DNA, 25 bp, Homo sapien
gcaaatgctatatacagttttacag

SEQ ID NO: 2803508 - DNA, 25 bp, Homo sapien
attattcctatttagcaaataagaa

SEQ ID NO: 2803509 - DNA, 25 bp, Homo sapien
tatctggtagtcttaaagcaaatgc

SEQ ID NO: 2803510 - DNA, 25 bp, Homo sapien
cactctaaccacttcagatactgtc

SEQ ID NO: 2803511 - DNA, 25 bp, Homo sapien
caccatattaacgtgcatcatgcac

SEQ ID NO: 2803512 - DNA, 25 bp, Homo sapien
tgtctcctatgaaatgtatcagtga

SEQ ID NO: 2803513 - DNA, 25 bp, Homo sapien
gcacatagattgataactcttgaaa

SEQ ID NO: 2803514 - DNA, 25 bp, Homo sapien
ccaaggcctctttaacagacagcaa

SEQ ID NO: 2803515 - DNA, 25 bp, Homo sapien
ttacccaaggcctctttaacagaca

SEQ ID NO: 2803516 - DNA, 25 bp, Homo sapien
acagcaacagtaaacttaatattcc

SEQ ID NO: 2803517 - DNA, 25 bp, Homo sapien
cttcaaatggtacttcagaaattgg

SEQ ID NO: 2803518 - DNA, 25 bp, Homo sapien
ttacagatacgaaaacagatcttct

SEQ ID NO: 2803519 - DNA, 25 bp, Homo sapien
tgtgttacatatatcaaagggcaaa

SEQ ID NO: 2803520 - DNA, 25 bp, Homo sapien
atatatatattctagccagagaaca

SEQ ID NO: 2803521 - DNA, 25 bp, Homo sapien
tagatttgattctatatatggatgt

SEQ ID NO: 2803522 - DNA, 25 bp, Homo sapien
tcccattagaatgggacttcaggcc

SEQ ID NO: 2803523 - DNA, 25 bp, Homo sapien
aagtcagtatatctaagtaagtccc

SEQ ID NO: 2803524 - DNA, 25 bp, Homo sapien
ggagtgtcctgatactttaatctta

SEQ ID NO: 2803525 - DNA, 25 bp, Homo sapien
tcctttggatactggtaccacagaa

SEQ ID NO: 2803526 - DNA, 25 bp, Homo sapien
tgcacatttctatgcccaacacaga

SEQ ID NO: 2803527 - DNA, 25 bp, Homo sapien
tgtaagaagatacaggcagctggtg

SEQ ID NO: 2803528 - DNA, 25 bp, Homo sapien
tgaacatcaccttgcacaagaaccc

SEQ ID NO: 2803529 - DNA, 25 bp, Homo sapien
cccactgagatctttaaagctgctt

SEQ ID NO: 2803530 - DNA, 25 bp, Homo sapien
gacccatgtgtactaagaagccaga

SEQ ID NO: 2803531 - DNA, 25 bp, Homo sapien
ggcaccataagagccagggcagttc

SEQ ID NO: 2803532 - DNA, 25 bp, Homo sapien
tcagctatggcagcaagctagaccc

SEQ ID NO: 2803533 - DNA, 25 bp, Homo sapien
gccagaagtcgaagtggcagcagtt

SEQ ID NO: 2803534 - DNA, 25 bp, Homo sapien
ccaaagcaattgagccaggtgagct

SEQ ID NO: 2803535 - DNA, 25 bp, Homo sapien
ggacagagcagggttctctaaaaca

SEQ ID NO: 2803536 - DNA, 25 bp, Homo sapien
tatgagcaagctcgctggacagagc

SEQ ID NO: 2803537 - DNA, 25 bp, Homo sapien
caaaagtctctaggataaaccaaag

SEQ ID NO: 2803538 - DNA, 25 bp, Homo sapien
aagaaattagctggtgtcttgataa

SEQ ID NO: 2803539 - DNA, 25 bp, Homo sapien
tggattcgtccagtcatgatttaga

SEQ ID NO: 2803540 - DNA, 25 bp, Homo sapien
gttagatggctatatctgtatcaat

SEQ ID NO: 2803541 - DNA, 25 bp, Homo sapien
gcttcatacttgtgctaccttgtga

SEQ ID NO: 2803542 - DNA, 25 bp, Homo sapien
atatctagaaaaccctatcatctca

SEQ ID NO: 2803543 - DNA, 25 bp, Homo sapien
ggcctttgacaaatttcaacaactc

SEQ ID NO: 2803544 - DNA, 25 bp, Homo sapien
cctttgacaaatttcaacaactctt

SEQ ID NO: 2803545 - DNA, 25 bp, Homo sapien
tgacaaatttcaacaactcttcatg

SEQ ID NO: 2803546 - DNA, 25 bp, Homo sapien
aagaggaacagtgggtagtgaaaca

SEQ ID NO: 2803547 - DNA, 25 bp, Homo sapien
tccatgttgagcgttctgaagatgc

SEQ ID NO: 2803548 - DNA, 25 bp, Homo sapien
ggttcccaagtgaacatgtccatgt

SEQ ID NO: 2803549 - DNA, 25 bp, Homo sapien
gccagaggtccaggcattcactttg

SEQ ID NO: 2803550 - DNA, 25 bp, Homo sapien
gcttgtccagccgagctttccttgg

SEQ ID NO: 2803551 - DNA, 25 bp, Homo sapien
tagagtcttacatactgagctttta

SEQ ID NO: 2803552 - DNA, 25 bp, Homo sapien
agttccattcgcaaagtgcaatgtc

SEQ ID NO: 2803553 - DNA, 25 bp, Homo sapien
tgtgaaagagttagcatatggagtg

SEQ ID NO: 2803554 - DNA, 25 bp, Homo sapien
gttgttatcaatgtttccacgaaac

SEQ ID NO: 2803555 - DNA, 25 bp, Homo sapien
aggattttatatactctgggcttcc

SEQ ID NO: 2803556 - DNA, 25 bp, Homo sapien
cttggctccttgggtaatcacacca

SEQ ID NO: 2803557 - DNA, 25 bp, Homo sapien
cactttgtacattgcccaagtcttt

SEQ ID NO: 2803558 - DNA, 25 bp, Homo sapien
tcattggtgcctttcactttgtaca

SEQ ID NO: 2803559 - DNA, 25 bp, Homo sapien
ccagactgatgataataatgtgcct

SEQ ID NO: 2803560 - DNA, 25 bp, Homo sapien
gcaatagcacagttacctacaaaag

SEQ ID NO: 2803561 - DNA, 25 bp, Homo sapien
tgccttgaaatagggaggtgaagtc

SEQ ID NO: 2803562 - DNA, 25 bp, Homo sapien
gaagtcttacatcagtgctggcagg

SEQ ID NO: 2803563 - DNA, 25 bp, Homo sapien
tgaatgctctccttggcatttgcca

SEQ ID NO: 2803564 - DNA, 25 bp, Homo sapien
cacagggtccatatgaatgctctcc

SEQ ID NO: 2803565 - DNA, 25 bp, Homo sapien
atatgaatgctctccttggcatttg

SEQ ID NO: 2803566 - DNA, 25 bp, Homo sapien
gaatgctctccttggcatttgccat

SEQ ID NO: 2803567 - DNA, 25 bp, Homo sapien
tgcacccttgctggagagttgttgt

SEQ ID NO: 2803568 - DNA, 25 bp, Homo sapien
ggagagttgttgtgatcatttagag

SEQ ID NO: 2803569 - DNA, 25 bp, Homo sapien
gctggagagttgttgtgatcattta

SEQ ID NO: 2803570 - DNA, 25 bp, Homo sapien
tccagttttgcacccttgctggaga

SEQ ID NO: 2803571 - DNA, 25 bp, Homo sapien
caattttcgtttcatcaagacaatg

SEQ ID NO: 2803572 - DNA, 25 bp, Homo sapien
tttaaatccagaaccagttatgagc

SEQ ID NO: 2803573 - DNA, 25 bp, Homo sapien
ttgcatgctgaacatataaatgtaa

SEQ ID NO: 2803574 - DNA, 25 bp, Homo sapien
gcattgtggtactattaataattgc

SEQ ID NO: 2803575 - DNA, 25 bp, Homo sapien
gtgatatcatctctcaactgttctg

SEQ ID NO: 2803576 - DNA, 25 bp, Homo sapien
ctgttctgaattttggctatgaata

SEQ ID NO: 2803577 - DNA, 25 bp, Homo sapien
gaagctcacgaacataatttgccaa

SEQ ID NO: 2803578 - DNA, 25 bp, Homo sapien
tgtaaactggtgatatcatctctca

SEQ ID NO: 2803579 - DNA, 25 bp, Homo sapien
tttagtatgactcccgaagcacagc

SEQ ID NO: 2803580 - DNA, 25 bp, Homo sapien
ttatacttgcatttgtggacccact

SEQ ID NO: 2803581 - DNA, 25 bp, Homo sapien
tattaatgtgctttccccaacagag

SEQ ID NO: 2803582 - DNA, 25 bp, Homo sapien
gaagcacagcaaactcgtacaatga

SEQ ID NO: 2803583 - DNA, 25 bp, Homo sapien
taactaacttcttaatggaatgtgc

SEQ ID NO: 2803584 - DNA, 25 bp, Homo sapien
cagaattgggagctaatttgaactc

SEQ ID NO: 2803585 - DNA, 25 bp, Homo sapien
gaccataaggaagagtcacactgag

SEQ ID NO: 2803586 - DNA, 25 bp, Homo sapien
taaattaccctttcctctgaccata

SEQ ID NO: 2803587 - DNA, 25 bp, Homo sapien
aaccttgtcccatcccatctgttac

SEQ ID NO: 2803588 - DNA, 25 bp, Homo sapien
ttaaccttgtcccatcccatctgtt

SEQ ID NO: 2803589 - DNA, 25 bp, Homo sapien
taaccttgtcccatcccatctgtta

SEQ ID NO: 2803590 - DNA, 25 bp, Homo sapien
taagccccttcttattaagacgtgc

SEQ ID NO: 2803591 - DNA, 25 bp, Homo sapien
taagacgtgcatagtagggatacca

SEQ ID NO: 2803592 - DNA, 25 bp, Homo sapien
ttggagtccaaaaagagctcggtga

SEQ ID NO: 2803593 - DNA, 25 bp, Homo sapien
tgcagctgtccacgcatttataagc

SEQ ID NO: 2803594 - DNA, 25 bp, Homo sapien
gggccaaacttcaagtgcctcccca

SEQ ID NO: 2803595 - DNA, 25 bp, Homo sapien
ctgggggccaaacttcaagtgcctc

SEQ ID NO: 2803596 - DNA, 25 bp, Homo sapien
ggctagctgggggccaaacttcaag

SEQ ID NO: 2803597 - DNA, 25 bp, Homo sapien
ggccaaacttcaagtgcctccccat

SEQ ID NO: 2803598 - DNA, 25 bp, Homo sapien
caagtaagcagtgcctcaagatgtc

SEQ ID NO: 2803599 - DNA, 25 bp, Homo sapien
cattctctggagtatggcaaagaat

SEQ ID NO: 2803600 - DNA, 25 bp, Homo sapien
tgcagctgacaagtaagcagtgcct

SEQ ID NO: 2803601 - DNA, 25 bp, Homo sapien
gatcttgcagctgacaagtaagcag

SEQ ID NO: 2803602 - DNA, 25 bp, Homo sapien
taaacctgttgaagctaagccagct

SEQ ID NO: 2803603 - DNA, 25 bp, Homo sapien
tctgacattatgtagtatccaagtt

SEQ ID NO: 2803604 - DNA, 25 bp, Homo sapien
tcgagaaggatttaatagagtaaca

SEQ ID NO: 2803605 - DNA, 25 bp, Homo sapien
tcagtaatgaatatggatcagccta

SEQ ID NO: 2803606 - DNA, 25 bp, Homo sapien
aattctgctcttgtaattcactaaa

SEQ ID NO: 2803607 - DNA, 25 bp, Homo sapien
gatagggaagagtaggaatttagta

SEQ ID NO: 2803608 - DNA, 25 bp, Homo sapien
tataaaactataatctctgaccact

SEQ ID NO: 2803609 - DNA, 25 bp, Homo sapien
aaacattcatttgcttgtcattcgc

SEQ ID NO: 2803610 - DNA, 25 bp, Homo sapien
tctgcaactgcaatgcctgggatta

SEQ ID NO: 2803611 - DNA, 25 bp, Homo sapien
gtttactagccaggccaacctatgc

SEQ ID NO: 2803612 - DNA, 25 bp, Homo sapien
ctatttgaatgtaaagcctgcactc

SEQ ID NO: 2803613 - DNA, 25 bp, Homo sapien
gccaaggccactcatcaagtgtaag

SEQ ID NO: 2803614 - DNA, 25 bp, Homo sapien
gaaggtgaaatagtcactgacatca

SEQ ID NO: 2803615 - DNA, 25 bp, Homo sapien
aatattaataagatgttcactgaca

SEQ ID NO: 2803616 - DNA, 25 bp, Homo sapien
ggtgaaatagtcactgacatcagtt

SEQ ID NO: 2803617 - DNA, 25 bp, Homo sapien
agatgttcactgacagacatcttgg

SEQ ID NO: 2803618 - DNA, 25 bp, Homo sapien
cataatgttgttgtggtgctcagat

SEQ ID NO: 2803619 - DNA, 25 bp, Homo sapien
aatcagaaacctgtagcactgcttc

SEQ ID NO: 2803620 - DNA, 25 bp, Homo sapien
tcaggtgtgtctcagtttgtgcatc

SEQ ID NO: 2803621 - DNA, 25 bp, Homo sapien
gcttgggcaaacaacatcaggtgtg

SEQ ID NO: 2803622 - DNA, 25 bp, Homo sapien
aggccccatcccattgactttagtc

SEQ ID NO: 2803623 - DNA, 25 bp, Homo sapien
gccccatcccattgactttagtcct

SEQ ID NO: 2803624 - DNA, 25 bp, Homo sapien
cccatcccattgactttagtcctgt

SEQ ID NO: 2803625 - DNA, 25 bp, Homo sapien
ggccccatcccattgactttagtcc

SEQ ID NO: 2803626 - DNA, 25 bp, Homo sapien
ttcccataaattcgcctgggcactc

SEQ ID NO: 2803627 - DNA, 25 bp, Homo sapien
tcttcccataaattcgcctgggcac

SEQ ID NO: 2803628 - DNA, 25 bp, Homo sapien
ttcttcccataaattcgcctgggca

SEQ ID NO: 2803629 - DNA, 25 bp, Homo sapien
cccataaattcgcctgggcactcac

SEQ ID NO: 2803630 - DNA, 25 bp, Homo sapien
tgcaaggctcaacttcgcattcatt

SEQ ID NO: 2803631 - DNA, 25 bp, Homo sapien
ccatttttgcaaggctcaacttcgc

SEQ ID NO: 2803632 - DNA, 25 bp, Homo sapien
gttagcaacaagatctgtacatatt

SEQ ID NO: 2803633 - DNA, 25 bp, Homo sapien
tacatattccaccatttttgcaagg

SEQ ID NO: 2803634 - DNA, 25 bp, Homo sapien
gaaggaagttctcatagccagtgtg

SEQ ID NO: 2803635 - DNA, 25 bp, Homo sapien
gaacctagtgaagccatatgtgaga

SEQ ID NO: 2803636 - DNA, 25 bp, Homo sapien
tcaggccccatctataaatcatcag

SEQ ID NO: 2803637 - DNA, 25 bp, Homo sapien
tattaacgatacaaagacactgctg

SEQ ID NO: 2803638 - DNA, 25 bp, Homo sapien
ctttgtcagaaccattattgtacag

SEQ ID NO: 2803639 - DNA, 25 bp, Homo sapien
attgtacagattatagccaaaagcc

SEQ ID NO: 2803640 - DNA, 25 bp, Homo sapien
ttatagccaaaagcccatgaaattg

SEQ ID NO: 2803641 - DNA, 25 bp, Homo sapien
caaaagcccatgaaattgactttgg

SEQ ID NO: 2803642 - DNA, 25 bp, Homo sapien
taattagtttgttttcaactggctc

SEQ ID NO: 2803643 - DNA, 25 bp, Homo sapien
aattagtttgttttcaactggctca

SEQ ID NO: 2803644 - DNA, 25 bp, Homo sapien
attagtttgttttcaactggctcac

SEQ ID NO: 2803645 - DNA, 25 bp, Homo sapien
ttctgggacatcattatcccagttc

SEQ ID NO: 2803646 - DNA, 25 bp, Homo sapien
tcataagtaagtacattgaggcccc

SEQ ID NO: 2803647 - DNA, 25 bp, Homo sapien
caagaacatcaagaaggaacatggt

SEQ ID NO: 2803648 - DNA, 25 bp, Homo sapien
tgccatctgtcctcagtagtttagc

SEQ ID NO: 2803649 - DNA, 25 bp, Homo sapien
gaatactgaccaccatttggaccag

SEQ ID NO: 2803650 - DNA, 25 bp, Homo sapien
tctgtgtcacctttgtatgtaagaa

SEQ ID NO: 2803651 - DNA, 25 bp, Homo sapien
cattctgtgtcacctttgtatgtaa

SEQ ID NO: 2803652 - DNA, 25 bp, Homo sapien
ttctgtgtcacctttgtatgtaaga

SEQ ID NO: 2803653 - DNA, 25 bp, Homo sapien
tgtgtcacctttgtatgtaagaagc

SEQ ID NO: 2803654 - DNA, 25 bp, Homo sapien
catatctaaatatgtcagctttttc

SEQ ID NO: 2803655 - DNA, 25 bp, Homo sapien
gtcagctttttctcagagacatgcc

SEQ ID NO: 2803656 - DNA, 25 bp, Homo sapien
ctacatatctaaatatgtcagcttt

SEQ ID NO: 2803657 - DNA, 25 bp, Homo sapien
gctttttctcagagacatgccctga

SEQ ID NO: 2803658 - DNA, 25 bp, Homo sapien
catgttgattgcacagggaccttct

SEQ ID NO: 2803659 - DNA, 25 bp, Homo sapien
ggatccccttggagcaccatgttga

SEQ ID NO: 2803660 - DNA, 25 bp, Homo sapien
cttgggctcccaagataacagagct

SEQ ID NO: 2803661 - DNA, 25 bp, Homo sapien
tgaggacagcttaggccatagcccc

SEQ ID NO: 2803662 - DNA, 25 bp, Homo sapien
tgaagcagcagtccatatgtaactg

SEQ ID NO: 2803663 - DNA, 25 bp, Homo sapien
gcagcagtccatatgtaactgatta

SEQ ID NO: 2803664 - DNA, 25 bp, Homo sapien
cagcagtccatatgtaactgattat

SEQ ID NO: 2803665 - DNA, 25 bp, Homo sapien
aagcagcagtccatatgtaactgat

SEQ ID NO: 2803666 - DNA, 25 bp, Homo sapien
gagcgataagggcaagggctttcca

SEQ ID NO: 2803667 - DNA, 25 bp, Homo sapien
gcaggacaatgggaaattaaggatc

SEQ ID NO: 2803668 - DNA, 25 bp, Homo sapien
tcctaggagcgtttttggaggatct

SEQ ID NO: 2803669 - DNA, 25 bp, Homo sapien
gaggatctgggcctggcattatcga

SEQ ID NO: 2803670 - DNA, 25 bp, Homo sapien
caaatcaagtccttgctctagaaaa

SEQ ID NO: 2803671 - DNA, 25 bp, Homo sapien
tggttaacacaccaaggctcattca

SEQ ID NO: 2803672 - DNA, 25 bp, Homo sapien
caatatcatgggagatagactgcta

SEQ ID NO: 2803673 - DNA, 25 bp, Homo sapien
caagcacctatgatgagctaggcac

SEQ ID NO: 2803674 - DNA, 25 bp, Homo sapien
tgttgtcccactaggcaaatggagg

SEQ ID NO: 2803675 - DNA, 25 bp, Homo sapien
taagaataggctgtgcttgccctag

SEQ ID NO: 2803676 - DNA, 25 bp, Homo sapien
tagatgttaggcagagaacctcttc

SEQ ID NO: 2803677 - DNA, 25 bp, Homo sapien
caaggttcaagcgttttggtcaggt

SEQ ID NO: 2803678 - DNA, 25 bp, Homo sapien
taaaaagggatgaccagaagactac

SEQ ID NO: 2803679 - DNA, 25 bp, Homo sapien
gaaacacagtctaggagtcctccac

SEQ ID NO: 2803680 - DNA, 25 bp, Homo sapien
gacatggtgtattccatgggagaga

SEQ ID NO: 2803681 - DNA, 25 bp, Homo sapien
agactacaaacttcccatgccactg

SEQ ID NO: 2803682 - DNA, 25 bp, Homo sapien
agcctatgaatgtatcccctcggta

SEQ ID NO: 2803683 - DNA, 25 bp, Homo sapien
cagtgaatcccattaaatcctcggg

SEQ ID NO: 2803684 - DNA, 25 bp, Homo sapien
tcctcggggacatttacaaacatag

SEQ ID NO: 2803685 - DNA, 25 bp, Homo sapien
tatcccctcggtatgcttcacttat

SEQ ID NO: 2803686 - DNA, 25 bp, Homo sapien
tcctgcaggatgttaattgactcag

SEQ ID NO: 2803687 - DNA, 25 bp, Homo sapien
cttcctgcaggatgttaattgactc

SEQ ID NO: 2803688 - DNA, 25 bp, Homo sapien
ttcttcctgcaggatgttaattgac

SEQ ID NO: 2803689 - DNA, 25 bp, Homo sapien
ctgcaggatgttaattgactcagga

SEQ ID NO: 2803690 - DNA, 25 bp, Homo sapien
ttgccactgttacaacaccacactg

SEQ ID NO: 2803691 - DNA, 25 bp, Homo sapien
tgttacaacaccacactgaaagaat

SEQ ID NO: 2803692 - DNA, 25 bp, Homo sapien
taacaatggctaaatcattgccact

SEQ ID NO: 2803693 - DNA, 25 bp, Homo sapien
actaacaatggctaaatcattgcca

SEQ ID NO: 2803694 - DNA, 25 bp, Homo sapien
ctgctgaagttggttcttcttcatc

SEQ ID NO: 2803695 - DNA, 25 bp, Homo sapien
tgaagttggttcttcttcatctgat

SEQ ID NO: 2803696 - DNA, 25 bp, Homo sapien
gaagttggttcttcttcatctgatg

SEQ ID NO: 2803697 - DNA, 25 bp, Homo sapien
gctgaagttggttcttcttcatctg

SEQ ID NO: 2803698 - DNA, 25 bp, Homo sapien
aagtgtggtggtacttgggaggaca

SEQ ID NO: 2803699 - DNA, 25 bp, Homo sapien
tgcaggacattccaccagtgtacat

SEQ ID NO: 2803700 - DNA, 25 bp, Homo sapien
ggacaggaaggcatcatacagactc

SEQ ID NO: 2803701 - DNA, 25 bp, Homo sapien
taagttagtcgctcttttgcaggac

SEQ ID NO: 2803702 - DNA, 25 bp, Homo sapien
gaagccatctggacactcacaggaa

SEQ ID NO: 2803703 - DNA, 25 bp, Homo sapien
catcagccaatcctggcaaacagat

SEQ ID NO: 2803704 - DNA, 25 bp, Homo sapien
catggattgggatcacaaatatcac

SEQ ID NO: 2803705 - DNA, 25 bp, Homo sapien
tggcaaacagatacctccattttca

SEQ ID NO: 2803706 - DNA, 25 bp, Homo sapien
gtggccttggctgtggcaatgggtg

SEQ ID NO: 2803707 - DNA, 25 bp, Homo sapien
ggtggcagatagtatctggaaaagc

SEQ ID NO: 2803708 - DNA, 25 bp, Homo sapien
cagatagtatctggaaaagcagtca

SEQ ID NO: 2803709 - DNA, 25 bp, Homo sapien
caatgggtggcagatagtatctgga

SEQ ID NO: 2803710 - DNA, 25 bp, Homo sapien
ggttatttatcctactgtcagcagg

SEQ ID NO: 2803711 - DNA, 25 bp, Homo sapien
tatggcagattcaggcaaattaagc

SEQ ID NO: 2803712 - DNA, 25 bp, Homo sapien
ccagagttctgatcggactgcatga

SEQ ID NO: 2803713 - DNA, 25 bp, Homo sapien
cctcacctgcttagattaggacaga

SEQ ID NO: 2803714 - DNA, 25 bp, Homo sapien
ttattgccaatggactgatacaccc

SEQ ID NO: 2803715 - DNA, 25 bp, Homo sapien
tcctttattgccaatggactgatac

SEQ ID NO: 2803716 - DNA, 25 bp, Homo sapien
ccagtacttaatccctggggtctct

SEQ ID NO: 2803717 - DNA, 25 bp, Homo sapien
gtctctttgccgctatttaatgtac

SEQ ID NO: 2803718 - DNA, 25 bp, Homo sapien
ctttatggtgcttgacactttggcc

SEQ ID NO: 2803719 - DNA, 25 bp, Homo sapien
cacatgacttgtatcaccaaagggc

SEQ ID NO: 2803720 - DNA, 25 bp, Homo sapien
gacttgtatcaccaaagggcaatgg

SEQ ID NO: 2803721 - DNA, 25 bp, Homo sapien
tcctttgctttatggtgcttgacac

SEQ ID NO: 2803722 - DNA, 25 bp, Homo sapien
gagaggcaaaatgtaatgtttctac

SEQ ID NO: 2803723 - DNA, 25 bp, Homo sapien
aatgtttctacatctttgctttcta

SEQ ID NO: 2803724 - DNA, 25 bp, Homo sapien
ggcaaaatgtaatgtttctacatct

SEQ ID NO: 2803725 - DNA, 25 bp, Homo sapien
ctgagtaagagaggcaaaatgtaat

SEQ ID NO: 2803726 - DNA, 25 bp, Homo sapien
taatgggcactccactatagtgcat

SEQ ID NO: 2803727 - DNA, 25 bp, Homo sapien
ttcagtaatgggcactccactatag

SEQ ID NO: 2803728 - DNA, 25 bp, Homo sapien
cctttcagtaatgggcactccacta

SEQ ID NO: 2803729 - DNA, 25 bp, Homo sapien
tccctttcagtaatgggcactccac

SEQ ID NO: 2803730 - DNA, 25 bp, Homo sapien
catttctccttactaaattgatttt

SEQ ID NO: 2803731 - DNA, 25 bp, Homo sapien
tttctccttactaaattgattttca

SEQ ID NO: 2803732 - DNA, 25 bp, Homo sapien
ttctccttactaaattgattttcat

SEQ ID NO: 2803733 - DNA, 25 bp, Homo sapien
catgctgtctgggattaaatttcct

SEQ ID NO: 2803734 - DNA, 25 bp, Homo sapien
cacctgtgtgacattgggaaattta

SEQ ID NO: 2803735 - DNA, 25 bp, Homo sapien
taaaataacgactcttgagccatgc

SEQ ID NO: 2803736 - DNA, 25 bp, Homo sapien
ttatagcctctacttcatagggcag

SEQ ID NO: 2803737 - DNA, 25 bp, Homo sapien
tgacaagatgaagcaaccaggacat

SEQ ID NO: 2803738 - DNA, 25 bp, Homo sapien
ggactgagactcaatcctgatggca

SEQ ID NO: 2803739 - DNA, 25 bp, Homo sapien
tgtccaacacagaaccaagagatgg

SEQ ID NO: 2803740 - DNA, 25 bp, Homo sapien
taataagatgtatgtctagagccac

SEQ ID NO: 2803741 - DNA, 25 bp, Homo sapien
ctggagagaattagtggtagtcgcc

SEQ ID NO: 2803742 - DNA, 25 bp, Homo sapien
gagggtcagctccagtgaatgcaat

SEQ ID NO: 2803743 - DNA, 25 bp, Homo sapien
caaaatgcagaagtgctaggaatcc

SEQ ID NO: 2803744 - DNA, 25 bp, Homo sapien
ggtagtcgccacaagaaatgaaggt

SEQ ID NO: 2803745 - DNA, 25 bp, Homo sapien
ggcactgcccagacaaaacactatc

SEQ ID NO: 2803746 - DNA, 25 bp, Homo sapien
gataaatgtcatctctagtgcccaa

SEQ ID NO: 2803747 - DNA, 25 bp, Homo sapien
tatctgagagaataggaactgcagc

SEQ ID NO: 2803748 - DNA, 25 bp, Homo sapien
cagtttggtcctctaatggcttaca

SEQ ID NO: 2803749 - DNA, 25 bp, Homo sapien
cagctgtccgggtcccgacgcctta

SEQ ID NO: 2803750 - DNA, 25 bp, Homo sapien
tgcgcggcgtttctcaggggactcc

SEQ ID NO: 2803751 - DNA, 25 bp, Homo sapien
gggcacccaggactcgacgcctcct

SEQ ID NO: 2803752 - DNA, 25 bp, Homo sapien
agcggcgctcgccacccttggcacg

SEQ ID NO: 2803753 - DNA, 25 bp, Homo sapien
gggacaccgaggctgagcccgacca

SEQ ID NO: 2803754 - DNA, 25 bp, Homo sapien
ctttgccgaactgggggacaccgag

SEQ ID NO: 2803755 - DNA, 25 bp, Homo sapien
gccagacggctaccgagcgcttcat

SEQ ID NO: 2803756 - DNA, 25 bp, Homo sapien
aggctgagcccgaccaagagccaga

SEQ ID NO: 2803757 - DNA, 25 bp, Homo sapien
tccgcccctactaaagaattcaaga

SEQ ID NO: 2803758 - DNA, 25 bp, Homo sapien
cgccgggagcgcactgtgtacaaac

SEQ ID NO: 2803759 - DNA, 25 bp, Homo sapien
tcggctgtcgctgttctccgcgcgg

SEQ ID NO: 2803760 - DNA, 25 bp, Homo sapien
cttggagaacaatgaagcgtgagct

SEQ ID NO: 2803761 - DNA, 25 bp, Homo sapien
cagcacacaaccttcatcaaaagtt

SEQ ID NO: 2803762 - DNA, 25 bp, Homo sapien
agcacacaaccttcatcaaaagttt

SEQ ID NO: 2803763 - DNA, 25 bp, Homo sapien
tcaccctgacaaagctgtaaggcag

SEQ ID NO: 2803764 - DNA, 25 bp, Homo sapien
catcttttgctctttggtcaccctg

SEQ ID NO: 2803765 - DNA, 25 bp, Homo sapien
gacttacatgtatttagtccccacg

SEQ ID NO: 2803766 - DNA, 25 bp, Homo sapien
tacctcaattgttgagaaccagaaa

SEQ ID NO: 2803767 - DNA, 25 bp, Homo sapien
atacatgggtatcagttggttccag

SEQ ID NO: 2803768 - DNA, 25 bp, Homo sapien
gtgaacaatcatatacatgggtatc

SEQ ID NO: 2803769 - DNA, 25 bp, Homo sapien
tgggtatcagttggttccagaagca

SEQ ID NO: 2803770 - DNA, 25 bp, Homo sapien
gttcctgtgaacaatcatatacatg

SEQ ID NO: 2803771 - DNA, 25 bp, Homo sapien
aggattagataatgaaagaggagca

SEQ ID NO: 2803772 - DNA, 25 bp, Homo sapien
tattctattcgcatgaaaaaggaag

SEQ ID NO: 2803773 - DNA, 25 bp, Homo sapien
ggaggactgtggtcttcaagataac

SEQ ID NO: 2803774 - DNA, 25 bp, Homo sapien
tagtatgtaggcatgttgagctcca

SEQ ID NO: 2803775 - DNA, 25 bp, Homo sapien
catttggtgacttgcgcatggactg

SEQ ID NO: 2803776 - DNA, 25 bp, Homo sapien
tgcgcatggactggtgatgcgccat

SEQ ID NO: 2803777 - DNA, 25 bp, Homo sapien
tgacttgcgcatggactggtgatgc

SEQ ID NO: 2803778 - DNA, 25 bp, Homo sapien
atttggtgacttgcgcatggactgg

SEQ ID NO: 2803779 - DNA, 25 bp, Homo sapien
tgattacatagatccgatccataac

SEQ ID NO: 2803780 - DNA, 25 bp, Homo sapien
gattacatagatccgatccataact

SEQ ID NO: 2803781 - DNA, 25 bp, Homo sapien
atgattacatagatccgatccataa

SEQ ID NO: 2803782 - DNA, 25 bp, Homo sapien
gtgatggctttatgatgtttggcag

SEQ ID NO: 2803783 - DNA, 25 bp, Homo sapien
tttatgatgtttggcagcaggtcca

SEQ ID NO: 2803784 - DNA, 25 bp, Homo sapien
gctttatgatgtttggcagcaggtc

SEQ ID NO: 2803785 - DNA, 25 bp, Homo sapien
gatggctttatgatgtttggcagca

SEQ ID NO: 2803786 - DNA, 25 bp, Homo sapien
gaacccatttccctgttatctgatt

SEQ ID NO: 2803787 - DNA, 25 bp, Homo sapien
ttatatgtcgagcttctagaaatgt

SEQ ID NO: 2803788 - DNA, 25 bp, Homo sapien
tctctattattctgcacgtgaaccc

SEQ ID NO: 2803789 - DNA, 25 bp, Homo sapien
ttccaggtttagtctctgggattgg

SEQ ID NO: 2803790 - DNA, 25 bp, Homo sapien
tttgcatgctttactctggctctgg

SEQ ID NO: 2803791 - DNA, 25 bp, Homo sapien
tgatgtgcgttccagtctcagggaa

SEQ ID NO: 2803792 - DNA, 25 bp, Homo sapien
cagggaagacaccagatccatgagt

SEQ ID NO: 2803793 - DNA, 25 bp, Homo sapien
tccttggataaaccaattgtaacga

SEQ ID NO: 2803794 - DNA, 25 bp, Homo sapien
taactggcggtgtaaaagactttga

SEQ ID NO: 2803795 - DNA, 25 bp, Homo sapien
aaagccttctgtacttttggcaaca

SEQ ID NO: 2803796 - DNA, 25 bp, Homo sapien
aagccttctgtacttttggcaacat

SEQ ID NO: 2803797 - DNA, 25 bp, Homo sapien
tgggtctgtctaccatttttctctg

SEQ ID NO: 2803798 - DNA, 25 bp, Homo sapien
tcagccaactcccaacttcttgtca

SEQ ID NO: 2803799 - DNA, 25 bp, Homo sapien
tcatgtctttcatgatgggtctgtc

SEQ ID NO: 2803800 - DNA, 25 bp, Homo sapien
gaactctcatgtctttcatgatggg

SEQ ID NO: 2803801 - DNA, 25 bp, Homo sapien
ttccctgccttctctatgttcaagt

SEQ ID NO: 2803802 - DNA, 25 bp, Homo sapien
tccctgccttctctatgttcaagtt

SEQ ID NO: 2803803 - DNA, 25 bp, Homo sapien
cattctccattatacctctcgacat

SEQ ID NO: 2803804 - DNA, 25 bp, Homo sapien
tgccttctctatgttcaagttccac

SEQ ID NO: 2803805 - DNA, 25 bp, Homo sapien
tctaggtgatgtcagcgtatcctca

SEQ ID NO: 2803806 - DNA, 25 bp, Homo sapien
tatgagaaagcccaagagccaagtg

SEQ ID NO: 2803807 - DNA, 25 bp, Homo sapien
taggaaccactgctccagaatactc

SEQ ID NO: 2803808 - DNA, 25 bp, Homo sapien
ttaatagatgaagccggaagcaact

SEQ ID NO: 2803809 - DNA, 25 bp, Homo sapien
tatgttgccaagtccaagactcagc

SEQ ID NO: 2803810 - DNA, 25 bp, Homo sapien
cttaatctgtgtggtaaaagctggt

SEQ ID NO: 2803811 - DNA, 25 bp, Homo sapien
taaaagctggtatgttgccaagtcc

SEQ ID NO: 2803812 - DNA, 25 bp, Homo sapien
gtgtggtaaaagctggtatgttgcc

SEQ ID NO: 2803813 - DNA, 25 bp, Homo sapien
cctgcaggctatggtatgaaaggac

SEQ ID NO: 2803814 - DNA, 25 bp, Homo sapien
tgttgcaagatttgcatgactcttg

SEQ ID NO: 2803815 - DNA, 25 bp, Homo sapien
gactcttgtatttgatctgcaccac

SEQ ID NO: 2803816 - DNA, 25 bp, Homo sapien
gaaactgtcggtgttagtgactgct

SEQ ID NO: 2803817 - DNA, 25 bp, Homo sapien
ttagaactggagccttgactgtccc

SEQ ID NO: 2803818 - DNA, 25 bp, Homo sapien
agaactggagccttgactgtcccac

SEQ ID NO: 2803819 - DNA, 25 bp, Homo sapien
tagaactggagccttgactgtccca

SEQ ID NO: 2803820 - DNA, 25 bp, Homo sapien
tctacgagcttttagatactcagtg

SEQ ID NO: 2803821 - DNA, 25 bp, Homo sapien
ttccttaaggatctacgagctttta

SEQ ID NO: 2803822 - DNA, 25 bp, Homo sapien
tttagatactcagtgaaatagtctg

SEQ ID NO: 2803823 - DNA, 25 bp, Homo sapien
tcagtgaaatagtctgttgaattca

SEQ ID NO: 2803824 - DNA, 25 bp, Homo sapien
gtggagttcctagcgcaagggatcc

SEQ ID NO: 2803825 - DNA, 25 bp, Homo sapien
tcctaggcgtttgctttctaagtct

SEQ ID NO: 2803826 - DNA, 25 bp, Homo sapien
tcttcaggtggagttcctagcgcaa

SEQ ID NO: 2803827 - DNA, 25 bp, Homo sapien
ttcctaggcgtttgctttctaagtc

SEQ ID NO: 2803828 - DNA, 25 bp, Homo sapien
ggtaaatggataatgggaactgctc

SEQ ID NO: 2803829 - DNA, 25 bp, Homo sapien
ggataatgggaactgctctgttcca

SEQ ID NO: 2803830 - DNA, 25 bp, Homo sapien
ctgaggtaaatggataatgggaact

SEQ ID NO: 2803831 - DNA, 25 bp, Homo sapien
tgggaactgctctgttccaggacat

SEQ ID NO: 2803832 - DNA, 25 bp, Homo sapien
gttgatcctttagtgctctcaacac

SEQ ID NO: 2803833 - DNA, 25 bp, Homo sapien
ttgatcctttagtgctctcaacacc

SEQ ID NO: 2803834 - DNA, 25 bp, Homo sapien
tgatcctttagtgctctcaacacct

SEQ ID NO: 2803835 - DNA, 25 bp, Homo sapien
gctgtcagctggcaaagaccagttt

SEQ ID NO: 2803836 - DNA, 25 bp, Homo sapien
tccctcagtggccatattctgaacc

SEQ ID NO: 2803837 - DNA, 25 bp, Homo sapien
cctgctgtcagctggcaaagaccag

SEQ ID NO: 2803838 - DNA, 25 bp, Homo sapien
aaagaccagtttatctccctcagtg

SEQ ID NO: 2803839 - DNA, 25 bp, Homo sapien
ccttcacgcctatctttgagggcag

SEQ ID NO: 2803840 - DNA, 25 bp, Homo sapien
cagataagaacaaggttggacaggt

SEQ ID NO: 2803841 - DNA, 25 bp, Homo sapien
ctagggaaagagcttcaaaggatag

SEQ ID NO: 2803842 - DNA, 25 bp, Homo sapien
acagcaactactagggaaagagctt

SEQ ID NO: 2803843 - DNA, 25 bp, Homo sapien
tctgtccatgttccattccttgtcc

SEQ ID NO: 2803844 - DNA, 25 bp, Homo sapien
catgttccattccttgtcctcactt

SEQ ID NO: 2803845 - DNA, 25 bp, Homo sapien
cttccacatcaaggtctgtagacat

SEQ ID NO: 2803846 - DNA, 25 bp, Homo sapien
tcctcacttccacatcaaggtctgt

SEQ ID NO: 2803847 - DNA, 25 bp, Homo sapien
gggaatctgctggtttaagaatttc

SEQ ID NO: 2803848 - DNA, 25 bp, Homo sapien
cccaggtgcttcaggggaatctgct

SEQ ID NO: 2803849 - DNA, 25 bp, Homo sapien
gaatctgctggtttaagaatttcag

SEQ ID NO: 2803850 - DNA, 25 bp, Homo sapien
ctactgctgccaacccaggtgcttc

SEQ ID NO: 2803851 - DNA, 25 bp, Homo sapien
cccttctacatagaggaggataatc

SEQ ID NO: 2803852 - DNA, 25 bp, Homo sapien
taatcgacatagattagaactgtta

SEQ ID NO: 2803853 - DNA, 25 bp, Homo sapien
gaactgttattggtagtatttagga

SEQ ID NO: 2803854 - DNA, 25 bp, Homo sapien
tatttaggatattatagggcttccc

SEQ ID NO: 2803855 - DNA, 25 bp, Homo sapien
caatcttcgggtaattaactgcaga

SEQ ID NO: 2803856 - DNA, 25 bp, Homo sapien
cagtcgaatgagtttggtgtgatcc

SEQ ID NO: 2803857 - DNA, 25 bp, Homo sapien
tctaaaaagtttagtcagtcgaatg

SEQ ID NO: 2803858 - DNA, 25 bp, Homo sapien
ggaagctgttaagatccagaaggaa

SEQ ID NO: 2803859 - DNA, 25 bp, Homo sapien
aaaatgtccttgagccacaataaga

SEQ ID NO: 2803860 - DNA, 25 bp, Homo sapien
tgctgatgacatcgctgagttcaca

SEQ ID NO: 2803861 - DNA, 25 bp, Homo sapien
tgatgacatcgctgagttcacaaaa

SEQ ID NO: 2803862 - DNA, 25 bp, Homo sapien
gagccacaataagaagactatttgt

SEQ ID NO: 2803863 - DNA, 25 bp, Homo sapien
cagtgtatgagggttgaaaaaaatg

SEQ ID NO: 2803864 - DNA, 25 bp, Homo sapien
tatgtttcctcaacaaagaaaattg

SEQ ID NO: 2803865 - DNA, 25 bp, Homo sapien
atggaaatttgctctgtatgtttcc

SEQ ID NO: 2803866 - DNA, 25 bp, Homo sapien
aattgaatcttcaaagacagtgtat

SEQ ID NO: 2803867 - DNA, 25 bp, Homo sapien
tggtgttctccaagacataagactt

SEQ ID NO: 2803868 - DNA, 25 bp, Homo sapien
tccacacgcaaaacaggagatgcag

SEQ ID NO: 2803869 - DNA, 25 bp, Homo sapien
gaaaccatagactatcaatgggctg

SEQ ID NO: 2803870 - DNA, 25 bp, Homo sapien
tacctacgagtggaaacgagctgtg

SEQ ID NO: 2803871 - DNA, 25 bp, Homo sapien
ctagagttttccacagtcaacaatg

SEQ ID NO: 2803872 - DNA, 25 bp, Homo sapien
tccacagtcaacaatggtgatcttt

SEQ ID NO: 2803873 - DNA, 25 bp, Homo sapien
gttttccacagtcaacaatggtgat

SEQ ID NO: 2803874 - DNA, 25 bp, Homo sapien
tttccacagtcaacaatggtgatct

SEQ ID NO: 2803875 - DNA, 25 bp, Homo sapien
ttcctgaagtgttccatagcctatg

SEQ ID NO: 2803876 - DNA, 25 bp, Homo sapien
gtttgtgccaggtccagcatttgcc

SEQ ID NO: 2803877 - DNA, 25 bp, Homo sapien
aaacgtttgtgccaggtccagcatt

SEQ ID NO: 2803878 - DNA, 25 bp, Homo sapien
ggaaacgtttgtgccaggtccagca

SEQ ID NO: 2803879 - DNA, 25 bp, Homo sapien
ctgggaaacgtttgtgccaggtcca

SEQ ID NO: 2803880 - DNA, 25 bp, Homo sapien
acttgtctgcaaatctgcaaatagc

SEQ ID NO: 2803881 - DNA, 25 bp, Homo sapien
ctacggcgatgttgaagaacatggt

SEQ ID NO: 2803882 - DNA, 25 bp, Homo sapien
tgaagaacatggtagggttgactgt

SEQ ID NO: 2803883 - DNA, 25 bp, Homo sapien
tgttgaagaacatggtagggttgac

SEQ ID NO: 2803884 - DNA, 25 bp, Homo sapien
atgttgaagaacatggtagggttga

SEQ ID NO: 2803885 - DNA, 25 bp, Homo sapien
tctgtaaaagaaaaatgacccgtga

SEQ ID NO: 2803886 - DNA, 25 bp, Homo sapien
ccctttatttgcactctcctgttag

SEQ ID NO: 2803887 - DNA, 25 bp, Homo sapien
caacagactgccagatggttccaag

SEQ ID NO: 2803888 - DNA, 25 bp, Homo sapien
catggactccttttgccacagtgtc

SEQ ID NO: 2803889 - DNA, 25 bp, Homo sapien
tctcctgttagcactgattcttttg

SEQ ID NO: 2803890 - DNA, 25 bp, Homo sapien
gtggctattcacaagcacatcccac

SEQ ID NO: 2803891 - DNA, 25 bp, Homo sapien
gctattcacaagcacatcccactac

SEQ ID NO: 2803892 - DNA, 25 bp, Homo sapien
ttcacaagcacatcccactactgat

SEQ ID NO: 2803893 - DNA, 25 bp, Homo sapien
tatagacaaagtttcattatgttgc

SEQ ID NO: 2803894 - DNA, 25 bp, Homo sapien
tccatcacccacttcatatgtgttc

SEQ ID NO: 2803895 - DNA, 25 bp, Homo sapien
cccacttcatatgtgttcaaagata

SEQ ID NO: 2803896 - DNA, 25 bp, Homo sapien
tctattggatgtggagcataggtcc

SEQ ID NO: 2803897 - DNA, 25 bp, Homo sapien
taggaaaggaagaattctattggat

SEQ ID NO: 2803898 - DNA, 25 bp, Homo sapien
tgtagttgctctacacggacaagga

SEQ ID NO: 2803899 - DNA, 25 bp, Homo sapien
ctctacacggacaaggagaagagtg

SEQ ID NO: 2803900 - DNA, 25 bp, Homo sapien
tcagtcgacaaattgcaaaagtcat

SEQ ID NO: 2803901 - DNA, 25 bp, Homo sapien
gcaataagataatcactccacagtt

SEQ ID NO: 2803902 - DNA, 25 bp, Homo sapien
gccccagcattttagctgtccaagt

SEQ ID NO: 2803903 - DNA, 25 bp, Homo sapien
tgccccagcattttagctgtccaag

SEQ ID NO: 2803904 - DNA, 25 bp, Homo sapien
ccccagcattttagctgtccaagtc

SEQ ID NO: 2803905 - DNA, 25 bp, Homo sapien
atgtcaccctgagtctttgttccca

SEQ ID NO: 2803906 - DNA, 25 bp, Homo sapien
tgtcaccctgagtctttgttcccat

SEQ ID NO: 2803907 - DNA, 25 bp, Homo sapien
ctcctttggtactgtaggtgctgcc

SEQ ID NO: 2803908 - DNA, 25 bp, Homo sapien
ttaatactgatctgtagccacagtg

SEQ ID NO: 2803909 - DNA, 25 bp, Homo sapien
agccacagtgaaatcaattgtaact

SEQ ID NO: 2803910 - DNA, 25 bp, Homo sapien
tagccacagtgaaatcaattgtaac

SEQ ID NO: 2803911 - DNA, 25 bp, Homo sapien
ctgtagccacagtgaaatcaattgt

SEQ ID NO: 2803912 - DNA, 25 bp, Homo sapien
atgtctctcattcgcatagcattct

SEQ ID NO: 2803913 - DNA, 25 bp, Homo sapien
aaatggctcatgtctctcattcgca

SEQ ID NO: 2803914 - DNA, 25 bp, Homo sapien
ttaaatggctcatgtctctcattcg

SEQ ID NO: 2803915 - DNA, 25 bp, Homo sapien
tctcattcgcatagcattcttcaat

SEQ ID NO: 2803916 - DNA, 25 bp, Homo sapien
tatgctttgtaggaatctgaaaaac

SEQ ID NO: 2803917 - DNA, 25 bp, Homo sapien
caatgcacccggcctttgaaagtta

SEQ ID NO: 2803918 - DNA, 25 bp, Homo sapien
cagttggatgatctgtttgggaata

SEQ ID NO: 2803919 - DNA, 25 bp, Homo sapien
tttgggaataattggctgaatctgc

SEQ ID NO: 2803920 - DNA, 25 bp, Homo sapien
ttgctgtgctgtccccatttgcatg

SEQ ID NO: 2803921 - DNA, 25 bp, Homo sapien
gtattttttagacagttggatgatc

SEQ ID NO: 2803922 - DNA, 25 bp, Homo sapien
gaacatactcattatttgggctaat

SEQ ID NO: 2803923 - DNA, 25 bp, Homo sapien
tggctttggtgcatcaagtgtctcc

SEQ ID NO: 2803924 - DNA, 25 bp, Homo sapien
gtctcccagttaatatttagaacat

SEQ ID NO: 2803925 - DNA, 25 bp, Homo sapien
tttagaacatactcattatttgggc

SEQ ID NO: 2803926 - DNA, 25 bp, Homo sapien
catttggagcaggtgctctcggaac

SEQ ID NO: 2803927 - DNA, 25 bp, Homo sapien
ggtgctctcggaactggagttttct

SEQ ID NO: 2803928 - DNA, 25 bp, Homo sapien
gcttttggaagaggacctgccttct

SEQ ID NO: 2803929 - DNA, 25 bp, Homo sapien
ggcttctaggctggagccttctttc

SEQ ID NO: 2803930 - DNA, 25 bp, Homo sapien
ttagcagcaggtgttttttcaggag

SEQ ID NO: 2803931 - DNA, 25 bp, Homo sapien
tgtactgacattggcctcctgccag

SEQ ID NO: 2803932 - DNA, 25 bp, Homo sapien
ttgtactgacattggcctcctgcca

SEQ ID NO: 2803933 - DNA, 25 bp, Homo sapien
tgaggatgaagtcagtgagccgcat

SEQ ID NO: 2803934 - DNA, 25 bp, Homo sapien
ctgtgtacgaacttgaggatgaagt

SEQ ID NO: 2803935 - DNA, 25 bp, Homo sapien
acttgaggatgaagtcagtgagccg

SEQ ID NO: 2803936 - DNA, 25 bp, Homo sapien
tgtgtacgaacttgaggatgaagtc

SEQ ID NO: 2803937 - DNA, 25 bp, Homo sapien
gcaatgtccattaatcaaagccctg

SEQ ID NO: 2803938 - DNA, 25 bp, Homo sapien
tgtctccttaccctagtgcaatgtc

SEQ ID NO: 2803939 - DNA, 25 bp, Homo sapien
catttgaaaggagcggcctgtctcc

SEQ ID NO: 2803940 - DNA, 25 bp, Homo sapien
aattgggaccggctttctggcatga

SEQ ID NO: 2803941 - DNA, 25 bp, Homo sapien
gaaaagcaacttatgtcccaaagct

SEQ ID NO: 2803942 - DNA, 25 bp, Homo sapien
tctgaaaggttaaacaagtgagcat

SEQ ID NO: 2803943 - DNA, 25 bp, Homo sapien
cacaggtgtagacagtcactctaaa

SEQ ID NO: 2803944 - DNA, 25 bp, Homo sapien
caatagatcaaagagctttatgagt

SEQ ID NO: 2803945 - DNA, 25 bp, Homo sapien
atcaactctgttacattattgtcac

SEQ ID NO: 2803946 - DNA, 25 bp, Homo sapien
tcaactctgttacattattgtcact

SEQ ID NO: 2803947 - DNA, 25 bp, Homo sapien
ctctgttacattattgtcacttaga

SEQ ID NO: 2803948 - DNA, 25 bp, Homo sapien
taaaggccttgctatacaaacagag

SEQ ID NO: 2803949 - DNA, 25 bp, Homo sapien
ttcgccacatgctgaaaagcttacc

SEQ ID NO: 2803950 - DNA, 25 bp, Homo sapien
gacaagatagctgcattaagccctg

SEQ ID NO: 2803951 - DNA, 25 bp, Homo sapien
tatactcaggaggagggtagttctc

SEQ ID NO: 2803952 - DNA, 25 bp, Homo sapien
acaaaatgtaactgagccttgaaaa

SEQ ID NO: 2803953 - DNA, 25 bp, Homo sapien
tctacaaaatgtaactgagccttga

SEQ ID NO: 2803954 - DNA, 25 bp, Homo sapien
ttctacaaaatgtaactgagccttg

SEQ ID NO: 2803955 - DNA, 25 bp, Homo sapien
ttttctacaaaatgtaactgagcct

SEQ ID NO: 2803956 - DNA, 25 bp, Homo sapien
tgcttacatatatcagcagaaagct

SEQ ID NO: 2803957 - DNA, 25 bp, Homo sapien
tacacgatgacccagggagaaaaaa

SEQ ID NO: 2803958 - DNA, 25 bp, Homo sapien
tcaacattcaccagagatagtagta

SEQ ID NO: 2803959 - DNA, 25 bp, Homo sapien
aaataatcacaagactttgcttaca

SEQ ID NO: 2803960 - DNA, 25 bp, Homo sapien
catggttttgtgatagcctgctcta

SEQ ID NO: 2803961 - DNA, 25 bp, Homo sapien
gctctatctcttataagtctttcca

SEQ ID NO: 2803962 - DNA, 25 bp, Homo sapien
tagcctgctctatctcttataagtc

SEQ ID NO: 2803963 - DNA, 25 bp, Homo sapien
gtgggattctctcatggttttgtga

SEQ ID NO: 2803964 - DNA, 25 bp, Homo sapien
tctgggttgtacagttaaggtgtaa

SEQ ID NO: 2803965 - DNA, 25 bp, Homo sapien
agagcctctgggttgtacagttaag

SEQ ID NO: 2803966 - DNA, 25 bp, Homo sapien
gagcctctgggttgtacagttaagg

SEQ ID NO: 2803967 - DNA, 25 bp, Homo sapien
gcctctgggttgtacagttaaggtg

SEQ ID NO: 2803968 - DNA, 25 bp, Homo sapien
tgggcattcttcagtaacggaattt

SEQ ID NO: 2803969 - DNA, 25 bp, Homo sapien
gggcattcttcagtaacggaattta

SEQ ID NO: 2803970 - DNA, 25 bp, Homo sapien
ggcattcttcagtaacggaatttac

SEQ ID NO: 2803971 - DNA, 25 bp, Homo sapien
cattcttcagtaacggaatttactt

SEQ ID NO: 2803972 - DNA, 25 bp, Homo sapien
ggcgtcattactcctaagacatgaa

SEQ ID NO: 2803973 - DNA, 25 bp, Homo sapien
gtctgagttggcgtcattactccta

SEQ ID NO: 2803974 - DNA, 25 bp, Homo sapien
tgatttagtctgagttggcgtcatt

SEQ ID NO: 2803975 - DNA, 25 bp, Homo sapien
ttactcctaagacatgaagtttttg

SEQ ID NO: 2803976 - DNA, 25 bp, Homo sapien
aaatttcggtactctggattagtcg

SEQ ID NO: 2803977 - DNA, 25 bp, Homo sapien
tactctggattagtcggtacttcac

SEQ ID NO: 2803978 - DNA, 25 bp, Homo sapien
tcggtactctggattagtcggtact

SEQ ID NO: 2803979 - DNA, 25 bp, Homo sapien
tattcaataaaatttcggtactctg

SEQ ID NO: 2803980 - DNA, 25 bp, Homo sapien
tctaaagttgtcatagcttcgcgtc

SEQ ID NO: 2803981 - DNA, 25 bp, Homo sapien
tcaagtgctcttgatgcaggagttt

SEQ ID NO: 2803982 - DNA, 25 bp, Homo sapien
catttgtcctgcttccgctttcaga

SEQ ID NO: 2803983 - DNA, 25 bp, Homo sapien
tcggttcttgtctcaggaccagcaa

SEQ ID NO: 2803984 - DNA, 25 bp, Homo sapien
tgctgggtgttgatgtagatcttcc

SEQ ID NO: 2803985 - DNA, 25 bp, Homo sapien
aaatatatgggttggcaatgagagc

SEQ ID NO: 2803986 - DNA, 25 bp, Homo sapien
tcaaatatatgggttggcaatgaga

SEQ ID NO: 2803987 - DNA, 25 bp, Homo sapien
gttgatgtagatcttccctagggtc

SEQ ID NO: 2803988 - DNA, 25 bp, Homo sapien
catgcctgcatatttccttgttgga

SEQ ID NO: 2803989 - DNA, 25 bp, Homo sapien
ccagtgttgctgttccaagtaagga

SEQ ID NO: 2803990 - DNA, 25 bp, Homo sapien
tccttgttggaatctcccttctttg

SEQ ID NO: 2803991 - DNA, 25 bp, Homo sapien
caagtaaggagctattgttttggcc

SEQ ID NO: 2803992 - DNA, 25 bp, Homo sapien
agaataacagcccattttttcacca

SEQ ID NO: 2803993 - DNA, 25 bp, Homo sapien
gcagtcttaattgcaagcattagaa

SEQ ID NO: 2803994 - DNA, 25 bp, Homo sapien
tgcttgccttggcatagataatagg

SEQ ID NO: 2803995 - DNA, 25 bp, Homo sapien
cagtatcaaaatcccaccttcggtt

SEQ ID NO: 2803996 - DNA, 25 bp, Homo sapien
gaaattgcctagcactaataccagt

SEQ ID NO: 2803997 - DNA, 25 bp, Homo sapien
cagagtaggcagaccaggatttcag

SEQ ID NO: 2803998 - DNA, 25 bp, Homo sapien
taaatgtcatagaaacttacctctg

SEQ ID NO: 2803999 - DNA, 25 bp, Homo sapien
cagagtaacgaaattcagaagaagc

SEQ ID NO: 2804000 - DNA, 25 bp, Homo sapien
caacggcagtgggtctttcatttgt

SEQ ID NO: 2804001 - DNA, 25 bp, Homo sapien
tccccatagggtgactgtggcatgc

SEQ ID NO: 2804002 - DNA, 25 bp, Homo sapien
catatggactgtcagttgcctctgg

SEQ ID NO: 2804003 - DNA, 25 bp, Homo sapien
gagtgcattgctagtacatgccacg

SEQ ID NO: 2804004 - DNA, 25 bp, Homo sapien
cagcagcaatggtagagagcctgtc

SEQ ID NO: 2804005 - DNA, 25 bp, Homo sapien
gcttttccatacaacagctgtggtg

SEQ ID NO: 2804006 - DNA, 25 bp, Homo sapien
gagcctccactgactgaagtaatca

SEQ ID NO: 2804007 - DNA, 25 bp, Homo sapien
tgtggtgtgctagaggcccatgact

SEQ ID NO: 2804008 - DNA, 25 bp, Homo sapien
gtatgtagtcactttcatattaata

SEQ ID NO: 2804009 - DNA, 25 bp, Homo sapien
gcagtatgtagtcactttcatatta

SEQ ID NO: 2804010 - DNA, 25 bp, Homo sapien
tgtgcagtatgtagtcactttcata

SEQ ID NO: 2804011 - DNA, 25 bp, Homo sapien
gtgcagtatgtagtcactttcatat

SEQ ID NO: 2804012 - DNA, 25 bp, Homo sapien
cacaatatggctgataatcgcagtt

SEQ ID NO: 2804013 - DNA, 25 bp, Homo sapien
cctgcagtcataggtaaactagtgc

SEQ ID NO: 2804014 - DNA, 25 bp, Homo sapien
taaatgtgtattcaaaccctgcagt

SEQ ID NO: 2804015 - DNA, 25 bp, Homo sapien
cacacattgcagcttggctagtagg

SEQ ID NO: 2804016 - DNA, 25 bp, Homo sapien
ccaagatgtgttgttgataccagaa

SEQ ID NO: 2804017 - DNA, 25 bp, Homo sapien
ggattgcattttctgccagagagaa

SEQ ID NO: 2804018 - DNA, 25 bp, Homo sapien
gcagtttccaccagccaagatgtgt

SEQ ID NO: 2804019 - DNA, 25 bp, Homo sapien
ttttttgtcgtatccctcaggattg

SEQ ID NO: 2804020 - DNA, 25 bp, Homo sapien
attaggcctctgaggacttaggagc

SEQ ID NO: 2804021 - DNA, 25 bp, Homo sapien
ttaggcctctgaggacttaggagca

SEQ ID NO: 2804022 - DNA, 25 bp, Homo sapien
tctgaggacttaggagcatcaagga

SEQ ID NO: 2804023 - DNA, 25 bp, Homo sapien
gaggacttaggagcatcaaggacat

SEQ ID NO: 2804024 - DNA, 25 bp, Homo sapien
cagaggccaaataggtggtttcagc

SEQ ID NO: 2804025 - DNA, 25 bp, Homo sapien
tctttcagaggccaaataggtggtt

SEQ ID NO: 2804026 - DNA, 25 bp, Homo sapien
tcagaggccaaataggtggtttcag

SEQ ID NO: 2804027 - DNA, 25 bp, Homo sapien
gaccaaatgcgccttttttatcttc

SEQ ID NO: 2804028 - DNA, 25 bp, Homo sapien
aatgaaaggaaaggtgctacacact

SEQ ID NO: 2804029 - DNA, 25 bp, Homo sapien
gacgtgagatttgtgcaggaaaaca

SEQ ID NO: 2804030 - DNA, 25 bp, Homo sapien
catttcagcgtgagctcaaaagtct

SEQ ID NO: 2804031 - DNA, 25 bp, Homo sapien
ggaaccatgtcttatgtggccagag

SEQ ID NO: 2804032 - DNA, 25 bp, Homo sapien
tagtttcaaaaacctatcttcaggc

SEQ ID NO: 2804033 - DNA, 25 bp, Homo sapien
caaaaggtaggacatctaagccagg

SEQ ID NO: 2804034 - DNA, 25 bp, Homo sapien
ttattgcaaccatcgctgtctgggc

SEQ ID NO: 2804035 - DNA, 25 bp, Homo sapien
taagccaggtgcgatgatgtatacc

SEQ ID NO: 2804036 - DNA, 25 bp, Homo sapien
tactcagagactaccataaccacct

SEQ ID NO: 2804037 - DNA, 25 bp, Homo sapien
ccaaaacctggtggagacgcaacaa

SEQ ID NO: 2804038 - DNA, 25 bp, Homo sapien
ggtatcattaccacggaaactattc

SEQ ID NO: 2804039 - DNA, 25 bp, Homo sapien
ccttctcaagactgaaccggtaaga

SEQ ID NO: 2804040 - DNA, 25 bp, Homo sapien
tttggctaacatcatacataagagt

SEQ ID NO: 2804041 - DNA, 25 bp, Homo sapien
tcattttggctaacatcatacataa

SEQ ID NO: 2804042 - DNA, 25 bp, Homo sapien
ttttggctaacatcatacataagag

SEQ ID NO: 2804043 - DNA, 25 bp, Homo sapien
ggctaacatcatacataagagttct

SEQ ID NO: 2804044 - DNA, 25 bp, Homo sapien
cacccttcagtatgaagtatctcca

SEQ ID NO: 2804045 - DNA, 25 bp, Homo sapien
tatgaagtatctccagcattgtctc

SEQ ID NO: 2804046 - DNA, 25 bp, Homo sapien
atgaagtatctccagcattgtctcc

SEQ ID NO: 2804047 - DNA, 25 bp, Homo sapien
cagtatgaagtatctccagcattgt

SEQ ID NO: 2804048 - DNA, 25 bp, Homo sapien
tgtccttgaaagtccctaagaatct

SEQ ID NO: 2804049 - DNA, 25 bp, Homo sapien
agtgtccttgaaagtccctaagaat

SEQ ID NO: 2804050 - DNA, 25 bp, Homo sapien
gatatttatcaggtccacctgatca

SEQ ID NO: 2804051 - DNA, 25 bp, Homo sapien
ttatcaggtccacctgatcaagagc

SEQ ID NO: 2804052 - DNA, 25 bp, Homo sapien
gagaagacatggttgatgggtactc

SEQ ID NO: 2804053 - DNA, 25 bp, Homo sapien
caaagtcattgagcgggcttggaga

SEQ ID NO: 2804054 - DNA, 25 bp, Homo sapien
tattgacgcttataaggaggtaact

SEQ ID NO: 2804055 - DNA, 25 bp, Homo sapien
cacaaatatgccagatccagttcaa

SEQ ID NO: 2804056 - DNA, 25 bp, Homo sapien
tgtgggaattgctgactgtgctgtg

SEQ ID NO: 2804057 - DNA, 25 bp, Homo sapien
gtgtgggaattgctgactgtgctgt

SEQ ID NO: 2804058 - DNA, 25 bp, Homo sapien
ctactgaagtagctcctcaggttct

SEQ ID NO: 2804059 - DNA, 25 bp, Homo sapien
tactgaagtagctcctcaggttctt

SEQ ID NO: 2804060 - DNA, 25 bp, Homo sapien
ctgaagtagctcctcaggttcttcc

SEQ ID NO: 2804061 - DNA, 25 bp, Homo sapien
actgaagtagctcctcaggttcttc

SEQ ID NO: 2804062 - DNA, 25 bp, Homo sapien
ttgagtctgctgtccatgacagtct

SEQ ID NO: 2804063 - DNA, 25 bp, Homo sapien
tgagtctgctgtccatgacagtctc

SEQ ID NO: 2804064 - DNA, 25 bp, Homo sapien
cttctgtgtctgttgattcttgcat

SEQ ID NO: 2804065 - DNA, 25 bp, Homo sapien
cccctggaggatgacaataatgact

SEQ ID NO: 2804066 - DNA, 25 bp, Homo sapien
ggaaaaaagcccctggaggatgaca

SEQ ID NO: 2804067 - DNA, 25 bp, Homo sapien
taatgactcctatggggtcccttgg

SEQ ID NO: 2804068 - DNA, 25 bp, Homo sapien
agttgagctcctgtggtataccaca

SEQ ID NO: 2804069 - DNA, 25 bp, Homo sapien
ctctcagagaagcacaatgtgcata

SEQ ID NO: 2804070 - DNA, 25 bp, Homo sapien
tcccctgttggcacagtatgcagtt

SEQ ID NO: 2804071 - DNA, 25 bp, Homo sapien
aatcttatcccggagataatctccc

SEQ ID NO: 2804072 - DNA, 25 bp, Homo sapien
gaaggctctgaatgtggtagtgaaa

SEQ ID NO: 2804073 - DNA, 25 bp, Homo sapien
ggtagtgaaagaacgaatgtcatct

SEQ ID NO: 2804074 - DNA, 25 bp, Homo sapien
gaaagtttgctgacgtagactccta

SEQ ID NO: 2804075 - DNA, 25 bp, Homo sapien
ctaccagtgagtgtgcagggagtat

SEQ ID NO: 2804076 - DNA, 25 bp, Homo sapien
tattccatacatgcatctgttggag

SEQ ID NO: 2804077 - DNA, 25 bp, Homo sapien
gagcagcagagccaaaaatgccagt

SEQ ID NO: 2804078 - DNA, 25 bp, Homo sapien
ctgtattccatacatgcatctgttg

SEQ ID NO: 2804079 - DNA, 25 bp, Homo sapien
gcagagccaaaaatgccagtgcccc

SEQ ID NO: 2804080 - DNA, 25 bp, Homo sapien
ttttctctgatcgtcaccttccaaa

SEQ ID NO: 2804081 - DNA, 25 bp, Homo sapien
gatcgtcaccttccaaagcgcataa

SEQ ID NO: 2804082 - DNA, 25 bp, Homo sapien
ccttccaaagcgcataaatattcaa

SEQ ID NO: 2804083 - DNA, 25 bp, Homo sapien
gcactgtagcttcctgtgccagctt

SEQ ID NO: 2804084 - DNA, 25 bp, Homo sapien
aagtcgggtaacctgagaatcagga

SEQ ID NO: 2804085 - DNA, 25 bp, Homo sapien
agtcgggtaacctgagaatcaggag

SEQ ID NO: 2804086 - DNA, 25 bp, Homo sapien
tttagcttttcagcttttccaccca

SEQ ID NO: 2804087 - DNA, 25 bp, Homo sapien
ttagcttttcagcttttccacccat

SEQ ID NO: 2804088 - DNA, 25 bp, Homo sapien
ctaggcagcttctacatgggccttt

SEQ ID NO: 2804089 - DNA, 25 bp, Homo sapien
tctacccttgtttaggctgatcttg

SEQ ID NO: 2804090 - DNA, 25 bp, Homo sapien
taggcagcttctacatgggcctttg

SEQ ID NO: 2804091 - DNA, 25 bp, Homo sapien
atgaaagcagtctattccagacaga

SEQ ID NO: 2804092 - DNA, 25 bp, Homo sapien
gacagaggggcttgtaggggttgga

SEQ ID NO: 2804093 - DNA, 25 bp, Homo sapien
gagatgaaagcagtctattccagac

SEQ ID NO: 2804094 - DNA, 25 bp, Homo sapien
tcatatcgaacaaccttccccaaac

SEQ ID NO: 2804095 - DNA, 25 bp, Homo sapien
cacagaggctctcgacttcagctct

SEQ ID NO: 2804096 - DNA, 25 bp, Homo sapien
gacttcagctctagatgtgctgagg

SEQ ID NO: 2804097 - DNA, 25 bp, Homo sapien
atacgtgcacgtgggtcgggttaag

SEQ ID NO: 2804098 - DNA, 25 bp, Homo sapien
tgtgctgaggaatacgtgcacgtgg

SEQ ID NO: 2804099 - DNA, 25 bp, Homo sapien
tccataataataggctctggacaaa

SEQ ID NO: 2804100 - DNA, 25 bp, Homo sapien
tttccataataataggctctggaca

SEQ ID NO: 2804101 - DNA, 25 bp, Homo sapien
gtttccataataataggctctggac

SEQ ID NO: 2804102 - DNA, 25 bp, Homo sapien
tgtttccataataataggctctgga

SEQ ID NO: 2804103 - DNA, 25 bp, Homo sapien
tgtaacaacctttggataacctatc

SEQ ID NO: 2804104 - DNA, 25 bp, Homo sapien
tactattacaataaccctggtcaaa

SEQ ID NO: 2804105 - DNA, 25 bp, Homo sapien
tctttgtgtcgatactaatggtaca

SEQ ID NO: 2804106 - DNA, 25 bp, Homo sapien
gagaactatttcaagacttggtcag

SEQ ID NO: 2804107 - DNA, 25 bp, Homo sapien
gggtcggccatccatctaggctcaa

SEQ ID NO: 2804108 - DNA, 25 bp, Homo sapien
gcaagccaggtgatgtagagcccac

SEQ ID NO: 2804109 - DNA, 25 bp, Homo sapien
tgaaagaaatggtaggagcagcaag

SEQ ID NO: 2804110 - DNA, 25 bp, Homo sapien
tagtggaacaaagatagggtcggcc

SEQ ID NO: 2804111 - DNA, 25 bp, Homo sapien
gagtttcagcaaggtagcccctgta

SEQ ID NO: 2804112 - DNA, 25 bp, Homo sapien
actgacagaccgtgcctgactggca

SEQ ID NO: 2804113 - DNA, 25 bp, Homo sapien
gctgggcaatctcaggttccctgga

SEQ ID NO: 2804114 - DNA, 25 bp, Homo sapien
gatgaggccggtccgacttgagctc

SEQ ID NO: 2804115 - DNA, 25 bp, Homo sapien
tataggaacaaatataacagcttgc

SEQ ID NO: 2804116 - DNA, 25 bp, Homo sapien
tgatacagtctttcactatcgagaa

SEQ ID NO: 2804117 - DNA, 25 bp, Homo sapien
ataaaaagatgcctgtgttcaagct

SEQ ID NO: 2804118 - DNA, 25 bp, Homo sapien
acaatgttgaatagccatggtcagg

SEQ ID NO: 2804119 - DNA, 25 bp, Homo sapien
cagtgttccatacttgcatgtgaga

SEQ ID NO: 2804120 - DNA, 25 bp, Homo sapien
tagggccttcatccctggtactcag

SEQ ID NO: 2804121 - DNA, 25 bp, Homo sapien
cagtatttctcatgcccactcagga

SEQ ID NO: 2804122 - DNA, 25 bp, Homo sapien
gagactccactcagatgttagcaat

SEQ ID NO: 2804123 - DNA, 25 bp, Homo sapien
gagttagctgatgagttaatcctag

SEQ ID NO: 2804124 - DNA, 25 bp, Homo sapien
gattcttatcatgccactagtttgc

SEQ ID NO: 2804125 - DNA, 25 bp, Homo sapien
ggtaattccatggtctacagctaac

SEQ ID NO: 2804126 - DNA, 25 bp, Homo sapien
tctttacaaagactctgctcatcca

SEQ ID NO: 2804127 - DNA, 25 bp, Homo sapien
taaacctagagaatactgtaactct

SEQ ID NO: 2804128 - DNA, 25 bp, Homo sapien
tttagaccagagattagaatggaga

SEQ ID NO: 2804129 - DNA, 25 bp, Homo sapien
taaatggacttggattaaacctaga

SEQ ID NO: 2804130 - DNA, 25 bp, Homo sapien
gaaaagagcattaacaaattatgtc

SEQ ID NO: 2804131 - DNA, 25 bp, Homo sapien
accatgctggctgattagctgtatc

SEQ ID NO: 2804132 - DNA, 25 bp, Homo sapien
tgtgtctatgtacaaaatgttgagc

SEQ ID NO: 2804133 - DNA, 25 bp, Homo sapien
cattcagattttcaccataaaccct

SEQ ID NO: 2804134 - DNA, 25 bp, Homo sapien
tactgcattagagaatgaataaagg

SEQ ID NO: 2804135 - DNA, 25 bp, Homo sapien
ttcatttggattctcttccttctgg

SEQ ID NO: 2804136 - DNA, 25 bp, Homo sapien
catttggattctcttccttctggaa

SEQ ID NO: 2804137 - DNA, 25 bp, Homo sapien
acttctctttcaaatattcatttgg

SEQ ID NO: 2804138 - DNA, 25 bp, Homo sapien
tcaaatattcatttggattctcttc

SEQ ID NO: 2804139 - DNA, 25 bp, Homo sapien
tgacttagctcatctcgcctacttg

SEQ ID NO: 2804140 - DNA, 25 bp, Homo sapien
cttagctcatctcgcctacttgtaa

SEQ ID NO: 2804141 - DNA, 25 bp, Homo sapien
tttgttgacttagctcatctcgcct

SEQ ID NO: 2804142 - DNA, 25 bp, Homo sapien
agtttttgttgacttagctcatctc

SEQ ID NO: 2804143 - DNA, 25 bp, Homo sapien
agctcccaaatcctgatgttttctt

SEQ ID NO: 2804144 - DNA, 25 bp, Homo sapien
gatatgtgacaatatgcagtacttt

SEQ ID NO: 2804145 - DNA, 25 bp, Homo sapien
cacaatacctgtacacataagcatt

SEQ ID NO: 2804146 - DNA, 25 bp, Homo sapien
tagtctggtaaacctatctacttgg

SEQ ID NO: 2804147 - DNA, 25 bp, Homo sapien
taatgtggttcaatacttcaaggaa

SEQ ID NO: 2804148 - DNA, 25 bp, Homo sapien
tcaccagaagccttcagcacttcat

SEQ ID NO: 2804149 - DNA, 25 bp, Homo sapien
gcacttcatgctgagactcttctcc

SEQ ID NO: 2804150 - DNA, 25 bp, Homo sapien
cagtggagataagcttttcatagac

SEQ ID NO: 2804151 - DNA, 25 bp, Homo sapien
caaatatcaaatcaccagaagcctt

SEQ ID NO: 2804152 - DNA, 25 bp, Homo sapien
catcttaagtcatctcttaattctc

SEQ ID NO: 2804153 - DNA, 25 bp, Homo sapien
ccatcttaagtcatctcttaattct

SEQ ID NO: 2804154 - DNA, 25 bp, Homo sapien
tttctccatatctaccatcatctta

SEQ ID NO: 2804155 - DNA, 25 bp, Homo sapien
tccatatctaccatcatcttataca

SEQ ID NO: 2804156 - DNA, 25 bp, Homo sapien
cctgtaaatccgagcacaatgggag

SEQ ID NO: 2804157 - DNA, 25 bp, Homo sapien
tgtaaatccgagcacaatgggaggc

SEQ ID NO: 2804158 - DNA, 25 bp, Homo sapien
catacctgtaaatccgagcacaatg

SEQ ID NO: 2804159 - DNA, 25 bp, Homo sapien
tacctgtaaatccgagcacaatggg

SEQ ID NO: 2804160 - DNA, 25 bp, Homo sapien
caaggtactgttgatgcttgaacaa

SEQ ID NO: 2804161 - DNA, 25 bp, Homo sapien
catgagttggaacatcatgagtcca

SEQ ID NO: 2804162 - DNA, 25 bp, Homo sapien
aatctattctgtgtactgtccatgg

SEQ ID NO: 2804163 - DNA, 25 bp, Homo sapien
tgcccaactgcaaatgccttctaag

SEQ ID NO: 2804164 - DNA, 25 bp, Homo sapien
tccaagatcaaggtgctagcagagc

SEQ ID NO: 2804165 - DNA, 25 bp, Homo sapien
caagatcaaggtgctagcagagctg

SEQ ID NO: 2804166 - DNA, 25 bp, Homo sapien
gtccaagatcaaggtgctagcagag

SEQ ID NO: 2804167 - DNA, 25 bp, Homo sapien
agatcaaggtgctagcagagctggt

SEQ ID NO: 2804168 - DNA, 25 bp, Homo sapien
tttgtcgcgtttcctcaaggctccg

SEQ ID NO: 2804169 - DNA, 25 bp, Homo sapien
tcagtccttgcgcaccggggaacaa

SEQ ID NO: 2804170 - DNA, 25 bp, Homo sapien
acaatccagggcgatttccgctttg

SEQ ID NO: 2804171 - DNA, 25 bp, Homo sapien
gctccgcaatggtctgaactacaat

SEQ ID NO: 2804172 - DNA, 25 bp, Homo sapien
cttccttgtagtaagacaccaactg

SEQ ID NO: 2804173 - DNA, 25 bp, Homo sapien
tccttgtagtaagacaccaactgct

SEQ ID NO: 2804174 - DNA, 25 bp, Homo sapien
ttccttgtagtaagacaccaactgc

SEQ ID NO: 2804175 - DNA, 25 bp, Homo sapien
agcaagactatggcttgcaatgttt

SEQ ID NO: 2804176 - DNA, 25 bp, Homo sapien
gcaagactatggcttgcaatgtttt

SEQ ID NO: 2804177 - DNA, 25 bp, Homo sapien
tgtacagatgccagcacaatctaac

SEQ ID NO: 2804178 - DNA, 25 bp, Homo sapien
tacaatcttcctgcatatgtctcag

SEQ ID NO: 2804179 - DNA, 25 bp, Homo sapien
ttcatcagcatgaggtgaccttttc

SEQ ID NO: 2804180 - DNA, 25 bp, Homo sapien
gatttatcatattgaggcactgggt

SEQ ID NO: 2804181 - DNA, 25 bp, Homo sapien
actcagatatttgtagactcccctc

SEQ ID NO: 2804182 - DNA, 25 bp, Homo sapien
ctcagatatttgtagactcccctct

SEQ ID NO: 2804183 - DNA, 25 bp, Homo sapien
gttcatgtgtccatgcaatgttttg

SEQ ID NO: 2804184 - DNA, 25 bp, Homo sapien
tgtccatgcaatgttttggagaaat

SEQ ID NO: 2804185 - DNA, 25 bp, Homo sapien
tgtgttcatgtgtccatgcaatgtt

SEQ ID NO: 2804186 - DNA, 25 bp, Homo sapien
atgtgtccatgcaatgttttggaga

SEQ ID NO: 2804187 - DNA, 25 bp, Homo sapien
acaaacttgcgtgtcatcattgcac

SEQ ID NO: 2804188 - DNA, 25 bp, Homo sapien
aggtgccatgctaatcttctctgta

SEQ ID NO: 2804189 - DNA, 25 bp, Homo sapien
aatattgtatgcttcacaaacttgc

SEQ ID NO: 2804190 - DNA, 25 bp, Homo sapien
tcattctaattttagtatatgtgct

SEQ ID NO: 2804191 - DNA, 25 bp, Homo sapien
ttggccagtgtcctagccaaacagt

SEQ ID NO: 2804192 - DNA, 25 bp, Homo sapien
gagcttgtgttgttgcccttaatcc

SEQ ID NO: 2804193 - DNA, 25 bp, Homo sapien
gccaaacagttgagcttgtaaaaac

SEQ ID NO: 2804194 - DNA, 25 bp, Homo sapien
tctcttcaatctcacacataggcca

SEQ ID NO: 2804195 - DNA, 25 bp, Homo sapien
ggtagcagtcttggtattaaccctg

SEQ ID NO: 2804196 - DNA, 25 bp, Homo sapien
gaacactttaatgtgggtagcagtc

SEQ ID NO: 2804197 - DNA, 25 bp, Homo sapien
caaaagtagcacagaacactttaat

SEQ ID NO: 2804198 - DNA, 25 bp, Homo sapien
tggtattaaccctgaaccactttgc

SEQ ID NO: 2804199 - DNA, 25 bp, Homo sapien
agcttccctcttgacttctgtacca

SEQ ID NO: 2804200 - DNA, 25 bp, Homo sapien
gactctcaggctctgcatgctacca

SEQ ID NO: 2804201 - DNA, 25 bp, Homo sapien
cttctccctggtatgctgactctca

SEQ ID NO: 2804202 - DNA, 25 bp, Homo sapien
catgctaccacactcctttgctcct

SEQ ID NO: 2804203 - DNA, 25 bp, Homo sapien
taatggcttaaccagttgaataagg

SEQ ID NO: 2804204 - DNA, 25 bp, Homo sapien
tgttgcagccatttagagtatttat

SEQ ID NO: 2804205 - DNA, 25 bp, Homo sapien
gatgctgcatagtattgagttgaca

SEQ ID NO: 2804206 - DNA, 25 bp, Homo sapien
gtgtctcaaacctagcccaagatgt

SEQ ID NO: 2804207 - DNA, 25 bp, Homo sapien
gggttgaaaatctgaaacaactaca

SEQ ID NO: 2804208 - DNA, 25 bp, Homo sapien
ggttgaaaatctgaaacaactacaa

SEQ ID NO: 2804209 - DNA, 25 bp, Homo sapien
gtggaagctatagcatttctgcccc

SEQ ID NO: 2804210 - DNA, 25 bp, Homo sapien
aatcaagtttcatggtattatctgg

SEQ ID NO: 2804211 - DNA, 25 bp, Homo sapien
ctgtggaagctatagcatttctgcc

SEQ ID NO: 2804212 - DNA, 25 bp, Homo sapien
agaatcaagtttcatggtattatct

SEQ ID NO: 2804213 - DNA, 25 bp, Homo sapien
cacatctgatgggaattgtcaatca

SEQ ID NO: 2804214 - DNA, 25 bp, Homo sapien
ttccacatctgatgggaattgtcaa

SEQ ID NO: 2804215 - DNA, 25 bp, Homo sapien
ctttagagaacagcacaatactttt

SEQ ID NO: 2804216 - DNA, 25 bp, Homo sapien
agagaacagcacaatacttttccac

SEQ ID NO: 2804217 - DNA, 25 bp, Homo sapien
ctatcgaaattgtttaagggaggag

SEQ ID NO: 2804218 - DNA, 25 bp, Homo sapien
gctggaaagatggtgacacatttct

SEQ ID NO: 2804219 - DNA, 25 bp, Homo sapien
aacaagtagctagtccctgaaggga

SEQ ID NO: 2804220 - DNA, 25 bp, Homo sapien
gaggagagatactgccaagactggc

SEQ ID NO: 2804221 - DNA, 25 bp, Homo sapien
tactcattgaattacatatctcaac

SEQ ID NO: 2804222 - DNA, 25 bp, Homo sapien
cctgcttctttagttgtcaagttaa

SEQ ID NO: 2804223 - DNA, 25 bp, Homo sapien
cacccctctcagaattactcattga

SEQ ID NO: 2804224 - DNA, 25 bp, Homo sapien
gaattacatatctcaacatctattt

SEQ ID NO: 2804225 - DNA, 25 bp, Homo sapien
tggggttttctaatatacagtcatg

SEQ ID NO: 2804226 - DNA, 25 bp, Homo sapien
cataaggagatttttggctaagatg

SEQ ID NO: 2804227 - DNA, 25 bp, Homo sapien
tttctaatatacagtcatgtcatct

SEQ ID NO: 2804228 - DNA, 25 bp, Homo sapien
ataaggagatttttggctaagatga

SEQ ID NO: 2804229 - DNA, 25 bp, Homo sapien
aaaacaataactccagccctgatca

SEQ ID NO: 2804230 - DNA, 25 bp, Homo sapien
tcagcacctgaagtccatcaaaaca

SEQ ID NO: 2804231 - DNA, 25 bp, Homo sapien
taatctctgactctataagggccaa

SEQ ID NO: 2804232 - DNA, 25 bp, Homo sapien
catcgtgtggaacatgtttaatctc

SEQ ID NO: 2804233 - DNA, 25 bp, Homo sapien
ggtagtagtatatggctccttcttc

SEQ ID NO: 2804234 - DNA, 25 bp, Homo sapien
tcttcttgcctccacgtctagctgc

SEQ ID NO: 2804235 - DNA, 25 bp, Homo sapien
aatgtaaggggtagtagtatatggc

SEQ ID NO: 2804236 - DNA, 25 bp, Homo sapien
ttcttgcctccacgtctagctgcag

SEQ ID NO: 2804237 - DNA, 25 bp, Homo sapien
atttctctcagtgtgctgccactct

SEQ ID NO: 2804238 - DNA, 25 bp, Homo sapien
ttctctcagtgtgctgccactctgg

SEQ ID NO: 2804239 - DNA, 25 bp, Homo sapien
ctctcagtgtgctgccactctgggt

SEQ ID NO: 2804240 - DNA, 25 bp, Homo sapien
gctgccactctgggttacactttcc

SEQ ID NO: 2804241 - DNA, 25 bp, Homo sapien
cacatgaagtcttggaatggaaggg

SEQ ID NO: 2804242 - DNA, 25 bp, Homo sapien
gcatcttttagtggcaagagtcaca

SEQ ID NO: 2804243 - DNA, 25 bp, Homo sapien
ctcctgttctcaattgaagtcatgg

SEQ ID NO: 2804244 - DNA, 25 bp, Homo sapien
aatttgatattcagaggacactggc

SEQ ID NO: 2804245 - DNA, 25 bp, Homo sapien
ctgagatttaagctgaagtttgaga

SEQ ID NO: 2804246 - DNA, 25 bp, Homo sapien
ctaagcaatttatttgcctccagtg

SEQ ID NO: 2804247 - DNA, 25 bp, Homo sapien
taaggactataagattagtaatctc

SEQ ID NO: 2804248 - DNA, 25 bp, Homo sapien
gatgaggagacacctaatgtggatc

SEQ ID NO: 2804249 - DNA, 25 bp, Homo sapien
gagcccaggtggttgcaaagaagcc

SEQ ID NO: 2804250 - DNA, 25 bp, Homo sapien
caaaacttgtggaagctatggccat

SEQ ID NO: 2804251 - DNA, 25 bp, Homo sapien
tgattgtccatgaggtacagcacca

SEQ ID NO: 2804252 - DNA, 25 bp, Homo sapien
gagtacacccagctctagccttttg

SEQ ID NO: 2804253 - DNA, 25 bp, Homo sapien
ggtgatcagtattccacagtttttg

SEQ ID NO: 2804254 - DNA, 25 bp, Homo sapien
cctgctcagtggattagatgactgc

SEQ ID NO: 2804255 - DNA, 25 bp, Homo sapien
ccagagcggatttattcctaggatc

SEQ ID NO: 2804256 - DNA, 25 bp, Homo sapien
gcactttagcaattcttctgtcctg

SEQ ID NO: 2804257 - DNA, 25 bp, Homo sapien
gctggtctgaaagaaaactagagct

SEQ ID NO: 2804258 - DNA, 25 bp, Homo sapien
tttagagcagagtccccaaactgta

SEQ ID NO: 2804259 - DNA, 25 bp, Homo sapien
tagattcccgtcttactggagatgc

SEQ ID NO: 2804260 - DNA, 25 bp, Homo sapien
tttgaaggccaaaaacagcacattt

SEQ ID NO: 2804261 - DNA, 25 bp, Homo sapien
gtgctgtgacatcaagagctgctgc

SEQ ID NO: 2804262 - DNA, 25 bp, Homo sapien
tgtgacatcaagagctgctgcttgt

SEQ ID NO: 2804263 - DNA, 25 bp, Homo sapien
gggtgctgtgacatcaagagctgct

SEQ ID NO: 2804264 - DNA, 25 bp, Homo sapien
gctgtgacatcaagagctgctgctt

SEQ ID NO: 2804265 - DNA, 25 bp, Homo sapien
aaacaggagatgaaattatagtcat

SEQ ID NO: 2804266 - DNA, 25 bp, Homo sapien
cttttggaaacaggagatgaaatta

SEQ ID NO: 2804267 - DNA, 25 bp, Homo sapien
ttttggaaacaggagatgaaattat

SEQ ID NO: 2804268 - DNA, 25 bp, Homo sapien
tggaaacaggagatgaaattatagt

SEQ ID NO: 2804269 - DNA, 25 bp, Homo sapien
gatgttttgtgatgaaggcaataaa

SEQ ID NO: 2804270 - DNA, 25 bp, Homo sapien
tgtgatgaaggcaataaatcacaga

SEQ ID NO: 2804271 - DNA, 25 bp, Homo sapien
ttttgtgatgaaggcaataaatcac

SEQ ID NO: 2804272 - DNA, 25 bp, Homo sapien
tgatgaaggcaataaatcacagaat

SEQ ID NO: 2804273 - DNA, 25 bp, Homo sapien
atggtgctcttgatatataaggccg

SEQ ID NO: 2804274 - DNA, 25 bp, Homo sapien
gtgctcttgatatataaggccggac

SEQ ID NO: 2804275 - DNA, 25 bp, Homo sapien
caaatataggcgctggggcttgccc

SEQ ID NO: 2804276 - DNA, 25 bp, Homo sapien
tcaaatataggcgctggggcttgcc

SEQ ID NO: 2804277 - DNA, 25 bp, Homo sapien
caacaagaagctgacagccaggtga

SEQ ID NO: 2804278 - DNA, 25 bp, Homo sapien
atgacaacaagaagctgacagccag

SEQ ID NO: 2804279 - DNA, 25 bp, Homo sapien
aacaagaagctgacagccaggtgaa

SEQ ID NO: 2804280 - DNA, 25 bp, Homo sapien
gacaacaagaagctgacagccaggt

SEQ ID NO: 2804281 - DNA, 25 bp, Homo sapien
gttgagttttttcagcgcctcagtg

SEQ ID NO: 2804282 - DNA, 25 bp, Homo sapien
cctgccttatttagatctgggccga

SEQ ID NO: 2804283 - DNA, 25 bp, Homo sapien
tgagttttttcagcgcctcagtgtc

SEQ ID NO: 2804284 - DNA, 25 bp, Homo sapien
tctgggccgaggattcgtggaatct

SEQ ID NO: 2804285 - DNA, 25 bp, Homo sapien
tatccatggccttggcctcgtcgca

SEQ ID NO: 2804286 - DNA, 25 bp, Homo sapien
ggatatccatggccttggcctcgtc

SEQ ID NO: 2804287 - DNA, 25 bp, Homo sapien
atccatggccttggcctcgtcgcag

SEQ ID NO: 2804288 - DNA, 25 bp, Homo sapien
gtgggggatatccatggccttggcc

SEQ ID NO: 2804289 - DNA, 25 bp, Homo sapien
tggtgcccgaggagcacttgtcctt

SEQ ID NO: 2804290 - DNA, 25 bp, Homo sapien
gacttaagcctgatggtgcccgagg

SEQ ID NO: 2804291 - DNA, 25 bp, Homo sapien
cgaggagcacttgtccttctgtggg

SEQ ID NO: 2804292 - DNA, 25 bp, Homo sapien
tccttctgtgggtcatacttcttca

SEQ ID NO: 2804293 - DNA, 25 bp, Homo sapien
tggcgctagcgctggttcctgtgca

SEQ ID NO: 2804294 - DNA, 25 bp, Homo sapien
aatttgtggcgctagcgctggttcc

SEQ ID NO: 2804295 - DNA, 25 bp, Homo sapien
tctcctggaatttgtggcgctagcg

SEQ ID NO: 2804296 - DNA, 25 bp, Homo sapien
tgcacctacaccgtctcctggaatt

SEQ ID NO: 2804297 - DNA, 25 bp, Homo sapien
gagatccctctagctacatctctag

SEQ ID NO: 2804298 - DNA, 25 bp, Homo sapien
tgttccagacaaagcgttaatggca

SEQ ID NO: 2804299 - DNA, 25 bp, Homo sapien
ggcaatttgaattaaggcagtatta

SEQ ID NO: 2804300 - DNA, 25 bp, Homo sapien
aatactggagatagtgagatccctc

SEQ ID NO: 2804301 - DNA, 25 bp, Homo sapien
tttctcttgctgataatttccattc

SEQ ID NO: 2804302 - DNA, 25 bp, Homo sapien
ctttccagatggatccactttctct

SEQ ID NO: 2804303 - DNA, 25 bp, Homo sapien
tctcttgctgataatttccattcat

SEQ ID NO: 2804304 - DNA, 25 bp, Homo sapien
cagatggatccactttctcttgctg

SEQ ID NO: 2804305 - DNA, 25 bp, Homo sapien
agacaggccttcactctgtaactca

SEQ ID NO: 2804306 - DNA, 25 bp, Homo sapien
cattagctccaactacaggcatgaa

SEQ ID NO: 2804307 - DNA, 25 bp, Homo sapien
ttaggatgaataggcaaggatgaga

SEQ ID NO: 2804308 - DNA, 25 bp, Homo sapien
acaatgcccacctaagacattatct

SEQ ID NO: 2804309 - DNA, 25 bp, Homo sapien
gaagaaagccaaagcaatacaaggt

SEQ ID NO: 2804310 - DNA, 25 bp, Homo sapien
acagaatatgcaacacactttttct

SEQ ID NO: 2804311 - DNA, 25 bp, Homo sapien
ctctttttctcaagcaaattgaaat

SEQ ID NO: 2804312 - DNA, 25 bp, Homo sapien
aataaacagaatatgcaacacactt

SEQ ID NO: 2804313 - DNA, 25 bp, Homo sapien
atacaagtggtccataagacacagc

SEQ ID NO: 2804314 - DNA, 25 bp, Homo sapien
tacaagtggtccataagacacagca

SEQ ID NO: 2804315 - DNA, 25 bp, Homo sapien
gatgataagatcatagcatataagg

SEQ ID NO: 2804316 - DNA, 25 bp, Homo sapien
gaggatgataagatcatagcatata

SEQ ID NO: 2804317 - DNA, 25 bp, Homo sapien
gatcatagcatataaggactcagta

SEQ ID NO: 2804318 - DNA, 25 bp, Homo sapien
tgataagatcatagcatataaggac

SEQ ID NO: 2804319 - DNA, 25 bp, Homo sapien
ttctgatagaatgatcctatatctt

SEQ ID NO: 2804320 - DNA, 25 bp, Homo sapien
ctgatagaatgatcctatatcttcc

SEQ ID NO: 2804321 - DNA, 25 bp, Homo sapien
tgatagaatgatcctatatcttcca

SEQ ID NO: 2804322 - DNA, 25 bp, Homo sapien
gatagaatgatcctatatcttccat

SEQ ID NO: 2804323 - DNA, 25 bp, Homo sapien
cttgcttcatataagtttactccag

SEQ ID NO: 2804324 - DNA, 25 bp, Homo sapien
gtcccttttggattcacttgcttca

SEQ ID NO: 2804325 - DNA, 25 bp, Homo sapien
agtttactccagacaggttttctgg

SEQ ID NO: 2804326 - DNA, 25 bp, Homo sapien
gcatccactgcagttcaccattgtc

SEQ ID NO: 2804327 - DNA, 25 bp, Homo sapien
tccttctgtaaggtgcatccttgga

SEQ ID NO: 2804328 - DNA, 25 bp, Homo sapien
ctgagctatggaataaatactctgc

SEQ ID NO: 2804329 - DNA, 25 bp, Homo sapien
tgcccgctctcaaagagtgactctg

SEQ ID NO: 2804330 - DNA, 25 bp, Homo sapien
gcatccttggatatgatgctacatt

SEQ ID NO: 2804331 - DNA, 25 bp, Homo sapien
ttcttctctaatagtagccttaaca

SEQ ID NO: 2804332 - DNA, 25 bp, Homo sapien
cttctctaatagtagccttaacata

SEQ ID NO: 2804333 - DNA, 25 bp, Homo sapien
tctaatagtagccttaacataattt

SEQ ID NO: 2804334 - DNA, 25 bp, Homo sapien
tctctaatagtagccttaacataat

SEQ ID NO: 2804335 - DNA, 25 bp, Homo sapien
tcacatgcttcaagggcaacaaaat

SEQ ID NO: 2804336 - DNA, 25 bp, Homo sapien
gatgtcacatgtcggcagattctgt

SEQ ID NO: 2804337 - DNA, 25 bp, Homo sapien
gggagatgtcacatgtcggcagatt

SEQ ID NO: 2804338 - DNA, 25 bp, Homo sapien
gcttcaagggcaacaaaatatcaca

SEQ ID NO: 2804339 - DNA, 25 bp, Homo sapien
gcctgtcagtgggagtgcattcttt

SEQ ID NO: 2804340 - DNA, 25 bp, Homo sapien
ttactgataaggtaccctgtcccac

SEQ ID NO: 2804341 - DNA, 25 bp, Homo sapien
tcttattcgcttttgcaagaagaga

SEQ ID NO: 2804342 - DNA, 25 bp, Homo sapien
tcagtgggagtgcattcttttccca

SEQ ID NO: 2804343 - DNA, 25 bp, Homo sapien
ttcttttaggatgcccagatttcat

SEQ ID NO: 2804344 - DNA, 25 bp, Homo sapien
tgttttacaaacaacttatacagat

SEQ ID NO: 2804345 - DNA, 25 bp, Homo sapien
tggcttcacccagtccctctattca

SEQ ID NO: 2804346 - DNA, 25 bp, Homo sapien
ttcacccagtccctctattcagggt

SEQ ID NO: 2804347 - DNA, 25 bp, Homo sapien
tggctgatcactctgaggaatggcg

SEQ ID NO: 2804348 - DNA, 25 bp, Homo sapien
actctgaggaatggcgccatatcga

SEQ ID NO: 2804349 - DNA, 25 bp, Homo sapien
ccacatagttcatgggtccactggg

SEQ ID NO: 2804350 - DNA, 25 bp, Homo sapien
ttcagtgttggtatccgctgctggc

SEQ ID NO: 2804351 - DNA, 25 bp, Homo sapien
tcaatcactcagaaaggtccatcca

SEQ ID NO: 2804352 - DNA, 25 bp, Homo sapien
tcaggaccttctcaagcccgatcaa

SEQ ID NO: 2804353 - DNA, 25 bp, Homo sapien
aaatatcttcagttttcaatcactc

SEQ ID NO: 2804354 - DNA, 25 bp, Homo sapien
taatgcagtggtctactttcaggta

SEQ ID NO: 2804355 - DNA, 25 bp, Homo sapien
tcacagagaatgcttcctagggacc

SEQ ID NO: 2804356 - DNA, 25 bp, Homo sapien
caatgatagtgggtctaggaataca

SEQ ID NO: 2804357 - DNA, 25 bp, Homo sapien
gaaggctgaagatcatgttaggact

SEQ ID NO: 2804358 - DNA, 25 bp, Homo sapien
ggagaggtctctagaaatccaaaaa

SEQ ID NO: 2804359 - DNA, 25 bp, Homo sapien
aaaaatgatgcttatagacttgctt

SEQ ID NO: 2804360 - DNA, 25 bp, Homo sapien
ggaaaaatgatgcttatagacttgc

SEQ ID NO: 2804361 - DNA, 25 bp, Homo sapien
aatgatgcttatagacttgcttgat

SEQ ID NO: 2804362 - DNA, 25 bp, Homo sapien
aaccttcaatctggaaaaaaatgca

SEQ ID NO: 2804363 - DNA, 25 bp, Homo sapien
aacactgctagaaacaaaacttaat

SEQ ID NO: 2804364 - DNA, 25 bp, Homo sapien
acactgctagaaacaaaacttaata

SEQ ID NO: 2804365 - DNA, 25 bp, Homo sapien
taattttgatggagtcaagttgtca

SEQ ID NO: 2804366 - DNA, 25 bp, Homo sapien
tgtgtcttgtcgaggaggacttcct

SEQ ID NO: 2804367 - DNA, 25 bp, Homo sapien
gacctcaaggtcagaaagatgttct

SEQ ID NO: 2804368 - DNA, 25 bp, Homo sapien
gatggagtcaagttgtcattctttt

SEQ ID NO: 2804369 - DNA, 25 bp, Homo sapien
taagcaagagtgattccctgaagtg

SEQ ID NO: 2804370 - DNA, 25 bp, Homo sapien
gtgtatgcagaagtatgatcctcca

SEQ ID NO: 2804371 - DNA, 25 bp, Homo sapien
cctgaagtggcaccgtgaaacgatg

SEQ ID NO: 2804372 - DNA, 25 bp, Homo sapien
caaattcagacttttagctcggtac

SEQ ID NO: 2804373 - DNA, 25 bp, Homo sapien
atatttgagtcacccctactacttt

SEQ ID NO: 2804374 - DNA, 25 bp, Homo sapien
tatttgagtcacccctactactttc

SEQ ID NO: 2804375 - DNA, 25 bp, Homo sapien
atttgagtcacccctactactttct

SEQ ID NO: 2804376 - DNA, 25 bp, Homo sapien
aatatttgagtcacccctactactt

SEQ ID NO: 2804377 - DNA, 25 bp, Homo sapien
agctggatccatggagacagagtga

SEQ ID NO: 2804378 - DNA, 25 bp, Homo sapien
cagagtgaacagcattggacaggaa

SEQ ID NO: 2804379 - DNA, 25 bp, Homo sapien
gatccatggagacagagtgaacagc

SEQ ID NO: 2804380 - DNA, 25 bp, Homo sapien
tggatccatggagacagagtgaaca

SEQ ID NO: 2804381 - DNA, 25 bp, Homo sapien
tacgtctgtgggatatattcaatgg

SEQ ID NO: 2804382 - DNA, 25 bp, Homo sapien
tattcaatggactctggtatattat

SEQ ID NO: 2804383 - DNA, 25 bp, Homo sapien
tatctacttgattatacgtctgtgg

SEQ ID NO: 2804384 - DNA, 25 bp, Homo sapien
tcaatggactctggtatattataaa

SEQ ID NO: 2804385 - DNA, 25 bp, Homo sapien
ctgcaagagtatagggcacaagcct

SEQ ID NO: 2804386 - DNA, 25 bp, Homo sapien
tgcaagagtatagggcacaagcctc

SEQ ID NO: 2804387 - DNA, 25 bp, Homo sapien
tcctaaggaccctagaagctcttct

SEQ ID NO: 2804388 - DNA, 25 bp, Homo sapien
tctcagactgcacaaatgtaggaag

SEQ ID NO: 2804389 - DNA, 25 bp, Homo sapien
aagctcttctccagatgtgctcttc

SEQ ID NO: 2804390 - DNA, 25 bp, Homo sapien
tttcaactatctctgaccatcctaa

SEQ ID NO: 2804391 - DNA, 25 bp, Homo sapien
ttcctcctccttggaatttttgctc

SEQ ID NO: 2804392 - DNA, 25 bp, Homo sapien
tcctcctccttggaatttttgctcc

SEQ ID NO: 2804393 - DNA, 25 bp, Homo sapien
catcatctgtaagcttaataaggat

SEQ ID NO: 2804394 - DNA, 25 bp, Homo sapien
taagaataatgaaggagagttcttt

SEQ ID NO: 2804395 - DNA, 25 bp, Homo sapien
taatccagccagtatcatagccacc

SEQ ID NO: 2804396 - DNA, 25 bp, Homo sapien
ggccactgttctgcacagctcctga

SEQ ID NO: 2804397 - DNA, 25 bp, Homo sapien
gaaatgtggtcctgatgactagaat

SEQ ID NO: 2804398 - DNA, 25 bp, Homo sapien
tgtggtcctgatgactagaattctg

SEQ ID NO: 2804399 - DNA, 25 bp, Homo sapien
aatgtggtcctgatgactagaattc

SEQ ID NO: 2804400 - DNA, 25 bp, Homo sapien
aaatgtggtcctgatgactagaatt

SEQ ID NO: 2804401 - DNA, 25 bp, Homo sapien
attttatggtagaatcctctagacg

SEQ ID NO: 2804402 - DNA, 25 bp, Homo sapien
cctctagacgttcataaagacaaag

SEQ ID NO: 2804403 - DNA, 25 bp, Homo sapien
caaagattacccatggaattccctc

SEQ ID NO: 2804404 - DNA, 25 bp, Homo sapien
tcataaagacaaagattacccatgg

SEQ ID NO: 2804405 - DNA, 25 bp, Homo sapien
atttttgtcatatattttatcagaa

SEQ ID NO: 2804406 - DNA, 25 bp, Homo sapien
ggaaatgagtgtataaccatttgtg

SEQ ID NO: 2804407 - DNA, 25 bp, Homo sapien
atggaaatgagtgtataaccatttg

SEQ ID NO: 2804408 - DNA, 25 bp, Homo sapien
ttaagttcctaatgatctttctatt

SEQ ID NO: 2804409 - DNA, 25 bp, Homo sapien
cttaagttcctaatgatctttctat

SEQ ID NO: 2804410 - DNA, 25 bp, Homo sapien
tcttgtaagggtgtcaccagttaca

SEQ ID NO: 2804411 - DNA, 25 bp, Homo sapien
tgtcaccagttacatagggctgccc

SEQ ID NO: 2804412 - DNA, 25 bp, Homo sapien
ttacatagggctgcccattaccagt

SEQ ID NO: 2804413 - DNA, 25 bp, Homo sapien
cagttttcttgtaagggtgtcacca

SEQ ID NO: 2804414 - DNA, 25 bp, Homo sapien
acacacacttcatcagtggcctttc

SEQ ID NO: 2804415 - DNA, 25 bp, Homo sapien
ctctctacacacacttcatcagtgg

SEQ ID NO: 2804416 - DNA, 25 bp, Homo sapien
taacactctttaccaccctctctac

SEQ ID NO: 2804417 - DNA, 25 bp, Homo sapien
cagtggcctttcccctactaggatc

SEQ ID NO: 2804418 - DNA, 25 bp, Homo sapien
ctcatacaaaagaccacatcctcca

SEQ ID NO: 2804419 - DNA, 25 bp, Homo sapien
tcatacaaaagaccacatcctccat

SEQ ID NO: 2804420 - DNA, 25 bp, Homo sapien
ctaaaatttcccttcaagtatctgc

SEQ ID NO: 2804421 - DNA, 25 bp, Homo sapien
taacgtctctgtttccgccactaaa

SEQ ID NO: 2804422 - DNA, 25 bp, Homo sapien
ctgggaaatgttccaatggctcatc

SEQ ID NO: 2804423 - DNA, 25 bp, Homo sapien
gctcatctgccagttaacgtctctg

SEQ ID NO: 2804424 - DNA, 25 bp, Homo sapien
gctctgatttacattaagttgcttc

SEQ ID NO: 2804425 - DNA, 25 bp, Homo sapien
gctttctggcccttgacattagtaa

SEQ ID NO: 2804426 - DNA, 25 bp, Homo sapien
gacattagtaagaccttctcctgct

SEQ ID NO: 2804427 - DNA, 25 bp, Homo sapien
caactctaggagtagtcttgatttc

SEQ ID NO: 2804428 - DNA, 25 bp, Homo sapien
ataactgtgtacagctttggatcca

SEQ ID NO: 2804429 - DNA, 25 bp, Homo sapien
attaaggtaaagcagttcttcttat

SEQ ID NO: 2804430 - DNA, 25 bp, Homo sapien
tgcccttggtactcctgtaatagcc

SEQ ID NO: 2804431 - DNA, 25 bp, Homo sapien
aaaactgcaataactgtgtacagct

SEQ ID NO: 2804432 - DNA, 25 bp, Homo sapien
cccaaagagccaacgtccaggaaat

SEQ ID NO: 2804433 - DNA, 25 bp, Homo sapien
ccagggcaagactagtgactgacac

SEQ ID NO: 2804434 - DNA, 25 bp, Homo sapien
ctgcctgctgcaatagacactgttg

SEQ ID NO: 2804435 - DNA, 25 bp, Homo sapien
tactacatcctcgaatgcctgcctg

SEQ ID NO: 2804436 - DNA, 25 bp, Homo sapien
tgcgatatgctcttctcttcagggc

SEQ ID NO: 2804437 - DNA, 25 bp, Homo sapien
aacttttcaaaatgcgatatgctct

SEQ ID NO: 2804438 - DNA, 25 bp, Homo sapien
tttcaaaatgcgatatgctcttctc

SEQ ID NO: 2804439 - DNA, 25 bp, Homo sapien
caaaatgcgatatgctcttctcttc

SEQ ID NO: 2804440 - DNA, 25 bp, Homo sapien
catgtagttacataggacaaatctc

SEQ ID NO: 2804441 - DNA, 25 bp, Homo sapien
agctccagggccctatgcccagtag

SEQ ID NO: 2804442 - DNA, 25 bp, Homo sapien
gcctaggcagtttcatctgcaaaca

SEQ ID NO: 2804443 - DNA, 25 bp, Homo sapien
catgaatgttggtgtacctcaaggc

SEQ ID NO: 2804444 - DNA, 25 bp, Homo sapien
ttcacttgtattattaccagctgag

SEQ ID NO: 2804445 - DNA, 25 bp, Homo sapien
tattattaccagctgagacaatctg

SEQ ID NO: 2804446 - DNA, 25 bp, Homo sapien
taccagctgagacaatctgatcaaa

SEQ ID NO: 2804447 - DNA, 25 bp, Homo sapien
gctgagacaatctgatcaaaataat

SEQ ID NO: 2804448 - DNA, 25 bp, Homo sapien
catgtcctccatggttgcacaagat

SEQ ID NO: 2804449 - DNA, 25 bp, Homo sapien
taatcatgtcaggacaatctgaggc

SEQ ID NO: 2804450 - DNA, 25 bp, Homo sapien
aactaatgaaatatgccccaaggcc

SEQ ID NO: 2804451 - DNA, 25 bp, Homo sapien
tagtccaacacctcactgaacagag

SEQ ID NO: 2804452 - DNA, 25 bp, Homo sapien
tagcattgaatctttgggaagtaaa

SEQ ID NO: 2804453 - DNA, 25 bp, Homo sapien
tttgaccattcagaatgatattagc

SEQ ID NO: 2804454 - DNA, 25 bp, Homo sapien
tgtctgtctgtctattcttggtgta

SEQ ID NO: 2804455 - DNA, 25 bp, Homo sapien
ggtagtttactcatgatttgtctgt

SEQ ID NO: 2804456 - DNA, 25 bp, Homo sapien
gacctcaggtgattctctggcctca

SEQ ID NO: 2804457 - DNA, 25 bp, Homo sapien
ccaccacacctggcttcttttaact

SEQ ID NO: 2804458 - DNA, 25 bp, Homo sapien
tcagcctcccaaagtccagggatta

SEQ ID NO: 2804459 - DNA, 25 bp, Homo sapien
tggccacgctggtttcaaacccttg

SEQ ID NO: 2804460 - DNA, 25 bp, Homo sapien
tacgtgtggcttgccggtttttcca

SEQ ID NO: 2804461 - DNA, 25 bp, Homo sapien
tggtattgctttggttatgcgggct

SEQ ID NO: 2804462 - DNA, 25 bp, Homo sapien
tgctataaatatgcacgtgtatctg

SEQ ID NO: 2804463 - DNA, 25 bp, Homo sapien
tatgtattatctggcgtggctttca

SEQ ID NO: 2804464 - DNA, 25 bp, Homo sapien
gagatccctacctttgtggagcttt

SEQ ID NO: 2804465 - DNA, 25 bp, Homo sapien
taaggctaagaactaggaattggct

SEQ ID NO: 2804466 - DNA, 25 bp, Homo sapien
ggttccaacactattacagtagcag

SEQ ID NO: 2804467 - DNA, 25 bp, Homo sapien
caattcagtggaatcagtcttgcag

SEQ ID NO: 2804468 - DNA, 25 bp, Homo sapien
ctgcacctgtcaaccatctacatta

SEQ ID NO: 2804469 - DNA, 25 bp, Homo sapien
cacaatgatggattttgactctatc

SEQ ID NO: 2804470 - DNA, 25 bp, Homo sapien
ccgttcttttgcattcggtgtgtag

SEQ ID NO: 2804471 - DNA, 25 bp, Homo sapien
cagcattatttctgatgcatctgtt

SEQ ID NO: 2804472 - DNA, 25 bp, Homo sapien
ggaatgtcaatcatggcttgatggg

SEQ ID NO: 2804473 - DNA, 25 bp, Homo sapien
tgtagggtttcagcagacaaatctg

SEQ ID NO: 2804474 - DNA, 25 bp, Homo sapien
caactttgccgagctgcagtgggct

SEQ ID NO: 2804475 - DNA, 25 bp, Homo sapien
gaaggtctctcccactccggaggca

SEQ ID NO: 2804476 - DNA, 25 bp, Homo sapien
tagagagacactcttgctacagcaa

SEQ ID NO: 2804477 - DNA, 25 bp, Homo sapien
atctgtgccggaatgccccgttcct

SEQ ID NO: 2804478 - DNA, 25 bp, Homo sapien
ccgtggggaaagcatagtatctgtg

SEQ ID NO: 2804479 - DNA, 25 bp, Homo sapien
ggaatgccccgttcctcacggcaca

SEQ ID NO: 2804480 - DNA, 25 bp, Homo sapien
agtatctgtgccggaatgccccgtt

SEQ ID NO: 2804481 - DNA, 25 bp, Homo sapien
gtcttttaattacaacccgagatga

SEQ ID NO: 2804482 - DNA, 25 bp, Homo sapien
tgctcagtggtatcacatggagtag

SEQ ID NO: 2804483 - DNA, 25 bp, Homo sapien
gccatctgacttgtgattatccgta

SEQ ID NO: 2804484 - DNA, 25 bp, Homo sapien
atctcaggtattgccagtggtgaca

SEQ ID NO: 2804485 - DNA, 25 bp, Homo sapien
cagcctatgttgtgttacctggcaa

SEQ ID NO: 2804486 - DNA, 25 bp, Homo sapien
gctgttatgcgtaaataaccaaagg

SEQ ID NO: 2804487 - DNA, 25 bp, Homo sapien
ccaccccagtgctactgtaatagaa

SEQ ID NO: 2804488 - DNA, 25 bp, Homo sapien
gataaccgtgtttatcagagtctga

SEQ ID NO: 2804489 - DNA, 25 bp, Homo sapien
tgccacccaggctcacgtgattctc

SEQ ID NO: 2804490 - DNA, 25 bp, Homo sapien
acccaggctcacgtgattctcctct

SEQ ID NO: 2804491 - DNA, 25 bp, Homo sapien
acaggcatgagccacttcacccacc

SEQ ID NO: 2804492 - DNA, 25 bp, Homo sapien
tctgccacccaggctcacgtgattc

SEQ ID NO: 2804493 - DNA, 25 bp, Homo sapien
tcttgattgcagagacaattctcca

SEQ ID NO: 2804494 - DNA, 25 bp, Homo sapien
tgagagggcctaaaagaaactatac

SEQ ID NO: 2804495 - DNA, 25 bp, Homo sapien
tggcaatatggtagaataatgtcct

SEQ ID NO: 2804496 - DNA, 25 bp, Homo sapien
caatccttggagaaataattgagtc

SEQ ID NO: 2804497 - DNA, 25 bp, Homo sapien
gattatgccaaagttttaggcctct

SEQ ID NO: 2804498 - DNA, 25 bp, Homo sapien
gaaaaactacatacaaacccactga

SEQ ID NO: 2804499 - DNA, 25 bp, Homo sapien
gacagcatgcactcctgatacatga

SEQ ID NO: 2804500 - DNA, 25 bp, Homo sapien
taaccccagtatagtcataagaaaa

SEQ ID NO: 2804501 - DNA, 25 bp, Homo sapien
tacaatagggctaaagaactgcagc

SEQ ID NO: 2804502 - DNA, 25 bp, Homo sapien
ggaattaccgccaagaagtcatggg

SEQ ID NO: 2804503 - DNA, 25 bp, Homo sapien
caaggtatcactttgctgcacaggt

SEQ ID NO: 2804504 - DNA, 25 bp, Homo sapien
ccggataggaaaacacagagtactt

SEQ ID NO: 2804505 - DNA, 25 bp, Homo sapien
tgtgagagattaaatataaggactg

SEQ ID NO: 2804506 - DNA, 25 bp, Homo sapien
ccaggcaacagttgtgcagtgatac

SEQ ID NO: 2804507 - DNA, 25 bp, Homo sapien
taaagaagctgtaataatttttagc

SEQ ID NO: 2804508 - DNA, 25 bp, Homo sapien
gcatgctgataaggggattttaaag

SEQ ID NO: 2804509 - DNA, 25 bp, Homo sapien
tgaactacacgacacccagcttgtg

SEQ ID NO: 2804510 - DNA, 25 bp, Homo sapien
gactttcagccctaacctatggaga

SEQ ID NO: 2804511 - DNA, 25 bp, Homo sapien
ccctgagttatgtgagaacctctag

SEQ ID NO: 2804512 - DNA, 25 bp, Homo sapien
tatggctgctctgtcggaagcacag

SEQ ID NO: 2804513 - DNA, 25 bp, Homo sapien
tggctaatagtcgaaaaatcatagt

SEQ ID NO: 2804514 - DNA, 25 bp, Homo sapien
aaagattatacatgatcgagttgga

SEQ ID NO: 2804515 - DNA, 25 bp, Homo sapien
aaaattctaactgccacatattggc

SEQ ID NO: 2804516 - DNA, 25 bp, Homo sapien
caagttggtctcttactatgttccc

SEQ ID NO: 2804517 - DNA, 25 bp, Homo sapien
cagacatagatttactcttgagtca

SEQ ID NO: 2804518 - DNA, 25 bp, Homo sapien
ccagagcaatgatgattattggtgg

SEQ ID NO: 2804519 - DNA, 25 bp, Homo sapien
tattaacttcatgagagaaactaca

SEQ ID NO: 2804520 - DNA, 25 bp, Homo sapien
tgtactcataaggaagattaaccta

SEQ ID NO: 2804521 - DNA, 25 bp, Homo sapien
gtctggcatacagtttgaaatttgc

SEQ ID NO: 2804522 - DNA, 25 bp, Homo sapien
ggcatacagtttgaaatttgctgcc

SEQ ID NO: 2804523 - DNA, 25 bp, Homo sapien
gccaggtctggcatacagtttgaaa

SEQ ID NO: 2804524 - DNA, 25 bp, Homo sapien
caggtctggcatacagtttgaaatt

SEQ ID NO: 2804525 - DNA, 25 bp, Homo sapien
ggcgagtaaactctttgctcccaga

SEQ ID NO: 2804526 - DNA, 25 bp, Homo sapien
tttgcaatcccgaacttctggtgga

SEQ ID NO: 2804527 - DNA, 25 bp, Homo sapien
caatcccgaacttctggtggagact

SEQ ID NO: 2804528 - DNA, 25 bp, Homo sapien
gtgtccatggcccactacccagtgg

SEQ ID NO: 2804529 - DNA, 25 bp, Homo sapien
cattgagaaactggccaagaaccta

SEQ ID NO: 2804530 - DNA, 25 bp, Homo sapien
ggaacaattatgttctcatattaat

SEQ ID NO: 2804531 - DNA, 25 bp, Homo sapien
tttaaaaatctgtcattgagaaact

SEQ ID NO: 2804532 - DNA, 25 bp, Homo sapien
ctggaacaattatgttctcatatta

SEQ ID NO: 2804533 - DNA, 25 bp, Homo sapien
gagatcactgtaagaaatgaacttc

SEQ ID NO: 2804534 - DNA, 25 bp, Homo sapien
aaggaactctgtaaatctcttgaag

SEQ ID NO: 2804535 - DNA, 25 bp, Homo sapien
ccaacaattcactcaaggaactctg

SEQ ID NO: 2804536 - DNA, 25 bp, Homo sapien
tatcttaataggagatgagatcact

SEQ ID NO: 2804537 - DNA, 25 bp, Homo sapien
gaggaggaacattcttctatcattt

SEQ ID NO: 2804538 - DNA, 25 bp, Homo sapien
attcagctgtaaaagatctgagaaa

SEQ ID NO: 2804539 - DNA, 25 bp, Homo sapien
ccaattcagctgtaaaagatctgag

SEQ ID NO: 2804540 - DNA, 25 bp, Homo sapien
caattcagctgtaaaagatctgaga

SEQ ID NO: 2804541 - DNA, 25 bp, Homo sapien
gaaggaggacaatctgaagtccctt

SEQ ID NO: 2804542 - DNA, 25 bp, Homo sapien
ccgaaggaggacaatctgaagtccc

SEQ ID NO: 2804543 - DNA, 25 bp, Homo sapien
aggaggacaatctgaagtcccttct

SEQ ID NO: 2804544 - DNA, 25 bp, Homo sapien
cccgaaggaggacaatctgaagtcc

SEQ ID NO: 2804545 - DNA, 25 bp, Homo sapien
tctccaatacgtgaatgtttgaatt

SEQ ID NO: 2804546 - DNA, 25 bp, Homo sapien
ccaatacgtgaatgtttgaattctc

SEQ ID NO: 2804547 - DNA, 25 bp, Homo sapien
cttctccaatacgtgaatgtttgaa

SEQ ID NO: 2804548 - DNA, 25 bp, Homo sapien
ctccaatacgtgaatgtttgaattc

SEQ ID NO: 2804549 - DNA, 25 bp, Homo sapien
tacacctacatgtgagggtgcatgc

SEQ ID NO: 2804550 - DNA, 25 bp, Homo sapien
ccagacctagaagtggcaaatgtca

SEQ ID NO: 2804551 - DNA, 25 bp, Homo sapien
cacactgcagaatgataagagggtc

SEQ ID NO: 2804552 - DNA, 25 bp, Homo sapien
taaacaacagatcgccaaacacact

SEQ ID NO: 2804553 - DNA, 25 bp, Homo sapien
gggcacactcatacatatacccaca

SEQ ID NO: 2804554 - DNA, 25 bp, Homo sapien
actcaccttgactgagatcgctgac

SEQ ID NO: 2804555 - DNA, 25 bp, Homo sapien
tgactgagatcgctgacacatgccc

SEQ ID NO: 2804556 - DNA, 25 bp, Homo sapien
tatacccacactcaccttgactgag

SEQ ID NO: 2804557 - DNA, 25 bp, Homo sapien
tgtgtctcaagggtaacataatcag

SEQ ID NO: 2804558 - DNA, 25 bp, Homo sapien
agagaccaaggagacacgacaccta

SEQ ID NO: 2804559 - DNA, 25 bp, Homo sapien
tgtgaagtccacttaataggtgcca

SEQ ID NO: 2804560 - DNA, 25 bp, Homo sapien
gcaaaaaatgcctaaaccgaatgtg

SEQ ID NO: 2804561 - DNA, 25 bp, Homo sapien
ctaatgggtgctaagtaacaggaca

SEQ ID NO: 2804562 - DNA, 25 bp, Homo sapien
tcagagtgtcaaggatccaacccag

SEQ ID NO: 2804563 - DNA, 25 bp, Homo sapien
taagaactgctttgcctcaccaggg

SEQ ID NO: 2804564 - DNA, 25 bp, Homo sapien
gcactcattagggatggtcacatct

SEQ ID NO: 2804565 - DNA, 25 bp, Homo sapien
gacctggtgctgatttcttgggagc

SEQ ID NO: 2804566 - DNA, 25 bp, Homo sapien
taccattagggtaagcgaggtagga

SEQ ID NO: 2804567 - DNA, 25 bp, Homo sapien
tatctacagcagaagagactattgt

SEQ ID NO: 2804568 - DNA, 25 bp, Homo sapien
tatgttccacaaaggacatgggtaa

SEQ ID NO: 2804569 - DNA, 25 bp, Homo sapien
gaggccattaaacctaagacttaga

SEQ ID NO: 2804570 - DNA, 25 bp, Homo sapien
gaaaaggttatggtctgtcagtgat

SEQ ID NO: 2804571 - DNA, 25 bp, Homo sapien
tatcaacgaatccataccagaggcc

SEQ ID NO: 2804572 - DNA, 25 bp, Homo sapien
taatatccgaacatcaatttgcact

SEQ ID NO: 2804573 - DNA, 25 bp, Homo sapien
tcgaactcctgacaaccgtagctgc

SEQ ID NO: 2804574 - DNA, 25 bp, Homo sapien
tgttacgggagctttgcagtgtcac

SEQ ID NO: 2804575 - DNA, 25 bp, Homo sapien
tcttgtcccctctaacggcagagag

SEQ ID NO: 2804576 - DNA, 25 bp, Homo sapien
gcagagagggtaggtcgtctctatt

SEQ ID NO: 2804577 - DNA, 25 bp, Homo sapien
tccccttgccgtgcccagcgtgatg

SEQ ID NO: 2804578 - DNA, 25 bp, Homo sapien
ccccttgccgtgcccagcgtgatgg

SEQ ID NO: 2804579 - DNA, 25 bp, Homo sapien
ccagagtcactggaggcaatgcagt

SEQ ID NO: 2804580 - DNA, 25 bp, Homo sapien
catcttagttatcaacccagagtca

SEQ ID NO: 2804581 - DNA, 25 bp, Homo sapien
gtggttaagcgtgcagattctgaag

SEQ ID NO: 2804582 - DNA, 25 bp, Homo sapien
cagcaagaacgaaaccctgtctaaa

SEQ ID NO: 2804583 - DNA, 25 bp, Homo sapien
catgccagtctcttctgtaaacacc

SEQ ID NO: 2804584 - DNA, 25 bp, Homo sapien
cacatgccagtctcttctgtaaaca

SEQ ID NO: 2804585 - DNA, 25 bp, Homo sapien
tgactcacatgccagtctcttctgt

SEQ ID NO: 2804586 - DNA, 25 bp, Homo sapien
ctcacatgccagtctcttctgtaaa

SEQ ID NO: 2804587 - DNA, 25 bp, Homo sapien
ggtgtgaagtagtaactggttttga

SEQ ID NO: 2804588 - DNA, 25 bp, Homo sapien
tcagcttcccgagtgccaacacttt

SEQ ID NO: 2804589 - DNA, 25 bp, Homo sapien
cttcccgagtgccaacactttttat

SEQ ID NO: 2804590 - DNA, 25 bp, Homo sapien
gtgtgaagtagtaactggttttgat

SEQ ID NO: 2804591 - DNA, 25 bp, Homo sapien
gtatgatgggtgagttttgattgta

SEQ ID NO: 2804592 - DNA, 25 bp, Homo sapien
ctttttcttagctgaaattttctat

SEQ ID NO: 2804593 - DNA, 25 bp, Homo sapien
tttctcatccaagttgtgactttct

SEQ ID NO: 2804594 - DNA, 25 bp, Homo sapien
taatgatagctgattgaaaattaaa

SEQ ID NO: 2804595 - DNA, 25 bp, Homo sapien
catgtacttgcatgcattctggagg

SEQ ID NO: 2804596 - DNA, 25 bp, Homo sapien
gagctttgatacttctgtgtatgca

SEQ ID NO: 2804597 - DNA, 25 bp, Homo sapien
ggaggttatctcaggcaatagagaa

SEQ ID NO: 2804598 - DNA, 25 bp, Homo sapien
ggtgttatagccatcttaagggact

SEQ ID NO: 2804599 - DNA, 25 bp, Homo sapien
caaagcatggatttagaagaaatta

SEQ ID NO: 2804600 - DNA, 25 bp, Homo sapien
tagggtggctgccaaagcatggatt

SEQ ID NO: 2804601 - DNA, 25 bp, Homo sapien
gcagatggtaagcttagttgttcac

SEQ ID NO: 2804602 - DNA, 25 bp, Homo sapien
aagtgactataggttgctttctctc

SEQ ID NO: 2804603 - DNA, 25 bp, Homo sapien
aagttagtgtcagaaatcatacaac

SEQ ID NO: 2804604 - DNA, 25 bp, Homo sapien
acttttaaagtgctgcggagataat

SEQ ID NO: 2804605 - DNA, 25 bp, Homo sapien
taaagttagtgtcagaaatcataca

SEQ ID NO: 2804606 - DNA, 25 bp, Homo sapien
gctgcggagataatggtaccattta

SEQ ID NO: 2804607 - DNA, 25 bp, Homo sapien
tctcctattagagtggtctgttact

SEQ ID NO: 2804608 - DNA, 25 bp, Homo sapien
tatgacacagagcttatgtgtatat

SEQ ID NO: 2804609 - DNA, 25 bp, Homo sapien
tttactttgattcacaccctcattt

SEQ ID NO: 2804610 - DNA, 25 bp, Homo sapien
gaaattcctgatacattatgacaca

SEQ ID NO: 2804611 - DNA, 25 bp, Homo sapien
gaacttctggattctatccattttt

SEQ ID NO: 2804612 - DNA, 25 bp, Homo sapien
tactgggcataatgtactacagtcc

SEQ ID NO: 2804613 - DNA, 25 bp, Homo sapien
caaactaatcgtggaggtttactgg

SEQ ID NO: 2804614 - DNA, 25 bp, Homo sapien
tgataccaaactaatcgtggaggtt

SEQ ID NO: 2804615 - DNA, 25 bp, Homo sapien
acatatcccgcatctcccatagtta

SEQ ID NO: 2804616 - DNA, 25 bp, Homo sapien
taaattaacatatcccgcatctccc

SEQ ID NO: 2804617 - DNA, 25 bp, Homo sapien
tatgtagtgaagtaattactacagt

SEQ ID NO: 2804618 - DNA, 25 bp, Homo sapien
gcatatatgtagtgaagtaattact

SEQ ID NO: 2804619 - DNA, 25 bp, Homo sapien
tgatcttttctctattatcatccca

SEQ ID NO: 2804620 - DNA, 25 bp, Homo sapien
cttgagcaggggtcatattgatctt

SEQ ID NO: 2804621 - DNA, 25 bp, Homo sapien
ttgatcttttctctattatcatccc

SEQ ID NO: 2804622 - DNA, 25 bp, Homo sapien
atccttgagcaggggtcatattgat

SEQ ID NO: 2804623 - DNA, 25 bp, Homo sapien
tgtatatggttcttacaaagaaggg

SEQ ID NO: 2804624 - DNA, 25 bp, Homo sapien
gatgtgaattgttccaggagtcaga

SEQ ID NO: 2804625 - DNA, 25 bp, Homo sapien
gtatgcaagggaatggtgtgttaac

SEQ ID NO: 2804626 - DNA, 25 bp, Homo sapien
ggagtcagaaacctatatagatgtt

SEQ ID NO: 2804627 - DNA, 25 bp, Homo sapien
aagttcacgtgagcccaagtggttg

SEQ ID NO: 2804628 - DNA, 25 bp, Homo sapien
gatatgtctcataagctgggcaggg

SEQ ID NO: 2804629 - DNA, 25 bp, Homo sapien
cactctcactcgcttggatgaccaa

SEQ ID NO: 2804630 - DNA, 25 bp, Homo sapien
ttagagaccaaaccgagcaacatag

SEQ ID NO: 2804631 - DNA, 25 bp, Homo sapien
tcttcacggtagcagagacatggaa

SEQ ID NO: 2804632 - DNA, 25 bp, Homo sapien
caaaagaagacgtacttgcgggcaa

SEQ ID NO: 2804633 - DNA, 25 bp, Homo sapien
gaaatgatctgtacaatagactccc

SEQ ID NO: 2804634 - DNA, 25 bp, Homo sapien
cagagacatacaccgatggaacgga

SEQ ID NO: 2804635 - DNA, 25 bp, Homo sapien
tcttgtatactctctcggcgtgcgt

SEQ ID NO: 2804636 - DNA, 25 bp, Homo sapien
caattcagtagatatcgctggaggg

SEQ ID NO: 2804637 - DNA, 25 bp, Homo sapien
tgtagaggatggacggcttagccac

SEQ ID NO: 2804638 - DNA, 25 bp, Homo sapien
tagtctctccaagaaccaacttttg

SEQ ID NO: 2804639 - DNA, 25 bp, Homo sapien
gaagagtgatagataactaccacag

SEQ ID NO: 2804640 - DNA, 25 bp, Homo sapien
tggctgaattttggctctccctgga

SEQ ID NO: 2804641 - DNA, 25 bp, Homo sapien
tgcaaatagtttggaagccgggctt

SEQ ID NO: 2804642 - DNA, 25 bp, Homo sapien
cacataggcaggactttttgacaga

SEQ ID NO: 2804643 - DNA, 25 bp, Homo sapien
gggaacttcctgcacataaactgtc

SEQ ID NO: 2804644 - DNA, 25 bp, Homo sapien
ccacagagacttgaggattgagaac

SEQ ID NO: 2804645 - DNA, 25 bp, Homo sapien
gaaatttctagacctgtcccacaga

SEQ ID NO: 2804646 - DNA, 25 bp, Homo sapien
ggatagcttattccgattcccaggt

SEQ ID NO: 2804647 - DNA, 25 bp, Homo sapien
tctgaaacccaacagggaagtcatg

SEQ ID NO: 2804648 - DNA, 25 bp, Homo sapien
gggtctccatgaggactctggccct

SEQ ID NO: 2804649 - DNA, 25 bp, Homo sapien
tctctgtgagggttccagtcccaca

SEQ ID NO: 2804650 - DNA, 25 bp, Homo sapien
tggcccgagttgtacattggcccct

SEQ ID NO: 2804651 - DNA, 25 bp, Homo sapien
ccatcagatcttgcgggaatttact

SEQ ID NO: 2804652 - DNA, 25 bp, Homo sapien
cagagcaaccatatcagagggaggt

SEQ ID NO: 2804653 - DNA, 25 bp, Homo sapien
ccaacactgggagtaacagttcaac

SEQ ID NO: 2804654 - DNA, 25 bp, Homo sapien
ttttccctgtaactcaacatagtgt

SEQ ID NO: 2804655 - DNA, 25 bp, Homo sapien
cctcacgtgagggatataggttgtg

SEQ ID NO: 2804656 - DNA, 25 bp, Homo sapien
gaggcctaacacaccaaacattgta

SEQ ID NO: 2804657 - DNA, 25 bp, Homo sapien
gatcagcagagcttagatcagcagc

SEQ ID NO: 2804658 - DNA, 25 bp, Homo sapien
atcagtcagtccctggtgccggagg

SEQ ID NO: 2804659 - DNA, 25 bp, Homo sapien
tacttttaaccttcagacgtagtga

SEQ ID NO: 2804660 - DNA, 25 bp, Homo sapien
catcttttaggtctcagtttagcca

SEQ ID NO: 2804661 - DNA, 25 bp, Homo sapien
cctcctgctagtaggtattgtgcta

SEQ ID NO: 2804662 - DNA, 25 bp, Homo sapien
tcctacttactataccagattacag

SEQ ID NO: 2804663 - DNA, 25 bp, Homo sapien
cagaagtttgtagtatgatcaggca

SEQ ID NO: 2804664 - DNA, 25 bp, Homo sapien
cagagtcccaagtgattcagatgca

SEQ ID NO: 2804665 - DNA, 25 bp, Homo sapien
caagcgtgtgtaacaaagtctgatt

SEQ ID NO: 2804666 - DNA, 25 bp, Homo sapien
gttttagcaaatgcataccaacttg

SEQ ID NO: 2804667 - DNA, 25 bp, Homo sapien
tatatgattctctatgcaggacagc

SEQ ID NO: 2804668 - DNA, 25 bp, Homo sapien
aaaacttattattgctatgtgccag

SEQ ID NO: 2804669 - DNA, 25 bp, Homo sapien
gccacaaatgtgagcagattgataa

SEQ ID NO: 2804670 - DNA, 25 bp, Homo sapien
gttttgtaaagccatatcccacctg

SEQ ID NO: 2804671 - DNA, 25 bp, Homo sapien
gcttttatcattggcttatatatta

SEQ ID NO: 2804672 - DNA, 25 bp, Homo sapien
ttggtaaagctgaagtactatatta

SEQ ID NO: 2804673 - DNA, 25 bp, Homo sapien
ttattacaacaagcttacaaaaata

SEQ ID NO: 2804674 - DNA, 25 bp, Homo sapien
aaaaatagtcatagtaacataatgc

SEQ ID NO: 2804675 - DNA, 25 bp, Homo sapien
tgcaccaccagaggcaagtaaaatg

SEQ ID NO: 2804676 - DNA, 25 bp, Homo sapien
tattgctatgtgtggagattactac

SEQ ID NO: 2804677 - DNA, 25 bp, Homo sapien
tcttcactgtcagacctaataggtt

SEQ ID NO: 2804678 - DNA, 25 bp, Homo sapien
gattactacattggtggaagacgtt

SEQ ID NO: 2804679 - DNA, 25 bp, Homo sapien
cacaaagtaaggagagttctgcttc

SEQ ID NO: 2804680 - DNA, 25 bp, Homo sapien
gaaggcgtgtacgagctattctacc

SEQ ID NO: 2804681 - DNA, 25 bp, Homo sapien
ggcatttgaaagagctagacttcga

SEQ ID NO: 2804682 - DNA, 25 bp, Homo sapien
tactcttggactaggaagcttttga

SEQ ID NO: 2804683 - DNA, 25 bp, Homo sapien
actggacaggcctataaatgacaaa

SEQ ID NO: 2804684 - DNA, 25 bp, Homo sapien
tagtgggatcatttaggacagcagt

SEQ ID NO: 2804685 - DNA, 25 bp, Homo sapien
tacggagaataggtttacacaatga

SEQ ID NO: 2804686 - DNA, 25 bp, Homo sapien
gagacagtaaagacccacaatcggc

SEQ ID NO: 2804687 - DNA, 25 bp, Homo sapien
ggatggtaaaactgctggtgcctta

SEQ ID NO: 2804688 - DNA, 25 bp, Homo sapien
tgtttaatctgggaaccctatggcc

SEQ ID NO: 2804689 - DNA, 25 bp, Homo sapien
caaggctgtggcacaaaagtgtact

SEQ ID NO: 2804690 - DNA, 25 bp, Homo sapien
tgtaccagggatcagtgtcatgagg

SEQ ID NO: 2804691 - DNA, 25 bp, Homo sapien
taatgtgttaacaactagaagatat

SEQ ID NO: 2804692 - DNA, 25 bp, Homo sapien
gaggttttgatagtgtataatgtgt

SEQ ID NO: 2804693 - DNA, 25 bp, Homo sapien
tttgatagtgtataatgtgttaaca

SEQ ID NO: 2804694 - DNA, 25 bp, Homo sapien
tgttaacaactagaagatatagata

SEQ ID NO: 2804695 - DNA, 25 bp, Homo sapien
ggtcaacgcatgttgttacaaaatt

SEQ ID NO: 2804696 - DNA, 25 bp, Homo sapien
ttattggaatgcataaagttcactg

SEQ ID NO: 2804697 - DNA, 25 bp, Homo sapien
gatgttattggaatgcataaagttc

SEQ ID NO: 2804698 - DNA, 25 bp, Homo sapien
tttctaaaaggtcaacgcatgttgt

SEQ ID NO: 2804699 - DNA, 25 bp, Homo sapien
gaagcttgagatagcatagagaaag

SEQ ID NO: 2804700 - DNA, 25 bp, Homo sapien
tcagctagtgaaatattggccatca

SEQ ID NO: 2804701 - DNA, 25 bp, Homo sapien
ggttaagtggtaatgtctgctgcca

SEQ ID NO: 2804702 - DNA, 25 bp, Homo sapien
tggccatcattaagaaggattgtag

SEQ ID NO: 2804703 - DNA, 25 bp, Homo sapien
gaccaaattgtgagaagtaaatcca

SEQ ID NO: 2804704 - DNA, 25 bp, Homo sapien
cagaatgtcttactgaagaggtagc

SEQ ID NO: 2804705 - DNA, 25 bp, Homo sapien
tgagatagttccttcccagattggt

SEQ ID NO: 2804706 - DNA, 25 bp, Homo sapien
tgatgttcactttttacgggctcag

SEQ ID NO: 2804707 - DNA, 25 bp, Homo sapien
gaagatctgaaccattaatcccaat

SEQ ID NO: 2804708 - DNA, 25 bp, Homo sapien
atttagggatggaacttgaggcttg

SEQ ID NO: 2804709 - DNA, 25 bp, Homo sapien
ccattagtgagactgtaccctgctg

SEQ ID NO: 2804710 - DNA, 25 bp, Homo sapien
taccctgctgtttgtattagtttga

SEQ ID NO: 2804711 - DNA, 25 bp, Homo sapien
tgctagagatcaaggtacatggaac

SEQ ID NO: 2804712 - DNA, 25 bp, Homo sapien
gcccagctaggagttgcaaattcta

SEQ ID NO: 2804713 - DNA, 25 bp, Homo sapien
caatgtaagcaagtgaagcgggtca

SEQ ID NO: 2804714 - DNA, 25 bp, Homo sapien
tggcaactaatattcactcacggtg

SEQ ID NO: 2804715 - DNA, 25 bp, Homo sapien
tttcctaatatagggactgtcgcag

SEQ ID NO: 2804716 - DNA, 25 bp, Homo sapien
ggcaccaagtcctgatgactttatc

SEQ ID NO: 2804717 - DNA, 25 bp, Homo sapien
tgtttaccgccttctcaaatcttaa

SEQ ID NO: 2804718 - DNA, 25 bp, Homo sapien
taaatcccactttcactcggaagtc

SEQ ID NO: 2804719 - DNA, 25 bp, Homo sapien
cagtagtgctatcatagttcacctc

SEQ ID NO: 2804720 - DNA, 25 bp, Homo sapien
tgctatcatagttcacctcaaactc

SEQ ID NO: 2804721 - DNA, 25 bp, Homo sapien
agtgctatcatagttcacctcaaac

SEQ ID NO: 2804722 - DNA, 25 bp, Homo sapien
gtagtgctatcatagttcacctcaa

SEQ ID NO: 2804723 - DNA, 25 bp, Homo sapien
catacttagctcattcatcacttcc

SEQ ID NO: 2804724 - DNA, 25 bp, Homo sapien
ttgctcaagctgcttcctaggccag

SEQ ID NO: 2804725 - DNA, 25 bp, Homo sapien
ctcaagctgcttcctaggccagaat

SEQ ID NO: 2804726 - DNA, 25 bp, Homo sapien
cttccattcatacttagctcattca

SEQ ID NO: 2804727 - DNA, 25 bp, Homo sapien
aatagattcttgtggtgataaccct

SEQ ID NO: 2804728 - DNA, 25 bp, Homo sapien
tggagaaaaggcagagcatctatgt

SEQ ID NO: 2804729 - DNA, 25 bp, Homo sapien
gaagtacaaataagcacttgcatgc

SEQ ID NO: 2804730 - DNA, 25 bp, Homo sapien
tcagctatttcagtgtggaaccaaa

SEQ ID NO: 2804731 - DNA, 25 bp, Homo sapien
tttagcagttttagccagtattccc

SEQ ID NO: 2804732 - DNA, 25 bp, Homo sapien
caggtgtagatattactgaccagaa

SEQ ID NO: 2804733 - DNA, 25 bp, Homo sapien
gtaagatacaccagagagatagcag

SEQ ID NO: 2804734 - DNA, 25 bp, Homo sapien
gatagcagacaagcaatgtggatgg

SEQ ID NO: 2804735 - DNA, 25 bp, Homo sapien
agtacagtggttcaactgtagctca

SEQ ID NO: 2804736 - DNA, 25 bp, Homo sapien
ttaacacgtgtacattgttagacat

SEQ ID NO: 2804737 - DNA, 25 bp, Homo sapien
tgagccactttggttgccccaacag

SEQ ID NO: 2804738 - DNA, 25 bp, Homo sapien
aaacataacttatacgtgcactgcg

SEQ ID NO: 2804739 - DNA, 25 bp, Homo sapien
ttaaatcatacatttccccatactg

SEQ ID NO: 2804740 - DNA, 25 bp, Homo sapien
tatcctcaattctaattccccttgg

SEQ ID NO: 2804741 - DNA, 25 bp, Homo sapien
ggctctttgagttagtgattttaat

SEQ ID NO: 2804742 - DNA, 25 bp, Homo sapien
ttctaattccccttggctctttgag

SEQ ID NO: 2804743 - DNA, 25 bp, Homo sapien
taaaggcgtgagcaaaatgcagtac

SEQ ID NO: 2804744 - DNA, 25 bp, Homo sapien
aaaggcgtgagcaaaatgcagtact

SEQ ID NO: 2804745 - DNA, 25 bp, Homo sapien
aggcgtgagcaaaatgcagtacttt

SEQ ID NO: 2804746 - DNA, 25 bp, Homo sapien
attaaaggcgtgagcaaaatgcagt

SEQ ID NO: 2804747 - DNA, 25 bp, Homo sapien
tgtcagccctgctgtaagcaattca

SEQ ID NO: 2804748 - DNA, 25 bp, Homo sapien
tgtctttttatctggaagcaaccac

SEQ ID NO: 2804749 - DNA, 25 bp, Homo sapien
gactggatttagcatgcgtgccaca

SEQ ID NO: 2804750 - DNA, 25 bp, Homo sapien
tcctctaggccagcggttggcaaaa

SEQ ID NO: 2804751 - DNA, 25 bp, Homo sapien
cacacttagtggattgagggaactg

SEQ ID NO: 2804752 - DNA, 25 bp, Homo sapien
catggttataacaccagctgtggat

SEQ ID NO: 2804753 - DNA, 25 bp, Homo sapien
cctggtacggttgtctgtattcacc

SEQ ID NO: 2804754 - DNA, 25 bp, Homo sapien
cacaattgtgcataggcaaacatga

SEQ ID NO: 2804755 - DNA, 25 bp, Homo sapien
caatttgacataacgacattttggg

SEQ ID NO: 2804756 - DNA, 25 bp, Homo sapien
taaggtattctcagcatttactctg

SEQ ID NO: 2804757 - DNA, 25 bp, Homo sapien
tcacaattgtttggctaagagaaaa

SEQ ID NO: 2804758 - DNA, 25 bp, Homo sapien
tccttatggcacatggcacattcat

SEQ ID NO: 2804759 - DNA, 25 bp, Homo sapien
caagcaatcttttgagtgacttact

SEQ ID NO: 2804760 - DNA, 25 bp, Homo sapien
gccttccttgcttaattgtagacta

SEQ ID NO: 2804761 - DNA, 25 bp, Homo sapien
cctgtagtaaagcatgttttgtccc

SEQ ID NO: 2804762 - DNA, 25 bp, Homo sapien
cacatggtttaactcagtgtaccca

SEQ ID NO: 2804763 - DNA, 25 bp, Homo sapien
gaagtatgttacctgtccaaaagaa

SEQ ID NO: 2804764 - DNA, 25 bp, Homo sapien
gaaaggtccacattacacttgatgg

SEQ ID NO: 2804765 - DNA, 25 bp, Homo sapien
aaatacctactgttggatgctgaag

SEQ ID NO: 2804766 - DNA, 25 bp, Homo sapien
gttagattggaagtctgttggcaca

SEQ ID NO: 2804767 - DNA, 25 bp, Homo sapien
tcctgtgaaatagagaagcacttag

SEQ ID NO: 2804768 - DNA, 25 bp, Homo sapien
gctcacaactgccaggatgttgcag

SEQ ID NO: 2804769 - DNA, 25 bp, Homo sapien
tgaggcccggtctcaaacaaaacta

SEQ ID NO: 2804770 - DNA, 25 bp, Homo sapien
caaagtatgctactttattattaac

SEQ ID NO: 2804771 - DNA, 25 bp, Homo sapien
gatacaggcaacatttaggattaga

SEQ ID NO: 2804772 - DNA, 25 bp, Homo sapien
tggcaactgccttgaacggaaaaga

SEQ ID NO: 2804773 - DNA, 25 bp, Homo sapien
ttagcgtctcagctacacagccagc

SEQ ID NO: 2804774 - DNA, 25 bp, Homo sapien
ccaactagggtggttagtctgatac

SEQ ID NO: 2804775 - DNA, 25 bp, Homo sapien
gaagaagttaggcaaattttgacat

SEQ ID NO: 2804776 - DNA, 25 bp, Homo sapien
tagtaatccctgtataattggaaga

SEQ ID NO: 2804777 - DNA, 25 bp, Homo sapien
tggagagttaagctaggctttctct

SEQ ID NO: 2804778 - DNA, 25 bp, Homo sapien
tatactttgagatttgtggagagtt

SEQ ID NO: 2804779 - DNA, 25 bp, Homo sapien
tgtagtgcaattctagaaatctggg

SEQ ID NO: 2804780 - DNA, 25 bp, Homo sapien
tagtgtccaagtagcaaaaactcat

SEQ ID NO: 2804781 - DNA, 25 bp, Homo sapien
tgtaacatctacctgaatagtgtcc

SEQ ID NO: 2804782 - DNA, 25 bp, Homo sapien
gaagaagcccataaactcccagtaa

SEQ ID NO: 2804783 - DNA, 25 bp, Homo sapien
taaagaaataaggtagtttgatgcc

SEQ ID NO: 2804784 - DNA, 25 bp, Homo sapien
tatttgtgaagtgctatgcccttgg

SEQ ID NO: 2804785 - DNA, 25 bp, Homo sapien
gggtttccagtacttatttgaatga

SEQ ID NO: 2804786 - DNA, 25 bp, Homo sapien
aggaaaagtgtgtaatctgcgtgtc

SEQ ID NO: 2804787 - DNA, 25 bp, Homo sapien
aaagcctgaatatttctctataaaa

SEQ ID NO: 2804788 - DNA, 25 bp, Homo sapien
tctctataaaatgtttattctgtag

SEQ ID NO: 2804789 - DNA, 25 bp, Homo sapien
ttctctataaaatgtttattctgta

SEQ ID NO: 2804790 - DNA, 25 bp, Homo sapien
tatttctctataaaatgtttattct

SEQ ID NO: 2804791 - DNA, 25 bp, Homo sapien
tatcagagtttagtgcaccgtagac

SEQ ID NO: 2804792 - DNA, 25 bp, Homo sapien
gatctcgtccgctcaagggttacct

SEQ ID NO: 2804793 - DNA, 25 bp, Homo sapien
gaatagcattcaccactgttaacag

SEQ ID NO: 2804794 - DNA, 25 bp, Homo sapien
tagtaatgacacagaacgaaggcca

SEQ ID NO: 2804795 - DNA, 25 bp, Homo sapien
taacaccatagggaagactgaacac

SEQ ID NO: 2804796 - DNA, 25 bp, Homo sapien
tatttatgcgctgccagttgagccg

SEQ ID NO: 2804797 - DNA, 25 bp, Homo sapien
cgattacagaaagggcatgccacag

SEQ ID NO: 2804798 - DNA, 25 bp, Homo sapien
aaggtattgaaccagggtccctgcg

SEQ ID NO: 2804799 - DNA, 25 bp, Homo sapien
taagcatggaaggtatggtatggcc

SEQ ID NO: 2804800 - DNA, 25 bp, Homo sapien
tactggccagcatcctactgaggat

SEQ ID NO: 2804801 - DNA, 25 bp, Homo sapien
cacatgtatgtggacaagaccgaac

SEQ ID NO: 2804802 - DNA, 25 bp, Homo sapien
gcagataagtactagaagccacaag

SEQ ID NO: 2804803 - DNA, 25 bp, Homo sapien
tcattaacagttcttgcttctaggt

SEQ ID NO: 2804804 - DNA, 25 bp, Homo sapien
tatagataggtagttcccaagctgc

SEQ ID NO: 2804805 - DNA, 25 bp, Homo sapien
tcttgcttctaggttccccaaataa

SEQ ID NO: 2804806 - DNA, 25 bp, Homo sapien
tggcttacaaaataatccaccctcc

SEQ ID NO: 2804807 - DNA, 25 bp, Homo sapien
gcagttacacctgtctgtaatacat

SEQ ID NO: 2804808 - DNA, 25 bp, Homo sapien
atttgtagccaattacattttaagg

SEQ ID NO: 2804809 - DNA, 25 bp, Homo sapien
ctcatagcagttacacctgtctgta

SEQ ID NO: 2804810 - DNA, 25 bp, Homo sapien
tacacctgtctgtaatacatttata

SEQ ID NO: 2804811 - DNA, 25 bp, Homo sapien
ctattaagacagtaagtggaatctc

SEQ ID NO: 2804812 - DNA, 25 bp, Homo sapien
tatgtagcacttcattacatcttgg

SEQ ID NO: 2804813 - DNA, 25 bp, Homo sapien
aaaccatcaagttgcaccagaaatt

SEQ ID NO: 2804814 - DNA, 25 bp, Homo sapien
tatactacttacagaaagcgtgcat

SEQ ID NO: 2804815 - DNA, 25 bp, Homo sapien
caagccaatatgtctggtttgtact

SEQ ID NO: 2804816 - DNA, 25 bp, Homo sapien
cacccattattttcgtacaagccaa

SEQ ID NO: 2804817 - DNA, 25 bp, Homo sapien
gaaatacttccaccgtaagtggtga

SEQ ID NO: 2804818 - DNA, 25 bp, Homo sapien
tagctgtcttaataaaaccacccat

SEQ ID NO: 2804819 - DNA, 25 bp, Homo sapien
ctatagaaggaattgcgtaactcat

SEQ ID NO: 2804820 - DNA, 25 bp, Homo sapien
tgctaagaaattgggtaatccactc

SEQ ID NO: 2804821 - DNA, 25 bp, Homo sapien
gccaaggttaggtttcaggctcata

SEQ ID NO: 2804822 - DNA, 25 bp, Homo sapien
tgtaaactgtttcgtgcaagagggt

SEQ ID NO: 2804823 - DNA, 25 bp, Homo sapien
tctatatagccatcacatctctgta

SEQ ID NO: 2804824 - DNA, 25 bp, Homo sapien
taagtgacttcttgtagtctgcagc

SEQ ID NO: 2804825 - DNA, 25 bp, Homo sapien
ggaagagctttgcttagcccattgc

SEQ ID NO: 2804826 - DNA, 25 bp, Homo sapien
gactgctgccagctagatcttcaag

SEQ ID NO: 2804827 - DNA, 25 bp, Homo sapien
gcagaacttagcaaatcttgtggaa

SEQ ID NO: 2804828 - DNA, 25 bp, Homo sapien
caagaacactgatattagtggctaa

SEQ ID NO: 2804829 - DNA, 25 bp, Homo sapien
cactgatattagtggctaaatctgt

SEQ ID NO: 2804830 - DNA, 25 bp, Homo sapien
tcctattgctgcaagaacactgata

SEQ ID NO: 2804831 - DNA, 25 bp, Homo sapien
tcaggattttagtacgatgagcagt

SEQ ID NO: 2804832 - DNA, 25 bp, Homo sapien
cagttaactacgtgtatggcctagg

SEQ ID NO: 2804833 - DNA, 25 bp, Homo sapien
ttaattccctgtaatctctgctgga

SEQ ID NO: 2804834 - DNA, 25 bp, Homo sapien
gttacgatttgtgcttgggtccaga

SEQ ID NO: 2804835 - DNA, 25 bp, Homo sapien
ctgccttcctaaacaaaaaacatat

SEQ ID NO: 2804836 - DNA, 25 bp, Homo sapien
tctgccttcctaaacaaaaaacata

SEQ ID NO: 2804837 - DNA, 25 bp, Homo sapien
cacagttctgaccaggttaaataag

SEQ ID NO: 2804838 - DNA, 25 bp, Homo sapien
caccaaagcatacattattgtggct

SEQ ID NO: 2804839 - DNA, 25 bp, Homo sapien
tcacatctgactgccatgacattct

SEQ ID NO: 2804840 - DNA, 25 bp, Homo sapien
gggcgtgaagcaagacgatgacaca

SEQ ID NO: 2804841 - DNA, 25 bp, Homo sapien
tcagttcatatacagagaaaccagg

SEQ ID NO: 2804842 - DNA, 25 bp, Homo sapien
aaccaggaaggtgcatgtacatgtg

SEQ ID NO: 2804843 - DNA, 25 bp, Homo sapien
cattcagtgtgaatatctgtgcctc

SEQ ID NO: 2804844 - DNA, 25 bp, Homo sapien
taaaagacgtggattcggtgttaca

SEQ ID NO: 2804845 - DNA, 25 bp, Homo sapien
tagtgcatggccaaagtgattctca

SEQ ID NO: 2804846 - DNA, 25 bp, Homo sapien
cgggccccgactaaaatgatgtaca

SEQ ID NO: 2804847 - DNA, 25 bp, Homo sapien
taagggctactgagaggaagtgacc

SEQ ID NO: 2804848 - DNA, 25 bp, Homo sapien
tattccgatgcaagtgaaccatggc

SEQ ID NO: 2804849 - DNA, 25 bp, Homo sapien
attttatgcatccttttgctttgat

SEQ ID NO: 2804850 - DNA, 25 bp, Homo sapien
tattttatgcatccttttgctttga

SEQ ID NO: 2804851 - DNA, 25 bp, Homo sapien
ggtaatattttatgcatccttttgc

SEQ ID NO: 2804852 - DNA, 25 bp, Homo sapien
gtaatattttatgcatccttttgct

SEQ ID NO: 2804853 - DNA, 25 bp, Homo sapien
gtgaataactatgccagcaaccttg

SEQ ID NO: 2804854 - DNA, 25 bp, Homo sapien
tgtgtgagctatgcaaacaaaatcc

SEQ ID NO: 2804855 - DNA, 25 bp, Homo sapien
tctgagccttggtgtacagaccacc

SEQ ID NO: 2804856 - DNA, 25 bp, Homo sapien
gccccagtgttctgcatggattcag

SEQ ID NO: 2804857 - DNA, 25 bp, Homo sapien
tggaccaacatagtatcccaggtgg

SEQ ID NO: 2804858 - DNA, 25 bp, Homo sapien
tatggaacatacgtggcagaatgac

SEQ ID NO: 2804859 - DNA, 25 bp, Homo sapien
ggcagtttaaaccttagcatcagag

SEQ ID NO: 2804860 - DNA, 25 bp, Homo sapien
gggctgctaacctatgtggcttcaa

SEQ ID NO: 2804861 - DNA, 25 bp, Homo sapien
ctttgtaggccctctagtaactagc

SEQ ID NO: 2804862 - DNA, 25 bp, Homo sapien
tctagtaactagcttgtcagtgttg

SEQ ID NO: 2804863 - DNA, 25 bp, Homo sapien
ggccctctagtaactagcttgtcag

SEQ ID NO: 2804864 - DNA, 25 bp, Homo sapien
gtaactagcttgtcagtgttgaaat

SEQ ID NO: 2804865 - DNA, 25 bp, Homo sapien
aaaattttcagtgataagtgtggac

SEQ ID NO: 2804866 - DNA, 25 bp, Homo sapien
tcagtgataagtgtggaccttgctc

SEQ ID NO: 2804867 - DNA, 25 bp, Homo sapien
tgctctgatgccaaagtttggcgat

SEQ ID NO: 2804868 - DNA, 25 bp, Homo sapien
aattttcagtgataagtgtggacct

SEQ ID NO: 2804869 - DNA, 25 bp, Homo sapien
tggcttggtaaacagacgtccacag

SEQ ID NO: 2804870 - DNA, 25 bp, Homo sapien
tatatttaactaggactgcgatgga

SEQ ID NO: 2804871 - DNA, 25 bp, Homo sapien
ggtcacatagtgaaatacagctggc

SEQ ID NO: 2804872 - DNA, 25 bp, Homo sapien
attactcggaattccttcaagccag

SEQ ID NO: 2804873 - DNA, 25 bp, Homo sapien
gaatatacaatttgctgctacctac

SEQ ID NO: 2804874 - DNA, 25 bp, Homo sapien
tctatactagcgtaagagtttgatg

SEQ ID NO: 2804875 - DNA, 25 bp, Homo sapien
gtaacagttgaaataccttctgcag

SEQ ID NO: 2804876 - DNA, 25 bp, Homo sapien
tattcattacccagacgactggctt

SEQ ID NO: 2804877 - DNA, 25 bp, Homo sapien
tattttacataaagttactgtgaaa

SEQ ID NO: 2804878 - DNA, 25 bp, Homo sapien
attttacataaagttactgtgaaag

SEQ ID NO: 2804879 - DNA, 25 bp, Homo sapien
cataaagttactgtgaaagggaaag

SEQ ID NO: 2804880 - DNA, 25 bp, Homo sapien
gttaaacgtttgatatgcttcctac

SEQ ID NO: 2804881 - DNA, 25 bp, Homo sapien
tatgttttcacattatactttttaa

SEQ ID NO: 2804882 - DNA, 25 bp, Homo sapien
aataaagttaaacgtttgatatgct

SEQ ID NO: 2804883 - DNA, 25 bp, Homo sapien
aagttaaacgtttgatatgcttcct

SEQ ID NO: 2804884 - DNA, 25 bp, Homo sapien
gttagcattgagaaatcaacttcaa

SEQ ID NO: 2804885 - DNA, 25 bp, Homo sapien
ttctcttgattagttagcattgaga

SEQ ID NO: 2804886 - DNA, 25 bp, Homo sapien
gattagttagcattgagaaatcaac

SEQ ID NO: 2804887 - DNA, 25 bp, Homo sapien
cttgattagttagcattgagaaatc

SEQ ID NO: 2804888 - DNA, 25 bp, Homo sapien
taccaggtcgtcatcagtccattct

SEQ ID NO: 2804889 - DNA, 25 bp, Homo sapien
gagagattctaccaggtcgtcatca

SEQ ID NO: 2804890 - DNA, 25 bp, Homo sapien
attctaccaggtcgtcatcagtcca

SEQ ID NO: 2804891 - DNA, 25 bp, Homo sapien
ttagagagattctaccaggtcgtca

SEQ ID NO: 2804892 - DNA, 25 bp, Homo sapien
tagtaatgttggcatggtctcacca

SEQ ID NO: 2804893 - DNA, 25 bp, Homo sapien
cctccagtgaggaataaaggttatg

SEQ ID NO: 2804894 - DNA, 25 bp, Homo sapien
ccatgtggattacaaaagataaacc

SEQ ID NO: 2804895 - DNA, 25 bp, Homo sapien
cacttatttgacttgacagatagaa

SEQ ID NO: 2804896 - DNA, 25 bp, Homo sapien
tataatgcctgtactcttggagaat

SEQ ID NO: 2804897 - DNA, 25 bp, Homo sapien
aataatggacaacagtactgtacgt

SEQ ID NO: 2804898 - DNA, 25 bp, Homo sapien
tagagttcatctttggagtaaaaca

SEQ ID NO: 2804899 - DNA, 25 bp, Homo sapien
tactgtacgtaaggaagtatgcaaa

SEQ ID NO: 2804900 - DNA, 25 bp, Homo sapien
gatttctttgagacgtaatcatcat

SEQ ID NO: 2804901 - DNA, 25 bp, Homo sapien
ggatttctttgagacgtaatcatca

SEQ ID NO: 2804902 - DNA, 25 bp, Homo sapien
ttggatttctttgagacgtaatcat

SEQ ID NO: 2804903 - DNA, 25 bp, Homo sapien
tttctttgagacgtaatcatcatct

SEQ ID NO: 2804904 - DNA, 25 bp, Homo sapien
tcctaagtccgtagatattccccaa

SEQ ID NO: 2804905 - DNA, 25 bp, Homo sapien
ttctatgctaaaacatgctttgtcg

SEQ ID NO: 2804906 - DNA, 25 bp, Homo sapien
aattcctgttaccactgaaaccgag

SEQ ID NO: 2804907 - DNA, 25 bp, Homo sapien
cattacttctctgtaaccactctga

SEQ ID NO: 2804908 - DNA, 25 bp, Homo sapien
gattacgttaagtgcaagctcagca

SEQ ID NO: 2804909 - DNA, 25 bp, Homo sapien
ctcagcagaatgacatcgctccaac

SEQ ID NO: 2804910 - DNA, 25 bp, Homo sapien
gaatgacatcgctccaacttctgtt

SEQ ID NO: 2804911 - DNA, 25 bp, Homo sapien
tgggtggttcatacttctttactaa

SEQ ID NO: 2804912 - DNA, 25 bp, Homo sapien
cattatatctagtaactgtgacagg

SEQ ID NO: 2804913 - DNA, 25 bp, Homo sapien
attatatctagtaactgtgacaggc

SEQ ID NO: 2804914 - DNA, 25 bp, Homo sapien
tcattatatctagtaactgtgacag

SEQ ID NO: 2804915 - DNA, 25 bp, Homo sapien
tgtgtataaaaggtaagcatccgtc

SEQ ID NO: 2804916 - DNA, 25 bp, Homo sapien
gattctccaatatgggatagcgggt

SEQ ID NO: 2804917 - DNA, 25 bp, Homo sapien
ggtaagcatccgtcaatgcaattct

SEQ ID NO: 2804918 - DNA, 25 bp, Homo sapien
gccctggaggcactagataaaatgg

SEQ ID NO: 2804919 - DNA, 25 bp, Homo sapien
gaggaagccctcaaatggtctgtaa

SEQ ID NO: 2804920 - DNA, 25 bp, Homo sapien
tcctgtccaagaggactctcccgga

SEQ ID NO: 2804921 - DNA, 25 bp, Homo sapien
gaattcatctactttgcaggccaaa

SEQ ID NO: 2804922 - DNA, 25 bp, Homo sapien
gaagtagttcatattccagtatctg

SEQ ID NO: 2804923 - DNA, 25 bp, Homo sapien
cattactgagttattaagataaaaa

SEQ ID NO: 2804924 - DNA, 25 bp, Homo sapien
gataaaaacgtttgaaatacataca

SEQ ID NO: 2804925 - DNA, 25 bp, Homo sapien
gctggcttaaacaccgaacagaatt

SEQ ID NO: 2804926 - DNA, 25 bp, Homo sapien
gaaagactggatcattcggaagaac

SEQ ID NO: 2804927 - DNA, 25 bp, Homo sapien
tcttcatgaggctcaagaaagactg

SEQ ID NO: 2804928 - DNA, 25 bp, Homo sapien
cacaacagatcttggcattgctggc

SEQ ID NO: 2804929 - DNA, 25 bp, Homo sapien
ttcactacgttacaaagactggtta

SEQ ID NO: 2804930 - DNA, 25 bp, Homo sapien
tacttgtctgccattcgacgacggg

SEQ ID NO: 2804931 - DNA, 25 bp, Homo sapien
aagactggttacttgtctgccattc

SEQ ID NO: 2804932 - DNA, 25 bp, Homo sapien
tctcttcttcactacgttacaaaga

SEQ ID NO: 2804933 - DNA, 25 bp, Homo sapien
tccgcgccgcagaggcagagaaacg

SEQ ID NO: 2804934 - DNA, 25 bp, Homo sapien
tgaccgggcaactgggcaaccgttg

SEQ ID NO: 2804935 - DNA, 25 bp, Homo sapien
gctcagaatttagtgaccgggcaac

SEQ ID NO: 2804936 - DNA, 25 bp, Homo sapien
aaacgacggagcgagattgtcctgg

SEQ ID NO: 2804937 - DNA, 25 bp, Homo sapien
tggccacggctttgcatctgaattt

SEQ ID NO: 2804938 - DNA, 25 bp, Homo sapien
gccgcttctgactactgttgtggta

SEQ ID NO: 2804939 - DNA, 25 bp, Homo sapien
tctgaatttgcggttggcgtcagcc

SEQ ID NO: 2804940 - DNA, 25 bp, Homo sapien
tggagaaggtccagtgccgcttctg

SEQ ID NO: 2804941 - DNA, 25 bp, Homo sapien
atggaatcgtgaccaggtccagagg

SEQ ID NO: 2804942 - DNA, 25 bp, Homo sapien
tatggaatcgtgaccaggtccagag

SEQ ID NO: 2804943 - DNA, 25 bp, Homo sapien
ggaatcgtgaccaggtccagagggt

SEQ ID NO: 2804944 - DNA, 25 bp, Homo sapien
tggaatcgtgaccaggtccagaggg

SEQ ID NO: 2804945 - DNA, 25 bp, Homo sapien
gaacccaaacgcatcagcgtcctgg

SEQ ID NO: 2804946 - DNA, 25 bp, Homo sapien
aaacgcatcagcgtcctggcgtaaa

SEQ ID NO: 2804947 - DNA, 25 bp, Homo sapien
ctgcagacgagaacccaaacgcatc

SEQ ID NO: 2804948 - DNA, 25 bp, Homo sapien
cagcgtcctggcgtaaaacacccgt

SEQ ID NO: 2804949 - DNA, 25 bp, Homo sapien
tacgcagttgcatttccggagcgga

SEQ ID NO: 2804950 - DNA, 25 bp, Homo sapien
gctgtcgtcacgattacgcggccag

SEQ ID NO: 2804951 - DNA, 25 bp, Homo sapien
tcgcggaagcctagggcgtccggct

SEQ ID NO: 2804952 - DNA, 25 bp, Homo sapien
tagggcgtccggctagccggcgctg

SEQ ID NO: 2804953 - DNA, 25 bp, Homo sapien
tgggcggagcctagagaacgctcct

SEQ ID NO: 2804954 - DNA, 25 bp, Homo sapien
gctcctctcggtgagtctgggacat

SEQ ID NO: 2804955 - DNA, 25 bp, Homo sapien
cgttagggcgcccactgagacgtaa

SEQ ID NO: 2804956 - DNA, 25 bp, Homo sapien
gaacgctcctctcggtgagtctggg

SEQ ID NO: 2804957 - DNA, 25 bp, Homo sapien
taactgataagcagaacagttttcc

SEQ ID NO: 2804958 - DNA, 25 bp, Homo sapien
tatgtggttggtaactgataagcag

SEQ ID NO: 2804959 - DNA, 25 bp, Homo sapien
gaagtgatgctgtcataacctgctc

SEQ ID NO: 2804960 - DNA, 25 bp, Homo sapien
gctcctagggttccaacaggacttc

SEQ ID NO: 2804961 - DNA, 25 bp, Homo sapien
ttctctagcctcttatgtgttcgaa

SEQ ID NO: 2804962 - DNA, 25 bp, Homo sapien
ttatgtgttcgaaatccactctcca

SEQ ID NO: 2804963 - DNA, 25 bp, Homo sapien
tgtgttcgaaatccactctccacca

SEQ ID NO: 2804964 - DNA, 25 bp, Homo sapien
cttctctagcctcttatgtgttcga

SEQ ID NO: 2804965 - DNA, 25 bp, Homo sapien
gatttagcattccaggttgttgtat

SEQ ID NO: 2804966 - DNA, 25 bp, Homo sapien
cttctttgcagatttagcattccag

SEQ ID NO: 2804967 - DNA, 25 bp, Homo sapien
tttgcagatttagcattccaggttg

SEQ ID NO: 2804968 - DNA, 25 bp, Homo sapien
tctttgcggactttctttataacca

SEQ ID NO: 2804969 - DNA, 25 bp, Homo sapien
agcctgggaataccgacgtgcacac

SEQ ID NO: 2804970 - DNA, 25 bp, Homo sapien
ctcagcctgggaataccgacgtgca

SEQ ID NO: 2804971 - DNA, 25 bp, Homo sapien
atctcagcctgggaataccgacgtg

SEQ ID NO: 2804972 - DNA, 25 bp, Homo sapien
gggaataccgacgtgcacaccacgc

SEQ ID NO: 2804973 - DNA, 25 bp, Homo sapien
tactggctccatttccgaaaaagga

SEQ ID NO: 2804974 - DNA, 25 bp, Homo sapien
catgctagatgggaggttgccttcc

SEQ ID NO: 2804975 - DNA, 25 bp, Homo sapien
taacaaccgcttacaggagtgtatg

SEQ ID NO: 2804976 - DNA, 25 bp, Homo sapien
catgcaaatgaactcttccccttgg

SEQ ID NO: 2804977 - DNA, 25 bp, Homo sapien
tgcttcttgccataatatactgcag

SEQ ID NO: 2804978 - DNA, 25 bp, Homo sapien
ttattctatgcttcttgccataata

SEQ ID NO: 2804979 - DNA, 25 bp, Homo sapien
tgccataatatactgcagcaattca

SEQ ID NO: 2804980 - DNA, 25 bp, Homo sapien
ttctatgcttcttgccataatatac

SEQ ID NO: 2804981 - DNA, 25 bp, Homo sapien
acaactgcaatgacgcagcttggtt

SEQ ID NO: 2804982 - DNA, 25 bp, Homo sapien
actgcaatgacgcagcttggtttct

SEQ ID NO: 2804983 - DNA, 25 bp, Homo sapien
caactgcaatgacgcagcttggttt

SEQ ID NO: 2804984 - DNA, 25 bp, Homo sapien
tgcaatgacgcagcttggtttctca

SEQ ID NO: 2804985 - DNA, 25 bp, Homo sapien
tccaacagctcagttgcggcctcat

SEQ ID NO: 2804986 - DNA, 25 bp, Homo sapien
aacatgcataaacatgagcaacatg

SEQ ID NO: 2804987 - DNA, 25 bp, Homo sapien
tagacttgactggtgtctgtgattt

SEQ ID NO: 2804988 - DNA, 25 bp, Homo sapien
gctatttgtagacttgactggtgtc

SEQ ID NO: 2804989 - DNA, 25 bp, Homo sapien
gaatggggtagcagctgtattcttc

SEQ ID NO: 2804990 - DNA, 25 bp, Homo sapien
ttcaatcctgataattggtacaaac

SEQ ID NO: 2804991 - DNA, 25 bp, Homo sapien
atcctgataattggtacaaacagta

SEQ ID NO: 2804992 - DNA, 25 bp, Homo sapien
caatcctgataattggtacaaacag

SEQ ID NO: 2804993 - DNA, 25 bp, Homo sapien
ttttcaatcctgataattggtacaa

SEQ ID NO: 2804994 - DNA, 25 bp, Homo sapien
tgtagctgcattcaggtacaggtgg

SEQ ID NO: 2804995 - DNA, 25 bp, Homo sapien
gagtaagaagtaacaattcattatc

SEQ ID NO: 2804996 - DNA, 25 bp, Homo sapien
acatgagtaagaagtaacaattcat

SEQ ID NO: 2804997 - DNA, 25 bp, Homo sapien
gttgtgatgttttgaatggtgtttc

SEQ ID NO: 2804998 - DNA, 25 bp, Homo sapien
tcattatcaaatgtctgttaaagct

SEQ ID NO: 2804999 - DNA, 25 bp, Homo sapien
aaacttgtacaaggactctgtgtgg

SEQ ID NO: 2805000 - DNA, 25 bp, Homo sapien
cacaggtcgggaaacttgtacaagg

SEQ ID NO: 2805001 - DNA, 25 bp, Homo sapien
tatgagaccagattccccaacaggg

SEQ ID NO: 2805002 - DNA, 25 bp, Homo sapien
aattggctgtataagtcaagcttga

SEQ ID NO: 2805003 - DNA, 25 bp, Homo sapien
gaggaaatgacactttagattccct

SEQ ID NO: 2805004 - DNA, 25 bp, Homo sapien
gagaggaaatgacactttagattcc

SEQ ID NO: 2805005 - DNA, 25 bp, Homo sapien
aatgacactttagattccctgggat

SEQ ID NO: 2805006 - DNA, 25 bp, Homo sapien
agaggaaatgacactttagattccc

SEQ ID NO: 2805007 - DNA, 25 bp, Homo sapien
tggtacggttggttgccatggatat

SEQ ID NO: 2805008 - DNA, 25 bp, Homo sapien
cagtttagattggaggcgtcattga

SEQ ID NO: 2805009 - DNA, 25 bp, Homo sapien
catgatgtgcatagaatatttgaca

SEQ ID NO: 2805010 - DNA, 25 bp, Homo sapien
cctactggcagtgcagagattggca

SEQ ID NO: 2805011 - DNA, 25 bp, Homo sapien
ttctgggtagagttgagagccctga

SEQ ID NO: 2805012 - DNA, 25 bp, Homo sapien
tcttctttacccatgaggagagttg

SEQ ID NO: 2805013 - DNA, 25 bp, Homo sapien
tgacacttctgggtagagttgagag

SEQ ID NO: 2805014 - DNA, 25 bp, Homo sapien
ttacccatgaggagagttggaaagc

SEQ ID NO: 2805015 - DNA, 25 bp, Homo sapien
tagagaagaattgtggtatccaggg

SEQ ID NO: 2805016 - DNA, 25 bp, Homo sapien
ttgtggtatccaggggcaaagccag

SEQ ID NO: 2805017 - DNA, 25 bp, Homo sapien
gaattgtggtatccaggggcaaagc

SEQ ID NO: 2805018 - DNA, 25 bp, Homo sapien
ctagagaagaattgtggtatccagg

SEQ ID NO: 2805019 - DNA, 25 bp, Homo sapien
ctgcttatgaggatgagaagttgca

SEQ ID NO: 2805020 - DNA, 25 bp, Homo sapien
caagatttgttgtggactcaggtac

SEQ ID NO: 2805021 - DNA, 25 bp, Homo sapien
tcaggtaccagaacctattttcagc

SEQ ID NO: 2805022 - DNA, 25 bp, Homo sapien
gaagcatataagacaccaagatttg

SEQ ID NO: 2805023 - DNA, 25 bp, Homo sapien
gaagcactaaatttagcgtctacca

SEQ ID NO: 2805024 - DNA, 25 bp, Homo sapien
aagcactaaatttagcgtctaccac

SEQ ID NO: 2805025 - DNA, 25 bp, Homo sapien
caaagtactggatctttggatccct

SEQ ID NO: 2805026 - DNA, 25 bp, Homo sapien
tccaattggccctcctaatccttgg

SEQ ID NO: 2805027 - DNA, 25 bp, Homo sapien
ggtgggccttctccctattgataaa

SEQ ID NO: 2805028 - DNA, 25 bp, Homo sapien
tattgataaatatagccccatcatt

SEQ ID NO: 2805029 - DNA, 25 bp, Homo sapien
ggcacaaagctacccctcgaatatt

SEQ ID NO: 2805030 - DNA, 25 bp, Homo sapien
caaagctacccctcgaatattaact

SEQ ID NO: 2805031 - DNA, 25 bp, Homo sapien
cacaaagctacccctcgaatattaa

SEQ ID NO: 2805032 - DNA, 25 bp, Homo sapien
gcacaaagctacccctcgaatatta

SEQ ID NO: 2805033 - DNA, 25 bp, Homo sapien
tagtgttccttccaccttgactgaa

SEQ ID NO: 2805034 - DNA, 25 bp, Homo sapien
attactaggtagatggctttgaggc

SEQ ID NO: 2805035 - DNA, 25 bp, Homo sapien
tccttaagcgtagagaaggtgcttt

SEQ ID NO: 2805036 - DNA, 25 bp, Homo sapien
gatgtcatccttgatacagccagac

SEQ ID NO: 2805037 - DNA, 25 bp, Homo sapien
gatgtatgtatacaagtggttgagt

SEQ ID NO: 2805038 - DNA, 25 bp, Homo sapien
gagtaatgtattactcatatgcact

SEQ ID NO: 2805039 - DNA, 25 bp, Homo sapien
tctgaatagtgagacctggtaagaa

SEQ ID NO: 2805040 - DNA, 25 bp, Homo sapien
gtattactcatatgcactttgttct

SEQ ID NO: 2805041 - DNA, 25 bp, Homo sapien
agagaagggcataacctggcagtgt

SEQ ID NO: 2805042 - DNA, 25 bp, Homo sapien
cacagacacaggcactaattttcaa

SEQ ID NO: 2805043 - DNA, 25 bp, Homo sapien
gcagtgtgaagcagaatatgatatc

SEQ ID NO: 2805044 - DNA, 25 bp, Homo sapien
gcagaatatgatatcatgtacttac

SEQ ID NO: 2805045 - DNA, 25 bp, Homo sapien
ggaagcctatgaccccaaatgatta

SEQ ID NO: 2805046 - DNA, 25 bp, Homo sapien
tttttgtgagatagactaggaagcc

SEQ ID NO: 2805047 - DNA, 25 bp, Homo sapien
tacatctgggttctaagggagggct

SEQ ID NO: 2805048 - DNA, 25 bp, Homo sapien
cagatttttgtgctcgtgtgcaaca

SEQ ID NO: 2805049 - DNA, 25 bp, Homo sapien
gcagacaaagtttgcatattctcag

SEQ ID NO: 2805050 - DNA, 25 bp, Homo sapien
tcaaacaactgcagacaaagtttgc

SEQ ID NO: 2805051 - DNA, 25 bp, Homo sapien
tcatctgatattgtggggtccctca

SEQ ID NO: 2805052 - DNA, 25 bp, Homo sapien
caactgcagacaaagtttgcatatt

SEQ ID NO: 2805053 - DNA, 25 bp, Homo sapien
tgacctcgagtctttcaaatggcca

SEQ ID NO: 2805054 - DNA, 25 bp, Homo sapien
gactcatttggaagtatccagagga

SEQ ID NO: 2805055 - DNA, 25 bp, Homo sapien
ggttaccccaattagccagactcat

SEQ ID NO: 2805056 - DNA, 25 bp, Homo sapien
tccagaggagtcaggtgcatcactc

SEQ ID NO: 2805057 - DNA, 25 bp, Homo sapien
aagctatcttgattatcaggctgtt

SEQ ID NO: 2805058 - DNA, 25 bp, Homo sapien
tatcaggctgtttgcgttcctgggc

SEQ ID NO: 2805059 - DNA, 25 bp, Homo sapien
ttgattatcaggctgtttgcgttcc

SEQ ID NO: 2805060 - DNA, 25 bp, Homo sapien
tatcttgattatcaggctgtttgcg

SEQ ID NO: 2805061 - DNA, 25 bp, Homo sapien
ctctagtgctaagttcaggccatcc

SEQ ID NO: 2805062 - DNA, 25 bp, Homo sapien
agttcaggccatccaaggctgccat

SEQ ID NO: 2805063 - DNA, 25 bp, Homo sapien
taagttcaggccatccaaggctgcc

SEQ ID NO: 2805064 - DNA, 25 bp, Homo sapien
gtgctaagttcaggccatccaaggc

SEQ ID NO: 2805065 - DNA, 25 bp, Homo sapien
tacaggtatttcagctccccttgag

SEQ ID NO: 2805066 - DNA, 25 bp, Homo sapien
gaacagcatgaaaaagtcctgcctc

SEQ ID NO: 2805067 - DNA, 25 bp, Homo sapien
cctggatgcatgtatctcatggcac

SEQ ID NO: 2805068 - DNA, 25 bp, Homo sapien
caaatttgacctggaataggaagcc

SEQ ID NO: 2805069 - DNA, 25 bp, Homo sapien
acttgaggtataggtaggttgccca

SEQ ID NO: 2805070 - DNA, 25 bp, Homo sapien
ggttgcccaagaagaaatgtctagt

SEQ ID NO: 2805071 - DNA, 25 bp, Homo sapien
gtattgaactgcagtgccagtccag

SEQ ID NO: 2805072 - DNA, 25 bp, Homo sapien
gagttgcatcagaagtcaagcagcc

SEQ ID NO: 2805073 - DNA, 25 bp, Homo sapien
aatcaaatccctggtgggttgttga

SEQ ID NO: 2805074 - DNA, 25 bp, Homo sapien
cattcatgaggcaacgtggacaact

SEQ ID NO: 2805075 - DNA, 25 bp, Homo sapien
tgttcaatagcgtaaaaattcaggc

SEQ ID NO: 2805076 - DNA, 25 bp, Homo sapien
tcaggcactccaagactaaaatcaa

SEQ ID NO: 2805077 - DNA, 25 bp, Homo sapien
catctttgcatagcaggaaggacaa

SEQ ID NO: 2805078 - DNA, 25 bp, Homo sapien
cagctagaagtgacagagtcagtct

SEQ ID NO: 2805079 - DNA, 25 bp, Homo sapien
cagtatccagtgaggattgtcttct

SEQ ID NO: 2805080 - DNA, 25 bp, Homo sapien
gaccatagcagatgttgagtaacta

SEQ ID NO: 2805081 - DNA, 25 bp, Homo sapien
atttgagaggataattcaggttggt

SEQ ID NO: 2805082 - DNA, 25 bp, Homo sapien
gaaaaccaagattaactctgaatga

SEQ ID NO: 2805083 - DNA, 25 bp, Homo sapien
gattcctggcaaatagccatatcat

SEQ ID NO: 2805084 - DNA, 25 bp, Homo sapien
aattttgttcaggacacacaagtgc

SEQ ID NO: 2805085 - DNA, 25 bp, Homo sapien
ctagagggcaacagatacacagaaa

SEQ ID NO: 2805086 - DNA, 25 bp, Homo sapien
agaatggctccttccctaaacaaag

SEQ ID NO: 2805087 - DNA, 25 bp, Homo sapien
tgttttcctgtgttaccaagcccag

SEQ ID NO: 2805088 - DNA, 25 bp, Homo sapien
gacactgcgaaaattagctctattg

SEQ ID NO: 2805089 - DNA, 25 bp, Homo sapien
cagccagaggacaaattcagcaagc

SEQ ID NO: 2805090 - DNA, 25 bp, Homo sapien
cctgaggcatctttatgaccttgct

SEQ ID NO: 2805091 - DNA, 25 bp, Homo sapien
gcagagttctgtcagtaatcccctc

SEQ ID NO: 2805092 - DNA, 25 bp, Homo sapien
caaacatttgaacaagagggcaaag

SEQ ID NO: 2805093 - DNA, 25 bp, Homo sapien
gcaaaacttgcagatgagtcattct

SEQ ID NO: 2805094 - DNA, 25 bp, Homo sapien
ctccatggtggacagctcgtaaact

SEQ ID NO: 2805095 - DNA, 25 bp, Homo sapien
tctcagaagccacgagcaaaacttg

SEQ ID NO: 2805096 - DNA, 25 bp, Homo sapien
cactcaaattctgtagcctagcatg

SEQ ID NO: 2805097 - DNA, 25 bp, Homo sapien
tctgctgcctatagttatgtttcta

SEQ ID NO: 2805098 - DNA, 25 bp, Homo sapien
ctgctctgctgcctatagttatgtt

SEQ ID NO: 2805099 - DNA, 25 bp, Homo sapien
tatgtttctataactggattttgac

SEQ ID NO: 2805100 - DNA, 25 bp, Homo sapien
ggattttgacaatccaaatgtagac

SEQ ID NO: 2805101 - DNA, 25 bp, Homo sapien
gccagtggccaccacaatagcactt

SEQ ID NO: 2805102 - DNA, 25 bp, Homo sapien
cacacagagacgaggtagaaggcag

SEQ ID NO: 2805103 - DNA, 25 bp, Homo sapien
cacagtcaagacgttggtggaaaca

SEQ ID NO: 2805104 - DNA, 25 bp, Homo sapien
gtttctcagatctgccacagtcaag

SEQ ID NO: 2805105 - DNA, 25 bp, Homo sapien
ccaatgtactgcgataatctctggg

SEQ ID NO: 2805106 - DNA, 25 bp, Homo sapien
gacgtctgcccaatatgtaaaataa

SEQ ID NO: 2805107 - DNA, 25 bp, Homo sapien
ctgtgacagcatgtggtaattttcc

SEQ ID NO: 2805108 - DNA, 25 bp, Homo sapien
taacggaatgaatggattccttgga

SEQ ID NO: 2805109 - DNA, 25 bp, Homo sapien
gaaacaatgataacaagacctggct

SEQ ID NO: 2805110 - DNA, 25 bp, Homo sapien
actggaacacaaagcatagactgcg

SEQ ID NO: 2805111 - DNA, 25 bp, Homo sapien
tggaacacaaagcatagactgcggg

SEQ ID NO: 2805112 - DNA, 25 bp, Homo sapien
gaaactggaacacaaagcatagact

SEQ ID NO: 2805113 - DNA, 25 bp, Homo sapien
aaggaaactggaacacaaagcatag

SEQ ID NO: 2805114 - DNA, 25 bp, Homo sapien
gtggattaatgcatcatctctgctt

SEQ ID NO: 2805115 - DNA, 25 bp, Homo sapien
tagctctgactgaatcctgccatac

SEQ ID NO: 2805116 - DNA, 25 bp, Homo sapien
cctgccatacactttgaatagcata

SEQ ID NO: 2805117 - DNA, 25 bp, Homo sapien
tatccattattagtggctgaatgct

SEQ ID NO: 2805118 - DNA, 25 bp, Homo sapien
cctgtctgttagagtcgttcccagc

SEQ ID NO: 2805119 - DNA, 25 bp, Homo sapien
tctgttagagtcgttcccagcctcc

SEQ ID NO: 2805120 - DNA, 25 bp, Homo sapien
gttagagtcgttcccagcctcctct

SEQ ID NO: 2805121 - DNA, 25 bp, Homo sapien
tgtctgttagagtcgttcccagcct

SEQ ID NO: 2805122 - DNA, 25 bp, Homo sapien
gacctcttgcggagggaatttccag

SEQ ID NO: 2805123 - DNA, 25 bp, Homo sapien
tgacctcttgcggagggaatttcca

SEQ ID NO: 2805124 - DNA, 25 bp, Homo sapien
ccttagctgacctcttgcggaggga

SEQ ID NO: 2805125 - DNA, 25 bp, Homo sapien
tagctgacctcttgcggagggaatt

SEQ ID NO: 2805126 - DNA, 25 bp, Homo sapien
cgcgcctggccgataaggtcacatt

SEQ ID NO: 2805127 - DNA, 25 bp, Homo sapien
tccacatatgattttagggacaggg

SEQ ID NO: 2805128 - DNA, 25 bp, Homo sapien
cccctgatgacctgactttaacttg

SEQ ID NO: 2805129 - DNA, 25 bp, Homo sapien
tgattttagggacagggaacataat

SEQ ID NO: 2805130 - DNA, 25 bp, Homo sapien
ggcaataactcctagtaaggctctg

SEQ ID NO: 2805131 - DNA, 25 bp, Homo sapien
gagtttaagaacctcgtgtctccca

SEQ ID NO: 2805132 - DNA, 25 bp, Homo sapien
gatatcagggagtgtgtcttaacac

SEQ ID NO: 2805133 - DNA, 25 bp, Homo sapien
cctctgtagggatgtaatggatgta

SEQ ID NO: 2805134 - DNA, 25 bp, Homo sapien
cacagagttaggcagggatcaagga

SEQ ID NO: 2805135 - DNA, 25 bp, Homo sapien
tagactatagtcaaccagcacacac

SEQ ID NO: 2805136 - DNA, 25 bp, Homo sapien
aatatcgaccagtacctattgactg

SEQ ID NO: 2805137 - DNA, 25 bp, Homo sapien
ggaaggcatctttctagactatagt

SEQ ID NO: 2805138 - DNA, 25 bp, Homo sapien
ttgcatattggagtctctatcagcc

SEQ ID NO: 2805139 - DNA, 25 bp, Homo sapien
gaccactttggcatattgcatattg

SEQ ID NO: 2805140 - DNA, 25 bp, Homo sapien
ctatcagccagcaccagtccagtgg

SEQ ID NO: 2805141 - DNA, 25 bp, Homo sapien
cagccagcaccagtccagtggagaa

SEQ ID NO: 2805142 - DNA, 25 bp, Homo sapien
aagatttccaacaatccatatattt

SEQ ID NO: 2805143 - DNA, 25 bp, Homo sapien
acaagatttccaacaatccatatat

SEQ ID NO: 2805144 - DNA, 25 bp, Homo sapien
caagatttccaacaatccatatatt

SEQ ID NO: 2805145 - DNA, 25 bp, Homo sapien
ctctcagtaagtccgacacaggcaa

SEQ ID NO: 2805146 - DNA, 25 bp, Homo sapien
tctcagtaagtccgacacaggcaat

SEQ ID NO: 2805147 - DNA, 25 bp, Homo sapien
ctcagtaagtccgacacaggcaatt

SEQ ID NO: 2805148 - DNA, 25 bp, Homo sapien
tcagtaagtccgacacaggcaattt

SEQ ID NO: 2805149 - DNA, 25 bp, Homo sapien
catttggcgaactctcagatccaca

SEQ ID NO: 2805150 - DNA, 25 bp, Homo sapien
agcgctgtgatcactgattcctgcc

SEQ ID NO: 2805151 - DNA, 25 bp, Homo sapien
tttggcgaactctcagatccacaca

SEQ ID NO: 2805152 - DNA, 25 bp, Homo sapien
cacaagcgctgtgatcactgattcc

SEQ ID NO: 2805153 - DNA, 25 bp, Homo sapien
tagtgagatatatctctggtaggag

SEQ ID NO: 2805154 - DNA, 25 bp, Homo sapien
tatggaatcattacggctagtgaga

SEQ ID NO: 2805155 - DNA, 25 bp, Homo sapien
ttccagctaggatataatgctgtcc

SEQ ID NO: 2805156 - DNA, 25 bp, Homo sapien
tgctgtccatatggaatcattacgg

SEQ ID NO: 2805157 - DNA, 25 bp, Homo sapien
aaaagggtgtgaccataaaagccag

SEQ ID NO: 2805158 - DNA, 25 bp, Homo sapien
caggcagtgtattgggaaccttaat

SEQ ID NO: 2805159 - DNA, 25 bp, Homo sapien
gaccataaaagccagtgtgtaacaa

SEQ ID NO: 2805160 - DNA, 25 bp, Homo sapien
gcaggcagtgtattgggaaccttaa

SEQ ID NO: 2805161 - DNA, 25 bp, Homo sapien
gataatcgtgtaggctcccactcaa

SEQ ID NO: 2805162 - DNA, 25 bp, Homo sapien
ttgataatcgtgtaggctcccactc

SEQ ID NO: 2805163 - DNA, 25 bp, Homo sapien
taatcgtgtaggctcccactcaagt

SEQ ID NO: 2805164 - DNA, 25 bp, Homo sapien
atcgtgtaggctcccactcaagtcc

SEQ ID NO: 2805165 - DNA, 25 bp, Homo sapien
gactcttggccctcacttattctta

SEQ ID NO: 2805166 - DNA, 25 bp, Homo sapien
tcactctcatgagagtagcataggg

SEQ ID NO: 2805167 - DNA, 25 bp, Homo sapien
gaaatttgtctacagatagtcccat

SEQ ID NO: 2805168 - DNA, 25 bp, Homo sapien
tagtcccatggaaattcttgccact

SEQ ID NO: 2805169 - DNA, 25 bp, Homo sapien
catcacctgggtcagatacaaacca

SEQ ID NO: 2805170 - DNA, 25 bp, Homo sapien
taaacagccattgtagaacaacgac

SEQ ID NO: 2805171 - DNA, 25 bp, Homo sapien
agccaacagctcattacacagaaaa

SEQ ID NO: 2805172 - DNA, 25 bp, Homo sapien
cactgaggaatggactgaagccaac

SEQ ID NO: 2805173 - DNA, 25 bp, Homo sapien
gcagcaggacgtactcaaaatgaaa

SEQ ID NO: 2805174 - DNA, 25 bp, Homo sapien
tcactcgtagattattaaaaagcag

SEQ ID NO: 2805175 - DNA, 25 bp, Homo sapien
aggaccttagttcttcagattgagg

SEQ ID NO: 2805176 - DNA, 25 bp, Homo sapien
accttagttcttcagattgaggtga

SEQ ID NO: 2805177 - DNA, 25 bp, Homo sapien
gtttcatgtgattatcagtttgcag

SEQ ID NO: 2805178 - DNA, 25 bp, Homo sapien
tgatccatgcacttaagccccttat

SEQ ID NO: 2805179 - DNA, 25 bp, Homo sapien
cccagaggtggaaagcatgagtcaa

SEQ ID NO: 2805180 - DNA, 25 bp, Homo sapien
agccccttattgacagcagcttccc

SEQ ID NO: 2805181 - DNA, 25 bp, Homo sapien
gaaacccttgacaggtccagtgatg

SEQ ID NO: 2805182 - DNA, 25 bp, Homo sapien
cagtggcaggacagcacaataggat

SEQ ID NO: 2805183 - DNA, 25 bp, Homo sapien
gagctatgtcaactggtcctacaga

SEQ ID NO: 2805184 - DNA, 25 bp, Homo sapien
tttcttgagtcaggctccccaaagc

SEQ ID NO: 2805185 - DNA, 25 bp, Homo sapien
ggaagctctctcagaaaggctgcct

SEQ ID NO: 2805186 - DNA, 25 bp, Homo sapien
caaatgattgatgccacttggacat

SEQ ID NO: 2805187 - DNA, 25 bp, Homo sapien
gaagtcaacactccatcatcctcta

SEQ ID NO: 2805188 - DNA, 25 bp, Homo sapien
gtcagccattgtgtgatccaaatga

SEQ ID NO: 2805189 - DNA, 25 bp, Homo sapien
ctattaatcctgtcagtcttcaact

SEQ ID NO: 2805190 - DNA, 25 bp, Homo sapien
tagccgtcataggaaagcccaaatt

SEQ ID NO: 2805191 - DNA, 25 bp, Homo sapien
tctagggtcgctccacagtttgaca

SEQ ID NO: 2805192 - DNA, 25 bp, Homo sapien
cagtttgacactagtctggactgac

SEQ ID NO: 2805193 - DNA, 25 bp, Homo sapien
gctttgaggtagaagagtgcatttc

SEQ ID NO: 2805194 - DNA, 25 bp, Homo sapien
catataaggtatattcgctcagctc

SEQ ID NO: 2805195 - DNA, 25 bp, Homo sapien
gagtgaaacactaaaaagctgtttg

SEQ ID NO: 2805196 - DNA, 25 bp, Homo sapien
gctcagctctctaaggattttatca

SEQ ID NO: 2805197 - DNA, 25 bp, Homo sapien
cttggttcccacaggaagctatcat

SEQ ID NO: 2805198 - DNA, 25 bp, Homo sapien
caataatatcagacccttttaaaag

SEQ ID NO: 2805199 - DNA, 25 bp, Homo sapien
agcacaggcatcttacagtaaattt

SEQ ID NO: 2805200 - DNA, 25 bp, Homo sapien
cacagcacaggcatcttacagtaaa

SEQ ID NO: 2805201 - DNA, 25 bp, Homo sapien
gaactgatattccaataatatcaga

SEQ ID NO: 2805202 - DNA, 25 bp, Homo sapien
catacattagatgtccagctggcat

SEQ ID NO: 2805203 - DNA, 25 bp, Homo sapien
tacattagatgtccagctggcatct

SEQ ID NO: 2805204 - DNA, 25 bp, Homo sapien
acattagatgtccagctggcatctg

SEQ ID NO: 2805205 - DNA, 25 bp, Homo sapien
ctcatacattagatgtccagctggc

SEQ ID NO: 2805206 - DNA, 25 bp, Homo sapien
gctccaggcacctctatatttaatt

SEQ ID NO: 2805207 - DNA, 25 bp, Homo sapien
aatggcacagagaactttacacaag

SEQ ID NO: 2805208 - DNA, 25 bp, Homo sapien
tctccgagtacctttttcaaatggc

SEQ ID NO: 2805209 - DNA, 25 bp, Homo sapien
gagaactttacacaagctccaggca

SEQ ID NO: 2805210 - DNA, 25 bp, Homo sapien
cagtcttggtactaagtcagcacca

SEQ ID NO: 2805211 - DNA, 25 bp, Homo sapien
tcttggtactaagtcagcaccaatt

SEQ ID NO: 2805212 - DNA, 25 bp, Homo sapien
agtcttggtactaagtcagcaccaa

SEQ ID NO: 2805213 - DNA, 25 bp, Homo sapien
acagtcttggtactaagtcagcacc

SEQ ID NO: 2805214 - DNA, 25 bp, Homo sapien
ttaatggaagaactactgttaagtc

SEQ ID NO: 2805215 - DNA, 25 bp, Homo sapien
aagaactactgttaagtcactggac

SEQ ID NO: 2805216 - DNA, 25 bp, Homo sapien
aatggaagaactactgttaagtcac

SEQ ID NO: 2805217 - DNA, 25 bp, Homo sapien
ctactgttaagtcactggactgatg

SEQ ID NO: 2805218 - DNA, 25 bp, Homo sapien
gaaagagttctatcacagcaaagtc

SEQ ID NO: 2805219 - DNA, 25 bp, Homo sapien
caaggtggcacagaacttaacaaag

SEQ ID NO: 2805220 - DNA, 25 bp, Homo sapien
caaagtctagggttcataaagtgct

SEQ ID NO: 2805221 - DNA, 25 bp, Homo sapien
tgggaaaatggtggatgcctcaatc

SEQ ID NO: 2805222 - DNA, 25 bp, Homo sapien
taaaactagggatgacatgcactct

SEQ ID NO: 2805223 - DNA, 25 bp, Homo sapien
gcctattctagcaagaagactagga

SEQ ID NO: 2805224 - DNA, 25 bp, Homo sapien
cacccaaaaggtcatcaatctgtga

SEQ ID NO: 2805225 - DNA, 25 bp, Homo sapien
ggattagacaatagcaccccttgca

SEQ ID NO: 2805226 - DNA, 25 bp, Homo sapien
cacactaggaaagtcataggtgctc

SEQ ID NO: 2805227 - DNA, 25 bp, Homo sapien
tattgactcttacagctgcctttga

SEQ ID NO: 2805228 - DNA, 25 bp, Homo sapien
caaatagccatgaggaactagaggt

SEQ ID NO: 2805229 - DNA, 25 bp, Homo sapien
tactgtgactccttacaagtgctca

SEQ ID NO: 2805230 - DNA, 25 bp, Homo sapien
gctctacacagtatttaacaccaga

SEQ ID NO: 2805231 - DNA, 25 bp, Homo sapien
ttggctgggtaggttcttacctagc

SEQ ID NO: 2805232 - DNA, 25 bp, Homo sapien
gggaaataatggtacacacttatta

SEQ ID NO: 2805233 - DNA, 25 bp, Homo sapien
ttatagattagcctctcaggggaaa

SEQ ID NO: 2805234 - DNA, 25 bp, Homo sapien
tctgtggtacgttcatgcaatgaaa

SEQ ID NO: 2805235 - DNA, 25 bp, Homo sapien
atctgtggtacgttcatgcaatgaa

SEQ ID NO: 2805236 - DNA, 25 bp, Homo sapien
ctgtggtacgttcatgcaatgaaat

SEQ ID NO: 2805237 - DNA, 25 bp, Homo sapien
catctgtggtacgttcatgcaatga

SEQ ID NO: 2805238 - DNA, 25 bp, Homo sapien
ggagttcgcacgcattcttccccaa

SEQ ID NO: 2805239 - DNA, 25 bp, Homo sapien
tacatagttacgtaccaacaaattg

SEQ ID NO: 2805240 - DNA, 25 bp, Homo sapien
gcttgtggtcgtgattacattacac

SEQ ID NO: 2805241 - DNA, 25 bp, Homo sapien
ttacaggatattgggagggattgac

SEQ ID NO: 2805242 - DNA, 25 bp, Homo sapien
tacacctgcaaatcactgcctgcgt

SEQ ID NO: 2805243 - DNA, 25 bp, Homo sapien
gtatttcactgtagggatatgccaa

SEQ ID NO: 2805244 - DNA, 25 bp, Homo sapien
tccatgctccatgttacactgtgcc

SEQ ID NO: 2805245 - DNA, 25 bp, Homo sapien
tcttcttcttgcaagacaatgagca

SEQ ID NO: 2805246 - DNA, 25 bp, Homo sapien
caaggtcagttcagagcagtattca

SEQ ID NO: 2805247 - DNA, 25 bp, Homo sapien
caaaccgcgattttctccagtgatt

SEQ ID NO: 2805248 - DNA, 25 bp, Homo sapien
tacacaaaccgcgattttctccagt

SEQ ID NO: 2805249 - DNA, 25 bp, Homo sapien
tttcctctcaatgtgcctcaaggtc

SEQ ID NO: 2805250 - DNA, 25 bp, Homo sapien
caagagctcacgtaggccttcttct

SEQ ID NO: 2805251 - DNA, 25 bp, Homo sapien
catttccaaccagtctccgtgcaga

SEQ ID NO: 2805252 - DNA, 25 bp, Homo sapien
gcaaaccctgtagcggcatttttcg

SEQ ID NO: 2805253 - DNA, 25 bp, Homo sapien
cggctcaggaccagagctcggagaa

SEQ ID NO: 2805254 - DNA, 25 bp, Homo sapien
tgactctgaaatgcgccggtctgcg

SEQ ID NO: 2805255 - DNA, 25 bp, Homo sapien
catgggtatccgctagtcgctgact

SEQ ID NO: 2805256 - DNA, 25 bp, Homo sapien
cacctctcggtggtacaatagcccg

SEQ ID NO: 2805257 - DNA, 25 bp, Homo sapien
caatagcccggagcccatgggtatc

SEQ ID NO: 2805258 - DNA, 25 bp, Homo sapien
ccgcaccaagggcactcagggccgg

SEQ ID NO: 2805259 - DNA, 25 bp, Homo sapien
gccgcaccaagggcactcagggccg

SEQ ID NO: 2805260 - DNA, 25 bp, Homo sapien
cgccgcaccaagggcactcagggcc

SEQ ID NO: 2805261 - DNA, 25 bp, Homo sapien
tatctgactttcatccgcggtgggc

SEQ ID NO: 2805262 - DNA, 25 bp, Homo sapien
ccctgatagtggttgttatctgact

SEQ ID NO: 2805263 - DNA, 25 bp, Homo sapien
gtcccaaaagtagtgtcccgagatg

SEQ ID NO: 2805264 - DNA, 25 bp, Homo sapien
ccggctgccgtagcgtccctgatag

SEQ ID NO: 2805265 - DNA, 25 bp, Homo sapien
cagggatagtgggctgagaagctgg

SEQ ID NO: 2805266 - DNA, 25 bp, Homo sapien
gtcagaacagctgctgacacgcgcg

SEQ ID NO: 2805267 - DNA, 25 bp, Homo sapien
cagaacagctgctgacacgcgcgtt

SEQ ID NO: 2805268 - DNA, 25 bp, Homo sapien
aacagctgctgacacgcgcgttcat

SEQ ID NO: 2805269 - DNA, 25 bp, Homo sapien
tcaattaatttcagggacattttag

SEQ ID NO: 2805270 - DNA, 25 bp, Homo sapien
caattaatttcagggacattttagt

SEQ ID NO: 2805271 - DNA, 25 bp, Homo sapien
cactggatgccagggagattgtggg

SEQ ID NO: 2805272 - DNA, 25 bp, Homo sapien
gaggtataggatacccatccacact

SEQ ID NO: 2805273 - DNA, 25 bp, Homo sapien
gagggtccagaggtataggataccc

SEQ ID NO: 2805274 - DNA, 25 bp, Homo sapien
ggtccagaggtataggatacccatc

SEQ ID NO: 2805275 - DNA, 25 bp, Homo sapien
gcatagcattcgattgtgtatattt

SEQ ID NO: 2805276 - DNA, 25 bp, Homo sapien
agcatcatcaatatccctgcaaaag

SEQ ID NO: 2805277 - DNA, 25 bp, Homo sapien
tagcattcgattgtgtatatttgcc

SEQ ID NO: 2805278 - DNA, 25 bp, Homo sapien
gcattcgattgtgtatatttgccac

SEQ ID NO: 2805279 - DNA, 25 bp, Homo sapien
ttgcccgattgccatggcctgaact

SEQ ID NO: 2805280 - DNA, 25 bp, Homo sapien
cgattgccatggcctgaacttccaa

SEQ ID NO: 2805281 - DNA, 25 bp, Homo sapien
gcccgattgccatggcctgaacttc

SEQ ID NO: 2805282 - DNA, 25 bp, Homo sapien
tcttgcccgattgccatggcctgaa

SEQ ID NO: 2805283 - DNA, 25 bp, Homo sapien
gattgtaagtatactttgtagattc

SEQ ID NO: 2805284 - DNA, 25 bp, Homo sapien
taaaatctcattacaaggtcttatt

SEQ ID NO: 2805285 - DNA, 25 bp, Homo sapien
gtagattctgggtatgaggtgtttt

SEQ ID NO: 2805286 - DNA, 25 bp, Homo sapien
tcttattttaccctcctgatggtat

SEQ ID NO: 2805287 - DNA, 25 bp, Homo sapien
taggcttttatatgactgccagtgc

SEQ ID NO: 2805288 - DNA, 25 bp, Homo sapien
tgagcaatgcagtgcactacaatgt

SEQ ID NO: 2805289 - DNA, 25 bp, Homo sapien
tacatgaaccagtaacatagtagct

SEQ ID NO: 2805290 - DNA, 25 bp, Homo sapien
taccctctacatcttataccactgg

SEQ ID NO: 2805291 - DNA, 25 bp, Homo sapien
gtagccatcctaggcacttttaaga

SEQ ID NO: 2805292 - DNA, 25 bp, Homo sapien
attctcaaattggagggacaagacc

SEQ ID NO: 2805293 - DNA, 25 bp, Homo sapien
ttagttaaataccagacaggatgct

SEQ ID NO: 2805294 - DNA, 25 bp, Homo sapien
taaagtccaacgatgcattgcaatc

SEQ ID NO: 2805295 - DNA, 25 bp, Homo sapien
gaagtgcctattcaaatgtctcacc

SEQ ID NO: 2805296 - DNA, 25 bp, Homo sapien
gcttaatggtcaactgtgaagtgcc

SEQ ID NO: 2805297 - DNA, 25 bp, Homo sapien
aatgtctcacccatttcctaatcta

SEQ ID NO: 2805298 - DNA, 25 bp, Homo sapien
ccagtcttttgtctcgttttgcaag

SEQ ID NO: 2805299 - DNA, 25 bp, Homo sapien
tgcctggtcgtctttttgatcattt

SEQ ID NO: 2805300 - DNA, 25 bp, Homo sapien
ccatgtgaaagggtctgatggattg

SEQ ID NO: 2805301 - DNA, 25 bp, Homo sapien
gagttccacagtgaacttcctcatg

SEQ ID NO: 2805302 - DNA, 25 bp, Homo sapien
gaagcacatgggttatttcacaagc

SEQ ID NO: 2805303 - DNA, 25 bp, Homo sapien
aaagaagcacatgggttatttcaca

SEQ ID NO: 2805304 - DNA, 25 bp, Homo sapien
acacaccgctgtgtcagttttggca

SEQ ID NO: 2805305 - DNA, 25 bp, Homo sapien
tatggcacattacaggcactcaaca

SEQ ID NO: 2805306 - DNA, 25 bp, Homo sapien
ggtgtgtggaacagcctatggcaca

SEQ ID NO: 2805307 - DNA, 25 bp, Homo sapien
tattgtctgcattctctccactaga

SEQ ID NO: 2805308 - DNA, 25 bp, Homo sapien
ttccaaacggaaaatgatgtcagca

SEQ ID NO: 2805309 - DNA, 25 bp, Homo sapien
actttaaatacactcacacataggc

SEQ ID NO: 2805310 - DNA, 25 bp, Homo sapien
taccaacagaagagactttagcccc

SEQ ID NO: 2805311 - DNA, 25 bp, Homo sapien
tacaggtagtcagcaggtttacaaa

SEQ ID NO: 2805312 - DNA, 25 bp, Homo sapien
tatggcaggtccaaacctaatggca

SEQ ID NO: 2805313 - DNA, 25 bp, Homo sapien
gaagattgttctataggcagccact

SEQ ID NO: 2805314 - DNA, 25 bp, Homo sapien
aatccaccaggtcagaaaagacaga

SEQ ID NO: 2805315 - DNA, 25 bp, Homo sapien
tgatagaaaagcccaaaaaggcttg

SEQ ID NO: 2805316 - DNA, 25 bp, Homo sapien
aaaaggcttgtagaaaagaggcaag

SEQ ID NO: 2805317 - DNA, 25 bp, Homo sapien
gcaatccaccaggtcagaaaagaca

SEQ ID NO: 2805318 - DNA, 25 bp, Homo sapien
tgaagagtaactaattaccaagctt

SEQ ID NO: 2805319 - DNA, 25 bp, Homo sapien
tacaatttgaagagtaactaattac

SEQ ID NO: 2805320 - DNA, 25 bp, Homo sapien
tttgaagagtaactaattaccaagc

SEQ ID NO: 2805321 - DNA, 25 bp, Homo sapien
caatttgaagagtaactaattacca

SEQ ID NO: 2805322 - DNA, 25 bp, Homo sapien
gtgtgaagcagcattaccagaggcg

SEQ ID NO: 2805323 - DNA, 25 bp, Homo sapien
caaagataataaaagactcgagcca

SEQ ID NO: 2805324 - DNA, 25 bp, Homo sapien
aaagcagagttgtgtgaagcagcat

SEQ ID NO: 2805325 - DNA, 25 bp, Homo sapien
taccagaggcgccacatactgcagt

SEQ ID NO: 2805326 - DNA, 25 bp, Homo sapien
tatgacaccaagcacttaaggcagg

SEQ ID NO: 2805327 - DNA, 25 bp, Homo sapien
gaattaagacctcacttggcaccaa

SEQ ID NO: 2805328 - DNA, 25 bp, Homo sapien
cactatagtggcagatggattcctt

SEQ ID NO: 2805329 - DNA, 25 bp, Homo sapien
taggcagagccacatatgagcataa

SEQ ID NO: 2805330 - DNA, 25 bp, Homo sapien
taaataagcttgcaggtgactacgc

SEQ ID NO: 2805331 - DNA, 25 bp, Homo sapien
tgtagctcaaccgtgcttattcgcc

SEQ ID NO: 2805332 - DNA, 25 bp, Homo sapien
tattaaccagagtcgcagagtatcg

SEQ ID NO: 2805333 - DNA, 25 bp, Homo sapien
tcatctgatccacacatttttgggc

SEQ ID NO: 2805334 - DNA, 25 bp, Homo sapien
gctgagcttttacttgggaccactg

SEQ ID NO: 2805335 - DNA, 25 bp, Homo sapien
caacaaggacaactaactgggagca

SEQ ID NO: 2805336 - DNA, 25 bp, Homo sapien
tacaaaaggtacactgcggagtcaa

SEQ ID NO: 2805337 - DNA, 25 bp, Homo sapien
tgtagtgactagaccacccttggca

SEQ ID NO: 2805338 - DNA, 25 bp, Homo sapien
tctaacagttctacaaggctaacag

SEQ ID NO: 2805339 - DNA, 25 bp, Homo sapien
cctgcctcaaatgaagattttagtg

SEQ ID NO: 2805340 - DNA, 25 bp, Homo sapien
gaacaatagccacaatgacaacaga

SEQ ID NO: 2805341 - DNA, 25 bp, Homo sapien
tgacgactggacataaagaggagga

SEQ ID NO: 2805342 - DNA, 25 bp, Homo sapien
gcccagtggtgggttcataatgtag

SEQ ID NO: 2805343 - DNA, 25 bp, Homo sapien
ctttggtgattggttttacccagag

SEQ ID NO: 2805344 - DNA, 25 bp, Homo sapien
ccaagaagttgatatgaagtaaagt

SEQ ID NO: 2805345 - DNA, 25 bp, Homo sapien
ccagtggtgggttcataatgtagtc

SEQ ID NO: 2805346 - DNA, 25 bp, Homo sapien
tatatttatctgcatgtgcttatgt

SEQ ID NO: 2805347 - DNA, 25 bp, Homo sapien
tatttatctgcatgtgcttatgtac

SEQ ID NO: 2805348 - DNA, 25 bp, Homo sapien
atatttatctgcatgtgcttatgta

SEQ ID NO: 2805349 - DNA, 25 bp, Homo sapien
tgagccagtcgtaatccaggaaatg

SEQ ID NO: 2805350 - DNA, 25 bp, Homo sapien
cagaaaatagccaggaaaaatttga

SEQ ID NO: 2805351 - DNA, 25 bp, Homo sapien
caaaaaagccccaatgaatgaacag

SEQ ID NO: 2805352 - DNA, 25 bp, Homo sapien
tccagatgcatttgagccagtcgta

SEQ ID NO: 2805353 - DNA, 25 bp, Homo sapien
actgcatcgcactgtctgaaaaatt

SEQ ID NO: 2805354 - DNA, 25 bp, Homo sapien
caagaaactgcatcgcactgtctga

SEQ ID NO: 2805355 - DNA, 25 bp, Homo sapien
tttcaagaaactgcatcgcactgtc

SEQ ID NO: 2805356 - DNA, 25 bp, Homo sapien
gaaactgcatcgcactgtctgaaaa

SEQ ID NO: 2805357 - DNA, 25 bp, Homo sapien
agtccaaattccagataattttctg

SEQ ID NO: 2805358 - DNA, 25 bp, Homo sapien
taattttctgttacaatcaacactg

SEQ ID NO: 2805359 - DNA, 25 bp, Homo sapien
tttctgttacaatcaacactgccat

SEQ ID NO: 2805360 - DNA, 25 bp, Homo sapien
ttttctgttacaatcaacactgcca

SEQ ID NO: 2805361 - DNA, 25 bp, Homo sapien
aatagtgtgtagttaatgaaaatag

SEQ ID NO: 2805362 - DNA, 25 bp, Homo sapien
aaacagatctttcaccaccatcttc

SEQ ID NO: 2805363 - DNA, 25 bp, Homo sapien
tgacacaaacagatctttcaccacc

SEQ ID NO: 2805364 - DNA, 25 bp, Homo sapien
aaaatccaaaggtgacacaaacaga

SEQ ID NO: 2805365 - DNA, 25 bp, Homo sapien
ctgcagaaggaaaagttcaggaaaa

SEQ ID NO: 2805366 - DNA, 25 bp, Homo sapien
tgcagaaggaaaagttcaggaaaaa

SEQ ID NO: 2805367 - DNA, 25 bp, Homo sapien
aatgatgaacaggttcaagttttag

SEQ ID NO: 2805368 - DNA, 25 bp, Homo sapien
atgatgaacaggttcaagttttagg

SEQ ID NO: 2805369 - DNA, 25 bp, Homo sapien
tgatgaacaggttcaagttttaggt

SEQ ID NO: 2805370 - DNA, 25 bp, Homo sapien
tgcaaaagacaaaacaagtaggcac

SEQ ID NO: 2805371 - DNA, 25 bp, Homo sapien
attgcaaaagacaaaacaagtaggc

SEQ ID NO: 2805372 - DNA, 25 bp, Homo sapien
ttgcaaaagacaaaacaagtaggca

SEQ ID NO: 2805373 - DNA, 25 bp, Homo sapien
actgtgaaatccaccagccactggt

SEQ ID NO: 2805374 - DNA, 25 bp, Homo sapien
gtgaaatccaccagccactggtatt

SEQ ID NO: 2805375 - DNA, 25 bp, Homo sapien
tgtgaaatccaccagccactggtat

SEQ ID NO: 2805376 - DNA, 25 bp, Homo sapien
ctgtgaaatccaccagccactggta

SEQ ID NO: 2805377 - DNA, 25 bp, Homo sapien
gagtgtagtccaaaacatcaacatc

SEQ ID NO: 2805378 - DNA, 25 bp, Homo sapien
tcaggtggcataggtattctggttt

SEQ ID NO: 2805379 - DNA, 25 bp, Homo sapien
cataggtattctggtttacttctac

SEQ ID NO: 2805380 - DNA, 25 bp, Homo sapien
ctaccagagtgtagtccaaaacatc

SEQ ID NO: 2805381 - DNA, 25 bp, Homo sapien
tattaattagctgacaaagtattca

SEQ ID NO: 2805382 - DNA, 25 bp, Homo sapien
tgtaaccctgtccatgttattcaac

SEQ ID NO: 2805383 - DNA, 25 bp, Homo sapien
actggtaagttacccacttcagaat

SEQ ID NO: 2805384 - DNA, 25 bp, Homo sapien
ttctcactaaatggctgtaccacat

SEQ ID NO: 2805385 - DNA, 25 bp, Homo sapien
tgtgtaagttagcctcttccgaaaa

SEQ ID NO: 2805386 - DNA, 25 bp, Homo sapien
aatttgtgtaagttagcctcttccg

SEQ ID NO: 2805387 - DNA, 25 bp, Homo sapien
tgtaagttagcctcttccgaaaata

SEQ ID NO: 2805388 - DNA, 25 bp, Homo sapien
tttgtgtaagttagcctcttccgaa

SEQ ID NO: 2805389 - DNA, 25 bp, Homo sapien
ctttggaatggttaatggcttactt

SEQ ID NO: 2805390 - DNA, 25 bp, Homo sapien
tggaatggttaatggcttactttca

SEQ ID NO: 2805391 - DNA, 25 bp, Homo sapien
ttggaatggttaatggcttactttc

SEQ ID NO: 2805392 - DNA, 25 bp, Homo sapien
cctttggaatggttaatggcttact

SEQ ID NO: 2805393 - DNA, 25 bp, Homo sapien
ttcttctgtaggatgttgataccac

SEQ ID NO: 2805394 - DNA, 25 bp, Homo sapien
tgttgtttccctgcaagaattctta

SEQ ID NO: 2805395 - DNA, 25 bp, Homo sapien
tcttcttctgtaggatgttgatacc

SEQ ID NO: 2805396 - DNA, 25 bp, Homo sapien
gcaagaattcttaattcttcttctg

SEQ ID NO: 2805397 - DNA, 25 bp, Homo sapien
atagtgaggtataatcttctgcatg

SEQ ID NO: 2805398 - DNA, 25 bp, Homo sapien
tacagagtagccatcgagcaagaga

SEQ ID NO: 2805399 - DNA, 25 bp, Homo sapien
ctgccattacagagtagccatcgag

SEQ ID NO: 2805400 - DNA, 25 bp, Homo sapien
tagccatcgagcaagagaatagtga

SEQ ID NO: 2805401 - DNA, 25 bp, Homo sapien
gtaacaaccagctgtatacctatca

SEQ ID NO: 2805402 - DNA, 25 bp, Homo sapien
caaccagctgtatacctatcacacc

SEQ ID NO: 2805403 - DNA, 25 bp, Homo sapien
aacaaccagctgtatacctatcaca

SEQ ID NO: 2805404 - DNA, 25 bp, Homo sapien
ggtaacaaccagctgtatacctatc

SEQ ID NO: 2805405 - DNA, 25 bp, Homo sapien
gcaaaaggacctccagtatctccat

SEQ ID NO: 2805406 - DNA, 25 bp, Homo sapien
aggtccatcaatttaactcttaact

SEQ ID NO: 2805407 - DNA, 25 bp, Homo sapien
tctagtaggggtttaaggtccatca

SEQ ID NO: 2805408 - DNA, 25 bp, Homo sapien
catttctctctagtaggggtttaag

SEQ ID NO: 2805409 - DNA, 25 bp, Homo sapien
taggtcgtggaccagacaccctgga

SEQ ID NO: 2805410 - DNA, 25 bp, Homo sapien
taggataggtcgtggaccagacacc

SEQ ID NO: 2805411 - DNA, 25 bp, Homo sapien
gataggtcgtggaccagacaccctg

SEQ ID NO: 2805412 - DNA, 25 bp, Homo sapien
cgcctaggataggtcgtggaccaga

SEQ ID NO: 2805413 - DNA, 25 bp, Homo sapien
tctcaaacagcgaaagagagggtct

SEQ ID NO: 2805414 - DNA, 25 bp, Homo sapien
cccacgccacgcagaggtgaagata

SEQ ID NO: 2805415 - DNA, 25 bp, Homo sapien
tctaaagcaacttccgtgggtgcca

SEQ ID NO: 2805416 - DNA, 25 bp, Homo sapien
ggtgaagatacgcaggacgtcctct

SEQ ID NO: 2805417 - DNA, 25 bp, Homo sapien
gaagtttcttcactattcacaggtg

SEQ ID NO: 2805418 - DNA, 25 bp, Homo sapien
gactcggtcccttattagcatatcc

SEQ ID NO: 2805419 - DNA, 25 bp, Homo sapien
caggtggcaattgaagccggaagaa

SEQ ID NO: 2805420 - DNA, 25 bp, Homo sapien
tctgttccctgccttagtgggtacc

SEQ ID NO: 2805421 - DNA, 25 bp, Homo sapien
taaaagaagatctgggaatcgtaag

SEQ ID NO: 2805422 - DNA, 25 bp, Homo sapien
cgaacagcgtgacaattaaaagaag

SEQ ID NO: 2805423 - DNA, 25 bp, Homo sapien
ggaatcgtaagtactgacagaatac

SEQ ID NO: 2805424 - DNA, 25 bp, Homo sapien
gggacgaacagcgtgacaattaaaa

SEQ ID NO: 2805425 - DNA, 25 bp, Homo sapien
tttgtgaaacagatcctgctgagga

SEQ ID NO: 2805426 - DNA, 25 bp, Homo sapien
acttcctgaagggttccgcttctgc

SEQ ID NO: 2805427 - DNA, 25 bp, Homo sapien
ggactggagaatagtttgtgaaaca

SEQ ID NO: 2805428 - DNA, 25 bp, Homo sapien
tgctgtgtagggacaaggttgtaaa

SEQ ID NO: 2805429 - DNA, 25 bp, Homo sapien
taatatctgtcctaaacctggcagt

SEQ ID NO: 2805430 - DNA, 25 bp, Homo sapien
cctggcagtcattgaggttcgcaaa

SEQ ID NO: 2805431 - DNA, 25 bp, Homo sapien
taagtggctatcaacctgtcagaga

SEQ ID NO: 2805432 - DNA, 25 bp, Homo sapien
ggttcgcaaagtatctccttctatg

SEQ ID NO: 2805433 - DNA, 25 bp, Homo sapien
ggcagactctcatccaagtgccaat

SEQ ID NO: 2805434 - DNA, 25 bp, Homo sapien
cccaggcagactctcatccaagtgc

SEQ ID NO: 2805435 - DNA, 25 bp, Homo sapien
gactctcatccaagtgccaatcagc

SEQ ID NO: 2805436 - DNA, 25 bp, Homo sapien
caggcagactctcatccaagtgcca

SEQ ID NO: 2805437 - DNA, 25 bp, Homo sapien
ccaaaagagtgcttaaatggagacc

SEQ ID NO: 2805438 - DNA, 25 bp, Homo sapien
ggtaagccttcctcctaatcctaga

SEQ ID NO: 2805439 - DNA, 25 bp, Homo sapien
tcccgtagaagtacagccctgctaa

SEQ ID NO: 2805440 - DNA, 25 bp, Homo sapien
gaatggtggcccctgcaaaaggtaa

SEQ ID NO: 2805441 - DNA, 25 bp, Homo sapien
taatgcatcgcaaagagttgagtcc

SEQ ID NO: 2805442 - DNA, 25 bp, Homo sapien
catcgcaaagagttgagtccaccat

SEQ ID NO: 2805443 - DNA, 25 bp, Homo sapien
ttagtaatgcatcgcaaagagttga

SEQ ID NO: 2805444 - DNA, 25 bp, Homo sapien
cttttagtaatgcatcgcaaagagt

SEQ ID NO: 2805445 - DNA, 25 bp, Homo sapien
actaagactgagaggtaacactggc

SEQ ID NO: 2805446 - DNA, 25 bp, Homo sapien
tggctcctgaagttcggatttgact

SEQ ID NO: 2805447 - DNA, 25 bp, Homo sapien
tcctgaagttcggatttgactgtag

SEQ ID NO: 2805448 - DNA, 25 bp, Homo sapien
ctgaagttcggatttgactgtaggg

SEQ ID NO: 2805449 - DNA, 25 bp, Homo sapien
cataatttaagctttgtgtcctctt

SEQ ID NO: 2805450 - DNA, 25 bp, Homo sapien
cctcactgctacataatttaagctt

SEQ ID NO: 2805451 - DNA, 25 bp, Homo sapien
actgctacataatttaagctttgtg

SEQ ID NO: 2805452 - DNA, 25 bp, Homo sapien
tacataatttaagctttgtgtcctc

SEQ ID NO: 2805453 - DNA, 25 bp, Homo sapien
aaaaagagctcatgtctctgcctga

SEQ ID NO: 2805454 - DNA, 25 bp, Homo sapien
gcaaataatgttttgatgagatgaa

SEQ ID NO: 2805455 - DNA, 25 bp, Homo sapien
tctttggaatggaactgttccctct

SEQ ID NO: 2805456 - DNA, 25 bp, Homo sapien
ctcttaggttatactgaatattagc

SEQ ID NO: 2805457 - DNA, 25 bp, Homo sapien
gaattgcacctgatgaccttaaggg

SEQ ID NO: 2805458 - DNA, 25 bp, Homo sapien
aatggtagaccatgactgaagctca

SEQ ID NO: 2805459 - DNA, 25 bp, Homo sapien
tattggaaagacactaggattcaag

SEQ ID NO: 2805460 - DNA, 25 bp, Homo sapien
cacctgctatggtcagtataaggag

SEQ ID NO: 2805461 - DNA, 25 bp, Homo sapien
cagcctgcttcttgtatgggttgcc

SEQ ID NO: 2805462 - DNA, 25 bp, Homo sapien
tcatattggccaagtcatcaggtcc

SEQ ID NO: 2805463 - DNA, 25 bp, Homo sapien
tctgcagccaattgagttgaccgag

SEQ ID NO: 2805464 - DNA, 25 bp, Homo sapien
tatgctgtcccagtgtaggctgtag

SEQ ID NO: 2805465 - DNA, 25 bp, Homo sapien
gaatagtgctgcatctgtactgtaa

SEQ ID NO: 2805466 - DNA, 25 bp, Homo sapien
taagaacgtgggcattgtgaacaaa

SEQ ID NO: 2805467 - DNA, 25 bp, Homo sapien
tctctgctgcattgtatctcttgaa

SEQ ID NO: 2805468 - DNA, 25 bp, Homo sapien
gaacaaattgactgcctcagatgat

SEQ ID NO: 2805469 - DNA, 25 bp, Homo sapien
tgcttggcattacatcaaaatccat

SEQ ID NO: 2805470 - DNA, 25 bp, Homo sapien
gcattacatcaaaatccattcttct

SEQ ID NO: 2805471 - DNA, 25 bp, Homo sapien
ttggcattacatcaaaatccattct

SEQ ID NO: 2805472 - DNA, 25 bp, Homo sapien
gcttggcattacatcaaaatccatt

SEQ ID NO: 2805473 - DNA, 25 bp, Homo sapien
tctatgccaaagcagcgtgctgctg

SEQ ID NO: 2805474 - DNA, 25 bp, Homo sapien
gacacagggctttttagcgttcact

SEQ ID NO: 2805475 - DNA, 25 bp, Homo sapien
agggttgtccagacaccaccgagag

SEQ ID NO: 2805476 - DNA, 25 bp, Homo sapien
gggaagtctgcacacgtgtttggaa

SEQ ID NO: 2805477 - DNA, 25 bp, Homo sapien
tgcaatgagcacaattagcaatcca

SEQ ID NO: 2805478 - DNA, 25 bp, Homo sapien
aaatgacccaaatttgcaatgagca

SEQ ID NO: 2805479 - DNA, 25 bp, Homo sapien
atgacccaaatttgcaatgagcaca

SEQ ID NO: 2805480 - DNA, 25 bp, Homo sapien
caatgagcacaattagcaatccaaa

SEQ ID NO: 2805481 - DNA, 25 bp, Homo sapien
tctgttagcataacaaaggctctga

SEQ ID NO: 2805482 - DNA, 25 bp, Homo sapien
ctaggcagctgatttgagattgtct

SEQ ID NO: 2805483 - DNA, 25 bp, Homo sapien
gaaacctttcgacctcttagctgct

SEQ ID NO: 2805484 - DNA, 25 bp, Homo sapien
tgcctatagagatctcccaaagctc

SEQ ID NO: 2805485 - DNA, 25 bp, Homo sapien
tgtgtgagttgaacatgcatatgga

SEQ ID NO: 2805486 - DNA, 25 bp, Homo sapien
tccctgctttattgcactgcctgaa

SEQ ID NO: 2805487 - DNA, 25 bp, Homo sapien
ctgtctagacggtcccttttgtgta

SEQ ID NO: 2805488 - DNA, 25 bp, Homo sapien
cttttgtgtatcagctgttttttcc

SEQ ID NO: 2805489 - DNA, 25 bp, Homo sapien
ttataataatcgggtctcatcctgc

SEQ ID NO: 2805490 - DNA, 25 bp, Homo sapien
tataataatcgggtctcatcctgca

SEQ ID NO: 2805491 - DNA, 25 bp, Homo sapien
cattgaccttggacgtgaacttcta

SEQ ID NO: 2805492 - DNA, 25 bp, Homo sapien
gaagccattacacagagagtttgcc

SEQ ID NO: 2805493 - DNA, 25 bp, Homo sapien
ggtggaatcaactctcgctgctcag

SEQ ID NO: 2805494 - DNA, 25 bp, Homo sapien
cagactatgtgagaagggatccaaa

SEQ ID NO: 2805495 - DNA, 25 bp, Homo sapien
cctgcagtcttgttgtacctagttc

SEQ ID NO: 2805496 - DNA, 25 bp, Homo sapien
ggctctttggtagtactctcattgc

SEQ ID NO: 2805497 - DNA, 25 bp, Homo sapien
gttgtacctagttccacattgtgca

SEQ ID NO: 2805498 - DNA, 25 bp, Homo sapien
tggtagtactctcattgccttcttc

SEQ ID NO: 2805499 - DNA, 25 bp, Homo sapien
caggaaagggaacactctgctgtac

SEQ ID NO: 2805500 - DNA, 25 bp, Homo sapien
cagatctgtttcggatgcagaatgt

SEQ ID NO: 2805501 - DNA, 25 bp, Homo sapien
ctgtactctgttagattttcttgca

SEQ ID NO: 2805502 - DNA, 25 bp, Homo sapien
gcaaggattcatgagcagatctgtt

SEQ ID NO: 2805503 - DNA, 25 bp, Homo sapien
tgtgctaaaaggcagtctgaagact

SEQ ID NO: 2805504 - DNA, 25 bp, Homo sapien
gattgtgaagagtatgttaatgtgc

SEQ ID NO: 2805505 - DNA, 25 bp, Homo sapien
gcacttaaggtgcttttattgtggg

SEQ ID NO: 2805506 - DNA, 25 bp, Homo sapien
gtctgaagactttatgaactatgct

SEQ ID NO: 2805507 - DNA, 25 bp, Homo sapien
cagcatgccatgaaagtaggtgttc

SEQ ID NO: 2805508 - DNA, 25 bp, Homo sapien
tcacttcagtggaaattgtacccta

SEQ ID NO: 2805509 - DNA, 25 bp, Homo sapien
catcacatcttcagtagtctggaaa

SEQ ID NO: 2805510 - DNA, 25 bp, Homo sapien
gatgaagccaaagaatccactgtct

SEQ ID NO: 2805511 - DNA, 25 bp, Homo sapien
tagcataagagatgcaccgtgtgtc

SEQ ID NO: 2805512 - DNA, 25 bp, Homo sapien
tctcaatggtaacaaccccaggtga

SEQ ID NO: 2805513 - DNA, 25 bp, Homo sapien
ggagcaaatgatggttactgttctg

SEQ ID NO: 2805514 - DNA, 25 bp, Homo sapien
gctgtcctgcttctaatagcataag

SEQ ID NO: 2805515 - DNA, 25 bp, Homo sapien
ccaagcatgctcaatggaagacttg

SEQ ID NO: 2805516 - DNA, 25 bp, Homo sapien
agcatgctcaatggaagacttgtct

SEQ ID NO: 2805517 - DNA, 25 bp, Homo sapien
ttgaattcatactgtatcaaaatga

SEQ ID NO: 2805518 - DNA, 25 bp, Homo sapien
gaattcatactgtatcaaaatgact

SEQ ID NO: 2805519 - DNA, 25 bp, Homo sapien
taggagtcccaattagcaacttcag

SEQ ID NO: 2805520 - DNA, 25 bp, Homo sapien
gaatattagtgatcattgctcccac

SEQ ID NO: 2805521 - DNA, 25 bp, Homo sapien
gaggatggacaattcgagacaggca

SEQ ID NO: 2805522 - DNA, 25 bp, Homo sapien
tcagctgcaagtagtggaaaaccaa

SEQ ID NO: 2805523 - DNA, 25 bp, Homo sapien
gtaccctgcttctatcactttttca

SEQ ID NO: 2805524 - DNA, 25 bp, Homo sapien
tttgatgatgcaaaaggtaccctgc

SEQ ID NO: 2805525 - DNA, 25 bp, Homo sapien
gatgcaaaaggtaccctgcttctat

SEQ ID NO: 2805526 - DNA, 25 bp, Homo sapien
caaaaggtaccctgcttctatcact

SEQ ID NO: 2805527 - DNA, 25 bp, Homo sapien
gagagatgccatgccaattcaaggc

SEQ ID NO: 2805528 - DNA, 25 bp, Homo sapien
gttgaaactcttgcgtaatgacatc

SEQ ID NO: 2805529 - DNA, 25 bp, Homo sapien
gagttggatgaaagactgtgctgcc

SEQ ID NO: 2805530 - DNA, 25 bp, Homo sapien
tgctgtagcagagtgatgtagtgac

SEQ ID NO: 2805531 - DNA, 25 bp, Homo sapien
catctttaaagtgatatcattttat

SEQ ID NO: 2805532 - DNA, 25 bp, Homo sapien
acatctttaaagtgatatcatttta

SEQ ID NO: 2805533 - DNA, 25 bp, Homo sapien
tgcttctggctacctatttaaaatg

SEQ ID NO: 2805534 - DNA, 25 bp, Homo sapien
aaacatttcaattgcacatatctgc

SEQ ID NO: 2805535 - DNA, 25 bp, Homo sapien
gggcacaatcgtcctctttcataag

SEQ ID NO: 2805536 - DNA, 25 bp, Homo sapien
tggataagtggtactgggcacaatc

SEQ ID NO: 2805537 - DNA, 25 bp, Homo sapien
gccctggtgtagcactgaatagagg

SEQ ID NO: 2805538 - DNA, 25 bp, Homo sapien
gggtttaccagattgttggcactgg

SEQ ID NO: 2805539 - DNA, 25 bp, Homo sapien
tggctgacttatgcccccttttcat

SEQ ID NO: 2805540 - DNA, 25 bp, Homo sapien
aatttcccctctggccatatctgca

SEQ ID NO: 2805541 - DNA, 25 bp, Homo sapien
ccttgcaggaaggtgacatgcacca

SEQ ID NO: 2805542 - DNA, 25 bp, Homo sapien
tctgcaaactagttgccttgcagga

SEQ ID NO: 2805543 - DNA, 25 bp, Homo sapien
ttgttgtccagtaatttcccctctg

SEQ ID NO: 2805544 - DNA, 25 bp, Homo sapien
gcttcatagatggtgacttctaggt

SEQ ID NO: 2805545 - DNA, 25 bp, Homo sapien
cttcatagatggtgacttctaggtg

SEQ ID NO: 2805546 - DNA, 25 bp, Homo sapien
ttcatagatggtgacttctaggtgg

SEQ ID NO: 2805547 - DNA, 25 bp, Homo sapien
ctttctccttctgggaacatccctt

SEQ ID NO: 2805548 - DNA, 25 bp, Homo sapien
ccttctgggaacatcccttcctcat

SEQ ID NO: 2805549 - DNA, 25 bp, Homo sapien
attgctttctccttctgggaacatc

SEQ ID NO: 2805550 - DNA, 25 bp, Homo sapien
ttgatgcctttccattgctttctcc

SEQ ID NO: 2805551 - DNA, 25 bp, Homo sapien
tctttatgaattaatgacagatatc

SEQ ID NO: 2805552 - DNA, 25 bp, Homo sapien
taattatctttatgaattaatgaca

SEQ ID NO: 2805553 - DNA, 25 bp, Homo sapien
tatctttatgaattaatgacagata

SEQ ID NO: 2805554 - DNA, 25 bp, Homo sapien
tttatgaattaatgacagatatctc

SEQ ID NO: 2805555 - DNA, 25 bp, Homo sapien
caaacacctgggatagagccaagca

SEQ ID NO: 2805556 - DNA, 25 bp, Homo sapien
gatgtgaggataaaccaaacacctg

SEQ ID NO: 2805557 - DNA, 25 bp, Homo sapien
caaatctgtgtaggctttggcttaa

SEQ ID NO: 2805558 - DNA, 25 bp, Homo sapien
gcttaatgagagtccaagagagtta

SEQ ID NO: 2805559 - DNA, 25 bp, Homo sapien
tagagaagtgatatcaggacctggc

SEQ ID NO: 2805560 - DNA, 25 bp, Homo sapien
tcacagtatatcatccaagaacaag

SEQ ID NO: 2805561 - DNA, 25 bp, Homo sapien
aatggacgaccatggtcattccgtg

SEQ ID NO: 2805562 - DNA, 25 bp, Homo sapien
aaaagatgctcatgcggtagctgca

SEQ ID NO: 2805563 - DNA, 25 bp, Homo sapien
aaaccgtcctcgttctctcctccag

SEQ ID NO: 2805564 - DNA, 25 bp, Homo sapien
aaccgtcctcgttctctcctccagc

SEQ ID NO: 2805565 - DNA, 25 bp, Homo sapien
caccccttgactacatgattctaga

SEQ ID NO: 2805566 - DNA, 25 bp, Homo sapien
caaggtcacaataaccacctgaagg

SEQ ID NO: 2805567 - DNA, 25 bp, Homo sapien
tcagtgtttggtcccatgccctctt

SEQ ID NO: 2805568 - DNA, 25 bp, Homo sapien
tcatttacccctcagcatgaagatt

SEQ ID NO: 2805569 - DNA, 25 bp, Homo sapien
tataagtcggatgatgaatgagggc

SEQ ID NO: 2805570 - DNA, 25 bp, Homo sapien
tagtcttgtaataagtataagtcgg

SEQ ID NO: 2805571 - DNA, 25 bp, Homo sapien
ctcataccaggccttccgttttaag

SEQ ID NO: 2805572 - DNA, 25 bp, Homo sapien
gaagctttttagaagctacctcata

SEQ ID NO: 2805573 - DNA, 25 bp, Homo sapien
ctcaggtaatggagaacattctaac

SEQ ID NO: 2805574 - DNA, 25 bp, Homo sapien
tgaggagggaatagtgattaaaacc

SEQ ID NO: 2805575 - DNA, 25 bp, Homo sapien
aatacatggattattcagaatgggc

SEQ ID NO: 2805576 - DNA, 25 bp, Homo sapien
caaattagtgtcctataatgaggag

SEQ ID NO: 2805577 - DNA, 25 bp, Homo sapien
tgaaatgaatgtagcctggcaactt

SEQ ID NO: 2805578 - DNA, 25 bp, Homo sapien
tggcaacttcaactgggaacccttc

SEQ ID NO: 2805579 - DNA, 25 bp, Homo sapien
tcggagggcctcaattatgtatgcg

SEQ ID NO: 2805580 - DNA, 25 bp, Homo sapien
cccaaggaccagtatgttgttgcca

SEQ ID NO: 2805581 - DNA, 25 bp, Homo sapien
agaacaatgtggctaaaatgacgca

SEQ ID NO: 2805582 - DNA, 25 bp, Homo sapien
taaaatgacgcaagccaggagagct

SEQ ID NO: 2805583 - DNA, 25 bp, Homo sapien
tgtggctaaaatgacgcaagccagg

SEQ ID NO: 2805584 - DNA, 25 bp, Homo sapien
tgatgctgtgctcaatttacaatag

SEQ ID NO: 2805585 - DNA, 25 bp, Homo sapien
ttttatggatatctgaaacaggaat

SEQ ID NO: 2805586 - DNA, 25 bp, Homo sapien
ctagactcagaaaaagtgccaaatt

SEQ ID NO: 2805587 - DNA, 25 bp, Homo sapien
aaagaaattctatagctagactcag

SEQ ID NO: 2805588 - DNA, 25 bp, Homo sapien
tccactgataggagatacttttctt

SEQ ID NO: 2805589 - DNA, 25 bp, Homo sapien
ggagtctgagatattgttcccagtt

SEQ ID NO: 2805590 - DNA, 25 bp, Homo sapien
tcctgtttggagtctgagatattgt

SEQ ID NO: 2805591 - DNA, 25 bp, Homo sapien
gctctctacttctataatgtgcctc

SEQ ID NO: 2805592 - DNA, 25 bp, Homo sapien
tttggagtctgagatattgttccca

SEQ ID NO: 2805593 - DNA, 25 bp, Homo sapien
cacttactgtatgaagcatgtgtca

SEQ ID NO: 2805594 - DNA, 25 bp, Homo sapien
cttactgtatgaagcatgtgtcatc

SEQ ID NO: 2805595 - DNA, 25 bp, Homo sapien
agcacttactgtatgaagcatgtgt

SEQ ID NO: 2805596 - DNA, 25 bp, Homo sapien
gcacttactgtatgaagcatgtgtc

SEQ ID NO: 2805597 - DNA, 25 bp, Homo sapien
ccttcatttccctcatagccatatc

SEQ ID NO: 2805598 - DNA, 25 bp, Homo sapien
catttccctcatagccatatccttg

SEQ ID NO: 2805599 - DNA, 25 bp, Homo sapien
atatccttgtcgtattttttctgtt

SEQ ID NO: 2805600 - DNA, 25 bp, Homo sapien
tatccttgtcgtattttttctgttc

SEQ ID NO: 2805601 - DNA, 25 bp, Homo sapien
cattttcttctcttcccccactgcc

SEQ ID NO: 2805602 - DNA, 25 bp, Homo sapien
ttttcttctcttcccccactgccac

SEQ ID NO: 2805603 - DNA, 25 bp, Homo sapien
ttcttctcttcccccactgccacat

SEQ ID NO: 2805604 - DNA, 25 bp, Homo sapien
tgcaagtcttaatttccattttctt

SEQ ID NO: 2805605 - DNA, 25 bp, Homo sapien
ttccctcccctaccatgtttacatc

SEQ ID NO: 2805606 - DNA, 25 bp, Homo sapien
tccctcccctaccatgtttacatct

SEQ ID NO: 2805607 - DNA, 25 bp, Homo sapien
ccctcccctaccatgtttacatctt

SEQ ID NO: 2805608 - DNA, 25 bp, Homo sapien
ctcccctaccatgtttacatcttta

SEQ ID NO: 2805609 - DNA, 25 bp, Homo sapien
aacagctgtgtttgatcatcatgaa

SEQ ID NO: 2805610 - DNA, 25 bp, Homo sapien
tcagttccaggtcttatcaggcaga

SEQ ID NO: 2805611 - DNA, 25 bp, Homo sapien
tgatcatcatgaacacgtgactttt

SEQ ID NO: 2805612 - DNA, 25 bp, Homo sapien
attttaacaccaatcaaacagctgt

SEQ ID NO: 2805613 - DNA, 25 bp, Homo sapien
tgcagtgatttctctattgctggca

SEQ ID NO: 2805614 - DNA, 25 bp, Homo sapien
tagtattggtccacgaacagctgga

SEQ ID NO: 2805615 - DNA, 25 bp, Homo sapien
tattgctggcatctagtattggtcc

SEQ ID NO: 2805616 - DNA, 25 bp, Homo sapien
ccacgaacagctggaagcaatgagt

SEQ ID NO: 2805617 - DNA, 25 bp, Homo sapien
tctgtggttcacgatactgctaaaa

SEQ ID NO: 2805618 - DNA, 25 bp, Homo sapien
caaagagctctcctgtaaccatttg

SEQ ID NO: 2805619 - DNA, 25 bp, Homo sapien
taatcagatactaatgtgagaggga

SEQ ID NO: 2805620 - DNA, 25 bp, Homo sapien
tgtatgtccagttgacttctcttgc

SEQ ID NO: 2805621 - DNA, 25 bp, Homo sapien
gcaatggctgcaagttttgaaagaa

SEQ ID NO: 2805622 - DNA, 25 bp, Homo sapien
aagtatttccttgaccacagtgttg

SEQ ID NO: 2805623 - DNA, 25 bp, Homo sapien
gaaaatagtgtagaggttatctgtg

SEQ ID NO: 2805624 - DNA, 25 bp, Homo sapien
taagccaagtcctgtcagagcaatg

SEQ ID NO: 2805625 - DNA, 25 bp, Homo sapien
ggtgtgggtgtgtggatattgatgc

SEQ ID NO: 2805626 - DNA, 25 bp, Homo sapien
ttttctggaattgaaggtgtgggtg

SEQ ID NO: 2805627 - DNA, 25 bp, Homo sapien
tgtggatattgatgccataggacat

SEQ ID NO: 2805628 - DNA, 25 bp, Homo sapien
tgggtgtgtggatattgatgccata

SEQ ID NO: 2805629 - DNA, 25 bp, Homo sapien
cgtgataggcactctcctttgtgat

SEQ ID NO: 2805630 - DNA, 25 bp, Homo sapien
tactaccgacttgtctcctggagac

SEQ ID NO: 2805631 - DNA, 25 bp, Homo sapien
gatgttaagacctctcgtgataggc

SEQ ID NO: 2805632 - DNA, 25 bp, Homo sapien
gagccagtgatgctaactcttacca

SEQ ID NO: 2805633 - DNA, 25 bp, Homo sapien
tctggtaagatgagccaaaagtttt

SEQ ID NO: 2805634 - DNA, 25 bp, Homo sapien
cacagccacctacaagataatagaa

SEQ ID NO: 2805635 - DNA, 25 bp, Homo sapien
agttttaagaatggacacagccacc

SEQ ID NO: 2805636 - DNA, 25 bp, Homo sapien
cgggcatattccagcacatcaggca

SEQ ID NO: 2805637 - DNA, 25 bp, Homo sapien
gctctggctcaaagtaagaactgtg

SEQ ID NO: 2805638 - DNA, 25 bp, Homo sapien
caaaagtcggtgctgctacatcggc

SEQ ID NO: 2805639 - DNA, 25 bp, Homo sapien
tcaaagtgggcgagacaaaagtcgg

SEQ ID NO: 2805640 - DNA, 25 bp, Homo sapien
gatggtataaagcagtccccagcca

SEQ ID NO: 2805641 - DNA, 25 bp, Homo sapien
tactggagccttactggtgggatac

SEQ ID NO: 2805642 - DNA, 25 bp, Homo sapien
tattcattgacgtccacccaagtgc

SEQ ID NO: 2805643 - DNA, 25 bp, Homo sapien
ccgctgtgtcgctacaaagtgggcc

SEQ ID NO: 2805644 - DNA, 25 bp, Homo sapien
tagcttcaaactgcacgaagccgcg

SEQ ID NO: 2805645 - DNA, 25 bp, Homo sapien
agtagtccacgccagatgtcttcag

SEQ ID NO: 2805646 - DNA, 25 bp, Homo sapien
cagagtagtccacgccagatgtctt

SEQ ID NO: 2805647 - DNA, 25 bp, Homo sapien
tcagagtagtccacgccagatgtct

SEQ ID NO: 2805648 - DNA, 25 bp, Homo sapien
catcagagtagtccacgccagatgt

SEQ ID NO: 2805649 - DNA, 25 bp, Homo sapien
ttgtttcctcatctccaaagcaatt

SEQ ID NO: 2805650 - DNA, 25 bp, Homo sapien
cataagagtttgtttcctcatctcc

SEQ ID NO: 2805651 - DNA, 25 bp, Homo sapien
gtttgtttcctcatctccaaagcaa

SEQ ID NO: 2805652 - DNA, 25 bp, Homo sapien
gtttcctcatctccaaagcaatttc

SEQ ID NO: 2805653 - DNA, 25 bp, Homo sapien
ggagagagtcgttcccagcacagtt

SEQ ID NO: 2805654 - DNA, 25 bp, Homo sapien
tttgcctgtcagtttcccatgcgcc

SEQ ID NO: 2805655 - DNA, 25 bp, Homo sapien
tgaagatggtatgacaggcttggct

SEQ ID NO: 2805656 - DNA, 25 bp, Homo sapien
ggcttggcttctcccgatgcagctg

SEQ ID NO: 2805657 - DNA, 25 bp, Homo sapien
aaatgtcaggtctaaatcctgtatg

SEQ ID NO: 2805658 - DNA, 25 bp, Homo sapien
tgaagactagaggtttccctgggcc

SEQ ID NO: 2805659 - DNA, 25 bp, Homo sapien
tatgaaaatcagtccggtttaatcc

SEQ ID NO: 2805660 - DNA, 25 bp, Homo sapien
tgtgaaccgaataataaatgtcagg

SEQ ID NO: 2805661 - DNA, 25 bp, Homo sapien
gtttctattgtgttctgagcttcca

SEQ ID NO: 2805662 - DNA, 25 bp, Homo sapien
gtgtttctattgtgttctgagcttc

SEQ ID NO: 2805663 - DNA, 25 bp, Homo sapien
tttgcaattcatatcgttgctgtgt

SEQ ID NO: 2805664 - DNA, 25 bp, Homo sapien
tgtttctattgtgttctgagcttcc

SEQ ID NO: 2805665 - DNA, 25 bp, Homo sapien
gagaagtaagatccttttcaggcaa

SEQ ID NO: 2805666 - DNA, 25 bp, Homo sapien
ggctcacctcatggtggactgccca

SEQ ID NO: 2805667 - DNA, 25 bp, Homo sapien
cattgaagtacccagacctgtgaca

SEQ ID NO: 2805668 - DNA, 25 bp, Homo sapien
ggactgcccaccctaatattcttaa

SEQ ID NO: 2805669 - DNA, 25 bp, Homo sapien
aaggtagtattatgatcttggctca

SEQ ID NO: 2805670 - DNA, 25 bp, Homo sapien
taaggtagtattatgatcttggctc

SEQ ID NO: 2805671 - DNA, 25 bp, Homo sapien
caatttttaagggataggtcaggag

SEQ ID NO: 2805672 - DNA, 25 bp, Homo sapien
tattccagttgaacaccaagagaaa

SEQ ID NO: 2805673 - DNA, 25 bp, Homo sapien
ctgctctattccagttgaacaccaa

SEQ ID NO: 2805674 - DNA, 25 bp, Homo sapien
tgcagccatacaccttcccttcctc

SEQ ID NO: 2805675 - DNA, 25 bp, Homo sapien
gagaaaaacaatgcagccatacacc

SEQ ID NO: 2805676 - DNA, 25 bp, Homo sapien
ctaactgcgtaatgttccatctcca

SEQ ID NO: 2805677 - DNA, 25 bp, Homo sapien
taactgcgtaatgttccatctccat

SEQ ID NO: 2805678 - DNA, 25 bp, Homo sapien
gttttcttataagggtgatatgagt

SEQ ID NO: 2805679 - DNA, 25 bp, Homo sapien
taaatcatatacatgagtcattttc

SEQ ID NO: 2805680 - DNA, 25 bp, Homo sapien
tatcgctgatgcatattaaatcata

SEQ ID NO: 2805681 - DNA, 25 bp, Homo sapien
ggtgatatgagttatcgctgatgca

SEQ ID NO: 2805682 - DNA, 25 bp, Homo sapien
ctcctgtatttcattagcaaccaga

SEQ ID NO: 2805683 - DNA, 25 bp, Homo sapien
gattttctgcaatcaatctcctgta

SEQ ID NO: 2805684 - DNA, 25 bp, Homo sapien
cattagcaaccagataaggtgtggt

SEQ ID NO: 2805685 - DNA, 25 bp, Homo sapien
aagattttctgcaatcaatctcctg

SEQ ID NO: 2805686 - DNA, 25 bp, Homo sapien
tccatgcatgatgttattaactggc

SEQ ID NO: 2805687 - DNA, 25 bp, Homo sapien
tagtaagtgcttaagacccagatct

SEQ ID NO: 2805688 - DNA, 25 bp, Homo sapien
gttctactgtatccacccaacaagg

SEQ ID NO: 2805689 - DNA, 25 bp, Homo sapien
tttaaagtaatctctgaacaagttc

SEQ ID NO: 2805690 - DNA, 25 bp, Homo sapien
ttggtgacacaataacaaaattgca

SEQ ID NO: 2805691 - DNA, 25 bp, Homo sapien
gcacttacatgttaagaactatgag

SEQ ID NO: 2805692 - DNA, 25 bp, Homo sapien
aatagatttcgtgaatgttaaaccg

SEQ ID NO: 2805693 - DNA, 25 bp, Homo sapien
taaaccgaaggataactgatttaca

SEQ ID NO: 2805694 - DNA, 25 bp, Homo sapien
taccattcatagctctagacgtaga

SEQ ID NO: 2805695 - DNA, 25 bp, Homo sapien
gacatttagtacagccctggtgagg

SEQ ID NO: 2805696 - DNA, 25 bp, Homo sapien
tagatttcaatcgacttaagcgggc

SEQ ID NO: 2805697 - DNA, 25 bp, Homo sapien
taagcgggcacaatgaaacttggtc

SEQ ID NO: 2805698 - DNA, 25 bp, Homo sapien
tacatgcctttggaatattacgggt

SEQ ID NO: 2805699 - DNA, 25 bp, Homo sapien
ggctcggaacaagagacactagttt

SEQ ID NO: 2805700 - DNA, 25 bp, Homo sapien
tgggacatgttgcaccaagggcagt

SEQ ID NO: 2805701 - DNA, 25 bp, Homo sapien
ggttgcatagacaagggctcggaac

SEQ ID NO: 2805702 - DNA, 25 bp, Homo sapien
taaaactctggcacgtgtacagcag

SEQ ID NO: 2805703 - DNA, 25 bp, Homo sapien
tgtagcagctacagaccagttggtg

SEQ ID NO: 2805704 - DNA, 25 bp, Homo sapien
ttgtcaataatctaggccacgtgga

SEQ ID NO: 2805705 - DNA, 25 bp, Homo sapien
taggtaaatagcacccctggacatg

SEQ ID NO: 2805706 - DNA, 25 bp, Homo sapien
tagctttatgaagaccaatacactc

SEQ ID NO: 2805707 - DNA, 25 bp, Homo sapien
gctttatgaagaccaatacactcat

SEQ ID NO: 2805708 - DNA, 25 bp, Homo sapien
tttatgaagaccaatacactcatac

SEQ ID NO: 2805709 - DNA, 25 bp, Homo sapien
ttatgaagaccaatacactcataca

SEQ ID NO: 2805710 - DNA, 25 bp, Homo sapien
tctggcagtaccgaagagtggtcgt

SEQ ID NO: 2805711 - DNA, 25 bp, Homo sapien
tgtgcgcggctaaaacatccaaacg

SEQ ID NO: 2805712 - DNA, 25 bp, Homo sapien
gccaacggcaatttccagcgcaggt

SEQ ID NO: 2805713 - DNA, 25 bp, Homo sapien
tttcagcaagtaatctccggcagcg

SEQ ID NO: 2805714 - DNA, 25 bp, Homo sapien
tagaatgcagcacaggtaaaccttg

SEQ ID NO: 2805715 - DNA, 25 bp, Homo sapien
tctaatgctgtacacaactctgctg

SEQ ID NO: 2805716 - DNA, 25 bp, Homo sapien
tctaagcaagcggacttcatcgtgg

SEQ ID NO: 2805717 - DNA, 25 bp, Homo sapien
tctgctgtaatgaaaatcctgagcc

SEQ ID NO: 2805718 - DNA, 25 bp, Homo sapien
taaaacactaatgagctctgccgcc

SEQ ID NO: 2805719 - DNA, 25 bp, Homo sapien
tgtgtagccctaaagattcctagca

SEQ ID NO: 2805720 - DNA, 25 bp, Homo sapien
tgcaaagcacatgaagaactggcct

SEQ ID NO: 2805721 - DNA, 25 bp, Homo sapien
tagtcatatcaactggactccgggc

SEQ ID NO: 2805722 - DNA, 25 bp, Homo sapien
gttggattgtctattcattttatgc

SEQ ID NO: 2805723 - DNA, 25 bp, Homo sapien
ctttggttggttggattgtctattc

SEQ ID NO: 2805724 - DNA, 25 bp, Homo sapien
ggttggattgtctattcattttatg

SEQ ID NO: 2805725 - DNA, 25 bp, Homo sapien
ggttggttggattgtctattcattt

SEQ ID NO: 2805726 - DNA, 25 bp, Homo sapien
ccaggcaatgctgccccccaaatcc

SEQ ID NO: 2805727 - DNA, 25 bp, Homo sapien
caggcaatgctgccccccaaatcca

SEQ ID NO: 2805728 - DNA, 25 bp, Homo sapien
agctgggcaggaaccgaggcgccgg

SEQ ID NO: 2805729 - DNA, 25 bp, Homo sapien
aaagacaagatccaaagtcacagca

SEQ ID NO: 2805730 - DNA, 25 bp, Homo sapien
cacacaaacaggcttctttcggcgt

SEQ ID NO: 2805731 - DNA, 25 bp, Homo sapien
atccaaagtcacagcacggccgcag

SEQ ID NO: 2805732 - DNA, 25 bp, Homo sapien
acggccgcagcacacaaacaggctt

SEQ ID NO: 2805733 - DNA, 25 bp, Homo sapien
tcaacacatttaaaactgccgctca

SEQ ID NO: 2805734 - DNA, 25 bp, Homo sapien
agaagggcgcaaaagaccaaggagt

SEQ ID NO: 2805735 - DNA, 25 bp, Homo sapien
tgattcttggttgattgcgtctaaa

SEQ ID NO: 2805736 - DNA, 25 bp, Homo sapien
aaaactgccgctcaattccacatgg

SEQ ID NO: 2805737 - DNA, 25 bp, Homo sapien
ccatgccaggcacttgctccctgag

SEQ ID NO: 2805738 - DNA, 25 bp, Homo sapien
ctgagcctcggagtggagagtgaag

SEQ ID NO: 2805739 - DNA, 25 bp, Homo sapien
cccatgccaggcacttgctccctga

SEQ ID NO: 2805740 - DNA, 25 bp, Homo sapien
ccctgagcctcggagtggagagtga

SEQ ID NO: 2805741 - DNA, 25 bp, Homo sapien
tctgcgttgccagagataatgaatt

SEQ ID NO: 2805742 - DNA, 25 bp, Homo sapien
gaatttgcacccaaacctctcatag

SEQ ID NO: 2805743 - DNA, 25 bp, Homo sapien
ttttcagtccccacactacgttctg

SEQ ID NO: 2805744 - DNA, 25 bp, Homo sapien
tattgttcatccattgccacggtct

SEQ ID NO: 2805745 - DNA, 25 bp, Homo sapien
ggaacgatgaaacggcacacttggc

SEQ ID NO: 2805746 - DNA, 25 bp, Homo sapien
cctgctcgtagatctgccctccggc

SEQ ID NO: 2805747 - DNA, 25 bp, Homo sapien
atggccacgaacatgtcaggaaaac

SEQ ID NO: 2805748 - DNA, 25 bp, Homo sapien
ggctgcgaggtggaacgatgaaacg

SEQ ID NO: 2805749 - DNA, 25 bp, Homo sapien
gaaaccagaagacttcaccagtcgg

SEQ ID NO: 2805750 - DNA, 25 bp, Homo sapien
tctgagggaagcaaaagaacgtgtg

SEQ ID NO: 2805751 - DNA, 25 bp, Homo sapien
agtcggctgggcgatttacctctcc

SEQ ID NO: 2805752 - DNA, 25 bp, Homo sapien
taagctacccgagcattggtctaaa

SEQ ID NO: 2805753 - DNA, 25 bp, Homo sapien
gaaggctggcgagtctgagagccgc

SEQ ID NO: 2805754 - DNA, 25 bp, Homo sapien
cgtgtgcggccggaaggctggcgag

SEQ ID NO: 2805755 - DNA, 25 bp, Homo sapien
cagggcaagagtctgcgtgtgcggc

SEQ ID NO: 2805756 - DNA, 25 bp, Homo sapien
gcgagtctgagagccgcgcggtgca

SEQ ID NO: 2805757 - DNA, 25 bp, Homo sapien
gttcaaggtttagctgcgaggtcac

SEQ ID NO: 2805758 - DNA, 25 bp, Homo sapien
cttcacgttcaaggtttagctgcga

SEQ ID NO: 2805759 - DNA, 25 bp, Homo sapien
ccatcccggcttcacgttcaaggtt

SEQ ID NO: 2805760 - DNA, 25 bp, Homo sapien
catcccggcttcacgttcaaggttt

SEQ ID NO: 2805761 - DNA, 25 bp, Homo sapien
gctccctgtctccctctacgtccgg

SEQ ID NO: 2805762 - DNA, 25 bp, Homo sapien
gacgtcagctccctgtctccctcta

SEQ ID NO: 2805763 - DNA, 25 bp, Homo sapien
tcagctccctgtctccctctacgtc

SEQ ID NO: 2805764 - DNA, 25 bp, Homo sapien
acgtcagctccctgtctccctctac

SEQ ID NO: 2805765 - DNA, 25 bp, Homo sapien
tatgcaaatcctgcgcgaagaggag

SEQ ID NO: 2805766 - DNA, 25 bp, Homo sapien
cgagaacggttgtttcggctcctgt

SEQ ID NO: 2805767 - DNA, 25 bp, Homo sapien
ggcgcgatcgccttttattgaagct

SEQ ID NO: 2805768 - DNA, 25 bp, Homo sapien
aaacgctgtagccttcgagaacggt

SEQ ID NO: 2805769 - DNA, 25 bp, Homo sapien
tgctagataatatacacagttacct

SEQ ID NO: 2805770 - DNA, 25 bp, Homo sapien
tctgtcttttttggcgagtgtctgc

SEQ ID NO: 2805771 - DNA, 25 bp, Homo sapien
tgcaatgccagctgtataacctcct

SEQ ID NO: 2805772 - DNA, 25 bp, Homo sapien
ctgctgctgtctcttgctagataat

SEQ ID NO: 2805773 - DNA, 25 bp, Homo sapien
taaacaagtccaagtacatgcacag

SEQ ID NO: 2805774 - DNA, 25 bp, Homo sapien
cacagatactcaggccaagactcag

SEQ ID NO: 2805775 - DNA, 25 bp, Homo sapien
tgggtagacacagcaatggacagcc

SEQ ID NO: 2805776 - DNA, 25 bp, Homo sapien
caatatagctatgcagcacgatggc

SEQ ID NO: 2805777 - DNA, 25 bp, Homo sapien
tttccaagcctacaccaaagtgctc

SEQ ID NO: 2805778 - DNA, 25 bp, Homo sapien
ctggctgtagtttttccaagcctac

SEQ ID NO: 2805779 - DNA, 25 bp, Homo sapien
caccaaagtgctcatatgatatgtc

SEQ ID NO: 2805780 - DNA, 25 bp, Homo sapien
gctcatatgatatgtcacccaataa

SEQ ID NO: 2805781 - DNA, 25 bp, Homo sapien
cacctggctgagtgaaacaattcgg

SEQ ID NO: 2805782 - DNA, 25 bp, Homo sapien
caattcggcaggctcaaggtctctt

SEQ ID NO: 2805783 - DNA, 25 bp, Homo sapien
cgcgcgcgctatgtgacaaggaaca

SEQ ID NO: 2805784 - DNA, 25 bp, Homo sapien
tgtaggatcaggacaaacacaccgg

SEQ ID NO: 2805785 - DNA, 25 bp, Homo sapien
agggccggtggctcggtgactcgct

SEQ ID NO: 2805786 - DNA, 25 bp, Homo sapien
agggtgggtagcgtcgctgccgctg

SEQ ID NO: 2805787 - DNA, 25 bp, Homo sapien
ccgagggccggtggctcggtgactc

SEQ ID NO: 2805788 - DNA, 25 bp, Homo sapien
ggtggctcggtgactcgctggctag

SEQ ID NO: 2805789 - DNA, 25 bp, Homo sapien
ccggttgaatctcccctcttcggat

SEQ ID NO: 2805790 - DNA, 25 bp, Homo sapien
tcaacctcttgtttattcgtaaagc

SEQ ID NO: 2805791 - DNA, 25 bp, Homo sapien
tctgtagctagctcccacgaagctg

SEQ ID NO: 2805792 - DNA, 25 bp, Homo sapien
agcccatatggaaccccggttgaat

SEQ ID NO: 2805793 - DNA, 25 bp, Homo sapien
tagccaggtgagcacgggcacagtc

SEQ ID NO: 2805794 - DNA, 25 bp, Homo sapien
cgaaggtacttccttaggccggcag

SEQ ID NO: 2805795 - DNA, 25 bp, Homo sapien
ccgcccatggcacgtgaagagaaag

SEQ ID NO: 2805796 - DNA, 25 bp, Homo sapien
ctctctcgggagctccggtgggtct

SEQ ID NO: 2805797 - DNA, 25 bp, Homo sapien
ccgggagcggaaggctgagtggcgc

SEQ ID NO: 2805798 - DNA, 25 bp, Homo sapien
ccggcaggggaacagcgacacctac

SEQ ID NO: 2805799 - DNA, 25 bp, Homo sapien
cgccggcaggggaacagcgacacct

SEQ ID NO: 2805800 - DNA, 25 bp, Homo sapien
ctgccgggagcggaaggctgagtgg

SEQ ID NO: 2805801 - DNA, 25 bp, Homo sapien
gaaccggataaaccctcagatgcag

SEQ ID NO: 2805802 - DNA, 25 bp, Homo sapien
gctctgcggactgctctaggactcg

SEQ ID NO: 2805803 - DNA, 25 bp, Homo sapien
gaaacttcaccgaaggctctgcgga

SEQ ID NO: 2805804 - DNA, 25 bp, Homo sapien
gacccaagcagaggtcggagccttg

SEQ ID NO: 2805805 - DNA, 25 bp, Homo sapien
tctgatgaaagctcagcaaggttgg

SEQ ID NO: 2805806 - DNA, 25 bp, Homo sapien
tatatcttctgcgacatggcttcgg

SEQ ID NO: 2805807 - DNA, 25 bp, Homo sapien
tctgtaatagcatatagccatttca

SEQ ID NO: 2805808 - DNA, 25 bp, Homo sapien
gcaattcatgtattccagattcact

SEQ ID NO: 2805809 - DNA, 25 bp, Homo sapien
tcttagctttacataccggttagaa

SEQ ID NO: 2805810 - DNA, 25 bp, Homo sapien
ctaaaagattttgcctggaaggtgg

SEQ ID NO: 2805811 - DNA, 25 bp, Homo sapien
aaatttttgtcttcgttctctacag

SEQ ID NO: 2805812 - DNA, 25 bp, Homo sapien
ggtgggagagcttattaggactaaa

SEQ ID NO: 2805813 - DNA, 25 bp, Homo sapien
aaaaattacactgggcacacaacaa

SEQ ID NO: 2805814 - DNA, 25 bp, Homo sapien
ttaaagcaccttgataaatgcaggg

SEQ ID NO: 2805815 - DNA, 25 bp, Homo sapien
tcacatcgaagaagagactcttagc

SEQ ID NO: 2805816 - DNA, 25 bp, Homo sapien
aaattgggctttatcctactggcat

SEQ ID NO: 2805817 - DNA, 25 bp, Homo sapien
tgtggaagctagcaggccgactgaa

SEQ ID NO: 2805818 - DNA, 25 bp, Homo sapien
tttggcttcagggagtagagctcca

SEQ ID NO: 2805819 - DNA, 25 bp, Homo sapien
gatggatacatttgacacctggcta

SEQ ID NO: 2805820 - DNA, 25 bp, Homo sapien
tagagctccaaggacacctgtgtgc

SEQ ID NO: 2805821 - DNA, 25 bp, Homo sapien
gcagctgatcagacatggtaatcca

SEQ ID NO: 2805822 - DNA, 25 bp, Homo sapien
cttattggtaggtcatcagcagctg

SEQ ID NO: 2805823 - DNA, 25 bp, Homo sapien
tcacttcatgacagagcagcggctc

SEQ ID NO: 2805824 - DNA, 25 bp, Homo sapien
tttctgcgcaagtctagggttccca

SEQ ID NO: 2805825 - DNA, 25 bp, Homo sapien
tggtggcccagaagcatcaagtttc

SEQ ID NO: 2805826 - DNA, 25 bp, Homo sapien
tctgtcacacacgaggattacttgt

SEQ ID NO: 2805827 - DNA, 25 bp, Homo sapien
tctcccagccgttgtgccagatttc

SEQ ID NO: 2805828 - DNA, 25 bp, Homo sapien
gcaaaagcttgcttattcagaggag

SEQ ID NO: 2805829 - DNA, 25 bp, Homo sapien
actagcagctaccagccgcttggag

SEQ ID NO: 2805830 - DNA, 25 bp, Homo sapien
tacaggctaaactgacctcgccgac

SEQ ID NO: 2805831 - DNA, 25 bp, Homo sapien
tgcaagcgccaaaagcaaaccatgg

SEQ ID NO: 2805832 - DNA, 25 bp, Homo sapien
gggttccacggtccagtacaggcta

SEQ ID NO: 2805833 - DNA, 25 bp, Homo sapien
gaatgacaccgtccagggtcagaag

SEQ ID NO: 2805834 - DNA, 25 bp, Homo sapien
tgctgtaagagcgaaacgttgcccc

SEQ ID NO: 2805835 - DNA, 25 bp, Homo sapien
tactcggaataaggctgacagttcg

SEQ ID NO: 2805836 - DNA, 25 bp, Homo sapien
tctcggccggagacgttaagagttc

SEQ ID NO: 2805837 - DNA, 25 bp, Homo sapien
ctttggccacgtagctgcccctttt

SEQ ID NO: 2805838 - DNA, 25 bp, Homo sapien
tgccccttttcaccctgccagcaga

SEQ ID NO: 2805839 - DNA, 25 bp, Homo sapien
aaagtgaacgctcttcttttctctg

SEQ ID NO: 2805840 - DNA, 25 bp, Homo sapien
acaaagtgaacgctcttcttttctc

SEQ ID NO: 2805841 - DNA, 25 bp, Homo sapien
caagggcatacttgagcctaccagg

SEQ ID NO: 2805842 - DNA, 25 bp, Homo sapien
aaagcagcgaccgagttatttccct

SEQ ID NO: 2805843 - DNA, 25 bp, Homo sapien
tatcccaggctatggcacgtcttcg

SEQ ID NO: 2805844 - DNA, 25 bp, Homo sapien
gcctcacgctttttctgcagagaga

SEQ ID NO: 2805845 - DNA, 25 bp, Homo sapien
cccagtgctgcttccttctctgtgc

SEQ ID NO: 2805846 - DNA, 25 bp, Homo sapien
cagtgctgcttccttctctgtgcac

SEQ ID NO: 2805847 - DNA, 25 bp, Homo sapien
ttagccccagtgctgcttccttctc

SEQ ID NO: 2805848 - DNA, 25 bp, Homo sapien
gccccagtgctgcttccttctctgt

SEQ ID NO: 2805849 - DNA, 25 bp, Homo sapien
ttttgtccttgtctatatcactaca

SEQ ID NO: 2805850 - DNA, 25 bp, Homo sapien
atctggagagtgcttaggtccaggg

SEQ ID NO: 2805851 - DNA, 25 bp, Homo sapien
attttgtcttgtgagctttcagcca

SEQ ID NO: 2805852 - DNA, 25 bp, Homo sapien
cacccaacatccagtgcctctttct

SEQ ID NO: 2805853 - DNA, 25 bp, Homo sapien
gaacattagctactggattccaggg

SEQ ID NO: 2805854 - DNA, 25 bp, Homo sapien
catatcttcgaatgaaaactgtggg

SEQ ID NO: 2805855 - DNA, 25 bp, Homo sapien
tgaaaactgtgggagccttgtcctt

SEQ ID NO: 2805856 - DNA, 25 bp, Homo sapien
ccatctaccacttcggcaagaacat

SEQ ID NO: 2805857 - DNA, 25 bp, Homo sapien
cttggatggttgctatgtgcacagt

SEQ ID NO: 2805858 - DNA, 25 bp, Homo sapien
aaaaagccgactctttgtctcagag

SEQ ID NO: 2805859 - DNA, 25 bp, Homo sapien
gattttaccttatctttcagggctg

SEQ ID NO: 2805860 - DNA, 25 bp, Homo sapien
acctggttaaagagtagtctggtct

SEQ ID NO: 2805861 - DNA, 25 bp, Homo sapien
gaccttccctaagactttaatcatg

SEQ ID NO: 2805862 - DNA, 25 bp, Homo sapien
tgcatttccaaacacggctctctca

SEQ ID NO: 2805863 - DNA, 25 bp, Homo sapien
accacaatttacttaagcactcctg

SEQ ID NO: 2805864 - DNA, 25 bp, Homo sapien
ggttacataggattcaattgggagg

SEQ ID NO: 2805865 - DNA, 25 bp, Homo sapien
tttgagcattagtaaagtaggatcc

SEQ ID NO: 2805866 - DNA, 25 bp, Homo sapien
caaattatcttttgggaacgtgata

SEQ ID NO: 2805867 - DNA, 25 bp, Homo sapien
gcacagctcggctttctctgtaagt

SEQ ID NO: 2805868 - DNA, 25 bp, Homo sapien
taagtggagtaggtgctttgagcat

SEQ ID NO: 2805869 - DNA, 25 bp, Homo sapien
cacctatcaagttttaatggagcct

SEQ ID NO: 2805870 - DNA, 25 bp, Homo sapien
gagagtagggctcccaatcttttca

SEQ ID NO: 2805871 - DNA, 25 bp, Homo sapien
gcaaccctctgagttagtgataaac

SEQ ID NO: 2805872 - DNA, 25 bp, Homo sapien
taaaatagcatactgtggtcatcat

SEQ ID NO: 2805873 - DNA, 25 bp, Homo sapien
gatggccaaagtggctccctcatag

SEQ ID NO: 2805874 - DNA, 25 bp, Homo sapien
aatcaagtgaaaggcttctgctggg

SEQ ID NO: 2805875 - DNA, 25 bp, Homo sapien
gaagtgtccatgctctgagcctctg

SEQ ID NO: 2805876 - DNA, 25 bp, Homo sapien
caagctagggccatatgtgactgca

SEQ ID NO: 2805877 - DNA, 25 bp, Homo sapien
tctgtaataccctaagaaccgtcat

SEQ ID NO: 2805878 - DNA, 25 bp, Homo sapien
ataacttatggtactgcttttcaca

SEQ ID NO: 2805879 - DNA, 25 bp, Homo sapien
aagaaccttagacttccaccactgg

SEQ ID NO: 2805880 - DNA, 25 bp, Homo sapien
gagaaagctcatttgtgcttgtggc

SEQ ID NO: 2805881 - DNA, 25 bp, Homo sapien
gatataacaatactcgcagccgtgt

SEQ ID NO: 2805882 - DNA, 25 bp, Homo sapien
tcatctagtggcgacaaagtccagc

SEQ ID NO: 2805883 - DNA, 25 bp, Homo sapien
gctcgaagagaacactggtactgca

SEQ ID NO: 2805884 - DNA, 25 bp, Homo sapien
gtaaaataatactccctcagggctc

SEQ ID NO: 2805885 - DNA, 25 bp, Homo sapien
tcaacagtcctatattgctgacaag

SEQ ID NO: 2805886 - DNA, 25 bp, Homo sapien
gggtcctgacacaccgggattgttc

SEQ ID NO: 2805887 - DNA, 25 bp, Homo sapien
tgtttctagggccatatttgcagga

SEQ ID NO: 2805888 - DNA, 25 bp, Homo sapien
tgggcaagttaggatatgcacttac

SEQ ID NO: 2805889 - DNA, 25 bp, Homo sapien
cattaccgggtctgtccaagcatct

SEQ ID NO: 2805890 - DNA, 25 bp, Homo sapien
cctttttaatgagtgccatacgcca

SEQ ID NO: 2805891 - DNA, 25 bp, Homo sapien
cacaggttatccttttgacagctga

SEQ ID NO: 2805892 - DNA, 25 bp, Homo sapien
tcttggttagcaaagcatggagttc

SEQ ID NO: 2805893 - DNA, 25 bp, Homo sapien
tccggcgaaggtctggtgagtccaa

SEQ ID NO: 2805894 - DNA, 25 bp, Homo sapien
catgcgcttgactgagggactttcc

SEQ ID NO: 2805895 - DNA, 25 bp, Homo sapien
ctttcgtccggcgaaggtctggtga

SEQ ID NO: 2805896 - DNA, 25 bp, Homo sapien
tccttcagaaagtcgcatgcgcttg

SEQ ID NO: 2805897 - DNA, 25 bp, Homo sapien
gagtggaattcgttccggtgatcct

SEQ ID NO: 2805898 - DNA, 25 bp, Homo sapien
tgctcaagctgtcaacaggagatct

SEQ ID NO: 2805899 - DNA, 25 bp, Homo sapien
tacgaactgctacagctgctcaagc

SEQ ID NO: 2805900 - DNA, 25 bp, Homo sapien
tccccgcctcgtggcgcgtgtgttg

SEQ ID NO: 2805901 - DNA, 25 bp, Homo sapien
gaggctttgagtagaaggcagggag

SEQ ID NO: 2805902 - DNA, 25 bp, Homo sapien
gacttgatgttgaggctttgagtag

SEQ ID NO: 2805903 - DNA, 25 bp, Homo sapien
atgttgaggctttgagtagaaggca

SEQ ID NO: 2805904 - DNA, 25 bp, Homo sapien
ggctttgagtagaaggcagggagag

SEQ ID NO: 2805905 - DNA, 25 bp, Homo sapien
tgagataaatgagtgctagtgcaag

SEQ ID NO: 2805906 - DNA, 25 bp, Homo sapien
ctgagataaatgagtgctagtgcaa

SEQ ID NO: 2805907 - DNA, 25 bp, Homo sapien
gagataaatgagtgctagtgcaagc

SEQ ID NO: 2805908 - DNA, 25 bp, Homo sapien
agataaatgagtgctagtgcaagct

SEQ ID NO: 2805909 - DNA, 25 bp, Homo sapien
gcctaaggaaagcttgttgccaaga

SEQ ID NO: 2805910 - DNA, 25 bp, Homo sapien
gatgcgtgcggttcttaggctacca

SEQ ID NO: 2805911 - DNA, 25 bp, Homo sapien
aatgttagtcactccctgatgcgtg

SEQ ID NO: 2805912 - DNA, 25 bp, Homo sapien
gatgaatctggtgttgcctaaggaa

SEQ ID NO: 2805913 - DNA, 25 bp, Homo sapien
gccagttactgaaccaaggtgaaga

SEQ ID NO: 2805914 - DNA, 25 bp, Homo sapien
taaacccagacagagatgacaggtc

SEQ ID NO: 2805915 - DNA, 25 bp, Homo sapien
gagcgctggcggtgttaaacccaga

SEQ ID NO: 2805916 - DNA, 25 bp, Homo sapien
ggtgttgctgttgccagccagttac

SEQ ID NO: 2805917 - DNA, 25 bp, Homo sapien
ttgctacggaaaccactggggtagc

SEQ ID NO: 2805918 - DNA, 25 bp, Homo sapien
ccttgtcctggtaaagtaggagttg

SEQ ID NO: 2805919 - DNA, 25 bp, Homo sapien
ctggggtagccaatgactgagccga

SEQ ID NO: 2805920 - DNA, 25 bp, Homo sapien
ctggtaaagtaggagttgctacgga

SEQ ID NO: 2805921 - DNA, 25 bp, Homo sapien
taacatgtgtctctatgaactctgc

SEQ ID NO: 2805922 - DNA, 25 bp, Homo sapien
gataacttggtacaaatctcatgaa

SEQ ID NO: 2805923 - DNA, 25 bp, Homo sapien
tttccacataaagagataacttggt

SEQ ID NO: 2805924 - DNA, 25 bp, Homo sapien
tgtgtctctatgaactctgccaacc

SEQ ID NO: 2805925 - DNA, 25 bp, Homo sapien
ctgagagcatgcggaaggagtttta

SEQ ID NO: 2805926 - DNA, 25 bp, Homo sapien
taattagtgtccgtaaatatttata

SEQ ID NO: 2805927 - DNA, 25 bp, Homo sapien
agagcatgcggaaggagttttatta

SEQ ID NO: 2805928 - DNA, 25 bp, Homo sapien
attagtgtccgtaaatatttataat

SEQ ID NO: 2805929 - DNA, 25 bp, Homo sapien
agggacctaactgacccatcacaga

SEQ ID NO: 2805930 - DNA, 25 bp, Homo sapien
gagagggacctaactgacccatcac

SEQ ID NO: 2805931 - DNA, 25 bp, Homo sapien
ggacctggaataaatctgttgatag

SEQ ID NO: 2805932 - DNA, 25 bp, Homo sapien
agggacctggaataaatctgttgat

SEQ ID NO: 2805933 - DNA, 25 bp, Homo sapien
gggaaatgcaaaccagttaccagaa

SEQ ID NO: 2805934 - DNA, 25 bp, Homo sapien
caaggctctgtcaatggcactgtta

SEQ ID NO: 2805935 - DNA, 25 bp, Homo sapien
aacatcagcctagtgaagttcacca

SEQ ID NO: 2805936 - DNA, 25 bp, Homo sapien
tgttaagtaattcatcaagttagac

SEQ ID NO: 2805937 - DNA, 25 bp, Homo sapien
cggagatctggtttacggttattca

SEQ ID NO: 2805938 - DNA, 25 bp, Homo sapien
gaccagcagacctggtgagtttcgg

SEQ ID NO: 2805939 - DNA, 25 bp, Homo sapien
ctggtggaataagaactcggagatc

SEQ ID NO: 2805940 - DNA, 25 bp, Homo sapien
catcgtattcttgctgcctggtgga

SEQ ID NO: 2805941 - DNA, 25 bp, Homo sapien
ctgttatttggaaattacgccattt

SEQ ID NO: 2805942 - DNA, 25 bp, Homo sapien
aactctctgagaaattccaacaaag

SEQ ID NO: 2805943 - DNA, 25 bp, Homo sapien
caaagcctatgtctttttgcccaca

SEQ ID NO: 2805944 - DNA, 25 bp, Homo sapien
tacgccattttagaagattagtcac

SEQ ID NO: 2805945 - DNA, 25 bp, Homo sapien
gatattatgaggaaggcattttgcc

SEQ ID NO: 2805946 - DNA, 25 bp, Homo sapien
cataaaggattagagaatctacctc

SEQ ID NO: 2805947 - DNA, 25 bp, Homo sapien
gaacttgaatgtggtgttaggagaa

SEQ ID NO: 2805948 - DNA, 25 bp, Homo sapien
tccccagttaacttgcaaacacttg

SEQ ID NO: 2805949 - DNA, 25 bp, Homo sapien
caacccactcaaggaagtctttctg

SEQ ID NO: 2805950 - DNA, 25 bp, Homo sapien
ctttctgaactgctacttccatcat

SEQ ID NO: 2805951 - DNA, 25 bp, Homo sapien
aaagctttaatgtggtcaggcatgg

SEQ ID NO: 2805952 - DNA, 25 bp, Homo sapien
caaggcattgctctgctaatggtta

SEQ ID NO: 2805953 - DNA, 25 bp, Homo sapien
tagtgaataatccaacacaaggcat

SEQ ID NO: 2805954 - DNA, 25 bp, Homo sapien
taatgactacaaacaaccgaacttg

SEQ ID NO: 2805955 - DNA, 25 bp, Homo sapien
ctgcagctgctaaaaagtaacgtaa

SEQ ID NO: 2805956 - DNA, 25 bp, Homo sapien
gccacttggcctcaagagtttcaaa

SEQ ID NO: 2805957 - DNA, 25 bp, Homo sapien
gcagctgctaaaaagtaacgtaatt

SEQ ID NO: 2805958 - DNA, 25 bp, Homo sapien
taacgtaattgcagtctcgccactt

SEQ ID NO: 2805959 - DNA, 25 bp, Homo sapien
gcacggatatattcagcctgacata

SEQ ID NO: 2805960 - DNA, 25 bp, Homo sapien
cctctggtgttatgtgattctctga

SEQ ID NO: 2805961 - DNA, 25 bp, Homo sapien
caatgacaatatgcaaaatttggaa

SEQ ID NO: 2805962 - DNA, 25 bp, Homo sapien
aaatttggaagctatattttggcct

SEQ ID NO: 2805963 - DNA, 25 bp, Homo sapien
gacatgacagctaagcttgagacta

SEQ ID NO: 2805964 - DNA, 25 bp, Homo sapien
ttgagactaagtggcatctgcaaca

SEQ ID NO: 2805965 - DNA, 25 bp, Homo sapien
taagcttgagactaagtggcatctg

SEQ ID NO: 2805966 - DNA, 25 bp, Homo sapien
ggaagatggctgagtttatgagtag

SEQ ID NO: 2805967 - DNA, 25 bp, Homo sapien
tggtgcctgcaccagacgtgaggtc

SEQ ID NO: 2805968 - DNA, 25 bp, Homo sapien
ggtgcctgcaccagacgtgaggtct

SEQ ID NO: 2805969 - DNA, 25 bp, Homo sapien
catctcgtagataaagcagtgttgg

SEQ ID NO: 2805970 - DNA, 25 bp, Homo sapien
tatcatgcaggagacctagctcggg

SEQ ID NO: 2805971 - DNA, 25 bp, Homo sapien
gagacaaatttgtggcaggtgtaca

SEQ ID NO: 2805972 - DNA, 25 bp, Homo sapien
tagccacaggaggagataggtgaca

SEQ ID NO: 2805973 - DNA, 25 bp, Homo sapien
gatgtgttacaccaggagacatact

SEQ ID NO: 2805974 - DNA, 25 bp, Homo sapien
tggaggtcgatgtgttacaccagga

SEQ ID NO: 2805975 - DNA, 25 bp, Homo sapien
gttacaccaggagacatactattcc

SEQ ID NO: 2805976 - DNA, 25 bp, Homo sapien
ctgcacttggaggtcgatgtgttac

SEQ ID NO: 2805977 - DNA, 25 bp, Homo sapien
actggcatctcgaagttgggaggtg

SEQ ID NO: 2805978 - DNA, 25 bp, Homo sapien
gacagggttgctgtacaccaaactg

SEQ ID NO: 2805979 - DNA, 25 bp, Homo sapien
tggagactggcatctcgaagttggg

SEQ ID NO: 2805980 - DNA, 25 bp, Homo sapien
ccaaactgttgtggctggacactgg

SEQ ID NO: 2805981 - DNA, 25 bp, Homo sapien
gaacagggccaagtcgagggcccat

SEQ ID NO: 2805982 - DNA, 25 bp, Homo sapien
tgaagccggtcccagctttgaagga

SEQ ID NO: 2805983 - DNA, 25 bp, Homo sapien
tgctgtcagcagaactggctatgta

SEQ ID NO: 2805984 - DNA, 25 bp, Homo sapien
cagagtatttaaccaagtgcagccc

SEQ ID NO: 2805985 - DNA, 25 bp, Homo sapien
caaggctgcctgacaagtctatcat

SEQ ID NO: 2805986 - DNA, 25 bp, Homo sapien
ctgctgggctgtagtagaggaaaaa

SEQ ID NO: 2805987 - DNA, 25 bp, Homo sapien
gattaaccattaccagctgctgggc

SEQ ID NO: 2805988 - DNA, 25 bp, Homo sapien
tctgatgacttgtgagtaccaatgc

SEQ ID NO: 2805989 - DNA, 25 bp, Homo sapien
tccattgagtgatcagcagtactgc

SEQ ID NO: 2805990 - DNA, 25 bp, Homo sapien
taaaaattggcccaaatggcgtggc

SEQ ID NO: 2805991 - DNA, 25 bp, Homo sapien
tatctgacacacctaaggtactccg

SEQ ID NO: 2805992 - DNA, 25 bp, Homo sapien
gaactctttacgtaacaggctgaaa

SEQ ID NO: 2805993 - DNA, 25 bp, Homo sapien
ggatcggggctttcacagcctttgt

SEQ ID NO: 2805994 - DNA, 25 bp, Homo sapien
agtgcataagaggagtcgggatcgg

SEQ ID NO: 2805995 - DNA, 25 bp, Homo sapien
tatgactcttgatcatattatcaaa

SEQ ID NO: 2805996 - DNA, 25 bp, Homo sapien
gggtgagtgcataagaggagtcggg

SEQ ID NO: 2805997 - DNA, 25 bp, Homo sapien
acaatctttgcctgctgatcattag

SEQ ID NO: 2805998 - DNA, 25 bp, Homo sapien
caatctttgcctgctgatcattaga

SEQ ID NO: 2805999 - DNA, 25 bp, Homo sapien
tgcctgctgatcattagatcaatat

SEQ ID NO: 2806000 - DNA, 25 bp, Homo sapien
acacaatctttgcctgctgatcatt

SEQ ID NO: 2806001 - DNA, 25 bp, Homo sapien
gtcacagccattaaggcccttcttt

SEQ ID NO: 2806002 - DNA, 25 bp, Homo sapien
aatcgtccgcatcggggtctgggct

SEQ ID NO: 2806003 - DNA, 25 bp, Homo sapien
gctgtcacagccattaaggcccttc

SEQ ID NO: 2806004 - DNA, 25 bp, Homo sapien
cattaaggcccttctttctcaacgt

SEQ ID NO: 2806005 - DNA, 25 bp, Homo sapien
gaaatacataatttggaaagttcaa

SEQ ID NO: 2806006 - DNA, 25 bp, Homo sapien
cataatttggaaagttcaaacctag

SEQ ID NO: 2806007 - DNA, 25 bp, Homo sapien
ctgaaatacataatttggaaagttc

SEQ ID NO: 2806008 - DNA, 25 bp, Homo sapien
tgaaatacataatttggaaagttca

SEQ ID NO: 2806009 - DNA, 25 bp, Homo sapien
agagattaggtaaacctatgccagg

SEQ ID NO: 2806010 - DNA, 25 bp, Homo sapien
gtctcaaacccatatggccaagcat

SEQ ID NO: 2806011 - DNA, 25 bp, Homo sapien
taaacctatgccaggtctcaaaccc

SEQ ID NO: 2806012 - DNA, 25 bp, Homo sapien
catgaagagattaggtaaacctatg

SEQ ID NO: 2806013 - DNA, 25 bp, Homo sapien
tttcatgtattgaacacaaggaaac

SEQ ID NO: 2806014 - DNA, 25 bp, Homo sapien
gcaaatcatatccaatacagagtac

SEQ ID NO: 2806015 - DNA, 25 bp, Homo sapien
taatgctcattctagccagatatca

SEQ ID NO: 2806016 - DNA, 25 bp, Homo sapien
ccaactctgtcttaagggccacaaa

SEQ ID NO: 2806017 - DNA, 25 bp, Homo sapien
tacaagttctggtaggttaaagcaa

SEQ ID NO: 2806018 - DNA, 25 bp, Homo sapien
gttaaagcaatatctggaatgactt

SEQ ID NO: 2806019 - DNA, 25 bp, Homo sapien
gattgcggcacaggacatccctgtg

SEQ ID NO: 2806020 - DNA, 25 bp, Homo sapien
tctggaatgacttcaagattgcggc

SEQ ID NO: 2806021 - DNA, 25 bp, Homo sapien
aaattcctcatttctgagacagtca

SEQ ID NO: 2806022 - DNA, 25 bp, Homo sapien
tcatttctgagacagtcaggaactc

SEQ ID NO: 2806023 - DNA, 25 bp, Homo sapien
ggaactcccaagataaagattgagc

SEQ ID NO: 2806024 - DNA, 25 bp, Homo sapien
ccaagataaagattgagctgtttcc

SEQ ID NO: 2806025 - DNA, 25 bp, Homo sapien
tggggtttcatcagacttagcataa

SEQ ID NO: 2806026 - DNA, 25 bp, Homo sapien
gcagacagacatcctggggtttcat

SEQ ID NO: 2806027 - DNA, 25 bp, Homo sapien
agggccagttaagccagcagacaga

SEQ ID NO: 2806028 - DNA, 25 bp, Homo sapien
gacagttgctgatccagggccagtt

SEQ ID NO: 2806029 - DNA, 25 bp, Homo sapien
gctccttgcaggttcaacagttgac

SEQ ID NO: 2806030 - DNA, 25 bp, Homo sapien
gggaaaaggctccttgcaggttcaa

SEQ ID NO: 2806031 - DNA, 25 bp, Homo sapien
gcagaaaggccgactggaagtcaga

SEQ ID NO: 2806032 - DNA, 25 bp, Homo sapien
cagaaaggccgactggaagtcagag

SEQ ID NO: 2806033 - DNA, 25 bp, Homo sapien
acaaggccaagtgcatgctgccagc

SEQ ID NO: 2806034 - DNA, 25 bp, Homo sapien
gccttctctgaacagactctgtaga

SEQ ID NO: 2806035 - DNA, 25 bp, Homo sapien
ccacggcgcactctgtcctgtggcc

SEQ ID NO: 2806036 - DNA, 25 bp, Homo sapien
ctgttgtctaactcaacaaggccaa

SEQ ID NO: 2806037 - DNA, 25 bp, Homo sapien
tttaaatgtaagcaccaaatacact

SEQ ID NO: 2806038 - DNA, 25 bp, Homo sapien
aaataccagttgtatgagcatcatg

SEQ ID NO: 2806039 - DNA, 25 bp, Homo sapien
atttcagtgtccaaagtatgcgtgt

SEQ ID NO: 2806040 - DNA, 25 bp, Homo sapien
atgcgtgtgtatatacaagtgaaag

SEQ ID NO: 2806041 - DNA, 25 bp, Homo sapien
catgtggctaggctaccttacagat

SEQ ID NO: 2806042 - DNA, 25 bp, Homo sapien
caacagagggtttctttcataatgg

SEQ ID NO: 2806043 - DNA, 25 bp, Homo sapien
gatgcaccagtttcgtcatttactg

SEQ ID NO: 2806044 - DNA, 25 bp, Homo sapien
tgaaagagaacactagatgcaccag

SEQ ID NO: 2806045 - DNA, 25 bp, Homo sapien
tcttccaggtggttaaatttcagag

SEQ ID NO: 2806046 - DNA, 25 bp, Homo sapien
gacatgactggataatatgccaaat

SEQ ID NO: 2806047 - DNA, 25 bp, Homo sapien
acactaaacaccattgagacatgac

SEQ ID NO: 2806048 - DNA, 25 bp, Homo sapien
taaccttccagctagtcattaactc

SEQ ID NO: 2806049 - DNA, 25 bp, Homo sapien
tgaatgtccacaatatgctaggcat

SEQ ID NO: 2806050 - DNA, 25 bp, Homo sapien
tagaacacatcggatctcaccaaag

SEQ ID NO: 2806051 - DNA, 25 bp, Homo sapien
aaagcttcgtcatgcccttcaggga

SEQ ID NO: 2806052 - DNA, 25 bp, Homo sapien
tcttattcggcaccttttagagcca

SEQ ID NO: 2806053 - DNA, 25 bp, Homo sapien
taaattcacctcctctaaacactgc

SEQ ID NO: 2806054 - DNA, 25 bp, Homo sapien
cactttgtcctgtaggcattcagtg

SEQ ID NO: 2806055 - DNA, 25 bp, Homo sapien
tctcactttgtcctgtaggcattca

SEQ ID NO: 2806056 - DNA, 25 bp, Homo sapien
gctataaattcacctcctctaaaca

SEQ ID NO: 2806057 - DNA, 25 bp, Homo sapien
tttgtacgcgacatgggtctcctga

SEQ ID NO: 2806058 - DNA, 25 bp, Homo sapien
ctttgtacgcgacatgggtctcctg

SEQ ID NO: 2806059 - DNA, 25 bp, Homo sapien
ctactgagacagttgtgaatcaaag

SEQ ID NO: 2806060 - DNA, 25 bp, Homo sapien
ctgagacagttgtgaatcaaaggtt

SEQ ID NO: 2806061 - DNA, 25 bp, Homo sapien
ggagttacatccatctctgaatttc

SEQ ID NO: 2806062 - DNA, 25 bp, Homo sapien
gtttcttctgcaggagttacatcca

SEQ ID NO: 2806063 - DNA, 25 bp, Homo sapien
gtcctgtcactccaaggatcacttg

SEQ ID NO: 2806064 - DNA, 25 bp, Homo sapien
ggtgctaagtgatactcccataagg

SEQ ID NO: 2806065 - DNA, 25 bp, Homo sapien
tatggaggtaacctgtctgggagtc

SEQ ID NO: 2806066 - DNA, 25 bp, Homo sapien
tttgtggttacaaaacgtgctggat

SEQ ID NO: 2806067 - DNA, 25 bp, Homo sapien
agagcccaacataaactggtagggt

SEQ ID NO: 2806068 - DNA, 25 bp, Homo sapien
cctgaagtactcaacaaccacatct

SEQ ID NO: 2806069 - DNA, 25 bp, Homo sapien
aaactggtagggtttgctgtcttag

SEQ ID NO: 2806070 - DNA, 25 bp, Homo sapien
tcagatcatcctgaagtactcaaca

SEQ ID NO: 2806071 - DNA, 25 bp, Homo sapien
gcataattcagggagttgaacagga

SEQ ID NO: 2806072 - DNA, 25 bp, Homo sapien
ttgaacaggacggacccacaatgtg

SEQ ID NO: 2806073 - DNA, 25 bp, Homo sapien
tcaccaagtgtctcaagtatcctaa

SEQ ID NO: 2806074 - DNA, 25 bp, Homo sapien
taaattttatcaagcttagcggtcc

SEQ ID NO: 2806075 - DNA, 25 bp, Homo sapien
tcatccaaataattgagccatccaa

SEQ ID NO: 2806076 - DNA, 25 bp, Homo sapien
taattgagccatccaatctctagat

SEQ ID NO: 2806077 - DNA, 25 bp, Homo sapien
cctcgaagtgtctttttgagagatt

SEQ ID NO: 2806078 - DNA, 25 bp, Homo sapien
aatctctagatttggcccaaaagcc

SEQ ID NO: 2806079 - DNA, 25 bp, Homo sapien
caactcaccacactgcacaaaagtg

SEQ ID NO: 2806080 - DNA, 25 bp, Homo sapien
tttgagatgagaaaacgtcagccca

SEQ ID NO: 2806081 - DNA, 25 bp, Homo sapien
aacaatgactcttaacccagtgctg

SEQ ID NO: 2806082 - DNA, 25 bp, Homo sapien
gaagtctgactttcaaatatccacc

SEQ ID NO: 2806083 - DNA, 25 bp, Homo sapien
caattggctcattatggatctacag

SEQ ID NO: 2806084 - DNA, 25 bp, Homo sapien
gactagcagttccagtgtaatgata

SEQ ID NO: 2806085 - DNA, 25 bp, Homo sapien
tattttaagcacatatcaccctagg

SEQ ID NO: 2806086 - DNA, 25 bp, Homo sapien
ggatctacagcatttcacatgacat

SEQ ID NO: 2806087 - DNA, 25 bp, Homo sapien
ctggcaagagttcccaaccatggtg

SEQ ID NO: 2806088 - DNA, 25 bp, Homo sapien
tgatgccgggaaactattatatacc

SEQ ID NO: 2806089 - DNA, 25 bp, Homo sapien
tggatgagctattccctggcaagag

SEQ ID NO: 2806090 - DNA, 25 bp, Homo sapien
ttactcttccagcaagaaagcattc

SEQ ID NO: 2806091 - DNA, 25 bp, Homo sapien
ccaaactcccctgcttgcggaggct

SEQ ID NO: 2806092 - DNA, 25 bp, Homo sapien
aaactcccctgcttgcggaggcttg

SEQ ID NO: 2806093 - DNA, 25 bp, Homo sapien
tcccctgcttgcggaggcttggggc

SEQ ID NO: 2806094 - DNA, 25 bp, Homo sapien
actcccctgcttgcggaggcttggg

SEQ ID NO: 2806095 - DNA, 25 bp, Homo sapien
catgcggctcgttgtactccgtgta

SEQ ID NO: 2806096 - DNA, 25 bp, Homo sapien
tttgtccggctctcatgcggctcgt

SEQ ID NO: 2806097 - DNA, 25 bp, Homo sapien
gatgatcagcgcaatctcacagtca

SEQ ID NO: 2806098 - DNA, 25 bp, Homo sapien
tccacgatgtctgagtttgtccggc

SEQ ID NO: 2806099 - DNA, 25 bp, Homo sapien
tggacatgacattaggaacttagca

SEQ ID NO: 2806100 - DNA, 25 bp, Homo sapien
cacttgaagggatatgactgtgatc

SEQ ID NO: 2806101 - DNA, 25 bp, Homo sapien
gactgtgatctcagacgatgttgta

SEQ ID NO: 2806102 - DNA, 25 bp, Homo sapien
tgtgtagttgtcagagccctgggca

SEQ ID NO: 2806103 - DNA, 25 bp, Homo sapien
tggactagcagacagaaagcctgac

SEQ ID NO: 2806104 - DNA, 25 bp, Homo sapien
agagagaactctgaatcctggcctg

SEQ ID NO: 2806105 - DNA, 25 bp, Homo sapien
tgttgacaaggactgtggactagca

SEQ ID NO: 2806106 - DNA, 25 bp, Homo sapien
gagaggccagctcattttatcacag

SEQ ID NO: 2806107 - DNA, 25 bp, Homo sapien
gacttggtgaaagctgattgtggta

SEQ ID NO: 2806108 - DNA, 25 bp, Homo sapien
tatttctaatcttgacttggtgaaa

SEQ ID NO: 2806109 - DNA, 25 bp, Homo sapien
tctaatcttgacttggtgaaagctg

SEQ ID NO: 2806110 - DNA, 25 bp, Homo sapien
gaaagctgattgtggtattactccc

SEQ ID NO: 2806111 - DNA, 25 bp, Homo sapien
tagggctggagtcaagagtctgcaa

SEQ ID NO: 2806112 - DNA, 25 bp, Homo sapien
ctgtaatccaggagccacaggtctt

SEQ ID NO: 2806113 - DNA, 25 bp, Homo sapien
tgttcctgacagtaagtaatggcac

SEQ ID NO: 2806114 - DNA, 25 bp, Homo sapien
gaaaatatttcaggtcggctactcc

SEQ ID NO: 2806115 - DNA, 25 bp, Homo sapien
cattattatgaggtatttgcaggct

SEQ ID NO: 2806116 - DNA, 25 bp, Homo sapien
ttaagaaggcatccccaatatgtgg

SEQ ID NO: 2806117 - DNA, 25 bp, Homo sapien
gcaggcatctgttaagaaatgatac

SEQ ID NO: 2806118 - DNA, 25 bp, Homo sapien
caatatgtggcaatagaccctataa

SEQ ID NO: 2806119 - DNA, 25 bp, Homo sapien
tcattctctagccccttgttggctt

SEQ ID NO: 2806120 - DNA, 25 bp, Homo sapien
cattctctagccccttgttggcttc

SEQ ID NO: 2806121 - DNA, 25 bp, Homo sapien
acatacttgcttaagaaatccatgt

SEQ ID NO: 2806122 - DNA, 25 bp, Homo sapien
tcttggcacataattggtaactact

SEQ ID NO: 2806123 - DNA, 25 bp, Homo sapien
tcagccataaaatgggacttattaa

SEQ ID NO: 2806124 - DNA, 25 bp, Homo sapien
catgttgtctaagcttgaaactaag

SEQ ID NO: 2806125 - DNA, 25 bp, Homo sapien
ggttctactggacagtctacagtgg

SEQ ID NO: 2806126 - DNA, 25 bp, Homo sapien
gagctgttccctacttccattatga

SEQ ID NO: 2806127 - DNA, 25 bp, Homo sapien
cccaggttacgggtgcctctacaca

SEQ ID NO: 2806128 - DNA, 25 bp, Homo sapien
tgagccattgcatgaggttctactg

SEQ ID NO: 2806129 - DNA, 25 bp, Homo sapien
tacaactgctctcatagtaggtgag

SEQ ID NO: 2806130 - DNA, 25 bp, Homo sapien
ggcctactgtatctaaagactggag

SEQ ID NO: 2806131 - DNA, 25 bp, Homo sapien
ggtaacagccactgtagctgcaact

SEQ ID NO: 2806132 - DNA, 25 bp, Homo sapien
taggtgagaggtgcacaagacaagc

SEQ ID NO: 2806133 - DNA, 25 bp, Homo sapien
aaagctcatgaattcaacctgcaaa

SEQ ID NO: 2806134 - DNA, 25 bp, Homo sapien
ccaaataacaaggtccaaacagtgt

SEQ ID NO: 2806135 - DNA, 25 bp, Homo sapien
tactcaaaataggttctggtccaaa

SEQ ID NO: 2806136 - DNA, 25 bp, Homo sapien
ttatctggtattggtaataaagtgc

SEQ ID NO: 2806137 - DNA, 25 bp, Homo sapien
aattacagtctggtggttgtcccca

SEQ ID NO: 2806138 - DNA, 25 bp, Homo sapien
attcaccctctagctaaacatgcag

SEQ ID NO: 2806139 - DNA, 25 bp, Homo sapien
aatggcgtactgactttgatgcaag

SEQ ID NO: 2806140 - DNA, 25 bp, Homo sapien
gacaaaacaggacaatagaggacat

SEQ ID NO: 2806141 - DNA, 25 bp, Homo sapien
aagtaggcaaaacactcttctcttc

SEQ ID NO: 2806142 - DNA, 25 bp, Homo sapien
tcagtgtaaccgaaaagtaggcaaa

SEQ ID NO: 2806143 - DNA, 25 bp, Homo sapien
agtaggcaaaacactcttctcttcc

SEQ ID NO: 2806144 - DNA, 25 bp, Homo sapien
ccacaaaaggtctagttcccatgaa

SEQ ID NO: 2806145 - DNA, 25 bp, Homo sapien
tctcccctagtgtgaagaaaaatag

SEQ ID NO: 2806146 - DNA, 25 bp, Homo sapien
ggttgggacccagcagtactataat

SEQ ID NO: 2806147 - DNA, 25 bp, Homo sapien
tatgaattaaccgatagtccttgcc

SEQ ID NO: 2806148 - DNA, 25 bp, Homo sapien
aagatattttctgtacccttaacat

SEQ ID NO: 2806149 - DNA, 25 bp, Homo sapien
atattttctgtacccttaacatatg

SEQ ID NO: 2806150 - DNA, 25 bp, Homo sapien
tttctgtacccttaacatatgtgga

SEQ ID NO: 2806151 - DNA, 25 bp, Homo sapien
attttctgtacccttaacatatgtg

SEQ ID NO: 2806152 - DNA, 25 bp, Homo sapien
gttcatccataatcctcgtaatctg

SEQ ID NO: 2806153 - DNA, 25 bp, Homo sapien
ctgtctgttacgttcatccataatc

SEQ ID NO: 2806154 - DNA, 25 bp, Homo sapien
tgttacgttcatccataatcctcgt

SEQ ID NO: 2806155 - DNA, 25 bp, Homo sapien
cataatcctcgtaatctgaatcttt

SEQ ID NO: 2806156 - DNA, 25 bp, Homo sapien
cagctcagttcccaaattcctgcat

SEQ ID NO: 2806157 - DNA, 25 bp, Homo sapien
aattaaataccactctaacagcaag

SEQ ID NO: 2806158 - DNA, 25 bp, Homo sapien
tcatattctaattttatcaaggaaa

SEQ ID NO: 2806159 - DNA, 25 bp, Homo sapien
aaaattaaataccactctaacagca

SEQ ID NO: 2806160 - DNA, 25 bp, Homo sapien
aagtcagtttcataagaactatcat

SEQ ID NO: 2806161 - DNA, 25 bp, Homo sapien
gcctctctactaaactgcagctcag

SEQ ID NO: 2806162 - DNA, 25 bp, Homo sapien
catcaaaaactattgctccagctgt

SEQ ID NO: 2806163 - DNA, 25 bp, Homo sapien
tatttgatgttgctagacactgtcc

SEQ ID NO: 2806164 - DNA, 25 bp, Homo sapien
tatttcccatgcacgtttaagaccc

SEQ ID NO: 2806165 - DNA, 25 bp, Homo sapien
aagtaaagtctatcatgaaacgtgg

SEQ ID NO: 2806166 - DNA, 25 bp, Homo sapien
gaggtattgccttcagaacatttct

SEQ ID NO: 2806167 - DNA, 25 bp, Homo sapien
tgatgatgacactaagtaactggtc

SEQ ID NO: 2806168 - DNA, 25 bp, Homo sapien
tttagtatgaagtacacgtgcagag

SEQ ID NO: 2806169 - DNA, 25 bp, Homo sapien
aggcaaagtggtttgagacccaagt

SEQ ID NO: 2806170 - DNA, 25 bp, Homo sapien
gcaaagtggtttgagacccaagtcg

SEQ ID NO: 2806171 - DNA, 25 bp, Homo sapien
agtggtttgagacccaagtcgagaa

SEQ ID NO: 2806172 - DNA, 25 bp, Homo sapien
ggtttgagacccaagtcgagaagaa

SEQ ID NO: 2806173 - DNA, 25 bp, Homo sapien
tacttcaacactttacgaaagtgct

SEQ ID NO: 2806174 - DNA, 25 bp, Homo sapien
tttacgaaagtgctacaaatatatg

SEQ ID NO: 2806175 - DNA, 25 bp, Homo sapien
gacagcagcaataccatgtagtaaa

SEQ ID NO: 2806176 - DNA, 25 bp, Homo sapien
catgtagtaaactgtcatttcagag

SEQ ID NO: 2806177 - DNA, 25 bp, Homo sapien
taatattattgtgagccaggcgtgg

SEQ ID NO: 2806178 - DNA, 25 bp, Homo sapien
cattataaaaatgggcacactgatg

SEQ ID NO: 2806179 - DNA, 25 bp, Homo sapien
taataaggtagataagctgaggcac

SEQ ID NO: 2806180 - DNA, 25 bp, Homo sapien
gaatattgggtaatcttacacggat

SEQ ID NO: 2806181 - DNA, 25 bp, Homo sapien
gctcagcagagcctagcagctatga

SEQ ID NO: 2806182 - DNA, 25 bp, Homo sapien
tgtgcctgctggtcataatggtgga

SEQ ID NO: 2806183 - DNA, 25 bp, Homo sapien
gggcttacctttcagacagtcttag

SEQ ID NO: 2806184 - DNA, 25 bp, Homo sapien
caaccttgtctcaattgccaggaag

SEQ ID NO: 2806185 - DNA, 25 bp, Homo sapien
tatctgagtcccatttgacctctgg

SEQ ID NO: 2806186 - DNA, 25 bp, Homo sapien
actgtggaaatttggcaaggaatcc

SEQ ID NO: 2806187 - DNA, 25 bp, Homo sapien
cagtgaaacaaagcggaagcaaatg

SEQ ID NO: 2806188 - DNA, 25 bp, Homo sapien
tgcatgcttgcatggtaatccaaac

SEQ ID NO: 2806189 - DNA, 25 bp, Homo sapien
tgacacattcttttcataaaccgaa

SEQ ID NO: 2806190 - DNA, 25 bp, Homo sapien
taaaccgaaccctgttagtgacagc

SEQ ID NO: 2806191 - DNA, 25 bp, Homo sapien
tagtgacagcagaacagattgtgtg

SEQ ID NO: 2806192 - DNA, 25 bp, Homo sapien
tatagtggcatgttctgacacattc

SEQ ID NO: 2806193 - DNA, 25 bp, Homo sapien
ctgattacaatgaaaatttattcta

SEQ ID NO: 2806194 - DNA, 25 bp, Homo sapien
tacaatgaaaatttattctatacag

SEQ ID NO: 2806195 - DNA, 25 bp, Homo sapien
atgaaaatttattctatacagttac

SEQ ID NO: 2806196 - DNA, 25 bp, Homo sapien
caatgaaaatttattctatacagtt

SEQ ID NO: 2806197 - DNA, 25 bp, Homo sapien
cttgattgcagtgttgggagctgtc

SEQ ID NO: 2806198 - DNA, 25 bp, Homo sapien
taatcataaccctggaaagggctac

SEQ ID NO: 2806199 - DNA, 25 bp, Homo sapien
ccatgtgccttagagggctccatca

SEQ ID NO: 2806200 - DNA, 25 bp, Homo sapien
gcttttagaggcgtccttgattgca

SEQ ID NO: 2806201 - DNA, 25 bp, Homo sapien
ataggataataagggtagcatttgc

SEQ ID NO: 2806202 - DNA, 25 bp, Homo sapien
cgttatcagaaggtataatcctcag

SEQ ID NO: 2806203 - DNA, 25 bp, Homo sapien
gctgtggtcataatgaataagccct

SEQ ID NO: 2806204 - DNA, 25 bp, Homo sapien
tcatctcaaagttgataagctgtgg

SEQ ID NO: 2806205 - DNA, 25 bp, Homo sapien
cttgtccaataactgtaccacttcc

SEQ ID NO: 2806206 - DNA, 25 bp, Homo sapien
ttcatagagcaacctaaaaggcata

SEQ ID NO: 2806207 - DNA, 25 bp, Homo sapien
ccttgtccaataactgtaccacttc

SEQ ID NO: 2806208 - DNA, 25 bp, Homo sapien
agagcaacctaaaaggcataatgtg

SEQ ID NO: 2806209 - DNA, 25 bp, Homo sapien
cacccaacaacttaataaggctcct

SEQ ID NO: 2806210 - DNA, 25 bp, Homo sapien
ttctaacctatatagagtctaagtg

SEQ ID NO: 2806211 - DNA, 25 bp, Homo sapien
taaggctcctcaaatatggatgaaa

SEQ ID NO: 2806212 - DNA, 25 bp, Homo sapien
taatagaagggtgaaaagatctact

SEQ ID NO: 2806213 - DNA, 25 bp, Homo sapien
taaaggcttccttgtgtgacgataa

SEQ ID NO: 2806214 - DNA, 25 bp, Homo sapien
tgaatcccaaccacttgcaggagga

SEQ ID NO: 2806215 - DNA, 25 bp, Homo sapien
cactgcttgaggacttgcactgtca

SEQ ID NO: 2806216 - DNA, 25 bp, Homo sapien
tagttgtaccaccttattcagggtc

SEQ ID NO: 2806217 - DNA, 25 bp, Homo sapien
tgtgctctttataacgcctctgaaa

SEQ ID NO: 2806218 - DNA, 25 bp, Homo sapien
gaaacactaggaggcatcagttggg

SEQ ID NO: 2806219 - DNA, 25 bp, Homo sapien
tgaacccaactgtataattcccagg

SEQ ID NO: 2806220 - DNA, 25 bp, Homo sapien
tcaaagaaaacctgcaagtgcgtgc

SEQ ID NO: 2806221 - DNA, 25 bp, Homo sapien
gatctcggtgaacagtcaagcttta

SEQ ID NO: 2806222 - DNA, 25 bp, Homo sapien
tatgttgcttcgaatcatgtcccca

SEQ ID NO: 2806223 - DNA, 25 bp, Homo sapien
ccttttgtaacgtgcatagactctg

SEQ ID NO: 2806224 - DNA, 25 bp, Homo sapien
cagtccacgcgcctataagattaag

SEQ ID NO: 2806225 - DNA, 25 bp, Homo sapien
tataaattgctcatttgttattgaa

SEQ ID NO: 2806226 - DNA, 25 bp, Homo sapien
tgctcatttgttattgaaataaaaa

SEQ ID NO: 2806227 - DNA, 25 bp, Homo sapien
taaattgctcatttgttattgaaat

SEQ ID NO: 2806228 - DNA, 25 bp, Homo sapien
aattgctcatttgttattgaaataa

SEQ ID NO: 2806229 - DNA, 25 bp, Homo sapien
cacagcaatcaggacgtaaatggtg

SEQ ID NO: 2806230 - DNA, 25 bp, Homo sapien
tatctttcaatatattccacatgca

SEQ ID NO: 2806231 - DNA, 25 bp, Homo sapien
tttcaatatattccacatgcacagc

SEQ ID NO: 2806232 - DNA, 25 bp, Homo sapien
ggacgtaaatggtgcaattaatgaa

SEQ ID NO: 2806233 - DNA, 25 bp, Homo sapien
tactgtctctttgacgggagaacca

SEQ ID NO: 2806234 - DNA, 25 bp, Homo sapien
taccatattggtacatgctgaatgt

SEQ ID NO: 2806235 - DNA, 25 bp, Homo sapien
ttaaagactagccaaaactgacatt

SEQ ID NO: 2806236 - DNA, 25 bp, Homo sapien
gtaaaggtaacagccacctactgtc

SEQ ID NO: 2806237 - DNA, 25 bp, Homo sapien
gctgatggcaaacggatacgactat

SEQ ID NO: 2806238 - DNA, 25 bp, Homo sapien
tagaaattatatgcagtccccaagc

SEQ ID NO: 2806239 - DNA, 25 bp, Homo sapien
ggctcagaagcataacccagggcaa

SEQ ID NO: 2806240 - DNA, 25 bp, Homo sapien
taaggcgtctacttcaaggtcacag

SEQ ID NO: 2806241 - DNA, 25 bp, Homo sapien
cagggatagatagacacagtgccgt

SEQ ID NO: 2806242 - DNA, 25 bp, Homo sapien
cagattttagagacaatacccgggt

SEQ ID NO: 2806243 - DNA, 25 bp, Homo sapien
tttctatttcctcgagaaatatcag

SEQ ID NO: 2806244 - DNA, 25 bp, Homo sapien
aaaagaatgcacaacgagcctcaac

SEQ ID NO: 2806245 - DNA, 25 bp, Homo sapien
gaagacccgatcagattagtccttg

SEQ ID NO: 2806246 - DNA, 25 bp, Homo sapien
gaaggaagacccgatcagattagtc

SEQ ID NO: 2806247 - DNA, 25 bp, Homo sapien
gacccgatcagattagtccttggga

SEQ ID NO: 2806248 - DNA, 25 bp, Homo sapien
ccgatcagattagtccttgggatat

SEQ ID NO: 2806249 - DNA, 25 bp, Homo sapien
caatccaatagcagcccgaagatgt

SEQ ID NO: 2806250 - DNA, 25 bp, Homo sapien
gccacggcgacccacacagaacctt

SEQ ID NO: 2806251 - DNA, 25 bp, Homo sapien
ttcgtccagcgttgaagtgcttctc

SEQ ID NO: 2806252 - DNA, 25 bp, Homo sapien
aagtcaatccaatagcagcccgaag

SEQ ID NO: 2806253 - DNA, 25 bp, Homo sapien
tgtgctcaagtgtctgtgactgcga

SEQ ID NO: 2806254 - DNA, 25 bp, Homo sapien
gagagctggagacgatgtgtgcgtg

SEQ ID NO: 2806255 - DNA, 25 bp, Homo sapien
aagtgtctgtgactgcgagcagagc

SEQ ID NO: 2806256 - DNA, 25 bp, Homo sapien
ggtgtacgcgtgtgctcaagtgtct

SEQ ID NO: 2806257 - DNA, 25 bp, Homo sapien
ttctttactgccacaatcatttgcc

SEQ ID NO: 2806258 - DNA, 25 bp, Homo sapien
catttgccttccgttctttacttca

SEQ ID NO: 2806259 - DNA, 25 bp, Homo sapien
tactgccacaatcatttgccttccg

SEQ ID NO: 2806260 - DNA, 25 bp, Homo sapien
cacatacacttctttactgccacaa

SEQ ID NO: 2806261 - DNA, 25 bp, Homo sapien
tgcccgaagcgctccaaccattttg

SEQ ID NO: 2806262 - DNA, 25 bp, Homo sapien
ttaacagtgcacaaagcgctggcac

SEQ ID NO: 2806263 - DNA, 25 bp, Homo sapien
ctggcacacggtccacgtctggtga

SEQ ID NO: 2806264 - DNA, 25 bp, Homo sapien
cgtctggtgacgcaggctgcccgaa

SEQ ID NO: 2806265 - DNA, 25 bp, Homo sapien
agttgtacccgtcagcacctgctga

SEQ ID NO: 2806266 - DNA, 25 bp, Homo sapien
gaagttgtacccgtcagcacctgct

SEQ ID NO: 2806267 - DNA, 25 bp, Homo sapien
ttgtacccgtcagcacctgctgagg

SEQ ID NO: 2806268 - DNA, 25 bp, Homo sapien
caggaagttgtacccgtcagcacct

SEQ ID NO: 2806269 - DNA, 25 bp, Homo sapien
ttgggctgcgtttgcctcctctcct

SEQ ID NO: 2806270 - DNA, 25 bp, Homo sapien
tttgggctgcgtttgcctcctctcc

SEQ ID NO: 2806271 - DNA, 25 bp, Homo sapien
tctccacagggcaccactttcagat

SEQ ID NO: 2806272 - DNA, 25 bp, Homo sapien
ctccacagggcaccactttcagata

SEQ ID NO: 2806273 - DNA, 25 bp, Homo sapien
ttctccacagggcaccactttcaga

SEQ ID NO: 2806274 - DNA, 25 bp, Homo sapien
tccacagggcaccactttcagataa

SEQ ID NO: 2806275 - DNA, 25 bp, Homo sapien
tacagcaataaagactaacaaactg

SEQ ID NO: 2806276 - DNA, 25 bp, Homo sapien
tattatgggtaacaacctggatgaa

SEQ ID NO: 2806277 - DNA, 25 bp, Homo sapien
tgggtgaatggttggacagactgtg

SEQ ID NO: 2806278 - DNA, 25 bp, Homo sapien
cagactgtgatataagcatgctata

SEQ ID NO: 2806279 - DNA, 25 bp, Homo sapien
ccaaactcagcaacaataggaagca

SEQ ID NO: 2806280 - DNA, 25 bp, Homo sapien
caaactcagcaacaataggaagcat

SEQ ID NO: 2806281 - DNA, 25 bp, Homo sapien
ctgcagcaaacctatcagtccctgg

SEQ ID NO: 2806282 - DNA, 25 bp, Homo sapien
caaacctatcagtccctggaccaaa

SEQ ID NO: 2806283 - DNA, 25 bp, Homo sapien
tttggagcctttgactctcttttcc

SEQ ID NO: 2806284 - DNA, 25 bp, Homo sapien
tggagcctttgactctcttttcctc

SEQ ID NO: 2806285 - DNA, 25 bp, Homo sapien
atttggagcctttgactctcttttc

SEQ ID NO: 2806286 - DNA, 25 bp, Homo sapien
gagcctttgactctcttttcctcat

SEQ ID NO: 2806287 - DNA, 25 bp, Homo sapien
taagcgaatacacaagaaaaggtca

SEQ ID NO: 2806288 - DNA, 25 bp, Homo sapien
tactgaatataagcgaatacacaag

SEQ ID NO: 2806289 - DNA, 25 bp, Homo sapien
gcgaatacacaagaaaaggtcaaaa

SEQ ID NO: 2806290 - DNA, 25 bp, Homo sapien
cagcgtgccagatactgaatataag

SEQ ID NO: 2806291 - DNA, 25 bp, Homo sapien
agttggttgaaattctctgtggcac

SEQ ID NO: 2806292 - DNA, 25 bp, Homo sapien
tggttgaaattctctgtggcacttt

SEQ ID NO: 2806293 - DNA, 25 bp, Homo sapien
ggaacagttgcttcaagttggttga

SEQ ID NO: 2806294 - DNA, 25 bp, Homo sapien
aaatcttaagccacattctttggaa

SEQ ID NO: 2806295 - DNA, 25 bp, Homo sapien
tcttttcctatgaccccagtgctgt

SEQ ID NO: 2806296 - DNA, 25 bp, Homo sapien
cattgctgggtttacggtctcctga

SEQ ID NO: 2806297 - DNA, 25 bp, Homo sapien
tgctccgcagtgtgagtggccacta

SEQ ID NO: 2806298 - DNA, 25 bp, Homo sapien
tgttgagagtcaagccacgatgtag

SEQ ID NO: 2806299 - DNA, 25 bp, Homo sapien
tgcagctggcgggggcactgcttta

SEQ ID NO: 2806300 - DNA, 25 bp, Homo sapien
gctggcgggggcactgctttattgc

SEQ ID NO: 2806301 - DNA, 25 bp, Homo sapien
cagctggcgggggcactgctttatt

SEQ ID NO: 2806302 - DNA, 25 bp, Homo sapien
ttgcagctggcgggggcactgcttt

SEQ ID NO: 2806303 - DNA, 25 bp, Homo sapien
cattgtgagtgaacttttggaatcc

SEQ ID NO: 2806304 - DNA, 25 bp, Homo sapien
tggtgtaactgaaaggcaataagga

SEQ ID NO: 2806305 - DNA, 25 bp, Homo sapien
cattgagtggttcacattacgctga

SEQ ID NO: 2806306 - DNA, 25 bp, Homo sapien
tacagcctgtgacttttcaactcgg

SEQ ID NO: 2806307 - DNA, 25 bp, Homo sapien
tgacttcagctcctaatttgaaagc

SEQ ID NO: 2806308 - DNA, 25 bp, Homo sapien
gagatgtaagtgagctttaagccaa

SEQ ID NO: 2806309 - DNA, 25 bp, Homo sapien
tatttggccaaaaaattctgctggc

SEQ ID NO: 2806310 - DNA, 25 bp, Homo sapien
agtgagcaagagactatatttggcc

SEQ ID NO: 2806311 - DNA, 25 bp, Homo sapien
taaagtgaatgacgggatgttaact

SEQ ID NO: 2806312 - DNA, 25 bp, Homo sapien
aatggaagtcgttagtcaaatacgc

SEQ ID NO: 2806313 - DNA, 25 bp, Homo sapien
tggttcatttttctactcagggtag

SEQ ID NO: 2806314 - DNA, 25 bp, Homo sapien
cataaagtatagtggcagatggttc

SEQ ID NO: 2806315 - DNA, 25 bp, Homo sapien
gaagggatggcagcttccccgtaga

SEQ ID NO: 2806316 - DNA, 25 bp, Homo sapien
gatgacgacatgaagactggactgc

SEQ ID NO: 2806317 - DNA, 25 bp, Homo sapien
tccccgtagagcagtgaggacggat

SEQ ID NO: 2806318 - DNA, 25 bp, Homo sapien
gaagaacatggaccaagaccagggc

SEQ ID NO: 2806319 - DNA, 25 bp, Homo sapien
ctgctgtgatagcttgctgtcacta

SEQ ID NO: 2806320 - DNA, 25 bp, Homo sapien
agttccttgtatgccagctgctgtg

SEQ ID NO: 2806321 - DNA, 25 bp, Homo sapien
gccagctgctgtgatagcttgctgt

SEQ ID NO: 2806322 - DNA, 25 bp, Homo sapien
tcagttccttgtatgccagctgctg

SEQ ID NO: 2806323 - DNA, 25 bp, Homo sapien
tgggtcattctgtcttgtgctttgg

SEQ ID NO: 2806324 - DNA, 25 bp, Homo sapien
cacattaatgctagggagctggcgg

SEQ ID NO: 2806325 - DNA, 25 bp, Homo sapien
gaattaagtgggaccacattaatgc

SEQ ID NO: 2806326 - DNA, 25 bp, Homo sapien
gagctggcggtcttccaaaactgca

SEQ ID NO: 2806327 - DNA, 25 bp, Homo sapien
aaataagatctggactgaaggtcat

SEQ ID NO: 2806328 - DNA, 25 bp, Homo sapien
gagaagaaataagatctggactgaa

SEQ ID NO: 2806329 - DNA, 25 bp, Homo sapien
gaagaaataagatctggactgaagg

SEQ ID NO: 2806330 - DNA, 25 bp, Homo sapien
agaaataagatctggactgaaggtc

SEQ ID NO: 2806331 - DNA, 25 bp, Homo sapien
gcagcttctgaaagtggagattcag

SEQ ID NO: 2806332 - DNA, 25 bp, Homo sapien
tgaaagtggagattcagcaaggctt

SEQ ID NO: 2806333 - DNA, 25 bp, Homo sapien
agtggagattcagcaaggctttccc

SEQ ID NO: 2806334 - DNA, 25 bp, Homo sapien
tcaatctagtgcagcttctgaaagt

SEQ ID NO: 2806335 - DNA, 25 bp, Homo sapien
tttccatgtgtctgacagagggaag

SEQ ID NO: 2806336 - DNA, 25 bp, Homo sapien
ggcttttgcgttacattgtcatctt

SEQ ID NO: 2806337 - DNA, 25 bp, Homo sapien
acagagggaagatcctcccgcagca

SEQ ID NO: 2806338 - DNA, 25 bp, Homo sapien
ctggcttttgcgttacattgtcatc

SEQ ID NO: 2806339 - DNA, 25 bp, Homo sapien
actgccattcccctaaccactggct

SEQ ID NO: 2806340 - DNA, 25 bp, Homo sapien
ccattcccctaaccactggctctgg

SEQ ID NO: 2806341 - DNA, 25 bp, Homo sapien
attcccctaaccactggctctgggt

SEQ ID NO: 2806342 - DNA, 25 bp, Homo sapien
tgccattcccctaaccactggctct

SEQ ID NO: 2806343 - DNA, 25 bp, Homo sapien
ttattgtctgtggaagtgcagctgg

SEQ ID NO: 2806344 - DNA, 25 bp, Homo sapien
ctgctttattgtctgtggaagtgca

SEQ ID NO: 2806345 - DNA, 25 bp, Homo sapien
gctttattgtctgtggaagtgcagc

SEQ ID NO: 2806346 - DNA, 25 bp, Homo sapien
ctttattgtctgtggaagtgcagct

SEQ ID NO: 2806347 - DNA, 25 bp, Homo sapien
aatttggtgtgcatctttcttgttc

SEQ ID NO: 2806348 - DNA, 25 bp, Homo sapien
ctatataatctctatgatgaatttg

SEQ ID NO: 2806349 - DNA, 25 bp, Homo sapien
aatctctatgatgaatttggtgtgc

SEQ ID NO: 2806350 - DNA, 25 bp, Homo sapien
ctctatgatgaatttggtgtgcatc

SEQ ID NO: 2806351 - DNA, 25 bp, Homo sapien
attcagacatgggtaagggtgccct

SEQ ID NO: 2806352 - DNA, 25 bp, Homo sapien
tcagacatgggtaagggtgccctcc

SEQ ID NO: 2806353 - DNA, 25 bp, Homo sapien
agacatgggtaagggtgccctcctt

SEQ ID NO: 2806354 - DNA, 25 bp, Homo sapien
ttacccatttttgccgtttctgcca

SEQ ID NO: 2806355 - DNA, 25 bp, Homo sapien
gattgctcccctgagatgcagttag

SEQ ID NO: 2806356 - DNA, 25 bp, Homo sapien
ccacaggctgagtcaagccgtgtga

SEQ ID NO: 2806357 - DNA, 25 bp, Homo sapien
aagccgtgtgattgctcccctgaga

SEQ ID NO: 2806358 - DNA, 25 bp, Homo sapien
ctgagtcaagccgtgtgattgctcc

SEQ ID NO: 2806359 - DNA, 25 bp, Homo sapien
cctgaaagttatgttgagatcgtca

SEQ ID NO: 2806360 - DNA, 25 bp, Homo sapien
ctggcaagcctgaaagttatgttga

SEQ ID NO: 2806361 - DNA, 25 bp, Homo sapien
cgtcaaatccatagtcaaggaccat

SEQ ID NO: 2806362 - DNA, 25 bp, Homo sapien
tgttgagatcgtcaaatccatagtc

SEQ ID NO: 2806363 - DNA, 25 bp, Homo sapien
cttttccagatgcatgatataaact

SEQ ID NO: 2806364 - DNA, 25 bp, Homo sapien
ttttcatagttcctctaggcagtgc

SEQ ID NO: 2806365 - DNA, 25 bp, Homo sapien
gctttgcaggagcaaagcccctctc

SEQ ID NO: 2806366 - DNA, 25 bp, Homo sapien
gatataaactgtcagtgggtctacc

SEQ ID NO: 2806367 - DNA, 25 bp, Homo sapien
catttgttcggaaccctggctttca

SEQ ID NO: 2806368 - DNA, 25 bp, Homo sapien
aagcctatgactctggcaagcaggc

SEQ ID NO: 2806369 - DNA, 25 bp, Homo sapien
tcaaagttagaagcctatgactctg

SEQ ID NO: 2806370 - DNA, 25 bp, Homo sapien
gttcggaaccctggctttcaacagc

SEQ ID NO: 2806371 - DNA, 25 bp, Homo sapien
taactgaacttcaagggaactcctg

SEQ ID NO: 2806372 - DNA, 25 bp, Homo sapien
ttcaagacagtctgctgacgtggca

SEQ ID NO: 2806373 - DNA, 25 bp, Homo sapien
ttttcaggttgagcaaacctttaga

SEQ ID NO: 2806374 - DNA, 25 bp, Homo sapien
agtcctgatcctctcattacactca

SEQ ID NO: 2806375 - DNA, 25 bp, Homo sapien
ccatgatggatagttatcttgaggc

SEQ ID NO: 2806376 - DNA, 25 bp, Homo sapien
gaccacacagttgttcgccacgttg

SEQ ID NO: 2806377 - DNA, 25 bp, Homo sapien
gtgacactgtcccttatcaaaggac

SEQ ID NO: 2806378 - DNA, 25 bp, Homo sapien
tatcttgaggcttgatggacataag

SEQ ID NO: 2806379 - DNA, 25 bp, Homo sapien
caagaaacacacatgtagaggcaca

SEQ ID NO: 2806380 - DNA, 25 bp, Homo sapien
aaggcaggttttagtaaatgacaag

SEQ ID NO: 2806381 - DNA, 25 bp, Homo sapien
taaatgccaaacagcgacatgaatt

SEQ ID NO: 2806382 - DNA, 25 bp, Homo sapien
aacagaagctgccacaaaacaacgc

SEQ ID NO: 2806383 - DNA, 25 bp, Homo sapien
tgcgagaccagcgtttgccagcttc

SEQ ID NO: 2806384 - DNA, 25 bp, Homo sapien
taaatgttactgtgcgagaccagcg

SEQ ID NO: 2806385 - DNA, 25 bp, Homo sapien
tgttgaccggcactaaatgttactg

SEQ ID NO: 2806386 - DNA, 25 bp, Homo sapien
cagatgttagcccatacggtgtgtt

SEQ ID NO: 2806387 - DNA, 25 bp, Homo sapien
ttattagcgagactccactgcgacc

SEQ ID NO: 2806388 - DNA, 25 bp, Homo sapien
tggcagggagcctgacaacaaaatg

SEQ ID NO: 2806389 - DNA, 25 bp, Homo sapien
cttttgaattattagcgagactcca

SEQ ID NO: 2806390 - DNA, 25 bp, Homo sapien
ggcagggagcctgacaacaaaatgc

SEQ ID NO: 2806391 - DNA, 25 bp, Homo sapien
tgcctttatcaagaattgctgctga

SEQ ID NO: 2806392 - DNA, 25 bp, Homo sapien
taaggtcggcttgtagagggtctct

SEQ ID NO: 2806393 - DNA, 25 bp, Homo sapien
tgaaaggggattttgcactgagcac

SEQ ID NO: 2806394 - DNA, 25 bp, Homo sapien
gcactgagcacaacctttagggcca

SEQ ID NO: 2806395 - DNA, 25 bp, Homo sapien
taggagaggtccacgtaacattggg

SEQ ID NO: 2806396 - DNA, 25 bp, Homo sapien
cattctttcacagggaagctctccc

SEQ ID NO: 2806397 - DNA, 25 bp, Homo sapien
ggctctccccgctctactgatgtgg

SEQ ID NO: 2806398 - DNA, 25 bp, Homo sapien
cctgatttctggctacctcgtgagc

SEQ ID NO: 2806399 - DNA, 25 bp, Homo sapien
tgatgtggttgggagttttctgccc

SEQ ID NO: 2806400 - DNA, 25 bp, Homo sapien
aattggaattcacctgttcaatttc

SEQ ID NO: 2806401 - DNA, 25 bp, Homo sapien
ttggaattcacctgttcaatttcac

SEQ ID NO: 2806402 - DNA, 25 bp, Homo sapien
attggaattcacctgttcaatttca

SEQ ID NO: 2806403 - DNA, 25 bp, Homo sapien
atttccataactcatatttggaatg

SEQ ID NO: 2806404 - DNA, 25 bp, Homo sapien
tcatatttggaatggttcctggttt

SEQ ID NO: 2806405 - DNA, 25 bp, Homo sapien
tatttccataactcatatttggaat

SEQ ID NO: 2806406 - DNA, 25 bp, Homo sapien
catatttggaatggttcctggtttt

SEQ ID NO: 2806407 - DNA, 25 bp, Homo sapien
caaagatgcaagggtaactgctaca

SEQ ID NO: 2806408 - DNA, 25 bp, Homo sapien
actaacttggtctccaacctccaca

SEQ ID NO: 2806409 - DNA, 25 bp, Homo sapien
agccttctctccactaacttggtct

SEQ ID NO: 2806410 - DNA, 25 bp, Homo sapien
gtctccaacctccacaaagatgcaa

SEQ ID NO: 2806411 - DNA, 25 bp, Homo sapien
gaccatttgcttacaaagtaatatg

SEQ ID NO: 2806412 - DNA, 25 bp, Homo sapien
gcagggaacgaaaggtaataaggca

SEQ ID NO: 2806413 - DNA, 25 bp, Homo sapien
cagtcttgaccatttgcttacaaag

SEQ ID NO: 2806414 - DNA, 25 bp, Homo sapien
ggaaatacgcttgtagaaatcagtc

SEQ ID NO: 2806415 - DNA, 25 bp, Homo sapien
tggttcggttgtgtagcagacaggt

SEQ ID NO: 2806416 - DNA, 25 bp, Homo sapien
ctttggttcggttgtgtagcagaca

SEQ ID NO: 2806417 - DNA, 25 bp, Homo sapien
ttcggttgtgtagcagacaggtttt

SEQ ID NO: 2806418 - DNA, 25 bp, Homo sapien
tttggttcggttgtgtagcagacag

SEQ ID NO: 2806419 - DNA, 25 bp, Homo sapien
caaaggagacatttaactgataggc

SEQ ID NO: 2806420 - DNA, 25 bp, Homo sapien
ggttctgtctaagtttcatccagga

SEQ ID NO: 2806421 - DNA, 25 bp, Homo sapien
tgataggccctttttatgaaaggcc

SEQ ID NO: 2806422 - DNA, 25 bp, Homo sapien
ctttagacttagctggagccagatc

SEQ ID NO: 2806423 - DNA, 25 bp, Homo sapien
tggtacttcactagtagctcaagca

SEQ ID NO: 2806424 - DNA, 25 bp, Homo sapien
tgctttcactgtggtacttcactag

SEQ ID NO: 2806425 - DNA, 25 bp, Homo sapien
cactgtggtacttcactagtagctc

SEQ ID NO: 2806426 - DNA, 25 bp, Homo sapien
ttcactgtggtacttcactagtagc

SEQ ID NO: 2806427 - DNA, 25 bp, Homo sapien
ttcttgtttttctatgcagctccac

SEQ ID NO: 2806428 - DNA, 25 bp, Homo sapien
ttgtttttctatgcagctccacctg

SEQ ID NO: 2806429 - DNA, 25 bp, Homo sapien
cctggggtgtctgaatctgtcctcc

SEQ ID NO: 2806430 - DNA, 25 bp, Homo sapien
tcataacagggggtttgggagcctg

SEQ ID NO: 2806431 - DNA, 25 bp, Homo sapien
ctgtgggctgctttttgctgtgcat

SEQ ID NO: 2806432 - DNA, 25 bp, Homo sapien
tgtgggctgctttttgctgtgcata

SEQ ID NO: 2806433 - DNA, 25 bp, Homo sapien
gtgggctgctttttgctgtgcatat

SEQ ID NO: 2806434 - DNA, 25 bp, Homo sapien
cctgtgggctgctttttgctgtgca

SEQ ID NO: 2806435 - DNA, 25 bp, Homo sapien
tgtgggtttgtctgttctctattga

SEQ ID NO: 2806436 - DNA, 25 bp, Homo sapien
ctggtagacctgctcgagtctgtag

SEQ ID NO: 2806437 - DNA, 25 bp, Homo sapien
tctgtagcccctgacagaaaccaca

SEQ ID NO: 2806438 - DNA, 25 bp, Homo sapien
acagaaaccacaagactgtacaaac

SEQ ID NO: 2806439 - DNA, 25 bp, Homo sapien
agaagagtaccaccctccacgtttg

SEQ ID NO: 2806440 - DNA, 25 bp, Homo sapien
cctataggtttcgtctctgaagcaa

SEQ ID NO: 2806441 - DNA, 25 bp, Homo sapien
gaacagtccttgcactcctggtggg

SEQ ID NO: 2806442 - DNA, 25 bp, Homo sapien
gactttggacgcctttcttgtgact

SEQ ID NO: 2806443 - DNA, 25 bp, Homo sapien
ttattcctccatcgaagctgattcc

SEQ ID NO: 2806444 - DNA, 25 bp, Homo sapien
attcctccatcgaagctgattccaa

SEQ ID NO: 2806445 - DNA, 25 bp, Homo sapien
tattcctccatcgaagctgattcca

SEQ ID NO: 2806446 - DNA, 25 bp, Homo sapien
tagcccacgctgactccgatggctg

SEQ ID NO: 2806447 - DNA, 25 bp, Homo sapien
agtgtcatagcccacgctgactccg

SEQ ID NO: 2806448 - DNA, 25 bp, Homo sapien
cgctgactccgatggctgagaacat

SEQ ID NO: 2806449 - DNA, 25 bp, Homo sapien
tgtcatagcccacgctgactccgat

SEQ ID NO: 2806450 - DNA, 25 bp, Homo sapien
aaggtacttgctgacagggaattgt

SEQ ID NO: 2806451 - DNA, 25 bp, Homo sapien
gaattgtagcttgatagggcactca

SEQ ID NO: 2806452 - DNA, 25 bp, Homo sapien
cagtgaagtgtatttcctggacaga

SEQ ID NO: 2806453 - DNA, 25 bp, Homo sapien
tacactaaaagcattttggcacagt

SEQ ID NO: 2806454 - DNA, 25 bp, Homo sapien
ggccttaaagaacatcatctccact

SEQ ID NO: 2806455 - DNA, 25 bp, Homo sapien
gtctacttggctttcttcaatttca

SEQ ID NO: 2806456 - DNA, 25 bp, Homo sapien
cactttgtctacttggctttcttca

SEQ ID NO: 2806457 - DNA, 25 bp, Homo sapien
ctaggccttaaagaacatcatctcc

SEQ ID NO: 2806458 - DNA, 25 bp, Homo sapien
ttctaaaagcatacaagttgtctgg

SEQ ID NO: 2806459 - DNA, 25 bp, Homo sapien
gaggaggagtattcttaatagtttc

SEQ ID NO: 2806460 - DNA, 25 bp, Homo sapien
tctccaggatagattactaaaggcc

SEQ ID NO: 2806461 - DNA, 25 bp, Homo sapien
aaggccttgcatgctttgctaaaga

SEQ ID NO: 2806462 - DNA, 25 bp, Homo sapien
cacttgcacaccatctggaactact

SEQ ID NO: 2806463 - DNA, 25 bp, Homo sapien
acttgtttgagtctggccacttgca

SEQ ID NO: 2806464 - DNA, 25 bp, Homo sapien
tcatgccaacaagcttagtaacttg

SEQ ID NO: 2806465 - DNA, 25 bp, Homo sapien
cttctttcatgccaacaagcttagt

SEQ ID NO: 2806466 - DNA, 25 bp, Homo sapien
tgggcccacagcccggtacttggtc

SEQ ID NO: 2806467 - DNA, 25 bp, Homo sapien
cgagaagaacaggtgctacaagcta

SEQ ID NO: 2806468 - DNA, 25 bp, Homo sapien
tgctacaagctaggctcaccacttg

SEQ ID NO: 2806469 - DNA, 25 bp, Homo sapien
ctggctcacgagaagaacaggtgct

SEQ ID NO: 2806470 - DNA, 25 bp, Homo sapien
ggtaagggcagaattagaagagtgt

SEQ ID NO: 2806471 - DNA, 25 bp, Homo sapien
gtaagggcagaattagaagagtgtg

SEQ ID NO: 2806472 - DNA, 25 bp, Homo sapien
taagggcagaattagaagagtgtga

SEQ ID NO: 2806473 - DNA, 25 bp, Homo sapien
gagtagtctgaatattgagcttgtt

SEQ ID NO: 2806474 - DNA, 25 bp, Homo sapien
tgtttagaaccacttggggattcag

SEQ ID NO: 2806475 - DNA, 25 bp, Homo sapien
aatattgagcttgttgtttagaacc

SEQ ID NO: 2806476 - DNA, 25 bp, Homo sapien
tctgaatattgagcttgttgtttag

SEQ ID NO: 2806477 - DNA, 25 bp, Homo sapien
gtgtgtacgatgatgacttttacca

SEQ ID NO: 2806478 - DNA, 25 bp, Homo sapien
cttcagtgtgtacgatgatgacttt

SEQ ID NO: 2806479 - DNA, 25 bp, Homo sapien
gacttttaccaatgcagtgggttga

SEQ ID NO: 2806480 - DNA, 25 bp, Homo sapien
gatgacttttaccaatgcagtgggt

SEQ ID NO: 2806481 - DNA, 25 bp, Homo sapien
aaagcttggtgtgcttgacgtaggc

SEQ ID NO: 2806482 - DNA, 25 bp, Homo sapien
tcgctctccacattatggttaagcc

SEQ ID NO: 2806483 - DNA, 25 bp, Homo sapien
atgtgttctttctcgctctccacat

SEQ ID NO: 2806484 - DNA, 25 bp, Homo sapien
gccttgttggcctttttcagagtca

SEQ ID NO: 2806485 - DNA, 25 bp, Homo sapien
gatgaaatccgaattgtgtgttgaa

SEQ ID NO: 2806486 - DNA, 25 bp, Homo sapien
catgtgcatactgaaatagggatag

SEQ ID NO: 2806487 - DNA, 25 bp, Homo sapien
gaaattcagaaccaacattgggcac

SEQ ID NO: 2806488 - DNA, 25 bp, Homo sapien
ttgggcactcagtgtctaccatgtg

SEQ ID NO: 2806489 - DNA, 25 bp, Homo sapien
cctttatggcatctccattgtgaag

SEQ ID NO: 2806490 - DNA, 25 bp, Homo sapien
cttccttttctgcatagtctattcc

SEQ ID NO: 2806491 - DNA, 25 bp, Homo sapien
ccttttctgcatagtctattccaaa

SEQ ID NO: 2806492 - DNA, 25 bp, Homo sapien
ttctgcatagtctattccaaacacc

SEQ ID NO: 2806493 - DNA, 25 bp, Homo sapien
caatgaagacgaatgggacttttta

SEQ ID NO: 2806494 - DNA, 25 bp, Homo sapien
acacaccagtgccttgcagctgctg

SEQ ID NO: 2806495 - DNA, 25 bp, Homo sapien
caccagtgccttgcagctgctgaaa

SEQ ID NO: 2806496 - DNA, 25 bp, Homo sapien
gaaccacaatgaagacgaatgggac

SEQ ID NO: 2806497 - DNA, 25 bp, Homo sapien
taatcacatgctggcgccccaagcc

SEQ ID NO: 2806498 - DNA, 25 bp, Homo sapien
acatgctggcgccccaagcctgttt

SEQ ID NO: 2806499 - DNA, 25 bp, Homo sapien
tcacatgctggcgccccaagcctgt

SEQ ID NO: 2806500 - DNA, 25 bp, Homo sapien
cataatcacatgctggcgccccaag

SEQ ID NO: 2806501 - DNA, 25 bp, Homo sapien
ctggggcagccgtgacctcagactg

SEQ ID NO: 2806502 - DNA, 25 bp, Homo sapien
ctaatgaaagcatcccaaaatatcc

SEQ ID NO: 2806503 - DNA, 25 bp, Homo sapien
aactgtactctgtgccttctaatga

SEQ ID NO: 2806504 - DNA, 25 bp, Homo sapien
tatccccaaccgctcaaattctggg

SEQ ID NO: 2806505 - DNA, 25 bp, Homo sapien
tgataaaaatctccctgtggtaatg

SEQ ID NO: 2806506 - DNA, 25 bp, Homo sapien
aatgactgaaatgcttgctctctct

SEQ ID NO: 2806507 - DNA, 25 bp, Homo sapien
tttgtcacttcatagcttatgattc

SEQ ID NO: 2806508 - DNA, 25 bp, Homo sapien
tgctcagacagaatggttgataaaa

SEQ ID NO: 2806509 - DNA, 25 bp, Homo sapien
agtagaaaatatgcacccggacatt

SEQ ID NO: 2806510 - DNA, 25 bp, Homo sapien
cccggacattagacaaacacagact

SEQ ID NO: 2806511 - DNA, 25 bp, Homo sapien
gctggatcagatagtgcaatacgct

SEQ ID NO: 2806512 - DNA, 25 bp, Homo sapien
cacagactaaacacagactgaggaa

SEQ ID NO: 2806513 - DNA, 25 bp, Homo sapien
gcccaatccttccatgcatactcac

SEQ ID NO: 2806514 - DNA, 25 bp, Homo sapien
agcccaatccttccatgcatactca

SEQ ID NO: 2806515 - DNA, 25 bp, Homo sapien
catttgtcccttatactccaataaa

SEQ ID NO: 2806516 - DNA, 25 bp, Homo sapien
tgatgccggtatgtaatcatttgtc

SEQ ID NO: 2806517 - DNA, 25 bp, Homo sapien
ttcttttggttgctattgaggtggc

SEQ ID NO: 2806518 - DNA, 25 bp, Homo sapien
ttcttgatgccggtatgtaatcatt

SEQ ID NO: 2806519 - DNA, 25 bp, Homo sapien
caggctcgcctctagcaagtgctaa

SEQ ID NO: 2806520 - DNA, 25 bp, Homo sapien
tgtacatctcttataccttcatgga

SEQ ID NO: 2806521 - DNA, 25 bp, Homo sapien
gatctcttgttgtcaacaccttgag

SEQ ID NO: 2806522 - DNA, 25 bp, Homo sapien
ggatagggacttattcaggctcgcc

SEQ ID NO: 2806523 - DNA, 25 bp, Homo sapien
gaaaatagaaaccagatgaatccaa

SEQ ID NO: 2806524 - DNA, 25 bp, Homo sapien
tgcctattagctgattctttaatcc

SEQ ID NO: 2806525 - DNA, 25 bp, Homo sapien
caagaattgtgtgcctattagctga

SEQ ID NO: 2806526 - DNA, 25 bp, Homo sapien
gaacagtatggcttcaagaattgtg

SEQ ID NO: 2806527 - DNA, 25 bp, Homo sapien
aagatttagatctgacaggagagct

SEQ ID NO: 2806528 - DNA, 25 bp, Homo sapien
cctggagcaaagtctgtctgccaag

SEQ ID NO: 2806529 - DNA, 25 bp, Homo sapien
ggagcaaagtctgtctgccaagagg

SEQ ID NO: 2806530 - DNA, 25 bp, Homo sapien
gagctgtgtcagcacaaatgagaga

SEQ ID NO: 2806531 - DNA, 25 bp, Homo sapien
gctgctctgatgatgccactaccat

SEQ ID NO: 2806532 - DNA, 25 bp, Homo sapien
attgggatatgaaattcatctgctg

SEQ ID NO: 2806533 - DNA, 25 bp, Homo sapien
gggatatgaaattcatctgctgctc

SEQ ID NO: 2806534 - DNA, 25 bp, Homo sapien
tctgctgctctgatgatgccactac

SEQ ID NO: 2806535 - DNA, 25 bp, Homo sapien
aagcaggtgaagcatagcaatgttt

SEQ ID NO: 2806536 - DNA, 25 bp, Homo sapien
gagagacgcagatttgttaaggaag

SEQ ID NO: 2806537 - DNA, 25 bp, Homo sapien
gcatagcaatgtttctcatagagag

SEQ ID NO: 2806538 - DNA, 25 bp, Homo sapien
tctcatagagagacgcagatttgtt

SEQ ID NO: 2806539 - DNA, 25 bp, Homo sapien
cccagggttatgatgtgagtcttaa

SEQ ID NO: 2806540 - DNA, 25 bp, Homo sapien
ttcccagggttatgatgtgagtctt

SEQ ID NO: 2806541 - DNA, 25 bp, Homo sapien
tcttaatcaattgattcaagcctct

SEQ ID NO: 2806542 - DNA, 25 bp, Homo sapien
gatgtgagtcttaatcaattgattc

SEQ ID NO: 2806543 - DNA, 25 bp, Homo sapien
gcatctgcacctcgcccttctgcat

SEQ ID NO: 2806544 - DNA, 25 bp, Homo sapien
agctgagctacactaggagagtcct

SEQ ID NO: 2806545 - DNA, 25 bp, Homo sapien
tcaggcatctgcacctcgcccttct

SEQ ID NO: 2806546 - DNA, 25 bp, Homo sapien
gctgagctacactaggagagtcctc

SEQ ID NO: 2806547 - DNA, 25 bp, Homo sapien
gctaaatacagtaggtctgattcca

SEQ ID NO: 2806548 - DNA, 25 bp, Homo sapien
ctaaatacagtaggtctgattccac

SEQ ID NO: 2806549 - DNA, 25 bp, Homo sapien
tgctgctagtcttatgacactccac

SEQ ID NO: 2806550 - DNA, 25 bp, Homo sapien
tagtcttatgacactccacctgacc

SEQ ID NO: 2806551 - DNA, 25 bp, Homo sapien
tgctagtcttatgacactccacctg

SEQ ID NO: 2806552 - DNA, 25 bp, Homo sapien
gctagtcttatgacactccacctga

SEQ ID NO: 2806553 - DNA, 25 bp, Homo sapien
ttaccaagcagttgaaaggacattt

SEQ ID NO: 2806554 - DNA, 25 bp, Homo sapien
aaatgccttagtcattaactgaaag

SEQ ID NO: 2806555 - DNA, 25 bp, Homo sapien
gccttagtcattaactgaaagtgtc

SEQ ID NO: 2806556 - DNA, 25 bp, Homo sapien
agcagctggcattaccaagcagttg

SEQ ID NO: 2806557 - DNA, 25 bp, Homo sapien
ttcatcttcccaagagtactgttag

SEQ ID NO: 2806558 - DNA, 25 bp, Homo sapien
ttcccaagagtactgttaggaaatg

SEQ ID NO: 2806559 - DNA, 25 bp, Homo sapien
catcttcccaagagtactgttagga

SEQ ID NO: 2806560 - DNA, 25 bp, Homo sapien
tcttcccaagagtactgttaggaaa

SEQ ID NO: 2806561 - DNA, 25 bp, Homo sapien
tagctttggctaagtatcgagtggc

SEQ ID NO: 2806562 - DNA, 25 bp, Homo sapien
tatcgagtggctccaaacttgctta

SEQ ID NO: 2806563 - DNA, 25 bp, Homo sapien
ggctccaaacttgcttagatgaagc

SEQ ID NO: 2806564 - DNA, 25 bp, Homo sapien
gctaagtatcgagtggctccaaact

SEQ ID NO: 2806565 - DNA, 25 bp, Homo sapien
tcaatccaagccttttgtggcccag

SEQ ID NO: 2806566 - DNA, 25 bp, Homo sapien
actcggaattacagcctggaggtga

SEQ ID NO: 2806567 - DNA, 25 bp, Homo sapien
tgagctcatgacactcggaattaca

SEQ ID NO: 2806568 - DNA, 25 bp, Homo sapien
tactgtggggatgcagcaaatggaa

SEQ ID NO: 2806569 - DNA, 25 bp, Homo sapien
tccaaaatatcgaaacacagcaata

SEQ ID NO: 2806570 - DNA, 25 bp, Homo sapien
aacacagcaatattgtagatactaa

SEQ ID NO: 2806571 - DNA, 25 bp, Homo sapien
ccaaaatatcgaaacacagcaatat

SEQ ID NO: 2806572 - DNA, 25 bp, Homo sapien
cagcaatattgtagatactaacttc

SEQ ID NO: 2806573 - DNA, 25 bp, Homo sapien
tcaggtcaggcatggaagtactcat

SEQ ID NO: 2806574 - DNA, 25 bp, Homo sapien
tgagcaatatcttactgggtccttc

SEQ ID NO: 2806575 - DNA, 25 bp, Homo sapien
cagttccacccagttgtagcaacaa

SEQ ID NO: 2806576 - DNA, 25 bp, Homo sapien
tagtagtcctagcatccaaagtgtg

SEQ ID NO: 2806577 - DNA, 25 bp, Homo sapien
gaattctctgccactgtaatctcca

SEQ ID NO: 2806578 - DNA, 25 bp, Homo sapien
aacaagtagtggttatgaatactca

SEQ ID NO: 2806579 - DNA, 25 bp, Homo sapien
gccatggtatttatgctgcatctga

SEQ ID NO: 2806580 - DNA, 25 bp, Homo sapien
gtgtgtatgtacatgatgtggcagc

SEQ ID NO: 2806581 - DNA, 25 bp, Homo sapien
tctgatgtacaaagcatagcgtgtg

SEQ ID NO: 2806582 - DNA, 25 bp, Homo sapien
caaggccgctttacaggcagctgag

SEQ ID NO: 2806583 - DNA, 25 bp, Homo sapien
cgcgagtgcacatcaaaatcctggc

SEQ ID NO: 2806584 - DNA, 25 bp, Homo sapien
tcgctgtgccgaacaggatctgtga

SEQ ID NO: 2806585 - DNA, 25 bp, Homo sapien
ctcagaaacggacagaagaccaact

SEQ ID NO: 2806586 - DNA, 25 bp, Homo sapien
cttctggcaaggaaattctgagtac

SEQ ID NO: 2806587 - DNA, 25 bp, Homo sapien
agttgaatttcaagatggattctaa

SEQ ID NO: 2806588 - DNA, 25 bp, Homo sapien
tagggatgcagtctttagttgaatt

SEQ ID NO: 2806589 - DNA, 25 bp, Homo sapien
ctgaggattacaatatgttcagctc

SEQ ID NO: 2806590 - DNA, 25 bp, Homo sapien
gcagtcacatgacagatggtaatgg

SEQ ID NO: 2806591 - DNA, 25 bp, Homo sapien
tctctgtacaatatgtacacgtaca

SEQ ID NO: 2806592 - DNA, 25 bp, Homo sapien
caaaaaggaattcacattcgatgaa

SEQ ID NO: 2806593 - DNA, 25 bp, Homo sapien
taaagaacagatgccttttaggggc

SEQ ID NO: 2806594 - DNA, 25 bp, Homo sapien
caaggcctccagaaagcttttgcag

SEQ ID NO: 2806595 - DNA, 25 bp, Homo sapien
cctggtgctctcctagcagttgaac

SEQ ID NO: 2806596 - DNA, 25 bp, Homo sapien
tcctagcagttgaactacactaaac

SEQ ID NO: 2806597 - DNA, 25 bp, Homo sapien
tgctctcctagcagttgaactacac

SEQ ID NO: 2806598 - DNA, 25 bp, Homo sapien
gcagttgaactacactaaacacagt

SEQ ID NO: 2806599 - DNA, 25 bp, Homo sapien
tctatgtacttttcaggtcttctct

SEQ ID NO: 2806600 - DNA, 25 bp, Homo sapien
tatgtacttttcaggtcttctcttc

SEQ ID NO: 2806601 - DNA, 25 bp, Homo sapien
cttcttctatgtacttttcaggtct

SEQ ID NO: 2806602 - DNA, 25 bp, Homo sapien
tcttctatgtacttttcaggtcttc

SEQ ID NO: 2806603 - DNA, 25 bp, Homo sapien
agagcatgtacctggttagtgatag

SEQ ID NO: 2806604 - DNA, 25 bp, Homo sapien
gtgatagatgggatggcatctacac

SEQ ID NO: 2806605 - DNA, 25 bp, Homo sapien
gagcatgtacctggttagtgataga

SEQ ID NO: 2806606 - DNA, 25 bp, Homo sapien
catgtacctggttagtgatagatgg

SEQ ID NO: 2806607 - DNA, 25 bp, Homo sapien
caaccagtgtggaaatctatcttgc

SEQ ID NO: 2806608 - DNA, 25 bp, Homo sapien
ttccaaccagtgtggaaatctatct

SEQ ID NO: 2806609 - DNA, 25 bp, Homo sapien
tataattccaaccagtgtggaaatc

SEQ ID NO: 2806610 - DNA, 25 bp, Homo sapien
taattccaaccagtgtggaaatcta

SEQ ID NO: 2806611 - DNA, 25 bp, Homo sapien
tgaattcccctcctttacctgtgct

SEQ ID NO: 2806612 - DNA, 25 bp, Homo sapien
tacctgtgcttaggaaacaatgaac

SEQ ID NO: 2806613 - DNA, 25 bp, Homo sapien
caatctgtatcaggtaaaacatgga

SEQ ID NO: 2806614 - DNA, 25 bp, Homo sapien
gaactaggacccaaagactgtatga

SEQ ID NO: 2806615 - DNA, 25 bp, Homo sapien
aatgcagtcattactcaaagggttc

SEQ ID NO: 2806616 - DNA, 25 bp, Homo sapien
tttctgggaagttctaatgcagtca

SEQ ID NO: 2806617 - DNA, 25 bp, Homo sapien
cacgagtagccaaactgttatttaa

SEQ ID NO: 2806618 - DNA, 25 bp, Homo sapien
cgatgccttcagtgtattgtgttac

SEQ ID NO: 2806619 - DNA, 25 bp, Homo sapien
cctcaggtttcctggatctttcagc

SEQ ID NO: 2806620 - DNA, 25 bp, Homo sapien
tcctggcagcatttttagctttaat

SEQ ID NO: 2806621 - DNA, 25 bp, Homo sapien
ggtttcctggatctttcagccatct

SEQ ID NO: 2806622 - DNA, 25 bp, Homo sapien
cttcctggcagcatttttagcttta

SEQ ID NO: 2806623 - DNA, 25 bp, Homo sapien
ctgcatatgggacagtgtaaaggct

SEQ ID NO: 2806624 - DNA, 25 bp, Homo sapien
tgtagctctcggcagggttgccaga

SEQ ID NO: 2806625 - DNA, 25 bp, Homo sapien
gtgacagactcctgctctaatgcaa

SEQ ID NO: 2806626 - DNA, 25 bp, Homo sapien
taaaggctgtgggataagtgacact

SEQ ID NO: 2806627 - DNA, 25 bp, Homo sapien
aattgcatgttacacagcagacagc

SEQ ID NO: 2806628 - DNA, 25 bp, Homo sapien
gatgcactcatcctgtgttagaaga

SEQ ID NO: 2806629 - DNA, 25 bp, Homo sapien
tgtaggtccacgcagggtcatgatg

SEQ ID NO: 2806630 - DNA, 25 bp, Homo sapien
tacattctggtgtgcaacttcagca

SEQ ID NO: 2806631 - DNA, 25 bp, Homo sapien
cctgaggttatctctaggccataag

SEQ ID NO: 2806632 - DNA, 25 bp, Homo sapien
tccgaaaaggcagataaagtcaaca

SEQ ID NO: 2806633 - DNA, 25 bp, Homo sapien
taatcggagtgatatacacccgtgg

SEQ ID NO: 2806634 - DNA, 25 bp, Homo sapien
gacagtgaaacagctgattgccaac

SEQ ID NO: 2806635 - DNA, 25 bp, Homo sapien
tgctcataaagaggaagtacgcgtc

SEQ ID NO: 2806636 - DNA, 25 bp, Homo sapien
tacctcctgtgttgggaactatgct

SEQ ID NO: 2806637 - DNA, 25 bp, Homo sapien
tccttcctccagtaatataaattgg

SEQ ID NO: 2806638 - DNA, 25 bp, Homo sapien
tcttgcaatgagagaatgttctccc

SEQ ID NO: 2806639 - DNA, 25 bp, Homo sapien
agccctttgagcttgttccatggag

SEQ ID NO: 2806640 - DNA, 25 bp, Homo sapien
ggatcttcttgccaaactcatttga

SEQ ID NO: 2806641 - DNA, 25 bp, Homo sapien
tcatcagaaacagcgttttagtctt

SEQ ID NO: 2806642 - DNA, 25 bp, Homo sapien
ttccatggagtacaaaaggatcttc

SEQ ID NO: 2806643 - DNA, 25 bp, Homo sapien
tgttttggtccgagtacttggaatc

SEQ ID NO: 2806644 - DNA, 25 bp, Homo sapien
tctactgtgttttggtccgagtact

SEQ ID NO: 2806645 - DNA, 25 bp, Homo sapien
ctactgtgttttggtccgagtactt

SEQ ID NO: 2806646 - DNA, 25 bp, Homo sapien
tttggtccgagtacttggaatccat

SEQ ID NO: 2806647 - DNA, 25 bp, Homo sapien
tcctttcagagtaacaatacttgaa

SEQ ID NO: 2806648 - DNA, 25 bp, Homo sapien
gaggcttcatccacttttaccacct

SEQ ID NO: 2806649 - DNA, 25 bp, Homo sapien
gagcaaactcggatttcttacattc

SEQ ID NO: 2806650 - DNA, 25 bp, Homo sapien
aaatttgagcaaactcggatttctt

SEQ ID NO: 2806651 - DNA, 25 bp, Homo sapien
tgagcctgcagagattccgttctaa

SEQ ID NO: 2806652 - DNA, 25 bp, Homo sapien
attgtatgtattcccgtgagcctgc

SEQ ID NO: 2806653 - DNA, 25 bp, Homo sapien
ctgaaagcaaaacgtgttgcaattg

SEQ ID NO: 2806654 - DNA, 25 bp, Homo sapien
gcagagattccgttctaacagacat

SEQ ID NO: 2806655 - DNA, 25 bp, Homo sapien
ccccaacgcaaacttgatcaatgct

SEQ ID NO: 2806656 - DNA, 25 bp, Homo sapien
tatcttggacaaccaatgttgatgc

SEQ ID NO: 2806657 - DNA, 25 bp, Homo sapien
caaacttgatcaatgcttcacatcc

SEQ ID NO: 2806658 - DNA, 25 bp, Homo sapien
caccactgttatcttggacaaccaa

SEQ ID NO: 2806659 - DNA, 25 bp, Homo sapien
gccggattctcatggagatcatgag

SEQ ID NO: 2806660 - DNA, 25 bp, Homo sapien
tggtctccatgattccactgaagcg

SEQ ID NO: 2806661 - DNA, 25 bp, Homo sapien
tacggctgcggtacaggactgagtc

SEQ ID NO: 2806662 - DNA, 25 bp, Homo sapien
gaaatttccagacagagccggattc

SEQ ID NO: 2806663 - DNA, 25 bp, Homo sapien
ttgagaacccgtgcgggaagtcctg

SEQ ID NO: 2806664 - DNA, 25 bp, Homo sapien
tacttgctgaacatattccaccacg

SEQ ID NO: 2806665 - DNA, 25 bp, Homo sapien
caattctgccaaatttacttgctga

SEQ ID NO: 2806666 - DNA, 25 bp, Homo sapien
ccacgtcttacaataagatgccaaa

SEQ ID NO: 2806667 - DNA, 25 bp, Homo sapien
gatgccaaatagcatgaggattctt

SEQ ID NO: 2806668 - DNA, 25 bp, Homo sapien
tggtaaggattatccctattttcaa

SEQ ID NO: 2806669 - DNA, 25 bp, Homo sapien
tctaactggtaaggattatccctat

SEQ ID NO: 2806670 - DNA, 25 bp, Homo sapien
caagttatttctaactggtaaggat

SEQ ID NO: 2806671 - DNA, 25 bp, Homo sapien
ttctatatgttacccaagttatttc

SEQ ID NO: 2806672 - DNA, 25 bp, Homo sapien
gagttagcctgcaatcgtcattagc

SEQ ID NO: 2806673 - DNA, 25 bp, Homo sapien
acacgcacaagcagggaggtagcag

SEQ ID NO: 2806674 - DNA, 25 bp, Homo sapien
tttatagaagcaagtggtaggctgg

SEQ ID NO: 2806675 - DNA, 25 bp, Homo sapien
ttggataatgtagggacacacgcac

SEQ ID NO: 2806676 - DNA, 25 bp, Homo sapien
ggatgacctcaagggtatccttctg

SEQ ID NO: 2806677 - DNA, 25 bp, Homo sapien
gaaatgtctttgatgggcaatgatg

SEQ ID NO: 2806678 - DNA, 25 bp, Homo sapien
cataatgaatattggaggtgagaac

SEQ ID NO: 2806679 - DNA, 25 bp, Homo sapien
ctcaagggtatccttctggagcatc

SEQ ID NO: 2806680 - DNA, 25 bp, Homo sapien
tgtgcttgttgaagttaacaggtag

SEQ ID NO: 2806681 - DNA, 25 bp, Homo sapien
cattactgatacaccatcatgtagt

SEQ ID NO: 2806682 - DNA, 25 bp, Homo sapien
actgatacaccatcatgtagtctcc

SEQ ID NO: 2806683 - DNA, 25 bp, Homo sapien
tgatacaccatcatgtagtctccag

SEQ ID NO: 2806684 - DNA, 25 bp, Homo sapien
aaatactgatcagagacagtgccca

SEQ ID NO: 2806685 - DNA, 25 bp, Homo sapien
tgtgcattccaaaactccctaaaat

SEQ ID NO: 2806686 - DNA, 25 bp, Homo sapien
ttccaagactagtgccacaagtttg

SEQ ID NO: 2806687 - DNA, 25 bp, Homo sapien
cagtgcccacattccaagactagtg

SEQ ID NO: 2806688 - DNA, 25 bp, Homo sapien
gactccccaaatagattttgagtgt

SEQ ID NO: 2806689 - DNA, 25 bp, Homo sapien
agaacgtcttacacttactttcagg

SEQ ID NO: 2806690 - DNA, 25 bp, Homo sapien
caagggcaaacagaacgtcttacac

SEQ ID NO: 2806691 - DNA, 25 bp, Homo sapien
gcaaacagaacgtcttacacttact

SEQ ID NO: 2806692 - DNA, 25 bp, Homo sapien
gaacctagtgccaggattgctgcca

SEQ ID NO: 2806693 - DNA, 25 bp, Homo sapien
tcatgtagaagagagcccacttggt

SEQ ID NO: 2806694 - DNA, 25 bp, Homo sapien
gtactttatattaatgccaattgaa

SEQ ID NO: 2806695 - DNA, 25 bp, Homo sapien
catcccagaatgacgatttagaacc

SEQ ID NO: 2806696 - DNA, 25 bp, Homo sapien
cctgccatgtgctagagaaaactct

SEQ ID NO: 2806697 - DNA, 25 bp, Homo sapien
cggttagccctcgaaactctggact

SEQ ID NO: 2806698 - DNA, 25 bp, Homo sapien
gctacttagtcgagaacaatgtcca

SEQ ID NO: 2806699 - DNA, 25 bp, Homo sapien
cccaaggcgcccagaatagaatctg

SEQ ID NO: 2806700 - DNA, 25 bp, Homo sapien
agggttaaagagtctttcctctgag

SEQ ID NO: 2806701 - DNA, 25 bp, Homo sapien
agagtctttcctctgagcagtaggc

SEQ ID NO: 2806702 - DNA, 25 bp, Homo sapien
ttaaagagtctttcctctgagcagt

SEQ ID NO: 2806703 - DNA, 25 bp, Homo sapien
aagagtctttcctctgagcagtagg

SEQ ID NO: 2806704 - DNA, 25 bp, Homo sapien
tttagcatcatactggtgaggagcc

SEQ ID NO: 2806705 - DNA, 25 bp, Homo sapien
ttagccggtgtgagtactctctacg

SEQ ID NO: 2806706 - DNA, 25 bp, Homo sapien
actctctacgcgtatggatctgaca

SEQ ID NO: 2806707 - DNA, 25 bp, Homo sapien
taaatccaaagcaaattagccggtg

SEQ ID NO: 2806708 - DNA, 25 bp, Homo sapien
actacagttttttggatatgtcaat

SEQ ID NO: 2806709 - DNA, 25 bp, Homo sapien
gaaaagtagaggcttatctttcttc

SEQ ID NO: 2806710 - DNA, 25 bp, Homo sapien
tagatttccatcaagtcaggtataa

SEQ ID NO: 2806711 - DNA, 25 bp, Homo sapien
tcctcgagatttcttttagctacta

SEQ ID NO: 2806712 - DNA, 25 bp, Homo sapien
cttggaattatcgtcctgatgcatc

SEQ ID NO: 2806713 - DNA, 25 bp, Homo sapien
aaattcaccattgaactcttggaat

SEQ ID NO: 2806714 - DNA, 25 bp, Homo sapien
ggaattatcgtcctgatgcatcccc

SEQ ID NO: 2806715 - DNA, 25 bp, Homo sapien
caccattgaactcttggaattatcg

SEQ ID NO: 2806716 - DNA, 25 bp, Homo sapien
tgccacttctgggaacaagaaatat

SEQ ID NO: 2806717 - DNA, 25 bp, Homo sapien
tctgggaacaagaaatatccccaag

SEQ ID NO: 2806718 - DNA, 25 bp, Homo sapien
ccacttctgggaacaagaaatatcc

SEQ ID NO: 2806719 - DNA, 25 bp, Homo sapien
cttctgggaacaagaaatatcccca

SEQ ID NO: 2806720 - DNA, 25 bp, Homo sapien
tagtttctttggcacctttctggta

SEQ ID NO: 2806721 - DNA, 25 bp, Homo sapien
ctttgcacttagtttctttggcacc

SEQ ID NO: 2806722 - DNA, 25 bp, Homo sapien
gcacttagtttctttggcacctttc

SEQ ID NO: 2806723 - DNA, 25 bp, Homo sapien
cttagtttctttggcacctttctgg

SEQ ID NO: 2806724 - DNA, 25 bp, Homo sapien
tggcttcccaactcacagcacctac

SEQ ID NO: 2806725 - DNA, 25 bp, Homo sapien
ctggcttcccaactcacagcaccta

SEQ ID NO: 2806726 - DNA, 25 bp, Homo sapien
tatccacgactgtgtgtaagaaatg

SEQ ID NO: 2806727 - DNA, 25 bp, Homo sapien
cattttctcatacatcagctcctca

SEQ ID NO: 2806728 - DNA, 25 bp, Homo sapien
agctcctcatatccacgactgtgtg

SEQ ID NO: 2806729 - DNA, 25 bp, Homo sapien
atacatcagctcctcatatccacga

SEQ ID NO: 2806730 - DNA, 25 bp, Homo sapien
tgaaaaccagttaagggacacctgc

SEQ ID NO: 2806731 - DNA, 25 bp, Homo sapien
gacgcaaataatttataatgtccaa

SEQ ID NO: 2806732 - DNA, 25 bp, Homo sapien
tgttggcttgacctgagcagacgca

SEQ ID NO: 2806733 - DNA, 25 bp, Homo sapien
cactgtacggatgctttattttgaa

SEQ ID NO: 2806734 - DNA, 25 bp, Homo sapien
tcagctttcactgtacggatgcttt

SEQ ID NO: 2806735 - DNA, 25 bp, Homo sapien
tataagtgccgataagattaagcat

SEQ ID NO: 2806736 - DNA, 25 bp, Homo sapien
tctataagtgccgataagattaagc

SEQ ID NO: 2806737 - DNA, 25 bp, Homo sapien
ttctataagtgccgataagattaag

SEQ ID NO: 2806738 - DNA, 25 bp, Homo sapien
tattctataagtgccgataagatta

SEQ ID NO: 2806739 - DNA, 25 bp, Homo sapien
gctgatgccgtcctagaatccattc

SEQ ID NO: 2806740 - DNA, 25 bp, Homo sapien
tagaatccattcctaggagattagc

SEQ ID NO: 2806741 - DNA, 25 bp, Homo sapien
atgctgatgccgtcctagaatccat

SEQ ID NO: 2806742 - DNA, 25 bp, Homo sapien
cctagaatccattcctaggagatta

SEQ ID NO: 2806743 - DNA, 25 bp, Homo sapien
gatgtgagccaggtagcaaaagtcc

SEQ ID NO: 2806744 - DNA, 25 bp, Homo sapien
tcaagctaccaaagtgatgtgagcc

SEQ ID NO: 2806745 - DNA, 25 bp, Homo sapien
caatcatggcagagttcaagctacc

SEQ ID NO: 2806746 - DNA, 25 bp, Homo sapien
caaaagtcccgaaaatgtaacgatg

SEQ ID NO: 2806747 - DNA, 25 bp, Homo sapien
gaagatgccgttttctctgtttcca

SEQ ID NO: 2806748 - DNA, 25 bp, Homo sapien
gctagtctccttgcaagtagtaatc

SEQ ID NO: 2806749 - DNA, 25 bp, Homo sapien
gttgtctttcacaaatagagcaaag

SEQ ID NO: 2806750 - DNA, 25 bp, Homo sapien
taatctttactcatccagttgtctt

SEQ ID NO: 2806751 - DNA, 25 bp, Homo sapien
tccaaaatattgatcataaaaagca

SEQ ID NO: 2806752 - DNA, 25 bp, Homo sapien
tctcttgacccagttgtaaaatgtg

SEQ ID NO: 2806753 - DNA, 25 bp, Homo sapien
atttctctccaaaatattgatcata

SEQ ID NO: 2806754 - DNA, 25 bp, Homo sapien
gtaaaatgtggccctctttttcatc

SEQ ID NO: 2806755 - DNA, 25 bp, Homo sapien
tgtagtttgatgaggtgtttttggc

SEQ ID NO: 2806756 - DNA, 25 bp, Homo sapien
acagagctactgctagcacatacat

SEQ ID NO: 2806757 - DNA, 25 bp, Homo sapien
gctaatgccttgtctgtcatcatct

SEQ ID NO: 2806758 - DNA, 25 bp, Homo sapien
aatatctgactaatggaaacagagc

SEQ ID NO: 2806759 - DNA, 25 bp, Homo sapien
tggagctcgagaggctttttaattt

SEQ ID NO: 2806760 - DNA, 25 bp, Homo sapien
ctttggagctcgagaggctttttaa

SEQ ID NO: 2806761 - DNA, 25 bp, Homo sapien
ttggagctcgagaggctttttaatt

SEQ ID NO: 2806762 - DNA, 25 bp, Homo sapien
tttggagctcgagaggctttttaat

SEQ ID NO: 2806763 - DNA, 25 bp, Homo sapien
cttgcaaatcatcctgtcatttact

SEQ ID NO: 2806764 - DNA, 25 bp, Homo sapien
tgcaaatcatcctgtcatttacttt

SEQ ID NO: 2806765 - DNA, 25 bp, Homo sapien
ttgcaaatcatcctgtcatttactt

SEQ ID NO: 2806766 - DNA, 25 bp, Homo sapien
gaccacattcgaagaggattgacag

SEQ ID NO: 2806767 - DNA, 25 bp, Homo sapien
gtaggtgttcacctgccagtctccg

SEQ ID NO: 2806768 - DNA, 25 bp, Homo sapien
cagtctccgccgtgcaagatgagag

SEQ ID NO: 2806769 - DNA, 25 bp, Homo sapien
tcattcacagtgagagggaccacat

SEQ ID NO: 2806770 - DNA, 25 bp, Homo sapien
tttgtagaaccataatgaagactct

SEQ ID NO: 2806771 - DNA, 25 bp, Homo sapien
tctttgaccaacaggcagtttgtag

SEQ ID NO: 2806772 - DNA, 25 bp, Homo sapien
tctttgttaccccatctctttgacc

SEQ ID NO: 2806773 - DNA, 25 bp, Homo sapien
gaagactctgcatccctgatgatca

SEQ ID NO: 2806774 - DNA, 25 bp, Homo sapien
cagcagataagataccagactgtct

SEQ ID NO: 2806775 - DNA, 25 bp, Homo sapien
tgctccagcggcaaatcgcatggtt

SEQ ID NO: 2806776 - DNA, 25 bp, Homo sapien
gaactgtgatgactatatccgtgca

SEQ ID NO: 2806777 - DNA, 25 bp, Homo sapien
ccgctgcatgcggactgagagctcc

SEQ ID NO: 2806778 - DNA, 25 bp, Homo sapien
ttgctttctgccgttaactttgaaa

SEQ ID NO: 2806779 - DNA, 25 bp, Homo sapien
taatgtaacacactaatggactaca

SEQ ID NO: 2806780 - DNA, 25 bp, Homo sapien
tgctttctgccgttaactttgaaaa

SEQ ID NO: 2806781 - DNA, 25 bp, Homo sapien
ttctggctgcgaagggacacttcat

SEQ ID NO: 2806782 - DNA, 25 bp, Homo sapien
tgtgtagggatcatgccagcagcca

SEQ ID NO: 2806783 - DNA, 25 bp, Homo sapien
aaaagctatctccttgtcctcagag

SEQ ID NO: 2806784 - DNA, 25 bp, Homo sapien
gaacagccctagaacgcttctctgg

SEQ ID NO: 2806785 - DNA, 25 bp, Homo sapien
tgagtacagaagataaaggcacacc

SEQ ID NO: 2806786 - DNA, 25 bp, Homo sapien
tggtcttctcttgccattacttgaa

SEQ ID NO: 2806787 - DNA, 25 bp, Homo sapien
tccaactgcgtctctctctagcatc

SEQ ID NO: 2806788 - DNA, 25 bp, Homo sapien
tctagcatcttttacgagctggtga

SEQ ID NO: 2806789 - DNA, 25 bp, Homo sapien
tctggtttctaccacagggccttgg

SEQ ID NO: 2806790 - DNA, 25 bp, Homo sapien
ttccagcggggtttagtttctggca

SEQ ID NO: 2806791 - DNA, 25 bp, Homo sapien
ggcttgcagacgggtactttgtcct

SEQ ID NO: 2806792 - DNA, 25 bp, Homo sapien
gcttgcagacgggtactttgtcctc

SEQ ID NO: 2806793 - DNA, 25 bp, Homo sapien
tccagcggggtttagtttctggcaa

SEQ ID NO: 2806794 - DNA, 25 bp, Homo sapien
ccaagtgtggataaaagtgtctttc

SEQ ID NO: 2806795 - DNA, 25 bp, Homo sapien
acgtccaagtgtggataaaagtgtc

SEQ ID NO: 2806796 - DNA, 25 bp, Homo sapien
cgtccaagtgtggataaaagtgtct

SEQ ID NO: 2806797 - DNA, 25 bp, Homo sapien
tcacgtccaagtgtggataaaagtg

SEQ ID NO: 2806798 - DNA, 25 bp, Homo sapien
catctacttgcaatctggaagaaca

SEQ ID NO: 2806799 - DNA, 25 bp, Homo sapien
gaacagacttcacactctttcaaaa

SEQ ID NO: 2806800 - DNA, 25 bp, Homo sapien
ttctgtgtagctcaactgttgttgt

SEQ ID NO: 2806801 - DNA, 25 bp, Homo sapien
gatgccttttacaccattgagagcc

SEQ ID NO: 2806802 - DNA, 25 bp, Homo sapien
gcacccagcctcaaacttctttttc

SEQ ID NO: 2806803 - DNA, 25 bp, Homo sapien
ggctggagtgcgtgatctcgtctca

SEQ ID NO: 2806804 - DNA, 25 bp, Homo sapien
ccgaccttgtgatacacccgcttca

SEQ ID NO: 2806805 - DNA, 25 bp, Homo sapien
gctggagtgcgtgatctcgtctcac

SEQ ID NO: 2806806 - DNA, 25 bp, Homo sapien
cattgacttgttctgcaaagggagg

SEQ ID NO: 2806807 - DNA, 25 bp, Homo sapien
tctagcaagattggtcgcctgcagg

SEQ ID NO: 2806808 - DNA, 25 bp, Homo sapien
cagagtcaagtcatgagagcaagtc

SEQ ID NO: 2806809 - DNA, 25 bp, Homo sapien
gcagggcaccaagtaagaagaacag

SEQ ID NO: 2806810 - DNA, 25 bp, Homo sapien
aattcccataataggcaaacaaaag

SEQ ID NO: 2806811 - DNA, 25 bp, Homo sapien
tcccataataggcaaacaaaaggga

SEQ ID NO: 2806812 - DNA, 25 bp, Homo sapien
attcccataataggcaaacaaaagg

SEQ ID NO: 2806813 - DNA, 25 bp, Homo sapien
aaataattctattatttcacaatga

SEQ ID NO: 2806814 - DNA, 25 bp, Homo sapien
actgttacaatatttctcgctgaat

SEQ ID NO: 2806815 - DNA, 25 bp, Homo sapien
gaatctagtgatgcgtttgcttttt

SEQ ID NO: 2806816 - DNA, 25 bp, Homo sapien
tgctgtgcaaattggaccgtagccc

SEQ ID NO: 2806817 - DNA, 25 bp, Homo sapien
caaattggaccgtagcccagaaaag

SEQ ID NO: 2806818 - DNA, 25 bp, Homo sapien
tggcatcctctatagagcccccaat

SEQ ID NO: 2806819 - DNA, 25 bp, Homo sapien
gcatcctctatagagcccccaatgt

SEQ ID NO: 2806820 - DNA, 25 bp, Homo sapien
gatggcatcctctatagagccccca

SEQ ID NO: 2806821 - DNA, 25 bp, Homo sapien
attgatggcatcctctatagagccc

SEQ ID NO: 2806822 - DNA, 25 bp, Homo sapien
caagatccgattatagagctgcaaa

SEQ ID NO: 2806823 - DNA, 25 bp, Homo sapien
ttcccacactgtagaggtcccggag

SEQ ID NO: 2806824 - DNA, 25 bp, Homo sapien
tatctttttgtaactgtttcccaca

SEQ ID NO: 2806825 - DNA, 25 bp, Homo sapien
ccggagatcccagaacatccaagat

SEQ ID NO: 2806826 - DNA, 25 bp, Homo sapien
ggcagtctaggtaacaccatacagt

SEQ ID NO: 2806827 - DNA, 25 bp, Homo sapien
ggctagctactcagatttaatggaa

SEQ ID NO: 2806828 - DNA, 25 bp, Homo sapien
tgatcgcccttttcagagagcacag

SEQ ID NO: 2806829 - DNA, 25 bp, Homo sapien
tccccaaacgacatgaaatagactg

SEQ ID NO: 2806830 - DNA, 25 bp, Homo sapien
taatttcaaggtctgttgccctgaa

SEQ ID NO: 2806831 - DNA, 25 bp, Homo sapien
tatacacttgcttcctagataactg

SEQ ID NO: 2806832 - DNA, 25 bp, Homo sapien
gaactcatcagtgtgcgacaaaaat

SEQ ID NO: 2806833 - DNA, 25 bp, Homo sapien
tcatgatcaagacagagggaactca

SEQ ID NO: 2806834 - DNA, 25 bp, Homo sapien
aaggataaatgggtctatctgcaca

SEQ ID NO: 2806835 - DNA, 25 bp, Homo sapien
gaagagcccaccagtacttggaaac

SEQ ID NO: 2806836 - DNA, 25 bp, Homo sapien
cactcttgagggttaacagatacta

SEQ ID NO: 2806837 - DNA, 25 bp, Homo sapien
tcctggtgaatcacagactgttcct

SEQ ID NO: 2806838 - DNA, 25 bp, Homo sapien
gcaacattcttagtgtttatccttg

SEQ ID NO: 2806839 - DNA, 25 bp, Homo sapien
tctggaaaatgtgtgcactaaaaag

SEQ ID NO: 2806840 - DNA, 25 bp, Homo sapien
tagaatataagatggtaactgcaac

SEQ ID NO: 2806841 - DNA, 25 bp, Homo sapien
tgagtactaacaacacagttcatac

SEQ ID NO: 2806842 - DNA, 25 bp, Homo sapien
aatgtcaccagtcataatagcaatg

SEQ ID NO: 2806843 - DNA, 25 bp, Homo sapien
atgtcaccagtcataatagcaatga

SEQ ID NO: 2806844 - DNA, 25 bp, Homo sapien
ttttttcagaatccacgactaccat

SEQ ID NO: 2806845 - DNA, 25 bp, Homo sapien
cttctttgttaggaagtggaacatg

SEQ ID NO: 2806846 - DNA, 25 bp, Homo sapien
tgtaacttcttggatgcaaaaatac

SEQ ID NO: 2806847 - DNA, 25 bp, Homo sapien
aagtcaatcacagtcatatttgtac

SEQ ID NO: 2806848 - DNA, 25 bp, Homo sapien
gaaagaatagtgtatgcctcacaga

SEQ ID NO: 2806849 - DNA, 25 bp, Homo sapien
tatatactgcactggttctagaaac

SEQ ID NO: 2806850 - DNA, 25 bp, Homo sapien
tctaggcagaaggtacaatggtgtt

SEQ ID NO: 2806851 - DNA, 25 bp, Homo sapien
cctccagaagctgacagggaactat

SEQ ID NO: 2806852 - DNA, 25 bp, Homo sapien
ttcactgaagaactcccgatttaga

SEQ ID NO: 2806853 - DNA, 25 bp, Homo sapien
tttagactgaggcatctagaccaaa

SEQ ID NO: 2806854 - DNA, 25 bp, Homo sapien
gcatctagaccaaataggaagcaag

SEQ ID NO: 2806855 - DNA, 25 bp, Homo sapien
ccaaataggaagcaagagtatgttc

SEQ ID NO: 2806856 - DNA, 25 bp, Homo sapien
cagttactcaaggtgggatagatca

SEQ ID NO: 2806857 - DNA, 25 bp, Homo sapien
tctgtaggcactgaagaatcgtttc

SEQ ID NO: 2806858 - DNA, 25 bp, Homo sapien
gagacttttatatgccgaaagggca

SEQ ID NO: 2806859 - DNA, 25 bp, Homo sapien
caattaggacactacaagagactgc

SEQ ID NO: 2806860 - DNA, 25 bp, Homo sapien
ggtccattacaagaagcagttaagt

SEQ ID NO: 2806861 - DNA, 25 bp, Homo sapien
catgtgtagcatcaggaaaacctgg

SEQ ID NO: 2806862 - DNA, 25 bp, Homo sapien
catgtaggttgagggagaagccatt

SEQ ID NO: 2806863 - DNA, 25 bp, Homo sapien
caaaaaagtcttgcaagtcatttgg

SEQ ID NO: 2806864 - DNA, 25 bp, Homo sapien
tgtcaaattcttctatcatagctcg

SEQ ID NO: 2806865 - DNA, 25 bp, Homo sapien
cacgtcgcaaattcctcaagcttat

SEQ ID NO: 2806866 - DNA, 25 bp, Homo sapien
tttcacccaattctctagcaacacg

SEQ ID NO: 2806867 - DNA, 25 bp, Homo sapien
tcatagctcgaagttcttcatcact

SEQ ID NO: 2806868 - DNA, 25 bp, Homo sapien
tgagtatttcttcatggggatctct

SEQ ID NO: 2806869 - DNA, 25 bp, Homo sapien
tcttcatggggatctctttccaata

SEQ ID NO: 2806870 - DNA, 25 bp, Homo sapien
tagtttaaatgccttgagtatttct

SEQ ID NO: 2806871 - DNA, 25 bp, Homo sapien
atagtttaaatgccttgagtatttc

SEQ ID NO: 2806872 - DNA, 25 bp, Homo sapien
tttcagtcccacaaacttaatcagg

SEQ ID NO: 2806873 - DNA, 25 bp, Homo sapien
gcaacatttacagctagattccata

SEQ ID NO: 2806874 - DNA, 25 bp, Homo sapien
tgttggactccaaactcattccact

SEQ ID NO: 2806875 - DNA, 25 bp, Homo sapien
cataccagttagacatgttggactc

SEQ ID NO: 2806876 - DNA, 25 bp, Homo sapien
gacaaaactataaatctcagagcaa

SEQ ID NO: 2806877 - DNA, 25 bp, Homo sapien
ttgatcacccttcaagttttatcac

SEQ ID NO: 2806878 - DNA, 25 bp, Homo sapien
tataaaaagctacacaatagttcct

SEQ ID NO: 2806879 - DNA, 25 bp, Homo sapien
caatagttccttggttagaatcttc

SEQ ID NO: 2806880 - DNA, 25 bp, Homo sapien
tttaagaatcttcagtacatcagct

SEQ ID NO: 2806881 - DNA, 25 bp, Homo sapien
tctttaagaatcttcagtacatcag

SEQ ID NO: 2806882 - DNA, 25 bp, Homo sapien
ctttaagaatcttcagtacatcagc

SEQ ID NO: 2806883 - DNA, 25 bp, Homo sapien
tttgttttgtccactacaagctcac

SEQ ID NO: 2806884 - DNA, 25 bp, Homo sapien
ctgtatcaaatagttcaaaagcatc

SEQ ID NO: 2806885 - DNA, 25 bp, Homo sapien
tctgttcctcagacagttctcttct

SEQ ID NO: 2806886 - DNA, 25 bp, Homo sapien
tttaattcatgataatctattgctt

SEQ ID NO: 2806887 - DNA, 25 bp, Homo sapien
gacgttcctctcaagaacgatttta

SEQ ID NO: 2806888 - DNA, 25 bp, Homo sapien
aaggcagcaagacgcccacagccgt

SEQ ID NO: 2806889 - DNA, 25 bp, Homo sapien
tatctcttcgcacagagacgttcct

SEQ ID NO: 2806890 - DNA, 25 bp, Homo sapien
gccgttcaacagacacgaacgacct

SEQ ID NO: 2806891 - DNA, 25 bp, Homo sapien
gattggctcgatgcgtttttccccg

SEQ ID NO: 2806892 - DNA, 25 bp, Homo sapien
tgtgggccgccattcagaaactgga

SEQ ID NO: 2806893 - DNA, 25 bp, Homo sapien
agaaactggatggacagcttcggcg

SEQ ID NO: 2806894 - DNA, 25 bp, Homo sapien
gggcgctgtgttcctctctcgtaaa

SEQ ID NO: 2806895 - DNA, 25 bp, Homo sapien
gaaggctatgcatgtttctcaccat

SEQ ID NO: 2806896 - DNA, 25 bp, Homo sapien
ctccagcccactcagatttatgatt

SEQ ID NO: 2806897 - DNA, 25 bp, Homo sapien
tgatggagagcttcttagcttaatt

SEQ ID NO: 2806898 - DNA, 25 bp, Homo sapien
cagtgatgatgaaggctatgcatgt

SEQ ID NO: 2806899 - DNA, 25 bp, Homo sapien
gccacaatcttctactggcaagtag

SEQ ID NO: 2806900 - DNA, 25 bp, Homo sapien
taagataactaggtcaatggaaaca

SEQ ID NO: 2806901 - DNA, 25 bp, Homo sapien
tgctatgaacttagagtacaacaat

SEQ ID NO: 2806902 - DNA, 25 bp, Homo sapien
caataagaacaaatagactcctcaa

SEQ ID NO: 2806903 - DNA, 25 bp, Homo sapien
gattatttgtagttgccctgaacca

SEQ ID NO: 2806904 - DNA, 25 bp, Homo sapien
tcttggcacacacggcatcttggaa

SEQ ID NO: 2806905 - DNA, 25 bp, Homo sapien
gcatgtggcagttcagcttgtctcc

SEQ ID NO: 2806906 - DNA, 25 bp, Homo sapien
tgaccatcatagagaaatgcccatg

SEQ ID NO: 2806907 - DNA, 25 bp, Homo sapien
taaacttgcaagagatcgcatggca

SEQ ID NO: 2806908 - DNA, 25 bp, Homo sapien
tgttacacgtagagctaaacttgca

SEQ ID NO: 2806909 - DNA, 25 bp, Homo sapien
ggcgaggtcctagaatttgttacac

SEQ ID NO: 2806910 - DNA, 25 bp, Homo sapien
tagttagaagccaatcgaaaaagcc

SEQ ID NO: 2806911 - DNA, 25 bp, Homo sapien
tgatccatcatacacgacgtctcca

SEQ ID NO: 2806912 - DNA, 25 bp, Homo sapien
tagtcacttatcctgctgtatggga

SEQ ID NO: 2806913 - DNA, 25 bp, Homo sapien
gaagagaatctttcggtctttgtca

SEQ ID NO: 2806914 - DNA, 25 bp, Homo sapien
cggtctttgtcatgtaagcaaatac

SEQ ID NO: 2806915 - DNA, 25 bp, Homo sapien
ctgtctgtcaccaaggttgatcaca

SEQ ID NO: 2806916 - DNA, 25 bp, Homo sapien
ctgtcaccaaggttgatcacatccc

SEQ ID NO: 2806917 - DNA, 25 bp, Homo sapien
tctgtcaccaaggttgatcacatcc

SEQ ID NO: 2806918 - DNA, 25 bp, Homo sapien
aacagtgagctgtctgtcaccaagg

SEQ ID NO: 2806919 - DNA, 25 bp, Homo sapien
tactgttaagagaactagggcagct

SEQ ID NO: 2806920 - DNA, 25 bp, Homo sapien
tatatgcagcctacaagaaagaaac

SEQ ID NO: 2806921 - DNA, 25 bp, Homo sapien
tacttggagagttcaatattcttct

SEQ ID NO: 2806922 - DNA, 25 bp, Homo sapien
cataatgtaatctctagtgcaagca

SEQ ID NO: 2806923 - DNA, 25 bp, Homo sapien
cattacattgtatgcgtttatcaaa

SEQ ID NO: 2806924 - DNA, 25 bp, Homo sapien
gaaaggtttccaatcgcattagcgg

SEQ ID NO: 2806925 - DNA, 25 bp, Homo sapien
gaatctctacacgatgccagagctg

SEQ ID NO: 2806926 - DNA, 25 bp, Homo sapien
tctgctcactacgaaagctcctgga

SEQ ID NO: 2806927 - DNA, 25 bp, Homo sapien
gactctctaaggctacaggtgggaa

SEQ ID NO: 2806928 - DNA, 25 bp, Homo sapien
taatcccctttatggccacgcaagt

SEQ ID NO: 2806929 - DNA, 25 bp, Homo sapien
acagaagtggctctgcgaggtgcca

SEQ ID NO: 2806930 - DNA, 25 bp, Homo sapien
aataccctcccttaacgagagcgcg

SEQ ID NO: 2806931 - DNA, 25 bp, Homo sapien
gcaagtctgcaacatgcggcactcg

SEQ ID NO: 2806932 - DNA, 25 bp, Homo sapien
accacctcgctatcggaaagccagg

SEQ ID NO: 2806933 - DNA, 25 bp, Homo sapien
cggtctcaaagttgtccccgcgagc

SEQ ID NO: 2806934 - DNA, 25 bp, Homo sapien
actgccacgcggtcgaactggtaga

SEQ ID NO: 2806935 - DNA, 25 bp, Homo sapien
gtggtgcactgccacgcggtcgaac

SEQ ID NO: 2806936 - DNA, 25 bp, Homo sapien
cagaagataccatcgcctagagact

SEQ ID NO: 2806937 - DNA, 25 bp, Homo sapien
cctagagacttgtgggcgtaccact

SEQ ID NO: 2806938 - DNA, 25 bp, Homo sapien
cacggttgcccgactcgtagaaacg

SEQ ID NO: 2806939 - DNA, 25 bp, Homo sapien
cgcaccagccagatgttggcacggt

SEQ ID NO: 2806940 - DNA, 25 bp, Homo sapien
cagaatggagactcaggtggcgacc

SEQ ID NO: 2806941 - DNA, 25 bp, Homo sapien
cagccgcaccacgagagagctttaa

SEQ ID NO: 2806942 - DNA, 25 bp, Homo sapien
aggaaggacgcagaccgacgctgcc

SEQ ID NO: 2806943 - DNA, 25 bp, Homo sapien
ggtgggaagagctagaaccgcccac

SEQ ID NO: 2806944 - DNA, 25 bp, Homo sapien
ggatttgcaggttgctttaccagca

SEQ ID NO: 2806945 - DNA, 25 bp, Homo sapien
tatactagttgcaagaacaagcagg

SEQ ID NO: 2806946 - DNA, 25 bp, Homo sapien
gcagataaccacttgaaccaggcaa

SEQ ID NO: 2806947 - DNA, 25 bp, Homo sapien
tagtcttgcagatagcagggcagcc

SEQ ID NO: 2806948 - DNA, 25 bp, Homo sapien
tatgaactccataacttcctaggag

SEQ ID NO: 2806949 - DNA, 25 bp, Homo sapien
gaaaatactgattacctgagcaaca

SEQ ID NO: 2806950 - DNA, 25 bp, Homo sapien
tatgatctaacagtgcaatatgcac

SEQ ID NO: 2806951 - DNA, 25 bp, Homo sapien
ggccagcagagtgtgtaaccatttt

SEQ ID NO: 2806952 - DNA, 25 bp, Homo sapien
tttcttcaacagacctcaaaggcag

SEQ ID NO: 2806953 - DNA, 25 bp, Homo sapien
taaagggtctgtcctaaagaaagca

SEQ ID NO: 2806954 - DNA, 25 bp, Homo sapien
tacttagccagactgtagccgactc

SEQ ID NO: 2806955 - DNA, 25 bp, Homo sapien
tagcctatgtaacgaatctgattgg

SEQ ID NO: 2806956 - DNA, 25 bp, Homo sapien
gctgttaaggccgatactacctcat

SEQ ID NO: 2806957 - DNA, 25 bp, Homo sapien
tactatttgttctatgtctcggtct

SEQ ID NO: 2806958 - DNA, 25 bp, Homo sapien
aacattatcactacagctgtccacc

SEQ ID NO: 2806959 - DNA, 25 bp, Homo sapien
ttccccagtctgctccataataggg

SEQ ID NO: 2806960 - DNA, 25 bp, Homo sapien
cctgttgttcggaagagtattgaac

SEQ ID NO: 2806961 - DNA, 25 bp, Homo sapien
tttggaggacaaagtgtttcggtca

SEQ ID NO: 2806962 - DNA, 25 bp, Homo sapien
tgaatgacgtgaagtctgtcttcct

SEQ ID NO: 2806963 - DNA, 25 bp, Homo sapien
agtgtttcggtcaaggaactgaact

SEQ ID NO: 2806964 - DNA, 25 bp, Homo sapien
ctgatgagattgttaactctcttga

SEQ ID NO: 2806965 - DNA, 25 bp, Homo sapien
tgatcactgatgagattgttaactc

SEQ ID NO: 2806966 - DNA, 25 bp, Homo sapien
gattgttaactctcttgatatctgc

SEQ ID NO: 2806967 - DNA, 25 bp, Homo sapien
tgagattgttaactctcttgatatc

SEQ ID NO: 2806968 - DNA, 25 bp, Homo sapien
gatggacgatggcattcattgagaa

SEQ ID NO: 2806969 - DNA, 25 bp, Homo sapien
gcttagatttctggtttggtcaact

SEQ ID NO: 2806970 - DNA, 25 bp, Homo sapien
tgattcatgtcagagagataaagtg

SEQ ID NO: 2806971 - DNA, 25 bp, Homo sapien
gataaagtgggtctagtatgaagct

SEQ ID NO: 2806972 - DNA, 25 bp, Homo sapien
aaggagcactgcttatcttaactaa

SEQ ID NO: 2806973 - DNA, 25 bp, Homo sapien
tcccactatagtggctgatatgtcc

SEQ ID NO: 2806974 - DNA, 25 bp, Homo sapien
tatagtggctgatatgtccccaccc

SEQ ID NO: 2806975 - DNA, 25 bp, Homo sapien
catccctttcccactatagtggctg

SEQ ID NO: 2806976 - DNA, 25 bp, Homo sapien
ggatcgaagttcatacacttcagca

SEQ ID NO: 2806977 - DNA, 25 bp, Homo sapien
gatgtacttcttcggactttctctt

SEQ ID NO: 2806978 - DNA, 25 bp, Homo sapien
aatgtcgtcaagtctatctcttgat

SEQ ID NO: 2806979 - DNA, 25 bp, Homo sapien
tatcactgtctgaacaatttccaaa

SEQ ID NO: 2806980 - DNA, 25 bp, Homo sapien
ctggaagaggaaaactacgattctg

SEQ ID NO: 2806981 - DNA, 25 bp, Homo sapien
ggaaaactacgattctgatgcctcc

SEQ ID NO: 2806982 - DNA, 25 bp, Homo sapien
aagaggaaaactacgattctgatgc

SEQ ID NO: 2806983 - DNA, 25 bp, Homo sapien
agaggaaaactacgattctgatgcc

SEQ ID NO: 2806984 - DNA, 25 bp, Homo sapien
aaattagctgcccaggtaatccagc

SEQ ID NO: 2806985 - DNA, 25 bp, Homo sapien
tatcgtcagcgaagattacgtctca

SEQ ID NO: 2806986 - DNA, 25 bp, Homo sapien
gatgccgtcagcgaatatttcacgc

SEQ ID NO: 2806987 - DNA, 25 bp, Homo sapien
tcagtttccccgacagtgtgacaag

SEQ ID NO: 2806988 - DNA, 25 bp, Homo sapien
gttcatggccgagcctctgctttgg

SEQ ID NO: 2806989 - DNA, 25 bp, Homo sapien
agaagatggccaaaaggtccgccgc

SEQ ID NO: 2806990 - DNA, 25 bp, Homo sapien
ggagcactctgcgagaagatggcca

SEQ ID NO: 2806991 - DNA, 25 bp, Homo sapien
cgctgtcccgggtaagttcatggcc

SEQ ID NO: 2806992 - DNA, 25 bp, Homo sapien
gtacgccgccgccacgtccgcaaac

SEQ ID NO: 2806993 - DNA, 25 bp, Homo sapien
ggccgtacgccgccgccacgtccgc

SEQ ID NO: 2806994 - DNA, 25 bp, Homo sapien
cgcctctgccgccaacgtctccgcc

SEQ ID NO: 2806995 - DNA, 25 bp, Homo sapien
tgccgccaacgtctccgccttccgg

SEQ ID NO: 2806996 - DNA, 25 bp, Homo sapien
gaggcgtggctcaggatgtgtcggg

SEQ ID NO: 2806997 - DNA, 25 bp, Homo sapien
tggctgcgtctttgtccagcgtcca

SEQ ID NO: 2806998 - DNA, 25 bp, Homo sapien
actgtcgggtgcaccctgaggacga

SEQ ID NO: 2806999 - DNA, 25 bp, Homo sapien
acactgcgctggcagagactgtcgg

SEQ ID NO: 2807000 - DNA, 25 bp, Homo sapien
cagtagttgactgatacttccggta

SEQ ID NO: 2807001 - DNA, 25 bp, Homo sapien
aagcagttagcgtgaattttggcca

SEQ ID NO: 2807002 - DNA, 25 bp, Homo sapien
caagttccaaaaagccggccagtag

SEQ ID NO: 2807003 - DNA, 25 bp, Homo sapien
taaattgatgcaacctgttaggcaa

SEQ ID NO: 2807004 - DNA, 25 bp, Homo sapien
ctcccatgagccttgttcacctttt

SEQ ID NO: 2807005 - DNA, 25 bp, Homo sapien
ccatgagccttgttcacctttttct

SEQ ID NO: 2807006 - DNA, 25 bp, Homo sapien
tcacctttttctcaatatctgccat

SEQ ID NO: 2807007 - DNA, 25 bp, Homo sapien
ttcacctttttctcaatatctgcca

SEQ ID NO: 2807008 - DNA, 25 bp, Homo sapien
aaccaaccaaggcttgagatgctgc

SEQ ID NO: 2807009 - DNA, 25 bp, Homo sapien
cttgagatgctgctcacaccttaac

SEQ ID NO: 2807010 - DNA, 25 bp, Homo sapien
gatgctgctcacaccttaactcctt

SEQ ID NO: 2807011 - DNA, 25 bp, Homo sapien
aaatagaaccaaccaaggcttgaga

SEQ ID NO: 2807012 - DNA, 25 bp, Homo sapien
agattctcaggctgaaagtagtctt

SEQ ID NO: 2807013 - DNA, 25 bp, Homo sapien
ccaaaagcccaagaatattcatctt

SEQ ID NO: 2807014 - DNA, 25 bp, Homo sapien
tggcagtaccaacacatagctctgt

SEQ ID NO: 2807015 - DNA, 25 bp, Homo sapien
tgttaaacggattctctgatccctt

SEQ ID NO: 2807016 - DNA, 25 bp, Homo sapien
ccgcggcctgcgggtaatggggcat

SEQ ID NO: 2807017 - DNA, 25 bp, Homo sapien
ggcgggccacagccgggcccaggga

SEQ ID NO: 2807018 - DNA, 25 bp, Homo sapien
agggcgggccacagccgggcccagg

SEQ ID NO: 2807019 - DNA, 25 bp, Homo sapien
ggagggcgggccacagccgggccca

SEQ ID NO: 2807020 - DNA, 25 bp, Homo sapien
ttgaaaagacttggcgctaagccct

SEQ ID NO: 2807021 - DNA, 25 bp, Homo sapien
catacagagtacgtgctgacccgtg

SEQ ID NO: 2807022 - DNA, 25 bp, Homo sapien
cataggcagtggagcgtttctcctc

SEQ ID NO: 2807023 - DNA, 25 bp, Homo sapien
gaccctgtgggctaaagatagcact

SEQ ID NO: 2807024 - DNA, 25 bp, Homo sapien
ggttttccgcctctgaatgacatgg

SEQ ID NO: 2807025 - DNA, 25 bp, Homo sapien
cctctgaatgacatggagataagaa

SEQ ID NO: 2807026 - DNA, 25 bp, Homo sapien
ccttgtgaactggttttccgcctct

SEQ ID NO: 2807027 - DNA, 25 bp, Homo sapien
caccttgtgaactggttttccgcct

SEQ ID NO: 2807028 - DNA, 25 bp, Homo sapien
ggtaaaagatgaagctaataaggtc

SEQ ID NO: 2807029 - DNA, 25 bp, Homo sapien
gctatggcattgacaaggtaaaaga

SEQ ID NO: 2807030 - DNA, 25 bp, Homo sapien
ggtcaatgcgttcattcaattctgc

SEQ ID NO: 2807031 - DNA, 25 bp, Homo sapien
caattctgcactagtaatgtttgtc

SEQ ID NO: 2807032 - DNA, 25 bp, Homo sapien
tgtactatccatcgcaaaataggag

SEQ ID NO: 2807033 - DNA, 25 bp, Homo sapien
taacagagggctttaaagagtggca

SEQ ID NO: 2807034 - DNA, 25 bp, Homo sapien
cagtcctgtgacgattacctattcc

SEQ ID NO: 2807035 - DNA, 25 bp, Homo sapien
gtaccagtcctgtccacgtgtggaa

SEQ ID NO: 2807036 - DNA, 25 bp, Homo sapien
ttgaccagattcttcattttgctga

SEQ ID NO: 2807037 - DNA, 25 bp, Homo sapien
taacagtgcctctcacgtgtgtatg

SEQ ID NO: 2807038 - DNA, 25 bp, Homo sapien
tcctggactagagctagggaaaaat

SEQ ID NO: 2807039 - DNA, 25 bp, Homo sapien
ccaaaatataaggagacaaaattca

SEQ ID NO: 2807040 - DNA, 25 bp, Homo sapien
catataaaccctgcgctgaagaagt

SEQ ID NO: 2807041 - DNA, 25 bp, Homo sapien
tactacaaaatgagaggacttgccc

SEQ ID NO: 2807042 - DNA, 25 bp, Homo sapien
tgtggcccaaatacagacagtaagg

SEQ ID NO: 2807043 - DNA, 25 bp, Homo sapien
gaactagaaagggaccaatgtggcc

SEQ ID NO: 2807044 - DNA, 25 bp, Homo sapien
tgtgtggactcactctgggtagcca

SEQ ID NO: 2807045 - DNA, 25 bp, Homo sapien
tggtgcatctgaagtctgtatcgtc

SEQ ID NO: 2807046 - DNA, 25 bp, Homo sapien
ggtgaagacacagcctaacagctct

SEQ ID NO: 2807047 - DNA, 25 bp, Homo sapien
gtgaatgacatagatgcttgcccca

SEQ ID NO: 2807048 - DNA, 25 bp, Homo sapien
tgtgcttcaggctttcttaaatcag

SEQ ID NO: 2807049 - DNA, 25 bp, Homo sapien
gaacactgaatccttccagagaacc

SEQ ID NO: 2807050 - DNA, 25 bp, Homo sapien
ctgccctgagttgaacactgaatcc

SEQ ID NO: 2807051 - DNA, 25 bp, Homo sapien
tgagttgaacactgaatccttccag

SEQ ID NO: 2807052 - DNA, 25 bp, Homo sapien
ttcaagaaagcccatactgctccca

SEQ ID NO: 2807053 - DNA, 25 bp, Homo sapien
cctctgttatatggctcttcttcct

SEQ ID NO: 2807054 - DNA, 25 bp, Homo sapien
taactgggaacttcaagaaagccca

SEQ ID NO: 2807055 - DNA, 25 bp, Homo sapien
agcctctgttatatggctcttcttc

SEQ ID NO: 2807056 - DNA, 25 bp, Homo sapien
catggtatttcaggccatcgaagag

SEQ ID NO: 2807057 - DNA, 25 bp, Homo sapien
ttcaggccatcgaagaggattttta

SEQ ID NO: 2807058 - DNA, 25 bp, Homo sapien
caggccatcgaagaggatttttatg

SEQ ID NO: 2807059 - DNA, 25 bp, Homo sapien
atttcaggccatcgaagaggatttt

SEQ ID NO: 2807060 - DNA, 25 bp, Homo sapien
gacagtcgagttctcttctcctcct

SEQ ID NO: 2807061 - DNA, 25 bp, Homo sapien
tgagttgcagtaactagacctctgc

SEQ ID NO: 2807062 - DNA, 25 bp, Homo sapien
attcctgagtggaatgttacagggc

SEQ ID NO: 2807063 - DNA, 25 bp, Homo sapien
gcaggagttgatgggagtgggcccc

SEQ ID NO: 2807064 - DNA, 25 bp, Homo sapien
gtagcccttagtttgtgcatcatcc

SEQ ID NO: 2807065 - DNA, 25 bp, Homo sapien
agcccttagtttgtgcatcatccat

SEQ ID NO: 2807066 - DNA, 25 bp, Homo sapien
tagcccttagtttgtgcatcatcca

SEQ ID NO: 2807067 - DNA, 25 bp, Homo sapien
gtcctaagtcaaacagataagccct

SEQ ID NO: 2807068 - DNA, 25 bp, Homo sapien
tgtttcatatgaggataattgtcct

SEQ ID NO: 2807069 - DNA, 25 bp, Homo sapien
tgtgataccatttgttaatgtttca

SEQ ID NO: 2807070 - DNA, 25 bp, Homo sapien
taagccctatcaaaagtgtgtactg

SEQ ID NO: 2807071 - DNA, 25 bp, Homo sapien
ccatgaagtcccacaaagcaatgac

SEQ ID NO: 2807072 - DNA, 25 bp, Homo sapien
ctgacccacagagtgtagaccatga

SEQ ID NO: 2807073 - DNA, 25 bp, Homo sapien
acagagtgtagaccatgaagtccca

SEQ ID NO: 2807074 - DNA, 25 bp, Homo sapien
cccacagagtgtagaccatgaagtc

SEQ ID NO: 2807075 - DNA, 25 bp, Homo sapien
ctttccacctcaatctgttctacct

SEQ ID NO: 2807076 - DNA, 25 bp, Homo sapien
tccacctcaatctgttctacctcac

SEQ ID NO: 2807077 - DNA, 25 bp, Homo sapien
actctttccacctcaatctgttcta

SEQ ID NO: 2807078 - DNA, 25 bp, Homo sapien
cactctttccacctcaatctgttct

SEQ ID NO: 2807079 - DNA, 25 bp, Homo sapien
ctctgataacgagagcaaggtcttc

SEQ ID NO: 2807080 - DNA, 25 bp, Homo sapien
acctgagcctgatggggttttggcc

SEQ ID NO: 2807081 - DNA, 25 bp, Homo sapien
gactctgataacgagagcaaggtct

SEQ ID NO: 2807082 - DNA, 25 bp, Homo sapien
ctgaagactctgataacgagagcaa

SEQ ID NO: 2807083 - DNA, 25 bp, Homo sapien
cacctgagatgacaccccttgcatc

SEQ ID NO: 2807084 - DNA, 25 bp, Homo sapien
acctgagatgacaccccttgcatcc

SEQ ID NO: 2807085 - DNA, 25 bp, Homo sapien
ccacctgagatgacaccccttgcat

SEQ ID NO: 2807086 - DNA, 25 bp, Homo sapien
cctgagatgacaccccttgcatcca

SEQ ID NO: 2807087 - DNA, 25 bp, Homo sapien
cccaaccagacaaattggagtcctg

SEQ ID NO: 2807088 - DNA, 25 bp, Homo sapien
tccataggtgatattcccaaccaga

SEQ ID NO: 2807089 - DNA, 25 bp, Homo sapien
cataggtgatattcccaaccagaca

SEQ ID NO: 2807090 - DNA, 25 bp, Homo sapien
aattggagtcctggtctcttgccca

SEQ ID NO: 2807091 - DNA, 25 bp, Homo sapien
ctacaacatgtcttccatcttcagc

SEQ ID NO: 2807092 - DNA, 25 bp, Homo sapien
catcttcagcatgtgacttccgagg

SEQ ID NO: 2807093 - DNA, 25 bp, Homo sapien
ttccatcttcagcatgtgacttccg

SEQ ID NO: 2807094 - DNA, 25 bp, Homo sapien
tacaacatgtcttccatcttcagca

SEQ ID NO: 2807095 - DNA, 25 bp, Homo sapien
tgtgccacacataggttcataaatg

SEQ ID NO: 2807096 - DNA, 25 bp, Homo sapien
tattggaggatagactttggtggac

SEQ ID NO: 2807097 - DNA, 25 bp, Homo sapien
ccctaactctatcagtattggagga

SEQ ID NO: 2807098 - DNA, 25 bp, Homo sapien
gacagtcccgtatctgtgccacaca

SEQ ID NO: 2807099 - DNA, 25 bp, Homo sapien
actgccacactgtatggtgtcaaca

SEQ ID NO: 2807100 - DNA, 25 bp, Homo sapien
tcactgccacactgtatggtgtcaa

SEQ ID NO: 2807101 - DNA, 25 bp, Homo sapien
tttcactgccacactgtatggtgtc

SEQ ID NO: 2807102 - DNA, 25 bp, Homo sapien
tcgtttcactgccacactgtatggt

SEQ ID NO: 2807103 - DNA, 25 bp, Homo sapien
tcattctgcttataattgatgtctt

SEQ ID NO: 2807104 - DNA, 25 bp, Homo sapien
ggcggtgaatgctgctcaatcttgc

SEQ ID NO: 2807105 - DNA, 25 bp, Homo sapien
cctgggcggtgaatgctgctcaatc

SEQ ID NO: 2807106 - DNA, 25 bp, Homo sapien
ggtgaatgctgctcaatcttgctat

SEQ ID NO: 2807107 - DNA, 25 bp, Homo sapien
aagtctaataaaatcctgcttttca

SEQ ID NO: 2807108 - DNA, 25 bp, Homo sapien
ctaagtctaataaaatcctgctttt

SEQ ID NO: 2807109 - DNA, 25 bp, Homo sapien
aataaaatcctgcttttcaggccca

SEQ ID NO: 2807110 - DNA, 25 bp, Homo sapien
ccttctaagtctaataaaatcctgc

SEQ ID NO: 2807111 - DNA, 25 bp, Homo sapien
tcgtacttgctcaaattatgactat

SEQ ID NO: 2807112 - DNA, 25 bp, Homo sapien
tgctcaaattatgactatgatgcat

SEQ ID NO: 2807113 - DNA, 25 bp, Homo sapien
cttttctcgtacttgctcaaattat

SEQ ID NO: 2807114 - DNA, 25 bp, Homo sapien
cttgctcaaattatgactatgatgc

SEQ ID NO: 2807115 - DNA, 25 bp, Homo sapien
gaaagtattatttacatcatttcca

SEQ ID NO: 2807116 - DNA, 25 bp, Homo sapien
ttttgctatctccagctattttgaa

SEQ ID NO: 2807117 - DNA, 25 bp, Homo sapien
tattttgaaagtattatttacatca

SEQ ID NO: 2807118 - DNA, 25 bp, Homo sapien
cattttgctatctccagctattttg

SEQ ID NO: 2807119 - DNA, 25 bp, Homo sapien
caatgcgaatgtcaggtgttatttc

SEQ ID NO: 2807120 - DNA, 25 bp, Homo sapien
ccagcttgtctgctatgaaagtgat

SEQ ID NO: 2807121 - DNA, 25 bp, Homo sapien
aagtgattttggattctgcagtgtc

SEQ ID NO: 2807122 - DNA, 25 bp, Homo sapien
gcttattactgcttccaatgcgaat

SEQ ID NO: 2807123 - DNA, 25 bp, Homo sapien
tcttgtacacaagtaaaagaacaga

SEQ ID NO: 2807124 - DNA, 25 bp, Homo sapien
aatcgagatttccaggagtgtgtcc

SEQ ID NO: 2807125 - DNA, 25 bp, Homo sapien
gaagagtaatcgagatttccaggag

SEQ ID NO: 2807126 - DNA, 25 bp, Homo sapien
agtaatcgagatttccaggagtgtg

SEQ ID NO: 2807127 - DNA, 25 bp, Homo sapien
gtatgatcccttttaagctgtataa

SEQ ID NO: 2807128 - DNA, 25 bp, Homo sapien
tataatttacactggggtgtgatgc

SEQ ID NO: 2807129 - DNA, 25 bp, Homo sapien
aatttacactggggtgtgatgccat

SEQ ID NO: 2807130 - DNA, 25 bp, Homo sapien
agtatgatcccttttaagctgtata

SEQ ID NO: 2807131 - DNA, 25 bp, Homo sapien
cacagtccagttgtagtttaagaga

SEQ ID NO: 2807132 - DNA, 25 bp, Homo sapien
tcaaatcttaggttgtgtgatagcc

SEQ ID NO: 2807133 - DNA, 25 bp, Homo sapien
tgtgatagcctgataccttccatgt

SEQ ID NO: 2807134 - DNA, 25 bp, Homo sapien
tagttaatctagaggcagtgctcca

SEQ ID NO: 2807135 - DNA, 25 bp, Homo sapien
gcaggccctgaagcactttgaaaat

SEQ ID NO: 2807136 - DNA, 25 bp, Homo sapien
cgtccctaattgtcttttgcctctg

SEQ ID NO: 2807137 - DNA, 25 bp, Homo sapien
tgtgttaccaacttatcgcctaccc

SEQ ID NO: 2807138 - DNA, 25 bp, Homo sapien
agtccacgggagtcttacagctgca

SEQ ID NO: 2807139 - DNA, 25 bp, Homo sapien
gacttggggtttcagcaactgtgcc

SEQ ID NO: 2807140 - DNA, 25 bp, Homo sapien
gcagacctccgagtgaccaggtttt

SEQ ID NO: 2807141 - DNA, 25 bp, Homo sapien
accaggttttcagtccaggatcttc

SEQ ID NO: 2807142 - DNA, 25 bp, Homo sapien
aggagaagggataagagagagagcc

SEQ ID NO: 2807143 - DNA, 25 bp, Homo sapien
gaatgcgtaatcagaagaatgccgt

SEQ ID NO: 2807144 - DNA, 25 bp, Homo sapien
gatgactgcattaagttctgagggt

SEQ ID NO: 2807145 - DNA, 25 bp, Homo sapien
ggagggactctccattcaagaatag

SEQ ID NO: 2807146 - DNA, 25 bp, Homo sapien
ggaatggtcccaaacagaatgcata

SEQ ID NO: 2807147 - DNA, 25 bp, Homo sapien
tctgagtcataggagcagcttgcaa

SEQ ID NO: 2807148 - DNA, 25 bp, Homo sapien
tgagtcataggagcagcttgcaaag

SEQ ID NO: 2807149 - DNA, 25 bp, Homo sapien
agtcataggagcagcttgcaaagaa

SEQ ID NO: 2807150 - DNA, 25 bp, Homo sapien
ttgggatctgagtcataggagcagc

SEQ ID NO: 2807151 - DNA, 25 bp, Homo sapien
gcagagggaaccacaagtccacggg

SEQ ID NO: 2807152 - DNA, 25 bp, Homo sapien
tgataagtaggattagcaggtagtc

SEQ ID NO: 2807153 - DNA, 25 bp, Homo sapien
cagcagagggaaccacaagtccacg

SEQ ID NO: 2807154 - DNA, 25 bp, Homo sapien
taagtaggattagcaggtagtcagg

SEQ ID NO: 2807155 - DNA, 25 bp, Homo sapien
gaaaagcattgacctggccaggaag

SEQ ID NO: 2807156 - DNA, 25 bp, Homo sapien
taagtcattggtgatgcaaaacagc

SEQ ID NO: 2807157 - DNA, 25 bp, Homo sapien
acaaagtgaccataccgccaggaag

SEQ ID NO: 2807158 - DNA, 25 bp, Homo sapien
gagcatggcagtatgcaaacccggt

SEQ ID NO: 2807159 - DNA, 25 bp, Homo sapien
gagtccctcataccacattgtctca

SEQ ID NO: 2807160 - DNA, 25 bp, Homo sapien
ctaggaggttacagcttaaaggaag

SEQ ID NO: 2807161 - DNA, 25 bp, Homo sapien
ttctaggaggttacagcttaaagga

SEQ ID NO: 2807162 - DNA, 25 bp, Homo sapien
agtccctcataccacattgtctcag

SEQ ID NO: 2807163 - DNA, 25 bp, Homo sapien
acagcctttttcacgcccgggagtg

SEQ ID NO: 2807164 - DNA, 25 bp, Homo sapien
ggaaatcagcaagtccacccagaat

SEQ ID NO: 2807165 - DNA, 25 bp, Homo sapien
aaatgtgttgccctatgaaggccag

SEQ ID NO: 2807166 - DNA, 25 bp, Homo sapien
cactgtggaaatgaatgggcatcct

SEQ ID NO: 2807167 - DNA, 25 bp, Homo sapien
gagccaccacttgggtgctcacttg

SEQ ID NO: 2807168 - DNA, 25 bp, Homo sapien
cacttgggtgctcacttgggtgttg

SEQ ID NO: 2807169 - DNA, 25 bp, Homo sapien
gaattggccttgattcagctgtcag

SEQ ID NO: 2807170 - DNA, 25 bp, Homo sapien
attcctcagaggcatagaattggcc

SEQ ID NO: 2807171 - DNA, 25 bp, Homo sapien
aatttcttctgccagatatcataaa

SEQ ID NO: 2807172 - DNA, 25 bp, Homo sapien
aaatttcttctgccagatatcataa

SEQ ID NO: 2807173 - DNA, 25 bp, Homo sapien
ttcttctgccagatatcataaatca

SEQ ID NO: 2807174 - DNA, 25 bp, Homo sapien
tctgccagatatcataaatcatctc

SEQ ID NO: 2807175 - DNA, 25 bp, Homo sapien
gatctcatggctgcgcacgatgact

SEQ ID NO: 2807176 - DNA, 25 bp, Homo sapien
ctcatggctgcgcacgatgactcat

SEQ ID NO: 2807177 - DNA, 25 bp, Homo sapien
atggctgcgcacgatgactcatgcc

SEQ ID NO: 2807178 - DNA, 25 bp, Homo sapien
cagatctcatggctgcgcacgatga

SEQ ID NO: 2807179 - DNA, 25 bp, Homo sapien
atagttgatcttccattaggaatga

SEQ ID NO: 2807180 - DNA, 25 bp, Homo sapien
gaatagttgatcttccattaggaat

SEQ ID NO: 2807181 - DNA, 25 bp, Homo sapien
tctttcttgaatagttgatcttcca

SEQ ID NO: 2807182 - DNA, 25 bp, Homo sapien
ttgaatagttgatcttccattagga

SEQ ID NO: 2807183 - DNA, 25 bp, Homo sapien
agagtttgataagcttccacttggg

SEQ ID NO: 2807184 - DNA, 25 bp, Homo sapien
ttcctggctatagttctttggagtt

SEQ ID NO: 2807185 - DNA, 25 bp, Homo sapien
aagagtttgataagcttccacttgg

SEQ ID NO: 2807186 - DNA, 25 bp, Homo sapien
taggaagctcaactcctctatacgt

SEQ ID NO: 2807187 - DNA, 25 bp, Homo sapien
cttttcctctaggaagctcaactcc

SEQ ID NO: 2807188 - DNA, 25 bp, Homo sapien
taactccaccactaggtctccaaag

SEQ ID NO: 2807189 - DNA, 25 bp, Homo sapien
gctcaactcctctatacgtaaagtt

SEQ ID NO: 2807190 - DNA, 25 bp, Homo sapien
aatccatgcttagcaccgtgttatt

SEQ ID NO: 2807191 - DNA, 25 bp, Homo sapien
atgcttagcaccgtgttatttcaag

SEQ ID NO: 2807192 - DNA, 25 bp, Homo sapien
cctcattcggtggaaaaatccatgc

SEQ ID NO: 2807193 - DNA, 25 bp, Homo sapien
ccatgcttagcaccgtgttatttca

SEQ ID NO: 2807194 - DNA, 25 bp, Homo sapien
gaatggcctgaccaatctgtggaga

SEQ ID NO: 2807195 - DNA, 25 bp, Homo sapien
tctgtctggcatgtaacaagtgctt

SEQ ID NO: 2807196 - DNA, 25 bp, Homo sapien
caatccctatagagagaatggcctg

SEQ ID NO: 2807197 - DNA, 25 bp, Homo sapien
cctcataaaggtgggccaacagcta

SEQ ID NO: 2807198 - DNA, 25 bp, Homo sapien
taacgcattctgtgtaagtgtggag

SEQ ID NO: 2807199 - DNA, 25 bp, Homo sapien
tatcatggcattcatgattcactgt

SEQ ID NO: 2807200 - DNA, 25 bp, Homo sapien
taagtgtggagtccttatcatggca

SEQ ID NO: 2807201 - DNA, 25 bp, Homo sapien
gtcaaaatccattaacgcattctgt

SEQ ID NO: 2807202 - DNA, 25 bp, Homo sapien
ctcggtcgggattcaaaagcagtga

SEQ ID NO: 2807203 - DNA, 25 bp, Homo sapien
tcctggcagaggattaacacgctga

SEQ ID NO: 2807204 - DNA, 25 bp, Homo sapien
gacaggactgctctgctattcagga

SEQ ID NO: 2807205 - DNA, 25 bp, Homo sapien
taagacgagagctgggtacaacgga

SEQ ID NO: 2807206 - DNA, 25 bp, Homo sapien
tgggcaagatccttagacaagagtc

SEQ ID NO: 2807207 - DNA, 25 bp, Homo sapien
catcctcggagagagctccttgaca

SEQ ID NO: 2807208 - DNA, 25 bp, Homo sapien
ggaatgccctacaatcatcagttgg

SEQ ID NO: 2807209 - DNA, 25 bp, Homo sapien
ggtaggtgatgcaaaacaaccaggc

SEQ ID NO: 2807210 - DNA, 25 bp, Homo sapien
tgttgactgcaagagcttgaaggct

SEQ ID NO: 2807211 - DNA, 25 bp, Homo sapien
tgagcaaggcctttatcctcgggtt

SEQ ID NO: 2807212 - DNA, 25 bp, Homo sapien
tgtgggtgtcacctatgtatctgcc

SEQ ID NO: 2807213 - DNA, 25 bp, Homo sapien
tgagaatactggcatccattgtgtc

SEQ ID NO: 2807214 - DNA, 25 bp, Homo sapien
gatcgtgcctacattcccctgtgta

SEQ ID NO: 2807215 - DNA, 25 bp, Homo sapien
tagtccagtatttcttaaacagatc

SEQ ID NO: 2807216 - DNA, 25 bp, Homo sapien
cagattagagaccatttagtccagt

SEQ ID NO: 2807217 - DNA, 25 bp, Homo sapien
ctggccaacacggtgtagattgtag

SEQ ID NO: 2807218 - DNA, 25 bp, Homo sapien
gcatcaggacaaaaatccttatctt

SEQ ID NO: 2807219 - DNA, 25 bp, Homo sapien
agggacagctggtaagtgtagcatc

SEQ ID NO: 2807220 - DNA, 25 bp, Homo sapien
taagtgtagcatcaggacaaaaatc

SEQ ID NO: 2807221 - DNA, 25 bp, Homo sapien
cagctggtaagtgtagcatcaggac

SEQ ID NO: 2807222 - DNA, 25 bp, Homo sapien
gatggcccaacctacagagaggagt

SEQ ID NO: 2807223 - DNA, 25 bp, Homo sapien
tgtgagtcaaaaaatgccccattgt

SEQ ID NO: 2807224 - DNA, 25 bp, Homo sapien
cactctgataacctatgacaaagga

SEQ ID NO: 2807225 - DNA, 25 bp, Homo sapien
tcaacataaataaggaggtagggtc

SEQ ID NO: 2807226 - DNA, 25 bp, Homo sapien
tagagaagccaaaacaaccaggtga

SEQ ID NO: 2807227 - DNA, 25 bp, Homo sapien
gaaagctcccttggaggtgttctca

SEQ ID NO: 2807228 - DNA, 25 bp, Homo sapien
caaggcagtttctaggaccaagagc

SEQ ID NO: 2807229 - DNA, 25 bp, Homo sapien
tgagctaaaaccactatcaaggcag

SEQ ID NO: 2807230 - DNA, 25 bp, Homo sapien
gtactacaagccaggtatagatgct

SEQ ID NO: 2807231 - DNA, 25 bp, Homo sapien
ctggtactacaagccaggtatagat

SEQ ID NO: 2807232 - DNA, 25 bp, Homo sapien
gatgcttgggatgtattaatgagca

SEQ ID NO: 2807233 - DNA, 25 bp, Homo sapien
gccaggtatagatgcttgggatgta

SEQ ID NO: 2807234 - DNA, 25 bp, Homo sapien
tacacgcagataagggtttcaaata

SEQ ID NO: 2807235 - DNA, 25 bp, Homo sapien
taagggtttcaaatattgttggcat

SEQ ID NO: 2807236 - DNA, 25 bp, Homo sapien
cagtagcaaacttgtacacgcagat

SEQ ID NO: 2807237 - DNA, 25 bp, Homo sapien
caaacttgtacacgcagataagggt

SEQ ID NO: 2807238 - DNA, 25 bp, Homo sapien
tattgctatcataatgcttggctaa

SEQ ID NO: 2807239 - DNA, 25 bp, Homo sapien
tgggaggctctttaaatagagaccc

SEQ ID NO: 2807240 - DNA, 25 bp, Homo sapien
gacaggttggattcatgcatactcc

SEQ ID NO: 2807241 - DNA, 25 bp, Homo sapien
tgttggcacagtcataaaaatggga

SEQ ID NO: 2807242 - DNA, 25 bp, Homo sapien
aaatatcaattagaatctagcttcc

SEQ ID NO: 2807243 - DNA, 25 bp, Homo sapien
cagaggggctgactctgggataata

SEQ ID NO: 2807244 - DNA, 25 bp, Homo sapien
gaggaggttacgtagatctttacaa

SEQ ID NO: 2807245 - DNA, 25 bp, Homo sapien
tagaatctagcttcctgccctttgt

SEQ ID NO: 2807246 - DNA, 25 bp, Homo sapien
gaatacaagttgagtgctgccacac

SEQ ID NO: 2807247 - DNA, 25 bp, Homo sapien
cgtcattatgtcgtcacagggccat

SEQ ID NO: 2807248 - DNA, 25 bp, Homo sapien
tagagcctcctttatgcaacgccag

SEQ ID NO: 2807249 - DNA, 25 bp, Homo sapien
tccttgctaggaaacgaaacacttg

SEQ ID NO: 2807250 - DNA, 25 bp, Homo sapien
cacgctaagtctcatccttccaaag

SEQ ID NO: 2807251 - DNA, 25 bp, Homo sapien
tagcacatgtgatagcaaacagcaa

SEQ ID NO: 2807252 - DNA, 25 bp, Homo sapien
tttggacacaactgtacaggcacgc

SEQ ID NO: 2807253 - DNA, 25 bp, Homo sapien
gcagtttcatcaacagcatgtatag

SEQ ID NO: 2807254 - DNA, 25 bp, Homo sapien
agtgaaccgagatcgcgcgccactg

SEQ ID NO: 2807255 - DNA, 25 bp, Homo sapien
cagtgaaccgagatcgcgcgccact

SEQ ID NO: 2807256 - DNA, 25 bp, Homo sapien
ccagcctgggcgacagagcgaaact

SEQ ID NO: 2807257 - DNA, 25 bp, Homo sapien
cactccagcctgggcgacagagcga

SEQ ID NO: 2807258 - DNA, 25 bp, Homo sapien
cccatggtagatgctgaaccaattt

SEQ ID NO: 2807259 - DNA, 25 bp, Homo sapien
aaattgcacctgtctaaggcaatcc

SEQ ID NO: 2807260 - DNA, 25 bp, Homo sapien
tcagaacacatagtgtgacaatatg

SEQ ID NO: 2807261 - DNA, 25 bp, Homo sapien
gaaccaattttgttaacgtgagaga

SEQ ID NO: 2807262 - DNA, 25 bp, Homo sapien
ttgccttaaagggagagaggttgtc

SEQ ID NO: 2807263 - DNA, 25 bp, Homo sapien
cccatgaacctgcaggtatatggat

SEQ ID NO: 2807264 - DNA, 25 bp, Homo sapien
agtccttgccactggttactagttt

SEQ ID NO: 2807265 - DNA, 25 bp, Homo sapien
tcgaatgcaattacggagaggagat

SEQ ID NO: 2807266 - DNA, 25 bp, Homo sapien
cagaactcaggttatttatctccca

SEQ ID NO: 2807267 - DNA, 25 bp, Homo sapien
tttactctaaacaggaagctcttcc

SEQ ID NO: 2807268 - DNA, 25 bp, Homo sapien
caccacagtaccagcgtctagaaaa

SEQ ID NO: 2807269 - DNA, 25 bp, Homo sapien
tacagttcaggattgaatctgctct

SEQ ID NO: 2807270 - DNA, 25 bp, Homo sapien
tgtgaacctcacatcttatgtcagg

SEQ ID NO: 2807271 - DNA, 25 bp, Homo sapien
gtatttaaccaggtcaagcaccaag

SEQ ID NO: 2807272 - DNA, 25 bp, Homo sapien
tgttccctagtcagttagacgtaag

SEQ ID NO: 2807273 - DNA, 25 bp, Homo sapien
tcttaaaacagagcctacaaggaca

SEQ ID NO: 2807274 - DNA, 25 bp, Homo sapien
tgcatacgcaggtaaagtccaggct

SEQ ID NO: 2807275 - DNA, 25 bp, Homo sapien
tcttgacacgtacgaccataggcta

SEQ ID NO: 2807276 - DNA, 25 bp, Homo sapien
cctcagccggaagagatacagttcg

SEQ ID NO: 2807277 - DNA, 25 bp, Homo sapien
gaagctgtagtgacgtcgaaccgca

SEQ ID NO: 2807278 - DNA, 25 bp, Homo sapien
caggatggtctatcatctgctgact

SEQ ID NO: 2807279 - DNA, 25 bp, Homo sapien
ggatggtctatcatctgctgactga

SEQ ID NO: 2807280 - DNA, 25 bp, Homo sapien
gaggggcaggatggtctatcatctg

SEQ ID NO: 2807281 - DNA, 25 bp, Homo sapien
aggggcaggatggtctatcatctgc

SEQ ID NO: 2807282 - DNA, 25 bp, Homo sapien
agagagcaaacacagcttgttagca

SEQ ID NO: 2807283 - DNA, 25 bp, Homo sapien
gagagcaaacacagcttgttagcat

SEQ ID NO: 2807284 - DNA, 25 bp, Homo sapien
cagagagcaaacacagcttgttagc

SEQ ID NO: 2807285 - DNA, 25 bp, Homo sapien
agagcaaacacagcttgttagcata

SEQ ID NO: 2807286 - DNA, 25 bp, Homo sapien
aaagagcttttggacgagaccccat

SEQ ID NO: 2807287 - DNA, 25 bp, Homo sapien
cagagggccaaaaacgcagtgtatc

SEQ ID NO: 2807288 - DNA, 25 bp, Homo sapien
tataaaggcatgtctgaatagtccc

SEQ ID NO: 2807289 - DNA, 25 bp, Homo sapien
taactcatgggtgtaaaatcccaca

SEQ ID NO: 2807290 - DNA, 25 bp, Homo sapien
cgaaaatagtctaaccatgtgggaa

SEQ ID NO: 2807291 - DNA, 25 bp, Homo sapien
tccctaataagtgaacagtcctacc

SEQ ID NO: 2807292 - DNA, 25 bp, Homo sapien
aagtgcttagctgccatcaatatga

SEQ ID NO: 2807293 - DNA, 25 bp, Homo sapien
ccaagatagccagttcatttcatac

SEQ ID NO: 2807294 - DNA, 25 bp, Homo sapien
gcaaacagtggtccttgaagggctc

SEQ ID NO: 2807295 - DNA, 25 bp, Homo sapien
tctgttaccacttctgcatagctgg

SEQ ID NO: 2807296 - DNA, 25 bp, Homo sapien
gaggcaagaatcgaaactcctggat

SEQ ID NO: 2807297 - DNA, 25 bp, Homo sapien
catcacaagcactcactggtgcaag

SEQ ID NO: 2807298 - DNA, 25 bp, Homo sapien
gatacacgcaattcgaacagcatgt

SEQ ID NO: 2807299 - DNA, 25 bp, Homo sapien
ggaaaaagatacacgcaattcgaac

SEQ ID NO: 2807300 - DNA, 25 bp, Homo sapien
agatacacgcaattcgaacagcatg

SEQ ID NO: 2807301 - DNA, 25 bp, Homo sapien
aaaagatacacgcaattcgaacagc

SEQ ID NO: 2807302 - DNA, 25 bp, Homo sapien
ttcatattcatgctacactgactgc

SEQ ID NO: 2807303 - DNA, 25 bp, Homo sapien
gaatggtaccgatgacaagtggcaa

SEQ ID NO: 2807304 - DNA, 25 bp, Homo sapien
tgactgcttacacttgaggttctgc

SEQ ID NO: 2807305 - DNA, 25 bp, Homo sapien
ggtctttcaggaagtgataaactga

SEQ ID NO: 2807306 - DNA, 25 bp, Homo sapien
ttccagatgataaggattccccacg

SEQ ID NO: 2807307 - DNA, 25 bp, Homo sapien
tccctttggcatagaaggcctgtgt

SEQ ID NO: 2807308 - DNA, 25 bp, Homo sapien
ttccacgcggattatactacagtcg

SEQ ID NO: 2807309 - DNA, 25 bp, Homo sapien
tttggcaccaccattcgggaagagc

SEQ ID NO: 2807310 - DNA, 25 bp, Homo sapien
taaagctaaagtaagaaagtgcaac

SEQ ID NO: 2807311 - DNA, 25 bp, Homo sapien
ttgtgggaatctacctcttacatac

SEQ ID NO: 2807312 - DNA, 25 bp, Homo sapien
ccaggaactgcaaataacttgagtc

SEQ ID NO: 2807313 - DNA, 25 bp, Homo sapien
gaactaatcagtagctatttgaaaa

SEQ ID NO: 2807314 - DNA, 25 bp, Homo sapien
gcacttaaggatattgggcctgagg

SEQ ID NO: 2807315 - DNA, 25 bp, Homo sapien
attgggcctgaggtacagaaccagc

SEQ ID NO: 2807316 - DNA, 25 bp, Homo sapien
aggatattgggcctgaggtacagaa

SEQ ID NO: 2807317 - DNA, 25 bp, Homo sapien
cttaaggatattgggcctgaggtac

SEQ ID NO: 2807318 - DNA, 25 bp, Homo sapien
aaaaaggtcagtgtatggattggta

SEQ ID NO: 2807319 - DNA, 25 bp, Homo sapien
aaaaggtcagtgtatggattggtac

SEQ ID NO: 2807320 - DNA, 25 bp, Homo sapien
aaggtcagtgtatggattggtacaa

SEQ ID NO: 2807321 - DNA, 25 bp, Homo sapien
ggtcagtgtatggattggtacaatc

SEQ ID NO: 2807322 - DNA, 25 bp, Homo sapien
gagatacttcatatcatatactggt

SEQ ID NO: 2807323 - DNA, 25 bp, Homo sapien
caaatcatccaaggaccagatctgt

SEQ ID NO: 2807324 - DNA, 25 bp, Homo sapien
tatggctgtcatactctgagtaaga

SEQ ID NO: 2807325 - DNA, 25 bp, Homo sapien
gacaactatccctctattggaataa

SEQ ID NO: 2807326 - DNA, 25 bp, Homo sapien
tgaaggagtgttgatatctatatgc

SEQ ID NO: 2807327 - DNA, 25 bp, Homo sapien
cagtaatgaaggagtgttgatatct

SEQ ID NO: 2807328 - DNA, 25 bp, Homo sapien
tatctatatgctcaaagactgtaaa

SEQ ID NO: 2807329 - DNA, 25 bp, Homo sapien
tgttgatatctatatgctcaaagac

SEQ ID NO: 2807330 - DNA, 25 bp, Homo sapien
ggctttcacccaatagcgcacactg

SEQ ID NO: 2807331 - DNA, 25 bp, Homo sapien
tcggccttcgaatgaggtagcgagt

SEQ ID NO: 2807332 - DNA, 25 bp, Homo sapien
caaggcctgtgcaattcggctttca

SEQ ID NO: 2807333 - DNA, 25 bp, Homo sapien
catgtcggccttcgaatgaggtagc

SEQ ID NO: 2807334 - DNA, 25 bp, Homo sapien
tacacagtaggtcagaatagaagtg

SEQ ID NO: 2807335 - DNA, 25 bp, Homo sapien
aactctgtcagattttacttgtgga

SEQ ID NO: 2807336 - DNA, 25 bp, Homo sapien
tagtactccacttctcattagccgg

SEQ ID NO: 2807337 - DNA, 25 bp, Homo sapien
ctaactaaggtctagaaaaggcctg

SEQ ID NO: 2807338 - DNA, 25 bp, Homo sapien
gttatttacaagagtgctagcttag

SEQ ID NO: 2807339 - DNA, 25 bp, Homo sapien
ttatttacaagagtgctagcttaga

SEQ ID NO: 2807340 - DNA, 25 bp, Homo sapien
agtgctagcttagattagcataaga

SEQ ID NO: 2807341 - DNA, 25 bp, Homo sapien
ctagcttagattagcataagaaaca

SEQ ID NO: 2807342 - DNA, 25 bp, Homo sapien
tctccagaataatcaccacaagtgc

SEQ ID NO: 2807343 - DNA, 25 bp, Homo sapien
tgaaaatactcaggccccatattgg

SEQ ID NO: 2807344 - DNA, 25 bp, Homo sapien
tcactcatgttaaaggaaaccctat

SEQ ID NO: 2807345 - DNA, 25 bp, Homo sapien
ttttaagcctgggtcatatctcttg

SEQ ID NO: 2807346 - DNA, 25 bp, Homo sapien
cctgaatgaatagtgtggaagcctt

SEQ ID NO: 2807347 - DNA, 25 bp, Homo sapien
tctgtggaagctcgaagctgaatgc

SEQ ID NO: 2807348 - DNA, 25 bp, Homo sapien
ggaagccttcttcggaattatcatc

SEQ ID NO: 2807349 - DNA, 25 bp, Homo sapien
tattcatgccttcctgaatgaatag

SEQ ID NO: 2807350 - DNA, 25 bp, Homo sapien
tccgcagggtggcataactttaaag

SEQ ID NO: 2807351 - DNA, 25 bp, Homo sapien
tcaacatttacatactccgcagggt

SEQ ID NO: 2807352 - DNA, 25 bp, Homo sapien
tatatatactcaaaaggctcgggtc

SEQ ID NO: 2807353 - DNA, 25 bp, Homo sapien
aataaaaatcctgtcgtcagctgcc

SEQ ID NO: 2807354 - DNA, 25 bp, Homo sapien
gatgcctccctgatattaaacgaga

SEQ ID NO: 2807355 - DNA, 25 bp, Homo sapien
catttaaattcgctcccctcgaagg

SEQ ID NO: 2807356 - DNA, 25 bp, Homo sapien
cctgtgcaaattcccctgaacggat

SEQ ID NO: 2807357 - DNA, 25 bp, Homo sapien
tatacacaaaaaacgtgatgcctcc

SEQ ID NO: 2807358 - DNA, 25 bp, Homo sapien
caagctttgtttcagctaaggggaa

SEQ ID NO: 2807359 - DNA, 25 bp, Homo sapien
tcaggtcaactcaaggtagacagtg

SEQ ID NO: 2807360 - DNA, 25 bp, Homo sapien
tgtcccctcaggtcaactcaaggta

SEQ ID NO: 2807361 - DNA, 25 bp, Homo sapien
ggtagacagtgtggcgactggagag

SEQ ID NO: 2807362 - DNA, 25 bp, Homo sapien
ctttcgtgcccaattaagatgtctt

SEQ ID NO: 2807363 - DNA, 25 bp, Homo sapien
taagatgtctttatggttgaaatac

SEQ ID NO: 2807364 - DNA, 25 bp, Homo sapien
ctctttcgtgcccaattaagatgtc

SEQ ID NO: 2807365 - DNA, 25 bp, Homo sapien
tgtctttatggttgaaatactctac

SEQ ID NO: 2807366 - DNA, 25 bp, Homo sapien
cagtccagcgtactttcgcatgtcc

SEQ ID NO: 2807367 - DNA, 25 bp, Homo sapien
ctgatttccccagtaacttctaaat

SEQ ID NO: 2807368 - DNA, 25 bp, Homo sapien
ggcagtattggagccggcgtttcta

SEQ ID NO: 2807369 - DNA, 25 bp, Homo sapien
cgcatgtcctcttgcatgaatttta

SEQ ID NO: 2807370 - DNA, 25 bp, Homo sapien
tcattaagacagtcaaagcttattg

SEQ ID NO: 2807371 - DNA, 25 bp, Homo sapien
aaagcttattgtcaaactcttcacc

SEQ ID NO: 2807372 - DNA, 25 bp, Homo sapien
gtcaaagcttattgtcaaactcttc

SEQ ID NO: 2807373 - DNA, 25 bp, Homo sapien
ttgctgtcattaagacagtcaaagc

SEQ ID NO: 2807374 - DNA, 25 bp, Homo sapien
aagtcaagatcgcatataaaatgtg

SEQ ID NO: 2807375 - DNA, 25 bp, Homo sapien
tcaagatcgcatataaaatgtgatc

SEQ ID NO: 2807376 - DNA, 25 bp, Homo sapien
agacaaaaaagtcaagatcgcatat

SEQ ID NO: 2807377 - DNA, 25 bp, Homo sapien
caaaaaagtcaagatcgcatataaa

SEQ ID NO: 2807378 - DNA, 25 bp, Homo sapien
caaaatgcttgcaggccggatcagt

SEQ ID NO: 2807379 - DNA, 25 bp, Homo sapien
ggccggatcagtgattctctacaaa

SEQ ID NO: 2807380 - DNA, 25 bp, Homo sapien
cactgatcgatatttttgccgtgca

SEQ ID NO: 2807381 - DNA, 25 bp, Homo sapien
tcagtggtctccttacaaagacggg

SEQ ID NO: 2807382 - DNA, 25 bp, Homo sapien
taaagcgccccacaatatggtcttt

SEQ ID NO: 2807383 - DNA, 25 bp, Homo sapien
tttaaagcgccccacaatatggtct

SEQ ID NO: 2807384 - DNA, 25 bp, Homo sapien
cacttttccggggtttgcttgccag

SEQ ID NO: 2807385 - DNA, 25 bp, Homo sapien
gcgccccacaatatggtctttttaa

SEQ ID NO: 2807386 - DNA, 25 bp, Homo sapien
ggccagataacagggtggcttcctt

SEQ ID NO: 2807387 - DNA, 25 bp, Homo sapien
gacatgatctttgccttgcatcctg

SEQ ID NO: 2807388 - DNA, 25 bp, Homo sapien
ccacttgccaccttgacatgatctt

SEQ ID NO: 2807389 - DNA, 25 bp, Homo sapien
taatgggttcgctgagtcttccctg

SEQ ID NO: 2807390 - DNA, 25 bp, Homo sapien
attgctaagaaatccttgagcctct

SEQ ID NO: 2807391 - DNA, 25 bp, Homo sapien
tacattgctaagaaatccttgagcc

SEQ ID NO: 2807392 - DNA, 25 bp, Homo sapien
ttacattgctaagaaatccttgagc

SEQ ID NO: 2807393 - DNA, 25 bp, Homo sapien
gctaagaaatccttgagcctcttac

SEQ ID NO: 2807394 - DNA, 25 bp, Homo sapien
ttaatttgtgtcatgtcagcaaaca

SEQ ID NO: 2807395 - DNA, 25 bp, Homo sapien
ttggagattcatccatagatggttg

SEQ ID NO: 2807396 - DNA, 25 bp, Homo sapien
gattcatccatagatggttgagggc

SEQ ID NO: 2807397 - DNA, 25 bp, Homo sapien
aaacagcaaattcttttggagattc

SEQ ID NO: 2807398 - DNA, 25 bp, Homo sapien
caggcttcttcccatagaataatga

SEQ ID NO: 2807399 - DNA, 25 bp, Homo sapien
tcccatagaataatgaggaattcaa

SEQ ID NO: 2807400 - DNA, 25 bp, Homo sapien
ataatgaggaattcaatttccatcc

SEQ ID NO: 2807401 - DNA, 25 bp, Homo sapien
ttcttcccatagaataatgaggaat

SEQ ID NO: 2807402 - DNA, 25 bp, Homo sapien
tggcaaatttggattgcaagaatat

SEQ ID NO: 2807403 - DNA, 25 bp, Homo sapien
ggcaaatttggattgcaagaatatc

SEQ ID NO: 2807404 - DNA, 25 bp, Homo sapien
ctggcaaatttggattgcaagaata

SEQ ID NO: 2807405 - DNA, 25 bp, Homo sapien
acatgtcaattcaaaaaagttggtc

SEQ ID NO: 2807406 - DNA, 25 bp, Homo sapien
aacatgtcaattcaaaaaagttggt

SEQ ID NO: 2807407 - DNA, 25 bp, Homo sapien
aagaacatgtcaattcaaaaaagtt

SEQ ID NO: 2807408 - DNA, 25 bp, Homo sapien
gaacatgtcaattcaaaaaagttgg

SEQ ID NO: 2807409 - DNA, 25 bp, Homo sapien
ctgctagctgtagtttgaccgccat

SEQ ID NO: 2807410 - DNA, 25 bp, Homo sapien
tcccaaagagtatgaattaggaaga

SEQ ID NO: 2807411 - DNA, 25 bp, Homo sapien
caatatgccagccaaattctagtaa

SEQ ID NO: 2807412 - DNA, 25 bp, Homo sapien
tcttagaattcccaaagagtatgaa

SEQ ID NO: 2807413 - DNA, 25 bp, Homo sapien
tgccagccaaattctagtaattatg

SEQ ID NO: 2807414 - DNA, 25 bp, Homo sapien
ttcactagagcttaccaaagatgtc

SEQ ID NO: 2807415 - DNA, 25 bp, Homo sapien
tcagtggttatcgtagttctcttca

SEQ ID NO: 2807416 - DNA, 25 bp, Homo sapien
agatgtcttcataccagcagtaaag

SEQ ID NO: 2807417 - DNA, 25 bp, Homo sapien
ggttatcgtagttctcttcactaga

SEQ ID NO: 2807418 - DNA, 25 bp, Homo sapien
gaagtgcctggtgtatactggaaat

SEQ ID NO: 2807419 - DNA, 25 bp, Homo sapien
tgatgatggaagaatcagaagtgcc

SEQ ID NO: 2807420 - DNA, 25 bp, Homo sapien
tgaagcaccagtccccaagtgcaga

SEQ ID NO: 2807421 - DNA, 25 bp, Homo sapien
gtgtaacactgtccaactctgaagg

SEQ ID NO: 2807422 - DNA, 25 bp, Homo sapien
tctttgcttggtagcatagccaatc

SEQ ID NO: 2807423 - DNA, 25 bp, Homo sapien
atagccaatcggaccagggatcagc

SEQ ID NO: 2807424 - DNA, 25 bp, Homo sapien
gttctttatccatgggagcatgcag

SEQ ID NO: 2807425 - DNA, 25 bp, Homo sapien
tttatccatgggagcatgcagtctt

SEQ ID NO: 2807426 - DNA, 25 bp, Homo sapien
ttcaaaattataaacagctggtgtc

SEQ ID NO: 2807427 - DNA, 25 bp, Homo sapien
ggtgtctgctgagtacctattatat

SEQ ID NO: 2807428 - DNA, 25 bp, Homo sapien
tatgaaactgttcagtgctggaccc

SEQ ID NO: 2807429 - DNA, 25 bp, Homo sapien
ctgggtcctgccctaaagcagtgta

SEQ ID NO: 2807430 - DNA, 25 bp, Homo sapien
aaagtctttccattgcaaggagcct

SEQ ID NO: 2807431 - DNA, 25 bp, Homo sapien
acagccctgactccctgataaagtc

SEQ ID NO: 2807432 - DNA, 25 bp, Homo sapien
gtctttccattgcaaggagcctttc

SEQ ID NO: 2807433 - DNA, 25 bp, Homo sapien
ctgactccctgataaagtctttcca

SEQ ID NO: 2807434 - DNA, 25 bp, Homo sapien
actgcaggaagccttacagctgtag

SEQ ID NO: 2807435 - DNA, 25 bp, Homo sapien
ctgcaggaagccttacagctgtagg

SEQ ID NO: 2807436 - DNA, 25 bp, Homo sapien
tcctattcaaatcgagtacttctat

SEQ ID NO: 2807437 - DNA, 25 bp, Homo sapien
cgcgcccgcctatagttattcttta

SEQ ID NO: 2807438 - DNA, 25 bp, Homo sapien
ggctgaagcgatactcccatcttaa

SEQ ID NO: 2807439 - DNA, 25 bp, Homo sapien
ccagtcaggctcattaatttcagaa

SEQ ID NO: 2807440 - DNA, 25 bp, Homo sapien
ccttgatgtaggccgtgactggcca

SEQ ID NO: 2807441 - DNA, 25 bp, Homo sapien
gggatgcaacaatctaaaacctgaa

SEQ ID NO: 2807442 - DNA, 25 bp, Homo sapien
tacagccaccacattgtgtattggt

SEQ ID NO: 2807443 - DNA, 25 bp, Homo sapien
aaaacctgaattatggcagctgtcc

SEQ ID NO: 2807444 - DNA, 25 bp, Homo sapien
ctgagcatgcacaaccaaatctgag

SEQ ID NO: 2807445 - DNA, 25 bp, Homo sapien
gcatgcacaaccaaatctgagtcaa

SEQ ID NO: 2807446 - DNA, 25 bp, Homo sapien
gagcatgcacaaccaaatctgagtc

SEQ ID NO: 2807447 - DNA, 25 bp, Homo sapien
gcacaaccaaatctgagtcaaacca

SEQ ID NO: 2807448 - DNA, 25 bp, Homo sapien
aacgacatctggtcctaggattttc

SEQ ID NO: 2807449 - DNA, 25 bp, Homo sapien
ggctcaaccatcctcatacaatctt

SEQ ID NO: 2807450 - DNA, 25 bp, Homo sapien
tctttgtggaaagttttctgattac

SEQ ID NO: 2807451 - DNA, 25 bp, Homo sapien
tggaagaaataccactaacgacatc

SEQ ID NO: 2807452 - DNA, 25 bp, Homo sapien
gggagtctagccctcatagctactt

SEQ ID NO: 2807453 - DNA, 25 bp, Homo sapien
agaagtacagaagattcctcctcca

SEQ ID NO: 2807454 - DNA, 25 bp, Homo sapien
gaagattcctcctccaagagaatgg

SEQ ID NO: 2807455 - DNA, 25 bp, Homo sapien
tctctgtggtccaagatgaagacat

SEQ ID NO: 2807456 - DNA, 25 bp, Homo sapien
gttcgcaggtttatctactagattg

SEQ ID NO: 2807457 - DNA, 25 bp, Homo sapien
tcagttcgcaggtttatctactaga

SEQ ID NO: 2807458 - DNA, 25 bp, Homo sapien
catgtcgttgtatatgttgttataa

SEQ ID NO: 2807459 - DNA, 25 bp, Homo sapien
caggtttatctactagattggcatc

SEQ ID NO: 2807460 - DNA, 25 bp, Homo sapien
tagcacaaaccagggaaagcttgtc

SEQ ID NO: 2807461 - DNA, 25 bp, Homo sapien
tggccttgtgctctaatttaatact

SEQ ID NO: 2807462 - DNA, 25 bp, Homo sapien
tcagctgcttttagttgtgcactgg

SEQ ID NO: 2807463 - DNA, 25 bp, Homo sapien
taatactggtgtcgttcagaggcgg

SEQ ID NO: 2807464 - DNA, 25 bp, Homo sapien
cctggtcaaagggataagctgtagg

SEQ ID NO: 2807465 - DNA, 25 bp, Homo sapien
ggttcttcatactttcacagagcag

SEQ ID NO: 2807466 - DNA, 25 bp, Homo sapien
tctcaggacagaatagttagcaaag

SEQ ID NO: 2807467 - DNA, 25 bp, Homo sapien
gcaaagtcagcatgtttcatcctac

SEQ ID NO: 2807468 - DNA, 25 bp, Homo sapien
tagttcttctgcatcatcaaattga

SEQ ID NO: 2807469 - DNA, 25 bp, Homo sapien
tattcctgatgtatttagttcttct

SEQ ID NO: 2807470 - DNA, 25 bp, Homo sapien
tcctgatgtatttagttcttctgca

SEQ ID NO: 2807471 - DNA, 25 bp, Homo sapien
agttcttctgcatcatcaaattgag

SEQ ID NO: 2807472 - DNA, 25 bp, Homo sapien
ctatccaattattacaacgccagct

SEQ ID NO: 2807473 - DNA, 25 bp, Homo sapien
tattacaacgccagctttctcttta

SEQ ID NO: 2807474 - DNA, 25 bp, Homo sapien
aacgccagctttctctttacaaata

SEQ ID NO: 2807475 - DNA, 25 bp, Homo sapien
tccaattattacaacgccagctttc

SEQ ID NO: 2807476 - DNA, 25 bp, Homo sapien
atggaatgagtgcttactgactgaa

SEQ ID NO: 2807477 - DNA, 25 bp, Homo sapien
tgactgaattcatagacagcagttc

SEQ ID NO: 2807478 - DNA, 25 bp, Homo sapien
ctgaattcatagacagcagttccat

SEQ ID NO: 2807479 - DNA, 25 bp, Homo sapien
aatggaatgagtgcttactgactga

SEQ ID NO: 2807480 - DNA, 25 bp, Homo sapien
gggaagaaggattgaagtagtacat

SEQ ID NO: 2807481 - DNA, 25 bp, Homo sapien
agaaagcaggaactatggtgaaatg

SEQ ID NO: 2807482 - DNA, 25 bp, Homo sapien
aagcaggaactatggtgaaatgtgg

SEQ ID NO: 2807483 - DNA, 25 bp, Homo sapien
caggaactatggtgaaatgtgggga

SEQ ID NO: 2807484 - DNA, 25 bp, Homo sapien
actgtatccagcacaaatgctgtct

SEQ ID NO: 2807485 - DNA, 25 bp, Homo sapien
ggtttaggtagtattggcagatgtt

SEQ ID NO: 2807486 - DNA, 25 bp, Homo sapien
gacaactgtatccagcacaaatgct

SEQ ID NO: 2807487 - DNA, 25 bp, Homo sapien
ttaggtagtattggcagatgttagg

SEQ ID NO: 2807488 - DNA, 25 bp, Homo sapien
tactcagtacaattgggtcaggcat

SEQ ID NO: 2807489 - DNA, 25 bp, Homo sapien
caaataatctgtagggcttactcag

SEQ ID NO: 2807490 - DNA, 25 bp, Homo sapien
gggcttactcagtacaattgggtca

SEQ ID NO: 2807491 - DNA, 25 bp, Homo sapien
gacaaataatctgtagggcttactc

SEQ ID NO: 2807492 - DNA, 25 bp, Homo sapien
cacagagtagtcactagaaagattt

SEQ ID NO: 2807493 - DNA, 25 bp, Homo sapien
ggtaattctgacacagagtagtcac

SEQ ID NO: 2807494 - DNA, 25 bp, Homo sapien
atttaagtgaaggtaattctgacac

SEQ ID NO: 2807495 - DNA, 25 bp, Homo sapien
acaactgcatgcactaatgagggca

SEQ ID NO: 2807496 - DNA, 25 bp, Homo sapien
ttcctgttctttgcatcccttacaa

SEQ ID NO: 2807497 - DNA, 25 bp, Homo sapien
ttctttgcatcccttacaaaccctg

SEQ ID NO: 2807498 - DNA, 25 bp, Homo sapien
tgttctttgcatcccttacaaaccc

SEQ ID NO: 2807499 - DNA, 25 bp, Homo sapien
cagctctgatgtgctgtattgctga

SEQ ID NO: 2807500 - DNA, 25 bp, Homo sapien
gactgtgcaagggtgaactgtccaa

SEQ ID NO: 2807501 - DNA, 25 bp, Homo sapien
ctggactgtgcaagggtgaactgtc

SEQ ID NO: 2807502 - DNA, 25 bp, Homo sapien
ctgtgcaagggtgaactgtccaacc

SEQ ID NO: 2807503 - DNA, 25 bp, Homo sapien
tggactgtgcaagggtgaactgtcc

SEQ ID NO: 2807504 - DNA, 25 bp, Homo sapien
ttgcaaactactgcatgggcaagaa

SEQ ID NO: 2807505 - DNA, 25 bp, Homo sapien
gggcaagaatggctgccacgttgta

SEQ ID NO: 2807506 - DNA, 25 bp, Homo sapien
cagacttcttggttataaaggttca

SEQ ID NO: 2807507 - DNA, 25 bp, Homo sapien
aaggctatgccaatctttttagtcg

SEQ ID NO: 2807508 - DNA, 25 bp, Homo sapien
tggctgaaattcatctcttctgaca

SEQ ID NO: 2807509 - DNA, 25 bp, Homo sapien
gctgaaattcatctcttctgacaac

SEQ ID NO: 2807510 - DNA, 25 bp, Homo sapien
attggctgaaattcatctcttctga

SEQ ID NO: 2807511 - DNA, 25 bp, Homo sapien
ggctgaaattcatctcttctgacaa

SEQ ID NO: 2807512 - DNA, 25 bp, Homo sapien
tcataaaatatgagcattggtcctt

SEQ ID NO: 2807513 - DNA, 25 bp, Homo sapien
cataaaatatgagcattggtccttt

SEQ ID NO: 2807514 - DNA, 25 bp, Homo sapien
ataaaatatgagcattggtcctttt

SEQ ID NO: 2807515 - DNA, 25 bp, Homo sapien
gaactcactgccattggctgcatcc

SEQ ID NO: 2807516 - DNA, 25 bp, Homo sapien
gttgctgtaagctcccttaagacca

SEQ ID NO: 2807517 - DNA, 25 bp, Homo sapien
agctcccttaagaccactacttctg

SEQ ID NO: 2807518 - DNA, 25 bp, Homo sapien
tgcatcccagttgctgtaagctccc

SEQ ID NO: 2807519 - DNA, 25 bp, Homo sapien
tggaatggttaaggtcatctcttcg

SEQ ID NO: 2807520 - DNA, 25 bp, Homo sapien
tcaacttctactagttgtggaatgg

SEQ ID NO: 2807521 - DNA, 25 bp, Homo sapien
tccaaatgatgtacatgacaaatgg

SEQ ID NO: 2807522 - DNA, 25 bp, Homo sapien
tggtagagtctatcgtaactgattt

SEQ ID NO: 2807523 - DNA, 25 bp, Homo sapien
agaaatgtgagttggaatttctaag

SEQ ID NO: 2807524 - DNA, 25 bp, Homo sapien
cagtgatatattgttagatcttcca

SEQ ID NO: 2807525 - DNA, 25 bp, Homo sapien
cacagtagacagtgatatattgtta

SEQ ID NO: 2807526 - DNA, 25 bp, Homo sapien
ctttgacacagtagacagtgatata

SEQ ID NO: 2807527 - DNA, 25 bp, Homo sapien
gccaaaaccaggcagtgatatttcc

SEQ ID NO: 2807528 - DNA, 25 bp, Homo sapien
gcttgctttgcaccccacactataa

SEQ ID NO: 2807529 - DNA, 25 bp, Homo sapien
cactgaacatggtgtctgagtatga

SEQ ID NO: 2807530 - DNA, 25 bp, Homo sapien
gaatggtctcaccacctgggagtct

SEQ ID NO: 2807531 - DNA, 25 bp, Homo sapien
aagtagttggagcagatgcattcaa

SEQ ID NO: 2807532 - DNA, 25 bp, Homo sapien
gccatgagtcatgggaaaataagcc

SEQ ID NO: 2807533 - DNA, 25 bp, Homo sapien
catgagtcatgggaaaataagcctg

SEQ ID NO: 2807534 - DNA, 25 bp, Homo sapien
tgagtcatgggaaaataagcctgtt

SEQ ID NO: 2807535 - DNA, 25 bp, Homo sapien
ctggcacccgtgctattggttatag

SEQ ID NO: 2807536 - DNA, 25 bp, Homo sapien
cccgtgctattggttatagagctgc

SEQ ID NO: 2807537 - DNA, 25 bp, Homo sapien
gaccaagggtctactggcacccgtg

SEQ ID NO: 2807538 - DNA, 25 bp, Homo sapien
gccacactgactaagatgaccaagg

SEQ ID NO: 2807539 - DNA, 25 bp, Homo sapien
taagtacagggttctccattccctc

SEQ ID NO: 2807540 - DNA, 25 bp, Homo sapien
ggaaactgatggcatcgctgctcct

SEQ ID NO: 2807541 - DNA, 25 bp, Homo sapien
gatggcatcgctgctcctaagtaca

SEQ ID NO: 2807542 - DNA, 25 bp, Homo sapien
ccattccctcatcggttttattaag

SEQ ID NO: 2807543 - DNA, 25 bp, Homo sapien
tctgtgggccatagtgctcatcaaa

SEQ ID NO: 2807544 - DNA, 25 bp, Homo sapien
tctctgtgggccatagtgctcatca

SEQ ID NO: 2807545 - DNA, 25 bp, Homo sapien
agtgctcatcaaacaatgctccctg

SEQ ID NO: 2807546 - DNA, 25 bp, Homo sapien
catcaaacaatgctccctggacagc

SEQ ID NO: 2807547 - DNA, 25 bp, Homo sapien
taaatctgatgcgtgcagatgaacg

SEQ ID NO: 2807548 - DNA, 25 bp, Homo sapien
gagcaatagctccttatggctccag

SEQ ID NO: 2807549 - DNA, 25 bp, Homo sapien
aacgtgtgttcaggatgagtgagca

SEQ ID NO: 2807550 - DNA, 25 bp, Homo sapien
tctggagatgacagcctatctgagc

SEQ ID NO: 2807551 - DNA, 25 bp, Homo sapien
gtcatgctcgaatgatggaatttca

SEQ ID NO: 2807552 - DNA, 25 bp, Homo sapien
gctgtgccttgtactctgaagtgtt

SEQ ID NO: 2807553 - DNA, 25 bp, Homo sapien
gccttgtactctgaagtgttttgtt

SEQ ID NO: 2807554 - DNA, 25 bp, Homo sapien
ttaagtttgaattttgagatgtcat

SEQ ID NO: 2807555 - DNA, 25 bp, Homo sapien
catttttataatgacttgctgcagt

SEQ ID NO: 2807556 - DNA, 25 bp, Homo sapien
atttttataatgacttgctgcagtt

SEQ ID NO: 2807557 - DNA, 25 bp, Homo sapien
cgtatgctgtgttgtactgtgagct

SEQ ID NO: 2807558 - DNA, 25 bp, Homo sapien
caaaaatgatgcaatgtatccctcg

SEQ ID NO: 2807559 - DNA, 25 bp, Homo sapien
gagctttcttgttcgacataatcaa

SEQ ID NO: 2807560 - DNA, 25 bp, Homo sapien
agtctagctggatgaaaggaaggca

SEQ ID NO: 2807561 - DNA, 25 bp, Homo sapien
tttaggctgcttcatctcgttctga

SEQ ID NO: 2807562 - DNA, 25 bp, Homo sapien
gatctgtcagattctccctactcat

SEQ ID NO: 2807563 - DNA, 25 bp, Homo sapien
gtgccaaatgttttaggctgcttca

SEQ ID NO: 2807564 - DNA, 25 bp, Homo sapien
catctcgttctgatctgtcagattc

SEQ ID NO: 2807565 - DNA, 25 bp, Homo sapien
tataactttcgtttttcttgtgtga

SEQ ID NO: 2807566 - DNA, 25 bp, Homo sapien
gattggtccagtaggggctgtttac

SEQ ID NO: 2807567 - DNA, 25 bp, Homo sapien
tcttgtgtgaagtgtagccttgaga

SEQ ID NO: 2807568 - DNA, 25 bp, Homo sapien
gccttgagagatctggatttttctg

SEQ ID NO: 2807569 - DNA, 25 bp, Homo sapien
agtgctaaagggcaagatctggcta

SEQ ID NO: 2807570 - DNA, 25 bp, Homo sapien
attggaaagagtgctaaagggcaag

SEQ ID NO: 2807571 - DNA, 25 bp, Homo sapien
tgctaaagggcaagatctggctaaa

SEQ ID NO: 2807572 - DNA, 25 bp, Homo sapien
aaagagtgctaaagggcaagatctg

SEQ ID NO: 2807573 - DNA, 25 bp, Homo sapien
gttctccacttttcctaggcttcag

SEQ ID NO: 2807574 - DNA, 25 bp, Homo sapien
cttttcctaggcttcagtctcaggc

SEQ ID NO: 2807575 - DNA, 25 bp, Homo sapien
tgtgttctccacttttcctaggctt

SEQ ID NO: 2807576 - DNA, 25 bp, Homo sapien
ccacttttcctaggcttcagtctca

SEQ ID NO: 2807577 - DNA, 25 bp, Homo sapien
gcctctccatctcgtgcaatattga

SEQ ID NO: 2807578 - DNA, 25 bp, Homo sapien
gcagatattgcataccaacgagggt

SEQ ID NO: 2807579 - DNA, 25 bp, Homo sapien
aatttgcatccagacgtacgcagag

SEQ ID NO: 2807580 - DNA, 25 bp, Homo sapien
tgtaaagaaccctaagcaaatttgc

SEQ ID NO: 2807581 - DNA, 25 bp, Homo sapien
tttctgcattagtactgcactgtct

SEQ ID NO: 2807582 - DNA, 25 bp, Homo sapien
ttttctgcattagtactgcactgtc

SEQ ID NO: 2807583 - DNA, 25 bp, Homo sapien
cttttctgcattagtactgcactgt

SEQ ID NO: 2807584 - DNA, 25 bp, Homo sapien
tgatcagtttattgctgcaatatga

SEQ ID NO: 2807585 - DNA, 25 bp, Homo sapien
tgtatctagaatgaagtgctctgtc

SEQ ID NO: 2807586 - DNA, 25 bp, Homo sapien
agctgtatctagaatgaagtgctct

SEQ ID NO: 2807587 - DNA, 25 bp, Homo sapien
gatcagtttattgctgcaatatgaa

SEQ ID NO: 2807588 - DNA, 25 bp, Homo sapien
aaggcagaatggagggcccctgaaa

SEQ ID NO: 2807589 - DNA, 25 bp, Homo sapien
gatttccttacaaccttcactttga

SEQ ID NO: 2807590 - DNA, 25 bp, Homo sapien
ttacaaccttcactttgaaggcaga

SEQ ID NO: 2807591 - DNA, 25 bp, Homo sapien
ccctgaaactcccatcaagtgccat

SEQ ID NO: 2807592 - DNA, 25 bp, Homo sapien
catttgcattgatttatatgagttt

SEQ ID NO: 2807593 - DNA, 25 bp, Homo sapien
cactatatccactggacatttgcat

SEQ ID NO: 2807594 - DNA, 25 bp, Homo sapien
tactgcacatcctttatcctgctaa

SEQ ID NO: 2807595 - DNA, 25 bp, Homo sapien
tttatcctgctaactggcccactat

SEQ ID NO: 2807596 - DNA, 25 bp, Homo sapien
cagtggacactttaccaccaaggtc

SEQ ID NO: 2807597 - DNA, 25 bp, Homo sapien
gagatgttgagacatataagcactg

SEQ ID NO: 2807598 - DNA, 25 bp, Homo sapien
ggaaaattctatgcatttagcccaa

SEQ ID NO: 2807599 - DNA, 25 bp, Homo sapien
tacctctactaatgttgaaaaggca

SEQ ID NO: 2807600 - DNA, 25 bp, Homo sapien
tcttaactcagacagttttctcctt

SEQ ID NO: 2807601 - DNA, 25 bp, Homo sapien
tcatcttaactcagacagttttctc

SEQ ID NO: 2807602 - DNA, 25 bp, Homo sapien
catcttaactcagacagttttctcc

SEQ ID NO: 2807603 - DNA, 25 bp, Homo sapien
cttaactcagacagttttctcctta

SEQ ID NO: 2807604 - DNA, 25 bp, Homo sapien
tcacatgtcacataaacaggtcagc

SEQ ID NO: 2807605 - DNA, 25 bp, Homo sapien
aacaggtcagccactgatcattttc

SEQ ID NO: 2807606 - DNA, 25 bp, Homo sapien
tctaccaaacttgtaagtgacagtt

SEQ ID NO: 2807607 - DNA, 25 bp, Homo sapien
tttctaccaaacttgtaagtgacag

SEQ ID NO: 2807608 - DNA, 25 bp, Homo sapien
tttgagacatcattaaggcagcagc

SEQ ID NO: 2807609 - DNA, 25 bp, Homo sapien
ttgagacatcattaaggcagcagca

SEQ ID NO: 2807610 - DNA, 25 bp, Homo sapien
atttgagacatcattaaggcagcag

SEQ ID NO: 2807611 - DNA, 25 bp, Homo sapien
taagatgcctcctgagtctttattg

SEQ ID NO: 2807612 - DNA, 25 bp, Homo sapien
caggaaagtgacctgcaataactcc

SEQ ID NO: 2807613 - DNA, 25 bp, Homo sapien
agtgacctgcaataactcctactgt

SEQ ID NO: 2807614 - DNA, 25 bp, Homo sapien
tgaagtatccgaccatcaggaaagt

SEQ ID NO: 2807615 - DNA, 25 bp, Homo sapien
cttggtatataaagcctgcttctgc

SEQ ID NO: 2807616 - DNA, 25 bp, Homo sapien
tgcacatgcttggtatataaagcct

SEQ ID NO: 2807617 - DNA, 25 bp, Homo sapien
aaagaaaggtgccattttgcgtgca

SEQ ID NO: 2807618 - DNA, 25 bp, Homo sapien
cattttgcgtgcatggcacaagcca

SEQ ID NO: 2807619 - DNA, 25 bp, Homo sapien
tttttagtggcctgtgaaatagtac

SEQ ID NO: 2807620 - DNA, 25 bp, Homo sapien
tcataggaacatcaagtgtggtctg

SEQ ID NO: 2807621 - DNA, 25 bp, Homo sapien
tcctttttagtggcctgtgaaatag

SEQ ID NO: 2807622 - DNA, 25 bp, Homo sapien
gaacatcaagtgtggtctgttcctt

SEQ ID NO: 2807623 - DNA, 25 bp, Homo sapien
gcttcagcagtgagatttgaggcag

SEQ ID NO: 2807624 - DNA, 25 bp, Homo sapien
cttcagcagtgagatttgaggcagc

SEQ ID NO: 2807625 - DNA, 25 bp, Homo sapien
gaaaagcttcagcagtgagatttga

SEQ ID NO: 2807626 - DNA, 25 bp, Homo sapien
aagcttcagcagtgagatttgaggc

SEQ ID NO: 2807627 - DNA, 25 bp, Homo sapien
ccaggtcctagtcttgggccttgct

SEQ ID NO: 2807628 - DNA, 25 bp, Homo sapien
caggactgcatagagactctccagg

SEQ ID NO: 2807629 - DNA, 25 bp, Homo sapien
ctcctgggacttcatgctgaaggct

SEQ ID NO: 2807630 - DNA, 25 bp, Homo sapien
tagttccttctagtccaggactgca

SEQ ID NO: 2807631 - DNA, 25 bp, Homo sapien
ttaactcaataacatatactttccc

SEQ ID NO: 2807632 - DNA, 25 bp, Homo sapien
ccctgccccacgaattagattgatt

SEQ ID NO: 2807633 - DNA, 25 bp, Homo sapien
tagattgattatggtggcatgtgag

SEQ ID NO: 2807634 - DNA, 25 bp, Homo sapien
ttattccacgttgtagagtacaatc

SEQ ID NO: 2807635 - DNA, 25 bp, Homo sapien
taatgttttgctaggcaatttctcc

SEQ ID NO: 2807636 - DNA, 25 bp, Homo sapien
tattcaccctcaaataagcacaggg

SEQ ID NO: 2807637 - DNA, 25 bp, Homo sapien
ttttcttaatgtgggctgcataacc

SEQ ID NO: 2807638 - DNA, 25 bp, Homo sapien
tagaagtttcgtgttcaattccagc

SEQ ID NO: 2807639 - DNA, 25 bp, Homo sapien
gataccaccagtacaagtatccata

SEQ ID NO: 2807640 - DNA, 25 bp, Homo sapien
tcttatgataccaccagtacaagta

SEQ ID NO: 2807641 - DNA, 25 bp, Homo sapien
caagtatccatattggatctaataa

SEQ ID NO: 2807642 - DNA, 25 bp, Homo sapien
gtacaagtatccatattggatctaa

SEQ ID NO: 2807643 - DNA, 25 bp, Homo sapien
taagtagatgtactccaaaatttgt

SEQ ID NO: 2807644 - DNA, 25 bp, Homo sapien
tactccaaaatttgttgatgtctcc

SEQ ID NO: 2807645 - DNA, 25 bp, Homo sapien
gctttctaagtagatgtactccaaa

SEQ ID NO: 2807646 - DNA, 25 bp, Homo sapien
gatgtactccaaaatttgttgatgt

SEQ ID NO: 2807647 - DNA, 25 bp, Homo sapien
tgttatgtgctccatcctgaaagag

SEQ ID NO: 2807648 - DNA, 25 bp, Homo sapien
catattcctattgcaccctcagggt

SEQ ID NO: 2807649 - DNA, 25 bp, Homo sapien
caccgctgggttcattagtgcagaa

SEQ ID NO: 2807650 - DNA, 25 bp, Homo sapien
tcttttttaactgacctgtggccac

SEQ ID NO: 2807651 - DNA, 25 bp, Homo sapien
ttgcccctttcagaatgatcttgcc

SEQ ID NO: 2807652 - DNA, 25 bp, Homo sapien
aatgccgaggccatccatctggact

SEQ ID NO: 2807653 - DNA, 25 bp, Homo sapien
gcatattgggaaaatgccgaggcca

SEQ ID NO: 2807654 - DNA, 25 bp, Homo sapien
catcccgccgtatatggcatattgg

SEQ ID NO: 2807655 - DNA, 25 bp, Homo sapien
tatttcagggatactgtttgatgaa

SEQ ID NO: 2807656 - DNA, 25 bp, Homo sapien
cgtatttcagggatactgtttgatg

SEQ ID NO: 2807657 - DNA, 25 bp, Homo sapien
ttctcgtatttcagggatactgttt

SEQ ID NO: 2807658 - DNA, 25 bp, Homo sapien
tttgcaaactttattctcgtatttc

SEQ ID NO: 2807659 - DNA, 25 bp, Homo sapien
gagaggcagtgcatacttgaatttg

SEQ ID NO: 2807660 - DNA, 25 bp, Homo sapien
ggtgaatttcctctttccgatggtg

SEQ ID NO: 2807661 - DNA, 25 bp, Homo sapien
tcattatgaagtttcccagaggcca

SEQ ID NO: 2807662 - DNA, 25 bp, Homo sapien
aaaatgctacctttccaagattggc

SEQ ID NO: 2807663 - DNA, 25 bp, Homo sapien
ccctgatcatcatactggtatctga

SEQ ID NO: 2807664 - DNA, 25 bp, Homo sapien
gatcatcatactggtatctgatgct

SEQ ID NO: 2807665 - DNA, 25 bp, Homo sapien
atccctgatcatcatactggtatct

SEQ ID NO: 2807666 - DNA, 25 bp, Homo sapien
catcatactggtatctgatgctgaa

SEQ ID NO: 2807667 - DNA, 25 bp, Homo sapien
gttcaaggatgtgggaggaccatac

SEQ ID NO: 2807668 - DNA, 25 bp, Homo sapien
ctctggtccatagaagtagtgtact

SEQ ID NO: 2807669 - DNA, 25 bp, Homo sapien
gaagtagtgtactgttgttcaagga

SEQ ID NO: 2807670 - DNA, 25 bp, Homo sapien
tgtttcatagggtgtggttggctct

SEQ ID NO: 2807671 - DNA, 25 bp, Homo sapien
tggaacttctcagggtctatctgga

SEQ ID NO: 2807672 - DNA, 25 bp, Homo sapien
tagtggcttgctgagtcaatacagg

SEQ ID NO: 2807673 - DNA, 25 bp, Homo sapien
tcaatacaggatagactggatagct

SEQ ID NO: 2807674 - DNA, 25 bp, Homo sapien
gatagactggatagcttggcctcat

SEQ ID NO: 2807675 - DNA, 25 bp, Homo sapien
gccagacgggcaaaagacgtgtctt

SEQ ID NO: 2807676 - DNA, 25 bp, Homo sapien
aatcatccaagtctactgctctcag

SEQ ID NO: 2807677 - DNA, 25 bp, Homo sapien
tcatccaagtctactgctctcaggt

SEQ ID NO: 2807678 - DNA, 25 bp, Homo sapien
taaaatcatccaagtctactgctct

SEQ ID NO: 2807679 - DNA, 25 bp, Homo sapien
tccaagtctactgctctcaggtcag

SEQ ID NO: 2807680 - DNA, 25 bp, Homo sapien
agcaaagggtgagaacagatatctt

SEQ ID NO: 2807681 - DNA, 25 bp, Homo sapien
gcaaagggtgagaacagatatcttt

SEQ ID NO: 2807682 - DNA, 25 bp, Homo sapien
ttctgacatatcctgaagtcatgca

SEQ ID NO: 2807683 - DNA, 25 bp, Homo sapien
taagtactgtatgttctgacatatc

SEQ ID NO: 2807684 - DNA, 25 bp, Homo sapien
aaggaagcggacgaccgaggacact

SEQ ID NO: 2807685 - DNA, 25 bp, Homo sapien
gagaaggaagcggacgaccgaggac

SEQ ID NO: 2807686 - DNA, 25 bp, Homo sapien
agaaggaagcggacgaccgaggaca

SEQ ID NO: 2807687 - DNA, 25 bp, Homo sapien
ggaagcggacgaccgaggacactgt

SEQ ID NO: 2807688 - DNA, 25 bp, Homo sapien
ttgttgatgtgtgcacggagggccc

SEQ ID NO: 2807689 - DNA, 25 bp, Homo sapien
acggagggccctgtggttgtactga

SEQ ID NO: 2807690 - DNA, 25 bp, Homo sapien
gaacgcatgtatgaacagggatgaa

SEQ ID NO: 2807691 - DNA, 25 bp, Homo sapien
tgtggttgtactgaacgcatgtatg

SEQ ID NO: 2807692 - DNA, 25 bp, Homo sapien
aggaggcttcggtgtttatttgcac

SEQ ID NO: 2807693 - DNA, 25 bp, Homo sapien
gtgaggaggcttcggtgtttatttg

SEQ ID NO: 2807694 - DNA, 25 bp, Homo sapien
gaggaggcttcggtgtttatttgca

SEQ ID NO: 2807695 - DNA, 25 bp, Homo sapien
tgaggaggcttcggtgtttatttgc

SEQ ID NO: 2807696 - DNA, 25 bp, Homo sapien
tgaacaaataattttctgttaagta

SEQ ID NO: 2807697 - DNA, 25 bp, Homo sapien
aatgaacaaataattttctgttaag

SEQ ID NO: 2807698 - DNA, 25 bp, Homo sapien
tcaatgaacaaataattttctgtta

SEQ ID NO: 2807699 - DNA, 25 bp, Homo sapien
caatgaacaaataattttctgttaa

SEQ ID NO: 2807700 - DNA, 25 bp, Homo sapien
tcgatgatcgggtacaattgtgctt

SEQ ID NO: 2807701 - DNA, 25 bp, Homo sapien
tgtaaacactctggctggtattctc

SEQ ID NO: 2807702 - DNA, 25 bp, Homo sapien
agttcaaaggcaaagtggtcgatga

SEQ ID NO: 2807703 - DNA, 25 bp, Homo sapien
ggtacaattgtgctttaaggagctc

SEQ ID NO: 2807704 - DNA, 25 bp, Homo sapien
gtccacttggtagtgatggctgttc

SEQ ID NO: 2807705 - DNA, 25 bp, Homo sapien
tgtccacttggtagtgatggctgtt

SEQ ID NO: 2807706 - DNA, 25 bp, Homo sapien
gatgtagcatcagataatccacgta

SEQ ID NO: 2807707 - DNA, 25 bp, Homo sapien
aattggttgggtgagaaagactaca

SEQ ID NO: 2807708 - DNA, 25 bp, Homo sapien
tctgagttgaaccatatgagaaagc

SEQ ID NO: 2807709 - DNA, 25 bp, Homo sapien
cttacagagtcaaggacatagtggg

SEQ ID NO: 2807710 - DNA, 25 bp, Homo sapien
gacactatctggatattttgcatga

SEQ ID NO: 2807711 - DNA, 25 bp, Homo sapien
taaaacactaaacatggccacaaag

SEQ ID NO: 2807712 - DNA, 25 bp, Homo sapien
tatctgcaatatatgtgcctactgt

SEQ ID NO: 2807713 - DNA, 25 bp, Homo sapien
tggccacaaagctttacggataaaa

SEQ ID NO: 2807714 - DNA, 25 bp, Homo sapien
ggagatcgaatccagccaagtgaca

SEQ ID NO: 2807715 - DNA, 25 bp, Homo sapien
tgttcatgtacttgtctccccacca

SEQ ID NO: 2807716 - DNA, 25 bp, Homo sapien
gaaagagaatctgaccacactctcc

SEQ ID NO: 2807717 - DNA, 25 bp, Homo sapien
tactggtcacagctggaagtaacca

SEQ ID NO: 2807718 - DNA, 25 bp, Homo sapien
agtgagaacattcacgggcccagca

SEQ ID NO: 2807719 - DNA, 25 bp, Homo sapien
ccattctggtaatgttgtgaaacta

SEQ ID NO: 2807720 - DNA, 25 bp, Homo sapien
tagggaggcgacagaccattctggt

SEQ ID NO: 2807721 - DNA, 25 bp, Homo sapien
attgttcctaattggtagggaggcg

SEQ ID NO: 2807722 - DNA, 25 bp, Homo sapien
ggtgtcacaagtgcttctacttgaa

SEQ ID NO: 2807723 - DNA, 25 bp, Homo sapien
ggggtgtcacaagtgcttctacttg

SEQ ID NO: 2807724 - DNA, 25 bp, Homo sapien
caagtgcttctacttgaaaattctt

SEQ ID NO: 2807725 - DNA, 25 bp, Homo sapien
tcacaagtgcttctacttgaaaatt

SEQ ID NO: 2807726 - DNA, 25 bp, Homo sapien
tggtccccagaagggacttgaagac

SEQ ID NO: 2807727 - DNA, 25 bp, Homo sapien
cccagaagggacttgaagacctcat

SEQ ID NO: 2807728 - DNA, 25 bp, Homo sapien
tccccagaagggacttgaagacctc

SEQ ID NO: 2807729 - DNA, 25 bp, Homo sapien
ccccagaagggacttgaagacctca

SEQ ID NO: 2807730 - DNA, 25 bp, Homo sapien
gaatatggtattaatattgccagtt

SEQ ID NO: 2807731 - DNA, 25 bp, Homo sapien
tgaatatggtattaatattgccagt

SEQ ID NO: 2807732 - DNA, 25 bp, Homo sapien
aatatggtattaatattgccagttt

SEQ ID NO: 2807733 - DNA, 25 bp, Homo sapien
caagatttttccaagttcaggtact

SEQ ID NO: 2807734 - DNA, 25 bp, Homo sapien
tcaagatttttccaagttcaggtac

SEQ ID NO: 2807735 - DNA, 25 bp, Homo sapien
gaatggcccttgtgcctgatccata

SEQ ID NO: 2807736 - DNA, 25 bp, Homo sapien
tctctttgtgggaggcattgcttca

SEQ ID NO: 2807737 - DNA, 25 bp, Homo sapien
tgcttcacggacctgacaggatgga

SEQ ID NO: 2807738 - DNA, 25 bp, Homo sapien
catgacagtagtttaggaactctct

SEQ ID NO: 2807739 - DNA, 25 bp, Homo sapien
acacacatttcaagattcattctgg

SEQ ID NO: 2807740 - DNA, 25 bp, Homo sapien
gttacacacatttcaagattcattc

SEQ ID NO: 2807741 - DNA, 25 bp, Homo sapien
tacacacatttcaagattcattctg

SEQ ID NO: 2807742 - DNA, 25 bp, Homo sapien
ttacacacatttcaagattcattct

SEQ ID NO: 2807743 - DNA, 25 bp, Homo sapien
gatttatgatggcactgtcaagaaa

SEQ ID NO: 2807744 - DNA, 25 bp, Homo sapien
ctgtagagtggtggtgtagcagctg

SEQ ID NO: 2807745 - DNA, 25 bp, Homo sapien
cccgcagctgcatggatttatgatg

SEQ ID NO: 2807746 - DNA, 25 bp, Homo sapien
cacagtagctggctttagctgcaaa

SEQ ID NO: 2807747 - DNA, 25 bp, Homo sapien
aagtacagaactgtctttgaattgt

SEQ ID NO: 2807748 - DNA, 25 bp, Homo sapien
tgaagagcttttgtggcctttaaca

SEQ ID NO: 2807749 - DNA, 25 bp, Homo sapien
cataatttatcttgagagtactacc

SEQ ID NO: 2807750 - DNA, 25 bp, Homo sapien
tcttgagagtactaccccaacaagg

SEQ ID NO: 2807751 - DNA, 25 bp, Homo sapien
gcactgatcgcatttgcaattggca

SEQ ID NO: 2807752 - DNA, 25 bp, Homo sapien
cttgcgttgtatgaccttctgaggt

SEQ ID NO: 2807753 - DNA, 25 bp, Homo sapien
ccttctgaggtagcactgatcgcat

SEQ ID NO: 2807754 - DNA, 25 bp, Homo sapien
tgtatgaccttctgaggtagcactg

SEQ ID NO: 2807755 - DNA, 25 bp, Homo sapien
gaaggatggattgaattcatatctg

SEQ ID NO: 2807756 - DNA, 25 bp, Homo sapien
ccatctgacctcattatgtgtttct

SEQ ID NO: 2807757 - DNA, 25 bp, Homo sapien
aatataaaacagctcagtactgcca

SEQ ID NO: 2807758 - DNA, 25 bp, Homo sapien
tctctggagtgcatccctgggtttc

SEQ ID NO: 2807759 - DNA, 25 bp, Homo sapien
ttggtctctggtgcagagcacctgc

SEQ ID NO: 2807760 - DNA, 25 bp, Homo sapien
tcttgtgctctgcaacatctaccac

SEQ ID NO: 2807761 - DNA, 25 bp, Homo sapien
tctaccactgtgctgcgattatata

SEQ ID NO: 2807762 - DNA, 25 bp, Homo sapien
gtttgcatgcccgactatttgttct

SEQ ID NO: 2807763 - DNA, 25 bp, Homo sapien
ccaaattcagcatggtcatattcaa

SEQ ID NO: 2807764 - DNA, 25 bp, Homo sapien
cccaaattcagcatggtcatattca

SEQ ID NO: 2807765 - DNA, 25 bp, Homo sapien
cactgtttaaggttttccatcaagc

SEQ ID NO: 2807766 - DNA, 25 bp, Homo sapien
gattatttgccgctctgcatttaca

SEQ ID NO: 2807767 - DNA, 25 bp, Homo sapien
gtattagttctgattcctgagacac

SEQ ID NO: 2807768 - DNA, 25 bp, Homo sapien
tctctcatataagcgattatttgcc

SEQ ID NO: 2807769 - DNA, 25 bp, Homo sapien
cagcaatgtcctttttatgacccat

SEQ ID NO: 2807770 - DNA, 25 bp, Homo sapien
tcttccccagcaatgtcctttttat

SEQ ID NO: 2807771 - DNA, 25 bp, Homo sapien
ttctcttccccagcaatgtcctttt

SEQ ID NO: 2807772 - DNA, 25 bp, Homo sapien
ccccagcaatgtcctttttatgacc

SEQ ID NO: 2807773 - DNA, 25 bp, Homo sapien
ccttttggtgactctaactatgcta

SEQ ID NO: 2807774 - DNA, 25 bp, Homo sapien
acaaggactgtcaacttaaatggtc

SEQ ID NO: 2807775 - DNA, 25 bp, Homo sapien
ggaatgtttgcagtacagatctaag

SEQ ID NO: 2807776 - DNA, 25 bp, Homo sapien
ttctataggaaaagtgccagatcag

SEQ ID NO: 2807777 - DNA, 25 bp, Homo sapien
actaccagaaattaggaaatgggca

SEQ ID NO: 2807778 - DNA, 25 bp, Homo sapien
tgggcataaacagattatccctcac

SEQ ID NO: 2807779 - DNA, 25 bp, Homo sapien
tatgtgagcatgaaggaagatacca

SEQ ID NO: 2807780 - DNA, 25 bp, Homo sapien
atcctatgtgagcatgaaggaagat

SEQ ID NO: 2807781 - DNA, 25 bp, Homo sapien
aaattgccttagtagaatatctctg

SEQ ID NO: 2807782 - DNA, 25 bp, Homo sapien
taaacgccaaagagatgaatctatg

SEQ ID NO: 2807783 - DNA, 25 bp, Homo sapien
tagactcgcccaaacacttaaacgc

SEQ ID NO: 2807784 - DNA, 25 bp, Homo sapien
tgaatctatgggaagggtgcttttc

SEQ ID NO: 2807785 - DNA, 25 bp, Homo sapien
gaaaatatgtttccccaagctcatg

SEQ ID NO: 2807786 - DNA, 25 bp, Homo sapien
caactttgggacattaagacatcag

SEQ ID NO: 2807787 - DNA, 25 bp, Homo sapien
gatggcatctaacctcaaggtaaga

SEQ ID NO: 2807788 - DNA, 25 bp, Homo sapien
tgtaactacttagagcaactttggg

SEQ ID NO: 2807789 - DNA, 25 bp, Homo sapien
cccagggtgtttatttatcaagcct

SEQ ID NO: 2807790 - DNA, 25 bp, Homo sapien
gtgtttatttatcaagccttctaag

SEQ ID NO: 2807791 - DNA, 25 bp, Homo sapien
gtctacttctataacagagaactcc

SEQ ID NO: 2807792 - DNA, 25 bp, Homo sapien
tttcttaaaacccagagctgagaaa

SEQ ID NO: 2807793 - DNA, 25 bp, Homo sapien
ttcagtgtcatatggatcaaagagt

SEQ ID NO: 2807794 - DNA, 25 bp, Homo sapien
agttcagagttcagtgcatggatgt

SEQ ID NO: 2807795 - DNA, 25 bp, Homo sapien
tgtcatatggatcaaagagttcaga

SEQ ID NO: 2807796 - DNA, 25 bp, Homo sapien
catggatgtttaacttagcttttga

SEQ ID NO: 2807797 - DNA, 25 bp, Homo sapien
tccttctgcaggtaacgggtggcct

SEQ ID NO: 2807798 - DNA, 25 bp, Homo sapien
gtggccttaggcctagaggcaatca

SEQ ID NO: 2807799 - DNA, 25 bp, Homo sapien
taggcctagaggcaatcaattttga

SEQ ID NO: 2807800 - DNA, 25 bp, Homo sapien
ttctgcaggtaacgggtggccttag

SEQ ID NO: 2807801 - DNA, 25 bp, Homo sapien
ccttctccatggcccggttcagctc

SEQ ID NO: 2807802 - DNA, 25 bp, Homo sapien
ggttcagctcctactctgctaccag

SEQ ID NO: 2807803 - DNA, 25 bp, Homo sapien
ctccatggcccggttcagctcctac

SEQ ID NO: 2807804 - DNA, 25 bp, Homo sapien
atggcccggttcagctcctactctg

SEQ ID NO: 2807805 - DNA, 25 bp, Homo sapien
cttggatcctaaggatggaagtata

SEQ ID NO: 2807806 - DNA, 25 bp, Homo sapien
ggaagcagttccagttacccgtgat

SEQ ID NO: 2807807 - DNA, 25 bp, Homo sapien
tcctggaaattgctatggaagaatc

SEQ ID NO: 2807808 - DNA, 25 bp, Homo sapien
ttttagcatgtcattggaagcagtt

SEQ ID NO: 2807809 - DNA, 25 bp, Homo sapien
ctccagggtagatgaggtccgtggg

SEQ ID NO: 2807810 - DNA, 25 bp, Homo sapien
acagaacggagcaccatcttgcaat

SEQ ID NO: 2807811 - DNA, 25 bp, Homo sapien
gaacggagcaccatcttgcaatttt

SEQ ID NO: 2807812 - DNA, 25 bp, Homo sapien
gaagcctcaaaaaactcaacgtgaa

SEQ ID NO: 2807813 - DNA, 25 bp, Homo sapien
tgtatcctggaaaattttgggtgag

SEQ ID NO: 2807814 - DNA, 25 bp, Homo sapien
ttgtatcctggaaaattttgggtga

SEQ ID NO: 2807815 - DNA, 25 bp, Homo sapien
cttgtatcctggaaaattttgggtg

SEQ ID NO: 2807816 - DNA, 25 bp, Homo sapien
tggaaaattttgggtgaggggagca

SEQ ID NO: 2807817 - DNA, 25 bp, Homo sapien
ttaagtaatgttgcgaagtaagcag

SEQ ID NO: 2807818 - DNA, 25 bp, Homo sapien
aaggctacaagtattaggaaatatc

SEQ ID NO: 2807819 - DNA, 25 bp, Homo sapien
acttcagggaccattactggcctaa

SEQ ID NO: 2807820 - DNA, 25 bp, Homo sapien
tcagataattatctccacactgtgt

SEQ ID NO: 2807821 - DNA, 25 bp, Homo sapien
tgaaggaacaaatgggctccatgtg

SEQ ID NO: 2807822 - DNA, 25 bp, Homo sapien
gaaggaacaaatgggctccatgtgg

SEQ ID NO: 2807823 - DNA, 25 bp, Homo sapien
ttgaaggaacaaatgggctccatgt

SEQ ID NO: 2807824 - DNA, 25 bp, Homo sapien
aggaacaaatgggctccatgtggtg

SEQ ID NO: 2807825 - DNA, 25 bp, Homo sapien
gctatatcggcaggacaatccagat

SEQ ID NO: 2807826 - DNA, 25 bp, Homo sapien
cagtgtgtggacacctcttttcaag

SEQ ID NO: 2807827 - DNA, 25 bp, Homo sapien
gagaacaacctaatcatatgcctga

SEQ ID NO: 2807828 - DNA, 25 bp, Homo sapien
ggtattacctaatagctggctgcta

SEQ ID NO: 2807829 - DNA, 25 bp, Homo sapien
tgtgtaacctctgcattttgctgtc

SEQ ID NO: 2807830 - DNA, 25 bp, Homo sapien
taacctctgcattttgctgtctgtg

SEQ ID NO: 2807831 - DNA, 25 bp, Homo sapien
acctctgcattttgctgtctgtgac

SEQ ID NO: 2807832 - DNA, 25 bp, Homo sapien
tgtaacctctgcattttgctgtctg

SEQ ID NO: 2807833 - DNA, 25 bp, Homo sapien
gaatgaaaagtacgatttaatgttc

SEQ ID NO: 2807834 - DNA, 25 bp, Homo sapien
gcagaatggtatcataggacagtgt

SEQ ID NO: 2807835 - DNA, 25 bp, Homo sapien
ataggacagtgtgatggaatttttc

SEQ ID NO: 2807836 - DNA, 25 bp, Homo sapien
ggacagtgtgatggaatttttcttt

SEQ ID NO: 2807837 - DNA, 25 bp, Homo sapien
gaactttaaccatgatatccttggg

SEQ ID NO: 2807838 - DNA, 25 bp, Homo sapien
aagcagcttcaatgtgagacacatt

SEQ ID NO: 2807839 - DNA, 25 bp, Homo sapien
gagacacattaacacacacttgaag

SEQ ID NO: 2807840 - DNA, 25 bp, Homo sapien
acacactggaactttaaccatgata

SEQ ID NO: 2807841 - DNA, 25 bp, Homo sapien
tctttagcaattaagttagtcaaac

SEQ ID NO: 2807842 - DNA, 25 bp, Homo sapien
gcaattaagttagtcaaactgatat

SEQ ID NO: 2807843 - DNA, 25 bp, Homo sapien
ttagcaattaagttagtcaaactga

SEQ ID NO: 2807844 - DNA, 25 bp, Homo sapien
gcataatctttagcaattaagttag

SEQ ID NO: 2807845 - DNA, 25 bp, Homo sapien
tttcatactgatggagataaaatgc

SEQ ID NO: 2807846 - DNA, 25 bp, Homo sapien
cttaaatccctctatgccatgctga

SEQ ID NO: 2807847 - DNA, 25 bp, Homo sapien
cctctcgagttagctctgattatgc

SEQ ID NO: 2807848 - DNA, 25 bp, Homo sapien
catgctgagttgctaagggctgttg

SEQ ID NO: 2807849 - DNA, 25 bp, Homo sapien
atttgtcctctggagaagcaatgtg

SEQ ID NO: 2807850 - DNA, 25 bp, Homo sapien
tccacattgtgctataagagctact

SEQ ID NO: 2807851 - DNA, 25 bp, Homo sapien
ccacattgtgctataagagctactt

SEQ ID NO: 2807852 - DNA, 25 bp, Homo sapien
ttccacattgtgctataagagctac

SEQ ID NO: 2807853 - DNA, 25 bp, Homo sapien
gctttgtaatatctctgagatcagt

SEQ ID NO: 2807854 - DNA, 25 bp, Homo sapien
gagagacgagaagaaagaaatttga

SEQ ID NO: 2807855 - DNA, 25 bp, Homo sapien
accaaagctcggtgacttgagaggc

SEQ ID NO: 2807856 - DNA, 25 bp, Homo sapien
tctgagatcagtcagggagagacga

SEQ ID NO: 2807857 - DNA, 25 bp, Homo sapien
ctatgatctctcttgataccattga

SEQ ID NO: 2807858 - DNA, 25 bp, Homo sapien
tatgatctctcttgataccattgac

SEQ ID NO: 2807859 - DNA, 25 bp, Homo sapien
gacatgaaaatgcaggcaccaaggg

SEQ ID NO: 2807860 - DNA, 25 bp, Homo sapien
cccagtttcattggggagcagtcca

SEQ ID NO: 2807861 - DNA, 25 bp, Homo sapien
gcaccaagggcctaacgctgtcctt

SEQ ID NO: 2807862 - DNA, 25 bp, Homo sapien
tccaaagaacacagcatggttgcag

SEQ ID NO: 2807863 - DNA, 25 bp, Homo sapien
tctaatgttgaggacggcacatgga

SEQ ID NO: 2807864 - DNA, 25 bp, Homo sapien
aatattcaaaaggttaaggtgtctg

SEQ ID NO: 2807865 - DNA, 25 bp, Homo sapien
gcacatggataatttacgattccca

SEQ ID NO: 2807866 - DNA, 25 bp, Homo sapien
aagctgcagagggaaattaatattc

SEQ ID NO: 2807867 - DNA, 25 bp, Homo sapien
ttgatgtaaaagcttatcatttttc

SEQ ID NO: 2807868 - DNA, 25 bp, Homo sapien
tcagtttcatggatatcatcaatca

SEQ ID NO: 2807869 - DNA, 25 bp, Homo sapien
tatcatcaatcaagataccgtagta

SEQ ID NO: 2807870 - DNA, 25 bp, Homo sapien
gataccgtagtataaactatttctg

SEQ ID NO: 2807871 - DNA, 25 bp, Homo sapien
attgctaaatacctagtctcagttt

SEQ ID NO: 2807872 - DNA, 25 bp, Homo sapien
ttcataggcagtaatttcatactgt

SEQ ID NO: 2807873 - DNA, 25 bp, Homo sapien
taaatgagagtataccttctaattt

SEQ ID NO: 2807874 - DNA, 25 bp, Homo sapien
ttcatactgttgattccctcttgac

SEQ ID NO: 2807875 - DNA, 25 bp, Homo sapien
ctgttgattccctcttgaccttgtg

SEQ ID NO: 2807876 - DNA, 25 bp, Homo sapien
gggtcaaaggaaagcaatggccatg

SEQ ID NO: 2807877 - DNA, 25 bp, Homo sapien
gtcaaaggaaagcaatggccatgac

SEQ ID NO: 2807878 - DNA, 25 bp, Homo sapien
gagaaggggtcaaaggaaagcaatg

SEQ ID NO: 2807879 - DNA, 25 bp, Homo sapien
aggggtcaaaggaaagcaatggcca

SEQ ID NO: 2807880 - DNA, 25 bp, Homo sapien
ggagacttcaattcattattgtaac

SEQ ID NO: 2807881 - DNA, 25 bp, Homo sapien
tgaatatcaagggttgagtagtgct

SEQ ID NO: 2807882 - DNA, 25 bp, Homo sapien
tatacctgctgttgggagacttcaa

SEQ ID NO: 2807883 - DNA, 25 bp, Homo sapien
gatagatataaccagttaaaggtga

SEQ ID NO: 2807884 - DNA, 25 bp, Homo sapien
ttgaaaagtcgcttgctataaccag

SEQ ID NO: 2807885 - DNA, 25 bp, Homo sapien
tggctcacccttttgctaacattgg

SEQ ID NO: 2807886 - DNA, 25 bp, Homo sapien
tcaatatcgtacttgaaaagtcgct

SEQ ID NO: 2807887 - DNA, 25 bp, Homo sapien
gaaaattttgagtaccgctctgtgg

SEQ ID NO: 2807888 - DNA, 25 bp, Homo sapien
ggttttgagaagcttcctgcagttg

SEQ ID NO: 2807889 - DNA, 25 bp, Homo sapien
tgttagtgtcaattcagcctctgca

SEQ ID NO: 2807890 - DNA, 25 bp, Homo sapien
tgcagttggctgccatcgactcctc

SEQ ID NO: 2807891 - DNA, 25 bp, Homo sapien
cataaggagctttgcaggttttgag

SEQ ID NO: 2807892 - DNA, 25 bp, Homo sapien
gtgctgggtcacagtctaacttaat

SEQ ID NO: 2807893 - DNA, 25 bp, Homo sapien
tcacagtctaacttaataaggcccg

SEQ ID NO: 2807894 - DNA, 25 bp, Homo sapien
tctaacttaataaggcccgccacag

SEQ ID NO: 2807895 - DNA, 25 bp, Homo sapien
taaggcccgccacagagagttggtc

SEQ ID NO: 2807896 - DNA, 25 bp, Homo sapien
gttcactaccctgcatataaattgt

SEQ ID NO: 2807897 - DNA, 25 bp, Homo sapien
tacactgtccttggttgagaaatgt

SEQ ID NO: 2807898 - DNA, 25 bp, Homo sapien
tagcacatctggtacactgtccttg

SEQ ID NO: 2807899 - DNA, 25 bp, Homo sapien
tctgattgctcccataagtcttagc

SEQ ID NO: 2807900 - DNA, 25 bp, Homo sapien
gcactgtatatttgtgtgagctttt

SEQ ID NO: 2807901 - DNA, 25 bp, Homo sapien
ccgtttgggatattcacagaatcct

SEQ ID NO: 2807902 - DNA, 25 bp, Homo sapien
tcctatggttctaatttgcaatcgt

SEQ ID NO: 2807903 - DNA, 25 bp, Homo sapien
aactgtcttttgtcagactttgagg

SEQ ID NO: 2807904 - DNA, 25 bp, Homo sapien
ggttctaatttgcaatcgtaactgc

SEQ ID NO: 2807905 - DNA, 25 bp, Homo sapien
tacattgactacatctgttgatcat

SEQ ID NO: 2807906 - DNA, 25 bp, Homo sapien
gatgtgtagtcactgtatcaccagc

SEQ ID NO: 2807907 - DNA, 25 bp, Homo sapien
taaaatacacgaaatcatgggctgg

SEQ ID NO: 2807908 - DNA, 25 bp, Homo sapien
gaatatgtagtcagtggaaaccatg

SEQ ID NO: 2807909 - DNA, 25 bp, Homo sapien
ggaaaccatgattttgttgtaataa

SEQ ID NO: 2807910 - DNA, 25 bp, Homo sapien
caactttggtcagcaccctgacagc

SEQ ID NO: 2807911 - DNA, 25 bp, Homo sapien
gtcatcttcctcgtatttgtttggc

SEQ ID NO: 2807912 - DNA, 25 bp, Homo sapien
gcaagtttcctggcattgtcatctt

SEQ ID NO: 2807913 - DNA, 25 bp, Homo sapien
cagcaggtgcagtcataggaaagga

SEQ ID NO: 2807914 - DNA, 25 bp, Homo sapien
ttgacttacgggcatcagaataatg

SEQ ID NO: 2807915 - DNA, 25 bp, Homo sapien
tacgggcatcagaataatgacagca

SEQ ID NO: 2807916 - DNA, 25 bp, Homo sapien
ggttttgacttacgggcatcagaat

SEQ ID NO: 2807917 - DNA, 25 bp, Homo sapien
cttacgggcatcagaataatgacag

SEQ ID NO: 2807918 - DNA, 25 bp, Homo sapien
ctgtaaatagtgattttctactcca

SEQ ID NO: 2807919 - DNA, 25 bp, Homo sapien
gctgtaaatagtgattttctactcc

SEQ ID NO: 2807920 - DNA, 25 bp, Homo sapien
ttgctgtaaatagtgattttctact

SEQ ID NO: 2807921 - DNA, 25 bp, Homo sapien
tgctgtaaatagtgattttctactc

SEQ ID NO: 2807922 - DNA, 25 bp, Homo sapien
tcactccacatttatctctctgtac

SEQ ID NO: 2807923 - DNA, 25 bp, Homo sapien
gtgacccagctgatattgactggtt

SEQ ID NO: 2807924 - DNA, 25 bp, Homo sapien
tagtcttcagtccatgtgacccagc

SEQ ID NO: 2807925 - DNA, 25 bp, Homo sapien
tgactggttctgaataaaggccctg

SEQ ID NO: 2807926 - DNA, 25 bp, Homo sapien
aagggcaaggtcgtgcaggctcctt

SEQ ID NO: 2807927 - DNA, 25 bp, Homo sapien
cagttggatttctttgcttgtgaca

SEQ ID NO: 2807928 - DNA, 25 bp, Homo sapien
tcaagaccccagttggatttctttg

SEQ ID NO: 2807929 - DNA, 25 bp, Homo sapien
tctttgcttgtgacagccttaaagg

SEQ ID NO: 2807930 - DNA, 25 bp, Homo sapien
tgtgacagccttaaaggtggtttca

SEQ ID NO: 2807931 - DNA, 25 bp, Homo sapien
accacaagagagagtttatcgtttc

SEQ ID NO: 2807932 - DNA, 25 bp, Homo sapien
gagagtttatcgtttctcatgggta

SEQ ID NO: 2807933 - DNA, 25 bp, Homo sapien
gtttctcatgggtaagccatagcct

SEQ ID NO: 2807934 - DNA, 25 bp, Homo sapien
ttatcgtttctcatgggtaagccat

SEQ ID NO: 2807935 - DNA, 25 bp, Homo sapien
gagagctttatctcaatagccccac

SEQ ID NO: 2807936 - DNA, 25 bp, Homo sapien
taatcccataggtacttggagagct

SEQ ID NO: 2807937 - DNA, 25 bp, Homo sapien
cttggagagctttatctcaatagcc

SEQ ID NO: 2807938 - DNA, 25 bp, Homo sapien
ctaatcccataggtacttggagagc

SEQ ID NO: 2807939 - DNA, 25 bp, Homo sapien
gtctcctccataagttgtggcatca

SEQ ID NO: 2807940 - DNA, 25 bp, Homo sapien
ccctcctgacaatcatgatggaatt

SEQ ID NO: 2807941 - DNA, 25 bp, Homo sapien
ctcctgacaatcatgatggaattag

SEQ ID NO: 2807942 - DNA, 25 bp, Homo sapien
ggaattaggcatgaactgttctgtc

SEQ ID NO: 2807943 - DNA, 25 bp, Homo sapien
tggtaattccccattgtgaggactc

SEQ ID NO: 2807944 - DNA, 25 bp, Homo sapien
ggactctgatctcagccttatcttt

SEQ ID NO: 2807945 - DNA, 25 bp, Homo sapien
ccagaatgatggatccttgctaact

SEQ ID NO: 2807946 - DNA, 25 bp, Homo sapien
gaccacatccccattggagagtttg

SEQ ID NO: 2807947 - DNA, 25 bp, Homo sapien
tcttgaatgaaacaccaggtaacag

SEQ ID NO: 2807948 - DNA, 25 bp, Homo sapien
caccaggtaacagatgggaatcctc

SEQ ID NO: 2807949 - DNA, 25 bp, Homo sapien
ttttggggttgcatttccaacacca

SEQ ID NO: 2807950 - DNA, 25 bp, Homo sapien
cagatgggaatcctctagggctcca

SEQ ID NO: 2807951 - DNA, 25 bp, Homo sapien
caaaccatcaagcatcatcactgca

SEQ ID NO: 2807952 - DNA, 25 bp, Homo sapien
caatcattttaagctgcagcaaacc

SEQ ID NO: 2807953 - DNA, 25 bp, Homo sapien
cctgtatcttcttgattccaatcat

SEQ ID NO: 2807954 - DNA, 25 bp, Homo sapien
gctgcagcaaaccatcaagcatcat

SEQ ID NO: 2807955 - DNA, 25 bp, Homo sapien
ggcacacttctccaagcagcttctt

SEQ ID NO: 2807956 - DNA, 25 bp, Homo sapien
tcagagcaggatggcacacttctcc

SEQ ID NO: 2807957 - DNA, 25 bp, Homo sapien
ctttctgctgggagatgagcttgga

SEQ ID NO: 2807958 - DNA, 25 bp, Homo sapien
cttggagctcagagcaggatggcac

SEQ ID NO: 2807959 - DNA, 25 bp, Homo sapien
tgccaattggatggctgtgcgtaaa

SEQ ID NO: 2807960 - DNA, 25 bp, Homo sapien
gatcttcaggtgcaaaccttcctcc

SEQ ID NO: 2807961 - DNA, 25 bp, Homo sapien
ggtggtgctatcacccaccttggca

SEQ ID NO: 2807962 - DNA, 25 bp, Homo sapien
tttgttatcattaactgccaattgg

SEQ ID NO: 2807963 - DNA, 25 bp, Homo sapien
tcaagaagattgttgcttgcctctg

SEQ ID NO: 2807964 - DNA, 25 bp, Homo sapien
ttcaagaagattgttgcttgcctct

SEQ ID NO: 2807965 - DNA, 25 bp, Homo sapien
aagaagattgttgcttgcctctgcc

SEQ ID NO: 2807966 - DNA, 25 bp, Homo sapien
caagaagattgttgcttgcctctgc

SEQ ID NO: 2807967 - DNA, 25 bp, Homo sapien
ctcaaagatttttctaggccaattt

SEQ ID NO: 2807968 - DNA, 25 bp, Homo sapien
ttttctaggccaatttctttcgtca

SEQ ID NO: 2807969 - DNA, 25 bp, Homo sapien
tttctaggccaatttctttcgtcat

SEQ ID NO: 2807970 - DNA, 25 bp, Homo sapien
tctctcaaagatttttctaggccaa

SEQ ID NO: 2807971 - DNA, 25 bp, Homo sapien
tcccccaagtgaattgtaaattcat

SEQ ID NO: 2807972 - DNA, 25 bp, Homo sapien
ttcccccaagtgaattgtaaattca

SEQ ID NO: 2807973 - DNA, 25 bp, Homo sapien
taaattcatagagatcagggatcat

SEQ ID NO: 2807974 - DNA, 25 bp, Homo sapien
ttgtaaattcatagagatcagggat

SEQ ID NO: 2807975 - DNA, 25 bp, Homo sapien
cactgataattcagccactgagcca

SEQ ID NO: 2807976 - DNA, 25 bp, Homo sapien
aagcaaaatggtgacaggcatggta

SEQ ID NO: 2807977 - DNA, 25 bp, Homo sapien
catttctaatcattgaaaacatgca

SEQ ID NO: 2807978 - DNA, 25 bp, Homo sapien
gcatggtagagatgacctggagtaa

SEQ ID NO: 2807979 - DNA, 25 bp, Homo sapien
tcaaactcctaactcctggaaaatg

SEQ ID NO: 2807980 - DNA, 25 bp, Homo sapien
actcctaactcctggaaaatggaat

SEQ ID NO: 2807981 - DNA, 25 bp, Homo sapien
caaactcctaactcctggaaaatgg

SEQ ID NO: 2807982 - DNA, 25 bp, Homo sapien
cctaactcctggaaaatggaatcac

SEQ ID NO: 2807983 - DNA, 25 bp, Homo sapien
actggtatcaaagccaagcccatcg

SEQ ID NO: 2807984 - DNA, 25 bp, Homo sapien
ccaaggactgctgaactaagagtgt

SEQ ID NO: 2807985 - DNA, 25 bp, Homo sapien
ttccagagtcacattccagttcagg

SEQ ID NO: 2807986 - DNA, 25 bp, Homo sapien
gttcctactctgcaagccaactggt

SEQ ID NO: 2807987 - DNA, 25 bp, Homo sapien
ttgggtgcttcactcctgcaacctt

SEQ ID NO: 2807988 - DNA, 25 bp, Homo sapien
tgggcttgggtgcttcactcctgca

SEQ ID NO: 2807989 - DNA, 25 bp, Homo sapien
gcttgggtgcttcactcctgcaacc

SEQ ID NO: 2807990 - DNA, 25 bp, Homo sapien
gggtgcttcactcctgcaacctttc

SEQ ID NO: 2807991 - DNA, 25 bp, Homo sapien
gaactctaaagactgtgtttaatgt

SEQ ID NO: 2807992 - DNA, 25 bp, Homo sapien
ttgcctctgatgtgtctggtgcacc

SEQ ID NO: 2807993 - DNA, 25 bp, Homo sapien
cctctgatgtgtctggtgcacctgc

SEQ ID NO: 2807994 - DNA, 25 bp, Homo sapien
gactgtgtttaatgtcagcaaaatc

SEQ ID NO: 2807995 - DNA, 25 bp, Homo sapien
tcctgttattgacaggagcccggaa

SEQ ID NO: 2807996 - DNA, 25 bp, Homo sapien
aaagttgaattggattaagtccctg

SEQ ID NO: 2807997 - DNA, 25 bp, Homo sapien
cccggaagacacattggagatggat

SEQ ID NO: 2807998 - DNA, 25 bp, Homo sapien
tttaggagctcctgttattgacagg

SEQ ID NO: 2807999 - DNA, 25 bp, Homo sapien
caaagtacaaaggcttgatactcct

SEQ ID NO: 2808000 - DNA, 25 bp, Homo sapien
aaaaatgggtgaatatttgactagt

SEQ ID NO: 2808001 - DNA, 25 bp, Homo sapien
aatgggtgaatatttgactagtggt

SEQ ID NO: 2808002 - DNA, 25 bp, Homo sapien
aaatgggtgaatatttgactagtgg

SEQ ID NO: 2808003 - DNA, 25 bp, Homo sapien
tgatccagctgaactcacaagcagt

SEQ ID NO: 2808004 - DNA, 25 bp, Homo sapien
ccagggctgagctattgatccagct

SEQ ID NO: 2808005 - DNA, 25 bp, Homo sapien
cagtagccttggatgtagtatacaa

SEQ ID NO: 2808006 - DNA, 25 bp, Homo sapien
catccagtatccagcagacaggcaa

SEQ ID NO: 2808007 - DNA, 25 bp, Homo sapien
tagcggtagtcaccagccaaatctg

SEQ ID NO: 2808008 - DNA, 25 bp, Homo sapien
gggcagtcagacaatgccagaggta

SEQ ID NO: 2808009 - DNA, 25 bp, Homo sapien
cagatgtgccatcccctataggcaa

SEQ ID NO: 2808010 - DNA, 25 bp, Homo sapien
gacttcccagatagctctaagcact

SEQ ID NO: 2808011 - DNA, 25 bp, Homo sapien
catgaacaggaataatagaagtgta

SEQ ID NO: 2808012 - DNA, 25 bp, Homo sapien
ccagtttcatgaacaggaataatag

SEQ ID NO: 2808013 - DNA, 25 bp, Homo sapien
gtttcatgaacaggaataatagaag

SEQ ID NO: 2808014 - DNA, 25 bp, Homo sapien
aggccagtttcatgaacaggaataa

SEQ ID NO: 2808015 - DNA, 25 bp, Homo sapien
ccttcacaaggggtttggacagcaa

SEQ ID NO: 2808016 - DNA, 25 bp, Homo sapien
ctacaggacagaaggttccttcaca

SEQ ID NO: 2808017 - DNA, 25 bp, Homo sapien
gacagcaaaggccttccaccaaagt

SEQ ID NO: 2808018 - DNA, 25 bp, Homo sapien
ctaaaaagcctgcagagagtttcca

SEQ ID NO: 2808019 - DNA, 25 bp, Homo sapien
tgtctcttctgagagtcctaatctc

SEQ ID NO: 2808020 - DNA, 25 bp, Homo sapien
ctctgtggcttatgatggctgcctt

SEQ ID NO: 2808021 - DNA, 25 bp, Homo sapien
cacatttgatcccaatctgaagtaa

SEQ ID NO: 2808022 - DNA, 25 bp, Homo sapien
cagaccgggtgtcttaacaacagaa

SEQ ID NO: 2808023 - DNA, 25 bp, Homo sapien
ttaagaactcaaatacaatgacgat

SEQ ID NO: 2808024 - DNA, 25 bp, Homo sapien
atacaatgacgataatgtgtaaaac

SEQ ID NO: 2808025 - DNA, 25 bp, Homo sapien
gaactcaaatacaatgacgataatg

SEQ ID NO: 2808026 - DNA, 25 bp, Homo sapien
ctcaaatacaatgacgataatgtgt

SEQ ID NO: 2808027 - DNA, 25 bp, Homo sapien
catcaattcctgatgtgtcattagg

SEQ ID NO: 2808028 - DNA, 25 bp, Homo sapien
cctgatgtgtcattaggctgcagat

SEQ ID NO: 2808029 - DNA, 25 bp, Homo sapien
aattcctgatgtgtcattaggctgc

SEQ ID NO: 2808030 - DNA, 25 bp, Homo sapien
gatgtgtcattaggctgcagattcc

SEQ ID NO: 2808031 - DNA, 25 bp, Homo sapien
ggttaagtgagtgagagtctctgaa

SEQ ID NO: 2808032 - DNA, 25 bp, Homo sapien
tcttgcaatagctgacaggaaataa

SEQ ID NO: 2808033 - DNA, 25 bp, Homo sapien
caacgggccgcttacagtaatagtc

SEQ ID NO: 2808034 - DNA, 25 bp, Homo sapien
taagatacatgcaagaaacaacggg

SEQ ID NO: 2808035 - DNA, 25 bp, Homo sapien
gtaatagtctaatcttttggaggcc

SEQ ID NO: 2808036 - DNA, 25 bp, Homo sapien
aggtcatgtaaggcggccactttgt

SEQ ID NO: 2808037 - DNA, 25 bp, Homo sapien
ctctggggtcaaacctgtctgttct

SEQ ID NO: 2808038 - DNA, 25 bp, Homo sapien
ccactttgtgactagctgttataaa

SEQ ID NO: 2808039 - DNA, 25 bp, Homo sapien
tcaccctgaaagcaacaccagccct

SEQ ID NO: 2808040 - DNA, 25 bp, Homo sapien
caacatttacttgatgtgggtcaca

SEQ ID NO: 2808041 - DNA, 25 bp, Homo sapien
tttctttatagacgtcaacatttac

SEQ ID NO: 2808042 - DNA, 25 bp, Homo sapien
tacttgatgtgggtcacaattcctt

SEQ ID NO: 2808043 - DNA, 25 bp, Homo sapien
tatagacgtcaacatttacttgatg

SEQ ID NO: 2808044 - DNA, 25 bp, Homo sapien
cacaatacacaggtagaagtaataa

SEQ ID NO: 2808045 - DNA, 25 bp, Homo sapien
tgggccattgaacactgtgaatttt

SEQ ID NO: 2808046 - DNA, 25 bp, Homo sapien
caatacacaggtagaagtaataagt

SEQ ID NO: 2808047 - DNA, 25 bp, Homo sapien
ataatgagttttgggccattgaaca

SEQ ID NO: 2808048 - DNA, 25 bp, Homo sapien
ttggatgtgactagcaatagctgag

SEQ ID NO: 2808049 - DNA, 25 bp, Homo sapien
tgagtagatgcctctttaattagtt

SEQ ID NO: 2808050 - DNA, 25 bp, Homo sapien
aatgcagctgatattactttggaag

SEQ ID NO: 2808051 - DNA, 25 bp, Homo sapien
tactttggaagaaggtagcatgtga

SEQ ID NO: 2808052 - DNA, 25 bp, Homo sapien
tgattccttctaccagaacctcaga

SEQ ID NO: 2808053 - DNA, 25 bp, Homo sapien
ttcctttccaccataggagccactc

SEQ ID NO: 2808054 - DNA, 25 bp, Homo sapien
ccataggagccactccaatattttt

SEQ ID NO: 2808055 - DNA, 25 bp, Homo sapien
caacaatgattccttctaccagaac

SEQ ID NO: 2808056 - DNA, 25 bp, Homo sapien
gatctgcaggttgtcacatataagc

SEQ ID NO: 2808057 - DNA, 25 bp, Homo sapien
tgccattgtgttggccctgcctttg

SEQ ID NO: 2808058 - DNA, 25 bp, Homo sapien
gactcaacgggaccagtgccattgt

SEQ ID NO: 2808059 - DNA, 25 bp, Homo sapien
tcttgtaggtgccacagaactcaga

SEQ ID NO: 2808060 - DNA, 25 bp, Homo sapien
tgtcaatggttgtaatgggttatta

SEQ ID NO: 2808061 - DNA, 25 bp, Homo sapien
tcttcagagccctgatctttactgg

SEQ ID NO: 2808062 - DNA, 25 bp, Homo sapien
gatctttactgggtgtcaatggttg

SEQ ID NO: 2808063 - DNA, 25 bp, Homo sapien
gagccctgatctttactgggtgtca

SEQ ID NO: 2808064 - DNA, 25 bp, Homo sapien
tagctgcagagtagactgagacagc

SEQ ID NO: 2808065 - DNA, 25 bp, Homo sapien
cagcaggtgaacaagtccaggagca

SEQ ID NO: 2808066 - DNA, 25 bp, Homo sapien
tcatcttgtggtgccccaacatgag

SEQ ID NO: 2808067 - DNA, 25 bp, Homo sapien
tggtgaaaataaggatggtccaaat

SEQ ID NO: 2808068 - DNA, 25 bp, Homo sapien
gatttttactaagggtcagcataag

SEQ ID NO: 2808069 - DNA, 25 bp, Homo sapien
ttggttcatctgagaaatgctggtg

SEQ ID NO: 2808070 - DNA, 25 bp, Homo sapien
ggtgttctgatgcatccccagtcaa

SEQ ID NO: 2808071 - DNA, 25 bp, Homo sapien
cacattgacatgactgtaatacagc

SEQ ID NO: 2808072 - DNA, 25 bp, Homo sapien
acagcattttgatgtggacttggca

SEQ ID NO: 2808073 - DNA, 25 bp, Homo sapien
attttgatgtggacttggcaaagaa

SEQ ID NO: 2808074 - DNA, 25 bp, Homo sapien
gcattttgatgtggacttggcaaag

SEQ ID NO: 2808075 - DNA, 25 bp, Homo sapien
cattttgatgtggacttggcaaaga

SEQ ID NO: 2808076 - DNA, 25 bp, Homo sapien
ttccagctggcaaggcattaaggag

SEQ ID NO: 2808077 - DNA, 25 bp, Homo sapien
tgcttcctttgtgggcaatgcaaga

SEQ ID NO: 2808078 - DNA, 25 bp, Homo sapien
tgtgggcaatgcaagaggctctttt

SEQ ID NO: 2808079 - DNA, 25 bp, Homo sapien
tccagctggcaaggcattaaggagg

SEQ ID NO: 2808080 - DNA, 25 bp, Homo sapien
cagaatgactaatttactggagaag

SEQ ID NO: 2808081 - DNA, 25 bp, Homo sapien
aaatgctgtaggcagccaaccagaa

SEQ ID NO: 2808082 - DNA, 25 bp, Homo sapien
tgtctctttgttctcggttctactg

SEQ ID NO: 2808083 - DNA, 25 bp, Homo sapien
tgttctcggttctactgctttcaca

SEQ ID NO: 2808084 - DNA, 25 bp, Homo sapien
ttcatttaaaagagagccgctgtgc

SEQ ID NO: 2808085 - DNA, 25 bp, Homo sapien
cagcctacacttggtttacccttgg

SEQ ID NO: 2808086 - DNA, 25 bp, Homo sapien
tattttcgcattggcagtgtacgca

SEQ ID NO: 2808087 - DNA, 25 bp, Homo sapien
taaagctagtttgatacaatgccag

SEQ ID NO: 2808088 - DNA, 25 bp, Homo sapien
gccatcctggcgtcagcggcatacg

SEQ ID NO: 2808089 - DNA, 25 bp, Homo sapien
tggcgtcagcggcatacgcagccat

SEQ ID NO: 2808090 - DNA, 25 bp, Homo sapien
atcctggcgtcagcggcatacgcag

SEQ ID NO: 2808091 - DNA, 25 bp, Homo sapien
agcggcatacgcagccatgcggctg

SEQ ID NO: 2808092 - DNA, 25 bp, Homo sapien
gtataaaaggataatcctgtgttct

SEQ ID NO: 2808093 - DNA, 25 bp, Homo sapien
ataaaaggataatcctgtgttctca

SEQ ID NO: 2808094 - DNA, 25 bp, Homo sapien
tataaaaggataatcctgtgttctc

SEQ ID NO: 2808095 - DNA, 25 bp, Homo sapien
taaaaggataatcctgtgttctcat

SEQ ID NO: 2808096 - DNA, 25 bp, Homo sapien
cattgctagattggcttccatttca

SEQ ID NO: 2808097 - DNA, 25 bp, Homo sapien
tacaatctaacttgctcaactgcat

SEQ ID NO: 2808098 - DNA, 25 bp, Homo sapien
tgtccaaagtttaggtgattatgtg

SEQ ID NO: 2808099 - DNA, 25 bp, Homo sapien
tccatttcagagatttgtccaaagt

SEQ ID NO: 2808100 - DNA, 25 bp, Homo sapien
aggcagccagcgtggaggccgtgaa

SEQ ID NO: 2808101 - DNA, 25 bp, Homo sapien
gcagccagcgtggaggccgtgaaga

SEQ ID NO: 2808102 - DNA, 25 bp, Homo sapien
cagccagcgtggaggccgtgaagat

SEQ ID NO: 2808103 - DNA, 25 bp, Homo sapien
gccagcgtggaggccgtgaagatgc

SEQ ID NO: 2808104 - DNA, 25 bp, Homo sapien
taagtagcttaaatggccactgaga

SEQ ID NO: 2808105 - DNA, 25 bp, Homo sapien
ttaaatggccactgagatgttctac

SEQ ID NO: 2808106 - DNA, 25 bp, Homo sapien
catttgactaagtagcttaaatggc

SEQ ID NO: 2808107 - DNA, 25 bp, Homo sapien
gcttaaatggccactgagatgttct

SEQ ID NO: 2808108 - DNA, 25 bp, Homo sapien
ccatttttgaataggagtagccact

SEQ ID NO: 2808109 - DNA, 25 bp, Homo sapien
aagtcgacaagaggagtttcatttt

SEQ ID NO: 2808110 - DNA, 25 bp, Homo sapien
tatctatgctcttgctttccatttt

SEQ ID NO: 2808111 - DNA, 25 bp, Homo sapien
agcaggcaggctatgaggagcattc

SEQ ID NO: 2808112 - DNA, 25 bp, Homo sapien
tcatgcttgggtgttctaataacca

SEQ ID NO: 2808113 - DNA, 25 bp, Homo sapien
cgtaacatgaagaacgtctcatgct

SEQ ID NO: 2808114 - DNA, 25 bp, Homo sapien
gttacgtaacatgaagaacgtctca

SEQ ID NO: 2808115 - DNA, 25 bp, Homo sapien
gaagaacgtctcatgcttgggtgtt

SEQ ID NO: 2808116 - DNA, 25 bp, Homo sapien
taagcttcattacccacagtatttc

SEQ ID NO: 2808117 - DNA, 25 bp, Homo sapien
ctgaatataagcttcattacccaca

SEQ ID NO: 2808118 - DNA, 25 bp, Homo sapien
acagtatttctcaaagatccctctc

SEQ ID NO: 2808119 - DNA, 25 bp, Homo sapien
cccacagtatttctcaaagatccct

SEQ ID NO: 2808120 - DNA, 25 bp, Homo sapien
gtatttttacgtctccactgggaca

SEQ ID NO: 2808121 - DNA, 25 bp, Homo sapien
tgggtcccatgttccccttgaagaa

SEQ ID NO: 2808122 - DNA, 25 bp, Homo sapien
tatgtatgtttccacagaaaccgta

SEQ ID NO: 2808123 - DNA, 25 bp, Homo sapien
cagtcgctgggtagaaatgctacag

SEQ ID NO: 2808124 - DNA, 25 bp, Homo sapien
accggccctggctcgtctgctatct

SEQ ID NO: 2808125 - DNA, 25 bp, Homo sapien
cgtctgctatctccaggtggcagct

SEQ ID NO: 2808126 - DNA, 25 bp, Homo sapien
gctcgtctgctatctccaggtggca

SEQ ID NO: 2808127 - DNA, 25 bp, Homo sapien
cctggctcgtctgctatctccaggt

SEQ ID NO: 2808128 - DNA, 25 bp, Homo sapien
cagttgggccttgccaatataggtc

SEQ ID NO: 2808129 - DNA, 25 bp, Homo sapien
cacgggcttttcatgaaccaggacc

SEQ ID NO: 2808130 - DNA, 25 bp, Homo sapien
gctattgccgactggcctaagacag

SEQ ID NO: 2808131 - DNA, 25 bp, Homo sapien
tattgtggcctaaacaggctattgc

SEQ ID NO: 2808132 - DNA, 25 bp, Homo sapien
acccgatccgaacacccacagacat

SEQ ID NO: 2808133 - DNA, 25 bp, Homo sapien
aactctatagcctaacccgatccga

SEQ ID NO: 2808134 - DNA, 25 bp, Homo sapien
tctatagcctaacccgatccgaaca

SEQ ID NO: 2808135 - DNA, 25 bp, Homo sapien
atagccaactctatagcctaacccg

SEQ ID NO: 2808136 - DNA, 25 bp, Homo sapien
tgccctatctccctgcctagcccca

SEQ ID NO: 2808137 - DNA, 25 bp, Homo sapien
ctccagctagggtggcagactgaga

SEQ ID NO: 2808138 - DNA, 25 bp, Homo sapien
agctagggtggcagactgagaccct

SEQ ID NO: 2808139 - DNA, 25 bp, Homo sapien
tagggtggcagactgagaccctgaa

SEQ ID NO: 2808140 - DNA, 25 bp, Homo sapien
tccagctagggtggcagactgagac

SEQ ID NO: 2808141 - DNA, 25 bp, Homo sapien
tgaattagtgccaagcccgcatggc

SEQ ID NO: 2808142 - DNA, 25 bp, Homo sapien
tcaggccgaccagctctcttggaat

SEQ ID NO: 2808143 - DNA, 25 bp, Homo sapien
ccctggtgacaacagccgacttctt

SEQ ID NO: 2808144 - DNA, 25 bp, Homo sapien
catggccagaatacctgtgggagcc

SEQ ID NO: 2808145 - DNA, 25 bp, Homo sapien
gatagctaactctgctaaagagacg

SEQ ID NO: 2808146 - DNA, 25 bp, Homo sapien
tctgtgagaagggaatatagcaccg

SEQ ID NO: 2808147 - DNA, 25 bp, Homo sapien
taaagagacgagctctctgggcagt

SEQ ID NO: 2808148 - DNA, 25 bp, Homo sapien
ggacacaaaatctccccgatatttg

SEQ ID NO: 2808149 - DNA, 25 bp, Homo sapien
tctgaaccacagaaaagggtctgct

SEQ ID NO: 2808150 - DNA, 25 bp, Homo sapien
tgaaccacagaaaagggtctgctga

SEQ ID NO: 2808151 - DNA, 25 bp, Homo sapien
aaccacagaaaagggtctgctgaga

SEQ ID NO: 2808152 - DNA, 25 bp, Homo sapien
tatttctgaaccacagaaaagggtc

SEQ ID NO: 2808153 - DNA, 25 bp, Homo sapien
tccttctctaaatgagagccaaaga

SEQ ID NO: 2808154 - DNA, 25 bp, Homo sapien
agatggagggttgtccatccttctc

SEQ ID NO: 2808155 - DNA, 25 bp, Homo sapien
ccatccttctctaaatgagagccaa

SEQ ID NO: 2808156 - DNA, 25 bp, Homo sapien
aattctgagatggagggttgtccat

SEQ ID NO: 2808157 - DNA, 25 bp, Homo sapien
tacataggcagtttgtgacaaagcc

SEQ ID NO: 2808158 - DNA, 25 bp, Homo sapien
acttgttgcttgtgctacataggca

SEQ ID NO: 2808159 - DNA, 25 bp, Homo sapien
ccttctgatgagtctgaataacctg

SEQ ID NO: 2808160 - DNA, 25 bp, Homo sapien
agactgtgtctccaaggctccatgc

SEQ ID NO: 2808161 - DNA, 25 bp, Homo sapien
ctctcacccctttggaataacaagt

SEQ ID NO: 2808162 - DNA, 25 bp, Homo sapien
cctctcacccctttggaataacaag

SEQ ID NO: 2808163 - DNA, 25 bp, Homo sapien
ggcatgaaagtgtacccacgccgct

SEQ ID NO: 2808164 - DNA, 25 bp, Homo sapien
aaagtgtacccacgccgctctgtgt

SEQ ID NO: 2808165 - DNA, 25 bp, Homo sapien
tatctttggcatgaaagtgtaccca

SEQ ID NO: 2808166 - DNA, 25 bp, Homo sapien
tcccgaatatctttggcatgaaagt

SEQ ID NO: 2808167 - DNA, 25 bp, Homo sapien
aagattccgtaatctcttgccacag

SEQ ID NO: 2808168 - DNA, 25 bp, Homo sapien
tgtcttgggtcacagtctcattccc

SEQ ID NO: 2808169 - DNA, 25 bp, Homo sapien
tgtatgagtggatttattaagtgcc

SEQ ID NO: 2808170 - DNA, 25 bp, Homo sapien
ttgccacagaggtttaagagtgtct

SEQ ID NO: 2808171 - DNA, 25 bp, Homo sapien
ttgactgcatggctcttcaggtgcc

SEQ ID NO: 2808172 - DNA, 25 bp, Homo sapien
ctcatcttgactgcatggctcttca

SEQ ID NO: 2808173 - DNA, 25 bp, Homo sapien
caggtgccctgattctttgggcaga

SEQ ID NO: 2808174 - DNA, 25 bp, Homo sapien
gcatggctcttcaggtgccctgatt

SEQ ID NO: 2808175 - DNA, 25 bp, Homo sapien
gtctcccgggttctacaggagcagt

SEQ ID NO: 2808176 - DNA, 25 bp, Homo sapien
agctgtgtgttcagtacaggaggct

SEQ ID NO: 2808177 - DNA, 25 bp, Homo sapien
ttcagtacaggaggctctccctttc

SEQ ID NO: 2808178 - DNA, 25 bp, Homo sapien
tcccgggttctacaggagcagtctg

SEQ ID NO: 2808179 - DNA, 25 bp, Homo sapien
gattgattgtaagctaccaacccct

SEQ ID NO: 2808180 - DNA, 25 bp, Homo sapien
gatacctcatgcaaactaaaagtgg

SEQ ID NO: 2808181 - DNA, 25 bp, Homo sapien
aaatatccagtatcacgaccaggag

SEQ ID NO: 2808182 - DNA, 25 bp, Homo sapien
tagcaagactacactaggcaccagg

SEQ ID NO: 2808183 - DNA, 25 bp, Homo sapien
aaattttcatagagccgttgcccag

SEQ ID NO: 2808184 - DNA, 25 bp, Homo sapien
taaaatggatcctatcagaagccca

SEQ ID NO: 2808185 - DNA, 25 bp, Homo sapien
gatggacactcctcaagacaaagac

SEQ ID NO: 2808186 - DNA, 25 bp, Homo sapien
taggctgcgcactcgttatgagagc

SEQ ID NO: 2808187 - DNA, 25 bp, Homo sapien
tacacctaattaacagcagaagaaa

SEQ ID NO: 2808188 - DNA, 25 bp, Homo sapien
tcttggggatacacctaattaacag

SEQ ID NO: 2808189 - DNA, 25 bp, Homo sapien
gggatacacctaattaacagcagaa

SEQ ID NO: 2808190 - DNA, 25 bp, Homo sapien
tatttattgtcttggggatacacct

SEQ ID NO: 2808191 - DNA, 25 bp, Homo sapien
tgtcccagtcctagaggcagtgtat

SEQ ID NO: 2808192 - DNA, 25 bp, Homo sapien
ttccaaagagaaaacgtgcagggtg

SEQ ID NO: 2808193 - DNA, 25 bp, Homo sapien
gcataactgctgtccactgcggcat

SEQ ID NO: 2808194 - DNA, 25 bp, Homo sapien
ttctggctagtgaggcacaccatct

SEQ ID NO: 2808195 - DNA, 25 bp, Homo sapien
tgaactagccaggtgggtcaaagac

SEQ ID NO: 2808196 - DNA, 25 bp, Homo sapien
tgaagcaatcggacaagcaaagaac

SEQ ID NO: 2808197 - DNA, 25 bp, Homo sapien
tgtgaatagtaaagtccctgcctgt

SEQ ID NO: 2808198 - DNA, 25 bp, Homo sapien
caacagttgcagatagagaagcgtg

SEQ ID NO: 2808199 - DNA, 25 bp, Homo sapien
gtcactagcacacactttttactac

SEQ ID NO: 2808200 - DNA, 25 bp, Homo sapien
taaaattaaacatggacttaatgcc

SEQ ID NO: 2808201 - DNA, 25 bp, Homo sapien
tcacccacacagcttatgaaacagg

SEQ ID NO: 2808202 - DNA, 25 bp, Homo sapien
caggggaaacaagaagatgaaaata

SEQ ID NO: 2808203 - DNA, 25 bp, Homo sapien
tcatgaatgccagatgtcaaacaaa

SEQ ID NO: 2808204 - DNA, 25 bp, Homo sapien
catgaatgccagatgtcaaacaaac

SEQ ID NO: 2808205 - DNA, 25 bp, Homo sapien
gctgctgagaattctctgagcagga

SEQ ID NO: 2808206 - DNA, 25 bp, Homo sapien
catcacgtctgaggaaactgctgtc

SEQ ID NO: 2808207 - DNA, 25 bp, Homo sapien
caccacatcacgtctgaggaaactg

SEQ ID NO: 2808208 - DNA, 25 bp, Homo sapien
agcaggatgcaaggggcaccacatc

SEQ ID NO: 2808209 - DNA, 25 bp, Homo sapien
cctgaataggttgtgcttagccata

SEQ ID NO: 2808210 - DNA, 25 bp, Homo sapien
tttattctgatgtacccaggtagac

SEQ ID NO: 2808211 - DNA, 25 bp, Homo sapien
gattgtacaggtacttcacttctga

SEQ ID NO: 2808212 - DNA, 25 bp, Homo sapien
tacagatgctaattacagtgccaaa

SEQ ID NO: 2808213 - DNA, 25 bp, Homo sapien
tgttccaaagaccaggggacaccat

SEQ ID NO: 2808214 - DNA, 25 bp, Homo sapien
tctgcagacagcagtagataatacc

SEQ ID NO: 2808215 - DNA, 25 bp, Homo sapien
agacagcagtagataatacctgatg

SEQ ID NO: 2808216 - DNA, 25 bp, Homo sapien
caaagaccaggggacaccattgagc

SEQ ID NO: 2808217 - DNA, 25 bp, Homo sapien
catttcaagtttgtataaatagtac

SEQ ID NO: 2808218 - DNA, 25 bp, Homo sapien
tcatttcaagtttgtataaatagta

SEQ ID NO: 2808219 - DNA, 25 bp, Homo sapien
gcaagtttgcaagtagcctcttata

SEQ ID NO: 2808220 - DNA, 25 bp, Homo sapien
tcaacggaatctacagaagtgtggt

SEQ ID NO: 2808221 - DNA, 25 bp, Homo sapien
tataagattgggaggacacaggtcc

SEQ ID NO: 2808222 - DNA, 25 bp, Homo sapien
tgggcctcactctgtatcatgggat

SEQ ID NO: 2808223 - DNA, 25 bp, Homo sapien
tttcttggaattccatttgcgactg

SEQ ID NO: 2808224 - DNA, 25 bp, Homo sapien
tcttggaattccatttgcgactgtt

SEQ ID NO: 2808225 - DNA, 25 bp, Homo sapien
ggaattccatttgcgactgtttcac

SEQ ID NO: 2808226 - DNA, 25 bp, Homo sapien
tggaattccatttgcgactgtttca

SEQ ID NO: 2808227 - DNA, 25 bp, Homo sapien
tccaatgtggatgggcgttgagcaa

SEQ ID NO: 2808228 - DNA, 25 bp, Homo sapien
tagtcctaggtttgcagtttcagca

SEQ ID NO: 2808229 - DNA, 25 bp, Homo sapien
ggtttctcccgccttcagacttgta

SEQ ID NO: 2808230 - DNA, 25 bp, Homo sapien
tcagcactaccagctttcatgagga

SEQ ID NO: 2808231 - DNA, 25 bp, Homo sapien
tatctaagggagaaattgtacactc

SEQ ID NO: 2808232 - DNA, 25 bp, Homo sapien
tatgacaaaggctaaaatttaccca

SEQ ID NO: 2808233 - DNA, 25 bp, Homo sapien
tatgttagaattagtacctccgaag

SEQ ID NO: 2808234 - DNA, 25 bp, Homo sapien
gaagccatcataaagtagaccatat

SEQ ID NO: 2808235 - DNA, 25 bp, Homo sapien
ctaccatatcggagagggggacaac

SEQ ID NO: 2808236 - DNA, 25 bp, Homo sapien
ttcattagtatctctaccatatcgg

SEQ ID NO: 2808237 - DNA, 25 bp, Homo sapien
gagcactattgcctattgccgccag

SEQ ID NO: 2808238 - DNA, 25 bp, Homo sapien
ttaaagagcactattgcctattgcc

SEQ ID NO: 2808239 - DNA, 25 bp, Homo sapien
tgcaaccagcagaaagcctcatact

SEQ ID NO: 2808240 - DNA, 25 bp, Homo sapien
gataagactttgaggcaactgaact

SEQ ID NO: 2808241 - DNA, 25 bp, Homo sapien
tacacttataacagccaggcaggtg

SEQ ID NO: 2808242 - DNA, 25 bp, Homo sapien
tgaactttcatacatcgctggtaga

SEQ ID NO: 2808243 - DNA, 25 bp, Homo sapien
tcatctagcgcaagctgttcctgaa

SEQ ID NO: 2808244 - DNA, 25 bp, Homo sapien
gtatcatctagcgcaagctgttcct

SEQ ID NO: 2808245 - DNA, 25 bp, Homo sapien
cttcagtagtatcatctagcgcaag

SEQ ID NO: 2808246 - DNA, 25 bp, Homo sapien
tatcatctagcgcaagctgttcctg

SEQ ID NO: 2808247 - DNA, 25 bp, Homo sapien
tcttccaatatcattgttagaggtc

SEQ ID NO: 2808248 - DNA, 25 bp, Homo sapien
tctccaagacttagtatctattctt

SEQ ID NO: 2808249 - DNA, 25 bp, Homo sapien
ctccaagacttagtatctattcttc

SEQ ID NO: 2808250 - DNA, 25 bp, Homo sapien
ctctccaagacttagtatctattct

SEQ ID NO: 2808251 - DNA, 25 bp, Homo sapien
tgtgagccacctgcgccctacctca

SEQ ID NO: 2808252 - DNA, 25 bp, Homo sapien
tacattttgtaaggccatacctgtc

SEQ ID NO: 2808253 - DNA, 25 bp, Homo sapien
catacctgtcatagatagcgattcc

SEQ ID NO: 2808254 - DNA, 25 bp, Homo sapien
tgcgccctacctcaagtcttattaa

SEQ ID NO: 2808255 - DNA, 25 bp, Homo sapien
ttgctgtaatcttacgataaaactt

SEQ ID NO: 2808256 - DNA, 25 bp, Homo sapien
gaattgctgtaatcttacgataaaa

SEQ ID NO: 2808257 - DNA, 25 bp, Homo sapien
aattgctgtaatcttacgataaaac

SEQ ID NO: 2808258 - DNA, 25 bp, Homo sapien
tgctgtaatcttacgataaaacttt

SEQ ID NO: 2808259 - DNA, 25 bp, Homo sapien
cctgaaacttagtcactgtcatgag

SEQ ID NO: 2808260 - DNA, 25 bp, Homo sapien
agtttatagacaagtatcaccaaat

SEQ ID NO: 2808261 - DNA, 25 bp, Homo sapien
ggtaacccctattttaagcatgata

SEQ ID NO: 2808262 - DNA, 25 bp, Homo sapien
gctatccagctcatcttataagact

SEQ ID NO: 2808263 - DNA, 25 bp, Homo sapien
tgtggctagtactccaaagaaactg

SEQ ID NO: 2808264 - DNA, 25 bp, Homo sapien
gaatgactggctacatcaggcaaag

SEQ ID NO: 2808265 - DNA, 25 bp, Homo sapien
cagcagcctctagcgatatgtggat

SEQ ID NO: 2808266 - DNA, 25 bp, Homo sapien
aatagtatacaccagaactctctgc

SEQ ID NO: 2808267 - DNA, 25 bp, Homo sapien
cacataatgcaaatgacagttggta

SEQ ID NO: 2808268 - DNA, 25 bp, Homo sapien
cagttggtaaagctgctgttattac

SEQ ID NO: 2808269 - DNA, 25 bp, Homo sapien
tcacataatgcaaatgacagttggt

SEQ ID NO: 2808270 - DNA, 25 bp, Homo sapien
caaatgacagttggtaaagctgctg

SEQ ID NO: 2808271 - DNA, 25 bp, Homo sapien
aatgattgcccaaacttccaggaag

SEQ ID NO: 2808272 - DNA, 25 bp, Homo sapien
tatttgactgttctaaaacgaagga

SEQ ID NO: 2808273 - DNA, 25 bp, Homo sapien
gaagcacattggaaagtcccatcct

SEQ ID NO: 2808274 - DNA, 25 bp, Homo sapien
gatcacctatgaagtaagatattcc

SEQ ID NO: 2808275 - DNA, 25 bp, Homo sapien
atctgtgacaaagctctctctttgg

SEQ ID NO: 2808276 - DNA, 25 bp, Homo sapien
tttgctcatctgtgacaaagctctc

SEQ ID NO: 2808277 - DNA, 25 bp, Homo sapien
tctgtgacaaagctctctctttggt

SEQ ID NO: 2808278 - DNA, 25 bp, Homo sapien
gtgacaaagctctctctttggtcat

SEQ ID NO: 2808279 - DNA, 25 bp, Homo sapien
gtgaaagatccctacactgcaaact

SEQ ID NO: 2808280 - DNA, 25 bp, Homo sapien
agtgaaagatccctacactgcaaac

SEQ ID NO: 2808281 - DNA, 25 bp, Homo sapien
tacccaaagtgatctgcaggtttaa

SEQ ID NO: 2808282 - DNA, 25 bp, Homo sapien
gtttaatgcaatacctgtcaaaata

SEQ ID NO: 2808283 - DNA, 25 bp, Homo sapien
ttgtgattgtttttgaacctaacag

SEQ ID NO: 2808284 - DNA, 25 bp, Homo sapien
caaacaatgctgcacgaaagtgttg

SEQ ID NO: 2808285 - DNA, 25 bp, Homo sapien
ttaatgcattgccactacagccact

SEQ ID NO: 2808286 - DNA, 25 bp, Homo sapien
acagttgtaggaaatacttcttata

SEQ ID NO: 2808287 - DNA, 25 bp, Homo sapien
aattggtttcgttatacatcacttc

SEQ ID NO: 2808288 - DNA, 25 bp, Homo sapien
gtttccaagaacttatagacaatgt

SEQ ID NO: 2808289 - DNA, 25 bp, Homo sapien
tagacaatgttaagggaggattact

SEQ ID NO: 2808290 - DNA, 25 bp, Homo sapien
tcagaaatataccataggaactgcc

SEQ ID NO: 2808291 - DNA, 25 bp, Homo sapien
attccagcactacttaacaatagcc

SEQ ID NO: 2808292 - DNA, 25 bp, Homo sapien
tttattccagcactacttaacaata

SEQ ID NO: 2808293 - DNA, 25 bp, Homo sapien
tccagcactacttaacaatagccaa

SEQ ID NO: 2808294 - DNA, 25 bp, Homo sapien
tattccagcactacttaacaatagc

SEQ ID NO: 2808295 - DNA, 25 bp, Homo sapien
tatagtaagatcaacagcattgccg

SEQ ID NO: 2808296 - DNA, 25 bp, Homo sapien
gaaaaccactagttgaggccattcc

SEQ ID NO: 2808297 - DNA, 25 bp, Homo sapien
ggtctctccccaccagatgacagta

SEQ ID NO: 2808298 - DNA, 25 bp, Homo sapien
ttagtcctgaccctgccaacaagta

SEQ ID NO: 2808299 - DNA, 25 bp, Homo sapien
gcctgttggcaaatttaagcttcaa

SEQ ID NO: 2808300 - DNA, 25 bp, Homo sapien
tatcgaacacctaagccaatttgcc

SEQ ID NO: 2808301 - DNA, 25 bp, Homo sapien
agccaatttgccttgaggacatttg

SEQ ID NO: 2808302 - DNA, 25 bp, Homo sapien
ctttctggtaagaagaatatcgaac

SEQ ID NO: 2808303 - DNA, 25 bp, Homo sapien
tatacctagaatgaaacctgccgtc

SEQ ID NO: 2808304 - DNA, 25 bp, Homo sapien
tcaagatcccatgtaaggtggcaca

SEQ ID NO: 2808305 - DNA, 25 bp, Homo sapien
gcatttgcagcagatcagacccaga

SEQ ID NO: 2808306 - DNA, 25 bp, Homo sapien
tcagagagtagcctaggaaccagca

SEQ ID NO: 2808307 - DNA, 25 bp, Homo sapien
cggatgttgcgctgagccgaggttg

SEQ ID NO: 2808308 - DNA, 25 bp, Homo sapien
gcctggtgacatagcgagattccat

SEQ ID NO: 2808309 - DNA, 25 bp, Homo sapien
aggcggatgttgcgctgagccgagg

SEQ ID NO: 2808310 - DNA, 25 bp, Homo sapien
agcctggtgacatagcgagattcca

SEQ ID NO: 2808311 - DNA, 25 bp, Homo sapien
aggccctacattcccatgcatgaga

SEQ ID NO: 2808312 - DNA, 25 bp, Homo sapien
tagtaagaggatctcataatgacac

SEQ ID NO: 2808313 - DNA, 25 bp, Homo sapien
tatcaatcacattaaagagcgccca

SEQ ID NO: 2808314 - DNA, 25 bp, Homo sapien
caatcacttggataaatgggattaa

SEQ ID NO: 2808315 - DNA, 25 bp, Homo sapien
aaatacgccactcattctaactcag

SEQ ID NO: 2808316 - DNA, 25 bp, Homo sapien
tttagtgtttacagcttgaacagga

SEQ ID NO: 2808317 - DNA, 25 bp, Homo sapien
taacagaacctagttaataccagaa

SEQ ID NO: 2808318 - DNA, 25 bp, Homo sapien
cacaagttgaatgaccagagtatat

SEQ ID NO: 2808319 - DNA, 25 bp, Homo sapien
gagggccaaagcaacataagtgact

SEQ ID NO: 2808320 - DNA, 25 bp, Homo sapien
tattgaccctgaactgcagatagct

SEQ ID NO: 2808321 - DNA, 25 bp, Homo sapien
gcaacaagcattaacgatggccacc

SEQ ID NO: 2808322 - DNA, 25 bp, Homo sapien
aaaggacacgagcaaagcaagactg

SEQ ID NO: 2808323 - DNA, 25 bp, Homo sapien
aattctattgccaaagctccccagt

SEQ ID NO: 2808324 - DNA, 25 bp, Homo sapien
catcaatagagatgagctgcaagtt

SEQ ID NO: 2808325 - DNA, 25 bp, Homo sapien
cataggcttcctgatctagccaatt

SEQ ID NO: 2808326 - DNA, 25 bp, Homo sapien
tgttccatagttgacataggcttcc

SEQ ID NO: 2808327 - DNA, 25 bp, Homo sapien
tcctctgttagcacaggaaggatga

SEQ ID NO: 2808328 - DNA, 25 bp, Homo sapien
tagcacaggaaggatgatgtggaaa

SEQ ID NO: 2808329 - DNA, 25 bp, Homo sapien
ccagatcctctgttagcacaggaag

SEQ ID NO: 2808330 - DNA, 25 bp, Homo sapien
tctgttagcacaggaaggatgatgt

SEQ ID NO: 2808331 - DNA, 25 bp, Homo sapien
gctaccataaggatgcagctctggg

SEQ ID NO: 2808332 - DNA, 25 bp, Homo sapien
atagaaatattgagaacatctgctg

SEQ ID NO: 2808333 - DNA, 25 bp, Homo sapien
ggggctcctcttgcatatggaaata

SEQ ID NO: 2808334 - DNA, 25 bp, Homo sapien
gaacatctgctgcaacctgtgatgc

SEQ ID NO: 2808335 - DNA, 25 bp, Homo sapien
cagatcaccctaacagatactgtag

SEQ ID NO: 2808336 - DNA, 25 bp, Homo sapien
gctttgctgtcttcaacgggctcaa

SEQ ID NO: 2808337 - DNA, 25 bp, Homo sapien
taatatcgaagatcacagatcaccc

SEQ ID NO: 2808338 - DNA, 25 bp, Homo sapien
cacaacttggatgtttgacaagagg

SEQ ID NO: 2808339 - DNA, 25 bp, Homo sapien
ttgtggtcacggagaaaacaggttc

SEQ ID NO: 2808340 - DNA, 25 bp, Homo sapien
caggttcatcatgggctagtttcat

SEQ ID NO: 2808341 - DNA, 25 bp, Homo sapien
cctggttaatattgtggtcacggag

SEQ ID NO: 2808342 - DNA, 25 bp, Homo sapien
aaaacaggttcatcatgggctagtt

SEQ ID NO: 2808343 - DNA, 25 bp, Homo sapien
ggtgggaagcagcaaattctggcaa

SEQ ID NO: 2808344 - DNA, 25 bp, Homo sapien
tacttgtagaagtcttgagcaaagg

SEQ ID NO: 2808345 - DNA, 25 bp, Homo sapien
ttgtagaagtcttgagcaaaggtgg

SEQ ID NO: 2808346 - DNA, 25 bp, Homo sapien
agaagctgatttgtcttaggctatt

SEQ ID NO: 2808347 - DNA, 25 bp, Homo sapien
tagtatttccgtttctcagtccctg

SEQ ID NO: 2808348 - DNA, 25 bp, Homo sapien
aacatctggagcacgagtcctctgc

SEQ ID NO: 2808349 - DNA, 25 bp, Homo sapien
cagcgcctctagtgcaacatctgga

SEQ ID NO: 2808350 - DNA, 25 bp, Homo sapien
cagtcctcccaacagattggctgga

SEQ ID NO: 2808351 - DNA, 25 bp, Homo sapien
tatgaactacatagcactttctccg

SEQ ID NO: 2808352 - DNA, 25 bp, Homo sapien
cgctgttcccgccttgcagatgggt

SEQ ID NO: 2808353 - DNA, 25 bp, Homo sapien
gaaggaagatcccattcagcgggct

SEQ ID NO: 2808354 - DNA, 25 bp, Homo sapien
ggcgcgggacatatcaactctctaa

SEQ ID NO: 2808355 - DNA, 25 bp, Homo sapien
gatggcaaggttcagcgctttagcc

SEQ ID NO: 2808356 - DNA, 25 bp, Homo sapien
aaagcggcttcgttcgacggtggat

SEQ ID NO: 2808357 - DNA, 25 bp, Homo sapien
cgacggtggatctctgaaccttaaa

SEQ ID NO: 2808358 - DNA, 25 bp, Homo sapien
caaggcagggcaaatcgttaggcac

SEQ ID NO: 2808359 - DNA, 25 bp, Homo sapien
tccttcttgaatgcccccggcgcag

SEQ ID NO: 2808360 - DNA, 25 bp, Homo sapien
tggggttcgggaagcgtgcgccacc

SEQ ID NO: 2808361 - DNA, 25 bp, Homo sapien
gaccattactaagaggtctgctgtg

SEQ ID NO: 2808362 - DNA, 25 bp, Homo sapien
caggcccggtgctttgtccctccgg

SEQ ID NO: 2808363 - DNA, 25 bp, Homo sapien
tcagtgcgcagataccgcggcccgg

SEQ ID NO: 2808364 - DNA, 25 bp, Homo sapien
ttccgccgacgtctcagtgcgcaga

SEQ ID NO: 2808365 - DNA, 25 bp, Homo sapien
gggcgagagcacggcctctagcctt

SEQ ID NO: 2808366 - DNA, 25 bp, Homo sapien
ggcctctagccttccgccgacgtct

SEQ ID NO: 2808367 - DNA, 25 bp, Homo sapien
tgcggggccgcgcttagggtcggag

SEQ ID NO: 2808368 - DNA, 25 bp, Homo sapien
tatgggcctagcttccgggatccgc

SEQ ID NO: 2808369 - DNA, 25 bp, Homo sapien
tgggcctagcttccgggatccgctc

SEQ ID NO: 2808370 - DNA, 25 bp, Homo sapien
ctccgcggccggatatgggcctagc

SEQ ID NO: 2808371 - DNA, 25 bp, Homo sapien
taaaaattcgttcgcaagggagcgc

SEQ ID NO: 2808372 - DNA, 25 bp, Homo sapien
acactcgagaattagggtcctggac

SEQ ID NO: 2808373 - DNA, 25 bp, Homo sapien
tagcgccaggtcacgattccattcg

SEQ ID NO: 2808374 - DNA, 25 bp, Homo sapien
tcagggtcgtgaagagacactcgag

SEQ ID NO: 2808375 - DNA, 25 bp, Homo sapien
tcttaggaggtaaagcccagtgctt

SEQ ID NO: 2808376 - DNA, 25 bp, Homo sapien
aaactttagaactgcaatcgcctgc

SEQ ID NO: 2808377 - DNA, 25 bp, Homo sapien
cagggtctctgcgatctggagccag

SEQ ID NO: 2808378 - DNA, 25 bp, Homo sapien
taatctttattggacagggcggctc

SEQ ID NO: 2808379 - DNA, 25 bp, Homo sapien
tatgaaagctcagctagctgtccgc

SEQ ID NO: 2808380 - DNA, 25 bp, Homo sapien
aataaaacatagaacgatccccgag

SEQ ID NO: 2808381 - DNA, 25 bp, Homo sapien
tttccctggaaagaatagccatgcg

SEQ ID NO: 2808382 - DNA, 25 bp, Homo sapien
taaccagcatgtgagacttcctaag

SEQ ID NO: 2808383 - DNA, 25 bp, Homo sapien
aaacggcgtccgcaggtgggcggct

SEQ ID NO: 2808384 - DNA, 25 bp, Homo sapien
cgttacaaacggcgtccgcaggtgg

SEQ ID NO: 2808385 - DNA, 25 bp, Homo sapien
cggcgtccgcaggtgggcggctgca

SEQ ID NO: 2808386 - DNA, 25 bp, Homo sapien
ttacaaacggcgtccgcaggtgggc

SEQ ID NO: 2808387 - DNA, 25 bp, Homo sapien
cagccgggccggtgttaaacgtgcg

SEQ ID NO: 2808388 - DNA, 25 bp, Homo sapien
ccgggccggactctgcagccggctc

SEQ ID NO: 2808389 - DNA, 25 bp, Homo sapien
gggcacaagggccagccgggccgga

SEQ ID NO: 2808390 - DNA, 25 bp, Homo sapien
tcaggccgtaaccaggcaaggcgcg

SEQ ID NO: 2808391 - DNA, 25 bp, Homo sapien
cggactgggcatccagtgtgcctgc

SEQ ID NO: 2808392 - DNA, 25 bp, Homo sapien
gtgcccacgacgcacggtccagggt

SEQ ID NO: 2808393 - DNA, 25 bp, Homo sapien
cgagtctcgtttctggtgcccacga

SEQ ID NO: 2808394 - DNA, 25 bp, Homo sapien
tgccctggcgctcgctgtcgctggt

SEQ ID NO: 2808395 - DNA, 25 bp, Homo sapien
taaaatcatcgctcgtcactaagcg

SEQ ID NO: 2808396 - DNA, 25 bp, Homo sapien
atcagctgcgtacaatgggccaccg

SEQ ID NO: 2808397 - DNA, 25 bp, Homo sapien
gcgcgtttgcgcgtttatttgggca

SEQ ID NO: 2808398 - DNA, 25 bp, Homo sapien
cgctcgcggagtgcattgacagttc

SEQ ID NO: 2808399 - DNA, 25 bp, Homo sapien
cccctccctggtgagacttaaagtg

SEQ ID NO: 2808400 - DNA, 25 bp, Homo sapien
ccccaaacacgcagtgcttcccaaa

SEQ ID NO: 2808401 - DNA, 25 bp, Homo sapien
gacttaaagtgagaacgagtattaa

SEQ ID NO: 2808402 - DNA, 25 bp, Homo sapien
gagagaccaggaagcgcaaaacgtc

SEQ ID NO: 2808403 - DNA, 25 bp, Homo sapien
cacctttacctgagggcgtgttggc

SEQ ID NO: 2808404 - DNA, 25 bp, Homo sapien
gctcgagctgagacaaacttttacg

SEQ ID NO: 2808405 - DNA, 25 bp, Homo sapien
aacttttacgccctcgcgagtcgag

SEQ ID NO: 2808406 - DNA, 25 bp, Homo sapien
tgttggcgctaggaatgctcgagct

SEQ ID NO: 2808407 - DNA, 25 bp, Homo sapien
tccgatcgaatttgtggcaatagct

SEQ ID NO: 2808408 - DNA, 25 bp, Homo sapien
taattctccttttgcccatcgctag

SEQ ID NO: 2808409 - DNA, 25 bp, Homo sapien
aattccaggagtgtgctttgtcatc

SEQ ID NO: 2808410 - DNA, 25 bp, Homo sapien
catctttgggataaataggaaccct

SEQ ID NO: 2808411 - DNA, 25 bp, Homo sapien
gcgtgcaggaggcttggctaacctt

SEQ ID NO: 2808412 - DNA, 25 bp, Homo sapien
tggctaaccttagcctcccattttc

SEQ ID NO: 2808413 - DNA, 25 bp, Homo sapien
tcccagtctgtaggtagctaagcgg

SEQ ID NO: 2808414 - DNA, 25 bp, Homo sapien
accatcccagtctgtaggtagctaa

SEQ ID NO: 2808415 - DNA, 25 bp, Homo sapien
cagtcagtcgcctttgattatcagt

SEQ ID NO: 2808416 - DNA, 25 bp, Homo sapien
tatcagttgccagcagcccttctct

SEQ ID NO: 2808417 - DNA, 25 bp, Homo sapien
ttgacacgagctccatataaggcag

SEQ ID NO: 2808418 - DNA, 25 bp, Homo sapien
tcttggctccttgacacgagctcca

SEQ ID NO: 2808419 - DNA, 25 bp, Homo sapien
tatatacagacattcgcgcagatcc

SEQ ID NO: 2808420 - DNA, 25 bp, Homo sapien
tttcaatagtagtgtcaaagttcac

SEQ ID NO: 2808421 - DNA, 25 bp, Homo sapien
gagtcctcccgtttaaacgcattca

SEQ ID NO: 2808422 - DNA, 25 bp, Homo sapien
gcgcagatccccctttcggaaacat

SEQ ID NO: 2808423 - DNA, 25 bp, Homo sapien
gattatttattcgacctactttgga

SEQ ID NO: 2808424 - DNA, 25 bp, Homo sapien
tatttcgctgtgatttcgtcgccgg

SEQ ID NO: 2808425 - DNA, 25 bp, Homo sapien
aagaacatttttgggcgatctccag

SEQ ID NO: 2808426 - DNA, 25 bp, Homo sapien
tcgtcgccggcgtgaattatcccgt

SEQ ID NO: 2808427 - DNA, 25 bp, Homo sapien
gaatggctggctgcgtccggccctg

SEQ ID NO: 2808428 - DNA, 25 bp, Homo sapien
aagtgtgtgatcttcctcgccggct

SEQ ID NO: 2808429 - DNA, 25 bp, Homo sapien
ccggcgccaccggcacaacaaaaag

SEQ ID NO: 2808430 - DNA, 25 bp, Homo sapien
gaagaaggcagcgagagcccggcgc

SEQ ID NO: 2808431 - DNA, 25 bp, Homo sapien
tcctccagcggcgctcgccgcagca

SEQ ID NO: 2808432 - DNA, 25 bp, Homo sapien
tccagcggcgctcgccgcagcagct

SEQ ID NO: 2808433 - DNA, 25 bp, Homo sapien
cccagcgccctgctcggctcaccgc

SEQ ID NO: 2808434 - DNA, 25 bp, Homo sapien
ccagcgccctgctcggctcaccgcg

SEQ ID NO: 2808435 - DNA, 25 bp, Homo sapien
aatactgccgcctcaagaagtgcct

SEQ ID NO: 2808436 - DNA, 25 bp, Homo sapien
gcgagggctgcaaaagtttcttcaa

SEQ ID NO: 2808437 - DNA, 25 bp, Homo sapien
taacttacacatgccgtgccaacag

SEQ ID NO: 2808438 - DNA, 25 bp, Homo sapien
gtttcttcaagaggagcgtccgcag

SEQ ID NO: 2808439 - DNA, 25 bp, Homo sapien
gatttggccgtaatgcatagactgc

SEQ ID NO: 2808440 - DNA, 25 bp, Homo sapien
gactacttcatttctagctccaggg

SEQ ID NO: 2808441 - DNA, 25 bp, Homo sapien
gctccagggagattttgtaggcatc

SEQ ID NO: 2808442 - DNA, 25 bp, Homo sapien
gactgcagctagcatgagcttccac

SEQ ID NO: 2808443 - DNA, 25 bp, Homo sapien
cattatgggcatcgagaacatctgc

SEQ ID NO: 2808444 - DNA, 25 bp, Homo sapien
tgcatgcagcccaacaacattatgg

SEQ ID NO: 2808445 - DNA, 25 bp, Homo sapien
tacgcctcacctggagcgagctgtt

SEQ ID NO: 2808446 - DNA, 25 bp, Homo sapien
ggatctgcagatcaccgaccaggtg

SEQ ID NO: 2808447 - DNA, 25 bp, Homo sapien
ctagagactcagaggacccacctgg

SEQ ID NO: 2808448 - DNA, 25 bp, Homo sapien
acctgggccaaggactccaaagccg

SEQ ID NO: 2808449 - DNA, 25 bp, Homo sapien
tgggccaaggactccaaagccgcgg

SEQ ID NO: 2808450 - DNA, 25 bp, Homo sapien
cccgtccccctagagactcagagga

SEQ ID NO: 2808451 - DNA, 25 bp, Homo sapien
agtggtgtaggcagggtcgcgcgcc

SEQ ID NO: 2808452 - DNA, 25 bp, Homo sapien
gcttcagtgtctggcggcggcaacc

SEQ ID NO: 2808453 - DNA, 25 bp, Homo sapien
gtcgcgcgcccggtaagtctccagg

SEQ ID NO: 2808454 - DNA, 25 bp, Homo sapien
tttaccgcatgtgggaacttgctga

SEQ ID NO: 2808455 - DNA, 25 bp, Homo sapien
ccaggcaggtaggatatggagccac

SEQ ID NO: 2808456 - DNA, 25 bp, Homo sapien
tgttttataggatcagagcgggcgc

SEQ ID NO: 2808457 - DNA, 25 bp, Homo sapien
gcagtgccgcactctctgtgaagat

SEQ ID NO: 2808458 - DNA, 25 bp, Homo sapien
gctgcgagaacacatactgccaagg

SEQ ID NO: 2808459 - DNA, 25 bp, Homo sapien
gaataacgtcttagggcctctgttg

SEQ ID NO: 2808460 - DNA, 25 bp, Homo sapien
ggagagtccatagttaacccctgac

SEQ ID NO: 2808461 - DNA, 25 bp, Homo sapien
gtcttagggcctctgttgacttccc

SEQ ID NO: 2808462 - DNA, 25 bp, Homo sapien
tgcaccacgcccaggaataacgtct

SEQ ID NO: 2808463 - DNA, 25 bp, Homo sapien
cccactggctgccggatccggattg

SEQ ID NO: 2808464 - DNA, 25 bp, Homo sapien
cccaagaagtatcagggagccccac

SEQ ID NO: 2808465 - DNA, 25 bp, Homo sapien
cgcttcccaagaagtatcagggagc

SEQ ID NO: 2808466 - DNA, 25 bp, Homo sapien
cactggctgccggatccggattggg

SEQ ID NO: 2808467 - DNA, 25 bp, Homo sapien
gagacgagctgcctcggagagctca

SEQ ID NO: 2808468 - DNA, 25 bp, Homo sapien
cgagctgcctcggagagctcagcga

SEQ ID NO: 2808469 - DNA, 25 bp, Homo sapien
gagagctcagcgatctttcctgcct

SEQ ID NO: 2808470 - DNA, 25 bp, Homo sapien
tgcctcggagagctcagcgatcttt

SEQ ID NO: 2808471 - DNA, 25 bp, Homo sapien
gagcggtcagcggtttcctctcggc

SEQ ID NO: 2808472 - DNA, 25 bp, Homo sapien
cctgcgggctgagggcggagcggtc

SEQ ID NO: 2808473 - DNA, 25 bp, Homo sapien
aggctgccccgggttcagcgtcctg

SEQ ID NO: 2808474 - DNA, 25 bp, Homo sapien
ggttcagcgtcctgtgtttccccag

SEQ ID NO: 2808475 - DNA, 25 bp, Homo sapien
gctcccagcaggtgtaggccgggca

SEQ ID NO: 2808476 - DNA, 25 bp, Homo sapien
gccgtggaaccggggcttgaggctc

SEQ ID NO: 2808477 - DNA, 25 bp, Homo sapien
cgggcagtcgccctgggctcgcagc

SEQ ID NO: 2808478 - DNA, 25 bp, Homo sapien
ccagcaggtgtaggccgggcagtcg

SEQ ID NO: 2808479 - DNA, 25 bp, Homo sapien
caggagaaccatgagctttggggac

SEQ ID NO: 2808480 - DNA, 25 bp, Homo sapien
ggatctggagtcccctctatctgag

SEQ ID NO: 2808481 - DNA, 25 bp, Homo sapien
ggctcccaagaggtccgaccaccca

SEQ ID NO: 2808482 - DNA, 25 bp, Homo sapien
ctggcagccacaaaggttcttggtt

SEQ ID NO: 2808483 - DNA, 25 bp, Homo sapien
tgtgcgagagagagaaccaagtctt

SEQ ID NO: 2808484 - DNA, 25 bp, Homo sapien
tggacctgcgctgacaactaacaga

SEQ ID NO: 2808485 - DNA, 25 bp, Homo sapien
ttgtcagtcggcatgcaggagcccg

SEQ ID NO: 2808486 - DNA, 25 bp, Homo sapien
ttagcattcctaacccatggacctg

SEQ ID NO: 2808487 - DNA, 25 bp, Homo sapien
aggcctcctctccttttgtcttcag

SEQ ID NO: 2808488 - DNA, 25 bp, Homo sapien
gcctcctctccttttgtcttcagat

SEQ ID NO: 2808489 - DNA, 25 bp, Homo sapien
caggcctcctctccttttgtcttca

SEQ ID NO: 2808490 - DNA, 25 bp, Homo sapien
caccaggcctcctctccttttgtct

SEQ ID NO: 2808491 - DNA, 25 bp, Homo sapien
gatttctcggtggaagctggagcct

SEQ ID NO: 2808492 - DNA, 25 bp, Homo sapien
gaaaaagatttctcggtggaagctg

SEQ ID NO: 2808493 - DNA, 25 bp, Homo sapien
tggagcctgaacttccatgtggttg

SEQ ID NO: 2808494 - DNA, 25 bp, Homo sapien
catgtggttgttggagattcggtgc

SEQ ID NO: 2808495 - DNA, 25 bp, Homo sapien
gtgagtaaaccggatagacataagt

SEQ ID NO: 2808496 - DNA, 25 bp, Homo sapien
tttaagtgagtaaaccggatagaca

SEQ ID NO: 2808497 - DNA, 25 bp, Homo sapien
taaaccggatagacataagtactcc

SEQ ID NO: 2808498 - DNA, 25 bp, Homo sapien
gagtaaaccggatagacataagtac

SEQ ID NO: 2808499 - DNA, 25 bp, Homo sapien
aattcctagagcctgagcgcctggc

SEQ ID NO: 2808500 - DNA, 25 bp, Homo sapien
gccaggagcactcggtaccagttat

SEQ ID NO: 2808501 - DNA, 25 bp, Homo sapien
tccgcggtgcctgggaattcctaga

SEQ ID NO: 2808502 - DNA, 25 bp, Homo sapien
caaatgaggacgcttcctgagcata

SEQ ID NO: 2808503 - DNA, 25 bp, Homo sapien
ttagcaaataatagaggcgttctgg

SEQ ID NO: 2808504 - DNA, 25 bp, Homo sapien
gaggcgttctggatgctttccaacg

SEQ ID NO: 2808505 - DNA, 25 bp, Homo sapien
acgttacacatgtacttggtcataa

SEQ ID NO: 2808506 - DNA, 25 bp, Homo sapien
gatgctttccaacgttacacatgta

SEQ ID NO: 2808507 - DNA, 25 bp, Homo sapien
tttcattatgatttggccttttggg

SEQ ID NO: 2808508 - DNA, 25 bp, Homo sapien
aattatttcattatgatttggcctt

SEQ ID NO: 2808509 - DNA, 25 bp, Homo sapien
ttgaattatttcattatgatttggc

SEQ ID NO: 2808510 - DNA, 25 bp, Homo sapien
tatttcattatgatttggccttttg

SEQ ID NO: 2808511 - DNA, 25 bp, Homo sapien
taccccgatcgtcttccgggcgcat

SEQ ID NO: 2808512 - DNA, 25 bp, Homo sapien
tgcttggggcctccgcccaaggtgt

SEQ ID NO: 2808513 - DNA, 25 bp, Homo sapien
tgggggctgcgtggtgagccgaggc

SEQ ID NO: 2808514 - DNA, 25 bp, Homo sapien
aaggactgagaatcttgatttgcca

SEQ ID NO: 2808515 - DNA, 25 bp, Homo sapien
gcgctccgccgggatgagaagtact

SEQ ID NO: 2808516 - DNA, 25 bp, Homo sapien
tcttgacatagaacgtccgggcctc

SEQ ID NO: 2808517 - DNA, 25 bp, Homo sapien
cacttggaagaaactgtgtgtgcgc

SEQ ID NO: 2808518 - DNA, 25 bp, Homo sapien
tctccggctcttacttgaaaaagca

SEQ ID NO: 2808519 - DNA, 25 bp, Homo sapien
tgaccagagtggaaaggcaacagac

SEQ ID NO: 2808520 - DNA, 25 bp, Homo sapien
aattgcgtgcacaaacgtgttttta

SEQ ID NO: 2808521 - DNA, 25 bp, Homo sapien
catgttatggtgttttcgaggaccc

SEQ ID NO: 2808522 - DNA, 25 bp, Homo sapien
agacgagtcacgctttcagacaggg

SEQ ID NO: 2808523 - DNA, 25 bp, Homo sapien
tctccacattcgaatgatcatcctg

SEQ ID NO: 2808524 - DNA, 25 bp, Homo sapien
catcctgcagattttaaccgatatt

SEQ ID NO: 2808525 - DNA, 25 bp, Homo sapien
cacattcgaatgatcatcctgcaga

SEQ ID NO: 2808526 - DNA, 25 bp, Homo sapien
cgaatgatcatcctgcagattttaa

SEQ ID NO: 2808527 - DNA, 25 bp, Homo sapien
ttaacgcgacggcaaaaagaagaga

SEQ ID NO: 2808528 - DNA, 25 bp, Homo sapien
tattgtactttgcttaacgcgacgg

SEQ ID NO: 2808529 - DNA, 25 bp, Homo sapien
ccaaacagggagaggtgccgaaaag

SEQ ID NO: 2808530 - DNA, 25 bp, Homo sapien
aaagaagagagccaaacagggagag

SEQ ID NO: 2808531 - DNA, 25 bp, Homo sapien
tgctttcagcttagactagatgcaa

SEQ ID NO: 2808532 - DNA, 25 bp, Homo sapien
ttcagcttagactagatgcaaattc

SEQ ID NO: 2808533 - DNA, 25 bp, Homo sapien
catagaaatgacaagagtggcgctg

SEQ ID NO: 2808534 - DNA, 25 bp, Homo sapien
aagagtggcgctgctttcagcttag

SEQ ID NO: 2808535 - DNA, 25 bp, Homo sapien
tcaagccggtatgaaagccaaattg

SEQ ID NO: 2808536 - DNA, 25 bp, Homo sapien
ggaactgaatcacactcttgtaaca

SEQ ID NO: 2808537 - DNA, 25 bp, Homo sapien
tagcctccgcaactggaatccatgt

SEQ ID NO: 2808538 - DNA, 25 bp, Homo sapien
gacatgaattcaaacagctgacaca

SEQ ID NO: 2808539 - DNA, 25 bp, Homo sapien
taccataggcatcgaaaagacagac

SEQ ID NO: 2808540 - DNA, 25 bp, Homo sapien
tgacagttctccatattacccgagg

SEQ ID NO: 2808541 - DNA, 25 bp, Homo sapien
tcacaaatctcaaggcgaaggactg

SEQ ID NO: 2808542 - DNA, 25 bp, Homo sapien
taatgctagtgagtctacgatccag

SEQ ID NO: 2808543 - DNA, 25 bp, Homo sapien
ttttagacgtcatggagagtcccac

SEQ ID NO: 2808544 - DNA, 25 bp, Homo sapien
gacgaacaattcaagagactcccac

SEQ ID NO: 2808545 - DNA, 25 bp, Homo sapien
taaaaccgcctaacaaagctgacgc

SEQ ID NO: 2808546 - DNA, 25 bp, Homo sapien
taatcacgctctttggcatcaaggt

SEQ ID NO: 2808547 - DNA, 25 bp, Homo sapien
tatatacatgtacttggaggcaact

SEQ ID NO: 2808548 - DNA, 25 bp, Homo sapien
tcgaacacagtacatcaagaaccta

SEQ ID NO: 2808549 - DNA, 25 bp, Homo sapien
gacacacgtgtttggattgaaccgc

SEQ ID NO: 2808550 - DNA, 25 bp, Homo sapien
tacagttagcatatctctaaaaggg

SEQ ID NO: 2808551 - DNA, 25 bp, Homo sapien
gttgttcagatttccttgctaagga

SEQ ID NO: 2808552 - DNA, 25 bp, Homo sapien
ttaaaatattgacggatgctgtctc

SEQ ID NO: 2808553 - DNA, 25 bp, Homo sapien
tctgagcaagaataataacaccgct

SEQ ID NO: 2808554 - DNA, 25 bp, Homo sapien
ggtgcaagccaaatagtgactcaac

SEQ ID NO: 2808555 - DNA, 25 bp, Homo sapien
ttaacgacgggatggctagtaccta

SEQ ID NO: 2808556 - DNA, 25 bp, Homo sapien
gcaatccaggtcaaagcacgaggca

SEQ ID NO: 2808557 - DNA, 25 bp, Homo sapien
tagtacctatagaaagctccaaagc

SEQ ID NO: 2808558 - DNA, 25 bp, Homo sapien
tcctcatgcaggtgggctactacca

SEQ ID NO: 2808559 - DNA, 25 bp, Homo sapien
taagattccggaacactgctgaaga

SEQ ID NO: 2808560 - DNA, 25 bp, Homo sapien
catctggtagctgaataaaatgcca

SEQ ID NO: 2808561 - DNA, 25 bp, Homo sapien
gaagcttcgccaatttagcattgca

SEQ ID NO: 2808562 - DNA, 25 bp, Homo sapien
tgtttgtccctcaactaagattccg

SEQ ID NO: 2808563 - DNA, 25 bp, Homo sapien
tcagggcaattagagcttcgccggc

SEQ ID NO: 2808564 - DNA, 25 bp, Homo sapien
gatgtatatatcacgaccctgggct

SEQ ID NO: 2808565 - DNA, 25 bp, Homo sapien
gagtccgctcgacacaagcagtgag

SEQ ID NO: 2808566 - DNA, 25 bp, Homo sapien
ccctacagaggaagcggagtgctaa

SEQ ID NO: 2808567 - DNA, 25 bp, Homo sapien
ccaggaagttagctcgtgacggtcg

SEQ ID NO: 2808568 - DNA, 25 bp, Homo sapien
gctcttcgtgcttgatgcggtggga

SEQ ID NO: 2808569 - DNA, 25 bp, Homo sapien
gaaaatagacggaaagctcttccag

SEQ ID NO: 2808570 - DNA, 25 bp, Homo sapien
agcggcgcgtcacagccggcttcag

SEQ ID NO: 2808571 - DNA, 25 bp, Homo sapien
agacttcgctatccgcggcgtctag

SEQ ID NO: 2808572 - DNA, 25 bp, Homo sapien
gaactcagacttcgctatccgcggc

SEQ ID NO: 2808573 - DNA, 25 bp, Homo sapien
atccgcggcgtctaggcgtctccgg

SEQ ID NO: 2808574 - DNA, 25 bp, Homo sapien
tcagaggaactcagacttcgctatc

SEQ ID NO: 2808575 - DNA, 25 bp, Homo sapien
cagttgcaagccctttaaagttgag

SEQ ID NO: 2808576 - DNA, 25 bp, Homo sapien
tgcataagatacaagcaagttctct

SEQ ID NO: 2808577 - DNA, 25 bp, Homo sapien
aaagttgagattgtattgagactgt

SEQ ID NO: 2808578 - DNA, 25 bp, Homo sapien
taaaggcaagaagtcaagtttgacc

SEQ ID NO: 2808579 - DNA, 25 bp, Homo sapien
caatgaacgtgcaaacttcagagag

SEQ ID NO: 2808580 - DNA, 25 bp, Homo sapien
aaagaaggccatcggtttcaactgg

SEQ ID NO: 2808581 - DNA, 25 bp, Homo sapien
gcaacaaggagccaggtgaaagtct

SEQ ID NO: 2808582 - DNA, 25 bp, Homo sapien
gaacacttttgacttgagacctgag

SEQ ID NO: 2808583 - DNA, 25 bp, Homo sapien
tgaattaaaaaatggagttgaacta

SEQ ID NO: 2808584 - DNA, 25 bp, Homo sapien
taccccagtcagttaatgatttgga

SEQ ID NO: 2808585 - DNA, 25 bp, Homo sapien
taaaatactgagtgctatagactga

SEQ ID NO: 2808586 - DNA, 25 bp, Homo sapien
tgatttggaattgttctaaagccca

SEQ ID NO: 2808587 - DNA, 25 bp, Homo sapien
taggtggtaaactagccagtataga

SEQ ID NO: 2808588 - DNA, 25 bp, Homo sapien
tcgacctttggactgtattgcatca

SEQ ID NO: 2808589 - DNA, 25 bp, Homo sapien
gagtaatctcttagcccttggaatg

SEQ ID NO: 2808590 - DNA, 25 bp, Homo sapien
ttccagcaatctatgagcaatccag

SEQ ID NO: 2808591 - DNA, 25 bp, Homo sapien
ccactgtgccgtaaaggattaacct

SEQ ID NO: 2808592 - DNA, 25 bp, Homo sapien
aaaaatcttgctggcactttgacag

SEQ ID NO: 2808593 - DNA, 25 bp, Homo sapien
gaggctttgggacttcacaatttta

SEQ ID NO: 2808594 - DNA, 25 bp, Homo sapien
gctctatgagtgctggcaaattacc

SEQ ID NO: 2808595 - DNA, 25 bp, Homo sapien
caaacctgaaggtggtcttagagat

SEQ ID NO: 2808596 - DNA, 25 bp, Homo sapien
gaatgattacattgaacacccatcc

SEQ ID NO: 2808597 - DNA, 25 bp, Homo sapien
gagggcttagaaatagtgtacacag

SEQ ID NO: 2808598 - DNA, 25 bp, Homo sapien
tctggctaccctatcaatatgcttg

SEQ ID NO: 2808599 - DNA, 25 bp, Homo sapien
gaatttcagattgttaacctatgga

SEQ ID NO: 2808600 - DNA, 25 bp, Homo sapien
ttgaaatcaccaataatcctactgt

SEQ ID NO: 2808601 - DNA, 25 bp, Homo sapien
tatcctggcaattggttaaccctca

SEQ ID NO: 2808602 - DNA, 25 bp, Homo sapien
catgtgcaggctagccagaacccaa

SEQ ID NO: 2808603 - DNA, 25 bp, Homo sapien
gagagaacttgccttcctgcatgtg

SEQ ID NO: 2808604 - DNA, 25 bp, Homo sapien
ccttgcattcttgaacattcagctc

SEQ ID NO: 2808605 - DNA, 25 bp, Homo sapien
gtgcaggaaccagaatctatcctta

SEQ ID NO: 2808606 - DNA, 25 bp, Homo sapien
tctatccttaaacttgaatctgagc

SEQ ID NO: 2808607 - DNA, 25 bp, Homo sapien
tctaatagtgcctaacacttggaaa

SEQ ID NO: 2808608 - DNA, 25 bp, Homo sapien
gaatctgagccacttagacatcatg

SEQ ID NO: 2808609 - DNA, 25 bp, Homo sapien
tactgcacatataggtaataagtcc

SEQ ID NO: 2808610 - DNA, 25 bp, Homo sapien
gcaatttgactgtggcttagactct

SEQ ID NO: 2808611 - DNA, 25 bp, Homo sapien
gaatactcactatgctttagatgca

SEQ ID NO: 2808612 - DNA, 25 bp, Homo sapien
gatgatatagctaaagtttaccgga

SEQ ID NO: 2808613 - DNA, 25 bp, Homo sapien
cagcataggcaccagagacgttctt

SEQ ID NO: 2808614 - DNA, 25 bp, Homo sapien
tgaatgcgtgataaaaatggcagcc

SEQ ID NO: 2808615 - DNA, 25 bp, Homo sapien
gccaggtctaagcttgtctcactag

SEQ ID NO: 2808616 - DNA, 25 bp, Homo sapien
aaacaggcctgacagtaacaatgag

SEQ ID NO: 2808617 - DNA, 25 bp, Homo sapien
catcagctgacactccacaaacaca

SEQ ID NO: 2808618 - DNA, 25 bp, Homo sapien
gctgacactccacaaacacatttgc

SEQ ID NO: 2808619 - DNA, 25 bp, Homo sapien
agcatcagctgacactccacaaaca

SEQ ID NO: 2808620 - DNA, 25 bp, Homo sapien
cagctgacactccacaaacacattt

SEQ ID NO: 2808621 - DNA, 25 bp, Homo sapien
aattatggatttctctggcacaggc

SEQ ID NO: 2808622 - DNA, 25 bp, Homo sapien
tgtcaaagtcaaaggtaacattcgg

SEQ ID NO: 2808623 - DNA, 25 bp, Homo sapien
tacttaatttgaccagaaaggtgtc

SEQ ID NO: 2808624 - DNA, 25 bp, Homo sapien
tctgattaccaagattaaagacagg

SEQ ID NO: 2808625 - DNA, 25 bp, Homo sapien
tttgggaaacacgagctccagactg

SEQ ID NO: 2808626 - DNA, 25 bp, Homo sapien
gagctctcagaattactattcccag

SEQ ID NO: 2808627 - DNA, 25 bp, Homo sapien
aaacaacgcgtcctacacatgcact

SEQ ID NO: 2808628 - DNA, 25 bp, Homo sapien
cacatgcactggcaagataatcccc

SEQ ID NO: 2808629 - DNA, 25 bp, Homo sapien
gcaaagggtggagttgatctttaaa

SEQ ID NO: 2808630 - DNA, 25 bp, Homo sapien
aatactgagttttatttcacatgta

SEQ ID NO: 2808631 - DNA, 25 bp, Homo sapien
catgtctgaccaccgctagtactat

SEQ ID NO: 2808632 - DNA, 25 bp, Homo sapien
accaagcaaagggtggagttgatct

SEQ ID NO: 2808633 - DNA, 25 bp, Homo sapien
atcaactgttaacagaaatgaaata

SEQ ID NO: 2808634 - DNA, 25 bp, Homo sapien
taacagaaatgaaataagacggaaa

SEQ ID NO: 2808635 - DNA, 25 bp, Homo sapien
agatatcaactgttaacagaaatga

SEQ ID NO: 2808636 - DNA, 25 bp, Homo sapien
ctgttaacagaaatgaaataagacg

SEQ ID NO: 2808637 - DNA, 25 bp, Homo sapien
atagcctcttggttagtcatccgga

SEQ ID NO: 2808638 - DNA, 25 bp, Homo sapien
tgaatagcctcttggttagtcatcc

SEQ ID NO: 2808639 - DNA, 25 bp, Homo sapien
cttgaatagcctcttggttagtcat

SEQ ID NO: 2808640 - DNA, 25 bp, Homo sapien
gcctcttggttagtcatccggaagc

SEQ ID NO: 2808641 - DNA, 25 bp, Homo sapien
gcatttttggctggagtatctcgta

SEQ ID NO: 2808642 - DNA, 25 bp, Homo sapien
tttttggctggagtatctcgtatag

SEQ ID NO: 2808643 - DNA, 25 bp, Homo sapien
catttttggctggagtatctcgtat

SEQ ID NO: 2808644 - DNA, 25 bp, Homo sapien
ttggctggagtatctcgtatagatt

SEQ ID NO: 2808645 - DNA, 25 bp, Homo sapien
tacttttttctgtggaaccttgcta

SEQ ID NO: 2808646 - DNA, 25 bp, Homo sapien
tttttctgtggaaccttgctaccac

SEQ ID NO: 2808647 - DNA, 25 bp, Homo sapien
atcatcttcatcagcagcaagtttt

SEQ ID NO: 2808648 - DNA, 25 bp, Homo sapien
ttcatcagcagcaagttttactttt

SEQ ID NO: 2808649 - DNA, 25 bp, Homo sapien
tccaggggcagaccgctttccagat

SEQ ID NO: 2808650 - DNA, 25 bp, Homo sapien
aggggcagaccgctttccagatata

SEQ ID NO: 2808651 - DNA, 25 bp, Homo sapien
ctccaggggcagaccgctttccaga

SEQ ID NO: 2808652 - DNA, 25 bp, Homo sapien
gggcagaccgctttccagatatact

SEQ ID NO: 2808653 - DNA, 25 bp, Homo sapien
actaagtgctgtccactaatatgca

SEQ ID NO: 2808654 - DNA, 25 bp, Homo sapien
acagctactaagtgctgtccactaa

SEQ ID NO: 2808655 - DNA, 25 bp, Homo sapien
tccacagctactaagtgctgtccac

SEQ ID NO: 2808656 - DNA, 25 bp, Homo sapien
cactaatatgcactggccctgaacc

SEQ ID NO: 2808657 - DNA, 25 bp, Homo sapien
ttcaaccttaagaccactggtggtg

SEQ ID NO: 2808658 - DNA, 25 bp, Homo sapien
acttcaaccttaagaccactggtgg

SEQ ID NO: 2808659 - DNA, 25 bp, Homo sapien
accttaagaccactggtggtgttat

SEQ ID NO: 2808660 - DNA, 25 bp, Homo sapien
gccttcgtaattcatggcctctgct

SEQ ID NO: 2808661 - DNA, 25 bp, Homo sapien
aactggcgctcattttcatcattat

SEQ ID NO: 2808662 - DNA, 25 bp, Homo sapien
ggcgctcattttcatcattatccac

SEQ ID NO: 2808663 - DNA, 25 bp, Homo sapien
ctggcgctcattttcatcattatcc

SEQ ID NO: 2808664 - DNA, 25 bp, Homo sapien
cttaaggataactggcgctcatttt

SEQ ID NO: 2808665 - DNA, 25 bp, Homo sapien
aagtgatcatctttgtcggccttta

SEQ ID NO: 2808666 - DNA, 25 bp, Homo sapien
gatcatctttgtcggcctttagttc

SEQ ID NO: 2808667 - DNA, 25 bp, Homo sapien
tgtcggcctttagttcacaaccgaa

SEQ ID NO: 2808668 - DNA, 25 bp, Homo sapien
cacaaccgaaaagatagttctgggg

SEQ ID NO: 2808669 - DNA, 25 bp, Homo sapien
tcgaatcttccatcgggtggcggca

SEQ ID NO: 2808670 - DNA, 25 bp, Homo sapien
tccatcgaatcttccatcgggtggc

SEQ ID NO: 2808671 - DNA, 25 bp, Homo sapien
atcttccatcgggtggcggcacgca

SEQ ID NO: 2808672 - DNA, 25 bp, Homo sapien
catcgaatcttccatcgggtggcgg

SEQ ID NO: 2808673 - DNA, 25 bp, Homo sapien
aaacaacgctgctgcagagaacagc

SEQ ID NO: 2808674 - DNA, 25 bp, Homo sapien
ggagataaaacaacgctgctgcaga

SEQ ID NO: 2808675 - DNA, 25 bp, Homo sapien
aggcggacggagataaaacaacgct

SEQ ID NO: 2808676 - DNA, 25 bp, Homo sapien
acggagataaaacaacgctgctgca

SEQ ID NO: 2808677 - DNA, 25 bp, Homo sapien
tatttcaatagtttagtaattcttg

SEQ ID NO: 2808678 - DNA, 25 bp, Homo sapien
cattaccctttctgaatatacagta

SEQ ID NO: 2808679 - DNA, 25 bp, Homo sapien
actttaattatgtctagtacttgca

SEQ ID NO: 2808680 - DNA, 25 bp, Homo sapien
tagtacttgcattaatacgtgcata

SEQ ID NO: 2808681 - DNA, 25 bp, Homo sapien
catgttgttagttaggaatctggcc

SEQ ID NO: 2808682 - DNA, 25 bp, Homo sapien
tacctgacacatgggtagcactcaa

SEQ ID NO: 2808683 - DNA, 25 bp, Homo sapien
taaatctattccctcacttgcaaag

SEQ ID NO: 2808684 - DNA, 25 bp, Homo sapien
tagcactcaatacaggctagctgtt

SEQ ID NO: 2808685 - DNA, 25 bp, Homo sapien
gaaataagtctcaggtcatatggct

SEQ ID NO: 2808686 - DNA, 25 bp, Homo sapien
gcctcattgtgagcagacaacagaa

SEQ ID NO: 2808687 - DNA, 25 bp, Homo sapien
tagttagcaaccaagtcacataggt

SEQ ID NO: 2808688 - DNA, 25 bp, Homo sapien
tagtgaggatcattgcttttacacc

SEQ ID NO: 2808689 - DNA, 25 bp, Homo sapien
tctgcatcttcacattcggactagc

SEQ ID NO: 2808690 - DNA, 25 bp, Homo sapien
gccttatcttcaaacgcatttccat

SEQ ID NO: 2808691 - DNA, 25 bp, Homo sapien
tttcactaccaaatctgaagacctg

SEQ ID NO: 2808692 - DNA, 25 bp, Homo sapien
gacctgtcagcattaggctcgtgct

SEQ ID NO: 2808693 - DNA, 25 bp, Homo sapien
ggatatgtggcagatattcaaaatt

SEQ ID NO: 2808694 - DNA, 25 bp, Homo sapien
aatccagcagaaatgggtcagaaat

SEQ ID NO: 2808695 - DNA, 25 bp, Homo sapien
tgggtcagaaatgtggatatgtggc

SEQ ID NO: 2808696 - DNA, 25 bp, Homo sapien
atgtggatatgtggcagatattcaa

SEQ ID NO: 2808697 - DNA, 25 bp, Homo sapien
gaatgccaatgctattatctgagtg

SEQ ID NO: 2808698 - DNA, 25 bp, Homo sapien
tccttcaaagcagataaacgtttcc

SEQ ID NO: 2808699 - DNA, 25 bp, Homo sapien
tatctgagtgttactatctcctgca

SEQ ID NO: 2808700 - DNA, 25 bp, Homo sapien
tactgaccaggcttatagagatggc

SEQ ID NO: 2808701 - DNA, 25 bp, Homo sapien
gcttgaagacaaattccctgttcct

SEQ ID NO: 2808702 - DNA, 25 bp, Homo sapien
caaggtataacttgcaaatgtgcag

SEQ ID NO: 2808703 - DNA, 25 bp, Homo sapien
cttccctgggttctcagatgtaagc

SEQ ID NO: 2808704 - DNA, 25 bp, Homo sapien
tcttccagaggctgctaccatggca

SEQ ID NO: 2808705 - DNA, 25 bp, Homo sapien
acttgcatgctacattgcctcaatg

SEQ ID NO: 2808706 - DNA, 25 bp, Homo sapien
cccaataaagctgaggaacaatgca

SEQ ID NO: 2808707 - DNA, 25 bp, Homo sapien
ggtatacacatgtcaatcaccatgt

SEQ ID NO: 2808708 - DNA, 25 bp, Homo sapien
tcaatgaaatcataaggtcctccaa

SEQ ID NO: 2808709 - DNA, 25 bp, Homo sapien
cacactgggaacatctgtcataaga

SEQ ID NO: 2808710 - DNA, 25 bp, Homo sapien
caagagaacttgtattcctacacac

SEQ ID NO: 2808711 - DNA, 25 bp, Homo sapien
gacaagttgccaagggtgatttgaa

SEQ ID NO: 2808712 - DNA, 25 bp, Homo sapien
tttcacatctcaatgacaagttgcc

SEQ ID NO: 2808713 - DNA, 25 bp, Homo sapien
tggtgctgccaggtgcaaatatgct

SEQ ID NO: 2808714 - DNA, 25 bp, Homo sapien
cagctaaagccctgtgcctgtggcc

SEQ ID NO: 2808715 - DNA, 25 bp, Homo sapien
taaaacatttctgcaagggccaaag

SEQ ID NO: 2808716 - DNA, 25 bp, Homo sapien
ccaagtttggccaaatggactggtg

SEQ ID NO: 2808717 - DNA, 25 bp, Homo sapien
tgcagaaagatgtattagccacgta

SEQ ID NO: 2808718 - DNA, 25 bp, Homo sapien
gagcaaactagtcctacttcagaga

SEQ ID NO: 2808719 - DNA, 25 bp, Homo sapien
tactctttgaagctgggcaaggtaa

SEQ ID NO: 2808720 - DNA, 25 bp, Homo sapien
tggacacttcctagctttagacaga

SEQ ID NO: 2808721 - DNA, 25 bp, Homo sapien
cactgagctggtgatatctagaaaa

SEQ ID NO: 2808722 - DNA, 25 bp, Homo sapien
gatctaaagaagagccacggtcctc

SEQ ID NO: 2808723 - DNA, 25 bp, Homo sapien
tgcctttactaattatgccactgaa

SEQ ID NO: 2808724 - DNA, 25 bp, Homo sapien
cagtgaagatctattggagtcggga

SEQ ID NO: 2808725 - DNA, 25 bp, Homo sapien
tcatcaaggacgctggaccatggga

SEQ ID NO: 2808726 - DNA, 25 bp, Homo sapien
gagttattctctatacagccaccag

SEQ ID NO: 2808727 - DNA, 25 bp, Homo sapien
gaggaactgagaccctgacatgaag

SEQ ID NO: 2808728 - DNA, 25 bp, Homo sapien
taagctacagctgggaccgaagctc

SEQ ID NO: 2808729 - DNA, 25 bp, Homo sapien
tacccctgcagagtagagacgtgta

SEQ ID NO: 2808730 - DNA, 25 bp, Homo sapien
agccccagtcccaggtgaaagcaca

SEQ ID NO: 2808731 - DNA, 25 bp, Homo sapien
agacgtgtatagtgggggatatcca

SEQ ID NO: 2808732 - DNA, 25 bp, Homo sapien
gggctacccctgcagagtagagacg

SEQ ID NO: 2808733 - DNA, 25 bp, Homo sapien
cctgggcaaggaggcccggctgtcc

SEQ ID NO: 2808734 - DNA, 25 bp, Homo sapien
ggtgctcctgggcaaggaggcccgg

SEQ ID NO: 2808735 - DNA, 25 bp, Homo sapien
ctcctgggcaaggaggcccggctgt

SEQ ID NO: 2808736 - DNA, 25 bp, Homo sapien
tgctcctgggcaaggaggcccggct

SEQ ID NO: 2808737 - DNA, 25 bp, Homo sapien
tagggcaccgctggaagaatttctc

SEQ ID NO: 2808738 - DNA, 25 bp, Homo sapien
tttgcataagcccagaaggttctct

SEQ ID NO: 2808739 - DNA, 25 bp, Homo sapien
catcttgctgcggttatagaaccaa

SEQ ID NO: 2808740 - DNA, 25 bp, Homo sapien
gcatcattggttggtcgactgccca

SEQ ID NO: 2808741 - DNA, 25 bp, Homo sapien
gcttccacatgttggcgacgcttag

SEQ ID NO: 2808742 - DNA, 25 bp, Homo sapien
tcagtatgcccgagatgtcctctgg

SEQ ID NO: 2808743 - DNA, 25 bp, Homo sapien
tgcgagtaccctaggctcaacctct

SEQ ID NO: 2808744 - DNA, 25 bp, Homo sapien
tgctccgcagggcaatgtagggccc

SEQ ID NO: 2808745 - DNA, 25 bp, Homo sapien
tgggtgctcaaccaggtcagagtgt

SEQ ID NO: 2808746 - DNA, 25 bp, Homo sapien
tatccagccccggaattcgtgtggc

SEQ ID NO: 2808747 - DNA, 25 bp, Homo sapien
gggaatcctccacacgtcagggcct

SEQ ID NO: 2808748 - DNA, 25 bp, Homo sapien
gggcctgcagggtgctatccagccc

SEQ ID NO: 2808749 - DNA, 25 bp, Homo sapien
cctctggggccgcccccaccactgc

SEQ ID NO: 2808750 - DNA, 25 bp, Homo sapien
ccctctggggccgcccccaccactg

SEQ ID NO: 2808751 - DNA, 25 bp, Homo sapien
gcagaagtggtttgagggcctgtgt

SEQ ID NO: 2808752 - DNA, 25 bp, Homo sapien
gaagtggtttgagggcctgtgtccg

SEQ ID NO: 2808753 - DNA, 25 bp, Homo sapien
gggcagaagtggtttgagggcctgt

SEQ ID NO: 2808754 - DNA, 25 bp, Homo sapien
cagaagtggtttgagggcctgtgtc

SEQ ID NO: 2808755 - DNA, 25 bp, Homo sapien
ggtggaatggcacccgcagcggctc

SEQ ID NO: 2808756 - DNA, 25 bp, Homo sapien
gggtggaatggcacccgcagcggct

SEQ ID NO: 2808757 - DNA, 25 bp, Homo sapien
gtggaatggcacccgcagcggctct

SEQ ID NO: 2808758 - DNA, 25 bp, Homo sapien
tggaatggcacccgcagcggctctg

SEQ ID NO: 2808759 - DNA, 25 bp, Homo sapien
tgaagacgtatgttttgggaatatt

SEQ ID NO: 2808760 - DNA, 25 bp, Homo sapien
ggaatattttggccagcagacagat

SEQ ID NO: 2808761 - DNA, 25 bp, Homo sapien
ttctttgaagacgtatgttttggga

SEQ ID NO: 2808762 - DNA, 25 bp, Homo sapien
ctttgaagacgtatgttttgggaat

SEQ ID NO: 2808763 - DNA, 25 bp, Homo sapien
tgtgcctggtacaaagtggccaaag

SEQ ID NO: 2808764 - DNA, 25 bp, Homo sapien
tggccaaaggcatgtcaagatcccc

SEQ ID NO: 2808765 - DNA, 25 bp, Homo sapien
tagagccttccatcctgtgtgcctg

SEQ ID NO: 2808766 - DNA, 25 bp, Homo sapien
taaccttgtctgtgatgcctagagc

SEQ ID NO: 2808767 - DNA, 25 bp, Homo sapien
tgcctaatgggagtatatagtacca

SEQ ID NO: 2808768 - DNA, 25 bp, Homo sapien
tggcccagagaacataggaaagcct

SEQ ID NO: 2808769 - DNA, 25 bp, Homo sapien
tctgcaaatgccttttcagtcctat

SEQ ID NO: 2808770 - DNA, 25 bp, Homo sapien
aagtgaggcagatatttactgttgc

SEQ ID NO: 2808771 - DNA, 25 bp, Homo sapien
ttccctttcaataggcagtccagtc

SEQ ID NO: 2808772 - DNA, 25 bp, Homo sapien
ctcttccctttcaataggcagtcca

SEQ ID NO: 2808773 - DNA, 25 bp, Homo sapien
cctttcaataggcagtccagtcttg

SEQ ID NO: 2808774 - DNA, 25 bp, Homo sapien
ctttcaataggcagtccagtcttgc

SEQ ID NO: 2808775 - DNA, 25 bp, Homo sapien
gagacccgggggcaatcaggtagca

SEQ ID NO: 2808776 - DNA, 25 bp, Homo sapien
ctccactgatgtgtctaatggttct

SEQ ID NO: 2808777 - DNA, 25 bp, Homo sapien
gatgtgtctaatggttctgagctag

SEQ ID NO: 2808778 - DNA, 25 bp, Homo sapien
gagctagagacccaattacaacagt

SEQ ID NO: 2808779 - DNA, 25 bp, Homo sapien
gtggaaagatccttgactggtagat

SEQ ID NO: 2808780 - DNA, 25 bp, Homo sapien
ttgactggtagatcaagtgtcttat

SEQ ID NO: 2808781 - DNA, 25 bp, Homo sapien
gactggtagatcaagtgtcttattg

SEQ ID NO: 2808782 - DNA, 25 bp, Homo sapien
atcaagtgtcttattgtatttcctt

SEQ ID NO: 2808783 - DNA, 25 bp, Homo sapien
gagccactaggtattctattaagaa

SEQ ID NO: 2808784 - DNA, 25 bp, Homo sapien
gctgaagagccactaggtattctat

SEQ ID NO: 2808785 - DNA, 25 bp, Homo sapien
agctgaagagccactaggtattcta

SEQ ID NO: 2808786 - DNA, 25 bp, Homo sapien
gaagagccactaggtattctattaa

SEQ ID NO: 2808787 - DNA, 25 bp, Homo sapien
tccattctcgaatcgttttgccagc

SEQ ID NO: 2808788 - DNA, 25 bp, Homo sapien
cagagtctgtcaatgccacagcagt

SEQ ID NO: 2808789 - DNA, 25 bp, Homo sapien
tgatgccacacattgtgaacagagt

SEQ ID NO: 2808790 - DNA, 25 bp, Homo sapien
ttacatcggcttctcgttgaatcat

SEQ ID NO: 2808791 - DNA, 25 bp, Homo sapien
tagtcctggaactacttgcaactgc

SEQ ID NO: 2808792 - DNA, 25 bp, Homo sapien
tcctggaactacttgcaactgccat

SEQ ID NO: 2808793 - DNA, 25 bp, Homo sapien
tagtagtcctggaactacttgcaac

SEQ ID NO: 2808794 - DNA, 25 bp, Homo sapien
tttagtagtcctggaactacttgca

SEQ ID NO: 2808795 - DNA, 25 bp, Homo sapien
ctggttacaagtgtgccctgtagat

SEQ ID NO: 2808796 - DNA, 25 bp, Homo sapien
gatgacttatcagtcaactctgggt

SEQ ID NO: 2808797 - DNA, 25 bp, Homo sapien
tttcatggtactctgtcctgtgcta

SEQ ID NO: 2808798 - DNA, 25 bp, Homo sapien
caagtgtgccctgtagatgacttat

SEQ ID NO: 2808799 - DNA, 25 bp, Homo sapien
gaaattaaggtgacatgcaggtccc

SEQ ID NO: 2808800 - DNA, 25 bp, Homo sapien
caagttgggtctagatggcttggcc

SEQ ID NO: 2808801 - DNA, 25 bp, Homo sapien
cactgttctttgagtatgggcacca

SEQ ID NO: 2808802 - DNA, 25 bp, Homo sapien
gcaggtcccattacagacttgcata

SEQ ID NO: 2808803 - DNA, 25 bp, Homo sapien
ctctggttggtactgggagtgtctc

SEQ ID NO: 2808804 - DNA, 25 bp, Homo sapien
ctaaacttgtcctagggacacctgg

SEQ ID NO: 2808805 - DNA, 25 bp, Homo sapien
ggatagactatgtccaaatctggga

SEQ ID NO: 2808806 - DNA, 25 bp, Homo sapien
cagctgtggttctataggcaggatc

SEQ ID NO: 2808807 - DNA, 25 bp, Homo sapien
taagtcttgggttgacaggccacca

SEQ ID NO: 2808808 - DNA, 25 bp, Homo sapien
ccaccaaggtggtttgtacacataa

SEQ ID NO: 2808809 - DNA, 25 bp, Homo sapien
caatttggcaggtcaactcagtcaa

SEQ ID NO: 2808810 - DNA, 25 bp, Homo sapien
tgtagatactgccttactatggaaa

SEQ ID NO: 2808811 - DNA, 25 bp, Homo sapien
caaatgcaatagtttagcaggcata

SEQ ID NO: 2808812 - DNA, 25 bp, Homo sapien
taaaaagcacaagacataattatgc

SEQ ID NO: 2808813 - DNA, 25 bp, Homo sapien
ccaataatgcatataggactagttt

SEQ ID NO: 2808814 - DNA, 25 bp, Homo sapien
gaagctgaaacttcaactattcaaa

SEQ ID NO: 2808815 - DNA, 25 bp, Homo sapien
taccacatgagtaataacaggtgcc

SEQ ID NO: 2808816 - DNA, 25 bp, Homo sapien
cagtttagcatgctactgcagctgg

SEQ ID NO: 2808817 - DNA, 25 bp, Homo sapien
tgtgtgcctatccacgaggaatgag

SEQ ID NO: 2808818 - DNA, 25 bp, Homo sapien
tccttggtggaacatgtgcagttta

SEQ ID NO: 2808819 - DNA, 25 bp, Homo sapien
atcctttatttctcaccaactactg

SEQ ID NO: 2808820 - DNA, 25 bp, Homo sapien
attacatttctccaatttgggtcca

SEQ ID NO: 2808821 - DNA, 25 bp, Homo sapien
gcatcatacagcatccttcctgata

SEQ ID NO: 2808822 - DNA, 25 bp, Homo sapien
tttgggtccatacaagaagctgatt

SEQ ID NO: 2808823 - DNA, 25 bp, Homo sapien
tctgagactaggctgacttggacta

SEQ ID NO: 2808824 - DNA, 25 bp, Homo sapien
ggcatgcatcataatatccagctat

SEQ ID NO: 2808825 - DNA, 25 bp, Homo sapien
tctatctgtcaaacaaggctcatca

SEQ ID NO: 2808826 - DNA, 25 bp, Homo sapien
ggctcatcatacctacctgatagag

SEQ ID NO: 2808827 - DNA, 25 bp, Homo sapien
catttatacttataaagaatcccaa

SEQ ID NO: 2808828 - DNA, 25 bp, Homo sapien
ggcagacaggctactagaaaccttt

SEQ ID NO: 2808829 - DNA, 25 bp, Homo sapien
ctttgttgtcggcagacaggctact

SEQ ID NO: 2808830 - DNA, 25 bp, Homo sapien
tgtcggcagacaggctactagaaac

SEQ ID NO: 2808831 - DNA, 25 bp, Homo sapien
aaagcaagtcctccatagctgtgag

SEQ ID NO: 2808832 - DNA, 25 bp, Homo sapien
agcagcctgagctatgaaatgatcc

SEQ ID NO: 2808833 - DNA, 25 bp, Homo sapien
ccatagctgtgagcaacgaaaaaca

SEQ ID NO: 2808834 - DNA, 25 bp, Homo sapien
gagcaacgaaaaacacattctcagc

SEQ ID NO: 2808835 - DNA, 25 bp, Homo sapien
cctgttggactgtcctgaaaccaag

SEQ ID NO: 2808836 - DNA, 25 bp, Homo sapien
atcctgttggactgtcctgaaacca

SEQ ID NO: 2808837 - DNA, 25 bp, Homo sapien
ctgttggactgtcctgaaaccaagg

SEQ ID NO: 2808838 - DNA, 25 bp, Homo sapien
tgttggactgtcctgaaaccaaggt

SEQ ID NO: 2808839 - DNA, 25 bp, Homo sapien
caaaatcatcgaaactgaaattaaa

SEQ ID NO: 2808840 - DNA, 25 bp, Homo sapien
ttacaaaatcatcgaaactgaaatt

SEQ ID NO: 2808841 - DNA, 25 bp, Homo sapien
ataacattacaaaatcatcgaaact

SEQ ID NO: 2808842 - DNA, 25 bp, Homo sapien
cattacaaaatcatcgaaactgaaa

SEQ ID NO: 2808843 - DNA, 25 bp, Homo sapien
tccactgaccttctatcatatctta

SEQ ID NO: 2808844 - DNA, 25 bp, Homo sapien
ttccactgaccttctatcatatctt

SEQ ID NO: 2808845 - DNA, 25 bp, Homo sapien
ccactgaccttctatcatatcttaa

SEQ ID NO: 2808846 - DNA, 25 bp, Homo sapien
ggtgaggagttgttttgatatgaat

SEQ ID NO: 2808847 - DNA, 25 bp, Homo sapien
tgcttgcaaatgtaaaagaattctt

SEQ ID NO: 2808848 - DNA, 25 bp, Homo sapien
ctgcttgcaaatgtaaaagaattct

SEQ ID NO: 2808849 - DNA, 25 bp, Homo sapien
tgattttcacatcccacgtgcctag

SEQ ID NO: 2808850 - DNA, 25 bp, Homo sapien
gttacactaacatgctcagaggcca

SEQ ID NO: 2808851 - DNA, 25 bp, Homo sapien
cactccaggtacgatgtggaatcta

SEQ ID NO: 2808852 - DNA, 25 bp, Homo sapien
tcagaggccatcgttaagcatcaac

SEQ ID NO: 2808853 - DNA, 25 bp, Homo sapien
atttagagaaactgcttgtttttgt

SEQ ID NO: 2808854 - DNA, 25 bp, Homo sapien
ggagagatgaatccagaatatccac

SEQ ID NO: 2808855 - DNA, 25 bp, Homo sapien
aatttagagaaactgcttgtttttg

SEQ ID NO: 2808856 - DNA, 25 bp, Homo sapien
tgagagaagagatgccccttgcctc

SEQ ID NO: 2808857 - DNA, 25 bp, Homo sapien
ttgcctcgtgggctctagctctggg

SEQ ID NO: 2808858 - DNA, 25 bp, Homo sapien
agagatgccccttgcctcgtgggct

SEQ ID NO: 2808859 - DNA, 25 bp, Homo sapien
gaagagatgccccttgcctcgtggg

SEQ ID NO: 2808860 - DNA, 25 bp, Homo sapien
tatatagggcaagcagaatctgggt

SEQ ID NO: 2808861 - DNA, 25 bp, Homo sapien
tagagcctggcatagctggttggat

SEQ ID NO: 2808862 - DNA, 25 bp, Homo sapien
tgcagtgagatagtttactgtagcc

SEQ ID NO: 2808863 - DNA, 25 bp, Homo sapien
aaaactcctcagaaataggatggaa

SEQ ID NO: 2808864 - DNA, 25 bp, Homo sapien
gaggagggtattgctattttgccca

SEQ ID NO: 2808865 - DNA, 25 bp, Homo sapien
tatagcattactctagcatcctgag

SEQ ID NO: 2808866 - DNA, 25 bp, Homo sapien
tggagagaagattcacattaaggct

SEQ ID NO: 2808867 - DNA, 25 bp, Homo sapien
gctcaatggttgctattgctattca

SEQ ID NO: 2808868 - DNA, 25 bp, Homo sapien
tatgtccccttaagagttatgcaac

SEQ ID NO: 2808869 - DNA, 25 bp, Homo sapien
taatacaagcaatcttcaattggcc

SEQ ID NO: 2808870 - DNA, 25 bp, Homo sapien
gccccataagggcactcagtgtata

SEQ ID NO: 2808871 - DNA, 25 bp, Homo sapien
gaatgtccaccttatcgctatgagg

SEQ ID NO: 2808872 - DNA, 25 bp, Homo sapien
tagaaagcaggcacagacatctggg

SEQ ID NO: 2808873 - DNA, 25 bp, Homo sapien
ctagaaagcaggcacagacatctgg

SEQ ID NO: 2808874 - DNA, 25 bp, Homo sapien
cagacatctgggctctttcagcaag

SEQ ID NO: 2808875 - DNA, 25 bp, Homo sapien
gctctttcagcaagaagccacccat

SEQ ID NO: 2808876 - DNA, 25 bp, Homo sapien
tctgccataattcttcccatgtttc

SEQ ID NO: 2808877 - DNA, 25 bp, Homo sapien
caagctttaagttgatgtagagaaa

SEQ ID NO: 2808878 - DNA, 25 bp, Homo sapien
tgccttggaatgtattatagaaaac

SEQ ID NO: 2808879 - DNA, 25 bp, Homo sapien
ttatgctgattattaagatactaac

SEQ ID NO: 2808880 - DNA, 25 bp, Homo sapien
ttattaagatactaactaagcctct

SEQ ID NO: 2808881 - DNA, 25 bp, Homo sapien
tacaaagtactataaccagtggtga

SEQ ID NO: 2808882 - DNA, 25 bp, Homo sapien
aaaatccgatatgaacagcagcagc

SEQ ID NO: 2808883 - DNA, 25 bp, Homo sapien
tgtgtgtcttggtatgtcttgctca

SEQ ID NO: 2808884 - DNA, 25 bp, Homo sapien
tgacttagttctcaacccaacacat

SEQ ID NO: 2808885 - DNA, 25 bp, Homo sapien
aaaacatataaagcacgctcaaaga

SEQ ID NO: 2808886 - DNA, 25 bp, Homo sapien
aaacatataaagcacgctcaaagat

SEQ ID NO: 2808887 - DNA, 25 bp, Homo sapien
caagtagacgactatgggaaataaa

SEQ ID NO: 2808888 - DNA, 25 bp, Homo sapien
tccaagtagacgactatgggaaata

SEQ ID NO: 2808889 - DNA, 25 bp, Homo sapien
tttaatccaagtagacgactatggg

SEQ ID NO: 2808890 - DNA, 25 bp, Homo sapien
taatccaagtagacgactatgggaa

SEQ ID NO: 2808891 - DNA, 25 bp, Homo sapien
aatagtaaaggaaagtagtgatctc

SEQ ID NO: 2808892 - DNA, 25 bp, Homo sapien
tatatacaaggtaaagaaaatagta

SEQ ID NO: 2808893 - DNA, 25 bp, Homo sapien
tagtaaaggaaagtagtgatctcac

SEQ ID NO: 2808894 - DNA, 25 bp, Homo sapien
aaaggaaagtagtgatctcactcac

SEQ ID NO: 2808895 - DNA, 25 bp, Homo sapien
tgtatcttcggcttttctacttcaa

SEQ ID NO: 2808896 - DNA, 25 bp, Homo sapien
tcatagaaatcacgtcgcttctttg

SEQ ID NO: 2808897 - DNA, 25 bp, Homo sapien
tgaactatcagatgatgactgtacg

SEQ ID NO: 2808898 - DNA, 25 bp, Homo sapien
cgtttttctgctggttcatctgaac

SEQ ID NO: 2808899 - DNA, 25 bp, Homo sapien
tagctctaagtcaaaagttttacca

SEQ ID NO: 2808900 - DNA, 25 bp, Homo sapien
cagttggacacacttgactagttat

SEQ ID NO: 2808901 - DNA, 25 bp, Homo sapien
cttggtgattttctacagttggaca

SEQ ID NO: 2808902 - DNA, 25 bp, Homo sapien
cactgtcaggtagacagattgtcac

SEQ ID NO: 2808903 - DNA, 25 bp, Homo sapien
tgtcagctccttggttactgaaccg

SEQ ID NO: 2808904 - DNA, 25 bp, Homo sapien
gctcaaaatctttgttaatctcatt

SEQ ID NO: 2808905 - DNA, 25 bp, Homo sapien
tgtttgcagctttatcaacacatgc

SEQ ID NO: 2808906 - DNA, 25 bp, Homo sapien
tatcaacacatgcatcaatgtcagc

SEQ ID NO: 2808907 - DNA, 25 bp, Homo sapien
aatagcaaataagttatagtatgag

SEQ ID NO: 2808908 - DNA, 25 bp, Homo sapien
gtaatagcaaataagttatagtatg

SEQ ID NO: 2808909 - DNA, 25 bp, Homo sapien
tacagtaatagcaaataagttatag

SEQ ID NO: 2808910 - DNA, 25 bp, Homo sapien
cagtaatagcaaataagttatagta

SEQ ID NO: 2808911 - DNA, 25 bp, Homo sapien
cgtgcaaagcaaatggccgtaaatg

SEQ ID NO: 2808912 - DNA, 25 bp, Homo sapien
aagcaaatggccgtaaatgcaccca

SEQ ID NO: 2808913 - DNA, 25 bp, Homo sapien
aatacctacaaactcagctgagagc

SEQ ID NO: 2808914 - DNA, 25 bp, Homo sapien
gagccgtgcaaagcaaatggccgta

SEQ ID NO: 2808915 - DNA, 25 bp, Homo sapien
gattagtcacataaaccgaaaccga

SEQ ID NO: 2808916 - DNA, 25 bp, Homo sapien
catatggctgaacagaagcgtagct

SEQ ID NO: 2808917 - DNA, 25 bp, Homo sapien
ctaacctaatataagagaactgggc

SEQ ID NO: 2808918 - DNA, 25 bp, Homo sapien
tcagggaaacctgagaatgcataca

SEQ ID NO: 2808919 - DNA, 25 bp, Homo sapien
tactttgtcctcctcggatactaga

SEQ ID NO: 2808920 - DNA, 25 bp, Homo sapien
tcctcggatactagagccaataacg

SEQ ID NO: 2808921 - DNA, 25 bp, Homo sapien
tccttcattactttgtcctcctcgg

SEQ ID NO: 2808922 - DNA, 25 bp, Homo sapien
gatactagagccaataacgatagca

SEQ ID NO: 2808923 - DNA, 25 bp, Homo sapien
tcttccctgattctatgaaacagtg

SEQ ID NO: 2808924 - DNA, 25 bp, Homo sapien
cagtgatagtacaagtgtcctgctc

SEQ ID NO: 2808925 - DNA, 25 bp, Homo sapien
tgttaatgactctcaatgtggtcct

SEQ ID NO: 2808926 - DNA, 25 bp, Homo sapien
tctcagagtcccgtattgcttcctg

SEQ ID NO: 2808927 - DNA, 25 bp, Homo sapien
tcaactgtgtacgaattcaatcaca

SEQ ID NO: 2808928 - DNA, 25 bp, Homo sapien
tggtggtaggtatcaggcattagca

SEQ ID NO: 2808929 - DNA, 25 bp, Homo sapien
tcacccgtaaaacattaagcactcc

SEQ ID NO: 2808930 - DNA, 25 bp, Homo sapien
tactgtcaagtttctagaagagaga

SEQ ID NO: 2808931 - DNA, 25 bp, Homo sapien
gccatgattggccaggagagaaact

SEQ ID NO: 2808932 - DNA, 25 bp, Homo sapien
tgaattctattagcccaagcagggc

SEQ ID NO: 2808933 - DNA, 25 bp, Homo sapien
caagagaactgaataggatgtaagc

SEQ ID NO: 2808934 - DNA, 25 bp, Homo sapien
tgcagaataaatgtaggaggtgaca

SEQ ID NO: 2808935 - DNA, 25 bp, Homo sapien
gaggcttgcttataggtcttgctct

SEQ ID NO: 2808936 - DNA, 25 bp, Homo sapien
taaacttcatatggtgaggcttgct

SEQ ID NO: 2808937 - DNA, 25 bp, Homo sapien
gcatagggatgacccatgtgattga

SEQ ID NO: 2808938 - DNA, 25 bp, Homo sapien
cccggacagccataaaaagtacata

SEQ ID NO: 2808939 - DNA, 25 bp, Homo sapien
aacacactatctgtgctcttcatta

SEQ ID NO: 2808940 - DNA, 25 bp, Homo sapien
tccaaaaggttcaatctttctgagg

SEQ ID NO: 2808941 - DNA, 25 bp, Homo sapien
tgtatacctaacacactatctgtgc

SEQ ID NO: 2808942 - DNA, 25 bp, Homo sapien
gaggcatactcattcctgaatatcc

SEQ ID NO: 2808943 - DNA, 25 bp, Homo sapien
ttcacaaatataactgccatcaagt

SEQ ID NO: 2808944 - DNA, 25 bp, Homo sapien
tcacaaatataactgccatcaagtt

SEQ ID NO: 2808945 - DNA, 25 bp, Homo sapien
cacaaatataactgccatcaagttc

SEQ ID NO: 2808946 - DNA, 25 bp, Homo sapien
tataataagtcttctagcccactgc

SEQ ID NO: 2808947 - DNA, 25 bp, Homo sapien
tttaataaacggtatctgtgtgcca

SEQ ID NO: 2808948 - DNA, 25 bp, Homo sapien
ggatttgtcaaagcatcctcactca

SEQ ID NO: 2808949 - DNA, 25 bp, Homo sapien
ttggttcactctcagtggcatctac

SEQ ID NO: 2808950 - DNA, 25 bp, Homo sapien
ttccaggagctcatatacatacttc

SEQ ID NO: 2808951 - DNA, 25 bp, Homo sapien
caggagctcatatacatacttcgtg

SEQ ID NO: 2808952 - DNA, 25 bp, Homo sapien
tccaggagctcatatacatacttcg

SEQ ID NO: 2808953 - DNA, 25 bp, Homo sapien
ttttccaggagctcatatacatact

SEQ ID NO: 2808954 - DNA, 25 bp, Homo sapien
catgcccagtcctgattattatatt

SEQ ID NO: 2808955 - DNA, 25 bp, Homo sapien
ccatgcccagtcctgattattatat

SEQ ID NO: 2808956 - DNA, 25 bp, Homo sapien
acagaaacagagtagaatggtggct

SEQ ID NO: 2808957 - DNA, 25 bp, Homo sapien
aaactcacagaaacagagtagaatg

SEQ ID NO: 2808958 - DNA, 25 bp, Homo sapien
gtcaaactcacagaaacagagtaga

SEQ ID NO: 2808959 - DNA, 25 bp, Homo sapien
atgaggcatctaaaatagtcaaact

SEQ ID NO: 2808960 - DNA, 25 bp, Homo sapien
caatatgcttgtgtttaatgacatc

SEQ ID NO: 2808961 - DNA, 25 bp, Homo sapien
ttctgatatacaatatgcttgtgtt

SEQ ID NO: 2808962 - DNA, 25 bp, Homo sapien
tgaactaatgcaccgtcagtaacag

SEQ ID NO: 2808963 - DNA, 25 bp, Homo sapien
gtgaggatgactaaatgattctgat

SEQ ID NO: 2808964 - DNA, 25 bp, Homo sapien
cacgtagcagcaaaaccttggagta

SEQ ID NO: 2808965 - DNA, 25 bp, Homo sapien
ggtagctcattataccttcagagag

SEQ ID NO: 2808966 - DNA, 25 bp, Homo sapien
tatcttgggttctcacacgtagcag

SEQ ID NO: 2808967 - DNA, 25 bp, Homo sapien
tcagagagaatccaagtttgaggct

SEQ ID NO: 2808968 - DNA, 25 bp, Homo sapien
tgcccttcagccagtagtaaccaga

SEQ ID NO: 2808969 - DNA, 25 bp, Homo sapien
caagccctttatgcagatgatgaga

SEQ ID NO: 2808970 - DNA, 25 bp, Homo sapien
ccttaatacaggagcccaatgtgct

SEQ ID NO: 2808971 - DNA, 25 bp, Homo sapien
taatttacagaagatgggtcacagc

SEQ ID NO: 2808972 - DNA, 25 bp, Homo sapien
tccgtgcagtaacagaagacataga

SEQ ID NO: 2808973 - DNA, 25 bp, Homo sapien
tccaaggtgatggacagcatcctgt

SEQ ID NO: 2808974 - DNA, 25 bp, Homo sapien
catatgtgtgcccttctaccaggcc

SEQ ID NO: 2808975 - DNA, 25 bp, Homo sapien
gtttgcagtccatgagtgctaccca

SEQ ID NO: 2808976 - DNA, 25 bp, Homo sapien
cctgtcgtgccatagtgtgctgaaa

SEQ ID NO: 2808977 - DNA, 25 bp, Homo sapien
gaaatgacttcacgtagagcctgag

SEQ ID NO: 2808978 - DNA, 25 bp, Homo sapien
tatgcagtatacaactcccagagga

SEQ ID NO: 2808979 - DNA, 25 bp, Homo sapien
tagagcttctacatgcctgtcgtgc

SEQ ID NO: 2808980 - DNA, 25 bp, Homo sapien
aactaaaacaacagttgtgaaacat

SEQ ID NO: 2808981 - DNA, 25 bp, Homo sapien
ctaaaacaacagttgtgaaacatat

SEQ ID NO: 2808982 - DNA, 25 bp, Homo sapien
gaaacatatatagtagcgctcagct

SEQ ID NO: 2808983 - DNA, 25 bp, Homo sapien
tagtagcgctcagctaaagacaaaa

SEQ ID NO: 2808984 - DNA, 25 bp, Homo sapien
taaatagtacactaattccaaggta

SEQ ID NO: 2808985 - DNA, 25 bp, Homo sapien
gatatgtctataaggctttcttaag

SEQ ID NO: 2808986 - DNA, 25 bp, Homo sapien
gaattgggtgtcacataaatagtac

SEQ ID NO: 2808987 - DNA, 25 bp, Homo sapien
accttatggtcaagcattaaaattg

SEQ ID NO: 2808988 - DNA, 25 bp, Homo sapien
taaaatcactgtatgccacagagat

SEQ ID NO: 2808989 - DNA, 25 bp, Homo sapien
aattgtgtaagatgcctataattct

SEQ ID NO: 2808990 - DNA, 25 bp, Homo sapien
aaacttgttattagtacatattaca

SEQ ID NO: 2808991 - DNA, 25 bp, Homo sapien
gtgtaagatgcctataattctgata

SEQ ID NO: 2808992 - DNA, 25 bp, Homo sapien
atgcaaatacaacgctttacctccc

SEQ ID NO: 2808993 - DNA, 25 bp, Homo sapien
tgacagtagatttgcagaccaaagt

SEQ ID NO: 2808994 - DNA, 25 bp, Homo sapien
aactgtgctccaagagggatctctc

SEQ ID NO: 2808995 - DNA, 25 bp, Homo sapien
taccccatggaactctcactctggg

SEQ ID NO: 2808996 - DNA, 25 bp, Homo sapien
taaaagttaaatgctatggccaggc

SEQ ID NO: 2808997 - DNA, 25 bp, Homo sapien
aaaagttaaatgctatggccaggca

SEQ ID NO: 2808998 - DNA, 25 bp, Homo sapien
aaatagaaacactgcattaaaagtt

SEQ ID NO: 2808999 - DNA, 25 bp, Homo sapien
caaatggttccccagtttttatgtg

SEQ ID NO: 2809000 - DNA, 25 bp, Homo sapien
atggttccccagtttttatgtgtct

SEQ ID NO: 2809001 - DNA, 25 bp, Homo sapien
catctgtgtaaatcttcccggtagt

SEQ ID NO: 2809002 - DNA, 25 bp, Homo sapien
tctgtgtaaatcttcccggtagtta

SEQ ID NO: 2809003 - DNA, 25 bp, Homo sapien
aggaaaatcaagaggcggttcatct

SEQ ID NO: 2809004 - DNA, 25 bp, Homo sapien
tagttcatccaaatctatcctagat

SEQ ID NO: 2809005 - DNA, 25 bp, Homo sapien
attcaaatccttccagggtatcagg

SEQ ID NO: 2809006 - DNA, 25 bp, Homo sapien
cttttttcattagttcatccaaatc

SEQ ID NO: 2809007 - DNA, 25 bp, Homo sapien
gaactttactgtcagctctcctggg

SEQ ID NO: 2809008 - DNA, 25 bp, Homo sapien
gaagcaccccaagtgtacatagatg

SEQ ID NO: 2809009 - DNA, 25 bp, Homo sapien
tctctctgccgatcttcaagctggg

SEQ ID NO: 2809010 - DNA, 25 bp, Homo sapien
tgaaagtgtgcacagagcaacaacg

SEQ ID NO: 2809011 - DNA, 25 bp, Homo sapien
gaaagtattattgaccagtgtgaca

SEQ ID NO: 2809012 - DNA, 25 bp, Homo sapien
tgaatgaactttgagacctaacagc

SEQ ID NO: 2809013 - DNA, 25 bp, Homo sapien
cttgcttaaaagaaggtggcacctc

SEQ ID NO: 2809014 - DNA, 25 bp, Homo sapien
tatgagttccctgagatctgcttgc

SEQ ID NO: 2809015 - DNA, 25 bp, Homo sapien
aactactttcttccagcatgcactg

SEQ ID NO: 2809016 - DNA, 25 bp, Homo sapien
gctttaaccccgctcatcttgagtt

SEQ ID NO: 2809017 - DNA, 25 bp, Homo sapien
catacgaactaagaggactagatac

SEQ ID NO: 2809018 - DNA, 25 bp, Homo sapien
taaaggcactatagcaaaatgcagg

SEQ ID NO: 2809019 - DNA, 25 bp, Homo sapien
gaatccagatagttacaagatccag

SEQ ID NO: 2809020 - DNA, 25 bp, Homo sapien
gcttgcaggagtacaaatcagaacc

SEQ ID NO: 2809021 - DNA, 25 bp, Homo sapien
tattctgagcgtgctggatccttcc

SEQ ID NO: 2809022 - DNA, 25 bp, Homo sapien
aaatctatctaggtggaaacccagc

SEQ ID NO: 2809023 - DNA, 25 bp, Homo sapien
gctgtgagggatataaataattgca

SEQ ID NO: 2809024 - DNA, 25 bp, Homo sapien
tgagtacatacatctcagatgcagt

SEQ ID NO: 2809025 - DNA, 25 bp, Homo sapien
gaatggaaggtcacctaaatattcc

SEQ ID NO: 2809026 - DNA, 25 bp, Homo sapien
tattcctacacctttattaggcaca

SEQ ID NO: 2809027 - DNA, 25 bp, Homo sapien
tttcatctggacctccctgctggat

SEQ ID NO: 2809028 - DNA, 25 bp, Homo sapien
tggatttgtgccatgtttatccaaa

SEQ ID NO: 2809029 - DNA, 25 bp, Homo sapien
tttgtgccatgtttatccaaattgg

SEQ ID NO: 2809030 - DNA, 25 bp, Homo sapien
tcagtgcggtagtcttttctttttc

SEQ ID NO: 2809031 - DNA, 25 bp, Homo sapien
tatcatcactaaattgcctagtaat

SEQ ID NO: 2809032 - DNA, 25 bp, Homo sapien
ttccatgtaaagaaggcgcttcctt

SEQ ID NO: 2809033 - DNA, 25 bp, Homo sapien
gccttgcatcccatatcatcactaa

SEQ ID NO: 2809034 - DNA, 25 bp, Homo sapien
tagtaattttccaattcagcaacaa

SEQ ID NO: 2809035 - DNA, 25 bp, Homo sapien
gaagactgcattcttactggagaaa

SEQ ID NO: 2809036 - DNA, 25 bp, Homo sapien
gaggtatgattcaccctacagcaaa

SEQ ID NO: 2809037 - DNA, 25 bp, Homo sapien
taggaaaccgtgctctactagatca

SEQ ID NO: 2809038 - DNA, 25 bp, Homo sapien
tagtacattaatctgcttgagcggc

SEQ ID NO: 2809039 - DNA, 25 bp, Homo sapien
tactactttacacccatcaggatcg

SEQ ID NO: 2809040 - DNA, 25 bp, Homo sapien
gaaaagagtgtgtcaattcctcgaa

SEQ ID NO: 2809041 - DNA, 25 bp, Homo sapien
gcaataaaagtcatggtggctgcct

SEQ ID NO: 2809042 - DNA, 25 bp, Homo sapien
tataccagtggtcaaaaaggacatg

SEQ ID NO: 2809043 - DNA, 25 bp, Homo sapien
tacgccccgacataaggaaagtcat

SEQ ID NO: 2809044 - DNA, 25 bp, Homo sapien
gtcgctcccgcctagagagtggaaa

SEQ ID NO: 2809045 - DNA, 25 bp, Homo sapien
gaatgcagcgtggttccagacagcc

SEQ ID NO: 2809046 - DNA, 25 bp, Homo sapien
agtcatccagggaacacacacgtcg

SEQ ID NO: 2809047 - DNA, 25 bp, Homo sapien
cagtcgaactccctcgtgcggttgt

SEQ ID NO: 2809048 - DNA, 25 bp, Homo sapien
ccctcgtgcggttgttatgactttc

SEQ ID NO: 2809049 - DNA, 25 bp, Homo sapien
gtggccttccagttcgccagtcgaa

SEQ ID NO: 2809050 - DNA, 25 bp, Homo sapien
tatgactttccctctcgggatccgc

SEQ ID NO: 2809051 - DNA, 25 bp, Homo sapien
tgttggacttcactgagatgacgtt

SEQ ID NO: 2809052 - DNA, 25 bp, Homo sapien
tggacttcactgagatgacgttcat

SEQ ID NO: 2809053 - DNA, 25 bp, Homo sapien
tcctgttggacttcactgagatgac

SEQ ID NO: 2809054 - DNA, 25 bp, Homo sapien
cctgttggacttcactgagatgacg

SEQ ID NO: 2809055 - DNA, 25 bp, Homo sapien
tagtaactgctaaaccaataataaa

SEQ ID NO: 2809056 - DNA, 25 bp, Homo sapien
tttcacatagtaactgctaaaccaa

SEQ ID NO: 2809057 - DNA, 25 bp, Homo sapien
gaaggaagatcatactttataggaa

SEQ ID NO: 2809058 - DNA, 25 bp, Homo sapien
tataaactgttaggcttcattcctg

SEQ ID NO: 2809059 - DNA, 25 bp, Homo sapien
caagcaattgtctgaacatggagcc

SEQ ID NO: 2809060 - DNA, 25 bp, Homo sapien
aaattgggacttgggctacagctac

SEQ ID NO: 2809061 - DNA, 25 bp, Homo sapien
tccttggcagagagggtactagagc

SEQ ID NO: 2809062 - DNA, 25 bp, Homo sapien
ttcaaagggaacacgagatggcagc

SEQ ID NO: 2809063 - DNA, 25 bp, Homo sapien
gttctccggatgatgaaaatccaca

SEQ ID NO: 2809064 - DNA, 25 bp, Homo sapien
aatccacaaaagcttttgcctaatg

SEQ ID NO: 2809065 - DNA, 25 bp, Homo sapien
ctctttctgatacgttctccggatg

SEQ ID NO: 2809066 - DNA, 25 bp, Homo sapien
ccacaaaagcttttgcctaatgttt

SEQ ID NO: 2809067 - DNA, 25 bp, Homo sapien
tgtaggaaaacaaccgacaaatcaa

SEQ ID NO: 2809068 - DNA, 25 bp, Homo sapien
gaactgtgcataaacactgtttggt

SEQ ID NO: 2809069 - DNA, 25 bp, Homo sapien
aagaggctagaagctaccccagtag

SEQ ID NO: 2809070 - DNA, 25 bp, Homo sapien
ttttgactggatactttaaggctga

SEQ ID NO: 2809071 - DNA, 25 bp, Homo sapien
tctttctgacttggttcctgctcgc

SEQ ID NO: 2809072 - DNA, 25 bp, Homo sapien
ttggttcctgctcgcatatccagct

SEQ ID NO: 2809073 - DNA, 25 bp, Homo sapien
caagatgtttaaactccttatcaac

SEQ ID NO: 2809074 - DNA, 25 bp, Homo sapien
ctgctgacaagatgtttaaactcct

SEQ ID NO: 2809075 - DNA, 25 bp, Homo sapien
tgcctcgcccttccaaagtggtagg

SEQ ID NO: 2809076 - DNA, 25 bp, Homo sapien
tggagtgcagtggcatgatcttggc

SEQ ID NO: 2809077 - DNA, 25 bp, Homo sapien
agacagggcctttctctgtcaccag

SEQ ID NO: 2809078 - DNA, 25 bp, Homo sapien
cagggcctttctctgtcaccagggc

SEQ ID NO: 2809079 - DNA, 25 bp, Homo sapien
tccttttaaacacatgctccctggc

SEQ ID NO: 2809080 - DNA, 25 bp, Homo sapien
ctggctccaaaattgtaacaacgtt

SEQ ID NO: 2809081 - DNA, 25 bp, Homo sapien
tttaaacacatgctccctggctcca

SEQ ID NO: 2809082 - DNA, 25 bp, Homo sapien
ctccctggctccaaaattgtaacaa

SEQ ID NO: 2809083 - DNA, 25 bp, Homo sapien
gtagctgacctgtcagtgttaagtt

SEQ ID NO: 2809084 - DNA, 25 bp, Homo sapien
tagctgacctgtcagtgttaagttg

SEQ ID NO: 2809085 - DNA, 25 bp, Homo sapien
tgtagctgacctgtcagtgttaagt

SEQ ID NO: 2809086 - DNA, 25 bp, Homo sapien
atgtagctgacctgtcagtgttaag

SEQ ID NO: 2809087 - DNA, 25 bp, Homo sapien
tgagtctgagtcctcacaggaacct

SEQ ID NO: 2809088 - DNA, 25 bp, Homo sapien
caagaatgaggcgatgttttgtgag

SEQ ID NO: 2809089 - DNA, 25 bp, Homo sapien
ttacaagatatgctctcctgagtct

SEQ ID NO: 2809090 - DNA, 25 bp, Homo sapien
caagaggcaagaatgaggcgatgtt

SEQ ID NO: 2809091 - DNA, 25 bp, Homo sapien
cttacaatccgtaggtatactttca

SEQ ID NO: 2809092 - DNA, 25 bp, Homo sapien
tactttcataaactgagctacactg

SEQ ID NO: 2809093 - DNA, 25 bp, Homo sapien
ctattcaaggcttacaatccgtagg

SEQ ID NO: 2809094 - DNA, 25 bp, Homo sapien
caaggcttacaatccgtaggtatac

SEQ ID NO: 2809095 - DNA, 25 bp, Homo sapien
cgtgtcctaacaattgcagacattg

SEQ ID NO: 2809096 - DNA, 25 bp, Homo sapien
cctaacaattgcagacattgtactt

SEQ ID NO: 2809097 - DNA, 25 bp, Homo sapien
catttcgtgtcctaacaattgcaga

SEQ ID NO: 2809098 - DNA, 25 bp, Homo sapien
ttttcccagacatttcgtgtcctaa

SEQ ID NO: 2809099 - DNA, 25 bp, Homo sapien
cttcacttttgccattctgagaata

SEQ ID NO: 2809100 - DNA, 25 bp, Homo sapien
tgccattctgagaataaataagaaa

SEQ ID NO: 2809101 - DNA, 25 bp, Homo sapien
tctgagaataaataagaaagttcat

SEQ ID NO: 2809102 - DNA, 25 bp, Homo sapien
tcatcttcacttttgccattctgag

SEQ ID NO: 2809103 - DNA, 25 bp, Homo sapien
ttattgtgagacttgatgctagaca

SEQ ID NO: 2809104 - DNA, 25 bp, Homo sapien
caggactactgttcctagtagcaat

SEQ ID NO: 2809105 - DNA, 25 bp, Homo sapien
tggtagtaatatatcccaccaggac

SEQ ID NO: 2809106 - DNA, 25 bp, Homo sapien
gctagacatcaggtttgcaatagaa

SEQ ID NO: 2809107 - DNA, 25 bp, Homo sapien
tagccacttttgtcatggaatacca

SEQ ID NO: 2809108 - DNA, 25 bp, Homo sapien
caatggttgtctagaggaaaagtac

SEQ ID NO: 2809109 - DNA, 25 bp, Homo sapien
ctgagtggaaggctgaagtagccac

SEQ ID NO: 2809110 - DNA, 25 bp, Homo sapien
tcaggaatgcccttatgaagcagca

SEQ ID NO: 2809111 - DNA, 25 bp, Homo sapien
gtctcaaatgcttgactattaccat

SEQ ID NO: 2809112 - DNA, 25 bp, Homo sapien
aaatgcttgactattaccatacttg

SEQ ID NO: 2809113 - DNA, 25 bp, Homo sapien
gggtgctcagttttctgttcactct

SEQ ID NO: 2809114 - DNA, 25 bp, Homo sapien
ttaggtgactgggtgctcagttttc

SEQ ID NO: 2809115 - DNA, 25 bp, Homo sapien
ttgctccttacatgagcattttctt

SEQ ID NO: 2809116 - DNA, 25 bp, Homo sapien
ctctttgctccttacatgagcattt

SEQ ID NO: 2809117 - DNA, 25 bp, Homo sapien
ctccttacatgagcattttcttgtt

SEQ ID NO: 2809118 - DNA, 25 bp, Homo sapien
ctttgctccttacatgagcattttc

SEQ ID NO: 2809119 - DNA, 25 bp, Homo sapien
agctccatcagtgtttcttgtagca

SEQ ID NO: 2809120 - DNA, 25 bp, Homo sapien
cagagctccatcagtgtttcttgta

SEQ ID NO: 2809121 - DNA, 25 bp, Homo sapien
tcagagctccatcagtgtttcttgt

SEQ ID NO: 2809122 - DNA, 25 bp, Homo sapien
agagctccatcagtgtttcttgtag

SEQ ID NO: 2809123 - DNA, 25 bp, Homo sapien
cttatcttgttccatgttctcccca

SEQ ID NO: 2809124 - DNA, 25 bp, Homo sapien
tcttatcttgttccatgttctcccc

SEQ ID NO: 2809125 - DNA, 25 bp, Homo sapien
ttatcttgttccatgttctccccac

SEQ ID NO: 2809126 - DNA, 25 bp, Homo sapien
ctcttatcttgttccatgttctccc

SEQ ID NO: 2809127 - DNA, 25 bp, Homo sapien
tgacttaatcaagtattccgccaag

SEQ ID NO: 2809128 - DNA, 25 bp, Homo sapien
gaagtcttcccggatgatcccatcc

SEQ ID NO: 2809129 - DNA, 25 bp, Homo sapien
tccgccaagaagtcttcccggatga

SEQ ID NO: 2809130 - DNA, 25 bp, Homo sapien
taatcaagtattccgccaagaagtc

SEQ ID NO: 2809131 - DNA, 25 bp, Homo sapien
gctcacacctgtaatcccagcactt

SEQ ID NO: 2809132 - DNA, 25 bp, Homo sapien
tgggaggccaaggtgggtggatcac

SEQ ID NO: 2809133 - DNA, 25 bp, Homo sapien
tctttaagaatgttggctgggcatt

SEQ ID NO: 2809134 - DNA, 25 bp, Homo sapien
ttaagaatgttggctgggcattgtg

SEQ ID NO: 2809135 - DNA, 25 bp, Homo sapien
ggagttgactctcaattataccaag

SEQ ID NO: 2809136 - DNA, 25 bp, Homo sapien
atgcagattggagttgactctcaat

SEQ ID NO: 2809137 - DNA, 25 bp, Homo sapien
ataggcccgttcagccccagttgcg

SEQ ID NO: 2809138 - DNA, 25 bp, Homo sapien
aaataggcccgttcagccccagttg

SEQ ID NO: 2809139 - DNA, 25 bp, Homo sapien
taacacggggtattgatgacagtac

SEQ ID NO: 2809140 - DNA, 25 bp, Homo sapien
tgacagtacatcaattcaagcatca

SEQ ID NO: 2809141 - DNA, 25 bp, Homo sapien
ggttgaagacaaatactgagaggca

SEQ ID NO: 2809142 - DNA, 25 bp, Homo sapien
tatatgatgacctgttccagggtgt

SEQ ID NO: 2809143 - DNA, 25 bp, Homo sapien
gaagactcgccgaatctcatttaac

SEQ ID NO: 2809144 - DNA, 25 bp, Homo sapien
agaagactcgccgaatctcatttaa

SEQ ID NO: 2809145 - DNA, 25 bp, Homo sapien
agtttcacagcctatatcttttttt

SEQ ID NO: 2809146 - DNA, 25 bp, Homo sapien
tcagaagactcgccgaatctcattt

SEQ ID NO: 2809147 - DNA, 25 bp, Homo sapien
gcagactattgataatgggccttaa

SEQ ID NO: 2809148 - DNA, 25 bp, Homo sapien
tgacagcgcattatggagcacatgg

SEQ ID NO: 2809149 - DNA, 25 bp, Homo sapien
ttcttaaaaggcagctatctcaggg

SEQ ID NO: 2809150 - DNA, 25 bp, Homo sapien
gctggacctttaccttacggctgcc

SEQ ID NO: 2809151 - DNA, 25 bp, Homo sapien
tagtttgcacatttccgaaaattta

SEQ ID NO: 2809152 - DNA, 25 bp, Homo sapien
aatatagactcattagtagttagtc

SEQ ID NO: 2809153 - DNA, 25 bp, Homo sapien
tagagagagaattagtcaaaggcaa

SEQ ID NO: 2809154 - DNA, 25 bp, Homo sapien
tatataagcatttataggtatatgt

SEQ ID NO: 2809155 - DNA, 25 bp, Homo sapien
agcagagaattacatacagatatac

SEQ ID NO: 2809156 - DNA, 25 bp, Homo sapien
catgtgaatacatattttggcccta

SEQ ID NO: 2809157 - DNA, 25 bp, Homo sapien
cggagggagttgctgaagatctaca

SEQ ID NO: 2809158 - DNA, 25 bp, Homo sapien
acagatatacagcaggttacttgtt

SEQ ID NO: 2809159 - DNA, 25 bp, Homo sapien
tacagtttggctcggcagaaattca

SEQ ID NO: 2809160 - DNA, 25 bp, Homo sapien
aataaaggcctgattgatctcactg

SEQ ID NO: 2809161 - DNA, 25 bp, Homo sapien
tttcactgacctgttatggcctctg

SEQ ID NO: 2809162 - DNA, 25 bp, Homo sapien
gatctcactgactaaggcaattgaa

SEQ ID NO: 2809163 - DNA, 25 bp, Homo sapien
tccagtccaaaaggctttgataccc

SEQ ID NO: 2809164 - DNA, 25 bp, Homo sapien
catctggcggtccttaggatataaa

SEQ ID NO: 2809165 - DNA, 25 bp, Homo sapien
taaaacccgcttcatcaatgatgcc

SEQ ID NO: 2809166 - DNA, 25 bp, Homo sapien
aatctatcggtacttgaaattccag

SEQ ID NO: 2809167 - DNA, 25 bp, Homo sapien
ctagcgggggcacaaaagcactctg

SEQ ID NO: 2809168 - DNA, 25 bp, Homo sapien
aaagcactctggcctgtaaactagg

SEQ ID NO: 2809169 - DNA, 25 bp, Homo sapien
gcgggggcacaaaagcactctggcc

SEQ ID NO: 2809170 - DNA, 25 bp, Homo sapien
ggcacaaaagcactctggcctgtaa

SEQ ID NO: 2809171 - DNA, 25 bp, Homo sapien
ctatactttcaactattgcagattt

SEQ ID NO: 2809172 - DNA, 25 bp, Homo sapien
taatatctggttgttcgattacccc

SEQ ID NO: 2809173 - DNA, 25 bp, Homo sapien
cgattaccccctcattacttatctt

SEQ ID NO: 2809174 - DNA, 25 bp, Homo sapien
cttgaatgaattctatactttcaac

SEQ ID NO: 2809175 - DNA, 25 bp, Homo sapien
gctgttcgtagatgtagacaggtac

SEQ ID NO: 2809176 - DNA, 25 bp, Homo sapien
taaatgcactagctcaccctcatct

SEQ ID NO: 2809177 - DNA, 25 bp, Homo sapien
tgaacttgttttataccgctctgca

SEQ ID NO: 2809178 - DNA, 25 bp, Homo sapien
tataccgctctgcaaaataagctgt

SEQ ID NO: 2809179 - DNA, 25 bp, Homo sapien
ggaactactcgtaattgcatttttc

SEQ ID NO: 2809180 - DNA, 25 bp, Homo sapien
ttccaattccatggaactactcgta

SEQ ID NO: 2809181 - DNA, 25 bp, Homo sapien
caggcactcgggagacaatgtgaga

SEQ ID NO: 2809182 - DNA, 25 bp, Homo sapien
gcactcgggagacaatgtgagaaag

SEQ ID NO: 2809183 - DNA, 25 bp, Homo sapien
caccgatgaggatacgataatcaaa

SEQ ID NO: 2809184 - DNA, 25 bp, Homo sapien
gaccacaggagaatagttgctaaaa

SEQ ID NO: 2809185 - DNA, 25 bp, Homo sapien
gctaaaagttatgcactgatgtaca

SEQ ID NO: 2809186 - DNA, 25 bp, Homo sapien
agggacaccgatgaggatacgataa

SEQ ID NO: 2809187 - DNA, 25 bp, Homo sapien
atgagtctttcagctcattgctacc

SEQ ID NO: 2809188 - DNA, 25 bp, Homo sapien
tcattgctaccatctgaagaagggc

SEQ ID NO: 2809189 - DNA, 25 bp, Homo sapien
aagaagggctatggcctttctgagc

SEQ ID NO: 2809190 - DNA, 25 bp, Homo sapien
tgtgactctgcggttgattaatgag

SEQ ID NO: 2809191 - DNA, 25 bp, Homo sapien
ctgggtcaatagctaaatcgcatta

SEQ ID NO: 2809192 - DNA, 25 bp, Homo sapien
taaaactccggaatgaggacaatgt

SEQ ID NO: 2809193 - DNA, 25 bp, Homo sapien
caggactgatgtgttaccttgagtg

SEQ ID NO: 2809194 - DNA, 25 bp, Homo sapien
taagagatccgcaagcttctgggtc

SEQ ID NO: 2809195 - DNA, 25 bp, Homo sapien
cacaaggtagctcatgctggacatc

SEQ ID NO: 2809196 - DNA, 25 bp, Homo sapien
taatgtagtgtataaatgccccgag

SEQ ID NO: 2809197 - DNA, 25 bp, Homo sapien
tgtagaagtcattaacacggagctc

SEQ ID NO: 2809198 - DNA, 25 bp, Homo sapien
tgatgacagtcagtgcaagcagaag

SEQ ID NO: 2809199 - DNA, 25 bp, Homo sapien
gatccagtgcaagaacccgaaagtg

SEQ ID NO: 2809200 - DNA, 25 bp, Homo sapien
tacttcactaaagtaatggagacct

SEQ ID NO: 2809201 - DNA, 25 bp, Homo sapien
cgaaagtgccagtatgtgaatgcat

SEQ ID NO: 2809202 - DNA, 25 bp, Homo sapien
tataatctccccatatgtaagagaa

SEQ ID NO: 2809203 - DNA, 25 bp, Homo sapien
atgatgggtagagcgagtcactgag

SEQ ID NO: 2809204 - DNA, 25 bp, Homo sapien
tgatgggtagagcgagtcactgagt

SEQ ID NO: 2809205 - DNA, 25 bp, Homo sapien
cactgagtctgaggtcttttggtgg

SEQ ID NO: 2809206 - DNA, 25 bp, Homo sapien
gatgggtagagcgagtcactgagtc

SEQ ID NO: 2809207 - DNA, 25 bp, Homo sapien
tgcgtatggcttgcctgttatctta

SEQ ID NO: 2809208 - DNA, 25 bp, Homo sapien
gcttgcctgttatcttagcaccatt

SEQ ID NO: 2809209 - DNA, 25 bp, Homo sapien
gtcctggatagtatttcctaggtta

SEQ ID NO: 2809210 - DNA, 25 bp, Homo sapien
tcaatcttttgcgtatggcttgcct

SEQ ID NO: 2809211 - DNA, 25 bp, Homo sapien
gctgcttcaagatttgttctgcctt

SEQ ID NO: 2809212 - DNA, 25 bp, Homo sapien
gcagctgcttcaagatttgttctgc

SEQ ID NO: 2809213 - DNA, 25 bp, Homo sapien
cctttgcagtcagcacagaaccagc

SEQ ID NO: 2809214 - DNA, 25 bp, Homo sapien
tcaggcagctgcttcaagatttgtt

SEQ ID NO: 2809215 - DNA, 25 bp, Homo sapien
tctttgggacagtataggtgcacac

SEQ ID NO: 2809216 - DNA, 25 bp, Homo sapien
actatagattcaatagaggccctgg

SEQ ID NO: 2809217 - DNA, 25 bp, Homo sapien
tgaaggatgtttgtccctagaggac

SEQ ID NO: 2809218 - DNA, 25 bp, Homo sapien
accatttagtggattggaagcagca

SEQ ID NO: 2809219 - DNA, 25 bp, Homo sapien
tcttatccagtctcagataatttgg

SEQ ID NO: 2809220 - DNA, 25 bp, Homo sapien
tgagcagcacactgaaggtcatctt

SEQ ID NO: 2809221 - DNA, 25 bp, Homo sapien
cagtctcagataatttggcagcaac

SEQ ID NO: 2809222 - DNA, 25 bp, Homo sapien
ctgtttttgagcagcacactgaagg

SEQ ID NO: 2809223 - DNA, 25 bp, Homo sapien
ggcttttcctctgaactattcatag

SEQ ID NO: 2809224 - DNA, 25 bp, Homo sapien
cacatggaaagggttaaaggcagaa

SEQ ID NO: 2809225 - DNA, 25 bp, Homo sapien
actaaacgccttatacacatggaaa

SEQ ID NO: 2809226 - DNA, 25 bp, Homo sapien
caaggtcgtctttaaaggtcggatg

SEQ ID NO: 2809227 - DNA, 25 bp, Homo sapien
ctaattgctcgataaaaaggccgtt

SEQ ID NO: 2809228 - DNA, 25 bp, Homo sapien
tctgctcagtcagttcaagagcaac

SEQ ID NO: 2809229 - DNA, 25 bp, Homo sapien
gagatccaggaccatcgtgtttatt

SEQ ID NO: 2809230 - DNA, 25 bp, Homo sapien
aaggccgtgcttttctctattgtca

SEQ ID NO: 2809231 - DNA, 25 bp, Homo sapien
taaatttgcctcaggtactccctgc

SEQ ID NO: 2809232 - DNA, 25 bp, Homo sapien
ggcaaacatgcaatcaccgtaggta

SEQ ID NO: 2809233 - DNA, 25 bp, Homo sapien
ctgcctgagcagtaagccttgtgaa

SEQ ID NO: 2809234 - DNA, 25 bp, Homo sapien
gcaggccagctttcttcaattcaac

SEQ ID NO: 2809235 - DNA, 25 bp, Homo sapien
gacgttcaatccagttgggcttctg

SEQ ID NO: 2809236 - DNA, 25 bp, Homo sapien
tgatggcatcggtcagtgccagtct

SEQ ID NO: 2809237 - DNA, 25 bp, Homo sapien
cctttggcatgctctcaagcaaaca

SEQ ID NO: 2809238 - DNA, 25 bp, Homo sapien
gtctcacagtttctcctagaactca

SEQ ID NO: 2809239 - DNA, 25 bp, Homo sapien
caagcatcggatgacctctagctcg

SEQ ID NO: 2809240 - DNA, 25 bp, Homo sapien
tgagaatttttacgcctgccagagg

SEQ ID NO: 2809241 - DNA, 25 bp, Homo sapien
tggtggacagtcttaggcaactctc

SEQ ID NO: 2809242 - DNA, 25 bp, Homo sapien
caatgccattatcgaggagccaagt

SEQ ID NO: 2809243 - DNA, 25 bp, Homo sapien
gatttagcaggaggaaactacagca

SEQ ID NO: 2809244 - DNA, 25 bp, Homo sapien
ccatcaagctgggtccttggttcag

SEQ ID NO: 2809245 - DNA, 25 bp, Homo sapien
tatataaaaagtcccataattgctc

SEQ ID NO: 2809246 - DNA, 25 bp, Homo sapien
tcaggttattttctgtgtcggaaac

SEQ ID NO: 2809247 - DNA, 25 bp, Homo sapien
tccatgtagctcacaaaaacgtttg

SEQ ID NO: 2809248 - DNA, 25 bp, Homo sapien
aaatacatgacagctgctaggcaac

SEQ ID NO: 2809249 - DNA, 25 bp, Homo sapien
tgctaggcaacaccttctcaggcac

SEQ ID NO: 2809250 - DNA, 25 bp, Homo sapien
tacatgacagctgctaggcaacacc

SEQ ID NO: 2809251 - DNA, 25 bp, Homo sapien
tgacagctgctaggcaacaccttct

SEQ ID NO: 2809252 - DNA, 25 bp, Homo sapien
caattgccttgggtgtcaaaagtca

SEQ ID NO: 2809253 - DNA, 25 bp, Homo sapien
catgtggcctcagcaagataattac

SEQ ID NO: 2809254 - DNA, 25 bp, Homo sapien
caaatgtcactagcaggaaaggtta

SEQ ID NO: 2809255 - DNA, 25 bp, Homo sapien
taagaaacctgtaaggccatgtggc

SEQ ID NO: 2809256 - DNA, 25 bp, Homo sapien
ggtttccagaagcaagttccagtta

SEQ ID NO: 2809257 - DNA, 25 bp, Homo sapien
gttacaacgtggctgggataagagc

SEQ ID NO: 2809258 - DNA, 25 bp, Homo sapien
ggctttcagtcctccagctgatgga

SEQ ID NO: 2809259 - DNA, 25 bp, Homo sapien
tccatcatgatgcagtagggtttcc

SEQ ID NO: 2809260 - DNA, 25 bp, Homo sapien
gtaagatataagttcgtttacatcc

SEQ ID NO: 2809261 - DNA, 25 bp, Homo sapien
caattgtgaaaagtcgtaagttctt

SEQ ID NO: 2809262 - DNA, 25 bp, Homo sapien
gccaattgtgaaaagtcgtaagttc

SEQ ID NO: 2809263 - DNA, 25 bp, Homo sapien
ccaattgtgaaaagtcgtaagttct

SEQ ID NO: 2809264 - DNA, 25 bp, Homo sapien
tgtgatatgcaagaaacccaatata

SEQ ID NO: 2809265 - DNA, 25 bp, Homo sapien
gaagggtagaaatgtgatatgcaag

SEQ ID NO: 2809266 - DNA, 25 bp, Homo sapien
gagtaaagaagggtagaaatgtgat

SEQ ID NO: 2809267 - DNA, 25 bp, Homo sapien
tagaaatgtgatatgcaagaaaccc

SEQ ID NO: 2809268 - DNA, 25 bp, Homo sapien
ttaacaaaactgatcagctctttgg

SEQ ID NO: 2809269 - DNA, 25 bp, Homo sapien
tctctgggttctctgatctacacct

SEQ ID NO: 2809270 - DNA, 25 bp, Homo sapien
ctctttgggcttatgtagccagatg

SEQ ID NO: 2809271 - DNA, 25 bp, Homo sapien
tacacctatgttgccggcattcctt

SEQ ID NO: 2809272 - DNA, 25 bp, Homo sapien
taattctgttaatggtgaagtcaaa

SEQ ID NO: 2809273 - DNA, 25 bp, Homo sapien
tgaggattcaaaagtttctgtacag

SEQ ID NO: 2809274 - DNA, 25 bp, Homo sapien
gaccataacatgttctcagtgcata

SEQ ID NO: 2809275 - DNA, 25 bp, Homo sapien
tacagatgtacaaactgaccataac

SEQ ID NO: 2809276 - DNA, 25 bp, Homo sapien
cagtagactcaaagatttctccagc

SEQ ID NO: 2809277 - DNA, 25 bp, Homo sapien
aactgtggagttcttttacggctgg

SEQ ID NO: 2809278 - DNA, 25 bp, Homo sapien
agcacttccactagaatctcctggg

SEQ ID NO: 2809279 - DNA, 25 bp, Homo sapien
agcgtatctggaggccagtagactc

SEQ ID NO: 2809280 - DNA, 25 bp, Homo sapien
gcagaatggtccagagatcgtaatg

SEQ ID NO: 2809281 - DNA, 25 bp, Homo sapien
cagaatggtccagagatcgtaatga

SEQ ID NO: 2809282 - DNA, 25 bp, Homo sapien
ggcagaatggtccagagatcgtaat

SEQ ID NO: 2809283 - DNA, 25 bp, Homo sapien
gaatggtccagagatcgtaatgaag

SEQ ID NO: 2809284 - DNA, 25 bp, Homo sapien
ctggatcgagaaggaacatctttcc

SEQ ID NO: 2809285 - DNA, 25 bp, Homo sapien
ggatcgagaaggaacatctttcccc

SEQ ID NO: 2809286 - DNA, 25 bp, Homo sapien
tggatcgagaaggaacatctttccc

SEQ ID NO: 2809287 - DNA, 25 bp, Homo sapien
aaccttcagtgcctgcgaggtgaca

SEQ ID NO: 2809288 - DNA, 25 bp, Homo sapien
ggtgacaggagcgattctgatgaat

SEQ ID NO: 2809289 - DNA, 25 bp, Homo sapien
tagctgctcctctctgttgtagcaa

SEQ ID NO: 2809290 - DNA, 25 bp, Homo sapien
taataactcgggcataaatcaaacc

SEQ ID NO: 2809291 - DNA, 25 bp, Homo sapien
tctgacgcagtagttcgtaacctga

SEQ ID NO: 2809292 - DNA, 25 bp, Homo sapien
gctttgtagtcatcccagtggtggc

SEQ ID NO: 2809293 - DNA, 25 bp, Homo sapien
tgatatcgttggacaagcaccagga

SEQ ID NO: 2809294 - DNA, 25 bp, Homo sapien
gcttgtagcacaaactctgacgcag

SEQ ID NO: 2809295 - DNA, 25 bp, Homo sapien
caggacagctgttgccactttacaa

SEQ ID NO: 2809296 - DNA, 25 bp, Homo sapien
ccagagccagtggaagcattgtgtc

SEQ ID NO: 2809297 - DNA, 25 bp, Homo sapien
tatcatatcgcttgaaatgctggaa

SEQ ID NO: 2809298 - DNA, 25 bp, Homo sapien
gacatacaccgctgtggagaggtat

SEQ ID NO: 2809299 - DNA, 25 bp, Homo sapien
cctcaggaaacatatggctgtcttg

SEQ ID NO: 2809300 - DNA, 25 bp, Homo sapien
gtcttgccaaacttgctggacattt

SEQ ID NO: 2809301 - DNA, 25 bp, Homo sapien
ttacaaggttcatagcatagctcac

SEQ ID NO: 2809302 - DNA, 25 bp, Homo sapien
tcctcctcaggaaacatatggctgt

SEQ ID NO: 2809303 - DNA, 25 bp, Homo sapien
tcattctgttcctgttggagaattt

SEQ ID NO: 2809304 - DNA, 25 bp, Homo sapien
aaaaccttcaattgcagttactacg

SEQ ID NO: 2809305 - DNA, 25 bp, Homo sapien
gacacttctttaaatgcacttctcc

SEQ ID NO: 2809306 - DNA, 25 bp, Homo sapien
ttactacgcagtgcgccatgggaag

SEQ ID NO: 2809307 - DNA, 25 bp, Homo sapien
caacctctctatcggatttctccaa

SEQ ID NO: 2809308 - DNA, 25 bp, Homo sapien
gaatattggtttcgtttgctctagg

SEQ ID NO: 2809309 - DNA, 25 bp, Homo sapien
ttccattacaacctctctatcggat

SEQ ID NO: 2809310 - DNA, 25 bp, Homo sapien
cctggtagtgattgctcggaaggaa

SEQ ID NO: 2809311 - DNA, 25 bp, Homo sapien
caatgtggaagccttcgacctctct

SEQ ID NO: 2809312 - DNA, 25 bp, Homo sapien
caaatttccaatgtggaagccttcg

SEQ ID NO: 2809313 - DNA, 25 bp, Homo sapien
aaagctgaatctgtagaagagacta

SEQ ID NO: 2809314 - DNA, 25 bp, Homo sapien
gagactacatccaagagataatacc

SEQ ID NO: 2809315 - DNA, 25 bp, Homo sapien
ccattgctctttgtcattgctgggg

SEQ ID NO: 2809316 - DNA, 25 bp, Homo sapien
gccattgctctttgtcattgctggg

SEQ ID NO: 2809317 - DNA, 25 bp, Homo sapien
agccattgctctttgtcattgctgg

SEQ ID NO: 2809318 - DNA, 25 bp, Homo sapien
catatcgaaatctgaagcatctaat

SEQ ID NO: 2809319 - DNA, 25 bp, Homo sapien
ttctcacaaccctatataacattat

SEQ ID NO: 2809320 - DNA, 25 bp, Homo sapien
taacattataacatatcgaaatctg

SEQ ID NO: 2809321 - DNA, 25 bp, Homo sapien
ttataacatatcgaaatctgaagca

SEQ ID NO: 2809322 - DNA, 25 bp, Homo sapien
ctgaagtatccctggttatcttgag

SEQ ID NO: 2809323 - DNA, 25 bp, Homo sapien
gagctgcgataagaattcgactttg

SEQ ID NO: 2809324 - DNA, 25 bp, Homo sapien
aaagtatttcgtcaaacaattcttg

SEQ ID NO: 2809325 - DNA, 25 bp, Homo sapien
taaaggattttatgagctgcgataa

SEQ ID NO: 2809326 - DNA, 25 bp, Homo sapien
tcatgaacgctaagatgaaattgaa

SEQ ID NO: 2809327 - DNA, 25 bp, Homo sapien
tgtttttgtcatgaacgctaagatg

SEQ ID NO: 2809328 - DNA, 25 bp, Homo sapien
ttttgtcatgaacgctaagatgaaa

SEQ ID NO: 2809329 - DNA, 25 bp, Homo sapien
attgtttttgtcatgaacgctaaga

SEQ ID NO: 2809330 - DNA, 25 bp, Homo sapien
cagcagaaagtgaatactgttttgt

SEQ ID NO: 2809331 - DNA, 25 bp, Homo sapien
ccaagtaaactctccatgctgtgaa

SEQ ID NO: 2809332 - DNA, 25 bp, Homo sapien
catcatatggaactctcagggttga

SEQ ID NO: 2809333 - DNA, 25 bp, Homo sapien
cccctgcattgtgggaaaacagcag

SEQ ID NO: 2809334 - DNA, 25 bp, Homo sapien
ccaagcaagaggatcaaagcagcca

SEQ ID NO: 2809335 - DNA, 25 bp, Homo sapien
accaagcaagaggatcaaagcagcc

SEQ ID NO: 2809336 - DNA, 25 bp, Homo sapien
caagcaagaggatcaaagcagccat

SEQ ID NO: 2809337 - DNA, 25 bp, Homo sapien
tatatgtgcatagaactcgtaattg

SEQ ID NO: 2809338 - DNA, 25 bp, Homo sapien
cacttgaggtgataacagtgaattt

SEQ ID NO: 2809339 - DNA, 25 bp, Homo sapien
gcaccaaaatctagacacttgaggt

SEQ ID NO: 2809340 - DNA, 25 bp, Homo sapien
gaagccaaagtatcctctagtctca

SEQ ID NO: 2809341 - DNA, 25 bp, Homo sapien
gtgtcctaacaacctggcacatgaa

SEQ ID NO: 2809342 - DNA, 25 bp, Homo sapien
taaagaactatcagggcagcagaga

SEQ ID NO: 2809343 - DNA, 25 bp, Homo sapien
cacacacagccattagagaagggaa

SEQ ID NO: 2809344 - DNA, 25 bp, Homo sapien
caactctgttgggaatgagcaatca

SEQ ID NO: 2809345 - DNA, 25 bp, Homo sapien
tgtattttgccataaccgaatttgg

SEQ ID NO: 2809346 - DNA, 25 bp, Homo sapien
cataaccgaatttggcagatgcatc

SEQ ID NO: 2809347 - DNA, 25 bp, Homo sapien
taagtacactaataaagtgcatttt

SEQ ID NO: 2809348 - DNA, 25 bp, Homo sapien
tgttcctaaattaactgactttgta

SEQ ID NO: 2809349 - DNA, 25 bp, Homo sapien
ttttattaatgaagatacgcacaag

SEQ ID NO: 2809350 - DNA, 25 bp, Homo sapien
tacgcacaagtatagtgagctatag

SEQ ID NO: 2809351 - DNA, 25 bp, Homo sapien
tcacattaatttggtcaactgaaat

SEQ ID NO: 2809352 - DNA, 25 bp, Homo sapien
tcaaagatccataattcaccaaata

SEQ ID NO: 2809353 - DNA, 25 bp, Homo sapien
ccttcctaatcaactacaatacaga

SEQ ID NO: 2809354 - DNA, 25 bp, Homo sapien
tactgtttgtcatatgcaatcaaga

SEQ ID NO: 2809355 - DNA, 25 bp, Homo sapien
tgctcattattagaattgactgact

SEQ ID NO: 2809356 - DNA, 25 bp, Homo sapien
atgtttgcagtgagatttaaccaaa

SEQ ID NO: 2809357 - DNA, 25 bp, Homo sapien
cagaagattagccaacagtttattc

SEQ ID NO: 2809358 - DNA, 25 bp, Homo sapien
tctgtaacagtatccaggtaagttt

SEQ ID NO: 2809359 - DNA, 25 bp, Homo sapien
gcttgttttaaccacacgaacagca

SEQ ID NO: 2809360 - DNA, 25 bp, Homo sapien
tgaactgcagctcacaaaaattttc

SEQ ID NO: 2809361 - DNA, 25 bp, Homo sapien
tgcagtcttatatcatcccacatag

SEQ ID NO: 2809362 - DNA, 25 bp, Homo sapien
taagaagcgtcgaagatgcagtctt

SEQ ID NO: 2809363 - DNA, 25 bp, Homo sapien
gacatccatagaggaattatcttca

SEQ ID NO: 2809364 - DNA, 25 bp, Homo sapien
tcccacatagacttgacatccatag

SEQ ID NO: 2809365 - DNA, 25 bp, Homo sapien
ggaaagatgttccacttagggttga

SEQ ID NO: 2809366 - DNA, 25 bp, Homo sapien
atgaaacgctgctgtggcaggagag

SEQ ID NO: 2809367 - DNA, 25 bp, Homo sapien
tggaaagatgttccacttagggttg

SEQ ID NO: 2809368 - DNA, 25 bp, Homo sapien
gaaagatgttccacttagggttgat

SEQ ID NO: 2809369 - DNA, 25 bp, Homo sapien
gattttgttcattcttcaacaaatc

SEQ ID NO: 2809370 - DNA, 25 bp, Homo sapien
tgattttgttcattcttcaacaaat

SEQ ID NO: 2809371 - DNA, 25 bp, Homo sapien
tttgttcattcttcaacaaatcttg

SEQ ID NO: 2809372 - DNA, 25 bp, Homo sapien
ttcttcttgattttgttcattcttc

SEQ ID NO: 2809373 - DNA, 25 bp, Homo sapien
caaatagctcagtggattatgttgg

SEQ ID NO: 2809374 - DNA, 25 bp, Homo sapien
tatggcaggctaatatggtcactca

SEQ ID NO: 2809375 - DNA, 25 bp, Homo sapien
aacacaaacccctatgtatggcagg

SEQ ID NO: 2809376 - DNA, 25 bp, Homo sapien
tgtattccctgtttactcatcccac

SEQ ID NO: 2809377 - DNA, 25 bp, Homo sapien
gcagctgcacacctggacattgttt

SEQ ID NO: 2809378 - DNA, 25 bp, Homo sapien
tttcggactgtatctctttaatgca

SEQ ID NO: 2809379 - DNA, 25 bp, Homo sapien
caagtctccatgagaaatgaaagat

SEQ ID NO: 2809380 - DNA, 25 bp, Homo sapien
gttagccattcaaagcagtcagttg

SEQ ID NO: 2809381 - DNA, 25 bp, Homo sapien
caaagggattgagtggttgcatttc

SEQ ID NO: 2809382 - DNA, 25 bp, Homo sapien
aaaggctcagcagttagtctaccta

SEQ ID NO: 2809383 - DNA, 25 bp, Homo sapien
ggatctccctcattgatacaaacta

SEQ ID NO: 2809384 - DNA, 25 bp, Homo sapien
tctaacatccgaatctgggcagagg

SEQ ID NO: 2809385 - DNA, 25 bp, Homo sapien
atgctgtctgcccaggatgcattct

SEQ ID NO: 2809386 - DNA, 25 bp, Homo sapien
tgtcactgaagatctgctcaaactc

SEQ ID NO: 2809387 - DNA, 25 bp, Homo sapien
ccaggaaatgagtttaacaaacaat

SEQ ID NO: 2809388 - DNA, 25 bp, Homo sapien
ttaacaaacaatgtaggtcaaaaga

SEQ ID NO: 2809389 - DNA, 25 bp, Homo sapien
ttcaatcttttcatcaatgtcactg

SEQ ID NO: 2809390 - DNA, 25 bp, Homo sapien
attgctgacctacaaactaattaca

SEQ ID NO: 2809391 - DNA, 25 bp, Homo sapien
aattgctgacctacaaactaattac

SEQ ID NO: 2809392 - DNA, 25 bp, Homo sapien
ttgctgacctacaaactaattacat

SEQ ID NO: 2809393 - DNA, 25 bp, Homo sapien
ctacaaccacgaccaatgatatgaa

SEQ ID NO: 2809394 - DNA, 25 bp, Homo sapien
aaaccatcgttgtatttcaactaca

SEQ ID NO: 2809395 - DNA, 25 bp, Homo sapien
ttattctcgcacggactacaaccac

SEQ ID NO: 2809396 - DNA, 25 bp, Homo sapien
caaccacgaccaatgatatgaaaaa

SEQ ID NO: 2809397 - DNA, 25 bp, Homo sapien
gagaaaaagtacttgacttcaccat

SEQ ID NO: 2809398 - DNA, 25 bp, Homo sapien
cagagaaaaagtacttgacttcacc

SEQ ID NO: 2809399 - DNA, 25 bp, Homo sapien
agaaaaagtacttgacttcaccatc

SEQ ID NO: 2809400 - DNA, 25 bp, Homo sapien
aatcagagaaaaagtacttgacttc

SEQ ID NO: 2809401 - DNA, 25 bp, Homo sapien
tctccaacttgaggaacgatccaca

SEQ ID NO: 2809402 - DNA, 25 bp, Homo sapien
cacaactagtaaagaaaggatggcc

SEQ ID NO: 2809403 - DNA, 25 bp, Homo sapien
cctaaaggttgggagccagtgatct

SEQ ID NO: 2809404 - DNA, 25 bp, Homo sapien
tcaaataatctagcagtcctgcagc

SEQ ID NO: 2809405 - DNA, 25 bp, Homo sapien
gaaacaaaccagattggagaccatt

SEQ ID NO: 2809406 - DNA, 25 bp, Homo sapien
tatccctttatgtggtgagctctgc

SEQ ID NO: 2809407 - DNA, 25 bp, Homo sapien
gatagccaagaagtatgagatgtga

SEQ ID NO: 2809408 - DNA, 25 bp, Homo sapien
taggtgagtacttgtacaccaaacc

SEQ ID NO: 2809409 - DNA, 25 bp, Homo sapien
gaatgaactggtcttcgaatcctaa

SEQ ID NO: 2809410 - DNA, 25 bp, Homo sapien
gaagagttgtcagcagaagaactgt

SEQ ID NO: 2809411 - DNA, 25 bp, Homo sapien
agagttgtcagcagaagaactgtct

SEQ ID NO: 2809412 - DNA, 25 bp, Homo sapien
tcttcgaatcctaaggaggtagaaa

SEQ ID NO: 2809413 - DNA, 25 bp, Homo sapien
atatattacatgatggtaggcaaga

SEQ ID NO: 2809414 - DNA, 25 bp, Homo sapien
attacatgatggtaggcaagagagc

SEQ ID NO: 2809415 - DNA, 25 bp, Homo sapien
aatcaggcctctcaacagtttccca

SEQ ID NO: 2809416 - DNA, 25 bp, Homo sapien
caatcaggcctctcaacagtttccc

SEQ ID NO: 2809417 - DNA, 25 bp, Homo sapien
ttgaaaaaagcaggtcacaagacaa

SEQ ID NO: 2809418 - DNA, 25 bp, Homo sapien
catggaaaaattcatggtatagcac

SEQ ID NO: 2809419 - DNA, 25 bp, Homo sapien
taaaattgaatagcatacaggccct

SEQ ID NO: 2809420 - DNA, 25 bp, Homo sapien
gggtcatgggccactcttcctttct

SEQ ID NO: 2809421 - DNA, 25 bp, Homo sapien
taaaaattcaactggaggctagcaa

SEQ ID NO: 2809422 - DNA, 25 bp, Homo sapien
tttaatgactatgcgtaacctacga

SEQ ID NO: 2809423 - DNA, 25 bp, Homo sapien
gatgagaaacatgatacccagagct

SEQ ID NO: 2809424 - DNA, 25 bp, Homo sapien
gattatcgcttttgggatcagagcc

SEQ ID NO: 2809425 - DNA, 25 bp, Homo sapien
tacaaatacttctcggtggataaat

SEQ ID NO: 2809426 - DNA, 25 bp, Homo sapien
tgtacaaatacttctcggtggataa

SEQ ID NO: 2809427 - DNA, 25 bp, Homo sapien
aaatgtacaaatacttctcggtgga

SEQ ID NO: 2809428 - DNA, 25 bp, Homo sapien
aatacttctcggtggataaataaca

SEQ ID NO: 2809429 - DNA, 25 bp, Homo sapien
gcaccccagaactacggaaacagta

SEQ ID NO: 2809430 - DNA, 25 bp, Homo sapien
ctcttatgtctcagccatgaaaaca

SEQ ID NO: 2809431 - DNA, 25 bp, Homo sapien
tcaaatggcgggaggaaccttcaat

SEQ ID NO: 2809432 - DNA, 25 bp, Homo sapien
gcatctaatgcccaagcatgaaatt

SEQ ID NO: 2809433 - DNA, 25 bp, Homo sapien
ggtagagaaactcggcacaacgccg

SEQ ID NO: 2809434 - DNA, 25 bp, Homo sapien
ttgatcattggtagagaaactcggc

SEQ ID NO: 2809435 - DNA, 25 bp, Homo sapien
tgggagataggaaactcgttgatca

SEQ ID NO: 2809436 - DNA, 25 bp, Homo sapien
gccaaacgctgccaatgggagatag

SEQ ID NO: 2809437 - DNA, 25 bp, Homo sapien
gataagacggtaagccgggatccca

SEQ ID NO: 2809438 - DNA, 25 bp, Homo sapien
tgacccgaggtcgagttccaagtcg

SEQ ID NO: 2809439 - DNA, 25 bp, Homo sapien
tcacggtacacggtgtcttcggcct

SEQ ID NO: 2809440 - DNA, 25 bp, Homo sapien
gacagattttgcgagtggataagac

SEQ ID NO: 2809441 - DNA, 25 bp, Homo sapien
tgtcaagcgccacggggtttgatgg

SEQ ID NO: 2809442 - DNA, 25 bp, Homo sapien
ctcacttctcgggctggccataatg

SEQ ID NO: 2809443 - DNA, 25 bp, Homo sapien
ggactccttctggttccaccctcgc

SEQ ID NO: 2809444 - DNA, 25 bp, Homo sapien
accctcgcccactcacttctcgggc

SEQ ID NO: 2809445 - DNA, 25 bp, Homo sapien
gagccccggccagccattaatatca

SEQ ID NO: 2809446 - DNA, 25 bp, Homo sapien
ccattaatatcaggcgcaggagaaa

SEQ ID NO: 2809447 - DNA, 25 bp, Homo sapien
gcgcaggagaaaacccagtaaaatc

SEQ ID NO: 2809448 - DNA, 25 bp, Homo sapien
caggagaaaacccagtaaaatcact

SEQ ID NO: 2809449 - DNA, 25 bp, Homo sapien
gcaagagcctgacccgctggccaga

SEQ ID NO: 2809450 - DNA, 25 bp, Homo sapien
gctgatctagcaagagcctgacccg

SEQ ID NO: 2809451 - DNA, 25 bp, Homo sapien
tccggtgctgatctagcaagagcct

SEQ ID NO: 2809452 - DNA, 25 bp, Homo sapien
agtcttccacctccggtgctgatct

SEQ ID NO: 2809453 - DNA, 25 bp, Homo sapien
gaagcatcccagacaccgggaaggt

SEQ ID NO: 2809454 - DNA, 25 bp, Homo sapien
tcagctaggaagacacagtgtattc

SEQ ID NO: 2809455 - DNA, 25 bp, Homo sapien
ccacccggaaatggtactatcgctt

SEQ ID NO: 2809456 - DNA, 25 bp, Homo sapien
cagagcccggattcgtgaagcagtt

SEQ ID NO: 2809457 - DNA, 25 bp, Homo sapien
ggactccttcatcccgaaattaaca

SEQ ID NO: 2809458 - DNA, 25 bp, Homo sapien
tacagtactggatagattggacatc

SEQ ID NO: 2809459 - DNA, 25 bp, Homo sapien
tgtcatcagagggactaattactgc

SEQ ID NO: 2809460 - DNA, 25 bp, Homo sapien
tctccgtatgtcctcctaagcttct

SEQ ID NO: 2809461 - DNA, 25 bp, Homo sapien
caagggttgtaccctgctctttcat

SEQ ID NO: 2809462 - DNA, 25 bp, Homo sapien
ccaagggttgtaccctgctctttca

SEQ ID NO: 2809463 - DNA, 25 bp, Homo sapien
cttgcctctcaaaccagacttttgt

SEQ ID NO: 2809464 - DNA, 25 bp, Homo sapien
tctcaaaccagacttttgtattcat

SEQ ID NO: 2809465 - DNA, 25 bp, Homo sapien
tttcctccgcatgtttaacttcagt

SEQ ID NO: 2809466 - DNA, 25 bp, Homo sapien
tcctccgcatgtttaacttcagttt

SEQ ID NO: 2809467 - DNA, 25 bp, Homo sapien
ttcctccgcatgtttaacttcagtt

SEQ ID NO: 2809468 - DNA, 25 bp, Homo sapien
cctccgcatgtttaacttcagtttc

SEQ ID NO: 2809469 - DNA, 25 bp, Homo sapien
catttatgtttagggttattatcgg

SEQ ID NO: 2809470 - DNA, 25 bp, Homo sapien
ccatttatgtttagggttattatcg

SEQ ID NO: 2809471 - DNA, 25 bp, Homo sapien
tcggtgggtaaggaacttactgctg

SEQ ID NO: 2809472 - DNA, 25 bp, Homo sapien
tatcggtgggtaaggaacttactgc

SEQ ID NO: 2809473 - DNA, 25 bp, Homo sapien
ttatccaattcagtatctaggggat

SEQ ID NO: 2809474 - DNA, 25 bp, Homo sapien
tatccaattcagtatctaggggatt

SEQ ID NO: 2809475 - DNA, 25 bp, Homo sapien
tccaattcagtatctaggggatttt

SEQ ID NO: 2809476 - DNA, 25 bp, Homo sapien
caattcagtatctaggggattttct

SEQ ID NO: 2809477 - DNA, 25 bp, Homo sapien
ctgtttggactgaacatagcaatga

SEQ ID NO: 2809478 - DNA, 25 bp, Homo sapien
tctgtttggactgaacatagcaatg

SEQ ID NO: 2809479 - DNA, 25 bp, Homo sapien
gtttggactgaacatagcaatgaag

SEQ ID NO: 2809480 - DNA, 25 bp, Homo sapien
tcttgaaatgaaaggtgccttaaga

SEQ ID NO: 2809481 - DNA, 25 bp, Homo sapien
tggttctattttgattcaacatcac

SEQ ID NO: 2809482 - DNA, 25 bp, Homo sapien
ctttggaagccatacatatgaaaat

SEQ ID NO: 2809483 - DNA, 25 bp, Homo sapien
acctttggaagccatacatatgaaa

SEQ ID NO: 2809484 - DNA, 25 bp, Homo sapien
aatacctttggaagccatacatatg

SEQ ID NO: 2809485 - DNA, 25 bp, Homo sapien
agcaattgcaagaaaggcgttgaac

SEQ ID NO: 2809486 - DNA, 25 bp, Homo sapien
ttcagaggagttatactttgaggag

SEQ ID NO: 2809487 - DNA, 25 bp, Homo sapien
tgaagatattcagaggagttatact

SEQ ID NO: 2809488 - DNA, 25 bp, Homo sapien
caattgcaagaaaggcgttgaacat

SEQ ID NO: 2809489 - DNA, 25 bp, Homo sapien
aactgcaaggcttaaactcagctgt

SEQ ID NO: 2809490 - DNA, 25 bp, Homo sapien
tagtcctgccgatcacaccagggga

SEQ ID NO: 2809491 - DNA, 25 bp, Homo sapien
ggtgctactgatgtggtcagacctg

SEQ ID NO: 2809492 - DNA, 25 bp, Homo sapien
ggtttcccatgccatatagccgcaa

SEQ ID NO: 2809493 - DNA, 25 bp, Homo sapien
tggctggctgtcttggtcgctgatc

SEQ ID NO: 2809494 - DNA, 25 bp, Homo sapien
gctggctgtcttggtcgctgatcat

SEQ ID NO: 2809495 - DNA, 25 bp, Homo sapien
atctggctggctgtcttggtcgctg

SEQ ID NO: 2809496 - DNA, 25 bp, Homo sapien
ctgctaggatctggctggctgtctt

SEQ ID NO: 2809497 - DNA, 25 bp, Homo sapien
cagtgacatttggaggtacggataa

SEQ ID NO: 2809498 - DNA, 25 bp, Homo sapien
gcttgtgcatgtaatagaacacttc

SEQ ID NO: 2809499 - DNA, 25 bp, Homo sapien
cacactagagtgtgaaatcacgcta

SEQ ID NO: 2809500 - DNA, 25 bp, Homo sapien
ttctggagcaaaaaggtataactgc

SEQ ID NO: 2809501 - DNA, 25 bp, Homo sapien
cagatctcaaaatgaaggcaagtca

SEQ ID NO: 2809502 - DNA, 25 bp, Homo sapien
tatgaattatcacaacgaatgtcag

SEQ ID NO: 2809503 - DNA, 25 bp, Homo sapien
tatgcactaggataatctgagttgg

SEQ ID NO: 2809504 - DNA, 25 bp, Homo sapien
taatagttagcagtccaagtagatg

SEQ ID NO: 2809505 - DNA, 25 bp, Homo sapien
aaaaggagtgctgattatacgtggg

SEQ ID NO: 2809506 - DNA, 25 bp, Homo sapien
gcacacaatccctcatcaatctctg

SEQ ID NO: 2809507 - DNA, 25 bp, Homo sapien
aaaaaaggagtgctgattatacgtg

SEQ ID NO: 2809508 - DNA, 25 bp, Homo sapien
acacaatccctcatcaatctctgaa

SEQ ID NO: 2809509 - DNA, 25 bp, Homo sapien
caaacagatgctggtctcctcagtg

SEQ ID NO: 2809510 - DNA, 25 bp, Homo sapien
gagtgtagtcccctaccaagtcagg

SEQ ID NO: 2809511 - DNA, 25 bp, Homo sapien
agttatgctcccttagtataccagg

SEQ ID NO: 2809512 - DNA, 25 bp, Homo sapien
cacaggagtgaatgtcgggatctaa

SEQ ID NO: 2809513 - DNA, 25 bp, Homo sapien
tttcttttatatgggctatgagaag

SEQ ID NO: 2809514 - DNA, 25 bp, Homo sapien
ttcttttatatgggctatgagaagg

SEQ ID NO: 2809515 - DNA, 25 bp, Homo sapien
caattgcatatggactccgaagctt

SEQ ID NO: 2809516 - DNA, 25 bp, Homo sapien
tatggactccgaagcttttttgtaa

SEQ ID NO: 2809517 - DNA, 25 bp, Homo sapien
ggaaaggaagtcaagtagttcattg

SEQ ID NO: 2809518 - DNA, 25 bp, Homo sapien
catctgaagggactctggaaaggaa

SEQ ID NO: 2809519 - DNA, 25 bp, Homo sapien
taaaaactgagccatacactggagc

SEQ ID NO: 2809520 - DNA, 25 bp, Homo sapien
caaagtatcttaaaagcggagggct

SEQ ID NO: 2809521 - DNA, 25 bp, Homo sapien
tacacagctagatgtctgccctggg

SEQ ID NO: 2809522 - DNA, 25 bp, Homo sapien
tttcccgaatgctaaaggtgacctc

SEQ ID NO: 2809523 - DNA, 25 bp, Homo sapien
tcagcggaatgcagtacaggatggc

SEQ ID NO: 2809524 - DNA, 25 bp, Homo sapien
cagacaaggacaatgtatctcagcg

SEQ ID NO: 2809525 - DNA, 25 bp, Homo sapien
tggccagccagcttaagaatgggac

SEQ ID NO: 2809526 - DNA, 25 bp, Homo sapien
agccagcttaagaatgggacagtcc

SEQ ID NO: 2809527 - DNA, 25 bp, Homo sapien
gggcactggctcttcactcagaaaa

SEQ ID NO: 2809528 - DNA, 25 bp, Homo sapien
acgactccacgtgtgagggcactgg

SEQ ID NO: 2809529 - DNA, 25 bp, Homo sapien
caagacatggtaagtatagagccct

SEQ ID NO: 2809530 - DNA, 25 bp, Homo sapien
aactcaccaggtaaaggatcatgcc

SEQ ID NO: 2809531 - DNA, 25 bp, Homo sapien
tctttatcctttcgccaaaggaagc

SEQ ID NO: 2809532 - DNA, 25 bp, Homo sapien
ctgacacatacctcctggatggcat

SEQ ID NO: 2809533 - DNA, 25 bp, Homo sapien
taggatgttctggacactgacacat

SEQ ID NO: 2809534 - DNA, 25 bp, Homo sapien
tctaggatgttctggacactgacac

SEQ ID NO: 2809535 - DNA, 25 bp, Homo sapien
atctaggatgttctggacactgaca

SEQ ID NO: 2809536 - DNA, 25 bp, Homo sapien
tcatgacaaaaacttctaaagcgaa

SEQ ID NO: 2809537 - DNA, 25 bp, Homo sapien
tctaaagcgaacattttgatttggt

SEQ ID NO: 2809538 - DNA, 25 bp, Homo sapien
gatttggttgcaatgcaaccaaagc

SEQ ID NO: 2809539 - DNA, 25 bp, Homo sapien
attttgatttggttgcaatgcaacc

SEQ ID NO: 2809540 - DNA, 25 bp, Homo sapien
ggaaaacacggaaagagatactcta

SEQ ID NO: 2809541 - DNA, 25 bp, Homo sapien
ggcagctggcactctaaatgttaaa

SEQ ID NO: 2809542 - DNA, 25 bp, Homo sapien
gagaagttgactgactatgagaaag

SEQ ID NO: 2809543 - DNA, 25 bp, Homo sapien
gaaatataccctgggctagacaatg

SEQ ID NO: 2809544 - DNA, 25 bp, Homo sapien
ccatgtctcatggttgaaattgggc

SEQ ID NO: 2809545 - DNA, 25 bp, Homo sapien
gaaattgggctcctttcaggtcact

SEQ ID NO: 2809546 - DNA, 25 bp, Homo sapien
tggttatactcataagatgcatgcc

SEQ ID NO: 2809547 - DNA, 25 bp, Homo sapien
tcatggctgaatcagcgccagagtt

SEQ ID NO: 2809548 - DNA, 25 bp, Homo sapien
gactgtgactggaatcaatttcatc

SEQ ID NO: 2809549 - DNA, 25 bp, Homo sapien
caaacaaagatggactgtgactgga

SEQ ID NO: 2809550 - DNA, 25 bp, Homo sapien
caaagatggactgtgactggaatca

SEQ ID NO: 2809551 - DNA, 25 bp, Homo sapien
tttccaaacaaagatggactgtgac

SEQ ID NO: 2809552 - DNA, 25 bp, Homo sapien
tcttcagtgtctgcgagcatgacgt

SEQ ID NO: 2809553 - DNA, 25 bp, Homo sapien
cagtgtctgcgagcatgacgtttgg

SEQ ID NO: 2809554 - DNA, 25 bp, Homo sapien
tgctgtaagtcttcagtgtctgcga

SEQ ID NO: 2809555 - DNA, 25 bp, Homo sapien
taagtcttcagtgtctgcgagcatg

SEQ ID NO: 2809556 - DNA, 25 bp, Homo sapien
tcttgtttgtgccaaagattcctgc

SEQ ID NO: 2809557 - DNA, 25 bp, Homo sapien
tgtttgtgccaaagattcctgcatc

SEQ ID NO: 2809558 - DNA, 25 bp, Homo sapien
attcctgcatcaagtaaggaggagg

SEQ ID NO: 2809559 - DNA, 25 bp, Homo sapien
tcctgcatcaagtaaggaggaggac

SEQ ID NO: 2809560 - DNA, 25 bp, Homo sapien
gaagcaccttgtcccagtgcaaagt

SEQ ID NO: 2809561 - DNA, 25 bp, Homo sapien
gcaccttgtcccagtgcaaagtgcc

SEQ ID NO: 2809562 - DNA, 25 bp, Homo sapien
tgaacttccttaacaagctgaattc

SEQ ID NO: 2809563 - DNA, 25 bp, Homo sapien
cttccttaacaagctgaattctagc

SEQ ID NO: 2809564 - DNA, 25 bp, Homo sapien
tacgtagagcttcattgtgagagaa

SEQ ID NO: 2809565 - DNA, 25 bp, Homo sapien
agtcggtccatatttccgagtgcca

SEQ ID NO: 2809566 - DNA, 25 bp, Homo sapien
aatttgtatgcaaagtacgtagagc

SEQ ID NO: 2809567 - DNA, 25 bp, Homo sapien
aactgtgtgcagagtatagcaggcc

SEQ ID NO: 2809568 - DNA, 25 bp, Homo sapien
tcagacctggcagctactttgggag

SEQ ID NO: 2809569 - DNA, 25 bp, Homo sapien
tggtgttgaattcaagatagagtcc

SEQ ID NO: 2809570 - DNA, 25 bp, Homo sapien
ccttcttagactaaacaatgagaga

SEQ ID NO: 2809571 - DNA, 25 bp, Homo sapien
tctgctaatgctgctaagagcatga

SEQ ID NO: 2809572 - DNA, 25 bp, Homo sapien
gaacctcgtctagcaaaagtcacta

SEQ ID NO: 2809573 - DNA, 25 bp, Homo sapien
ccaccaaggtaagaacctcgtctag

SEQ ID NO: 2809574 - DNA, 25 bp, Homo sapien
aagtcactagtaccttttggatgag

SEQ ID NO: 2809575 - DNA, 25 bp, Homo sapien
taaataatagcagcccatgccacca

SEQ ID NO: 2809576 - DNA, 25 bp, Homo sapien
tatgatatgccaagcactgactcca

SEQ ID NO: 2809577 - DNA, 25 bp, Homo sapien
gagctatccgacacaaacggaaacg

SEQ ID NO: 2809578 - DNA, 25 bp, Homo sapien
gcttgcagcctcacgaaggtgagat

SEQ ID NO: 2809579 - DNA, 25 bp, Homo sapien
tcatcatggccatgttggaatccag

SEQ ID NO: 2809580 - DNA, 25 bp, Homo sapien
taataatgcctttctgtctataacc

SEQ ID NO: 2809581 - DNA, 25 bp, Homo sapien
ccagtatgcccacaagtgaacaaac

SEQ ID NO: 2809582 - DNA, 25 bp, Homo sapien
gtttgaggacttgcttaataatgcc

SEQ ID NO: 2809583 - DNA, 25 bp, Homo sapien
tgtctataaccagtatgcccacaag

SEQ ID NO: 2809584 - DNA, 25 bp, Homo sapien
taatgttctgggtggagattccata

SEQ ID NO: 2809585 - DNA, 25 bp, Homo sapien
agggataaaggagctgcactggctt

SEQ ID NO: 2809586 - DNA, 25 bp, Homo sapien
ccacagctcggagagtgtgctcttt

SEQ ID NO: 2809587 - DNA, 25 bp, Homo sapien
gtgtgctctttggtgcaagatgtga

SEQ ID NO: 2809588 - DNA, 25 bp, Homo sapien
gagtgtccacttgtttccatttctt

SEQ ID NO: 2809589 - DNA, 25 bp, Homo sapien
agagtgtccacttgtttccatttct

SEQ ID NO: 2809590 - DNA, 25 bp, Homo sapien
tcccctcccagattgaaggcgttac

SEQ ID NO: 2809591 - DNA, 25 bp, Homo sapien
ccctcccagattgaaggcgttactc

SEQ ID NO: 2809592 - DNA, 25 bp, Homo sapien
cctcccagattgaaggcgttactca

SEQ ID NO: 2809593 - DNA, 25 bp, Homo sapien
ctcccagattgaaggcgttactcat

SEQ ID NO: 2809594 - DNA, 25 bp, Homo sapien
tgcataaagcgtacagagccctgac

SEQ ID NO: 2809595 - DNA, 25 bp, Homo sapien
gagagtgtcagcaaagcagagccgt

SEQ ID NO: 2809596 - DNA, 25 bp, Homo sapien
ttaatatgtgcgagggctatagccc

SEQ ID NO: 2809597 - DNA, 25 bp, Homo sapien
tgaggatcaagtgcccagaaggaat

SEQ ID NO: 2809598 - DNA, 25 bp, Homo sapien
attttatccaaagtggttacctgag

SEQ ID NO: 2809599 - DNA, 25 bp, Homo sapien
gaagagcgcttgtaactggatttta

SEQ ID NO: 2809600 - DNA, 25 bp, Homo sapien
cagggaagagcgcttgtaactggat

SEQ ID NO: 2809601 - DNA, 25 bp, Homo sapien
gattttatccaaagtggttacctga

SEQ ID NO: 2809602 - DNA, 25 bp, Homo sapien
ccagggaggccttgacagtgacttg

SEQ ID NO: 2809603 - DNA, 25 bp, Homo sapien
catttgtccatttggctcatgctga

SEQ ID NO: 2809604 - DNA, 25 bp, Homo sapien
tttggcgaccacacattcctggtgt

SEQ ID NO: 2809605 - DNA, 25 bp, Homo sapien
ctgggctgccaagctgtggactgcc

SEQ ID NO: 2809606 - DNA, 25 bp, Homo sapien
tcctaatgactggttgatcaaagcc

SEQ ID NO: 2809607 - DNA, 25 bp, Homo sapien
catggtatgagaagccagcaacaac

SEQ ID NO: 2809608 - DNA, 25 bp, Homo sapien
tctgggctggcctaaagtcttgctt

SEQ ID NO: 2809609 - DNA, 25 bp, Homo sapien
gagattcaggaaagaagtgccccag

SEQ ID NO: 2809610 - DNA, 25 bp, Homo sapien
aagatactctgtatggacctgtggc

SEQ ID NO: 2809611 - DNA, 25 bp, Homo sapien
gatactctgtatggacctgtggcca

SEQ ID NO: 2809612 - DNA, 25 bp, Homo sapien
cactgaatgggtaaaagatactctg

SEQ ID NO: 2809613 - DNA, 25 bp, Homo sapien
aaagcacactgaatgggtaaaagat

SEQ ID NO: 2809614 - DNA, 25 bp, Homo sapien
aaggatcccatcacacaatgactcc

SEQ ID NO: 2809615 - DNA, 25 bp, Homo sapien
gaaggctcatactgtgtcgcattca

SEQ ID NO: 2809616 - DNA, 25 bp, Homo sapien
tcctggaaggctcatactgtgtcgc

SEQ ID NO: 2809617 - DNA, 25 bp, Homo sapien
cccatcacacaatgactcctggaag

SEQ ID NO: 2809618 - DNA, 25 bp, Homo sapien
ttaggtccttctcatacttgatgag

SEQ ID NO: 2809619 - DNA, 25 bp, Homo sapien
gtccttctcatacttgatgagcctg

SEQ ID NO: 2809620 - DNA, 25 bp, Homo sapien
taggtccttctcatacttgatgagc

SEQ ID NO: 2809621 - DNA, 25 bp, Homo sapien
cttctcatacttgatgagcctgtgg

SEQ ID NO: 2809622 - DNA, 25 bp, Homo sapien
tcttgcccttgtagaccgccctgtg

SEQ ID NO: 2809623 - DNA, 25 bp, Homo sapien
gtgcagatataagggcttgtacttc

SEQ ID NO: 2809624 - DNA, 25 bp, Homo sapien
gggtgcagatataagggcttgtact

SEQ ID NO: 2809625 - DNA, 25 bp, Homo sapien
tgcccttgtagaccgccctgtggtt

SEQ ID NO: 2809626 - DNA, 25 bp, Homo sapien
cacactgtcaatgtgcagctgggag

SEQ ID NO: 2809627 - DNA, 25 bp, Homo sapien
tcacactgtcaatgtgcagctggga

SEQ ID NO: 2809628 - DNA, 25 bp, Homo sapien
caatgtgcagctgggagagctctac

SEQ ID NO: 2809629 - DNA, 25 bp, Homo sapien
ctgtcacactgtcaatgtgcagctg

SEQ ID NO: 2809630 - DNA, 25 bp, Homo sapien
agctgtctcagaagctcttccttct

SEQ ID NO: 2809631 - DNA, 25 bp, Homo sapien
aaagccaagacactggccccggtga

SEQ ID NO: 2809632 - DNA, 25 bp, Homo sapien
caagtccaaaggttataggactaat

SEQ ID NO: 2809633 - DNA, 25 bp, Homo sapien
taatagctgccttgtggtaatcagg

SEQ ID NO: 2809634 - DNA, 25 bp, Homo sapien
cactggccccggtgaaacatctggg

SEQ ID NO: 2809635 - DNA, 25 bp, Homo sapien
cacatggaaaacacactgcttgtcg

SEQ ID NO: 2809636 - DNA, 25 bp, Homo sapien
catggaaaacacactgcttgtcggc

SEQ ID NO: 2809637 - DNA, 25 bp, Homo sapien
ggaaaacacactgcttgtcggcatc

SEQ ID NO: 2809638 - DNA, 25 bp, Homo sapien
gtcctttcacatggaaaacacactg

SEQ ID NO: 2809639 - DNA, 25 bp, Homo sapien
ttcacgagagctatcaagttccaga

SEQ ID NO: 2809640 - DNA, 25 bp, Homo sapien
cacgagagctatcaagttccagaca

SEQ ID NO: 2809641 - DNA, 25 bp, Homo sapien
tatcttcacgagagctatcaagttc

SEQ ID NO: 2809642 - DNA, 25 bp, Homo sapien
tcttcacgagagctatcaagttcca

SEQ ID NO: 2809643 - DNA, 25 bp, Homo sapien
tctccctctttgcaacacgcagtgg

SEQ ID NO: 2809644 - DNA, 25 bp, Homo sapien
cacgcagtggcattgttaggatgat

SEQ ID NO: 2809645 - DNA, 25 bp, Homo sapien
tgtccaattttctggactcaaacac

SEQ ID NO: 2809646 - DNA, 25 bp, Homo sapien
tggactcaaacacttcaactccttt

SEQ ID NO: 2809647 - DNA, 25 bp, Homo sapien
catcttcttcttcctcgtcctctag

SEQ ID NO: 2809648 - DNA, 25 bp, Homo sapien
cttcttcttcctcgtcctctagcat

SEQ ID NO: 2809649 - DNA, 25 bp, Homo sapien
tcatcttcttcttcctcgtcctcta

SEQ ID NO: 2809650 - DNA, 25 bp, Homo sapien
cttgtcatctttgtcatcttcttct

SEQ ID NO: 2809651 - DNA, 25 bp, Homo sapien
tggagtatttcagctacagtagtca

SEQ ID NO: 2809652 - DNA, 25 bp, Homo sapien
gtcatcaagataactgaaccactag

SEQ ID NO: 2809653 - DNA, 25 bp, Homo sapien
taaggatttgaccttggagtatttc

SEQ ID NO: 2809654 - DNA, 25 bp, Homo sapien
gtaataataattagtgtgataggct

SEQ ID NO: 2809655 - DNA, 25 bp, Homo sapien
tcctgatttttacagagacactcaa

SEQ ID NO: 2809656 - DNA, 25 bp, Homo sapien
aagacttcctgatttttacagagac

SEQ ID NO: 2809657 - DNA, 25 bp, Homo sapien
cagagacactcaaatacaattattc

SEQ ID NO: 2809658 - DNA, 25 bp, Homo sapien
tgctaaaagacttcctgatttttac

SEQ ID NO: 2809659 - DNA, 25 bp, Homo sapien
gctttaatgtggctatcagatgact

SEQ ID NO: 2809660 - DNA, 25 bp, Homo sapien
gatgacttttgatgcatgccactga

SEQ ID NO: 2809661 - DNA, 25 bp, Homo sapien
ggaagtgccacgttgtaatttagtc

SEQ ID NO: 2809662 - DNA, 25 bp, Homo sapien
tccttggctcattctgggaagtgcc

SEQ ID NO: 2809663 - DNA, 25 bp, Homo sapien
tgatttcagtgaaacgccctgttct

SEQ ID NO: 2809664 - DNA, 25 bp, Homo sapien
tcaatgatgatttcagtgaaacgcc

SEQ ID NO: 2809665 - DNA, 25 bp, Homo sapien
gtgaaacgccctgttctttgctcat

SEQ ID NO: 2809666 - DNA, 25 bp, Homo sapien
gcttttggactcaatgatgatttca

SEQ ID NO: 2809667 - DNA, 25 bp, Homo sapien
ctctccagacccactatctttgaag

SEQ ID NO: 2809668 - DNA, 25 bp, Homo sapien
gtcatagccctcatggctggacagc

SEQ ID NO: 2809669 - DNA, 25 bp, Homo sapien
tccagacccactatctttgaaggtc

SEQ ID NO: 2809670 - DNA, 25 bp, Homo sapien
catagccctcatggctggacagcca

SEQ ID NO: 2809671 - DNA, 25 bp, Homo sapien
tcctggtcacgaatgcttctgaaat

SEQ ID NO: 2809672 - DNA, 25 bp, Homo sapien
cctgatattatcaagaagtagttcc

SEQ ID NO: 2809673 - DNA, 25 bp, Homo sapien
gttatctttccctgatattatcaag

SEQ ID NO: 2809674 - DNA, 25 bp, Homo sapien
gaagtagttccatgtcaatagtaac

SEQ ID NO: 2809675 - DNA, 25 bp, Homo sapien
tatcacgttgcctgttatctttccc

SEQ ID NO: 2809676 - DNA, 25 bp, Homo sapien
tgtagagctcaaagttccagacaac

SEQ ID NO: 2809677 - DNA, 25 bp, Homo sapien
gagctcaaagttccagacaacaaag

SEQ ID NO: 2809678 - DNA, 25 bp, Homo sapien
tcaaagttccagacaacaaagagaa

SEQ ID NO: 2809679 - DNA, 25 bp, Homo sapien
cagtggtatcatgtagagctcaaag

SEQ ID NO: 2809680 - DNA, 25 bp, Homo sapien
cctgctacctgtttgactaggatgg

SEQ ID NO: 2809681 - DNA, 25 bp, Homo sapien
aaagagaacacccaagatcttacca

SEQ ID NO: 2809682 - DNA, 25 bp, Homo sapien
gaacacccaagatcttaccaaattc

SEQ ID NO: 2809683 - DNA, 25 bp, Homo sapien
tggtcagacggaatgactggataaa

SEQ ID NO: 2809684 - DNA, 25 bp, Homo sapien
tcatctatgtcaattctaagggtag

SEQ ID NO: 2809685 - DNA, 25 bp, Homo sapien
ggtagacaataggtccaatgtggcc

SEQ ID NO: 2809686 - DNA, 25 bp, Homo sapien
tcagaaaggttgagataaacacaat

SEQ ID NO: 2809687 - DNA, 25 bp, Homo sapien
ggcttcccttagcactcttcagcgt

SEQ ID NO: 2809688 - DNA, 25 bp, Homo sapien
aagttatttgcttctgtgaagcatt

SEQ ID NO: 2809689 - DNA, 25 bp, Homo sapien
tctgtgaagcattttccaacagtac

SEQ ID NO: 2809690 - DNA, 25 bp, Homo sapien
gaagttatttgcttctgtgaagcat

SEQ ID NO: 2809691 - DNA, 25 bp, Homo sapien
gtgaagcattttccaacagtacaga

SEQ ID NO: 2809692 - DNA, 25 bp, Homo sapien
tcatttactaactttagatttggga

SEQ ID NO: 2809693 - DNA, 25 bp, Homo sapien
ctttagatttgggaacccccatgca

SEQ ID NO: 2809694 - DNA, 25 bp, Homo sapien
gcaatcaaagcattatctgtccaag

SEQ ID NO: 2809695 - DNA, 25 bp, Homo sapien
agcattatctgtccaagcaatttgc

SEQ ID NO: 2809696 - DNA, 25 bp, Homo sapien
gttaactgaagcctcttgagcttca

SEQ ID NO: 2809697 - DNA, 25 bp, Homo sapien
cagctttcagaccttttggctcaca

SEQ ID NO: 2809698 - DNA, 25 bp, Homo sapien
ttccactgaggatttgatgaaggca

SEQ ID NO: 2809699 - DNA, 25 bp, Homo sapien
tgcaacagctttcagaccttttggc

SEQ ID NO: 2809700 - DNA, 25 bp, Homo sapien
ctgatgacaaatgccaatttgggtt

SEQ ID NO: 2809701 - DNA, 25 bp, Homo sapien
tcattttttcatagaagcttcctcc

SEQ ID NO: 2809702 - DNA, 25 bp, Homo sapien
ctcttcttctcttatacacactcca

SEQ ID NO: 2809703 - DNA, 25 bp, Homo sapien
ttgcccattagctgatacagtttcc

SEQ ID NO: 2809704 - DNA, 25 bp, Homo sapien
gcctgttacatttaaggctaatatt

SEQ ID NO: 2809705 - DNA, 25 bp, Homo sapien
tttgagataagtctcctaaatacag

SEQ ID NO: 2809706 - DNA, 25 bp, Homo sapien
acagtttccttatagtgtcaatggg

SEQ ID NO: 2809707 - DNA, 25 bp, Homo sapien
gaagcctactattcgttaaactcat

SEQ ID NO: 2809708 - DNA, 25 bp, Homo sapien
cttctgaagcctactattcgttaaa

SEQ ID NO: 2809709 - DNA, 25 bp, Homo sapien
actcattttccgttcagtttgttct

SEQ ID NO: 2809710 - DNA, 25 bp, Homo sapien
gcttgattggttttgggattgatac

SEQ ID NO: 2809711 - DNA, 25 bp, Homo sapien
ggcccttgtagtgcaatttttgaca

SEQ ID NO: 2809712 - DNA, 25 bp, Homo sapien
aagctcccttttcattgggagccta

SEQ ID NO: 2809713 - DNA, 25 bp, Homo sapien
cttgtagtgcaatttttgacacatc

SEQ ID NO: 2809714 - DNA, 25 bp, Homo sapien
ttgggagcctaagggcatattcagg

SEQ ID NO: 2809715 - DNA, 25 bp, Homo sapien
cagttcactgtagctcaagcaatac

SEQ ID NO: 2809716 - DNA, 25 bp, Homo sapien
caataccctacaacagggtgggtag

SEQ ID NO: 2809717 - DNA, 25 bp, Homo sapien
gggcttgtttgccagcagggcaaac

SEQ ID NO: 2809718 - DNA, 25 bp, Homo sapien
aatgagataaccacacaccacaagt

SEQ ID NO: 2809719 - DNA, 25 bp, Homo sapien
gggagacttggacattatggtgaaa

SEQ ID NO: 2809720 - DNA, 25 bp, Homo sapien
tttgtaaaagtaagaaatgcaggct

SEQ ID NO: 2809721 - DNA, 25 bp, Homo sapien
cagctggatttgtgtatgtgcgtgc

SEQ ID NO: 2809722 - DNA, 25 bp, Homo sapien
atttcgctttgcacaatcttcaggg

SEQ ID NO: 2809723 - DNA, 25 bp, Homo sapien
cagtctcctgtgcttttctagttac

SEQ ID NO: 2809724 - DNA, 25 bp, Homo sapien
gtctcctgtgcttttctagttacca

SEQ ID NO: 2809725 - DNA, 25 bp, Homo sapien
cttcagtctcctgtgcttttctagt

SEQ ID NO: 2809726 - DNA, 25 bp, Homo sapien
tcagtctcctgtgcttttctagtta

SEQ ID NO: 2809727 - DNA, 25 bp, Homo sapien
aaattgcactctgtaactttcacag

SEQ ID NO: 2809728 - DNA, 25 bp, Homo sapien
aattgcactctgtaactttcacagg

SEQ ID NO: 2809729 - DNA, 25 bp, Homo sapien
tcacaggtattataagaagtaggca

SEQ ID NO: 2809730 - DNA, 25 bp, Homo sapien
tttcacaggtattataagaagtagg

SEQ ID NO: 2809731 - DNA, 25 bp, Homo sapien
ttttggtatggaacacaggctctgc

SEQ ID NO: 2809732 - DNA, 25 bp, Homo sapien
gcagctgagtaggtacacggtcgat

SEQ ID NO: 2809733 - DNA, 25 bp, Homo sapien
caggtagtaagcaatttagcgtccc

SEQ ID NO: 2809734 - DNA, 25 bp, Homo sapien
ttagcgtcccaatctagagcagtgc

SEQ ID NO: 2809735 - DNA, 25 bp, Homo sapien
tcctgtgacaatgaacctgttctta

SEQ ID NO: 2809736 - DNA, 25 bp, Homo sapien
gctgtggtaggtaacttcagtctgc

SEQ ID NO: 2809737 - DNA, 25 bp, Homo sapien
gcagtcagccctaatatcccttgag

SEQ ID NO: 2809738 - DNA, 25 bp, Homo sapien
ccttcattcagaactagaactggca

SEQ ID NO: 2809739 - DNA, 25 bp, Homo sapien
tctttgaagcttccattactagtca

SEQ ID NO: 2809740 - DNA, 25 bp, Homo sapien
ctttgaagcttccattactagtcat

SEQ ID NO: 2809741 - DNA, 25 bp, Homo sapien
gtctttgaagcttccattactagtc

SEQ ID NO: 2809742 - DNA, 25 bp, Homo sapien
catttggctatacagagctgcctca

SEQ ID NO: 2809743 - DNA, 25 bp, Homo sapien
ggagtaactgttgtcccgaatatga

SEQ ID NO: 2809744 - DNA, 25 bp, Homo sapien
tagggattgaataaaggtggagcac

SEQ ID NO: 2809745 - DNA, 25 bp, Homo sapien
tctcttctgcataatggcccagctt

SEQ ID NO: 2809746 - DNA, 25 bp, Homo sapien
tctggtaacttacaacacaaaggga

SEQ ID NO: 2809747 - DNA, 25 bp, Homo sapien
gcaggctgcctaactttctggtaac

SEQ ID NO: 2809748 - DNA, 25 bp, Homo sapien
caacaacacgtctatgggaagcagg

SEQ ID NO: 2809749 - DNA, 25 bp, Homo sapien
tgacaattgctttctttagggagac

SEQ ID NO: 2809750 - DNA, 25 bp, Homo sapien
gacattaatgaaagtcccatacaag

SEQ ID NO: 2809751 - DNA, 25 bp, Homo sapien
cagacattaatgaaagtcccataca

SEQ ID NO: 2809752 - DNA, 25 bp, Homo sapien
cattaatgaaagtcccatacaaggc

SEQ ID NO: 2809753 - DNA, 25 bp, Homo sapien
tcagacattaatgaaagtcccatac

SEQ ID NO: 2809754 - DNA, 25 bp, Homo sapien
gcagctatgattactgaatttaatg

SEQ ID NO: 2809755 - DNA, 25 bp, Homo sapien
cagctatgattactgaatttaatga

SEQ ID NO: 2809756 - DNA, 25 bp, Homo sapien
atttaatgaataacaatgtaagtaa

SEQ ID NO: 2809757 - DNA, 25 bp, Homo sapien
taacgtagtatgcagcatttaccag

SEQ ID NO: 2809758 - DNA, 25 bp, Homo sapien
accagcaccatgacacaacgtttca

SEQ ID NO: 2809759 - DNA, 25 bp, Homo sapien
aactattaacgtagtatgcagcatt

SEQ ID NO: 2809760 - DNA, 25 bp, Homo sapien
acacaacgtttcattctgataaagt

SEQ ID NO: 2809761 - DNA, 25 bp, Homo sapien
gtttcccttagaagatggagcctcc

SEQ ID NO: 2809762 - DNA, 25 bp, Homo sapien
ggagcctcctcgcatctggattaga

SEQ ID NO: 2809763 - DNA, 25 bp, Homo sapien
ttatactgggctcgctttacacaca

SEQ ID NO: 2809764 - DNA, 25 bp, Homo sapien
cctgcatcatacctgtgggtggtct

SEQ ID NO: 2809765 - DNA, 25 bp, Homo sapien
tctttgggtattaatgttcgtaagc

SEQ ID NO: 2809766 - DNA, 25 bp, Homo sapien
tctgttctttgggtattaatgttcg

SEQ ID NO: 2809767 - DNA, 25 bp, Homo sapien
tgggtattaatgttcgtaagctggc

SEQ ID NO: 2809768 - DNA, 25 bp, Homo sapien
ttaatgttcgtaagctggctttcac

SEQ ID NO: 2809769 - DNA, 25 bp, Homo sapien
tacaagtttttcacgcagttcaatt

SEQ ID NO: 2809770 - DNA, 25 bp, Homo sapien
tacagttgcacatgcatgcgcttcc

SEQ ID NO: 2809771 - DNA, 25 bp, Homo sapien
agaacacaaccgcagcagcattcgc

SEQ ID NO: 2809772 - DNA, 25 bp, Homo sapien
tttcttatgccggtagacagcggcc

SEQ ID NO: 2809773 - DNA, 25 bp, Homo sapien
tagatgaccccctttgttggccctg

SEQ ID NO: 2809774 - DNA, 25 bp, Homo sapien
caagacgtaggctttctgttcacca

SEQ ID NO: 2809775 - DNA, 25 bp, Homo sapien
tgcttgtttttcaagacgtaggctt

SEQ ID NO: 2809776 - DNA, 25 bp, Homo sapien
catctatttcaagatagatgacccc

SEQ ID NO: 2809777 - DNA, 25 bp, Homo sapien
cagtgtgtcaggtgaataaaactta

SEQ ID NO: 2809778 - DNA, 25 bp, Homo sapien
aacagtgtgtcaggtgaataaaact

SEQ ID NO: 2809779 - DNA, 25 bp, Homo sapien
acagtgtgtcaggtgaataaaactt

SEQ ID NO: 2809780 - DNA, 25 bp, Homo sapien
agtgtgtcaggtgaataaaacttac

SEQ ID NO: 2809781 - DNA, 25 bp, Homo sapien
cttcgatcccgatcttcatcataaa

SEQ ID NO: 2809782 - DNA, 25 bp, Homo sapien
tcaagaactgaatggatatctttaa

SEQ ID NO: 2809783 - DNA, 25 bp, Homo sapien
tcataaactgtcacttcaagaactg

SEQ ID NO: 2809784 - DNA, 25 bp, Homo sapien
caactttgcccagaaagtcagcact

SEQ ID NO: 2809785 - DNA, 25 bp, Homo sapien
gatttcatcagtaggaaacaacaac

SEQ ID NO: 2809786 - DNA, 25 bp, Homo sapien
gaaaatttagatagctccagctgat

SEQ ID NO: 2809787 - DNA, 25 bp, Homo sapien
tagcttggtatctgacagaatttcc

SEQ ID NO: 2809788 - DNA, 25 bp, Homo sapien
gtgtgtttgtaagcatgctatttgc

SEQ ID NO: 2809789 - DNA, 25 bp, Homo sapien
cagtatgtgttagcagtctatcgtt

SEQ ID NO: 2809790 - DNA, 25 bp, Homo sapien
aagactttattccactcaggattga

SEQ ID NO: 2809791 - DNA, 25 bp, Homo sapien
agtctatcgttgttcagttctacca

SEQ ID NO: 2809792 - DNA, 25 bp, Homo sapien
ttccactcaggattgagatttttgt

SEQ ID NO: 2809793 - DNA, 25 bp, Homo sapien
ctacaagagatttttggtaaatatt

SEQ ID NO: 2809794 - DNA, 25 bp, Homo sapien
gtcattgttaagagagctgaggcat

SEQ ID NO: 2809795 - DNA, 25 bp, Homo sapien
cggcctgctctaaagggctttgtct

SEQ ID NO: 2809796 - DNA, 25 bp, Homo sapien
gctttgtctccctgtcattgttaag

SEQ ID NO: 2809797 - DNA, 25 bp, Homo sapien
caatttaaacaagtccccatgcggc

SEQ ID NO: 2809798 - DNA, 25 bp, Homo sapien
catgagttgaacggttccccaggga

SEQ ID NO: 2809799 - DNA, 25 bp, Homo sapien
tcatgagttgaacggttccccaggg

SEQ ID NO: 2809800 - DNA, 25 bp, Homo sapien
tgggccggaccatctaaaagtgtct

SEQ ID NO: 2809801 - DNA, 25 bp, Homo sapien
cagaaggtcaaagtcatgggccgga

SEQ ID NO: 2809802 - DNA, 25 bp, Homo sapien
agtcatgggccggaccatctaaaag

SEQ ID NO: 2809803 - DNA, 25 bp, Homo sapien
ggtcaaagtcatgggccggaccatc

SEQ ID NO: 2809804 - DNA, 25 bp, Homo sapien
tgacacagcaagttgggggtggggg

SEQ ID NO: 2809805 - DNA, 25 bp, Homo sapien
ctgtgacacagcaagttgggggtgg

SEQ ID NO: 2809806 - DNA, 25 bp, Homo sapien
gtgacacagcaagttgggggtgggg

SEQ ID NO: 2809807 - DNA, 25 bp, Homo sapien
tgtgacacagcaagttgggggtggg

SEQ ID NO: 2809808 - DNA, 25 bp, Homo sapien
tccaacactgggctattgagaccga

SEQ ID NO: 2809809 - DNA, 25 bp, Homo sapien
gccttgctcaatgcatgtgtatgtg

SEQ ID NO: 2809810 - DNA, 25 bp, Homo sapien
taaattgaggccttaaccaccagag

SEQ ID NO: 2809811 - DNA, 25 bp, Homo sapien
aaccttaatgatttgaagtgcactg

SEQ ID NO: 2809812 - DNA, 25 bp, Homo sapien
taacccttccgctctgatgactttc

SEQ ID NO: 2809813 - DNA, 25 bp, Homo sapien
tgactttcacctggagaaatcccac

SEQ ID NO: 2809814 - DNA, 25 bp, Homo sapien
cagtgacgtcggcagccattaaccc

SEQ ID NO: 2809815 - DNA, 25 bp, Homo sapien
aatcccacatctttcaggttgtgaa

SEQ ID NO: 2809816 - DNA, 25 bp, Homo sapien
tcagtggagatagccagaataaatt

SEQ ID NO: 2809817 - DNA, 25 bp, Homo sapien
cattggtggatgagttgtacaagca

SEQ ID NO: 2809818 - DNA, 25 bp, Homo sapien
tgtacaagcattagcagacagctga

SEQ ID NO: 2809819 - DNA, 25 bp, Homo sapien
agctgattcagtggagatagccaga

SEQ ID NO: 2809820 - DNA, 25 bp, Homo sapien
caacttctcagaagtacttctgtcc

SEQ ID NO: 2809821 - DNA, 25 bp, Homo sapien
ctccaggtaaattgtttacaacctg

SEQ ID NO: 2809822 - DNA, 25 bp, Homo sapien
tcttccaccagacaacttctcagaa

SEQ ID NO: 2809823 - DNA, 25 bp, Homo sapien
tacaacctgatctagtcacatgtgt

SEQ ID NO: 2809824 - DNA, 25 bp, Homo sapien
caggtcagagatgctgactgtggct

SEQ ID NO: 2809825 - DNA, 25 bp, Homo sapien
agcttgtgcgtctgttccctactga

SEQ ID NO: 2809826 - DNA, 25 bp, Homo sapien
taatatctcctctcgttccttctgg

SEQ ID NO: 2809827 - DNA, 25 bp, Homo sapien
tggctgatgctgtcagagtgaccag

SEQ ID NO: 2809828 - DNA, 25 bp, Homo sapien
taattccaatgtagagaatgcccat

SEQ ID NO: 2809829 - DNA, 25 bp, Homo sapien
gaagtgtcacctgtaactaagcaaa

SEQ ID NO: 2809830 - DNA, 25 bp, Homo sapien
tggaactcttccaacatagtctggt

SEQ ID NO: 2809831 - DNA, 25 bp, Homo sapien
tcatattgttgctggcgttggctga

SEQ ID NO: 2809832 - DNA, 25 bp, Homo sapien
tatgccttctaaggtggcaggcaag

SEQ ID NO: 2809833 - DNA, 25 bp, Homo sapien
aatgaggagcaaagttatgccttct

SEQ ID NO: 2809834 - DNA, 25 bp, Homo sapien
tgaggagcaaagttatgccttctaa

SEQ ID NO: 2809835 - DNA, 25 bp, Homo sapien
ttatgccttctaaggtggcaggcaa

SEQ ID NO: 2809836 - DNA, 25 bp, Homo sapien
aattttctgactagctgtccttgtg

SEQ ID NO: 2809837 - DNA, 25 bp, Homo sapien
gaagcattgtagttttggtgtcaca

SEQ ID NO: 2809838 - DNA, 25 bp, Homo sapien
aatattgcctatctccctaatgaac

SEQ ID NO: 2809839 - DNA, 25 bp, Homo sapien
caaagtcaaaggctattttcctcat

SEQ ID NO: 2809840 - DNA, 25 bp, Homo sapien
cagatcaatcactccactggctgag

SEQ ID NO: 2809841 - DNA, 25 bp, Homo sapien
taatgtgtataatagggccctgcag

SEQ ID NO: 2809842 - DNA, 25 bp, Homo sapien
ggccctgcaggttgtaaagcattat

SEQ ID NO: 2809843 - DNA, 25 bp, Homo sapien
gacagctccgtagatatcatgatga

SEQ ID NO: 2809844 - DNA, 25 bp, Homo sapien
cagatagcctgtgtccatcaactgg

SEQ ID NO: 2809845 - DNA, 25 bp, Homo sapien
ggtcaaaaccgccacctactggtca

SEQ ID NO: 2809846 - DNA, 25 bp, Homo sapien
tacagatttatgaactccaaggaga

SEQ ID NO: 2809847 - DNA, 25 bp, Homo sapien
catgcttcctacactaatacttggg

SEQ ID NO: 2809848 - DNA, 25 bp, Homo sapien
aaatcaaattgttccctccactgag

SEQ ID NO: 2809849 - DNA, 25 bp, Homo sapien
ctttgtcccatgcagtgatatcaat

SEQ ID NO: 2809850 - DNA, 25 bp, Homo sapien
tcccatgcagtgatatcaatgactc

SEQ ID NO: 2809851 - DNA, 25 bp, Homo sapien
gaaaatcaaattgttccctccactg

SEQ ID NO: 2809852 - DNA, 25 bp, Homo sapien
tagggatcgctcaacccgttggaat

SEQ ID NO: 2809853 - DNA, 25 bp, Homo sapien
caagccggaacttcacgtagggatc

SEQ ID NO: 2809854 - DNA, 25 bp, Homo sapien
tgtacttctgatgcccaagccggaa

SEQ ID NO: 2809855 - DNA, 25 bp, Homo sapien
tgctcttgtacttctgatgcccaag

SEQ ID NO: 2809856 - DNA, 25 bp, Homo sapien
aagatgcgattttctgtgtaggtct

SEQ ID NO: 2809857 - DNA, 25 bp, Homo sapien
ctgtgtaggtctgataggcgtaaac

SEQ ID NO: 2809858 - DNA, 25 bp, Homo sapien
gtctctcccttcaatcaaggtgatg

SEQ ID NO: 2809859 - DNA, 25 bp, Homo sapien
ggtgatgctgactattcctctccaa

SEQ ID NO: 2809860 - DNA, 25 bp, Homo sapien
tccataccagagcaacgccataggt

SEQ ID NO: 2809861 - DNA, 25 bp, Homo sapien
tttttccataccagagcaacgccat

SEQ ID NO: 2809862 - DNA, 25 bp, Homo sapien
ccagagcaacgccataggtattttt

SEQ ID NO: 2809863 - DNA, 25 bp, Homo sapien
gcaacgccataggtatttttatcat

SEQ ID NO: 2809864 - DNA, 25 bp, Homo sapien
ttttgcaataaggattctgaagctc

SEQ ID NO: 2809865 - DNA, 25 bp, Homo sapien
acaggaagagctggcctgccgcacg

SEQ ID NO: 2809866 - DNA, 25 bp, Homo sapien
tctgaagctctgctctgcagaagcc

SEQ ID NO: 2809867 - DNA, 25 bp, Homo sapien
ctgctctgcagaagcccaggacagg

SEQ ID NO: 2809868 - DNA, 25 bp, Homo sapien
acagagaaataagatccaaccactt

SEQ ID NO: 2809869 - DNA, 25 bp, Homo sapien
cagagaaataagatccaaccacttc

SEQ ID NO: 2809870 - DNA, 25 bp, Homo sapien
cacagagaaataagatccaaccact

SEQ ID NO: 2809871 - DNA, 25 bp, Homo sapien
caggaagcacaatttaccggaggaa

SEQ ID NO: 2809872 - DNA, 25 bp, Homo sapien
ttcccaggaagcacaatttaccgga

SEQ ID NO: 2809873 - DNA, 25 bp, Homo sapien
cccttagtttcccaggaagcacaat

SEQ ID NO: 2809874 - DNA, 25 bp, Homo sapien
tagtttcccaggaagcacaatttac

SEQ ID NO: 2809875 - DNA, 25 bp, Homo sapien
gagccagggcttagtaagttacagg

SEQ ID NO: 2809876 - DNA, 25 bp, Homo sapien
tatcttacaagttgaagaagagcca

SEQ ID NO: 2809877 - DNA, 25 bp, Homo sapien
tatcgatctgtgtccaacagtggca

SEQ ID NO: 2809878 - DNA, 25 bp, Homo sapien
gccattaatgccataggaattaggg

SEQ ID NO: 2809879 - DNA, 25 bp, Homo sapien
cttttccaactcttcctcattagca

SEQ ID NO: 2809880 - DNA, 25 bp, Homo sapien
cttacttgatcttttccaactcttc

SEQ ID NO: 2809881 - DNA, 25 bp, Homo sapien
ttttccaactcttcctcattagcat

SEQ ID NO: 2809882 - DNA, 25 bp, Homo sapien
tccaactcttcctcattagcattgt

SEQ ID NO: 2809883 - DNA, 25 bp, Homo sapien
tacagtgagggaacatacattgctt

SEQ ID NO: 2809884 - DNA, 25 bp, Homo sapien
tccatgggaagagcaataaggcttg

SEQ ID NO: 2809885 - DNA, 25 bp, Homo sapien
gatattgtttgtgacaacctcaggg

SEQ ID NO: 2809886 - DNA, 25 bp, Homo sapien
tatttccccttgtatcagtgatagg

SEQ ID NO: 2809887 - DNA, 25 bp, Homo sapien
gggtgagtgagatcaggacaggaag

SEQ ID NO: 2809888 - DNA, 25 bp, Homo sapien
gagtgagatcaggacaggaagtaca

SEQ ID NO: 2809889 - DNA, 25 bp, Homo sapien
tacaaggatgttcaccagccagagg

SEQ ID NO: 2809890 - DNA, 25 bp, Homo sapien
ttaggggtgagtgagatcaggacag

SEQ ID NO: 2809891 - DNA, 25 bp, Homo sapien
taagccctggttgagccacttgctt

SEQ ID NO: 2809892 - DNA, 25 bp, Homo sapien
ttttctaagccctggttgagccact

SEQ ID NO: 2809893 - DNA, 25 bp, Homo sapien
tgtgccttttctaagccctggttga

SEQ ID NO: 2809894 - DNA, 25 bp, Homo sapien
tcactgtgccttttctaagccctgg

SEQ ID NO: 2809895 - DNA, 25 bp, Homo sapien
gaggatctttcagagtaagggtcac

SEQ ID NO: 2809896 - DNA, 25 bp, Homo sapien
gtcaggataatgaggatctttcaga

SEQ ID NO: 2809897 - DNA, 25 bp, Homo sapien
taatgaggatctttcagagtaaggg

SEQ ID NO: 2809898 - DNA, 25 bp, Homo sapien
tctttaggggtaaggatgactgaga

SEQ ID NO: 2809899 - DNA, 25 bp, Homo sapien
aaggctgagcccataaagtcatcct

SEQ ID NO: 2809900 - DNA, 25 bp, Homo sapien
cagatccagaaaggctgagcccata

SEQ ID NO: 2809901 - DNA, 25 bp, Homo sapien
taactccaattgtgtcagatccaga

SEQ ID NO: 2809902 - DNA, 25 bp, Homo sapien
ctgtttaactccaattgtgtcagat

SEQ ID NO: 2809903 - DNA, 25 bp, Homo sapien
catattaacgttattgtgccatccc

SEQ ID NO: 2809904 - DNA, 25 bp, Homo sapien
agacagttcaaaaacgctatttaag

SEQ ID NO: 2809905 - DNA, 25 bp, Homo sapien
gagaagggttggctacgcacactct

SEQ ID NO: 2809906 - DNA, 25 bp, Homo sapien
ctctctagaagtgaggagcagggca

SEQ ID NO: 2809907 - DNA, 25 bp, Homo sapien
ccctaagatgatcaaccagaataca

SEQ ID NO: 2809908 - DNA, 25 bp, Homo sapien
ttgaggttcttgtgtattatcttac

SEQ ID NO: 2809909 - DNA, 25 bp, Homo sapien
caatggctccctaagatgatcaacc

SEQ ID NO: 2809910 - DNA, 25 bp, Homo sapien
ctttatatacaatggctccctaaga

SEQ ID NO: 2809911 - DNA, 25 bp, Homo sapien
ttttaaacttcacatatggatcact

SEQ ID NO: 2809912 - DNA, 25 bp, Homo sapien
taaacttcacatatggatcactcgt

SEQ ID NO: 2809913 - DNA, 25 bp, Homo sapien
ttaaacttcacatatggatcactcg

SEQ ID NO: 2809914 - DNA, 25 bp, Homo sapien
tttaaacttcacatatggatcactc

SEQ ID NO: 2809915 - DNA, 25 bp, Homo sapien
ctgttaaatagatagattgatccat

SEQ ID NO: 2809916 - DNA, 25 bp, Homo sapien
gacttggtttggaagcaagagaacc

SEQ ID NO: 2809917 - DNA, 25 bp, Homo sapien
cttggtttggaagcaagagaaccac

SEQ ID NO: 2809918 - DNA, 25 bp, Homo sapien
ttggtttggaagcaagagaaccact

SEQ ID NO: 2809919 - DNA, 25 bp, Homo sapien
acttggtttggaagcaagagaacca

SEQ ID NO: 2809920 - DNA, 25 bp, Homo sapien
taatttagcacagaggcctatacac

SEQ ID NO: 2809921 - DNA, 25 bp, Homo sapien
tcttgcacatgatcacaaagccttc

SEQ ID NO: 2809922 - DNA, 25 bp, Homo sapien
tctgagggctagttcagctagtgct

SEQ ID NO: 2809923 - DNA, 25 bp, Homo sapien
aaaacgcactcgcacaaaatctggc

SEQ ID NO: 2809924 - DNA, 25 bp, Homo sapien
ttccttgagtgtcaccaataacttt

SEQ ID NO: 2809925 - DNA, 25 bp, Homo sapien
tccttgagtgtcaccaataactttt

SEQ ID NO: 2809926 - DNA, 25 bp, Homo sapien
tcatcaatttcaacgggcttttctt

SEQ ID NO: 2809927 - DNA, 25 bp, Homo sapien
tttccttgagtgtcaccaataactt

SEQ ID NO: 2809928 - DNA, 25 bp, Homo sapien
ctgttcttaagatctttgttcaatt

SEQ ID NO: 2809929 - DNA, 25 bp, Homo sapien
tgttcttaagatctttgttcaattg

SEQ ID NO: 2809930 - DNA, 25 bp, Homo sapien
taagatctttgttcaattggtaaaa

SEQ ID NO: 2809931 - DNA, 25 bp, Homo sapien
agatctttgttcaattggtaaaaca

SEQ ID NO: 2809932 - DNA, 25 bp, Homo sapien
aagttatcgttctttgatcagggaa

SEQ ID NO: 2809933 - DNA, 25 bp, Homo sapien
tatcgttctttgatcagggaatata

SEQ ID NO: 2809934 - DNA, 25 bp, Homo sapien
tcaagttatcgttctttgatcaggg

SEQ ID NO: 2809935 - DNA, 25 bp, Homo sapien
gttatcgttctttgatcagggaata

SEQ ID NO: 2809936 - DNA, 25 bp, Homo sapien
gaggcttcctcaagatagtcaccag

SEQ ID NO: 2809937 - DNA, 25 bp, Homo sapien
cttgaggcttcctcaagatagtcac

SEQ ID NO: 2809938 - DNA, 25 bp, Homo sapien
ttcctcaagatagtcaccagcacca

SEQ ID NO: 2809939 - DNA, 25 bp, Homo sapien
ggcttcctcaagatagtcaccagca

SEQ ID NO: 2809940 - DNA, 25 bp, Homo sapien
agagtattttctagaggaattgtaa

SEQ ID NO: 2809941 - DNA, 25 bp, Homo sapien
agtattttctagaggaattgtaata

SEQ ID NO: 2809942 - DNA, 25 bp, Homo sapien
gagtattttctagaggaattgtaat

SEQ ID NO: 2809943 - DNA, 25 bp, Homo sapien
gagagtattttctagaggaattgta

SEQ ID NO: 2809944 - DNA, 25 bp, Homo sapien
ttcagtgcccgttacgtagaaatga

SEQ ID NO: 2809945 - DNA, 25 bp, Homo sapien
acttcagtgcccgttacgtagaaat

SEQ ID NO: 2809946 - DNA, 25 bp, Homo sapien
cagtgcccgttacgtagaaatgaga

SEQ ID NO: 2809947 - DNA, 25 bp, Homo sapien
gtgcccgttacgtagaaatgagatt

SEQ ID NO: 2809948 - DNA, 25 bp, Homo sapien
taaaaaagcttctaggtgatattgc

SEQ ID NO: 2809949 - DNA, 25 bp, Homo sapien
caccatggtcacaggagtcaagtaa

SEQ ID NO: 2809950 - DNA, 25 bp, Homo sapien
gaacttgcatcaaaacgtcttccac

SEQ ID NO: 2809951 - DNA, 25 bp, Homo sapien
ttttataactcaggcaatcacgtgg

SEQ ID NO: 2809952 - DNA, 25 bp, Homo sapien
gcattactggttccagcagtgttta

SEQ ID NO: 2809953 - DNA, 25 bp, Homo sapien
tcgagcagctaaactttgacccctt

SEQ ID NO: 2809954 - DNA, 25 bp, Homo sapien
tgaccccttcttaatgtaatgtcca

SEQ ID NO: 2809955 - DNA, 25 bp, Homo sapien
ggtacattccgggatcagccaaggg

SEQ ID NO: 2809956 - DNA, 25 bp, Homo sapien
ttgtatcttcgtccttcactcttga

SEQ ID NO: 2809957 - DNA, 25 bp, Homo sapien
tcccgtgtctttctacccagtcttc

SEQ ID NO: 2809958 - DNA, 25 bp, Homo sapien
taaaaacttgtatcttcgtccttca

SEQ ID NO: 2809959 - DNA, 25 bp, Homo sapien
tcttcgtccttcactcttgaccagg

SEQ ID NO: 2809960 - DNA, 25 bp, Homo sapien
actgctccgtactcttgaatgtctg

SEQ ID NO: 2809961 - DNA, 25 bp, Homo sapien
tgagggtccactgctccgtactctt

SEQ ID NO: 2809962 - DNA, 25 bp, Homo sapien
ctgctgaaagcctgaagtacgtctg

SEQ ID NO: 2809963 - DNA, 25 bp, Homo sapien
tactcttgaatgtctgtgtggttcc

SEQ ID NO: 2809964 - DNA, 25 bp, Homo sapien
tgctaaattgactgctctgtgtggc

SEQ ID NO: 2809965 - DNA, 25 bp, Homo sapien
gattgtctgctaaattgactgctct

SEQ ID NO: 2809966 - DNA, 25 bp, Homo sapien
tgtctgctaaattgactgctctgtg

SEQ ID NO: 2809967 - DNA, 25 bp, Homo sapien
ccgtggattgtctgctaaattgact

SEQ ID NO: 2809968 - DNA, 25 bp, Homo sapien
ttcgaacaatctcatggtcacaggt

SEQ ID NO: 2809969 - DNA, 25 bp, Homo sapien
caaacattcgaacaatctcatggtc

SEQ ID NO: 2809970 - DNA, 25 bp, Homo sapien
cctttcaaacattcgaacaatctca

SEQ ID NO: 2809971 - DNA, 25 bp, Homo sapien
cattcgaacaatctcatggtcacag

SEQ ID NO: 2809972 - DNA, 25 bp, Homo sapien
caatcagggtaaatcttgggacttg

SEQ ID NO: 2809973 - DNA, 25 bp, Homo sapien
tatgaaatagctaacactgatggaa

SEQ ID NO: 2809974 - DNA, 25 bp, Homo sapien
tgacctaagctctttcaatcagggt

SEQ ID NO: 2809975 - DNA, 25 bp, Homo sapien
gacttggttgagaatgctggaacac

SEQ ID NO: 2809976 - DNA, 25 bp, Homo sapien
tcatgtgcagaattcccagtaatgt

SEQ ID NO: 2809977 - DNA, 25 bp, Homo sapien
ggcgttaacaaaccaatagcctgat

SEQ ID NO: 2809978 - DNA, 25 bp, Homo sapien
cagtgcttacacatatagttgggaa

SEQ ID NO: 2809979 - DNA, 25 bp, Homo sapien
ccagtaatgtttatatcagggtgtc

SEQ ID NO: 2809980 - DNA, 25 bp, Homo sapien
tatcccaccagcttacattcctacg

SEQ ID NO: 2809981 - DNA, 25 bp, Homo sapien
gagatcttgtcaaatcaccaatctt

SEQ ID NO: 2809982 - DNA, 25 bp, Homo sapien
ttttcaattttgagagatcttgtca

SEQ ID NO: 2809983 - DNA, 25 bp, Homo sapien
cttacattcctacggacagtgagtg

SEQ ID NO: 2809984 - DNA, 25 bp, Homo sapien
cagggctgtcctctagctcagccag

SEQ ID NO: 2809985 - DNA, 25 bp, Homo sapien
tctagctcagccagcaaggtttcct

SEQ ID NO: 2809986 - DNA, 25 bp, Homo sapien
gtacttcccactaagaccagggctg

SEQ ID NO: 2809987 - DNA, 25 bp, Homo sapien
gcagtacttcccactaagaccaggg

SEQ ID NO: 2809988 - DNA, 25 bp, Homo sapien
ggaggacctcctcagaagttaagtc

SEQ ID NO: 2809989 - DNA, 25 bp, Homo sapien
gaatgaagttctaggaggacctcct

SEQ ID NO: 2809990 - DNA, 25 bp, Homo sapien
ccttgttgagggtgtatgtcatgga

SEQ ID NO: 2809991 - DNA, 25 bp, Homo sapien
ctatccttctctgcacatgggtgag

SEQ ID NO: 2809992 - DNA, 25 bp, Homo sapien
tgctgactctaaacatcatcttctt

SEQ ID NO: 2809993 - DNA, 25 bp, Homo sapien
gctgactctaaacatcatcttcttt

SEQ ID NO: 2809994 - DNA, 25 bp, Homo sapien
gtgctgactctaaacatcatcttct

SEQ ID NO: 2809995 - DNA, 25 bp, Homo sapien
tgatgttactctcgtcagttctctg

SEQ ID NO: 2809996 - DNA, 25 bp, Homo sapien
cctgctttgacggtaataattccta

SEQ ID NO: 2809997 - DNA, 25 bp, Homo sapien
gagtattccagtaccattattgtgg

SEQ ID NO: 2809998 - DNA, 25 bp, Homo sapien
ttattgtggtccatattttgtgtcc

SEQ ID NO: 2809999 - DNA, 25 bp, Homo sapien
tgagacctagataagcatcctctga

SEQ ID NO: 2810000 - DNA, 25 bp, Homo sapien
tacccagatttttccgagagcagtc

SEQ ID NO: 2810001 - DNA, 25 bp, Homo sapien
taaccaggcttctcaagataatcag

SEQ ID NO: 2810002 - DNA, 25 bp, Homo sapien
aatgatccgcaaaatgtcaaaccgg

SEQ ID NO: 2810003 - DNA, 25 bp, Homo sapien
ttttgaacgcattccagagtcccct

SEQ ID NO: 2810004 - DNA, 25 bp, Homo sapien
gaacagtccccacatatccttctgg

SEQ ID NO: 2810005 - DNA, 25 bp, Homo sapien
cagttgaggctataaggaaaagagc

SEQ ID NO: 2810006 - DNA, 25 bp, Homo sapien
gatgtgaaaatcagacaggcagcac

SEQ ID NO: 2810007 - DNA, 25 bp, Homo sapien
gataaaacagtatgaccaatatggg

SEQ ID NO: 2810008 - DNA, 25 bp, Homo sapien
tgtagaattgaccattaaccaaacc

SEQ ID NO: 2810009 - DNA, 25 bp, Homo sapien
gcaggtgccatttaaatagctgacc

SEQ ID NO: 2810010 - DNA, 25 bp, Homo sapien
tcttgtgtaacaaccctggacatta

SEQ ID NO: 2810011 - DNA, 25 bp, Homo sapien
agtgtctaacactctgggacacttg

SEQ ID NO: 2810012 - DNA, 25 bp, Homo sapien
aattttctatagtgtctaacactct

SEQ ID NO: 2810013 - DNA, 25 bp, Homo sapien
tatagtgtctaacactctgggacac

SEQ ID NO: 2810014 - DNA, 25 bp, Homo sapien
tttctatagtgtctaacactctggg

SEQ ID NO: 2810015 - DNA, 25 bp, Homo sapien
ctccatgtcggtttgcattactatg

SEQ ID NO: 2810016 - DNA, 25 bp, Homo sapien
ctgattggccgggatctgttttcta

SEQ ID NO: 2810017 - DNA, 25 bp, Homo sapien
tggccgggatctgttttctacttag

SEQ ID NO: 2810018 - DNA, 25 bp, Homo sapien
tatggttttcacaattcggtcaaaa

SEQ ID NO: 2810019 - DNA, 25 bp, Homo sapien
tgctgagtgcaacaccttgcacttg

SEQ ID NO: 2810020 - DNA, 25 bp, Homo sapien
ccttgcacttgagtgcaacacctgc

SEQ ID NO: 2810021 - DNA, 25 bp, Homo sapien
ctctagttctcttcttgtcaacggg

SEQ ID NO: 2810022 - DNA, 25 bp, Homo sapien
cagcctcctctagttctcttcttgt

SEQ ID NO: 2810023 - DNA, 25 bp, Homo sapien
tgcagtacagattgggggatacctt

SEQ ID NO: 2810024 - DNA, 25 bp, Homo sapien
gcagtacagattgggggataccttt

SEQ ID NO: 2810025 - DNA, 25 bp, Homo sapien
tagggacctccaaacctctcagctt

SEQ ID NO: 2810026 - DNA, 25 bp, Homo sapien
ctttagggacctccaaacctctcag

SEQ ID NO: 2810027 - DNA, 25 bp, Homo sapien
tcccagctgcggcttggtgaattca

SEQ ID NO: 2810028 - DNA, 25 bp, Homo sapien
tggtgaattcatcccgcagtagttc

SEQ ID NO: 2810029 - DNA, 25 bp, Homo sapien
attcatcccgcagtagttccatagc

SEQ ID NO: 2810030 - DNA, 25 bp, Homo sapien
gcggcttggtgaattcatcccgcag

SEQ ID NO: 2810031 - DNA, 25 bp, Homo sapien
caagagcgtctgtctgaggtacccg

SEQ ID NO: 2810032 - DNA, 25 bp, Homo sapien
catacctatgacaccagatccggag

SEQ ID NO: 2810033 - DNA, 25 bp, Homo sapien
gagcctgaggcagcacgtgcagccc

SEQ ID NO: 2810034 - DNA, 25 bp, Homo sapien
gaggtacccgctggcttcgtagtca

SEQ ID NO: 2810035 - DNA, 25 bp, Homo sapien
tgcagaatttcctaactcaagcctt

SEQ ID NO: 2810036 - DNA, 25 bp, Homo sapien
ccctatttagttgtgcttgatcaag

SEQ ID NO: 2810037 - DNA, 25 bp, Homo sapien
taataccatctctgaaacttgcaga

SEQ ID NO: 2810038 - DNA, 25 bp, Homo sapien
taccccagtacagttgtttccattg

SEQ ID NO: 2810039 - DNA, 25 bp, Homo sapien
tcttttttgatattctgccatgact

SEQ ID NO: 2810040 - DNA, 25 bp, Homo sapien
ttttttgatattctgccatgactgt

SEQ ID NO: 2810041 - DNA, 25 bp, Homo sapien
tctgccatgactgtttcttctgcat

SEQ ID NO: 2810042 - DNA, 25 bp, Homo sapien
tttcttttttgatattctgccatga

SEQ ID NO: 2810043 - DNA, 25 bp, Homo sapien
gcctggccagttcgttatatataat

SEQ ID NO: 2810044 - DNA, 25 bp, Homo sapien
ttcattccacattgaaaactatcag

SEQ ID NO: 2810045 - DNA, 25 bp, Homo sapien
caagaaatggcttatagctatgttc

SEQ ID NO: 2810046 - DNA, 25 bp, Homo sapien
tctttcacatctcatacatcattcc

SEQ ID NO: 2810047 - DNA, 25 bp, Homo sapien
tgcactcctatagcccagggttttg

SEQ ID NO: 2810048 - DNA, 25 bp, Homo sapien
tcagtatgctgtaaattgccgcgaa

SEQ ID NO: 2810049 - DNA, 25 bp, Homo sapien
cctatgggaagtatgggactgtcat

SEQ ID NO: 2810050 - DNA, 25 bp, Homo sapien
ttataacaacagactctcctggtga

SEQ ID NO: 2810051 - DNA, 25 bp, Homo sapien
tttaaggctaccacaatccagtgag

SEQ ID NO: 2810052 - DNA, 25 bp, Homo sapien
gaacaatcatatacctaaactgcca

SEQ ID NO: 2810053 - DNA, 25 bp, Homo sapien
tacactatgtatctcacaagtaggt

SEQ ID NO: 2810054 - DNA, 25 bp, Homo sapien
aatgcaaccttcaataccccgtgag

SEQ ID NO: 2810055 - DNA, 25 bp, Homo sapien
cttttcagcttgcagctgtctagca

SEQ ID NO: 2810056 - DNA, 25 bp, Homo sapien
aaatggcaaattgcaggcacttttc

SEQ ID NO: 2810057 - DNA, 25 bp, Homo sapien
tggcaaattgcaggcacttttcagc

SEQ ID NO: 2810058 - DNA, 25 bp, Homo sapien
acttttcagcttgcagctgtctagc

SEQ ID NO: 2810059 - DNA, 25 bp, Homo sapien
cttcactgaataccggcaaaagagg

SEQ ID NO: 2810060 - DNA, 25 bp, Homo sapien
gaacaaaacatctttcactccagtg

SEQ ID NO: 2810061 - DNA, 25 bp, Homo sapien
acctccaagtgatagcaacagccct

SEQ ID NO: 2810062 - DNA, 25 bp, Homo sapien
gagaactgcatatttagacttgctt

SEQ ID NO: 2810063 - DNA, 25 bp, Homo sapien
cttctcctgccgcttaaatgctgct

SEQ ID NO: 2810064 - DNA, 25 bp, Homo sapien
ccagaggaatcagtcctcggtcctt

SEQ ID NO: 2810065 - DNA, 25 bp, Homo sapien
aatcagtcctcggtccttggctttt

SEQ ID NO: 2810066 - DNA, 25 bp, Homo sapien
ggaatcagtcctcggtccttggctt

SEQ ID NO: 2810067 - DNA, 25 bp, Homo sapien
aggcaatcacatgaccattagaagg

SEQ ID NO: 2810068 - DNA, 25 bp, Homo sapien
cactgacgttgctcctctctactca

SEQ ID NO: 2810069 - DNA, 25 bp, Homo sapien
cacatgaccattagaagggcactga

SEQ ID NO: 2810070 - DNA, 25 bp, Homo sapien
aatcacatgaccattagaagggcac

SEQ ID NO: 2810071 - DNA, 25 bp, Homo sapien
gaggctttccccttcaatgccctgt

SEQ ID NO: 2810072 - DNA, 25 bp, Homo sapien
tgctaagagccaattgttctccgag

SEQ ID NO: 2810073 - DNA, 25 bp, Homo sapien
taagagccaattgttctccgaggct

SEQ ID NO: 2810074 - DNA, 25 bp, Homo sapien
cgaggctttccccttcaatgccctg

SEQ ID NO: 2810075 - DNA, 25 bp, Homo sapien
gggcacttgtaacccataggagtac

SEQ ID NO: 2810076 - DNA, 25 bp, Homo sapien
acatgcagagaaggttggagcccta

SEQ ID NO: 2810077 - DNA, 25 bp, Homo sapien
ctgtaccatctctatattccaggag

SEQ ID NO: 2810078 - DNA, 25 bp, Homo sapien
tggagccctaggaatactgctgagg

SEQ ID NO: 2810079 - DNA, 25 bp, Homo sapien
cttgtttcaaacttatggtatgttc

SEQ ID NO: 2810080 - DNA, 25 bp, Homo sapien
tcaaacttatggtatgttctgtgtc

SEQ ID NO: 2810081 - DNA, 25 bp, Homo sapien
aaacttatggtatgttctgtgtctg

SEQ ID NO: 2810082 - DNA, 25 bp, Homo sapien
gtttcaaacttatggtatgttctgt

SEQ ID NO: 2810083 - DNA, 25 bp, Homo sapien
ggcgcagttgccttcttacagatcc

SEQ ID NO: 2810084 - DNA, 25 bp, Homo sapien
tagtccctcaagttcctagtgctga

SEQ ID NO: 2810085 - DNA, 25 bp, Homo sapien
agtgctgacccctcgctcaataagt

SEQ ID NO: 2810086 - DNA, 25 bp, Homo sapien
tcaccaaggagatcccagcttacat

SEQ ID NO: 2810087 - DNA, 25 bp, Homo sapien
ttgctggcttgtagcttaggaccta

SEQ ID NO: 2810088 - DNA, 25 bp, Homo sapien
tatgaaatctagtgctgtatttgtt

SEQ ID NO: 2810089 - DNA, 25 bp, Homo sapien
cttcagcgatgttataagcaacagc

SEQ ID NO: 2810090 - DNA, 25 bp, Homo sapien
ttgtagcttaggacctagagcctca

SEQ ID NO: 2810091 - DNA, 25 bp, Homo sapien
gaacaatgttaagtggtattggccc

SEQ ID NO: 2810092 - DNA, 25 bp, Homo sapien
tcacttagggaacaagagagcttct

SEQ ID NO: 2810093 - DNA, 25 bp, Homo sapien
tgtgagaatatacccaacatgagga

SEQ ID NO: 2810094 - DNA, 25 bp, Homo sapien
ccatttgccactaaactgagagctc

SEQ ID NO: 2810095 - DNA, 25 bp, Homo sapien
tcctcatctgcaacccgggactttg

SEQ ID NO: 2810096 - DNA, 25 bp, Homo sapien
gcagcaggatattgaaggtgtttaa

SEQ ID NO: 2810097 - DNA, 25 bp, Homo sapien
tacttctctatagtccagaagagac

SEQ ID NO: 2810098 - DNA, 25 bp, Homo sapien
tagtaacacgggaaaaaatgcacac

SEQ ID NO: 2810099 - DNA, 25 bp, Homo sapien
aagaagagctactacaaatgaaagg

SEQ ID NO: 2810100 - DNA, 25 bp, Homo sapien
gacacttgtgttaggcaaataggca

SEQ ID NO: 2810101 - DNA, 25 bp, Homo sapien
tattaatgtagttcagacacttgtg

SEQ ID NO: 2810102 - DNA, 25 bp, Homo sapien
cattgactcagatgaacttgacata

SEQ ID NO: 2810103 - DNA, 25 bp, Homo sapien
cctgcagacatatgtgatcaaagtc

SEQ ID NO: 2810104 - DNA, 25 bp, Homo sapien
agacatatgtgatcaaagtcttcag

SEQ ID NO: 2810105 - DNA, 25 bp, Homo sapien
aaaatcacgattgtcttttccatca

SEQ ID NO: 2810106 - DNA, 25 bp, Homo sapien
tccctgcagacatatgtgatcaaag

SEQ ID NO: 2810107 - DNA, 25 bp, Homo sapien
ggccagcagtggtctcttactttgg

SEQ ID NO: 2810108 - DNA, 25 bp, Homo sapien
tcttactttggcatttcctctctgc

SEQ ID NO: 2810109 - DNA, 25 bp, Homo sapien
ccacaggccagcagtggtctcttac

SEQ ID NO: 2810110 - DNA, 25 bp, Homo sapien
ctcttactttggcatttcctctctg

SEQ ID NO: 2810111 - DNA, 25 bp, Homo sapien
aatattccttccctttgtagctggg

SEQ ID NO: 2810112 - DNA, 25 bp, Homo sapien
ctccatgggctcttgatattaaatc

SEQ ID NO: 2810113 - DNA, 25 bp, Homo sapien
tcagggcttgtcataaccacagtaa

SEQ ID NO: 2810114 - DNA, 25 bp, Homo sapien
tgtggccattattgataagctgcat

SEQ ID NO: 2810115 - DNA, 25 bp, Homo sapien
ttcttctatcctaaaagctttgagt

SEQ ID NO: 2810116 - DNA, 25 bp, Homo sapien
caagggagcctggtctataagcatg

SEQ ID NO: 2810117 - DNA, 25 bp, Homo sapien
tttgagttctccaatcaagggagcc

SEQ ID NO: 2810118 - DNA, 25 bp, Homo sapien
tagtgcttcacatcaaaacatacct

SEQ ID NO: 2810119 - DNA, 25 bp, Homo sapien
tgtcaaaagccactccataattcat

SEQ ID NO: 2810120 - DNA, 25 bp, Homo sapien
tcttgtcaaaagccactccataatt

SEQ ID NO: 2810121 - DNA, 25 bp, Homo sapien
ttgtcaaaagccactccataattca

SEQ ID NO: 2810122 - DNA, 25 bp, Homo sapien
cttgtcaaaagccactccataattc

SEQ ID NO: 2810123 - DNA, 25 bp, Homo sapien
tttggcaacctactcatttgacaaa

SEQ ID NO: 2810124 - DNA, 25 bp, Homo sapien
aaattttggcaacctactcatttga

SEQ ID NO: 2810125 - DNA, 25 bp, Homo sapien
aattttggcaacctactcatttgac

SEQ ID NO: 2810126 - DNA, 25 bp, Homo sapien
agaaaattttggcaacctactcatt

SEQ ID NO: 2810127 - DNA, 25 bp, Homo sapien
tgggagggagttctaaacacagaca

SEQ ID NO: 2810128 - DNA, 25 bp, Homo sapien
gatataatgttagagatggagcacc

SEQ ID NO: 2810129 - DNA, 25 bp, Homo sapien
ggagcacctatcttgtaaccataag

SEQ ID NO: 2810130 - DNA, 25 bp, Homo sapien
tgaaatctttgagccagcaaccacc

SEQ ID NO: 2810131 - DNA, 25 bp, Homo sapien
taaacacactgtcatacgaagtgag

SEQ ID NO: 2810132 - DNA, 25 bp, Homo sapien
tatggcaagagacataaggtcacac

SEQ ID NO: 2810133 - DNA, 25 bp, Homo sapien
tcctgaggctacctctggaagaaaa

SEQ ID NO: 2810134 - DNA, 25 bp, Homo sapien
tggataatctggcaacaagcaaaca

SEQ ID NO: 2810135 - DNA, 25 bp, Homo sapien
tagtaaagccggtcttggccacacc

SEQ ID NO: 2810136 - DNA, 25 bp, Homo sapien
cttctgcaaagggaatgtgaggtca

SEQ ID NO: 2810137 - DNA, 25 bp, Homo sapien
tgtcattaaactcccatgaagtcag

SEQ ID NO: 2810138 - DNA, 25 bp, Homo sapien
gtgaggtcataatctctgtcattaa

SEQ ID NO: 2810139 - DNA, 25 bp, Homo sapien
tatatacccgtgactcccaaatctc

SEQ ID NO: 2810140 - DNA, 25 bp, Homo sapien
ccccaacagcaaggcattattaagt

SEQ ID NO: 2810141 - DNA, 25 bp, Homo sapien
tgtcagagtacgtgcacatatgttg

SEQ ID NO: 2810142 - DNA, 25 bp, Homo sapien
catggcttatgccaggatcaagcag

SEQ ID NO: 2810143 - DNA, 25 bp, Homo sapien
gtctccggccgcgccaccggcactc

SEQ ID NO: 2810144 - DNA, 25 bp, Homo sapien
ttgtctccggccgcgccaccggcac

SEQ ID NO: 2810145 - DNA, 25 bp, Homo sapien
cttgtctccggccgcgccaccggca

SEQ ID NO: 2810146 - DNA, 25 bp, Homo sapien
ctccggccgcgccaccggcactcac

SEQ ID NO: 2810147 - DNA, 25 bp, Homo sapien
actccgcgccggctctgcgggagga

SEQ ID NO: 2810148 - DNA, 25 bp, Homo sapien
cggtgcccggcagagaggagctctt

SEQ ID NO: 2810149 - DNA, 25 bp, Homo sapien
ggcccgagactccgcgggactccgc

SEQ ID NO: 2810150 - DNA, 25 bp, Homo sapien
gcaggcggtgcccggcagagaggag

SEQ ID NO: 2810151 - DNA, 25 bp, Homo sapien
tcatctcgggcgcggtcccccctcg

SEQ ID NO: 2810152 - DNA, 25 bp, Homo sapien
ccggggccctgacgccgtgcaccct

SEQ ID NO: 2810153 - DNA, 25 bp, Homo sapien
tggtggcacaagtgcgccccggggc

SEQ ID NO: 2810154 - DNA, 25 bp, Homo sapien
tgacgccgtgcaccctcatctcggg

SEQ ID NO: 2810155 - DNA, 25 bp, Homo sapien
ggagctgagtcgggggagcgtccgc

SEQ ID NO: 2810156 - DNA, 25 bp, Homo sapien
gggagcgtccgccaggaggcgtccc

SEQ ID NO: 2810157 - DNA, 25 bp, Homo sapien
tcgggggagcgtccgccaggaggcg

SEQ ID NO: 2810158 - DNA, 25 bp, Homo sapien
ctgagtcgggggagcgtccgccagg

SEQ ID NO: 2810159 - DNA, 25 bp, Homo sapien
tagcgtggacccctgctcggctctg

SEQ ID NO: 2810160 - DNA, 25 bp, Homo sapien
gctccggcgacgagcagcacaggtt

SEQ ID NO: 2810161 - DNA, 25 bp, Homo sapien
ccgcttcttgaagccgctccacctg

SEQ ID NO: 2810162 - DNA, 25 bp, Homo sapien
ggaggagaagactcggtccagcact

SEQ ID NO: 2810163 - DNA, 25 bp, Homo sapien
caggttcttccagagccgggcctgg

SEQ ID NO: 2810164 - DNA, 25 bp, Homo sapien
gagggcgacggggtgtccgcagtgc

SEQ ID NO: 2810165 - DNA, 25 bp, Homo sapien
ggaggaggacgccgccggcggctct

SEQ ID NO: 2810166 - DNA, 25 bp, Homo sapien
tgtccgcagtgcggcgctctggacc

SEQ ID NO: 2810167 - DNA, 25 bp, Homo sapien
tcttctctctgaccgagctcgggaa

SEQ ID NO: 2810168 - DNA, 25 bp, Homo sapien
tgcaaagtttttccctcgaagctcc

SEQ ID NO: 2810169 - DNA, 25 bp, Homo sapien
gcgcctgcaaagtttttccctcgaa

SEQ ID NO: 2810170 - DNA, 25 bp, Homo sapien
gctggagccgtaaccgaatcccggc

SEQ ID NO: 2810171 - DNA, 25 bp, Homo sapien
tccggagtctgacgataaagccagc

SEQ ID NO: 2810172 - DNA, 25 bp, Homo sapien
tggaaactatgtgccctcgatgggt

SEQ ID NO: 2810173 - DNA, 25 bp, Homo sapien
taaagccagcccttaagttgcaggg

SEQ ID NO: 2810174 - DNA, 25 bp, Homo sapien
gaacccgacggagttctaaagctga

SEQ ID NO: 2810175 - DNA, 25 bp, Homo sapien
ttttgtcttcgtccttgctcttggt

SEQ ID NO: 2810176 - DNA, 25 bp, Homo sapien
tctattagtgcggaatgatgccctt

SEQ ID NO: 2810177 - DNA, 25 bp, Homo sapien
tgttttctattagtgcggaatgatg

SEQ ID NO: 2810178 - DNA, 25 bp, Homo sapien
gatgcccttgcaccatctattccta

SEQ ID NO: 2810179 - DNA, 25 bp, Homo sapien
cctcaatatttctgaggattctagg

SEQ ID NO: 2810180 - DNA, 25 bp, Homo sapien
ggattctaggagaagggacatacat

SEQ ID NO: 2810181 - DNA, 25 bp, Homo sapien
tgctgagagaagtccagctcctcct

SEQ ID NO: 2810182 - DNA, 25 bp, Homo sapien
tcaatatttctgaggattctaggag

SEQ ID NO: 2810183 - DNA, 25 bp, Homo sapien
tggaagtatgatctggaacctcaat

SEQ ID NO: 2810184 - DNA, 25 bp, Homo sapien
tggtaatgactctgtccctctttcc

SEQ ID NO: 2810185 - DNA, 25 bp, Homo sapien
cctggaggaagattggaagtatgat

SEQ ID NO: 2810186 - DNA, 25 bp, Homo sapien
tatgatctggaacctcaatggtaat

SEQ ID NO: 2810187 - DNA, 25 bp, Homo sapien
ccctctctgggacttagtaatagca

SEQ ID NO: 2810188 - DNA, 25 bp, Homo sapien
ttggctgaagccagaattatgactg

SEQ ID NO: 2810189 - DNA, 25 bp, Homo sapien
gatctccctgactctactgtgctcc

SEQ ID NO: 2810190 - DNA, 25 bp, Homo sapien
gaagagcgtacatgaacataggcat

SEQ ID NO: 2810191 - DNA, 25 bp, Homo sapien
taaacgcgtaggtatatccttgaca

SEQ ID NO: 2810192 - DNA, 25 bp, Homo sapien
gacaataaacgcgtaggtatatcct

SEQ ID NO: 2810193 - DNA, 25 bp, Homo sapien
ctgtagtgacaataaacgcgtaggt

SEQ ID NO: 2810194 - DNA, 25 bp, Homo sapien
tagtgacaataaacgcgtaggtata

SEQ ID NO: 2810195 - DNA, 25 bp, Homo sapien
cagtcatatgggtataatgttataa

SEQ ID NO: 2810196 - DNA, 25 bp, Homo sapien
aacaacagtcatatgggtataatgt

SEQ ID NO: 2810197 - DNA, 25 bp, Homo sapien
taatgttataagtggatgaaccata

SEQ ID NO: 2810198 - DNA, 25 bp, Homo sapien
ggtataatgttataagtggatgaac

SEQ ID NO: 2810199 - DNA, 25 bp, Homo sapien
cagaccatcaccagcatcgtcaaaa

SEQ ID NO: 2810200 - DNA, 25 bp, Homo sapien
gcatcgtcaaaaaactcagccaaaa

SEQ ID NO: 2810201 - DNA, 25 bp, Homo sapien
aagccacatccagaccatcaccagc

SEQ ID NO: 2810202 - DNA, 25 bp, Homo sapien
ggaatcgctcgccaggaagttactg

SEQ ID NO: 2810203 - DNA, 25 bp, Homo sapien
aaataagagctcgagatcaggcggc

SEQ ID NO: 2810204 - DNA, 25 bp, Homo sapien
gataaacatcaaacacctacaagga

SEQ ID NO: 2810205 - DNA, 25 bp, Homo sapien
atcaggcggccacaggaactaactt

SEQ ID NO: 2810206 - DNA, 25 bp, Homo sapien
ctttgcagtacacgagataaacatc

SEQ ID NO: 2810207 - DNA, 25 bp, Homo sapien
cacaaactgggaattagggcatgaa

SEQ ID NO: 2810208 - DNA, 25 bp, Homo sapien
tctgcttactataagaaaaagctgc

SEQ ID NO: 2810209 - DNA, 25 bp, Homo sapien
tcagcttgaaacataccacttaagt

SEQ ID NO: 2810210 - DNA, 25 bp, Homo sapien
tactgattcgaaccctcatgacatg

SEQ ID NO: 2810211 - DNA, 25 bp, Homo sapien
tctttgaactcccttaatgtatgag

SEQ ID NO: 2810212 - DNA, 25 bp, Homo sapien
aaaatgacaagtgaccccaaacaga

SEQ ID NO: 2810213 - DNA, 25 bp, Homo sapien
cccaaacagattatgttccaaaagt

SEQ ID NO: 2810214 - DNA, 25 bp, Homo sapien
tcccataggaaattatcagatgcca

SEQ ID NO: 2810215 - DNA, 25 bp, Homo sapien
tagagtttctggaatctgataacac

SEQ ID NO: 2810216 - DNA, 25 bp, Homo sapien
taaactcccaaaagacattctggcc

SEQ ID NO: 2810217 - DNA, 25 bp, Homo sapien
gaatctgataacactgattcgtgaa

SEQ ID NO: 2810218 - DNA, 25 bp, Homo sapien
tgctttaggcatgttgtttaacacc

SEQ ID NO: 2810219 - DNA, 25 bp, Homo sapien
ggtagatggagccaacccgttctgg

SEQ ID NO: 2810220 - DNA, 25 bp, Homo sapien
taccctttgattatggtcccgaagc

SEQ ID NO: 2810221 - DNA, 25 bp, Homo sapien
cagaaaacagatggagggcaagaac

SEQ ID NO: 2810222 - DNA, 25 bp, Homo sapien
cagagaatggcacgtgttgaacctt

SEQ ID NO: 2810223 - DNA, 25 bp, Homo sapien
aacagaattggagatgaatcactag

SEQ ID NO: 2810224 - DNA, 25 bp, Homo sapien
cacacctgagtgtttggaattatat

SEQ ID NO: 2810225 - DNA, 25 bp, Homo sapien
ttatgatgaattggtttgccgaact

SEQ ID NO: 2810226 - DNA, 25 bp, Homo sapien
gccgaactttagaattcatagcaag

SEQ ID NO: 2810227 - DNA, 25 bp, Homo sapien
tacaaataatgttaagcaaccaagg

SEQ ID NO: 2810228 - DNA, 25 bp, Homo sapien
caaccaaggcaataatggttttcct

SEQ ID NO: 2810229 - DNA, 25 bp, Homo sapien
tattgtgcaccatgcaagatgcaga

SEQ ID NO: 2810230 - DNA, 25 bp, Homo sapien
tattgtaagggattacagtaaaaga

SEQ ID NO: 2810231 - DNA, 25 bp, Homo sapien
gaggacaatctctgattcagttcca

SEQ ID NO: 2810232 - DNA, 25 bp, Homo sapien
ctgattcagttccaatgctcttgta

SEQ ID NO: 2810233 - DNA, 25 bp, Homo sapien
ccaatgctcttgtatctccatgagt

SEQ ID NO: 2810234 - DNA, 25 bp, Homo sapien
ttattgtgaggacaatctctgattc

SEQ ID NO: 2810235 - DNA, 25 bp, Homo sapien
taaagtcctgcaattagacaagctc

SEQ ID NO: 2810236 - DNA, 25 bp, Homo sapien
aactgatcacgaccccaaggttgtt

SEQ ID NO: 2810237 - DNA, 25 bp, Homo sapien
ggagaatgtcataactaacccatgg

SEQ ID NO: 2810238 - DNA, 25 bp, Homo sapien
actaggtaagggctttagatcagca

SEQ ID NO: 2810239 - DNA, 25 bp, Homo sapien
catctttggcatataagtgtctcag

SEQ ID NO: 2810240 - DNA, 25 bp, Homo sapien
taggtaccaacgtgcagttgatgca

SEQ ID NO: 2810241 - DNA, 25 bp, Homo sapien
gatgcaatagatttgggatacccag

SEQ ID NO: 2810242 - DNA, 25 bp, Homo sapien
gatacccaggctgatataccactct

SEQ ID NO: 2810243 - DNA, 25 bp, Homo sapien
tgtaacaaagcttgtaaaagaacag

SEQ ID NO: 2810244 - DNA, 25 bp, Homo sapien
cagccagtggacaaaagcaaagctt

SEQ ID NO: 2810245 - DNA, 25 bp, Homo sapien
cccattttgcgtttgaattgtaaca

SEQ ID NO: 2810246 - DNA, 25 bp, Homo sapien
cagttgtagcctcttgaaccaaaga

SEQ ID NO: 2810247 - DNA, 25 bp, Homo sapien
aggaccccggaggacacagattgaa

SEQ ID NO: 2810248 - DNA, 25 bp, Homo sapien
taatgcaagtagtgctagtctcaac

SEQ ID NO: 2810249 - DNA, 25 bp, Homo sapien
tcaacagacttgagagcttcccact

SEQ ID NO: 2810250 - DNA, 25 bp, Homo sapien
tccttgggattgatacacatgtgcc

SEQ ID NO: 2810251 - DNA, 25 bp, Homo sapien
tccaactgccccgttgggatgccaa

SEQ ID NO: 2810252 - DNA, 25 bp, Homo sapien
taagataacggctggctgatcaggg

SEQ ID NO: 2810253 - DNA, 25 bp, Homo sapien
ttgtgactccaggagtggtttacac

SEQ ID NO: 2810254 - DNA, 25 bp, Homo sapien
gaacagaggttgagttggacatgac

SEQ ID NO: 2810255 - DNA, 25 bp, Homo sapien
tcttcaagtacagcatctgggagtg

SEQ ID NO: 2810256 - DNA, 25 bp, Homo sapien
gcctcatacattccatttttgaagt

SEQ ID NO: 2810257 - DNA, 25 bp, Homo sapien
tgaagttattttcccagtaagataa

SEQ ID NO: 2810258 - DNA, 25 bp, Homo sapien
ttgaagttattttcccagtaagata

SEQ ID NO: 2810259 - DNA, 25 bp, Homo sapien
atctagcctcatacattccattttt

SEQ ID NO: 2810260 - DNA, 25 bp, Homo sapien
ttagaccagtgacagcttgtgagag

SEQ ID NO: 2810261 - DNA, 25 bp, Homo sapien
cctgtgtctattagaccagtgacag

SEQ ID NO: 2810262 - DNA, 25 bp, Homo sapien
agagagaccacttttcaagggactg

SEQ ID NO: 2810263 - DNA, 25 bp, Homo sapien
gagagaccacttttcaagggactgg

SEQ ID NO: 2810264 - DNA, 25 bp, Homo sapien
caacaccatggatacatcttcagga

SEQ ID NO: 2810265 - DNA, 25 bp, Homo sapien
ccaaacaacaccatggatacatctt

SEQ ID NO: 2810266 - DNA, 25 bp, Homo sapien
acaccatggatacatcttcaggaaa

SEQ ID NO: 2810267 - DNA, 25 bp, Homo sapien
aacaacaccatggatacatcttcag

SEQ ID NO: 2810268 - DNA, 25 bp, Homo sapien
tttatcatcagcgtgacaggctgcc

SEQ ID NO: 2810269 - DNA, 25 bp, Homo sapien
ttagcccagcccagatagcaggatc

SEQ ID NO: 2810270 - DNA, 25 bp, Homo sapien
tgagtgttgttcactaaggccagtt

SEQ ID NO: 2810271 - DNA, 25 bp, Homo sapien
gcagaaacagcagataacagtgcca

SEQ ID NO: 2810272 - DNA, 25 bp, Homo sapien
tagccaactgatttaccgcagtgta

SEQ ID NO: 2810273 - DNA, 25 bp, Homo sapien
atcttctgctgaactgcttcccata

SEQ ID NO: 2810274 - DNA, 25 bp, Homo sapien
ttctgctgaactgcttcccatagcc

SEQ ID NO: 2810275 - DNA, 25 bp, Homo sapien
ctgatttaccgcagtgtacagtaat

SEQ ID NO: 2810276 - DNA, 25 bp, Homo sapien
tttccatgatttgagtccagaatat

SEQ ID NO: 2810277 - DNA, 25 bp, Homo sapien
tgatttgagtccagaatatgagcca

SEQ ID NO: 2810278 - DNA, 25 bp, Homo sapien
tttgagtccagaatatgagccacat

SEQ ID NO: 2810279 - DNA, 25 bp, Homo sapien
gagtccagaatatgagccacatttc

SEQ ID NO: 2810280 - DNA, 25 bp, Homo sapien
cattcacaactcctaaacttcttaa

SEQ ID NO: 2810281 - DNA, 25 bp, Homo sapien
acattcacaactcctaaacttctta

SEQ ID NO: 2810282 - DNA, 25 bp, Homo sapien
aattaagattgataagacctttcca

SEQ ID NO: 2810283 - DNA, 25 bp, Homo sapien
tgataagacctttccactaaatcac

SEQ ID NO: 2810284 - DNA, 25 bp, Homo sapien
tagatgtgcagaatattgggtccca

SEQ ID NO: 2810285 - DNA, 25 bp, Homo sapien
caaactgtggcttgtgcatctgcag

SEQ ID NO: 2810286 - DNA, 25 bp, Homo sapien
tgggtcccatctcaagcctacagaa

SEQ ID NO: 2810287 - DNA, 25 bp, Homo sapien
gcagcgtccacactctctaagaggt

SEQ ID NO: 2810288 - DNA, 25 bp, Homo sapien
tcagtaggaataacgaacaagactc

SEQ ID NO: 2810289 - DNA, 25 bp, Homo sapien
ggtgaatcagaattactccaggtct

SEQ ID NO: 2810290 - DNA, 25 bp, Homo sapien
taacgtagtcccagattgatggacc

SEQ ID NO: 2810291 - DNA, 25 bp, Homo sapien
gtctcaagaactagcaacccaagca

SEQ ID NO: 2810292 - DNA, 25 bp, Homo sapien
taatccttcatagagtgtcagtgac

SEQ ID NO: 2810293 - DNA, 25 bp, Homo sapien
gaatagactcctgaaaatatctgga

SEQ ID NO: 2810294 - DNA, 25 bp, Homo sapien
tcttgcagaagaataatgccatagt

SEQ ID NO: 2810295 - DNA, 25 bp, Homo sapien
tctagaacagcacaaccgtatatgg

SEQ ID NO: 2810296 - DNA, 25 bp, Homo sapien
tcgttgagcatactgtgcaacaact

SEQ ID NO: 2810297 - DNA, 25 bp, Homo sapien
caacaactcgagacaacagagacca

SEQ ID NO: 2810298 - DNA, 25 bp, Homo sapien
gcatttcgttgagcatactgtgcaa

SEQ ID NO: 2810299 - DNA, 25 bp, Homo sapien
gcatactgtgcaacaactcgagaca

SEQ ID NO: 2810300 - DNA, 25 bp, Homo sapien
caagtataattaggttccaggttca

SEQ ID NO: 2810301 - DNA, 25 bp, Homo sapien
tatcaagtataattaggttccaggt

SEQ ID NO: 2810302 - DNA, 25 bp, Homo sapien
tgtcaaatgcaaccatatcaagtat

SEQ ID NO: 2810303 - DNA, 25 bp, Homo sapien
ccatatcaagtataattaggttcca

SEQ ID NO: 2810304 - DNA, 25 bp, Homo sapien
gcttttgacagtgtagcatcctgca

SEQ ID NO: 2810305 - DNA, 25 bp, Homo sapien
gcacctctgataattactgtctttg

SEQ ID NO: 2810306 - DNA, 25 bp, Homo sapien
cctagagcacacagggcttgaaggc

SEQ ID NO: 2810307 - DNA, 25 bp, Homo sapien
taaatcgctgatgtaagaaggcacc

SEQ ID NO: 2810308 - DNA, 25 bp, Homo sapien
gattcaacaatagacaaggctctct

SEQ ID NO: 2810309 - DNA, 25 bp, Homo sapien
agatatgggctttgtcttgctccga

SEQ ID NO: 2810310 - DNA, 25 bp, Homo sapien
ccagagctgtcaagatatgggcttt

SEQ ID NO: 2810311 - DNA, 25 bp, Homo sapien
tgtcttggctacatccgtttttcct

SEQ ID NO: 2810312 - DNA, 25 bp, Homo sapien
tataaagccccttcatgaataaagc

SEQ ID NO: 2810313 - DNA, 25 bp, Homo sapien
cctatgatgtcttctaacacttcaa

SEQ ID NO: 2810314 - DNA, 25 bp, Homo sapien
gccaatgcaaaacctatgatgtctt

SEQ ID NO: 2810315 - DNA, 25 bp, Homo sapien
agctttatcatattcaccagtggaa

SEQ ID NO: 2810316 - DNA, 25 bp, Homo sapien
gaaagatatagagctcattccccat

SEQ ID NO: 2810317 - DNA, 25 bp, Homo sapien
taggaactagtcagcatatcagcag

SEQ ID NO: 2810318 - DNA, 25 bp, Homo sapien
taacgaggcttctactgttagagac

SEQ ID NO: 2810319 - DNA, 25 bp, Homo sapien
catctccagtcaacaaaccatgagt

SEQ ID NO: 2810320 - DNA, 25 bp, Homo sapien
aatctgccgtaatttcttattgcaa

SEQ ID NO: 2810321 - DNA, 25 bp, Homo sapien
caacattgtaagtatcttggtcttc

SEQ ID NO: 2810322 - DNA, 25 bp, Homo sapien
ttgcaacattgtaagtatcttggtc

SEQ ID NO: 2810323 - DNA, 25 bp, Homo sapien
taacaatctgccgtaatttcttatt

SEQ ID NO: 2810324 - DNA, 25 bp, Homo sapien
aattctactaattctttggtgctag

SEQ ID NO: 2810325 - DNA, 25 bp, Homo sapien
tattaagttggtaccacaaaagcac

SEQ ID NO: 2810326 - DNA, 25 bp, Homo sapien
gaaatgactatgtcacagtttaaag

SEQ ID NO: 2810327 - DNA, 25 bp, Homo sapien
ggtgctagttacaatagcttattca

SEQ ID NO: 2810328 - DNA, 25 bp, Homo sapien
tcctttttcagttgtagatgttcgt

SEQ ID NO: 2810329 - DNA, 25 bp, Homo sapien
gaaagctggggcataattctgaatt

SEQ ID NO: 2810330 - DNA, 25 bp, Homo sapien
aagtaacccaacattgtgaaagctg

SEQ ID NO: 2810331 - DNA, 25 bp, Homo sapien
tgtagatgttcgtttaagtaaccca

SEQ ID NO: 2810332 - DNA, 25 bp, Homo sapien
tgcaatgttgtgcagacccaatacg

SEQ ID NO: 2810333 - DNA, 25 bp, Homo sapien
tggaatagcattcatctggaggatg

SEQ ID NO: 2810334 - DNA, 25 bp, Homo sapien
ctggaggatgttgtactggtacagc

SEQ ID NO: 2810335 - DNA, 25 bp, Homo sapien
tacgcataacctaatgctccttcag

SEQ ID NO: 2810336 - DNA, 25 bp, Homo sapien
tcaaacgggataaaatgcagaaaac

SEQ ID NO: 2810337 - DNA, 25 bp, Homo sapien
tagaaatgtctaccatgcctactcc

SEQ ID NO: 2810338 - DNA, 25 bp, Homo sapien
caccattgccaaaggtcagaccaaa

SEQ ID NO: 2810339 - DNA, 25 bp, Homo sapien
ccagctcttgaaagttgtagaaaaa

SEQ ID NO: 2810340 - DNA, 25 bp, Homo sapien
gcctagcccaatatctattcattcc

SEQ ID NO: 2810341 - DNA, 25 bp, Homo sapien
taacaaggataacacttttctcatt

SEQ ID NO: 2810342 - DNA, 25 bp, Homo sapien
ctatgcctagcccaatatctattca

SEQ ID NO: 2810343 - DNA, 25 bp, Homo sapien
attcattcccttaacaaggataaca

SEQ ID NO: 2810344 - DNA, 25 bp, Homo sapien
catatttagttctgtagtgtgcctg

SEQ ID NO: 2810345 - DNA, 25 bp, Homo sapien
tagttctgtagtgtgcctgaagaga

SEQ ID NO: 2810346 - DNA, 25 bp, Homo sapien
atgcatatttagttctgtagtgtgc

SEQ ID NO: 2810347 - DNA, 25 bp, Homo sapien
atttagttctgtagtgtgcctgaag

SEQ ID NO: 2810348 - DNA, 25 bp, Homo sapien
ccagcacattaaataagatggatca

SEQ ID NO: 2810349 - DNA, 25 bp, Homo sapien
cacattaaataagatggatcaaggg

SEQ ID NO: 2810350 - DNA, 25 bp, Homo sapien
ggatcaagggattgagccattttga

SEQ ID NO: 2810351 - DNA, 25 bp, Homo sapien
ggattgagccattttgaaagcctca

SEQ ID NO: 2810352 - DNA, 25 bp, Homo sapien
tgaggtataacactcccaagttggt

SEQ ID NO: 2810353 - DNA, 25 bp, Homo sapien
ccaagttggtccatgcaacagcatt

SEQ ID NO: 2810354 - DNA, 25 bp, Homo sapien
actcccaagttggtccatgcaacag

SEQ ID NO: 2810355 - DNA, 25 bp, Homo sapien
atttgtgaggtataacactcccaag

SEQ ID NO: 2810356 - DNA, 25 bp, Homo sapien
ctggattgatttgatgaaacagtgc

SEQ ID NO: 2810357 - DNA, 25 bp, Homo sapien
ggattgatttgatgaaacagtgctg

SEQ ID NO: 2810358 - DNA, 25 bp, Homo sapien
tggattgatttgatgaaacagtgct

SEQ ID NO: 2810359 - DNA, 25 bp, Homo sapien
ttgaaatacacaatcttctaaaaat

SEQ ID NO: 2810360 - DNA, 25 bp, Homo sapien
tattgaagtgttactcaattctcac

SEQ ID NO: 2810361 - DNA, 25 bp, Homo sapien
aaaatacaaaacctgatgaaactga

SEQ ID NO: 2810362 - DNA, 25 bp, Homo sapien
gaaactgaactttgtttgaaataca

SEQ ID NO: 2810363 - DNA, 25 bp, Homo sapien
gcattccagtataagtgattattac

SEQ ID NO: 2810364 - DNA, 25 bp, Homo sapien
tattactgtcgagtctcactgcttt

SEQ ID NO: 2810365 - DNA, 25 bp, Homo sapien
cgagtctcactgcttttttcagaca

SEQ ID NO: 2810366 - DNA, 25 bp, Homo sapien
tgtaacatgcaaccacaccaagagc

SEQ ID NO: 2810367 - DNA, 25 bp, Homo sapien
caagatatatgtggttttatgtgaa

SEQ ID NO: 2810368 - DNA, 25 bp, Homo sapien
caacttcgagaaaagcattatgttt

SEQ ID NO: 2810369 - DNA, 25 bp, Homo sapien
gaatagcagcatgtatatcaagata

SEQ ID NO: 2810370 - DNA, 25 bp, Homo sapien
ttcttggaatagcagcatgtatatc

SEQ ID NO: 2810371 - DNA, 25 bp, Homo sapien
cagttttaatgcacgaccataacac

SEQ ID NO: 2810372 - DNA, 25 bp, Homo sapien
cacaccatgtattagatgtagacat

SEQ ID NO: 2810373 - DNA, 25 bp, Homo sapien
ttaattccaaggtcacaccatgtat

SEQ ID NO: 2810374 - DNA, 25 bp, Homo sapien
tgcttggcgataataattaattcca

SEQ ID NO: 2810375 - DNA, 25 bp, Homo sapien
cactttagatggtgcgacagcatac

SEQ ID NO: 2810376 - DNA, 25 bp, Homo sapien
tcactttagatggtgcgacagcata

SEQ ID NO: 2810377 - DNA, 25 bp, Homo sapien
tttagatggtgcgacagcatacaga

SEQ ID NO: 2810378 - DNA, 25 bp, Homo sapien
gatggtgcgacagcatacagacagg

SEQ ID NO: 2810379 - DNA, 25 bp, Homo sapien
caatcggttccaattaaagatactc

SEQ ID NO: 2810380 - DNA, 25 bp, Homo sapien
tgagcacctgaagccctatttccca

SEQ ID NO: 2810381 - DNA, 25 bp, Homo sapien
tcccaatcggttccaattaaagata

SEQ ID NO: 2810382 - DNA, 25 bp, Homo sapien
cactgaatgtacagcatattgagca

SEQ ID NO: 2810383 - DNA, 25 bp, Homo sapien
caagataatcaactagagctgcttt

SEQ ID NO: 2810384 - DNA, 25 bp, Homo sapien
atcataagatggcattcacccaaac

SEQ ID NO: 2810385 - DNA, 25 bp, Homo sapien
tttctatgtagtctacggcttttcc

SEQ ID NO: 2810386 - DNA, 25 bp, Homo sapien
tttccatcaagataatcaactagag

SEQ ID NO: 2810387 - DNA, 25 bp, Homo sapien
taagtatgcttctcctaacgattcc

SEQ ID NO: 2810388 - DNA, 25 bp, Homo sapien
gatcatctggtattgagctacagcc

SEQ ID NO: 2810389 - DNA, 25 bp, Homo sapien
taacgattcccaacaattgaagtcc

SEQ ID NO: 2810390 - DNA, 25 bp, Homo sapien
tcactggcttttgtgaaggacttca

SEQ ID NO: 2810391 - DNA, 25 bp, Homo sapien
cttttgagttactgttgttaggata

SEQ ID NO: 2810392 - DNA, 25 bp, Homo sapien
taagccaggcccattttgccgttcc

SEQ ID NO: 2810393 - DNA, 25 bp, Homo sapien
gaccagctttcaaatagtatagtcc

SEQ ID NO: 2810394 - DNA, 25 bp, Homo sapien
tagtatagtcctcgcctaagccagg

SEQ ID NO: 2810395 - DNA, 25 bp, Homo sapien
ggctttcctataacatccacgagct

SEQ ID NO: 2810396 - DNA, 25 bp, Homo sapien
gctccacacttaggtcaactgctgc

SEQ ID NO: 2810397 - DNA, 25 bp, Homo sapien
gattcagcatcagtgtcatctaatt

SEQ ID NO: 2810398 - DNA, 25 bp, Homo sapien
tcccactacgtctctataataatga

SEQ ID NO: 2810399 - DNA, 25 bp, Homo sapien
aaaactttgcccatatatgtatcca

SEQ ID NO: 2810400 - DNA, 25 bp, Homo sapien
agcagaaaactttgcccatatatgt

SEQ ID NO: 2810401 - DNA, 25 bp, Homo sapien
gaaaactttgcccatatatgtatcc

SEQ ID NO: 2810402 - DNA, 25 bp, Homo sapien
cagaaaactttgcccatatatgtat

SEQ ID NO: 2810403 - DNA, 25 bp, Homo sapien
ccagtatgttaatccaagttggtaa

SEQ ID NO: 2810404 - DNA, 25 bp, Homo sapien
taatgatattctgcaacttcggtat

SEQ ID NO: 2810405 - DNA, 25 bp, Homo sapien
tctgcaacttcggtatctttctcaa

SEQ ID NO: 2810406 - DNA, 25 bp, Homo sapien
tctcttcacccatgaaccagtatgt

SEQ ID NO: 2810407 - DNA, 25 bp, Homo sapien
tttctgcttgtagatagtccttttt

SEQ ID NO: 2810408 - DNA, 25 bp, Homo sapien
tcaaagcctcaagggcatgaacttc

SEQ ID NO: 2810409 - DNA, 25 bp, Homo sapien
gaaatgaatcaaagcctcaagggca

SEQ ID NO: 2810410 - DNA, 25 bp, Homo sapien
gcttgtagatagtcctttttggtga

SEQ ID NO: 2810411 - DNA, 25 bp, Homo sapien
gggtaagaagagagaaggtcttcca

SEQ ID NO: 2810412 - DNA, 25 bp, Homo sapien
ggtcagggtaagaagagagaaggtc

SEQ ID NO: 2810413 - DNA, 25 bp, Homo sapien
ctaggtcagggtaagaagagagaag

SEQ ID NO: 2810414 - DNA, 25 bp, Homo sapien
tcagggtaagaagagagaaggtctt

SEQ ID NO: 2810415 - DNA, 25 bp, Homo sapien
aatgaacctttgttccgataggcca

SEQ ID NO: 2810416 - DNA, 25 bp, Homo sapien
gcagcttcatcaaatgaacctttgt

SEQ ID NO: 2810417 - DNA, 25 bp, Homo sapien
ctttgttccgataggccaagctttt

SEQ ID NO: 2810418 - DNA, 25 bp, Homo sapien
aacctttgttccgataggccaagct

SEQ ID NO: 2810419 - DNA, 25 bp, Homo sapien
gataaagactgttaccagacgcacc

SEQ ID NO: 2810420 - DNA, 25 bp, Homo sapien
gacaaagattcctctgataaagact

SEQ ID NO: 2810421 - DNA, 25 bp, Homo sapien
cctctgaagagtcataatctgagag

SEQ ID NO: 2810422 - DNA, 25 bp, Homo sapien
agcgtacgaattgcttcctctgaag

SEQ ID NO: 2810423 - DNA, 25 bp, Homo sapien
aattaagggtatccaaatgaagaca

SEQ ID NO: 2810424 - DNA, 25 bp, Homo sapien
caaatagggttggtcacccttatat

SEQ ID NO: 2810425 - DNA, 25 bp, Homo sapien
tatatgtcaacccaaaaagtatcaa

SEQ ID NO: 2810426 - DNA, 25 bp, Homo sapien
gggttggtcacccttatatgtcaac

SEQ ID NO: 2810427 - DNA, 25 bp, Homo sapien
ggtcacccttatatgtcaacccaaa

SEQ ID NO: 2810428 - DNA, 25 bp, Homo sapien
ttctgccagatgataccatccactt

SEQ ID NO: 2810429 - DNA, 25 bp, Homo sapien
aacagcttctttaggtctatgcatt

SEQ ID NO: 2810430 - DNA, 25 bp, Homo sapien
cagcttctttaggtctatgcatttt

SEQ ID NO: 2810431 - DNA, 25 bp, Homo sapien
agaacagcttctttaggtctatgca

SEQ ID NO: 2810432 - DNA, 25 bp, Homo sapien
gaggcctggaccactttttgaatcc

SEQ ID NO: 2810433 - DNA, 25 bp, Homo sapien
ttgtcttgtaatgctttaatgccta

SEQ ID NO: 2810434 - DNA, 25 bp, Homo sapien
tctgttaggttcctaacagcatctt

SEQ ID NO: 2810435 - DNA, 25 bp, Homo sapien
ctaatctacaacaatactgctgccc

SEQ ID NO: 2810436 - DNA, 25 bp, Homo sapien
agtacagttctcagtatttttccct

SEQ ID NO: 2810437 - DNA, 25 bp, Homo sapien
ttctcgtcagagtccaccttcttct

SEQ ID NO: 2810438 - DNA, 25 bp, Homo sapien
gtcctcctctgatggtaaccattcc

SEQ ID NO: 2810439 - DNA, 25 bp, Homo sapien
tttccctgtcgtcttgtgttgcttc

SEQ ID NO: 2810440 - DNA, 25 bp, Homo sapien
tagctctgtgtaatatagcctgacc

SEQ ID NO: 2810441 - DNA, 25 bp, Homo sapien
tgtgacataacatcaacactgaggc

SEQ ID NO: 2810442 - DNA, 25 bp, Homo sapien
tttgttcacctcaagagagtagggc

SEQ ID NO: 2810443 - DNA, 25 bp, Homo sapien
taactggtggaataccagccctgga

SEQ ID NO: 2810444 - DNA, 25 bp, Homo sapien
acttctaatggatactgtacagtag

SEQ ID NO: 2810445 - DNA, 25 bp, Homo sapien
aatgcaaacaaagcacttctaatgg

SEQ ID NO: 2810446 - DNA, 25 bp, Homo sapien
tcacaggccttcttcaatctagcag

SEQ ID NO: 2810447 - DNA, 25 bp, Homo sapien
cagtaggatagatgtttatcattcc

SEQ ID NO: 2810448 - DNA, 25 bp, Homo sapien
tacactacattctagtagtagtaaa

SEQ ID NO: 2810449 - DNA, 25 bp, Homo sapien
atacactacattctagtagtagtaa

SEQ ID NO: 2810450 - DNA, 25 bp, Homo sapien
aatgcctataaagtacttggtgatc

SEQ ID NO: 2810451 - DNA, 25 bp, Homo sapien
cttatctgataatcccagtgcattc

SEQ ID NO: 2810452 - DNA, 25 bp, Homo sapien
ggtgatcttcactaggaatcttatc

SEQ ID NO: 2810453 - DNA, 25 bp, Homo sapien
ggaatcttatctgataatcccagtg

SEQ ID NO: 2810454 - DNA, 25 bp, Homo sapien
taaacagtggaattgttaaacctca

SEQ ID NO: 2810455 - DNA, 25 bp, Homo sapien
taattcagtactcttagttcagaag

SEQ ID NO: 2810456 - DNA, 25 bp, Homo sapien
agactccgtatgagactacaggcca

SEQ ID NO: 2810457 - DNA, 25 bp, Homo sapien
gaaattctgataccatgagtaccaa

SEQ ID NO: 2810458 - DNA, 25 bp, Homo sapien
tttcatgaacaaacttgaggaataa

SEQ ID NO: 2810459 - DNA, 25 bp, Homo sapien
tcaacttgtgccatgttcgagccac

SEQ ID NO: 2810460 - DNA, 25 bp, Homo sapien
tctccatagttgatgaagctcttca

SEQ ID NO: 2810461 - DNA, 25 bp, Homo sapien
tgctgagtttcattattctggtcct

SEQ ID NO: 2810462 - DNA, 25 bp, Homo sapien
tctgtactttcagccaggaactgag

SEQ ID NO: 2810463 - DNA, 25 bp, Homo sapien
cacaagtttcttgcagacatcacac

SEQ ID NO: 2810464 - DNA, 25 bp, Homo sapien
gagcttttggtaaacaccaggcaag

SEQ ID NO: 2810465 - DNA, 25 bp, Homo sapien
aagatccaggagcttttggtaaaca

SEQ ID NO: 2810466 - DNA, 25 bp, Homo sapien
tatttctcatacaagtttgctaacc

SEQ ID NO: 2810467 - DNA, 25 bp, Homo sapien
ccttagcatttatgtgattatattt

SEQ ID NO: 2810468 - DNA, 25 bp, Homo sapien
ggtctggctctaattcagcagcttt

SEQ ID NO: 2810469 - DNA, 25 bp, Homo sapien
agtaattggtctggctctaattcag

SEQ ID NO: 2810470 - DNA, 25 bp, Homo sapien
tctgggcctgatcaggttgttctag

SEQ ID NO: 2810471 - DNA, 25 bp, Homo sapien
gcactctgggcctgatcaggttgtt

SEQ ID NO: 2810472 - DNA, 25 bp, Homo sapien
gcaacgccaataaaaacccaggcat

SEQ ID NO: 2810473 - DNA, 25 bp, Homo sapien
acccaggcattatagttatttttct

SEQ ID NO: 2810474 - DNA, 25 bp, Homo sapien
cccaggcattatagttatttttctc

SEQ ID NO: 2810475 - DNA, 25 bp, Homo sapien
ctgcagcaacgccaataaaaaccca

SEQ ID NO: 2810476 - DNA, 25 bp, Homo sapien
gcatctctagcactttttagagcag

SEQ ID NO: 2810477 - DNA, 25 bp, Homo sapien
tgcatctctagcactttttagagca

SEQ ID NO: 2810478 - DNA, 25 bp, Homo sapien
atctacagtaatacctacccaatcg

SEQ ID NO: 2810479 - DNA, 25 bp, Homo sapien
cagtaatacctacccaatcgtaaat

SEQ ID NO: 2810480 - DNA, 25 bp, Homo sapien
aagcctgagtaaatctacagtaata

SEQ ID NO: 2810481 - DNA, 25 bp, Homo sapien
atcgtaaatgttccaacaaacttag

SEQ ID NO: 2810482 - DNA, 25 bp, Homo sapien
aatttcaatgctgatttcacaattt

SEQ ID NO: 2810483 - DNA, 25 bp, Homo sapien
atcttgattggagtaggtaacaaat

SEQ ID NO: 2810484 - DNA, 25 bp, Homo sapien
acaaatttcaatgctgatttcacaa

SEQ ID NO: 2810485 - DNA, 25 bp, Homo sapien
tatatatttataggtgaaagcttca

SEQ ID NO: 2810486 - DNA, 25 bp, Homo sapien
tattcttcccgaattgaatttgatt

SEQ ID NO: 2810487 - DNA, 25 bp, Homo sapien
tattaccacctctatattcttcccg

SEQ ID NO: 2810488 - DNA, 25 bp, Homo sapien
tttaccaattattaccacctctata

SEQ ID NO: 2810489 - DNA, 25 bp, Homo sapien
acctctatattcttcccgaattgaa

SEQ ID NO: 2810490 - DNA, 25 bp, Homo sapien
gtgagttacggcacagactcttcaa

SEQ ID NO: 2810491 - DNA, 25 bp, Homo sapien
gctgcttgagtaacaattctgctac

SEQ ID NO: 2810492 - DNA, 25 bp, Homo sapien
cagacagagcatttagtgagttacg

SEQ ID NO: 2810493 - DNA, 25 bp, Homo sapien
tacgtttttgcatgctcccgcagat

SEQ ID NO: 2810494 - DNA, 25 bp, Homo sapien
aggcaccgccctattcaacttaagt

SEQ ID NO: 2810495 - DNA, 25 bp, Homo sapien
taggatcccttgtgcaaaaccgaca

SEQ ID NO: 2810496 - DNA, 25 bp, Homo sapien
agtaccatttcaatcgcctttagga

SEQ ID NO: 2810497 - DNA, 25 bp, Homo sapien
gcttgcgcggcccaaaatgaacagc

SEQ ID NO: 2810498 - DNA, 25 bp, Homo sapien
gaggctgcaatgagagcgcatgcgc

SEQ ID NO: 2810499 - DNA, 25 bp, Homo sapien
gctgcaatgagagcgcatgcgcctt

SEQ ID NO: 2810500 - DNA, 25 bp, Homo sapien
ggctgcaatgagagcgcatgcgcct

SEQ ID NO: 2810501 - DNA, 25 bp, Homo sapien
ctgcaatgagagcgcatgcgccttt

SEQ ID NO: 2810502 - DNA, 25 bp, Homo sapien
gcgactccttcgtaagtaccgcgag

SEQ ID NO: 2810503 - DNA, 25 bp, Homo sapien
gaagctcggcgttactatcaagcaa

SEQ ID NO: 2810504 - DNA, 25 bp, Homo sapien
gaatttctctgttgcgcatgtgcgc

SEQ ID NO: 2810505 - DNA, 25 bp, Homo sapien
gctctgctagggagagaacgccaga

SEQ ID NO: 2810506 - DNA, 25 bp, Homo sapien
cgactaatgaactttcagtccatac

SEQ ID NO: 2810507 - DNA, 25 bp, Homo sapien
cacgactaatgaactttcagtccat

SEQ ID NO: 2810508 - DNA, 25 bp, Homo sapien
acgactaatgaactttcagtccata

SEQ ID NO: 2810509 - DNA, 25 bp, Homo sapien
ctccataaaagcgtgttagctttcc

SEQ ID NO: 2810510 - DNA, 25 bp, Homo sapien
tccataaaagcgtgttagctttcca

SEQ ID NO: 2810511 - DNA, 25 bp, Homo sapien
cataaaagcgtgttagctttccaaa

SEQ ID NO: 2810512 - DNA, 25 bp, Homo sapien
catctccataaaagcgtgttagctt

SEQ ID NO: 2810513 - DNA, 25 bp, Homo sapien
tatttaacagccactggaatctgct

SEQ ID NO: 2810514 - DNA, 25 bp, Homo sapien
gacagtatctggtaggactagtccc

SEQ ID NO: 2810515 - DNA, 25 bp, Homo sapien
acaccacttgattagagcttctgag

SEQ ID NO: 2810516 - DNA, 25 bp, Homo sapien
caatggtgcaatcccggtttcaagt

SEQ ID NO: 2810517 - DNA, 25 bp, Homo sapien
gctcaaatgtcaccatcgcacaagg

SEQ ID NO: 2810518 - DNA, 25 bp, Homo sapien
tggatactcaaagctcccactggtt

SEQ ID NO: 2810519 - DNA, 25 bp, Homo sapien
agtcattacaatagcctgtgggccc

SEQ ID NO: 2810520 - DNA, 25 bp, Homo sapien
tgtgggccccaaataatctggtagc

SEQ ID NO: 2810521 - DNA, 25 bp, Homo sapien
gctgggctagaatagtttgcaacct

SEQ ID NO: 2810522 - DNA, 25 bp, Homo sapien
catctctaccgctgaagtgtgaaag

SEQ ID NO: 2810523 - DNA, 25 bp, Homo sapien
tatttacctaatagtggcgttgctg

SEQ ID NO: 2810524 - DNA, 25 bp, Homo sapien
gcaaccttgccgcaaattggaatca

SEQ ID NO: 2810525 - DNA, 25 bp, Homo sapien
gcttcgtcgcgcctgttacggtcct

SEQ ID NO: 2810526 - DNA, 25 bp, Homo sapien
cgtcgcgggcttcgtcgcgcctgtt

SEQ ID NO: 2810527 - DNA, 25 bp, Homo sapien
tcgcgcctgttacggtcctgggcgt

SEQ ID NO: 2810528 - DNA, 25 bp, Homo sapien
tcgcgggcttcgtcgcgcctgttac

SEQ ID NO: 2810529 - DNA, 25 bp, Homo sapien
cctcattatcaccatgctcggcggg

SEQ ID NO: 2810530 - DNA, 25 bp, Homo sapien
cttggtggtcagagacgggtcatct

SEQ ID NO: 2810531 - DNA, 25 bp, Homo sapien
gcaacctccagggaactcgaggcct

SEQ ID NO: 2810532 - DNA, 25 bp, Homo sapien
ttgctcctgcgaaagtgccttctag

SEQ ID NO: 2810533 - DNA, 25 bp, Homo sapien
gaatccaaggtttgtccttccacag

SEQ ID NO: 2810534 - DNA, 25 bp, Homo sapien
tgagcatgtggacgtactacaggaa

SEQ ID NO: 2810535 - DNA, 25 bp, Homo sapien
tgactttgagcatgtggacgtacta

SEQ ID NO: 2810536 - DNA, 25 bp, Homo sapien
catgtggacgtactacaggaatcca

SEQ ID NO: 2810537 - DNA, 25 bp, Homo sapien
agttccagggcctagtaagggcagt

SEQ ID NO: 2810538 - DNA, 25 bp, Homo sapien
taggaaatccagattggtggacacc

SEQ ID NO: 2810539 - DNA, 25 bp, Homo sapien
cctagtaagggcagtattatcaccc

SEQ ID NO: 2810540 - DNA, 25 bp, Homo sapien
gagtaggaaatccagattggtggac

SEQ ID NO: 2810541 - DNA, 25 bp, Homo sapien
ctatcaaccagggtcatctgccggc

SEQ ID NO: 2810542 - DNA, 25 bp, Homo sapien
gcgctgttggccagagatctctatc

SEQ ID NO: 2810543 - DNA, 25 bp, Homo sapien
caagtacacgagtatgcctgccagt

SEQ ID NO: 2810544 - DNA, 25 bp, Homo sapien
gtaagttctgttctcgccgcgcagg

SEQ ID NO: 2810545 - DNA, 25 bp, Homo sapien
accttgaaacttgggccacacctga

SEQ ID NO: 2810546 - DNA, 25 bp, Homo sapien
tcctggagatactcgcctcctggag

SEQ ID NO: 2810547 - DNA, 25 bp, Homo sapien
gacagccacgtgcagtctcagaact

SEQ ID NO: 2810548 - DNA, 25 bp, Homo sapien
tctgtgtcgagaatttgcagcacct

SEQ ID NO: 2810549 - DNA, 25 bp, Homo sapien
gcattctgataatgtgtaggcaaag

SEQ ID NO: 2810550 - DNA, 25 bp, Homo sapien
ttgagataagcattctgataatgtg

SEQ ID NO: 2810551 - DNA, 25 bp, Homo sapien
taagcattctgataatgtgtaggca

SEQ ID NO: 2810552 - DNA, 25 bp, Homo sapien
gataagcattctgataatgtgtagg

SEQ ID NO: 2810553 - DNA, 25 bp, Homo sapien
taccacctgatcaatttgtgttctt

SEQ ID NO: 2810554 - DNA, 25 bp, Homo sapien
tgaaggctgcatgcccaactctgaa

SEQ ID NO: 2810555 - DNA, 25 bp, Homo sapien
aggctgcatgcccaactctgaaggc

SEQ ID NO: 2810556 - DNA, 25 bp, Homo sapien
cctgatcaatttgtgttctttgagt

SEQ ID NO: 2810557 - DNA, 25 bp, Homo sapien
cacagagccgggagcattctttcaa

SEQ ID NO: 2810558 - DNA, 25 bp, Homo sapien
tagctgcacaaacctaaaacttggg

SEQ ID NO: 2810559 - DNA, 25 bp, Homo sapien
gattggacactctactgatcttgcc

SEQ ID NO: 2810560 - DNA, 25 bp, Homo sapien
gaattctatgacctggaaactcccc

SEQ ID NO: 2810561 - DNA, 25 bp, Homo sapien
catgggagcttcttagacatgcaga

SEQ ID NO: 2810562 - DNA, 25 bp, Homo sapien
gaccagcaactttggtgtcacatgg

SEQ ID NO: 2810563 - DNA, 25 bp, Homo sapien
gacatgcagaatcttgtcaccccaa

SEQ ID NO: 2810564 - DNA, 25 bp, Homo sapien
tccagtttcagtccataatgagagc

SEQ ID NO: 2810565 - DNA, 25 bp, Homo sapien
atggacgaccgtgtatagtttgccc

SEQ ID NO: 2810566 - DNA, 25 bp, Homo sapien
tttttaacctggttcttctgcagca

SEQ ID NO: 2810567 - DNA, 25 bp, Homo sapien
tatcaagaacatttgacatgtcaga

SEQ ID NO: 2810568 - DNA, 25 bp, Homo sapien
gactcttcagagtctatcaagaaca

SEQ ID NO: 2810569 - DNA, 25 bp, Homo sapien
gagagatgtaaagtctcctattcag

SEQ ID NO: 2810570 - DNA, 25 bp, Homo sapien
cagtgagccaatgttctttgaatgc

SEQ ID NO: 2810571 - DNA, 25 bp, Homo sapien
tgtgatcaaggcagatcttgaagta

SEQ ID NO: 2810572 - DNA, 25 bp, Homo sapien
aacttaaccactgttaagtgatctg

SEQ ID NO: 2810573 - DNA, 25 bp, Homo sapien
tcttgttcattaaaagtatgtagtc

SEQ ID NO: 2810574 - DNA, 25 bp, Homo sapien
cttatattataaaccacagtgtaaa

SEQ ID NO: 2810575 - DNA, 25 bp, Homo sapien
tcattaaaagtatgtagtcagtaca

SEQ ID NO: 2810576 - DNA, 25 bp, Homo sapien
tataaaccacagtgtaaagtctaac

SEQ ID NO: 2810577 - DNA, 25 bp, Homo sapien
gaaagcagagcaattcagaatatgt

SEQ ID NO: 2810578 - DNA, 25 bp, Homo sapien
tagataactcttaagttctgttcag

SEQ ID NO: 2810579 - DNA, 25 bp, Homo sapien
gagttttgtcagatgaaatgtgcca

SEQ ID NO: 2810580 - DNA, 25 bp, Homo sapien
cattttaatagtagcccccttctct

SEQ ID NO: 2810581 - DNA, 25 bp, Homo sapien
tcatttcagctgattggtcaaacac

SEQ ID NO: 2810582 - DNA, 25 bp, Homo sapien
ttcatttcagctgattggtcaaaca

SEQ ID NO: 2810583 - DNA, 25 bp, Homo sapien
taaaacttggatgttattactctgc

SEQ ID NO: 2810584 - DNA, 25 bp, Homo sapien
caaacataggctccgaaagcacagg

SEQ ID NO: 2810585 - DNA, 25 bp, Homo sapien
gaaatgtctggcttctccggcaatg

SEQ ID NO: 2810586 - DNA, 25 bp, Homo sapien
gccttatggattcttcttcctggaa

SEQ ID NO: 2810587 - DNA, 25 bp, Homo sapien
atttattttaagactggatctcact

SEQ ID NO: 2810588 - DNA, 25 bp, Homo sapien
ttatttattttaagactggatctca

SEQ ID NO: 2810589 - DNA, 25 bp, Homo sapien
ttaagactggatctcactattttgc

SEQ ID NO: 2810590 - DNA, 25 bp, Homo sapien
tgcttcagcctcccccgtcagcctc

SEQ ID NO: 2810591 - DNA, 25 bp, Homo sapien
aaattagtgctgcatatgaagcata

SEQ ID NO: 2810592 - DNA, 25 bp, Homo sapien
aagcatatattatgctagttaaagc

SEQ ID NO: 2810593 - DNA, 25 bp, Homo sapien
tatattatgctagttaaagcagtct

SEQ ID NO: 2810594 - DNA, 25 bp, Homo sapien
attatgctagttaaagcagtctttg

SEQ ID NO: 2810595 - DNA, 25 bp, Homo sapien
caaattgatagcatgcctttgaatc

SEQ ID NO: 2810596 - DNA, 25 bp, Homo sapien
tgatagcatgcctttgaatcccact

SEQ ID NO: 2810597 - DNA, 25 bp, Homo sapien
ctagaaagaatcaaattgatagcat

SEQ ID NO: 2810598 - DNA, 25 bp, Homo sapien
gaatcaaattgatagcatgcctttg

SEQ ID NO: 2810599 - DNA, 25 bp, Homo sapien
ctttcatgcatccacaaagcatatc

SEQ ID NO: 2810600 - DNA, 25 bp, Homo sapien
atccacaaagcatatccccttgcat

SEQ ID NO: 2810601 - DNA, 25 bp, Homo sapien
ttcatgcatccacaaagcatatccc

SEQ ID NO: 2810602 - DNA, 25 bp, Homo sapien
tgcatccacaaagcatatccccttg

SEQ ID NO: 2810603 - DNA, 25 bp, Homo sapien
ttttacttccccacacaaagctcca

SEQ ID NO: 2810604 - DNA, 25 bp, Homo sapien
cacaaagctccatctgagacaggca

SEQ ID NO: 2810605 - DNA, 25 bp, Homo sapien
atctgagacaggcagtttgacaatt

SEQ ID NO: 2810606 - DNA, 25 bp, Homo sapien
ccacacaaagctccatctgagacag

SEQ ID NO: 2810607 - DNA, 25 bp, Homo sapien
tcattatcagtcaaagtaaaaaggc

SEQ ID NO: 2810608 - DNA, 25 bp, Homo sapien
tccctgaacatgtcataggccatta

SEQ ID NO: 2810609 - DNA, 25 bp, Homo sapien
tgcagattggcccttctgagcaaag

SEQ ID NO: 2810610 - DNA, 25 bp, Homo sapien
tatatccttctagagagacatgtac

SEQ ID NO: 2810611 - DNA, 25 bp, Homo sapien
caacagctctgggttgtttatggga

SEQ ID NO: 2810612 - DNA, 25 bp, Homo sapien
taactcaattggagccccattttct

SEQ ID NO: 2810613 - DNA, 25 bp, Homo sapien
tgtatccagccatgtcgggaatctc

SEQ ID NO: 2810614 - DNA, 25 bp, Homo sapien
ttggtttaactcaattggagcccca

SEQ ID NO: 2810615 - DNA, 25 bp, Homo sapien
taatccacgaattaatgttgctcga

SEQ ID NO: 2810616 - DNA, 25 bp, Homo sapien
tcggcgcattaacttccctcagcag

SEQ ID NO: 2810617 - DNA, 25 bp, Homo sapien
tcagcagacgaccagatatgtccct

SEQ ID NO: 2810618 - DNA, 25 bp, Homo sapien
ccttagctctaaaagtctgcatgca

SEQ ID NO: 2810619 - DNA, 25 bp, Homo sapien
tgggcatacacgcaagcaccaccat

SEQ ID NO: 2810620 - DNA, 25 bp, Homo sapien
gggcatacacgcaagcaccaccatg

SEQ ID NO: 2810621 - DNA, 25 bp, Homo sapien
taactgggcatacacgcaagcacca

SEQ ID NO: 2810622 - DNA, 25 bp, Homo sapien
gagtaactgggcatacacgcaagca

SEQ ID NO: 2810623 - DNA, 25 bp, Homo sapien
gataatcttaggatggtgggaaatt

SEQ ID NO: 2810624 - DNA, 25 bp, Homo sapien
catctttaaactcatctacaaggtc

SEQ ID NO: 2810625 - DNA, 25 bp, Homo sapien
caaggtccatgattgctttctggat

SEQ ID NO: 2810626 - DNA, 25 bp, Homo sapien
ctgattagactgtgataatcttagg

SEQ ID NO: 2810627 - DNA, 25 bp, Homo sapien
cccacatatccacccaacaggtttg

SEQ ID NO: 2810628 - DNA, 25 bp, Homo sapien
tccacccaacaggtttgattggcat

SEQ ID NO: 2810629 - DNA, 25 bp, Homo sapien
tatccacccaacaggtttgattggc

SEQ ID NO: 2810630 - DNA, 25 bp, Homo sapien
tcttcaacacctgcccacatatcca

SEQ ID NO: 2810631 - DNA, 25 bp, Homo sapien
tagtgaaagatgagggtagccttcc

SEQ ID NO: 2810632 - DNA, 25 bp, Homo sapien
tgcttgggttcctagtccttaacaa

SEQ ID NO: 2810633 - DNA, 25 bp, Homo sapien
tctgccattagtgaaagatgagggt

SEQ ID NO: 2810634 - DNA, 25 bp, Homo sapien
ctgggtaatgcttgtcctagtctgc

SEQ ID NO: 2810635 - DNA, 25 bp, Homo sapien
ccaaaagcagaaaccgatgagggag

SEQ ID NO: 2810636 - DNA, 25 bp, Homo sapien
caaaagcagaaaccgatgagggagg

SEQ ID NO: 2810637 - DNA, 25 bp, Homo sapien
aggaaaagcagctgaccaaagttcc

SEQ ID NO: 2810638 - DNA, 25 bp, Homo sapien
aagcagctgaccaaagttccctcac

SEQ ID NO: 2810639 - DNA, 25 bp, Homo sapien
gaaaagcagctgaccaaagttccct

SEQ ID NO: 2810640 - DNA, 25 bp, Homo sapien
aaaagcagctgaccaaagttccctc

SEQ ID NO: 2810641 - DNA, 25 bp, Homo sapien
aggaatctgcttctccaagaggact

SEQ ID NO: 2810642 - DNA, 25 bp, Homo sapien
ttaaccaggttcccacaggaatctg

SEQ ID NO: 2810643 - DNA, 25 bp, Homo sapien
cacaggaatctgcttctccaagagg

SEQ ID NO: 2810644 - DNA, 25 bp, Homo sapien
taaccaggttcccacaggaatctgc

SEQ ID NO: 2810645 - DNA, 25 bp, Homo sapien
agtgcacatagatcgactgcaaagg

SEQ ID NO: 2810646 - DNA, 25 bp, Homo sapien
tctgagaacagtgcacatagatcga

SEQ ID NO: 2810647 - DNA, 25 bp, Homo sapien
gaacagtgcacatagatcgactgca

SEQ ID NO: 2810648 - DNA, 25 bp, Homo sapien
tggctctgagaacagtgcacataga

SEQ ID NO: 2810649 - DNA, 25 bp, Homo sapien
caaacaatagaatatccatgtggag

SEQ ID NO: 2810650 - DNA, 25 bp, Homo sapien
ggtagattaaatacctacatgtgag

SEQ ID NO: 2810651 - DNA, 25 bp, Homo sapien
tattgacaggataaccaagtagacg

SEQ ID NO: 2810652 - DNA, 25 bp, Homo sapien
tgcaaagggccaagacaagacatat

SEQ ID NO: 2810653 - DNA, 25 bp, Homo sapien
gatttctttgaaccatattcagaga

SEQ ID NO: 2810654 - DNA, 25 bp, Homo sapien
aggtcaccaatctttcctaaatggc

SEQ ID NO: 2810655 - DNA, 25 bp, Homo sapien
gactgtggctcttcgatgatccttg

SEQ ID NO: 2810656 - DNA, 25 bp, Homo sapien
cttgtagttaatgccatcatgcaga

SEQ ID NO: 2810657 - DNA, 25 bp, Homo sapien
gaaagcggcagacgtggtaaagcac

SEQ ID NO: 2810658 - DNA, 25 bp, Homo sapien
ccccaaggcgacattagcaaattaa

SEQ ID NO: 2810659 - DNA, 25 bp, Homo sapien
cagctgtagcgcatgttgacaaatg

SEQ ID NO: 2810660 - DNA, 25 bp, Homo sapien
aaagcactttcggtcaaggccaaga

SEQ ID NO: 2810661 - DNA, 25 bp, Homo sapien
cgccctgcccttggatttgagatca

SEQ ID NO: 2810662 - DNA, 25 bp, Homo sapien
ttgagatcatgtacgtacgcgccgc

SEQ ID NO: 2810663 - DNA, 25 bp, Homo sapien
tctggttacggccttgcgagttgaa

SEQ ID NO: 2810664 - DNA, 25 bp, Homo sapien
caaacttgctgcaggcggattggcg

SEQ ID NO: 2810665 - DNA, 25 bp, Homo sapien
ggccgtcggggcttatccgcactta

SEQ ID NO: 2810666 - DNA, 25 bp, Homo sapien
ggtccatccacatcgtggcgctggg

SEQ ID NO: 2810667 - DNA, 25 bp, Homo sapien
gggggacacattccaccaggacaac

SEQ ID NO: 2810668 - DNA, 25 bp, Homo sapien
gcgcgctgaccgtgcttcccttctc

SEQ ID NO: 2810669 - DNA, 25 bp, Homo sapien
gagtgtccgcgttacatgggtcaaa

SEQ ID NO: 2810670 - DNA, 25 bp, Homo sapien
ggtgttcaccgagtatcaggccagt

SEQ ID NO: 2810671 - DNA, 25 bp, Homo sapien
caggccagtgcgtttgggaatgtca

SEQ ID NO: 2810672 - DNA, 25 bp, Homo sapien
tcctttgtttcactgggcagggaac

SEQ ID NO: 2810673 - DNA, 25 bp, Homo sapien
gccttgaagttgaaatgaggtagct

SEQ ID NO: 2810674 - DNA, 25 bp, Homo sapien
tgtgttgcataaccccgagaggaaa

SEQ ID NO: 2810675 - DNA, 25 bp, Homo sapien
gccttaccctggatccttgccttat

SEQ ID NO: 2810676 - DNA, 25 bp, Homo sapien
tgtgctgcagattcattagatgtag

SEQ ID NO: 2810677 - DNA, 25 bp, Homo sapien
ggacctgttagtcagacctagctat

SEQ ID NO: 2810678 - DNA, 25 bp, Homo sapien
tgtaaaatatcaacccaggccaggc

SEQ ID NO: 2810679 - DNA, 25 bp, Homo sapien
ttagctcaacagcttttggacctgt

SEQ ID NO: 2810680 - DNA, 25 bp, Homo sapien
tggactccatgctggtcgacagaaa

SEQ ID NO: 2810681 - DNA, 25 bp, Homo sapien
ggcgaagaatggtgcatttcctaaa

SEQ ID NO: 2810682 - DNA, 25 bp, Homo sapien
catttatagtgatgagcagtgagta

SEQ ID NO: 2810683 - DNA, 25 bp, Homo sapien
ttcaagcagattatatactagtggc

SEQ ID NO: 2810684 - DNA, 25 bp, Homo sapien
tatcgatgactgtgagaaacttttg

SEQ ID NO: 2810685 - DNA, 25 bp, Homo sapien
tattcaagagagtagctgcgtggga

SEQ ID NO: 2810686 - DNA, 25 bp, Homo sapien
tggctttctcgagtattcaagagag

SEQ ID NO: 2810687 - DNA, 25 bp, Homo sapien
gcgtgggatggcatgcacttataat

SEQ ID NO: 2810688 - DNA, 25 bp, Homo sapien
cagccacacaattgtagtgcttggc

SEQ ID NO: 2810689 - DNA, 25 bp, Homo sapien
tgctccactcgattcattttttaaa

SEQ ID NO: 2810690 - DNA, 25 bp, Homo sapien
aattccttcttgagtggatagttta

SEQ ID NO: 2810691 - DNA, 25 bp, Homo sapien
tgcatacgtataaatggtactgacg

SEQ ID NO: 2810692 - DNA, 25 bp, Homo sapien
ttaagttgactctatgtcattgctg

SEQ ID NO: 2810693 - DNA, 25 bp, Homo sapien
gagatcgaatcagtttctgcattct

SEQ ID NO: 2810694 - DNA, 25 bp, Homo sapien
gggtcacctgtgatttagggttgat

SEQ ID NO: 2810695 - DNA, 25 bp, Homo sapien
gatttagggttgattggactcacac

SEQ ID NO: 2810696 - DNA, 25 bp, Homo sapien
ctagtttatggagatcgaatcagtt

SEQ ID NO: 2810697 - DNA, 25 bp, Homo sapien
taaagactgacttacggccaggtgc

SEQ ID NO: 2810698 - DNA, 25 bp, Homo sapien
taagttttaaacaagtcatgagccc

SEQ ID NO: 2810699 - DNA, 25 bp, Homo sapien
tcatgagccctctagtgaaagattt

SEQ ID NO: 2810700 - DNA, 25 bp, Homo sapien
ccccagccaaattgggtggttgcca

SEQ ID NO: 2810701 - DNA, 25 bp, Homo sapien
tgcttaaagacgtttggccactccg

SEQ ID NO: 2810702 - DNA, 25 bp, Homo sapien
cctgtctgctgtcacagtatactga

SEQ ID NO: 2810703 - DNA, 25 bp, Homo sapien
tccggcagccgtagattgttattcg

SEQ ID NO: 2810704 - DNA, 25 bp, Homo sapien
gttatttgctaatagtgctccctca

SEQ ID NO: 2810705 - DNA, 25 bp, Homo sapien
ggagtttcacaatctggacaaataa

SEQ ID NO: 2810706 - DNA, 25 bp, Homo sapien
aaattatgtctgtttcgtggtggga

SEQ ID NO: 2810707 - DNA, 25 bp, Homo sapien
aatgtttgaagaagggccccatgat

SEQ ID NO: 2810708 - DNA, 25 bp, Homo sapien
agaaggaccccacacttggttcaag

SEQ ID NO: 2810709 - DNA, 25 bp, Homo sapien
ggttcaaggctctgctatagcggaa

SEQ ID NO: 2810710 - DNA, 25 bp, Homo sapien
gagaacatagtgaagattcccgcct

SEQ ID NO: 2810711 - DNA, 25 bp, Homo sapien
cactgccaccttggctggcaaggga

SEQ ID NO: 2810712 - DNA, 25 bp, Homo sapien
ggaggtctggaccacccagggcctc

SEQ ID NO: 2810713 - DNA, 25 bp, Homo sapien
caagggagaaatgtgttgtgttgtc

SEQ ID NO: 2810714 - DNA, 25 bp, Homo sapien
tagagaatttgctaccgaagttggc

SEQ ID NO: 2810715 - DNA, 25 bp, Homo sapien
ttaccaagattaggacgtcagtggc

SEQ ID NO: 2810716 - DNA, 25 bp, Homo sapien
gagtgactaaccagcctaactttaa

SEQ ID NO: 2810717 - DNA, 25 bp, Homo sapien
ccaggaggttggtaagagtgactaa

SEQ ID NO: 2810718 - DNA, 25 bp, Homo sapien
cagtgactttagaatacacacagtt

SEQ ID NO: 2810719 - DNA, 25 bp, Homo sapien
caaagtaaaacattaggtcaggcat

SEQ ID NO: 2810720 - DNA, 25 bp, Homo sapien
cccataccgttagcccttgtatgta

SEQ ID NO: 2810721 - DNA, 25 bp, Homo sapien
tgtatgtataccaacactgccaaag

SEQ ID NO: 2810722 - DNA, 25 bp, Homo sapien
tgtgagtgacaccaacatccagatg

SEQ ID NO: 2810723 - DNA, 25 bp, Homo sapien
tgagtgacaccaacatccagatgtc

SEQ ID NO: 2810724 - DNA, 25 bp, Homo sapien
gtgagtgacaccaacatccagatgt

SEQ ID NO: 2810725 - DNA, 25 bp, Homo sapien
ggataaatttgacttccaagacagc

SEQ ID NO: 2810726 - DNA, 25 bp, Homo sapien
tagtaacagaagtctgaacaattgg

SEQ ID NO: 2810727 - DNA, 25 bp, Homo sapien
cactacactgttatagttaatctga

SEQ ID NO: 2810728 - DNA, 25 bp, Homo sapien
ccaagacagctaaacttttcaactg

SEQ ID NO: 2810729 - DNA, 25 bp, Homo sapien
agaatgctgccttgtatttctcaag

SEQ ID NO: 2810730 - DNA, 25 bp, Homo sapien
ggagaatgctgccttgtatttctca

SEQ ID NO: 2810731 - DNA, 25 bp, Homo sapien
gagaatgctgccttgtatttctcaa

SEQ ID NO: 2810732 - DNA, 25 bp, Homo sapien
gcataacattccttaatgtcttgag

SEQ ID NO: 2810733 - DNA, 25 bp, Homo sapien
gttagtgtatttcgcataacattcc

SEQ ID NO: 2810734 - DNA, 25 bp, Homo sapien
gagaacatgcaaatgaattggacaa

SEQ ID NO: 2810735 - DNA, 25 bp, Homo sapien
tggcagggccaaatataaacacagt

SEQ ID NO: 2810736 - DNA, 25 bp, Homo sapien
tgtcactagagattgaaggaaatta

SEQ ID NO: 2810737 - DNA, 25 bp, Homo sapien
taagtgttgtcactagagattgaag

SEQ ID NO: 2810738 - DNA, 25 bp, Homo sapien
aagttttcaaagtgtaggagctctt

SEQ ID NO: 2810739 - DNA, 25 bp, Homo sapien
tcacagatacactcttggtgtaggg

SEQ ID NO: 2810740 - DNA, 25 bp, Homo sapien
gcagtagcagataaccaactgtgga

SEQ ID NO: 2810741 - DNA, 25 bp, Homo sapien
caaagaggacaattgagggtcagtg

SEQ ID NO: 2810742 - DNA, 25 bp, Homo sapien
taagaaacgcatgccaaagaggaca

SEQ ID NO: 2810743 - DNA, 25 bp, Homo sapien
ttagaggtagagacatgccgacaca

SEQ ID NO: 2810744 - DNA, 25 bp, Homo sapien
agctcttgaggagggacgtcagcat

SEQ ID NO: 2810745 - DNA, 25 bp, Homo sapien
cagctcttgaggagggacgtcagca

SEQ ID NO: 2810746 - DNA, 25 bp, Homo sapien
ctttctctcattaccagaacactta

SEQ ID NO: 2810747 - DNA, 25 bp, Homo sapien
tctcattaccagaacacttacacct

SEQ ID NO: 2810748 - DNA, 25 bp, Homo sapien
tctctcattaccagaacacttacac

SEQ ID NO: 2810749 - DNA, 25 bp, Homo sapien
tcattaccagaacacttacacctgc

SEQ ID NO: 2810750 - DNA, 25 bp, Homo sapien
ccaattaaatagagttgatttgcca

SEQ ID NO: 2810751 - DNA, 25 bp, Homo sapien
gcctgcttgggagctagctagcgct

SEQ ID NO: 2810752 - DNA, 25 bp, Homo sapien
tctgaaatgttcatcgccctgtggt

SEQ ID NO: 2810753 - DNA, 25 bp, Homo sapien
cctgtgtttcacattgcgttttgaa

SEQ ID NO: 2810754 - DNA, 25 bp, Homo sapien
gttgcaaagagactagatcactgca

SEQ ID NO: 2810755 - DNA, 25 bp, Homo sapien
cccactctgttgcaaagagactaga

SEQ ID NO: 2810756 - DNA, 25 bp, Homo sapien
gcagttccccactctgttgcaaaga

SEQ ID NO: 2810757 - DNA, 25 bp, Homo sapien
ctttaccaataaagactcgaggcac

SEQ ID NO: 2810758 - DNA, 25 bp, Homo sapien
tcagtgaatggtacccctaacggga

SEQ ID NO: 2810759 - DNA, 25 bp, Homo sapien
tatatgctcacaggacaggacttcc

SEQ ID NO: 2810760 - DNA, 25 bp, Homo sapien
taagatggttaactcaccccggatg

SEQ ID NO: 2810761 - DNA, 25 bp, Homo sapien
tctggcaaagaagcgaaaggctcct

SEQ ID NO: 2810762 - DNA, 25 bp, Homo sapien
tcattcaagtgaccgagatcctctc

SEQ ID NO: 2810763 - DNA, 25 bp, Homo sapien
ggagccgcagccttatcctaaagaa

SEQ ID NO: 2810764 - DNA, 25 bp, Homo sapien
tctggacgccttgaagtacggagcc

SEQ ID NO: 2810765 - DNA, 25 bp, Homo sapien
ccccgtgaagacctttggctgcagt

SEQ ID NO: 2810766 - DNA, 25 bp, Homo sapien
ccagaagcccttgtttgatgggcaa

SEQ ID NO: 2810767 - DNA, 25 bp, Homo sapien
ttgggccctcctgcagtacgggcag

SEQ ID NO: 2810768 - DNA, 25 bp, Homo sapien
aatctcgttagtgtggttggtggct

SEQ ID NO: 2810769 - DNA, 25 bp, Homo sapien
tgatatcgacaaattccagaagccc

SEQ ID NO: 2810770 - DNA, 25 bp, Homo sapien
tggtagctatgaaagacactctggg

SEQ ID NO: 2810771 - DNA, 25 bp, Homo sapien
acttcactagttagcaatgcccagg

SEQ ID NO: 2810772 - DNA, 25 bp, Homo sapien
cttgctcgagttttaaagggacagc

SEQ ID NO: 2810773 - DNA, 25 bp, Homo sapien
gagtttgcctggtagcttgctcgag

SEQ ID NO: 2810774 - DNA, 25 bp, Homo sapien
tattcgtgatgtttctaccagctgc

SEQ ID NO: 2810775 - DNA, 25 bp, Homo sapien
taactaggcctgtcataaactcgcc

SEQ ID NO: 2810776 - DNA, 25 bp, Homo sapien
tgttgggtccaaagcagatgctctc

SEQ ID NO: 2810777 - DNA, 25 bp, Homo sapien
tgagtctcccatgggcaagtgcaca

SEQ ID NO: 2810778 - DNA, 25 bp, Homo sapien
tatacagtgcaaaggaagttgctct

SEQ ID NO: 2810779 - DNA, 25 bp, Homo sapien
ggtatacagtgcaaaggaagttgct

SEQ ID NO: 2810780 - DNA, 25 bp, Homo sapien
tttattaaataggcaacatataaac

SEQ ID NO: 2810781 - DNA, 25 bp, Homo sapien
agggtatacagtgcaaaggaagttg

SEQ ID NO: 2810782 - DNA, 25 bp, Homo sapien
ttctcttgatactccagcggcaaac

SEQ ID NO: 2810783 - DNA, 25 bp, Homo sapien
gtatagtcatttggttctattgctt

SEQ ID NO: 2810784 - DNA, 25 bp, Homo sapien
cttgatactccagcggcaaaccatt

SEQ ID NO: 2810785 - DNA, 25 bp, Homo sapien
acttctcttgatactccagcggcaa

SEQ ID NO: 2810786 - DNA, 25 bp, Homo sapien
atccgggcccgggacgtccctgcag

SEQ ID NO: 2810787 - DNA, 25 bp, Homo sapien
agaaaaatgtcctcatccgggcccg

SEQ ID NO: 2810788 - DNA, 25 bp, Homo sapien
taggcgaagtacagaaaaatgtcct

SEQ ID NO: 2810789 - DNA, 25 bp, Homo sapien
cgtaggcgaagtacagaaaaatgtc

SEQ ID NO: 2810790 - DNA, 25 bp, Homo sapien
catttaagggaaactcgactatgtt

SEQ ID NO: 2810791 - DNA, 25 bp, Homo sapien
cagagaggaagcaactagttgaggg

SEQ ID NO: 2810792 - DNA, 25 bp, Homo sapien
tatttaaagtaggtactgggatgta

SEQ ID NO: 2810793 - DNA, 25 bp, Homo sapien
tacaataacagcttgagggaatagc

SEQ ID NO: 2810794 - DNA, 25 bp, Homo sapien
atactcaccgtgagggcccgcggct

SEQ ID NO: 2810795 - DNA, 25 bp, Homo sapien
actgtaatactcaccgtgagggccc

SEQ ID NO: 2810796 - DNA, 25 bp, Homo sapien
gaactgtaatactcaccgtgagggc

SEQ ID NO: 2810797 - DNA, 25 bp, Homo sapien
gtaatactcaccgtgagggcccgcg

SEQ ID NO: 2810798 - DNA, 25 bp, Homo sapien
ttgacaagttccagatttccagcag

SEQ ID NO: 2810799 - DNA, 25 bp, Homo sapien
tttccagcaggatttaactcctgag

SEQ ID NO: 2810800 - DNA, 25 bp, Homo sapien
caaggcttgacaagttccagatttc

SEQ ID NO: 2810801 - DNA, 25 bp, Homo sapien
aactcctgagtcacatcaacttggg

SEQ ID NO: 2810802 - DNA, 25 bp, Homo sapien
tttccagacaaatgtctgagggaac

SEQ ID NO: 2810803 - DNA, 25 bp, Homo sapien
ctgagggaactatacctgctttgat

SEQ ID NO: 2810804 - DNA, 25 bp, Homo sapien
ggaactatacctgctttgataaggg

SEQ ID NO: 2810805 - DNA, 25 bp, Homo sapien
tggtttttccagacaaatgtctgag

SEQ ID NO: 2810806 - DNA, 25 bp, Homo sapien
aggaagacggagggcgctggggaag

SEQ ID NO: 2810807 - DNA, 25 bp, Homo sapien
gacggagggcgctggggaaggcagt

SEQ ID NO: 2810808 - DNA, 25 bp, Homo sapien
gcctccaggaagacggagggcgctg

SEQ ID NO: 2810809 - DNA, 25 bp, Homo sapien
gaagacggagggcgctggggaaggc

SEQ ID NO: 2810810 - DNA, 25 bp, Homo sapien
tatagacgaaccactcaggagactc

SEQ ID NO: 2810811 - DNA, 25 bp, Homo sapien
gatacttgggccctatacctagaga

SEQ ID NO: 2810812 - DNA, 25 bp, Homo sapien
taggaggtccatgctacatagaacc

SEQ ID NO: 2810813 - DNA, 25 bp, Homo sapien
cctaacacggtttgagtggaacagc

SEQ ID NO: 2810814 - DNA, 25 bp, Homo sapien
cagatcgagcacacacttccagatg

SEQ ID NO: 2810815 - DNA, 25 bp, Homo sapien
taatcaagtgggaagcagtgtagct

SEQ ID NO: 2810816 - DNA, 25 bp, Homo sapien
taacctgagcgtttggcctactagg

SEQ ID NO: 2810817 - DNA, 25 bp, Homo sapien
tgttctagatcaagtcagcctgtat

SEQ ID NO: 2810818 - DNA, 25 bp, Homo sapien
cacatcttctggtccaagcagagtt

SEQ ID NO: 2810819 - DNA, 25 bp, Homo sapien
gcttaagtttattcacatcttctgg

SEQ ID NO: 2810820 - DNA, 25 bp, Homo sapien
tttattcacatcttctggtccaagc

SEQ ID NO: 2810821 - DNA, 25 bp, Homo sapien
attcacatcttctggtccaagcaga

SEQ ID NO: 2810822 - DNA, 25 bp, Homo sapien
tttgatgtgagccagcttgttatga

SEQ ID NO: 2810823 - DNA, 25 bp, Homo sapien
tgtgagccagcttgttatgaagata

SEQ ID NO: 2810824 - DNA, 25 bp, Homo sapien
tagccttttgatgtgagccagcttg

SEQ ID NO: 2810825 - DNA, 25 bp, Homo sapien
ttttcttcatggtaattgggactag

SEQ ID NO: 2810826 - DNA, 25 bp, Homo sapien
gaaaatcaacagtgatgatacctac

SEQ ID NO: 2810827 - DNA, 25 bp, Homo sapien
ccacaggtcagaaaatcaacagtga

SEQ ID NO: 2810828 - DNA, 25 bp, Homo sapien
aaaagaggaatgagattgcagaatt

SEQ ID NO: 2810829 - DNA, 25 bp, Homo sapien
gagattgcagaatttacaacatttt

SEQ ID NO: 2810830 - DNA, 25 bp, Homo sapien
ttatcttctgatattcttgtaagac

SEQ ID NO: 2810831 - DNA, 25 bp, Homo sapien
ctgctttatcttctgatattcttgt

SEQ ID NO: 2810832 - DNA, 25 bp, Homo sapien
cttctgatattcttgtaagacttct

SEQ ID NO: 2810833 - DNA, 25 bp, Homo sapien
tctgatattcttgtaagacttcttc

SEQ ID NO: 2810834 - DNA, 25 bp, Homo sapien
tatggaaggcaatgtggcaacagct

SEQ ID NO: 2810835 - DNA, 25 bp, Homo sapien
tgactgtgggaatgtaacttgaaac

SEQ ID NO: 2810836 - DNA, 25 bp, Homo sapien
tagtaaatgcaaaatcgactcagca

SEQ ID NO: 2810837 - DNA, 25 bp, Homo sapien
cagcaattctacttatcctatggac

SEQ ID NO: 2810838 - DNA, 25 bp, Homo sapien
cactgttttgggatagcaccagacc

SEQ ID NO: 2810839 - DNA, 25 bp, Homo sapien
gaggacacaaatgctctcaggctgt

SEQ ID NO: 2810840 - DNA, 25 bp, Homo sapien
catccattgtctcacgtaggctcca

SEQ ID NO: 2810841 - DNA, 25 bp, Homo sapien
gacaaagttatctagcccacacggg

SEQ ID NO: 2810842 - DNA, 25 bp, Homo sapien
catactctgcattgaagtcatcctt

SEQ ID NO: 2810843 - DNA, 25 bp, Homo sapien
atcatactctgcattgaagtcatcc

SEQ ID NO: 2810844 - DNA, 25 bp, Homo sapien
tcatactctgcattgaagtcatcct

SEQ ID NO: 2810845 - DNA, 25 bp, Homo sapien
tactctgcattgaagtcatccttat

SEQ ID NO: 2810846 - DNA, 25 bp, Homo sapien
tactaatatcacagacgcctagcag

SEQ ID NO: 2810847 - DNA, 25 bp, Homo sapien
gaactgggatcacataaggaactgg

SEQ ID NO: 2810848 - DNA, 25 bp, Homo sapien
taaaaggtacactgccagccaagca

SEQ ID NO: 2810849 - DNA, 25 bp, Homo sapien
tattgactgtacaccagagggagcc

SEQ ID NO: 2810850 - DNA, 25 bp, Homo sapien
aagagattatttggttacactggca

SEQ ID NO: 2810851 - DNA, 25 bp, Homo sapien
taagcgaacaatcacatagtactag

SEQ ID NO: 2810852 - DNA, 25 bp, Homo sapien
gcgcccggcctcgatcatttaggtt

SEQ ID NO: 2810853 - DNA, 25 bp, Homo sapien
aggcagatccaggaaccatccttag

SEQ ID NO: 2810854 - DNA, 25 bp, Homo sapien
ttcaaggccctcctagagaactcta

SEQ ID NO: 2810855 - DNA, 25 bp, Homo sapien
aactaagtggtaggtgatagctgcc

SEQ ID NO: 2810856 - DNA, 25 bp, Homo sapien
agagggtactcagcaaggtttctca

SEQ ID NO: 2810857 - DNA, 25 bp, Homo sapien
catacactacctcagatgagagggt

SEQ ID NO: 2810858 - DNA, 25 bp, Homo sapien
tgaaaagggctaaacagcatagttt

SEQ ID NO: 2810859 - DNA, 25 bp, Homo sapien
ttaacattgtccaccatgagatgct

SEQ ID NO: 2810860 - DNA, 25 bp, Homo sapien
gctagaattatgtgtccaagttata

SEQ ID NO: 2810861 - DNA, 25 bp, Homo sapien
cagcatttagcaacttgttgtcaca

SEQ ID NO: 2810862 - DNA, 25 bp, Homo sapien
taatctgggagttcaattgctgaag

SEQ ID NO: 2810863 - DNA, 25 bp, Homo sapien
aatctgggagttcaattgctgaagg

SEQ ID NO: 2810864 - DNA, 25 bp, Homo sapien
ctgggagttcaattgctgaaggttc

SEQ ID NO: 2810865 - DNA, 25 bp, Homo sapien
aataatctgggagttcaattgctga

SEQ ID NO: 2810866 - DNA, 25 bp, Homo sapien
ggaggcagtgcaatcctctttaact

SEQ ID NO: 2810867 - DNA, 25 bp, Homo sapien
gaggcagtgcaatcctctttaactc

SEQ ID NO: 2810868 - DNA, 25 bp, Homo sapien
gtctctagcctttgactcagaagca

SEQ ID NO: 2810869 - DNA, 25 bp, Homo sapien
ctctgagaacacttggaactctgat

SEQ ID NO: 2810870 - DNA, 25 bp, Homo sapien
ttggaactctgatgtagatctcaac

SEQ ID NO: 2810871 - DNA, 25 bp, Homo sapien
gatctcaacatactgaaatccagtt

SEQ ID NO: 2810872 - DNA, 25 bp, Homo sapien
aacttggatcttctatgtggtggca

SEQ ID NO: 2810873 - DNA, 25 bp, Homo sapien
catatcatattctacagcggcttct

SEQ ID NO: 2810874 - DNA, 25 bp, Homo sapien
ggcagcaatgccaaatggtgaactt

SEQ ID NO: 2810875 - DNA, 25 bp, Homo sapien
tagagcttctctcatatggcaaaga

SEQ ID NO: 2810876 - DNA, 25 bp, Homo sapien
gctggtcctcatagatactatcgtt

SEQ ID NO: 2810877 - DNA, 25 bp, Homo sapien
agaggtatatttgtcttgctggtcc

SEQ ID NO: 2810878 - DNA, 25 bp, Homo sapien
gcagataggttgaaggcagcggtgg

SEQ ID NO: 2810879 - DNA, 25 bp, Homo sapien
gaggatgtgagatgggcagataggt

SEQ ID NO: 2810880 - DNA, 25 bp, Homo sapien
gaaatttagatagttgaaaactata

SEQ ID NO: 2810881 - DNA, 25 bp, Homo sapien
catggtaatagtagcctaatctgtc

SEQ ID NO: 2810882 - DNA, 25 bp, Homo sapien
gcttaaatgtaatgctgtagcttgt

SEQ ID NO: 2810883 - DNA, 25 bp, Homo sapien
ataattggtccattaaaattaggtg

SEQ ID NO: 2810884 - DNA, 25 bp, Homo sapien
ggtgcgtcccactgtctgtcaaaag

SEQ ID NO: 2810885 - DNA, 25 bp, Homo sapien
tcactaattcttgggagtaaggtcc

SEQ ID NO: 2810886 - DNA, 25 bp, Homo sapien
ggctggaagccaagacctaaattct

SEQ ID NO: 2810887 - DNA, 25 bp, Homo sapien
caatcagctgagaatcaggcaggct

SEQ ID NO: 2810888 - DNA, 25 bp, Homo sapien
acaggagattctgaacggctggtgc

SEQ ID NO: 2810889 - DNA, 25 bp, Homo sapien
gcagcattctgagacggatttagtt

SEQ ID NO: 2810890 - DNA, 25 bp, Homo sapien
gcgtctctactagaacatacaggag

SEQ ID NO: 2810891 - DNA, 25 bp, Homo sapien
gaggagaagatacagcgtctctact

SEQ ID NO: 2810892 - DNA, 25 bp, Homo sapien
ttaaggtatatgagaggtccttaga

SEQ ID NO: 2810893 - DNA, 25 bp, Homo sapien
cataatcctttaaggtatatgagag

SEQ ID NO: 2810894 - DNA, 25 bp, Homo sapien
ctgactccaatgaccgtctgtctat

SEQ ID NO: 2810895 - DNA, 25 bp, Homo sapien
gagcactgactccaatgaccgtctg

SEQ ID NO: 2810896 - DNA, 25 bp, Homo sapien
tcatctcctaacctaaaacaggcaa

SEQ ID NO: 2810897 - DNA, 25 bp, Homo sapien
cagagcattaggtatttttactatc

SEQ ID NO: 2810898 - DNA, 25 bp, Homo sapien
caggcaacctttaggatttacactg

SEQ ID NO: 2810899 - DNA, 25 bp, Homo sapien
tactatcatctcctaacctaaaaca

SEQ ID NO: 2810900 - DNA, 25 bp, Homo sapien
caaacatacaggttcacgtgccaaa

SEQ ID NO: 2810901 - DNA, 25 bp, Homo sapien
cacgcttgctccttatatctgccag

SEQ ID NO: 2810902 - DNA, 25 bp, Homo sapien
tagtcagccagtttattccgaagtg

SEQ ID NO: 2810903 - DNA, 25 bp, Homo sapien
aattcctagagtttcgcggcttagc

SEQ ID NO: 2810904 - DNA, 25 bp, Homo sapien
tccgcatctcagtcaatggctcaat

SEQ ID NO: 2810905 - DNA, 25 bp, Homo sapien
gccgtagaagtcttaaatgcagtct

SEQ ID NO: 2810906 - DNA, 25 bp, Homo sapien
gaaaaggttccctgatctctccact

SEQ ID NO: 2810907 - DNA, 25 bp, Homo sapien
tgagcttgagccaaatatccaaatg

SEQ ID NO: 2810908 - DNA, 25 bp, Homo sapien
gatcgtgcacgtgaaatgcctagca

SEQ ID NO: 2810909 - DNA, 25 bp, Homo sapien
tacactttgagatacgcgcacacac

SEQ ID NO: 2810910 - DNA, 25 bp, Homo sapien
tatagaatatgagtgcctaggcccc

SEQ ID NO: 2810911 - DNA, 25 bp, Homo sapien
cactggcatgttttaaaggctaccc

SEQ ID NO: 2810912 - DNA, 25 bp, Homo sapien
aatggcctactttcttacacgtaag

SEQ ID NO: 2810913 - DNA, 25 bp, Homo sapien
gatcttggcacacttagtggcagaa

SEQ ID NO: 2810914 - DNA, 25 bp, Homo sapien
aaagatagagtaataagggcagcac

SEQ ID NO: 2810915 - DNA, 25 bp, Homo sapien
tgttctggcttataccaatcaaagg

SEQ ID NO: 2810916 - DNA, 25 bp, Homo sapien
gagttgtatttcacataccactgat

SEQ ID NO: 2810917 - DNA, 25 bp, Homo sapien
ttcaggagttgtatttcacatacca

SEQ ID NO: 2810918 - DNA, 25 bp, Homo sapien
tattcaggagttgtatttcacatac

SEQ ID NO: 2810919 - DNA, 25 bp, Homo sapien
caggagttgtatttcacataccact

SEQ ID NO: 2810920 - DNA, 25 bp, Homo sapien
ggtgctgctgctatgtgtctttcga

SEQ ID NO: 2810921 - DNA, 25 bp, Homo sapien
tatgtgtctttcgaattgtatttgc

SEQ ID NO: 2810922 - DNA, 25 bp, Homo sapien
gctatgtgtctttcgaattgtattt

SEQ ID NO: 2810923 - DNA, 25 bp, Homo sapien
tgctgctatgtgtctttcgaattgt

SEQ ID NO: 2810924 - DNA, 25 bp, Homo sapien
cattgttacacatttgtgggttaca

SEQ ID NO: 2810925 - DNA, 25 bp, Homo sapien
gataataactagtaacacaaactgt

SEQ ID NO: 2810926 - DNA, 25 bp, Homo sapien
tcttggaaataatatgtataatgca

SEQ ID NO: 2810927 - DNA, 25 bp, Homo sapien
ttacaatatgagcacctcagtttcc

SEQ ID NO: 2810928 - DNA, 25 bp, Homo sapien
aaccaaccaaccagtctcagagggc

SEQ ID NO: 2810929 - DNA, 25 bp, Homo sapien
gaaaatggtacaaaggaggccttca

SEQ ID NO: 2810930 - DNA, 25 bp, Homo sapien
cacatgtgagttagagaaatggaaa

SEQ ID NO: 2810931 - DNA, 25 bp, Homo sapien
tctgcagtgctgagactacacatgt

SEQ ID NO: 2810932 - DNA, 25 bp, Homo sapien
tgacaatcccagcaaccgttccttg

SEQ ID NO: 2810933 - DNA, 25 bp, Homo sapien
caagtggctacttctagaacatgtg

SEQ ID NO: 2810934 - DNA, 25 bp, Homo sapien
cagtgctgttcatgtggttaaccca

SEQ ID NO: 2810935 - DNA, 25 bp, Homo sapien
tgaacactgacacttggcaagtggc

SEQ ID NO: 2810936 - DNA, 25 bp, Homo sapien
tagcatgaaactgtgtgagactctc

SEQ ID NO: 2810937 - DNA, 25 bp, Homo sapien
tctatgccctctggttaaagaaggg

SEQ ID NO: 2810938 - DNA, 25 bp, Homo sapien
gaatcttttagcttgtttaggacac

SEQ ID NO: 2810939 - DNA, 25 bp, Homo sapien
gaacttgtaatgacatacgatgtgg

SEQ ID NO: 2810940 - DNA, 25 bp, Homo sapien
actgaaacctctactggctggtatg

SEQ ID NO: 2810941 - DNA, 25 bp, Homo sapien
catcagctggaaacttatgcaccaa

SEQ ID NO: 2810942 - DNA, 25 bp, Homo sapien
cactaggtttcacctgaaaaggcag

SEQ ID NO: 2810943 - DNA, 25 bp, Homo sapien
aatagtaattctgtccatgctgggc

SEQ ID NO: 2810944 - DNA, 25 bp, Homo sapien
gttagctaagctacacacactagga

SEQ ID NO: 2810945 - DNA, 25 bp, Homo sapien
catttcccagttgcaacagcgttaa

SEQ ID NO: 2810946 - DNA, 25 bp, Homo sapien
tcaggaggtctccaaggtctactgg

SEQ ID NO: 2810947 - DNA, 25 bp, Homo sapien
taggatgaattcaagcagcaaggca

SEQ ID NO: 2810948 - DNA, 25 bp, Homo sapien
tatgagattccaatgagtaactaca

SEQ ID NO: 2810949 - DNA, 25 bp, Homo sapien
cttcattgggtgattatgagattcc

SEQ ID NO: 2810950 - DNA, 25 bp, Homo sapien
tgtgagtgctaaccagtgccttgtg

SEQ ID NO: 2810951 - DNA, 25 bp, Homo sapien
tggatgaatcagacagttttgagac

SEQ ID NO: 2810952 - DNA, 25 bp, Homo sapien
gtgcacgccatcatgcccagttaat

SEQ ID NO: 2810953 - DNA, 25 bp, Homo sapien
ttcaccatgttggtgttggccagga

SEQ ID NO: 2810954 - DNA, 25 bp, Homo sapien
gcttcccgcttagctgagattacag

SEQ ID NO: 2810955 - DNA, 25 bp, Homo sapien
ctcgctctgtctccaagttggagtg

SEQ ID NO: 2810956 - DNA, 25 bp, Homo sapien
cgagatcgatgcaagcctctgcagg

SEQ ID NO: 2810957 - DNA, 25 bp, Homo sapien
gaagagggtgtacagagggaggcca

SEQ ID NO: 2810958 - DNA, 25 bp, Homo sapien
cccggattggccgagatcgatgcaa

SEQ ID NO: 2810959 - DNA, 25 bp, Homo sapien
gaaaaggcctacagagtgcccggat

SEQ ID NO: 2810960 - DNA, 25 bp, Homo sapien
cagggaactaggccccatgggtaca

SEQ ID NO: 2810961 - DNA, 25 bp, Homo sapien
tgagcagggaactaggccccatggg

SEQ ID NO: 2810962 - DNA, 25 bp, Homo sapien
gaactaggccccatgggtacaaata

SEQ ID NO: 2810963 - DNA, 25 bp, Homo sapien
aactaggccccatgggtacaaatat

SEQ ID NO: 2810964 - DNA, 25 bp, Homo sapien
cacgcagtaatgtgaccagatccca

SEQ ID NO: 2810965 - DNA, 25 bp, Homo sapien
gctcttcaatttactggcagtctga

SEQ ID NO: 2810966 - DNA, 25 bp, Homo sapien
gtaagtagccaacgaagattcagga

SEQ ID NO: 2810967 - DNA, 25 bp, Homo sapien
aaaacacaacggtaccacgattgca

SEQ ID NO: 2810968 - DNA, 25 bp, Homo sapien
gtataaatcccaggcaattgagctg

SEQ ID NO: 2810969 - DNA, 25 bp, Homo sapien
tgtgcttcggttgcgggattcctcc

SEQ ID NO: 2810970 - DNA, 25 bp, Homo sapien
ctacatatggtccaccgggtttgat

SEQ ID NO: 2810971 - DNA, 25 bp, Homo sapien
gagtcgtttgttgcacacactgtaa

SEQ ID NO: 2810972 - DNA, 25 bp, Homo sapien
gtaagtcagtggctttgttagacat

SEQ ID NO: 2810973 - DNA, 25 bp, Homo sapien
aagtaagtcagtggctttgttagac

SEQ ID NO: 2810974 - DNA, 25 bp, Homo sapien
ctgtcaagtaagtcagtggctttgt

SEQ ID NO: 2810975 - DNA, 25 bp, Homo sapien
tcaagtaagtcagtggctttgttag

SEQ ID NO: 2810976 - DNA, 25 bp, Homo sapien
agtagttagccacactcagagagag

SEQ ID NO: 2810977 - DNA, 25 bp, Homo sapien
tatccaaaggataacgagaggctga

SEQ ID NO: 2810978 - DNA, 25 bp, Homo sapien
cacagcttccagagatagtgaggaa

SEQ ID NO: 2810979 - DNA, 25 bp, Homo sapien
gaggccacttaggatgctactgaag

SEQ ID NO: 2810980 - DNA, 25 bp, Homo sapien
ttgcccacatttgacaaataaaagt

SEQ ID NO: 2810981 - DNA, 25 bp, Homo sapien
gatcatttttgggaattttgacaag

SEQ ID NO: 2810982 - DNA, 25 bp, Homo sapien
cttcattgaggggatcatttttggg

SEQ ID NO: 2810983 - DNA, 25 bp, Homo sapien
aagttaaagttatgaacttcattga

SEQ ID NO: 2810984 - DNA, 25 bp, Homo sapien
taagagtccatatccgaatctttgg

SEQ ID NO: 2810985 - DNA, 25 bp, Homo sapien
gcaaacatgcctataacttaccaga

SEQ ID NO: 2810986 - DNA, 25 bp, Homo sapien
ttttgtctttggcttacatgacccc

SEQ ID NO: 2810987 - DNA, 25 bp, Homo sapien
gatatatacatcctcgcagcattta

SEQ ID NO: 2810988 - DNA, 25 bp, Homo sapien
gacacaaagtagttccgtctgtcgt

SEQ ID NO: 2810989 - DNA, 25 bp, Homo sapien
acgacagacggaactactttgtgtc

SEQ ID NO: 2810990 - DNA, 25 bp, Homo sapien
tgtgcacgctcagcgcctagttggc

SEQ ID NO: 2810991 - DNA, 25 bp, Homo sapien
cacaagagaacataaggctacctgc

SEQ ID NO: 2810992 - DNA, 25 bp, Homo sapien
gaatgcttgcgtcaggcacaagaga

SEQ ID NO: 2810993 - DNA, 25 bp, Homo sapien
tcttaatcctacagcagtagaggca

SEQ ID NO: 2810994 - DNA, 25 bp, Homo sapien
tccatgctatgtactcaccaaagtg

SEQ ID NO: 2810995 - DNA, 25 bp, Homo sapien
tgaccatgactagaatagaatcagc

SEQ ID NO: 2810996 - DNA, 25 bp, Homo sapien
cagtagggccaaggctgataaattt

SEQ ID NO: 2810997 - DNA, 25 bp, Homo sapien
cagaaataggtcatccccttagaaa

SEQ ID NO: 2810998 - DNA, 25 bp, Homo sapien
tgtcctcacctctgatagcagaact

SEQ ID NO: 2810999 - DNA, 25 bp, Homo sapien
agaacttctcaacagtctctcctac

SEQ ID NO: 2811000 - DNA, 25 bp, Homo sapien
cctcacctctgatagcagaacttct

SEQ ID NO: 2811001 - DNA, 25 bp, Homo sapien
gctaaagatcagtaacaaaccacct

SEQ ID NO: 2811002 - DNA, 25 bp, Homo sapien
tatttgagcagtacgcagacacggc

SEQ ID NO: 2811003 - DNA, 25 bp, Homo sapien
tatgggtatatttgagcagtacgca

SEQ ID NO: 2811004 - DNA, 25 bp, Homo sapien
ctgcgtgtaacactatgggtatatt

SEQ ID NO: 2811005 - DNA, 25 bp, Homo sapien
ggtatatttgagcagtacgcagaca

SEQ ID NO: 2811006 - DNA, 25 bp, Homo sapien
cagctatggagctgaagtggagctt

SEQ ID NO: 2811007 - DNA, 25 bp, Homo sapien
caaagggtgactcttgatgcacgtc

SEQ ID NO: 2811008 - DNA, 25 bp, Homo sapien
gcacgtcatgagtttctttgcagct

SEQ ID NO: 2811009 - DNA, 25 bp, Homo sapien
taatctgaagcttttcaagagcaag

SEQ ID NO: 2811010 - DNA, 25 bp, Homo sapien
gatatgcacaacacatcaagagcta

SEQ ID NO: 2811011 - DNA, 25 bp, Homo sapien
agagggcctgtcaagtttcttagac

SEQ ID NO: 2811012 - DNA, 25 bp, Homo sapien
ggttaggccattggcaaagccatca

SEQ ID NO: 2811013 - DNA, 25 bp, Homo sapien
ggcagagtctggtttactccataaa

SEQ ID NO: 2811014 - DNA, 25 bp, Homo sapien
tgtgactggcactttcgaacagctg

SEQ ID NO: 2811015 - DNA, 25 bp, Homo sapien
caaggcactggatgttactttacgc

SEQ ID NO: 2811016 - DNA, 25 bp, Homo sapien
cactcctagcaataccagatggaga

SEQ ID NO: 2811017 - DNA, 25 bp, Homo sapien
gatccataccgctaggctttgtgag

SEQ ID NO: 2811018 - DNA, 25 bp, Homo sapien
ggtaccaaccctctactgatgtggg

SEQ ID NO: 2811019 - DNA, 25 bp, Homo sapien
tcctatggctgcttaggtaccaacc

SEQ ID NO: 2811020 - DNA, 25 bp, Homo sapien
taaagaactgcccttttcctatggc

SEQ ID NO: 2811021 - DNA, 25 bp, Homo sapien
tggaaatggaacaccctcaaatacc

SEQ ID NO: 2811022 - DNA, 25 bp, Homo sapien
tcccacacccttgataacaccagca

SEQ ID NO: 2811023 - DNA, 25 bp, Homo sapien
ttgataacaccagcaactctgcctg

SEQ ID NO: 2811024 - DNA, 25 bp, Homo sapien
cactcccacacccttgataacacca

SEQ ID NO: 2811025 - DNA, 25 bp, Homo sapien
acccttgataacaccagcaactctg

SEQ ID NO: 2811026 - DNA, 25 bp, Homo sapien
ctgtaaactcaagaactagaatgtg

SEQ ID NO: 2811027 - DNA, 25 bp, Homo sapien
tagataacaagacctgccttctctg

SEQ ID NO: 2811028 - DNA, 25 bp, Homo sapien
gctggtgtctagctctagataacaa

SEQ ID NO: 2811029 - DNA, 25 bp, Homo sapien
agttgactaccaagatattagctgg

SEQ ID NO: 2811030 - DNA, 25 bp, Homo sapien
gtattcatatgtaaaccagtattct

SEQ ID NO: 2811031 - DNA, 25 bp, Homo sapien
ttcatatgtaaaccagtattcttta

SEQ ID NO: 2811032 - DNA, 25 bp, Homo sapien
accagtattctttaacagctagaaa

SEQ ID NO: 2811033 - DNA, 25 bp, Homo sapien
tattcatatgtaaaccagtattctt

SEQ ID NO: 2811034 - DNA, 25 bp, Homo sapien
ccaatgggaataccccctgggcagc

SEQ ID NO: 2811035 - DNA, 25 bp, Homo sapien
tcttacgactaaggttccaggtata

SEQ ID NO: 2811036 - DNA, 25 bp, Homo sapien
ctccaatgggaataccccctgggca

SEQ ID NO: 2811037 - DNA, 25 bp, Homo sapien
tccaatgggaataccccctgggcag

SEQ ID NO: 2811038 - DNA, 25 bp, Homo sapien
gatttgaataatggcctcaccacct

SEQ ID NO: 2811039 - DNA, 25 bp, Homo sapien
gctataatagattgtgacccattgg

SEQ ID NO: 2811040 - DNA, 25 bp, Homo sapien
gacccattggaaggtcatggcatta

SEQ ID NO: 2811041 - DNA, 25 bp, Homo sapien
ggagtgtaacctgaacacctcatgg

SEQ ID NO: 2811042 - DNA, 25 bp, Homo sapien
gggtggcctagaccgagtactctag

SEQ ID NO: 2811043 - DNA, 25 bp, Homo sapien
tctacctgtctatcatggtgcctgg

SEQ ID NO: 2811044 - DNA, 25 bp, Homo sapien
tattaaagtgatactgcctgcaaca

SEQ ID NO: 2811045 - DNA, 25 bp, Homo sapien
gtacacatcgcgcactgacaaatat

SEQ ID NO: 2811046 - DNA, 25 bp, Homo sapien
ctctctccccagtaatgactctttg

SEQ ID NO: 2811047 - DNA, 25 bp, Homo sapien
cagtaatgactctttgtttttacta

SEQ ID NO: 2811048 - DNA, 25 bp, Homo sapien
ctctccccagtaatgactctttgtt

SEQ ID NO: 2811049 - DNA, 25 bp, Homo sapien
ctccccagtaatgactctttgtttt

SEQ ID NO: 2811050 - DNA, 25 bp, Homo sapien
tttaaaagttgaatagcgtgcaaga

SEQ ID NO: 2811051 - DNA, 25 bp, Homo sapien
tagcgtgcaagaacattagatttgt

SEQ ID NO: 2811052 - DNA, 25 bp, Homo sapien
tgaatagcgtgcaagaacattagat

SEQ ID NO: 2811053 - DNA, 25 bp, Homo sapien
aagttgaatagcgtgcaagaacatt

SEQ ID NO: 2811054 - DNA, 25 bp, Homo sapien
cccgtggagtccttggaactggatt

SEQ ID NO: 2811055 - DNA, 25 bp, Homo sapien
gtggagtccttggaactggattgaa

SEQ ID NO: 2811056 - DNA, 25 bp, Homo sapien
gaactggattgaaggtcgaaaagga

SEQ ID NO: 2811057 - DNA, 25 bp, Homo sapien
tggaactggattgaaggtcgaaaag

SEQ ID NO: 2811058 - DNA, 25 bp, Homo sapien
tatagattaactttcttaaggcgaa

SEQ ID NO: 2811059 - DNA, 25 bp, Homo sapien
tcagcagaatctaagtactactggg

SEQ ID NO: 2811060 - DNA, 25 bp, Homo sapien
tgttactgttctactaccataaaag

SEQ ID NO: 2811061 - DNA, 25 bp, Homo sapien
catttaactttagacttatcagcag

SEQ ID NO: 2811062 - DNA, 25 bp, Homo sapien
gaaagcatgcccataggggcctagg

SEQ ID NO: 2811063 - DNA, 25 bp, Homo sapien
ctgaagtaatgaaagcatgcccata

SEQ ID NO: 2811064 - DNA, 25 bp, Homo sapien
aaagcatgcccataggggcctaggt

SEQ ID NO: 2811065 - DNA, 25 bp, Homo sapien
aagtaatgaaagcatgcccataggg

SEQ ID NO: 2811066 - DNA, 25 bp, Homo sapien
aagagtaaggtggccctacaattga

SEQ ID NO: 2811067 - DNA, 25 bp, Homo sapien
agagtaaggtggccctacaattgag

SEQ ID NO: 2811068 - DNA, 25 bp, Homo sapien
tacaattgagattatacaggttcat

SEQ ID NO: 2811069 - DNA, 25 bp, Homo sapien
gaagagtaaggtggccctacaattg

SEQ ID NO: 2811070 - DNA, 25 bp, Homo sapien
ttcatttcgaaaggctagtgccttt

SEQ ID NO: 2811071 - DNA, 25 bp, Homo sapien
tcaaattgctgatatccccactgga

SEQ ID NO: 2811072 - DNA, 25 bp, Homo sapien
tcagaagcactgaacataacctcat

SEQ ID NO: 2811073 - DNA, 25 bp, Homo sapien
gtcttcagctcaccaatgaaatttg

SEQ ID NO: 2811074 - DNA, 25 bp, Homo sapien
tacttgctgatagatcaaatatgtc

SEQ ID NO: 2811075 - DNA, 25 bp, Homo sapien
actgggagactacttgatcatattt

SEQ ID NO: 2811076 - DNA, 25 bp, Homo sapien
ggccacctcgaagtttatggcagtg

SEQ ID NO: 2811077 - DNA, 25 bp, Homo sapien
ttttgaaggtgacagtacttgctga

SEQ ID NO: 2811078 - DNA, 25 bp, Homo sapien
tagccatacccttgagaaaaactcc

SEQ ID NO: 2811079 - DNA, 25 bp, Homo sapien
ggaaatcagtacttggagctagaga

SEQ ID NO: 2811080 - DNA, 25 bp, Homo sapien
aactcacctagggagactgaacaga

SEQ ID NO: 2811081 - DNA, 25 bp, Homo sapien
cattcagaggccagtcaaacagagg

SEQ ID NO: 2811082 - DNA, 25 bp, Homo sapien
cagaacagggtctttatggcaattc

SEQ ID NO: 2811083 - DNA, 25 bp, Homo sapien
tagttactatgaaaccagcagccaa

SEQ ID NO: 2811084 - DNA, 25 bp, Homo sapien
tctgctggagatgtggtccccatcc

SEQ ID NO: 2811085 - DNA, 25 bp, Homo sapien
cacaccagggccagaataatcctaa

SEQ ID NO: 2811086 - DNA, 25 bp, Homo sapien
aactttccagttaacatgatacaca

SEQ ID NO: 2811087 - DNA, 25 bp, Homo sapien
tatgtagagcttatgtagaccacac

SEQ ID NO: 2811088 - DNA, 25 bp, Homo sapien
tctgccaatcatgaaaataactttc

SEQ ID NO: 2811089 - DNA, 25 bp, Homo sapien
ttgctggactcacaatgcccctctg

SEQ ID NO: 2811090 - DNA, 25 bp, Homo sapien
catcactttacataggccagagctg

SEQ ID NO: 2811091 - DNA, 25 bp, Homo sapien
ccactggaggataaaagctcagcca

SEQ ID NO: 2811092 - DNA, 25 bp, Homo sapien
tctgaagccttacgtcaaagtgggt

SEQ ID NO: 2811093 - DNA, 25 bp, Homo sapien
tactgtgcccatagaggtacactgg

SEQ ID NO: 2811094 - DNA, 25 bp, Homo sapien
gctggtctcttcactgcaggtgcac

SEQ ID NO: 2811095 - DNA, 25 bp, Homo sapien
caggtgcacctatctaagagtagct

SEQ ID NO: 2811096 - DNA, 25 bp, Homo sapien
tgtctcctggaagctactggtatat

SEQ ID NO: 2811097 - DNA, 25 bp, Homo sapien
tagagaccaaccagacccataaatg

SEQ ID NO: 2811098 - DNA, 25 bp, Homo sapien
tatttgtaagatgccccgtgggttc

SEQ ID NO: 2811099 - DNA, 25 bp, Homo sapien
tacgagaccggttggagtgtgttcc

SEQ ID NO: 2811100 - DNA, 25 bp, Homo sapien
agtgtgttcctcagtaccgaacggg

SEQ ID NO: 2811101 - DNA, 25 bp, Homo sapien
gaataactatgtgaatctgtgtctc

SEQ ID NO: 2811102 - DNA, 25 bp, Homo sapien
gaaagcgtctggatttgtagtccaa

SEQ ID NO: 2811103 - DNA, 25 bp, Homo sapien
tccggtctcccacagtactgcatgt

SEQ ID NO: 2811104 - DNA, 25 bp, Homo sapien
tggttaccgcgtcccttctcggtgc

SEQ ID NO: 2811105 - DNA, 25 bp, Homo sapien
tatgtgcgcctatctgagcctctct

SEQ ID NO: 2811106 - DNA, 25 bp, Homo sapien
ctctggctcgttccccgtttacact

SEQ ID NO: 2811107 - DNA, 25 bp, Homo sapien
ggctctggctcgttccccgtttaca

SEQ ID NO: 2811108 - DNA, 25 bp, Homo sapien
tctggctctggctcgttccccgttt

SEQ ID NO: 2811109 - DNA, 25 bp, Homo sapien
tggctctggctcgttccccgtttac

SEQ ID NO: 2811110 - DNA, 25 bp, Homo sapien
agcgctaagtgtgcgtgagtcctca

SEQ ID NO: 2811111 - DNA, 25 bp, Homo sapien
ttgagcgtccgtgaacctctctctc

SEQ ID NO: 2811112 - DNA, 25 bp, Homo sapien
cagaacccgatgtcttgctcccggg

SEQ ID NO: 2811113 - DNA, 25 bp, Homo sapien
tttcgggtacgttgagcgtccgtga

SEQ ID NO: 2811114 - DNA, 25 bp, Homo sapien
tggacgcggcgcgtctccagtaacg

SEQ ID NO: 2811115 - DNA, 25 bp, Homo sapien
gcgtctccagtaacgcgatgcgccg

SEQ ID NO: 2811116 - DNA, 25 bp, Homo sapien
cgcggcgcgtctccagtaacgcgat

SEQ ID NO: 2811117 - DNA, 25 bp, Homo sapien
cagtaacgcgatgcgccggtgtccc

SEQ ID NO: 2811118 - DNA, 25 bp, Homo sapien
acatgcagtacggtgatgttgtcct

SEQ ID NO: 2811119 - DNA, 25 bp, Homo sapien
tgcagtacggtgatgttgtcctgcc

SEQ ID NO: 2811120 - DNA, 25 bp, Homo sapien
cagtacggtgatgttgtcctgcccc

SEQ ID NO: 2811121 - DNA, 25 bp, Homo sapien
agtacggtgatgttgtcctgcccca

SEQ ID NO: 2811122 - DNA, 25 bp, Homo sapien
ctccggctctagcctccactgcggc

SEQ ID NO: 2811123 - DNA, 25 bp, Homo sapien
ccgctccggctctagcctccactgc

SEQ ID NO: 2811124 - DNA, 25 bp, Homo sapien
tctagcctccactgcggccgcggct

SEQ ID NO: 2811125 - DNA, 25 bp, Homo sapien
tgcggccgcggctgcttgggcttct

SEQ ID NO: 2811126 - DNA, 25 bp, Homo sapien
tagggccatcccgctgctgacgtac

SEQ ID NO: 2811127 - DNA, 25 bp, Homo sapien
ctagggccatcccgctgctgacgta

SEQ ID NO: 2811128 - DNA, 25 bp, Homo sapien
gtcatatactgcgcggagccagacc

SEQ ID NO: 2811129 - DNA, 25 bp, Homo sapien
agacctcggactgccaccgccgcca

SEQ ID NO: 2811130 - DNA, 25 bp, Homo sapien
agccagacctcggactgccaccgcc

SEQ ID NO: 2811131 - DNA, 25 bp, Homo sapien
tgtcatatactgcgcggagccagac

SEQ ID NO: 2811132 - DNA, 25 bp, Homo sapien
taagaggctgacgtctaggtgacgc

SEQ ID NO: 2811133 - DNA, 25 bp, Homo sapien
ggtgacgcgccaacttaatcatgtc

SEQ ID NO: 2811134 - DNA, 25 bp, Homo sapien
taatcatgtctgacgtcacgtctgg

SEQ ID NO: 2811135 - DNA, 25 bp, Homo sapien
tagagttttgctcctgggacgggac

SEQ ID NO: 2811136 - DNA, 25 bp, Homo sapien
tgaacataaggtggcccaatgttgc

SEQ ID NO: 2811137 - DNA, 25 bp, Homo sapien
gatgccttcagggaccactggatat

SEQ ID NO: 2811138 - DNA, 25 bp, Homo sapien
tttaaagggctcagtgatttcttgg

SEQ ID NO: 2811139 - DNA, 25 bp, Homo sapien
tggtacagaggtcaccaattcagat

SEQ ID NO: 2811140 - DNA, 25 bp, Homo sapien
tgccctgaaagatatcatataggct

SEQ ID NO: 2811141 - DNA, 25 bp, Homo sapien
cagtgtagtgcagagtgccctgaaa

SEQ ID NO: 2811142 - DNA, 25 bp, Homo sapien
tgcagagtgccctgaaagatatcat

SEQ ID NO: 2811143 - DNA, 25 bp, Homo sapien
ctattcagtgtagtgcagagtgccc

SEQ ID NO: 2811144 - DNA, 25 bp, Homo sapien
ttattcggtgcacacccatcgtgat

SEQ ID NO: 2811145 - DNA, 25 bp, Homo sapien
acacccatcgtgatgtgttgacctt

SEQ ID NO: 2811146 - DNA, 25 bp, Homo sapien
gcagttattgggaagcctgaaggca

SEQ ID NO: 2811147 - DNA, 25 bp, Homo sapien
ttgggaagcctgaaggcactttgat

SEQ ID NO: 2811148 - DNA, 25 bp, Homo sapien
agttattgggaagcctgaaggcact

SEQ ID NO: 2811149 - DNA, 25 bp, Homo sapien
tattgggaagcctgaaggcactttg

SEQ ID NO: 2811150 - DNA, 25 bp, Homo sapien
tgttgaaccaatgtgccatgtatga

SEQ ID NO: 2811151 - DNA, 25 bp, Homo sapien
tgaagttgtggacagtctgtgtttt

SEQ ID NO: 2811152 - DNA, 25 bp, Homo sapien
aggatgcggtccaccattaattttc

SEQ ID NO: 2811153 - DNA, 25 bp, Homo sapien
tgaaccaatgtgccatgtatgaagt

SEQ ID NO: 2811154 - DNA, 25 bp, Homo sapien
tccaccagggtacaagagaactgtg

SEQ ID NO: 2811155 - DNA, 25 bp, Homo sapien
ttcagagtgctctcagtgtttatga

SEQ ID NO: 2811156 - DNA, 25 bp, Homo sapien
tctccaccagggtacaagagaactg

SEQ ID NO: 2811157 - DNA, 25 bp, Homo sapien
ctccaccagggtacaagagaactgt

SEQ ID NO: 2811158 - DNA, 25 bp, Homo sapien
gttacaagagatgttacaatctggt

SEQ ID NO: 2811159 - DNA, 25 bp, Homo sapien
ctgttacaagagatgttacaatctg

SEQ ID NO: 2811160 - DNA, 25 bp, Homo sapien
tacaagagatgttacaatctggttg

SEQ ID NO: 2811161 - DNA, 25 bp, Homo sapien
acaagagatgttacaatctggttgg

SEQ ID NO: 2811162 - DNA, 25 bp, Homo sapien
cagcctgagtccctagagagtcctc

SEQ ID NO: 2811163 - DNA, 25 bp, Homo sapien
ggctggcacttatgacttactttta

SEQ ID NO: 2811164 - DNA, 25 bp, Homo sapien
ggataaggtgcactgtgctcccaag

SEQ ID NO: 2811165 - DNA, 25 bp, Homo sapien
tgttgcttgtaatcttcaagggcac

SEQ ID NO: 2811166 - DNA, 25 bp, Homo sapien
gtgaactggtggcagtatccaaaag

SEQ ID NO: 2811167 - DNA, 25 bp, Homo sapien
tgtgggaaattcacactcagcttca

SEQ ID NO: 2811168 - DNA, 25 bp, Homo sapien
gggaaattcacactcagcttcatca

SEQ ID NO: 2811169 - DNA, 25 bp, Homo sapien
ggcagtatccaaaagagcaaagtac

SEQ ID NO: 2811170 - DNA, 25 bp, Homo sapien
tttggtacccattagagttcaccac

SEQ ID NO: 2811171 - DNA, 25 bp, Homo sapien
gcttttggtacccattagagttcac

SEQ ID NO: 2811172 - DNA, 25 bp, Homo sapien
gctgcttttggtacccattagagtt

SEQ ID NO: 2811173 - DNA, 25 bp, Homo sapien
ggtacccattagagttcaccactgg

SEQ ID NO: 2811174 - DNA, 25 bp, Homo sapien
cactggctacatcacttgtgaggcc

SEQ ID NO: 2811175 - DNA, 25 bp, Homo sapien
ctacatcacttgtgaggcccagcgc

SEQ ID NO: 2811176 - DNA, 25 bp, Homo sapien
tgtagcactggctacatcacttgtg

SEQ ID NO: 2811177 - DNA, 25 bp, Homo sapien
gcctctgtagcactggctacatcac

SEQ ID NO: 2811178 - DNA, 25 bp, Homo sapien
tctcctcatggtagcagctgtgctg

SEQ ID NO: 2811179 - DNA, 25 bp, Homo sapien
gcagtctcctcatggtagcagctgt

SEQ ID NO: 2811180 - DNA, 25 bp, Homo sapien
cctcatggtagcagctgtgctgagt

SEQ ID NO: 2811181 - DNA, 25 bp, Homo sapien
agtctcctcatggtagcagctgtgc

SEQ ID NO: 2811182 - DNA, 25 bp, Homo sapien
ttagctagtctgagtgataatgttt

SEQ ID NO: 2811183 - DNA, 25 bp, Homo sapien
gtctgagtgataatgtttatagcag

SEQ ID NO: 2811184 - DNA, 25 bp, Homo sapien
gcagtttctttcaagcactctcgcc

SEQ ID NO: 2811185 - DNA, 25 bp, Homo sapien
gtttctttcaagcactctcgcctaa

SEQ ID NO: 2811186 - DNA, 25 bp, Homo sapien
gctgaatggggcttagaaatcaaac

SEQ ID NO: 2811187 - DNA, 25 bp, Homo sapien
agctgaatggggcttagaaatcaaa

SEQ ID NO: 2811188 - DNA, 25 bp, Homo sapien
cagctgaatggggcttagaaatcaa

SEQ ID NO: 2811189 - DNA, 25 bp, Homo sapien
gtgggattgaccttgaagcaaaacc

SEQ ID NO: 2811190 - DNA, 25 bp, Homo sapien
caaaaccacggcgaatgtacagtgc

SEQ ID NO: 2811191 - DNA, 25 bp, Homo sapien
caccaaggatatgttgtgtctgctg

SEQ ID NO: 2811192 - DNA, 25 bp, Homo sapien
catcagaacaggtattaaacttgaa

SEQ ID NO: 2811193 - DNA, 25 bp, Homo sapien
aagggaatactcctgtacattgacg

SEQ ID NO: 2811194 - DNA, 25 bp, Homo sapien
taatccccttgctaatcctcttctg

SEQ ID NO: 2811195 - DNA, 25 bp, Homo sapien
ctgcaagaagtttgtaagggaatac

SEQ ID NO: 2811196 - DNA, 25 bp, Homo sapien
gtagttatctatgctcttaatcccc

SEQ ID NO: 2811197 - DNA, 25 bp, Homo sapien
tggtctgttttcactatgggccagc

SEQ ID NO: 2811198 - DNA, 25 bp, Homo sapien
tcaagatggtctgttttcactatgg

SEQ ID NO: 2811199 - DNA, 25 bp, Homo sapien
gatggtctgttttcactatgggcca

SEQ ID NO: 2811200 - DNA, 25 bp, Homo sapien
aagatggtctgttttcactatgggc

SEQ ID NO: 2811201 - DNA, 25 bp, Homo sapien
tcccaacaatgcctccatgacaata

SEQ ID NO: 2811202 - DNA, 25 bp, Homo sapien
tgcctccatgacaatatgctgttgg

SEQ ID NO: 2811203 - DNA, 25 bp, Homo sapien
tagaggcaaacaactcccaacaatg

SEQ ID NO: 2811204 - DNA, 25 bp, Homo sapien
cagaatgcatctgcatagaggcaaa

SEQ ID NO: 2811205 - DNA, 25 bp, Homo sapien
cttatggcagccaaaacttgttcct

SEQ ID NO: 2811206 - DNA, 25 bp, Homo sapien
gcagctgactgaaggttctatggct

SEQ ID NO: 2811207 - DNA, 25 bp, Homo sapien
tgcagctgactgaaggttctatggc

SEQ ID NO: 2811208 - DNA, 25 bp, Homo sapien
agctgactgaaggttctatggctta

SEQ ID NO: 2811209 - DNA, 25 bp, Homo sapien
gagctccccaagctagcttcacact

SEQ ID NO: 2811210 - DNA, 25 bp, Homo sapien
gggccattagttcccactgagctgg

SEQ ID NO: 2811211 - DNA, 25 bp, Homo sapien
cccagagctccccaagctagcttca

SEQ ID NO: 2811212 - DNA, 25 bp, Homo sapien
ggggccattagttcccactgagctg

SEQ ID NO: 2811213 - DNA, 25 bp, Homo sapien
gatgcccatccattgttcccagctt

SEQ ID NO: 2811214 - DNA, 25 bp, Homo sapien
gaggccatggcctcaagtccacaga

SEQ ID NO: 2811215 - DNA, 25 bp, Homo sapien
tcttctgagctctagtgagagacca

SEQ ID NO: 2811216 - DNA, 25 bp, Homo sapien
cagatgctgccgaagcttgaggcca

SEQ ID NO: 2811217 - DNA, 25 bp, Homo sapien
gaagacacccctttgacatcatttc

SEQ ID NO: 2811218 - DNA, 25 bp, Homo sapien
tgactgacatcctttgaagacaccc

SEQ ID NO: 2811219 - DNA, 25 bp, Homo sapien
tctcccttagaaaactctcctgcat

SEQ ID NO: 2811220 - DNA, 25 bp, Homo sapien
ctactcctctcccttagaaaactct

SEQ ID NO: 2811221 - DNA, 25 bp, Homo sapien
ttgccacagtactgcacaggcctgg

SEQ ID NO: 2811222 - DNA, 25 bp, Homo sapien
tgccacagtactgcacaggcctgga

SEQ ID NO: 2811223 - DNA, 25 bp, Homo sapien
tgccacatagaggagttcaccacat

SEQ ID NO: 2811224 - DNA, 25 bp, Homo sapien
tccgtggaattttggatgcatcacc

SEQ ID NO: 2811225 - DNA, 25 bp, Homo sapien
caatcacaagtagtgagtccccagg

SEQ ID NO: 2811226 - DNA, 25 bp, Homo sapien
tatacttctgacctggctacgtgga

SEQ ID NO: 2811227 - DNA, 25 bp, Homo sapien
tccagccaatggtcctaggtacagg

SEQ ID NO: 2811228 - DNA, 25 bp, Homo sapien
caaaagacgcctttcagctggagtg

SEQ ID NO: 2811229 - DNA, 25 bp, Homo sapien
ccagggagctgaagccttggcagct

SEQ ID NO: 2811230 - DNA, 25 bp, Homo sapien
ccagagggcaaaagacgcctttcag

SEQ ID NO: 2811231 - DNA, 25 bp, Homo sapien
ccttgcaggagtgccagtaaggaga

SEQ ID NO: 2811232 - DNA, 25 bp, Homo sapien
ttctcaactgcatttggaaatttgc

SEQ ID NO: 2811233 - DNA, 25 bp, Homo sapien
atttcttctcaactgcatttggaaa

SEQ ID NO: 2811234 - DNA, 25 bp, Homo sapien
ttttggtccattgtgttcgtggact

SEQ ID NO: 2811235 - DNA, 25 bp, Homo sapien
cattgtgttcgtggactggtgttca

SEQ ID NO: 2811236 - DNA, 25 bp, Homo sapien
tgccccaaacctgaagagccacaat

SEQ ID NO: 2811237 - DNA, 25 bp, Homo sapien
cttccttgcctggatcagaagcaga

SEQ ID NO: 2811238 - DNA, 25 bp, Homo sapien
tgcctggatcagaagcagatctgag

SEQ ID NO: 2811239 - DNA, 25 bp, Homo sapien
aatccacaactacaaagatgggagg

SEQ ID NO: 2811240 - DNA, 25 bp, Homo sapien
tgttgaaaccacactaagtccctga

SEQ ID NO: 2811241 - DNA, 25 bp, Homo sapien
atattgtactctggtcctttgtgca

SEQ ID NO: 2811242 - DNA, 25 bp, Homo sapien
tattgtactctggtcctttgtgcag

SEQ ID NO: 2811243 - DNA, 25 bp, Homo sapien
gattatatgttgaaaccacactaag

SEQ ID NO: 2811244 - DNA, 25 bp, Homo sapien
gaaccaatccagaagcaaattgctg

SEQ ID NO: 2811245 - DNA, 25 bp, Homo sapien
gctgctgatagtaactgacagcatg

SEQ ID NO: 2811246 - DNA, 25 bp, Homo sapien
caggatcaacccgtatgatctcact

SEQ ID NO: 2811247 - DNA, 25 bp, Homo sapien
ctgatagtaactgacagcatgaatt

SEQ ID NO: 2811248 - DNA, 25 bp, Homo sapien
tctcctgaaacaatggtgcctttga

SEQ ID NO: 2811249 - DNA, 25 bp, Homo sapien
tagacaatcccagcatggtacatgg

SEQ ID NO: 2811250 - DNA, 25 bp, Homo sapien
gatgggctctagtctttgcaggata

SEQ ID NO: 2811251 - DNA, 25 bp, Homo sapien
gagcactggctggttgaagacaatc

SEQ ID NO: 2811252 - DNA, 25 bp, Homo sapien
ggagcatcaaatggtcttggagagc

SEQ ID NO: 2811253 - DNA, 25 bp, Homo sapien
agttagacttgggacacggagcatc

SEQ ID NO: 2811254 - DNA, 25 bp, Homo sapien
ggagagccacagttaaccttccaaa

SEQ ID NO: 2811255 - DNA, 25 bp, Homo sapien
tccaaacaggttagcaaaatttgca

SEQ ID NO: 2811256 - DNA, 25 bp, Homo sapien
caactcccagtgcaaggatagagct

SEQ ID NO: 2811257 - DNA, 25 bp, Homo sapien
actgtggtgatggtagaatgactac

SEQ ID NO: 2811258 - DNA, 25 bp, Homo sapien
ggatagagctttcttgactgactgt

SEQ ID NO: 2811259 - DNA, 25 bp, Homo sapien
caatagtcgaggctaccgagcttaa

SEQ ID NO: 2811260 - DNA, 25 bp, Homo sapien
cctttcccatatttgtgctgtggga

SEQ ID NO: 2811261 - DNA, 25 bp, Homo sapien
ccagtttgctgagtattttagcatg

SEQ ID NO: 2811262 - DNA, 25 bp, Homo sapien
ttgtgctgtgggatgctggcttcca

SEQ ID NO: 2811263 - DNA, 25 bp, Homo sapien
catcttgaactagaactcctttccc

SEQ ID NO: 2811264 - DNA, 25 bp, Homo sapien
ggggacacaaggctttcctccacat

SEQ ID NO: 2811265 - DNA, 25 bp, Homo sapien
gcgctccccaagctgtggggacaca

SEQ ID NO: 2811266 - DNA, 25 bp, Homo sapien
attgtttctgaagtggggaccagga

SEQ ID NO: 2811267 - DNA, 25 bp, Homo sapien
ggctctcctcctccttgtgtgctgg

SEQ ID NO: 2811268 - DNA, 25 bp, Homo sapien
ctccttgtgtgctgggcacattcat

SEQ ID NO: 2811269 - DNA, 25 bp, Homo sapien
tctcctcctccttgtgtgctgggca

SEQ ID NO: 2811270 - DNA, 25 bp, Homo sapien
tcctcctccttgtgtgctgggcaca

SEQ ID NO: 2811271 - DNA, 25 bp, Homo sapien
tacccaagtgatatgaaccccagtc

SEQ ID NO: 2811272 - DNA, 25 bp, Homo sapien
aatagaccgggctgatgagtaatgg

SEQ ID NO: 2811273 - DNA, 25 bp, Homo sapien
aatgtcccagtctcaacaaccaatg

SEQ ID NO: 2811274 - DNA, 25 bp, Homo sapien
tagggtttcgaaggaatggaacagc

SEQ ID NO: 2811275 - DNA, 25 bp, Homo sapien
tttagattgttaagtaccttatgga

SEQ ID NO: 2811276 - DNA, 25 bp, Homo sapien
tctcctgttgtgtgagttgtctatt

SEQ ID NO: 2811277 - DNA, 25 bp, Homo sapien
cccagaacagtttatttaataggca

SEQ ID NO: 2811278 - DNA, 25 bp, Homo sapien
ccttatggattatagatagtagact

SEQ ID NO: 2811279 - DNA, 25 bp, Homo sapien
atggaacgcctcatgaatatgtgtg

SEQ ID NO: 2811280 - DNA, 25 bp, Homo sapien
aaaattatggaacgcctcatgaata

SEQ ID NO: 2811281 - DNA, 25 bp, Homo sapien
attatggaacgcctcatgaatatgt

SEQ ID NO: 2811282 - DNA, 25 bp, Homo sapien
ggaacgcctcatgaatatgtgtgtc

SEQ ID NO: 2811283 - DNA, 25 bp, Homo sapien
ctaacattatgtagggccaggctca

SEQ ID NO: 2811284 - DNA, 25 bp, Homo sapien
gtaatgtcactctgtatctggtaaa

SEQ ID NO: 2811285 - DNA, 25 bp, Homo sapien
ggtagagtcacccttctaacattat

SEQ ID NO: 2811286 - DNA, 25 bp, Homo sapien
cgacttctatgttctcttggtagag

SEQ ID NO: 2811287 - DNA, 25 bp, Homo sapien
ctttgtctcttaattggtatatgtg

SEQ ID NO: 2811288 - DNA, 25 bp, Homo sapien
gtagtgagatcctgtatgtccaaaa

SEQ ID NO: 2811289 - DNA, 25 bp, Homo sapien
ttaaaaacattggactgagcatggt

SEQ ID NO: 2811290 - DNA, 25 bp, Homo sapien
ccaacgtgggggaatctcttgaatc

SEQ ID NO: 2811291 - DNA, 25 bp, Homo sapien
taattaactaatgcatacacagtgt

SEQ ID NO: 2811292 - DNA, 25 bp, Homo sapien
gtcctcctctgacctctttctggcc

SEQ ID NO: 2811293 - DNA, 25 bp, Homo sapien
tgtcctcctctgacctctttctggc

SEQ ID NO: 2811294 - DNA, 25 bp, Homo sapien
tcctcctctgacctctttctggcca

SEQ ID NO: 2811295 - DNA, 25 bp, Homo sapien
aggtcttaactgcccattggttgta

SEQ ID NO: 2811296 - DNA, 25 bp, Homo sapien
ggtcttaactgcccattggttgtag

SEQ ID NO: 2811297 - DNA, 25 bp, Homo sapien
tattgcagatagtaattcatgtttt

SEQ ID NO: 2811298 - DNA, 25 bp, Homo sapien
ttgcagatagtaattcatgttttca

SEQ ID NO: 2811299 - DNA, 25 bp, Homo sapien
tgcagatagtaattcatgttttcac

SEQ ID NO: 2811300 - DNA, 25 bp, Homo sapien
tcccccacttgttctacccaacagc

SEQ ID NO: 2811301 - DNA, 25 bp, Homo sapien
tctacccaacagccctcttggccgc

SEQ ID NO: 2811302 - DNA, 25 bp, Homo sapien
tctcccccacttgttctacccaaca

SEQ ID NO: 2811303 - DNA, 25 bp, Homo sapien
tacccaacagccctcttggccgctc

SEQ ID NO: 2811304 - DNA, 25 bp, Homo sapien
catctggcatacaaagctggcggca

SEQ ID NO: 2811305 - DNA, 25 bp, Homo sapien
aatcacatctggcatacaaagctgg

SEQ ID NO: 2811306 - DNA, 25 bp, Homo sapien
attgcagcattgttcgctgtcgctc

SEQ ID NO: 2811307 - DNA, 25 bp, Homo sapien
gctgtcgctctgtaatcacatctgg

SEQ ID NO: 2811308 - DNA, 25 bp, Homo sapien
tcttatagagcctgaaaatgggttc

SEQ ID NO: 2811309 - DNA, 25 bp, Homo sapien
aaatgggttctagctgatgtcctgc

SEQ ID NO: 2811310 - DNA, 25 bp, Homo sapien
tgaccaagcctacatggaagaactt

SEQ ID NO: 2811311 - DNA, 25 bp, Homo sapien
ctatttggagaaggatagacgtcca

SEQ ID NO: 2811312 - DNA, 25 bp, Homo sapien
tttggcctggctgtttgtaccctga

SEQ ID NO: 2811313 - DNA, 25 bp, Homo sapien
ttggcctggctgtttgtaccctgac

SEQ ID NO: 2811314 - DNA, 25 bp, Homo sapien
ccagttccaagagcttggtgcaccc

SEQ ID NO: 2811315 - DNA, 25 bp, Homo sapien
tggtcccccgtgaatctgccagttc

SEQ ID NO: 2811316 - DNA, 25 bp, Homo sapien
tccaagagcttggtgcaccctgtgt

SEQ ID NO: 2811317 - DNA, 25 bp, Homo sapien
gttccaagagcttggtgcaccctgt

SEQ ID NO: 2811318 - DNA, 25 bp, Homo sapien
gaaataaagtactctgttacattcc

SEQ ID NO: 2811319 - DNA, 25 bp, Homo sapien
aataaagtactctgttacattcctg

SEQ ID NO: 2811320 - DNA, 25 bp, Homo sapien
tgaaataaagtactctgttacattc

SEQ ID NO: 2811321 - DNA, 25 bp, Homo sapien
gtgaaataaagtactctgttacatt

SEQ ID NO: 2811322 - DNA, 25 bp, Homo sapien
gctagcttgcagggtacaagaactg

SEQ ID NO: 2811323 - DNA, 25 bp, Homo sapien
gcttgcagggtacaagaactggtac

SEQ ID NO: 2811324 - DNA, 25 bp, Homo sapien
agcttgcagggtacaagaactggta

SEQ ID NO: 2811325 - DNA, 25 bp, Homo sapien
cttgcagggtacaagaactggtacc

SEQ ID NO: 2811326 - DNA, 25 bp, Homo sapien
tgtcagcagattgacgtgtaacatg

SEQ ID NO: 2811327 - DNA, 25 bp, Homo sapien
tgagcttttgtgcatgagtgtcagc

SEQ ID NO: 2811328 - DNA, 25 bp, Homo sapien
caaacttggagtgagcttttgtgca

SEQ ID NO: 2811329 - DNA, 25 bp, Homo sapien
tcatgtgcgtagcaccaaacttgga

SEQ ID NO: 2811330 - DNA, 25 bp, Homo sapien
ctggagagaaaagaagcactgccca

SEQ ID NO: 2811331 - DNA, 25 bp, Homo sapien
tggagagaaaagaagcactgcccag

SEQ ID NO: 2811332 - DNA, 25 bp, Homo sapien
tatacctttgaggtcagtgagaagg

SEQ ID NO: 2811333 - DNA, 25 bp, Homo sapien
tcagccaagtatacctttgaggtca

SEQ ID NO: 2811334 - DNA, 25 bp, Homo sapien
ggtaatatattcagccaagtatacc

SEQ ID NO: 2811335 - DNA, 25 bp, Homo sapien
tatattcagccaagtatacctttga

SEQ ID NO: 2811336 - DNA, 25 bp, Homo sapien
cagatggcccagatggcgctgtgat

SEQ ID NO: 2811337 - DNA, 25 bp, Homo sapien
agcaattgggtggatctttactgcc

SEQ ID NO: 2811338 - DNA, 25 bp, Homo sapien
tgtgcattcataagacagatggccc

SEQ ID NO: 2811339 - DNA, 25 bp, Homo sapien
gcaggtctgcatgacgtcgtcttct

SEQ ID NO: 2811340 - DNA, 25 bp, Homo sapien
ttcgtttgactaacattctgcacag

SEQ ID NO: 2811341 - DNA, 25 bp, Homo sapien
tcgtttgactaacattctgcacagc

SEQ ID NO: 2811342 - DNA, 25 bp, Homo sapien
ccttcgtttgactaacattctgcac

SEQ ID NO: 2811343 - DNA, 25 bp, Homo sapien
cttcgtttgactaacattctgcaca

SEQ ID NO: 2811344 - DNA, 25 bp, Homo sapien
ccatttccgtttgcttgaataacac

SEQ ID NO: 2811345 - DNA, 25 bp, Homo sapien
tcagatagccccactaacattcaga

SEQ ID NO: 2811346 - DNA, 25 bp, Homo sapien
tccaggtagaggcatgtttatttgt

SEQ ID NO: 2811347 - DNA, 25 bp, Homo sapien
taaagcacatcctttagcgccagac

SEQ ID NO: 2811348 - DNA, 25 bp, Homo sapien
ggtgctgttatgcaccaggtaagag

SEQ ID NO: 2811349 - DNA, 25 bp, Homo sapien
caccaggtaagaggcagcattagca

SEQ ID NO: 2811350 - DNA, 25 bp, Homo sapien
gtaagaggcagcattagcaccaatg

SEQ ID NO: 2811351 - DNA, 25 bp, Homo sapien
gttatgcaccaggtaagaggcagca

SEQ ID NO: 2811352 - DNA, 25 bp, Homo sapien
tgaaccagttctcactgtaatgtcc

SEQ ID NO: 2811353 - DNA, 25 bp, Homo sapien
tgactagcatgggtccacctgaacc

SEQ ID NO: 2811354 - DNA, 25 bp, Homo sapien
tcttcaatgtagctcacctcaggga

SEQ ID NO: 2811355 - DNA, 25 bp, Homo sapien
tcctggaatcctatgaaccctatgg

SEQ ID NO: 2811356 - DNA, 25 bp, Homo sapien
taagagctgttgttgtttaccccag

SEQ ID NO: 2811357 - DNA, 25 bp, Homo sapien
ttgactgccaggtcccggtaggagc

SEQ ID NO: 2811358 - DNA, 25 bp, Homo sapien
caacagagaagaatcgaggtaaatc

SEQ ID NO: 2811359 - DNA, 25 bp, Homo sapien
gattgaatcagcttgttggctccta

SEQ ID NO: 2811360 - DNA, 25 bp, Homo sapien
caaacaagttcattgggacattcca

SEQ ID NO: 2811361 - DNA, 25 bp, Homo sapien
ggtgtaatggaaagcatcctggact

SEQ ID NO: 2811362 - DNA, 25 bp, Homo sapien
gaaagaaaaccttgatatgcccatg

SEQ ID NO: 2811363 - DNA, 25 bp, Homo sapien
tagactctctgcatcaatctgcgta

SEQ ID NO: 2811364 - DNA, 25 bp, Homo sapien
tcagttatgatagctagaaagggcg

SEQ ID NO: 2811365 - DNA, 25 bp, Homo sapien
gatagagattttcaggtgtcttcaa

SEQ ID NO: 2811366 - DNA, 25 bp, Homo sapien
tcaacttcccctatagctgtacaag

SEQ ID NO: 2811367 - DNA, 25 bp, Homo sapien
aatggaatattggatgtgaacacag

SEQ ID NO: 2811368 - DNA, 25 bp, Homo sapien
tagagggggtatacagcagcctgtc

SEQ ID NO: 2811369 - DNA, 25 bp, Homo sapien
tggttttaacctgtatcacatgagc

SEQ ID NO: 2811370 - DNA, 25 bp, Homo sapien
tttctggttcaatgtagccctcctt

SEQ ID NO: 2811371 - DNA, 25 bp, Homo sapien
agtgccagtgccaggattggataga

SEQ ID NO: 2811372 - DNA, 25 bp, Homo sapien
tgagagtgaacctttggctacaacc

SEQ ID NO: 2811373 - DNA, 25 bp, Homo sapien
gaacattctctaagcattacgggca

SEQ ID NO: 2811374 - DNA, 25 bp, Homo sapien
tactgcccagcaaggaatcaagtgc

SEQ ID NO: 2811375 - DNA, 25 bp, Homo sapien
gagagtcatctaatcaggcagctgc

SEQ ID NO: 2811376 - DNA, 25 bp, Homo sapien
gcatgaatatttccaacttgggacc

SEQ ID NO: 2811377 - DNA, 25 bp, Homo sapien
gacacaggcaaaatcgcagggtaag

SEQ ID NO: 2811378 - DNA, 25 bp, Homo sapien
ccttcacatgtacagtttagggaga

SEQ ID NO: 2811379 - DNA, 25 bp, Homo sapien
aatgggctctaatgcagtgttctaa

SEQ ID NO: 2811380 - DNA, 25 bp, Homo sapien
ctttaagctgggaaggtttgttcag

SEQ ID NO: 2811381 - DNA, 25 bp, Homo sapien
tgctttggcggtgagtttttactga

SEQ ID NO: 2811382 - DNA, 25 bp, Homo sapien
ccagggcttcgtagaagttttcata

SEQ ID NO: 2811383 - DNA, 25 bp, Homo sapien
gagcttgaagcagccggtcgtctct

SEQ ID NO: 2811384 - DNA, 25 bp, Homo sapien
cagggtgttctccttagggttctct

SEQ ID NO: 2811385 - DNA, 25 bp, Homo sapien
gtgttctccttagggttctcttgtg

SEQ ID NO: 2811386 - DNA, 25 bp, Homo sapien
ttgcggtagcatgggtgtgccttcc

SEQ ID NO: 2811387 - DNA, 25 bp, Homo sapien
tcagaactacccttttagccactga

SEQ ID NO: 2811388 - DNA, 25 bp, Homo sapien
cccttttagccactgagctgtaaga

SEQ ID NO: 2811389 - DNA, 25 bp, Homo sapien
cactgagctgtaagaagtggtcagg

SEQ ID NO: 2811390 - DNA, 25 bp, Homo sapien
tgtaggacgtgtacacacgaggctg

SEQ ID NO: 2811391 - DNA, 25 bp, Homo sapien
tcattctgaacagtgttgtaggacg

SEQ ID NO: 2811392 - DNA, 25 bp, Homo sapien
gctgcttcatatgctctggctgaga

SEQ ID NO: 2811393 - DNA, 25 bp, Homo sapien
gaagaggtcccgtgcaaaatcagct

SEQ ID NO: 2811394 - DNA, 25 bp, Homo sapien
tgtaacaaacgactatagaatttgt

SEQ ID NO: 2811395 - DNA, 25 bp, Homo sapien
gaacaggcccagatgctaagaacat

SEQ ID NO: 2811396 - DNA, 25 bp, Homo sapien
ctttaggagaaagctatcctcagag

SEQ ID NO: 2811397 - DNA, 25 bp, Homo sapien
caaaaagttatctaggccgggtgtg

SEQ ID NO: 2811398 - DNA, 25 bp, Homo sapien
tgtaattctcaaagtccaagtacct

SEQ ID NO: 2811399 - DNA, 25 bp, Homo sapien
tccaagtacctatagggttctctcc

SEQ ID NO: 2811400 - DNA, 25 bp, Homo sapien
gccattaggagatgtatcccgttct

SEQ ID NO: 2811401 - DNA, 25 bp, Homo sapien
cagacatgaagtcccaattcttaaa

SEQ ID NO: 2811402 - DNA, 25 bp, Homo sapien
cagcagcagaagtaagtgtgacatg

SEQ ID NO: 2811403 - DNA, 25 bp, Homo sapien
gacatgaaggtctcctcttcgggaa

SEQ ID NO: 2811404 - DNA, 25 bp, Homo sapien
ctccagggacttgatagcattttct

SEQ ID NO: 2811405 - DNA, 25 bp, Homo sapien
cttcaaattgtacatgctccaggga

SEQ ID NO: 2811406 - DNA, 25 bp, Homo sapien
ggtcctggggtcagctaaatccacc

SEQ ID NO: 2811407 - DNA, 25 bp, Homo sapien
tgtcctttacaacacactctttctt

SEQ ID NO: 2811408 - DNA, 25 bp, Homo sapien
cagagctttggcatttagcaagcca

SEQ ID NO: 2811409 - DNA, 25 bp, Homo sapien
tcaaagtcattgtcctttacaacac

SEQ ID NO: 2811410 - DNA, 25 bp, Homo sapien
ggccagcgggtcatactcagaggtc

SEQ ID NO: 2811411 - DNA, 25 bp, Homo sapien
tccagggttattggccagcgggtca

SEQ ID NO: 2811412 - DNA, 25 bp, Homo sapien
tttccatccagggttattggccagc

SEQ ID NO: 2811413 - DNA, 25 bp, Homo sapien
gtcatactcagaggtccagacaacc

SEQ ID NO: 2811414 - DNA, 25 bp, Homo sapien
ccatcatgtactggctcagtaatcc

SEQ ID NO: 2811415 - DNA, 25 bp, Homo sapien
gcccatcatgtactggctcagtaat

SEQ ID NO: 2811416 - DNA, 25 bp, Homo sapien
cccatcatgtactggctcagtaatc

SEQ ID NO: 2811417 - DNA, 25 bp, Homo sapien
cagaggccgaggtgcctgtgtgcgt

SEQ ID NO: 2811418 - DNA, 25 bp, Homo sapien
agtcattgtgcaggtcagcgctcgt

SEQ ID NO: 2811419 - DNA, 25 bp, Homo sapien
cagaggtgcagaggccgaggtgcct

SEQ ID NO: 2811420 - DNA, 25 bp, Homo sapien
gcctgtgtgcgtctccgtgcagtca

SEQ ID NO: 2811421 - DNA, 25 bp, Homo sapien
tctgagattcccaaacgaaatgctg

SEQ ID NO: 2811422 - DNA, 25 bp, Homo sapien
tgaagtactcccactacgaatattt

SEQ ID NO: 2811423 - DNA, 25 bp, Homo sapien
cacaggcggatgtttgccatctgct

SEQ ID NO: 2811424 - DNA, 25 bp, Homo sapien
tctgctatgaccaggaaactcagct

SEQ ID NO: 2811425 - DNA, 25 bp, Homo sapien
gcagagagaattagacaaaagcaac

SEQ ID NO: 2811426 - DNA, 25 bp, Homo sapien
cagagagaattagacaaaagcaaca

SEQ ID NO: 2811427 - DNA, 25 bp, Homo sapien
agagaattagacaaaagcaacatac

SEQ ID NO: 2811428 - DNA, 25 bp, Homo sapien
ctaagcagagagaattagacaaaag

SEQ ID NO: 2811429 - DNA, 25 bp, Homo sapien
attctctggtcggtgtaatctccgc

SEQ ID NO: 2811430 - DNA, 25 bp, Homo sapien
tttcccgaagcccagacgaagatgg

SEQ ID NO: 2811431 - DNA, 25 bp, Homo sapien
gaggagcacttctcagcgtaccagg

SEQ ID NO: 2811432 - DNA, 25 bp, Homo sapien
taatctccgctgctgtaagaggtgg

SEQ ID NO: 2811433 - DNA, 25 bp, Homo sapien
aagccttctgggctagccggccagg

SEQ ID NO: 2811434 - DNA, 25 bp, Homo sapien
cactgtaaatatccacgtgtccagg

SEQ ID NO: 2811435 - DNA, 25 bp, Homo sapien
ttgaactggcctcaatagcatccgt

SEQ ID NO: 2811436 - DNA, 25 bp, Homo sapien
tagggccccagcttgcactgtaaat

SEQ ID NO: 2811437 - DNA, 25 bp, Homo sapien
gataacatctgcctaccacttctta

SEQ ID NO: 2811438 - DNA, 25 bp, Homo sapien
gtgataacatctgcctaccacttct

SEQ ID NO: 2811439 - DNA, 25 bp, Homo sapien
atctgcctaccacttcttagcccct

SEQ ID NO: 2811440 - DNA, 25 bp, Homo sapien
taacatctgcctaccacttcttagc

SEQ ID NO: 2811441 - DNA, 25 bp, Homo sapien
caagtcctgtagcaactttggcatg

SEQ ID NO: 2811442 - DNA, 25 bp, Homo sapien
tgccaagctatagggacaatcctct

SEQ ID NO: 2811443 - DNA, 25 bp, Homo sapien
cccatttacaatgggtgatgtaagc

SEQ ID NO: 2811444 - DNA, 25 bp, Homo sapien
gaatccatatctattgactcgctgg

SEQ ID NO: 2811445 - DNA, 25 bp, Homo sapien
caaccccgcatttgtgattatttgc

SEQ ID NO: 2811446 - DNA, 25 bp, Homo sapien
gattatttgcttgcatggcaatttc

SEQ ID NO: 2811447 - DNA, 25 bp, Homo sapien
ctccaactttggaattgtatgcaac

SEQ ID NO: 2811448 - DNA, 25 bp, Homo sapien
gtatgcaactccaaccccgcatttg

SEQ ID NO: 2811449 - DNA, 25 bp, Homo sapien
taaaatcatagctagcctctggatc

SEQ ID NO: 2811450 - DNA, 25 bp, Homo sapien
gttctcgtttgtgggatcatatcgg

SEQ ID NO: 2811451 - DNA, 25 bp, Homo sapien
gggaaatggatcatggtcattatca

SEQ ID NO: 2811452 - DNA, 25 bp, Homo sapien
tatcattaaaatcatagctagcctc

SEQ ID NO: 2811453 - DNA, 25 bp, Homo sapien
tcccaggcacactaaataaacatgt

SEQ ID NO: 2811454 - DNA, 25 bp, Homo sapien
gccataaagctagttagtgacactt

SEQ ID NO: 2811455 - DNA, 25 bp, Homo sapien
gaatgttaccaagcctatggttcac

SEQ ID NO: 2811456 - DNA, 25 bp, Homo sapien
tgaatataggtgcaaagaagtggct

SEQ ID NO: 2811457 - DNA, 25 bp, Homo sapien
taacaactcctttgcccgtaatgcc

SEQ ID NO: 2811458 - DNA, 25 bp, Homo sapien
caaacaggtatcacatgaaggtcca

SEQ ID NO: 2811459 - DNA, 25 bp, Homo sapien
ttggcataaatgtccgtgtgattcc

SEQ ID NO: 2811460 - DNA, 25 bp, Homo sapien
catccagtacggtgataacaactcc

SEQ ID NO: 2811461 - DNA, 25 bp, Homo sapien
caaatgagatttttgccacaagtac

SEQ ID NO: 2811462 - DNA, 25 bp, Homo sapien
ttggaaaccctaacctgcaagatat

SEQ ID NO: 2811463 - DNA, 25 bp, Homo sapien
gcagctaaagatatctgtttccaac

SEQ ID NO: 2811464 - DNA, 25 bp, Homo sapien
tgtttccaacatccttactcagcaa

SEQ ID NO: 2811465 - DNA, 25 bp, Homo sapien
ctgagtcccttagagctgaacgttt

SEQ ID NO: 2811466 - DNA, 25 bp, Homo sapien
ggatcattgaagagatttagtgctg

SEQ ID NO: 2811467 - DNA, 25 bp, Homo sapien
attgctgattccacatgggatcatt

SEQ ID NO: 2811468 - DNA, 25 bp, Homo sapien
catactgttgttcagcccatatcac

SEQ ID NO: 2811469 - DNA, 25 bp, Homo sapien
aggcactccttcgagaccttctggg

SEQ ID NO: 2811470 - DNA, 25 bp, Homo sapien
gatatgaaaggcactccttcgagac

SEQ ID NO: 2811471 - DNA, 25 bp, Homo sapien
atcagataatctcttagtgatatga

SEQ ID NO: 2811472 - DNA, 25 bp, Homo sapien
gaaaggcactccttcgagaccttct

SEQ ID NO: 2811473 - DNA, 25 bp, Homo sapien
actgttcagtgcacaccaagcgcaa

SEQ ID NO: 2811474 - DNA, 25 bp, Homo sapien
gacccaaaaggtcatagcccagctc

SEQ ID NO: 2811475 - DNA, 25 bp, Homo sapien
gccttttcgcttttgcactgttcag

SEQ ID NO: 2811476 - DNA, 25 bp, Homo sapien
gggatctccgctgcccattcattga

SEQ ID NO: 2811477 - DNA, 25 bp, Homo sapien
ctgcagactccaggctcttcgctcc

SEQ ID NO: 2811478 - DNA, 25 bp, Homo sapien
gcagactccaggctcttcgctccat

SEQ ID NO: 2811479 - DNA, 25 bp, Homo sapien
tgcagactccaggctcttcgctcca

SEQ ID NO: 2811480 - DNA, 25 bp, Homo sapien
ctcgggctctagaccactcctggct

SEQ ID NO: 2811481 - DNA, 25 bp, Homo sapien
agtgaagcgcttcggtctccaggct

SEQ ID NO: 2811482 - DNA, 25 bp, Homo sapien
gagcgctcagtgaagcgcttcggtc

SEQ ID NO: 2811483 - DNA, 25 bp, Homo sapien
cggcgagcgctcagtgaagcgcttc

SEQ ID NO: 2811484 - DNA, 25 bp, Homo sapien
gcgacacacgcaggactgccgcagg

SEQ ID NO: 2811485 - DNA, 25 bp, Homo sapien
gaggtctggacagcgacacacgcag

SEQ ID NO: 2811486 - DNA, 25 bp, Homo sapien
ttcagcaccgaggtctggacagcga

SEQ ID NO: 2811487 - DNA, 25 bp, Homo sapien
ctagtattcagcaccgaggtctgga

SEQ ID NO: 2811488 - DNA, 25 bp, Homo sapien
cttgggaacgtgttggactcaggcc

SEQ ID NO: 2811489 - DNA, 25 bp, Homo sapien
gactcaggccaaaagtaaaatcgcc

SEQ ID NO: 2811490 - DNA, 25 bp, Homo sapien
caacttgtgtccagctcttgggaac

SEQ ID NO: 2811491 - DNA, 25 bp, Homo sapien
taaaatcgccgggaggtggaattga

SEQ ID NO: 2811492 - DNA, 25 bp, Homo sapien
catctttaattctactggttgggat

SEQ ID NO: 2811493 - DNA, 25 bp, Homo sapien
ttaattctactggttgggatgctct

SEQ ID NO: 2811494 - DNA, 25 bp, Homo sapien
tctttaattctactggttgggatgc

SEQ ID NO: 2811495 - DNA, 25 bp, Homo sapien
gccttcccaagtgattagaagacca

SEQ ID NO: 2811496 - DNA, 25 bp, Homo sapien
tctgggaagactagaaagttgccct

SEQ ID NO: 2811497 - DNA, 25 bp, Homo sapien
ccttcctcttggagcaatttgcttc

SEQ ID NO: 2811498 - DNA, 25 bp, Homo sapien
cacatctgccttgagaacctgatcc

SEQ ID NO: 2811499 - DNA, 25 bp, Homo sapien
cagtagcgatgggtttaagggctct

SEQ ID NO: 2811500 - DNA, 25 bp, Homo sapien
gaccaaggccacataggaagacagc

SEQ ID NO: 2811501 - DNA, 25 bp, Homo sapien
accaaggccacataggaagacagct

SEQ ID NO: 2811502 - DNA, 25 bp, Homo sapien
ccaattgcagcatggtaccctggat

SEQ ID NO: 2811503 - DNA, 25 bp, Homo sapien
taaaagtccatccatccaattgcag

SEQ ID NO: 2811504 - DNA, 25 bp, Homo sapien
taccctggatttgattctggacttg

SEQ ID NO: 2811505 - DNA, 25 bp, Homo sapien
gaaagacttcccctatactgagatt

SEQ ID NO: 2811506 - DNA, 25 bp, Homo sapien
taacacaggcccttagagcctgctc

SEQ ID NO: 2811507 - DNA, 25 bp, Homo sapien
cacaggcccttagagcctgctcctt

SEQ ID NO: 2811508 - DNA, 25 bp, Homo sapien
caggcccttagagcctgctccttga

SEQ ID NO: 2811509 - DNA, 25 bp, Homo sapien
gataacacaggcccttagagcctgc

SEQ ID NO: 2811510 - DNA, 25 bp, Homo sapien
tagcagtattttcaatgtcctttaa

SEQ ID NO: 2811511 - DNA, 25 bp, Homo sapien
tgcagaggccataatcaagaagtga

SEQ ID NO: 2811512 - DNA, 25 bp, Homo sapien
gaagtgaagtttctttagcagtatt

SEQ ID NO: 2811513 - DNA, 25 bp, Homo sapien
catccaacaagctggtgcttttcat

SEQ ID NO: 2811514 - DNA, 25 bp, Homo sapien
tttgattcatggttcatggctttgg

SEQ ID NO: 2811515 - DNA, 25 bp, Homo sapien
ctctttgattcatggttcatggctt

SEQ ID NO: 2811516 - DNA, 25 bp, Homo sapien
ctttgattcatggttcatggctttg

SEQ ID NO: 2811517 - DNA, 25 bp, Homo sapien
gctgctacacgattcccgtgggatt

SEQ ID NO: 2811518 - DNA, 25 bp, Homo sapien
ctcacataatcctctttgctatcca

SEQ ID NO: 2811519 - DNA, 25 bp, Homo sapien
ctatccacaaagtctgctgctgcta

SEQ ID NO: 2811520 - DNA, 25 bp, Homo sapien
tctgctgctgctacacgattcccgt

SEQ ID NO: 2811521 - DNA, 25 bp, Homo sapien
tcccatacacgatggcagtttatcc

SEQ ID NO: 2811522 - DNA, 25 bp, Homo sapien
cggcacatccagttcagcacagata

SEQ ID NO: 2811523 - DNA, 25 bp, Homo sapien
tcatttcccatacacgatggcagtt

SEQ ID NO: 2811524 - DNA, 25 bp, Homo sapien
atttcccatacacgatggcagttta

SEQ ID NO: 2811525 - DNA, 25 bp, Homo sapien
aggtaacacagatgtgcttgcacat

SEQ ID NO: 2811526 - DNA, 25 bp, Homo sapien
gaacagacccagtaaatagccaaga

SEQ ID NO: 2811527 - DNA, 25 bp, Homo sapien
ccaagagggctacaatctgaggaat

SEQ ID NO: 2811528 - DNA, 25 bp, Homo sapien
gaataggtctttgcaaccggtgaag

SEQ ID NO: 2811529 - DNA, 25 bp, Homo sapien
cacacatcgtgcaaaagagaaacag

SEQ ID NO: 2811530 - DNA, 25 bp, Homo sapien
ctcgacaacaaaaggtaagcaggat

SEQ ID NO: 2811531 - DNA, 25 bp, Homo sapien
gattggctatgggaacagtctgcat

SEQ ID NO: 2811532 - DNA, 25 bp, Homo sapien
agcatggaggggaataacctggatt

SEQ ID NO: 2811533 - DNA, 25 bp, Homo sapien
caacaaaaggtaagcaggatgcttt

SEQ ID NO: 2811534 - DNA, 25 bp, Homo sapien
aggatggaggtatcagccgactgtt

SEQ ID NO: 2811535 - DNA, 25 bp, Homo sapien
tctcacagtgaaataggatgctact

SEQ ID NO: 2811536 - DNA, 25 bp, Homo sapien
cacactagggtgagcaatcatctcg

SEQ ID NO: 2811537 - DNA, 25 bp, Homo sapien
gcagttacagtctcataagccaaga

SEQ ID NO: 2811538 - DNA, 25 bp, Homo sapien
caagttgacagtgtgaaatgtgtct

SEQ ID NO: 2811539 - DNA, 25 bp, Homo sapien
ttgctccatcgatgagcaggaaaac

SEQ ID NO: 2811540 - DNA, 25 bp, Homo sapien
aaagcaagttgacagtgtgaaatgt

SEQ ID NO: 2811541 - DNA, 25 bp, Homo sapien
gtgtctgtgctcattattgctccat

SEQ ID NO: 2811542 - DNA, 25 bp, Homo sapien
cttgctccccatagggatgccatgc

SEQ ID NO: 2811543 - DNA, 25 bp, Homo sapien
catgcaggaccccaagctgtgtgga

SEQ ID NO: 2811544 - DNA, 25 bp, Homo sapien
tgcaggaccccaagctgtgtggaag

SEQ ID NO: 2811545 - DNA, 25 bp, Homo sapien
tccccatagggatgccatgcaggac

SEQ ID NO: 2811546 - DNA, 25 bp, Homo sapien
gaagattcatgtgcgtgtttttgtg

SEQ ID NO: 2811547 - DNA, 25 bp, Homo sapien
ggcaattattagtaaagtggctatg

SEQ ID NO: 2811548 - DNA, 25 bp, Homo sapien
cctagcagtgcaattgcgggatcat

SEQ ID NO: 2811549 - DNA, 25 bp, Homo sapien
ttaaattcaattggctaaataccta

SEQ ID NO: 2811550 - DNA, 25 bp, Homo sapien
gacagtggcagccaatactcaacat

SEQ ID NO: 2811551 - DNA, 25 bp, Homo sapien
atgcaaatcgataaacgtaatccag

SEQ ID NO: 2811552 - DNA, 25 bp, Homo sapien
catataaacagaaccaatgacaaaa

SEQ ID NO: 2811553 - DNA, 25 bp, Homo sapien
actggctaaagacagggatgtcctc

SEQ ID NO: 2811554 - DNA, 25 bp, Homo sapien
caacatatgcaaatcgataaacgta

SEQ ID NO: 2811555 - DNA, 25 bp, Homo sapien
ctaattcatccttggagaaagtgca

SEQ ID NO: 2811556 - DNA, 25 bp, Homo sapien
ggacttccattctgtttgtacttaa

SEQ ID NO: 2811557 - DNA, 25 bp, Homo sapien
aatcagtcctaattcatccttggag

SEQ ID NO: 2811558 - DNA, 25 bp, Homo sapien
gctgcttgtgtaaacagggacttcc

SEQ ID NO: 2811559 - DNA, 25 bp, Homo sapien
gatgtctggatctatcctgcaagca

SEQ ID NO: 2811560 - DNA, 25 bp, Homo sapien
tcatcattgcagtaatgattttcag

SEQ ID NO: 2811561 - DNA, 25 bp, Homo sapien
gattttcaggcaccgctgccgtggg

SEQ ID NO: 2811562 - DNA, 25 bp, Homo sapien
gggcaataacacagtcctaagttga

SEQ ID NO: 2811563 - DNA, 25 bp, Homo sapien
taaggactctctcaacccttggagc

SEQ ID NO: 2811564 - DNA, 25 bp, Homo sapien
ccttaaccccagtgtgccatacaga

SEQ ID NO: 2811565 - DNA, 25 bp, Homo sapien
cagatgggtggaattgacttggcca

SEQ ID NO: 2811566 - DNA, 25 bp, Homo sapien
gccttgtcccttaaccccagtgtgc

SEQ ID NO: 2811567 - DNA, 25 bp, Homo sapien
gaagactgactcctgaagatgaaac

SEQ ID NO: 2811568 - DNA, 25 bp, Homo sapien
gcgtggcataagacctggatgttca

SEQ ID NO: 2811569 - DNA, 25 bp, Homo sapien
tgtggtcactacagccatgctcatg

SEQ ID NO: 2811570 - DNA, 25 bp, Homo sapien
caggtaggcccaatacagtcacagt

SEQ ID NO: 2811571 - DNA, 25 bp, Homo sapien
cattaaccaggctagacttgtattc

SEQ ID NO: 2811572 - DNA, 25 bp, Homo sapien
cctggccccttgtgctatacattta

SEQ ID NO: 2811573 - DNA, 25 bp, Homo sapien
tagaaacgtgccctccctacattaa

SEQ ID NO: 2811574 - DNA, 25 bp, Homo sapien
ggcagcatttacactagcatcaccg

SEQ ID NO: 2811575 - DNA, 25 bp, Homo sapien
caataaagctgagttccatcatgtc

SEQ ID NO: 2811576 - DNA, 25 bp, Homo sapien
tcagtgagaccagcataatggaact

SEQ ID NO: 2811577 - DNA, 25 bp, Homo sapien
aactggcttttgcaggacttgagta

SEQ ID NO: 2811578 - DNA, 25 bp, Homo sapien
caatatggcagaggtatttcaggag

SEQ ID NO: 2811579 - DNA, 25 bp, Homo sapien
tatttgaagtcaacgggcctgattt

SEQ ID NO: 2811580 - DNA, 25 bp, Homo sapien
tcccaggatccattgtttgtcatct

SEQ ID NO: 2811581 - DNA, 25 bp, Homo sapien
tcgaataatgagacagccctgggaa

SEQ ID NO: 2811582 - DNA, 25 bp, Homo sapien
tggatcaagccacctttgccacctt

SEQ ID NO: 2811583 - DNA, 25 bp, Homo sapien
ggtcgaagcgtagactggccacgcc

SEQ ID NO: 2811584 - DNA, 25 bp, Homo sapien
ttctttctgaccaaccgggaccaga

SEQ ID NO: 2811585 - DNA, 25 bp, Homo sapien
caagctagatctgggcatcgaagga

SEQ ID NO: 2811586 - DNA, 25 bp, Homo sapien
ctacttctccggattgttgggagga

SEQ ID NO: 2811587 - DNA, 25 bp, Homo sapien
agcccggccagaagcccgccgcctc

SEQ ID NO: 2811588 - DNA, 25 bp, Homo sapien
atgtcccagcccggccagaagcccg

SEQ ID NO: 2811589 - DNA, 25 bp, Homo sapien
tcccagcccggccagaagcccgccg

SEQ ID NO: 2811590 - DNA, 25 bp, Homo sapien
cagcccggccagaagcccgccgcct

SEQ ID NO: 2811591 - DNA, 25 bp, Homo sapien
ctgcaggtggcttcggttccccggc

SEQ ID NO: 2811592 - DNA, 25 bp, Homo sapien
taccgggtcccggagctgtggccgc

SEQ ID NO: 2811593 - DNA, 25 bp, Homo sapien
gggtccagtgcgctgggcgtggcgt

SEQ ID NO: 2811594 - DNA, 25 bp, Homo sapien
ccatgaggtgagtggcgctcctgtc

SEQ ID NO: 2811595 - DNA, 25 bp, Homo sapien
gaggatgaggatgaacggggaatga

SEQ ID NO: 2811596 - DNA, 25 bp, Homo sapien
aggatgaggatgaacggggaatgag

SEQ ID NO: 2811597 - DNA, 25 bp, Homo sapien
gtaagacgtgggtgaatgaggatga

SEQ ID NO: 2811598 - DNA, 25 bp, Homo sapien
ctggtaagacgtgggtgaatgagga

SEQ ID NO: 2811599 - DNA, 25 bp, Homo sapien
gatcggagccagccggttgttgcca

SEQ ID NO: 2811600 - DNA, 25 bp, Homo sapien
atgtgcggagctcagtgccagcccg

SEQ ID NO: 2811601 - DNA, 25 bp, Homo sapien
cattcgccagctggtggtacaagac

SEQ ID NO: 2811602 - DNA, 25 bp, Homo sapien
caagacggtaaataggagcggttgt

SEQ ID NO: 2811603 - DNA, 25 bp, Homo sapien
cggagagtccagagggtatcaagat

SEQ ID NO: 2811604 - DNA, 25 bp, Homo sapien
gataaccttttattgctccatgatt

SEQ ID NO: 2811605 - DNA, 25 bp, Homo sapien
tgtgtgtgatggtagagagctgagt

SEQ ID NO: 2811606 - DNA, 25 bp, Homo sapien
agagctgagttccatgagctcggag

SEQ ID NO: 2811607 - DNA, 25 bp, Homo sapien
ggccactttgtacttaggacaacta

SEQ ID NO: 2811608 - DNA, 25 bp, Homo sapien
cttaggacaactactcccccaggtg

SEQ ID NO: 2811609 - DNA, 25 bp, Homo sapien
cccaagaaggccactttgtacttag

SEQ ID NO: 2811610 - DNA, 25 bp, Homo sapien
gaaggccactttgtacttaggacaa

SEQ ID NO: 2811611 - DNA, 25 bp, Homo sapien
gcatatttgcgaagtgcacccaccg

SEQ ID NO: 2811612 - DNA, 25 bp, Homo sapien
acccaccgtcgttgccttattctgg

SEQ ID NO: 2811613 - DNA, 25 bp, Homo sapien
cttattctggtagtcacagggtgac

SEQ ID NO: 2811614 - DNA, 25 bp, Homo sapien
tatttacagcagtatagactcatga

SEQ ID NO: 2811615 - DNA, 25 bp, Homo sapien
taatctcattgaatttagagatcat

SEQ ID NO: 2811616 - DNA, 25 bp, Homo sapien
aataatctcattgaatttagagatc

SEQ ID NO: 2811617 - DNA, 25 bp, Homo sapien
ctcattgaatttagagatcatgaaa

SEQ ID NO: 2811618 - DNA, 25 bp, Homo sapien
atctcattgaatttagagatcatga

SEQ ID NO: 2811619 - DNA, 25 bp, Homo sapien
ccaatgtttatttcaagcgtggcct

SEQ ID NO: 2811620 - DNA, 25 bp, Homo sapien
cctgtgcctcagctcaaggaccaat

SEQ ID NO: 2811621 - DNA, 25 bp, Homo sapien
ctttttcatcctgttgcctgattct

SEQ ID NO: 2811622 - DNA, 25 bp, Homo sapien
tgcctgattctaatcccctgtgcct

SEQ ID NO: 2811623 - DNA, 25 bp, Homo sapien
cccaaaatagtgtgttagcctagca

SEQ ID NO: 2811624 - DNA, 25 bp, Homo sapien
gtagtgtaggttctcccatgcaaaa

SEQ ID NO: 2811625 - DNA, 25 bp, Homo sapien
caaagcactatactaccagctggct

SEQ ID NO: 2811626 - DNA, 25 bp, Homo sapien
gaatgtagtgtgaaaggatccaaaa

SEQ ID NO: 2811627 - DNA, 25 bp, Homo sapien
tgcttcatctcttgtaagtccaaaa

SEQ ID NO: 2811628 - DNA, 25 bp, Homo sapien
taaagatggaaagccactcctgcca

SEQ ID NO: 2811629 - DNA, 25 bp, Homo sapien
gacttagaatctgacttgggaactc

SEQ ID NO: 2811630 - DNA, 25 bp, Homo sapien
ggacttctctggtccacaaaatgct

SEQ ID NO: 2811631 - DNA, 25 bp, Homo sapien
ggtagccaccaaaaacaaagtagca

SEQ ID NO: 2811632 - DNA, 25 bp, Homo sapien
ggcaatcccctaatctgttaaagag

SEQ ID NO: 2811633 - DNA, 25 bp, Homo sapien
gtagcaataagcataccaggaaatg

SEQ ID NO: 2811634 - DNA, 25 bp, Homo sapien
aaatagcggcatgaaagttaactgg

SEQ ID NO: 2811635 - DNA, 25 bp, Homo sapien
gaattcctagcaacatttgagaggg

SEQ ID NO: 2811636 - DNA, 25 bp, Homo sapien
tatacattaccaaggagaccacagc

SEQ ID NO: 2811637 - DNA, 25 bp, Homo sapien
tgatacctcggtaagcagcacatct

SEQ ID NO: 2811638 - DNA, 25 bp, Homo sapien
gagataaatgtttttgcgcagccac

SEQ ID NO: 2811639 - DNA, 25 bp, Homo sapien
cctgttgcgtcagcttcaggatcat

SEQ ID NO: 2811640 - DNA, 25 bp, Homo sapien
atcctgttgcgtcagcttcaggatc

SEQ ID NO: 2811641 - DNA, 25 bp, Homo sapien
tcctgttgcgtcagcttcaggatca

SEQ ID NO: 2811642 - DNA, 25 bp, Homo sapien
tgtaagtgatgtgggaaaagacccc

SEQ ID NO: 2811643 - DNA, 25 bp, Homo sapien
tctgtgcctggtactttgtcaaagc

SEQ ID NO: 2811644 - DNA, 25 bp, Homo sapien
tatcggtctgtcttgtaacagggtc

SEQ ID NO: 2811645 - DNA, 25 bp, Homo sapien
tctcagaaacctgcagatgaccaag

SEQ ID NO: 2811646 - DNA, 25 bp, Homo sapien
tcccagtccaaagttagaggcctct

SEQ ID NO: 2811647 - DNA, 25 bp, Homo sapien
ggtctactcttcattcctcagggca

SEQ ID NO: 2811648 - DNA, 25 bp, Homo sapien
ttcatttaaagtgagagcaggccct

SEQ ID NO: 2811649 - DNA, 25 bp, Homo sapien
ggttgtgccacaataatgctatgtc

SEQ ID NO: 2811650 - DNA, 25 bp, Homo sapien
acacaaaagccagtcctgatcgaga

SEQ ID NO: 2811651 - DNA, 25 bp, Homo sapien
ccagtcctgatcgagacaagctcta

SEQ ID NO: 2811652 - DNA, 25 bp, Homo sapien
caaaagccagtcctgatcgagacaa

SEQ ID NO: 2811653 - DNA, 25 bp, Homo sapien
aaagccagtcctgatcgagacaagc

SEQ ID NO: 2811654 - DNA, 25 bp, Homo sapien
tgttgtgacaaatagtaggatatcg

SEQ ID NO: 2811655 - DNA, 25 bp, Homo sapien
tagtataaggtcttccaggtccatc

SEQ ID NO: 2811656 - DNA, 25 bp, Homo sapien
catggtcgccatgttttattctctg

SEQ ID NO: 2811657 - DNA, 25 bp, Homo sapien
caacatggtagtttgggatgcatag

SEQ ID NO: 2811658 - DNA, 25 bp, Homo sapien
ggaattagagcatcaatgtcaccca

SEQ ID NO: 2811659 - DNA, 25 bp, Homo sapien
ggattggtgatagccatagcctcat

SEQ ID NO: 2811660 - DNA, 25 bp, Homo sapien
tgagtcaggcaccacgggaattaga

SEQ ID NO: 2811661 - DNA, 25 bp, Homo sapien
cagctccaaagcacctaagaatgga

SEQ ID NO: 2811662 - DNA, 25 bp, Homo sapien
tttattgtttccaaagggcatggcc

SEQ ID NO: 2811663 - DNA, 25 bp, Homo sapien
acagatgtgtttgcaaggatacggc

SEQ ID NO: 2811664 - DNA, 25 bp, Homo sapien
tgtatctaatcctcccatttgggca

SEQ ID NO: 2811665 - DNA, 25 bp, Homo sapien
taagctacaggatctaaagcagccc

SEQ ID NO: 2811666 - DNA, 25 bp, Homo sapien
aacaaagataggttcctcaggtgac

SEQ ID NO: 2811667 - DNA, 25 bp, Homo sapien
aaaggtttctgcacattgttgtggc

SEQ ID NO: 2811668 - DNA, 25 bp, Homo sapien
gacatttttcgtaccaatcatcaat

SEQ ID NO: 2811669 - DNA, 25 bp, Homo sapien
ggcagatttatgtccagaagtcact

SEQ ID NO: 2811670 - DNA, 25 bp, Homo sapien
gcaaaacacgctgcaacttgaatca

SEQ ID NO: 2811671 - DNA, 25 bp, Homo sapien
ttcaaaaagttcagtttgaattctc

SEQ ID NO: 2811672 - DNA, 25 bp, Homo sapien
caccttagagtcagcgcaaaacacg

SEQ ID NO: 2811673 - DNA, 25 bp, Homo sapien
ggtgtgaggatttccgcaccttaga

SEQ ID NO: 2811674 - DNA, 25 bp, Homo sapien
gaatgtcctatttgctaatatgagc

SEQ ID NO: 2811675 - DNA, 25 bp, Homo sapien
aagcaaccgtgtgtgaagtcttcac

SEQ ID NO: 2811676 - DNA, 25 bp, Homo sapien
ctgacttgacttgaactccgttggt

SEQ ID NO: 2811677 - DNA, 25 bp, Homo sapien
taagtccctgtgtagcaagttttca

SEQ ID NO: 2811678 - DNA, 25 bp, Homo sapien
gagctttaacccagtcatcgtccgg

SEQ ID NO: 2811679 - DNA, 25 bp, Homo sapien
gtccgccaggactagtaaaagccag

SEQ ID NO: 2811680 - DNA, 25 bp, Homo sapien
tatgtagaaaccacaagtccgccag

SEQ ID NO: 2811681 - DNA, 25 bp, Homo sapien
agagggtcccctctcggagctaaga

SEQ ID NO: 2811682 - DNA, 25 bp, Homo sapien
cacttgggtttacgttgcagggcaa

SEQ ID NO: 2811683 - DNA, 25 bp, Homo sapien
ccagttggagccaaaacagccatct

SEQ ID NO: 2811684 - DNA, 25 bp, Homo sapien
tgattagagataacaggaacctggc

SEQ ID NO: 2811685 - DNA, 25 bp, Homo sapien
tcttctgtggcagggaacccaacac

SEQ ID NO: 2811686 - DNA, 25 bp, Homo sapien
tcttatccatccaaccgatgttttc

SEQ ID NO: 2811687 - DNA, 25 bp, Homo sapien
caatggtttcaattgtctgttggac

SEQ ID NO: 2811688 - DNA, 25 bp, Homo sapien
tctgttggacacaacggagctgaga

SEQ ID NO: 2811689 - DNA, 25 bp, Homo sapien
tttatcaaaattcttatccatccaa

SEQ ID NO: 2811690 - DNA, 25 bp, Homo sapien
ttagcaagttatggcggtaagaccc

SEQ ID NO: 2811691 - DNA, 25 bp, Homo sapien
ggcagtcccagctgtctgaatagga

SEQ ID NO: 2811692 - DNA, 25 bp, Homo sapien
catagattccagacagccagttcct

SEQ ID NO: 2811693 - DNA, 25 bp, Homo sapien
tgagctcacatgacagataggctgg

SEQ ID NO: 2811694 - DNA, 25 bp, Homo sapien
tgatagctccactaaaaacagacct

SEQ ID NO: 2811695 - DNA, 25 bp, Homo sapien
gcgaagccagctgttaaccattact

SEQ ID NO: 2811696 - DNA, 25 bp, Homo sapien
agaccttctacaacagcgaagccag

SEQ ID NO: 2811697 - DNA, 25 bp, Homo sapien
tgtttcatacgctctcagaatgcaa

SEQ ID NO: 2811698 - DNA, 25 bp, Homo sapien
gattccggacctgcctctttagcaa

SEQ ID NO: 2811699 - DNA, 25 bp, Homo sapien
tctttagcaacagctggatgaccac

SEQ ID NO: 2811700 - DNA, 25 bp, Homo sapien
taataagtgacagggaaccatgaac

SEQ ID NO: 2811701 - DNA, 25 bp, Homo sapien
gacaattgcgagaattatcctcagc

SEQ ID NO: 2811702 - DNA, 25 bp, Homo sapien
ccacaccctcaaagtattttgtcta

SEQ ID NO: 2811703 - DNA, 25 bp, Homo sapien
tttatgctgctgtcaacaccatagc

SEQ ID NO: 2811704 - DNA, 25 bp, Homo sapien
tgtctaccccatattaattagctaa

SEQ ID NO: 2811705 - DNA, 25 bp, Homo sapien
ttttgtctaccccatattaattagc

SEQ ID NO: 2811706 - DNA, 25 bp, Homo sapien
tgtggagaattgatttgttgtaccc

SEQ ID NO: 2811707 - DNA, 25 bp, Homo sapien
agaattgatttgttgtacccattac

SEQ ID NO: 2811708 - DNA, 25 bp, Homo sapien
caagccgtgttcttgtggagaattg

SEQ ID NO: 2811709 - DNA, 25 bp, Homo sapien
ctcttcaagccgtgttcttgtggag

SEQ ID NO: 2811710 - DNA, 25 bp, Homo sapien
catgtgggctatggaagatgagcca

SEQ ID NO: 2811711 - DNA, 25 bp, Homo sapien
gtgggctatggaagatgagccaagt

SEQ ID NO: 2811712 - DNA, 25 bp, Homo sapien
ggctatggaagatgagccaagttca

SEQ ID NO: 2811713 - DNA, 25 bp, Homo sapien
gggctatggaagatgagccaagttc

SEQ ID NO: 2811714 - DNA, 25 bp, Homo sapien
cagctaaaaactgatcggtgtgaaa

SEQ ID NO: 2811715 - DNA, 25 bp, Homo sapien
ccaatgggttaagatctagctgtaa

SEQ ID NO: 2811716 - DNA, 25 bp, Homo sapien
caaaatatgatgtctatccaatggg

SEQ ID NO: 2811717 - DNA, 25 bp, Homo sapien
tacacaccaacagcctaataaaagg

SEQ ID NO: 2811718 - DNA, 25 bp, Homo sapien
tttcctcagaaattgccaggccagt

SEQ ID NO: 2811719 - DNA, 25 bp, Homo sapien
caggccagtgggtatcctactgggt

SEQ ID NO: 2811720 - DNA, 25 bp, Homo sapien
ttttatctcccttaaagctttcatc

SEQ ID NO: 2811721 - DNA, 25 bp, Homo sapien
ggttcctgccaatgagtgtaagaat

SEQ ID NO: 2811722 - DNA, 25 bp, Homo sapien
actgccaaggtcacgtcgacaggca

SEQ ID NO: 2811723 - DNA, 25 bp, Homo sapien
acactgccaaggtcacgtcgacagg

SEQ ID NO: 2811724 - DNA, 25 bp, Homo sapien
aaacactgccaaggtcacgtcgaca

SEQ ID NO: 2811725 - DNA, 25 bp, Homo sapien
tgccaaggtcacgtcgacaggcagg

SEQ ID NO: 2811726 - DNA, 25 bp, Homo sapien
tagtagttgactccgcagcattcgc

SEQ ID NO: 2811727 - DNA, 25 bp, Homo sapien
tgagccctcgtctgtccatgtctgc

SEQ ID NO: 2811728 - DNA, 25 bp, Homo sapien
tctgccctctgtacgcacggctgat

SEQ ID NO: 2811729 - DNA, 25 bp, Homo sapien
cacggctgatagttgtgcacacagg

SEQ ID NO: 2811730 - DNA, 25 bp, Homo sapien
taggaatcagctcattcaaaccttg

SEQ ID NO: 2811731 - DNA, 25 bp, Homo sapien
gaaacacgggcataatttcagtttc

SEQ ID NO: 2811732 - DNA, 25 bp, Homo sapien
cagtttcatgtttcaagtacaggga

SEQ ID NO: 2811733 - DNA, 25 bp, Homo sapien
aaatccaaggccttttcaatggaca

SEQ ID NO: 2811734 - DNA, 25 bp, Homo sapien
gacttcaaggctgttataaagaccc

SEQ ID NO: 2811735 - DNA, 25 bp, Homo sapien
cccagtggtgggagaaacctgatcc

SEQ ID NO: 2811736 - DNA, 25 bp, Homo sapien
tggttatctacacttccgcctcagt

SEQ ID NO: 2811737 - DNA, 25 bp, Homo sapien
gacaaggcaaggagtttcgccagga

SEQ ID NO: 2811738 - DNA, 25 bp, Homo sapien
ataaaccgcgactttgtgcagcgtg

SEQ ID NO: 2811739 - DNA, 25 bp, Homo sapien
ctttcagaaataaaccgcgactttg

SEQ ID NO: 2811740 - DNA, 25 bp, Homo sapien
accgcgactttgtgcagcgtgtatt

SEQ ID NO: 2811741 - DNA, 25 bp, Homo sapien
ttcaacttcttgttatcaatcaatc

SEQ ID NO: 2811742 - DNA, 25 bp, Homo sapien
gagactcgcccgatcattactgctg

SEQ ID NO: 2811743 - DNA, 25 bp, Homo sapien
cctcgtaatgcacaatgtaatagcc

SEQ ID NO: 2811744 - DNA, 25 bp, Homo sapien
ttaaaaggccagtcaaagagtccca

SEQ ID NO: 2811745 - DNA, 25 bp, Homo sapien
taatagccattcatgcccacattaa

SEQ ID NO: 2811746 - DNA, 25 bp, Homo sapien
cggatttgctggtgatgaatgtcaa

SEQ ID NO: 2811747 - DNA, 25 bp, Homo sapien
gtttttagcaaaaatcgatggacca

SEQ ID NO: 2811748 - DNA, 25 bp, Homo sapien
cgatggaccatgtcggatttgctgg

SEQ ID NO: 2811749 - DNA, 25 bp, Homo sapien
gaatgtcaatggaacatgccacagg

SEQ ID NO: 2811750 - DNA, 25 bp, Homo sapien
agaaaatactatgctgaaacattta

SEQ ID NO: 2811751 - DNA, 25 bp, Homo sapien
gaaaatactatgctgaaacatttag

SEQ ID NO: 2811752 - DNA, 25 bp, Homo sapien
gatggatatcgattaatcaagattt

SEQ ID NO: 2811753 - DNA, 25 bp, Homo sapien
gatagatggatatcgattaatcaag

SEQ ID NO: 2811754 - DNA, 25 bp, Homo sapien
tgtagatagatggatatcgattaat

SEQ ID NO: 2811755 - DNA, 25 bp, Homo sapien
tagatggatatcgattaatcaagat

SEQ ID NO: 2811756 - DNA, 25 bp, Homo sapien
ggatatataggaatttgttgtgtta

SEQ ID NO: 2811757 - DNA, 25 bp, Homo sapien
aacatgtatctaggtaaaggatata

SEQ ID NO: 2811758 - DNA, 25 bp, Homo sapien
gtaaaggatatataggaatttgttg

SEQ ID NO: 2811759 - DNA, 25 bp, Homo sapien
taacatgtatctaggtaaaggatat

SEQ ID NO: 2811760 - DNA, 25 bp, Homo sapien
aagcctccttaatcctactgggaag

SEQ ID NO: 2811761 - DNA, 25 bp, Homo sapien
aagtcaacttcataggatacacaga

SEQ ID NO: 2811762 - DNA, 25 bp, Homo sapien
tatttcaaaagcaaggttccatcct

SEQ ID NO: 2811763 - DNA, 25 bp, Homo sapien
tattttagcaatagtggtaagggca

SEQ ID NO: 2811764 - DNA, 25 bp, Homo sapien
acaaattttactctaggagcattac

SEQ ID NO: 2811765 - DNA, 25 bp, Homo sapien
cggggcgccgtcagagcccttcatg

SEQ ID NO: 2811766 - DNA, 25 bp, Homo sapien
cccctcactgtgatggttattaggg

SEQ ID NO: 2811767 - DNA, 25 bp, Homo sapien
cagagcccttcatgtagtgctcttg

SEQ ID NO: 2811768 - DNA, 25 bp, Homo sapien
tcttgcttcatgtgtacattcctcc

SEQ ID NO: 2811769 - DNA, 25 bp, Homo sapien
tcccttttacaccatctgtagggca

SEQ ID NO: 2811770 - DNA, 25 bp, Homo sapien
cttttacaccatctgtagggcaaat

SEQ ID NO: 2811771 - DNA, 25 bp, Homo sapien
aggatgaagatgaatgttgacttct

SEQ ID NO: 2811772 - DNA, 25 bp, Homo sapien
tccatcccttttacaccatctgtag

SEQ ID NO: 2811773 - DNA, 25 bp, Homo sapien
aatgcgtcagcactaagatactccc

SEQ ID NO: 2811774 - DNA, 25 bp, Homo sapien
gatactcccttagcatattcagaat

SEQ ID NO: 2811775 - DNA, 25 bp, Homo sapien
ggagatactgtacaataccactttt

SEQ ID NO: 2811776 - DNA, 25 bp, Homo sapien
catactatcccacaggtcctcgttt

SEQ ID NO: 2811777 - DNA, 25 bp, Homo sapien
tctacctccattgcgtcaaaacatt

SEQ ID NO: 2811778 - DNA, 25 bp, Homo sapien
tcatcaaacatctcccggatctgag

SEQ ID NO: 2811779 - DNA, 25 bp, Homo sapien
ccattgcgtcaaaacatttgccaaa

SEQ ID NO: 2811780 - DNA, 25 bp, Homo sapien
gaatttaaagcatctacctccattg

SEQ ID NO: 2811781 - DNA, 25 bp, Homo sapien
ctcaaatgtgaaggataaataacta

SEQ ID NO: 2811782 - DNA, 25 bp, Homo sapien
atgtgaaggataaataactacttac

SEQ ID NO: 2811783 - DNA, 25 bp, Homo sapien
aatgtgaaggataaataactactta

SEQ ID NO: 2811784 - DNA, 25 bp, Homo sapien
caaatgtgaaggataaataactact

SEQ ID NO: 2811785 - DNA, 25 bp, Homo sapien
tttcagttcaggatgggtcacactg

SEQ ID NO: 2811786 - DNA, 25 bp, Homo sapien
tcatttagccaaagatcattccacc

SEQ ID NO: 2811787 - DNA, 25 bp, Homo sapien
gggtcacactgacagacacaaactc

SEQ ID NO: 2811788 - DNA, 25 bp, Homo sapien
caaactccataaatttggcaaatcc

SEQ ID NO: 2811789 - DNA, 25 bp, Homo sapien
tatatgttgtcagtccccagttttc

SEQ ID NO: 2811790 - DNA, 25 bp, Homo sapien
catgggccacagtcattgtgatgcc

SEQ ID NO: 2811791 - DNA, 25 bp, Homo sapien
ccagttttccatagcaccagactga

SEQ ID NO: 2811792 - DNA, 25 bp, Homo sapien
gccaagcttacttgatgcagaagac

SEQ ID NO: 2811793 - DNA, 25 bp, Homo sapien
ccttttcaggcctcttgactccatt

SEQ ID NO: 2811794 - DNA, 25 bp, Homo sapien
cgccttttcaggcctcttgactcca

SEQ ID NO: 2811795 - DNA, 25 bp, Homo sapien
ttcaggcctcttgactccatttcta

SEQ ID NO: 2811796 - DNA, 25 bp, Homo sapien
cccgccttttcaggcctcttgactc

SEQ ID NO: 2811797 - DNA, 25 bp, Homo sapien
caaccgcaggtttgtcacttgctgg

SEQ ID NO: 2811798 - DNA, 25 bp, Homo sapien
caaaagagtccccatgccatatgcc

SEQ ID NO: 2811799 - DNA, 25 bp, Homo sapien
gatgctcagaaagatcaaccgcagg

SEQ ID NO: 2811800 - DNA, 25 bp, Homo sapien
cctgccaagcaggtgccagtaaaga

SEQ ID NO: 2811801 - DNA, 25 bp, Homo sapien
gatttatcttgtctggcacagcata

SEQ ID NO: 2811802 - DNA, 25 bp, Homo sapien
aaaattctagaagagtcaccgcagc

SEQ ID NO: 2811803 - DNA, 25 bp, Homo sapien
gggatacggtatgctgaaataatcc

SEQ ID NO: 2811804 - DNA, 25 bp, Homo sapien
gcatccagtgcataatctgcttgat

SEQ ID NO: 2811805 - DNA, 25 bp, Homo sapien
tatgagtccttcagcaacagtcaca

SEQ ID NO: 2811806 - DNA, 25 bp, Homo sapien
gatgaaggccaccagataggtgctc

SEQ ID NO: 2811807 - DNA, 25 bp, Homo sapien
caaaatggtcttctatgagtccttc

SEQ ID NO: 2811808 - DNA, 25 bp, Homo sapien
gaaggccaccagataggtgctcatc

SEQ ID NO: 2811809 - DNA, 25 bp, Homo sapien
cagtgggttcaaattgtgttgatgc

SEQ ID NO: 2811810 - DNA, 25 bp, Homo sapien
cattctagctgcagtgggttcaaat

SEQ ID NO: 2811811 - DNA, 25 bp, Homo sapien
ggagatggctaggtgccttggctct

SEQ ID NO: 2811812 - DNA, 25 bp, Homo sapien
tattggagatggctaggtgccttgg

SEQ ID NO: 2811813 - DNA, 25 bp, Homo sapien
tcgtggttccccagaaggtcagcgt

SEQ ID NO: 2811814 - DNA, 25 bp, Homo sapien
gaaagtctccgaaagattgccagca

SEQ ID NO: 2811815 - DNA, 25 bp, Homo sapien
tattccaaggaaatggtgtcccatc

SEQ ID NO: 2811816 - DNA, 25 bp, Homo sapien
aatgacaactgtgtacgggagcccg

SEQ ID NO: 2811817 - DNA, 25 bp, Homo sapien
tacgttttggagatgcttcagtgct

SEQ ID NO: 2811818 - DNA, 25 bp, Homo sapien
ctacgttttggagatgcttcagtgc

SEQ ID NO: 2811819 - DNA, 25 bp, Homo sapien
acagttaagagagccaacagtgagg

SEQ ID NO: 2811820 - DNA, 25 bp, Homo sapien
aggagtggacacagttaagagagcc

SEQ ID NO: 2811821 - DNA, 25 bp, Homo sapien
catgaaggagtggacacagttaaga

SEQ ID NO: 2811822 - DNA, 25 bp, Homo sapien
tggacacagttaagagagccaacag

SEQ ID NO: 2811823 - DNA, 25 bp, Homo sapien
gttgcaagggaccatttgaggggca

SEQ ID NO: 2811824 - DNA, 25 bp, Homo sapien
ggttgcaagggaccatttgaggggc

SEQ ID NO: 2811825 - DNA, 25 bp, Homo sapien
ttgcaagggaccatttgaggggcag

SEQ ID NO: 2811826 - DNA, 25 bp, Homo sapien
tggggccgagcgagggaagccgcaa

SEQ ID NO: 2811827 - DNA, 25 bp, Homo sapien
gcttcggcccgagccctagcggcag

SEQ ID NO: 2811828 - DNA, 25 bp, Homo sapien
gggccgccctcacccttgcgccgcc

SEQ ID NO: 2811829 - DNA, 25 bp, Homo sapien
tgaaagtggagcccggggagcggca

SEQ ID NO: 2811830 - DNA, 25 bp, Homo sapien
aatcaagatgatgactggagctgca

SEQ ID NO: 2811831 - DNA, 25 bp, Homo sapien
aagcaagtcacaggtttctctcaca

SEQ ID NO: 2811832 - DNA, 25 bp, Homo sapien
tgactatcggattgagaacctcagt

SEQ ID NO: 2811833 - DNA, 25 bp, Homo sapien
catatcctatgggttagaagcaagt

SEQ ID NO: 2811834 - DNA, 25 bp, Homo sapien
taggcacaggtgcaacaaatcaacc

SEQ ID NO: 2811835 - DNA, 25 bp, Homo sapien
cagggacggtctcaacttaggcaca

SEQ ID NO: 2811836 - DNA, 25 bp, Homo sapien
gaatcagtgaacctcaaagggccag

SEQ ID NO: 2811837 - DNA, 25 bp, Homo sapien
gcagattttccacacgttagccaga

SEQ ID NO: 2811838 - DNA, 25 bp, Homo sapien
gcacccaagctagatgtcattaaca

SEQ ID NO: 2811839 - DNA, 25 bp, Homo sapien
ctgagcacccaagctagatgtcatt

SEQ ID NO: 2811840 - DNA, 25 bp, Homo sapien
attaacacatcagcgttatctcccg

SEQ ID NO: 2811841 - DNA, 25 bp, Homo sapien
gctagatgtcattaacacatcagcg

SEQ ID NO: 2811842 - DNA, 25 bp, Homo sapien
ctgaggcatgactggagagggatcc

SEQ ID NO: 2811843 - DNA, 25 bp, Homo sapien
tgcagttctttaccatgtgggatcc

SEQ ID NO: 2811844 - DNA, 25 bp, Homo sapien
cagttctttaccatgtgggatcccc

SEQ ID NO: 2811845 - DNA, 25 bp, Homo sapien
ggatccactttcagtctcactcagg

SEQ ID NO: 2811846 - DNA, 25 bp, Homo sapien
agatgccacctgcagtcaagaggag

SEQ ID NO: 2811847 - DNA, 25 bp, Homo sapien
catacacatcctgtcacctttgtca

SEQ ID NO: 2811848 - DNA, 25 bp, Homo sapien
gacagagactccattagggtgagcc

SEQ ID NO: 2811849 - DNA, 25 bp, Homo sapien
gggtgagccttacaatcttatgaaa

SEQ ID NO: 2811850 - DNA, 25 bp, Homo sapien
cagccagtatggtgttttttagaca

SEQ ID NO: 2811851 - DNA, 25 bp, Homo sapien
tcatatactcctaattgcccactgg

SEQ ID NO: 2811852 - DNA, 25 bp, Homo sapien
ggatcagtttctctaactataggga

SEQ ID NO: 2811853 - DNA, 25 bp, Homo sapien
gatgaatttagccatccaggttcag

SEQ ID NO: 2811854 - DNA, 25 bp, Homo sapien
tcgagctggttatgaccaaagctgc

SEQ ID NO: 2811855 - DNA, 25 bp, Homo sapien
acttgattgaggacaagacactgct

SEQ ID NO: 2811856 - DNA, 25 bp, Homo sapien
cacatggtgagatcttcagggacct

SEQ ID NO: 2811857 - DNA, 25 bp, Homo sapien
gagtttgagtgatccttgccacatg

SEQ ID NO: 2811858 - DNA, 25 bp, Homo sapien
taaagggagacctaactagtagatc

SEQ ID NO: 2811859 - DNA, 25 bp, Homo sapien
ggaataaaactgatgctgaatccca

SEQ ID NO: 2811860 - DNA, 25 bp, Homo sapien
tctagcaataaagagccatatgtgg

SEQ ID NO: 2811861 - DNA, 25 bp, Homo sapien
tatgtggatgcatccattgaaaagc

SEQ ID NO: 2811862 - DNA, 25 bp, Homo sapien
cctgatattgaagccagacaaggac

SEQ ID NO: 2811863 - DNA, 25 bp, Homo sapien
ttaccctgatattgaagccagacaa

SEQ ID NO: 2811864 - DNA, 25 bp, Homo sapien
ctaataccactccttctcaaactct

SEQ ID NO: 2811865 - DNA, 25 bp, Homo sapien
aagaactaataccactccttctcaa

SEQ ID NO: 2811866 - DNA, 25 bp, Homo sapien
aacacgctgttgctctgcgagtgca

SEQ ID NO: 2811867 - DNA, 25 bp, Homo sapien
gaccgtttgtgctgggatactagat

SEQ ID NO: 2811868 - DNA, 25 bp, Homo sapien
tagattggcggaaccaaagaagacc

SEQ ID NO: 2811869 - DNA, 25 bp, Homo sapien
aattgggtctctgggcgacacagga

SEQ ID NO: 2811870 - DNA, 25 bp, Homo sapien
cagaattggggcaatctgagcctca

SEQ ID NO: 2811871 - DNA, 25 bp, Homo sapien
ccagaattggggcaatctgagcctc

SEQ ID NO: 2811872 - DNA, 25 bp, Homo sapien
ataaggcatctgaccactccacaac

SEQ ID NO: 2811873 - DNA, 25 bp, Homo sapien
aggtatgaacaagggcttgtgcctc

SEQ ID NO: 2811874 - DNA, 25 bp, Homo sapien
catcaattcccacaaataaggcatc

SEQ ID NO: 2811875 - DNA, 25 bp, Homo sapien
tctccctagaagtttgtaagtctgt

SEQ ID NO: 2811876 - DNA, 25 bp, Homo sapien
tacaaaaggtgatactataagttct

SEQ ID NO: 2811877 - DNA, 25 bp, Homo sapien
ccctgcccagtctaaatcaatcttt

SEQ ID NO: 2811878 - DNA, 25 bp, Homo sapien
gacaagacattgctacccaagtgcc

SEQ ID NO: 2811879 - DNA, 25 bp, Homo sapien
taagttctttagtggacaagacatt

SEQ ID NO: 2811880 - DNA, 25 bp, Homo sapien
gaatcctggtgcgtggtccattgcc

SEQ ID NO: 2811881 - DNA, 25 bp, Homo sapien
tttgttgagggcctatgatgtgcgc

SEQ ID NO: 2811882 - DNA, 25 bp, Homo sapien
cactgataggtgctagaaagaggtg

SEQ ID NO: 2811883 - DNA, 25 bp, Homo sapien
gcgtggtccattgcctgaagttgat

SEQ ID NO: 2811884 - DNA, 25 bp, Homo sapien
cacaggggacactctgagtgttcca

SEQ ID NO: 2811885 - DNA, 25 bp, Homo sapien
cactctaggtcaatggagaggaagg

SEQ ID NO: 2811886 - DNA, 25 bp, Homo sapien
gaaacacttggctcatccagaagtg

SEQ ID NO: 2811887 - DNA, 25 bp, Homo sapien
atagacactctaggtcaatggagag

SEQ ID NO: 2811888 - DNA, 25 bp, Homo sapien
tctgcagctcaattccatagcctgt

SEQ ID NO: 2811889 - DNA, 25 bp, Homo sapien
gcagctcaattccatagcctgtttc

SEQ ID NO: 2811890 - DNA, 25 bp, Homo sapien
cacttctaggattctgcagctcaat

SEQ ID NO: 2811891 - DNA, 25 bp, Homo sapien
ttttcacttctaggattctgcagct

SEQ ID NO: 2811892 - DNA, 25 bp, Homo sapien
tgcagagttagagtccgtagataag

SEQ ID NO: 2811893 - DNA, 25 bp, Homo sapien
ctcttctttgtcgtctttgtcccct

SEQ ID NO: 2811894 - DNA, 25 bp, Homo sapien
gagttagagtccgtagataagccct

SEQ ID NO: 2811895 - DNA, 25 bp, Homo sapien
tagagtccgtagataagcccttggg

SEQ ID NO: 2811896 - DNA, 25 bp, Homo sapien
tgagataccagtccgagtcttctgt

SEQ ID NO: 2811897 - DNA, 25 bp, Homo sapien
gttgcctggattacccttccctgag

SEQ ID NO: 2811898 - DNA, 25 bp, Homo sapien
gaaacccatactagcagtgcagcag

SEQ ID NO: 2811899 - DNA, 25 bp, Homo sapien
ggatagccatccctaatccagttgc

SEQ ID NO: 2811900 - DNA, 25 bp, Homo sapien
taagccagtgattgacaggcaaagc

SEQ ID NO: 2811901 - DNA, 25 bp, Homo sapien
gaagctggcctgtgacctgaaccat

SEQ ID NO: 2811902 - DNA, 25 bp, Homo sapien
tcctaagtatggtgggtaacagcca

SEQ ID NO: 2811903 - DNA, 25 bp, Homo sapien
ggatgctccgctcggctctcttgaa

SEQ ID NO: 2811904 - DNA, 25 bp, Homo sapien
aggtgtcagggtttatcaagaaggc

SEQ ID NO: 2811905 - DNA, 25 bp, Homo sapien
agtattctatagtttgcccaaccag

SEQ ID NO: 2811906 - DNA, 25 bp, Homo sapien
tacgtccaaggaaaattagccaatg

SEQ ID NO: 2811907 - DNA, 25 bp, Homo sapien
aaatctcagattattagaaactagg

SEQ ID NO: 2811908 - DNA, 25 bp, Homo sapien
aatatttgtcggctgtaaagcagca

SEQ ID NO: 2811909 - DNA, 25 bp, Homo sapien
ttgataaatatttgtcggctgtaaa

SEQ ID NO: 2811910 - DNA, 25 bp, Homo sapien
ataaatatttgtcggctgtaaagca

SEQ ID NO: 2811911 - DNA, 25 bp, Homo sapien
atatttgtcggctgtaaagcagcac

SEQ ID NO: 2811912 - DNA, 25 bp, Homo sapien
gcaaaaattatttattgtatactta

SEQ ID NO: 2811913 - DNA, 25 bp, Homo sapien
catgcaaaaattatttattgtatac

SEQ ID NO: 2811914 - DNA, 25 bp, Homo sapien
ttattcatgcaaaaattatttattg

SEQ ID NO: 2811915 - DNA, 25 bp, Homo sapien
tattcatgcaaaaattatttattgt

SEQ ID NO: 2811916 - DNA, 25 bp, Homo sapien
agtgctggtcaaacaacaccctggc

SEQ ID NO: 2811917 - DNA, 25 bp, Homo sapien
tgagcaggctgtttgcgcttgccgc

SEQ ID NO: 2811918 - DNA, 25 bp, Homo sapien
gaaagcctcagagcgtgtgacagtt

SEQ ID NO: 2811919 - DNA, 25 bp, Homo sapien
cccagagttaggcaaggagtttcat

SEQ ID NO: 2811920 - DNA, 25 bp, Homo sapien
gctagcggggctgcccgatttggca

SEQ ID NO: 2811921 - DNA, 25 bp, Homo sapien
gataaggaagcggttcccgacgagc

SEQ ID NO: 2811922 - DNA, 25 bp, Homo sapien
ctcctcggggcttatggggcccctg

SEQ ID NO: 2811923 - DNA, 25 bp, Homo sapien
gcctcggaggctagcggggctgccc

SEQ ID NO: 2811924 - DNA, 25 bp, Homo sapien
gcaatggcgcgagtgctggggggca

SEQ ID NO: 2811925 - DNA, 25 bp, Homo sapien
tttctcgggcctagcgccgcggagc

SEQ ID NO: 2811926 - DNA, 25 bp, Homo sapien
ttgctgcgggccccagtggtagcac

SEQ ID NO: 2811927 - DNA, 25 bp, Homo sapien
ttcggtttctcgggcctagcgccgc

SEQ ID NO: 2811928 - DNA, 25 bp, Homo sapien
taaggctcggaacaggcgggccttc

SEQ ID NO: 2811929 - DNA, 25 bp, Homo sapien
gaacaggcgggccttctgcccacat

SEQ ID NO: 2811930 - DNA, 25 bp, Homo sapien
caggtgttgatttaaggctcggaac

SEQ ID NO: 2811931 - DNA, 25 bp, Homo sapien
cgggaaccgcaggtgttgatttaag

SEQ ID NO: 2811932 - DNA, 25 bp, Homo sapien
gaccatgattttctggcgcagtgcg

SEQ ID NO: 2811933 - DNA, 25 bp, Homo sapien
tgtttctggaatgtccgctcctggg

SEQ ID NO: 2811934 - DNA, 25 bp, Homo sapien
gacttcggcttcagtggcacctgct

SEQ ID NO: 2811935 - DNA, 25 bp, Homo sapien
ggcatctctgccgaaaacacctaca

SEQ ID NO: 2811936 - DNA, 25 bp, Homo sapien
ctcgcctgtccacggagcagcaggg

SEQ ID NO: 2811937 - DNA, 25 bp, Homo sapien
cagctgccacgaaaacccggaacgg

SEQ ID NO: 2811938 - DNA, 25 bp, Homo sapien
gcagggggtttgactgtgcttttcc

SEQ ID NO: 2811939 - DNA, 25 bp, Homo sapien
ttctgcagctgccacgaaaacccgg

SEQ ID NO: 2811940 - DNA, 25 bp, Homo sapien
gtgtcggcccgactctcctgtagga

SEQ ID NO: 2811941 - DNA, 25 bp, Homo sapien
cctgtaggagcgttaagttgtggca

SEQ ID NO: 2811942 - DNA, 25 bp, Homo sapien
ggcagctgccgagcccaacttttgt

SEQ ID NO: 2811943 - DNA, 25 bp, Homo sapien
tcagctctcggagtaggaagctcgg

SEQ ID NO: 2811944 - DNA, 25 bp, Homo sapien
agaagtgccagagccacaatatagg

SEQ ID NO: 2811945 - DNA, 25 bp, Homo sapien
accatggcttttgtgcggaccagaa

SEQ ID NO: 2811946 - DNA, 25 bp, Homo sapien
ggtgagatgtcttaccgttttgcgg

SEQ ID NO: 2811947 - DNA, 25 bp, Homo sapien
taccgttttgcggtgttgagtgtgt

SEQ ID NO: 2811948 - DNA, 25 bp, Homo sapien
tcaggagatacagaaaaacgcccat

SEQ ID NO: 2811949 - DNA, 25 bp, Homo sapien
cttctccagccaatgatctggggtg

SEQ ID NO: 2811950 - DNA, 25 bp, Homo sapien
ttctccagccaatgatctggggtga

SEQ ID NO: 2811951 - DNA, 25 bp, Homo sapien
tctccagccaatgatctggggtgaa

SEQ ID NO: 2811952 - DNA, 25 bp, Homo sapien
tctctggattgtggggctcagagtc

SEQ ID NO: 2811953 - DNA, 25 bp, Homo sapien
agaatacaatgacgtacaaaaggac

SEQ ID NO: 2811954 - DNA, 25 bp, Homo sapien
tatgccgtagaatacaatgacgtac

SEQ ID NO: 2811955 - DNA, 25 bp, Homo sapien
tccctgaggccatttaaagtcctgt

SEQ ID NO: 2811956 - DNA, 25 bp, Homo sapien
aaagtcctgtttatgccgtagaata

SEQ ID NO: 2811957 - DNA, 25 bp, Homo sapien
gctggagtgcaatggtgtgatcttg

SEQ ID NO: 2811958 - DNA, 25 bp, Homo sapien
tgggttcaagtgattctcttgcctc

SEQ ID NO: 2811959 - DNA, 25 bp, Homo sapien
gctcaccacaacctctgcctcctgg

SEQ ID NO: 2811960 - DNA, 25 bp, Homo sapien
gaccaagtctcactcttttgcccag

SEQ ID NO: 2811961 - DNA, 25 bp, Homo sapien
aaggaacaaataagcctgtaactgg

SEQ ID NO: 2811962 - DNA, 25 bp, Homo sapien
gaacaaataagcctgtaactggttg

SEQ ID NO: 2811963 - DNA, 25 bp, Homo sapien
gtgaagcaatgagggtggagaagga

SEQ ID NO: 2811964 - DNA, 25 bp, Homo sapien
caagtgaagcaatgagggtggagaa

SEQ ID NO: 2811965 - DNA, 25 bp, Homo sapien
ggttgtatgtgctttagggatttgt

SEQ ID NO: 2811966 - DNA, 25 bp, Homo sapien
tgtatgtgctttagggatttgtgga

SEQ ID NO: 2811967 - DNA, 25 bp, Homo sapien
ttgtatgtgctttagggatttgtgg

SEQ ID NO: 2811968 - DNA, 25 bp, Homo sapien
tggttgtatgtgctttagggatttg

SEQ ID NO: 2811969 - DNA, 25 bp, Homo sapien
tctaggagagacttaatttggttca

SEQ ID NO: 2811970 - DNA, 25 bp, Homo sapien
tgtgcacaaaatcctcacgacatct

SEQ ID NO: 2811971 - DNA, 25 bp, Homo sapien
ggagttcacacagtatggaggttat

SEQ ID NO: 2811972 - DNA, 25 bp, Homo sapien
gaattactgatgctgaccatttggc

SEQ ID NO: 2811973 - DNA, 25 bp, Homo sapien
taactagcctgcttaaggtcataca

SEQ ID NO: 2811974 - DNA, 25 bp, Homo sapien
tatgttctatagactgaagcctcac

SEQ ID NO: 2811975 - DNA, 25 bp, Homo sapien
aggtcatacagatagcagagatttg

SEQ ID NO: 2811976 - DNA, 25 bp, Homo sapien
gaaccccagcactgtaaatacagag

SEQ ID NO: 2811977 - DNA, 25 bp, Homo sapien
tctgcaaagctctgacactaggttc

SEQ ID NO: 2811978 - DNA, 25 bp, Homo sapien
cactcccacagtattaggtcctaag

SEQ ID NO: 2811979 - DNA, 25 bp, Homo sapien
gaatcctgagtttaacccacctgct

SEQ ID NO: 2811980 - DNA, 25 bp, Homo sapien
gctttgggccttagagggtctgcaa

SEQ ID NO: 2811981 - DNA, 25 bp, Homo sapien
tcataagttcttgtgaaacctaaca

SEQ ID NO: 2811982 - DNA, 25 bp, Homo sapien
ctttagtgactgttcaaaagaaagg

SEQ ID NO: 2811983 - DNA, 25 bp, Homo sapien
caaaccaaacactagatgtaaagag

SEQ ID NO: 2811984 - DNA, 25 bp, Homo sapien
tcagatacaaggtacatgccctctt

SEQ ID NO: 2811985 - DNA, 25 bp, Homo sapien
ccatttcgggtttagagagtccaca

SEQ ID NO: 2811986 - DNA, 25 bp, Homo sapien
ccttacgtttgaccctgaggacagc

SEQ ID NO: 2811987 - DNA, 25 bp, Homo sapien
tttaatctagagctggaactgggcc

SEQ ID NO: 2811988 - DNA, 25 bp, Homo sapien
cctgaagacagtttagatgccctac

SEQ ID NO: 2811989 - DNA, 25 bp, Homo sapien
ccaaactgagttagctttaattata

SEQ ID NO: 2811990 - DNA, 25 bp, Homo sapien
aatggtgatagtccccagatctgta

SEQ ID NO: 2811991 - DNA, 25 bp, Homo sapien
tccctgccgtagatatactttaggt

SEQ ID NO: 2811992 - DNA, 25 bp, Homo sapien
tagtatttctacattcgtggcaagc

SEQ ID NO: 2811993 - DNA, 25 bp, Homo sapien
gcagacttatacctagattgttgtg

SEQ ID NO: 2811994 - DNA, 25 bp, Homo sapien
tttattcggcaggtatcaagttaga

SEQ ID NO: 2811995 - DNA, 25 bp, Homo sapien
tggcattttactccttctgaaagag

SEQ ID NO: 2811996 - DNA, 25 bp, Homo sapien
ggaggatgtccgaaactgtatggca

SEQ ID NO: 2811997 - DNA, 25 bp, Homo sapien
catggatgtacataatgaaacatgg

SEQ ID NO: 2811998 - DNA, 25 bp, Homo sapien
gacgtatgataactctcctgtttcc

SEQ ID NO: 2811999 - DNA, 25 bp, Homo sapien
tgaaacatggaggtccagacgtatg

SEQ ID NO: 2812000 - DNA, 25 bp, Homo sapien
taatgtggtacccagtcctctgctg

SEQ ID NO: 2812001 - DNA, 25 bp, Homo sapien
gaaagctaattagatccagcatttc

SEQ ID NO: 2812002 - DNA, 25 bp, Homo sapien
gagaagacactcagctatggttgag

SEQ ID NO: 2812003 - DNA, 25 bp, Homo sapien
tgagttgtgaaagctaattagatcc

SEQ ID NO: 2812004 - DNA, 25 bp, Homo sapien
caacaggtgtgcagcagataagaca

SEQ ID NO: 2812005 - DNA, 25 bp, Homo sapien
tcagattgaatgaggtagtgaaaag

SEQ ID NO: 2812006 - DNA, 25 bp, Homo sapien
atgttgattcagattgaatgaggta

SEQ ID NO: 2812007 - DNA, 25 bp, Homo sapien
ttgattcagattgaatgaggtagtg

SEQ ID NO: 2812008 - DNA, 25 bp, Homo sapien
gattcagattgaatgaggtagtgaa

SEQ ID NO: 2812009 - DNA, 25 bp, Homo sapien
taaaccggcgaagctgataagccaa

SEQ ID NO: 2812010 - DNA, 25 bp, Homo sapien
cccagaggtcttttgtgtgactgca

SEQ ID NO: 2812011 - DNA, 25 bp, Homo sapien
catgtggcaagacaagttggccctt

SEQ ID NO: 2812012 - DNA, 25 bp, Homo sapien
tgtctagaacgcatttgcaaaccgt

SEQ ID NO: 2812013 - DNA, 25 bp, Homo sapien
tgttttgcatatgaccagcactgac

SEQ ID NO: 2812014 - DNA, 25 bp, Homo sapien
agtctgagcttgtgggtggaattct

SEQ ID NO: 2812015 - DNA, 25 bp, Homo sapien
ctgaaaggcatgtgtagctgcaaac

SEQ ID NO: 2812016 - DNA, 25 bp, Homo sapien
cctatagagatcttcaattccttga

SEQ ID NO: 2812017 - DNA, 25 bp, Homo sapien
gatccgcactgagtaaccacacagg

SEQ ID NO: 2812018 - DNA, 25 bp, Homo sapien
cactgcttaagtaccaagttgaatg

SEQ ID NO: 2812019 - DNA, 25 bp, Homo sapien
gaatgccctgtgtcgctgattggga

SEQ ID NO: 2812020 - DNA, 25 bp, Homo sapien
gaaccagaggcgcttttgatccgca

SEQ ID NO: 2812021 - DNA, 25 bp, Homo sapien
ggttaactctaaagggtatcctgca

SEQ ID NO: 2812022 - DNA, 25 bp, Homo sapien
tggttaactctaaagggtatcctgc

SEQ ID NO: 2812023 - DNA, 25 bp, Homo sapien
gttaactctaaagggtatcctgcac

SEQ ID NO: 2812024 - DNA, 25 bp, Homo sapien
atggttaactctaaagggtatcctg

SEQ ID NO: 2812025 - DNA, 25 bp, Homo sapien
tcctgtaaaggtcctgtaaagtggc

SEQ ID NO: 2812026 - DNA, 25 bp, Homo sapien
gtgaaaacactatcccaggtccctg

SEQ ID NO: 2812027 - DNA, 25 bp, Homo sapien
tgtaggcgaggaatcttccctaggg

SEQ ID NO: 2812028 - DNA, 25 bp, Homo sapien
cagtgcaggcttggttggaagcctc

SEQ ID NO: 2812029 - DNA, 25 bp, Homo sapien
caagcttggtgatgctccatacata

SEQ ID NO: 2812030 - DNA, 25 bp, Homo sapien
taaaacaggtgcttcatgtcttaga

SEQ ID NO: 2812031 - DNA, 25 bp, Homo sapien
tacctatggcccaaccgtgtaggcc

SEQ ID NO: 2812032 - DNA, 25 bp, Homo sapien
tgtctccacaagtgtttgttcacgg

SEQ ID NO: 2812033 - DNA, 25 bp, Homo sapien
tagagcttcctcaaaggactcatgc

SEQ ID NO: 2812034 - DNA, 25 bp, Homo sapien
gagcaagaacgtgggctcttcaatc

SEQ ID NO: 2812035 - DNA, 25 bp, Homo sapien
ttaactatgaggaactagagcttcc

SEQ ID NO: 2812036 - DNA, 25 bp, Homo sapien
catcaacaggatctaaatccaatac

SEQ ID NO: 2812037 - DNA, 25 bp, Homo sapien
gaagtatcactttcaacggaagcat

SEQ ID NO: 2812038 - DNA, 25 bp, Homo sapien
gagaagctccaagatcacagtaagg

SEQ ID NO: 2812039 - DNA, 25 bp, Homo sapien
tataacactcatgccttttgttggc

SEQ ID NO: 2812040 - DNA, 25 bp, Homo sapien
cagctgcgtggctctgaagtatcac

SEQ ID NO: 2812041 - DNA, 25 bp, Homo sapien
taatggatttggccaaatatctttg

SEQ ID NO: 2812042 - DNA, 25 bp, Homo sapien
gtaatggatttggccaaatatcttt

SEQ ID NO: 2812043 - DNA, 25 bp, Homo sapien
aatggatttggccaaatatctttga

SEQ ID NO: 2812044 - DNA, 25 bp, Homo sapien
tgctgcctcttcctgtgagctttat

SEQ ID NO: 2812045 - DNA, 25 bp, Homo sapien
ctaactcatcagcaccaacatcaga

SEQ ID NO: 2812046 - DNA, 25 bp, Homo sapien
atcagcaccaacatcagaatggtca

SEQ ID NO: 2812047 - DNA, 25 bp, Homo sapien
tctcctaactcatcagcaccaacat

SEQ ID NO: 2812048 - DNA, 25 bp, Homo sapien
gatgaaattctttggcgagaatgtt

SEQ ID NO: 2812049 - DNA, 25 bp, Homo sapien
atcatcaaagtctgtcatttcaact

SEQ ID NO: 2812050 - DNA, 25 bp, Homo sapien
atttaatatcatcaaagtctgtcat

SEQ ID NO: 2812051 - DNA, 25 bp, Homo sapien
ctttggcgagaatgttattttcaaa

SEQ ID NO: 2812052 - DNA, 25 bp, Homo sapien
ggatgattgacaaatattgttaccc

SEQ ID NO: 2812053 - DNA, 25 bp, Homo sapien
ctggatgattgacaaatattgttac

SEQ ID NO: 2812054 - DNA, 25 bp, Homo sapien
gatgattgacaaatattgttaccca

SEQ ID NO: 2812055 - DNA, 25 bp, Homo sapien
gattgacaaatattgttacccaaaa

SEQ ID NO: 2812056 - DNA, 25 bp, Homo sapien
aaaatggttggcagagtttgttata

SEQ ID NO: 2812057 - DNA, 25 bp, Homo sapien
gattttggagatcaattctgacctc

SEQ ID NO: 2812058 - DNA, 25 bp, Homo sapien
ctgggattttggagatcaattctga

SEQ ID NO: 2812059 - DNA, 25 bp, Homo sapien
tggagatcaattctgacctcttctg

SEQ ID NO: 2812060 - DNA, 25 bp, Homo sapien
cagaggctgatgtcttctccggtcc

SEQ ID NO: 2812061 - DNA, 25 bp, Homo sapien
gctgatgtcttctccggtcccagag

SEQ ID NO: 2812062 - DNA, 25 bp, Homo sapien
acttcatgaatgtgttcaattgttt

SEQ ID NO: 2812063 - DNA, 25 bp, Homo sapien
gaggctgatgtcttctccggtccca

SEQ ID NO: 2812064 - DNA, 25 bp, Homo sapien
ggcactcaaccatgcaacagctgga

SEQ ID NO: 2812065 - DNA, 25 bp, Homo sapien
aaaattcgctctgccttgggtcctc

SEQ ID NO: 2812066 - DNA, 25 bp, Homo sapien
ccttaatgatgttgatccgggctgc

SEQ ID NO: 2812067 - DNA, 25 bp, Homo sapien
aaggacttggctcacacttgactga

SEQ ID NO: 2812068 - DNA, 25 bp, Homo sapien
tgtgggagtagacctcatcccttga

SEQ ID NO: 2812069 - DNA, 25 bp, Homo sapien
tcatcctgaattgagaagatgtggg

SEQ ID NO: 2812070 - DNA, 25 bp, Homo sapien
gaaagtgggcaaacctcatcctgaa

SEQ ID NO: 2812071 - DNA, 25 bp, Homo sapien
gatggtcttagtttcctggcaatgg

SEQ ID NO: 2812072 - DNA, 25 bp, Homo sapien
tatgtagctaattgttcccctggtg

SEQ ID NO: 2812073 - DNA, 25 bp, Homo sapien
tctttcgtgggtgacatttagcctc

SEQ ID NO: 2812074 - DNA, 25 bp, Homo sapien
gaagctttcataccattccaggaag

SEQ ID NO: 2812075 - DNA, 25 bp, Homo sapien
tgacagtggccaagggagaacctct

SEQ ID NO: 2812076 - DNA, 25 bp, Homo sapien
tgatagaaaaatgcatcgagtggct

SEQ ID NO: 2812077 - DNA, 25 bp, Homo sapien
tcttgtaagggtcctacgactctca

SEQ ID NO: 2812078 - DNA, 25 bp, Homo sapien
tctgccatcactgagggtacccggg

SEQ ID NO: 2812079 - DNA, 25 bp, Homo sapien
tatataaaatcaagcaaggcacgtg

SEQ ID NO: 2812080 - DNA, 25 bp, Homo sapien
gagacaattcctggtgagtcccgct

SEQ ID NO: 2812081 - DNA, 25 bp, Homo sapien
cagggccattcgtagctcttgagag

SEQ ID NO: 2812082 - DNA, 25 bp, Homo sapien
tcatgatccagtccagggccatgtg

SEQ ID NO: 2812083 - DNA, 25 bp, Homo sapien
gtaaggctcagctgatcatcactgg

SEQ ID NO: 2812084 - DNA, 25 bp, Homo sapien
ttcacgaagggcttttaggcttcca

SEQ ID NO: 2812085 - DNA, 25 bp, Homo sapien
cacgaagggcttttaggcttccatt

SEQ ID NO: 2812086 - DNA, 25 bp, Homo sapien
tccattccagtgcaatagttggaaa

SEQ ID NO: 2812087 - DNA, 25 bp, Homo sapien
atagttggaaaatggtcatcagctc

SEQ ID NO: 2812088 - DNA, 25 bp, Homo sapien
ttggcattctgtctaagttcactgc

SEQ ID NO: 2812089 - DNA, 25 bp, Homo sapien
gcacagtaagtactctgagagccca

SEQ ID NO: 2812090 - DNA, 25 bp, Homo sapien
gagcccacagacacctcagtaaaag

SEQ ID NO: 2812091 - DNA, 25 bp, Homo sapien
caaaaccacttgtgtctgctaatta

SEQ ID NO: 2812092 - DNA, 25 bp, Homo sapien
ctgcctggtgttcgctggctcatat

SEQ ID NO: 2812093 - DNA, 25 bp, Homo sapien
aagctctgttactctaaaggaagtt

SEQ ID NO: 2812094 - DNA, 25 bp, Homo sapien
tgttcgctggctcatattctacctg

SEQ ID NO: 2812095 - DNA, 25 bp, Homo sapien
taaaggaagttagtgtagtcaggtg

SEQ ID NO: 2812096 - DNA, 25 bp, Homo sapien
gactccagcatgtagtgataggccc

SEQ ID NO: 2812097 - DNA, 25 bp, Homo sapien
tagtcttccccatgtttgactccag

SEQ ID NO: 2812098 - DNA, 25 bp, Homo sapien
cagcatagtcttccccatgtttgac

SEQ ID NO: 2812099 - DNA, 25 bp, Homo sapien
catgtagtgataggccccaacactg

SEQ ID NO: 2812100 - DNA, 25 bp, Homo sapien
tggcctcggctctacttaagcagca

SEQ ID NO: 2812101 - DNA, 25 bp, Homo sapien
cagctcattgaagagggagttgatc

SEQ ID NO: 2812102 - DNA, 25 bp, Homo sapien
tccttggtgatcctgcgagagggca

SEQ ID NO: 2812103 - DNA, 25 bp, Homo sapien
gttgatcagggccactttagctgca

SEQ ID NO: 2812104 - DNA, 25 bp, Homo sapien
tattgtgctccatcctgctagactg

SEQ ID NO: 2812105 - DNA, 25 bp, Homo sapien
tctgtggctcatatggatctggtcg

SEQ ID NO: 2812106 - DNA, 25 bp, Homo sapien
ggttgcagatagagggacaagcccc

SEQ ID NO: 2812107 - DNA, 25 bp, Homo sapien
tggagcccataccttttggagagcc

SEQ ID NO: 2812108 - DNA, 25 bp, Homo sapien
cagttcctgtcaactgaaagaaatg

SEQ ID NO: 2812109 - DNA, 25 bp, Homo sapien
taatggacctgcaggcacaagtggg

SEQ ID NO: 2812110 - DNA, 25 bp, Homo sapien
cacaagtgggttggagagcctcttc

SEQ ID NO: 2812111 - DNA, 25 bp, Homo sapien
gctcaataatggacctgcaggcaca

SEQ ID NO: 2812112 - DNA, 25 bp, Homo sapien
caagtgggttggagagcctcttcct

SEQ ID NO: 2812113 - DNA, 25 bp, Homo sapien
cccagtggccaaagccagggctgac

SEQ ID NO: 2812114 - DNA, 25 bp, Homo sapien
ccagtggccaaagccagggctgacc

SEQ ID NO: 2812115 - DNA, 25 bp, Homo sapien
acttcctcctgtgtttcccacccag

SEQ ID NO: 2812116 - DNA, 25 bp, Homo sapien
cctgtgtttcccacccagtggccaa

SEQ ID NO: 2812117 - DNA, 25 bp, Homo sapien
ggtcacgtaactcacaaagggaggc

SEQ ID NO: 2812118 - DNA, 25 bp, Homo sapien
ccctgggagggtcacgtaactcaca

SEQ ID NO: 2812119 - DNA, 25 bp, Homo sapien
cacaccttcacttgggaatgcagcc

SEQ ID NO: 2812120 - DNA, 25 bp, Homo sapien
gtgactcatagaccaccacaccttc

SEQ ID NO: 2812121 - DNA, 25 bp, Homo sapien
tgaaagaaaagactttatttgcaca

SEQ ID NO: 2812122 - DNA, 25 bp, Homo sapien
cattttcaaacaagtcatatgacat

SEQ ID NO: 2812123 - DNA, 25 bp, Homo sapien
gaaaagactttatttgcacattttc

SEQ ID NO: 2812124 - DNA, 25 bp, Homo sapien
cacattttcaaacaagtcatatgac

SEQ ID NO: 2812125 - DNA, 25 bp, Homo sapien
tctccctcctattttgagtgttgtg

SEQ ID NO: 2812126 - DNA, 25 bp, Homo sapien
cctcctattttgagtgttgtgtcct

SEQ ID NO: 2812127 - DNA, 25 bp, Homo sapien
cctattttgagtgttgtgtcctttc

SEQ ID NO: 2812128 - DNA, 25 bp, Homo sapien
tccttctatccagcttactcccaca

SEQ ID NO: 2812129 - DNA, 25 bp, Homo sapien
gaggcaagacttgggcaatgatgtg

SEQ ID NO: 2812130 - DNA, 25 bp, Homo sapien
tttgaagactagagccggatctctg

SEQ ID NO: 2812131 - DNA, 25 bp, Homo sapien
tagagccggatctctgtgaggcaag

SEQ ID NO: 2812132 - DNA, 25 bp, Homo sapien
agactagagccggatctctgtgagg

SEQ ID NO: 2812133 - DNA, 25 bp, Homo sapien
tgtgtgagcctcctgtacagagtgt

SEQ ID NO: 2812134 - DNA, 25 bp, Homo sapien
ttaaacacacccacctacaggctag

SEQ ID NO: 2812135 - DNA, 25 bp, Homo sapien
taattagctcgaaaggctggctgac

SEQ ID NO: 2812136 - DNA, 25 bp, Homo sapien
cattgatgcactggattaccaagga

SEQ ID NO: 2812137 - DNA, 25 bp, Homo sapien
tcaactaggtaaagctgagcaggat

SEQ ID NO: 2812138 - DNA, 25 bp, Homo sapien
catctagtggccatttttcgctgca

SEQ ID NO: 2812139 - DNA, 25 bp, Homo sapien
gctactcaggcctgcttacaagctg

SEQ ID NO: 2812140 - DNA, 25 bp, Homo sapien
tgagaacatgttccggacccactta

SEQ ID NO: 2812141 - DNA, 25 bp, Homo sapien
aatggactgctttggcaggtaatta

SEQ ID NO: 2812142 - DNA, 25 bp, Homo sapien
tgtgcattgtagcatatcatcctca

SEQ ID NO: 2812143 - DNA, 25 bp, Homo sapien
tattgaatgcttaagaatgtgctaa

SEQ ID NO: 2812144 - DNA, 25 bp, Homo sapien
caggtaattattctttgcaagacac

SEQ ID NO: 2812145 - DNA, 25 bp, Homo sapien
aatgagggctcaaaaaggaattaca

SEQ ID NO: 2812146 - DNA, 25 bp, Homo sapien
tattaaacatatccaagatcctaaa

SEQ ID NO: 2812147 - DNA, 25 bp, Homo sapien
attaatatatgatagccttggctca

SEQ ID NO: 2812148 - DNA, 25 bp, Homo sapien
aaagacaaatgagggctcaaaaagg

SEQ ID NO: 2812149 - DNA, 25 bp, Homo sapien
tgcttccaaacttgatttgatattt

SEQ ID NO: 2812150 - DNA, 25 bp, Homo sapien
gctgcttccaaacttgatttgatat

SEQ ID NO: 2812151 - DNA, 25 bp, Homo sapien
ggctgcttccaaacttgatttgata

SEQ ID NO: 2812152 - DNA, 25 bp, Homo sapien
ctgcttccaaacttgatttgatatt

SEQ ID NO: 2812153 - DNA, 25 bp, Homo sapien
tcctttctgcaatcgacgtctgaca

SEQ ID NO: 2812154 - DNA, 25 bp, Homo sapien
tgttttgtcaactgacgtttcacct

SEQ ID NO: 2812155 - DNA, 25 bp, Homo sapien
tgcaatcgacgtctgacagctgatt

SEQ ID NO: 2812156 - DNA, 25 bp, Homo sapien
gacgtctgacagctgatttttgctg

SEQ ID NO: 2812157 - DNA, 25 bp, Homo sapien
cacagtgaccaagctcattaatctt

SEQ ID NO: 2812158 - DNA, 25 bp, Homo sapien
tgtctgaggcttacacaccttataa

SEQ ID NO: 2812159 - DNA, 25 bp, Homo sapien
ccattaacatgtacgtccaagtgtc

SEQ ID NO: 2812160 - DNA, 25 bp, Homo sapien
cagctcatatgaagaatgactcatc

SEQ ID NO: 2812161 - DNA, 25 bp, Homo sapien
cacagtagtgatgtaataaacattc

SEQ ID NO: 2812162 - DNA, 25 bp, Homo sapien
atcacagtagtgatgtaataaacat

SEQ ID NO: 2812163 - DNA, 25 bp, Homo sapien
cagtagtgatgtaataaacattcag

SEQ ID NO: 2812164 - DNA, 25 bp, Homo sapien
agtgatgtaataaacattcagtaca

SEQ ID NO: 2812165 - DNA, 25 bp, Homo sapien
ggaattgttgaacagcttacagcac

SEQ ID NO: 2812166 - DNA, 25 bp, Homo sapien
tggaggaattgttgaacagcttaca

SEQ ID NO: 2812167 - DNA, 25 bp, Homo sapien
gaggaattgttgaacagcttacagc

SEQ ID NO: 2812168 - DNA, 25 bp, Homo sapien
ggaggaattgttgaacagcttacag

SEQ ID NO: 2812169 - DNA, 25 bp, Homo sapien
tactgattcatagctcccacatttt

SEQ ID NO: 2812170 - DNA, 25 bp, Homo sapien
tgattcatagctcccacattttctt

SEQ ID NO: 2812171 - DNA, 25 bp, Homo sapien
attcatagctcccacattttcttca

SEQ ID NO: 2812172 - DNA, 25 bp, Homo sapien
ctatactgattcatagctcccacat

SEQ ID NO: 2812173 - DNA, 25 bp, Homo sapien
agtagccctgtgacacagatacaca

SEQ ID NO: 2812174 - DNA, 25 bp, Homo sapien
cagtagccctgtgacacagatacac

SEQ ID NO: 2812175 - DNA, 25 bp, Homo sapien
ttattatttaaatggcagtagccct

SEQ ID NO: 2812176 - DNA, 25 bp, Homo sapien
ttactagaatctaacaaagtatcag

SEQ ID NO: 2812177 - DNA, 25 bp, Homo sapien
aaaagcaatcgacagaagtctatac

SEQ ID NO: 2812178 - DNA, 25 bp, Homo sapien
tcagtctcaagactaaagttaaaaa

SEQ ID NO: 2812179 - DNA, 25 bp, Homo sapien
aagttaaaaagcaatcgacagaagt

SEQ ID NO: 2812180 - DNA, 25 bp, Homo sapien
acgacaaggcaattagatgagggca

SEQ ID NO: 2812181 - DNA, 25 bp, Homo sapien
catttcaaaactccgtgcatcagca

SEQ ID NO: 2812182 - DNA, 25 bp, Homo sapien
gcagccctctgattcttctagacag

SEQ ID NO: 2812183 - DNA, 25 bp, Homo sapien
cttcatactcgtcagagccagcagg

SEQ ID NO: 2812184 - DNA, 25 bp, Homo sapien
tgaaaatgagaattcagatccctct

SEQ ID NO: 2812185 - DNA, 25 bp, Homo sapien
tggatgaagcagttcatcatctgcc

SEQ ID NO: 2812186 - DNA, 25 bp, Homo sapien
gatgaagcagttcatcatctgcctg

SEQ ID NO: 2812187 - DNA, 25 bp, Homo sapien
tgtgtagccactggcagaaacctcc

SEQ ID NO: 2812188 - DNA, 25 bp, Homo sapien
aagctcactttcgtagctgaaacgt

SEQ ID NO: 2812189 - DNA, 25 bp, Homo sapien
actttcgtagctgaaacgtttcata

SEQ ID NO: 2812190 - DNA, 25 bp, Homo sapien
tcactttcgtagctgaaacgtttca

SEQ ID NO: 2812191 - DNA, 25 bp, Homo sapien
gctcactttcgtagctgaaacgttt

SEQ ID NO: 2812192 - DNA, 25 bp, Homo sapien
agcattgggatgagaagttgaaacc

SEQ ID NO: 2812193 - DNA, 25 bp, Homo sapien
catatactgatgcaggatcttcaac

SEQ ID NO: 2812194 - DNA, 25 bp, Homo sapien
gatcttcaacatggtgtatctgaca

SEQ ID NO: 2812195 - DNA, 25 bp, Homo sapien
cagcccatgatttgcaagtttgaca

SEQ ID NO: 2812196 - DNA, 25 bp, Homo sapien
agttccatgaccactgcatgacgat

SEQ ID NO: 2812197 - DNA, 25 bp, Homo sapien
ttgtaatcaattggctttggaactg

SEQ ID NO: 2812198 - DNA, 25 bp, Homo sapien
tgcatgacgattgtaatcaattggc

SEQ ID NO: 2812199 - DNA, 25 bp, Homo sapien
ttccatgaccactgcatgacgattg

SEQ ID NO: 2812200 - DNA, 25 bp, Homo sapien
cacaaaatatgcagtcaagttccaa

SEQ ID NO: 2812201 - DNA, 25 bp, Homo sapien
cctgagaaaaccgtctttgagattt

SEQ ID NO: 2812202 - DNA, 25 bp, Homo sapien
agtataaatgtagtccgccagtgcc

SEQ ID NO: 2812203 - DNA, 25 bp, Homo sapien
gaagtgcaatgaataggcctaaccc

SEQ ID NO: 2812204 - DNA, 25 bp, Homo sapien
aatatagccatgacacattgtgcct

SEQ ID NO: 2812205 - DNA, 25 bp, Homo sapien
ttcatggcagagagacgagataaat

SEQ ID NO: 2812206 - DNA, 25 bp, Homo sapien
tgtgcctatgtttatgataatcgcg

SEQ ID NO: 2812207 - DNA, 25 bp, Homo sapien
gaaacgaggttcttcctagtctgtg

SEQ ID NO: 2812208 - DNA, 25 bp, Homo sapien
tttgtcaaccgatagccctggacag

SEQ ID NO: 2812209 - DNA, 25 bp, Homo sapien
ccatctggtttccaacagactcaac

SEQ ID NO: 2812210 - DNA, 25 bp, Homo sapien
cagactcaactacttgcctagaaga

SEQ ID NO: 2812211 - DNA, 25 bp, Homo sapien
caaagctaggtaatcatatcctgca

SEQ ID NO: 2812212 - DNA, 25 bp, Homo sapien
gccgaagtgtgttctgtcagttctt

SEQ ID NO: 2812213 - DNA, 25 bp, Homo sapien
tttgactaataggatatggccgaag

SEQ ID NO: 2812214 - DNA, 25 bp, Homo sapien
cgtctaatgctttactagtctggca

SEQ ID NO: 2812215 - DNA, 25 bp, Homo sapien
tgctctggtggaaaccaattacctg

SEQ ID NO: 2812216 - DNA, 25 bp, Homo sapien
ttttggtacgctcccaagctatgag

SEQ ID NO: 2812217 - DNA, 25 bp, Homo sapien
catgtttaaggctggctatagaagc

SEQ ID NO: 2812218 - DNA, 25 bp, Homo sapien
gaagcaatcaaactgccgggaacaa

SEQ ID NO: 2812219 - DNA, 25 bp, Homo sapien
caagctatgagtttatgtttcacta

SEQ ID NO: 2812220 - DNA, 25 bp, Homo sapien
gaccctgaagtcatctcggctcatg

SEQ ID NO: 2812221 - DNA, 25 bp, Homo sapien
tctcggctcatgtaacgcaacttgg

SEQ ID NO: 2812222 - DNA, 25 bp, Homo sapien
gcggtcaagaccctgaagtcatctc

SEQ ID NO: 2812223 - DNA, 25 bp, Homo sapien
gtaacgcaacttggccacattcact

SEQ ID NO: 2812224 - DNA, 25 bp, Homo sapien
tccagcctctaagcgctttacagcg

SEQ ID NO: 2812225 - DNA, 25 bp, Homo sapien
cgacagccgcaaagcgtaaggcagg

SEQ ID NO: 2812226 - DNA, 25 bp, Homo sapien
gcaggtcgttattccagcctctaag

SEQ ID NO: 2812227 - DNA, 25 bp, Homo sapien
tttacagcgccagatggctcgcgca

SEQ ID NO: 2812228 - DNA, 25 bp, Homo sapien
gcccaggagcgatttaaggatttta

SEQ ID NO: 2812229 - DNA, 25 bp, Homo sapien
gggattttgatagttcgggctgacc

SEQ ID NO: 2812230 - DNA, 25 bp, Homo sapien
tgacctacgcgggtaggacttcgag

SEQ ID NO: 2812231 - DNA, 25 bp, Homo sapien
acttcgagggcccaggagcgattta

SEQ ID NO: 2812232 - DNA, 25 bp, Homo sapien
acagaccccgtcaccttcatttctt

SEQ ID NO: 2812233 - DNA, 25 bp, Homo sapien
ggtctaatgggtcataggttcttta

SEQ ID NO: 2812234 - DNA, 25 bp, Homo sapien
tagtgtttctaaacctcttgttcat

SEQ ID NO: 2812235 - DNA, 25 bp, Homo sapien
tgttcatttaagtccccatcacaga

SEQ ID NO: 2812236 - DNA, 25 bp, Homo sapien
atgtgtcgacgaatttatccctttt

SEQ ID NO: 2812237 - DNA, 25 bp, Homo sapien
tacagaaactgtatgggcgaggcag

SEQ ID NO: 2812238 - DNA, 25 bp, Homo sapien
gctgttcttgcttgggatattaccg

SEQ ID NO: 2812239 - DNA, 25 bp, Homo sapien
tttggccacattcctcagatccttg

SEQ ID NO: 2812240 - DNA, 25 bp, Homo sapien
cttacaaggtagaatggtctctcta

SEQ ID NO: 2812241 - DNA, 25 bp, Homo sapien
ttctggaggctttaaagtctaagac

SEQ ID NO: 2812242 - DNA, 25 bp, Homo sapien
tttggtgtctcgctctctgcctcat

SEQ ID NO: 2812243 - DNA, 25 bp, Homo sapien
agatttggtgtctcgctctctgcct

SEQ ID NO: 2812244 - DNA, 25 bp, Homo sapien
ggtgtctcgctctctgcctcataaa

SEQ ID NO: 2812245 - DNA, 25 bp, Homo sapien
agcctgaggcatccagacccttgct

SEQ ID NO: 2812246 - DNA, 25 bp, Homo sapien
tagcctgaggcatccagacccttgc

SEQ ID NO: 2812247 - DNA, 25 bp, Homo sapien
ctagcctgaggcatccagacccttg

SEQ ID NO: 2812248 - DNA, 25 bp, Homo sapien
attgtctggctcattatttcccaag

SEQ ID NO: 2812249 - DNA, 25 bp, Homo sapien
taattagagcccttgctttgtcact

SEQ ID NO: 2812250 - DNA, 25 bp, Homo sapien
catggaggcttcaaacattgtctgg

SEQ ID NO: 2812251 - DNA, 25 bp, Homo sapien
tgtcagaccggaacccttcgctaat

SEQ ID NO: 2812252 - DNA, 25 bp, Homo sapien
cctcttgctttcacactagcacagg

SEQ ID NO: 2812253 - DNA, 25 bp, Homo sapien
caggcactgatctcacaccaggtca

SEQ ID NO: 2812254 - DNA, 25 bp, Homo sapien
ctcattactgcactggagcccagac

SEQ ID NO: 2812255 - DNA, 25 bp, Homo sapien
accaggtcaccactcttgcacagat

SEQ ID NO: 2812256 - DNA, 25 bp, Homo sapien
ctgtgggaatgtccgccccactcaa

SEQ ID NO: 2812257 - DNA, 25 bp, Homo sapien
tctgccatgataccccgtgccagaa

SEQ ID NO: 2812258 - DNA, 25 bp, Homo sapien
gaatgtccgccccactcaaatgggc

SEQ ID NO: 2812259 - DNA, 25 bp, Homo sapien
cactcaaatgggctctgccatgata

SEQ ID NO: 2812260 - DNA, 25 bp, Homo sapien
tctgctcgaggtcttttcccacaca

SEQ ID NO: 2812261 - DNA, 25 bp, Homo sapien
cagcattctgctcgaggtcttttcc

SEQ ID NO: 2812262 - DNA, 25 bp, Homo sapien
gcttggacttcagcattctgctcga

SEQ ID NO: 2812263 - DNA, 25 bp, Homo sapien
gacttcagcattctgctcgaggtct

SEQ ID NO: 2812264 - DNA, 25 bp, Homo sapien
ggccgtgtttcagtttgatgatcca

SEQ ID NO: 2812265 - DNA, 25 bp, Homo sapien
tgaaacttcttcaatggccgtgttt

SEQ ID NO: 2812266 - DNA, 25 bp, Homo sapien
gatccactaaaactatattcttgac

SEQ ID NO: 2812267 - DNA, 25 bp, Homo sapien
tgatgatccactaaaactatattct

SEQ ID NO: 2812268 - DNA, 25 bp, Homo sapien
ccttttgagagatctggctggtttt

SEQ ID NO: 2812269 - DNA, 25 bp, Homo sapien
taggagcactgttactaaattcaac

SEQ ID NO: 2812270 - DNA, 25 bp, Homo sapien
tgcatctagacttgagagttctttg

SEQ ID NO: 2812271 - DNA, 25 bp, Homo sapien
aattcaacattgcatctagacttga

SEQ ID NO: 2812272 - DNA, 25 bp, Homo sapien
atcttgtaagtgttatatcttcctc

SEQ ID NO: 2812273 - DNA, 25 bp, Homo sapien
ggtcgctgttgcttgaaggctggcc

SEQ ID NO: 2812274 - DNA, 25 bp, Homo sapien
cttgggtcgctgttgcttgaaggct

SEQ ID NO: 2812275 - DNA, 25 bp, Homo sapien
ttgcttgaaggctggccccttcttt

SEQ ID NO: 2812276 - DNA, 25 bp, Homo sapien
tgggtcgctgttgcttgaaggctgg

SEQ ID NO: 2812277 - DNA, 25 bp, Homo sapien
ttctggttgggcacagtttctctta

SEQ ID NO: 2812278 - DNA, 25 bp, Homo sapien
gttgggcacagtttctcttacagcc

SEQ ID NO: 2812279 - DNA, 25 bp, Homo sapien
tggttgggcacagtttctcttacag

SEQ ID NO: 2812280 - DNA, 25 bp, Homo sapien
gggcacagtttctcttacagcccat

SEQ ID NO: 2812281 - DNA, 25 bp, Homo sapien
ctgccactgccactgcccagctggt

SEQ ID NO: 2812282 - DNA, 25 bp, Homo sapien
gccactgccactgcccagctggtac

SEQ ID NO: 2812283 - DNA, 25 bp, Homo sapien
cagtggcctgagcacccagcagcca

SEQ ID NO: 2812284 - DNA, 25 bp, Homo sapien
cactgccactgccactgcccagctg

SEQ ID NO: 2812285 - DNA, 25 bp, Homo sapien
aggccagagattgcgttagcagaga

SEQ ID NO: 2812286 - DNA, 25 bp, Homo sapien
tgccccaggctgttcatgaagcatg

SEQ ID NO: 2812287 - DNA, 25 bp, Homo sapien
attgcgttagcagagatgacaggcc

SEQ ID NO: 2812288 - DNA, 25 bp, Homo sapien
gccccaggctgttcatgaagcatgt

SEQ ID NO: 2812289 - DNA, 25 bp, Homo sapien
ctgcagtcaagacagtgggctctgt

SEQ ID NO: 2812290 - DNA, 25 bp, Homo sapien
cagggcatagtcagcctgaaaattg

SEQ ID NO: 2812291 - DNA, 25 bp, Homo sapien
ggtgaacagcctgaagcagggcata

SEQ ID NO: 2812292 - DNA, 25 bp, Homo sapien
ttcacagcgacacccttagcaaggc

SEQ ID NO: 2812293 - DNA, 25 bp, Homo sapien
atgggccgccattgccagcaagcct

SEQ ID NO: 2812294 - DNA, 25 bp, Homo sapien
tgggccgccattgccagcaagcctg

SEQ ID NO: 2812295 - DNA, 25 bp, Homo sapien
caagtataaaaaaaagtgaaagctg

SEQ ID NO: 2812296 - DNA, 25 bp, Homo sapien
tataaaaaaaagtgaaagctgccca

SEQ ID NO: 2812297 - DNA, 25 bp, Homo sapien
tggaatcttaaaagtggacatgtac

SEQ ID NO: 2812298 - DNA, 25 bp, Homo sapien
aagaatttgactggaatcttaaaag

SEQ ID NO: 2812299 - DNA, 25 bp, Homo sapien
gcattataaagagctattctgagga

SEQ ID NO: 2812300 - DNA, 25 bp, Homo sapien
cattataaagagctattctgaggat

SEQ ID NO: 2812301 - DNA, 25 bp, Homo sapien
aaagagctattctgaggatgacatt

SEQ ID NO: 2812302 - DNA, 25 bp, Homo sapien
gagctattctgaggatgacattcac

SEQ ID NO: 2812303 - DNA, 25 bp, Homo sapien
ggagaatcatgacaacaagccagtc

SEQ ID NO: 2812304 - DNA, 25 bp, Homo sapien
gatgtacccaataacgagctcaggc

SEQ ID NO: 2812305 - DNA, 25 bp, Homo sapien
cattcagctccataagcagcaaggg

SEQ ID NO: 2812306 - DNA, 25 bp, Homo sapien
gctcaggcacatcagactggagaat

SEQ ID NO: 2812307 - DNA, 25 bp, Homo sapien
tattaaatatcagtatcttgctgat

SEQ ID NO: 2812308 - DNA, 25 bp, Homo sapien
tgctcactctctcctttcaaaatta

SEQ ID NO: 2812309 - DNA, 25 bp, Homo sapien
cagtatcttgctgatatttagccaa

SEQ ID NO: 2812310 - DNA, 25 bp, Homo sapien
ctgatatttagccaaagatgaagtt

SEQ ID NO: 2812311 - DNA, 25 bp, Homo sapien
ggctgcattatcaagcagcttgact

SEQ ID NO: 2812312 - DNA, 25 bp, Homo sapien
ttgggctgcattatcaagcagcttg

SEQ ID NO: 2812313 - DNA, 25 bp, Homo sapien
gggctgcattatcaagcagcttgac

SEQ ID NO: 2812314 - DNA, 25 bp, Homo sapien
tgggctgcattatcaagcagcttga

SEQ ID NO: 2812315 - DNA, 25 bp, Homo sapien
agccactacaggccttatactgcat

SEQ ID NO: 2812316 - DNA, 25 bp, Homo sapien
cagccactacaggccttatactgca

SEQ ID NO: 2812317 - DNA, 25 bp, Homo sapien
tctgtcattaccaactgccagagtg

SEQ ID NO: 2812318 - DNA, 25 bp, Homo sapien
tcaaaatctgtcattaccaactgcc

SEQ ID NO: 2812319 - DNA, 25 bp, Homo sapien
tgtcattaccaactgccagagtgat

SEQ ID NO: 2812320 - DNA, 25 bp, Homo sapien
aatctgtcattaccaactgccagag

SEQ ID NO: 2812321 - DNA, 25 bp, Homo sapien
tctgtcttgatggctttaggcttca

SEQ ID NO: 2812322 - DNA, 25 bp, Homo sapien
ctctgtcttgatggctttaggcttc

SEQ ID NO: 2812323 - DNA, 25 bp, Homo sapien
ctgtcttgatggctttaggcttcat

SEQ ID NO: 2812324 - DNA, 25 bp, Homo sapien
gataagggcctcaatacagtgctcc

SEQ ID NO: 2812325 - DNA, 25 bp, Homo sapien
ggggaaggccactctctgtataaag

SEQ ID NO: 2812326 - DNA, 25 bp, Homo sapien
tagatttgggcttctgagcacccga

SEQ ID NO: 2812327 - DNA, 25 bp, Homo sapien
tacagtgctccccataactttcaac

SEQ ID NO: 2812328 - DNA, 25 bp, Homo sapien
cacaagagtgcacttgggaccaaat

SEQ ID NO: 2812329 - DNA, 25 bp, Homo sapien
tgcacttgggaccaaattgagtaag

SEQ ID NO: 2812330 - DNA, 25 bp, Homo sapien
ccaaattgagtaagatgtacagaca

SEQ ID NO: 2812331 - DNA, 25 bp, Homo sapien
gtttctcacaagagtgcacttggga

SEQ ID NO: 2812332 - DNA, 25 bp, Homo sapien
tctggggtcctaagcacatctctct

SEQ ID NO: 2812333 - DNA, 25 bp, Homo sapien
taagcacatctctctggggtgctgc

SEQ ID NO: 2812334 - DNA, 25 bp, Homo sapien
caggccacctctggggtcctaagca

SEQ ID NO: 2812335 - DNA, 25 bp, Homo sapien
acctctggggtcctaagcacatctc

SEQ ID NO: 2812336 - DNA, 25 bp, Homo sapien
caggcccacccgagggcctgtttgg

SEQ ID NO: 2812337 - DNA, 25 bp, Homo sapien
aggacagacgatgacagatctggag

SEQ ID NO: 2812338 - DNA, 25 bp, Homo sapien
gcatacaaacacgtagaacacattc

SEQ ID NO: 2812339 - DNA, 25 bp, Homo sapien
agacgatgacagatctggagacccc

SEQ ID NO: 2812340 - DNA, 25 bp, Homo sapien
gaggtggacatctgcgagagggtag

SEQ ID NO: 2812341 - DNA, 25 bp, Homo sapien
cttggtgaggtggacatctgcgaga

SEQ ID NO: 2812342 - DNA, 25 bp, Homo sapien
ggtgagtttgccactcttcaaccag

SEQ ID NO: 2812343 - DNA, 25 bp, Homo sapien
gaggtttggtgagtttgccactctt

SEQ ID NO: 2812344 - DNA, 25 bp, Homo sapien
gtttgccactcttcaaccagcacag

SEQ ID NO: 2812345 - DNA, 25 bp, Homo sapien
ggaggaggtttggtgagtttgccac

SEQ ID NO: 2812346 - DNA, 25 bp, Homo sapien
gatgcccaactatgctgctcttctg

SEQ ID NO: 2812347 - DNA, 25 bp, Homo sapien
gtcaacatgatagaagtggcctcta

SEQ ID NO: 2812348 - DNA, 25 bp, Homo sapien
tgtcctgcccagccgggtaatggtg

SEQ ID NO: 2812349 - DNA, 25 bp, Homo sapien
agagtgtagggcacagggttcccac

SEQ ID NO: 2812350 - DNA, 25 bp, Homo sapien
cctgcgtgacaagatgttttaggct

SEQ ID NO: 2812351 - DNA, 25 bp, Homo sapien
tcttcaagttggctgttgagttctt

SEQ ID NO: 2812352 - DNA, 25 bp, Homo sapien
gttttaggcttatcttgcacatttc

SEQ ID NO: 2812353 - DNA, 25 bp, Homo sapien
catgtttttgattgttcccttgcta

SEQ ID NO: 2812354 - DNA, 25 bp, Homo sapien
cagctgtttctcctcagtgtagtgt

SEQ ID NO: 2812355 - DNA, 25 bp, Homo sapien
agctgtttctcctcagtgtagtgtc

SEQ ID NO: 2812356 - DNA, 25 bp, Homo sapien
actgcttcctacactccttattcat

SEQ ID NO: 2812357 - DNA, 25 bp, Homo sapien
taggatgccacactgcttcctacac

SEQ ID NO: 2812358 - DNA, 25 bp, Homo sapien
tgccacactgcttcctacactcctt

SEQ ID NO: 2812359 - DNA, 25 bp, Homo sapien
ctgtaggatgccacactgcttccta

SEQ ID NO: 2812360 - DNA, 25 bp, Homo sapien
gaagtgagaggagcgaaaggggaaa

SEQ ID NO: 2812361 - DNA, 25 bp, Homo sapien
gagaagtgagaggagcgaaagggga

SEQ ID NO: 2812362 - DNA, 25 bp, Homo sapien
ggagagagaagtgagaggagcgaaa

SEQ ID NO: 2812363 - DNA, 25 bp, Homo sapien
gagagaagtgagaggagcgaaaggg

SEQ ID NO: 2812364 - DNA, 25 bp, Homo sapien
ctgtttccactttggctcagtagtg

SEQ ID NO: 2812365 - DNA, 25 bp, Homo sapien
cactttggctcagtagtgtctccac

SEQ ID NO: 2812366 - DNA, 25 bp, Homo sapien
gaagcctagtcctttggattcctgt

SEQ ID NO: 2812367 - DNA, 25 bp, Homo sapien
ctaggaacgggattccgtgaagcct

SEQ ID NO: 2812368 - DNA, 25 bp, Homo sapien
ccttgttctataggagagaaatgat

SEQ ID NO: 2812369 - DNA, 25 bp, Homo sapien
tataaaccttgttctataggagaga

SEQ ID NO: 2812370 - DNA, 25 bp, Homo sapien
cagtgctgccacctgaacctataaa

SEQ ID NO: 2812371 - DNA, 25 bp, Homo sapien
tgccacctgaacctataaaccttgt

SEQ ID NO: 2812372 - DNA, 25 bp, Homo sapien
tgggatctacgcgtaacattttgtg

SEQ ID NO: 2812373 - DNA, 25 bp, Homo sapien
ggatctacgcgtaacattttgtgtg

SEQ ID NO: 2812374 - DNA, 25 bp, Homo sapien
ctagttgggatctacgcgtaacatt

SEQ ID NO: 2812375 - DNA, 25 bp, Homo sapien
cttgctgatgctttagcacggaggt

SEQ ID NO: 2812376 - DNA, 25 bp, Homo sapien
tccataaaactctctagctttacac

SEQ ID NO: 2812377 - DNA, 25 bp, Homo sapien
actctctagctttacactctttctc

SEQ ID NO: 2812378 - DNA, 25 bp, Homo sapien
ttctcttccatggaacattgttcca

SEQ ID NO: 2812379 - DNA, 25 bp, Homo sapien
catttctcttccatggaacattgtt

SEQ ID NO: 2812380 - DNA, 25 bp, Homo sapien
tgagactggtccgataataactgct

SEQ ID NO: 2812381 - DNA, 25 bp, Homo sapien
ggtccgataataactgctttggctt

SEQ ID NO: 2812382 - DNA, 25 bp, Homo sapien
ggctttctggcataaatgatggata

SEQ ID NO: 2812383 - DNA, 25 bp, Homo sapien
tcagagttgagactggtccgataat

SEQ ID NO: 2812384 - DNA, 25 bp, Homo sapien
tccttttcccactctccatttctgc

SEQ ID NO: 2812385 - DNA, 25 bp, Homo sapien
ctccatttctgcctttaacatacag

SEQ ID NO: 2812386 - DNA, 25 bp, Homo sapien
cttccttttcccactctccatttct

SEQ ID NO: 2812387 - DNA, 25 bp, Homo sapien
catttctgcctttaacatacagcat

SEQ ID NO: 2812388 - DNA, 25 bp, Homo sapien
acactccccactctcgccattcata

SEQ ID NO: 2812389 - DNA, 25 bp, Homo sapien
gtgaattcctttttgcttgcaattg

SEQ ID NO: 2812390 - DNA, 25 bp, Homo sapien
cacatggctaggataataatgagct

SEQ ID NO: 2812391 - DNA, 25 bp, Homo sapien
ataatgagctggcataaagcctcga

SEQ ID NO: 2812392 - DNA, 25 bp, Homo sapien
tgcttgcaattgatcccccaggtaa

SEQ ID NO: 2812393 - DNA, 25 bp, Homo sapien
agaacatccccgaaaaaggaagatg

SEQ ID NO: 2812394 - DNA, 25 bp, Homo sapien
gaacatccccgaaaaaggaagatga

SEQ ID NO: 2812395 - DNA, 25 bp, Homo sapien
caataagtactatgcaaatgtgtaa

SEQ ID NO: 2812396 - DNA, 25 bp, Homo sapien
ctagaatcaataagtactatgcaaa

SEQ ID NO: 2812397 - DNA, 25 bp, Homo sapien
tcaggtacatgaggattatttaaac

SEQ ID NO: 2812398 - DNA, 25 bp, Homo sapien
ccaaatcatcatataaccgagtctc

SEQ ID NO: 2812399 - DNA, 25 bp, Homo sapien
ttcttgccgcctccactttctggca

SEQ ID NO: 2812400 - DNA, 25 bp, Homo sapien
ctcttttcttgccgcctccactttc

SEQ ID NO: 2812401 - DNA, 25 bp, Homo sapien
tcttgccgcctccactttctggcat

SEQ ID NO: 2812402 - DNA, 25 bp, Homo sapien
ttttcttgccgcctccactttctgg

SEQ ID NO: 2812403 - DNA, 25 bp, Homo sapien
ataatgggttggtagattgatggac

SEQ ID NO: 2812404 - DNA, 25 bp, Homo sapien
tataatgggttggtagattgatgga

SEQ ID NO: 2812405 - DNA, 25 bp, Homo sapien
tgaggaagccatgcagttttttcct

SEQ ID NO: 2812406 - DNA, 25 bp, Homo sapien
cttgcagttcagagagtgaagaatg

SEQ ID NO: 2812407 - DNA, 25 bp, Homo sapien
gttttttccttgcagttcagagagt

SEQ ID NO: 2812408 - DNA, 25 bp, Homo sapien
ctgaggaagccatgcagttttttcc

SEQ ID NO: 2812409 - DNA, 25 bp, Homo sapien
gaaccttgagaagggttgaggagga

SEQ ID NO: 2812410 - DNA, 25 bp, Homo sapien
acagctgagaatgttgcagatttgc

SEQ ID NO: 2812411 - DNA, 25 bp, Homo sapien
ttgcagatttgccactgagagctgg

SEQ ID NO: 2812412 - DNA, 25 bp, Homo sapien
gttgcagatttgccactgagagctg

SEQ ID NO: 2812413 - DNA, 25 bp, Homo sapien
cacatgggtgctttgatgcccaccc

SEQ ID NO: 2812414 - DNA, 25 bp, Homo sapien
taatttctgtcgtttcagagtctgg

SEQ ID NO: 2812415 - DNA, 25 bp, Homo sapien
aatttctgtcgtttcagagtctgga

SEQ ID NO: 2812416 - DNA, 25 bp, Homo sapien
gaaaatctccaaacttgctgcacta

SEQ ID NO: 2812417 - DNA, 25 bp, Homo sapien
cctacaacagcttggtttgacttcc

SEQ ID NO: 2812418 - DNA, 25 bp, Homo sapien
gggccattcagatcccctacaacag

SEQ ID NO: 2812419 - DNA, 25 bp, Homo sapien
tggcccaagtgaatgagcacagaaa

SEQ ID NO: 2812420 - DNA, 25 bp, Homo sapien
gaagaaaatgacataatgatagtta

SEQ ID NO: 2812421 - DNA, 25 bp, Homo sapien
agaaaatgacataatgatagttatt

SEQ ID NO: 2812422 - DNA, 25 bp, Homo sapien
taatgatagttattgagaagaggag

SEQ ID NO: 2812423 - DNA, 25 bp, Homo sapien
atgatagttattgagaagaggaggc

SEQ ID NO: 2812424 - DNA, 25 bp, Homo sapien
agcttctctgttaccattatggtat

SEQ ID NO: 2812425 - DNA, 25 bp, Homo sapien
accattatggtattgcagcttccca

SEQ ID NO: 2812426 - DNA, 25 bp, Homo sapien
agctggtgctcaggtcatcaacatc

SEQ ID NO: 2812427 - DNA, 25 bp, Homo sapien
acagagctggtgctcaggtcatcaa

SEQ ID NO: 2812428 - DNA, 25 bp, Homo sapien
caactgcatctaagtagttgtgcat

SEQ ID NO: 2812429 - DNA, 25 bp, Homo sapien
tgtggagtttcttgtgagcaactgc

SEQ ID NO: 2812430 - DNA, 25 bp, Homo sapien
ggagtttcttgtgagcaactgcatc

SEQ ID NO: 2812431 - DNA, 25 bp, Homo sapien
agcaactgcatctaagtagttgtgc

SEQ ID NO: 2812432 - DNA, 25 bp, Homo sapien
ttctccctcataagcattgagctca

SEQ ID NO: 2812433 - DNA, 25 bp, Homo sapien
tcataagcattgagctcattctcta

SEQ ID NO: 2812434 - DNA, 25 bp, Homo sapien
tccctcataagcattgagctcattc

SEQ ID NO: 2812435 - DNA, 25 bp, Homo sapien
gcattgagctcattctctatttctc

SEQ ID NO: 2812436 - DNA, 25 bp, Homo sapien
ggtcctatgagaaccatgtggctta

SEQ ID NO: 2812437 - DNA, 25 bp, Homo sapien
tgtggcttatccacgatggctgtgg

SEQ ID NO: 2812438 - DNA, 25 bp, Homo sapien
tggaattgtgttcaacctgctgact

SEQ ID NO: 2812439 - DNA, 25 bp, Homo sapien
catccggagactatgcttacagcac

SEQ ID NO: 2812440 - DNA, 25 bp, Homo sapien
gggtcaacatctgcatcgaagagaa

SEQ ID NO: 2812441 - DNA, 25 bp, Homo sapien
gaacaaccagaagtgctttgtcctg

SEQ ID NO: 2812442 - DNA, 25 bp, Homo sapien
gaagattactcaaatctcccgaagc

SEQ ID NO: 2812443 - DNA, 25 bp, Homo sapien
tcatggtggattacacttcctggat

SEQ ID NO: 2812444 - DNA, 25 bp, Homo sapien
cacttacacgcaagccacaccacag

SEQ ID NO: 2812445 - DNA, 25 bp, Homo sapien
atcagcatggccacttacacgcaag

SEQ ID NO: 2812446 - DNA, 25 bp, Homo sapien
gaagtctgaaggagtcagatcagca

SEQ ID NO: 2812447 - DNA, 25 bp, Homo sapien
ctgaaggagtcagatcagcatggcc

SEQ ID NO: 2812448 - DNA, 25 bp, Homo sapien
ccactttgccaataggctttttcca

SEQ ID NO: 2812449 - DNA, 25 bp, Homo sapien
catcctctcctttcgcaagttggta

SEQ ID NO: 2812450 - DNA, 25 bp, Homo sapien
tccattattctcatcacccctgaca

SEQ ID NO: 2812451 - DNA, 25 bp, Homo sapien
gcaagttggtaaggccactttgcca

SEQ ID NO: 2812452 - DNA, 25 bp, Homo sapien
ctgtttcctggggtatggagtgccc

SEQ ID NO: 2812453 - DNA, 25 bp, Homo sapien
tgtttcctggggtatggagtgccca

SEQ ID NO: 2812454 - DNA, 25 bp, Homo sapien
gtttcctggggtatggagtgcccat

SEQ ID NO: 2812455 - DNA, 25 bp, Homo sapien
tttactcctaatttctctgtactca

SEQ ID NO: 2812456 - DNA, 25 bp, Homo sapien
aaattgcctgaatttcaacttatga

SEQ ID NO: 2812457 - DNA, 25 bp, Homo sapien
cctatctctccaacaaaattgcctg

SEQ ID NO: 2812458 - DNA, 25 bp, Homo sapien
gcctgaatttcaacttatgaagttt

SEQ ID NO: 2812459 - DNA, 25 bp, Homo sapien
ctctggtttttgtaagcagtgttcc

SEQ ID NO: 2812460 - DNA, 25 bp, Homo sapien
tgcggcctgtattttggaacctctg

SEQ ID NO: 2812461 - DNA, 25 bp, Homo sapien
tctgctcatgtaatggtgtttgcca

SEQ ID NO: 2812462 - DNA, 25 bp, Homo sapien
tctatattttgaccacacagttttc

SEQ ID NO: 2812463 - DNA, 25 bp, Homo sapien
tgctttgacccttcatgtgtatatc

SEQ ID NO: 2812464 - DNA, 25 bp, Homo sapien
agatatctggtatctgaaaaagtcc

SEQ ID NO: 2812465 - DNA, 25 bp, Homo sapien
tcagaaagcctagttctggtatttt

SEQ ID NO: 2812466 - DNA, 25 bp, Homo sapien
cccttgctttgacccttcatgtgta

SEQ ID NO: 2812467 - DNA, 25 bp, Homo sapien
cttgttcctcttcatttatggtcat

SEQ ID NO: 2812468 - DNA, 25 bp, Homo sapien
tttcattcttctccctatcttgttc

SEQ ID NO: 2812469 - DNA, 25 bp, Homo sapien
atcttgttcctcttcatttatggtc

SEQ ID NO: 2812470 - DNA, 25 bp, Homo sapien
attttcattcttctccctatcttgt

SEQ ID NO: 2812471 - DNA, 25 bp, Homo sapien
atagaactgcattgtttggctctct

SEQ ID NO: 2812472 - DNA, 25 bp, Homo sapien
atggaaatgcaatagaactgcattg

SEQ ID NO: 2812473 - DNA, 25 bp, Homo sapien
tgcattgtttggctctctgatattc

SEQ ID NO: 2812474 - DNA, 25 bp, Homo sapien
aatgcaatagaactgcattgtttgg

SEQ ID NO: 2812475 - DNA, 25 bp, Homo sapien
ttcttggaatacaaatacaacaacg

SEQ ID NO: 2812476 - DNA, 25 bp, Homo sapien
aaaagcaaataagcccgggcgcagt

SEQ ID NO: 2812477 - DNA, 25 bp, Homo sapien
caacaacgaacaacagggatgagtc

SEQ ID NO: 2812478 - DNA, 25 bp, Homo sapien
cggacgcacatgaaattatggaaca

SEQ ID NO: 2812479 - DNA, 25 bp, Homo sapien
gtctaccacaataggatcaccaggg

SEQ ID NO: 2812480 - DNA, 25 bp, Homo sapien
tagactgctataggaagggcatgac

SEQ ID NO: 2812481 - DNA, 25 bp, Homo sapien
gaccatttctgcaaaggaggcaaac

SEQ ID NO: 2812482 - DNA, 25 bp, Homo sapien
tgctgcaggcaagacacatcttctg

SEQ ID NO: 2812483 - DNA, 25 bp, Homo sapien
ggaaacgtagtagtcagtcacattg

SEQ ID NO: 2812484 - DNA, 25 bp, Homo sapien
gaatagttcattctccctatggagc

SEQ ID NO: 2812485 - DNA, 25 bp, Homo sapien
taattgaaaacatggtgatctcaga

SEQ ID NO: 2812486 - DNA, 25 bp, Homo sapien
tatgggtgacgttgacgaatagttc

SEQ ID NO: 2812487 - DNA, 25 bp, Homo sapien
cacagtgctgtgtaatgtttccagc

SEQ ID NO: 2812488 - DNA, 25 bp, Homo sapien
aatataatagtgataatgcactgca

SEQ ID NO: 2812489 - DNA, 25 bp, Homo sapien
tgtgtaatgtttccagccagctgca

SEQ ID NO: 2812490 - DNA, 25 bp, Homo sapien
atgcactgcaggctcgcacagtgct

SEQ ID NO: 2812491 - DNA, 25 bp, Homo sapien
tggtcttctcctctgagttgcatag

SEQ ID NO: 2812492 - DNA, 25 bp, Homo sapien
cctctgagttgcatagaccttaaaa

SEQ ID NO: 2812493 - DNA, 25 bp, Homo sapien
tgatcaagcccttttcagcataaaa

SEQ ID NO: 2812494 - DNA, 25 bp, Homo sapien
aaaaatgttgatggtccactctccc

SEQ ID NO: 2812495 - DNA, 25 bp, Homo sapien
gattctctggttacactagcccttg

SEQ ID NO: 2812496 - DNA, 25 bp, Homo sapien
catccctataggcaactactggaac

SEQ ID NO: 2812497 - DNA, 25 bp, Homo sapien
tactggaacttctctaatgtacttg

SEQ ID NO: 2812498 - DNA, 25 bp, Homo sapien
gaggtgctagggacagcatccctat

SEQ ID NO: 2812499 - DNA, 25 bp, Homo sapien
tctgtaaccatgtgagtggaaaggg

SEQ ID NO: 2812500 - DNA, 25 bp, Homo sapien
cgtgcattggacacagatcactcat

SEQ ID NO: 2812501 - DNA, 25 bp, Homo sapien
tcatgcctagattcaagaattcttg

SEQ ID NO: 2812502 - DNA, 25 bp, Homo sapien
ctttgaatttgattagtctgagttc

SEQ ID NO: 2812503 - DNA, 25 bp, Homo sapien
tcccttgcagttagatagagccatg

SEQ ID NO: 2812504 - DNA, 25 bp, Homo sapien
gaattacggtgcactaaactggtga

SEQ ID NO: 2812505 - DNA, 25 bp, Homo sapien
aaaacttcctacgtgagatcctcca

SEQ ID NO: 2812506 - DNA, 25 bp, Homo sapien
tagtcactactacaaggacagctgc

SEQ ID NO: 2812507 - DNA, 25 bp, Homo sapien
gagttgggcagactttctctgactg

SEQ ID NO: 2812508 - DNA, 25 bp, Homo sapien
tgtgatgtgctagcgtgcctgcctg

SEQ ID NO: 2812509 - DNA, 25 bp, Homo sapien
tgactgccctagctaaactctgcct

SEQ ID NO: 2812510 - DNA, 25 bp, Homo sapien
catcccactagtggatggcctgtga

SEQ ID NO: 2812511 - DNA, 25 bp, Homo sapien
cttgggcccgcgtatacttttctgt

SEQ ID NO: 2812512 - DNA, 25 bp, Homo sapien
tctgtcaggacttaatctacttgtc

SEQ ID NO: 2812513 - DNA, 25 bp, Homo sapien
tgctcttggagtcaccttgtttcat

SEQ ID NO: 2812514 - DNA, 25 bp, Homo sapien
caggtattctaagctttgctcttgg

SEQ ID NO: 2812515 - DNA, 25 bp, Homo sapien
gcgttataaccatccggctcttgat

SEQ ID NO: 2812516 - DNA, 25 bp, Homo sapien
gacctcttggcagaacaaggtaggg

SEQ ID NO: 2812517 - DNA, 25 bp, Homo sapien
tagccaatatcgtgcgttataacca

SEQ ID NO: 2812518 - DNA, 25 bp, Homo sapien
gggtgtgtgtagtcaccaacacttc

SEQ ID NO: 2812519 - DNA, 25 bp, Homo sapien
tcctgggcactttagctgatatcct

SEQ ID NO: 2812520 - DNA, 25 bp, Homo sapien
caagactagctaggaaagatttcac

SEQ ID NO: 2812521 - DNA, 25 bp, Homo sapien
taatgggtcccatatcaacacctgg

SEQ ID NO: 2812522 - DNA, 25 bp, Homo sapien
gaacagctaggcttatacccaggag

SEQ ID NO: 2812523 - DNA, 25 bp, Homo sapien
tgtgctggctacttctttgtaagtg

SEQ ID NO: 2812524 - DNA, 25 bp, Homo sapien
tcttttggtgtgctggctacttctt

SEQ ID NO: 2812525 - DNA, 25 bp, Homo sapien
tttgtaagtggttgagtaaattcat

SEQ ID NO: 2812526 - DNA, 25 bp, Homo sapien
tggtgtgctggctacttctttgtaa

SEQ ID NO: 2812527 - DNA, 25 bp, Homo sapien
gaattgttcctttctgaattttgga

SEQ ID NO: 2812528 - DNA, 25 bp, Homo sapien
tcctttctgaattttggaataatag

SEQ ID NO: 2812529 - DNA, 25 bp, Homo sapien
tcagaacacatttttgggaattgtt

SEQ ID NO: 2812530 - DNA, 25 bp, Homo sapien
tgttcctttctgaattttggaataa

SEQ ID NO: 2812531 - DNA, 25 bp, Homo sapien
taggagttaagctgcctctaccaat

SEQ ID NO: 2812532 - DNA, 25 bp, Homo sapien
gttaagctgcctctaccaatttcat

SEQ ID NO: 2812533 - DNA, 25 bp, Homo sapien
aataattcccgtaggagttaagctg

SEQ ID NO: 2812534 - DNA, 25 bp, Homo sapien
tcccgtaggagttaagctgcctcta

SEQ ID NO: 2812535 - DNA, 25 bp, Homo sapien
ctcctcggaatgtattttgaatctt

SEQ ID NO: 2812536 - DNA, 25 bp, Homo sapien
tttttcgcacatttggaatgcagtg

SEQ ID NO: 2812537 - DNA, 25 bp, Homo sapien
tgcagtgttaccacagaaagatctg

SEQ ID NO: 2812538 - DNA, 25 bp, Homo sapien
tttagccgtaatttattgcagttca

SEQ ID NO: 2812539 - DNA, 25 bp, Homo sapien
cagatctcgaattttcccttgggtg

SEQ ID NO: 2812540 - DNA, 25 bp, Homo sapien
tgcttttgtgggtggtccagccgaa

SEQ ID NO: 2812541 - DNA, 25 bp, Homo sapien
ggtctttgtcagtgcccatcctaaa

SEQ ID NO: 2812542 - DNA, 25 bp, Homo sapien
tagcaagagttgacagatgccaagt

SEQ ID NO: 2812543 - DNA, 25 bp, Homo sapien
tatcacctattaacagctctttatg

SEQ ID NO: 2812544 - DNA, 25 bp, Homo sapien
gaattactttatctgccgctttccc

SEQ ID NO: 2812545 - DNA, 25 bp, Homo sapien
cagtcatcatgtgctcatgcctgta

SEQ ID NO: 2812546 - DNA, 25 bp, Homo sapien
tatctgccgctttcccagtggacac

SEQ ID NO: 2812547 - DNA, 25 bp, Homo sapien
tcttatcctcttgtgagggacttgg

SEQ ID NO: 2812548 - DNA, 25 bp, Homo sapien
agggacttggatgagcagatctcag

SEQ ID NO: 2812549 - DNA, 25 bp, Homo sapien
gagcagatctcagttctatagctaa

SEQ ID NO: 2812550 - DNA, 25 bp, Homo sapien
gttctatagctaaaccagctgccat

SEQ ID NO: 2812551 - DNA, 25 bp, Homo sapien
tatctctgttgaagcaagaggattg

SEQ ID NO: 2812552 - DNA, 25 bp, Homo sapien
cagttatctctgttgaagcaagagg

SEQ ID NO: 2812553 - DNA, 25 bp, Homo sapien
tcagttatctctgttgaagcaagag

SEQ ID NO: 2812554 - DNA, 25 bp, Homo sapien
ctctgttgaagcaagaggattgtac

SEQ ID NO: 2812555 - DNA, 25 bp, Homo sapien
aatacagcatgtcttatacggacag

SEQ ID NO: 2812556 - DNA, 25 bp, Homo sapien
ctggaaactcgctttagctagtgca

SEQ ID NO: 2812557 - DNA, 25 bp, Homo sapien
tacggacagtgtaaccttggacctg

SEQ ID NO: 2812558 - DNA, 25 bp, Homo sapien
cgctttagctagtgcaattcccaaa

SEQ ID NO: 2812559 - DNA, 25 bp, Homo sapien
aaatcccctctgtggtaatcaccag

SEQ ID NO: 2812560 - DNA, 25 bp, Homo sapien
cccctctgtggtaatcaccaggtag

SEQ ID NO: 2812561 - DNA, 25 bp, Homo sapien
gatcgaaatcccctctgtggtaatc

SEQ ID NO: 2812562 - DNA, 25 bp, Homo sapien
catgctgatcgaaatcccctctgtg

SEQ ID NO: 2812563 - DNA, 25 bp, Homo sapien
tgaatcaatgtgttcagctttgaaa

SEQ ID NO: 2812564 - DNA, 25 bp, Homo sapien
ccacaaataggtaagaagtctgtaa

SEQ ID NO: 2812565 - DNA, 25 bp, Homo sapien
tccccacaaataggtaagaagtctg

SEQ ID NO: 2812566 - DNA, 25 bp, Homo sapien
cctggaaatgaatcaatgtgttcag

SEQ ID NO: 2812567 - DNA, 25 bp, Homo sapien
ttcttgtctgccttagttcttgtct

SEQ ID NO: 2812568 - DNA, 25 bp, Homo sapien
tatgtaggtgatacttagatttctt

SEQ ID NO: 2812569 - DNA, 25 bp, Homo sapien
gatttcttgtctgccttagttcttg

SEQ ID NO: 2812570 - DNA, 25 bp, Homo sapien
ctctatcgattatgtaggtgatact

SEQ ID NO: 2812571 - DNA, 25 bp, Homo sapien
tcaccaagcaacagagctatggcag

SEQ ID NO: 2812572 - DNA, 25 bp, Homo sapien
caagcaacagagctatggcagagcc

SEQ ID NO: 2812573 - DNA, 25 bp, Homo sapien
ctgtcctcaccaagcagaggggatg

SEQ ID NO: 2812574 - DNA, 25 bp, Homo sapien
agagccacctgtcctcaccaagcag

SEQ ID NO: 2812575 - DNA, 25 bp, Homo sapien
tcaggacgtcaggacctcagaggac

SEQ ID NO: 2812576 - DNA, 25 bp, Homo sapien
aggacgtcaggacctcagaggactc

SEQ ID NO: 2812577 - DNA, 25 bp, Homo sapien
gacgtcaggacctcagaggactcag

SEQ ID NO: 2812578 - DNA, 25 bp, Homo sapien
cgtcaggacctcagaggactcagac

SEQ ID NO: 2812579 - DNA, 25 bp, Homo sapien
acgcccctcgtggagcctgtgcggc

SEQ ID NO: 2812580 - DNA, 25 bp, Homo sapien
tgagctcagcccacttgcattgccg

SEQ ID NO: 2812581 - DNA, 25 bp, Homo sapien
acaaccacgcccctcgtggagcctg

SEQ ID NO: 2812582 - DNA, 25 bp, Homo sapien
ccaggcggtagctgcggctgggagt

SEQ ID NO: 2812583 - DNA, 25 bp, Homo sapien
gatgaatactcatgttctgcatccc

SEQ ID NO: 2812584 - DNA, 25 bp, Homo sapien
aatactcatgttctgcatcccagac

SEQ ID NO: 2812585 - DNA, 25 bp, Homo sapien
ctatggatgaatactcatgttctgc

SEQ ID NO: 2812586 - DNA, 25 bp, Homo sapien
tgaatactcatgttctgcatcccag

SEQ ID NO: 2812587 - DNA, 25 bp, Homo sapien
cagctgccgcgctatgtcctcctgc

SEQ ID NO: 2812588 - DNA, 25 bp, Homo sapien
gctgccgcgctatgtcctcctgctg

SEQ ID NO: 2812589 - DNA, 25 bp, Homo sapien
gcagctgccgcgctatgtcctcctg

SEQ ID NO: 2812590 - DNA, 25 bp, Homo sapien
agctgccgcgctatgtcctcctgct

SEQ ID NO: 2812591 - DNA, 25 bp, Homo sapien
gtgatggtggcctccagggaaactt

SEQ ID NO: 2812592 - DNA, 25 bp, Homo sapien
ctgtgatggtggcctccagggaaac

SEQ ID NO: 2812593 - DNA, 25 bp, Homo sapien
tggtggcctccagggaaacttctgg

SEQ ID NO: 2812594 - DNA, 25 bp, Homo sapien
gatggtggcctccagggaaacttct

SEQ ID NO: 2812595 - DNA, 25 bp, Homo sapien
gggagtggctgttgtccatggacag

SEQ ID NO: 2812596 - DNA, 25 bp, Homo sapien
atgctgtccatgtccgggagtggct

SEQ ID NO: 2812597 - DNA, 25 bp, Homo sapien
gagtggctgttgtccatggacagca

SEQ ID NO: 2812598 - DNA, 25 bp, Homo sapien
cagccatgatgctgtccatgtccgg

SEQ ID NO: 2812599 - DNA, 25 bp, Homo sapien
tcatatagctgtctaaggaagttga

SEQ ID NO: 2812600 - DNA, 25 bp, Homo sapien
tctaaggaagttgatctggtcagtc

SEQ ID NO: 2812601 - DNA, 25 bp, Homo sapien
atagctgtctaaggaagttgatctg

SEQ ID NO: 2812602 - DNA, 25 bp, Homo sapien
agctgtctaaggaagttgatctggt

SEQ ID NO: 2812603 - DNA, 25 bp, Homo sapien
tccaggaatcgtaacttgtctatga

SEQ ID NO: 2812604 - DNA, 25 bp, Homo sapien
caggaatcgtaacttgtctatgaag

SEQ ID NO: 2812605 - DNA, 25 bp, Homo sapien
ggaatcgtaacttgtctatgaagga

SEQ ID NO: 2812606 - DNA, 25 bp, Homo sapien
tgctccaggaatcgtaacttgtcta

SEQ ID NO: 2812607 - DNA, 25 bp, Homo sapien
gcaggctttggttgaacgtgatggc

SEQ ID NO: 2812608 - DNA, 25 bp, Homo sapien
ttgaacgtgatggcggtgatgcctc

SEQ ID NO: 2812609 - DNA, 25 bp, Homo sapien
gttgaacgtgatggcggtgatgcct

SEQ ID NO: 2812610 - DNA, 25 bp, Homo sapien
ctttggttgaacgtgatggcggtga

SEQ ID NO: 2812611 - DNA, 25 bp, Homo sapien
cactgggcccacttgtgtaggaaca

SEQ ID NO: 2812612 - DNA, 25 bp, Homo sapien
tgggcccacttgtgtaggaacagct

SEQ ID NO: 2812613 - DNA, 25 bp, Homo sapien
acagctgctgaagtcctgggagcca

SEQ ID NO: 2812614 - DNA, 25 bp, Homo sapien
cccacttgtgtaggaacagctgctg

SEQ ID NO: 2812615 - DNA, 25 bp, Homo sapien
caaatttaatagtctcttcactgat

SEQ ID NO: 2812616 - DNA, 25 bp, Homo sapien
tgtcaaatttaatagtctcttcact

SEQ ID NO: 2812617 - DNA, 25 bp, Homo sapien
tgtactgagaaagggtattttcatt

SEQ ID NO: 2812618 - DNA, 25 bp, Homo sapien
gattctttgtactgagaaagggtat

SEQ ID NO: 2812619 - DNA, 25 bp, Homo sapien
ctggacatccatgatatcatcctca

SEQ ID NO: 2812620 - DNA, 25 bp, Homo sapien
gctggactcagggggccataatgcc

SEQ ID NO: 2812621 - DNA, 25 bp, Homo sapien
tccatactggacatccatgatatca

SEQ ID NO: 2812622 - DNA, 25 bp, Homo sapien
tggtcctcaatgtctccatactgga

SEQ ID NO: 2812623 - DNA, 25 bp, Homo sapien
tatgtaataatcttactaatatctt

SEQ ID NO: 2812624 - DNA, 25 bp, Homo sapien
taagacatatagggtttaacctata

SEQ ID NO: 2812625 - DNA, 25 bp, Homo sapien
gacaaagttatgtaataatcttact

SEQ ID NO: 2812626 - DNA, 25 bp, Homo sapien
gttatgtaataatcttactaatatc

SEQ ID NO: 2812627 - DNA, 25 bp, Homo sapien
ttcctgctaaagagggataaactgt

SEQ ID NO: 2812628 - DNA, 25 bp, Homo sapien
ctgctaaagagggataaactgtcca

SEQ ID NO: 2812629 - DNA, 25 bp, Homo sapien
tgggtttcctgctaaagagggataa

SEQ ID NO: 2812630 - DNA, 25 bp, Homo sapien
tgatgggtttcctgctaaagaggga

SEQ ID NO: 2812631 - DNA, 25 bp, Homo sapien
gctatcagccctaacctaaagagaa

SEQ ID NO: 2812632 - DNA, 25 bp, Homo sapien
cagtgatgctaaagaccctctcacc

SEQ ID NO: 2812633 - DNA, 25 bp, Homo sapien
gaatttctcagtgatgctaaagacc

SEQ ID NO: 2812634 - DNA, 25 bp, Homo sapien
taaagagaagatacactcctgaatt

SEQ ID NO: 2812635 - DNA, 25 bp, Homo sapien
gcacaaagaccatcatccttagttg

SEQ ID NO: 2812636 - DNA, 25 bp, Homo sapien
tgggcacaaagaccatcatccttag

SEQ ID NO: 2812637 - DNA, 25 bp, Homo sapien
caaagaccatcatccttagttgctg

SEQ ID NO: 2812638 - DNA, 25 bp, Homo sapien
gaccatcatccttagttgctgaagg

SEQ ID NO: 2812639 - DNA, 25 bp, Homo sapien
gctactactgttcccgttgagctgt

SEQ ID NO: 2812640 - DNA, 25 bp, Homo sapien
ttggcgaggtctcttgacccattta

SEQ ID NO: 2812641 - DNA, 25 bp, Homo sapien
tctaagctaggcaccttggcgaggt

SEQ ID NO: 2812642 - DNA, 25 bp, Homo sapien
taatccaacacaagttatgcctgct

SEQ ID NO: 2812643 - DNA, 25 bp, Homo sapien
gggtttgagagattaatgaatactg

SEQ ID NO: 2812644 - DNA, 25 bp, Homo sapien
ctaagcataccaggaactcttgcat

SEQ ID NO: 2812645 - DNA, 25 bp, Homo sapien
acacttcatgtgatttattttgaga

SEQ ID NO: 2812646 - DNA, 25 bp, Homo sapien
ttttgtgcactgctcaaagaaagca

SEQ ID NO: 2812647 - DNA, 25 bp, Homo sapien
gaagcttttgctctaactttacagt

SEQ ID NO: 2812648 - DNA, 25 bp, Homo sapien
tgtgccaggttagcaccattatctc

SEQ ID NO: 2812649 - DNA, 25 bp, Homo sapien
agacccctggtgttcttttgccgca

SEQ ID NO: 2812650 - DNA, 25 bp, Homo sapien
actttacagtcaattcagacccctg

SEQ ID NO: 2812651 - DNA, 25 bp, Homo sapien
cagcctgtaatggagatgggttgca

SEQ ID NO: 2812652 - DNA, 25 bp, Homo sapien
tgggttgcattctcccaggtccaaa

SEQ ID NO: 2812653 - DNA, 25 bp, Homo sapien
tcagcctgtaatggagatgggttgc

SEQ ID NO: 2812654 - DNA, 25 bp, Homo sapien
agatgggttgcattctcccaggtcc

SEQ ID NO: 2812655 - DNA, 25 bp, Homo sapien
cagggaaacattcgatatgctgcaa

SEQ ID NO: 2812656 - DNA, 25 bp, Homo sapien
ctgatgtttgcgtccttttaattaa

SEQ ID NO: 2812657 - DNA, 25 bp, Homo sapien
tcaaacggaagataatagaacctct

SEQ ID NO: 2812658 - DNA, 25 bp, Homo sapien
caagagatctggaatagggatgccc

SEQ ID NO: 2812659 - DNA, 25 bp, Homo sapien
actaatagtaatgctactattagtg

SEQ ID NO: 2812660 - DNA, 25 bp, Homo sapien
tactaatagtaatgctactattagt

SEQ ID NO: 2812661 - DNA, 25 bp, Homo sapien
ctaatagtaatgctactattagtgc

SEQ ID NO: 2812662 - DNA, 25 bp, Homo sapien
taatagtaatgctactattagtgcc

SEQ ID NO: 2812663 - DNA, 25 bp, Homo sapien
cacggcaatagattcctcctcattt

SEQ ID NO: 2812664 - DNA, 25 bp, Homo sapien
tgctctcagaccctttatggattac

SEQ ID NO: 2812665 - DNA, 25 bp, Homo sapien
ttacttgggccacggcaatagattc

SEQ ID NO: 2812666 - DNA, 25 bp, Homo sapien
tgtcatgctctcagaccctttatgg

SEQ ID NO: 2812667 - DNA, 25 bp, Homo sapien
ctataatggagttatgagcaaggca

SEQ ID NO: 2812668 - DNA, 25 bp, Homo sapien
gctctataatggagttatgagcaag

SEQ ID NO: 2812669 - DNA, 25 bp, Homo sapien
catttgtatagctctataatggagt

SEQ ID NO: 2812670 - DNA, 25 bp, Homo sapien
tatagctctataatggagttatgag

SEQ ID NO: 2812671 - DNA, 25 bp, Homo sapien
tgatgtatttattgtttccttcccc

SEQ ID NO: 2812672 - DNA, 25 bp, Homo sapien
cttcccctacaaatgcctgccttac

SEQ ID NO: 2812673 - DNA, 25 bp, Homo sapien
tattgtttccttcccctacaaatgc

SEQ ID NO: 2812674 - DNA, 25 bp, Homo sapien
tgtttccttcccctacaaatgcctg

SEQ ID NO: 2812675 - DNA, 25 bp, Homo sapien
aaatcgcttcgcagcagaagccact

SEQ ID NO: 2812676 - DNA, 25 bp, Homo sapien
tgtccttgggctgtcgttcactgtc

SEQ ID NO: 2812677 - DNA, 25 bp, Homo sapien
tatactctaatttgcagccaagctg

SEQ ID NO: 2812678 - DNA, 25 bp, Homo sapien
tgatgcaaatcgcttcgcagcagaa

SEQ ID NO: 2812679 - DNA, 25 bp, Homo sapien
tcttcttgcctacaccaagaattat

SEQ ID NO: 2812680 - DNA, 25 bp, Homo sapien
caagaattattatatgcacccaggg

SEQ ID NO: 2812681 - DNA, 25 bp, Homo sapien
tttggagtccatcataagccctgct

SEQ ID NO: 2812682 - DNA, 25 bp, Homo sapien
aaaagttagctgcagaatgtcggac

SEQ ID NO: 2812683 - DNA, 25 bp, Homo sapien
tggatcttcacaagcttacacttca

SEQ ID NO: 2812684 - DNA, 25 bp, Homo sapien
aaatgaagaggattggatcttcaca

SEQ ID NO: 2812685 - DNA, 25 bp, Homo sapien
taaatgaagaggattggatcttcac

SEQ ID NO: 2812686 - DNA, 25 bp, Homo sapien
atgaagaggattggatcttcacaag

SEQ ID NO: 2812687 - DNA, 25 bp, Homo sapien
tgaatatgcattttggaattctcaa

SEQ ID NO: 2812688 - DNA, 25 bp, Homo sapien
ggtataggactgaagtgaatatgca

SEQ ID NO: 2812689 - DNA, 25 bp, Homo sapien
ttgccttttgtaacaagattcttta

SEQ ID NO: 2812690 - DNA, 25 bp, Homo sapien
acaggaaagcatggctgatcttgca

SEQ ID NO: 2812691 - DNA, 25 bp, Homo sapien
ccccaggtgcatggtattccagaaa

SEQ ID NO: 2812692 - DNA, 25 bp, Homo sapien
tatcagggttacatgctatcatacc

SEQ ID NO: 2812693 - DNA, 25 bp, Homo sapien
tgtattacttcacgccactcttgaa

SEQ ID NO: 2812694 - DNA, 25 bp, Homo sapien
tataatctcattgctctttaaggca

SEQ ID NO: 2812695 - DNA, 25 bp, Homo sapien
tgagcacctactggattcgctgttg

SEQ ID NO: 2812696 - DNA, 25 bp, Homo sapien
ccgaaagagaatcacagatggatgc

SEQ ID NO: 2812697 - DNA, 25 bp, Homo sapien
taagctaggtacagtttgctgcaca

SEQ ID NO: 2812698 - DNA, 25 bp, Homo sapien
tcgctgttgtacacatgttgcccca

SEQ ID NO: 2812699 - DNA, 25 bp, Homo sapien
aaagaaccaatctcatttctgtagc

SEQ ID NO: 2812700 - DNA, 25 bp, Homo sapien
ggcagtgaagcattagtccccattg

SEQ ID NO: 2812701 - DNA, 25 bp, Homo sapien
tagtccccattgctccatttatcct

SEQ ID NO: 2812702 - DNA, 25 bp, Homo sapien
tgtgccggatttagattgaggcagt

SEQ ID NO: 2812703 - DNA, 25 bp, Homo sapien
tggtgttttagattcttgttgcttg

SEQ ID NO: 2812704 - DNA, 25 bp, Homo sapien
cctttgccttcaaagaaaatgcatg

SEQ ID NO: 2812705 - DNA, 25 bp, Homo sapien
gcatgcagacctttctctggtgttt

SEQ ID NO: 2812706 - DNA, 25 bp, Homo sapien
aaagaaaatgcatgcagacctttct

SEQ ID NO: 2812707 - DNA, 25 bp, Homo sapien
aattatgtaattcccgtctctgtct

SEQ ID NO: 2812708 - DNA, 25 bp, Homo sapien
agacagcatacaaatggctcttgat

SEQ ID NO: 2812709 - DNA, 25 bp, Homo sapien
ttaatgatcgaatattgtcagcggg

SEQ ID NO: 2812710 - DNA, 25 bp, Homo sapien
tatgcatggatttgatcacgtcatc

SEQ ID NO: 2812711 - DNA, 25 bp, Homo sapien
tacaagtaggtcttagatcttctgt

SEQ ID NO: 2812712 - DNA, 25 bp, Homo sapien
caagtaggtcttagatcttctgttt

SEQ ID NO: 2812713 - DNA, 25 bp, Homo sapien
gtaggtcttagatcttctgttttca

SEQ ID NO: 2812714 - DNA, 25 bp, Homo sapien
gtacaagtaggtcttagatcttctg

SEQ ID NO: 2812715 - DNA, 25 bp, Homo sapien
gggagtgttgagattgatacaactg

SEQ ID NO: 2812716 - DNA, 25 bp, Homo sapien
cactgagagtagatgttaattgtac

SEQ ID NO: 2812717 - DNA, 25 bp, Homo sapien
gactatagttactaacaaagtattc

SEQ ID NO: 2812718 - DNA, 25 bp, Homo sapien
tgtactcgccacaaaaaagataagt

SEQ ID NO: 2812719 - DNA, 25 bp, Homo sapien
gcctggaaccggctagatcctagtt

SEQ ID NO: 2812720 - DNA, 25 bp, Homo sapien
cacatttgattctccacgcctggaa

SEQ ID NO: 2812721 - DNA, 25 bp, Homo sapien
gagtgagaaagctctgacgctccca

SEQ ID NO: 2812722 - DNA, 25 bp, Homo sapien
gcaacttacagatctaggaccacat

SEQ ID NO: 2812723 - DNA, 25 bp, Homo sapien
ccagcctcccatcaacgcttcccgc

SEQ ID NO: 2812724 - DNA, 25 bp, Homo sapien
cagcctcccatcaacgcttcccgca

SEQ ID NO: 2812725 - DNA, 25 bp, Homo sapien
tccagcctcccatcaacgcttcccg

SEQ ID NO: 2812726 - DNA, 25 bp, Homo sapien
ctgaggttttcatgtgaagggcgcc

SEQ ID NO: 2812727 - DNA, 25 bp, Homo sapien
aaattcgtgggaacttgttctggcg

SEQ ID NO: 2812728 - DNA, 25 bp, Homo sapien
tgaagggcgcccatgaaattcgtgg

SEQ ID NO: 2812729 - DNA, 25 bp, Homo sapien
agggctggcgctccgcagagcaaac

SEQ ID NO: 2812730 - DNA, 25 bp, Homo sapien
cccttgggcgatggcagtcaagacc

SEQ ID NO: 2812731 - DNA, 25 bp, Homo sapien
gcggctgcgtttgcctggaagaaaa

SEQ ID NO: 2812732 - DNA, 25 bp, Homo sapien
ttttgtttcgaagggaaggctgcac

SEQ ID NO: 2812733 - DNA, 25 bp, Homo sapien
tgcccgggactacaaaatgggatcc

SEQ ID NO: 2812734 - DNA, 25 bp, Homo sapien
cctgccgttttgagcggtgagagca

SEQ ID NO: 2812735 - DNA, 25 bp, Homo sapien
tggcaagcggctcccaaatgctttt

SEQ ID NO: 2812736 - DNA, 25 bp, Homo sapien
cccgttgtctacgagcgggtgatga

SEQ ID NO: 2812737 - DNA, 25 bp, Homo sapien
tgctttttgcacctgccgttttgag

SEQ ID NO: 2812738 - DNA, 25 bp, Homo sapien
taaaaacatcacgtataggctcagg

SEQ ID NO: 2812739 - DNA, 25 bp, Homo sapien
caggtcctgcgtgttccgaagttca

SEQ ID NO: 2812740 - DNA, 25 bp, Homo sapien
gatgtaagtacaaaccacgagctgc

SEQ ID NO: 2812741 - DNA, 25 bp, Homo sapien
gattctccggatgtactgttcaggt

SEQ ID NO: 2812742 - DNA, 25 bp, Homo sapien
tgtacaatataaagtcgtttgtaac

SEQ ID NO: 2812743 - DNA, 25 bp, Homo sapien
tataaagtcgtttgtaacttgcagc

SEQ ID NO: 2812744 - DNA, 25 bp, Homo sapien
gtgtgaattacacaagtcatcagcc

SEQ ID NO: 2812745 - DNA, 25 bp, Homo sapien
gtgaattacacaagtcatcagccac

SEQ ID NO: 2812746 - DNA, 25 bp, Homo sapien
gagtggctgcggtataagcgactat

SEQ ID NO: 2812747 - DNA, 25 bp, Homo sapien
tgtgaacagtacgaatttacccgcg

SEQ ID NO: 2812748 - DNA, 25 bp, Homo sapien
tacgctcttgctttccaagccaatt

SEQ ID NO: 2812749 - DNA, 25 bp, Homo sapien
cgcgagtgtgtcaactgacctatgt

SEQ ID NO: 2812750 - DNA, 25 bp, Homo sapien
agcattttcctctagcggctgaaca

SEQ ID NO: 2812751 - DNA, 25 bp, Homo sapien
gttaggcttataaatctcgagcttg

SEQ ID NO: 2812752 - DNA, 25 bp, Homo sapien
gaaccaccttgcggtttacttgtga

SEQ ID NO: 2812753 - DNA, 25 bp, Homo sapien
gcggctgaacacttatgcagcaata

SEQ ID NO: 2812754 - DNA, 25 bp, Homo sapien
cgaggacgccctctattgataggaa

SEQ ID NO: 2812755 - DNA, 25 bp, Homo sapien
tgaagaacagttccgtttaacgaca

SEQ ID NO: 2812756 - DNA, 25 bp, Homo sapien
gataggaaaatctagagcacccgtg

SEQ ID NO: 2812757 - DNA, 25 bp, Homo sapien
tccgtttaacgacaccaggatttgc

SEQ ID NO: 2812758 - DNA, 25 bp, Homo sapien
taacatagcgggtacagttgccaac

SEQ ID NO: 2812759 - DNA, 25 bp, Homo sapien
tgtccgtggttgataagaaattcct

SEQ ID NO: 2812760 - DNA, 25 bp, Homo sapien
cgagggcggtatcaagtgtctctca

SEQ ID NO: 2812761 - DNA, 25 bp, Homo sapien
tgtggaatatcagcatgtccgtggt

SEQ ID NO: 2812762 - DNA, 25 bp, Homo sapien
cactttcggacccatccgatcataa

SEQ ID NO: 2812763 - DNA, 25 bp, Homo sapien
ggacccatccgatcataaaaggaga

SEQ ID NO: 2812764 - DNA, 25 bp, Homo sapien
gaatctatcatcagtctcataactg

SEQ ID NO: 2812765 - DNA, 25 bp, Homo sapien
gaattaatccgtagaaatttgtgga

SEQ ID NO: 2812766 - DNA, 25 bp, Homo sapien
caaatcgtggcataattacactgca

SEQ ID NO: 2812767 - DNA, 25 bp, Homo sapien
gccactgagcaacaacaaatcgtgg

SEQ ID NO: 2812768 - DNA, 25 bp, Homo sapien
cactgtaaccgaacgttgaagtttg

SEQ ID NO: 2812769 - DNA, 25 bp, Homo sapien
tgccgctttcaggaagggaaatgtc

SEQ ID NO: 2812770 - DNA, 25 bp, Homo sapien
agatttccaacaccgccccgagctt

SEQ ID NO: 2812771 - DNA, 25 bp, Homo sapien
tgccagcgaattccggcggcagttc

SEQ ID NO: 2812772 - DNA, 25 bp, Homo sapien
ggcagttcgcgggtaccttcccagc

SEQ ID NO: 2812773 - DNA, 25 bp, Homo sapien
tccggaccgcgggtgacattcagat

SEQ ID NO: 2812774 - DNA, 25 bp, Homo sapien
tccgcagatgtgattggctgaaagg

SEQ ID NO: 2812775 - DNA, 25 bp, Homo sapien
ggcgctctgtaaaagcgcctgcttc

SEQ ID NO: 2812776 - DNA, 25 bp, Homo sapien
agacaccctcaaacgactcggaacg

SEQ ID NO: 2812777 - DNA, 25 bp, Homo sapien
tgccgcgcggcgctctgtaaaagcg

SEQ ID NO: 2812778 - DNA, 25 bp, Homo sapien
gcgagagtaagacttgcggtcgccc

SEQ ID NO: 2812779 - DNA, 25 bp, Homo sapien
taacgccggcgagagtaagacttgc

SEQ ID NO: 2812780 - DNA, 25 bp, Homo sapien
agagtaagacttgcggtcgcccatt

SEQ ID NO: 2812781 - DNA, 25 bp, Homo sapien
ctttgtaacgccggcgagagtaaga

SEQ ID NO: 2812782 - DNA, 25 bp, Homo sapien
cagtaaatcgcggaagggggtagag

SEQ ID NO: 2812783 - DNA, 25 bp, Homo sapien
cgaggaaacagtaaatcgcggaagg

SEQ ID NO: 2812784 - DNA, 25 bp, Homo sapien
tgctacacgggcctgaagaaggaag

SEQ ID NO: 2812785 - DNA, 25 bp, Homo sapien
gcggtggtggcgccccatctgctac

SEQ ID NO: 2812786 - DNA, 25 bp, Homo sapien
tgcgccggctgcgcgctgcttgctg

SEQ ID NO: 2812787 - DNA, 25 bp, Homo sapien
agaagaggaagcgaagcgcgccccc

SEQ ID NO: 2812788 - DNA, 25 bp, Homo sapien
tctgcgctggtgtttactgaaagtc

SEQ ID NO: 2812789 - DNA, 25 bp, Homo sapien
aagtcaggctcggatcaggtttccg

SEQ ID NO: 2812790 - DNA, 25 bp, Homo sapien
gatgctttattgctctctgcgctgg

SEQ ID NO: 2812791 - DNA, 25 bp, Homo sapien
gcaaacctgggagttaatctcgaag

SEQ ID NO: 2812792 - DNA, 25 bp, Homo sapien
aagacctggccatgtcctacgagga

SEQ ID NO: 2812793 - DNA, 25 bp, Homo sapien
tctatatgactgatgcaagcccctc

SEQ ID NO: 2812794 - DNA, 25 bp, Homo sapien
caagagcctgcgtatcgtggaaagg

SEQ ID NO: 2812795 - DNA, 25 bp, Homo sapien
tgagtgaacgcatcgatgacgggca

SEQ ID NO: 2812796 - DNA, 25 bp, Homo sapien
tcagcagataatggtaatgtgtatg

SEQ ID NO: 2812797 - DNA, 25 bp, Homo sapien
ttaggtgacgcatatacaaaagttc

SEQ ID NO: 2812798 - DNA, 25 bp, Homo sapien
gataaatagcctgaatgtggcagaa

SEQ ID NO: 2812799 - DNA, 25 bp, Homo sapien
ccttgttcttagaggcatacactga

SEQ ID NO: 2812800 - DNA, 25 bp, Homo sapien
tactacagtccttgtttatgtgttc

SEQ ID NO: 2812801 - DNA, 25 bp, Homo sapien
taggacaggtatgcttctgcctcag

SEQ ID NO: 2812802 - DNA, 25 bp, Homo sapien
gcccatcatgaccactctatctaaa

SEQ ID NO: 2812803 - DNA, 25 bp, Homo sapien
tatttgcaggcgtaaagcccttctc

SEQ ID NO: 2812804 - DNA, 25 bp, Homo sapien
gaatctatagcctgttttgtgcgta

SEQ ID NO: 2812805 - DNA, 25 bp, Homo sapien
caacaaatcgggctaaagaatctat

SEQ ID NO: 2812806 - DNA, 25 bp, Homo sapien
tattatgttcaaccttcagtgctca

SEQ ID NO: 2812807 - DNA, 25 bp, Homo sapien
gaatacctactaagtacaagccact

SEQ ID NO: 2812808 - DNA, 25 bp, Homo sapien
tatacacaaatagtgaactagctaa

SEQ ID NO: 2812809 - DNA, 25 bp, Homo sapien
atctatacacaaatagtgaactagc

SEQ ID NO: 2812810 - DNA, 25 bp, Homo sapien
tacacaaatagtgaactagctaaaa

SEQ ID NO: 2812811 - DNA, 25 bp, Homo sapien
cacaaatagtgaactagctaaaaaa

SEQ ID NO: 2812812 - DNA, 25 bp, Homo sapien
gcctttgtataagtgtccccataac

SEQ ID NO: 2812813 - DNA, 25 bp, Homo sapien
gaggtttgcctttgtataagtgtcc

SEQ ID NO: 2812814 - DNA, 25 bp, Homo sapien
tgtgttctctgtgtaactgtagagg

SEQ ID NO: 2812815 - DNA, 25 bp, Homo sapien
tctgtgtaactgtagaggtttgcct

SEQ ID NO: 2812816 - DNA, 25 bp, Homo sapien
ccatcactgtccccagggtctccat

SEQ ID NO: 2812817 - DNA, 25 bp, Homo sapien
caaatatctgtaggttgctcccaca

SEQ ID NO: 2812818 - DNA, 25 bp, Homo sapien
tgtgtgccaggactactttcattac

SEQ ID NO: 2812819 - DNA, 25 bp, Homo sapien
gccagccaccatcttatgacttaag

SEQ ID NO: 2812820 - DNA, 25 bp, Homo sapien
tcagggtaactgtatcagaaagaga

SEQ ID NO: 2812821 - DNA, 25 bp, Homo sapien
atttgttacatcaaagcatacatgc

SEQ ID NO: 2812822 - DNA, 25 bp, Homo sapien
gattcaaatttgttacatcaaagca

SEQ ID NO: 2812823 - DNA, 25 bp, Homo sapien
agattcaaatttgttacatcaaagc

SEQ ID NO: 2812824 - DNA, 25 bp, Homo sapien
tgttacatcaaagcatacatgcaag

SEQ ID NO: 2812825 - DNA, 25 bp, Homo sapien
tgcagcagaaaattacaggagccca

SEQ ID NO: 2812826 - DNA, 25 bp, Homo sapien
aacagatttagttgtaatgctacac

SEQ ID NO: 2812827 - DNA, 25 bp, Homo sapien
tatgacctaagttttacttcatagg

SEQ ID NO: 2812828 - DNA, 25 bp, Homo sapien
cataataatatctgtaggaagccaa

SEQ ID NO: 2812829 - DNA, 25 bp, Homo sapien
gaggactaatggaattaagtggccc

SEQ ID NO: 2812830 - DNA, 25 bp, Homo sapien
gacattattgcccacataaaacggg

SEQ ID NO: 2812831 - DNA, 25 bp, Homo sapien
cgtttttatatacaatcagtgtgca

SEQ ID NO: 2812832 - DNA, 25 bp, Homo sapien
aaatgttaacctggctgcatagcac

SEQ ID NO: 2812833 - DNA, 25 bp, Homo sapien
aaggaacagtcaaaaaaagcctgag

SEQ ID NO: 2812834 - DNA, 25 bp, Homo sapien
gatcacaggtcagagtaaagttcat

SEQ ID NO: 2812835 - DNA, 25 bp, Homo sapien
caagcttgtgatgaaaagcggcaag

SEQ ID NO: 2812836 - DNA, 25 bp, Homo sapien
cggcaaggtggtcgcagtgtacaat

SEQ ID NO: 2812837 - DNA, 25 bp, Homo sapien
cttctgttgggataatagaccttgc

SEQ ID NO: 2812838 - DNA, 25 bp, Homo sapien
tactccaggtatgctccggtgtact

SEQ ID NO: 2812839 - DNA, 25 bp, Homo sapien
gaagctctgtggtccatttgccagt

SEQ ID NO: 2812840 - DNA, 25 bp, Homo sapien
tatattcagaacttgaccggtggtc

SEQ ID NO: 2812841 - DNA, 25 bp, Homo sapien
taatccctggaagatttatggtgcg

SEQ ID NO: 2812842 - DNA, 25 bp, Homo sapien
ccagattgctgaggttaagttttac

SEQ ID NO: 2812843 - DNA, 25 bp, Homo sapien
catagtgctgacagaggttctcaaa

SEQ ID NO: 2812844 - DNA, 25 bp, Homo sapien
tacctcaatgagatgtgttcacata

SEQ ID NO: 2812845 - DNA, 25 bp, Homo sapien
tcaaaacgaacaatgaaccccacgc

SEQ ID NO: 2812846 - DNA, 25 bp, Homo sapien
tatcagaggaataactgtccctgct

SEQ ID NO: 2812847 - DNA, 25 bp, Homo sapien
tgtagtgatcccaatcacgatggtc

SEQ ID NO: 2812848 - DNA, 25 bp, Homo sapien
tgtccctgctgctatcatcgtgatt

SEQ ID NO: 2812849 - DNA, 25 bp, Homo sapien
tttgtaagaatctccctgatgtcgg

SEQ ID NO: 2812850 - DNA, 25 bp, Homo sapien
tgttagataagtacaacttttatta

SEQ ID NO: 2812851 - DNA, 25 bp, Homo sapien
ctgttagataagtacaacttttatt

SEQ ID NO: 2812852 - DNA, 25 bp, Homo sapien
tagataagtacaacttttattaatg

SEQ ID NO: 2812853 - DNA, 25 bp, Homo sapien
gataagtacaacttttattaatgac

SEQ ID NO: 2812854 - DNA, 25 bp, Homo sapien
ccaaatacaagcagttaaagcattt

SEQ ID NO: 2812855 - DNA, 25 bp, Homo sapien
atatgggacctattcctttctcaga

SEQ ID NO: 2812856 - DNA, 25 bp, Homo sapien
tagaaatggtgtataaaagcagtac

SEQ ID NO: 2812857 - DNA, 25 bp, Homo sapien
caagaattcgtttcaacccttgcca

SEQ ID NO: 2812858 - DNA, 25 bp, Homo sapien
cataataatgtaggtatgtatcaga

SEQ ID NO: 2812859 - DNA, 25 bp, Homo sapien
cattttaacagtcattctacaattt

SEQ ID NO: 2812860 - DNA, 25 bp, Homo sapien
ttttaacagtcattctacaatttct

SEQ ID NO: 2812861 - DNA, 25 bp, Homo sapien
tacataataatgtaggtatgtatca

SEQ ID NO: 2812862 - DNA, 25 bp, Homo sapien
tctaatcacgtgaggattcaagttg

SEQ ID NO: 2812863 - DNA, 25 bp, Homo sapien
taatcacgtgaggattcaagttgct

SEQ ID NO: 2812864 - DNA, 25 bp, Homo sapien
ggattcaagttgctgttttgatcac

SEQ ID NO: 2812865 - DNA, 25 bp, Homo sapien
tttctaatcacgtgaggattcaagt

SEQ ID NO: 2812866 - DNA, 25 bp, Homo sapien
catgtatgacatttatagatctcca

SEQ ID NO: 2812867 - DNA, 25 bp, Homo sapien
tactgagttcccttcatctagcttc

SEQ ID NO: 2812868 - DNA, 25 bp, Homo sapien
aatgcacacgtgttaagaatcttta

SEQ ID NO: 2812869 - DNA, 25 bp, Homo sapien
ttttaaagcatgaactacttgtccc

SEQ ID NO: 2812870 - DNA, 25 bp, Homo sapien
gagactcctgccgttttttaatagc

SEQ ID NO: 2812871 - DNA, 25 bp, Homo sapien
agactcctgccgttttttaatagca

SEQ ID NO: 2812872 - DNA, 25 bp, Homo sapien
ctgagactcctgccgttttttaata

SEQ ID NO: 2812873 - DNA, 25 bp, Homo sapien
gactcctgccgttttttaatagcat

SEQ ID NO: 2812874 - DNA, 25 bp, Homo sapien
gggtagtatccctagaagattcaaa

SEQ ID NO: 2812875 - DNA, 25 bp, Homo sapien
taatggtcccaagagtaacacaacc

SEQ ID NO: 2812876 - DNA, 25 bp, Homo sapien
tttagggtgaaaagcagtacaatcc

SEQ ID NO: 2812877 - DNA, 25 bp, Homo sapien
caagggaggcatcagtaattaatca

SEQ ID NO: 2812878 - DNA, 25 bp, Homo sapien
tttagtagaccaccgtcttagccag

SEQ ID NO: 2812879 - DNA, 25 bp, Homo sapien
tgtaacacttgcttaatgccaactg

SEQ ID NO: 2812880 - DNA, 25 bp, Homo sapien
ttaaaaggatcagctagaatgaggc

SEQ ID NO: 2812881 - DNA, 25 bp, Homo sapien
gatcgggtcagccaatgataggtct

SEQ ID NO: 2812882 - DNA, 25 bp, Homo sapien
tgaaaaagttaagtctcctggctat

SEQ ID NO: 2812883 - DNA, 25 bp, Homo sapien
accaaaaaggtaatctgcccaactg

SEQ ID NO: 2812884 - DNA, 25 bp, Homo sapien
gatagaagccaagcatttttacact

SEQ ID NO: 2812885 - DNA, 25 bp, Homo sapien
atgataacccattcttggcaaaagg

SEQ ID NO: 2812886 - DNA, 25 bp, Homo sapien
ataatataaatttaacacttcctga

SEQ ID NO: 2812887 - DNA, 25 bp, Homo sapien
cacttcctgaaaagtgtatcactta

SEQ ID NO: 2812888 - DNA, 25 bp, Homo sapien
acttcctgaaaagtgtatcacttac

SEQ ID NO: 2812889 - DNA, 25 bp, Homo sapien
taacacttcctgaaaagtgtatcac

SEQ ID NO: 2812890 - DNA, 25 bp, Homo sapien
gctgctttaacaggcctcattcttt

SEQ ID NO: 2812891 - DNA, 25 bp, Homo sapien
caggatttgtatactcttttagaca

SEQ ID NO: 2812892 - DNA, 25 bp, Homo sapien
ttctcaggcctatcaagttgtttca

SEQ ID NO: 2812893 - DNA, 25 bp, Homo sapien
tgttctctttctgaaaggcctttct

SEQ ID NO: 2812894 - DNA, 25 bp, Homo sapien
tgtagcacactattctaaggagtct

SEQ ID NO: 2812895 - DNA, 25 bp, Homo sapien
acttcacaaatcttatacatcaggg

SEQ ID NO: 2812896 - DNA, 25 bp, Homo sapien
tcaggagagcaagcctttctgttat

SEQ ID NO: 2812897 - DNA, 25 bp, Homo sapien
ctaaattcaacaaggtctacctcct

SEQ ID NO: 2812898 - DNA, 25 bp, Homo sapien
tgcctttatggaacctggactctag

SEQ ID NO: 2812899 - DNA, 25 bp, Homo sapien
gactagatgctacgaggctggtttc

SEQ ID NO: 2812900 - DNA, 25 bp, Homo sapien
caagtaagtcagagaagtggccggc

SEQ ID NO: 2812901 - DNA, 25 bp, Homo sapien
tatgaatgccagtgtcgctggaacc

SEQ ID NO: 2812902 - DNA, 25 bp, Homo sapien
ttcagaaatgggaactggttcacca

SEQ ID NO: 2812903 - DNA, 25 bp, Homo sapien
cacttgccgtgatatgaactggagc

SEQ ID NO: 2812904 - DNA, 25 bp, Homo sapien
gaactggagcatctgacactgaaga

SEQ ID NO: 2812905 - DNA, 25 bp, Homo sapien
gctgaatgtcttctgatccagctct

SEQ ID NO: 2812906 - DNA, 25 bp, Homo sapien
tggatgtttcacagaactgatctca

SEQ ID NO: 2812907 - DNA, 25 bp, Homo sapien
ttccttctttatataaacatctggc

SEQ ID NO: 2812908 - DNA, 25 bp, Homo sapien
ttctttctgtatagcttcttttact

SEQ ID NO: 2812909 - DNA, 25 bp, Homo sapien
taaacatctggctcaggtttttctt

SEQ ID NO: 2812910 - DNA, 25 bp, Homo sapien
ctggaaagtgcaagtatggccaatg

SEQ ID NO: 2812911 - DNA, 25 bp, Homo sapien
tcttcatatgactacagattgcatg

SEQ ID NO: 2812912 - DNA, 25 bp, Homo sapien
gatacatgcaatgtttaccttccta

SEQ ID NO: 2812913 - DNA, 25 bp, Homo sapien
taaagtaagccagtcccattcaagt

SEQ ID NO: 2812914 - DNA, 25 bp, Homo sapien
agaggagaagaatcactctttattt

SEQ ID NO: 2812915 - DNA, 25 bp, Homo sapien
aggagaagaatcactctttatttcc

SEQ ID NO: 2812916 - DNA, 25 bp, Homo sapien
gaggagaagaatcactctttatttc

SEQ ID NO: 2812917 - DNA, 25 bp, Homo sapien
tagtctgcacgggtctgcaactgtt

SEQ ID NO: 2812918 - DNA, 25 bp, Homo sapien
ttttttgcaagatctctactaagta

SEQ ID NO: 2812919 - DNA, 25 bp, Homo sapien
taatttgatgaggtagtctgcacgg

SEQ ID NO: 2812920 - DNA, 25 bp, Homo sapien
tgcttgtggttttttatcgggatca

SEQ ID NO: 2812921 - DNA, 25 bp, Homo sapien
ttgccccagtctatatcaaaatgag

SEQ ID NO: 2812922 - DNA, 25 bp, Homo sapien
tcatagatgccaattaacaaattgg

SEQ ID NO: 2812923 - DNA, 25 bp, Homo sapien
gctgcctttgtgtggcatgggatag

SEQ ID NO: 2812924 - DNA, 25 bp, Homo sapien
tgaggtcaggatccattttaatcat

SEQ ID NO: 2812925 - DNA, 25 bp, Homo sapien
taactaatgataagtttgtaattgc

SEQ ID NO: 2812926 - DNA, 25 bp, Homo sapien
ataactaatgataagtttgtaattg

SEQ ID NO: 2812927 - DNA, 25 bp, Homo sapien
ttcattttgcaattattgaataaca

SEQ ID NO: 2812928 - DNA, 25 bp, Homo sapien
ttcaaaactagccaataacaccata

SEQ ID NO: 2812929 - DNA, 25 bp, Homo sapien
cgtgagtcattagaacttcaaaata

SEQ ID NO: 2812930 - DNA, 25 bp, Homo sapien
attttgaaaaacgtgagtcattaga

SEQ ID NO: 2812931 - DNA, 25 bp, Homo sapien
ggatttgtgcaaaggtattaattct

SEQ ID NO: 2812932 - DNA, 25 bp, Homo sapien
ggagatgactagtttggcattcacc

SEQ ID NO: 2812933 - DNA, 25 bp, Homo sapien
gatattcggaatgttggacccttca

SEQ ID NO: 2812934 - DNA, 25 bp, Homo sapien
tggcattcacctgtactcctgatat

SEQ ID NO: 2812935 - DNA, 25 bp, Homo sapien
caagcaactgatgctattacttatg

SEQ ID NO: 2812936 - DNA, 25 bp, Homo sapien
atgttatttaacaataagtattcct

SEQ ID NO: 2812937 - DNA, 25 bp, Homo sapien
gcaactgatgctattacttatgtta

SEQ ID NO: 2812938 - DNA, 25 bp, Homo sapien
acaccaagcaactgatgctattact

SEQ ID NO: 2812939 - DNA, 25 bp, Homo sapien
taaatcactctcagtttaatgttac

SEQ ID NO: 2812940 - DNA, 25 bp, Homo sapien
tattacccagaatagctttactttg

SEQ ID NO: 2812941 - DNA, 25 bp, Homo sapien
actatgcctggtctgcttattaaat

SEQ ID NO: 2812942 - DNA, 25 bp, Homo sapien
aaaacagattctactgccttcgaat

SEQ ID NO: 2812943 - DNA, 25 bp, Homo sapien
ctgttcgttctgttcctgaagaact

SEQ ID NO: 2812944 - DNA, 25 bp, Homo sapien
tctgttcctgaagaactatccttta

SEQ ID NO: 2812945 - DNA, 25 bp, Homo sapien
ttcctgaagaactatcctttaatgc

SEQ ID NO: 2812946 - DNA, 25 bp, Homo sapien
cgttctgttcctgaagaactatcct

SEQ ID NO: 2812947 - DNA, 25 bp, Homo sapien
ctgtttctgacttatcaactaactc

SEQ ID NO: 2812948 - DNA, 25 bp, Homo sapien
ctgacttatcaactaactcagcatc

SEQ ID NO: 2812949 - DNA, 25 bp, Homo sapien
caattctcccagtcgtctaaggtct

SEQ ID NO: 2812950 - DNA, 25 bp, Homo sapien
cccagtcgtctaaggtctgtttctg

SEQ ID NO: 2812951 - DNA, 25 bp, Homo sapien
ccaccaaatttcttatagctcttga

SEQ ID NO: 2812952 - DNA, 25 bp, Homo sapien
ccaaatttcttatagctcttgataa

SEQ ID NO: 2812953 - DNA, 25 bp, Homo sapien
aaatttcttatagctcttgataaac

SEQ ID NO: 2812954 - DNA, 25 bp, Homo sapien
aggaccaccaaatttcttatagctc

SEQ ID NO: 2812955 - DNA, 25 bp, Homo sapien
gaagcgattgtcttataacacctta

SEQ ID NO: 2812956 - DNA, 25 bp, Homo sapien
tgtgtagtctaagcagtttagcgat

SEQ ID NO: 2812957 - DNA, 25 bp, Homo sapien
tcgaaaggatcactattgagtcaaa

SEQ ID NO: 2812958 - DNA, 25 bp, Homo sapien
tactaaaaccaagttgaagcgattg

SEQ ID NO: 2812959 - DNA, 25 bp, Homo sapien
gaggaatagtccgtggtcttccacg

SEQ ID NO: 2812960 - DNA, 25 bp, Homo sapien
gcctaatttctgcatcactaaatcc

SEQ ID NO: 2812961 - DNA, 25 bp, Homo sapien
cctttaatattctcccgaggaatag

SEQ ID NO: 2812962 - DNA, 25 bp, Homo sapien
gagatggaatcactatcagatccag

SEQ ID NO: 2812963 - DNA, 25 bp, Homo sapien
ttaaggaagcacgaaaaaactcagc

SEQ ID NO: 2812964 - DNA, 25 bp, Homo sapien
catcagagagatgaaatcacacggc

SEQ ID NO: 2812965 - DNA, 25 bp, Homo sapien
taacagccaaaactcggaggacctg

SEQ ID NO: 2812966 - DNA, 25 bp, Homo sapien
cagccttggagaaagtgagcagtca

SEQ ID NO: 2812967 - DNA, 25 bp, Homo sapien
tcatgaggcaaacattatcaaatca

SEQ ID NO: 2812968 - DNA, 25 bp, Homo sapien
tatcaaatcaaggccattacaagaa

SEQ ID NO: 2812969 - DNA, 25 bp, Homo sapien
aaaactatggactgatacctcgtag

SEQ ID NO: 2812970 - DNA, 25 bp, Homo sapien
caaaatcagcccaggttgaatactc

SEQ ID NO: 2812971 - DNA, 25 bp, Homo sapien
tcttctaatcgtcttctttgatctt

SEQ ID NO: 2812972 - DNA, 25 bp, Homo sapien
gaataatttcctcccaattctttga

SEQ ID NO: 2812973 - DNA, 25 bp, Homo sapien
cttctaatcgtcttctttgatcttc

SEQ ID NO: 2812974 - DNA, 25 bp, Homo sapien
tctggaataatttcctcccaattct

SEQ ID NO: 2812975 - DNA, 25 bp, Homo sapien
aattcatctcctacagttaaaggac

SEQ ID NO: 2812976 - DNA, 25 bp, Homo sapien
cctacagttaaaggacctggttcat

SEQ ID NO: 2812977 - DNA, 25 bp, Homo sapien
gagtttcagctctcttcaagatttc

SEQ ID NO: 2812978 - DNA, 25 bp, Homo sapien
ttgaactgggaaagcaattcatctc

SEQ ID NO: 2812979 - DNA, 25 bp, Homo sapien
taaaatggctgataactcttcttta

SEQ ID NO: 2812980 - DNA, 25 bp, Homo sapien
aaaatggctgataactcttctttat

SEQ ID NO: 2812981 - DNA, 25 bp, Homo sapien
taactcttctttattgaaaggagta

SEQ ID NO: 2812982 - DNA, 25 bp, Homo sapien
aactcttctttattgaaaggagtag

SEQ ID NO: 2812983 - DNA, 25 bp, Homo sapien
gatggggcagaacctgtatgtagta

SEQ ID NO: 2812984 - DNA, 25 bp, Homo sapien
tgatggggcagaacctgtatgtagt

SEQ ID NO: 2812985 - DNA, 25 bp, Homo sapien
atggggcagaacctgtatgtagtac

SEQ ID NO: 2812986 - DNA, 25 bp, Homo sapien
cttgatggggcagaacctgtatgta

SEQ ID NO: 2812987 - DNA, 25 bp, Homo sapien
gaattacaagatgatctaaaaccat

SEQ ID NO: 2812988 - DNA, 25 bp, Homo sapien
tgtcttcccagttgtgtccattctt

SEQ ID NO: 2812989 - DNA, 25 bp, Homo sapien
gatccctttgtaactagacgataaa

SEQ ID NO: 2812990 - DNA, 25 bp, Homo sapien
ccatcttctttttcgccctttcaag

SEQ ID NO: 2812991 - DNA, 25 bp, Homo sapien
caagctcctcagtatcctatcggtt

SEQ ID NO: 2812992 - DNA, 25 bp, Homo sapien
gactgttacagtgatcttatcctct

SEQ ID NO: 2812993 - DNA, 25 bp, Homo sapien
tagttacgactagaatacgggatca

SEQ ID NO: 2812994 - DNA, 25 bp, Homo sapien
cctatcggttaaacagtagtatgac

SEQ ID NO: 2812995 - DNA, 25 bp, Homo sapien
tgtggattccaatcggaatcaaata

SEQ ID NO: 2812996 - DNA, 25 bp, Homo sapien
aattcgatgggctctagcctgtgcc

SEQ ID NO: 2812997 - DNA, 25 bp, Homo sapien
aatataacaacagtgtcagcagagg

SEQ ID NO: 2812998 - DNA, 25 bp, Homo sapien
taaattaatccctagacctccagct

SEQ ID NO: 2812999 - DNA, 25 bp, Homo sapien
gagctaagtgatccactcaactcag

SEQ ID NO: 2813000 - DNA, 25 bp, Homo sapien
taactgggactacaaccgagtgcca

SEQ ID NO: 2813001 - DNA, 25 bp, Homo sapien
cctgggctagagtctagtgacatga

SEQ ID NO: 2813002 - DNA, 25 bp, Homo sapien
tgttccatgctgaaacattattgat

SEQ ID NO: 2813003 - DNA, 25 bp, Homo sapien
tatcaaactagatatgaagattaaa

SEQ ID NO: 2813004 - DNA, 25 bp, Homo sapien
ctagaatagtgactttaaaacctca

SEQ ID NO: 2813005 - DNA, 25 bp, Homo sapien
taaaacctcatttgctaatcaaagg

SEQ ID NO: 2813006 - DNA, 25 bp, Homo sapien
caaaggtggctaacaccactctttt

SEQ ID NO: 2813007 - DNA, 25 bp, Homo sapien
gcattaaaatgatctagagcttgtt

SEQ ID NO: 2813008 - DNA, 25 bp, Homo sapien
tgatctagagcttgtttcctcagtt

SEQ ID NO: 2813009 - DNA, 25 bp, Homo sapien
tctgatccctcagcattaaaatgat

SEQ ID NO: 2813010 - DNA, 25 bp, Homo sapien
ctctgatccctcagcattaaaatga

SEQ ID NO: 2813011 - DNA, 25 bp, Homo sapien
tgaaggtgtttagcaaaggccatcc

SEQ ID NO: 2813012 - DNA, 25 bp, Homo sapien
aaaacactgattaagtccagcgtgg

SEQ ID NO: 2813013 - DNA, 25 bp, Homo sapien
tccagcgtggttactagaacagcat

SEQ ID NO: 2813014 - DNA, 25 bp, Homo sapien
agcaaattattgagtcctaccccag

SEQ ID NO: 2813015 - DNA, 25 bp, Homo sapien
tagcacagtgcctacaacatactga

SEQ ID NO: 2813016 - DNA, 25 bp, Homo sapien
tgatccatgcatttaaccgacgaat

SEQ ID NO: 2813017 - DNA, 25 bp, Homo sapien
cagacataatagtagtccctccttc

SEQ ID NO: 2813018 - DNA, 25 bp, Homo sapien
caccatgtcagttccgctttaaaca

SEQ ID NO: 2813019 - DNA, 25 bp, Homo sapien
tgtcagataactatgagcacaccaa

SEQ ID NO: 2813020 - DNA, 25 bp, Homo sapien
caacagagaagtggcgcttattaac

SEQ ID NO: 2813021 - DNA, 25 bp, Homo sapien
tacgttttcccctaaatgactgcaa

SEQ ID NO: 2813022 - DNA, 25 bp, Homo sapien
tgaagtactgaaaacagcacctgac

SEQ ID NO: 2813023 - DNA, 25 bp, Homo sapien
gaagaatcaattttccgctactacg

SEQ ID NO: 2813024 - DNA, 25 bp, Homo sapien
ctcttaggcgaattaatagcttgtc

SEQ ID NO: 2813025 - DNA, 25 bp, Homo sapien
ttctgcaagtatatctaacatccgc

SEQ ID NO: 2813026 - DNA, 25 bp, Homo sapien
aaaaaataagaactcgattgcctcg

SEQ ID NO: 2813027 - DNA, 25 bp, Homo sapien
gaggtagcaatggttacaacatttc

SEQ ID NO: 2813028 - DNA, 25 bp, Homo sapien
ttcaaaaagcctgaggtactgccct

SEQ ID NO: 2813029 - DNA, 25 bp, Homo sapien
tactgcccttggaacctttgctgag

SEQ ID NO: 2813030 - DNA, 25 bp, Homo sapien
tgtaaggcctcctgtttattataga

SEQ ID NO: 2813031 - DNA, 25 bp, Homo sapien
tgctaaaaagatggtcagctgcatt

SEQ ID NO: 2813032 - DNA, 25 bp, Homo sapien
gatgtttagcagaacaattaccagg

SEQ ID NO: 2813033 - DNA, 25 bp, Homo sapien
tagctatacacagaacaggctaatg

SEQ ID NO: 2813034 - DNA, 25 bp, Homo sapien
gctgtatatacaacggaccaaacct

SEQ ID NO: 2813035 - DNA, 25 bp, Homo sapien
tttgcctcctaacgacacagaataa

SEQ ID NO: 2813036 - DNA, 25 bp, Homo sapien
gctgagtcatgggtataagagttca

SEQ ID NO: 2813037 - DNA, 25 bp, Homo sapien
tctttcaaatgtatggcacctatag

SEQ ID NO: 2813038 - DNA, 25 bp, Homo sapien
gaaaagtcctactgtatagatcttg

SEQ ID NO: 2813039 - DNA, 25 bp, Homo sapien
cttaactcggcgtaacagaaatggc

SEQ ID NO: 2813040 - DNA, 25 bp, Homo sapien
tgtgaaggcttgcataaccatattc

SEQ ID NO: 2813041 - DNA, 25 bp, Homo sapien
tcttaaaatctgctcaaccttggca

SEQ ID NO: 2813042 - DNA, 25 bp, Homo sapien
tgcataaccatattctctccctttg

SEQ ID NO: 2813043 - DNA, 25 bp, Homo sapien
cagtgataaggagacgatgattgga

SEQ ID NO: 2813044 - DNA, 25 bp, Homo sapien
gcttcatcaacacctataaatgccc

SEQ ID NO: 2813045 - DNA, 25 bp, Homo sapien
gtcatcattctttaatcggtgtgct

SEQ ID NO: 2813046 - DNA, 25 bp, Homo sapien
gaattctgtagaggagttccagtga

SEQ ID NO: 2813047 - DNA, 25 bp, Homo sapien
gatgcgtccattcatgagttcttat

SEQ ID NO: 2813048 - DNA, 25 bp, Homo sapien
aaccgtttggtctgatgatgcgtcc

SEQ ID NO: 2813049 - DNA, 25 bp, Homo sapien
ttttaaccgtttggtctgatgatgc

SEQ ID NO: 2813050 - DNA, 25 bp, Homo sapien
tggtctgatgatgcgtccattcatg

SEQ ID NO: 2813051 - DNA, 25 bp, Homo sapien
gtttctgctgttaatgtcacctaaa

SEQ ID NO: 2813052 - DNA, 25 bp, Homo sapien
tttctgctgttaatgtcacctaaat

SEQ ID NO: 2813053 - DNA, 25 bp, Homo sapien
agtaagagtggagagcggtactacc

SEQ ID NO: 2813054 - DNA, 25 bp, Homo sapien
taaaaaaggtccatataattgatgt

SEQ ID NO: 2813055 - DNA, 25 bp, Homo sapien
ataattcagaaatgagatcgtctgt

SEQ ID NO: 2813056 - DNA, 25 bp, Homo sapien
gcccatttcatcagcgagtatgcaa

SEQ ID NO: 2813057 - DNA, 25 bp, Homo sapien
tgcaccaagaatgagcaagccaatt

SEQ ID NO: 2813058 - DNA, 25 bp, Homo sapien
cctccaatataggatggctgcttct

SEQ ID NO: 2813059 - DNA, 25 bp, Homo sapien
tcatgtcctccaatataggatggct

SEQ ID NO: 2813060 - DNA, 25 bp, Homo sapien
ttcagttgataatctcttaattcta

SEQ ID NO: 2813061 - DNA, 25 bp, Homo sapien
caatgcatgcttgaaactttttgga

SEQ ID NO: 2813062 - DNA, 25 bp, Homo sapien
gaaggccctgccatttgcagtaata

SEQ ID NO: 2813063 - DNA, 25 bp, Homo sapien
taaaatactcatcaatgcatgcttg

SEQ ID NO: 2813064 - DNA, 25 bp, Homo sapien
ggataaccagctgctgacttttgat

SEQ ID NO: 2813065 - DNA, 25 bp, Homo sapien
gtttaactagaatcatttatcacta

SEQ ID NO: 2813066 - DNA, 25 bp, Homo sapien
caagtaaaatttagctatctagttt

SEQ ID NO: 2813067 - DNA, 25 bp, Homo sapien
tatgtaagtggcaaacttatgactt

SEQ ID NO: 2813068 - DNA, 25 bp, Homo sapien
tagtaagagcaagctactgtgtttg

SEQ ID NO: 2813069 - DNA, 25 bp, Homo sapien
caattatacgttccactatttgata

SEQ ID NO: 2813070 - DNA, 25 bp, Homo sapien
tgctggcaattataatattccacat

SEQ ID NO: 2813071 - DNA, 25 bp, Homo sapien
gttccactatttgatactgtttatg

SEQ ID NO: 2813072 - DNA, 25 bp, Homo sapien
agttcttgctggcaattataatatt

SEQ ID NO: 2813073 - DNA, 25 bp, Homo sapien
cactgtgtgggccaagtttgagtaa

SEQ ID NO: 2813074 - DNA, 25 bp, Homo sapien
actcaaacaggaataaagcatcatt

SEQ ID NO: 2813075 - DNA, 25 bp, Homo sapien
tatgtgactgttaccaaggataggt

SEQ ID NO: 2813076 - DNA, 25 bp, Homo sapien
gtatgagacacactctatgtgactg

SEQ ID NO: 2813077 - DNA, 25 bp, Homo sapien
taaatactgaatctctcctggttct

SEQ ID NO: 2813078 - DNA, 25 bp, Homo sapien
tgcatagatggttgtagtagcacca

SEQ ID NO: 2813079 - DNA, 25 bp, Homo sapien
caagtgttgtggatatgggaccatc

SEQ ID NO: 2813080 - DNA, 25 bp, Homo sapien
aagcctgcatttgggtcaccatctg

SEQ ID NO: 2813081 - DNA, 25 bp, Homo sapien
ttcctcaggttgaggaacatcctct

SEQ ID NO: 2813082 - DNA, 25 bp, Homo sapien
acttccagtaggtcatcagaatctg

SEQ ID NO: 2813083 - DNA, 25 bp, Homo sapien
tctcccaatccgacaatccataaat

SEQ ID NO: 2813084 - DNA, 25 bp, Homo sapien
tgcttggcgacgagaacttctttta

SEQ ID NO: 2813085 - DNA, 25 bp, Homo sapien
cagattctgtttcatcacaactgct

SEQ ID NO: 2813086 - DNA, 25 bp, Homo sapien
gagatggagatcctgacccagacat

SEQ ID NO: 2813087 - DNA, 25 bp, Homo sapien
tgttttttggctcataatcagattc

SEQ ID NO: 2813088 - DNA, 25 bp, Homo sapien
taatcagattctgtttcatcacaac

SEQ ID NO: 2813089 - DNA, 25 bp, Homo sapien
tgacctcacttgatgagtcatcgga

SEQ ID NO: 2813090 - DNA, 25 bp, Homo sapien
gatgagtcatcggaatcttcactgc

SEQ ID NO: 2813091 - DNA, 25 bp, Homo sapien
ccttttgacctcacttgatgagtca

SEQ ID NO: 2813092 - DNA, 25 bp, Homo sapien
cacttgatgagtcatcggaatcttc

SEQ ID NO: 2813093 - DNA, 25 bp, Homo sapien
tctgaacggccagaatactaggact

SEQ ID NO: 2813094 - DNA, 25 bp, Homo sapien
tcttgaggattgcagatctctgaac

SEQ ID NO: 2813095 - DNA, 25 bp, Homo sapien
tcttctgatccgctattagatgagg

SEQ ID NO: 2813096 - DNA, 25 bp, Homo sapien
gaatactaggactagatttccaaaa

SEQ ID NO: 2813097 - DNA, 25 bp, Homo sapien
gattcagatccggagtcagagtcac

SEQ ID NO: 2813098 - DNA, 25 bp, Homo sapien
gttttctcgggaagtgtctgactca

SEQ ID NO: 2813099 - DNA, 25 bp, Homo sapien
gaagctgacccagaatcatcatccg

SEQ ID NO: 2813100 - DNA, 25 bp, Homo sapien
gaaccagatccagagcctgaagctg

SEQ ID NO: 2813101 - DNA, 25 bp, Homo sapien
tagcagagtgcctcacacagatggg

SEQ ID NO: 2813102 - DNA, 25 bp, Homo sapien
tgctagtagcaataaagtatctcct

SEQ ID NO: 2813103 - DNA, 25 bp, Homo sapien
agtatctcctctgaagatcttgaaa

SEQ ID NO: 2813104 - DNA, 25 bp, Homo sapien
ggttaacaagtagacctcatgatgt

SEQ ID NO: 2813105 - DNA, 25 bp, Homo sapien
tgttagaatgtctttaccttgggta

SEQ ID NO: 2813106 - DNA, 25 bp, Homo sapien
catagctagtaaaaactgcttgtta

SEQ ID NO: 2813107 - DNA, 25 bp, Homo sapien
tcatattctttaggcagtagtactg

SEQ ID NO: 2813108 - DNA, 25 bp, Homo sapien
acagcccgaggctatgctactctag

SEQ ID NO: 2813109 - DNA, 25 bp, Homo sapien
atgcccacccagctaaagattacct

SEQ ID NO: 2813110 - DNA, 25 bp, Homo sapien
tagtcatgtgagtaggttctggcca

SEQ ID NO: 2813111 - DNA, 25 bp, Homo sapien
ccagtttaggttgacacatgcccac

SEQ ID NO: 2813112 - DNA, 25 bp, Homo sapien
aatgtttgtggcagaaaatgtgccc

SEQ ID NO: 2813113 - DNA, 25 bp, Homo sapien
taactatagtcagtagtcaacatac

SEQ ID NO: 2813114 - DNA, 25 bp, Homo sapien
gactcttctatttacttaactatag

SEQ ID NO: 2813115 - DNA, 25 bp, Homo sapien
caacatacctatagagatttgaatc

SEQ ID NO: 2813116 - DNA, 25 bp, Homo sapien
gtgggtggacaatatgactcttcta

SEQ ID NO: 2813117 - DNA, 25 bp, Homo sapien
attctccactactgtttctaacact

SEQ ID NO: 2813118 - DNA, 25 bp, Homo sapien
tgtttctaacactttcttcatcact

SEQ ID NO: 2813119 - DNA, 25 bp, Homo sapien
tttcttcatcactgtgtccattcat

SEQ ID NO: 2813120 - DNA, 25 bp, Homo sapien
ctttcttcatcactgtgtccattca

SEQ ID NO: 2813121 - DNA, 25 bp, Homo sapien
aaatactgactccttgaatataaaa

SEQ ID NO: 2813122 - DNA, 25 bp, Homo sapien
gagccgactcgggtggacggcctcc

SEQ ID NO: 2813123 - DNA, 25 bp, Homo sapien
gagggagccgactcgggtggacggc

SEQ ID NO: 2813124 - DNA, 25 bp, Homo sapien
ggagccgactcgggtggacggcctc

SEQ ID NO: 2813125 - DNA, 25 bp, Homo sapien
ttattgaagcaccaagggcgagggc

SEQ ID NO: 2813126 - DNA, 25 bp, Homo sapien
gctataagtaaccagtcgtcgccgc

SEQ ID NO: 2813127 - DNA, 25 bp, Homo sapien
ccatgacgccgagaaagcaagcgag

SEQ ID NO: 2813128 - DNA, 25 bp, Homo sapien
agaaagcaagcgagcgcaaccgtct

SEQ ID NO: 2813129 - DNA, 25 bp, Homo sapien
tgaattccgggaagtgggagcttca

SEQ ID NO: 2813130 - DNA, 25 bp, Homo sapien
ttgaattccgggaagtgggagcttc

SEQ ID NO: 2813131 - DNA, 25 bp, Homo sapien
ccgtgcgggtatgggcgctaatgtc

SEQ ID NO: 2813132 - DNA, 25 bp, Homo sapien
ggagcttcaggctcgctccgtgcgg

SEQ ID NO: 2813133 - DNA, 25 bp, Homo sapien
ggaagccgggaagggccgcgctgaa

SEQ ID NO: 2813134 - DNA, 25 bp, Homo sapien
gatggttgcgcaaggacatcgcggc

SEQ ID NO: 2813135 - DNA, 25 bp, Homo sapien
catcgcggcggacactgacaaggaa

SEQ ID NO: 2813136 - DNA, 25 bp, Homo sapien
agactgcgatgggactcgggaagcc

SEQ ID NO: 2813137 - DNA, 25 bp, Homo sapien
gttgacagcctgtgatgccgcttga

SEQ ID NO: 2813138 - DNA, 25 bp, Homo sapien
gcttgggcgatctgcgattgacgca

SEQ ID NO: 2813139 - DNA, 25 bp, Homo sapien
tgcgattgacgcatcctgggagctg

SEQ ID NO: 2813140 - DNA, 25 bp, Homo sapien
agagaaaatagagacccggttgttg

SEQ ID NO: 2813141 - DNA, 25 bp, Homo sapien
tgtgcccgtaatttctccagagaaa

SEQ ID NO: 2813142 - DNA, 25 bp, Homo sapien
gaatagcaaaacgaagtggaacact

SEQ ID NO: 2813143 - DNA, 25 bp, Homo sapien
gaagtcgtcatttctgaactgagtg

SEQ ID NO: 2813144 - DNA, 25 bp, Homo sapien
taatgagaggaacttcctgtgcccg

SEQ ID NO: 2813145 - DNA, 25 bp, Homo sapien
gttttccggaagcacgtcaggcagg

SEQ ID NO: 2813146 - DNA, 25 bp, Homo sapien
tttactactaattgtgccattgaat

SEQ ID NO: 2813147 - DNA, 25 bp, Homo sapien
tatgctattctgtcgtattgtgcca

SEQ ID NO: 2813148 - DNA, 25 bp, Homo sapien
aattgtgccattgaatatgctattc

SEQ ID NO: 2813149 - DNA, 25 bp, Homo sapien
caagagttcaatctagacctgactg

SEQ ID NO: 2813150 - DNA, 25 bp, Homo sapien
tcaatctagacctgactgaacaacc

SEQ ID NO: 2813151 - DNA, 25 bp, Homo sapien
caatctagacctgactgaacaacca

SEQ ID NO: 2813152 - DNA, 25 bp, Homo sapien
gaacaagagttcaatctagacctga

SEQ ID NO: 2813153 - DNA, 25 bp, Homo sapien
tatctcacccaaaattcagctggca

SEQ ID NO: 2813154 - DNA, 25 bp, Homo sapien
tatagccctatgttccacttgtaaa

SEQ ID NO: 2813155 - DNA, 25 bp, Homo sapien
tatgtaccatgctaaaagtactgca

SEQ ID NO: 2813156 - DNA, 25 bp, Homo sapien
ttctcttactacagatccactttgc

SEQ ID NO: 2813157 - DNA, 25 bp, Homo sapien
gaaagttgtgaaatccagcctggtg

SEQ ID NO: 2813158 - DNA, 25 bp, Homo sapien
ggtactaccccagtttgcatctgct

SEQ ID NO: 2813159 - DNA, 25 bp, Homo sapien
tagtgtcccctttctcacgtgtgtc

SEQ ID NO: 2813160 - DNA, 25 bp, Homo sapien
taggccagtttgcagggtactaccc

SEQ ID NO: 2813161 - DNA, 25 bp, Homo sapien
cagtcatcatgcccctgtgctgatc

SEQ ID NO: 2813162 - DNA, 25 bp, Homo sapien
ccctgtgctgatccactagcaccat

SEQ ID NO: 2813163 - DNA, 25 bp, Homo sapien
ctaggtctgcaggtggtgaacatcc

SEQ ID NO: 2813164 - DNA, 25 bp, Homo sapien
tagcaccatatctaggtctgcaggt

SEQ ID NO: 2813165 - DNA, 25 bp, Homo sapien
ctgaagagaagaattccaagaaggg

SEQ ID NO: 2813166 - DNA, 25 bp, Homo sapien
agaagggccagggtggggctggagt

SEQ ID NO: 2813167 - DNA, 25 bp, Homo sapien
gggccagggtggggctggagtgccc

SEQ ID NO: 2813168 - DNA, 25 bp, Homo sapien
aagagaagaattccaagaagggcca

SEQ ID NO: 2813169 - DNA, 25 bp, Homo sapien
gaaactgtatccagcggtatttgtg

SEQ ID NO: 2813170 - DNA, 25 bp, Homo sapien
taaaagaaactgtatccagcggtat

SEQ ID NO: 2813171 - DNA, 25 bp, Homo sapien
tccagcggtatttgtgaaaaccaat

SEQ ID NO: 2813172 - DNA, 25 bp, Homo sapien
cagtctgtaaaagaaactgtatcca

SEQ ID NO: 2813173 - DNA, 25 bp, Homo sapien
cagttcagggtgctataatggaata

SEQ ID NO: 2813174 - DNA, 25 bp, Homo sapien
gctagttaggcattatctcagtcag

SEQ ID NO: 2813175 - DNA, 25 bp, Homo sapien
tataatggaatatcatagattgggt

SEQ ID NO: 2813176 - DNA, 25 bp, Homo sapien
cacataataagtacacagtaaatat

SEQ ID NO: 2813177 - DNA, 25 bp, Homo sapien
atggaatgatactgtattcatggac

SEQ ID NO: 2813178 - DNA, 25 bp, Homo sapien
atgatactgtattcatggactggaa

SEQ ID NO: 2813179 - DNA, 25 bp, Homo sapien
tgatactgtattcatggactggaag

SEQ ID NO: 2813180 - DNA, 25 bp, Homo sapien
aatggaatgatactgtattcatgga

SEQ ID NO: 2813181 - DNA, 25 bp, Homo sapien
tgggagctcgaagttactgtaagcc

SEQ ID NO: 2813182 - DNA, 25 bp, Homo sapien
gatgtgcacttgtggtctcacctac

SEQ ID NO: 2813183 - DNA, 25 bp, Homo sapien
aaaataataagagggaagttgatct

SEQ ID NO: 2813184 - DNA, 25 bp, Homo sapien
cacttgtactctctaagtctataaa

SEQ ID NO: 2813185 - DNA, 25 bp, Homo sapien
tccaagttatcagggcagcattcat

SEQ ID NO: 2813186 - DNA, 25 bp, Homo sapien
gagaatcatggtgaaagcttccagt

SEQ ID NO: 2813187 - DNA, 25 bp, Homo sapien
tagaacttctctttccgcgtctggt

SEQ ID NO: 2813188 - DNA, 25 bp, Homo sapien
gataaatgtggcttatctccaccag

SEQ ID NO: 2813189 - DNA, 25 bp, Homo sapien
cccagggagacccttctctcttgcc

SEQ ID NO: 2813190 - DNA, 25 bp, Homo sapien
gggagacccttctctcttgcctccc

SEQ ID NO: 2813191 - DNA, 25 bp, Homo sapien
ggagacccttctctcttgcctcccc

SEQ ID NO: 2813192 - DNA, 25 bp, Homo sapien
ccaccccagggagacccttctctct

SEQ ID NO: 2813193 - DNA, 25 bp, Homo sapien
tctctgtcagacaactcatttccct

SEQ ID NO: 2813194 - DNA, 25 bp, Homo sapien
gaaaatttgactctgtgtatgtatg

SEQ ID NO: 2813195 - DNA, 25 bp, Homo sapien
gtcctctctgatagtagaaaatttg

SEQ ID NO: 2813196 - DNA, 25 bp, Homo sapien
ttaaactgcatacatctcttcttcc

SEQ ID NO: 2813197 - DNA, 25 bp, Homo sapien
ttccttccagggttttcccatgata

SEQ ID NO: 2813198 - DNA, 25 bp, Homo sapien
ttccagggttttcccatgatattcc

SEQ ID NO: 2813199 - DNA, 25 bp, Homo sapien
ccttccagggttttcccatgatatt

SEQ ID NO: 2813200 - DNA, 25 bp, Homo sapien
ccagggttttcccatgatattccat

SEQ ID NO: 2813201 - DNA, 25 bp, Homo sapien
gagaaggttcccacaaattagtcag

SEQ ID NO: 2813202 - DNA, 25 bp, Homo sapien
tgttactttccacctgctaccataa

SEQ ID NO: 2813203 - DNA, 25 bp, Homo sapien
gctaccataaccctctccttgggta

SEQ ID NO: 2813204 - DNA, 25 bp, Homo sapien
tagtcagattccaatgctgatatcc

SEQ ID NO: 2813205 - DNA, 25 bp, Homo sapien
tcaaactcagaaaccgtcggcttct

SEQ ID NO: 2813206 - DNA, 25 bp, Homo sapien
ctcagaaaccgtcggcttctggcgc

SEQ ID NO: 2813207 - DNA, 25 bp, Homo sapien
aactcagaaaccgtcggcttctggc

SEQ ID NO: 2813208 - DNA, 25 bp, Homo sapien
tcatcaaactcagaaaccgtcggct

SEQ ID NO: 2813209 - DNA, 25 bp, Homo sapien
acaattccataactcatccgactgc

SEQ ID NO: 2813210 - DNA, 25 bp, Homo sapien
attccataactcatccgactgccat

SEQ ID NO: 2813211 - DNA, 25 bp, Homo sapien
aattccataactcatccgactgcca

SEQ ID NO: 2813212 - DNA, 25 bp, Homo sapien
gcacaattccataactcatccgact

SEQ ID NO: 2813213 - DNA, 25 bp, Homo sapien
tcacctgtgctttgtaagtgttgga

SEQ ID NO: 2813214 - DNA, 25 bp, Homo sapien
tgtgctttgtaagtgttggattcct

SEQ ID NO: 2813215 - DNA, 25 bp, Homo sapien
aatccattctcggttggttgctact

SEQ ID NO: 2813216 - DNA, 25 bp, Homo sapien
ctgaggagggtctaagggaatggga

SEQ ID NO: 2813217 - DNA, 25 bp, Homo sapien
attgggcatccaacaggaatagcaa

SEQ ID NO: 2813218 - DNA, 25 bp, Homo sapien
caattgggcatccaacaggaatagc

SEQ ID NO: 2813219 - DNA, 25 bp, Homo sapien
aattgggcatccaacaggaatagca

SEQ ID NO: 2813220 - DNA, 25 bp, Homo sapien
tgagggtaagaaggtttagcaattg

SEQ ID NO: 2813221 - DNA, 25 bp, Homo sapien
tgtcaggacttctctgaaaatgtgc

SEQ ID NO: 2813222 - DNA, 25 bp, Homo sapien
atgtcaggacttctctgaaaatgtg

SEQ ID NO: 2813223 - DNA, 25 bp, Homo sapien
cactttctttggcattgttgcttta

SEQ ID NO: 2813224 - DNA, 25 bp, Homo sapien
tcagggctggcttaactcagtgagc

SEQ ID NO: 2813225 - DNA, 25 bp, Homo sapien
gcaaaatgccattagaagttctagg

SEQ ID NO: 2813226 - DNA, 25 bp, Homo sapien
gactgcgttgcctcatgctggcaaa

SEQ ID NO: 2813227 - DNA, 25 bp, Homo sapien
ccaccagctatggaaaagggcttgt

SEQ ID NO: 2813228 - DNA, 25 bp, Homo sapien
ttaatcaacagtcttctatttgtct

SEQ ID NO: 2813229 - DNA, 25 bp, Homo sapien
gataatcaaatcagcggaacctcca

SEQ ID NO: 2813230 - DNA, 25 bp, Homo sapien
atcaacagtcttctatttgtcttca

SEQ ID NO: 2813231 - DNA, 25 bp, Homo sapien
tatcctgtagattgttgctcatctg

SEQ ID NO: 2813232 - DNA, 25 bp, Homo sapien
ctgtcagtaattccacacaggtatg

SEQ ID NO: 2813233 - DNA, 25 bp, Homo sapien
tctgtcagtaattccacacaggtat

SEQ ID NO: 2813234 - DNA, 25 bp, Homo sapien
tgtcagtaattccacacaggtatgt

SEQ ID NO: 2813235 - DNA, 25 bp, Homo sapien
tcttatttggattctgacaccccat

SEQ ID NO: 2813236 - DNA, 25 bp, Homo sapien
ctgacagatcttatttggattctga

SEQ ID NO: 2813237 - DNA, 25 bp, Homo sapien
attctgacagatcttatttggattc

SEQ ID NO: 2813238 - DNA, 25 bp, Homo sapien
tctgacagatcttatttggattctg

SEQ ID NO: 2813239 - DNA, 25 bp, Homo sapien
ccttctacttcttgattgtgtgcac

SEQ ID NO: 2813240 - DNA, 25 bp, Homo sapien
tgattgtgtgcacccgtgagattac

SEQ ID NO: 2813241 - DNA, 25 bp, Homo sapien
gtgagatatcctagacatcttcctc

SEQ ID NO: 2813242 - DNA, 25 bp, Homo sapien
tcacgtgagatatcctagacatctt

SEQ ID NO: 2813243 - DNA, 25 bp, Homo sapien
ccttattgagtctgttattctgttc

SEQ ID NO: 2813244 - DNA, 25 bp, Homo sapien
aaaggtgatttttccgcatgagggt

SEQ ID NO: 2813245 - DNA, 25 bp, Homo sapien
ctgtgttttgggctggtgacactca

SEQ ID NO: 2813246 - DNA, 25 bp, Homo sapien
catgagggttccctgctgtcatctg

SEQ ID NO: 2813247 - DNA, 25 bp, Homo sapien
ccattgctgagtcagggctttcttg

SEQ ID NO: 2813248 - DNA, 25 bp, Homo sapien
ccaaagttgtggtgtactgtgccca

SEQ ID NO: 2813249 - DNA, 25 bp, Homo sapien
catcaccatcaggtggccctctgaa

SEQ ID NO: 2813250 - DNA, 25 bp, Homo sapien
gcagcacactcaggttcacagagga

SEQ ID NO: 2813251 - DNA, 25 bp, Homo sapien
gtggaagtgggagcctatggcattg

SEQ ID NO: 2813252 - DNA, 25 bp, Homo sapien
ggtggaagtgggagcctatggcatt

SEQ ID NO: 2813253 - DNA, 25 bp, Homo sapien
ttcttgtgttaattatattgtaagt

SEQ ID NO: 2813254 - DNA, 25 bp, Homo sapien
tcttgtgttaattatattgtaagtt

SEQ ID NO: 2813255 - DNA, 25 bp, Homo sapien
cagaccattgtataagtagatggca

SEQ ID NO: 2813256 - DNA, 25 bp, Homo sapien
catatagataagaaagggaccagac

SEQ ID NO: 2813257 - DNA, 25 bp, Homo sapien
catagtacagcaaagcatatagata

SEQ ID NO: 2813258 - DNA, 25 bp, Homo sapien
aaagccatgtattctgatatccagg

SEQ ID NO: 2813259 - DNA, 25 bp, Homo sapien
gcaaagaccactaatggtgtctcct

SEQ ID NO: 2813260 - DNA, 25 bp, Homo sapien
actaatggtgtctcctactatctga

SEQ ID NO: 2813261 - DNA, 25 bp, Homo sapien
tggtgttgcaaagaccactaatggt

SEQ ID NO: 2813262 - DNA, 25 bp, Homo sapien
gaccactaatggtgtctcctactat

SEQ ID NO: 2813263 - DNA, 25 bp, Homo sapien
ggcttcatcttgctctaggaagtga

SEQ ID NO: 2813264 - DNA, 25 bp, Homo sapien
tcatcttgctctaggaagtgattgg

SEQ ID NO: 2813265 - DNA, 25 bp, Homo sapien
tcaggcttcatcttgctctaggaag

SEQ ID NO: 2813266 - DNA, 25 bp, Homo sapien
tcttgctctaggaagtgattggtac

SEQ ID NO: 2813267 - DNA, 25 bp, Homo sapien
ctcatcgattggtctcttcatggac

SEQ ID NO: 2813268 - DNA, 25 bp, Homo sapien
gattggtctcttcatggaccctgtg

SEQ ID NO: 2813269 - DNA, 25 bp, Homo sapien
ggtctcttcatggaccctgtggcca

SEQ ID NO: 2813270 - DNA, 25 bp, Homo sapien
gttctgcctcatcgattggtctctt

SEQ ID NO: 2813271 - DNA, 25 bp, Homo sapien
tatgatagtgacaatgtagatctgt

SEQ ID NO: 2813272 - DNA, 25 bp, Homo sapien
gacaatgtagatctgtgtcatcata

SEQ ID NO: 2813273 - DNA, 25 bp, Homo sapien
gtgacaatgtagatctgtgtcatca

SEQ ID NO: 2813274 - DNA, 25 bp, Homo sapien
gatagtgacaatgtagatctgtgtc

SEQ ID NO: 2813275 - DNA, 25 bp, Homo sapien
caattatcccatggttacttttgag

SEQ ID NO: 2813276 - DNA, 25 bp, Homo sapien
tcccatggttacttttgagaattcc

SEQ ID NO: 2813277 - DNA, 25 bp, Homo sapien
tatcccatggttacttttgagaatt

SEQ ID NO: 2813278 - DNA, 25 bp, Homo sapien
catcaattatcccatggttactttt

SEQ ID NO: 2813279 - DNA, 25 bp, Homo sapien
caatcctgtagggtgttgtagggat

SEQ ID NO: 2813280 - DNA, 25 bp, Homo sapien
cctgtagggtgttgtagggattcat

SEQ ID NO: 2813281 - DNA, 25 bp, Homo sapien
tcctgtagggtgttgtagggattca

SEQ ID NO: 2813282 - DNA, 25 bp, Homo sapien
atcctgtagggtgttgtagggattc

SEQ ID NO: 2813283 - DNA, 25 bp, Homo sapien
aaaataaagctcttgtaatccttca

SEQ ID NO: 2813284 - DNA, 25 bp, Homo sapien
aaataaagctcttgtaatccttcag

SEQ ID NO: 2813285 - DNA, 25 bp, Homo sapien
ataaagctcttgtaatccttcaggg

SEQ ID NO: 2813286 - DNA, 25 bp, Homo sapien
aataaagctcttgtaatccttcagg

SEQ ID NO: 2813287 - DNA, 25 bp, Homo sapien
tcacgtcaggactctcaactgatca

SEQ ID NO: 2813288 - DNA, 25 bp, Homo sapien
tgaggtagaaacatgagagcagctg

SEQ ID NO: 2813289 - DNA, 25 bp, Homo sapien
caactgatcagggattgttccttga

SEQ ID NO: 2813290 - DNA, 25 bp, Homo sapien
tcagggattgttccttgaggtagaa

SEQ ID NO: 2813291 - DNA, 25 bp, Homo sapien
cagatacaattgtgtaacttctcat

SEQ ID NO: 2813292 - DNA, 25 bp, Homo sapien
tcagaacagatacaattgtgtaact

SEQ ID NO: 2813293 - DNA, 25 bp, Homo sapien
gaacagatacaattgtgtaacttct

SEQ ID NO: 2813294 - DNA, 25 bp, Homo sapien
cttcagaacagatacaattgtgtaa

SEQ ID NO: 2813295 - DNA, 25 bp, Homo sapien
tctggcatgatatgtaggttcttgg

SEQ ID NO: 2813296 - DNA, 25 bp, Homo sapien
tgggcccacgaaaccgctgagctgt

SEQ ID NO: 2813297 - DNA, 25 bp, Homo sapien
cacgaaaccgctgagctgttgcaat

SEQ ID NO: 2813298 - DNA, 25 bp, Homo sapien
tcgccagctagatctataatctggc

SEQ ID NO: 2813299 - DNA, 25 bp, Homo sapien
catcaatgtaagtttaaagggataa

SEQ ID NO: 2813300 - DNA, 25 bp, Homo sapien
gaaagtacaaattaatgttattcaa

SEQ ID NO: 2813301 - DNA, 25 bp, Homo sapien
aaagggataattgcatgctcagaag

SEQ ID NO: 2813302 - DNA, 25 bp, Homo sapien
tattaaatccaagtgatgcttgaat

SEQ ID NO: 2813303 - DNA, 25 bp, Homo sapien
ctcttttattctgtcccaccagcat

SEQ ID NO: 2813304 - DNA, 25 bp, Homo sapien
aatgtttctcttttattctgtccca

SEQ ID NO: 2813305 - DNA, 25 bp, Homo sapien
tgtttctcttttattctgtcccacc

SEQ ID NO: 2813306 - DNA, 25 bp, Homo sapien
caaaaatgtttctcttttattctgt

SEQ ID NO: 2813307 - DNA, 25 bp, Homo sapien
caaattccatcctagattctcttct

SEQ ID NO: 2813308 - DNA, 25 bp, Homo sapien
attccatcctagattctcttctctc

SEQ ID NO: 2813309 - DNA, 25 bp, Homo sapien
tcttcaaattccatcctagattctc

SEQ ID NO: 2813310 - DNA, 25 bp, Homo sapien
cttcaaattccatcctagattctct

SEQ ID NO: 2813311 - DNA, 25 bp, Homo sapien
tctttcctcactctcaaaacaaaca

SEQ ID NO: 2813312 - DNA, 25 bp, Homo sapien
ataacaaacacaagtaagaacaaca

SEQ ID NO: 2813313 - DNA, 25 bp, Homo sapien
tcctctttcctcactctcaaaacaa

SEQ ID NO: 2813314 - DNA, 25 bp, Homo sapien
cattttcctctttcctcactctcaa

SEQ ID NO: 2813315 - DNA, 25 bp, Homo sapien
tatatccataattatgatgagctgc

SEQ ID NO: 2813316 - DNA, 25 bp, Homo sapien
ttatatccataattatgatgagctg

SEQ ID NO: 2813317 - DNA, 25 bp, Homo sapien
tcagggcgtgttacagaatacagta

SEQ ID NO: 2813318 - DNA, 25 bp, Homo sapien
ccaataatgaccctgtaaagagcat

SEQ ID NO: 2813319 - DNA, 25 bp, Homo sapien
aagagcccttgggatctcacgcagc

SEQ ID NO: 2813320 - DNA, 25 bp, Homo sapien
cagatgaattaaccaataatgaccc

SEQ ID NO: 2813321 - DNA, 25 bp, Homo sapien
gaaaattaatgagagccaggacacc

SEQ ID NO: 2813322 - DNA, 25 bp, Homo sapien
ggaaaattaatgagagccaggacac

SEQ ID NO: 2813323 - DNA, 25 bp, Homo sapien
gaagccagggccgaggaaagggtga

SEQ ID NO: 2813324 - DNA, 25 bp, Homo sapien
tggaaaattaatgagagccaggaca

SEQ ID NO: 2813325 - DNA, 25 bp, Homo sapien
cattcttattgtgatcgtcattgct

SEQ ID NO: 2813326 - DNA, 25 bp, Homo sapien
tcattcttattgtgatcgtcattgc

SEQ ID NO: 2813327 - DNA, 25 bp, Homo sapien
ttatgacctgaacagtcagttcatc

SEQ ID NO: 2813328 - DNA, 25 bp, Homo sapien
tcagttcatctctcttaggccagct

SEQ ID NO: 2813329 - DNA, 25 bp, Homo sapien
agttcatctctcttaggccagctta

SEQ ID NO: 2813330 - DNA, 25 bp, Homo sapien
ccatcatccttaattatgacctgaa

SEQ ID NO: 2813331 - DNA, 25 bp, Homo sapien
ctgcctgctggaggacaatgtagga

SEQ ID NO: 2813332 - DNA, 25 bp, Homo sapien
tgctggaggacaatgtaggacagag

SEQ ID NO: 2813333 - DNA, 25 bp, Homo sapien
ggaggacaatgtaggacagaggcat

SEQ ID NO: 2813334 - DNA, 25 bp, Homo sapien
ctggaggacaatgtaggacagaggc

SEQ ID NO: 2813335 - DNA, 25 bp, Homo sapien
aattccatccagatgccaatgattg

SEQ ID NO: 2813336 - DNA, 25 bp, Homo sapien
ttacagggactgttaacaaattcca

SEQ ID NO: 2813337 - DNA, 25 bp, Homo sapien
cagggactgttaacaaattccatcc

SEQ ID NO: 2813338 - DNA, 25 bp, Homo sapien
attccatccagatgccaatgattgt

SEQ ID NO: 2813339 - DNA, 25 bp, Homo sapien
agctggcagctaccatctccagcag

SEQ ID NO: 2813340 - DNA, 25 bp, Homo sapien
aaacttagctggcagctaccatctc

SEQ ID NO: 2813341 - DNA, 25 bp, Homo sapien
aacatctaaacttagctggcagcta

SEQ ID NO: 2813342 - DNA, 25 bp, Homo sapien
cttgctgttttgaacgaaacatcta

SEQ ID NO: 2813343 - DNA, 25 bp, Homo sapien
tcgtggatccacaggtggtctccct

SEQ ID NO: 2813344 - DNA, 25 bp, Homo sapien
cgtggatccacaggtggtctccctc

SEQ ID NO: 2813345 - DNA, 25 bp, Homo sapien
gggaccaatactgtgccccaccata

SEQ ID NO: 2813346 - DNA, 25 bp, Homo sapien
tacagatgtcatgagagctagagag

SEQ ID NO: 2813347 - DNA, 25 bp, Homo sapien
tctgggatggctgaatcacacatga

SEQ ID NO: 2813348 - DNA, 25 bp, Homo sapien
cactgccattgggtaagctcgactg

SEQ ID NO: 2813349 - DNA, 25 bp, Homo sapien
tggcttcacgtctatttggcgtact

SEQ ID NO: 2813350 - DNA, 25 bp, Homo sapien
tctatttggcgtactttttgctgct

SEQ ID NO: 2813351 - DNA, 25 bp, Homo sapien
taccccatcccattgaggaactttg

SEQ ID NO: 2813352 - DNA, 25 bp, Homo sapien
catcccattgaggaactttgttggc

SEQ ID NO: 2813353 - DNA, 25 bp, Homo sapien
atagtcaactgaacccttcccactg

SEQ ID NO: 2813354 - DNA, 25 bp, Homo sapien
cccactgaatgtgatgataaagtct

SEQ ID NO: 2813355 - DNA, 25 bp, Homo sapien
tcaactgaacccttcccactgaatg

SEQ ID NO: 2813356 - DNA, 25 bp, Homo sapien
cactgaatgtgatgataaagtctaa

SEQ ID NO: 2813357 - DNA, 25 bp, Homo sapien
ccttcatatccttttggtaaatgac

SEQ ID NO: 2813358 - DNA, 25 bp, Homo sapien
ggtaaatgacgaatcatatatacag

SEQ ID NO: 2813359 - DNA, 25 bp, Homo sapien
gatacttcagtgaatggtagcactg

SEQ ID NO: 2813360 - DNA, 25 bp, Homo sapien
tacagtcagcagcagagatcctgat

SEQ ID NO: 2813361 - DNA, 25 bp, Homo sapien
caaagtctaagaatatagaaggcac

SEQ ID NO: 2813362 - DNA, 25 bp, Homo sapien
ttaatatagtaacaaagtctaagaa

SEQ ID NO: 2813363 - DNA, 25 bp, Homo sapien
taatatagtaacaaagtctaagaat

SEQ ID NO: 2813364 - DNA, 25 bp, Homo sapien
attaatatagtaacaaagtctaaga

SEQ ID NO: 2813365 - DNA, 25 bp, Homo sapien
tcccgcttttcagaagtaacaatag

SEQ ID NO: 2813366 - DNA, 25 bp, Homo sapien
gcttttcagaagtaacaatagttgg

SEQ ID NO: 2813367 - DNA, 25 bp, Homo sapien
tttcagaagtaacaatagttggtgg

SEQ ID NO: 2813368 - DNA, 25 bp, Homo sapien
cagaagtaacaatagttggtggttt

SEQ ID NO: 2813369 - DNA, 25 bp, Homo sapien
gaatttgtctgagatccaacagaca

SEQ ID NO: 2813370 - DNA, 25 bp, Homo sapien
atttgtctgagatccaacagacagc

SEQ ID NO: 2813371 - DNA, 25 bp, Homo sapien
tttgtctgagatccaacagacagca

SEQ ID NO: 2813372 - DNA, 25 bp, Homo sapien
ttgtctgagatccaacagacagcat

SEQ ID NO: 2813373 - DNA, 25 bp, Homo sapien
taagtggatatcaaagaggcagtca

SEQ ID NO: 2813374 - DNA, 25 bp, Homo sapien
gtaagtggatatcaaagaggcagtc

SEQ ID NO: 2813375 - DNA, 25 bp, Homo sapien
tgagtaagtggatatcaaagaggca

SEQ ID NO: 2813376 - DNA, 25 bp, Homo sapien
gtggatatcaaagaggcagtcacac

SEQ ID NO: 2813377 - DNA, 25 bp, Homo sapien
gctgtatctgcgttgttttcacagt

SEQ ID NO: 2813378 - DNA, 25 bp, Homo sapien
tgctttagaaacgctagacccacca

SEQ ID NO: 2813379 - DNA, 25 bp, Homo sapien
ctttagaaacgctagacccaccaga

SEQ ID NO: 2813380 - DNA, 25 bp, Homo sapien
agaaacgctagacccaccagaagcc

SEQ ID NO: 2813381 - DNA, 25 bp, Homo sapien
tgcaggagccgacgttctaggcctc

SEQ ID NO: 2813382 - DNA, 25 bp, Homo sapien
caggagccgacgttctaggcctcct

SEQ ID NO: 2813383 - DNA, 25 bp, Homo sapien
aggagccgacgttctaggcctcctt

SEQ ID NO: 2813384 - DNA, 25 bp, Homo sapien
gcaggagccgacgttctaggcctcc

SEQ ID NO: 2813385 - DNA, 25 bp, Homo sapien
tgttcacaccgtgtttgacccaaag

SEQ ID NO: 2813386 - DNA, 25 bp, Homo sapien
cctgttcacaccgtgtttgacccaa

SEQ ID NO: 2813387 - DNA, 25 bp, Homo sapien
ctgttcacaccgtgtttgacccaaa

SEQ ID NO: 2813388 - DNA, 25 bp, Homo sapien
gttcacaccgtgtttgacccaaaga

SEQ ID NO: 2813389 - DNA, 25 bp, Homo sapien
gaaatgcagaccatgcatccctggt

SEQ ID NO: 2813390 - DNA, 25 bp, Homo sapien
acgagctcgtccaggtattctggga

SEQ ID NO: 2813391 - DNA, 25 bp, Homo sapien
cagcaagcctcccacggagctatag

SEQ ID NO: 2813392 - DNA, 25 bp, Homo sapien
ccacggagctataggagctggagat

SEQ ID NO: 2813393 - DNA, 25 bp, Homo sapien
tgtgaaccccaatggggtgactacc

SEQ ID NO: 2813394 - DNA, 25 bp, Homo sapien
gttgtgaaccccaatggggtgacta

SEQ ID NO: 2813395 - DNA, 25 bp, Homo sapien
acagccgggtgttgtgaaccccaat

SEQ ID NO: 2813396 - DNA, 25 bp, Homo sapien
agccgggtgttgtgaaccccaatgg

SEQ ID NO: 2813397 - DNA, 25 bp, Homo sapien
ctactgccactggaatatcttctcc

SEQ ID NO: 2813398 - DNA, 25 bp, Homo sapien
ggttactggtgctttgttgattctt

SEQ ID NO: 2813399 - DNA, 25 bp, Homo sapien
ttctccattgataagtagtattttg

SEQ ID NO: 2813400 - DNA, 25 bp, Homo sapien
tttatgatggttactggtgctttgt

SEQ ID NO: 2813401 - DNA, 25 bp, Homo sapien
cattgtcaataatgcatgatgggcc

SEQ ID NO: 2813402 - DNA, 25 bp, Homo sapien
aacattacattgtcaataatgcatg

SEQ ID NO: 2813403 - DNA, 25 bp, Homo sapien
taaccaataatttctgctaacatta

SEQ ID NO: 2813404 - DNA, 25 bp, Homo sapien
ctccagctgcaagaattgttaagag

SEQ ID NO: 2813405 - DNA, 25 bp, Homo sapien
taaagatgctgtagtattggaggtg

SEQ ID NO: 2813406 - DNA, 25 bp, Homo sapien
ttcatgaaagactctctccagaatg

SEQ ID NO: 2813407 - DNA, 25 bp, Homo sapien
gcagatactaattctgagggccaga

SEQ ID NO: 2813408 - DNA, 25 bp, Homo sapien
gactctctccagaatgcagatacta

SEQ ID NO: 2813409 - DNA, 25 bp, Homo sapien
ctgagacctggtaatctgaatcaac

SEQ ID NO: 2813410 - DNA, 25 bp, Homo sapien
cccactctgagttgtatccttagcc

SEQ ID NO: 2813411 - DNA, 25 bp, Homo sapien
cttcgcatctgacgaaataagaaaa

SEQ ID NO: 2813412 - DNA, 25 bp, Homo sapien
gcattttgtactcctgtccttttac

SEQ ID NO: 2813413 - DNA, 25 bp, Homo sapien
gataaccgtggtttgcacactatat

SEQ ID NO: 2813414 - DNA, 25 bp, Homo sapien
cagcgtatcgataaccgtggtttgc

SEQ ID NO: 2813415 - DNA, 25 bp, Homo sapien
ccttcaaacagcgtatcgataaccg

SEQ ID NO: 2813416 - DNA, 25 bp, Homo sapien
aagacttccttcaaacagcgtatcg

SEQ ID NO: 2813417 - DNA, 25 bp, Homo sapien
atgggggttgactgaaatccgttgc

SEQ ID NO: 2813418 - DNA, 25 bp, Homo sapien
tgggggttgactgaaatccgttgca

SEQ ID NO: 2813419 - DNA, 25 bp, Homo sapien
gggggttgactgaaatccgttgcat

SEQ ID NO: 2813420 - DNA, 25 bp, Homo sapien
gtttcctccatgaatcatttttagt

SEQ ID NO: 2813421 - DNA, 25 bp, Homo sapien
tgcctttgttgaccgtgcatgcttt

SEQ ID NO: 2813422 - DNA, 25 bp, Homo sapien
ttcaaaagtgtccattgcaatgcct

SEQ ID NO: 2813423 - DNA, 25 bp, Homo sapien
ttatccttcaacgaaatcccgatcc

SEQ ID NO: 2813424 - DNA, 25 bp, Homo sapien
aatttagagtttattgcaacatagg

SEQ ID NO: 2813425 - DNA, 25 bp, Homo sapien
gagtttattgcaacataggttttta

SEQ ID NO: 2813426 - DNA, 25 bp, Homo sapien
caaatttagagtttattgcaacata

SEQ ID NO: 2813427 - DNA, 25 bp, Homo sapien
tagagtttattgcaacataggtttt

SEQ ID NO: 2813428 - DNA, 25 bp, Homo sapien
attaagctcatgaacgttgtttaaa

SEQ ID NO: 2813429 - DNA, 25 bp, Homo sapien
taagctcatgaacgttgtttaaatc

SEQ ID NO: 2813430 - DNA, 25 bp, Homo sapien
catgaacgttgtttaaatctttatg

SEQ ID NO: 2813431 - DNA, 25 bp, Homo sapien
acattaagctcatgaacgttgttta

SEQ ID NO: 2813432 - DNA, 25 bp, Homo sapien
catcatagccatcgttatcagtatt

SEQ ID NO: 2813433 - DNA, 25 bp, Homo sapien
caacatcatagccatcgttatcagt

SEQ ID NO: 2813434 - DNA, 25 bp, Homo sapien
catagccatcgttatcagtattcac

SEQ ID NO: 2813435 - DNA, 25 bp, Homo sapien
tagccatcgttatcagtattcacca

SEQ ID NO: 2813436 - DNA, 25 bp, Homo sapien
tatattgccagtaccaaaaaagtat

SEQ ID NO: 2813437 - DNA, 25 bp, Homo sapien
taaattgtcaatggtggcaaatgct

SEQ ID NO: 2813438 - DNA, 25 bp, Homo sapien
taaagtatgacaatggatatcctgg

SEQ ID NO: 2813439 - DNA, 25 bp, Homo sapien
aaaagtattaattgatttccacctg

SEQ ID NO: 2813440 - DNA, 25 bp, Homo sapien
gggcagaacacttaggactcaatca

SEQ ID NO: 2813441 - DNA, 25 bp, Homo sapien
caggaagttagaaagtcccaggtca

SEQ ID NO: 2813442 - DNA, 25 bp, Homo sapien
caaaagggtagatctggtgaaggcc

SEQ ID NO: 2813443 - DNA, 25 bp, Homo sapien
tccagaggtgatgtagggcatcaca

SEQ ID NO: 2813444 - DNA, 25 bp, Homo sapien
tggcatactgccaaaaactgacagc

SEQ ID NO: 2813445 - DNA, 25 bp, Homo sapien
attgcgtttatattctgctagagtg

SEQ ID NO: 2813446 - DNA, 25 bp, Homo sapien
ccattttgatattgcgtttatattc

SEQ ID NO: 2813447 - DNA, 25 bp, Homo sapien
gatattgcgtttatattctgctaga

SEQ ID NO: 2813448 - DNA, 25 bp, Homo sapien
ttttactgtttcatcactatgtaac

SEQ ID NO: 2813449 - DNA, 25 bp, Homo sapien
ttactgtttcatcactatgtaacat

SEQ ID NO: 2813450 - DNA, 25 bp, Homo sapien
tttactgtttcatcactatgtaaca

SEQ ID NO: 2813451 - DNA, 25 bp, Homo sapien
tttttactgtttcatcactatgtaa

SEQ ID NO: 2813452 - DNA, 25 bp, Homo sapien
tcagacattccgaaggcagaactca

SEQ ID NO: 2813453 - DNA, 25 bp, Homo sapien
cagacattccgaaggcagaactcac

SEQ ID NO: 2813454 - DNA, 25 bp, Homo sapien
cagaataaatatgttgctgtagcaa

SEQ ID NO: 2813455 - DNA, 25 bp, Homo sapien
tgcagaataaatatgttgctgtagc

SEQ ID NO: 2813456 - DNA, 25 bp, Homo sapien
gatgaaagcccaaatgcacttgcag

SEQ ID NO: 2813457 - DNA, 25 bp, Homo sapien
gaacatctgatgaaagcccaaatgc

SEQ ID NO: 2813458 - DNA, 25 bp, Homo sapien
ttgggtttgcaccagaatcctgaag

SEQ ID NO: 2813459 - DNA, 25 bp, Homo sapien
tgccatcttttgttataccacttaa

SEQ ID NO: 2813460 - DNA, 25 bp, Homo sapien
tgcatttttgggtttgcaccagaat

SEQ ID NO: 2813461 - DNA, 25 bp, Homo sapien
ccagaatcctgaagtacatccgggg

SEQ ID NO: 2813462 - DNA, 25 bp, Homo sapien
cctgtagtggaattcacgtttatga

SEQ ID NO: 2813463 - DNA, 25 bp, Homo sapien
tatgatgagtatgaaggcagctaaa

SEQ ID NO: 2813464 - DNA, 25 bp, Homo sapien
cgtttatgatgagtatgaaggcagc

SEQ ID NO: 2813465 - DNA, 25 bp, Homo sapien
gaattcacgtttatgatgagtatga

SEQ ID NO: 2813466 - DNA, 25 bp, Homo sapien
agttggatgtagcatataagctgca

SEQ ID NO: 2813467 - DNA, 25 bp, Homo sapien
gatgtagcatataagctgcatctac

SEQ ID NO: 2813468 - DNA, 25 bp, Homo sapien
taagctgcatctacagtttctatcg

SEQ ID NO: 2813469 - DNA, 25 bp, Homo sapien
cagtttctatcgtcaatatttgcca

SEQ ID NO: 2813470 - DNA, 25 bp, Homo sapien
tttattctgtcctttcctttcttga

SEQ ID NO: 2813471 - DNA, 25 bp, Homo sapien
tattctgtcctttcctttcttgaac

SEQ ID NO: 2813472 - DNA, 25 bp, Homo sapien
attctgtcctttcctttcttgaaca

SEQ ID NO: 2813473 - DNA, 25 bp, Homo sapien
ttctgtcctttcctttcttgaacat

SEQ ID NO: 2813474 - DNA, 25 bp, Homo sapien
ttccctcctaattttggatgaagta

SEQ ID NO: 2813475 - DNA, 25 bp, Homo sapien
tccttccctcctaattttggatgaa

SEQ ID NO: 2813476 - DNA, 25 bp, Homo sapien
cttccttccctcctaattttggatg

SEQ ID NO: 2813477 - DNA, 25 bp, Homo sapien
ccttccctcctaattttggatgaag

SEQ ID NO: 2813478 - DNA, 25 bp, Homo sapien
ttttctgcaaacaccccatactgta

SEQ ID NO: 2813479 - DNA, 25 bp, Homo sapien
catactgtatcttctgtcccacagt

SEQ ID NO: 2813480 - DNA, 25 bp, Homo sapien
acttctctgttatttgagctaattg

SEQ ID NO: 2813481 - DNA, 25 bp, Homo sapien
tactcatacatatagcttgatcctg

SEQ ID NO: 2813482 - DNA, 25 bp, Homo sapien
ctgcccacagaaataagttggagtt

SEQ ID NO: 2813483 - DNA, 25 bp, Homo sapien
gcctggagctccgtgtcacctccac

SEQ ID NO: 2813484 - DNA, 25 bp, Homo sapien
acgttctcatgagcttcatgcagca

SEQ ID NO: 2813485 - DNA, 25 bp, Homo sapien
cctccacgttctcatgagcttcatg

SEQ ID NO: 2813486 - DNA, 25 bp, Homo sapien
ccagctcccgcctggagctccgtgt

SEQ ID NO: 2813487 - DNA, 25 bp, Homo sapien
tatgaactcagtagatgtgcttaac

SEQ ID NO: 2813488 - DNA, 25 bp, Homo sapien
caaaacacaattggatagatgaaat

SEQ ID NO: 2813489 - DNA, 25 bp, Homo sapien
gcaaaatttcggcattgaattgaaa

SEQ ID NO: 2813490 - DNA, 25 bp, Homo sapien
cagattagaggcaactaaagagaca

SEQ ID NO: 2813491 - DNA, 25 bp, Homo sapien
gacaagtctactattcacttttcca

SEQ ID NO: 2813492 - DNA, 25 bp, Homo sapien
aagatagacaagtctactattcact

SEQ ID NO: 2813493 - DNA, 25 bp, Homo sapien
gatagacaagtctactattcacttt

SEQ ID NO: 2813494 - DNA, 25 bp, Homo sapien
gtttttataagcaggaagatagaca

SEQ ID NO: 2813495 - DNA, 25 bp, Homo sapien
tatcattgatgacccaagacacagc

SEQ ID NO: 2813496 - DNA, 25 bp, Homo sapien
catcattggtatcgctctgtggaaa

SEQ ID NO: 2813497 - DNA, 25 bp, Homo sapien
catatctcatactggcttgtccgga

SEQ ID NO: 2813498 - DNA, 25 bp, Homo sapien
tcagcaggtattatgtgactatcat

SEQ ID NO: 2813499 - DNA, 25 bp, Homo sapien
ttctgaaactggcatggtggtcacc

SEQ ID NO: 2813500 - DNA, 25 bp, Homo sapien
cacattgctggaaagtttgctgcac

SEQ ID NO: 2813501 - DNA, 25 bp, Homo sapien
cttcctaagaacaacgtgggcttca

SEQ ID NO: 2813502 - DNA, 25 bp, Homo sapien
cctgtcaagcatgttcgttgtggca

SEQ ID NO: 2813503 - DNA, 25 bp, Homo sapien
tttgctgttcgtcatatgaaacagt

SEQ ID NO: 2813504 - DNA, 25 bp, Homo sapien
gcctctcaggaaagggccaatagca

SEQ ID NO: 2813505 - DNA, 25 bp, Homo sapien
ctctagcattgcaactcagttttga

SEQ ID NO: 2813506 - DNA, 25 bp, Homo sapien
tcagttttgaagaggtggtacgcag

SEQ ID NO: 2813507 - DNA, 25 bp, Homo sapien
aggtccacttagagagggaccctct

SEQ ID NO: 2813508 - DNA, 25 bp, Homo sapien
cacgatgaaggtgtatgcagagtct

SEQ ID NO: 2813509 - DNA, 25 bp, Homo sapien
aaggcacctcttcagtagatacatg

SEQ ID NO: 2813510 - DNA, 25 bp, Homo sapien
tggttgaccaaaaacaggactattg

SEQ ID NO: 2813511 - DNA, 25 bp, Homo sapien
ctggtgtagccagtgctctgtgaaa

SEQ ID NO: 2813512 - DNA, 25 bp, Homo sapien
cagagcagattgactgggtccacca

SEQ ID NO: 2813513 - DNA, 25 bp, Homo sapien
gacaacagagcagattgactgggtc

SEQ ID NO: 2813514 - DNA, 25 bp, Homo sapien
agcagattgactgggtccaccaaaa

SEQ ID NO: 2813515 - DNA, 25 bp, Homo sapien
caacagagcagattgactgggtcca

SEQ ID NO: 2813516 - DNA, 25 bp, Homo sapien
gactggttttcactgcatcatgctt

SEQ ID NO: 2813517 - DNA, 25 bp, Homo sapien
tctgtgattgcagtgtcaaatgaag

SEQ ID NO: 2813518 - DNA, 25 bp, Homo sapien
taagctcattatccaataatctgtg

SEQ ID NO: 2813519 - DNA, 25 bp, Homo sapien
ttccaagaccagcacatcatcaaga

SEQ ID NO: 2813520 - DNA, 25 bp, Homo sapien
cagactgctgcgagtagggtagtta

SEQ ID NO: 2813521 - DNA, 25 bp, Homo sapien
actattatgagtcccaattggcttg

SEQ ID NO: 2813522 - DNA, 25 bp, Homo sapien
tatagcgcctaaacatagtgtgagg

SEQ ID NO: 2813523 - DNA, 25 bp, Homo sapien
gaaagggtattcctgcaagtgctag

SEQ ID NO: 2813524 - DNA, 25 bp, Homo sapien
ggctgagacaggggtagggccttcc

SEQ ID NO: 2813525 - DNA, 25 bp, Homo sapien
gagtagggctgagacaggggtaggg

SEQ ID NO: 2813526 - DNA, 25 bp, Homo sapien
tagggctgagacaggggtagggcct

SEQ ID NO: 2813527 - DNA, 25 bp, Homo sapien
ctgagacaggggtagggccttccat

SEQ ID NO: 2813528 - DNA, 25 bp, Homo sapien
taagaccaacggatggctgttatcc

SEQ ID NO: 2813529 - DNA, 25 bp, Homo sapien
caacggatggctgttatcctttaaa

SEQ ID NO: 2813530 - DNA, 25 bp, Homo sapien
agaccaacggatggctgttatcctt

SEQ ID NO: 2813531 - DNA, 25 bp, Homo sapien
cggatggctgttatcctttaaaagt

SEQ ID NO: 2813532 - DNA, 25 bp, Homo sapien
ttagacatgggagtatgagttagca

SEQ ID NO: 2813533 - DNA, 25 bp, Homo sapien
catgttgttagacatgggagtatga

SEQ ID NO: 2813534 - DNA, 25 bp, Homo sapien
gagttagcagttcttatgagctttc

SEQ ID NO: 2813535 - DNA, 25 bp, Homo sapien
agttagcagttcttatgagctttct

SEQ ID NO: 2813536 - DNA, 25 bp, Homo sapien
aaggggctgtgagcctctgttatca

SEQ ID NO: 2813537 - DNA, 25 bp, Homo sapien
aataaggggctgtgagcctctgtta

SEQ ID NO: 2813538 - DNA, 25 bp, Homo sapien
taaataaggggctgtgagcctctgt

SEQ ID NO: 2813539 - DNA, 25 bp, Homo sapien
ggctgtgagcctctgttatcagatt

SEQ ID NO: 2813540 - DNA, 25 bp, Homo sapien
atatgactatcataatttaatcagt

SEQ ID NO: 2813541 - DNA, 25 bp, Homo sapien
taatcagtcgaaatcattcgtttta

SEQ ID NO: 2813542 - DNA, 25 bp, Homo sapien
aatttaatcagtcgaaatcattcgt

SEQ ID NO: 2813543 - DNA, 25 bp, Homo sapien
tcattcgttttatttaaactatgta

SEQ ID NO: 2813544 - DNA, 25 bp, Homo sapien
tttgaatatcatcaaaactagttaa

SEQ ID NO: 2813545 - DNA, 25 bp, Homo sapien
gaatatcatcaaaactagttaattg

SEQ ID NO: 2813546 - DNA, 25 bp, Homo sapien
tatcatcaaaactagttaattggaa

SEQ ID NO: 2813547 - DNA, 25 bp, Homo sapien
catcaaaactagttaattggaagtt

SEQ ID NO: 2813548 - DNA, 25 bp, Homo sapien
tgagccatagatgccgtcgtcagag

SEQ ID NO: 2813549 - DNA, 25 bp, Homo sapien
gatgacgtggagtccgtgaaagcct

SEQ ID NO: 2813550 - DNA, 25 bp, Homo sapien
taaagggcgtttcgaaatactctga

SEQ ID NO: 2813551 - DNA, 25 bp, Homo sapien
gaaagttgatccaatgatgacgtgg

SEQ ID NO: 2813552 - DNA, 25 bp, Homo sapien
gattagggcaacagcgatttctaga

SEQ ID NO: 2813553 - DNA, 25 bp, Homo sapien
ttgtcgtgtaggtaggggctcacta

SEQ ID NO: 2813554 - DNA, 25 bp, Homo sapien
gattatgaagatgatgagcgttgag

SEQ ID NO: 2813555 - DNA, 25 bp, Homo sapien
ttgaggggaggttaacagttgatat

SEQ ID NO: 2813556 - DNA, 25 bp, Homo sapien
aatatgggaataaggggtgcaggtg

SEQ ID NO: 2813557 - DNA, 25 bp, Homo sapien
tgatggtttcaataatgattaatat

SEQ ID NO: 2813558 - DNA, 25 bp, Homo sapien
ggtttcaataatgattaatatggga

SEQ ID NO: 2813559 - DNA, 25 bp, Homo sapien
cagttaggcgtacggctagggctac

SEQ ID NO: 2813560 - DNA, 25 bp, Homo sapien
agaggtagtgattctctcaatcttt

SEQ ID NO: 2813561 - DNA, 25 bp, Homo sapien
gaggtagtgattctctcaatcttta

SEQ ID NO: 2813562 - DNA, 25 bp, Homo sapien
gtagtgattctctcaatctttaact

SEQ ID NO: 2813563 - DNA, 25 bp, Homo sapien
ggtagtgattctctcaatctttaac

SEQ ID NO: 2813564 - DNA, 25 bp, Homo sapien
gggcataaaactgtggtttgctcca

SEQ ID NO: 2813565 - DNA, 25 bp, Homo sapien
attaattctaggacgatgggcataa

SEQ ID NO: 2813566 - DNA, 25 bp, Homo sapien
tttctgagcattggccgtagtatac

SEQ ID NO: 2813567 - DNA, 25 bp, Homo sapien
tggtttgctccacagatttctgagc

SEQ ID NO: 2813568 - DNA, 25 bp, Homo sapien
catctgtttttaggcccagtgtggg

SEQ ID NO: 2813569 - DNA, 25 bp, Homo sapien
ggcgtccgggaattgcatctgtttt

SEQ ID NO: 2813570 - DNA, 25 bp, Homo sapien
tgtggtttggttcaggcgtccggga

SEQ ID NO: 2813571 - DNA, 25 bp, Homo sapien
tgaatgtggtttggttcaggcgtcc

SEQ ID NO: 2813572 - DNA, 25 bp, Homo sapien
gaggaccacccggttatcaacgtca

SEQ ID NO: 2813573 - DNA, 25 bp, Homo sapien
cacccggttatcaacgtcaaggagt

SEQ ID NO: 2813574 - DNA, 25 bp, Homo sapien
ccacccggttatcaacgtcaaggag

SEQ ID NO: 2813575 - DNA, 25 bp, Homo sapien
tgacaaagttatgaaatggtttttc

SEQ ID NO: 2813576 - DNA, 25 bp, Homo sapien
ttatgaaatggtttttctaatatct

SEQ ID NO: 2813577 - DNA, 25 bp, Homo sapien
actttgacaaagttatgaaatggtt

SEQ ID NO: 2813578 - DNA, 25 bp, Homo sapien
agttatgaaatggtttttctaatat

SEQ ID NO: 2813579 - DNA, 25 bp, Homo sapien
ccccttgtctgctgcgtaggtggag

SEQ ID NO: 2813580 - DNA, 25 bp, Homo sapien
cccttgtctgctgcgtaggtggagt

SEQ ID NO: 2813581 - DNA, 25 bp, Homo sapien
tacataagggcacgttcctctagtc

SEQ ID NO: 2813582 - DNA, 25 bp, Homo sapien
ttacataagggcacgttcctctagt

SEQ ID NO: 2813583 - DNA, 25 bp, Homo sapien
ctagaccgagctctctaacaacact

SEQ ID NO: 2813584 - DNA, 25 bp, Homo sapien
ccaactcccccagaggcgtagccac

SEQ ID NO: 2813585 - DNA, 25 bp, Homo sapien
gaatccaactcccccagaggcgtag

SEQ ID NO: 2813586 - DNA, 25 bp, Homo sapien
caactcccccagaggcgtagccacc

SEQ ID NO: 2813587 - DNA, 25 bp, Homo sapien
ccctgaatccaactcccccagaggc

SEQ ID NO: 2813588 - DNA, 25 bp, Homo sapien
actgccgaaaatgaggttcacttcc

SEQ ID NO: 2813589 - DNA, 25 bp, Homo sapien
ctgccgggtacacacagctgaggtc

SEQ ID NO: 2813590 - DNA, 25 bp, Homo sapien
tgccgggtacacacagctgaggtca

SEQ ID NO: 2813591 - DNA, 25 bp, Homo sapien
cactggactgaacactgccgaaaat

SEQ ID NO: 2813592 - DNA, 25 bp, Homo sapien
ccaggaggtcgagatggcaacgagc

SEQ ID NO: 2813593 - DNA, 25 bp, Homo sapien
cccaggaggtcgagatggcaacgag

SEQ ID NO: 2813594 - DNA, 25 bp, Homo sapien
gattccaggaaggacgcaggctcgt

SEQ ID NO: 2813595 - DNA, 25 bp, Homo sapien
ttgaaggagtagccggcagattcca

SEQ ID NO: 2813596 - DNA, 25 bp, Homo sapien
acgcaggctcgttggccacggacca

SEQ ID NO: 2813597 - DNA, 25 bp, Homo sapien
aggagtagccggcagattccaggaa

SEQ ID NO: 2813598 - DNA, 25 bp, Homo sapien
ggtggttcttgtctctgagcaccgg

SEQ ID NO: 2813599 - DNA, 25 bp, Homo sapien
ggttcttgtctctgagcaccggttc

SEQ ID NO: 2813600 - DNA, 25 bp, Homo sapien
ggggtggttcttgtctctgagcacc

SEQ ID NO: 2813601 - DNA, 25 bp, Homo sapien
caccatggcggggtggttcttgtct

SEQ ID NO: 2813602 - DNA, 25 bp, Homo sapien
tgcatagacacgttgttgaagagtt

SEQ ID NO: 2813603 - DNA, 25 bp, Homo sapien
acacgttgttgaagagttgccagcg

SEQ ID NO: 2813604 - DNA, 25 bp, Homo sapien
tatggtgatgcatagacacgttgtt

SEQ ID NO: 2813605 - DNA, 25 bp, Homo sapien
tccaccacccacatatggtgatgca

SEQ ID NO: 2813606 - DNA, 25 bp, Homo sapien
cactcatcgatgaccacaatcccat

SEQ ID NO: 2813607 - DNA, 25 bp, Homo sapien
agcaggacactcatcgatgaccaca

SEQ ID NO: 2813608 - DNA, 25 bp, Homo sapien
actcatcgatgaccacaatcccata

SEQ ID NO: 2813609 - DNA, 25 bp, Homo sapien
aggacactcatcgatgaccacaatc

SEQ ID NO: 2813610 - DNA, 25 bp, Homo sapien
ggtgttggcgccaagccagcaaagc

SEQ ID NO: 2813611 - DNA, 25 bp, Homo sapien
aaggtgttggcgccaagccagcaaa

SEQ ID NO: 2813612 - DNA, 25 bp, Homo sapien
gtgttggcgccaagccagcaaagca

SEQ ID NO: 2813613 - DNA, 25 bp, Homo sapien
cagaaggtgttggcgccaagccagc

SEQ ID NO: 2813614 - DNA, 25 bp, Homo sapien
atttgcctcattgccttgagctgcc

SEQ ID NO: 2813615 - DNA, 25 bp, Homo sapien
caccatggggtggtttggagccatt

SEQ ID NO: 2813616 - DNA, 25 bp, Homo sapien
aggaccctggagaaccaccccatga

SEQ ID NO: 2813617 - DNA, 25 bp, Homo sapien
atgaggtcccctctccagcccaagc

SEQ ID NO: 2813618 - DNA, 25 bp, Homo sapien
gtccgcatcctcatgcttgacgccg

SEQ ID NO: 2813619 - DNA, 25 bp, Homo sapien
gcatcctcatgcttgacgccgtgga

SEQ ID NO: 2813620 - DNA, 25 bp, Homo sapien
atgcttgacgccgtggaaatagaaa

SEQ ID NO: 2813621 - DNA, 25 bp, Homo sapien
atagaaaggtttcccgctgatgagg

SEQ ID NO: 2813622 - DNA, 25 bp, Homo sapien
cagccacacctacgacagccaaagt

SEQ ID NO: 2813623 - DNA, 25 bp, Homo sapien
cacacctacgacagccaaagtgcca

SEQ ID NO: 2813624 - DNA, 25 bp, Homo sapien
acacctacgacagccaaagtgccag

SEQ ID NO: 2813625 - DNA, 25 bp, Homo sapien
gccacacctacgacagccaaagtgc

SEQ ID NO: 2813626 - DNA, 25 bp, Homo sapien
tgttcgtgcatcaggtatggccacc

SEQ ID NO: 2813627 - DNA, 25 bp, Homo sapien
tcaggtatggccaccagaggttggc

SEQ ID NO: 2813628 - DNA, 25 bp, Homo sapien
ggtgttcgtgcatcaggtatggcca

SEQ ID NO: 2813629 - DNA, 25 bp, Homo sapien
aggtatggccaccagaggttggcac

SEQ ID NO: 2813630 - DNA, 25 bp, Homo sapien
ggttgtccacgaccttgttttctgc

SEQ ID NO: 2813631 - DNA, 25 bp, Homo sapien
gtcccagcctggttgtccacgacct

SEQ ID NO: 2813632 - DNA, 25 bp, Homo sapien
tggttactgcacttgacggagatct

SEQ ID NO: 2813633 - DNA, 25 bp, Homo sapien
tgtccacgaccttgttttctgcatt

SEQ ID NO: 2813634 - DNA, 25 bp, Homo sapien
gaagggattgaaatgccttaaaaga

SEQ ID NO: 2813635 - DNA, 25 bp, Homo sapien
agggctgaagggattgaaatgcctt

SEQ ID NO: 2813636 - DNA, 25 bp, Homo sapien
ggctgaagggattgaaatgccttaa

SEQ ID NO: 2813637 - DNA, 25 bp, Homo sapien
gctgaagggattgaaatgccttaaa

SEQ ID NO: 2813638 - DNA, 25 bp, Homo sapien
gtcatatcctcctgtcaccaaacgg

SEQ ID NO: 2813639 - DNA, 25 bp, Homo sapien
agtcatatcctcctgtcaccaaacg

SEQ ID NO: 2813640 - DNA, 25 bp, Homo sapien
tcatatcctcctgtcaccaaacggg

SEQ ID NO: 2813641 - DNA, 25 bp, Homo sapien
atatcctcctgtcaccaaacgggca

SEQ ID NO: 2813642 - DNA, 25 bp, Homo sapien
ctgagggatccagacccaaagcaga

SEQ ID NO: 2813643 - DNA, 25 bp, Homo sapien
gagggatccagacccaaagcagaca

SEQ ID NO: 2813644 - DNA, 25 bp, Homo sapien
tgagggatccagacccaaagcagac

SEQ ID NO: 2813645 - DNA, 25 bp, Homo sapien
agggatccagacccaaagcagacac

SEQ ID NO: 2813646 - DNA, 25 bp, Homo sapien
aataaaatgactggagcaaaatgac

SEQ ID NO: 2813647 - DNA, 25 bp, Homo sapien
tggtagctattgtccccagaaacca

SEQ ID NO: 2813648 - DNA, 25 bp, Homo sapien
ctggtagctattgtccccagaaacc

SEQ ID NO: 2813649 - DNA, 25 bp, Homo sapien
ggtagctattgtccccagaaaccac

SEQ ID NO: 2813650 - DNA, 25 bp, Homo sapien
gtagctattgtccccagaaaccacc

SEQ ID NO: 2813651 - DNA, 25 bp, Homo sapien
cagttacaatcatcattttggggaa

SEQ ID NO: 2813652 - DNA, 25 bp, Homo sapien
gcagttacaatcatcattttgggga

SEQ ID NO: 2813653 - DNA, 25 bp, Homo sapien
ttctcatgcagttacaatcatcatt

SEQ ID NO: 2813654 - DNA, 25 bp, Homo sapien
agttacaatcatcattttggggaaa

SEQ ID NO: 2813655 - DNA, 25 bp, Homo sapien
cagttgtttctccaattcaggtgag

SEQ ID NO: 2813656 - DNA, 25 bp, Homo sapien
tttcataatggttatggaatacaga

SEQ ID NO: 2813657 - DNA, 25 bp, Homo sapien
ggtgagtagcactgataactaatag

SEQ ID NO: 2813658 - DNA, 25 bp, Homo sapien
gacttaaactatggagttcattcac

SEQ ID NO: 2813659 - DNA, 25 bp, Homo sapien
taggtgataagatctgaatcatgcc

SEQ ID NO: 2813660 - DNA, 25 bp, Homo sapien
ttaaaagaatccgtgaatgcaatga

SEQ ID NO: 2813661 - DNA, 25 bp, Homo sapien
aatgtcacctgcgtaaattatctca

SEQ ID NO: 2813662 - DNA, 25 bp, Homo sapien
aatgaccttcaacacaaaaaagcgg

SEQ ID NO: 2813663 - DNA, 25 bp, Homo sapien
taaaacatcacaaatcttgctgttc

SEQ ID NO: 2813664 - DNA, 25 bp, Homo sapien
gctgctagactgatgaattttaaca

SEQ ID NO: 2813665 - DNA, 25 bp, Homo sapien
caaccacatctttagtggctgctag

SEQ ID NO: 2813666 - DNA, 25 bp, Homo sapien
ggtattcagccagctttcttggata

SEQ ID NO: 2813667 - DNA, 25 bp, Homo sapien
caggcttacagttcagctgtgttca

SEQ ID NO: 2813668 - DNA, 25 bp, Homo sapien
tgtaagtaatgaggagaacaacctt

SEQ ID NO: 2813669 - DNA, 25 bp, Homo sapien
ctacactagatatgaagaatggcga

SEQ ID NO: 2813670 - DNA, 25 bp, Homo sapien
gctgtgttcactagccagattctac

SEQ ID NO: 2813671 - DNA, 25 bp, Homo sapien
gataagttctcagcctacataggag

SEQ ID NO: 2813672 - DNA, 25 bp, Homo sapien
aattaaatggtgtcagtaccccaga

SEQ ID NO: 2813673 - DNA, 25 bp, Homo sapien
gatagtagtgttaaagagctccgtc

SEQ ID NO: 2813674 - DNA, 25 bp, Homo sapien
aaagttggacttaggcagattcagc

SEQ ID NO: 2813675 - DNA, 25 bp, Homo sapien
attactaggataaaagcttcatgag

SEQ ID NO: 2813676 - DNA, 25 bp, Homo sapien
tgtctatttccattactaggataaa

SEQ ID NO: 2813677 - DNA, 25 bp, Homo sapien
ttccattactaggataaaagcttca

SEQ ID NO: 2813678 - DNA, 25 bp, Homo sapien
gcttcatgaggtcagaattttatgt

SEQ ID NO: 2813679 - DNA, 25 bp, Homo sapien
cgcaaatttagtcgcttaaagcaag

SEQ ID NO: 2813680 - DNA, 25 bp, Homo sapien
atatcgcagttgtgggtaaggagac

SEQ ID NO: 2813681 - DNA, 25 bp, Homo sapien
tccacatgagtgaatagtactatag

SEQ ID NO: 2813682 - DNA, 25 bp, Homo sapien
ggtgaggagtctcgacacatctgtg

SEQ ID NO: 2813683 - DNA, 25 bp, Homo sapien
atcaaggtgtcaggcaaagctgggt

SEQ ID NO: 2813684 - DNA, 25 bp, Homo sapien
tgagatcttagagagtctccattct

SEQ ID NO: 2813685 - DNA, 25 bp, Homo sapien
tccattctgggcataaaacccttcc

SEQ ID NO: 2813686 - DNA, 25 bp, Homo sapien
tgcattatcacaagtatctattcct

SEQ ID NO: 2813687 - DNA, 25 bp, Homo sapien
ttcaagatggttcaggatggagaat

SEQ ID NO: 2813688 - DNA, 25 bp, Homo sapien
tgcattgtgaaatgagtgcatcctg

SEQ ID NO: 2813689 - DNA, 25 bp, Homo sapien
tgtgaaatgagtgcatcctggagaa

SEQ ID NO: 2813690 - DNA, 25 bp, Homo sapien
ctatagtcatgctattatactgtta

SEQ ID NO: 2813691 - DNA, 25 bp, Homo sapien
aaatgagtgcatcctggagaatggg

SEQ ID NO: 2813692 - DNA, 25 bp, Homo sapien
cttttccccagtgtaagttattgat

SEQ ID NO: 2813693 - DNA, 25 bp, Homo sapien
tggtgaatgatagccatctagtttc

SEQ ID NO: 2813694 - DNA, 25 bp, Homo sapien
tgttccattaatctacctatctgta

SEQ ID NO: 2813695 - DNA, 25 bp, Homo sapien
tttgcccagactaatatcctggaaa

SEQ ID NO: 2813696 - DNA, 25 bp, Homo sapien
tcaaggtcaccataaattgcccaat

SEQ ID NO: 2813697 - DNA, 25 bp, Homo sapien
ggaactttccaagggagtatagctc

SEQ ID NO: 2813698 - DNA, 25 bp, Homo sapien
ttgcccaataatgagagggctccat

SEQ ID NO: 2813699 - DNA, 25 bp, Homo sapien
tcaaggtctgacaacaggaggaact

SEQ ID NO: 2813700 - DNA, 25 bp, Homo sapien
gctgagcagttcacggctataagct

SEQ ID NO: 2813701 - DNA, 25 bp, Homo sapien
cagcaagctgagcagttcacggcta

SEQ ID NO: 2813702 - DNA, 25 bp, Homo sapien
tcacggctataagctcacttccttt

SEQ ID NO: 2813703 - DNA, 25 bp, Homo sapien
gcagttcacggctataagctcactt

SEQ ID NO: 2813704 - DNA, 25 bp, Homo sapien
gctaatacagcttgggtctccacag

SEQ ID NO: 2813705 - DNA, 25 bp, Homo sapien
tggtcttcccgtacaatctatatac

SEQ ID NO: 2813706 - DNA, 25 bp, Homo sapien
tggatgtggtcttcccgtacaatct

SEQ ID NO: 2813707 - DNA, 25 bp, Homo sapien
aatacagcttgggtctccacagtac

SEQ ID NO: 2813708 - DNA, 25 bp, Homo sapien
aggtgcctcaccgttctcattcttc

SEQ ID NO: 2813709 - DNA, 25 bp, Homo sapien
tctcattcttctcctggttaccagc

SEQ ID NO: 2813710 - DNA, 25 bp, Homo sapien
cagcattgcagtgcgtttatgccac

SEQ ID NO: 2813711 - DNA, 25 bp, Homo sapien
tcaacaatcgttgacgaggtgcctc

SEQ ID NO: 2813712 - DNA, 25 bp, Homo sapien
gctttatgggcttttttacacatcc

SEQ ID NO: 2813713 - DNA, 25 bp, Homo sapien
tatgggcttttttacacatcctcac

SEQ ID NO: 2813714 - DNA, 25 bp, Homo sapien
caggtgctttatgggcttttttaca

SEQ ID NO: 2813715 - DNA, 25 bp, Homo sapien
tttgtcaggtgctttatgggctttt

SEQ ID NO: 2813716 - DNA, 25 bp, Homo sapien
acatcttgagaaaagtccctcttgg

SEQ ID NO: 2813717 - DNA, 25 bp, Homo sapien
catccaaatggcactttcggttaac

SEQ ID NO: 2813718 - DNA, 25 bp, Homo sapien
cctacaatttggtccactggaaata

SEQ ID NO: 2813719 - DNA, 25 bp, Homo sapien
ccctcttggattgaagaatgtcttt

SEQ ID NO: 2813720 - DNA, 25 bp, Homo sapien
tcaggactgccaacacattcttaag

SEQ ID NO: 2813721 - DNA, 25 bp, Homo sapien
tattgtccacaagtctaaagtaggg

SEQ ID NO: 2813722 - DNA, 25 bp, Homo sapien
tcagtgcaagtgaagccgtgagttc

SEQ ID NO: 2813723 - DNA, 25 bp, Homo sapien
gcaagaccatcagacagtcctcagg

SEQ ID NO: 2813724 - DNA, 25 bp, Homo sapien
tgttggctcctactcctggactcgg

SEQ ID NO: 2813725 - DNA, 25 bp, Homo sapien
gatgttaagctttatcagtagagga

SEQ ID NO: 2813726 - DNA, 25 bp, Homo sapien
tggactcggccagctagcgtgatgt

SEQ ID NO: 2813727 - DNA, 25 bp, Homo sapien
ttgtccttcagctcaaaatttacct

SEQ ID NO: 2813728 - DNA, 25 bp, Homo sapien
aggcagcttcctgtggcactagagc

SEQ ID NO: 2813729 - DNA, 25 bp, Homo sapien
tctcttctcgatatttcccaaagac

SEQ ID NO: 2813730 - DNA, 25 bp, Homo sapien
tggttagaatattctcttctcgata

SEQ ID NO: 2813731 - DNA, 25 bp, Homo sapien
ggttagaatattctcttctcgatat

SEQ ID NO: 2813732 - DNA, 25 bp, Homo sapien
tttggttagaatattctcttctcga

SEQ ID NO: 2813733 - DNA, 25 bp, Homo sapien
caatattggacaactggcttgattc

SEQ ID NO: 2813734 - DNA, 25 bp, Homo sapien
cccacatagggagtatagtaccaaa

SEQ ID NO: 2813735 - DNA, 25 bp, Homo sapien
taaggtttggcgtatgatcgaaccc

SEQ ID NO: 2813736 - DNA, 25 bp, Homo sapien
gatttcaattgtgctcatggctgtg

SEQ ID NO: 2813737 - DNA, 25 bp, Homo sapien
ggtctcaattttgtacagttccagc

SEQ ID NO: 2813738 - DNA, 25 bp, Homo sapien
caggtgttcataaaagtctccgagg

SEQ ID NO: 2813739 - DNA, 25 bp, Homo sapien
tttgttaatctagcagcagtctatg

SEQ ID NO: 2813740 - DNA, 25 bp, Homo sapien
cagttcatccttaggaggtttggag

SEQ ID NO: 2813741 - DNA, 25 bp, Homo sapien
cccttgtctgctgcgtaggtggagt

SEQ ID NO: 2813742 - DNA, 25 bp, Homo sapien
ccccttgtctgctgcgtaggtggag

SEQ ID NO: 2813743 - DNA, 25 bp, Homo sapien
acagtctgccatctgccagggtctc

SEQ ID NO: 2813744 - DNA, 25 bp, Homo sapien
tatggacggccctcccattgggctg

SEQ ID NO: 2813745 - DNA, 25 bp, Homo sapien
cacagaccacatcatgatggcgggt

SEQ ID NO: 2813746 - DNA, 25 bp, Homo sapien
tagatatttagttccctgaaccgtc

SEQ ID NO: 2813747 - DNA, 25 bp, Homo sapien
gccaggcagagcgggtgcgcagcag

SEQ ID NO: 2813748 - DNA, 25 bp, Homo sapien
caggcagagcgggtgcgcagcaggg

SEQ ID NO: 2813749 - DNA, 25 bp, Homo sapien
ggcagagcgggtgcgcagcagggac

SEQ ID NO: 2813750 - DNA, 25 bp, Homo sapien
aggcagagcgggtgcgcagcaggga

SEQ ID NO: 2813751 - DNA, 25 bp, Homo sapien
cagaaggtgttggcgccaagccagc

SEQ ID NO: 2813752 - DNA, 25 bp, Homo sapien
cacaatcccataccggtaacatatc

SEQ ID NO: 2813753 - DNA, 25 bp, Homo sapien
gtgttggcgccaagccagcaaagca

SEQ ID NO: 2813754 - DNA, 25 bp, Homo sapien
gaccacaatcccataccggtaacat

SEQ ID NO: 2813755 - DNA, 25 bp, Homo sapien
atagaaaggtttcccgctgatgagg

SEQ ID NO: 2813756 - DNA, 25 bp, Homo sapien
cctcatgcttgttgacgccgtggaa

SEQ ID NO: 2813757 - DNA, 25 bp, Homo sapien
catgcttgttgacgccgtggaaata

SEQ ID NO: 2813758 - DNA, 25 bp, Homo sapien
tgttgacgccgtggaaatagaaagg

SEQ ID NO: 2813759 - DNA, 25 bp, Homo sapien
cggtgacggccacagtgcggagccc

SEQ ID NO: 2813760 - DNA, 25 bp, Homo sapien
gtgacttctgtgcagtcagccacac

SEQ ID NO: 2813761 - DNA, 25 bp, Homo sapien
cagtgacttctgtgcagtcagccac

SEQ ID NO: 2813762 - DNA, 25 bp, Homo sapien
ctggctctcggtgacggccacagtg

SEQ ID NO: 2813763 - DNA, 25 bp, Homo sapien
cccgacagcctgagccccatctggc

SEQ ID NO: 2813764 - DNA, 25 bp, Homo sapien
gacagcctgagccccatctggcctg

SEQ ID NO: 2813765 - DNA, 25 bp, Homo sapien
tacgacagccaaagtgccagctgtg

SEQ ID NO: 2813766 - DNA, 25 bp, Homo sapien
gccagctgtgagcgccccgacagcc

SEQ ID NO: 2813767 - DNA, 25 bp, Homo sapien
gcaaaagacctcccttaagcaagtc

SEQ ID NO: 2813768 - DNA, 25 bp, Homo sapien
ccagggctaccagatgggggcaaaa

SEQ ID NO: 2813769 - DNA, 25 bp, Homo sapien
taagcaagtcccaaaccaccattac

SEQ ID NO: 2813770 - DNA, 25 bp, Homo sapien
cgttcacctgtcctgggatcctgct

SEQ ID NO: 2813771 - DNA, 25 bp, Homo sapien
gtcccagcctggttgtccacgacct

SEQ ID NO: 2813772 - DNA, 25 bp, Homo sapien
ggttgtccacgaccttgttttctgc

SEQ ID NO: 2813773 - DNA, 25 bp, Homo sapien
tggttactgcacttgacggagatct

SEQ ID NO: 2813774 - DNA, 25 bp, Homo sapien
tgtccacgaccttgttttctgcatt

SEQ ID NO: 2813775 - DNA, 25 bp, Homo sapien
ggaggcaagagagaccagggcttag

SEQ ID NO: 2813776 - DNA, 25 bp, Homo sapien
caagagagaccagggcttagggagg

SEQ ID NO: 2813777 - DNA, 25 bp, Homo sapien
ggcaagagagaccagggcttaggga

SEQ ID NO: 2813778 - DNA, 25 bp, Homo sapien
gagagaccagggcttagggagggac

SEQ ID NO: 2813779 - DNA, 25 bp, Homo sapien
gcttcctttaacaccctattcattg

SEQ ID NO: 2813780 - DNA, 25 bp, Homo sapien
ttcattgaattttccagtaaaccac

SEQ ID NO: 2813781 - DNA, 25 bp, Homo sapien
aattactaattactcctgaaatcag

SEQ ID NO: 2813782 - DNA, 25 bp, Homo sapien
gatatattattaatgaattgcttcc

SEQ ID NO: 2813783 - DNA, 25 bp, Homo sapien
gtatcctatgaaatctactactttc

SEQ ID NO: 2813784 - DNA, 25 bp, Homo sapien
tactttcaagtaatagtagttgaat

SEQ ID NO: 2813785 - DNA, 25 bp, Homo sapien
ttttataacagtatcctatgaaatc

SEQ ID NO: 2813786 - DNA, 25 bp, Homo sapien
taacagtatcctatgaaatctacta

SEQ ID NO: 2813787 - DNA, 25 bp, Homo sapien
gtgatttggctgacggaatgttagt

SEQ ID NO: 2813788 - DNA, 25 bp, Homo sapien
tgatttggctgacggaatgttagtg

SEQ ID NO: 2813789 - DNA, 25 bp, Homo sapien
tggctgacggaatgttagtggacat

SEQ ID NO: 2813790 - DNA, 25 bp, Homo sapien
tttggctgacggaatgttagtggac

SEQ ID NO: 2813791 - DNA, 25 bp, Homo sapien
gggaagatagtgttgagggccctca

SEQ ID NO: 2813792 - DNA, 25 bp, Homo sapien
ggaagatagtgttgagggccctcaa

SEQ ID NO: 2813793 - DNA, 25 bp, Homo sapien
aagtgtaccagaagaagtatgttca

SEQ ID NO: 2813794 - DNA, 25 bp, Homo sapien
agtgtaccagaagaagtatgttcat

SEQ ID NO: 2813795 - DNA, 25 bp, Homo sapien
aaaagtgtaccagaagaagtatgtt

SEQ ID NO: 2813796 - DNA, 25 bp, Homo sapien
aaagtgtaccagaagaagtatgttc

SEQ ID NO: 2813797 - DNA, 25 bp, Homo sapien
agttctggtgtcctattgcatagta

SEQ ID NO: 2813798 - DNA, 25 bp, Homo sapien
catagtaggatgagtatagttaaca

SEQ ID NO: 2813799 - DNA, 25 bp, Homo sapien
cctattgcatagtaggatgagtata

SEQ ID NO: 2813800 - DNA, 25 bp, Homo sapien
tggtgtcctattgcatagtaggatg

SEQ ID NO: 2813801 - DNA, 25 bp, Homo sapien
gttcaagaggcataacatctgctcc

SEQ ID NO: 2813802 - DNA, 25 bp, Homo sapien
tcactccgaaatctgctagccacag

SEQ ID NO: 2813803 - DNA, 25 bp, Homo sapien
aagtagaaacagtcaatggctccat

SEQ ID NO: 2813804 - DNA, 25 bp, Homo sapien
tatctacatttgacgggaaacccaa

SEQ ID NO: 2813805 - DNA, 25 bp, Homo sapien
catactggactttgaagggactgtt

SEQ ID NO: 2813806 - DNA, 25 bp, Homo sapien
catccagtgaacaaactcagattta

SEQ ID NO: 2813807 - DNA, 25 bp, Homo sapien
cattggatacctactgtgaatgctg

SEQ ID NO: 2813808 - DNA, 25 bp, Homo sapien
tttccttctctaaacatgaaagtgg

SEQ ID NO: 2813809 - DNA, 25 bp, Homo sapien
tgctccaagtacagaaaaccctttg

SEQ ID NO: 2813810 - DNA, 25 bp, Homo sapien
ctgctccaagtacagaaaacccttt

SEQ ID NO: 2813811 - DNA, 25 bp, Homo sapien
gctgctccaagtacagaaaaccctt

SEQ ID NO: 2813812 - DNA, 25 bp, Homo sapien
tactgctacatctttacccagtccg

SEQ ID NO: 2813813 - DNA, 25 bp, Homo sapien
catctttacccagtccgatctttaa

SEQ ID NO: 2813814 - DNA, 25 bp, Homo sapien
tgctacatctttacccagtccgatc

SEQ ID NO: 2813815 - DNA, 25 bp, Homo sapien
tttttaatactgctacatctttacc

SEQ ID NO: 2813816 - DNA, 25 bp, Homo sapien
gaaaattaaaggtgtgcagatagct

SEQ ID NO: 2813817 - DNA, 25 bp, Homo sapien
aaaattaaaggtgtgcagatagctg

SEQ ID NO: 2813818 - DNA, 25 bp, Homo sapien
atagtatccactacattcagacatg

SEQ ID NO: 2813819 - DNA, 25 bp, Homo sapien
tcatagtatccactacattcagaca

SEQ ID NO: 2813820 - DNA, 25 bp, Homo sapien
gagggaacatcctgcgttctaaaga

SEQ ID NO: 2813821 - DNA, 25 bp, Homo sapien
gtgcaaggtaggcatccctcatcaa

SEQ ID NO: 2813822 - DNA, 25 bp, Homo sapien
ttttcatcaagtgcaaggtaggcat

SEQ ID NO: 2813823 - DNA, 25 bp, Homo sapien
catgttagcctccttgtagttttcc

SEQ ID NO: 2813824 - DNA, 25 bp, Homo sapien
ttcacagagcatatttaattgagtt

SEQ ID NO: 2813825 - DNA, 25 bp, Homo sapien
attcacagagcatatttaattgagt

SEQ ID NO: 2813826 - DNA, 25 bp, Homo sapien
ttgaaacatccttacaaccctggga

SEQ ID NO: 2813827 - DNA, 25 bp, Homo sapien
gaatcatggttatgttgacctcaca

SEQ ID NO: 2813828 - DNA, 25 bp, Homo sapien
taaagaaaccacgaagtccacttca

SEQ ID NO: 2813829 - DNA, 25 bp, Homo sapien
tagttgcatttatccagggctgtgt

SEQ ID NO: 2813830 - DNA, 25 bp, Homo sapien
aaggaaatccttacactgtacgtag

SEQ ID NO: 2813831 - DNA, 25 bp, Homo sapien
tcatctctggtagcatatgctatta

SEQ ID NO: 2813832 - DNA, 25 bp, Homo sapien
tacgtaggtatacaaattagtacag

SEQ ID NO: 2813833 - DNA, 25 bp, Homo sapien
tcaccccagttaaagtggcctatat

SEQ ID NO: 2813834 - DNA, 25 bp, Homo sapien
tccactagggtatcctgtataaaat

SEQ ID NO: 2813835 - DNA, 25 bp, Homo sapien
cactagggtatcctgtataaaatgt

SEQ ID NO: 2813836 - DNA, 25 bp, Homo sapien
tggtttccactagggtatcctgtat

SEQ ID NO: 2813837 - DNA, 25 bp, Homo sapien
ttcctctggtttccactagggtatc

SEQ ID NO: 2813838 - DNA, 25 bp, Homo sapien
gatctacactagctcttaaagtagg

SEQ ID NO: 2813839 - DNA, 25 bp, Homo sapien
gctgtaaagacttcactcaatacac

SEQ ID NO: 2813840 - DNA, 25 bp, Homo sapien
tattcagcgtctaccagaagtgtca

SEQ ID NO: 2813841 - DNA, 25 bp, Homo sapien
taggagaagaaaatgtgcgcatcac

SEQ ID NO: 2813842 - DNA, 25 bp, Homo sapien
acagcctactggctcgatgcatgaa

SEQ ID NO: 2813843 - DNA, 25 bp, Homo sapien
cctactggctcgatgcatgaactct

SEQ ID NO: 2813844 - DNA, 25 bp, Homo sapien
cagtttttacccatgtgcacagcct

SEQ ID NO: 2813845 - DNA, 25 bp, Homo sapien
ctgtttagccgcagccagtttttac

SEQ ID NO: 2813846 - DNA, 25 bp, Homo sapien
agattcataaagcaattaccagtag

SEQ ID NO: 2813847 - DNA, 25 bp, Homo sapien
attcataaagcaattaccagtagat

SEQ ID NO: 2813848 - DNA, 25 bp, Homo sapien
gtctggagctcccagattcataaag

SEQ ID NO: 2813849 - DNA, 25 bp, Homo sapien
ctaggtctggagctcccagattcat

SEQ ID NO: 2813850 - DNA, 25 bp, Homo sapien
cccttgacaggcatctcattggtga

SEQ ID NO: 2813851 - DNA, 25 bp, Homo sapien
ccttgacaggcatctcattggtgag

SEQ ID NO: 2813852 - DNA, 25 bp, Homo sapien
tcaaaagacccacgtatacccttga

SEQ ID NO: 2813853 - DNA, 25 bp, Homo sapien
tacccttgacaggcatctcattggt

SEQ ID NO: 2813854 - DNA, 25 bp, Homo sapien
ttctccacttttttcagactgctgt

SEQ ID NO: 2813855 - DNA, 25 bp, Homo sapien
ttagctacttttctcataccatatt

SEQ ID NO: 2813856 - DNA, 25 bp, Homo sapien
ctgtggaattcctgagaaagagcaa

SEQ ID NO: 2813857 - DNA, 25 bp, Homo sapien
cttttctcataccatattgattctc

SEQ ID NO: 2813858 - DNA, 25 bp, Homo sapien
tgacatagcatgcagctttcgctga

SEQ ID NO: 2813859 - DNA, 25 bp, Homo sapien
ttcgctgagggctgactttttctga

SEQ ID NO: 2813860 - DNA, 25 bp, Homo sapien
gaagtatgagcatgtttaagctcca

SEQ ID NO: 2813861 - DNA, 25 bp, Homo sapien
ttctttgtctccaaagccggaagta

SEQ ID NO: 2813862 - DNA, 25 bp, Homo sapien
cttcttttcacatgtgctctttaga

SEQ ID NO: 2813863 - DNA, 25 bp, Homo sapien
cacatgtgctctttagacctttcct

SEQ ID NO: 2813864 - DNA, 25 bp, Homo sapien
tcttttcacatgtgctctttagacc

SEQ ID NO: 2813865 - DNA, 25 bp, Homo sapien
ttttcacatgtgctctttagacctt

SEQ ID NO: 2813866 - DNA, 25 bp, Homo sapien
tgtagtttcatacgcaagtcgaggt

SEQ ID NO: 2813867 - DNA, 25 bp, Homo sapien
gaaacaggttatttgactgcaagag

SEQ ID NO: 2813868 - DNA, 25 bp, Homo sapien
gaggttggtctatatgccatggcca

SEQ ID NO: 2813869 - DNA, 25 bp, Homo sapien
caattcttctctggcagacgttcag

SEQ ID NO: 2813870 - DNA, 25 bp, Homo sapien
taagaattcatttatctctttctga

SEQ ID NO: 2813871 - DNA, 25 bp, Homo sapien
caaactctaagaattcatttatctc

SEQ ID NO: 2813872 - DNA, 25 bp, Homo sapien
ccaaactctaagaattcatttatct

SEQ ID NO: 2813873 - DNA, 25 bp, Homo sapien
gaattcatttatctctttctgacag

SEQ ID NO: 2813874 - DNA, 25 bp, Homo sapien
ctgtgtagagttccaagggtaagag

SEQ ID NO: 2813875 - DNA, 25 bp, Homo sapien
tgtgtagagttccaagggtaagaga

SEQ ID NO: 2813876 - DNA, 25 bp, Homo sapien
tgtagagttccaagggtaagagacc

SEQ ID NO: 2813877 - DNA, 25 bp, Homo sapien
gtgtagagttccaagggtaagagac

SEQ ID NO: 2813878 - DNA, 25 bp, Homo sapien
aggtagcactaggaaacagacctta

SEQ ID NO: 2813879 - DNA, 25 bp, Homo sapien
ttagattcatttgcttttaagaccc

SEQ ID NO: 2813880 - DNA, 25 bp, Homo sapien
cttcttaggctcaaataagagtatt

SEQ ID NO: 2813881 - DNA, 25 bp, Homo sapien
cttagttctcttcttaggctcaaat

SEQ ID NO: 2813882 - DNA, 25 bp, Homo sapien
acaataggacattgctggaaaaagt

SEQ ID NO: 2813883 - DNA, 25 bp, Homo sapien
caataggacattgctggaaaaagtt

SEQ ID NO: 2813884 - DNA, 25 bp, Homo sapien
tctctgtcgagtagaaaatcaccgg

SEQ ID NO: 2813885 - DNA, 25 bp, Homo sapien
tcaatctctgtcgagtagaaaatca

SEQ ID NO: 2813886 - DNA, 25 bp, Homo sapien
tcgagtagaaaatcaccggtttctg

SEQ ID NO: 2813887 - DNA, 25 bp, Homo sapien
aaatcaccggtttctgtggaagtag

SEQ ID NO: 2813888 - DNA, 25 bp, Homo sapien
gttaagatacaggttcctgatgaac

SEQ ID NO: 2813889 - DNA, 25 bp, Homo sapien
tactagggatccacttttgccacat

SEQ ID NO: 2813890 - DNA, 25 bp, Homo sapien
tattgaaagtgcatgtcaggatgga

SEQ ID NO: 2813891 - DNA, 25 bp, Homo sapien
ggtgagtgcacttgctggtgtctac

SEQ ID NO: 2813892 - DNA, 25 bp, Homo sapien
tttgccacataagcaatgtccctta

SEQ ID NO: 2813893 - DNA, 25 bp, Homo sapien
gcttacagccagtctctatcccaga

SEQ ID NO: 2813894 - DNA, 25 bp, Homo sapien
gaaattgctcaatttctgtgacgaa

SEQ ID NO: 2813895 - DNA, 25 bp, Homo sapien
ctctggtcatgttgagaaattgctc

SEQ ID NO: 2813896 - DNA, 25 bp, Homo sapien
aagggatctgcacgcttacagccag

SEQ ID NO: 2813897 - DNA, 25 bp, Homo sapien
taaggttccattgtccaaggttgtg

SEQ ID NO: 2813898 - DNA, 25 bp, Homo sapien
tgtgcctgtcagcttttccggagag

SEQ ID NO: 2813899 - DNA, 25 bp, Homo sapien
tcagcatgcctcctttaaggttcca

SEQ ID NO: 2813900 - DNA, 25 bp, Homo sapien
aagagacaatgaagtcagcatgcct

SEQ ID NO: 2813901 - DNA, 25 bp, Homo sapien
gactctccctcaaaacctactggag

SEQ ID NO: 2813902 - DNA, 25 bp, Homo sapien
cagaaactttgtcagactctccctc

SEQ ID NO: 2813903 - DNA, 25 bp, Homo sapien
aaactttgtcagactctccctcaaa

SEQ ID NO: 2813904 - DNA, 25 bp, Homo sapien
tccctcaaaacctactggagcctcc

SEQ ID NO: 2813905 - DNA, 25 bp, Homo sapien
tcttctcatgggatcatgcacaatg

SEQ ID NO: 2813906 - DNA, 25 bp, Homo sapien
tgaagctagtttataaagcaagtaa

SEQ ID NO: 2813907 - DNA, 25 bp, Homo sapien
gctgccaccttaatttggagattaa

SEQ ID NO: 2813908 - DNA, 25 bp, Homo sapien
cccaggaggagagataaattagtaa

SEQ ID NO: 2813909 - DNA, 25 bp, Homo sapien
tcaaccgcaaacagaatgtgctaca

SEQ ID NO: 2813910 - DNA, 25 bp, Homo sapien
tgtgctacacaaaatatcgttaagg

SEQ ID NO: 2813911 - DNA, 25 bp, Homo sapien
catacaaagtataaccaagggcttg

SEQ ID NO: 2813912 - DNA, 25 bp, Homo sapien
taattgccaaccactagggctaagg

SEQ ID NO: 2813913 - DNA, 25 bp, Homo sapien
gaatatttcacaatcagctgcctga

SEQ ID NO: 2813914 - DNA, 25 bp, Homo sapien
tatactaaaaatggtccggctgcgg

SEQ ID NO: 2813915 - DNA, 25 bp, Homo sapien
cagtgcagaccctgaagatgttagc

SEQ ID NO: 2813916 - DNA, 25 bp, Homo sapien
gagcattgccaagtacagggttaaa

SEQ ID NO: 2813917 - DNA, 25 bp, Homo sapien
tacaatttctgatagataagaggtt

SEQ ID NO: 2813918 - DNA, 25 bp, Homo sapien
gaactgtactactgtgaatatcctt

SEQ ID NO: 2813919 - DNA, 25 bp, Homo sapien
gctatcagtctcctatacgcattag

SEQ ID NO: 2813920 - DNA, 25 bp, Homo sapien
acttacttagagacacatacattct

SEQ ID NO: 2813921 - DNA, 25 bp, Homo sapien
caaagtacaagtgagaatgcagagc

SEQ ID NO: 2813922 - DNA, 25 bp, Homo sapien
aacctcttgaaattaatcatctctg

SEQ ID NO: 2813923 - DNA, 25 bp, Homo sapien
tacagaaaatatcggtcaattaaat

SEQ ID NO: 2813924 - DNA, 25 bp, Homo sapien
cagaaaactggcctattggtcaatt

SEQ ID NO: 2813925 - DNA, 25 bp, Homo sapien
gctggtaccttctacaccactggaa

SEQ ID NO: 2813926 - DNA, 25 bp, Homo sapien
taacatggaggtttagagccgtgca

SEQ ID NO: 2813927 - DNA, 25 bp, Homo sapien
aaattcatgatcagactcagagtcc

SEQ ID NO: 2813928 - DNA, 25 bp, Homo sapien
cagagtcctgactgaagcatttact

SEQ ID NO: 2813929 - DNA, 25 bp, Homo sapien
tcattgctcaaactgcttccatctt

SEQ ID NO: 2813930 - DNA, 25 bp, Homo sapien
cattgctcaaactgcttccatcttg

SEQ ID NO: 2813931 - DNA, 25 bp, Homo sapien
ggttcctcttctaatatgcttggtg

SEQ ID NO: 2813932 - DNA, 25 bp, Homo sapien
gtctgagttgcgttcctggggttcc

SEQ ID NO: 2813933 - DNA, 25 bp, Homo sapien
tattcttagtggaagtggcacttac

SEQ ID NO: 2813934 - DNA, 25 bp, Homo sapien
gagtgcactgttggatcttgtaaac

SEQ ID NO: 2813935 - DNA, 25 bp, Homo sapien
gctggtagtcgatttctcatgaacg

SEQ ID NO: 2813936 - DNA, 25 bp, Homo sapien
tgaaacccagccgtgttttggatcc

SEQ ID NO: 2813937 - DNA, 25 bp, Homo sapien
tttagagctcctctattatgtagca

SEQ ID NO: 2813938 - DNA, 25 bp, Homo sapien
ttcctgttgtcagttttagagctcc

SEQ ID NO: 2813939 - DNA, 25 bp, Homo sapien
ttgaattctaatggcattctgtgag

SEQ ID NO: 2813940 - DNA, 25 bp, Homo sapien
cctctattatgtagcacatttaatg

SEQ ID NO: 2813941 - DNA, 25 bp, Homo sapien
aataatgatatttgaccgcttttcc

SEQ ID NO: 2813942 - DNA, 25 bp, Homo sapien
tttgataggaactttgttggtcagc

SEQ ID NO: 2813943 - DNA, 25 bp, Homo sapien
acctgtgctgggtcttttgatagga

SEQ ID NO: 2813944 - DNA, 25 bp, Homo sapien
caagtgtatacatgagaagacctgt

SEQ ID NO: 2813945 - DNA, 25 bp, Homo sapien
gaatttagacacacatagagcatat

SEQ ID NO: 2813946 - DNA, 25 bp, Homo sapien
aatttagacacacatagagcatatc

SEQ ID NO: 2813947 - DNA, 25 bp, Homo sapien
tactggatagaaacacaggcaacct

SEQ ID NO: 2813948 - DNA, 25 bp, Homo sapien
agtatttcttgccacacaccctggc

SEQ ID NO: 2813949 - DNA, 25 bp, Homo sapien
gagctgactacatatgccaatgtgg

SEQ ID NO: 2813950 - DNA, 25 bp, Homo sapien
tctgccagtgatgatggctaagcca

SEQ ID NO: 2813951 - DNA, 25 bp, Homo sapien
tctctggagacttatgtatctcagt

SEQ ID NO: 2813952 - DNA, 25 bp, Homo sapien
tcagtgacagctgcattgccacaat

SEQ ID NO: 2813953 - DNA, 25 bp, Homo sapien
tgccacaatatgctgaagtgctcat

SEQ ID NO: 2813954 - DNA, 25 bp, Homo sapien
ttctctggagacttatgtatctcag

SEQ ID NO: 2813955 - DNA, 25 bp, Homo sapien
aaataacgacgaattctgatgcagg

SEQ ID NO: 2813956 - DNA, 25 bp, Homo sapien
tgaaataacgacgaattctgatgca

SEQ ID NO: 2813957 - DNA, 25 bp, Homo sapien
tatgaaataacgacgaattctgatg

SEQ ID NO: 2813958 - DNA, 25 bp, Homo sapien
ataacgacgaattctgatgcaggca

SEQ ID NO: 2813959 - DNA, 25 bp, Homo sapien
gaaggacaggatgtcagtgcctaga

SEQ ID NO: 2813960 - DNA, 25 bp, Homo sapien
caaagcggtacatgggactgtgaag

SEQ ID NO: 2813961 - DNA, 25 bp, Homo sapien
gaaacatttactagcacacactgcc

SEQ ID NO: 2813962 - DNA, 25 bp, Homo sapien
tctctactggtgaaatgtggcctac

SEQ ID NO: 2813963 - DNA, 25 bp, Homo sapien
tagactgctaacgaatacacatcaa

SEQ ID NO: 2813964 - DNA, 25 bp, Homo sapien
catccacattataaacttcctagca

SEQ ID NO: 2813965 - DNA, 25 bp, Homo sapien
gatgcttagaagctattctctggca

SEQ ID NO: 2813966 - DNA, 25 bp, Homo sapien
caatgttacattacttagactgcta

SEQ ID NO: 2813967 - DNA, 25 bp, Homo sapien
tgctctgcagatgtcagctgaaagc

SEQ ID NO: 2813968 - DNA, 25 bp, Homo sapien
ttgccagaaaagatcttgattttgc

SEQ ID NO: 2813969 - DNA, 25 bp, Homo sapien
caatttgccagaaaagatcttgatt

SEQ ID NO: 2813970 - DNA, 25 bp, Homo sapien
ttgctctgcagatgtcagctgaaag

SEQ ID NO: 2813971 - DNA, 25 bp, Homo sapien
taactgtgccactaactgagtgtct

SEQ ID NO: 2813972 - DNA, 25 bp, Homo sapien
gtgagattggtctaaagagagctgc

SEQ ID NO: 2813973 - DNA, 25 bp, Homo sapien
tttggtcttatcagtgagacacagc

SEQ ID NO: 2813974 - DNA, 25 bp, Homo sapien
gagcagatgagactctgggctgcaa

SEQ ID NO: 2813975 - DNA, 25 bp, Homo sapien
cagaatcagaactttagctgcaagt

SEQ ID NO: 2813976 - DNA, 25 bp, Homo sapien
tatagcacagatggattccacaaag

SEQ ID NO: 2813977 - DNA, 25 bp, Homo sapien
gaactcagttgcttgatgctatagc

SEQ ID NO: 2813978 - DNA, 25 bp, Homo sapien
tgtaaagtagaatctgtgccatgct

SEQ ID NO: 2813979 - DNA, 25 bp, Homo sapien
tggtatttacgcattttattatctc

SEQ ID NO: 2813980 - DNA, 25 bp, Homo sapien
aagtttaggtggtgctcattgagac

SEQ ID NO: 2813981 - DNA, 25 bp, Homo sapien
tctctctccaatatttgaagtttag

SEQ ID NO: 2813982 - DNA, 25 bp, Homo sapien
tcattgagacgtaaagcctttccag

SEQ ID NO: 2813983 - DNA, 25 bp, Homo sapien
tatatattggcactatgtttgacat

SEQ ID NO: 2813984 - DNA, 25 bp, Homo sapien
tgacatacaaaacgtctaacaaagt

SEQ ID NO: 2813985 - DNA, 25 bp, Homo sapien
tcctgggcgggtacattaagtgata

SEQ ID NO: 2813986 - DNA, 25 bp, Homo sapien
aattcaagatggcatgtcaaacacc

SEQ ID NO: 2813987 - DNA, 25 bp, Homo sapien
gaatattcccatgtgtaaggacaaa

SEQ ID NO: 2813988 - DNA, 25 bp, Homo sapien
gacactcaaggatttaaacagtctt

SEQ ID NO: 2813989 - DNA, 25 bp, Homo sapien
gaacctgtttaggaagttacagaga

SEQ ID NO: 2813990 - DNA, 25 bp, Homo sapien
tcttcaaaattctctacgtcagtgt

SEQ ID NO: 2813991 - DNA, 25 bp, Homo sapien
ttagttagaattgttcaaatcctct

SEQ ID NO: 2813992 - DNA, 25 bp, Homo sapien
acatatgtgagcttgaatttaagaa

SEQ ID NO: 2813993 - DNA, 25 bp, Homo sapien
aaaatacatatgtgagcttgaattt

SEQ ID NO: 2813994 - DNA, 25 bp, Homo sapien
ctgaagaaataccagtaaaaaagtg

SEQ ID NO: 2813995 - DNA, 25 bp, Homo sapien
ctgcactgggcccaaaattgctcca

SEQ ID NO: 2813996 - DNA, 25 bp, Homo sapien
caacacttggttattactagtcaaa

SEQ ID NO: 2813997 - DNA, 25 bp, Homo sapien
taagtataatcatcccaccaaagta

SEQ ID NO: 2813998 - DNA, 25 bp, Homo sapien
ggtcagaagtttggccttgttgctc

SEQ ID NO: 2813999 - DNA, 25 bp, Homo sapien
gaagttgcctttcacacgtacacca

SEQ ID NO: 2814000 - DNA, 25 bp, Homo sapien
cattcctttcaccagtggtcagaag

SEQ ID NO: 2814001 - DNA, 25 bp, Homo sapien
tatctgtaaaaacccatgtgtattc

SEQ ID NO: 2814002 - DNA, 25 bp, Homo sapien
tttggttttggtattggattgagaa

SEQ ID NO: 2814003 - DNA, 25 bp, Homo sapien
tggttttggtattggattgagaaat

SEQ ID NO: 2814004 - DNA, 25 bp, Homo sapien
aaaatgcactactgcagtcactcct

SEQ ID NO: 2814005 - DNA, 25 bp, Homo sapien
aaatgcactactgcagtcactcctc

SEQ ID NO: 2814006 - DNA, 25 bp, Homo sapien
ttcatagagcataaactcaattccc

SEQ ID NO: 2814007 - DNA, 25 bp, Homo sapien
gaaactatctagagatttaaacagg

SEQ ID NO: 2814008 - DNA, 25 bp, Homo sapien
tgcaggaaattatctcaggaacaaa

SEQ ID NO: 2814009 - DNA, 25 bp, Homo sapien
gacatctaactgtgcttcatagagc

SEQ ID NO: 2814010 - DNA, 25 bp, Homo sapien
cagcacttctgttgtagtttcccta

SEQ ID NO: 2814011 - DNA, 25 bp, Homo sapien
taaggcattttatcgcagccagcct

SEQ ID NO: 2814012 - DNA, 25 bp, Homo sapien
ggctacagatgggacttaattgctc

SEQ ID NO: 2814013 - DNA, 25 bp, Homo sapien
cactactaggcctcttggctacaga

SEQ ID NO: 2814014 - DNA, 25 bp, Homo sapien
catgaataagtctcaatgacggata

SEQ ID NO: 2814015 - DNA, 25 bp, Homo sapien
cagcatgaataagtctcaatgacgg

SEQ ID NO: 2814016 - DNA, 25 bp, Homo sapien
cctctgacagcatgaataagtctca

SEQ ID NO: 2814017 - DNA, 25 bp, Homo sapien
ctgacagcatgaataagtctcaatg

SEQ ID NO: 2814018 - DNA, 25 bp, Homo sapien
ggcagttcgcactttcagtttattc

SEQ ID NO: 2814019 - DNA, 25 bp, Homo sapien
tcctcctttgaccatgaaagcagga

SEQ ID NO: 2814020 - DNA, 25 bp, Homo sapien
cattcagcatggaaagtctatgcac

SEQ ID NO: 2814021 - DNA, 25 bp, Homo sapien
agcaggaatccaaaggacactgtca

SEQ ID NO: 2814022 - DNA, 25 bp, Homo sapien
cccacatctgcagcaaactccacca

SEQ ID NO: 2814023 - DNA, 25 bp, Homo sapien
caaactccaccacaggagctagatt

SEQ ID NO: 2814024 - DNA, 25 bp, Homo sapien
ctccaccacaggagctagattacac

SEQ ID NO: 2814025 - DNA, 25 bp, Homo sapien
taaaatctgatttagttcccacatc

SEQ ID NO: 2814026 - DNA, 25 bp, Homo sapien
taacagattcatactttgacctagc

SEQ ID NO: 2814027 - DNA, 25 bp, Homo sapien
tgacctagctgtaatgcctgatccc

SEQ ID NO: 2814028 - DNA, 25 bp, Homo sapien
tgagtcccagaaagacagttggttt

SEQ ID NO: 2814029 - DNA, 25 bp, Homo sapien
tctgatatcataaggtaggccaagg

SEQ ID NO: 2814030 - DNA, 25 bp, Homo sapien
tagtagccagggaaataatacaagg

SEQ ID NO: 2814031 - DNA, 25 bp, Homo sapien
gccacagggactgtcaactttatca

SEQ ID NO: 2814032 - DNA, 25 bp, Homo sapien
tattaaaagacactgctctaaccag

SEQ ID NO: 2814033 - DNA, 25 bp, Homo sapien
tctaaccagttgcttgccacaggga

SEQ ID NO: 2814034 - DNA, 25 bp, Homo sapien
cagttaataggttaatcaaacacac

SEQ ID NO: 2814035 - DNA, 25 bp, Homo sapien
gtattccagtatatcttcaagagac

SEQ ID NO: 2814036 - DNA, 25 bp, Homo sapien
gagactgtgtttttcaacatgtcaa

SEQ ID NO: 2814037 - DNA, 25 bp, Homo sapien
aatcttgttgctatgacaggatcac

SEQ ID NO: 2814038 - DNA, 25 bp, Homo sapien
ttgaccactgacacatctcgttctg

SEQ ID NO: 2814039 - DNA, 25 bp, Homo sapien
ggtgaaacttcaggtaggaggctat

SEQ ID NO: 2814040 - DNA, 25 bp, Homo sapien
gaatttccaacaactgcacaggtct

SEQ ID NO: 2814041 - DNA, 25 bp, Homo sapien
tgagaaatgtttagtgtccggcgcc

SEQ ID NO: 2814042 - DNA, 25 bp, Homo sapien
catatccaagaactgatggtgtcat

SEQ ID NO: 2814043 - DNA, 25 bp, Homo sapien
catcagcatatccaagaactgatgg

SEQ ID NO: 2814044 - DNA, 25 bp, Homo sapien
cagcatatccaagaactgatggtgt

SEQ ID NO: 2814045 - DNA, 25 bp, Homo sapien
taccatcagcatatccaagaactga

SEQ ID NO: 2814046 - DNA, 25 bp, Homo sapien
gagccagcctttcgaatgattttat

SEQ ID NO: 2814047 - DNA, 25 bp, Homo sapien
tatcagagctattgacaagtgaccg

SEQ ID NO: 2814048 - DNA, 25 bp, Homo sapien
tgctggaagattgaagagccagcct

SEQ ID NO: 2814049 - DNA, 25 bp, Homo sapien
caaccttctacattgtgctggaaga

SEQ ID NO: 2814050 - DNA, 25 bp, Homo sapien
gccagctttgtgaaagtaagaaaca

SEQ ID NO: 2814051 - DNA, 25 bp, Homo sapien
ccagctttgtgaaagtaagaaacat

SEQ ID NO: 2814052 - DNA, 25 bp, Homo sapien
tgccagctttgtgaaagtaagaaac

SEQ ID NO: 2814053 - DNA, 25 bp, Homo sapien
tgctctccagggtcccagccaaggg

SEQ ID NO: 2814054 - DNA, 25 bp, Homo sapien
cagccaagggcccgaaccctcggag

SEQ ID NO: 2814055 - DNA, 25 bp, Homo sapien
tccagggtcccagccaagggcccga

SEQ ID NO: 2814056 - DNA, 25 bp, Homo sapien
tcctgctctccagggtcccagccaa

SEQ ID NO: 2814057 - DNA, 25 bp, Homo sapien
aaaatataaactgggcaggcatctc

SEQ ID NO: 2814058 - DNA, 25 bp, Homo sapien
cacaaagttgcaccacctcctgggt

SEQ ID NO: 2814059 - DNA, 25 bp, Homo sapien
cagggaggatttccgaaacaggact

SEQ ID NO: 2814060 - DNA, 25 bp, Homo sapien
tagtttctgatagaggacgcctcca

SEQ ID NO: 2814061 - DNA, 25 bp, Homo sapien
aaccacgcgcaagctcaaacaaaca

SEQ ID NO: 2814062 - DNA, 25 bp, Homo sapien
cagcctttgttatttaattcatgac

SEQ ID NO: 2814063 - DNA, 25 bp, Homo sapien
aacaaacacacatgctatcctaacc

SEQ ID NO: 2814064 - DNA, 25 bp, Homo sapien
tcacatttcatttatggcttgactt

SEQ ID NO: 2814065 - DNA, 25 bp, Homo sapien
agcagacttattgtgcagatcgtcc

SEQ ID NO: 2814066 - DNA, 25 bp, Homo sapien
gatcaggagcagacttattgtgcag

SEQ ID NO: 2814067 - DNA, 25 bp, Homo sapien
aagatcaggagcagacttattgtgc

SEQ ID NO: 2814068 - DNA, 25 bp, Homo sapien
caggagcagacttattgtgcagatc

SEQ ID NO: 2814069 - DNA, 25 bp, Homo sapien
agctcccgcaccttctcttgatata

SEQ ID NO: 2814070 - DNA, 25 bp, Homo sapien
cgcaccttctcttgatataaaggct

SEQ ID NO: 2814071 - DNA, 25 bp, Homo sapien
tcttgatataaaggctccgttttgg

SEQ ID NO: 2814072 - DNA, 25 bp, Homo sapien
ccttctcttgatataaaggctccgt

SEQ ID NO: 2814073 - DNA, 25 bp, Homo sapien
aggagagcttggagccgggatcccg

SEQ ID NO: 2814074 - DNA, 25 bp, Homo sapien
gagctccctctggtcctcgaacgct

SEQ ID NO: 2814075 - DNA, 25 bp, Homo sapien
tggccgagctccctctggtcctcga

SEQ ID NO: 2814076 - DNA, 25 bp, Homo sapien
ccgagctccctctggtcctcgaacg

SEQ ID NO: 2814077 - DNA, 25 bp, Homo sapien
agctccctctggtcctcgaacgctg

SEQ ID NO: 2814078 - DNA, 25 bp, Homo sapien
agacaccttgtgcattggaggtggc

SEQ ID NO: 2814079 - DNA, 25 bp, Homo sapien
tgctaggagataaacgctgcgcaaa

SEQ ID NO: 2814080 - DNA, 25 bp, Homo sapien
acgctgcgcaaagccaatcaccagg

SEQ ID NO: 2814081 - DNA, 25 bp, Homo sapien
tcttttcagatgagacaccttgtgc

SEQ ID NO: 2814082 - DNA, 25 bp, Homo sapien
ggtggcagggacacttttcaagagt

SEQ ID NO: 2814083 - DNA, 25 bp, Homo sapien
tgttcgattgttcactctgagtacc

SEQ ID NO: 2814084 - DNA, 25 bp, Homo sapien
caagagttctgtgttcgattgttca

SEQ ID NO: 2814085 - DNA, 25 bp, Homo sapien
tttcgtacttgtattgggtggcagg

SEQ ID NO: 2814086 - DNA, 25 bp, Homo sapien
tgtctctcatactgtccaatccaat

SEQ ID NO: 2814087 - DNA, 25 bp, Homo sapien
tgtccaatccaatcacccacttaat

SEQ ID NO: 2814088 - DNA, 25 bp, Homo sapien
gatcttttgtctctcatactgtcca

SEQ ID NO: 2814089 - DNA, 25 bp, Homo sapien
cataggatcttttgtctctcatact

SEQ ID NO: 2814090 - DNA, 25 bp, Homo sapien
tcacattttcagaaggtggtggaat

SEQ ID NO: 2814091 - DNA, 25 bp, Homo sapien
ctcacattttcagaaggtggtggaa

SEQ ID NO: 2814092 - DNA, 25 bp, Homo sapien
aggtggtggaatgagtttctcagtc

SEQ ID NO: 2814093 - DNA, 25 bp, Homo sapien
tcagtacctggagtgtgctggttat

SEQ ID NO: 2814094 - DNA, 25 bp, Homo sapien
cctggagtgtgctggttatgtgcca

SEQ ID NO: 2814095 - DNA, 25 bp, Homo sapien
ctttcagtacctggagtgtgctggt

SEQ ID NO: 2814096 - DNA, 25 bp, Homo sapien
ctggagtgtgctggttatgtgccat

SEQ ID NO: 2814097 - DNA, 25 bp, Homo sapien
caagccttgcgatggagtccagttt

SEQ ID NO: 2814098 - DNA, 25 bp, Homo sapien
gagatccaagccacacttaatgtcg

SEQ ID NO: 2814099 - DNA, 25 bp, Homo sapien
tctggttcagagagatccaagccac

SEQ ID NO: 2814100 - DNA, 25 bp, Homo sapien
tcgtctatgtgactatgagttcttc

SEQ ID NO: 2814101 - DNA, 25 bp, Homo sapien
tatacatagggttacaacgtccacg

SEQ ID NO: 2814102 - DNA, 25 bp, Homo sapien
catattgatggaactctggctatac

SEQ ID NO: 2814103 - DNA, 25 bp, Homo sapien
taatagtttgccaggacttccttgg

SEQ ID NO: 2814104 - DNA, 25 bp, Homo sapien
tctatttatgcagaggctgagacag

SEQ ID NO: 2814105 - DNA, 25 bp, Homo sapien
gccatctctactaaaaaaatacaaa

SEQ ID NO: 2814106 - DNA, 25 bp, Homo sapien
acgaggtgaggagatggagaccacg

SEQ ID NO: 2814107 - DNA, 25 bp, Homo sapien
aaaaaattagccaggcgcggtggcg

SEQ ID NO: 2814108 - DNA, 25 bp, Homo sapien
gagaccacggtgaaacgccatctct

SEQ ID NO: 2814109 - DNA, 25 bp, Homo sapien
ctgccagggccttatgctcaatatc

SEQ ID NO: 2814110 - DNA, 25 bp, Homo sapien
gggccttatgctcaatatcctgaga

SEQ ID NO: 2814111 - DNA, 25 bp, Homo sapien
tatgatggagcgcatttaatccatc

SEQ ID NO: 2814112 - DNA, 25 bp, Homo sapien
tatcctgagagatatgatggagcgc

SEQ ID NO: 2814113 - DNA, 25 bp, Homo sapien
ttgtctgtgacaaccgttttctgta

SEQ ID NO: 2814114 - DNA, 25 bp, Homo sapien
gctttgtcgtttcactgtttgtctg

SEQ ID NO: 2814115 - DNA, 25 bp, Homo sapien
ctgtgacaaccgttttctgtattta

SEQ ID NO: 2814116 - DNA, 25 bp, Homo sapien
ggcaatctagaatgtttaggctttg

SEQ ID NO: 2814117 - DNA, 25 bp, Homo sapien
gctggtagtgttcaacagtgtgtct

SEQ ID NO: 2814118 - DNA, 25 bp, Homo sapien
ggctggtagtgttcaacagtgtgtc

SEQ ID NO: 2814119 - DNA, 25 bp, Homo sapien
gaagagtttgtgatgccagacacat

SEQ ID NO: 2814120 - DNA, 25 bp, Homo sapien
gagttcagaagagtttgtgatgcca

SEQ ID NO: 2814121 - DNA, 25 bp, Homo sapien
tgcaaaattgctgccctagtttcaa

SEQ ID NO: 2814122 - DNA, 25 bp, Homo sapien
gactttctttctcgtactttataca

SEQ ID NO: 2814123 - DNA, 25 bp, Homo sapien
caacacaattgcaaaattgctgccc

SEQ ID NO: 2814124 - DNA, 25 bp, Homo sapien
cgtactttatacaacacaattgcaa

SEQ ID NO: 2814125 - DNA, 25 bp, Homo sapien
gaatgcttgtgccagtaacagcact

SEQ ID NO: 2814126 - DNA, 25 bp, Homo sapien
tgtgcccctgtgaataagcagtgct

SEQ ID NO: 2814127 - DNA, 25 bp, Homo sapien
caagtctccctatgtgttaatgaac

SEQ ID NO: 2814128 - DNA, 25 bp, Homo sapien
taatgaacagaggtatttccagtcc

SEQ ID NO: 2814129 - DNA, 25 bp, Homo sapien
gctgcgttattgatttcattctcag

SEQ ID NO: 2814130 - DNA, 25 bp, Homo sapien
gggctgcgttattgatttcattctc

SEQ ID NO: 2814131 - DNA, 25 bp, Homo sapien
ggctgcgttattgatttcattctca

SEQ ID NO: 2814132 - DNA, 25 bp, Homo sapien
tgcgttattgatttcattctcagtt

SEQ ID NO: 2814133 - DNA, 25 bp, Homo sapien
cagcatgtatagaatgacaataaga

SEQ ID NO: 2814134 - DNA, 25 bp, Homo sapien
gcttgaacagcatgtatagaatgac

SEQ ID NO: 2814135 - DNA, 25 bp, Homo sapien
ggagagggatatgtgatagaatcat

SEQ ID NO: 2814136 - DNA, 25 bp, Homo sapien
tagaatcatttgttgcttgaacagc

SEQ ID NO: 2814137 - DNA, 25 bp, Homo sapien
ccagtcacttaaatctgatgcatta

SEQ ID NO: 2814138 - DNA, 25 bp, Homo sapien
tgagattaaactcagtggataccag

SEQ ID NO: 2814139 - DNA, 25 bp, Homo sapien
aatctgatgcattatatccccggac

SEQ ID NO: 2814140 - DNA, 25 bp, Homo sapien
cggacattgacgctaaattcagaag

SEQ ID NO: 2814141 - DNA, 25 bp, Homo sapien
tttaactctccaagtatagacacac

SEQ ID NO: 2814142 - DNA, 25 bp, Homo sapien
atttaactctccaagtatagacaca

SEQ ID NO: 2814143 - DNA, 25 bp, Homo sapien
gcttcctgctaaacaaggtatgtct

SEQ ID NO: 2814144 - DNA, 25 bp, Homo sapien
gctaaacaaggtatgtcttcagcat

SEQ ID NO: 2814145 - DNA, 25 bp, Homo sapien
tcctgctaaacaaggtatgtcttca

SEQ ID NO: 2814146 - DNA, 25 bp, Homo sapien
taaacaaggtatgtcttcagcatcc

SEQ ID NO: 2814147 - DNA, 25 bp, Homo sapien
tagccaccacactgcaacgtgagca

SEQ ID NO: 2814148 - DNA, 25 bp, Homo sapien
cacggagaccggcaatctgcctttc

SEQ ID NO: 2814149 - DNA, 25 bp, Homo sapien
ttctgaacagccagcccacggagac

SEQ ID NO: 2814150 - DNA, 25 bp, Homo sapien
ccaccccactacaggtgacgtgtag

SEQ ID NO: 2814151 - DNA, 25 bp, Homo sapien
tgacaatttcatttgcggcacagag

SEQ ID NO: 2814152 - DNA, 25 bp, Homo sapien
tgcctgacaatttcatttgcggcac

SEQ ID NO: 2814153 - DNA, 25 bp, Homo sapien
tttcatttgcggcacagagccctgc

SEQ ID NO: 2814154 - DNA, 25 bp, Homo sapien
acaatttcatttgcggcacagagcc

SEQ ID NO: 2814155 - DNA, 25 bp, Homo sapien
tggtcactggacaccgatttaatat

SEQ ID NO: 2814156 - DNA, 25 bp, Homo sapien
gaagggttcctagaagtgcataaaa

SEQ ID NO: 2814157 - DNA, 25 bp, Homo sapien
tatacagcttactgttgtcagttaa

SEQ ID NO: 2814158 - DNA, 25 bp, Homo sapien
taaattgttagtacatgtatacagc

SEQ ID NO: 2814159 - DNA, 25 bp, Homo sapien
agctttgtacattaatgtagggcat

SEQ ID NO: 2814160 - DNA, 25 bp, Homo sapien
tagctttgtacattaatgtagggca

SEQ ID NO: 2814161 - DNA, 25 bp, Homo sapien
ctagctttgtacattaatgtagggc

SEQ ID NO: 2814162 - DNA, 25 bp, Homo sapien
gctttgtacattaatgtagggcatt

SEQ ID NO: 2814163 - DNA, 25 bp, Homo sapien
ttgaatcttccatagcagtcaacca

SEQ ID NO: 2814164 - DNA, 25 bp, Homo sapien
gtcaaccaataacctttggagaaca

SEQ ID NO: 2814165 - DNA, 25 bp, Homo sapien
catagcagtcaaccaataacctttg

SEQ ID NO: 2814166 - DNA, 25 bp, Homo sapien
aatgttgcatttctgttaacattga

SEQ ID NO: 2814167 - DNA, 25 bp, Homo sapien
taaagctgaatatgttggatcaggc

SEQ ID NO: 2814168 - DNA, 25 bp, Homo sapien
ggtcaaacatcctttagtatgtgtg

SEQ ID NO: 2814169 - DNA, 25 bp, Homo sapien
catctgttcttgtgtgtggtctcct

SEQ ID NO: 2814170 - DNA, 25 bp, Homo sapien
ctgtgtctgataattggattgtgtc

SEQ ID NO: 2814171 - DNA, 25 bp, Homo sapien
tctgtgtaataagctgactcaaact

SEQ ID NO: 2814172 - DNA, 25 bp, Homo sapien
tggtcagttaaatccaaaacccaga

SEQ ID NO: 2814173 - DNA, 25 bp, Homo sapien
catttcctttatagtgtgcaacaac

SEQ ID NO: 2814174 - DNA, 25 bp, Homo sapien
acctggcggtttccctaattctgtg

SEQ ID NO: 2814175 - DNA, 25 bp, Homo sapien
tattctggcacttcatgatatctga

SEQ ID NO: 2814176 - DNA, 25 bp, Homo sapien
tgatatctgataagagttggaccct

SEQ ID NO: 2814177 - DNA, 25 bp, Homo sapien
tgttcactgttcactttaggaccca

SEQ ID NO: 2814178 - DNA, 25 bp, Homo sapien
cttgaacctaattgcatatgccttg

SEQ ID NO: 2814179 - DNA, 25 bp, Homo sapien
gatcataattatcggtgcctgcatc

SEQ ID NO: 2814180 - DNA, 25 bp, Homo sapien
cataattatcggtgcctgcatcttc

SEQ ID NO: 2814181 - DNA, 25 bp, Homo sapien
ggatcataattatcggtgcctgcat

SEQ ID NO: 2814182 - DNA, 25 bp, Homo sapien
ctggatcataattatcggtgcctgc

SEQ ID NO: 2814183 - DNA, 25 bp, Homo sapien
tgttaagtgccatagggtacacaga

SEQ ID NO: 2814184 - DNA, 25 bp, Homo sapien
tagggtacacagattctttaagcat

SEQ ID NO: 2814185 - DNA, 25 bp, Homo sapien
gccatagggtacacagattctttaa

SEQ ID NO: 2814186 - DNA, 25 bp, Homo sapien
tagatatgcctgttaagtgccatag

SEQ ID NO: 2814187 - DNA, 25 bp, Homo sapien
ttagaaaatcggaaacactgtgttg

SEQ ID NO: 2814188 - DNA, 25 bp, Homo sapien
gctgaagatactctcatctgtggag

SEQ ID NO: 2814189 - DNA, 25 bp, Homo sapien
ggaatccacaatcctacactgtctg

SEQ ID NO: 2814190 - DNA, 25 bp, Homo sapien
aagtggttgccgctaaagttgatgc

SEQ ID NO: 2814191 - DNA, 25 bp, Homo sapien
cattcgagatactaggggtggtagc

SEQ ID NO: 2814192 - DNA, 25 bp, Homo sapien
ggtggtagcaagagtggccatacat

SEQ ID NO: 2814193 - DNA, 25 bp, Homo sapien
agtgctgtgattagaatacttgcat

SEQ ID NO: 2814194 - DNA, 25 bp, Homo sapien
gagtggccatacataccattacccc

SEQ ID NO: 2814195 - DNA, 25 bp, Homo sapien
aaattcaggcaatcttgcatgttac

SEQ ID NO: 2814196 - DNA, 25 bp, Homo sapien
ttcactcctactattgaccaaattc

SEQ ID NO: 2814197 - DNA, 25 bp, Homo sapien
cctactattgaccaaattcaggcaa

SEQ ID NO: 2814198 - DNA, 25 bp, Homo sapien
ccaaattcaggcaatcttgcatgtt

SEQ ID NO: 2814199 - DNA, 25 bp, Homo sapien
ttcctctttatgccattgtccttca

SEQ ID NO: 2814200 - DNA, 25 bp, Homo sapien
tcctctttatgccattgtccttcat

SEQ ID NO: 2814201 - DNA, 25 bp, Homo sapien
ccttcctctttatgccattgtcctt

SEQ ID NO: 2814202 - DNA, 25 bp, Homo sapien
cttcctctttatgccattgtccttc

SEQ ID NO: 2814203 - DNA, 25 bp, Homo sapien
ggattttcaaagatcgttccatcca

SEQ ID NO: 2814204 - DNA, 25 bp, Homo sapien
tggattttcaaagatcgttccatcc

SEQ ID NO: 2814205 - DNA, 25 bp, Homo sapien
gattttcaaagatcgttccatccat

SEQ ID NO: 2814206 - DNA, 25 bp, Homo sapien
tcaaatcagttattgggtaccataa

SEQ ID NO: 2814207 - DNA, 25 bp, Homo sapien
gaaataactaaaagatgaccctcat

SEQ ID NO: 2814208 - DNA, 25 bp, Homo sapien
tatgttctcaccatccagtgcagag

SEQ ID NO: 2814209 - DNA, 25 bp, Homo sapien
tcaagaaaattatatggccaccctc

SEQ ID NO: 2814210 - DNA, 25 bp, Homo sapien
tagcctactcagtcttaggatgcaa

SEQ ID NO: 2814211 - DNA, 25 bp, Homo sapien
taggatgcaaacacccatcttctgc

SEQ ID NO: 2814212 - DNA, 25 bp, Homo sapien
gctaaagcagctcatgttaaacaga

SEQ ID NO: 2814213 - DNA, 25 bp, Homo sapien
gattcatagtcctagagatggagaa

SEQ ID NO: 2814214 - DNA, 25 bp, Homo sapien
cactggccctgacacaatgcagtca

SEQ ID NO: 2814215 - DNA, 25 bp, Homo sapien
tctagtcggtaagtataagggcaca

SEQ ID NO: 2814216 - DNA, 25 bp, Homo sapien
cacatgaggtctgctagatggcttc

SEQ ID NO: 2814217 - DNA, 25 bp, Homo sapien
aaagtataaactggctcgtcctgtc

SEQ ID NO: 2814218 - DNA, 25 bp, Homo sapien
caatcccggagtactcttctgccac

SEQ ID NO: 2814219 - DNA, 25 bp, Homo sapien
cagaccctttcactgaaatccgtga

SEQ ID NO: 2814220 - DNA, 25 bp, Homo sapien
cagcttatggctgtggtctcagacc

SEQ ID NO: 2814221 - DNA, 25 bp, Homo sapien
tgattccctggtcgcaaaccacaga

SEQ ID NO: 2814222 - DNA, 25 bp, Homo sapien
gtctttatgatttggcctgttttgc

SEQ ID NO: 2814223 - DNA, 25 bp, Homo sapien
caatagtctttatgatttggcctgt

SEQ ID NO: 2814224 - DNA, 25 bp, Homo sapien
catcaatagtctttatgatttggcc

SEQ ID NO: 2814225 - DNA, 25 bp, Homo sapien
tagcatcaatagtctttatgatttg

SEQ ID NO: 2814226 - DNA, 25 bp, Homo sapien
ggcaggagtgcatcagtctttggta

SEQ ID NO: 2814227 - DNA, 25 bp, Homo sapien
caggagtgcatcagtctttggtaat

SEQ ID NO: 2814228 - DNA, 25 bp, Homo sapien
ctttggtaatccatgtgtcttgtaa

SEQ ID NO: 2814229 - DNA, 25 bp, Homo sapien
agtctttggtaatccatgtgtcttg

SEQ ID NO: 2814230 - DNA, 25 bp, Homo sapien
taatcgttgagcctgtgtcagacct

SEQ ID NO: 2814231 - DNA, 25 bp, Homo sapien
cctgtgtcagacctggaagttttct

SEQ ID NO: 2814232 - DNA, 25 bp, Homo sapien
cgttgagcctgtgtcagacctggaa

SEQ ID NO: 2814233 - DNA, 25 bp, Homo sapien
gggaataatcgttgagcctgtgtca

SEQ ID NO: 2814234 - DNA, 25 bp, Homo sapien
ccaacagccgaagcagattttaagc

SEQ ID NO: 2814235 - DNA, 25 bp, Homo sapien
gatcagtgcaaattctacagccaaa

SEQ ID NO: 2814236 - DNA, 25 bp, Homo sapien
ccaaactcaatgtcagtaggataga

SEQ ID NO: 2814237 - DNA, 25 bp, Homo sapien
catggaagacaggaatttaactggc

SEQ ID NO: 2814238 - DNA, 25 bp, Homo sapien
tggcagccatggacaatttggagag

SEQ ID NO: 2814239 - DNA, 25 bp, Homo sapien
gccatggacaatttggagagtaaga

SEQ ID NO: 2814240 - DNA, 25 bp, Homo sapien
ccatggacaatttggagagtaagaa

SEQ ID NO: 2814241 - DNA, 25 bp, Homo sapien
ggcagccatggacaatttggagagt

SEQ ID NO: 2814242 - DNA, 25 bp, Homo sapien
gataatgagcaggtttccaagcact

SEQ ID NO: 2814243 - DNA, 25 bp, Homo sapien
aatgagcaggtttccaagcactgtg

SEQ ID NO: 2814244 - DNA, 25 bp, Homo sapien
ttccaagcactgtgaccaggttcat

SEQ ID NO: 2814245 - DNA, 25 bp, Homo sapien
ggtttccaagcactgtgaccaggtt

SEQ ID NO: 2814246 - DNA, 25 bp, Homo sapien
tgaaaattctgcaaggtgttctgat

SEQ ID NO: 2814247 - DNA, 25 bp, Homo sapien
gttctgattgcatgtagctggcatg

SEQ ID NO: 2814248 - DNA, 25 bp, Homo sapien
ttctgattgcatgtagctggcatgt

SEQ ID NO: 2814249 - DNA, 25 bp, Homo sapien
cagtttcactgaaatattcataatg

SEQ ID NO: 2814250 - DNA, 25 bp, Homo sapien
agtttcactgaaatattcataatgt

SEQ ID NO: 2814251 - DNA, 25 bp, Homo sapien
tcagtttcactgaaatattcataat

SEQ ID NO: 2814252 - DNA, 25 bp, Homo sapien
tatataacctagtgagaaacagttg

SEQ ID NO: 2814253 - DNA, 25 bp, Homo sapien
cttattataaagtgtacagcagttc

SEQ ID NO: 2814254 - DNA, 25 bp, Homo sapien
caaatgagccggaatagccaataca

SEQ ID NO: 2814255 - DNA, 25 bp, Homo sapien
aagaagatccacataaatgcagcaa

SEQ ID NO: 2814256 - DNA, 25 bp, Homo sapien
gagatgtgcccttgcggagacagta

SEQ ID NO: 2814257 - DNA, 25 bp, Homo sapien
gaacctccatcatgttgagaaagaa

SEQ ID NO: 2814258 - DNA, 25 bp, Homo sapien
aatctgccaactcattagctactgg

SEQ ID NO: 2814259 - DNA, 25 bp, Homo sapien
cctgctgacattctgtgctggaata

SEQ ID NO: 2814260 - DNA, 25 bp, Homo sapien
gtgagttgctgccataatggcaaga

SEQ ID NO: 2814261 - DNA, 25 bp, Homo sapien
gaggcatctggtagtgtttccaaca

SEQ ID NO: 2814262 - DNA, 25 bp, Homo sapien
gagcagagctcctgctgcctaataa

SEQ ID NO: 2814263 - DNA, 25 bp, Homo sapien
aagaagtggcaatgtgtctgagagc

SEQ ID NO: 2814264 - DNA, 25 bp, Homo sapien
cacgaggtcggctgacaattgagtt

SEQ ID NO: 2814265 - DNA, 25 bp, Homo sapien
aattttacagagtgcacgaggtcgg

SEQ ID NO: 2814266 - DNA, 25 bp, Homo sapien
tgggcatgctacaagcatctttagt

SEQ ID NO: 2814267 - DNA, 25 bp, Homo sapien
acaattgagttgtgggcatgctaca

SEQ ID NO: 2814268 - DNA, 25 bp, Homo sapien
cagaagtgctcctgctgatgcctgc

SEQ ID NO: 2814269 - DNA, 25 bp, Homo sapien
tccagaagtgctcctgctgatgcct

SEQ ID NO: 2814270 - DNA, 25 bp, Homo sapien
gcctccagaagtgctcctgctgatg

SEQ ID NO: 2814271 - DNA, 25 bp, Homo sapien
gaagtgctcctgctgatgcctgcat

SEQ ID NO: 2814272 - DNA, 25 bp, Homo sapien
caggtattgatggaagaacttgtag

SEQ ID NO: 2814273 - DNA, 25 bp, Homo sapien
ttacttcacaaaacgttagtgttgc

SEQ ID NO: 2814274 - DNA, 25 bp, Homo sapien
tgcaggacggtgaatctatatctac

SEQ ID NO: 2814275 - DNA, 25 bp, Homo sapien
acttgtagtttcgtgttcagtctgg

SEQ ID NO: 2814276 - DNA, 25 bp, Homo sapien
tcaataatctcatttgctacagtaa

SEQ ID NO: 2814277 - DNA, 25 bp, Homo sapien
ttcaataatctcatttgctacagta

SEQ ID NO: 2814278 - DNA, 25 bp, Homo sapien
tcaatgatcatcaaactgtgctcgg

SEQ ID NO: 2814279 - DNA, 25 bp, Homo sapien
tgatcatcaaactgtgctcggggga

SEQ ID NO: 2814280 - DNA, 25 bp, Homo sapien
caatgatcatcaaactgtgctcggg

SEQ ID NO: 2814281 - DNA, 25 bp, Homo sapien
tcatcaaactgtgctcgggggaacc

SEQ ID NO: 2814282 - DNA, 25 bp, Homo sapien
gggggatgaagccaagcttgcttct

SEQ ID NO: 2814283 - DNA, 25 bp, Homo sapien
gctttattattgggattccatatac

SEQ ID NO: 2814284 - DNA, 25 bp, Homo sapien
attattgggattccatatacaattg

SEQ ID NO: 2814285 - DNA, 25 bp, Homo sapien
tcagagtcctattgtgggggatgaa

SEQ ID NO: 2814286 - DNA, 25 bp, Homo sapien
tcctgttgctgttaggtctttcagg

SEQ ID NO: 2814287 - DNA, 25 bp, Homo sapien
ctgttgctgttaggtctttcaggcc

SEQ ID NO: 2814288 - DNA, 25 bp, Homo sapien
gttgctgttaggtctttcaggccac

SEQ ID NO: 2814289 - DNA, 25 bp, Homo sapien
ggagctacccctgatcaccagcaat

SEQ ID NO: 2814290 - DNA, 25 bp, Homo sapien
catttccacactggaaaagtggaca

SEQ ID NO: 2814291 - DNA, 25 bp, Homo sapien
aatattgccagcttaatcaaaacca

SEQ ID NO: 2814292 - DNA, 25 bp, Homo sapien
aacatttccacactggaaaagtgga

SEQ ID NO: 2814293 - DNA, 25 bp, Homo sapien
tgcaatattgccagcttaatcaaaa

SEQ ID NO: 2814294 - DNA, 25 bp, Homo sapien
aagctgctttgcagaggtagtaagg

SEQ ID NO: 2814295 - DNA, 25 bp, Homo sapien
tgcaatggcacataggtgtgcatgt

SEQ ID NO: 2814296 - DNA, 25 bp, Homo sapien
gtagtaaggttgtttgcaatggcac

SEQ ID NO: 2814297 - DNA, 25 bp, Homo sapien
cagaggtagtaaggttgtttgcaat

SEQ ID NO: 2814298 - DNA, 25 bp, Homo sapien
tgggtgatgcagtaatcttcattct

SEQ ID NO: 2814299 - DNA, 25 bp, Homo sapien
attcttcaatacccatgagaaagct

SEQ ID NO: 2814300 - DNA, 25 bp, Homo sapien
gaccccatacaacactgagcaatgg

SEQ ID NO: 2814301 - DNA, 25 bp, Homo sapien
acccaagtgtgtttctttcggcata

SEQ ID NO: 2814302 - DNA, 25 bp, Homo sapien
gttttagtaagatgcaacccaccag

SEQ ID NO: 2814303 - DNA, 25 bp, Homo sapien
acacacatagagactcagtgacaga

SEQ ID NO: 2814304 - DNA, 25 bp, Homo sapien
tatcacaaaagaccaatcatatgag

SEQ ID NO: 2814305 - DNA, 25 bp, Homo sapien
gatttgtgattataatttactgaag

SEQ ID NO: 2814306 - DNA, 25 bp, Homo sapien
ttatcaccactcagtttgatctgat

SEQ ID NO: 2814307 - DNA, 25 bp, Homo sapien
tactttgtgctttctacgagtttat

SEQ ID NO: 2814308 - DNA, 25 bp, Homo sapien
tgtgctttctacgagtttatcacca

SEQ ID NO: 2814309 - DNA, 25 bp, Homo sapien
tctacgagtttatcaccactcagtt

SEQ ID NO: 2814310 - DNA, 25 bp, Homo sapien
tttcaaaagctcgagtttctatgag

SEQ ID NO: 2814311 - DNA, 25 bp, Homo sapien
catccaagcctgattggatcatccc

SEQ ID NO: 2814312 - DNA, 25 bp, Homo sapien
ttctatgagagccttgaatttgttt

SEQ ID NO: 2814313 - DNA, 25 bp, Homo sapien
ggatcatcccaagcaacttttcaaa

SEQ ID NO: 2814314 - DNA, 25 bp, Homo sapien
gtgctctagacagaaagctcattta

SEQ ID NO: 2814315 - DNA, 25 bp, Homo sapien
cctgtaatgattgcatcactctctg

SEQ ID NO: 2814316 - DNA, 25 bp, Homo sapien
gggcattaaagtagcaagtgctcta

SEQ ID NO: 2814317 - DNA, 25 bp, Homo sapien
ggacagaaattacttctggactaca

SEQ ID NO: 2814318 - DNA, 25 bp, Homo sapien
atactgcctcccgtgttgttaaatg

SEQ ID NO: 2814319 - DNA, 25 bp, Homo sapien
ttaaatgttccttgacagatgaatg

SEQ ID NO: 2814320 - DNA, 25 bp, Homo sapien
tagagtgatgctgacctcattaagt

SEQ ID NO: 2814321 - DNA, 25 bp, Homo sapien
aatgtttagtataatgaagccatct

SEQ ID NO: 2814322 - DNA, 25 bp, Homo sapien
gccggaattccttcattaatataca

SEQ ID NO: 2814323 - DNA, 25 bp, Homo sapien
ttccaaatcttaattgcccactcag

SEQ ID NO: 2814324 - DNA, 25 bp, Homo sapien
ctttgcattttgatgccggaattcc

SEQ ID NO: 2814325 - DNA, 25 bp, Homo sapien
tccaaatcttaattgcccactcaga

SEQ ID NO: 2814326 - DNA, 25 bp, Homo sapien
aaagcactctggcgtaagtctgcat

SEQ ID NO: 2814327 - DNA, 25 bp, Homo sapien
acaaagcactctggcgtaagtctgc

SEQ ID NO: 2814328 - DNA, 25 bp, Homo sapien
tgacaaagcactctggcgtaagtct

SEQ ID NO: 2814329 - DNA, 25 bp, Homo sapien
ctgacaaagcactctggcgtaagtc

SEQ ID NO: 2814330 - DNA, 25 bp, Homo sapien
gggaagaagcgagaagctgtctttc

SEQ ID NO: 2814331 - DNA, 25 bp, Homo sapien
cctcagggaagaagcgagaagctgt

SEQ ID NO: 2814332 - DNA, 25 bp, Homo sapien
gctgtctttcattatgtgtgcacat

SEQ ID NO: 2814333 - DNA, 25 bp, Homo sapien
cagggaagaagcgagaagctgtctt

SEQ ID NO: 2814334 - DNA, 25 bp, Homo sapien
agtgcacatggacaacaaacaaggg

SEQ ID NO: 2814335 - DNA, 25 bp, Homo sapien
gaagctaatttgtgatactcctgaa

SEQ ID NO: 2814336 - DNA, 25 bp, Homo sapien
gcattagggcctacttgaaggtgga

SEQ ID NO: 2814337 - DNA, 25 bp, Homo sapien
caaacaagggaaacacaggcattag

SEQ ID NO: 2814338 - DNA, 25 bp, Homo sapien
gaccagcaacatgagtataacctac

SEQ ID NO: 2814339 - DNA, 25 bp, Homo sapien
aaaaatgcaagccagttggtaccat

SEQ ID NO: 2814340 - DNA, 25 bp, Homo sapien
catgagtataacctactgaagtgcc

SEQ ID NO: 2814341 - DNA, 25 bp, Homo sapien
taccatcaacaaagcattggctatg

SEQ ID NO: 2814342 - DNA, 25 bp, Homo sapien
ctgagatcagacaggatctggggca

SEQ ID NO: 2814343 - DNA, 25 bp, Homo sapien
atcagacaggatctggggcattcag

SEQ ID NO: 2814344 - DNA, 25 bp, Homo sapien
gacaggatctggggcattcagggtg

SEQ ID NO: 2814345 - DNA, 25 bp, Homo sapien
caggatctggggcattcagggtggt

SEQ ID NO: 2814346 - DNA, 25 bp, Homo sapien
tggcaacattttgttcataccacat

SEQ ID NO: 2814347 - DNA, 25 bp, Homo sapien
cattcctattcctctggcaacattt

SEQ ID NO: 2814348 - DNA, 25 bp, Homo sapien
cctgttcaatcttcattcctattcc

SEQ ID NO: 2814349 - DNA, 25 bp, Homo sapien
ctctggcaacattttgttcatacca

SEQ ID NO: 2814350 - DNA, 25 bp, Homo sapien
ctaagttgactggagaggtagaaca

SEQ ID NO: 2814351 - DNA, 25 bp, Homo sapien
tgactggagaggtagaacaggggtt

SEQ ID NO: 2814352 - DNA, 25 bp, Homo sapien
ctggagaggtagaacaggggttagg

SEQ ID NO: 2814353 - DNA, 25 bp, Homo sapien
taagttgactggagaggtagaacag

SEQ ID NO: 2814354 - DNA, 25 bp, Homo sapien
tacccaaagcttttatagccaacag

SEQ ID NO: 2814355 - DNA, 25 bp, Homo sapien
gtcacagtgggcattagctgtactg

SEQ ID NO: 2814356 - DNA, 25 bp, Homo sapien
tactgacagacacatacccaaagct

SEQ ID NO: 2814357 - DNA, 25 bp, Homo sapien
ggcattagctgtactgacagacaca

SEQ ID NO: 2814358 - DNA, 25 bp, Homo sapien
ttccagaagtacaaataatcttcat

SEQ ID NO: 2814359 - DNA, 25 bp, Homo sapien
tttccagaagtacaaataatcttca

SEQ ID NO: 2814360 - DNA, 25 bp, Homo sapien
cttttccagaagtacaaataatctt

SEQ ID NO: 2814361 - DNA, 25 bp, Homo sapien
ttttccagaagtacaaataatcttc

SEQ ID NO: 2814362 - DNA, 25 bp, Homo sapien
ggatgctcagggctaggctctttat

SEQ ID NO: 2814363 - DNA, 25 bp, Homo sapien
tgctcagggctaggctctttatcag

SEQ ID NO: 2814364 - DNA, 25 bp, Homo sapien
ctcagggctaggctctttatcagga

SEQ ID NO: 2814365 - DNA, 25 bp, Homo sapien
cagggctaggctctttatcaggaaa

SEQ ID NO: 2814366 - DNA, 25 bp, Homo sapien
cagcttttcggttttttacatccat

SEQ ID NO: 2814367 - DNA, 25 bp, Homo sapien
tttgacattgttcttggtgttataa

SEQ ID NO: 2814368 - DNA, 25 bp, Homo sapien
aattgaacttttatatcacaccata

SEQ ID NO: 2814369 - DNA, 25 bp, Homo sapien
cattgttcttggtgttataaataaa

SEQ ID NO: 2814370 - DNA, 25 bp, Homo sapien
attgaacttttatatcacaccatac

SEQ ID NO: 2814371 - DNA, 25 bp, Homo sapien
atagaaaggcatccattgttcatgg

SEQ ID NO: 2814372 - DNA, 25 bp, Homo sapien
ccacactaccgaaagtggtctacag

SEQ ID NO: 2814373 - DNA, 25 bp, Homo sapien
tccacactaccgaaagtggtctaca

SEQ ID NO: 2814374 - DNA, 25 bp, Homo sapien
tctttttatggatgacaatataaat

SEQ ID NO: 2814375 - DNA, 25 bp, Homo sapien
caatatctacagtgaaacttgtgaa

SEQ ID NO: 2814376 - DNA, 25 bp, Homo sapien
tataaatagctattcggtatcttaa

SEQ ID NO: 2814377 - DNA, 25 bp, Homo sapien
aatagctattcggtatcttaaaata

SEQ ID NO: 2814378 - DNA, 25 bp, Homo sapien
gtaaaaactgcatccacaaagtaat

SEQ ID NO: 2814379 - DNA, 25 bp, Homo sapien
atagtaaaaactgcatccacaaagt

SEQ ID NO: 2814380 - DNA, 25 bp, Homo sapien
aagtaattctcattcgttactagtt

SEQ ID NO: 2814381 - DNA, 25 bp, Homo sapien
ctgcatccacaaagtaattctcatt

SEQ ID NO: 2814382 - DNA, 25 bp, Homo sapien
gaacaactgtaaatgcaaatgcaat

SEQ ID NO: 2814383 - DNA, 25 bp, Homo sapien
agcaccttattgtcttagtattata

SEQ ID NO: 2814384 - DNA, 25 bp, Homo sapien
caatttttactccatcaagaacaga

SEQ ID NO: 2814385 - DNA, 25 bp, Homo sapien
tttagcaaacaaagcaccttattgt

SEQ ID NO: 2814386 - DNA, 25 bp, Homo sapien
tatttgatcttaccaggccccagac

SEQ ID NO: 2814387 - DNA, 25 bp, Homo sapien
tctgcagtgaacgatgagggtgcca

SEQ ID NO: 2814388 - DNA, 25 bp, Homo sapien
ccccagacaggatgtatataggaca

SEQ ID NO: 2814389 - DNA, 25 bp, Homo sapien
tcacctgtcaaagatacctggtagc

SEQ ID NO: 2814390 - DNA, 25 bp, Homo sapien
ctgaccaaggcctacaccatcttct

SEQ ID NO: 2814391 - DNA, 25 bp, Homo sapien
aggcctacaccatcttctcttggca

SEQ ID NO: 2814392 - DNA, 25 bp, Homo sapien
ttggcagacactggctgacttccat

SEQ ID NO: 2814393 - DNA, 25 bp, Homo sapien
caaggcctacaccatcttctcttgg

SEQ ID NO: 2814394 - DNA, 25 bp, Homo sapien
tgctggcaaagcctgggatggcaca

SEQ ID NO: 2814395 - DNA, 25 bp, Homo sapien
ggcctttaccaggactcgctctctt

SEQ ID NO: 2814396 - DNA, 25 bp, Homo sapien
tttaccaggactcgctctcttctgc

SEQ ID NO: 2814397 - DNA, 25 bp, Homo sapien
gtggggcctttaccaggactcgctc

SEQ ID NO: 2814398 - DNA, 25 bp, Homo sapien
gatgactacactatgcaaggcactg

SEQ ID NO: 2814399 - DNA, 25 bp, Homo sapien
gcaaagttggcataaatctgacctg

SEQ ID NO: 2814400 - DNA, 25 bp, Homo sapien
cgctaggttctaacatcgttggcca

SEQ ID NO: 2814401 - DNA, 25 bp, Homo sapien
tttctgggctccaataggaagcagc

SEQ ID NO: 2814402 - DNA, 25 bp, Homo sapien
gaagaacatggtgataactttacaa

SEQ ID NO: 2814403 - DNA, 25 bp, Homo sapien
taaaacattagtcacaactgcattc

SEQ ID NO: 2814404 - DNA, 25 bp, Homo sapien
catggtgataactttacaagtaaca

SEQ ID NO: 2814405 - DNA, 25 bp, Homo sapien
gatggaggtggtttatacaaaaaga

SEQ ID NO: 2814406 - DNA, 25 bp, Homo sapien
ttatggctactagcatatgggccat

SEQ ID NO: 2814407 - DNA, 25 bp, Homo sapien
atttatatcccaaagaatacatgtg

SEQ ID NO: 2814408 - DNA, 25 bp, Homo sapien
tcctttaattccacaatcatttata

SEQ ID NO: 2814409 - DNA, 25 bp, Homo sapien
tgtgctgtctattgtgaaaccaaat

SEQ ID NO: 2814410 - DNA, 25 bp, Homo sapien
aatataattggtccaggaattgtcc

SEQ ID NO: 2814411 - DNA, 25 bp, Homo sapien
gggaccgttgtctgtgattaacaca

SEQ ID NO: 2814412 - DNA, 25 bp, Homo sapien
taataatcgaaggaccataaattgt

SEQ ID NO: 2814413 - DNA, 25 bp, Homo sapien
cataaattgtattcccaaggctagg

SEQ ID NO: 2814414 - DNA, 25 bp, Homo sapien
cccaaggctagggaccgttgtctgt

SEQ ID NO: 2814415 - DNA, 25 bp, Homo sapien
cacagttataggagtaccggccata

SEQ ID NO: 2814416 - DNA, 25 bp, Homo sapien
aaaagtttctgcagtggatgttatt

SEQ ID NO: 2814417 - DNA, 25 bp, Homo sapien
tttccagctttagcttcaaaaccaa

SEQ ID NO: 2814418 - DNA, 25 bp, Homo sapien
gcagtttcgcacaatgagtttcaca

SEQ ID NO: 2814419 - DNA, 25 bp, Homo sapien
ggataataatatgatcgcgaacagt

SEQ ID NO: 2814420 - DNA, 25 bp, Homo sapien
tacaaggggctatcaagtttcccaa

SEQ ID NO: 2814421 - DNA, 25 bp, Homo sapien
acagttacaattggcattacaaggg

SEQ ID NO: 2814422 - DNA, 25 bp, Homo sapien
tgatcgcgaacagttacaattggca

SEQ ID NO: 2814423 - DNA, 25 bp, Homo sapien
gagcagctccaggaattaaaacagc

SEQ ID NO: 2814424 - DNA, 25 bp, Homo sapien
cctaaaatttgaccgagagcagctc

SEQ ID NO: 2814425 - DNA, 25 bp, Homo sapien
gatacaccagcaaatggctcatttt

SEQ ID NO: 2814426 - DNA, 25 bp, Homo sapien
taagtgcaactccagatgtgaacag

SEQ ID NO: 2814427 - DNA, 25 bp, Homo sapien
tataaatttaggtaaaaatgtagca

SEQ ID NO: 2814428 - DNA, 25 bp, Homo sapien
gcaaatccagtagtaattaaggctt

SEQ ID NO: 2814429 - DNA, 25 bp, Homo sapien
tccaagagtagctgcgaagctggat

SEQ ID NO: 2814430 - DNA, 25 bp, Homo sapien
gaagctggatgtcaatccgaattga

SEQ ID NO: 2814431 - DNA, 25 bp, Homo sapien
ccaaatttcacatctgcattactat

SEQ ID NO: 2814432 - DNA, 25 bp, Homo sapien
tactctgatgagcctgggaagtttt

SEQ ID NO: 2814433 - DNA, 25 bp, Homo sapien
ccatcgcggatcatcctcagtgaca

SEQ ID NO: 2814434 - DNA, 25 bp, Homo sapien
tagaagaaacccaatccaccaagct

SEQ ID NO: 2814435 - DNA, 25 bp, Homo sapien
ggtattattaaagaccaagcaaaga

SEQ ID NO: 2814436 - DNA, 25 bp, Homo sapien
caaagatccatgatagaagaaaccc

SEQ ID NO: 2814437 - DNA, 25 bp, Homo sapien
gaccacatttttatattcactgctc

SEQ ID NO: 2814438 - DNA, 25 bp, Homo sapien
tgaccacatttttatattcactgct

SEQ ID NO: 2814439 - DNA, 25 bp, Homo sapien
ctatgaccacatttttatattcact

SEQ ID NO: 2814440 - DNA, 25 bp, Homo sapien
ccacatttttatattcactgctcat

SEQ ID NO: 2814441 - DNA, 25 bp, Homo sapien
caacatcaatgtatatggttagcag

SEQ ID NO: 2814442 - DNA, 25 bp, Homo sapien
cagttgtcctcccaatacatagcca

SEQ ID NO: 2814443 - DNA, 25 bp, Homo sapien
tacatagccaatagcagggcctaag

SEQ ID NO: 2814444 - DNA, 25 bp, Homo sapien
gcagggcctaagattgacatagcat

SEQ ID NO: 2814445 - DNA, 25 bp, Homo sapien
gaagaagaacagagacattgaatac

SEQ ID NO: 2814446 - DNA, 25 bp, Homo sapien
agaagaagaacagagacattgaata

SEQ ID NO: 2814447 - DNA, 25 bp, Homo sapien
agaagaacagagacattgaatacag

SEQ ID NO: 2814448 - DNA, 25 bp, Homo sapien
aagaacagagacattgaatacagtc

SEQ ID NO: 2814449 - DNA, 25 bp, Homo sapien
ctcctgcccccagcaatagttgtcc

SEQ ID NO: 2814450 - DNA, 25 bp, Homo sapien
cccagcaatagttgtcccaagatga

SEQ ID NO: 2814451 - DNA, 25 bp, Homo sapien
atagttgtcccaagatgaagacata

SEQ ID NO: 2814452 - DNA, 25 bp, Homo sapien
tgcccccagcaatagttgtcccaag

SEQ ID NO: 2814453 - DNA, 25 bp, Homo sapien
tggtgctattccttgttgttacaca

SEQ ID NO: 2814454 - DNA, 25 bp, Homo sapien
ggtgctattccttgttgttacacaa

SEQ ID NO: 2814455 - DNA, 25 bp, Homo sapien
taaataccaagctcagccaaatgct

SEQ ID NO: 2814456 - DNA, 25 bp, Homo sapien
cataccatatgtcaaaacattcaga

SEQ ID NO: 2814457 - DNA, 25 bp, Homo sapien
agaagataaataccaagctcagcca

SEQ ID NO: 2814458 - DNA, 25 bp, Homo sapien
cacataccatatgtcaaaacattca

SEQ ID NO: 2814459 - DNA, 25 bp, Homo sapien
tgccctaaagacctagaggctaaag

SEQ ID NO: 2814460 - DNA, 25 bp, Homo sapien
caagcatttgccctaaagacctaga

SEQ ID NO: 2814461 - DNA, 25 bp, Homo sapien
agacctagaggctaaaggtacctct

SEQ ID NO: 2814462 - DNA, 25 bp, Homo sapien
gcatttgccctaaagacctagaggc

SEQ ID NO: 2814463 - DNA, 25 bp, Homo sapien
aaattaagattagggcactgaccac

SEQ ID NO: 2814464 - DNA, 25 bp, Homo sapien
tcaggtgctttgacgtggctaactt

SEQ ID NO: 2814465 - DNA, 25 bp, Homo sapien
taccacatctctggttaccacggca

SEQ ID NO: 2814466 - DNA, 25 bp, Homo sapien
tgtttatagttgaccaccccgagtc

SEQ ID NO: 2814467 - DNA, 25 bp, Homo sapien
tgagaatacaagtgctcccagtcca

SEQ ID NO: 2814468 - DNA, 25 bp, Homo sapien
tcccagtccaatcataaaggctgca

SEQ ID NO: 2814469 - DNA, 25 bp, Homo sapien
gggaactcttcatttcataacgctt

SEQ ID NO: 2814470 - DNA, 25 bp, Homo sapien
gctgcaaatgcaagccatctcggct

SEQ ID NO: 2814471 - DNA, 25 bp, Homo sapien
gcctcaagcgggcgctggactttac

SEQ ID NO: 2814472 - DNA, 25 bp, Homo sapien
cgagcctcaagcgggcgctggactt

SEQ ID NO: 2814473 - DNA, 25 bp, Homo sapien
ctggcccgagcctcaagcgggcgct

SEQ ID NO: 2814474 - DNA, 25 bp, Homo sapien
tccactggcccgagcctcaagcggg

SEQ ID NO: 2814475 - DNA, 25 bp, Homo sapien
gctcctgtggctgagaattctctct

SEQ ID NO: 2814476 - DNA, 25 bp, Homo sapien
tcctcaaactcggacagcgacagtg

SEQ ID NO: 2814477 - DNA, 25 bp, Homo sapien
gacagtgaccggagcttctcttcgg

SEQ ID NO: 2814478 - DNA, 25 bp, Homo sapien
gaagcagaaagcctccaggtgtgtt

SEQ ID NO: 2814479 - DNA, 25 bp, Homo sapien
ctggaggggacaaaagccaagttct

SEQ ID NO: 2814480 - DNA, 25 bp, Homo sapien
tggaggggacaaaagccaagttctc

SEQ ID NO: 2814481 - DNA, 25 bp, Homo sapien
ggttctcccgactccggtgcttcag

SEQ ID NO: 2814482 - DNA, 25 bp, Homo sapien
gacagcgcccccgtgcgggaagctt

SEQ ID NO: 2814483 - DNA, 25 bp, Homo sapien
gtgcgggaagcttcccgcctcctgg

SEQ ID NO: 2814484 - DNA, 25 bp, Homo sapien
accttcctactccagctcgcagctg

SEQ ID NO: 2814485 - DNA, 25 bp, Homo sapien
tcgcctcaaggaccaaccggaaggc

SEQ ID NO: 2814486 - DNA, 25 bp, Homo sapien
gtggctttggcgctcagctgtgcct

SEQ ID NO: 2814487 - DNA, 25 bp, Homo sapien
cccagcctgtggctttggcgctcag

SEQ ID NO: 2814488 - DNA, 25 bp, Homo sapien
tgtgcctcacccgtcgcctcaagga

SEQ ID NO: 2814489 - DNA, 25 bp, Homo sapien
ttcacaataggacactttattatga

SEQ ID NO: 2814490 - DNA, 25 bp, Homo sapien
tttcacaataggacactttattatg

SEQ ID NO: 2814491 - DNA, 25 bp, Homo sapien
tcacaataggacactttattatgaa

SEQ ID NO: 2814492 - DNA, 25 bp, Homo sapien
taaacataatgtgtgattttcctct

SEQ ID NO: 2814493 - DNA, 25 bp, Homo sapien
aagagaaactcgttttcacactctg

SEQ ID NO: 2814494 - DNA, 25 bp, Homo sapien
gagaaactcgttttcacactctgat

SEQ ID NO: 2814495 - DNA, 25 bp, Homo sapien
agagaaactcgttttcacactctga

SEQ ID NO: 2814496 - DNA, 25 bp, Homo sapien
caatagtagtgaagatgatagtgca

SEQ ID NO: 2814497 - DNA, 25 bp, Homo sapien
tcagtgttctcatttagacgacgtt

SEQ ID NO: 2814498 - DNA, 25 bp, Homo sapien
agttacatctgggaagtcagtgttc

SEQ ID NO: 2814499 - DNA, 25 bp, Homo sapien
aacttttggattcttcacagttaca

SEQ ID NO: 2814500 - DNA, 25 bp, Homo sapien
tattccataggttatctctttactc

SEQ ID NO: 2814501 - DNA, 25 bp, Homo sapien
cttactaataagtgtttgagttcct

SEQ ID NO: 2814502 - DNA, 25 bp, Homo sapien
gatgattagtgatttaggcattcag

SEQ ID NO: 2814503 - DNA, 25 bp, Homo sapien
cattcagaaatataattgttggcca

SEQ ID NO: 2814504 - DNA, 25 bp, Homo sapien
tatatatccaacaacgtcctgtgtg

SEQ ID NO: 2814505 - DNA, 25 bp, Homo sapien
cattttaaagattgatggtccagga

SEQ ID NO: 2814506 - DNA, 25 bp, Homo sapien
tattcctaccaataagaaagccatt

SEQ ID NO: 2814507 - DNA, 25 bp, Homo sapien
taaaatacaagaagtttctcctgac

SEQ ID NO: 2814508 - DNA, 25 bp, Homo sapien
aatattctcaaaatcacatagctta

SEQ ID NO: 2814509 - DNA, 25 bp, Homo sapien
aaatattctcaaaatcacatagctt

SEQ ID NO: 2814510 - DNA, 25 bp, Homo sapien
caaatattctcaaaatcacatagct

SEQ ID NO: 2814511 - DNA, 25 bp, Homo sapien
atattctcaaaatcacatagcttac

SEQ ID NO: 2814512 - DNA, 25 bp, Homo sapien
ggccagagaacgcagtttgtcaggt

SEQ ID NO: 2814513 - DNA, 25 bp, Homo sapien
aaggccagagaacgcagtttgtcag

SEQ ID NO: 2814514 - DNA, 25 bp, Homo sapien
ccaaggccagagaacgcagtttgtc

SEQ ID NO: 2814515 - DNA, 25 bp, Homo sapien
cagagaacgcagtttgtcaggtaca

SEQ ID NO: 2814516 - DNA, 25 bp, Homo sapien
tgtatgctagattcaaggctaatca

SEQ ID NO: 2814517 - DNA, 25 bp, Homo sapien
tgttattagcactaagaatgtatgc

SEQ ID NO: 2814518 - DNA, 25 bp, Homo sapien
taagaatctttagccaattgacaga

SEQ ID NO: 2814519 - DNA, 25 bp, Homo sapien
ggtgcatcaattgtactaagaatct

SEQ ID NO: 2814520 - DNA, 25 bp, Homo sapien
taattctacccatatcaacctggta

SEQ ID NO: 2814521 - DNA, 25 bp, Homo sapien
tcctactgatcaaaccaagcatttg

SEQ ID NO: 2814522 - DNA, 25 bp, Homo sapien
catgtttgacctgtgactactacac

SEQ ID NO: 2814523 - DNA, 25 bp, Homo sapien
taaccgtacatattaggagtttgga

SEQ ID NO: 2814524 - DNA, 25 bp, Homo sapien
ccaaactggaagtctggatataatc

SEQ ID NO: 2814525 - DNA, 25 bp, Homo sapien
catctgatcactttcgctcttgagg

SEQ ID NO: 2814526 - DNA, 25 bp, Homo sapien
tgtacacagaatagcaacattcatg

SEQ ID NO: 2814527 - DNA, 25 bp, Homo sapien
tttctccatattttgtaccaggcat

SEQ ID NO: 2814528 - DNA, 25 bp, Homo sapien
cgcgtcatggccaagacgattggta

SEQ ID NO: 2814529 - DNA, 25 bp, Homo sapien
cgattggtacaccagaaaaaccaga

SEQ ID NO: 2814530 - DNA, 25 bp, Homo sapien
tgaacaaaggtaacttatagcactt

SEQ ID NO: 2814531 - DNA, 25 bp, Homo sapien
tttgcatcacatttcccgggtctgg

SEQ ID NO: 2814532 - DNA, 25 bp, Homo sapien
gcaaggagccgtgaggtttcccaac

SEQ ID NO: 2814533 - DNA, 25 bp, Homo sapien
tttgtgctttagaatatgtacaccc

SEQ ID NO: 2814534 - DNA, 25 bp, Homo sapien
aatatgtacaccctgcaaagcaggg

SEQ ID NO: 2814535 - DNA, 25 bp, Homo sapien
gaagatgagcatctacatttttcat

SEQ ID NO: 2814536 - DNA, 25 bp, Homo sapien
taaccattataaatctcataagggc

SEQ ID NO: 2814537 - DNA, 25 bp, Homo sapien
caagcagtataagtgatatcacaga

SEQ ID NO: 2814538 - DNA, 25 bp, Homo sapien
tcataagggctttacaagacatttc

SEQ ID NO: 2814539 - DNA, 25 bp, Homo sapien
aattgcactggattacagcgtacaa

SEQ ID NO: 2814540 - DNA, 25 bp, Homo sapien
tcccctctggacactctttatcaag

SEQ ID NO: 2814541 - DNA, 25 bp, Homo sapien
gatagtatttccacgtagagcacag

SEQ ID NO: 2814542 - DNA, 25 bp, Homo sapien
ggaagacagagagagtgtcccctct

SEQ ID NO: 2814543 - DNA, 25 bp, Homo sapien
gatatttatacgatgagtagccttg

SEQ ID NO: 2814544 - DNA, 25 bp, Homo sapien
tacatacaataagacagtgcaaaat

SEQ ID NO: 2814545 - DNA, 25 bp, Homo sapien
aagtgtagttgccacagtgggtgtt

SEQ ID NO: 2814546 - DNA, 25 bp, Homo sapien
tgccacagtgggtgttaatataaac

SEQ ID NO: 2814547 - DNA, 25 bp, Homo sapien
ttcagaagctccaataataactaaa

SEQ ID NO: 2814548 - DNA, 25 bp, Homo sapien
ggcatatgagcactggattcttcat

SEQ ID NO: 2814549 - DNA, 25 bp, Homo sapien
gacgctgttaattccactgatgcaa

SEQ ID NO: 2814550 - DNA, 25 bp, Homo sapien
ggtataaaacacagatcgcagctcc

SEQ ID NO: 2814551 - DNA, 25 bp, Homo sapien
taaaggattgcacgggattacgaga

SEQ ID NO: 2814552 - DNA, 25 bp, Homo sapien
taaagaaatgagacaacgggttgcg

SEQ ID NO: 2814553 - DNA, 25 bp, Homo sapien
aacactttgagaggtcaaggcgggt

SEQ ID NO: 2814554 - DNA, 25 bp, Homo sapien
caacactttgagaggtcaaggcggg

SEQ ID NO: 2814555 - DNA, 25 bp, Homo sapien
ggatcacaaggtcaggagatcaaga

SEQ ID NO: 2814556 - DNA, 25 bp, Homo sapien
ccattctggctaacatggtgaaacc

SEQ ID NO: 2814557 - DNA, 25 bp, Homo sapien
ctgattctgccagtaaaagaccttt

SEQ ID NO: 2814558 - DNA, 25 bp, Homo sapien
gacactgattctgccagtaaaagac

SEQ ID NO: 2814559 - DNA, 25 bp, Homo sapien
cactgattctgccagtaaaagacct

SEQ ID NO: 2814560 - DNA, 25 bp, Homo sapien
gattctgccagtaaaagacctttcc

SEQ ID NO: 2814561 - DNA, 25 bp, Homo sapien
gaaataaaagcctactcaattgtgg

SEQ ID NO: 2814562 - DNA, 25 bp, Homo sapien
aataaaagcctactcaattgtggtg

SEQ ID NO: 2814563 - DNA, 25 bp, Homo sapien
aaataaaagcctactcaattgtggt

SEQ ID NO: 2814564 - DNA, 25 bp, Homo sapien
tatcgagatgatcatgtgcttttgt

SEQ ID NO: 2814565 - DNA, 25 bp, Homo sapien
ccaaagagcagcacataaatccttg

SEQ ID NO: 2814566 - DNA, 25 bp, Homo sapien
gatctttaagtctgctgtcaaaaaa

SEQ ID NO: 2814567 - DNA, 25 bp, Homo sapien
aatgaagctgtttacgtttcctagc

SEQ ID NO: 2814568 - DNA, 25 bp, Homo sapien
gtttcctagcttttatccgtgttga

SEQ ID NO: 2814569 - DNA, 25 bp, Homo sapien
tattgtttggaaagcatgacaatgg

SEQ ID NO: 2814570 - DNA, 25 bp, Homo sapien
taatgtacaccatgcaacgacagcg

SEQ ID NO: 2814571 - DNA, 25 bp, Homo sapien
ccaccaagtccatagccattctgga

SEQ ID NO: 2814572 - DNA, 25 bp, Homo sapien
cattctggactaccattattgactg

SEQ ID NO: 2814573 - DNA, 25 bp, Homo sapien
tgttgcagaagtagtattctcaggg

SEQ ID NO: 2814574 - DNA, 25 bp, Homo sapien
gtagtattctcagggactttaacta

SEQ ID NO: 2814575 - DNA, 25 bp, Homo sapien
aactagtggtgctcctagcacataa

SEQ ID NO: 2814576 - DNA, 25 bp, Homo sapien
tggtgctcctagcacataacccaga

SEQ ID NO: 2814577 - DNA, 25 bp, Homo sapien
gtagcaacattctcatcaataaagg

SEQ ID NO: 2814578 - DNA, 25 bp, Homo sapien
ttccaaggatataaagaggcattcc

SEQ ID NO: 2814579 - DNA, 25 bp, Homo sapien
gaggcattcctgctattccctgcac

SEQ ID NO: 2814580 - DNA, 25 bp, Homo sapien
accagctgagtgtgtagcaacattc

SEQ ID NO: 2814581 - DNA, 25 bp, Homo sapien
ttggaatgatataccactgctctgg

SEQ ID NO: 2814582 - DNA, 25 bp, Homo sapien
gattggaatgatataccactgctct

SEQ ID NO: 2814583 - DNA, 25 bp, Homo sapien
gatataccactgctctggcaaccac

SEQ ID NO: 2814584 - DNA, 25 bp, Homo sapien
gaatgatataccactgctctggcaa

SEQ ID NO: 2814585 - DNA, 25 bp, Homo sapien
cataaaagtgatccaagtcctatta

SEQ ID NO: 2814586 - DNA, 25 bp, Homo sapien
tcttcattaatggatggaaaagcac

SEQ ID NO: 2814587 - DNA, 25 bp, Homo sapien
aagcacataaaagtgatccaagtcc

SEQ ID NO: 2814588 - DNA, 25 bp, Homo sapien
tggaaaagcacataaaagtgatcca

SEQ ID NO: 2814589 - DNA, 25 bp, Homo sapien
tccatagaatgctataaatattgct

SEQ ID NO: 2814590 - DNA, 25 bp, Homo sapien
catagaatgctataaatattgctac

SEQ ID NO: 2814591 - DNA, 25 bp, Homo sapien
tctccatagaatgctataaatattg

SEQ ID NO: 2814592 - DNA, 25 bp, Homo sapien
ttctgtctccatagaatgctataaa

SEQ ID NO: 2814593 - DNA, 25 bp, Homo sapien
tgctgacatctataagaccaaacac

SEQ ID NO: 2814594 - DNA, 25 bp, Homo sapien
tctgaaaatcgccaatgctgacatc

SEQ ID NO: 2814595 - DNA, 25 bp, Homo sapien
ttttccaatgccaacttctcaatgg

SEQ ID NO: 2814596 - DNA, 25 bp, Homo sapien
tattccttctgaaaatcgccaatgc

SEQ ID NO: 2814597 - DNA, 25 bp, Homo sapien
gaagcagcgaatgttattgcaacac

SEQ ID NO: 2814598 - DNA, 25 bp, Homo sapien
tatcaaggcctctggaagtagtctc

SEQ ID NO: 2814599 - DNA, 25 bp, Homo sapien
tactccccttgagacttcatcctgg

SEQ ID NO: 2814600 - DNA, 25 bp, Homo sapien
caggtgctgactaagcagcccaaac

SEQ ID NO: 2814601 - DNA, 25 bp, Homo sapien
gacgcggcccgagtgctctcggctg

SEQ ID NO: 2814602 - DNA, 25 bp, Homo sapien
tggcgagggcgtcggaggactcggt

SEQ ID NO: 2814603 - DNA, 25 bp, Homo sapien
ccaagcctccagagcgaacgtttct

SEQ ID NO: 2814604 - DNA, 25 bp, Homo sapien
gactcggtggccacaaggggctctt

SEQ ID NO: 2814605 - DNA, 25 bp, Homo sapien
gtctcaacccaaccaactggtcagg

SEQ ID NO: 2814606 - DNA, 25 bp, Homo sapien
tgaagggtcccattcggtatacaca

SEQ ID NO: 2814607 - DNA, 25 bp, Homo sapien
aaggccaaatgtctcttccggagca

SEQ ID NO: 2814608 - DNA, 25 bp, Homo sapien
agcccaaggccaaatgtctcttccg

SEQ ID NO: 2814609 - DNA, 25 bp, Homo sapien
ctagattttatccaggttcctctac

SEQ ID NO: 2814610 - DNA, 25 bp, Homo sapien
agtcactagattttatccaggttcc

SEQ ID NO: 2814611 - DNA, 25 bp, Homo sapien
tcactagattttatccaggttcctc

SEQ ID NO: 2814612 - DNA, 25 bp, Homo sapien
ttagtcactagattttatccaggtt

SEQ ID NO: 2814613 - DNA, 25 bp, Homo sapien
ttttccatggaatctacacaccaga

SEQ ID NO: 2814614 - DNA, 25 bp, Homo sapien
gccttctttcaggtataatctccag

SEQ ID NO: 2814615 - DNA, 25 bp, Homo sapien
tatgggatgataaatactggattct

SEQ ID NO: 2814616 - DNA, 25 bp, Homo sapien
tccagacttctacctgggttttctc

SEQ ID NO: 2814617 - DNA, 25 bp, Homo sapien
tctgcataagatgcacagccatctg

SEQ ID NO: 2814618 - DNA, 25 bp, Homo sapien
aacctgagttctgcataagatgcac

SEQ ID NO: 2814619 - DNA, 25 bp, Homo sapien
tgagttctgcataagatgcacagcc

SEQ ID NO: 2814620 - DNA, 25 bp, Homo sapien
ggaacctgagttctgcataagatgc

SEQ ID NO: 2814621 - DNA, 25 bp, Homo sapien
taacaaaattcgcagataagatcgg

SEQ ID NO: 2814622 - DNA, 25 bp, Homo sapien
cagagtcagactgtgagcttttaca

SEQ ID NO: 2814623 - DNA, 25 bp, Homo sapien
aatacagtataaactacctgagggc

SEQ ID NO: 2814624 - DNA, 25 bp, Homo sapien
tagagtctcagccagttgttctcac

SEQ ID NO: 2814625 - DNA, 25 bp, Homo sapien
aaaatccatggtaactgtactaaca

SEQ ID NO: 2814626 - DNA, 25 bp, Homo sapien
cttaagttagtatacaacttcagca

SEQ ID NO: 2814627 - DNA, 25 bp, Homo sapien
gcttcttaagttagtatacaacttc

SEQ ID NO: 2814628 - DNA, 25 bp, Homo sapien
aatcagagataacgaaaacaaatgg

SEQ ID NO: 2814629 - DNA, 25 bp, Homo sapien
tgcacccggtacgtcaccttgtagt

SEQ ID NO: 2814630 - DNA, 25 bp, Homo sapien
gactagcccgtttcacttgccaata

SEQ ID NO: 2814631 - DNA, 25 bp, Homo sapien
tgcttgctcactgaaatctggtgtg

SEQ ID NO: 2814632 - DNA, 25 bp, Homo sapien
tactggataactctagatgaggcag

SEQ ID NO: 2814633 - DNA, 25 bp, Homo sapien
tcctgaatcaggtcactggcaattg

SEQ ID NO: 2814634 - DNA, 25 bp, Homo sapien
tgtcaggcactcaagtgaaataggg

SEQ ID NO: 2814635 - DNA, 25 bp, Homo sapien
gattttaggtatgataatagcctcc

SEQ ID NO: 2814636 - DNA, 25 bp, Homo sapien
tatagtaacagatacccagtggtac

SEQ ID NO: 2814637 - DNA, 25 bp, Homo sapien
cagctgacgaggacagccatcaatt

SEQ ID NO: 2814638 - DNA, 25 bp, Homo sapien
ccatcaattactgggtgttttttgc

SEQ ID NO: 2814639 - DNA, 25 bp, Homo sapien
tgtccccagctgacgaggacagcca

SEQ ID NO: 2814640 - DNA, 25 bp, Homo sapien
gacgaggacagccatcaattactgg

SEQ ID NO: 2814641 - DNA, 25 bp, Homo sapien
cacttctacagcttgcatgatatta

SEQ ID NO: 2814642 - DNA, 25 bp, Homo sapien
ctacagcttgcatgatattattggg

SEQ ID NO: 2814643 - DNA, 25 bp, Homo sapien
tgtgaatgacctgcatcaaagaaac

SEQ ID NO: 2814644 - DNA, 25 bp, Homo sapien
ctgaatacacttctacagcttgcat

SEQ ID NO: 2814645 - DNA, 25 bp, Homo sapien
cagtcacattcgaataagaaagaca

SEQ ID NO: 2814646 - DNA, 25 bp, Homo sapien
aagaaagacaaggatttgctagact

SEQ ID NO: 2814647 - DNA, 25 bp, Homo sapien
caaggatttgctagactaagggaaa

SEQ ID NO: 2814648 - DNA, 25 bp, Homo sapien
tgccagtcacattcgaataagaaag

SEQ ID NO: 2814649 - DNA, 25 bp, Homo sapien
catgcacatgtctttaagggtagaa

SEQ ID NO: 2814650 - DNA, 25 bp, Homo sapien
tcccttttctccacgacattgtcag

SEQ ID NO: 2814651 - DNA, 25 bp, Homo sapien
tatctaagctctaagcccagtaccc

SEQ ID NO: 2814652 - DNA, 25 bp, Homo sapien
gttgttcccctgttcgtgtccacga

SEQ ID NO: 2814653 - DNA, 25 bp, Homo sapien
taaatacctcctatgagccaagcaa

SEQ ID NO: 2814654 - DNA, 25 bp, Homo sapien
agtagagctttcacacgtgagaggt

SEQ ID NO: 2814655 - DNA, 25 bp, Homo sapien
gctttcacacgtgagaggtttgagg

SEQ ID NO: 2814656 - DNA, 25 bp, Homo sapien
ttcagtcaactaatgtgtttattaa

SEQ ID NO: 2814657 - DNA, 25 bp, Homo sapien
caaacttcatggtatagcagatcac

SEQ ID NO: 2814658 - DNA, 25 bp, Homo sapien
gggcctttcatcactgagcacagag

SEQ ID NO: 2814659 - DNA, 25 bp, Homo sapien
gaggacctggctgtacaaagaacac

SEQ ID NO: 2814660 - DNA, 25 bp, Homo sapien
gatgttgctggcctgaagatcatac

SEQ ID NO: 2814661 - DNA, 25 bp, Homo sapien
tcttggacaaatgtttcacggaaaa

SEQ ID NO: 2814662 - DNA, 25 bp, Homo sapien
ttgacacaggtggtctctgttctta

SEQ ID NO: 2814663 - DNA, 25 bp, Homo sapien
acacaggtggtctctgttcttagtc

SEQ ID NO: 2814664 - DNA, 25 bp, Homo sapien
ctttcttggacaaatgtttcacgga

SEQ ID NO: 2814665 - DNA, 25 bp, Homo sapien
tagactacaggtggctttgcatccc

SEQ ID NO: 2814666 - DNA, 25 bp, Homo sapien
tctacctgcactcctaagctttggg

SEQ ID NO: 2814667 - DNA, 25 bp, Homo sapien
gatatatctatctgtaaccctggca

SEQ ID NO: 2814668 - DNA, 25 bp, Homo sapien
tcttcgcagtggaggtagcacagat

SEQ ID NO: 2814669 - DNA, 25 bp, Homo sapien
tatggtctcccacttgtatgctgag

SEQ ID NO: 2814670 - DNA, 25 bp, Homo sapien
tcccagcaattatcagacctttggc

SEQ ID NO: 2814671 - DNA, 25 bp, Homo sapien
tccaattgcagggtcaccccgtgga

SEQ ID NO: 2814672 - DNA, 25 bp, Homo sapien
tggatagtggaccttctcccagcaa

SEQ ID NO: 2814673 - DNA, 25 bp, Homo sapien
ccacagtcgacaaggcatatagaca

SEQ ID NO: 2814674 - DNA, 25 bp, Homo sapien
gtcgacaaggcatatagacaacttt

SEQ ID NO: 2814675 - DNA, 25 bp, Homo sapien
cagtcgacaaggcatatagacaact

SEQ ID NO: 2814676 - DNA, 25 bp, Homo sapien
cgacaaggcatatagacaactttcc

SEQ ID NO: 2814677 - DNA, 25 bp, Homo sapien
cagagagaggttttattctagcaga

SEQ ID NO: 2814678 - DNA, 25 bp, Homo sapien
gtgattctgatcaagcaacctcgtg

SEQ ID NO: 2814679 - DNA, 25 bp, Homo sapien
caacctcgtgatgggctgactccca

SEQ ID NO: 2814680 - DNA, 25 bp, Homo sapien
tctagcagatgatttgggtacacag

SEQ ID NO: 2814681 - DNA, 25 bp, Homo sapien
tataaggagcttccgcatttcactc

SEQ ID NO: 2814682 - DNA, 25 bp, Homo sapien
gaataagagcctgtggcaatgagct

SEQ ID NO: 2814683 - DNA, 25 bp, Homo sapien
tctcttgaagacagtgtagcagtgg

SEQ ID NO: 2814684 - DNA, 25 bp, Homo sapien
tagatttgatcttgccaacatgatg

SEQ ID NO: 2814685 - DNA, 25 bp, Homo sapien
caccagtcagaatggtgatcattaa

SEQ ID NO: 2814686 - DNA, 25 bp, Homo sapien
gaagtcggtgtggtgattcctcaag

SEQ ID NO: 2814687 - DNA, 25 bp, Homo sapien
tgtcctgaatggtatatgaacagac

SEQ ID NO: 2814688 - DNA, 25 bp, Homo sapien
cttctcaaaagaagacatttatgca

SEQ ID NO: 2814689 - DNA, 25 bp, Homo sapien
cctgcagtggagtaccataggtctg

SEQ ID NO: 2814690 - DNA, 25 bp, Homo sapien
tcagttcccagagtacctgcagtgg

SEQ ID NO: 2814691 - DNA, 25 bp, Homo sapien
ccagactctgtaagtgcccactcta

SEQ ID NO: 2814692 - DNA, 25 bp, Homo sapien
gcctgcgagctgacaactacatgaa

SEQ ID NO: 2814693 - DNA, 25 bp, Homo sapien
cagatacagagttaatgagcaaaca

SEQ ID NO: 2814694 - DNA, 25 bp, Homo sapien
gagcaaacattacccaaccttgcaa

SEQ ID NO: 2814695 - DNA, 25 bp, Homo sapien
caagcagatacagagttaatgagca

SEQ ID NO: 2814696 - DNA, 25 bp, Homo sapien
ttgcaatgtagagaagggatatggc

SEQ ID NO: 2814697 - DNA, 25 bp, Homo sapien
ctgcccagggcactgagcaacaaag

SEQ ID NO: 2814698 - DNA, 25 bp, Homo sapien
tgcccagggcactgagcaacaaagc

SEQ ID NO: 2814699 - DNA, 25 bp, Homo sapien
gcccagggcactgagcaacaaagca

SEQ ID NO: 2814700 - DNA, 25 bp, Homo sapien
cgtgcgcgcaccatgcgcgagtcga

SEQ ID NO: 2814701 - DNA, 25 bp, Homo sapien
gtgcgtgcgcgcaccatgcgcgagt

SEQ ID NO: 2814702 - DNA, 25 bp, Homo sapien
tggacggcacctggaaagtcgggtc

SEQ ID NO: 2814703 - DNA, 25 bp, Homo sapien
atggacggcacctggaaagtcgggt

SEQ ID NO: 2814704 - DNA, 25 bp, Homo sapien
cacccacggagacttggttagtgaa

SEQ ID NO: 2814705 - DNA, 25 bp, Homo sapien
ggtctgcttcaaatcctctcacttt

SEQ ID NO: 2814706 - DNA, 25 bp, Homo sapien
aggcggcaaagagccaagcacccac

SEQ ID NO: 2814707 - DNA, 25 bp, Homo sapien
aatcgcatgcacaagcagaggcggc

SEQ ID NO: 2814708 - DNA, 25 bp, Homo sapien
tctctaaagtatctccataggtcag

SEQ ID NO: 2814709 - DNA, 25 bp, Homo sapien
tgtgagataacaataagcaatggtc

SEQ ID NO: 2814710 - DNA, 25 bp, Homo sapien
cccagtcatgcattataaaggtgga

SEQ ID NO: 2814711 - DNA, 25 bp, Homo sapien
tataacacacgcagtacagtacatt

SEQ ID NO: 2814712 - DNA, 25 bp, Homo sapien
aattgtatctatgtctccttttagt

SEQ ID NO: 2814713 - DNA, 25 bp, Homo sapien
cctgtttacgagacattctgaaagc

SEQ ID NO: 2814714 - DNA, 25 bp, Homo sapien
gagaaattcaaacagctttatagca

SEQ ID NO: 2814715 - DNA, 25 bp, Homo sapien
ctgaaagcttttgctgtagagtgcc

SEQ ID NO: 2814716 - DNA, 25 bp, Homo sapien
ccaaggttctgataataataggtga

SEQ ID NO: 2814717 - DNA, 25 bp, Homo sapien
cccaaaacattagtatgaagcaaag

SEQ ID NO: 2814718 - DNA, 25 bp, Homo sapien
tgcttaacttggcagcatttatcac

SEQ ID NO: 2814719 - DNA, 25 bp, Homo sapien
atccttcagggactcatagaaaaag

SEQ ID NO: 2814720 - DNA, 25 bp, Homo sapien
gaaggtagaatcactgtcagcagag

SEQ ID NO: 2814721 - DNA, 25 bp, Homo sapien
attgctagcctaggaaagcttcctg

SEQ ID NO: 2814722 - DNA, 25 bp, Homo sapien
caggaacgactttccagtgaaggag

SEQ ID NO: 2814723 - DNA, 25 bp, Homo sapien
actatgtgccagacaaattgctagc

SEQ ID NO: 2814724 - DNA, 25 bp, Homo sapien
acctatttcaagtttctgacctcca

SEQ ID NO: 2814725 - DNA, 25 bp, Homo sapien
tataaaacctatttcaagtttctga

SEQ ID NO: 2814726 - DNA, 25 bp, Homo sapien
cctccagaactgtaagatagataaa

SEQ ID NO: 2814727 - DNA, 25 bp, Homo sapien
gaactgtaagatagataaatttgtg

SEQ ID NO: 2814728 - DNA, 25 bp, Homo sapien
tatggcccactacggggtcccatct

SEQ ID NO: 2814729 - DNA, 25 bp, Homo sapien
gactctgcacagaaaccaacagcat

SEQ ID NO: 2814730 - DNA, 25 bp, Homo sapien
acatctgaatatgtgccctcctcag

SEQ ID NO: 2814731 - DNA, 25 bp, Homo sapien
ccaacagcattcaggagcatacatc

SEQ ID NO: 2814732 - DNA, 25 bp, Homo sapien
cagagagaagtgtttcctctcttac

SEQ ID NO: 2814733 - DNA, 25 bp, Homo sapien
tctttcttctcaggactgacaccag

SEQ ID NO: 2814734 - DNA, 25 bp, Homo sapien
aggaatgtccactctaccataacag

SEQ ID NO: 2814735 - DNA, 25 bp, Homo sapien
tctaccataacagtcaatatgtgtt

SEQ ID NO: 2814736 - DNA, 25 bp, Homo sapien
tttcttctcaggactgacaccagga

SEQ ID NO: 2814737 - DNA, 25 bp, Homo sapien
gatccaagcgtgaagcttcctttga

SEQ ID NO: 2814738 - DNA, 25 bp, Homo sapien
tggagaagatccaagcgtgaagctt

SEQ ID NO: 2814739 - DNA, 25 bp, Homo sapien
aagatccaagcgtgaagcttccttt

SEQ ID NO: 2814740 - DNA, 25 bp, Homo sapien
ccctgtggagaagatccaagcgtga

SEQ ID NO: 2814741 - DNA, 25 bp, Homo sapien
tggtgttgacgtccctgatgtagag

SEQ ID NO: 2814742 - DNA, 25 bp, Homo sapien
tataaggcaatatatgcgaggcacc

SEQ ID NO: 2814743 - DNA, 25 bp, Homo sapien
ggtgcccatgcagaaactcgaaaaa

SEQ ID NO: 2814744 - DNA, 25 bp, Homo sapien
gaaaggcttcctaaatgattctcgg

SEQ ID NO: 2814745 - DNA, 25 bp, Homo sapien
tcagctggactagaacaaatggtcc

SEQ ID NO: 2814746 - DNA, 25 bp, Homo sapien
taggaagcagatcagctggactaga

SEQ ID NO: 2814747 - DNA, 25 bp, Homo sapien
ctggaagataggaagcagatcagct

SEQ ID NO: 2814748 - DNA, 25 bp, Homo sapien
ctagaacaaatggtcctgtcagtgc

SEQ ID NO: 2814749 - DNA, 25 bp, Homo sapien
tggggctattcattatattgcccac

SEQ ID NO: 2814750 - DNA, 25 bp, Homo sapien
tatgcataagcaaatttgactgttt

SEQ ID NO: 2814751 - DNA, 25 bp, Homo sapien
tctcttgtcgttctgaatatgcata

SEQ ID NO: 2814752 - DNA, 25 bp, Homo sapien
gatgacttctaaattgaaattaata

SEQ ID NO: 2814753 - DNA, 25 bp, Homo sapien
tctccttctttatcttcctcagtgt

SEQ ID NO: 2814754 - DNA, 25 bp, Homo sapien
cttcttcccagtccactggcttctc

SEQ ID NO: 2814755 - DNA, 25 bp, Homo sapien
ccttctttatcttcctcagtgtccc

SEQ ID NO: 2814756 - DNA, 25 bp, Homo sapien
tctttatcttcctcagtgtcccttc

SEQ ID NO: 2814757 - DNA, 25 bp, Homo sapien
caacctccctgctaccacaccagat

SEQ ID NO: 2814758 - DNA, 25 bp, Homo sapien
tcacaacctccctgctaccacacca

SEQ ID NO: 2814759 - DNA, 25 bp, Homo sapien
acaacctccctgctaccacaccaga

SEQ ID NO: 2814760 - DNA, 25 bp, Homo sapien
aacctccctgctaccacaccagatt

SEQ ID NO: 2814761 - DNA, 25 bp, Homo sapien
ctgaaggggaggagttgtctggaaa

SEQ ID NO: 2814762 - DNA, 25 bp, Homo sapien
agcagctcgggacccgcgctgcagg

SEQ ID NO: 2814763 - DNA, 25 bp, Homo sapien
tgaaggggaggagttgtctggaaag

SEQ ID NO: 2814764 - DNA, 25 bp, Homo sapien
cagctcgggacccgcgctgcaggga

SEQ ID NO: 2814765 - DNA, 25 bp, Homo sapien
gaaacgttcttctggcgcgaagctg

SEQ ID NO: 2814766 - DNA, 25 bp, Homo sapien
tgaactgggaagcactgcgcagacc

SEQ ID NO: 2814767 - DNA, 25 bp, Homo sapien
acctgagcgaggtggcctgaatcca

SEQ ID NO: 2814768 - DNA, 25 bp, Homo sapien
cggagggagagtcggacattttcct

SEQ ID NO: 2814769 - DNA, 25 bp, Homo sapien
tgggcaagagttccagctcttggct

SEQ ID NO: 2814770 - DNA, 25 bp, Homo sapien
tctggcccgcgcgtgagttcagaca

SEQ ID NO: 2814771 - DNA, 25 bp, Homo sapien
tagggacacgagactcgggagggtc

SEQ ID NO: 2814772 - DNA, 25 bp, Homo sapien
cagagactttcaggccgggccttca

SEQ ID NO: 2814773 - DNA, 25 bp, Homo sapien
agagcccgtggtcgcgcaggttggt

SEQ ID NO: 2814774 - DNA, 25 bp, Homo sapien
tccggcttccgtcccggacagagcc

SEQ ID NO: 2814775 - DNA, 25 bp, Homo sapien
caggttggtgttgttgccgctgctg

SEQ ID NO: 2814776 - DNA, 25 bp, Homo sapien
tccgtcccggacagagcccgtggtc

SEQ ID NO: 2814777 - DNA, 25 bp, Homo sapien
attattaagtccctggccagtttgt

SEQ ID NO: 2814778 - DNA, 25 bp, Homo sapien
ggtccttctcacctccgcacttctc

SEQ ID NO: 2814779 - DNA, 25 bp, Homo sapien
gccagtttgtgaggggtcgtcctcc

SEQ ID NO: 2814780 - DNA, 25 bp, Homo sapien
ccctccggtccttctcacctccgca

SEQ ID NO: 2814781 - DNA, 25 bp, Homo sapien
tctcttgtctcgtgcagctgcctga

SEQ ID NO: 2814782 - DNA, 25 bp, Homo sapien
ctaaaaggcatgtgttcctggagct

SEQ ID NO: 2814783 - DNA, 25 bp, Homo sapien
aagctatggaccttacatcctgtgc

SEQ ID NO: 2814784 - DNA, 25 bp, Homo sapien
cagagttgaaatcgtgtcgtcccca

SEQ ID NO: 2814785 - DNA, 25 bp, Homo sapien
ctgaagatcagaattttccccagtt

SEQ ID NO: 2814786 - DNA, 25 bp, Homo sapien
agatcagaattttccccagtttcat

SEQ ID NO: 2814787 - DNA, 25 bp, Homo sapien
gaagatcagaattttccccagtttc

SEQ ID NO: 2814788 - DNA, 25 bp, Homo sapien
tctgttgtatttctgaagatcagaa

SEQ ID NO: 2814789 - DNA, 25 bp, Homo sapien
gatcaagtaagcacctcttggaccc

SEQ ID NO: 2814790 - DNA, 25 bp, Homo sapien
gagacctgcgatcattccttctgca

SEQ ID NO: 2814791 - DNA, 25 bp, Homo sapien
tcggtttgcccttgagagacctgcg

SEQ ID NO: 2814792 - DNA, 25 bp, Homo sapien
ttctgcaggcggaattgtggaaaac

SEQ ID NO: 2814793 - DNA, 25 bp, Homo sapien
gaagatggaaacttggcaggaaaat

SEQ ID NO: 2814794 - DNA, 25 bp, Homo sapien
tttatttcccagttggcagtaccac

SEQ ID NO: 2814795 - DNA, 25 bp, Homo sapien
gtgtatctgagatgctaatggcctt

SEQ ID NO: 2814796 - DNA, 25 bp, Homo sapien
ttgagtatgatcttagctggtggca

SEQ ID NO: 2814797 - DNA, 25 bp, Homo sapien
gagatgagttatcctactttgatac

SEQ ID NO: 2814798 - DNA, 25 bp, Homo sapien
ggaatgggagatgagttatcctact

SEQ ID NO: 2814799 - DNA, 25 bp, Homo sapien
tgcttggaatgggagatgagttatc

SEQ ID NO: 2814800 - DNA, 25 bp, Homo sapien
aagaaaagtgcttggaatgggagat

SEQ ID NO: 2814801 - DNA, 25 bp, Homo sapien
gatgattcaccccacaataaagccc

SEQ ID NO: 2814802 - DNA, 25 bp, Homo sapien
tctctcgttgctcgctttccagtgt

SEQ ID NO: 2814803 - DNA, 25 bp, Homo sapien
tcctgatgatgtcagtatgcataca

SEQ ID NO: 2814804 - DNA, 25 bp, Homo sapien
cttggttaccatagtatcctctgcc

SEQ ID NO: 2814805 - DNA, 25 bp, Homo sapien
agaatgtaatacttggccaggcaca

SEQ ID NO: 2814806 - DNA, 25 bp, Homo sapien
gagttctgcccataaagttagtctt

SEQ ID NO: 2814807 - DNA, 25 bp, Homo sapien
cagacagaacagtgatacgtgaata

SEQ ID NO: 2814808 - DNA, 25 bp, Homo sapien
tgagacacatgaccggttcctctct

SEQ ID NO: 2814809 - DNA, 25 bp, Homo sapien
tctttgatatcactgtagctattcc

SEQ ID NO: 2814810 - DNA, 25 bp, Homo sapien
ctgtagctattccagtatcctgccc

SEQ ID NO: 2814811 - DNA, 25 bp, Homo sapien
actgtagctattccagtatcctgcc

SEQ ID NO: 2814812 - DNA, 25 bp, Homo sapien
gtgtttgattggcagacactctgtg

SEQ ID NO: 2814813 - DNA, 25 bp, Homo sapien
agcgccatctgccttcagtctgcct

SEQ ID NO: 2814814 - DNA, 25 bp, Homo sapien
tcatcgcatgatactttaagtagag

SEQ ID NO: 2814815 - DNA, 25 bp, Homo sapien
agaatttccccatcatcgcatgata

SEQ ID NO: 2814816 - DNA, 25 bp, Homo sapien
cctagagagggtggtcgcagtagaa

SEQ ID NO: 2814817 - DNA, 25 bp, Homo sapien
tacacagactcctgctacacatgtg

SEQ ID NO: 2814818 - DNA, 25 bp, Homo sapien
ctgctacacatgtgcccacctggat

SEQ ID NO: 2814819 - DNA, 25 bp, Homo sapien
tacacatgtgcccacctggattcct

SEQ ID NO: 2814820 - DNA, 25 bp, Homo sapien
ttgacccatacacagactcctgcta

SEQ ID NO: 2814821 - DNA, 25 bp, Homo sapien
tccttgggtaatgggattagcactc

SEQ ID NO: 2814822 - DNA, 25 bp, Homo sapien
tagtaatcttatgctccttgacagg

SEQ ID NO: 2814823 - DNA, 25 bp, Homo sapien
tgtaactgccactcttggaatggaa

SEQ ID NO: 2814824 - DNA, 25 bp, Homo sapien
ccttgacaggtcttacagtgtaact

SEQ ID NO: 2814825 - DNA, 25 bp, Homo sapien
gttgtgtgagttagtctttgacagt

SEQ ID NO: 2814826 - DNA, 25 bp, Homo sapien
aatgggtgttgtgtgagttagtctt

SEQ ID NO: 2814827 - DNA, 25 bp, Homo sapien
gaatgggtgttgtgtgagttagtct

SEQ ID NO: 2814828 - DNA, 25 bp, Homo sapien
ggtgttgtgtgagttagtctttgac

SEQ ID NO: 2814829 - DNA, 25 bp, Homo sapien
caagtactgctgtttagtttgaagc

SEQ ID NO: 2814830 - DNA, 25 bp, Homo sapien
tcaagtactgctgtttagtttgaag

SEQ ID NO: 2814831 - DNA, 25 bp, Homo sapien
tggtggtacttcaagctgcacagct

SEQ ID NO: 2814832 - DNA, 25 bp, Homo sapien
gtggtacttcaagctgcacagctgt

SEQ ID NO: 2814833 - DNA, 25 bp, Homo sapien
gcgggtagtcgagggggcggctggc

SEQ ID NO: 2814834 - DNA, 25 bp, Homo sapien
gggtggtggtacttcaagctgcaca

SEQ ID NO: 2814835 - DNA, 25 bp, Homo sapien
cagctcatacaacgccctgcaaaaa

SEQ ID NO: 2814836 - DNA, 25 bp, Homo sapien
tcatacaacgccctgcaaaaaacca

SEQ ID NO: 2814837 - DNA, 25 bp, Homo sapien
tttacagctcatacaacgccctgca

SEQ ID NO: 2814838 - DNA, 25 bp, Homo sapien
ttctttacagctcatacaacgccct

SEQ ID NO: 2814839 - DNA, 25 bp, Homo sapien
taacaaacataagaatgctttgatc

SEQ ID NO: 2814840 - DNA, 25 bp, Homo sapien
attctaacaaacataagaatgcttt

SEQ ID NO: 2814841 - DNA, 25 bp, Homo sapien
acaaacataagaatgctttgatcat

SEQ ID NO: 2814842 - DNA, 25 bp, Homo sapien
tctaacaaacataagaatgctttga

SEQ ID NO: 2814843 - DNA, 25 bp, Homo sapien
tgcccgggccatgaagtagcggctg

SEQ ID NO: 2814844 - DNA, 25 bp, Homo sapien
aagcttccgcctgcgggccggacaa

SEQ ID NO: 2814845 - DNA, 25 bp, Homo sapien
agctcgctgctctcgctggcggatg

SEQ ID NO: 2814846 - DNA, 25 bp, Homo sapien
ttttgcccgccgctcgtgaccgaga

SEQ ID NO: 2814847 - DNA, 25 bp, Homo sapien
agctgtttggctttccgaagcccac

SEQ ID NO: 2814848 - DNA, 25 bp, Homo sapien
ctgtctttaagaggtgggtgttcgt

SEQ ID NO: 2814849 - DNA, 25 bp, Homo sapien
tggccgcgtccctagcctgctagtt

SEQ ID NO: 2814850 - DNA, 25 bp, Homo sapien
tcgttgttcgggtgctttctgtgca

SEQ ID NO: 2814851 - DNA, 25 bp, Homo sapien
tgagaaatgtaatcacttttatgaa

SEQ ID NO: 2814852 - DNA, 25 bp, Homo sapien
ctgttgagaaatgtaatcactttta

SEQ ID NO: 2814853 - DNA, 25 bp, Homo sapien
gagaaatgtaatcacttttatgaac

SEQ ID NO: 2814854 - DNA, 25 bp, Homo sapien
gttgagaaatgtaatcacttttatg

SEQ ID NO: 2814855 - DNA, 25 bp, Homo sapien
cgtagttcctattgattcatcagat

SEQ ID NO: 2814856 - DNA, 25 bp, Homo sapien
accaccagacccgtagttcctattg

SEQ ID NO: 2814857 - DNA, 25 bp, Homo sapien
tgaatgtcttggtaccaccagaccc

SEQ ID NO: 2814858 - DNA, 25 bp, Homo sapien
tttccaatgaatgtcttggtaccac

SEQ ID NO: 2814859 - DNA, 25 bp, Homo sapien
catttctacagttgacgttatcagt

SEQ ID NO: 2814860 - DNA, 25 bp, Homo sapien
tcagttataatatttagcctcctca

SEQ ID NO: 2814861 - DNA, 25 bp, Homo sapien
cagttataatatttagcctcctcat

SEQ ID NO: 2814862 - DNA, 25 bp, Homo sapien
tacagttgacgttatcagttataat

SEQ ID NO: 2814863 - DNA, 25 bp, Homo sapien
tcctagcaccccatgcctctttttc

SEQ ID NO: 2814864 - DNA, 25 bp, Homo sapien
ttcacatttgttagcatcgttattc

SEQ ID NO: 2814865 - DNA, 25 bp, Homo sapien
tagctctcctagcaccccatgcctc

SEQ ID NO: 2814866 - DNA, 25 bp, Homo sapien
catcgttattcaattcatgcctata

SEQ ID NO: 2814867 - DNA, 25 bp, Homo sapien
caggaggctgacctttatggactac

SEQ ID NO: 2814868 - DNA, 25 bp, Homo sapien
tcacatgaacacttggcaccatttg

SEQ ID NO: 2814869 - DNA, 25 bp, Homo sapien
tatggactacattaatgggctccct

SEQ ID NO: 2814870 - DNA, 25 bp, Homo sapien
cctatccatggaatagaatgcaaac

SEQ ID NO: 2814871 - DNA, 25 bp, Homo sapien
caagctcttcggtttttgtcgctgt

SEQ ID NO: 2814872 - DNA, 25 bp, Homo sapien
tcctgtttctcaatctgccctagtc

SEQ ID NO: 2814873 - DNA, 25 bp, Homo sapien
tctttcctgtttctcaatctgccct

SEQ ID NO: 2814874 - DNA, 25 bp, Homo sapien
tcaagctcttcggtttttgtcgctg

SEQ ID NO: 2814875 - DNA, 25 bp, Homo sapien
tgatcatttatcacacagttaggct

SEQ ID NO: 2814876 - DNA, 25 bp, Homo sapien
ttcaatcaaatgagccctataaggg

SEQ ID NO: 2814877 - DNA, 25 bp, Homo sapien
cctaataacggaataggcagatgtg

SEQ ID NO: 2814878 - DNA, 25 bp, Homo sapien
tgtgtgcatggtagttatgaaaacc

SEQ ID NO: 2814879 - DNA, 25 bp, Homo sapien
gacacattgtccagggatctgagga

SEQ ID NO: 2814880 - DNA, 25 bp, Homo sapien
gcctgccggagtccagacacattgt

SEQ ID NO: 2814881 - DNA, 25 bp, Homo sapien
tcattgaggcctgggtaccaaccca

SEQ ID NO: 2814882 - DNA, 25 bp, Homo sapien
taaggatgggtctgtcaagcctgcc

SEQ ID NO: 2814883 - DNA, 25 bp, Homo sapien
tactcaagccatgtggcaagtaaaa

SEQ ID NO: 2814884 - DNA, 25 bp, Homo sapien
taattcccatctttatctatactca

SEQ ID NO: 2814885 - DNA, 25 bp, Homo sapien
gagagccacgtctgtgacccaataa

SEQ ID NO: 2814886 - DNA, 25 bp, Homo sapien
tctttatctatactcaagccatgtg

SEQ ID NO: 2814887 - DNA, 25 bp, Homo sapien
ggttctgccttatccatgaaactag

SEQ ID NO: 2814888 - DNA, 25 bp, Homo sapien
tagatatgacctagtatacccattg

SEQ ID NO: 2814889 - DNA, 25 bp, Homo sapien
taaatgacaggcagtaactactctg

SEQ ID NO: 2814890 - DNA, 25 bp, Homo sapien
tttagtctttcacctgtatcatcca

SEQ ID NO: 2814891 - DNA, 25 bp, Homo sapien
aagccgaggcagttgttgaaaccaa

SEQ ID NO: 2814892 - DNA, 25 bp, Homo sapien
gttattccggtggttgtcctgctgg

SEQ ID NO: 2814893 - DNA, 25 bp, Homo sapien
tcaagggcctttggaggcaagtaaa

SEQ ID NO: 2814894 - DNA, 25 bp, Homo sapien
gcaagtaaaatgagccccgtgaact

SEQ ID NO: 2814895 - DNA, 25 bp, Homo sapien
cagtgccattgtctttatatgaaca

SEQ ID NO: 2814896 - DNA, 25 bp, Homo sapien
taatctaacaatggaagatttgccc

SEQ ID NO: 2814897 - DNA, 25 bp, Homo sapien
acatagactagagaaaccgtcctct

SEQ ID NO: 2814898 - DNA, 25 bp, Homo sapien
ggatgtaaataaccccattctttgc

SEQ ID NO: 2814899 - DNA, 25 bp, Homo sapien
tttatcgagtcagagaatgcactgc

SEQ ID NO: 2814900 - DNA, 25 bp, Homo sapien
tcccagaggagtgaatcctaggcct

SEQ ID NO: 2814901 - DNA, 25 bp, Homo sapien
taggcctggccacagtagaatcgcc

SEQ ID NO: 2814902 - DNA, 25 bp, Homo sapien
tggaaacggtaagtctgctagggca

SEQ ID NO: 2814903 - DNA, 25 bp, Homo sapien
ctactctttagccttttccgcattc

SEQ ID NO: 2814904 - DNA, 25 bp, Homo sapien
cctcttctctcggaactaatagaag

SEQ ID NO: 2814905 - DNA, 25 bp, Homo sapien
actctttagccttttccgcattctc

SEQ ID NO: 2814906 - DNA, 25 bp, Homo sapien
ggcctcttctctcggaactaataga

SEQ ID NO: 2814907 - DNA, 25 bp, Homo sapien
tatacccgaggcagtgtagacaaca

SEQ ID NO: 2814908 - DNA, 25 bp, Homo sapien
tagagcccaccctattgaaatatga

SEQ ID NO: 2814909 - DNA, 25 bp, Homo sapien
taagaatgaggtacacgtttgactc

SEQ ID NO: 2814910 - DNA, 25 bp, Homo sapien
tagtattcaaagctctccataaggt

SEQ ID NO: 2814911 - DNA, 25 bp, Homo sapien
tatgaatatcatagaaattacagtt

SEQ ID NO: 2814912 - DNA, 25 bp, Homo sapien
aatctttgatactggttattttatg

SEQ ID NO: 2814913 - DNA, 25 bp, Homo sapien
agagctgtggcatgagcgcggctca

SEQ ID NO: 2814914 - DNA, 25 bp, Homo sapien
gaatatcatagaaattacagtttaa

SEQ ID NO: 2814915 - DNA, 25 bp, Homo sapien
ccatacaaaggtttgagagatttgg

SEQ ID NO: 2814916 - DNA, 25 bp, Homo sapien
cgtatactgatattcaaatgtggca

SEQ ID NO: 2814917 - DNA, 25 bp, Homo sapien
tagaaacggtgccaaaaccatacaa

SEQ ID NO: 2814918 - DNA, 25 bp, Homo sapien
tccattcaaggtagttcaaacttac

SEQ ID NO: 2814919 - DNA, 25 bp, Homo sapien
tgaataagatatcattaagaattta

SEQ ID NO: 2814920 - DNA, 25 bp, Homo sapien
tggtatttactaacttaagtattca

SEQ ID NO: 2814921 - DNA, 25 bp, Homo sapien
tatacaacgtttttaatgaataaga

SEQ ID NO: 2814922 - DNA, 25 bp, Homo sapien
taagaatttatattctaaacaaaca

SEQ ID NO: 2814923 - DNA, 25 bp, Homo sapien
ggtttgaagagtccaacagactgaa

SEQ ID NO: 2814924 - DNA, 25 bp, Homo sapien
tatttgcttgatatgctccaatcgg

SEQ ID NO: 2814925 - DNA, 25 bp, Homo sapien
tattctaatagttcacgatccttgc

SEQ ID NO: 2814926 - DNA, 25 bp, Homo sapien
tccaatcggaatttcaggcaatcca

SEQ ID NO: 2814927 - DNA, 25 bp, Homo sapien
ctactgaaccttgcaagagataaag

SEQ ID NO: 2814928 - DNA, 25 bp, Homo sapien
tactgaaccttgcaagagataaaga

SEQ ID NO: 2814929 - DNA, 25 bp, Homo sapien
gatatgtatatatgcggacaacggg

SEQ ID NO: 2814930 - DNA, 25 bp, Homo sapien
tgttccctcaacctgtctttggtag

SEQ ID NO: 2814931 - DNA, 25 bp, Homo sapien
caacgggatagaaggagtgagaatt

SEQ ID NO: 2814932 - DNA, 25 bp, Homo sapien
acttctagggagttatactgtctac

SEQ ID NO: 2814933 - DNA, 25 bp, Homo sapien
gatgttaatgggttaaggagccctc

SEQ ID NO: 2814934 - DNA, 25 bp, Homo sapien
tgggaccatagacacatgtcactat

SEQ ID NO: 2814935 - DNA, 25 bp, Homo sapien
gcctatttagattagagaccaatgg

SEQ ID NO: 2814936 - DNA, 25 bp, Homo sapien
gcctaggttggtctcctgaagatgt

SEQ ID NO: 2814937 - DNA, 25 bp, Homo sapien
tcttatgtagggcttaaggtgggac

SEQ ID NO: 2814938 - DNA, 25 bp, Homo sapien
gattctcttatgtagggcttaaggt

SEQ ID NO: 2814939 - DNA, 25 bp, Homo sapien
tagggcttaaggtgggacattttga

SEQ ID NO: 2814940 - DNA, 25 bp, Homo sapien
cttaaggtgggacattttgataggt

SEQ ID NO: 2814941 - DNA, 25 bp, Homo sapien
tctctcaggacagcacatccacttt

SEQ ID NO: 2814942 - DNA, 25 bp, Homo sapien
gttgtctctcaggacagcacatcca

SEQ ID NO: 2814943 - DNA, 25 bp, Homo sapien
cagtgttgtctctcaggacagcaca

SEQ ID NO: 2814944 - DNA, 25 bp, Homo sapien
taaccccagtgttgtctctcaggac

SEQ ID NO: 2814945 - DNA, 25 bp, Homo sapien
attcagactgaaaacgaccatcctt

SEQ ID NO: 2814946 - DNA, 25 bp, Homo sapien
tgacacaaggaccaacccattcaga

SEQ ID NO: 2814947 - DNA, 25 bp, Homo sapien
ccattcagactgaaaacgaccatcc

SEQ ID NO: 2814948 - DNA, 25 bp, Homo sapien
ggaccaacccattcagactgaaaac

SEQ ID NO: 2814949 - DNA, 25 bp, Homo sapien
ttcctttgtcttaaaacttcatgac

SEQ ID NO: 2814950 - DNA, 25 bp, Homo sapien
tgtcttaaaacttcatgacccactt

SEQ ID NO: 2814951 - DNA, 25 bp, Homo sapien
ctttgtcttaaaacttcatgaccca

SEQ ID NO: 2814952 - DNA, 25 bp, Homo sapien
tttgtcttaaaacttcatgacccac

SEQ ID NO: 2814953 - DNA, 25 bp, Homo sapien
aaatgaaatggatttaattgtttgg

SEQ ID NO: 2814954 - DNA, 25 bp, Homo sapien
atgaaatggatttaattgtttgggt

SEQ ID NO: 2814955 - DNA, 25 bp, Homo sapien
aatgaaatggatttaattgtttggg

SEQ ID NO: 2814956 - DNA, 25 bp, Homo sapien
taaatgaaatggatttaattgtttg

SEQ ID NO: 2814957 - DNA, 25 bp, Homo sapien
tttttaacaatgatcttgcttttat

SEQ ID NO: 2814958 - DNA, 25 bp, Homo sapien
caatgatcttgcttttatttagttc

SEQ ID NO: 2814959 - DNA, 25 bp, Homo sapien
ttgcttttatttagttcatccaaat

SEQ ID NO: 2814960 - DNA, 25 bp, Homo sapien
gcttttatttagttcatccaaattg

SEQ ID NO: 2814961 - DNA, 25 bp, Homo sapien
ggcccagtgaagttgtcttattctc

SEQ ID NO: 2814962 - DNA, 25 bp, Homo sapien
gcccagtgaagttgtcttattctcc

SEQ ID NO: 2814963 - DNA, 25 bp, Homo sapien
cttcatgaagactatctgaagtctc

SEQ ID NO: 2814964 - DNA, 25 bp, Homo sapien
tatctgaagtctcaggcatataagg

SEQ ID NO: 2814965 - DNA, 25 bp, Homo sapien
ggcatataaggatttcgactaaaca

SEQ ID NO: 2814966 - DNA, 25 bp, Homo sapien
taaggatttcgactaaacatttgaa

SEQ ID NO: 2814967 - DNA, 25 bp, Homo sapien
aacagctgataggtgatcatcccaa

SEQ ID NO: 2814968 - DNA, 25 bp, Homo sapien
catcccaattgtttgggtggtcagc

SEQ ID NO: 2814969 - DNA, 25 bp, Homo sapien
tccagaggtgtgagaaattacaatt

SEQ ID NO: 2814970 - DNA, 25 bp, Homo sapien
cgttgggttaacagttccagaggtg

SEQ ID NO: 2814971 - DNA, 25 bp, Homo sapien
ttaagcaatccttacacgttagcct

SEQ ID NO: 2814972 - DNA, 25 bp, Homo sapien
aatctggctggtaggattacaacag

SEQ ID NO: 2814973 - DNA, 25 bp, Homo sapien
tccttacacgttagcctcctgagtt

SEQ ID NO: 2814974 - DNA, 25 bp, Homo sapien
tctggctggtaggattacaacaggc

SEQ ID NO: 2814975 - DNA, 25 bp, Homo sapien
tgtttgacaccatgaaaactaccag

SEQ ID NO: 2814976 - DNA, 25 bp, Homo sapien
gatcctcctctactagacacatttg

SEQ ID NO: 2814977 - DNA, 25 bp, Homo sapien
cttttggtattggattctaaaatca

SEQ ID NO: 2814978 - DNA, 25 bp, Homo sapien
gttgcccccttaacatctgtttgac

SEQ ID NO: 2814979 - DNA, 25 bp, Homo sapien
tattttctgaggaggtccatataag

SEQ ID NO: 2814980 - DNA, 25 bp, Homo sapien
agaaggtgctgtttcggtgctacaa

SEQ ID NO: 2814981 - DNA, 25 bp, Homo sapien
gcatatacatgacttctgttgcttg

SEQ ID NO: 2814982 - DNA, 25 bp, Homo sapien
ggccccatcagatcaacagtaacta

SEQ ID NO: 2814983 - DNA, 25 bp, Homo sapien
tattgggtcttattcacatggaaca

SEQ ID NO: 2814984 - DNA, 25 bp, Homo sapien
ggagcaatttctctcaatcgtggga

SEQ ID NO: 2814985 - DNA, 25 bp, Homo sapien
ccttgcatatactgagggaagacta

SEQ ID NO: 2814986 - DNA, 25 bp, Homo sapien
ctgactgcaggacttcggtatgagt

SEQ ID NO: 2814987 - DNA, 25 bp, Homo sapien
gaaaaccttgtatgactgccattga

SEQ ID NO: 2814988 - DNA, 25 bp, Homo sapien
tgatttagtcaaatgaattccagct

SEQ ID NO: 2814989 - DNA, 25 bp, Homo sapien
caactccctttaagtgattgccaaa

SEQ ID NO: 2814990 - DNA, 25 bp, Homo sapien
tacttaatgagaggtgatacccaga

SEQ ID NO: 2814991 - DNA, 25 bp, Homo sapien
tcctggatataccatgatgagctcc

SEQ ID NO: 2814992 - DNA, 25 bp, Homo sapien
ttttcatggcattctcttaagactt

SEQ ID NO: 2814993 - DNA, 25 bp, Homo sapien
taattggattctaccagagtgaggg

SEQ ID NO: 2814994 - DNA, 25 bp, Homo sapien
cctcttctgaaacaattaccaaacg

SEQ ID NO: 2814995 - DNA, 25 bp, Homo sapien
gcagtgtagttgaatgatattcacc

SEQ ID NO: 2814996 - DNA, 25 bp, Homo sapien
ccagttcgtttgtaatatgcaatct

SEQ ID NO: 2814997 - DNA, 25 bp, Homo sapien
gatgaaggtcaccattttttccact

SEQ ID NO: 2814998 - DNA, 25 bp, Homo sapien
ttcttatgccacttctctcacttgg

SEQ ID NO: 2814999 - DNA, 25 bp, Homo sapien
ggtggtcctaaattcaaacgacaga

SEQ ID NO: 2815000 - DNA, 25 bp, Homo sapien
cgtgatttatctcgcgctgccggaa

SEQ ID NO: 2815001 - DNA, 25 bp, Homo sapien
aagcttcctctcgtgatttatctcg

SEQ ID NO: 2815002 - DNA, 25 bp, Homo sapien
gacagatttaagcttcctctcgtga

SEQ ID NO: 2815003 - DNA, 25 bp, Homo sapien
tgacgaccgcattcgtggcaggtga

SEQ ID NO: 2815004 - DNA, 25 bp, Homo sapien
caaaaccggaggagaaccggagatg

SEQ ID NO: 2815005 - DNA, 25 bp, Homo sapien
taaacacatgctccaccgaggggct

SEQ ID NO: 2815006 - DNA, 25 bp, Homo sapien
cggagatgcggaacctgatcatgcc

SEQ ID NO: 2815007 - DNA, 25 bp, Homo sapien
tgagggtcctttcgcgccttgattt

SEQ ID NO: 2815008 - DNA, 25 bp, Homo sapien
gctttgagggtcctttcgcgccttg

SEQ ID NO: 2815009 - DNA, 25 bp, Homo sapien
tttgagggtcctttcgcgccttgat

SEQ ID NO: 2815010 - DNA, 25 bp, Homo sapien
cagctttgagggtcctttcgcgcct

SEQ ID NO: 2815011 - DNA, 25 bp, Homo sapien
tagtcatttggaggtcgttgcagcc

SEQ ID NO: 2815012 - DNA, 25 bp, Homo sapien
gaggttcttgaccacttcctgggag

SEQ ID NO: 2815013 - DNA, 25 bp, Homo sapien
tggctagtagttgtcttgctggaag

SEQ ID NO: 2815014 - DNA, 25 bp, Homo sapien
tcctgggagattgcgactcttggtg

SEQ ID NO: 2815015 - DNA, 25 bp, Homo sapien
tctttgagttatgacagtatatttg

SEQ ID NO: 2815016 - DNA, 25 bp, Homo sapien
taagttctttgagttatgacagtat

SEQ ID NO: 2815017 - DNA, 25 bp, Homo sapien
tcattctttcctgttgagtggtttt

SEQ ID NO: 2815018 - DNA, 25 bp, Homo sapien
tctttcctgttgagtggtttttatc

SEQ ID NO: 2815019 - DNA, 25 bp, Homo sapien
tgaatggttgataataagctgttct

SEQ ID NO: 2815020 - DNA, 25 bp, Homo sapien
ccacaggtagtgttggtagcaccca

SEQ ID NO: 2815021 - DNA, 25 bp, Homo sapien
taggtcctcttggtgttagtagcaa

SEQ ID NO: 2815022 - DNA, 25 bp, Homo sapien
tctgaaatactgcttgcccacaggt

SEQ ID NO: 2815023 - DNA, 25 bp, Homo sapien
tggcctgcggcctgcgtggaggagg

SEQ ID NO: 2815024 - DNA, 25 bp, Homo sapien
cctgcggcctgcgtggaggaggtgg

SEQ ID NO: 2815025 - DNA, 25 bp, Homo sapien
caggaggaagccacactggcctgcg

SEQ ID NO: 2815026 - DNA, 25 bp, Homo sapien
ggaagccacactggcctgcggcctg

SEQ ID NO: 2815027 - DNA, 25 bp, Homo sapien
ggaaaatctctttcttgaatgcctg

SEQ ID NO: 2815028 - DNA, 25 bp, Homo sapien
tgattcagtttttcctatcctcagc

SEQ ID NO: 2815029 - DNA, 25 bp, Homo sapien
tgaatgcctgattcagtttttccta

SEQ ID NO: 2815030 - DNA, 25 bp, Homo sapien
tggctcagccctctagggcccaaag

SEQ ID NO: 2815031 - DNA, 25 bp, Homo sapien
tccagggaatgcgtggatgaatcct

SEQ ID NO: 2815032 - DNA, 25 bp, Homo sapien
tatttagacaatcacaaacagtagc

SEQ ID NO: 2815033 - DNA, 25 bp, Homo sapien
cagaagcgatatttcccaagagaag

SEQ ID NO: 2815034 - DNA, 25 bp, Homo sapien
tactccaaatttgtcctgtgtgaac

SEQ ID NO: 2815035 - DNA, 25 bp, Homo sapien
tggcaacctcctccaacttcatagg

SEQ ID NO: 2815036 - DNA, 25 bp, Homo sapien
tactgagtataatccgtgtggcaac

SEQ ID NO: 2815037 - DNA, 25 bp, Homo sapien
tcgttaggtggctatacggctgata

SEQ ID NO: 2815038 - DNA, 25 bp, Homo sapien
tacttgcaattaatgaaagcaccca

SEQ ID NO: 2815039 - DNA, 25 bp, Homo sapien
agtttggcaaccaattttccacatg

SEQ ID NO: 2815040 - DNA, 25 bp, Homo sapien
ccagttccggtatgggcttctacct

SEQ ID NO: 2815041 - DNA, 25 bp, Homo sapien
tatgtgccgtaattccctcagagca

SEQ ID NO: 2815042 - DNA, 25 bp, Homo sapien
tgttctccatactagggtgctgggc

SEQ ID NO: 2815043 - DNA, 25 bp, Homo sapien
gccagaggtcttggtataccttgat

SEQ ID NO: 2815044 - DNA, 25 bp, Homo sapien
taccttgattaagtttgtgcatcaa

SEQ ID NO: 2815045 - DNA, 25 bp, Homo sapien
tcaagatctctagccatgtccttgc

SEQ ID NO: 2815046 - DNA, 25 bp, Homo sapien
tcaaaaaaagcgagaatcaagatct

SEQ ID NO: 2815047 - DNA, 25 bp, Homo sapien
gcgccgagcgcggtgggagaggaga

SEQ ID NO: 2815048 - DNA, 25 bp, Homo sapien
ggatctcggcgccgcagtcctgcgc

SEQ ID NO: 2815049 - DNA, 25 bp, Homo sapien
tggatctcggcgccgcagtcctgcg

SEQ ID NO: 2815050 - DNA, 25 bp, Homo sapien
ttgcacggggacgacggctccgtct

SEQ ID NO: 2815051 - DNA, 25 bp, Homo sapien
agccccgggcacggcggaggcagcg

SEQ ID NO: 2815052 - DNA, 25 bp, Homo sapien
agccctgggccatcggtaggttgca

SEQ ID NO: 2815053 - DNA, 25 bp, Homo sapien
acggctccgtctgtaaccttttgtg

SEQ ID NO: 2815054 - DNA, 25 bp, Homo sapien
gtgcagcgcgtgtgagtgtgcgggg

SEQ ID NO: 2815055 - DNA, 25 bp, Homo sapien
tgtgcagcgcgtgtgagtgtgcggg

SEQ ID NO: 2815056 - DNA, 25 bp, Homo sapien
gggggcgtgcgcccccgtgtgcgcg

SEQ ID NO: 2815057 - DNA, 25 bp, Homo sapien
cgggggcgtgcgcccccgtgtgcgc

SEQ ID NO: 2815058 - DNA, 25 bp, Homo sapien
tgagaagtagctttccccggccggc

SEQ ID NO: 2815059 - DNA, 25 bp, Homo sapien
cgcgctcagggtgcgactgcccggg

SEQ ID NO: 2815060 - DNA, 25 bp, Homo sapien
ggcacctttggctgcgtgcccggcc

SEQ ID NO: 2815061 - DNA, 25 bp, Homo sapien
gtgcgactgcccgggtcagatagca

SEQ ID NO: 2815062 - DNA, 25 bp, Homo sapien
agatgtcgggcattgccaccctcgc

SEQ ID NO: 2815063 - DNA, 25 bp, Homo sapien
ggtccgagccagaagcttaagcggc

SEQ ID NO: 2815064 - DNA, 25 bp, Homo sapien
gtcctggttgcaacccgcgtgcgag

SEQ ID NO: 2815065 - DNA, 25 bp, Homo sapien
ccctccgagtgtctgccggtgcagt

SEQ ID NO: 2815066 - DNA, 25 bp, Homo sapien
tttaagccttcccaaagattagcca

SEQ ID NO: 2815067 - DNA, 25 bp, Homo sapien
gccttcccaaagattagccaattcc

SEQ ID NO: 2815068 - DNA, 25 bp, Homo sapien
gattagccaattccacagtgtacac

SEQ ID NO: 2815069 - DNA, 25 bp, Homo sapien
caaagattagccaattccacagtgt

SEQ ID NO: 2815070 - DNA, 25 bp, Homo sapien
tcctaagagacaaatttcttgtaaa

SEQ ID NO: 2815071 - DNA, 25 bp, Homo sapien
catatttgcagtgaaactgagtatt

SEQ ID NO: 2815072 - DNA, 25 bp, Homo sapien
tgtcggtcatatttgcagtgaaact

SEQ ID NO: 2815073 - DNA, 25 bp, Homo sapien
tcggtcatatttgcagtgaaactga

SEQ ID NO: 2815074 - DNA, 25 bp, Homo sapien
ggtcatatttgcagtgaaactgagt

SEQ ID NO: 2815075 - DNA, 25 bp, Homo sapien
taagaatatttgaaagaagcctcta

SEQ ID NO: 2815076 - DNA, 25 bp, Homo sapien
gcaagttgcaaatggtaaagtaaga

SEQ ID NO: 2815077 - DNA, 25 bp, Homo sapien
tgaaagaagcctctaagatgagcat

SEQ ID NO: 2815078 - DNA, 25 bp, Homo sapien
tttttgcaagttgcaaatggtaaag

SEQ ID NO: 2815079 - DNA, 25 bp, Homo sapien
tagaagcatctataaacgttgccaa

SEQ ID NO: 2815080 - DNA, 25 bp, Homo sapien
gttggatccacgtaaatttcagcaa

SEQ ID NO: 2815081 - DNA, 25 bp, Homo sapien
gtctgatgtcatctagttggatcca

SEQ ID NO: 2815082 - DNA, 25 bp, Homo sapien
tatagaagcatctataaacgttgcc

SEQ ID NO: 2815083 - DNA, 25 bp, Homo sapien
ttcacttgcctcaataatgttattg

SEQ ID NO: 2815084 - DNA, 25 bp, Homo sapien
gttattgatctctatggctgtaaaa

SEQ ID NO: 2815085 - DNA, 25 bp, Homo sapien
tatagcgttattaaagtgtgtctta

SEQ ID NO: 2815086 - DNA, 25 bp, Homo sapien
tttatttccgcatggaaagttattg

SEQ ID NO: 2815087 - DNA, 25 bp, Homo sapien
ttaaggatttttctggctgagaaga

SEQ ID NO: 2815088 - DNA, 25 bp, Homo sapien
attgctgatctgtataaaagttgac

SEQ ID NO: 2815089 - DNA, 25 bp, Homo sapien
aaaagttgacatgtaaagatatatt

SEQ ID NO: 2815090 - DNA, 25 bp, Homo sapien
atatatttcttgaaagtaccttcat

SEQ ID NO: 2815091 - DNA, 25 bp, Homo sapien
atatttcttgaaagtaccttcattg

SEQ ID NO: 2815092 - DNA, 25 bp, Homo sapien
gtaggctgcggagatgaactgaaga

SEQ ID NO: 2815093 - DNA, 25 bp, Homo sapien
cagtaggctgcggagatgaactgaa

SEQ ID NO: 2815094 - DNA, 25 bp, Homo sapien
agtaggctgcggagatgaactgaag

SEQ ID NO: 2815095 - DNA, 25 bp, Homo sapien
ctcatgtgtgggtaaggcttcacca

SEQ ID NO: 2815096 - DNA, 25 bp, Homo sapien
cacctcatgtgtgggtaaggcttca

SEQ ID NO: 2815097 - DNA, 25 bp, Homo sapien
cctcatgtgtgggtaaggcttcacc

SEQ ID NO: 2815098 - DNA, 25 bp, Homo sapien
tcacctcatgtgtgggtaaggcttc

SEQ ID NO: 2815099 - DNA, 25 bp, Homo sapien
ttggaccaggtagccagttttgggc

SEQ ID NO: 2815100 - DNA, 25 bp, Homo sapien
gaagacaagcttttggaccaggtag

SEQ ID NO: 2815101 - DNA, 25 bp, Homo sapien
ccaaataaaattttgcagtcagcat

SEQ ID NO: 2815102 - DNA, 25 bp, Homo sapien
gtcagcatttctcttaatccaacaa

SEQ ID NO: 2815103 - DNA, 25 bp, Homo sapien
taagattagaggatgttgttctgcg

SEQ ID NO: 2815104 - DNA, 25 bp, Homo sapien
tctgcggaacagtgctcttgaggct

SEQ ID NO: 2815105 - DNA, 25 bp, Homo sapien
tgttgttctgcggaacagtgctctt

SEQ ID NO: 2815106 - DNA, 25 bp, Homo sapien
gagtagaatgccctgctctgcaagc

SEQ ID NO: 2815107 - DNA, 25 bp, Homo sapien
gcaggcctcttttgaagatgtaaaa

SEQ ID NO: 2815108 - DNA, 25 bp, Homo sapien
tctctgcaggcctcttttgaagatg

SEQ ID NO: 2815109 - DNA, 25 bp, Homo sapien
gaattctctgcaggcctcttttgaa

SEQ ID NO: 2815110 - DNA, 25 bp, Homo sapien
tccagaattctctgcaggcctcttt

SEQ ID NO: 2815111 - DNA, 25 bp, Homo sapien
ctgtctcaataggtgtctgaggttt

SEQ ID NO: 2815112 - DNA, 25 bp, Homo sapien
gtctcaataggtgtctgaggtttgc

SEQ ID NO: 2815113 - DNA, 25 bp, Homo sapien
ctcaataggtgtctgaggtttgcat

SEQ ID NO: 2815114 - DNA, 25 bp, Homo sapien
tgtgaaccttttcttcggcactcat

SEQ ID NO: 2815115 - DNA, 25 bp, Homo sapien
tcttggcaatggtttttttagtcat

SEQ ID NO: 2815116 - DNA, 25 bp, Homo sapien
tgttggggacttcttgaaccatgca

SEQ ID NO: 2815117 - DNA, 25 bp, Homo sapien
tgcctggagtgaggtcgtgttcttg

SEQ ID NO: 2815118 - DNA, 25 bp, Homo sapien
tggggacttcttgaaccatgcagtg

SEQ ID NO: 2815119 - DNA, 25 bp, Homo sapien
gctggctctcatcaaactaggtagt

SEQ ID NO: 2815120 - DNA, 25 bp, Homo sapien
gagttgtcaacaatgcccctatttg

SEQ ID NO: 2815121 - DNA, 25 bp, Homo sapien
tgctgcaaggcacaattacacgtta

SEQ ID NO: 2815122 - DNA, 25 bp, Homo sapien
tgtggtccagggagctattttccgg

SEQ ID NO: 2815123 - DNA, 25 bp, Homo sapien
tggctcctggtcatacccactgtgc

SEQ ID NO: 2815124 - DNA, 25 bp, Homo sapien
tatggctcctggtcatacccactgt

SEQ ID NO: 2815125 - DNA, 25 bp, Homo sapien
gtttatggctcctggtcatacccac

SEQ ID NO: 2815126 - DNA, 25 bp, Homo sapien
ttatggctcctggtcatacccactg

SEQ ID NO: 2815127 - DNA, 25 bp, Homo sapien
gttgaccataggagataatttggaa

SEQ ID NO: 2815128 - DNA, 25 bp, Homo sapien
gaagatgtagcctttcatcagaacg

SEQ ID NO: 2815129 - DNA, 25 bp, Homo sapien
catcagaacgccaaaaaggtttatg

SEQ ID NO: 2815130 - DNA, 25 bp, Homo sapien
tggaacgacctttcaggtcttccat

SEQ ID NO: 2815131 - DNA, 25 bp, Homo sapien
ggtgagagttgtcatatgtaggcca

SEQ ID NO: 2815132 - DNA, 25 bp, Homo sapien
tctcagaggctctagttcatccccg

SEQ ID NO: 2815133 - DNA, 25 bp, Homo sapien
tggatttaggtctcagaggctctag

SEQ ID NO: 2815134 - DNA, 25 bp, Homo sapien
aggccatgtgtaccccaagacagag

SEQ ID NO: 2815135 - DNA, 25 bp, Homo sapien
tgaatgcattgtttgcttcggtcag

SEQ ID NO: 2815136 - DNA, 25 bp, Homo sapien
gaatgcattgtttgcttcggtcagt

SEQ ID NO: 2815137 - DNA, 25 bp, Homo sapien
aatgcattgtttgcttcggtcagtt

SEQ ID NO: 2815138 - DNA, 25 bp, Homo sapien
taataccaggatttgagctccgcag

SEQ ID NO: 2815139 - DNA, 25 bp, Homo sapien
tcgtcgacgctagaatgctgactaa

SEQ ID NO: 2815140 - DNA, 25 bp, Homo sapien
taagtaagggctaaaccagcagcaa

SEQ ID NO: 2815141 - DNA, 25 bp, Homo sapien
cgcagagaactatatgggagcaaca

SEQ ID NO: 2815142 - DNA, 25 bp, Homo sapien
gagaaacaaattggcactaggaatg

SEQ ID NO: 2815143 - DNA, 25 bp, Homo sapien
gaacactgcaaaggtatgctgcatg

SEQ ID NO: 2815144 - DNA, 25 bp, Homo sapien
tgatgtcacatgcatattcgcattg

SEQ ID NO: 2815145 - DNA, 25 bp, Homo sapien
tctggttcctgtgataagagcctat

SEQ ID NO: 2815146 - DNA, 25 bp, Homo sapien
gaggaaggagctggtccctggatgt

SEQ ID NO: 2815147 - DNA, 25 bp, Homo sapien
agggtcaccagtggaggaaggagct

SEQ ID NO: 2815148 - DNA, 25 bp, Homo sapien
gaaggagctggtccctggatgtcat

SEQ ID NO: 2815149 - DNA, 25 bp, Homo sapien
cagggtcaccagtggaggaaggagc

SEQ ID NO: 2815150 - DNA, 25 bp, Homo sapien
ccttgagaatcttggcagaagcagt

SEQ ID NO: 2815151 - DNA, 25 bp, Homo sapien
gaagcagtaagtgcttgctgcccag

SEQ ID NO: 2815152 - DNA, 25 bp, Homo sapien
tttccaccttgagaatcttggcaga

SEQ ID NO: 2815153 - DNA, 25 bp, Homo sapien
tggcagaagcagtaagtgcttgctg

SEQ ID NO: 2815154 - DNA, 25 bp, Homo sapien
gatttgcacagatccaaggctctct

SEQ ID NO: 2815155 - DNA, 25 bp, Homo sapien
taagaggttttgctccaatcacatc

SEQ ID NO: 2815156 - DNA, 25 bp, Homo sapien
gctgtcaagttgtaaggcagctcag

SEQ ID NO: 2815157 - DNA, 25 bp, Homo sapien
gctgcagttacatttcctagatttg

SEQ ID NO: 2815158 - DNA, 25 bp, Homo sapien
cagtaaaaaggaccatctcttgatc

SEQ ID NO: 2815159 - DNA, 25 bp, Homo sapien
aatctgcagtaaaaaggaccatctc

SEQ ID NO: 2815160 - DNA, 25 bp, Homo sapien
tagcaaagcacattcagggtgtcgt

SEQ ID NO: 2815161 - DNA, 25 bp, Homo sapien
tgtcgttgctggcaatggaaagccc

SEQ ID NO: 2815162 - DNA, 25 bp, Homo sapien
agggacgatttcattcttcataagt

SEQ ID NO: 2815163 - DNA, 25 bp, Homo sapien
aagggacgatttcattcttcataag

SEQ ID NO: 2815164 - DNA, 25 bp, Homo sapien
gttaaagggacgatttcattcttca

SEQ ID NO: 2815165 - DNA, 25 bp, Homo sapien
taaagggacgatttcattcttcata

SEQ ID NO: 2815166 - DNA, 25 bp, Homo sapien
tgcagattgtctggctctgaaggag

SEQ ID NO: 2815167 - DNA, 25 bp, Homo sapien
gcagattgtctggctctgaaggaga

SEQ ID NO: 2815168 - DNA, 25 bp, Homo sapien
gacttgggaatttcctttggatgca

SEQ ID NO: 2815169 - DNA, 25 bp, Homo sapien
taaatcctccatgggcttaaggtga

SEQ ID NO: 2815170 - DNA, 25 bp, Homo sapien
gaccaggtattatctcagatgtcat

SEQ ID NO: 2815171 - DNA, 25 bp, Homo sapien
tgagggatgagcaataacatccaat

SEQ ID NO: 2815172 - DNA, 25 bp, Homo sapien
ttatgtatattgtgctactgtttgc

SEQ ID NO: 2815173 - DNA, 25 bp, Homo sapien
tatattgtgctactgtttgcctggt

SEQ ID NO: 2815174 - DNA, 25 bp, Homo sapien
atgtatattgtgctactgtttgcct

SEQ ID NO: 2815175 - DNA, 25 bp, Homo sapien
ttgtgctactgtttgcctggtgtgg

SEQ ID NO: 2815176 - DNA, 25 bp, Homo sapien
gcatccacctcaggtgggttttgca

SEQ ID NO: 2815177 - DNA, 25 bp, Homo sapien
ttggtgcttcagtgcgtcctacagg

SEQ ID NO: 2815178 - DNA, 25 bp, Homo sapien
tgcgtcctacaggaggcatccacct

SEQ ID NO: 2815179 - DNA, 25 bp, Homo sapien
gcttcagtgcgtcctacaggaggca

SEQ ID NO: 2815180 - DNA, 25 bp, Homo sapien
ctccaggcatgcgcaagaacgcctg

SEQ ID NO: 2815181 - DNA, 25 bp, Homo sapien
actccaggcatgcgcaagaacgcct

SEQ ID NO: 2815182 - DNA, 25 bp, Homo sapien
aatagacaaattacctccttgagcc

SEQ ID NO: 2815183 - DNA, 25 bp, Homo sapien
ctccagagcatatgaatcttacagc

SEQ ID NO: 2815184 - DNA, 25 bp, Homo sapien
tgagctatgaggtccttgtgaggtt

SEQ ID NO: 2815185 - DNA, 25 bp, Homo sapien
taggccatgggacttctgagtacat

SEQ ID NO: 2815186 - DNA, 25 bp, Homo sapien
gctaacatatgcagcctgaggggga

SEQ ID NO: 2815187 - DNA, 25 bp, Homo sapien
cttatgctctcaaaagagagagtac

SEQ ID NO: 2815188 - DNA, 25 bp, Homo sapien
aatgtcacattcgatattgctgcgg

SEQ ID NO: 2815189 - DNA, 25 bp, Homo sapien
tataagttgtatacctcaatgtcac

SEQ ID NO: 2815190 - DNA, 25 bp, Homo sapien
tttaatacattggaagaacattcat

SEQ ID NO: 2815191 - DNA, 25 bp, Homo sapien
ggcttgtccgagaggtcaattcata

SEQ ID NO: 2815192 - DNA, 25 bp, Homo sapien
taagagttagggtctctttcgcatt

SEQ ID NO: 2815193 - DNA, 25 bp, Homo sapien
gaatagcctaatgcaaaggaagcca

SEQ ID NO: 2815194 - DNA, 25 bp, Homo sapien
caattactaattgtttggaactaag

SEQ ID NO: 2815195 - DNA, 25 bp, Homo sapien
ttcaattactaattgtttggaacta

SEQ ID NO: 2815196 - DNA, 25 bp, Homo sapien
ctagagttcaattactaattgtttg

SEQ ID NO: 2815197 - DNA, 25 bp, Homo sapien
gagttcaattactaattgtttggaa

SEQ ID NO: 2815198 - DNA, 25 bp, Homo sapien
ctatatccttgcagatatagaccac

SEQ ID NO: 2815199 - DNA, 25 bp, Homo sapien
cctatatccttgcagatatagacca

SEQ ID NO: 2815200 - DNA, 25 bp, Homo sapien
tgcagtgagtgtgctgatatccagg

SEQ ID NO: 2815201 - DNA, 25 bp, Homo sapien
caacaaattcttcggctgtcctcat

SEQ ID NO: 2815202 - DNA, 25 bp, Homo sapien
catgactcctgtggttgttatgaca

SEQ ID NO: 2815203 - DNA, 25 bp, Homo sapien
tgttatgacaactagctggactgag

SEQ ID NO: 2815204 - DNA, 25 bp, Homo sapien
aagccaaccatcctttcaagatgca

SEQ ID NO: 2815205 - DNA, 25 bp, Homo sapien
gattgttatcatagaaatacaagcc

SEQ ID NO: 2815206 - DNA, 25 bp, Homo sapien
aggcttgggtagagcgattgttatc

SEQ ID NO: 2815207 - DNA, 25 bp, Homo sapien
catcctttcaagatgcaatagtgca

SEQ ID NO: 2815208 - DNA, 25 bp, Homo sapien
gggaggctactgttgtgcagagtaa

SEQ ID NO: 2815209 - DNA, 25 bp, Homo sapien
gccagaggtgggaggctactgttgt

SEQ ID NO: 2815210 - DNA, 25 bp, Homo sapien
cctgggttcttgatagccagaggtg

SEQ ID NO: 2815211 - DNA, 25 bp, Homo sapien
agacaccctgggttcttgatagcca

SEQ ID NO: 2815212 - DNA, 25 bp, Homo sapien
aggtgtaacataaaagggtcagctg

SEQ ID NO: 2815213 - DNA, 25 bp, Homo sapien
cccgagcaactagccagaaaaccta

SEQ ID NO: 2815214 - DNA, 25 bp, Homo sapien
tttttccttctcgtgtccatagaca

SEQ ID NO: 2815215 - DNA, 25 bp, Homo sapien
ccattgtctatagggaagtactctt

SEQ ID NO: 2815216 - DNA, 25 bp, Homo sapien
ctaagacaatctgaatacccgagca

SEQ ID NO: 2815217 - DNA, 25 bp, Homo sapien
gggccgctttgtccattgcctcaag

SEQ ID NO: 2815218 - DNA, 25 bp, Homo sapien
caagacgggccgctttgtccattgc

SEQ ID NO: 2815219 - DNA, 25 bp, Homo sapien
ctggcggacaagacgggccgctttg

SEQ ID NO: 2815220 - DNA, 25 bp, Homo sapien
agacgggccgctttgtccattgcct

SEQ ID NO: 2815221 - DNA, 25 bp, Homo sapien
cttggtttgaggttgcatagaggca

SEQ ID NO: 2815222 - DNA, 25 bp, Homo sapien
ttacttctagaggtggccattttcc

SEQ ID NO: 2815223 - DNA, 25 bp, Homo sapien
gactgaggcacacagttaaacacaa

SEQ ID NO: 2815224 - DNA, 25 bp, Homo sapien
tagaggcaaaaagtcctatttccag

SEQ ID NO: 2815225 - DNA, 25 bp, Homo sapien
gtaattgataagaaagatgttcaat

SEQ ID NO: 2815226 - DNA, 25 bp, Homo sapien
aataatgtctctatgaacatttgtg

SEQ ID NO: 2815227 - DNA, 25 bp, Homo sapien
cttgaataatgtctctatgaacatt

SEQ ID NO: 2815228 - DNA, 25 bp, Homo sapien
gtcttgaataatgtctctatgaaca

SEQ ID NO: 2815229 - DNA, 25 bp, Homo sapien
tcttgaataatgtctctatgaacat

SEQ ID NO: 2815230 - DNA, 25 bp, Homo sapien
gtatctcatagtagtatggtatttt

SEQ ID NO: 2815231 - DNA, 25 bp, Homo sapien
tagtatctcatagtagtatggtatt

SEQ ID NO: 2815232 - DNA, 25 bp, Homo sapien
aatagtatctcatagtagtatggta

SEQ ID NO: 2815233 - DNA, 25 bp, Homo sapien
atctcatagtagtatggtattttca

SEQ ID NO: 2815234 - DNA, 25 bp, Homo sapien
gagatagaacttatgccctggtctc

SEQ ID NO: 2815235 - DNA, 25 bp, Homo sapien
catttgaaggctgtgatattcaaca

SEQ ID NO: 2815236 - DNA, 25 bp, Homo sapien
gtttctgttgaatgtctggcttctt

SEQ ID NO: 2815237 - DNA, 25 bp, Homo sapien
ttttaaagtcagcatttgaaggctg

SEQ ID NO: 2815238 - DNA, 25 bp, Homo sapien
aaaggagttctttcatatggcacag

SEQ ID NO: 2815239 - DNA, 25 bp, Homo sapien
gcaatgctgttaggttactctggga

SEQ ID NO: 2815240 - DNA, 25 bp, Homo sapien
ctaatgctgcttggactatggtgcc

SEQ ID NO: 2815241 - DNA, 25 bp, Homo sapien
gagccaaattgtagaaccagctgtg

SEQ ID NO: 2815242 - DNA, 25 bp, Homo sapien
agaggaagtgttctggttctcaatg

SEQ ID NO: 2815243 - DNA, 25 bp, Homo sapien
ctcaatggacccagatgtttatcta

SEQ ID NO: 2815244 - DNA, 25 bp, Homo sapien
tgagaggaagtgttctggttctcaa

SEQ ID NO: 2815245 - DNA, 25 bp, Homo sapien
cctgagaggaagtgttctggttctc

SEQ ID NO: 2815246 - DNA, 25 bp, Homo sapien
ttagccttgaattccatcagcactt

SEQ ID NO: 2815247 - DNA, 25 bp, Homo sapien
catccttcgtcaagtttagccttga

SEQ ID NO: 2815248 - DNA, 25 bp, Homo sapien
ctgccatccttcgtcaagtttagcc

SEQ ID NO: 2815249 - DNA, 25 bp, Homo sapien
atcagcacttgggaatgcacttctt

SEQ ID NO: 2815250 - DNA, 25 bp, Homo sapien
aaaaaatgtctgctggggtcagata

SEQ ID NO: 2815251 - DNA, 25 bp, Homo sapien
taaaaaatgtctgctggggtcagat

SEQ ID NO: 2815252 - DNA, 25 bp, Homo sapien
ctaaaaaatgtctgctggggtcaga

SEQ ID NO: 2815253 - DNA, 25 bp, Homo sapien
aaaaatgtctgctggggtcagatac

SEQ ID NO: 2815254 - DNA, 25 bp, Homo sapien
tgattttacggcatccttgcaggaa

SEQ ID NO: 2815255 - DNA, 25 bp, Homo sapien
cgatgggtgaagcaagtgattttac

SEQ ID NO: 2815256 - DNA, 25 bp, Homo sapien
tgctgacagagaaacgtgtgacaca

SEQ ID NO: 2815257 - DNA, 25 bp, Homo sapien
gatggctgatgtgtagtcttctctc

SEQ ID NO: 2815258 - DNA, 25 bp, Homo sapien
aagacatccacttttgtgcttactg

SEQ ID NO: 2815259 - DNA, 25 bp, Homo sapien
tttcaaagacatccacttttgtgct

SEQ ID NO: 2815260 - DNA, 25 bp, Homo sapien
caaagacatccacttttgtgcttac

SEQ ID NO: 2815261 - DNA, 25 bp, Homo sapien
ctcccaagcacactttttcctttca

SEQ ID NO: 2815262 - DNA, 25 bp, Homo sapien
gcaaacgttgtcaggtttctggaac

SEQ ID NO: 2815263 - DNA, 25 bp, Homo sapien
aagtgtgaatagtggtttaacagtc

SEQ ID NO: 2815264 - DNA, 25 bp, Homo sapien
cagtctttgtgcaaacgttgtcagg

SEQ ID NO: 2815265 - DNA, 25 bp, Homo sapien
taaagaagtgtgaatagtggtttaa

SEQ ID NO: 2815266 - DNA, 25 bp, Homo sapien
gcattgtgtcccaacaacaggatga

SEQ ID NO: 2815267 - DNA, 25 bp, Homo sapien
tctaaattgaatacaaagataccaa

SEQ ID NO: 2815268 - DNA, 25 bp, Homo sapien
catcactccaaatgcattggccatg

SEQ ID NO: 2815269 - DNA, 25 bp, Homo sapien
cagaagttgaaatggcatcctccca

SEQ ID NO: 2815270 - DNA, 25 bp, Homo sapien
cacgctgctgcactcaattgcccct

SEQ ID NO: 2815271 - DNA, 25 bp, Homo sapien
tgctgcactcaattgccccttcacc

SEQ ID NO: 2815272 - DNA, 25 bp, Homo sapien
gctgctgcactcaattgccccttca

SEQ ID NO: 2815273 - DNA, 25 bp, Homo sapien
gtgccacgctgctgcactcaattgc

SEQ ID NO: 2815274 - DNA, 25 bp, Homo sapien
cctcttatataggtagccgtggcag

SEQ ID NO: 2815275 - DNA, 25 bp, Homo sapien
tagaggcatccatcatacttcagca

SEQ ID NO: 2815276 - DNA, 25 bp, Homo sapien
tgatatcagatcctaccaccagggt

SEQ ID NO: 2815277 - DNA, 25 bp, Homo sapien
cacgatcccggagtgagtcctctta

SEQ ID NO: 2815278 - DNA, 25 bp, Homo sapien
tctgacattgagattaccgatctgt

SEQ ID NO: 2815279 - DNA, 25 bp, Homo sapien
agattaccgatctgtttagagctgt

SEQ ID NO: 2815280 - DNA, 25 bp, Homo sapien
agtgctgacttcatcatgatgtctg

SEQ ID NO: 2815281 - DNA, 25 bp, Homo sapien
gatgtctgacattgagattaccgat

SEQ ID NO: 2815282 - DNA, 25 bp, Homo sapien
agtgcttctcagtaatcctgcgatg

SEQ ID NO: 2815283 - DNA, 25 bp, Homo sapien
ctcctcagtttcatagtcatgtata

SEQ ID NO: 2815284 - DNA, 25 bp, Homo sapien
cctcagtttcatagtcatgtatatt

SEQ ID NO: 2815285 - DNA, 25 bp, Homo sapien
tctcagtaatcctgcgatgtttttc

SEQ ID NO: 2815286 - DNA, 25 bp, Homo sapien
tgccattttctcgcttcagtttagt

SEQ ID NO: 2815287 - DNA, 25 bp, Homo sapien
ccattttctcgcttcagtttagtgg

SEQ ID NO: 2815288 - DNA, 25 bp, Homo sapien
gccattttctcgcttcagtttagtg

SEQ ID NO: 2815289 - DNA, 25 bp, Homo sapien
gagcccggctttcttggcggcactg

SEQ ID NO: 2815290 - DNA, 25 bp, Homo sapien
tctgcaagctcgacactggtgacct

SEQ ID NO: 2815291 - DNA, 25 bp, Homo sapien
tctccaatctggagcccggctttct

SEQ ID NO: 2815292 - DNA, 25 bp, Homo sapien
gccattgacagccagtaccgcatct

SEQ ID NO: 2815293 - DNA, 25 bp, Homo sapien
ctcagtttctgtatacttatggata

SEQ ID NO: 2815294 - DNA, 25 bp, Homo sapien
aagctcagtttctgtatacttatgg

SEQ ID NO: 2815295 - DNA, 25 bp, Homo sapien
agctcagtttctgtatacttatgga

SEQ ID NO: 2815296 - DNA, 25 bp, Homo sapien
cagtttctgtatacttatggataat

SEQ ID NO: 2815297 - DNA, 25 bp, Homo sapien
ctgggaccatcctcaagattcacat

SEQ ID NO: 2815298 - DNA, 25 bp, Homo sapien
gaccatcctcaagattcacatcatc

SEQ ID NO: 2815299 - DNA, 25 bp, Homo sapien
ccatcctcaagattcacatcatccc

SEQ ID NO: 2815300 - DNA, 25 bp, Homo sapien
gggaccatcctcaagattcacatca

SEQ ID NO: 2815301 - DNA, 25 bp, Homo sapien
gccaaggtccacagaatggccctct

SEQ ID NO: 2815302 - DNA, 25 bp, Homo sapien
caaggtccacagaatggccctcttc

SEQ ID NO: 2815303 - DNA, 25 bp, Homo sapien
ccaaggtccacagaatggccctctt

SEQ ID NO: 2815304 - DNA, 25 bp, Homo sapien
gttgataacatcaattacgttctgg

SEQ ID NO: 2815305 - DNA, 25 bp, Homo sapien
taacatcaattacgttctggtaaga

SEQ ID NO: 2815306 - DNA, 25 bp, Homo sapien
caattacgttctggtaagaagatcc

SEQ ID NO: 2815307 - DNA, 25 bp, Homo sapien
acgttctggtaagaagatccacgca

SEQ ID NO: 2815308 - DNA, 25 bp, Homo sapien
ttgctggcaaataagctccctgctg

SEQ ID NO: 2815309 - DNA, 25 bp, Homo sapien
tgctgctgaaccgggttttttgcct

SEQ ID NO: 2815310 - DNA, 25 bp, Homo sapien
gagactatttatttccaaataccaa

SEQ ID NO: 2815311 - DNA, 25 bp, Homo sapien
ctttcagagactatttatttccaaa

SEQ ID NO: 2815312 - DNA, 25 bp, Homo sapien
cagagactatttatttccaaatacc

SEQ ID NO: 2815313 - DNA, 25 bp, Homo sapien
tcagagactatttatttccaaatac

SEQ ID NO: 2815314 - DNA, 25 bp, Homo sapien
tattcaccacgggtattatctggca

SEQ ID NO: 2815315 - DNA, 25 bp, Homo sapien
tcttggttaccatgtaggtccacat

SEQ ID NO: 2815316 - DNA, 25 bp, Homo sapien
gcacacactgcacagttggactcag

SEQ ID NO: 2815317 - DNA, 25 bp, Homo sapien
cacgattctcatttgacaggtcttc

SEQ ID NO: 2815318 - DNA, 25 bp, Homo sapien
tagaaacaactagtttctttatcat

SEQ ID NO: 2815319 - DNA, 25 bp, Homo sapien
taggtttcaaatgtctggtggccca

SEQ ID NO: 2815320 - DNA, 25 bp, Homo sapien
gaagcaggcctgagattaagacaca

SEQ ID NO: 2815321 - DNA, 25 bp, Homo sapien
gctgtgctttagcatgagagtcact

SEQ ID NO: 2815322 - DNA, 25 bp, Homo sapien
taataccgttgcgtgggctcttagc

SEQ ID NO: 2815323 - DNA, 25 bp, Homo sapien
tccagagtcgaggttagataaatca

SEQ ID NO: 2815324 - DNA, 25 bp, Homo sapien
taaagaccttctgccgagagatagc

SEQ ID NO: 2815325 - DNA, 25 bp, Homo sapien
gttactttcagcaagggtctgtcgg

SEQ ID NO: 2815326 - DNA, 25 bp, Homo sapien
taataccagactgtgagggagacct

SEQ ID NO: 2815327 - DNA, 25 bp, Homo sapien
taaagtcttctactgtgcctaggag

SEQ ID NO: 2815328 - DNA, 25 bp, Homo sapien
cagccaaaggaggatcatcatttcc

SEQ ID NO: 2815329 - DNA, 25 bp, Homo sapien
tgatcataggtaagactttctccag

SEQ ID NO: 2815330 - DNA, 25 bp, Homo sapien
tgtgtctgatagagcaacgctggca

SEQ ID NO: 2815331 - DNA, 25 bp, Homo sapien
ccttagatttccctaatgtcccagt

SEQ ID NO: 2815332 - DNA, 25 bp, Homo sapien
tccttagatttccctaatgtcccag

SEQ ID NO: 2815333 - DNA, 25 bp, Homo sapien
ctgatgaaacacaggctccaaggtg

SEQ ID NO: 2815334 - DNA, 25 bp, Homo sapien
acaggctccaaggtgtctcctttga

SEQ ID NO: 2815335 - DNA, 25 bp, Homo sapien
tccaaggtgtctcctttgacttcct

SEQ ID NO: 2815336 - DNA, 25 bp, Homo sapien
gaaacacaggctccaaggtgtctcc

SEQ ID NO: 2815337 - DNA, 25 bp, Homo sapien
catgctcagccagcaggctgagata

SEQ ID NO: 2815338 - DNA, 25 bp, Homo sapien
cttggcatgctcagccagcaggctg

SEQ ID NO: 2815339 - DNA, 25 bp, Homo sapien
ttggcatgctcagccagcaggctga

SEQ ID NO: 2815340 - DNA, 25 bp, Homo sapien
gctcagccagcaggctgagatacac

SEQ ID NO: 2815341 - DNA, 25 bp, Homo sapien
tactgtggtattcaagatttcccat

SEQ ID NO: 2815342 - DNA, 25 bp, Homo sapien
tgtggtattcaagatttcccatttt

SEQ ID NO: 2815343 - DNA, 25 bp, Homo sapien
atactgtggtattcaagatttccca

SEQ ID NO: 2815344 - DNA, 25 bp, Homo sapien
actgtggtattcaagatttcccatt

SEQ ID NO: 2815345 - DNA, 25 bp, Homo sapien
ggaacttcattcaaaaaatctttga

SEQ ID NO: 2815346 - DNA, 25 bp, Homo sapien
ccaattgaataggtagaatggaact

SEQ ID NO: 2815347 - DNA, 25 bp, Homo sapien
atcccactgaagcagatccaattga

SEQ ID NO: 2815348 - DNA, 25 bp, Homo sapien
cacaccaagcgattttgattagaaa

SEQ ID NO: 2815349 - DNA, 25 bp, Homo sapien
cataaattgctcagttctgaaggag

SEQ ID NO: 2815350 - DNA, 25 bp, Homo sapien
ataaattgctcagttctgaaggaga

SEQ ID NO: 2815351 - DNA, 25 bp, Homo sapien
caaaatctgattagcatatttaatc

SEQ ID NO: 2815352 - DNA, 25 bp, Homo sapien
aatccaaaatctgattagcatattt

SEQ ID NO: 2815353 - DNA, 25 bp, Homo sapien
atctgggttctctaaatccaaaatc

SEQ ID NO: 2815354 - DNA, 25 bp, Homo sapien
tatctgggttctctaaatccaaaat

SEQ ID NO: 2815355 - DNA, 25 bp, Homo sapien
tcaaattagacgagtggcgacacta

SEQ ID NO: 2815356 - DNA, 25 bp, Homo sapien
taaatatgtaaatctgcctgggact

SEQ ID NO: 2815357 - DNA, 25 bp, Homo sapien
tatccgacctttgaggagaattcct

SEQ ID NO: 2815358 - DNA, 25 bp, Homo sapien
taacacctccactgctagaacaatg

SEQ ID NO: 2815359 - DNA, 25 bp, Homo sapien
attgatgtgcaatagctcggcttgg

SEQ ID NO: 2815360 - DNA, 25 bp, Homo sapien
gtttgattaattgatgtgcaatagc

SEQ ID NO: 2815361 - DNA, 25 bp, Homo sapien
tccctttggtcagaacatccaggac

SEQ ID NO: 2815362 - DNA, 25 bp, Homo sapien
tgtgcaatagctcggcttggtggca

SEQ ID NO: 2815363 - DNA, 25 bp, Homo sapien
agctggtaccataggtgcacctggc

SEQ ID NO: 2815364 - DNA, 25 bp, Homo sapien
ctcaacatgcaaaatttaggacagc

SEQ ID NO: 2815365 - DNA, 25 bp, Homo sapien
gtaccataggtgcacctggctaact

SEQ ID NO: 2815366 - DNA, 25 bp, Homo sapien
gccccgcctcaacatgcaaaattta

SEQ ID NO: 2815367 - DNA, 25 bp, Homo sapien
tgaaccagcgggcatcctctatttc

SEQ ID NO: 2815368 - DNA, 25 bp, Homo sapien
ctgttctctagtgaaccagcgggca

SEQ ID NO: 2815369 - DNA, 25 bp, Homo sapien
agcaaccaatcattaaggaggaagg

SEQ ID NO: 2815370 - DNA, 25 bp, Homo sapien
gacactgctagagctaagcaaccaa

SEQ ID NO: 2815371 - DNA, 25 bp, Homo sapien
aataaccgagttttataacatgata

SEQ ID NO: 2815372 - DNA, 25 bp, Homo sapien
aaataaccgagttttataacatgat

SEQ ID NO: 2815373 - DNA, 25 bp, Homo sapien
ggtcccatctggatgaataacttgc

SEQ ID NO: 2815374 - DNA, 25 bp, Homo sapien
gcctaaaaggcatttggtcccatct

SEQ ID NO: 2815375 - DNA, 25 bp, Homo sapien
tcaataaatccagcaaggcaagtaa

SEQ ID NO: 2815376 - DNA, 25 bp, Homo sapien
gaataacttgcatgattactactgg

SEQ ID NO: 2815377 - DNA, 25 bp, Homo sapien
gccattgagactaggacagtcttct

SEQ ID NO: 2815378 - DNA, 25 bp, Homo sapien
tatggacgccattgagactaggaca

SEQ ID NO: 2815379 - DNA, 25 bp, Homo sapien
caactcttgggtatgaggtattatg

SEQ ID NO: 2815380 - DNA, 25 bp, Homo sapien
gaggtattatggacgccattgagac

SEQ ID NO: 2815381 - DNA, 25 bp, Homo sapien
gcatttccacaggttgggcaaaact

SEQ ID NO: 2815382 - DNA, 25 bp, Homo sapien
aaacttgtatcgactgtgccaggca

SEQ ID NO: 2815383 - DNA, 25 bp, Homo sapien
gccaggcaagaacagatcttgcttg

SEQ ID NO: 2815384 - DNA, 25 bp, Homo sapien
aagaacagatcttgcttgagctaca

SEQ ID NO: 2815385 - DNA, 25 bp, Homo sapien
tcgggacttcaccagcataattaag

SEQ ID NO: 2815386 - DNA, 25 bp, Homo sapien
tctttcaattgcagaagggctggca

SEQ ID NO: 2815387 - DNA, 25 bp, Homo sapien
tcaaggtgatcttctcaggctgggc

SEQ ID NO: 2815388 - DNA, 25 bp, Homo sapien
gatctatacctagagcaaaccaggc

SEQ ID NO: 2815389 - DNA, 25 bp, Homo sapien
tcattcgttaggaaccaaggcttct

SEQ ID NO: 2815390 - DNA, 25 bp, Homo sapien
gcagtctgccttgatttattgacaa

SEQ ID NO: 2815391 - DNA, 25 bp, Homo sapien
gctttctttagctagcagccagtca

SEQ ID NO: 2815392 - DNA, 25 bp, Homo sapien
tattgccacctagagtaaccaaggg

SEQ ID NO: 2815393 - DNA, 25 bp, Homo sapien
caaaccctttcaggtggtacagcct

SEQ ID NO: 2815394 - DNA, 25 bp, Homo sapien
gctttatgcactataaagagatacc

SEQ ID NO: 2815395 - DNA, 25 bp, Homo sapien
taagagacagtggatacttacactt

SEQ ID NO: 2815396 - DNA, 25 bp, Homo sapien
cttggtagtcatagtgagatctgca

SEQ ID NO: 2815397 - DNA, 25 bp, Homo sapien
gatggagaatgactgagtattcctg

SEQ ID NO: 2815398 - DNA, 25 bp, Homo sapien
tgggtgcccattccttgccgcatac

SEQ ID NO: 2815399 - DNA, 25 bp, Homo sapien
gactgagtattcctgttaacttggc

SEQ ID NO: 2815400 - DNA, 25 bp, Homo sapien
cagaaattggactatctctgggtgc

SEQ ID NO: 2815401 - DNA, 25 bp, Homo sapien
gaaactgagtaactatttcttgctt

SEQ ID NO: 2815402 - DNA, 25 bp, Homo sapien
tgagtaactatttcttgcttcagac

SEQ ID NO: 2815403 - DNA, 25 bp, Homo sapien
tcagacttctttttacagaagacat

SEQ ID NO: 2815404 - DNA, 25 bp, Homo sapien
ctgaacagtgaaactgagtaactat

SEQ ID NO: 2815405 - DNA, 25 bp, Homo sapien
ggcaggaaactctacgacctcagta

SEQ ID NO: 2815406 - DNA, 25 bp, Homo sapien
cgtgcacggtctctgaaaatggtaa

SEQ ID NO: 2815407 - DNA, 25 bp, Homo sapien
tgctcacacagaccgaatgggacag

SEQ ID NO: 2815408 - DNA, 25 bp, Homo sapien
caagaccaattaagtgccacccgtg

SEQ ID NO: 2815409 - DNA, 25 bp, Homo sapien
caaagattgggatatcccactcgct

SEQ ID NO: 2815410 - DNA, 25 bp, Homo sapien
ttcctggagccggatgcagtcttcc

SEQ ID NO: 2815411 - DNA, 25 bp, Homo sapien
gatgcagtccaaagattgggatatc

SEQ ID NO: 2815412 - DNA, 25 bp, Homo sapien
atatcccactcgcttttcctggagc

SEQ ID NO: 2815413 - DNA, 25 bp, Homo sapien
cctggtaggccaagcgctgacggcg

SEQ ID NO: 2815414 - DNA, 25 bp, Homo sapien
taggccaagcgctgacggcgctgtc

SEQ ID NO: 2815415 - DNA, 25 bp, Homo sapien
tgacggcgctgtcagcaatccacag

SEQ ID NO: 2815416 - DNA, 25 bp, Homo sapien
gcgctgacggcgctgtcagcaatcc

SEQ ID NO: 2815417 - DNA, 25 bp, Homo sapien
tgctcactctgtttttgcaaataca

SEQ ID NO: 2815418 - DNA, 25 bp, Homo sapien
ctcactctgtttttgcaaatacatt

SEQ ID NO: 2815419 - DNA, 25 bp, Homo sapien
ctgtttttgcaaatacatttccccg

SEQ ID NO: 2815420 - DNA, 25 bp, Homo sapien
tgtgctcactctgtttttgcaaata

SEQ ID NO: 2815421 - DNA, 25 bp, Homo sapien
tgctgtgctgctttgagagggcact

SEQ ID NO: 2815422 - DNA, 25 bp, Homo sapien
gatctggctgcttgcagaagtatga

SEQ ID NO: 2815423 - DNA, 25 bp, Homo sapien
cttgggatctggctgcttgcagaag

SEQ ID NO: 2815424 - DNA, 25 bp, Homo sapien
taaaacgaggaattagagcctctcc

SEQ ID NO: 2815425 - DNA, 25 bp, Homo sapien
ggagaagcaggactactggaattct

SEQ ID NO: 2815426 - DNA, 25 bp, Homo sapien
ggaagtcgggttcattgtttgctct

SEQ ID NO: 2815427 - DNA, 25 bp, Homo sapien
ttatagtcacctagctttgttcttc

SEQ ID NO: 2815428 - DNA, 25 bp, Homo sapien
taacatcatgttatagtcacctagc

SEQ ID NO: 2815429 - DNA, 25 bp, Homo sapien
gaaaaaaaggtgaatgttcattgac

SEQ ID NO: 2815430 - DNA, 25 bp, Homo sapien
catggaaaaaaaggtgaatgttcat

SEQ ID NO: 2815431 - DNA, 25 bp, Homo sapien
ggaaaaaaaggtgaatgttcattga

SEQ ID NO: 2815432 - DNA, 25 bp, Homo sapien
tggaaaaaaaggtgaatgttcattg

SEQ ID NO: 2815433 - DNA, 25 bp, Homo sapien
tggaaggcgtggaaccactagcctt

SEQ ID NO: 2815434 - DNA, 25 bp, Homo sapien
gctgcttgatagacttgtcaccagt

SEQ ID NO: 2815435 - DNA, 25 bp, Homo sapien
gcaaagttgccacataaactctact

SEQ ID NO: 2815436 - DNA, 25 bp, Homo sapien
tgtcaccagttcctcgcaaagttgc

SEQ ID NO: 2815437 - DNA, 25 bp, Homo sapien
aattttcatatgcaatcccatatgc

SEQ ID NO: 2815438 - DNA, 25 bp, Homo sapien
attgaaattttcatatgcaatccca

SEQ ID NO: 2815439 - DNA, 25 bp, Homo sapien
tatgcaatcccatatgcttgacttc

SEQ ID NO: 2815440 - DNA, 25 bp, Homo sapien
ttcatatgcaatcccatatgcttga

SEQ ID NO: 2815441 - DNA, 25 bp, Homo sapien
tctgttggatccggttgtgttctgg

SEQ ID NO: 2815442 - DNA, 25 bp, Homo sapien
ctgttggatccggttgtgttctggt

SEQ ID NO: 2815443 - DNA, 25 bp, Homo sapien
gctctgttggatccggttgtgttct

SEQ ID NO: 2815444 - DNA, 25 bp, Homo sapien
ttgctctgttggatccggttgtgtt

SEQ ID NO: 2815445 - DNA, 25 bp, Homo sapien
cttgcttgctgaagataacggtggc

SEQ ID NO: 2815446 - DNA, 25 bp, Homo sapien
taacggtggctggtgttactggcct

SEQ ID NO: 2815447 - DNA, 25 bp, Homo sapien
gaagataacggtggctggtgttact

SEQ ID NO: 2815448 - DNA, 25 bp, Homo sapien
ggctggtgttactggccttttatca

SEQ ID NO: 2815449 - DNA, 25 bp, Homo sapien
tgaatgtcctgttatagagaaggaa

SEQ ID NO: 2815450 - DNA, 25 bp, Homo sapien
tcactgtcaaggtgtatcttgcaca

SEQ ID NO: 2815451 - DNA, 25 bp, Homo sapien
tcagcatctcaaacccgttaggaag

SEQ ID NO: 2815452 - DNA, 25 bp, Homo sapien
cacatttgatggaaaattactgaag

SEQ ID NO: 2815453 - DNA, 25 bp, Homo sapien
taaaatgatggatctgtagttgggt

SEQ ID NO: 2815454 - DNA, 25 bp, Homo sapien
caaaatattgatttcctatggaatt

SEQ ID NO: 2815455 - DNA, 25 bp, Homo sapien
aatgggtctgctttgttgaattcac

SEQ ID NO: 2815456 - DNA, 25 bp, Homo sapien
aatcaatcctgctagaatgcgcagc

SEQ ID NO: 2815457 - DNA, 25 bp, Homo sapien
gacaaaacctgctctgttagatgag

SEQ ID NO: 2815458 - DNA, 25 bp, Homo sapien
tcttcaattcagtgacggctgactg

SEQ ID NO: 2815459 - DNA, 25 bp, Homo sapien
taaaaatcggaattggaaggtgctc

SEQ ID NO: 2815460 - DNA, 25 bp, Homo sapien
gaaggtgctccagtatcagacaaaa

SEQ ID NO: 2815461 - DNA, 25 bp, Homo sapien
ttgccatgttaattggatgatattc

SEQ ID NO: 2815462 - DNA, 25 bp, Homo sapien
aaaaatccattaacacatattgcca

SEQ ID NO: 2815463 - DNA, 25 bp, Homo sapien
acatattgccatgttaattggatga

SEQ ID NO: 2815464 - DNA, 25 bp, Homo sapien
tattgccatgttaattggatgatat

SEQ ID NO: 2815465 - DNA, 25 bp, Homo sapien
gaagaaaacggtagccagagcccaa

SEQ ID NO: 2815466 - DNA, 25 bp, Homo sapien
cagagcccaagcgccaccaagttgg

SEQ ID NO: 2815467 - DNA, 25 bp, Homo sapien
taggaaggtggaaacggacatatgg

SEQ ID NO: 2815468 - DNA, 25 bp, Homo sapien
gtggaaacggacatatgggaagaaa

SEQ ID NO: 2815469 - DNA, 25 bp, Homo sapien
gctccacattttgttcgtctttctt

SEQ ID NO: 2815470 - DNA, 25 bp, Homo sapien
aggctccacattttgttcgtctttc

SEQ ID NO: 2815471 - DNA, 25 bp, Homo sapien
ggctccacattttgttcgtctttct

SEQ ID NO: 2815472 - DNA, 25 bp, Homo sapien
cacaaaaggacatattgacaattcc

SEQ ID NO: 2815473 - DNA, 25 bp, Homo sapien
cttagcgtcatagccagtatttgct

SEQ ID NO: 2815474 - DNA, 25 bp, Homo sapien
ttgctaagatcttctgagcttttac

SEQ ID NO: 2815475 - DNA, 25 bp, Homo sapien
ttttacagctttacacaaaaggaca

SEQ ID NO: 2815476 - DNA, 25 bp, Homo sapien
ttaaaagcaggcttgattccctgtg

SEQ ID NO: 2815477 - DNA, 25 bp, Homo sapien
tccctgtgtggactttgttgaagcc

SEQ ID NO: 2815478 - DNA, 25 bp, Homo sapien
ttccccctgattttgtgttttgcag

SEQ ID NO: 2815479 - DNA, 25 bp, Homo sapien
tgttgaagccttctatcactgcttt

SEQ ID NO: 2815480 - DNA, 25 bp, Homo sapien
gcagtagctctgggagtagcaccat

SEQ ID NO: 2815481 - DNA, 25 bp, Homo sapien
tcactgacctgggaactctgctctg

SEQ ID NO: 2815482 - DNA, 25 bp, Homo sapien
tgtctgctttctctcgttgcctgtt

SEQ ID NO: 2815483 - DNA, 25 bp, Homo sapien
cttgatcccttgactctgacttaac

SEQ ID NO: 2815484 - DNA, 25 bp, Homo sapien
tctctcgttgcctgtttcctttctt

SEQ ID NO: 2815485 - DNA, 25 bp, Homo sapien
gctgctgttttgtctctcacatctg

SEQ ID NO: 2815486 - DNA, 25 bp, Homo sapien
ttgaaaatgagactcgagaggtctg

SEQ ID NO: 2815487 - DNA, 25 bp, Homo sapien
aatgagactcgagaggtctgttgtg

SEQ ID NO: 2815488 - DNA, 25 bp, Homo sapien
gagactcgagaggtctgttgtgata

SEQ ID NO: 2815489 - DNA, 25 bp, Homo sapien
aaaatgagactcgagaggtctgttg

SEQ ID NO: 2815490 - DNA, 25 bp, Homo sapien
caatcagtgacactttggggttaga

SEQ ID NO: 2815491 - DNA, 25 bp, Homo sapien
ttttaccacaatcagtgacactttg

SEQ ID NO: 2815492 - DNA, 25 bp, Homo sapien
tttttaccacaatcagtgacacttt

SEQ ID NO: 2815493 - DNA, 25 bp, Homo sapien
cagtgacactttggggttagaatgt

SEQ ID NO: 2815494 - DNA, 25 bp, Homo sapien
tgtatcagacaccagacatttgtta

SEQ ID NO: 2815495 - DNA, 25 bp, Homo sapien
gtttttgtgtatcagacaccagaca

SEQ ID NO: 2815496 - DNA, 25 bp, Homo sapien
tttgtttttgtgtatcagacaccag

SEQ ID NO: 2815497 - DNA, 25 bp, Homo sapien
ttgtgtatcagacaccagacatttg

SEQ ID NO: 2815498 - DNA, 25 bp, Homo sapien
agtgtgctggtactgagacatatat

SEQ ID NO: 2815499 - DNA, 25 bp, Homo sapien
ctgtttcctagtgtgctggtactga

SEQ ID NO: 2815500 - DNA, 25 bp, Homo sapien
gaaagttgtaccctttctagcttca

SEQ ID NO: 2815501 - DNA, 25 bp, Homo sapien
tgaattgaaagttgtaccctttcta

SEQ ID NO: 2815502 - DNA, 25 bp, Homo sapien
aaacttatgtttactactgattcca

SEQ ID NO: 2815503 - DNA, 25 bp, Homo sapien
cttatgtttactactgattccatca

SEQ ID NO: 2815504 - DNA, 25 bp, Homo sapien
ataaacttatgtttactactgattc

SEQ ID NO: 2815505 - DNA, 25 bp, Homo sapien
tatgtttactactgattccatcatc

SEQ ID NO: 2815506 - DNA, 25 bp, Homo sapien
gcccacagaaatttgatagaaggct

SEQ ID NO: 2815507 - DNA, 25 bp, Homo sapien
cccacagaaatttgatagaaggctt

SEQ ID NO: 2815508 - DNA, 25 bp, Homo sapien
tgcttgcccatggattggcgagtct

SEQ ID NO: 2815509 - DNA, 25 bp, Homo sapien
tgcccatggattggcgagtctttct

SEQ ID NO: 2815510 - DNA, 25 bp, Homo sapien
aatctgcttgcccatggattggcga

SEQ ID NO: 2815511 - DNA, 25 bp, Homo sapien
tggattggcgagtctttctgggtca

SEQ ID NO: 2815512 - DNA, 25 bp, Homo sapien
tctaagtttatgaactcctgttgaa

SEQ ID NO: 2815513 - DNA, 25 bp, Homo sapien
catctaagtttatgaactcctgttg

SEQ ID NO: 2815514 - DNA, 25 bp, Homo sapien
gaaccagtaacaattggaacatgat

SEQ ID NO: 2815515 - DNA, 25 bp, Homo sapien
atttggagttgggtcgcagacagct

SEQ ID NO: 2815516 - DNA, 25 bp, Homo sapien
ttggatggcccattcagtctcaggg

SEQ ID NO: 2815517 - DNA, 25 bp, Homo sapien
gctcctgtggttggcaagctagtca

SEQ ID NO: 2815518 - DNA, 25 bp, Homo sapien
tatccttgtggtgaggtgtactgtg

SEQ ID NO: 2815519 - DNA, 25 bp, Homo sapien
gctagtcacaaagtaaattgattga

SEQ ID NO: 2815520 - DNA, 25 bp, Homo sapien
gagcataggccaagtagatttgaca

SEQ ID NO: 2815521 - DNA, 25 bp, Homo sapien
tcattcctaagagccgtaggatttt

SEQ ID NO: 2815522 - DNA, 25 bp, Homo sapien
gctgcattagcccatgacaggagac

SEQ ID NO: 2815523 - DNA, 25 bp, Homo sapien
gatttttcacaatagtatacgagca

SEQ ID NO: 2815524 - DNA, 25 bp, Homo sapien
ggtgagtccctgtttacaattggat

SEQ ID NO: 2815525 - DNA, 25 bp, Homo sapien
gaaaaagcctgtatgactagctgcc

SEQ ID NO: 2815526 - DNA, 25 bp, Homo sapien
caaggtctgcgtaccatgtgtgatg

SEQ ID NO: 2815527 - DNA, 25 bp, Homo sapien
gttactgcacaatggtaaatgtgcc

SEQ ID NO: 2815528 - DNA, 25 bp, Homo sapien
tggcttctgccaccatcgtcctgca

SEQ ID NO: 2815529 - DNA, 25 bp, Homo sapien
tccattaaagagcagccattcagct

SEQ ID NO: 2815530 - DNA, 25 bp, Homo sapien
ctccattaaagagcagccattcagc

SEQ ID NO: 2815531 - DNA, 25 bp, Homo sapien
tctgccaccatcgtcctgcacttct

SEQ ID NO: 2815532 - DNA, 25 bp, Homo sapien
tcattttagcctgagttatcttggc

SEQ ID NO: 2815533 - DNA, 25 bp, Homo sapien
ggggataatgttcgcctcattttag

SEQ ID NO: 2815534 - DNA, 25 bp, Homo sapien
gtaatctggggataatgttcgcctc

SEQ ID NO: 2815535 - DNA, 25 bp, Homo sapien
gagttatcttggcaaattgaatcat

SEQ ID NO: 2815536 - DNA, 25 bp, Homo sapien
taccttctgaggctcttcgagttgc

SEQ ID NO: 2815537 - DNA, 25 bp, Homo sapien
tctgaggctcttcgagttgcctttt

SEQ ID NO: 2815538 - DNA, 25 bp, Homo sapien
cttctgaggctcttcgagttgcctt

SEQ ID NO: 2815539 - DNA, 25 bp, Homo sapien
gaggctcttcgagttgccttttctt

SEQ ID NO: 2815540 - DNA, 25 bp, Homo sapien
cactggctatagtttgagagaccga

SEQ ID NO: 2815541 - DNA, 25 bp, Homo sapien
aaaattcactggctatagtttgaga

SEQ ID NO: 2815542 - DNA, 25 bp, Homo sapien
agaccgaattgggaagagcaaggct

SEQ ID NO: 2815543 - DNA, 25 bp, Homo sapien
tatagtttgagagaccgaattggga

SEQ ID NO: 2815544 - DNA, 25 bp, Homo sapien
ctatacctgtcaagaagttcaaaga

SEQ ID NO: 2815545 - DNA, 25 bp, Homo sapien
aaatattctatacctgtcaagaagt

SEQ ID NO: 2815546 - DNA, 25 bp, Homo sapien
catacatctgggctaaacaaataca

SEQ ID NO: 2815547 - DNA, 25 bp, Homo sapien
catctgggctaaacaaatacagctc

SEQ ID NO: 2815548 - DNA, 25 bp, Homo sapien
ttaactgagcatatcatttcctttc

SEQ ID NO: 2815549 - DNA, 25 bp, Homo sapien
taactgagcatatcatttcctttct

SEQ ID NO: 2815550 - DNA, 25 bp, Homo sapien
gctgccatgaagtaagcctgcagac

SEQ ID NO: 2815551 - DNA, 25 bp, Homo sapien
tctccagcacctgcaacaattgctg

SEQ ID NO: 2815552 - DNA, 25 bp, Homo sapien
ctctccagcacctgcaacaattgct

SEQ ID NO: 2815553 - DNA, 25 bp, Homo sapien
agcacctgcaacaattgctgtccct

SEQ ID NO: 2815554 - DNA, 25 bp, Homo sapien
tccagcacctgcaacaattgctgtc

SEQ ID NO: 2815555 - DNA, 25 bp, Homo sapien
agcctttgcccctaagtcttcagga

SEQ ID NO: 2815556 - DNA, 25 bp, Homo sapien
gctttgtttagtgagcacatggagg

SEQ ID NO: 2815557 - DNA, 25 bp, Homo sapien
caagggagaatagtgcaggatatgg

SEQ ID NO: 2815558 - DNA, 25 bp, Homo sapien
atagaggtagtctgagaggtcactg

SEQ ID NO: 2815559 - DNA, 25 bp, Homo sapien
tgcggttgtctaaaactgacaaagc

SEQ ID NO: 2815560 - DNA, 25 bp, Homo sapien
ccactgtataatttctgcggttgtc

SEQ ID NO: 2815561 - DNA, 25 bp, Homo sapien
ccaaagaggtctatattttcagaca

SEQ ID NO: 2815562 - DNA, 25 bp, Homo sapien
tgacgtgtgttactgattgtggaac

SEQ ID NO: 2815563 - DNA, 25 bp, Homo sapien
tctttttcagagtatacacaacaca

SEQ ID NO: 2815564 - DNA, 25 bp, Homo sapien
ctggttgcagtttccccagattttc

SEQ ID NO: 2815565 - DNA, 25 bp, Homo sapien
cagagtatacacaacacaatccaaa

SEQ ID NO: 2815566 - DNA, 25 bp, Homo sapien
actggttgcagtttccccagatttt

SEQ ID NO: 2815567 - DNA, 25 bp, Homo sapien
tctgagaatttgtgtgttccatata

SEQ ID NO: 2815568 - DNA, 25 bp, Homo sapien
caggttttggatggatatgtgctgc

SEQ ID NO: 2815569 - DNA, 25 bp, Homo sapien
ttctgcacttctcaacaccaccttc

SEQ ID NO: 2815570 - DNA, 25 bp, Homo sapien
cataatactgagctctttttctgga

SEQ ID NO: 2815571 - DNA, 25 bp, Homo sapien
gagcattgactgacatcagaataat

SEQ ID NO: 2815572 - DNA, 25 bp, Homo sapien
cagagcattgactgacatcagaata

SEQ ID NO: 2815573 - DNA, 25 bp, Homo sapien
aacagagcattgactgacatcagaa

SEQ ID NO: 2815574 - DNA, 25 bp, Homo sapien
agaacagagcattgactgacatcag

SEQ ID NO: 2815575 - DNA, 25 bp, Homo sapien
ttaagatctttcaacatatagcgat

SEQ ID NO: 2815576 - DNA, 25 bp, Homo sapien
tctggaccaagaagcgagtggccat

SEQ ID NO: 2815577 - DNA, 25 bp, Homo sapien
caacatatagcgattctggaccaag

SEQ ID NO: 2815578 - DNA, 25 bp, Homo sapien
cctgccgtttaagatctttcaacat

SEQ ID NO: 2815579 - DNA, 25 bp, Homo sapien
catctcagcaaaaatgtaaactgtg

SEQ ID NO: 2815580 - DNA, 25 bp, Homo sapien
atctcagcaaaaatgtaaactgtga

SEQ ID NO: 2815581 - DNA, 25 bp, Homo sapien
tctcagcaaaaatgtaaactgtgac

SEQ ID NO: 2815582 - DNA, 25 bp, Homo sapien
gatgagtaagtattgtctgggctct

SEQ ID NO: 2815583 - DNA, 25 bp, Homo sapien
ctctatgatgagtaagtattgtctg

SEQ ID NO: 2815584 - DNA, 25 bp, Homo sapien
tgatgagtaagtattgtctgggctc

SEQ ID NO: 2815585 - DNA, 25 bp, Homo sapien
tatgatgagtaagtattgtctgggc

SEQ ID NO: 2815586 - DNA, 25 bp, Homo sapien
cctgatgaagaagcgcaattttcct

SEQ ID NO: 2815587 - DNA, 25 bp, Homo sapien
atttcactaagtgcctttactctgg

SEQ ID NO: 2815588 - DNA, 25 bp, Homo sapien
gacataataatgttaactcgcattt

SEQ ID NO: 2815589 - DNA, 25 bp, Homo sapien
ctgtgctacgttttatggaagacat

SEQ ID NO: 2815590 - DNA, 25 bp, Homo sapien
cctgagccagctaagccttcttttt

SEQ ID NO: 2815591 - DNA, 25 bp, Homo sapien
ttttccatcctcaactccttgggct

SEQ ID NO: 2815592 - DNA, 25 bp, Homo sapien
tgtgccttttctccctgagccagct

SEQ ID NO: 2815593 - DNA, 25 bp, Homo sapien
tgcatccagatttccagtcctgtgc

SEQ ID NO: 2815594 - DNA, 25 bp, Homo sapien
tgtgtttctggtccagcaacaccct

SEQ ID NO: 2815595 - DNA, 25 bp, Homo sapien
ggactagacggtttctcaggaatgc

SEQ ID NO: 2815596 - DNA, 25 bp, Homo sapien
cacaattgctatgttggcagccttg

SEQ ID NO: 2815597 - DNA, 25 bp, Homo sapien
ttattctgattaggactagacggtt

SEQ ID NO: 2815598 - DNA, 25 bp, Homo sapien
tggaagaggtggttgtttgccagtt

SEQ ID NO: 2815599 - DNA, 25 bp, Homo sapien
ggctgtgcctttgagacaactgtca

SEQ ID NO: 2815600 - DNA, 25 bp, Homo sapien
tgctcttgggagaccccttttcata

SEQ ID NO: 2815601 - DNA, 25 bp, Homo sapien
gaagaggtggttgtttgccagttct

SEQ ID NO: 2815602 - DNA, 25 bp, Homo sapien
caatgattaataccaaagtgttcac

SEQ ID NO: 2815603 - DNA, 25 bp, Homo sapien
ctgtgaaatcccttactgtgctgct

SEQ ID NO: 2815604 - DNA, 25 bp, Homo sapien
agctggcctgcagtcatactaactg

SEQ ID NO: 2815605 - DNA, 25 bp, Homo sapien
gatgacaggtgccataagagagcct

SEQ ID NO: 2815606 - DNA, 25 bp, Homo sapien
caagcaatgggtagcctgctcgatg

SEQ ID NO: 2815607 - DNA, 25 bp, Homo sapien
gcaatgggtagcctgctcgatgttg

SEQ ID NO: 2815608 - DNA, 25 bp, Homo sapien
tgggtagcctgctcgatgttgaccc

SEQ ID NO: 2815609 - DNA, 25 bp, Homo sapien
cccaagcaatgggtagcctgctcga

SEQ ID NO: 2815610 - DNA, 25 bp, Homo sapien
catcatcatcagttgcacttatgtt

SEQ ID NO: 2815611 - DNA, 25 bp, Homo sapien
tactcttaaacagccatccaaaaaa

SEQ ID NO: 2815612 - DNA, 25 bp, Homo sapien
tttactcttaaacagccatccaaaa

SEQ ID NO: 2815613 - DNA, 25 bp, Homo sapien
ataaacattgccaatcatcctcatc

SEQ ID NO: 2815614 - DNA, 25 bp, Homo sapien
acattgccaatcatcctcatccaaa

SEQ ID NO: 2815615 - DNA, 25 bp, Homo sapien
cacattttgcttgctgaaaggtgct

SEQ ID NO: 2815616 - DNA, 25 bp, Homo sapien
acattttgcttgctgaaaggtgctc

SEQ ID NO: 2815617 - DNA, 25 bp, Homo sapien
aaaggtgctcttgatggggctaaaa

SEQ ID NO: 2815618 - DNA, 25 bp, Homo sapien
agacacattttgcttgctgaaaggt

SEQ ID NO: 2815619 - DNA, 25 bp, Homo sapien
gtctcttggctgtgacctctggaag

SEQ ID NO: 2815620 - DNA, 25 bp, Homo sapien
tcagtctcttggctgtgacctctgg

SEQ ID NO: 2815621 - DNA, 25 bp, Homo sapien
cttggctgtgacctctggaagcttt

SEQ ID NO: 2815622 - DNA, 25 bp, Homo sapien
ctcttggctgtgacctctggaagct

SEQ ID NO: 2815623 - DNA, 25 bp, Homo sapien
aaaatatatcctccttgggggctga

SEQ ID NO: 2815624 - DNA, 25 bp, Homo sapien
gcatcagaaaatatatcctccttgg

SEQ ID NO: 2815625 - DNA, 25 bp, Homo sapien
tttctgggccacatcacatccaaag

SEQ ID NO: 2815626 - DNA, 25 bp, Homo sapien
tctgggccacatcacatccaaagtt

SEQ ID NO: 2815627 - DNA, 25 bp, Homo sapien
ttcagagctttttgcttcaccaagt

SEQ ID NO: 2815628 - DNA, 25 bp, Homo sapien
aaaagtccaagccatcatctcgttc

SEQ ID NO: 2815629 - DNA, 25 bp, Homo sapien
gctctatggttgtcaaagcacaatt

SEQ ID NO: 2815630 - DNA, 25 bp, Homo sapien
gcttcaccaagtattggttccctaa

SEQ ID NO: 2815631 - DNA, 25 bp, Homo sapien
tgcacacattattttgatggattct

SEQ ID NO: 2815632 - DNA, 25 bp, Homo sapien
catgactggagtaagaagaattgag

SEQ ID NO: 2815633 - DNA, 25 bp, Homo sapien
taaatgttcacaccataaataggca

SEQ ID NO: 2815634 - DNA, 25 bp, Homo sapien
tcctagaactttgtcctgagctggt

SEQ ID NO: 2815635 - DNA, 25 bp, Homo sapien
tcttctaatagtggcttcataacag

SEQ ID NO: 2815636 - DNA, 25 bp, Homo sapien
tagtggcttcataacagcttgtgaa

SEQ ID NO: 2815637 - DNA, 25 bp, Homo sapien
gaaggtagcaagttgagatgccaaa

SEQ ID NO: 2815638 - DNA, 25 bp, Homo sapien
cataacagcttgtgaaggtagcaag

SEQ ID NO: 2815639 - DNA, 25 bp, Homo sapien
atctaaatgcctttatgattggagc

SEQ ID NO: 2815640 - DNA, 25 bp, Homo sapien
ctttatgattggagccaaatccttc

SEQ ID NO: 2815641 - DNA, 25 bp, Homo sapien
taaatgcctttatgattggagccaa

SEQ ID NO: 2815642 - DNA, 25 bp, Homo sapien
ttctcatttttgaaagcgtatatca

SEQ ID NO: 2815643 - DNA, 25 bp, Homo sapien
gattgtccctttctcttcccctctc

SEQ ID NO: 2815644 - DNA, 25 bp, Homo sapien
gtccctttctcttcccctctcatgc

SEQ ID NO: 2815645 - DNA, 25 bp, Homo sapien
tgaggcaaccctttggattgtccct

SEQ ID NO: 2815646 - DNA, 25 bp, Homo sapien
ctttctcttcccctctcatgctcat

SEQ ID NO: 2815647 - DNA, 25 bp, Homo sapien
tctttctaactgctgtttttcttct

SEQ ID NO: 2815648 - DNA, 25 bp, Homo sapien
ctaactgctgtttttcttcttttat

SEQ ID NO: 2815649 - DNA, 25 bp, Homo sapien
actgctgtttttcttcttttatgtc

SEQ ID NO: 2815650 - DNA, 25 bp, Homo sapien
ttctttctaactgctgtttttcttc

SEQ ID NO: 2815651 - DNA, 25 bp, Homo sapien
taagtgcagaacataaactactttc

SEQ ID NO: 2815652 - DNA, 25 bp, Homo sapien
gaacataaactactttccactgcca

SEQ ID NO: 2815653 - DNA, 25 bp, Homo sapien
aacaggctcttttcatgaaggagga

SEQ ID NO: 2815654 - DNA, 25 bp, Homo sapien
gccatggctttaccacaagcatact

SEQ ID NO: 2815655 - DNA, 25 bp, Homo sapien
ggcacactgattggggtcctttctc

SEQ ID NO: 2815656 - DNA, 25 bp, Homo sapien
tctgaagcattgagacattgtttgc

SEQ ID NO: 2815657 - DNA, 25 bp, Homo sapien
tcggcacactgattggggtcctttc

SEQ ID NO: 2815658 - DNA, 25 bp, Homo sapien
tgtttgcttgattggcaaaggagag

SEQ ID NO: 2815659 - DNA, 25 bp, Homo sapien
ggccatgaactatttgcacctgaga

SEQ ID NO: 2815660 - DNA, 25 bp, Homo sapien
gttgatggccttccggactcctgtt

SEQ ID NO: 2815661 - DNA, 25 bp, Homo sapien
tagtcagaactgttgatggccttcc

SEQ ID NO: 2815662 - DNA, 25 bp, Homo sapien
actcctgtttgattagcaataggcc

SEQ ID NO: 2815663 - DNA, 25 bp, Homo sapien
tctccatcatattggtatttccaag

SEQ ID NO: 2815664 - DNA, 25 bp, Homo sapien
gctgtgtcttctccatcatattggt

SEQ ID NO: 2815665 - DNA, 25 bp, Homo sapien
catctggtgtttagctcatctcctt

SEQ ID NO: 2815666 - DNA, 25 bp, Homo sapien
gtgtcttctccatcatattggtatt

SEQ ID NO: 2815667 - DNA, 25 bp, Homo sapien
cataacatatcgtccttcagctggt

SEQ ID NO: 2815668 - DNA, 25 bp, Homo sapien
gattaatagtaagatgatagagtgt

SEQ ID NO: 2815669 - DNA, 25 bp, Homo sapien
ttcaaggtccatgatccacctaaga

SEQ ID NO: 2815670 - DNA, 25 bp, Homo sapien
gatagagtgtacaaatgaatatcat

SEQ ID NO: 2815671 - DNA, 25 bp, Homo sapien
tcctggaaatattgagaaccaatgc

SEQ ID NO: 2815672 - DNA, 25 bp, Homo sapien
caacccgaaccagaatgtgagaaac

SEQ ID NO: 2815673 - DNA, 25 bp, Homo sapien
gagaaacctctagcaaatctgaatg

SEQ ID NO: 2815674 - DNA, 25 bp, Homo sapien
aatgctaattttaccccttgactgc

SEQ ID NO: 2815675 - DNA, 25 bp, Homo sapien
gcctggagtgcagtacctgtatctc

SEQ ID NO: 2815676 - DNA, 25 bp, Homo sapien
agcctggagtgcagtacctgtatct

SEQ ID NO: 2815677 - DNA, 25 bp, Homo sapien
cccagcctggagtgcagtacctgta

SEQ ID NO: 2815678 - DNA, 25 bp, Homo sapien
gcagtacctgtatctcagctcacca

SEQ ID NO: 2815679 - DNA, 25 bp, Homo sapien
tcccaagtggctgggattgcagctg

SEQ ID NO: 2815680 - DNA, 25 bp, Homo sapien
aagttcaaccaattttcctgactca

SEQ ID NO: 2815681 - DNA, 25 bp, Homo sapien
cccaagtggctgggattgcagctgt

SEQ ID NO: 2815682 - DNA, 25 bp, Homo sapien
tcccaagttcaaccaattttcctga

SEQ ID NO: 2815683 - DNA, 25 bp, Homo sapien
tcgcaaccggccacaagaagagttt

SEQ ID NO: 2815684 - DNA, 25 bp, Homo sapien
ccagttgagtgttcggctcttagca

SEQ ID NO: 2815685 - DNA, 25 bp, Homo sapien
tcatttttacgtctctgcaggtctc

SEQ ID NO: 2815686 - DNA, 25 bp, Homo sapien
acagctcagagagctgggtagctcc

SEQ ID NO: 2815687 - DNA, 25 bp, Homo sapien
tgcagttctcagcagagtgggtact

SEQ ID NO: 2815688 - DNA, 25 bp, Homo sapien
gctggtcgtccctgccaaagacatc

SEQ ID NO: 2815689 - DNA, 25 bp, Homo sapien
tgcctttgtctgactaagcccagga

SEQ ID NO: 2815690 - DNA, 25 bp, Homo sapien
gctggtcatcccagctatcagcaga

SEQ ID NO: 2815691 - DNA, 25 bp, Homo sapien
gctcaggacttacagttgcaaggga

SEQ ID NO: 2815692 - DNA, 25 bp, Homo sapien
gacttacagttgcaagggagaggaa

SEQ ID NO: 2815693 - DNA, 25 bp, Homo sapien
caggacttacagttgcaagggagag

SEQ ID NO: 2815694 - DNA, 25 bp, Homo sapien
ttacagttgcaagggagaggaagtc

SEQ ID NO: 2815695 - DNA, 25 bp, Homo sapien
caggagagggcgaaagaatttgaag

SEQ ID NO: 2815696 - DNA, 25 bp, Homo sapien
atttgaaggtagcaccactaattct

SEQ ID NO: 2815697 - DNA, 25 bp, Homo sapien
ccaggagagggcgaaagaatttgaa

SEQ ID NO: 2815698 - DNA, 25 bp, Homo sapien
gaatttgaaggtagcaccactaatt

SEQ ID NO: 2815699 - DNA, 25 bp, Homo sapien
taatgtgctcctggtcaaaaacagc

SEQ ID NO: 2815700 - DNA, 25 bp, Homo sapien
gactgtggagtttaacctgttggta

SEQ ID NO: 2815701 - DNA, 25 bp, Homo sapien
aataattgacccaatggaggcggag

SEQ ID NO: 2815702 - DNA, 25 bp, Homo sapien
cctgttggtacagtagtggctgaag

SEQ ID NO: 2815703 - DNA, 25 bp, Homo sapien
ttgatgtggaacatagtacagatat

SEQ ID NO: 2815704 - DNA, 25 bp, Homo sapien
catattgatgtggaacatagtacag

SEQ ID NO: 2815705 - DNA, 25 bp, Homo sapien
atattgatgtggaacatagtacaga

SEQ ID NO: 2815706 - DNA, 25 bp, Homo sapien
tattgatgtggaacatagtacagat

SEQ ID NO: 2815707 - DNA, 25 bp, Homo sapien
tttcctcaccctttctagaggaagc

SEQ ID NO: 2815708 - DNA, 25 bp, Homo sapien
gcttcgctaggtatgtagcaacatc

SEQ ID NO: 2815709 - DNA, 25 bp, Homo sapien
gcaacatcaaagaggagcactttaa

SEQ ID NO: 2815710 - DNA, 25 bp, Homo sapien
agacagcaatggagagcttcgctag

SEQ ID NO: 2815711 - DNA, 25 bp, Homo sapien
tgagctctcacagaccttttaatgc

SEQ ID NO: 2815712 - DNA, 25 bp, Homo sapien
aatacagtgtcactctgggttcgct

SEQ ID NO: 2815713 - DNA, 25 bp, Homo sapien
ttacaatctttgtcatgagctctca

SEQ ID NO: 2815714 - DNA, 25 bp, Homo sapien
ttgtcacaagaatggattgggtgcc

SEQ ID NO: 2815715 - DNA, 25 bp, Homo sapien
aatgaaagattagcatattgtacca

SEQ ID NO: 2815716 - DNA, 25 bp, Homo sapien
tgaagttatcttttgggtcagctgc

SEQ ID NO: 2815717 - DNA, 25 bp, Homo sapien
tcacaatcagacatgaaaagttctt

SEQ ID NO: 2815718 - DNA, 25 bp, Homo sapien
gcatattgtaccagatcacaatcag

SEQ ID NO: 2815719 - DNA, 25 bp, Homo sapien
ggatcattaagctggtcagtttgac

SEQ ID NO: 2815720 - DNA, 25 bp, Homo sapien
cattaagctggtcagtttgactttt

SEQ ID NO: 2815721 - DNA, 25 bp, Homo sapien
ggaaactttctcaggatcattaagc

SEQ ID NO: 2815722 - DNA, 25 bp, Homo sapien
tctcaggatcattaagctggtcagt

SEQ ID NO: 2815723 - DNA, 25 bp, Homo sapien
ctgtctaaccaggcagtgatagcat

SEQ ID NO: 2815724 - DNA, 25 bp, Homo sapien
cctgtctaaccaggcagtgatagca

SEQ ID NO: 2815725 - DNA, 25 bp, Homo sapien
aggaagcagattattgaaagccccc

SEQ ID NO: 2815726 - DNA, 25 bp, Homo sapien
gaagcagattattgaaagcccccat

SEQ ID NO: 2815727 - DNA, 25 bp, Homo sapien
ggtaggatatgccaattgaaatgcc

SEQ ID NO: 2815728 - DNA, 25 bp, Homo sapien
cacaatgtggtaggatatgccaatt

SEQ ID NO: 2815729 - DNA, 25 bp, Homo sapien
caatgtggtaggatatgccaattga

SEQ ID NO: 2815730 - DNA, 25 bp, Homo sapien
tgtggtaggatatgccaattgaaat

SEQ ID NO: 2815731 - DNA, 25 bp, Homo sapien
ttcactacaacactctcagtctcag

SEQ ID NO: 2815732 - DNA, 25 bp, Homo sapien
gtctcagaatggctaccatctgcca

SEQ ID NO: 2815733 - DNA, 25 bp, Homo sapien
ccatctgccaaactcaactttccca

SEQ ID NO: 2815734 - DNA, 25 bp, Homo sapien
actacaacactctcagtctcagaat

SEQ ID NO: 2815735 - DNA, 25 bp, Homo sapien
tagtttccaacttgacaattcctaa

SEQ ID NO: 2815736 - DNA, 25 bp, Homo sapien
gtcatctccattgtcgactttcacc

SEQ ID NO: 2815737 - DNA, 25 bp, Homo sapien
tctccattgtcgactttcaccagta

SEQ ID NO: 2815738 - DNA, 25 bp, Homo sapien
cattgtcgactttcaccagtatttc

SEQ ID NO: 2815739 - DNA, 25 bp, Homo sapien
gattgtcaggaattaggaacactgt

SEQ ID NO: 2815740 - DNA, 25 bp, Homo sapien
tccatttactgagaaaacaataaca

SEQ ID NO: 2815741 - DNA, 25 bp, Homo sapien
taacatttaggagaatatgaattcc

SEQ ID NO: 2815742 - DNA, 25 bp, Homo sapien
gataatctagcaatctaacttaaag

SEQ ID NO: 2815743 - DNA, 25 bp, Homo sapien
aaattgtgacacgaatttatagtca

SEQ ID NO: 2815744 - DNA, 25 bp, Homo sapien
tggtaacataaatgccacccagatt

SEQ ID NO: 2815745 - DNA, 25 bp, Homo sapien
taaatgccacccagattcaactgat

SEQ ID NO: 2815746 - DNA, 25 bp, Homo sapien
tttctgtgttaagcttcaaattgtg

SEQ ID NO: 2815747 - DNA, 25 bp, Homo sapien
ttaactaaataagaaacagtcacag

SEQ ID NO: 2815748 - DNA, 25 bp, Homo sapien
cagtcatggaatcaggagctttcca

SEQ ID NO: 2815749 - DNA, 25 bp, Homo sapien
cacttgaatggaacaagattcactt

SEQ ID NO: 2815750 - DNA, 25 bp, Homo sapien
tctccatatcagttgttgacacttg

SEQ ID NO: 2815751 - DNA, 25 bp, Homo sapien
taaactgtccgccatgctgactcgg

SEQ ID NO: 2815752 - DNA, 25 bp, Homo sapien
ctgcggaaggtcatggagttaaact

SEQ ID NO: 2815753 - DNA, 25 bp, Homo sapien
atgctgactcggcacagtggcattc

SEQ ID NO: 2815754 - DNA, 25 bp, Homo sapien
ggtcatggagttaaactgtccgcca

SEQ ID NO: 2815755 - DNA, 25 bp, Homo sapien
caggaaggacatctgtaaaagttgg

SEQ ID NO: 2815756 - DNA, 25 bp, Homo sapien
gcgggcttctgctttttgaagccag

SEQ ID NO: 2815757 - DNA, 25 bp, Homo sapien
catctgtaaaagttggctgcctgca

SEQ ID NO: 2815758 - DNA, 25 bp, Homo sapien
tctgctttttgaagccaggaaggac

SEQ ID NO: 2815759 - DNA, 25 bp, Homo sapien
attctttcaaggatgctcctgagat

SEQ ID NO: 2815760 - DNA, 25 bp, Homo sapien
tgaaaggcagctcctaagtttgcct

SEQ ID NO: 2815761 - DNA, 25 bp, Homo sapien
gcagctcctaagtttgcctccaggc

SEQ ID NO: 2815762 - DNA, 25 bp, Homo sapien
tcaaggatgctcctgagatgacact

SEQ ID NO: 2815763 - DNA, 25 bp, Homo sapien
gatgggccaactcctacagaattgt

SEQ ID NO: 2815764 - DNA, 25 bp, Homo sapien
ccggcaatgccgtcttcctcagtga

SEQ ID NO: 2815765 - DNA, 25 bp, Homo sapien
ctgtgcatcaggctgtgcaattgat

SEQ ID NO: 2815766 - DNA, 25 bp, Homo sapien
ttgatttcacgataacagacaagag

SEQ ID NO: 2815767 - DNA, 25 bp, Homo sapien
tgcatggttcaatttcacggacaac

SEQ ID NO: 2815768 - DNA, 25 bp, Homo sapien
cacggacaacttccatggagtactg

SEQ ID NO: 2815769 - DNA, 25 bp, Homo sapien
ctggcctggctagaacagtatgtta

SEQ ID NO: 2815770 - DNA, 25 bp, Homo sapien
tcttgggcacctaggcagtgactgg

SEQ ID NO: 2815771 - DNA, 25 bp, Homo sapien
ctcttcagcatagctttcccatagc

SEQ ID NO: 2815772 - DNA, 25 bp, Homo sapien
cttcagcatagctttcccatagcca

SEQ ID NO: 2815773 - DNA, 25 bp, Homo sapien
ttcccatagccaacagtgtcagcca

SEQ ID NO: 2815774 - DNA, 25 bp, Homo sapien
atagctttcccatagccaacagtgt

SEQ ID NO: 2815775 - DNA, 25 bp, Homo sapien
tgccagcacgccagatgctgctatt

SEQ ID NO: 2815776 - DNA, 25 bp, Homo sapien
acaaaattgcttatggagtctgcca

SEQ ID NO: 2815777 - DNA, 25 bp, Homo sapien
cacgccagatgctgctattggaaga

SEQ ID NO: 2815778 - DNA, 25 bp, Homo sapien
tgcttatggagtctgccagcacgcc

SEQ ID NO: 2815779 - DNA, 25 bp, Homo sapien
tggtgcgaatggtgattgatgttat

SEQ ID NO: 2815780 - DNA, 25 bp, Homo sapien
tagctgcatgatcgatggtgcgaat

SEQ ID NO: 2815781 - DNA, 25 bp, Homo sapien
cagaagggtgttatggcagatgtca

SEQ ID NO: 2815782 - DNA, 25 bp, Homo sapien
agatgtcatccaactgcttcgtagc

SEQ ID NO: 2815783 - DNA, 25 bp, Homo sapien
gatcagtatgagtcacttgtttgtt

SEQ ID NO: 2815784 - DNA, 25 bp, Homo sapien
tagcctggacaaccagagatggttc

SEQ ID NO: 2815785 - DNA, 25 bp, Homo sapien
gatggttcctagatcagtatgagtc

SEQ ID NO: 2815786 - DNA, 25 bp, Homo sapien
gtttaagccattttggcccattatg

SEQ ID NO: 2815787 - DNA, 25 bp, Homo sapien
tggctttgaattttgctcgtacggt

SEQ ID NO: 2815788 - DNA, 25 bp, Homo sapien
ttggctttgaattttgctcgtacgg

SEQ ID NO: 2815789 - DNA, 25 bp, Homo sapien
tccttcagtggagtaatagcacgtt

SEQ ID NO: 2815790 - DNA, 25 bp, Homo sapien
cttcagtggagtaatagcacgtttc

SEQ ID NO: 2815791 - DNA, 25 bp, Homo sapien
ccttcagtggagtaatagcacgttt

SEQ ID NO: 2815792 - DNA, 25 bp, Homo sapien
tcagtggagtaatagcacgtttcaa

SEQ ID NO: 2815793 - DNA, 25 bp, Homo sapien
caatgagtttgcaattgtcgtttct

SEQ ID NO: 2815794 - DNA, 25 bp, Homo sapien
tcacttgctcatggtatatgatcca

SEQ ID NO: 2815795 - DNA, 25 bp, Homo sapien
tgagtgtttatatcatgaaagtaca

SEQ ID NO: 2815796 - DNA, 25 bp, Homo sapien
ttgtagtggcttttgtattagggaa

SEQ ID NO: 2815797 - DNA, 25 bp, Homo sapien
tataaatggactaaattctgcaatt

SEQ ID NO: 2815798 - DNA, 25 bp, Homo sapien
taaatataaatggactaaattctgc

SEQ ID NO: 2815799 - DNA, 25 bp, Homo sapien
ttaaatataaatggactaaattctg

SEQ ID NO: 2815800 - DNA, 25 bp, Homo sapien
aatataaatggactaaattctgcaa

SEQ ID NO: 2815801 - DNA, 25 bp, Homo sapien
aatccacactgaaatactccctgga

SEQ ID NO: 2815802 - DNA, 25 bp, Homo sapien
tccacactgaaatactccctggata

SEQ ID NO: 2815803 - DNA, 25 bp, Homo sapien
ccacactgaaatactccctggatat

SEQ ID NO: 2815804 - DNA, 25 bp, Homo sapien
atccacactgaaatactccctggat

SEQ ID NO: 2815805 - DNA, 25 bp, Homo sapien
agctctgcttttgtaagttcttgcc

SEQ ID NO: 2815806 - DNA, 25 bp, Homo sapien
ttttgtaagttcttgcctttctatg

SEQ ID NO: 2815807 - DNA, 25 bp, Homo sapien
ctgcttttgtaagttcttgcctttc

SEQ ID NO: 2815808 - DNA, 25 bp, Homo sapien
cagcagctctgcttttgtaagttct

SEQ ID NO: 2815809 - DNA, 25 bp, Homo sapien
cagcttatatctcagcttagaggag

SEQ ID NO: 2815810 - DNA, 25 bp, Homo sapien
tacatcgttaacataaacttgtcca

SEQ ID NO: 2815811 - DNA, 25 bp, Homo sapien
ttgtccaagcagcttatatctcagc

SEQ ID NO: 2815812 - DNA, 25 bp, Homo sapien
ttaacagtcaggtacatcgttaaca

SEQ ID NO: 2815813 - DNA, 25 bp, Homo sapien
aactttttcttatcagcagattttt

SEQ ID NO: 2815814 - DNA, 25 bp, Homo sapien
tttttcttatcagcagatttttcca

SEQ ID NO: 2815815 - DNA, 25 bp, Homo sapien
tttaaactttttcttatcagcagat

SEQ ID NO: 2815816 - DNA, 25 bp, Homo sapien
tttcttatcagcagatttttccaat

SEQ ID NO: 2815817 - DNA, 25 bp, Homo sapien
tactctacagccacaattatgctgc

SEQ ID NO: 2815818 - DNA, 25 bp, Homo sapien
ttctcaacctccaaatgtatgcacc

SEQ ID NO: 2815819 - DNA, 25 bp, Homo sapien
tgctgcatttgaggcttaagacact

SEQ ID NO: 2815820 - DNA, 25 bp, Homo sapien
tgtatgcaccatctgtcaacttcta

SEQ ID NO: 2815821 - DNA, 25 bp, Homo sapien
ctgcaataattttacgtcacataag

SEQ ID NO: 2815822 - DNA, 25 bp, Homo sapien
aattttacgtcacataagatcactg

SEQ ID NO: 2815823 - DNA, 25 bp, Homo sapien
ttacgtcacataagatcactgggaa

SEQ ID NO: 2815824 - DNA, 25 bp, Homo sapien
caataattttacgtcacataagatc

SEQ ID NO: 2815825 - DNA, 25 bp, Homo sapien
tgtgaggaacaataaccactgagca

SEQ ID NO: 2815826 - DNA, 25 bp, Homo sapien
ctgtgaggaacaataaccactgagc

SEQ ID NO: 2815827 - DNA, 25 bp, Homo sapien
gtgaggaacaataaccactgagcat

SEQ ID NO: 2815828 - DNA, 25 bp, Homo sapien
gctgctcagtgaacatcggcaacag

SEQ ID NO: 2815829 - DNA, 25 bp, Homo sapien
aatgtgattcccctttggctgctca

SEQ ID NO: 2815830 - DNA, 25 bp, Homo sapien
gattgatggagtttgtagctggtaa

SEQ ID NO: 2815831 - DNA, 25 bp, Homo sapien
cggttattaaggagactatgattga

SEQ ID NO: 2815832 - DNA, 25 bp, Homo sapien
ggtcaattttatgcctcacctccat

SEQ ID NO: 2815833 - DNA, 25 bp, Homo sapien
ccatgtcccggtcaattttatgcct

SEQ ID NO: 2815834 - DNA, 25 bp, Homo sapien
tcccggtcaattttatgcctcacct

SEQ ID NO: 2815835 - DNA, 25 bp, Homo sapien
tgtcccggtcaattttatgcctcac

SEQ ID NO: 2815836 - DNA, 25 bp, Homo sapien
gagtaactatgctttgtctggcaca

SEQ ID NO: 2815837 - DNA, 25 bp, Homo sapien
catctgggatttatggaatatagtc

SEQ ID NO: 2815838 - DNA, 25 bp, Homo sapien
gctaagtatgtgactgaaagaggta

SEQ ID NO: 2815839 - DNA, 25 bp, Homo sapien
tactcttcttttgggcttcatatga

SEQ ID NO: 2815840 - DNA, 25 bp, Homo sapien
tactgagtgtaatactctttccaga

SEQ ID NO: 2815841 - DNA, 25 bp, Homo sapien
tcaggactttgaaatgccatatgaa

SEQ ID NO: 2815842 - DNA, 25 bp, Homo sapien
ttaattagtacatagaagactacgg

SEQ ID NO: 2815843 - DNA, 25 bp, Homo sapien
tacggagagtcattctcaggacttt

SEQ ID NO: 2815844 - DNA, 25 bp, Homo sapien
aaaccaagagtaagacaatcaggtc

SEQ ID NO: 2815845 - DNA, 25 bp, Homo sapien
tccacagctctaaaccaagagtaag

SEQ ID NO: 2815846 - DNA, 25 bp, Homo sapien
caagagtaagacaatcaggtctcac

SEQ ID NO: 2815847 - DNA, 25 bp, Homo sapien
agagtaagacaatcaggtctcacca

SEQ ID NO: 2815848 - DNA, 25 bp, Homo sapien
attcttgagtaaggcagctggttcc

SEQ ID NO: 2815849 - DNA, 25 bp, Homo sapien
gctggttccttgtaaagcaaggttg

SEQ ID NO: 2815850 - DNA, 25 bp, Homo sapien
ggttccttgtaaagcaaggttgtga

SEQ ID NO: 2815851 - DNA, 25 bp, Homo sapien
taaatagtattgtgattcttgagta

SEQ ID NO: 2815852 - DNA, 25 bp, Homo sapien
tctcttacgacagccctgtactgtg

SEQ ID NO: 2815853 - DNA, 25 bp, Homo sapien
tgaccttcaggttaatgagaagttc

SEQ ID NO: 2815854 - DNA, 25 bp, Homo sapien
agttcctctggataattgtcctctc

SEQ ID NO: 2815855 - DNA, 25 bp, Homo sapien
ccctgaccttcaggttaatgagaag

SEQ ID NO: 2815856 - DNA, 25 bp, Homo sapien
cctggcctaggtaatatactaggtc

SEQ ID NO: 2815857 - DNA, 25 bp, Homo sapien
gtgcctggcctaggtaatatactag

SEQ ID NO: 2815858 - DNA, 25 bp, Homo sapien
cctaggtaatatactaggtctagat

SEQ ID NO: 2815859 - DNA, 25 bp, Homo sapien
taatatactaggtctagatactgat

SEQ ID NO: 2815860 - DNA, 25 bp, Homo sapien
tatgctagtgctccagagttgcagg

SEQ ID NO: 2815861 - DNA, 25 bp, Homo sapien
gaaattctgatatcgtagccacact

SEQ ID NO: 2815862 - DNA, 25 bp, Homo sapien
taatttccaaagtggcctcggacac

SEQ ID NO: 2815863 - DNA, 25 bp, Homo sapien
tgtggtatgaaaaatgcctgcagcc

SEQ ID NO: 2815864 - DNA, 25 bp, Homo sapien
cacatagtaggcacatgctattgga

SEQ ID NO: 2815865 - DNA, 25 bp, Homo sapien
atggcactgacagacttgctgttca

SEQ ID NO: 2815866 - DNA, 25 bp, Homo sapien
cagacacatagtaggcacatgctat

SEQ ID NO: 2815867 - DNA, 25 bp, Homo sapien
ttgctgttcacagagttgccacaaa

SEQ ID NO: 2815868 - DNA, 25 bp, Homo sapien
tatcgaggaggatcatgcttgtatc

SEQ ID NO: 2815869 - DNA, 25 bp, Homo sapien
catagcacttctactatcgaggagg

SEQ ID NO: 2815870 - DNA, 25 bp, Homo sapien
gttctgcaccatcacaggacttaat

SEQ ID NO: 2815871 - DNA, 25 bp, Homo sapien
ggacttaatttaagcatagcacttc

SEQ ID NO: 2815872 - DNA, 25 bp, Homo sapien
gaagacatttttattataagtggat

SEQ ID NO: 2815873 - DNA, 25 bp, Homo sapien
tatattctcagaagacatttttatt

SEQ ID NO: 2815874 - DNA, 25 bp, Homo sapien
gacatttttattataagtggattaa

SEQ ID NO: 2815875 - DNA, 25 bp, Homo sapien
attctcagaagacatttttattata

SEQ ID NO: 2815876 - DNA, 25 bp, Homo sapien
ctctatctcaaatacgtaggtgaga

SEQ ID NO: 2815877 - DNA, 25 bp, Homo sapien
tctcaaatacgtaggtgagaaaaca

SEQ ID NO: 2815878 - DNA, 25 bp, Homo sapien
ttatactttgacaattacagtagcc

SEQ ID NO: 2815879 - DNA, 25 bp, Homo sapien
aatacgtaggtgagaaaacacaggt

SEQ ID NO: 2815880 - DNA, 25 bp, Homo sapien
tgccaggttggcctataaatctata

SEQ ID NO: 2815881 - DNA, 25 bp, Homo sapien
taaatctatattgcttggagtgctg

SEQ ID NO: 2815882 - DNA, 25 bp, Homo sapien
cattcagtggaggaggatatccacc

SEQ ID NO: 2815883 - DNA, 25 bp, Homo sapien
tcatgtcagttacccttgattgcca

SEQ ID NO: 2815884 - DNA, 25 bp, Homo sapien
tactggatcaaagtgatggaatgta

SEQ ID NO: 2815885 - DNA, 25 bp, Homo sapien
acaggagaagacatgtacaactgtg

SEQ ID NO: 2815886 - DNA, 25 bp, Homo sapien
tggaatgtaagatcagaaaaacaag

SEQ ID NO: 2815887 - DNA, 25 bp, Homo sapien
gacatggggttcactctccgacttt

SEQ ID NO: 2815888 - DNA, 25 bp, Homo sapien
gagacaggatcactaataagcttgg

SEQ ID NO: 2815889 - DNA, 25 bp, Homo sapien
cctctgtaggtcagggttgatggta

SEQ ID NO: 2815890 - DNA, 25 bp, Homo sapien
gatgtgccaataagacggagacagg

SEQ ID NO: 2815891 - DNA, 25 bp, Homo sapien
gatcaaggccatcaggatgtgccaa

SEQ ID NO: 2815892 - DNA, 25 bp, Homo sapien
tcacagtcatggcagaaagcaaaag

SEQ ID NO: 2815893 - DNA, 25 bp, Homo sapien
cctcacagtcatggcagaaagcaaa

SEQ ID NO: 2815894 - DNA, 25 bp, Homo sapien
cacagtcatggcagaaagcaaaaga

SEQ ID NO: 2815895 - DNA, 25 bp, Homo sapien
ctcacagtcatggcagaaagcaaaa

SEQ ID NO: 2815896 - DNA, 25 bp, Homo sapien
tatgaagaggttggggaatgatcac

SEQ ID NO: 2815897 - DNA, 25 bp, Homo sapien
gagaatggaactcatctttcacttc

SEQ ID NO: 2815898 - DNA, 25 bp, Homo sapien
aatggctgcgatcattagggctcca

SEQ ID NO: 2815899 - DNA, 25 bp, Homo sapien
ttcctgaaatggctgcgatcattag

SEQ ID NO: 2815900 - DNA, 25 bp, Homo sapien
acagagaatggaactcatctttcac

SEQ ID NO: 2815901 - DNA, 25 bp, Homo sapien
tcagctagttgtacgaaagtttcca

SEQ ID NO: 2815902 - DNA, 25 bp, Homo sapien
acaaccttggtgtatgacatgagta

SEQ ID NO: 2815903 - DNA, 25 bp, Homo sapien
gagtatctggaatacctgctcaggt

SEQ ID NO: 2815904 - DNA, 25 bp, Homo sapien
tgtactcagccccagatttatccct

SEQ ID NO: 2815905 - DNA, 25 bp, Homo sapien
ccttattggtcaggcatcatgctaa

SEQ ID NO: 2815906 - DNA, 25 bp, Homo sapien
tgtccttattggtcaggcatcatgc

SEQ ID NO: 2815907 - DNA, 25 bp, Homo sapien
gcatgtccttattggtcaggcatca

SEQ ID NO: 2815908 - DNA, 25 bp, Homo sapien
ttggtcaggcatcatgctaatctct

SEQ ID NO: 2815909 - DNA, 25 bp, Homo sapien
tgtgtactaacataactttcctccc

SEQ ID NO: 2815910 - DNA, 25 bp, Homo sapien
tgcattgtgcaaaaagttatactta

SEQ ID NO: 2815911 - DNA, 25 bp, Homo sapien
ccataactttgtgtatcagaatcct

SEQ ID NO: 2815912 - DNA, 25 bp, Homo sapien
agaatcctatactgcttttacagca

SEQ ID NO: 2815913 - DNA, 25 bp, Homo sapien
tactctgtggctcttagattgctga

SEQ ID NO: 2815914 - DNA, 25 bp, Homo sapien
ggctcttagattgctgattgtatat

SEQ ID NO: 2815915 - DNA, 25 bp, Homo sapien
ttgggaaaaactactctgtggctct

SEQ ID NO: 2815916 - DNA, 25 bp, Homo sapien
gctgattgtatataagagtctcatt

SEQ ID NO: 2815917 - DNA, 25 bp, Homo sapien
cccataagggaagtattgattaagc

SEQ ID NO: 2815918 - DNA, 25 bp, Homo sapien
tgatcggcgaaatctcataggcttg

SEQ ID NO: 2815919 - DNA, 25 bp, Homo sapien
aaacttgcactattacaaggacgag

SEQ ID NO: 2815920 - DNA, 25 bp, Homo sapien
tatgactggatgcttcgtgatcggc

SEQ ID NO: 2815921 - DNA, 25 bp, Homo sapien
aaatagaatagaagctgatcagcag

SEQ ID NO: 2815922 - DNA, 25 bp, Homo sapien
agagtttggatagtgtaactttcct

SEQ ID NO: 2815923 - DNA, 25 bp, Homo sapien
ccttactcctctaagacatagcact

SEQ ID NO: 2815924 - DNA, 25 bp, Homo sapien
tctgcctgggcaaatagaatagaag

SEQ ID NO: 2815925 - DNA, 25 bp, Homo sapien
gaattatcattgactctttggttaa

SEQ ID NO: 2815926 - DNA, 25 bp, Homo sapien
catcttttgatatacattgaattat

SEQ ID NO: 2815927 - DNA, 25 bp, Homo sapien
ttgaattatcattgactctttggtt

SEQ ID NO: 2815928 - DNA, 25 bp, Homo sapien
ctttattaaccagtcagtgtttcat

SEQ ID NO: 2815929 - DNA, 25 bp, Homo sapien
aataggcccttaagctgtattagcc

SEQ ID NO: 2815930 - DNA, 25 bp, Homo sapien
ttataaatcagtcctggattccctg

SEQ ID NO: 2815931 - DNA, 25 bp, Homo sapien
gtctgtagacaatttccatagggag

SEQ ID NO: 2815932 - DNA, 25 bp, Homo sapien
gaaaggccaggcagtcagcttaata

SEQ ID NO: 2815933 - DNA, 25 bp, Homo sapien
atattctctttcgttggtctatatg

SEQ ID NO: 2815934 - DNA, 25 bp, Homo sapien
atatggtataaggagaggattcagt

SEQ ID NO: 2815935 - DNA, 25 bp, Homo sapien
ctctatattctctttcgttggtcta

SEQ ID NO: 2815936 - DNA, 25 bp, Homo sapien
ttgtaccagtacattgttgcgttgg

SEQ ID NO: 2815937 - DNA, 25 bp, Homo sapien
gatataaccatccaaacagtttgca

SEQ ID NO: 2815938 - DNA, 25 bp, Homo sapien
tgccaagactggcataaagttcaca

SEQ ID NO: 2815939 - DNA, 25 bp, Homo sapien
tcacagttgatataaccatccaaac

SEQ ID NO: 2815940 - DNA, 25 bp, Homo sapien
catagcaaccactgtagaaatagat

SEQ ID NO: 2815941 - DNA, 25 bp, Homo sapien
gcatgaaagcacttaccagaagtca

SEQ ID NO: 2815942 - DNA, 25 bp, Homo sapien
ccttcttagtcgtgttgatgcagca

SEQ ID NO: 2815943 - DNA, 25 bp, Homo sapien
gaagtcagggccttgcgcttgaact

SEQ ID NO: 2815944 - DNA, 25 bp, Homo sapien
gaacttcctaaccagcagaaccatg

SEQ ID NO: 2815945 - DNA, 25 bp, Homo sapien
aagggtctctaatcctgttctttct

SEQ ID NO: 2815946 - DNA, 25 bp, Homo sapien
ttatgttgatccaggtcataccagg

SEQ ID NO: 2815947 - DNA, 25 bp, Homo sapien
tttgtttatgttgatccaggtcata

SEQ ID NO: 2815948 - DNA, 25 bp, Homo sapien
tgatccaggtcataccaggttatga

SEQ ID NO: 2815949 - DNA, 25 bp, Homo sapien
accaggttatgatgcgttccctcca

SEQ ID NO: 2815950 - DNA, 25 bp, Homo sapien
ctgtgtatggtctaggacacctgga

SEQ ID NO: 2815951 - DNA, 25 bp, Homo sapien
gacacctggaaacttcgtatatgga

SEQ ID NO: 2815952 - DNA, 25 bp, Homo sapien
ctgatagacttaagcatggtgctta

SEQ ID NO: 2815953 - DNA, 25 bp, Homo sapien
tccagtaggcctgcagataactgtg

SEQ ID NO: 2815954 - DNA, 25 bp, Homo sapien
ctttaagatggaatattagagttgg

SEQ ID NO: 2815955 - DNA, 25 bp, Homo sapien
ccatctttaagatggaatattagag

SEQ ID NO: 2815956 - DNA, 25 bp, Homo sapien
tcttgctaacttggagtctcctcca

SEQ ID NO: 2815957 - DNA, 25 bp, Homo sapien
catctttaagatggaatattagagt

SEQ ID NO: 2815958 - DNA, 25 bp, Homo sapien
tgaaggtattaagggccacattgct

SEQ ID NO: 2815959 - DNA, 25 bp, Homo sapien
ctctatgaaggtattaagggccaca

SEQ ID NO: 2815960 - DNA, 25 bp, Homo sapien
tattaagggccacattgctggtggt

SEQ ID NO: 2815961 - DNA, 25 bp, Homo sapien
cattgctggtggtaagtggtgtcat

SEQ ID NO: 2815962 - DNA, 25 bp, Homo sapien
tatttaacttgtcataccactaatg

SEQ ID NO: 2815963 - DNA, 25 bp, Homo sapien
ccgagttcaagtgtttgtcctgcat

SEQ ID NO: 2815964 - DNA, 25 bp, Homo sapien
taacttgtcataccactaatgtaat

SEQ ID NO: 2815965 - DNA, 25 bp, Homo sapien
cgtggccaacataccttcaactttt

SEQ ID NO: 2815966 - DNA, 25 bp, Homo sapien
gacaagcaaattacgtattctctct

SEQ ID NO: 2815967 - DNA, 25 bp, Homo sapien
gcaggatagggaaatcgatggattt

SEQ ID NO: 2815968 - DNA, 25 bp, Homo sapien
tgaatttaataccataggcttgaga

SEQ ID NO: 2815969 - DNA, 25 bp, Homo sapien
catatctgctcactaatctctggct

SEQ ID NO: 2815970 - DNA, 25 bp, Homo sapien
cttcagaactaacccatcaagggag

SEQ ID NO: 2815971 - DNA, 25 bp, Homo sapien
tgtaggcccacatcacataaagtga

SEQ ID NO: 2815972 - DNA, 25 bp, Homo sapien
tcgtatcatggtcagaaaggcaaga

SEQ ID NO: 2815973 - DNA, 25 bp, Homo sapien
tagagttaatgaagaacatatagac

SEQ ID NO: 2815974 - DNA, 25 bp, Homo sapien
cacagttgcaatccgggctgcttct

SEQ ID NO: 2815975 - DNA, 25 bp, Homo sapien
acccattgcttcttgacgcccgtgg

SEQ ID NO: 2815976 - DNA, 25 bp, Homo sapien
tgcaatccgggctgcttctacatcc

SEQ ID NO: 2815977 - DNA, 25 bp, Homo sapien
cccgtggagttcgtgatgatatgct

SEQ ID NO: 2815978 - DNA, 25 bp, Homo sapien
tgctggaccacacttgacaatgtag

SEQ ID NO: 2815979 - DNA, 25 bp, Homo sapien
caaatagtgcataggccatgccctc

SEQ ID NO: 2815980 - DNA, 25 bp, Homo sapien
cacatggctgtatctagcaggctcc

SEQ ID NO: 2815981 - DNA, 25 bp, Homo sapien
ctcctgttgactggtgggcccaagc

SEQ ID NO: 2815982 - DNA, 25 bp, Homo sapien
ttgtttcagcaccgactcaaaagtc

SEQ ID NO: 2815983 - DNA, 25 bp, Homo sapien
ttcagcaccgactcaaaagtccaaa

SEQ ID NO: 2815984 - DNA, 25 bp, Homo sapien
ctacatctagggatagtgtcactcc

SEQ ID NO: 2815985 - DNA, 25 bp, Homo sapien
catatcactacatctagggatagtg

SEQ ID NO: 2815986 - DNA, 25 bp, Homo sapien
acatctagggatagtgtcactcctt

SEQ ID NO: 2815987 - DNA, 25 bp, Homo sapien
tcactacatctagggatagtgtcac

SEQ ID NO: 2815988 - DNA, 25 bp, Homo sapien
gacttaaagatatgatgttgccttc

SEQ ID NO: 2815989 - DNA, 25 bp, Homo sapien
atatgatgttgccttcatctaagtc

SEQ ID NO: 2815990 - DNA, 25 bp, Homo sapien
agggacttaaagatatgatgttgcc

SEQ ID NO: 2815991 - DNA, 25 bp, Homo sapien
taaagatatgatgttgccttcatct

SEQ ID NO: 2815992 - DNA, 25 bp, Homo sapien
agaggacagtgagggtagaaaaaga

SEQ ID NO: 2815993 - DNA, 25 bp, Homo sapien
gaggacagtgagggtagaaaaagaa

SEQ ID NO: 2815994 - DNA, 25 bp, Homo sapien
cactggcctgcaaaggagatccatc

SEQ ID NO: 2815995 - DNA, 25 bp, Homo sapien
catcttcacaagttccactggctgc

SEQ ID NO: 2815996 - DNA, 25 bp, Homo sapien
gactgttgaggttctgttactccag

SEQ ID NO: 2815997 - DNA, 25 bp, Homo sapien
tgcctctaggcataccatagtttat

SEQ ID NO: 2815998 - DNA, 25 bp, Homo sapien
tttggagataatcttcactcatagc

SEQ ID NO: 2815999 - DNA, 25 bp, Homo sapien
ttggagataatcttcactcatagcc

SEQ ID NO: 2816000 - DNA, 25 bp, Homo sapien
cttcactcatagcctttatcaccat

SEQ ID NO: 2816001 - DNA, 25 bp, Homo sapien
aatcttcactcatagcctttatcac

SEQ ID NO: 2816002 - DNA, 25 bp, Homo sapien
gacaatataaacatcggttcctgtg

SEQ ID NO: 2816003 - DNA, 25 bp, Homo sapien
gaagattctggctgttctctgaaag

SEQ ID NO: 2816004 - DNA, 25 bp, Homo sapien
tttcagcagtagcagccaaatgcct

SEQ ID NO: 2816005 - DNA, 25 bp, Homo sapien
caggtgatcagcatgagatttgcca

SEQ ID NO: 2816006 - DNA, 25 bp, Homo sapien
tctgttgcacaacggcttctgggcg

SEQ ID NO: 2816007 - DNA, 25 bp, Homo sapien
tctctagatctatctccaagatcct

SEQ ID NO: 2816008 - DNA, 25 bp, Homo sapien
cccttggggtctgttgcacaacggc

SEQ ID NO: 2816009 - DNA, 25 bp, Homo sapien
gcagcccttggggtctgttgcacaa

SEQ ID NO: 2816010 - DNA, 25 bp, Homo sapien
tttccttaaccaaattgtgggcagc

SEQ ID NO: 2816011 - DNA, 25 bp, Homo sapien
taaccaaattgtgggcagcttccat

SEQ ID NO: 2816012 - DNA, 25 bp, Homo sapien
ccttaaccaaattgtgggcagcttc

SEQ ID NO: 2816013 - DNA, 25 bp, Homo sapien
ttaaccaaattgtgggcagcttcca

SEQ ID NO: 2816014 - DNA, 25 bp, Homo sapien
aagcttccagaacttaagtaactgg

SEQ ID NO: 2816015 - DNA, 25 bp, Homo sapien
gaattcttatatttcgctgatgtga

SEQ ID NO: 2816016 - DNA, 25 bp, Homo sapien
ttgggtaacaagactgacagtgaac

SEQ ID NO: 2816017 - DNA, 25 bp, Homo sapien
tgatgtgaaagaacccaaaagcttt

SEQ ID NO: 2816018 - DNA, 25 bp, Homo sapien
cagattcttaaaatatcaaaatcaa

SEQ ID NO: 2816019 - DNA, 25 bp, Homo sapien
tcagattcttaaaatatcaaaatca

SEQ ID NO: 2816020 - DNA, 25 bp, Homo sapien
agattcttaaaatatcaaaatcaac

SEQ ID NO: 2816021 - DNA, 25 bp, Homo sapien
tgtgggctcaaatttaccttgcttg

SEQ ID NO: 2816022 - DNA, 25 bp, Homo sapien
gcatacacatctgagctgtaaggct

SEQ ID NO: 2816023 - DNA, 25 bp, Homo sapien
tggcttcaagggcatacacatctga

SEQ ID NO: 2816024 - DNA, 25 bp, Homo sapien
ctgtaaggctgtcgtgtgggctcaa

SEQ ID NO: 2816025 - DNA, 25 bp, Homo sapien
cttgtgttttggggttgatctggtc

SEQ ID NO: 2816026 - DNA, 25 bp, Homo sapien
ttgatctggtccttcgccagtgtgc

SEQ ID NO: 2816027 - DNA, 25 bp, Homo sapien
aagcacatcggtcacttgtgttttg

SEQ ID NO: 2816028 - DNA, 25 bp, Homo sapien
tgatctggtccttcgccagtgtgca

SEQ ID NO: 2816029 - DNA, 25 bp, Homo sapien
tggtgaggaatatacaatttgttag

SEQ ID NO: 2816030 - DNA, 25 bp, Homo sapien
tactgtcaggagtacactggtcttg

SEQ ID NO: 2816031 - DNA, 25 bp, Homo sapien
tcatcagaggagatgtttgttccca

SEQ ID NO: 2816032 - DNA, 25 bp, Homo sapien
tagctttcatcagaggagatgtttg

SEQ ID NO: 2816033 - DNA, 25 bp, Homo sapien
tacatgggagattctaccagtccct

SEQ ID NO: 2816034 - DNA, 25 bp, Homo sapien
taggacttaagctatctccactgca

SEQ ID NO: 2816035 - DNA, 25 bp, Homo sapien
gaaactatcccgcatttgaaagtct

SEQ ID NO: 2816036 - DNA, 25 bp, Homo sapien
attctccaatgctgagttagccttg

SEQ ID NO: 2816037 - DNA, 25 bp, Homo sapien
acacactgctttagtgacatcctaa

SEQ ID NO: 2816038 - DNA, 25 bp, Homo sapien
ggagttgatactttattagtcagcg

SEQ ID NO: 2816039 - DNA, 25 bp, Homo sapien
tacttggtatgatatctgttaatga

SEQ ID NO: 2816040 - DNA, 25 bp, Homo sapien
gtcttccaaatcacctgctaatctc

SEQ ID NO: 2816041 - DNA, 25 bp, Homo sapien
cacagtcattaagcctcatgtttgg

SEQ ID NO: 2816042 - DNA, 25 bp, Homo sapien
caataatgctttaaaccatgttgcg

SEQ ID NO: 2816043 - DNA, 25 bp, Homo sapien
aatttttggaaactgcatggcctaa

SEQ ID NO: 2816044 - DNA, 25 bp, Homo sapien
accatgtgaagtggcaaaactgatc

SEQ ID NO: 2816045 - DNA, 25 bp, Homo sapien
gaacttcctcgagaagaggaactcc

SEQ ID NO: 2816046 - DNA, 25 bp, Homo sapien
aacttcctcgagaagaggaactcca

SEQ ID NO: 2816047 - DNA, 25 bp, Homo sapien
agaacttcctcgagaagaggaactc

SEQ ID NO: 2816048 - DNA, 25 bp, Homo sapien
tgatgttgtgttccaggagggccac

SEQ ID NO: 2816049 - DNA, 25 bp, Homo sapien
tgtatcatggaagaatagaacagca

SEQ ID NO: 2816050 - DNA, 25 bp, Homo sapien
tggagagtaaacagtcaaggaactg

SEQ ID NO: 2816051 - DNA, 25 bp, Homo sapien
gaaaccaacatgtcaaaagtcagca

SEQ ID NO: 2816052 - DNA, 25 bp, Homo sapien
ttcctcttctagcttcataaaagta

SEQ ID NO: 2816053 - DNA, 25 bp, Homo sapien
cattcctcttctagcttcataaaag

SEQ ID NO: 2816054 - DNA, 25 bp, Homo sapien
tcctcttctagcttcataaaagtac

SEQ ID NO: 2816055 - DNA, 25 bp, Homo sapien
tcattcctcttctagcttcataaaa

SEQ ID NO: 2816056 - DNA, 25 bp, Homo sapien
gttcactaaaatgtgctctaccgag

SEQ ID NO: 2816057 - DNA, 25 bp, Homo sapien
ttgtattactgtcccaaaatggaag

SEQ ID NO: 2816058 - DNA, 25 bp, Homo sapien
aaagcactcagtcattaggaaacaa

SEQ ID NO: 2816059 - DNA, 25 bp, Homo sapien
agtcccaggagtgagggtgcctcaa

SEQ ID NO: 2816060 - DNA, 25 bp, Homo sapien
tctcagaaagtttacattcacgcca

SEQ ID NO: 2816061 - DNA, 25 bp, Homo sapien
gtctcagaaagtttacattcacgcc

SEQ ID NO: 2816062 - DNA, 25 bp, Homo sapien
tcagaaagtttacattcacgccagt

SEQ ID NO: 2816063 - DNA, 25 bp, Homo sapien
ctcagaaagtttacattcacgccag

SEQ ID NO: 2816064 - DNA, 25 bp, Homo sapien
gctgacaggacataacattcaaaag

SEQ ID NO: 2816065 - DNA, 25 bp, Homo sapien
cagagtcagtgtttgtagttgaatg

SEQ ID NO: 2816066 - DNA, 25 bp, Homo sapien
tcctcagagtcagtgtttgtagttg

SEQ ID NO: 2816067 - DNA, 25 bp, Homo sapien
caaaagatggaagattgagtgtttc

SEQ ID NO: 2816068 - DNA, 25 bp, Homo sapien
ttcctagggcgcactggtcctgttc

SEQ ID NO: 2816069 - DNA, 25 bp, Homo sapien
aaaatactgcagttagcaagtgaag

SEQ ID NO: 2816070 - DNA, 25 bp, Homo sapien
ctgcagttagcaagtgaagatcctt

SEQ ID NO: 2816071 - DNA, 25 bp, Homo sapien
ttctggtggtttcctagggcgcact

SEQ ID NO: 2816072 - DNA, 25 bp, Homo sapien
tcacatgctgtgtatacttcctctg

SEQ ID NO: 2816073 - DNA, 25 bp, Homo sapien
catgctgtgtatacttcctctggct

SEQ ID NO: 2816074 - DNA, 25 bp, Homo sapien
gctctgttacaatgtattgctccat

SEQ ID NO: 2816075 - DNA, 25 bp, Homo sapien
ggctctgttacaatgtattgctcca

SEQ ID NO: 2816076 - DNA, 25 bp, Homo sapien
tctggaacgaaggatcctgtactgg

SEQ ID NO: 2816077 - DNA, 25 bp, Homo sapien
gcaaaagggtaaatcaaaatgtcac

SEQ ID NO: 2816078 - DNA, 25 bp, Homo sapien
ccttcagggagcatctagactggta

SEQ ID NO: 2816079 - DNA, 25 bp, Homo sapien
cattgtaaacttgtgccccaagtgg

SEQ ID NO: 2816080 - DNA, 25 bp, Homo sapien
gacggatacataaggtaacagtctc

SEQ ID NO: 2816081 - DNA, 25 bp, Homo sapien
caaaataagctcagatgacggatac

SEQ ID NO: 2816082 - DNA, 25 bp, Homo sapien
tgcctgaggacgatatcaaaagtgt

SEQ ID NO: 2816083 - DNA, 25 bp, Homo sapien
tgttttctctgtaggagccatgaaa

SEQ ID NO: 2816084 - DNA, 25 bp, Homo sapien
gaggtctccagcatggtatgaattc

SEQ ID NO: 2816085 - DNA, 25 bp, Homo sapien
tctcctctaacagatctgttaggca

SEQ ID NO: 2816086 - DNA, 25 bp, Homo sapien
gtgaattgcattactgttcttatca

SEQ ID NO: 2816087 - DNA, 25 bp, Homo sapien
tatcaggtacaggtacatcattgtc

SEQ ID NO: 2816088 - DNA, 25 bp, Homo sapien
gcataatttgttttagcaccagctg

SEQ ID NO: 2816089 - DNA, 25 bp, Homo sapien
cataatttgttttagcaccagctgg

SEQ ID NO: 2816090 - DNA, 25 bp, Homo sapien
tcctttattttcattgctaatgtct

SEQ ID NO: 2816091 - DNA, 25 bp, Homo sapien
cctttattttcattgctaatgtctc

SEQ ID NO: 2816092 - DNA, 25 bp, Homo sapien
ttattttcattgctaatgtctctca

SEQ ID NO: 2816093 - DNA, 25 bp, Homo sapien
ctgtccttgtcctttattttcattg

SEQ ID NO: 2816094 - DNA, 25 bp, Homo sapien
catttggccaaggagtagttgcagg

SEQ ID NO: 2816095 - DNA, 25 bp, Homo sapien
gcagggaccggtgtattgggaatct

SEQ ID NO: 2816096 - DNA, 25 bp, Homo sapien
gtcccatttggccaaggagtagttg

SEQ ID NO: 2816097 - DNA, 25 bp, Homo sapien
ctgcagggaccggtgtattgggaat

SEQ ID NO: 2816098 - DNA, 25 bp, Homo sapien
gcagcagcaccaatgtccataattt

SEQ ID NO: 2816099 - DNA, 25 bp, Homo sapien
gaagtgacataagcctttggcaagg

SEQ ID NO: 2816100 - DNA, 25 bp, Homo sapien
cagcagcagcaccaatgtccataat

SEQ ID NO: 2816101 - DNA, 25 bp, Homo sapien
taattttacaattctggaagtgaca

SEQ ID NO: 2816102 - DNA, 25 bp, Homo sapien
tcaagaagcttctgcaagagaggag

SEQ ID NO: 2816103 - DNA, 25 bp, Homo sapien
ccaggatagcagataaattggagct

SEQ ID NO: 2816104 - DNA, 25 bp, Homo sapien
tggagagactcactagagcgaccag

SEQ ID NO: 2816105 - DNA, 25 bp, Homo sapien
tagtaaactgaaagtggagagactc

SEQ ID NO: 2816106 - DNA, 25 bp, Homo sapien
gtccaggcagtcagaagttaacctc

SEQ ID NO: 2816107 - DNA, 25 bp, Homo sapien
acctctgattgctttcaatgctaca

SEQ ID NO: 2816108 - DNA, 25 bp, Homo sapien
tgattgctttcaatgctacaatctg

SEQ ID NO: 2816109 - DNA, 25 bp, Homo sapien
ttgctttcaatgctacaatctgctg

SEQ ID NO: 2816110 - DNA, 25 bp, Homo sapien
ttctgagatgtttactaggaagtgt

SEQ ID NO: 2816111 - DNA, 25 bp, Homo sapien
aatgtgtgtaacctcttgaatgtga

SEQ ID NO: 2816112 - DNA, 25 bp, Homo sapien
ttagtttggcagctatcttaatgtg

SEQ ID NO: 2816113 - DNA, 25 bp, Homo sapien
gcttctgagatgtttactaggaagt

SEQ ID NO: 2816114 - DNA, 25 bp, Homo sapien
gcagaataccaagagtcttaggtgg

SEQ ID NO: 2816115 - DNA, 25 bp, Homo sapien
gatccttagggtttgacactggtca

SEQ ID NO: 2816116 - DNA, 25 bp, Homo sapien
cagaataccaagagtcttaggtgga

SEQ ID NO: 2816117 - DNA, 25 bp, Homo sapien
ttgccaagatccttagggtttgaca

SEQ ID NO: 2816118 - DNA, 25 bp, Homo sapien
tagctgtctaactaggaagcaggcc

SEQ ID NO: 2816119 - DNA, 25 bp, Homo sapien
gaatcaatgctgtgtctacgtaaaa

SEQ ID NO: 2816120 - DNA, 25 bp, Homo sapien
gaattacataaactcatgagggtgg

SEQ ID NO: 2816121 - DNA, 25 bp, Homo sapien
gaaaccctgtcctctaatgtgatag

SEQ ID NO: 2816122 - DNA, 25 bp, Homo sapien
tcttctaccacacaacaaccacttt

SEQ ID NO: 2816123 - DNA, 25 bp, Homo sapien
cactttcagttacatcctgtgtgat

SEQ ID NO: 2816124 - DNA, 25 bp, Homo sapien
caacccaatacctcttctaccacac

SEQ ID NO: 2816125 - DNA, 25 bp, Homo sapien
tgtgatcttgcatgattcagcactc

SEQ ID NO: 2816126 - DNA, 25 bp, Homo sapien
tctctatttcatacccgcagagttg

SEQ ID NO: 2816127 - DNA, 25 bp, Homo sapien
actataagtaatcctttagccaggg

SEQ ID NO: 2816128 - DNA, 25 bp, Homo sapien
gcagagttgtataacattctccagg

SEQ ID NO: 2816129 - DNA, 25 bp, Homo sapien
gagccatgcctcgtaaatccggtga

SEQ ID NO: 2816130 - DNA, 25 bp, Homo sapien
caaatcaacaaattgggcagtagca

SEQ ID NO: 2816131 - DNA, 25 bp, Homo sapien
ttggtggattggtgtagttgcacct

SEQ ID NO: 2816132 - DNA, 25 bp, Homo sapien
gcagtagcaaatttggtttaataac

SEQ ID NO: 2816133 - DNA, 25 bp, Homo sapien
tgcacctgagtttcaaagttccccg

SEQ ID NO: 2816134 - DNA, 25 bp, Homo sapien
tctggatatgtaagacaggacagct

SEQ ID NO: 2816135 - DNA, 25 bp, Homo sapien
cagagtagacaacccaaagtaagac

SEQ ID NO: 2816136 - DNA, 25 bp, Homo sapien
gtttaaataccaacacctggagcac

SEQ ID NO: 2816137 - DNA, 25 bp, Homo sapien
caaatgtactccatcgatctcagag

SEQ ID NO: 2816138 - DNA, 25 bp, Homo sapien
tcgctttcttctagtccttctaatc

SEQ ID NO: 2816139 - DNA, 25 bp, Homo sapien
attcgctttcttctagtccttctaa

SEQ ID NO: 2816140 - DNA, 25 bp, Homo sapien
tcataaaaacaattcgctttcttct

SEQ ID NO: 2816141 - DNA, 25 bp, Homo sapien
aaacaattcgctttcttctagtcct

SEQ ID NO: 2816142 - DNA, 25 bp, Homo sapien
ttttgccataagcagcgtgcatctt

SEQ ID NO: 2816143 - DNA, 25 bp, Homo sapien
cagggtgaccggcatatgctcattt

SEQ ID NO: 2816144 - DNA, 25 bp, Homo sapien
ccatttggctaagccagtctccatg

SEQ ID NO: 2816145 - DNA, 25 bp, Homo sapien
tgttccagaaaagtctcctccattt

SEQ ID NO: 2816146 - DNA, 25 bp, Homo sapien
ctaagaaatatacactcaggatcat

SEQ ID NO: 2816147 - DNA, 25 bp, Homo sapien
ctagcctcctgtagcaatttcctca

SEQ ID NO: 2816148 - DNA, 25 bp, Homo sapien
cttgccactctttaggcctcctacc

SEQ ID NO: 2816149 - DNA, 25 bp, Homo sapien
agcctcctgtagcaatttcctcact

SEQ ID NO: 2816150 - DNA, 25 bp, Homo sapien
tgccactctttaggcctcctaccag

SEQ ID NO: 2816151 - DNA, 25 bp, Homo sapien
tagcacagatgctgtcaattaagcc

SEQ ID NO: 2816152 - DNA, 25 bp, Homo sapien
tgttctgtcactaatttagcacaga

SEQ ID NO: 2816153 - DNA, 25 bp, Homo sapien
acacagatgctgtccgttgggttgg

SEQ ID NO: 2816154 - DNA, 25 bp, Homo sapien
tggataatttggctgcaccagaaca

SEQ ID NO: 2816155 - DNA, 25 bp, Homo sapien
tgggtctccaagtatctccacaaca

SEQ ID NO: 2816156 - DNA, 25 bp, Homo sapien
ttgggtctccaagtatctccacaac

SEQ ID NO: 2816157 - DNA, 25 bp, Homo sapien
gtctccaagtatctccacaacattt

SEQ ID NO: 2816158 - DNA, 25 bp, Homo sapien
gggtctccaagtatctccacaacat

SEQ ID NO: 2816159 - DNA, 25 bp, Homo sapien
cattgccttggcattagcttgtgga

SEQ ID NO: 2816160 - DNA, 25 bp, Homo sapien
ccagatgccattgccttggcattag

SEQ ID NO: 2816161 - DNA, 25 bp, Homo sapien
tagcttgtggaactgtaggcttatt

SEQ ID NO: 2816162 - DNA, 25 bp, Homo sapien
gtaggcttatttgggaactcgctgt

SEQ ID NO: 2816163 - DNA, 25 bp, Homo sapien
catcactgcttaactagcttctgag

SEQ ID NO: 2816164 - DNA, 25 bp, Homo sapien
aaccaggcccatcactgcttaacta

SEQ ID NO: 2816165 - DNA, 25 bp, Homo sapien
ggcccatcactgcttaactagcttc

SEQ ID NO: 2816166 - DNA, 25 bp, Homo sapien
caggcccatcactgcttaactagct

SEQ ID NO: 2816167 - DNA, 25 bp, Homo sapien
cacttgtcaaaatgacccgctggga

SEQ ID NO: 2816168 - DNA, 25 bp, Homo sapien
aagatatcacttgtagagcctgcca

SEQ ID NO: 2816169 - DNA, 25 bp, Homo sapien
ccagagtgatggtaacaggccaaga

SEQ ID NO: 2816170 - DNA, 25 bp, Homo sapien
gctaattcatgtcttatggccagag

SEQ ID NO: 2816171 - DNA, 25 bp, Homo sapien
tgatgctggtgaaacaccgacttac

SEQ ID NO: 2816172 - DNA, 25 bp, Homo sapien
atgatgctggtgaaacaccgactta

SEQ ID NO: 2816173 - DNA, 25 bp, Homo sapien
cttcatcgcagcaacaaatgggcag

SEQ ID NO: 2816174 - DNA, 25 bp, Homo sapien
gacaggactatcagggctttttgcc

SEQ ID NO: 2816175 - DNA, 25 bp, Homo sapien
tatcatggcattgcttaaaatgatt

SEQ ID NO: 2816176 - DNA, 25 bp, Homo sapien
taaaatgattacttcatcgcagcaa

SEQ ID NO: 2816177 - DNA, 25 bp, Homo sapien
aaatcacttcacaaaggcttctgga

SEQ ID NO: 2816178 - DNA, 25 bp, Homo sapien
tctggaacaatagagaaaagtgaaa

SEQ ID NO: 2816179 - DNA, 25 bp, Homo sapien
actgcatatatacccctgaacttaa

SEQ ID NO: 2816180 - DNA, 25 bp, Homo sapien
taatctatacaacaaccccacatga

SEQ ID NO: 2816181 - DNA, 25 bp, Homo sapien
caggtgttaattctgcaagtactaa

SEQ ID NO: 2816182 - DNA, 25 bp, Homo sapien
tgacagcaggtgttaattctgcaag

SEQ ID NO: 2816183 - DNA, 25 bp, Homo sapien
caggtgtcagatacactgggtatta

SEQ ID NO: 2816184 - DNA, 25 bp, Homo sapien
gtactaatttaacatagcaggtgtc

SEQ ID NO: 2816185 - DNA, 25 bp, Homo sapien
aaatgatcttctacttgcaggtaaa

SEQ ID NO: 2816186 - DNA, 25 bp, Homo sapien
aatgatcttctacttgcaggtaaaa

SEQ ID NO: 2816187 - DNA, 25 bp, Homo sapien
tgagtattaagctgcagctgatcat

SEQ ID NO: 2816188 - DNA, 25 bp, Homo sapien
cctttgagtattaagctgcagctga

SEQ ID NO: 2816189 - DNA, 25 bp, Homo sapien
aggatgaactaggggtaacggccat

SEQ ID NO: 2816190 - DNA, 25 bp, Homo sapien
gccacaggatgaactaggggtaacg

SEQ ID NO: 2816191 - DNA, 25 bp, Homo sapien
tccatctgagccacaggatgaacta

SEQ ID NO: 2816192 - DNA, 25 bp, Homo sapien
atctgagccacaggatgaactaggg

SEQ ID NO: 2816193 - DNA, 25 bp, Homo sapien
caacttattatggtcccattggttt

SEQ ID NO: 2816194 - DNA, 25 bp, Homo sapien
ctctggtgttttgctacagcatgag

SEQ ID NO: 2816195 - DNA, 25 bp, Homo sapien
atcaacttattatggtcccattggt

SEQ ID NO: 2816196 - DNA, 25 bp, Homo sapien
ggtgttttgctacagcatgagcctt

SEQ ID NO: 2816197 - DNA, 25 bp, Homo sapien
cttcctgtcttcttgcaaatttctc

SEQ ID NO: 2816198 - DNA, 25 bp, Homo sapien
cctgtcttcttgcaaatttctcacc

SEQ ID NO: 2816199 - DNA, 25 bp, Homo sapien
ctctttggagatacagtttttctct

SEQ ID NO: 2816200 - DNA, 25 bp, Homo sapien
cagtttttctctaaattgctctttt

SEQ ID NO: 2816201 - DNA, 25 bp, Homo sapien
ggatatacgtcttaaatctctgtag

SEQ ID NO: 2816202 - DNA, 25 bp, Homo sapien
aatcttgatgggatatacgtcttaa

SEQ ID NO: 2816203 - DNA, 25 bp, Homo sapien
tctctgtagttcacatcagtttcac

SEQ ID NO: 2816204 - DNA, 25 bp, Homo sapien
tactccatactctcttgtacaaatc

SEQ ID NO: 2816205 - DNA, 25 bp, Homo sapien
ctgctgcaactaaatccacccccat

SEQ ID NO: 2816206 - DNA, 25 bp, Homo sapien
aatacaaatgtgcaactctgtttat

SEQ ID NO: 2816207 - DNA, 25 bp, Homo sapien
ttaacataaactatgcctagaaaat

SEQ ID NO: 2816208 - DNA, 25 bp, Homo sapien
atgtgcaactctgtttatatgtttg

SEQ ID NO: 2816209 - DNA, 25 bp, Homo sapien
caatatttattttcaaccatgatgt

SEQ ID NO: 2816210 - DNA, 25 bp, Homo sapien
caagctgatcagtgccacaacacca

SEQ ID NO: 2816211 - DNA, 25 bp, Homo sapien
tgccagcaagaagcaagctgatcag

SEQ ID NO: 2816212 - DNA, 25 bp, Homo sapien
taaatacctagtgtgaaatgccagc

SEQ ID NO: 2816213 - DNA, 25 bp, Homo sapien
tctaggggagtagtgcctacaacat

SEQ ID NO: 2816214 - DNA, 25 bp, Homo sapien
gcaactttctaggttgcagtgtctg

SEQ ID NO: 2816215 - DNA, 25 bp, Homo sapien
catctagtctagaatattttcagga

SEQ ID NO: 2816216 - DNA, 25 bp, Homo sapien
taattacaagtattacaagtgtctg

SEQ ID NO: 2816217 - DNA, 25 bp, Homo sapien
tagtgccacatgaaaatgtagatac

SEQ ID NO: 2816218 - DNA, 25 bp, Homo sapien
ggctttttgcagctgaagatgtgca

SEQ ID NO: 2816219 - DNA, 25 bp, Homo sapien
gatgtgcagttaatagatttctctc

SEQ ID NO: 2816220 - DNA, 25 bp, Homo sapien
tagatttctctcaacactcctgcct

SEQ ID NO: 2816221 - DNA, 25 bp, Homo sapien
cctgattagaggctttttgcagctg

SEQ ID NO: 2816222 - DNA, 25 bp, Homo sapien
ctactagcgtcaccatatgctgggt

SEQ ID NO: 2816223 - DNA, 25 bp, Homo sapien
gtcccctcttcgataaaaagtgtca

SEQ ID NO: 2816224 - DNA, 25 bp, Homo sapien
tgaacgccttaacatgaagggataa

SEQ ID NO: 2816225 - DNA, 25 bp, Homo sapien
aaagatgaacgccttaacatgaagg

SEQ ID NO: 2816226 - DNA, 25 bp, Homo sapien
caggacacatttgcttgggattaac

SEQ ID NO: 2816227 - DNA, 25 bp, Homo sapien
catttgcttgggattaacatctatc

SEQ ID NO: 2816228 - DNA, 25 bp, Homo sapien
gaaccacctctaccaggacacattt

SEQ ID NO: 2816229 - DNA, 25 bp, Homo sapien
aagaaccacctctaccaggacacat

SEQ ID NO: 2816230 - DNA, 25 bp, Homo sapien
ggctctatctcctgtatgacccata

SEQ ID NO: 2816231 - DNA, 25 bp, Homo sapien
caggctctatctcctgtatgaccca

SEQ ID NO: 2816232 - DNA, 25 bp, Homo sapien
tctcctgtatgacccatacctccat

SEQ ID NO: 2816233 - DNA, 25 bp, Homo sapien
tctatctcctgtatgacccatacct

SEQ ID NO: 2816234 - DNA, 25 bp, Homo sapien
ggcctttagcactcatcaattacag

SEQ ID NO: 2816235 - DNA, 25 bp, Homo sapien
ccattcctgagtctttgttctgtga

SEQ ID NO: 2816236 - DNA, 25 bp, Homo sapien
ttttaactctcagatgtgtccacac

SEQ ID NO: 2816237 - DNA, 25 bp, Homo sapien
tactcaagtactccttcccttggaa

SEQ ID NO: 2816238 - DNA, 25 bp, Homo sapien
tggagagttggcataacaatttagc

SEQ ID NO: 2816239 - DNA, 25 bp, Homo sapien
tatccttgagaaccatgtagagctt

SEQ ID NO: 2816240 - DNA, 25 bp, Homo sapien
tacccactgactagttatccttgag

SEQ ID NO: 2816241 - DNA, 25 bp, Homo sapien
tactagtgataaacactcagatccc

SEQ ID NO: 2816242 - DNA, 25 bp, Homo sapien
cagtatttctcttggttgttacagg

SEQ ID NO: 2816243 - DNA, 25 bp, Homo sapien
ttgagtcagtaaccaggaatttcca

SEQ ID NO: 2816244 - DNA, 25 bp, Homo sapien
ttgttacaggaggtgaacgttcgtc

SEQ ID NO: 2816245 - DNA, 25 bp, Homo sapien
tcacattggtgctactttgccgcca

SEQ ID NO: 2816246 - DNA, 25 bp, Homo sapien
ataaagcttaaatttagtatcgtgt

SEQ ID NO: 2816247 - DNA, 25 bp, Homo sapien
taggataaagcttaaatttagtatc

SEQ ID NO: 2816248 - DNA, 25 bp, Homo sapien
aggataaagcttaaatttagtatcg

SEQ ID NO: 2816249 - DNA, 25 bp, Homo sapien
gataaagcttaaatttagtatcgtg

SEQ ID NO: 2816250 - DNA, 25 bp, Homo sapien
tgagtaccagagacagctcaatctg

SEQ ID NO: 2816251 - DNA, 25 bp, Homo sapien
tcaatctgatgccaactttggcagc

SEQ ID NO: 2816252 - DNA, 25 bp, Homo sapien
tatttgactcggatcaactcttctc

SEQ ID NO: 2816253 - DNA, 25 bp, Homo sapien
tgctgttggcaattgagtaccagag

SEQ ID NO: 2816254 - DNA, 25 bp, Homo sapien
ggctgacatcttcccggcgtagctg

SEQ ID NO: 2816255 - DNA, 25 bp, Homo sapien
caggcttcatagttgaaggaagagg

SEQ ID NO: 2816256 - DNA, 25 bp, Homo sapien
gggctgcaaactcgctcaggcttca

SEQ ID NO: 2816257 - DNA, 25 bp, Homo sapien
catcttcccggcgtagctgacatac

SEQ ID NO: 2816258 - DNA, 25 bp, Homo sapien
ctttcctgggatactcctgttgttt

SEQ ID NO: 2816259 - DNA, 25 bp, Homo sapien
ttttagctgcagacagttgatcttg

SEQ ID NO: 2816260 - DNA, 25 bp, Homo sapien
tttagctgcagacagttgatcttgt

SEQ ID NO: 2816261 - DNA, 25 bp, Homo sapien
cagccatctgattagtcttctcttc

SEQ ID NO: 2816262 - DNA, 25 bp, Homo sapien
tcctgcctcatgctgatctgcatct

SEQ ID NO: 2816263 - DNA, 25 bp, Homo sapien
tgcctcatgctgatctgcatctcca

SEQ ID NO: 2816264 - DNA, 25 bp, Homo sapien
atctcctgcctcatgctgatctgca

SEQ ID NO: 2816265 - DNA, 25 bp, Homo sapien
ctcatgctgatctgcatctccagtt

SEQ ID NO: 2816266 - DNA, 25 bp, Homo sapien
tcaacatccagtggtaattgtgtct

SEQ ID NO: 2816267 - DNA, 25 bp, Homo sapien
gcttgggaccctttcaactggattc

SEQ ID NO: 2816268 - DNA, 25 bp, Homo sapien
catttagtgcttgccctgttgcagt

SEQ ID NO: 2816269 - DNA, 25 bp, Homo sapien
tgcttcatttagtgcttgccctgtt

SEQ ID NO: 2816270 - DNA, 25 bp, Homo sapien
ctgtcagtttagtgttggatttttc

SEQ ID NO: 2816271 - DNA, 25 bp, Homo sapien
gtcagtttagtgttggatttttcta

SEQ ID NO: 2816272 - DNA, 25 bp, Homo sapien
cctctgtcagtttagtgttggattt

SEQ ID NO: 2816273 - DNA, 25 bp, Homo sapien
ctcctctgtcagtttagtgttggat

SEQ ID NO: 2816274 - DNA, 25 bp, Homo sapien
ttgaaaaatctgtaactccagcctg

SEQ ID NO: 2816275 - DNA, 25 bp, Homo sapien
tgaaaaatctgtaactccagcctga

SEQ ID NO: 2816276 - DNA, 25 bp, Homo sapien
gaaaaatctgtaactccagcctgag

SEQ ID NO: 2816277 - DNA, 25 bp, Homo sapien
aatgccaagcgaaggcaggctcttc

SEQ ID NO: 2816278 - DNA, 25 bp, Homo sapien
ttaatgccaagcgaaggcaggctct

SEQ ID NO: 2816279 - DNA, 25 bp, Homo sapien
ttgcattaatgccaagcgaaggcag

SEQ ID NO: 2816280 - DNA, 25 bp, Homo sapien
cttttgcattaatgccaagcgaagg

SEQ ID NO: 2816281 - DNA, 25 bp, Homo sapien
tttagagctttcaagccatatttca

SEQ ID NO: 2816282 - DNA, 25 bp, Homo sapien
ttagagctttcaagccatatttcag

SEQ ID NO: 2816283 - DNA, 25 bp, Homo sapien
tagagctttcaagccatatttcaga

SEQ ID NO: 2816284 - DNA, 25 bp, Homo sapien
tttttagagctttcaagccatattt

SEQ ID NO: 2816285 - DNA, 25 bp, Homo sapien
gtgcatagtcagagtcaagagtcct

SEQ ID NO: 2816286 - DNA, 25 bp, Homo sapien
ggtgcatagtcagagtcaagagtcc

SEQ ID NO: 2816287 - DNA, 25 bp, Homo sapien
tgcatagtcagagtcaagagtcctc

SEQ ID NO: 2816288 - DNA, 25 bp, Homo sapien
ccgctgcagcgctgctgctcaggta

SEQ ID NO: 2816289 - DNA, 25 bp, Homo sapien
cagcaggaagggtagcgggcagcag

SEQ ID NO: 2816290 - DNA, 25 bp, Homo sapien
ctgtgggcgcactccgaagccggct

SEQ ID NO: 2816291 - DNA, 25 bp, Homo sapien
gataattaggatggtgcttgccgct

SEQ ID NO: 2816292 - DNA, 25 bp, Homo sapien
tctgaggccagctaaaactcaggct

SEQ ID NO: 2816293 - DNA, 25 bp, Homo sapien
gaaaggcttgcaatgaggatccctt

SEQ ID NO: 2816294 - DNA, 25 bp, Homo sapien
tgagtgccgtaatgatgaaatttcg

SEQ ID NO: 2816295 - DNA, 25 bp, Homo sapien
caggctgttctgagggttacactaa

SEQ ID NO: 2816296 - DNA, 25 bp, Homo sapien
aaatcatagaatccatagcattttg

SEQ ID NO: 2816297 - DNA, 25 bp, Homo sapien
gagaaatcttatactgacatagtga

SEQ ID NO: 2816298 - DNA, 25 bp, Homo sapien
cccagccatgttagagaaatcttat

SEQ ID NO: 2816299 - DNA, 25 bp, Homo sapien
gattaattaggtgacttgcacaaaa

SEQ ID NO: 2816300 - DNA, 25 bp, Homo sapien
gacatagtgattaattaggtgactt

SEQ ID NO: 2816301 - DNA, 25 bp, Homo sapien
gccactttgccagtgttcagaccag

SEQ ID NO: 2816302 - DNA, 25 bp, Homo sapien
tcagagctaggatatccgtgatacc

SEQ ID NO: 2816303 - DNA, 25 bp, Homo sapien
ggtactatagctccagccactttgc

SEQ ID NO: 2816304 - DNA, 25 bp, Homo sapien
gggtgtggcaccagagtgtcttaca

SEQ ID NO: 2816305 - DNA, 25 bp, Homo sapien
ctgcaagaggaagtctgttcaccat

SEQ ID NO: 2816306 - DNA, 25 bp, Homo sapien
gtctgcaagaggaagtctgttcacc

SEQ ID NO: 2816307 - DNA, 25 bp, Homo sapien
cagatggtctgcaagaggaagtctg

SEQ ID NO: 2816308 - DNA, 25 bp, Homo sapien
atggtctgcaagaggaagtctgttc

SEQ ID NO: 2816309 - DNA, 25 bp, Homo sapien
ctctgatgtggaaacaccgagaata

SEQ ID NO: 2816310 - DNA, 25 bp, Homo sapien
cactggatcagagtcatgtagatgc

SEQ ID NO: 2816311 - DNA, 25 bp, Homo sapien
tgtaaagtcacatggccatcattat

SEQ ID NO: 2816312 - DNA, 25 bp, Homo sapien
tcaaaattgcatagtcatcgtaggc

SEQ ID NO: 2816313 - DNA, 25 bp, Homo sapien
gttattatcaatagctgcactgcga

SEQ ID NO: 2816314 - DNA, 25 bp, Homo sapien
taattttggtttatgctccaatatc

SEQ ID NO: 2816315 - DNA, 25 bp, Homo sapien
ttttggtttatgctccaatatccca

SEQ ID NO: 2816316 - DNA, 25 bp, Homo sapien
aacgtgctggctgtctagtcctttc

SEQ ID NO: 2816317 - DNA, 25 bp, Homo sapien
tgctggctgtctagtcctttctctt

SEQ ID NO: 2816318 - DNA, 25 bp, Homo sapien
tattgacatcacattattccaccag

SEQ ID NO: 2816319 - DNA, 25 bp, Homo sapien
tcttcagtcccatatcaattttagg

SEQ ID NO: 2816320 - DNA, 25 bp, Homo sapien
gaatgtgtacatactctgatttggc

SEQ ID NO: 2816321 - DNA, 25 bp, Homo sapien
gagcctgcccatctatgagcgtggt

SEQ ID NO: 2816322 - DNA, 25 bp, Homo sapien
tacaattgggagagtcatctcctcc

SEQ ID NO: 2816323 - DNA, 25 bp, Homo sapien
tcttccgtacacaaacatagctagg

SEQ ID NO: 2816324 - DNA, 25 bp, Homo sapien
gattccagtcttagcaaatagcaca

SEQ ID NO: 2816325 - DNA, 25 bp, Homo sapien
gaactgcgcttaggattctactgtc

SEQ ID NO: 2816326 - DNA, 25 bp, Homo sapien
ctgacctgggtcaatagtggtatct

SEQ ID NO: 2816327 - DNA, 25 bp, Homo sapien
ttgctgacctgggtcaatagtggta

SEQ ID NO: 2816328 - DNA, 25 bp, Homo sapien
gacctgggtcaatagtggtatcttt

SEQ ID NO: 2816329 - DNA, 25 bp, Homo sapien
ttacttgctgacctgggtcaatagt

SEQ ID NO: 2816330 - DNA, 25 bp, Homo sapien
ttatacagaatgtctaagaccacca

SEQ ID NO: 2816331 - DNA, 25 bp, Homo sapien
atcttcggatgaaataagtggcttg

SEQ ID NO: 2816332 - DNA, 25 bp, Homo sapien
ttcggatgaaataagtggcttgaac

SEQ ID NO: 2816333 - DNA, 25 bp, Homo sapien
tcttcggatgaaataagtggcttga

SEQ ID NO: 2816334 - DNA, 25 bp, Homo sapien
cagtcaaatggcagttatcccacat

SEQ ID NO: 2816335 - DNA, 25 bp, Homo sapien
cctgagtgtcagtcaaatggcagtt

SEQ ID NO: 2816336 - DNA, 25 bp, Homo sapien
tcaaatactacctgagtgtcagtca

SEQ ID NO: 2816337 - DNA, 25 bp, Homo sapien
gctttctatgagatagaatcttctg

SEQ ID NO: 2816338 - DNA, 25 bp, Homo sapien
gacgagcacttggactctcattatt

SEQ ID NO: 2816339 - DNA, 25 bp, Homo sapien
tacagtgaaattgagtccccacaaa

SEQ ID NO: 2816340 - DNA, 25 bp, Homo sapien
agcactggcacggaaggctggacga

SEQ ID NO: 2816341 - DNA, 25 bp, Homo sapien
agtgtttgtataactgccaatacag

SEQ ID NO: 2816342 - DNA, 25 bp, Homo sapien
cacatttgtaaggtctcttttccat

SEQ ID NO: 2816343 - DNA, 25 bp, Homo sapien
ctaatgaggtgtgagaaccagctca

SEQ ID NO: 2816344 - DNA, 25 bp, Homo sapien
acaatcttcactgatgtagggtttc

SEQ ID NO: 2816345 - DNA, 25 bp, Homo sapien
gttgaagggcaggtaaaggctttgc

SEQ ID NO: 2816346 - DNA, 25 bp, Homo sapien
tgtttactaatggctgagaaccact

SEQ ID NO: 2816347 - DNA, 25 bp, Homo sapien
taatggctgagaaccacttaaaacc

SEQ ID NO: 2816348 - DNA, 25 bp, Homo sapien
gaattttatgtttactaatggctga

SEQ ID NO: 2816349 - DNA, 25 bp, Homo sapien
ttttatgtttactaatggctgagaa

SEQ ID NO: 2816350 - DNA, 25 bp, Homo sapien
tcacattggtagcatctttctccag

SEQ ID NO: 2816351 - DNA, 25 bp, Homo sapien
gcatgaattctcttacgaatagtaa

SEQ ID NO: 2816352 - DNA, 25 bp, Homo sapien
acattggtagcatctttctccagta

SEQ ID NO: 2816353 - DNA, 25 bp, Homo sapien
tcttcacattggtagcatctttctc

SEQ ID NO: 2816354 - DNA, 25 bp, Homo sapien
gcaggtaacagttttgtcacatttt

SEQ ID NO: 2816355 - DNA, 25 bp, Homo sapien
tcccatatgaactctatatttagta

SEQ ID NO: 2816356 - DNA, 25 bp, Homo sapien
tctctcccatatgaactctatattt

SEQ ID NO: 2816357 - DNA, 25 bp, Homo sapien
ttgaggagcaggtaacagttttgtc

SEQ ID NO: 2816358 - DNA, 25 bp, Homo sapien
ttccggggagaattctgtggccaca

SEQ ID NO: 2816359 - DNA, 25 bp, Homo sapien
actcttccggggagaattctgtggc

SEQ ID NO: 2816360 - DNA, 25 bp, Homo sapien
tcttccggggagaattctgtggcca

SEQ ID NO: 2816361 - DNA, 25 bp, Homo sapien
gtccctatacaaatgttgctgagca

SEQ ID NO: 2816362 - DNA, 25 bp, Homo sapien
tttgaatattgtcctgatctgtctc

SEQ ID NO: 2816363 - DNA, 25 bp, Homo sapien
ctgttttgaatattgtcctgatctg

SEQ ID NO: 2816364 - DNA, 25 bp, Homo sapien
gttttgaatattgtcctgatctgtc

SEQ ID NO: 2816365 - DNA, 25 bp, Homo sapien
ttgaatattgtcctgatctgtctcc

SEQ ID NO: 2816366 - DNA, 25 bp, Homo sapien
agacaggtctcctttagggtgtgct

SEQ ID NO: 2816367 - DNA, 25 bp, Homo sapien
gagacaggtctcctttagggtgtgc

SEQ ID NO: 2816368 - DNA, 25 bp, Homo sapien
gacaggtctcctttagggtgtgctg

SEQ ID NO: 2816369 - DNA, 25 bp, Homo sapien
ctgtccagttgacatagatagccat

SEQ ID NO: 2816370 - DNA, 25 bp, Homo sapien
cctgtccagttgacatagatagcca

SEQ ID NO: 2816371 - DNA, 25 bp, Homo sapien
agcctgtccagttgacatagatagc

SEQ ID NO: 2816372 - DNA, 25 bp, Homo sapien
gcctgtccagttgacatagatagcc

SEQ ID NO: 2816373 - DNA, 25 bp, Homo sapien
agtattcagggatgacaccagaaat

SEQ ID NO: 2816374 - DNA, 25 bp, Homo sapien
ctaaattacgtctaccatcttgtac

SEQ ID NO: 2816375 - DNA, 25 bp, Homo sapien
cttgtacatgccttttgagttgcat

SEQ ID NO: 2816376 - DNA, 25 bp, Homo sapien
catcttgtacatgccttttgagttg

SEQ ID NO: 2816377 - DNA, 25 bp, Homo sapien
tctaaaatattcacttttctcaccc

SEQ ID NO: 2816378 - DNA, 25 bp, Homo sapien
tttttgcaactttgagaactaaggc

SEQ ID NO: 2816379 - DNA, 25 bp, Homo sapien
ctttgagaactaaggctcaaatctc

SEQ ID NO: 2816380 - DNA, 25 bp, Homo sapien
tgcaactttgagaactaaggctcaa

SEQ ID NO: 2816381 - DNA, 25 bp, Homo sapien
tctgtcctctcagataagttatcag

SEQ ID NO: 2816382 - DNA, 25 bp, Homo sapien
ttcacacttatcagttgtgccatct

SEQ ID NO: 2816383 - DNA, 25 bp, Homo sapien
tccttcacacttatcagttgtgcca

SEQ ID NO: 2816384 - DNA, 25 bp, Homo sapien
gataagttatcagggacatctggtt

SEQ ID NO: 2816385 - DNA, 25 bp, Homo sapien
tttttctcactcctagaggccttta

SEQ ID NO: 2816386 - DNA, 25 bp, Homo sapien
gtcttcctgggcattccgttcattt

SEQ ID NO: 2816387 - DNA, 25 bp, Homo sapien
gaggcctttaccctgtcagccttgt

SEQ ID NO: 2816388 - DNA, 25 bp, Homo sapien
ctgtctaggaatgatggcaattgtc

SEQ ID NO: 2816389 - DNA, 25 bp, Homo sapien
gctcttattattttgcaaaacgtcc

SEQ ID NO: 2816390 - DNA, 25 bp, Homo sapien
ggtgagctattgattattgtcacaa

SEQ ID NO: 2816391 - DNA, 25 bp, Homo sapien
attgtcacaatttcagctcctgtta

SEQ ID NO: 2816392 - DNA, 25 bp, Homo sapien
attttgcaaaacgtcccatcaatac

SEQ ID NO: 2816393 - DNA, 25 bp, Homo sapien
gacagttatagtcataaatgccagc

SEQ ID NO: 2816394 - DNA, 25 bp, Homo sapien
ttaggccctgccaatgctggaagag

SEQ ID NO: 2816395 - DNA, 25 bp, Homo sapien
gctggaagagatctaatccgctttc

SEQ ID NO: 2816396 - DNA, 25 bp, Homo sapien
tcactacattgatgggacgacccat

SEQ ID NO: 2816397 - DNA, 25 bp, Homo sapien
tgatctgtgtgtagtgaacaatggt

SEQ ID NO: 2816398 - DNA, 25 bp, Homo sapien
gatctgtgtgtagtgaacaatggtt

SEQ ID NO: 2816399 - DNA, 25 bp, Homo sapien
atgatctgtgtgtagtgaacaatgg

SEQ ID NO: 2816400 - DNA, 25 bp, Homo sapien
tctgtgtgtagtgaacaatggtttt

SEQ ID NO: 2816401 - DNA, 25 bp, Homo sapien
ctgtttcctgtgaaggtgttatgtc

SEQ ID NO: 2816402 - DNA, 25 bp, Homo sapien
ttcccagatttgcacatggctggcc

SEQ ID NO: 2816403 - DNA, 25 bp, Homo sapien
ttgcacatggctggccctttcattt

SEQ ID NO: 2816404 - DNA, 25 bp, Homo sapien
catggctggccctttcatttctgtt

SEQ ID NO: 2816405 - DNA, 25 bp, Homo sapien
ttgctccccaacacatacacaccca

SEQ ID NO: 2816406 - DNA, 25 bp, Homo sapien
cttgctccccaacacatacacaccc

SEQ ID NO: 2816407 - DNA, 25 bp, Homo sapien
tgctccccaacacatacacacccat

SEQ ID NO: 2816408 - DNA, 25 bp, Homo sapien
tttctcaattgacaaaaacctgtgc

SEQ ID NO: 2816409 - DNA, 25 bp, Homo sapien
aaacctgtgctaacatccttgtcat

SEQ ID NO: 2816410 - DNA, 25 bp, Homo sapien
caagtcgagtgataactgagatact

SEQ ID NO: 2816411 - DNA, 25 bp, Homo sapien
taaggaagttcagggcatataagtg

SEQ ID NO: 2816412 - DNA, 25 bp, Homo sapien
aggagagacgatctggttttcagag

SEQ ID NO: 2816413 - DNA, 25 bp, Homo sapien
aggaggagagacgatctggttttca

SEQ ID NO: 2816414 - DNA, 25 bp, Homo sapien
tattctaggtatccattcgtttaag

SEQ ID NO: 2816415 - DNA, 25 bp, Homo sapien
attctaggtatccattcgtttaagt

SEQ ID NO: 2816416 - DNA, 25 bp, Homo sapien
cctaactagagggaaatcacacatc

SEQ ID NO: 2816417 - DNA, 25 bp, Homo sapien
ccagtcgacagaacttgaattccag

SEQ ID NO: 2816418 - DNA, 25 bp, Homo sapien
ctgaattcagctgacgcccacagag

SEQ ID NO: 2816419 - DNA, 25 bp, Homo sapien
cagctaaggagggtgcttgcactac

SEQ ID NO: 2816420 - DNA, 25 bp, Homo sapien
caaatggggcaccaggtaaatagca

SEQ ID NO: 2816421 - DNA, 25 bp, Homo sapien
ggataaaaccgtaatatcaatatca

SEQ ID NO: 2816422 - DNA, 25 bp, Homo sapien
aatatcatcataagccacggtccag

SEQ ID NO: 2816423 - DNA, 25 bp, Homo sapien
cataagccacggtccagcatggcaa

SEQ ID NO: 2816424 - DNA, 25 bp, Homo sapien
tgccaactggaacttgaagttttaa

SEQ ID NO: 2816425 - DNA, 25 bp, Homo sapien
ccctttctttgccaactggaacttg

SEQ ID NO: 2816426 - DNA, 25 bp, Homo sapien
tttctttgccaactggaacttgaag

SEQ ID NO: 2816427 - DNA, 25 bp, Homo sapien
caaaggccctttctttgccaactgg

SEQ ID NO: 2816428 - DNA, 25 bp, Homo sapien
gactatggtcctcacaatgaagttc

SEQ ID NO: 2816429 - DNA, 25 bp, Homo sapien
agacagagctatcccatgactatgg

SEQ ID NO: 2816430 - DNA, 25 bp, Homo sapien
ccagtactgtggtgcaagttgtaac

SEQ ID NO: 2816431 - DNA, 25 bp, Homo sapien
taaaactgaagtctacagtgggagg

SEQ ID NO: 2816432 - DNA, 25 bp, Homo sapien
tccttcagtgaacagtcctatttgc

SEQ ID NO: 2816433 - DNA, 25 bp, Homo sapien
tctagctccttcagtgaacagtcct

SEQ ID NO: 2816434 - DNA, 25 bp, Homo sapien
ttcagtgaacagtcctatttgcccc

SEQ ID NO: 2816435 - DNA, 25 bp, Homo sapien
gaacagtcctatttgcccctcaaca

SEQ ID NO: 2816436 - DNA, 25 bp, Homo sapien
tttgcctatagcctgcacctgcact

SEQ ID NO: 2816437 - DNA, 25 bp, Homo sapien
cctctggaatctctgtgcttttgcc

SEQ ID NO: 2816438 - DNA, 25 bp, Homo sapien
ctcctctggaatctctgtgcttttg

SEQ ID NO: 2816439 - DNA, 25 bp, Homo sapien
gtgcttttgcctatagcctgcacct

SEQ ID NO: 2816440 - DNA, 25 bp, Homo sapien
gaggattgccattggactgctgaaa

SEQ ID NO: 2816441 - DNA, 25 bp, Homo sapien
tgaggattgccattggactgctgaa

SEQ ID NO: 2816442 - DNA, 25 bp, Homo sapien
ctgaggattgccattggactgctga

SEQ ID NO: 2816443 - DNA, 25 bp, Homo sapien
caagagagactaaagatctcatcaa

SEQ ID NO: 2816444 - DNA, 25 bp, Homo sapien
cagggaatagtctagcttcatcaaa

SEQ ID NO: 2816445 - DNA, 25 bp, Homo sapien
gagactaaagatctcatcaaaaaga

SEQ ID NO: 2816446 - DNA, 25 bp, Homo sapien
ggaactgctgcagggaatagtctag

SEQ ID NO: 2816447 - DNA, 25 bp, Homo sapien
ctgttgttctagcctctcttctctc

SEQ ID NO: 2816448 - DNA, 25 bp, Homo sapien
ttctagcctctcttctctccagaaa

SEQ ID NO: 2816449 - DNA, 25 bp, Homo sapien
gttgttctagcctctcttctctcca

SEQ ID NO: 2816450 - DNA, 25 bp, Homo sapien
tgttctagcctctcttctctccaga

SEQ ID NO: 2816451 - DNA, 25 bp, Homo sapien
ggtgcccttcatgagaccatccatc

SEQ ID NO: 2816452 - DNA, 25 bp, Homo sapien
tgagcttggtagggatttcccacat

SEQ ID NO: 2816453 - DNA, 25 bp, Homo sapien
cattcatctgcaatggcccctagga

SEQ ID NO: 2816454 - DNA, 25 bp, Homo sapien
catttctcatgacacgtatctccag

SEQ ID NO: 2816455 - DNA, 25 bp, Homo sapien
ttctgaccatcctatacatgtttaa

SEQ ID NO: 2816456 - DNA, 25 bp, Homo sapien
ctgagtcccagtgagcaggtcttag

SEQ ID NO: 2816457 - DNA, 25 bp, Homo sapien
aacaattagaatcaccttttatcac

SEQ ID NO: 2816458 - DNA, 25 bp, Homo sapien
cccagtgagcaggtcttagcctttt

SEQ ID NO: 2816459 - DNA, 25 bp, Homo sapien
ctttacatctccagacagtcgtatc

SEQ ID NO: 2816460 - DNA, 25 bp, Homo sapien
ttacatctccagacagtcgtatcat

SEQ ID NO: 2816461 - DNA, 25 bp, Homo sapien
tttacatctccagacagtcgtatca

SEQ ID NO: 2816462 - DNA, 25 bp, Homo sapien
gaattcacaccttatgcaagggagg

SEQ ID NO: 2816463 - DNA, 25 bp, Homo sapien
tctaagaacccgaacatttgcatgt

SEQ ID NO: 2816464 - DNA, 25 bp, Homo sapien
taaacatgcccatagtgaaaactgc

SEQ ID NO: 2816465 - DNA, 25 bp, Homo sapien
agagaactctcctaggcaaacaggg

SEQ ID NO: 2816466 - DNA, 25 bp, Homo sapien
tgaggtagaaggccactgcggactt

SEQ ID NO: 2816467 - DNA, 25 bp, Homo sapien
ctgcatttggatgtgaggtagaagg

SEQ ID NO: 2816468 - DNA, 25 bp, Homo sapien
gatgtgaggtagaaggccactgcgg

SEQ ID NO: 2816469 - DNA, 25 bp, Homo sapien
tttggatgtgaggtagaaggccact

SEQ ID NO: 2816470 - DNA, 25 bp, Homo sapien
gacagagaaaattagccaccacagt

SEQ ID NO: 2816471 - DNA, 25 bp, Homo sapien
aatgatgcccacctaccttggtgag

SEQ ID NO: 2816472 - DNA, 25 bp, Homo sapien
gaagatagatatcccaggtcaagaa

SEQ ID NO: 2816473 - DNA, 25 bp, Homo sapien
gaacccacggttgagagagagtact

SEQ ID NO: 2816474 - DNA, 25 bp, Homo sapien
gaagttggctgtagctcatgcagaa

SEQ ID NO: 2816475 - DNA, 25 bp, Homo sapien
ttgtgaagttggctgtagctcatgc

SEQ ID NO: 2816476 - DNA, 25 bp, Homo sapien
tgaagttggctgtagctcatgcaga

SEQ ID NO: 2816477 - DNA, 25 bp, Homo sapien
ttggctgtagctcatgcagaactgg

SEQ ID NO: 2816478 - DNA, 25 bp, Homo sapien
cggcttagcggctgaagactgacgc

SEQ ID NO: 2816479 - DNA, 25 bp, Homo sapien
tctctgactgactccttctcggctt

SEQ ID NO: 2816480 - DNA, 25 bp, Homo sapien
tgactgactccttctcggcttagcg

SEQ ID NO: 2816481 - DNA, 25 bp, Homo sapien
tctgactgactccttctcggcttag

SEQ ID NO: 2816482 - DNA, 25 bp, Homo sapien
gcaggcaacattgctgaacttcata

SEQ ID NO: 2816483 - DNA, 25 bp, Homo sapien
tctatgagaggaactgcaaaaacac

SEQ ID NO: 2816484 - DNA, 25 bp, Homo sapien
cacaagttgcactttgtcacagagc

SEQ ID NO: 2816485 - DNA, 25 bp, Homo sapien
cgtgaaatctgtacccaggcaagtg

SEQ ID NO: 2816486 - DNA, 25 bp, Homo sapien
atttccattgccgataatccgtggc

SEQ ID NO: 2816487 - DNA, 25 bp, Homo sapien
cgtggctatcaaaccagctggaacc

SEQ ID NO: 2816488 - DNA, 25 bp, Homo sapien
gagaccaactatgataagaatccat

SEQ ID NO: 2816489 - DNA, 25 bp, Homo sapien
gacttgcgagccttaataatgagac

SEQ ID NO: 2816490 - DNA, 25 bp, Homo sapien
tgaacctctctaattgaggtgcagc

SEQ ID NO: 2816491 - DNA, 25 bp, Homo sapien
tacatttgctcttcgctgaacctct

SEQ ID NO: 2816492 - DNA, 25 bp, Homo sapien
tcttattgcatcagggacatgacca

SEQ ID NO: 2816493 - DNA, 25 bp, Homo sapien
tcttatggcatcctgaaacagatac

SEQ ID NO: 2816494 - DNA, 25 bp, Homo sapien
caaggttcttcacatggcacacgag

SEQ ID NO: 2816495 - DNA, 25 bp, Homo sapien
ggttcttcacatggcacacgagaga

SEQ ID NO: 2816496 - DNA, 25 bp, Homo sapien
gttcttcacatggcacacgagagaa

SEQ ID NO: 2816497 - DNA, 25 bp, Homo sapien
agcaaggttcttcacatggcacacg

SEQ ID NO: 2816498 - DNA, 25 bp, Homo sapien
cgtttgatattcctgtggcttgggc

SEQ ID NO: 2816499 - DNA, 25 bp, Homo sapien
tagcgctgaaactagagatgactgt

SEQ ID NO: 2816500 - DNA, 25 bp, Homo sapien
agatgactgtgctgtcggtaagaca

SEQ ID NO: 2816501 - DNA, 25 bp, Homo sapien
tatggattccttcgtttgatattcc

SEQ ID NO: 2816502 - DNA, 25 bp, Homo sapien
tgagggaaatgcggttactgacaac

SEQ ID NO: 2816503 - DNA, 25 bp, Homo sapien
gagggaaatgcggttactgacaacg

SEQ ID NO: 2816504 - DNA, 25 bp, Homo sapien
ttgagggaaatgcggttactgacaa

SEQ ID NO: 2816505 - DNA, 25 bp, Homo sapien
cttgagggaaatgcggttactgaca

SEQ ID NO: 2816506 - DNA, 25 bp, Homo sapien
cttttttctcgttgacttgattcat

SEQ ID NO: 2816507 - DNA, 25 bp, Homo sapien
acttttttctcgttgacttgattca

SEQ ID NO: 2816508 - DNA, 25 bp, Homo sapien
tgttcacgctgtaatccatgttgtt

SEQ ID NO: 2816509 - DNA, 25 bp, Homo sapien
tgaagtccactgtgtcaccgaaaga

SEQ ID NO: 2816510 - DNA, 25 bp, Homo sapien
ccatgttgtttagtggtcactgaag

SEQ ID NO: 2816511 - DNA, 25 bp, Homo sapien
gattagcaggtttgacaacttgtgg

SEQ ID NO: 2816512 - DNA, 25 bp, Homo sapien
caggcctgattgagtgtctctgtca

SEQ ID NO: 2816513 - DNA, 25 bp, Homo sapien
taagaaacatactgcgtaattagag

SEQ ID NO: 2816514 - DNA, 25 bp, Homo sapien
tgtagactgtagattgcatcagagc

SEQ ID NO: 2816515 - DNA, 25 bp, Homo sapien
taactatggaacaggttgtagactg

SEQ ID NO: 2816516 - DNA, 25 bp, Homo sapien
tatcagttcccaacacatggaaatt

SEQ ID NO: 2816517 - DNA, 25 bp, Homo sapien
cagaccatatcagttcccaacacat

SEQ ID NO: 2816518 - DNA, 25 bp, Homo sapien
aggaaccgaccccatgatcgaatca

SEQ ID NO: 2816519 - DNA, 25 bp, Homo sapien
aaattataaatacgcaaggtgatgg

SEQ ID NO: 2816520 - DNA, 25 bp, Homo sapien
aaacttccattgcatctaggaggca

SEQ ID NO: 2816521 - DNA, 25 bp, Homo sapien
tgccctgtccagactatcttgatgt

SEQ ID NO: 2816522 - DNA, 25 bp, Homo sapien
cttgatgtttctcacaggtagggac

SEQ ID NO: 2816523 - DNA, 25 bp, Homo sapien
ggaggcatgccacagatattaatat

SEQ ID NO: 2816524 - DNA, 25 bp, Homo sapien
ctgtctctcatagggcttccacaaa

SEQ ID NO: 2816525 - DNA, 25 bp, Homo sapien
gcacagtcataagaaaactgtctct

SEQ ID NO: 2816526 - DNA, 25 bp, Homo sapien
tgaaagcaattgacagcacagtcat

SEQ ID NO: 2816527 - DNA, 25 bp, Homo sapien
aaactgtctctcatagggcttccac

SEQ ID NO: 2816528 - DNA, 25 bp, Homo sapien
ctgctttacgaaggcggagatataa

SEQ ID NO: 2816529 - DNA, 25 bp, Homo sapien
gcttcttccgctaaagatagaccat

SEQ ID NO: 2816530 - DNA, 25 bp, Homo sapien
tattatgtaaaataccacccggcag

SEQ ID NO: 2816531 - DNA, 25 bp, Homo sapien
gacttattaccgtctgcttcttccg

SEQ ID NO: 2816532 - DNA, 25 bp, Homo sapien
tcaaataggacggagccgaatgctt

SEQ ID NO: 2816533 - DNA, 25 bp, Homo sapien
cagacatagtacagaattcatcttt

SEQ ID NO: 2816534 - DNA, 25 bp, Homo sapien
gagccgaatgctttgagggctgtct

SEQ ID NO: 2816535 - DNA, 25 bp, Homo sapien
tcatctttctcaaataggacggagc

SEQ ID NO: 2816536 - DNA, 25 bp, Homo sapien
cacagacagctatctgactgatttg

SEQ ID NO: 2816537 - DNA, 25 bp, Homo sapien
cgctcaacactgaaatagctaatca

SEQ ID NO: 2816538 - DNA, 25 bp, Homo sapien
caactgggttgcctgctatttcccc

SEQ ID NO: 2816539 - DNA, 25 bp, Homo sapien
gactgatttgtagatagcgtactaa

SEQ ID NO: 2816540 - DNA, 25 bp, Homo sapien
tctgttactttcaaacttttcttgc

SEQ ID NO: 2816541 - DNA, 25 bp, Homo sapien
agagggttgataaaattaacttctg

SEQ ID NO: 2816542 - DNA, 25 bp, Homo sapien
ctttcaaacttttcttgcaagacat

SEQ ID NO: 2816543 - DNA, 25 bp, Homo sapien
tactttcaaacttttcttgcaagac

SEQ ID NO: 2816544 - DNA, 25 bp, Homo sapien
gactgctgcacagtgaccaacaggc

SEQ ID NO: 2816545 - DNA, 25 bp, Homo sapien
agactgctgcacagtgaccaacagg

SEQ ID NO: 2816546 - DNA, 25 bp, Homo sapien
actgctgcacagtgaccaacaggcc

SEQ ID NO: 2816547 - DNA, 25 bp, Homo sapien
tgctgcacagtgaccaacaggccac

SEQ ID NO: 2816548 - DNA, 25 bp, Homo sapien
tcaaataagtatggtgtgcctatac

SEQ ID NO: 2816549 - DNA, 25 bp, Homo sapien
gaaaaattgttaattccagccctca

SEQ ID NO: 2816550 - DNA, 25 bp, Homo sapien
tagacatagcgcaaatagacatagc

SEQ ID NO: 2816551 - DNA, 25 bp, Homo sapien
gaatgcctgagtcagcactgttcac

SEQ ID NO: 2816552 - DNA, 25 bp, Homo sapien
tgaatacaaagaaaggagggaacag

SEQ ID NO: 2816553 - DNA, 25 bp, Homo sapien
gatgaatacaaagaaaggagggaac

SEQ ID NO: 2816554 - DNA, 25 bp, Homo sapien
gggaacagggcacccttgccatggc

SEQ ID NO: 2816555 - DNA, 25 bp, Homo sapien
ggagggaacagggcacccttgccat

SEQ ID NO: 2816556 - DNA, 25 bp, Homo sapien
cagtatgtactttgacaaggagtgt

SEQ ID NO: 2816557 - DNA, 25 bp, Homo sapien
tataattgggatgtacagggaatag

SEQ ID NO: 2816558 - DNA, 25 bp, Homo sapien
tgttggaaacgactgccagcctgtg

SEQ ID NO: 2816559 - DNA, 25 bp, Homo sapien
gctgcagaaacagtatgtactttga

SEQ ID NO: 2816560 - DNA, 25 bp, Homo sapien
ggaaccgcataacttgtgccactgc

SEQ ID NO: 2816561 - DNA, 25 bp, Homo sapien
gaaccgcataacttgtgccactgcc

SEQ ID NO: 2816562 - DNA, 25 bp, Homo sapien
cctccccttctacgacaaagagatt

SEQ ID NO: 2816563 - DNA, 25 bp, Homo sapien
cttctacgacaaagagattaagacc

SEQ ID NO: 2816564 - DNA, 25 bp, Homo sapien
ggaggagattgagcaggtgtccatt

SEQ ID NO: 2816565 - DNA, 25 bp, Homo sapien
caaagagattaagacctagctccat

SEQ ID NO: 2816566 - DNA, 25 bp, Homo sapien
gcaacaacaactatctgaagctctc

SEQ ID NO: 2816567 - DNA, 25 bp, Homo sapien
aacaacaactatctgaagctctctc

SEQ ID NO: 2816568 - DNA, 25 bp, Homo sapien
caacaactatctgaagctctctcat

SEQ ID NO: 2816569 - DNA, 25 bp, Homo sapien
aactatctgaagctctctcatccat

SEQ ID NO: 2816570 - DNA, 25 bp, Homo sapien
catcattgtggcagtcttgacactc

SEQ ID NO: 2816571 - DNA, 25 bp, Homo sapien
cactcagtaacattaaatgagacca

SEQ ID NO: 2816572 - DNA, 25 bp, Homo sapien
ggccaattaaccagaccacttcatt

SEQ ID NO: 2816573 - DNA, 25 bp, Homo sapien
gccacgcatgcctgttaactacact

SEQ ID NO: 2816574 - DNA, 25 bp, Homo sapien
gaaggatatgaagagcttgttttct

SEQ ID NO: 2816575 - DNA, 25 bp, Homo sapien
gaaccctagtgcattactgccactg

SEQ ID NO: 2816576 - DNA, 25 bp, Homo sapien
gtaatttccaacatagggaaggata

SEQ ID NO: 2816577 - DNA, 25 bp, Homo sapien
caaaaggcggtagggttcaagcctg

SEQ ID NO: 2816578 - DNA, 25 bp, Homo sapien
tcttttgcatctaccatagtcatta

SEQ ID NO: 2816579 - DNA, 25 bp, Homo sapien
tttgcatctaccatagtcattactc

SEQ ID NO: 2816580 - DNA, 25 bp, Homo sapien
ctaacaggaataacaaagtttctct

SEQ ID NO: 2816581 - DNA, 25 bp, Homo sapien
ttctcttttgcatctaccatagtca

SEQ ID NO: 2816582 - DNA, 25 bp, Homo sapien
gtgcctcacatcgagttgaaggctg

SEQ ID NO: 2816583 - DNA, 25 bp, Homo sapien
gagttgaaggctggcaacacaaacg

SEQ ID NO: 2816584 - DNA, 25 bp, Homo sapien
gggacactctcgctttctgactgac

SEQ ID NO: 2816585 - DNA, 25 bp, Homo sapien
cctgagttctattgcctgagttcct

SEQ ID NO: 2816586 - DNA, 25 bp, Homo sapien
tgcaggctttgtccggtaattcagc

SEQ ID NO: 2816587 - DNA, 25 bp, Homo sapien
gctttaccaatacagctgcttccaa

SEQ ID NO: 2816588 - DNA, 25 bp, Homo sapien
tggtgaaaacttaagcaggcatgtg

SEQ ID NO: 2816589 - DNA, 25 bp, Homo sapien
tcagccagaagctttaccaatacag

SEQ ID NO: 2816590 - DNA, 25 bp, Homo sapien
agactgcccacaatgagtaaaaatc

SEQ ID NO: 2816591 - DNA, 25 bp, Homo sapien
tgtgcataagtgaaggttggaagac

SEQ ID NO: 2816592 - DNA, 25 bp, Homo sapien
ccctctaagccaaaaagatgggttg

SEQ ID NO: 2816593 - DNA, 25 bp, Homo sapien
ctgattctgggtatcttctcgaccc

SEQ ID NO: 2816594 - DNA, 25 bp, Homo sapien
ggcctttgtcttattgtaataacac

SEQ ID NO: 2816595 - DNA, 25 bp, Homo sapien
gcctttgtcttattgtaataacact

SEQ ID NO: 2816596 - DNA, 25 bp, Homo sapien
tggcctttgtcttattgtaataaca

SEQ ID NO: 2816597 - DNA, 25 bp, Homo sapien
atggcctttgtcttattgtaataac

SEQ ID NO: 2816598 - DNA, 25 bp, Homo sapien
cagggcggctttccgtggaagccac

SEQ ID NO: 2816599 - DNA, 25 bp, Homo sapien
ggctttccgtggaagccactggctt

SEQ ID NO: 2816600 - DNA, 25 bp, Homo sapien
gtggcttggcaaagagagggcactg

SEQ ID NO: 2816601 - DNA, 25 bp, Homo sapien
tggtggcttggcaaagagagggcac

SEQ ID NO: 2816602 - DNA, 25 bp, Homo sapien
tcagctcatagcaaggtaatcatct

SEQ ID NO: 2816603 - DNA, 25 bp, Homo sapien
cagaggcagcagtcttgctgcgttc

SEQ ID NO: 2816604 - DNA, 25 bp, Homo sapien
taatcatctctctggactagaagca

SEQ ID NO: 2816605 - DNA, 25 bp, Homo sapien
tctctctggactagaagcacaaaca

SEQ ID NO: 2816606 - DNA, 25 bp, Homo sapien
aatgacaacaggactctcttgtagt

SEQ ID NO: 2816607 - DNA, 25 bp, Homo sapien
tccaaccaagtcctagcaatgacaa

SEQ ID NO: 2816608 - DNA, 25 bp, Homo sapien
acaggactctcttgtagtgacagca

SEQ ID NO: 2816609 - DNA, 25 bp, Homo sapien
tcaatgtcagatccatccaaccaag

SEQ ID NO: 2816610 - DNA, 25 bp, Homo sapien
gagataaatttaaccacagggagac

SEQ ID NO: 2816611 - DNA, 25 bp, Homo sapien
taaatttaaccacagggagactgcc

SEQ ID NO: 2816612 - DNA, 25 bp, Homo sapien
ctctgagataaatttaaccacaggg

SEQ ID NO: 2816613 - DNA, 25 bp, Homo sapien
aatttaaccacagggagactgccat

SEQ ID NO: 2816614 - DNA, 25 bp, Homo sapien
gactcagaacctcacatcggttgtc

SEQ ID NO: 2816615 - DNA, 25 bp, Homo sapien
aacctcacatcggttgtctgtgaag

SEQ ID NO: 2816616 - DNA, 25 bp, Homo sapien
catcggttgtctgtgaagtgttccc

SEQ ID NO: 2816617 - DNA, 25 bp, Homo sapien
cagaacctcacatcggttgtctgtg

SEQ ID NO: 2816618 - DNA, 25 bp, Homo sapien
aaatggatgacgatccttttgaccg

SEQ ID NO: 2816619 - DNA, 25 bp, Homo sapien
tgtggttttggcagttgcgcccacc

SEQ ID NO: 2816620 - DNA, 25 bp, Homo sapien
tggatgacgatccttttgaccgtgg

SEQ ID NO: 2816621 - DNA, 25 bp, Homo sapien
gcagttgcgcccacctttgctgtct

SEQ ID NO: 2816622 - DNA, 25 bp, Homo sapien
tttcaggactgatatctccacacac

SEQ ID NO: 2816623 - DNA, 25 bp, Homo sapien
tcctccgagcattgccaatttctgc

SEQ ID NO: 2816624 - DNA, 25 bp, Homo sapien
tcaagtgtgggattccacaaaacag

SEQ ID NO: 2816625 - DNA, 25 bp, Homo sapien
tctgcagccattttcgtcctccgag

SEQ ID NO: 2816626 - DNA, 25 bp, Homo sapien
ccaaacctagaatgttagccttatt

SEQ ID NO: 2816627 - DNA, 25 bp, Homo sapien
ctagaatgttagccttattaaaatc

SEQ ID NO: 2816628 - DNA, 25 bp, Homo sapien
ttccaaacctagaatgttagcctta

SEQ ID NO: 2816629 - DNA, 25 bp, Homo sapien
agaatgttagccttattaaaatcca

SEQ ID NO: 2816630 - DNA, 25 bp, Homo sapien
gaagcaaattcacagagtccaacat

SEQ ID NO: 2816631 - DNA, 25 bp, Homo sapien
aaagtcattcacgagaagccagagg

SEQ ID NO: 2816632 - DNA, 25 bp, Homo sapien
tgttcattgagatcatcataacaca

SEQ ID NO: 2816633 - DNA, 25 bp, Homo sapien
tgttccatatggaagcaaattcaca

SEQ ID NO: 2816634 - DNA, 25 bp, Homo sapien
tagtaccttgaaaaatacagcctgt

SEQ ID NO: 2816635 - DNA, 25 bp, Homo sapien
tacagcctgtaatagcaagccaaca

SEQ ID NO: 2816636 - DNA, 25 bp, Homo sapien
tgagccctcctcttttggtagtacc

SEQ ID NO: 2816637 - DNA, 25 bp, Homo sapien
catgtctgtactccatcaattcctt

SEQ ID NO: 2816638 - DNA, 25 bp, Homo sapien
tcctcatcatgtaatttccacttct

SEQ ID NO: 2816639 - DNA, 25 bp, Homo sapien
atcatgtaatttccacttcttgcct

SEQ ID NO: 2816640 - DNA, 25 bp, Homo sapien
cctcctcatcatgtaatttccactt

SEQ ID NO: 2816641 - DNA, 25 bp, Homo sapien
tcatcatgtaatttccacttcttgc

SEQ ID NO: 2816642 - DNA, 25 bp, Homo sapien
catttcaaacttgggtaacctagag

SEQ ID NO: 2816643 - DNA, 25 bp, Homo sapien
aatccaggtttcgtcagtaaaacag

SEQ ID NO: 2816644 - DNA, 25 bp, Homo sapien
tatatgagtcacaggtagctccagc

SEQ ID NO: 2816645 - DNA, 25 bp, Homo sapien
cccagaggaaaagcgaacaatgaat

SEQ ID NO: 2816646 - DNA, 25 bp, Homo sapien
tacaaatggataaatggaggccagc

SEQ ID NO: 2816647 - DNA, 25 bp, Homo sapien
gaccctggttactaagcttgatccc

SEQ ID NO: 2816648 - DNA, 25 bp, Homo sapien
cctctaggctcacatttcttaggaa

SEQ ID NO: 2816649 - DNA, 25 bp, Homo sapien
taatgctcctagatggtctttgaag

SEQ ID NO: 2816650 - DNA, 25 bp, Homo sapien
ccaaattgagtctcatcagtatggc

SEQ ID NO: 2816651 - DNA, 25 bp, Homo sapien
ggttatgtgttcacccctgaaccta

SEQ ID NO: 2816652 - DNA, 25 bp, Homo sapien
tattctaaccacactccccaaattg

SEQ ID NO: 2816653 - DNA, 25 bp, Homo sapien
tgtgttgtacaattcaaaaatgcta

SEQ ID NO: 2816654 - DNA, 25 bp, Homo sapien
taccaagtcctcgatagtagaactc

SEQ ID NO: 2816655 - DNA, 25 bp, Homo sapien
tagaactcatgtatagctaagcgct

SEQ ID NO: 2816656 - DNA, 25 bp, Homo sapien
tgaaaccagttagccattgtagtac

SEQ ID NO: 2816657 - DNA, 25 bp, Homo sapien
ccagctcagttaggttgaaaccagt

SEQ ID NO: 2816658 - DNA, 25 bp, Homo sapien
taagggacaagtactgtggcatgcg

SEQ ID NO: 2816659 - DNA, 25 bp, Homo sapien
ttctgacagtaaggtggcacgggca

SEQ ID NO: 2816660 - DNA, 25 bp, Homo sapien
catgcggagtgtggtacaccaagcc

SEQ ID NO: 2816661 - DNA, 25 bp, Homo sapien
aggaaattcccgcacagcaggcttt

SEQ ID NO: 2816662 - DNA, 25 bp, Homo sapien
ccaagagaaggaacatgctggctcc

SEQ ID NO: 2816663 - DNA, 25 bp, Homo sapien
ttgttccatactctctgctacacaa

SEQ ID NO: 2816664 - DNA, 25 bp, Homo sapien
ccatactctctgctacacaaatcat

SEQ ID NO: 2816665 - DNA, 25 bp, Homo sapien
tccatactctctgctacacaaatca

SEQ ID NO: 2816666 - DNA, 25 bp, Homo sapien
gttccatactctctgctacacaaat

SEQ ID NO: 2816667 - DNA, 25 bp, Homo sapien
gattttgactcatgggtaacctccg

SEQ ID NO: 2816668 - DNA, 25 bp, Homo sapien
cacacatgagtcctgtatggagcag

SEQ ID NO: 2816669 - DNA, 25 bp, Homo sapien
cctttcacaacgacacagagaggga

SEQ ID NO: 2816670 - DNA, 25 bp, Homo sapien
gctaaggcaccggagaaaaacagag

SEQ ID NO: 2816671 - DNA, 25 bp, Homo sapien
tagtgctgactgactctcctggtga

SEQ ID NO: 2816672 - DNA, 25 bp, Homo sapien
tcctggtaatcgactggaaacgtcc

SEQ ID NO: 2816673 - DNA, 25 bp, Homo sapien
tctccagggcacaatacgtttacag

SEQ ID NO: 2816674 - DNA, 25 bp, Homo sapien
gaagcttactgtctactggtgtgga

SEQ ID NO: 2816675 - DNA, 25 bp, Homo sapien
gatgccctgcgcgatcatcttacag

SEQ ID NO: 2816676 - DNA, 25 bp, Homo sapien
cacagtgcgctaacggaggtgagtt

SEQ ID NO: 2816677 - DNA, 25 bp, Homo sapien
gacctgacatggtgacatgatgccc

SEQ ID NO: 2816678 - DNA, 25 bp, Homo sapien
gaaaaaatatctggtgtgcactgcc

SEQ ID NO: 2816679 - DNA, 25 bp, Homo sapien
cagttaggtggatctctggtgttcc

SEQ ID NO: 2816680 - DNA, 25 bp, Homo sapien
ggtgttccaagaccctgatgttttc

SEQ ID NO: 2816681 - DNA, 25 bp, Homo sapien
tcccttcttaggatgagcagttagg

SEQ ID NO: 2816682 - DNA, 25 bp, Homo sapien
ccccaacctgaagttgttgcttaga

SEQ ID NO: 2816683 - DNA, 25 bp, Homo sapien
ggctcggctgactcatgtacggtgt

SEQ ID NO: 2816684 - DNA, 25 bp, Homo sapien
caaaaggcggctgggtatccttggt

SEQ ID NO: 2816685 - DNA, 25 bp, Homo sapien
taatgtcaaaagcatcgccaggagg

SEQ ID NO: 2816686 - DNA, 25 bp, Homo sapien
cgccaggaggaacagtaggattgcc

SEQ ID NO: 2816687 - DNA, 25 bp, Homo sapien
ccaatgagatttcacatccttaata

SEQ ID NO: 2816688 - DNA, 25 bp, Homo sapien
caccattgactttcatgtctgcata

SEQ ID NO: 2816689 - DNA, 25 bp, Homo sapien
agcctgctgttaacagacctcgcca

SEQ ID NO: 2816690 - DNA, 25 bp, Homo sapien
ggtaatgaaccttgtgccaccattg

SEQ ID NO: 2816691 - DNA, 25 bp, Homo sapien
ttcctgcatgtacacctacgctcta

SEQ ID NO: 2816692 - DNA, 25 bp, Homo sapien
tattgccaggaattgtggttcaacc

SEQ ID NO: 2816693 - DNA, 25 bp, Homo sapien
tgaagatactcaccagcaagccctt

SEQ ID NO: 2816694 - DNA, 25 bp, Homo sapien
cccttaaaatatagctctgactgac

SEQ ID NO: 2816695 - DNA, 25 bp, Homo sapien
ttttctactttgtcgttaacatcga

SEQ ID NO: 2816696 - DNA, 25 bp, Homo sapien
tcgaaaacacgatcatgaacaccta

SEQ ID NO: 2816697 - DNA, 25 bp, Homo sapien
cgatcatgaacacctatagttttca

SEQ ID NO: 2816698 - DNA, 25 bp, Homo sapien
cgttaacatcgaaaacacgatcatg

SEQ ID NO: 2816699 - DNA, 25 bp, Homo sapien
ggaccttcttccattatctgggatt

SEQ ID NO: 2816700 - DNA, 25 bp, Homo sapien
gaccttcttccattatctgggattg

SEQ ID NO: 2816701 - DNA, 25 bp, Homo sapien
tcttccattatctgggattgcagag

SEQ ID NO: 2816702 - DNA, 25 bp, Homo sapien
ccttcttccattatctgggattgca

SEQ ID NO: 2816703 - DNA, 25 bp, Homo sapien
ttcaagttataaatcacttgaggaa

SEQ ID NO: 2816704 - DNA, 25 bp, Homo sapien
caagttataaatcacttgaggaaga

SEQ ID NO: 2816705 - DNA, 25 bp, Homo sapien
tcaagttataaatcacttgaggaag

SEQ ID NO: 2816706 - DNA, 25 bp, Homo sapien
gtttcaagttataaatcacttgagg

SEQ ID NO: 2816707 - DNA, 25 bp, Homo sapien
tagatctatcattcagacatagtag

SEQ ID NO: 2816708 - DNA, 25 bp, Homo sapien
atcattcagacatagtagagaacac

SEQ ID NO: 2816709 - DNA, 25 bp, Homo sapien
gaacacatcccttcgggtactgcca

SEQ ID NO: 2816710 - DNA, 25 bp, Homo sapien
aattcaccatagatctatcattcag

SEQ ID NO: 2816711 - DNA, 25 bp, Homo sapien
tgcctggctaatttttgtactttta

SEQ ID NO: 2816712 - DNA, 25 bp, Homo sapien
attacaagtgcatgccaacatgcct

SEQ ID NO: 2816713 - DNA, 25 bp, Homo sapien
tgctgtgaggttttgactttataga

SEQ ID NO: 2816714 - DNA, 25 bp, Homo sapien
ctgcctcttcggagataattgaaaa

SEQ ID NO: 2816715 - DNA, 25 bp, Homo sapien
ttctgactaaatcaagtcttcgggc

SEQ ID NO: 2816716 - DNA, 25 bp, Homo sapien
gaaattctgtggcaggatgctttga

SEQ ID NO: 2816717 - DNA, 25 bp, Homo sapien
aagtcttcgggcaaatttcctcctg

SEQ ID NO: 2816718 - DNA, 25 bp, Homo sapien
ccctgcagtgtgaaatatgaacttg

SEQ ID NO: 2816719 - DNA, 25 bp, Homo sapien
tttcaattccctgcagtgtgaaata

SEQ ID NO: 2816720 - DNA, 25 bp, Homo sapien
ccaacaaatggccagcgtgctgtgc

SEQ ID NO: 2816721 - DNA, 25 bp, Homo sapien
tcttctgtctgttcaatcatttcaa

SEQ ID NO: 2816722 - DNA, 25 bp, Homo sapien
tttgggcgacttattgattaacctg

SEQ ID NO: 2816723 - DNA, 25 bp, Homo sapien
aattattccagagtgtagacacaga

SEQ ID NO: 2816724 - DNA, 25 bp, Homo sapien
tacagggatcatacatttggcaatg

SEQ ID NO: 2816725 - DNA, 25 bp, Homo sapien
ttgggtgatactaactttgggcgac

SEQ ID NO: 2816726 - DNA, 25 bp, Homo sapien
gaaaggagttcaaccatggaggacc

SEQ ID NO: 2816727 - DNA, 25 bp, Homo sapien
tatatagagaggtcagagtcgctgc

SEQ ID NO: 2816728 - DNA, 25 bp, Homo sapien
tcagatggcgcctggaacacagtac

SEQ ID NO: 2816729 - DNA, 25 bp, Homo sapien
gacctggaccactgtacggatgtta

SEQ ID NO: 2816730 - DNA, 25 bp, Homo sapien
taagacaaccatgttagctctgctg

SEQ ID NO: 2816731 - DNA, 25 bp, Homo sapien
gaaggatgcctttgcgggtcgaaaa

SEQ ID NO: 2816732 - DNA, 25 bp, Homo sapien
gctatgaggagctaagaggtactgc

SEQ ID NO: 2816733 - DNA, 25 bp, Homo sapien
tgaagcttgttcctgagatcagcaa

SEQ ID NO: 2816734 - DNA, 25 bp, Homo sapien
ttttacagtgagacaactaatgagt

SEQ ID NO: 2816735 - DNA, 25 bp, Homo sapien
gttgctgtcccacaaatgaagtcct

SEQ ID NO: 2816736 - DNA, 25 bp, Homo sapien
taaaagtcaagaacatgctgcctga

SEQ ID NO: 2816737 - DNA, 25 bp, Homo sapien
catatgctgaatgagattctttcac

SEQ ID NO: 2816738 - DNA, 25 bp, Homo sapien
agctctctgcaattctctgaaacat

SEQ ID NO: 2816739 - DNA, 25 bp, Homo sapien
gctctctgcaattctctgaaacatg

SEQ ID NO: 2816740 - DNA, 25 bp, Homo sapien
acacgataaatctctatatactcac

SEQ ID NO: 2816741 - DNA, 25 bp, Homo sapien
aacacgataaatctctatatactca

SEQ ID NO: 2816742 - DNA, 25 bp, Homo sapien
caatatggtagtcacccctctggaa

SEQ ID NO: 2816743 - DNA, 25 bp, Homo sapien
catgtagaggacatagcgctcagtc

SEQ ID NO: 2816744 - DNA, 25 bp, Homo sapien
agaacttcagcggtccatttggaga

SEQ ID NO: 2816745 - DNA, 25 bp, Homo sapien
tagaaatattctcggcctggcctga

SEQ ID NO: 2816746 - DNA, 25 bp, Homo sapien
ctggtgaggaaattcttctctgagc

SEQ ID NO: 2816747 - DNA, 25 bp, Homo sapien
ttttagctggtgaggaaattcttct

SEQ ID NO: 2816748 - DNA, 25 bp, Homo sapien
tagctggtgaggaaattcttctctg

SEQ ID NO: 2816749 - DNA, 25 bp, Homo sapien
tgtttttagctggtgaggaaattct

SEQ ID NO: 2816750 - DNA, 25 bp, Homo sapien
catcctcatttgctaaagccaaaat

SEQ ID NO: 2816751 - DNA, 25 bp, Homo sapien
ctcatttgctaaagccaaaatgcat

SEQ ID NO: 2816752 - DNA, 25 bp, Homo sapien
tcctcatttgctaaagccaaaatgc

SEQ ID NO: 2816753 - DNA, 25 bp, Homo sapien
tccatcctcatttgctaaagccaaa

SEQ ID NO: 2816754 - DNA, 25 bp, Homo sapien
aaactgcttacttccatgtagccct

SEQ ID NO: 2816755 - DNA, 25 bp, Homo sapien
tgcttacttccatgtagcccttttg

SEQ ID NO: 2816756 - DNA, 25 bp, Homo sapien
tacttccatgtagcccttttgtatc

SEQ ID NO: 2816757 - DNA, 25 bp, Homo sapien
ctgtcaaactgcttacttccatgta

SEQ ID NO: 2816758 - DNA, 25 bp, Homo sapien
ccccacacagcctcctgaaacaaga

SEQ ID NO: 2816759 - DNA, 25 bp, Homo sapien
cacagcctcctgaaacaagactcac

SEQ ID NO: 2816760 - DNA, 25 bp, Homo sapien
ccacacagcctcctgaaacaagact

SEQ ID NO: 2816761 - DNA, 25 bp, Homo sapien
acacagcctcctgaaacaagactca

SEQ ID NO: 2816762 - DNA, 25 bp, Homo sapien
aaaggttaagcacaaacttctgcct

SEQ ID NO: 2816763 - DNA, 25 bp, Homo sapien
ccatcccaattacacagctgaacag

SEQ ID NO: 2816764 - DNA, 25 bp, Homo sapien
agctgaacagcattaggtgcctcta

SEQ ID NO: 2816765 - DNA, 25 bp, Homo sapien
ctctatttgagagggttcatcaggc

SEQ ID NO: 2816766 - DNA, 25 bp, Homo sapien
tctctctgagaagtaaaggcatagg

SEQ ID NO: 2816767 - DNA, 25 bp, Homo sapien
tgaagcatgcactaatattcagggc

SEQ ID NO: 2816768 - DNA, 25 bp, Homo sapien
gatttctggctcaggacactctgta

SEQ ID NO: 2816769 - DNA, 25 bp, Homo sapien
taaaaaccctaagtcatggtcactg

SEQ ID NO: 2816770 - DNA, 25 bp, Homo sapien
catagcactttctggtagaacatta

SEQ ID NO: 2816771 - DNA, 25 bp, Homo sapien
gtgggaggtgcctattgtttttctg

SEQ ID NO: 2816772 - DNA, 25 bp, Homo sapien
gcactttctggtagaacattaaatt

SEQ ID NO: 2816773 - DNA, 25 bp, Homo sapien
ctgtgggaggtgcctattgtttttc

SEQ ID NO: 2816774 - DNA, 25 bp, Homo sapien
agctgatgtcaaaacctaacgtctt

SEQ ID NO: 2816775 - DNA, 25 bp, Homo sapien
gctgatgtcaaaacctaacgtcttt

SEQ ID NO: 2816776 - DNA, 25 bp, Homo sapien
cagctgatgtcaaaacctaacgtct

SEQ ID NO: 2816777 - DNA, 25 bp, Homo sapien
tgatgtcaaaacctaacgtcttttc

SEQ ID NO: 2816778 - DNA, 25 bp, Homo sapien
cgaggtttgttggatgtggtgtcat

SEQ ID NO: 2816779 - DNA, 25 bp, Homo sapien
acatctggtccctgtcagtgtcaac

SEQ ID NO: 2816780 - DNA, 25 bp, Homo sapien
tctggtccctgtcagtgtcaacgag

SEQ ID NO: 2816781 - DNA, 25 bp, Homo sapien
tcagtgtcaacgaggtttgttggat

SEQ ID NO: 2816782 - DNA, 25 bp, Homo sapien
gactatttctgctcataagggacca

SEQ ID NO: 2816783 - DNA, 25 bp, Homo sapien
caccatggagcaaaggattatcggc

SEQ ID NO: 2816784 - DNA, 25 bp, Homo sapien
gattatcggccctaaccatttctgc

SEQ ID NO: 2816785 - DNA, 25 bp, Homo sapien
gaatttaagacatggatctagcacc

SEQ ID NO: 2816786 - DNA, 25 bp, Homo sapien
aacagcatctttgggaatccagccg

SEQ ID NO: 2816787 - DNA, 25 bp, Homo sapien
agcaaggtaccacttagtaagtcac

SEQ ID NO: 2816788 - DNA, 25 bp, Homo sapien
taagtcactgagttcaagccccaaa

SEQ ID NO: 2816789 - DNA, 25 bp, Homo sapien
agccccaaacagcatctttgggaat

SEQ ID NO: 2816790 - DNA, 25 bp, Homo sapien
ctttccaaggccctgcgaaggccgt

SEQ ID NO: 2816791 - DNA, 25 bp, Homo sapien
cctgcgaaggccgtcttttcttgca

SEQ ID NO: 2816792 - DNA, 25 bp, Homo sapien
tgcgaaggccgtcttttcttgcata

SEQ ID NO: 2816793 - DNA, 25 bp, Homo sapien
caaggccctgcgaaggccgtctttt

SEQ ID NO: 2816794 - DNA, 25 bp, Homo sapien
caggcagctttacctttgggcttta

SEQ ID NO: 2816795 - DNA, 25 bp, Homo sapien
aggcagctttacctttgggctttat

SEQ ID NO: 2816796 - DNA, 25 bp, Homo sapien
tttccacatcacaagaatccctgtt

SEQ ID NO: 2816797 - DNA, 25 bp, Homo sapien
gtttccacatcacaagaatccctgt

SEQ ID NO: 2816798 - DNA, 25 bp, Homo sapien
tctcaaaaggaagtagacgtataat

SEQ ID NO: 2816799 - DNA, 25 bp, Homo sapien
aatctcaaaaggaagtagacgtata

SEQ ID NO: 2816800 - DNA, 25 bp, Homo sapien
ttaatctcaaaaggaagtagacgta

SEQ ID NO: 2816801 - DNA, 25 bp, Homo sapien
tcaaaaggaagtagacgtataatac

SEQ ID NO: 2816802 - DNA, 25 bp, Homo sapien
aattaggaggacattaacaattaag

SEQ ID NO: 2816803 - DNA, 25 bp, Homo sapien
taggaaataattactctgattctca

SEQ ID NO: 2816804 - DNA, 25 bp, Homo sapien
caattaagtgttaatgcgaacaccg

SEQ ID NO: 2816805 - DNA, 25 bp, Homo sapien
caagtgatagatagttccaggagaa

SEQ ID NO: 2816806 - DNA, 25 bp, Homo sapien
ttgtcactaggttacgatggcgtca

SEQ ID NO: 2816807 - DNA, 25 bp, Homo sapien
gaccgtgtttctctcagctactgca

SEQ ID NO: 2816808 - DNA, 25 bp, Homo sapien
caaatatttttatcgtaagcgtcta

SEQ ID NO: 2816809 - DNA, 25 bp, Homo sapien
taagcgtctatacttgcagtgactc

SEQ ID NO: 2816810 - DNA, 25 bp, Homo sapien
cctttgtactgctgacattggttga

SEQ ID NO: 2816811 - DNA, 25 bp, Homo sapien
cattggttgaaactttgcctctgaa

SEQ ID NO: 2816812 - DNA, 25 bp, Homo sapien
tcttccaagatgttgttactgatgg

SEQ ID NO: 2816813 - DNA, 25 bp, Homo sapien
gaaacttacactctattcgacccaa

SEQ ID NO: 2816814 - DNA, 25 bp, Homo sapien
tacaatttggtgtggaacagatgcc

SEQ ID NO: 2816815 - DNA, 25 bp, Homo sapien
gaattccctaaacatgatagcagcc

SEQ ID NO: 2816816 - DNA, 25 bp, Homo sapien
catatacacaccaagaagagccagg

SEQ ID NO: 2816817 - DNA, 25 bp, Homo sapien
gaactatgcccaaagtcagaatgtg

SEQ ID NO: 2816818 - DNA, 25 bp, Homo sapien
gaaacaaattaagggcgcatctgct

SEQ ID NO: 2816819 - DNA, 25 bp, Homo sapien
tctcagataagacccagatcttggg

SEQ ID NO: 2816820 - DNA, 25 bp, Homo sapien
ttggacctagctgcactgggagttg

SEQ ID NO: 2816821 - DNA, 25 bp, Homo sapien
tcctctgggccttgtcgtgatatca

SEQ ID NO: 2816822 - DNA, 25 bp, Homo sapien
taggctaccacctgcactgcaaagt

SEQ ID NO: 2816823 - DNA, 25 bp, Homo sapien
cctttggcagggaacattaaccgct

SEQ ID NO: 2816824 - DNA, 25 bp, Homo sapien
gcttgtcactgcataggtaaaggac

SEQ ID NO: 2816825 - DNA, 25 bp, Homo sapien
ttatccaacatgagagttcctttgg

SEQ ID NO: 2816826 - DNA, 25 bp, Homo sapien
atttatttataggatggcttcgctc

SEQ ID NO: 2816827 - DNA, 25 bp, Homo sapien
ttctggttttaattacctaggagca

SEQ ID NO: 2816828 - DNA, 25 bp, Homo sapien
taggagcaaacttcaggtttcaaag

SEQ ID NO: 2816829 - DNA, 25 bp, Homo sapien
cctgacagtttatagttcctcgatt

SEQ ID NO: 2816830 - DNA, 25 bp, Homo sapien
taacccattaatacataagagcaga

SEQ ID NO: 2816831 - DNA, 25 bp, Homo sapien
caatggtgactagcgtgacatgtta

SEQ ID NO: 2816832 - DNA, 25 bp, Homo sapien
ctttagatacccttttacagactct

SEQ ID NO: 2816833 - DNA, 25 bp, Homo sapien
taagagcagatgtctttagataccc

SEQ ID NO: 2816834 - DNA, 25 bp, Homo sapien
taaaaacgtagatgaggaacactgg

SEQ ID NO: 2816835 - DNA, 25 bp, Homo sapien
cagaagagtccttgatcctagcaga

SEQ ID NO: 2816836 - DNA, 25 bp, Homo sapien
taatggacactcagaacataaatgt

SEQ ID NO: 2816837 - DNA, 25 bp, Homo sapien
gaacactggaatacggccttcacga

SEQ ID NO: 2816838 - DNA, 25 bp, Homo sapien
aagagattcttagccacaggatgag

SEQ ID NO: 2816839 - DNA, 25 bp, Homo sapien
gatggccatgaatgtaacctctggt

SEQ ID NO: 2816840 - DNA, 25 bp, Homo sapien
ccatgaatgtaacctctggtcatcc

SEQ ID NO: 2816841 - DNA, 25 bp, Homo sapien
cccaggagggtaagagattcttagc

SEQ ID NO: 2816842 - DNA, 25 bp, Homo sapien
gagactaggatgacaacgagctacc

SEQ ID NO: 2816843 - DNA, 25 bp, Homo sapien
tactcaggattttgcaaggaccaaa

SEQ ID NO: 2816844 - DNA, 25 bp, Homo sapien
tgaagaccagaacagcccaatcttt

SEQ ID NO: 2816845 - DNA, 25 bp, Homo sapien
ggttaattcaaccttgtggactgga

SEQ ID NO: 2816846 - DNA, 25 bp, Homo sapien
tgtaaattaagtgccctaaatcatc

SEQ ID NO: 2816847 - DNA, 25 bp, Homo sapien
tagccctgcctactcacaatgcatt

SEQ ID NO: 2816848 - DNA, 25 bp, Homo sapien
tgactaataatgtggcaccatgaac

SEQ ID NO: 2816849 - DNA, 25 bp, Homo sapien
aattcatccttatcaccactgccta

SEQ ID NO: 2816850 - DNA, 25 bp, Homo sapien
tgtggctcctgcaacacttgtttta

SEQ ID NO: 2816851 - DNA, 25 bp, Homo sapien
caaatggtgggcagatgtaaatggc

SEQ ID NO: 2816852 - DNA, 25 bp, Homo sapien
cacccaaaaggtgcattttgagaaa

SEQ ID NO: 2816853 - DNA, 25 bp, Homo sapien
gaagaaaatgccatgatgctatctg

SEQ ID NO: 2816854 - DNA, 25 bp, Homo sapien
caatcgcctgggtataagcaactga

SEQ ID NO: 2816855 - DNA, 25 bp, Homo sapien
cacataggctcctcagtagggtgta

SEQ ID NO: 2816856 - DNA, 25 bp, Homo sapien
tagggtgtaaatggctgcaatcgcc

SEQ ID NO: 2816857 - DNA, 25 bp, Homo sapien
gacagtggctgtcaatcaatcctgg

SEQ ID NO: 2816858 - DNA, 25 bp, Homo sapien
taggccatcattacagagagtcaca

SEQ ID NO: 2816859 - DNA, 25 bp, Homo sapien
tgggatttacaaggaaacactcgct

SEQ ID NO: 2816860 - DNA, 25 bp, Homo sapien
tacttacgtacccagtggccaggag

SEQ ID NO: 2816861 - DNA, 25 bp, Homo sapien
gccccatttcagagcatgtcaggaa

SEQ ID NO: 2816862 - DNA, 25 bp, Homo sapien
ctgcttgtgattcataagatgtttc

SEQ ID NO: 2816863 - DNA, 25 bp, Homo sapien
tattctacatgacgggtgctgtggg

SEQ ID NO: 2816864 - DNA, 25 bp, Homo sapien
gctcttcactgagatactgggctct

SEQ ID NO: 2816865 - DNA, 25 bp, Homo sapien
gaggctggtggtatccgtccattaa

SEQ ID NO: 2816866 - DNA, 25 bp, Homo sapien
aagtgtgacatgtaagctgatctgt

SEQ ID NO: 2816867 - DNA, 25 bp, Homo sapien
gggagaggaaataagtgtgacatgt

SEQ ID NO: 2816868 - DNA, 25 bp, Homo sapien
agtgtgacatgtaagctgatctgtg

SEQ ID NO: 2816869 - DNA, 25 bp, Homo sapien
tgcgcggcttactgggaactgcaac

SEQ ID NO: 2816870 - DNA, 25 bp, Homo sapien
tactgtactgcatatcgccagcctg

SEQ ID NO: 2816871 - DNA, 25 bp, Homo sapien
gtcagttcccgctatgttttccagg

SEQ ID NO: 2816872 - DNA, 25 bp, Homo sapien
tgctgcccagcttcgtgacagatac

SEQ ID NO: 2816873 - DNA, 25 bp, Homo sapien
tctggcctcagtccaagtactactg

SEQ ID NO: 2816874 - DNA, 25 bp, Homo sapien
tcattgactacccaagccacttggg

SEQ ID NO: 2816875 - DNA, 25 bp, Homo sapien
tatgcatgagttgctatgcctggcc

SEQ ID NO: 2816876 - DNA, 25 bp, Homo sapien
gacacgatctcacttgaggtcgacg

SEQ ID NO: 2816877 - DNA, 25 bp, Homo sapien
gctacatcagatccaaaagctctgg

SEQ ID NO: 2816878 - DNA, 25 bp, Homo sapien
tgcttaaaccccaaacaatctgtgt

SEQ ID NO: 2816879 - DNA, 25 bp, Homo sapien
aatgtgccagccctttgtgcaaaca

SEQ ID NO: 2816880 - DNA, 25 bp, Homo sapien
tcccactgctttgcaagcagacata

SEQ ID NO: 2816881 - DNA, 25 bp, Homo sapien
ggagagcagatgaatcagccatgag

SEQ ID NO: 2816882 - DNA, 25 bp, Homo sapien
gagagcagatgaatcagccatgagt

SEQ ID NO: 2816883 - DNA, 25 bp, Homo sapien
gagcagatgaatcagccatgagtgt

SEQ ID NO: 2816884 - DNA, 25 bp, Homo sapien
tggagagcagatgaatcagccatga

SEQ ID NO: 2816885 - DNA, 25 bp, Homo sapien
caacttcagtctgtccaagaggctc

SEQ ID NO: 2816886 - DNA, 25 bp, Homo sapien
tcagttacccgaattctacaagctt

SEQ ID NO: 2816887 - DNA, 25 bp, Homo sapien
aaagagagtattatggttccaggca

SEQ ID NO: 2816888 - DNA, 25 bp, Homo sapien
caagaggctctatcgttaacggaga

SEQ ID NO: 2816889 - DNA, 25 bp, Homo sapien
caggtgagcaatgcatgggtgcttt

SEQ ID NO: 2816890 - DNA, 25 bp, Homo sapien
tatttgcaattaacaataggagata

SEQ ID NO: 2816891 - DNA, 25 bp, Homo sapien
ttagctggtagggaagaatgacaac

SEQ ID NO: 2816892 - DNA, 25 bp, Homo sapien
caataggagatatagctcccttctt

SEQ ID NO: 2816893 - DNA, 25 bp, Homo sapien
gaagtaacataaagccattgtgggc

SEQ ID NO: 2816894 - DNA, 25 bp, Homo sapien
caccagctgtcccagtaggagcaat

SEQ ID NO: 2816895 - DNA, 25 bp, Homo sapien
ttgcctggtcacagaaaatggccca

SEQ ID NO: 2816896 - DNA, 25 bp, Homo sapien
tactcacctatgttcctggcaggcc

SEQ ID NO: 2816897 - DNA, 25 bp, Homo sapien
acaggccgaccctctacacagagaa

SEQ ID NO: 2816898 - DNA, 25 bp, Homo sapien
taaatggtggcacatggaaatcttc

SEQ ID NO: 2816899 - DNA, 25 bp, Homo sapien
caccacgtacctgactgatatgagg

SEQ ID NO: 2816900 - DNA, 25 bp, Homo sapien
tatctttatactactggtggtcaca

SEQ ID NO: 2816901 - DNA, 25 bp, Homo sapien
tgtccagatccttcagcacccatgg

SEQ ID NO: 2816902 - DNA, 25 bp, Homo sapien
tcatttcaagcctgttgggtcccag

SEQ ID NO: 2816903 - DNA, 25 bp, Homo sapien
tgcctctgcgtagggatgtccctgt

SEQ ID NO: 2816904 - DNA, 25 bp, Homo sapien
ggagaagggccagtcctctgatgta

SEQ ID NO: 2816905 - DNA, 25 bp, Homo sapien
cagattgagggatccatacaagaat

SEQ ID NO: 2816906 - DNA, 25 bp, Homo sapien
tccctgccgatctccatattcttcc

SEQ ID NO: 2816907 - DNA, 25 bp, Homo sapien
ggagtccagattgagggatccatac

SEQ ID NO: 2816908 - DNA, 25 bp, Homo sapien
tctactttagcaactccctgccgat

SEQ ID NO: 2816909 - DNA, 25 bp, Homo sapien
ctgtgcatttctctagctgggctct

SEQ ID NO: 2816910 - DNA, 25 bp, Homo sapien
gctgtgcctcagcaattctcggtaa

SEQ ID NO: 2816911 - DNA, 25 bp, Homo sapien
tcttgctctatgcaggacactttgt

SEQ ID NO: 2816912 - DNA, 25 bp, Homo sapien
cattcaactcgatctggagctgtgc

SEQ ID NO: 2816913 - DNA, 25 bp, Homo sapien
ccctgctgggtcccattgcctccaa

SEQ ID NO: 2816914 - DNA, 25 bp, Homo sapien
ctttgcagccctgctgggtcccatt

SEQ ID NO: 2816915 - DNA, 25 bp, Homo sapien
tgctgggtcccattgcctccaaaac

SEQ ID NO: 2816916 - DNA, 25 bp, Homo sapien
ccattgcctccaaaacccttcttca

SEQ ID NO: 2816917 - DNA, 25 bp, Homo sapien
gatcattcgttgtgactcttcttct

SEQ ID NO: 2816918 - DNA, 25 bp, Homo sapien
ttctgatcattcgttgtgactcttc

SEQ ID NO: 2816919 - DNA, 25 bp, Homo sapien
tcttcttcttaaaccatcatttgac

SEQ ID NO: 2816920 - DNA, 25 bp, Homo sapien
gtgactcttcttcttaaaccatcat

SEQ ID NO: 2816921 - DNA, 25 bp, Homo sapien
gaatgcagtgttgactacacagcct

SEQ ID NO: 2816922 - DNA, 25 bp, Homo sapien
ataccagtgaagtgaagcccgcctt

SEQ ID NO: 2816923 - DNA, 25 bp, Homo sapien
gaaacgtaaggaaccgaatgcagtg

SEQ ID NO: 2816924 - DNA, 25 bp, Homo sapien
tatatacaggccaggacagtgtcac

SEQ ID NO: 2816925 - DNA, 25 bp, Homo sapien
tgtggcagcagactcctaactgggc

SEQ ID NO: 2816926 - DNA, 25 bp, Homo sapien
tgccctgcaattagcggatgatact

SEQ ID NO: 2816927 - DNA, 25 bp, Homo sapien
catttgagaacctcctccttgggac

SEQ ID NO: 2816928 - DNA, 25 bp, Homo sapien
ggtctatttacccaagtgtccagca

SEQ ID NO: 2816929 - DNA, 25 bp, Homo sapien
tttgtgctaaaagatggaaaactgg

SEQ ID NO: 2816930 - DNA, 25 bp, Homo sapien
gggatttgtgctaaaagatggaaaa

SEQ ID NO: 2816931 - DNA, 25 bp, Homo sapien
agcgtgtgtgcttggccagtaagta

SEQ ID NO: 2816932 - DNA, 25 bp, Homo sapien
gcttggccagtaagtaagttgtatg

SEQ ID NO: 2816933 - DNA, 25 bp, Homo sapien
tgcacgggtgcactctctcttctct

SEQ ID NO: 2816934 - DNA, 25 bp, Homo sapien
aactaatccaagaatggggcccagg

SEQ ID NO: 2816935 - DNA, 25 bp, Homo sapien
ctgttgcagttgcacgggtgcactc

SEQ ID NO: 2816936 - DNA, 25 bp, Homo sapien
ctctctctcaacaggaagtagcaca

SEQ ID NO: 2816937 - DNA, 25 bp, Homo sapien
gctctgcactgcgttatgaaacagg

SEQ ID NO: 2816938 - DNA, 25 bp, Homo sapien
tatggcgaggtcatgtaaaacagca

SEQ ID NO: 2816939 - DNA, 25 bp, Homo sapien
cgtagagacactcctttatggcgag

SEQ ID NO: 2816940 - DNA, 25 bp, Homo sapien
tcaccctgacgagagaaaacaaagc

SEQ ID NO: 2816941 - DNA, 25 bp, Homo sapien
gactgtccaggtaaaatgagagttt

SEQ ID NO: 2816942 - DNA, 25 bp, Homo sapien
gcactatggatgtctatcccaggga

SEQ ID NO: 2816943 - DNA, 25 bp, Homo sapien
cagtgttagacctgttttgccaaaa

SEQ ID NO: 2816944 - DNA, 25 bp, Homo sapien
gatagtacagaatacaacagcggct

SEQ ID NO: 2816945 - DNA, 25 bp, Homo sapien
tttggccctgtgtccacaagaggct

SEQ ID NO: 2816946 - DNA, 25 bp, Homo sapien
tagcaggagcctcataagacttggg

SEQ ID NO: 2816947 - DNA, 25 bp, Homo sapien
tctttaccacttggctagcaggagc

SEQ ID NO: 2816948 - DNA, 25 bp, Homo sapien
tattacaccctaaagcaccaaaatg

SEQ ID NO: 2816949 - DNA, 25 bp, Homo sapien
gatggtagcagattagtaggcagcc

SEQ ID NO: 2816950 - DNA, 25 bp, Homo sapien
tattgtaacaatactaggagccctc

SEQ ID NO: 2816951 - DNA, 25 bp, Homo sapien
tgctattaaaagaagcccctgggct

SEQ ID NO: 2816952 - DNA, 25 bp, Homo sapien
taagctctgactgataccaaacccc

SEQ ID NO: 2816953 - DNA, 25 bp, Homo sapien
ttgctgatgctaacgtgaaaaacca

SEQ ID NO: 2816954 - DNA, 25 bp, Homo sapien
cagagggcacttgctctgctttgct

SEQ ID NO: 2816955 - DNA, 25 bp, Homo sapien
gacacccctgtctaatatgggaaga

SEQ ID NO: 2816956 - DNA, 25 bp, Homo sapien
cagcagagggcacttgctctgcttt

SEQ ID NO: 2816957 - DNA, 25 bp, Homo sapien
tattccaccaacagataagaagtga

SEQ ID NO: 2816958 - DNA, 25 bp, Homo sapien
ttcctgacaatgcacgatactcgtt

SEQ ID NO: 2816959 - DNA, 25 bp, Homo sapien
gcagcctttagtctgtaagaaatta

SEQ ID NO: 2816960 - DNA, 25 bp, Homo sapien
cattaactcttcaaacgtaacaaag

SEQ ID NO: 2816961 - DNA, 25 bp, Homo sapien
cagtaactgggaccatcacggcaat

SEQ ID NO: 2816962 - DNA, 25 bp, Homo sapien
gcacatagtccttacccttgaggag

SEQ ID NO: 2816963 - DNA, 25 bp, Homo sapien
tacattccactatgagaattgggcc

SEQ ID NO: 2816964 - DNA, 25 bp, Homo sapien
tagttctccaaatgcatcggcaggg

SEQ ID NO: 2816965 - DNA, 25 bp, Homo sapien
gaaacaagtcaattgtgaacataaa

SEQ ID NO: 2816966 - DNA, 25 bp, Homo sapien
caagtcaattgtgaacataaaactc

SEQ ID NO: 2816967 - DNA, 25 bp, Homo sapien
caaaatgactaacataattgccaac

SEQ ID NO: 2816968 - DNA, 25 bp, Homo sapien
aaatgactaacataattgccaacac

SEQ ID NO: 2816969 - DNA, 25 bp, Homo sapien
aagagctagtctgaatgttttgctg

SEQ ID NO: 2816970 - DNA, 25 bp, Homo sapien
tcttattgtaaactctggaccccca

SEQ ID NO: 2816971 - DNA, 25 bp, Homo sapien
tgaagtataaaagggtcttattgta

SEQ ID NO: 2816972 - DNA, 25 bp, Homo sapien
gttttgggaagagctagtctgaatg

SEQ ID NO: 2816973 - DNA, 25 bp, Homo sapien
cataaaggaagaatcttacttgttc

SEQ ID NO: 2816974 - DNA, 25 bp, Homo sapien
tatcttaaaggtaaatggtgtacac

SEQ ID NO: 2816975 - DNA, 25 bp, Homo sapien
taaagctggacaaaactcactgcaa

SEQ ID NO: 2816976 - DNA, 25 bp, Homo sapien
cataactcctttagtcatctggata

SEQ ID NO: 2816977 - DNA, 25 bp, Homo sapien
accaggccgcagtcagaacatgact

SEQ ID NO: 2816978 - DNA, 25 bp, Homo sapien
ttttcaatgtgagcgaatcggcatc

SEQ ID NO: 2816979 - DNA, 25 bp, Homo sapien
cctggagctggaataggaccttttc

SEQ ID NO: 2816980 - DNA, 25 bp, Homo sapien
gcatctgtgagcagtgcttgcagtg

SEQ ID NO: 2816981 - DNA, 25 bp, Homo sapien
gttttaccccgtatgcactgaccag

SEQ ID NO: 2816982 - DNA, 25 bp, Homo sapien
tactcagttggtggtgtggaacttc

SEQ ID NO: 2816983 - DNA, 25 bp, Homo sapien
aaaactgagccaggtcactgcaggg

SEQ ID NO: 2816984 - DNA, 25 bp, Homo sapien
aaacagcggctaagtgggtgtgcca

SEQ ID NO: 2816985 - DNA, 25 bp, Homo sapien
tgagcagatggaacctaattaatag

SEQ ID NO: 2816986 - DNA, 25 bp, Homo sapien
aatcagacttactatacaacaaggg

SEQ ID NO: 2816987 - DNA, 25 bp, Homo sapien
tcaccctatcctataaagcttaaat

SEQ ID NO: 2816988 - DNA, 25 bp, Homo sapien
tatggtaataagtataacctttaga

SEQ ID NO: 2816989 - DNA, 25 bp, Homo sapien
ttaaatctggacctcaccccgtgaa

SEQ ID NO: 2816990 - DNA, 25 bp, Homo sapien
tctcttaatatacaattctgaagta

SEQ ID NO: 2816991 - DNA, 25 bp, Homo sapien
tgtttaatctggtatcccatcttaa

SEQ ID NO: 2816992 - DNA, 25 bp, Homo sapien
gaggagagaaagattccgtatcttg

SEQ ID NO: 2816993 - DNA, 25 bp, Homo sapien
taacgctggtgaatctcgggaaaga

SEQ ID NO: 2816994 - DNA, 25 bp, Homo sapien
gcattactccgaatttaacgctggt

SEQ ID NO: 2816995 - DNA, 25 bp, Homo sapien
gggacttcattacctcgaaacaggc

SEQ ID NO: 2816996 - DNA, 25 bp, Homo sapien
tattaagcctgccattagaagggaa

SEQ ID NO: 2816997 - DNA, 25 bp, Homo sapien
gcatgatgccgagaccataactcag

SEQ ID NO: 2816998 - DNA, 25 bp, Homo sapien
gaaaattgcactgttagcagacggc

SEQ ID NO: 2816999 - DNA, 25 bp, Homo sapien
gtgggacaaattaggtgccgctgca

SEQ ID NO: 2817000 - DNA, 25 bp, Homo sapien
agcatatatatgacccagcagagag

SEQ ID NO: 2817001 - DNA, 25 bp, Homo sapien
aaatctgtattctcctatcctaagg

SEQ ID NO: 2817002 - DNA, 25 bp, Homo sapien
aaacatgaatatggtcactctgcca

SEQ ID NO: 2817003 - DNA, 25 bp, Homo sapien
aaaatgctaaaaatctgccactgca

SEQ ID NO: 2817004 - DNA, 25 bp, Homo sapien
gaaccagactgctatgactaataac

SEQ ID NO: 2817005 - DNA, 25 bp, Homo sapien
ttttctccttcacctctcaacacag

SEQ ID NO: 2817006 - DNA, 25 bp, Homo sapien
tctccttcacctctcaacacagttt

SEQ ID NO: 2817007 - DNA, 25 bp, Homo sapien
ccttcacctctcaacacagtttctt

SEQ ID NO: 2817008 - DNA, 25 bp, Homo sapien
ttctccttcacctctcaacacagtt

SEQ ID NO: 2817009 - DNA, 25 bp, Homo sapien
taaatgacagatgccggcctctagg

SEQ ID NO: 2817010 - DNA, 25 bp, Homo sapien
taagctgtcagagcctggtagtcca

SEQ ID NO: 2817011 - DNA, 25 bp, Homo sapien
aagagggctggcaatgttacatcac

SEQ ID NO: 2817012 - DNA, 25 bp, Homo sapien
tgagcaaccgtgttaggagacttga

SEQ ID NO: 2817013 - DNA, 25 bp, Homo sapien
gagaactcagtcgtcctagaacctg

SEQ ID NO: 2817014 - DNA, 25 bp, Homo sapien
gcttggatggcatagaatgaccctt

SEQ ID NO: 2817015 - DNA, 25 bp, Homo sapien
gacagatcatgcttctagagtgaaa

SEQ ID NO: 2817016 - DNA, 25 bp, Homo sapien
cagctttagatggttttctcccagg

SEQ ID NO: 2817017 - DNA, 25 bp, Homo sapien
ccaagaccaatggttgtcttagctt

SEQ ID NO: 2817018 - DNA, 25 bp, Homo sapien
tccaagaccaatggttgtcttagct

SEQ ID NO: 2817019 - DNA, 25 bp, Homo sapien
tcatttagctggagtcaatcaagcg

SEQ ID NO: 2817020 - DNA, 25 bp, Homo sapien
tatcatttcgatatcccctctaggg

SEQ ID NO: 2817021 - DNA, 25 bp, Homo sapien
cactactgattgagaaggcattccg

SEQ ID NO: 2817022 - DNA, 25 bp, Homo sapien
tacactcattgtggcaccatggaag

SEQ ID NO: 2817023 - DNA, 25 bp, Homo sapien
attcccattatgcatcctttcctct

SEQ ID NO: 2817024 - DNA, 25 bp, Homo sapien
gatctttgccgaaatgcacaagtac

SEQ ID NO: 2817025 - DNA, 25 bp, Homo sapien
aaagattagatctttgccgaaatgc

SEQ ID NO: 2817026 - DNA, 25 bp, Homo sapien
attcaaaaagattagatctttgccg

SEQ ID NO: 2817027 - DNA, 25 bp, Homo sapien
gggtcagaagttagacacacacacc

SEQ ID NO: 2817028 - DNA, 25 bp, Homo sapien
tcttttagctcatgacgagaaacct

SEQ ID NO: 2817029 - DNA, 25 bp, Homo sapien
cgagaaacctcagtcagttggagat

SEQ ID NO: 2817030 - DNA, 25 bp, Homo sapien
ttccctccagttacagcaaaagctg

SEQ ID NO: 2817031 - DNA, 25 bp, Homo sapien
cccgagggcactaaatggctacaga

SEQ ID NO: 2817032 - DNA, 25 bp, Homo sapien
tcagtagcatcacaatccttaggcc

SEQ ID NO: 2817033 - DNA, 25 bp, Homo sapien
tctgcagaagcactgtaggctgaca

SEQ ID NO: 2817034 - DNA, 25 bp, Homo sapien
tgacagtagcaaacctcagtgagct

SEQ ID NO: 2817035 - DNA, 25 bp, Homo sapien
gtaagaattaccagattattccaaa

SEQ ID NO: 2817036 - DNA, 25 bp, Homo sapien
attggtgttaagtaagaattaccag

SEQ ID NO: 2817037 - DNA, 25 bp, Homo sapien
ttgaagcaatttattcacatctaaa

SEQ ID NO: 2817038 - DNA, 25 bp, Homo sapien
gaagcaatttattcacatctaaaat

SEQ ID NO: 2817039 - DNA, 25 bp, Homo sapien
gagtattaagccacatcagatgcgg

SEQ ID NO: 2817040 - DNA, 25 bp, Homo sapien
ggagtgctgagcatacaaattccta

SEQ ID NO: 2817041 - DNA, 25 bp, Homo sapien
gagtaactggatgaatgacttgagc

SEQ ID NO: 2817042 - DNA, 25 bp, Homo sapien
tactgcctggtcatttacaacacac

SEQ ID NO: 2817043 - DNA, 25 bp, Homo sapien
taagccagccagttctactcaagag

SEQ ID NO: 2817044 - DNA, 25 bp, Homo sapien
gactcatggtcctttcccgaagtga

SEQ ID NO: 2817045 - DNA, 25 bp, Homo sapien
taggctgtaaaaacccgatgtgctc

SEQ ID NO: 2817046 - DNA, 25 bp, Homo sapien
caatattttagcagtgggtggcatc

SEQ ID NO: 2817047 - DNA, 25 bp, Homo sapien
tctcaactgtgatgcagaaattctt

SEQ ID NO: 2817048 - DNA, 25 bp, Homo sapien
aatggtaaagtgtaattgggagctg

SEQ ID NO: 2817049 - DNA, 25 bp, Homo sapien
aacaaaattcagacttgatgatctc

SEQ ID NO: 2817050 - DNA, 25 bp, Homo sapien
tacagtagaggtgaccggtctaacc

SEQ ID NO: 2817051 - DNA, 25 bp, Homo sapien
catgctagttcacccagattgtggg

SEQ ID NO: 2817052 - DNA, 25 bp, Homo sapien
ggatgttctttacccacataggcag

SEQ ID NO: 2817053 - DNA, 25 bp, Homo sapien
taggtaacagacagcctcacagtga

SEQ ID NO: 2817054 - DNA, 25 bp, Homo sapien
tacttctcacataacgggttcctgg

SEQ ID NO: 2817055 - DNA, 25 bp, Homo sapien
tccaaaacggtgagaaacttcagga

SEQ ID NO: 2817056 - DNA, 25 bp, Homo sapien
taagtttcttctggacaccctcaag

SEQ ID NO: 2817057 - DNA, 25 bp, Homo sapien
tgcctgcaaggatggcgaacagaat

SEQ ID NO: 2817058 - DNA, 25 bp, Homo sapien
taatatttcatggagcccaaagcac

SEQ ID NO: 2817059 - DNA, 25 bp, Homo sapien
gcatatagaaagcactcaggtagta

SEQ ID NO: 2817060 - DNA, 25 bp, Homo sapien
caggtagtaaaaattcagccttcag

SEQ ID NO: 2817061 - DNA, 25 bp, Homo sapien
cagccttcagttataaaagcgtttc

SEQ ID NO: 2817062 - DNA, 25 bp, Homo sapien
tagtgctagcagcagaagctcagtg

SEQ ID NO: 2817063 - DNA, 25 bp, Homo sapien
ctggaaacaactgaacatgtcttcc

SEQ ID NO: 2817064 - DNA, 25 bp, Homo sapien
tatcggaataggctcattaaacaga

SEQ ID NO: 2817065 - DNA, 25 bp, Homo sapien
aatacttgcatccaaagaaatctca

SEQ ID NO: 2817066 - DNA, 25 bp, Homo sapien
aatgagaacattttgcttcgtttca

SEQ ID NO: 2817067 - DNA, 25 bp, Homo sapien
caaaacatggtctatcggaataggc

SEQ ID NO: 2817068 - DNA, 25 bp, Homo sapien
gaagccgtcacctgttttgccatcg

SEQ ID NO: 2817069 - DNA, 25 bp, Homo sapien
gtaccagtaatagagccaaactcat

SEQ ID NO: 2817070 - DNA, 25 bp, Homo sapien
cagtaaatctgccttgtagaagttg

SEQ ID NO: 2817071 - DNA, 25 bp, Homo sapien
aaagtccttgtaagtggcattcact

SEQ ID NO: 2817072 - DNA, 25 bp, Homo sapien
ctctgtgactgtgattagtccaccg

SEQ ID NO: 2817073 - DNA, 25 bp, Homo sapien
atccagtccaatttacccatgaaac

SEQ ID NO: 2817074 - DNA, 25 bp, Homo sapien
gtgattagtccaccgaaaactcaca

SEQ ID NO: 2817075 - DNA, 25 bp, Homo sapien
ggaaatggggtgaatccagtccaat

SEQ ID NO: 2817076 - DNA, 25 bp, Homo sapien
cacagttgcgatctccctgcgtcaa

SEQ ID NO: 2817077 - DNA, 25 bp, Homo sapien
gattcaactcatcaactctgataag

SEQ ID NO: 2817078 - DNA, 25 bp, Homo sapien
tttactcagatacagcacagttgcg

SEQ ID NO: 2817079 - DNA, 25 bp, Homo sapien
tatttaaagccatgtctgaaaacaa

SEQ ID NO: 2817080 - DNA, 25 bp, Homo sapien
gaagagaggcacactatgggcagac

SEQ ID NO: 2817081 - DNA, 25 bp, Homo sapien
tgggcagacaactcataggctaatc

SEQ ID NO: 2817082 - DNA, 25 bp, Homo sapien
tgtcaaggccttaccacatctcgga

SEQ ID NO: 2817083 - DNA, 25 bp, Homo sapien
tgaggaaacacgacttgaccaaggt

SEQ ID NO: 2817084 - DNA, 25 bp, Homo sapien
tgtctaggaccacagcaagtagtca

SEQ ID NO: 2817085 - DNA, 25 bp, Homo sapien
tcaagttcttaagcatcatgggcca

SEQ ID NO: 2817086 - DNA, 25 bp, Homo sapien
gcagagaagtgtacccagaaccaac

SEQ ID NO: 2817087 - DNA, 25 bp, Homo sapien
aatttattgaccacatactatgcgc

SEQ ID NO: 2817088 - DNA, 25 bp, Homo sapien
ttccactgcagaggtacaaacagct

SEQ ID NO: 2817089 - DNA, 25 bp, Homo sapien
gattaggtgagaacctgatccactc

SEQ ID NO: 2817090 - DNA, 25 bp, Homo sapien
tgcagacacgcaattcaacgaaaag

SEQ ID NO: 2817091 - DNA, 25 bp, Homo sapien
tttgggacacaaaataacgcagagt

SEQ ID NO: 2817092 - DNA, 25 bp, Homo sapien
gctattcaagtcaattcctagaggg

SEQ ID NO: 2817093 - DNA, 25 bp, Homo sapien
tcgcccctaagtaaatgccaaagcc

SEQ ID NO: 2817094 - DNA, 25 bp, Homo sapien
tctataaaggactgtgctcagacac

SEQ ID NO: 2817095 - DNA, 25 bp, Homo sapien
aaattatggcttgctacctcagtcc

SEQ ID NO: 2817096 - DNA, 25 bp, Homo sapien
tatacaaggttacagccagtaggcc

SEQ ID NO: 2817097 - DNA, 25 bp, Homo sapien
tagtggcctgaatgaagcagaacag

SEQ ID NO: 2817098 - DNA, 25 bp, Homo sapien
gctgcaggtactttcactagatccc

SEQ ID NO: 2817099 - DNA, 25 bp, Homo sapien
tctgatacccctgaacagatgtgct

SEQ ID NO: 2817100 - DNA, 25 bp, Homo sapien
cccaagagagtgtgtaatccgacat

SEQ ID NO: 2817101 - DNA, 25 bp, Homo sapien
caagagagtgtgtaatccgacatga

SEQ ID NO: 2817102 - DNA, 25 bp, Homo sapien
gagagtgtgtaatccgacatgacag

SEQ ID NO: 2817103 - DNA, 25 bp, Homo sapien
agacccaagagagtgtgtaatccga

SEQ ID NO: 2817104 - DNA, 25 bp, Homo sapien
cagaggcatcagaacaggtaccagg

SEQ ID NO: 2817105 - DNA, 25 bp, Homo sapien
acagaggcatcagaacaggtaccag

SEQ ID NO: 2817106 - DNA, 25 bp, Homo sapien
gacagaggcatcagaacaggtacca

SEQ ID NO: 2817107 - DNA, 25 bp, Homo sapien
agaggcatcagaacaggtaccaggg

SEQ ID NO: 2817108 - DNA, 25 bp, Homo sapien
tgctgcaatttacatctccttgaga

SEQ ID NO: 2817109 - DNA, 25 bp, Homo sapien
tccaagttcaccaaaatgctgcaat

SEQ ID NO: 2817110 - DNA, 25 bp, Homo sapien
gcaatttacatctccttgagaagac

SEQ ID NO: 2817111 - DNA, 25 bp, Homo sapien
cttccaagttcaccaaaatgctgca

SEQ ID NO: 2817112 - DNA, 25 bp, Homo sapien
tggacccaccaagacaagcagcttt

SEQ ID NO: 2817113 - DNA, 25 bp, Homo sapien
ctgacccaaaggtttcactcagaaa

SEQ ID NO: 2817114 - DNA, 25 bp, Homo sapien
actgacccaaaggtttcactcagaa

SEQ ID NO: 2817115 - DNA, 25 bp, Homo sapien
cactgacccaaaggtttcactcaga

SEQ ID NO: 2817116 - DNA, 25 bp, Homo sapien
aacaataggaggctttgagcagggc

SEQ ID NO: 2817117 - DNA, 25 bp, Homo sapien
catttatgagttcggctgtgggccc

SEQ ID NO: 2817118 - DNA, 25 bp, Homo sapien
taacacatgcatacttgagcccgct

SEQ ID NO: 2817119 - DNA, 25 bp, Homo sapien
tgagcccgctctggagtgctgacta

SEQ ID NO: 2817120 - DNA, 25 bp, Homo sapien
gcccagctgcccgtaaggagcaggc

SEQ ID NO: 2817121 - DNA, 25 bp, Homo sapien
ttaagatagtcaatagcaagagttc

SEQ ID NO: 2817122 - DNA, 25 bp, Homo sapien
agcagagcgtcaagaggttaaaccc

SEQ ID NO: 2817123 - DNA, 25 bp, Homo sapien
caggcccagacaggaattgatttgt

SEQ ID NO: 2817124 - DNA, 25 bp, Homo sapien
taaccgaatgcttcatgatgacagg

SEQ ID NO: 2817125 - DNA, 25 bp, Homo sapien
tagatacagctaagagtgctcaccc

SEQ ID NO: 2817126 - DNA, 25 bp, Homo sapien
tagacatttatgacaggatcctcct

SEQ ID NO: 2817127 - DNA, 25 bp, Homo sapien
caagttctgattctatgtggtacca

SEQ ID NO: 2817128 - DNA, 25 bp, Homo sapien
aaatcttccataggtctacaggccc

SEQ ID NO: 2817129 - DNA, 25 bp, Homo sapien
tgaactgtacccctcttagtgctgg

SEQ ID NO: 2817130 - DNA, 25 bp, Homo sapien
aaaagactggaacctctgagatggc

SEQ ID NO: 2817131 - DNA, 25 bp, Homo sapien
tacctgggtgctacattctctgatg

SEQ ID NO: 2817132 - DNA, 25 bp, Homo sapien
tcaggacacttgtgtgccagggcag

SEQ ID NO: 2817133 - DNA, 25 bp, Homo sapien
gctcaggacacttgtgtgccagggc

SEQ ID NO: 2817134 - DNA, 25 bp, Homo sapien
gtggctcaggacacttgtgtgccag

SEQ ID NO: 2817135 - DNA, 25 bp, Homo sapien
caggacacttgtgtgccagggcagt

SEQ ID NO: 2817136 - DNA, 25 bp, Homo sapien
cgacatctgtctgtattttcttgcc

SEQ ID NO: 2817137 - DNA, 25 bp, Homo sapien
cttccacattccgacatctgtctgt

SEQ ID NO: 2817138 - DNA, 25 bp, Homo sapien
cattccgacatctgtctgtattttc

SEQ ID NO: 2817139 - DNA, 25 bp, Homo sapien
agaggtcaccgcttccacattccga

SEQ ID NO: 2817140 - DNA, 25 bp, Homo sapien
ctgaaacaatagaaggggaactagg

SEQ ID NO: 2817141 - DNA, 25 bp, Homo sapien
caatagaaggggaactaggctcatt

SEQ ID NO: 2817142 - DNA, 25 bp, Homo sapien
gggaactaggctcatttgctcccac

SEQ ID NO: 2817143 - DNA, 25 bp, Homo sapien
gaaggggaactaggctcatttgctc

SEQ ID NO: 2817144 - DNA, 25 bp, Homo sapien
agttgtctatacattattgagttca

SEQ ID NO: 2817145 - DNA, 25 bp, Homo sapien
cattattgagttcagtaaatgtaac

SEQ ID NO: 2817146 - DNA, 25 bp, Homo sapien
aaagataatttcccatacttagaat

SEQ ID NO: 2817147 - DNA, 25 bp, Homo sapien
gtctatacattattgagttcagtaa

SEQ ID NO: 2817148 - DNA, 25 bp, Homo sapien
aaatcggtcttaaaacaagatggct

SEQ ID NO: 2817149 - DNA, 25 bp, Homo sapien
ataaaatcggtcttaaaacaagatg

SEQ ID NO: 2817150 - DNA, 25 bp, Homo sapien
caatttcacgaaagaaataaaatcg

SEQ ID NO: 2817151 - DNA, 25 bp, Homo sapien
tcatttcttatactcctctttgagg

SEQ ID NO: 2817152 - DNA, 25 bp, Homo sapien
catttcttatactcctctttgagga

SEQ ID NO: 2817153 - DNA, 25 bp, Homo sapien
atactcctctttgaggattttatac

SEQ ID NO: 2817154 - DNA, 25 bp, Homo sapien
cttatactcctctttgaggatttta

SEQ ID NO: 2817155 - DNA, 25 bp, Homo sapien
aaaacaggaatcatacttctctttt

SEQ ID NO: 2817156 - DNA, 25 bp, Homo sapien
caaaaaacaggaatcatacttctct

SEQ ID NO: 2817157 - DNA, 25 bp, Homo sapien
acaggaatcatacttctcttttaca

SEQ ID NO: 2817158 - DNA, 25 bp, Homo sapien
aaaaaacaggaatcatacttctctt

SEQ ID NO: 2817159 - DNA, 25 bp, Homo sapien
ctcagaagtgaatacctgggtacat

SEQ ID NO: 2817160 - DNA, 25 bp, Homo sapien
caatggagaggcagtaatgaaactc

SEQ ID NO: 2817161 - DNA, 25 bp, Homo sapien
gaaaactcagtatccacttctcaga

SEQ ID NO: 2817162 - DNA, 25 bp, Homo sapien
tacattatcatcagtttaacgtgcc

SEQ ID NO: 2817163 - DNA, 25 bp, Homo sapien
agtggtaagtggcatgtcaaagaag

SEQ ID NO: 2817164 - DNA, 25 bp, Homo sapien
agaagaaatcgcttcccattccacc

SEQ ID NO: 2817165 - DNA, 25 bp, Homo sapien
gtggtaagtggcatgtcaaagaaga

SEQ ID NO: 2817166 - DNA, 25 bp, Homo sapien
atgtcaaagaagaaatcgcttccca

SEQ ID NO: 2817167 - DNA, 25 bp, Homo sapien
ccactcctgttcagcggttcattta

SEQ ID NO: 2817168 - DNA, 25 bp, Homo sapien
cctgttcagcggttcatttaggact

SEQ ID NO: 2817169 - DNA, 25 bp, Homo sapien
tcctgttcagcggttcatttaggac

SEQ ID NO: 2817170 - DNA, 25 bp, Homo sapien
actcctgttcagcggttcatttagg

SEQ ID NO: 2817171 - DNA, 25 bp, Homo sapien
tcccatcttcatctgcgctgacatt

SEQ ID NO: 2817172 - DNA, 25 bp, Homo sapien
cattattcaagcagggaatccctct

SEQ ID NO: 2817173 - DNA, 25 bp, Homo sapien
taagactatcttggactagcgggat

SEQ ID NO: 2817174 - DNA, 25 bp, Homo sapien
cctggttctgtaaccggcggactgc

SEQ ID NO: 2817175 - DNA, 25 bp, Homo sapien
cgcaggagatagaaaaaactggagg

SEQ ID NO: 2817176 - DNA, 25 bp, Homo sapien
ggcccgcaggagatagaaaaaactg

SEQ ID NO: 2817177 - DNA, 25 bp, Homo sapien
cccgcaggagatagaaaaaactgga

SEQ ID NO: 2817178 - DNA, 25 bp, Homo sapien
ctggaggcgcccaccgataccctct

SEQ ID NO: 2817179 - DNA, 25 bp, Homo sapien
cacaggccgggaagcaataaaggtt

SEQ ID NO: 2817180 - DNA, 25 bp, Homo sapien
gttcggaactgctccagacccggag

SEQ ID NO: 2817181 - DNA, 25 bp, Homo sapien
gaaagcagtgcggtatgggcctagc

SEQ ID NO: 2817182 - DNA, 25 bp, Homo sapien
gaccggcacacagctggaagctagc

SEQ ID NO: 2817183 - DNA, 25 bp, Homo sapien
ccgaaaacacgggacgtctgcgact

SEQ ID NO: 2817184 - DNA, 25 bp, Homo sapien
aatcggttccaggtaatcgcgcgcg

SEQ ID NO: 2817185 - DNA, 25 bp, Homo sapien
tgttctgcacacatgacgtaacccg

SEQ ID NO: 2817186 - DNA, 25 bp, Homo sapien
cgtaacccggcattagatcaaactt

SEQ ID NO: 2817187 - DNA, 25 bp, Homo sapien
ccggcgccccgcagaagcagttggt

SEQ ID NO: 2817188 - DNA, 25 bp, Homo sapien
gcagagaagtccctactccccggct

SEQ ID NO: 2817189 - DNA, 25 bp, Homo sapien
gccgggaaccggatgccagccagat

SEQ ID NO: 2817190 - DNA, 25 bp, Homo sapien
agaagcagttggtctaggcagcccc

SEQ ID NO: 2817191 - DNA, 25 bp, Homo sapien
gtagacagcgtagcggtcggcgacg

SEQ ID NO: 2817192 - DNA, 25 bp, Homo sapien
cagcgtagcggtcggcgacggcctt

SEQ ID NO: 2817193 - DNA, 25 bp, Homo sapien
tccagtagacagcgtagcggtcggc

SEQ ID NO: 2817194 - DNA, 25 bp, Homo sapien
agcggtcggcgacggccttggagcc

SEQ ID NO: 2817195 - DNA, 25 bp, Homo sapien
gccagcggcggagcccccgacgcgc

SEQ ID NO: 2817196 - DNA, 25 bp, Homo sapien
cagcggcggagcccccgacgcgcca

SEQ ID NO: 2817197 - DNA, 25 bp, Homo sapien
tggccagcggcggagcccccgacgc

SEQ ID NO: 2817198 - DNA, 25 bp, Homo sapien
cacgcctggccagcggcggagcccc

SEQ ID NO: 2817199 - DNA, 25 bp, Homo sapien
agagcgggcgccaaataaatatgaa

SEQ ID NO: 2817200 - DNA, 25 bp, Homo sapien
agacaaactcgcacccccactggag

SEQ ID NO: 2817201 - DNA, 25 bp, Homo sapien
aggaaagaggcgcccaccaagctgg

SEQ ID NO: 2817202 - DNA, 25 bp, Homo sapien
aatgaaagtgggcgagaaaggaaag

SEQ ID NO: 2817203 - DNA, 25 bp, Homo sapien
gattcctaaacctgcaagacgacgc

SEQ ID NO: 2817204 - DNA, 25 bp, Homo sapien
aacccaactgttcggctggagagcg

SEQ ID NO: 2817205 - DNA, 25 bp, Homo sapien
tcctggaactggttaagcggcagct

SEQ ID NO: 2817206 - DNA, 25 bp, Homo sapien
tgagctctcagaagtgtccctgcga

SEQ ID NO: 2817207 - DNA, 25 bp, Homo sapien
tcagctagattctgaattaccctct

SEQ ID NO: 2817208 - DNA, 25 bp, Homo sapien
ggttcagctagattctgaattaccc

SEQ ID NO: 2817209 - DNA, 25 bp, Homo sapien
ctagattctgaattaccctcttttc

SEQ ID NO: 2817210 - DNA, 25 bp, Homo sapien
cagctagattctgaattaccctctt

SEQ ID NO: 2817211 - DNA, 25 bp, Homo sapien
caactttccaaatatctctaacaac

SEQ ID NO: 2817212 - DNA, 25 bp, Homo sapien
catagggagactttgtcttcaacac

SEQ ID NO: 2817213 - DNA, 25 bp, Homo sapien
tctgctgcgttataaatttcatagg

SEQ ID NO: 2817214 - DNA, 25 bp, Homo sapien
ttgtaattggtaatcacaactttcc

SEQ ID NO: 2817215 - DNA, 25 bp, Homo sapien
gataatgtcatttggttagaagagc

SEQ ID NO: 2817216 - DNA, 25 bp, Homo sapien
ttctgatcctctttggataatgtca

SEQ ID NO: 2817217 - DNA, 25 bp, Homo sapien
aagtggtgtccagcaagaaaaatga

SEQ ID NO: 2817218 - DNA, 25 bp, Homo sapien
ttagaagagcaaacctgagcagacg

SEQ ID NO: 2817219 - DNA, 25 bp, Homo sapien
ctggactcagtcttgaaagtgaaga

SEQ ID NO: 2817220 - DNA, 25 bp, Homo sapien
actggactcagtcttgaaagtgaag

SEQ ID NO: 2817221 - DNA, 25 bp, Homo sapien
tggactcagtcttgaaagtgaagac

SEQ ID NO: 2817222 - DNA, 25 bp, Homo sapien
ggactcagtcttgaaagtgaagact

SEQ ID NO: 2817223 - DNA, 25 bp, Homo sapien
aagcagaccggagcctctgaatctg

SEQ ID NO: 2817224 - DNA, 25 bp, Homo sapien
gtgatactaggaagcagaccggagc

SEQ ID NO: 2817225 - DNA, 25 bp, Homo sapien
caggggtgatactaggaagcagacc

SEQ ID NO: 2817226 - DNA, 25 bp, Homo sapien
ctttatagtgtggctcttcccttga

SEQ ID NO: 2817227 - DNA, 25 bp, Homo sapien
cacacagttcacacaagaggagaga

SEQ ID NO: 2817228 - DNA, 25 bp, Homo sapien
ccagaggaattgttggacttcgcaa

SEQ ID NO: 2817229 - DNA, 25 bp, Homo sapien
taccaactagatgctagcaggactc

SEQ ID NO: 2817230 - DNA, 25 bp, Homo sapien
gaaactggagaaagcattagcactg

SEQ ID NO: 2817231 - DNA, 25 bp, Homo sapien
tgcaagatgactgcccaagatgaag

SEQ ID NO: 2817232 - DNA, 25 bp, Homo sapien
tcattgcccttccttgctgcaagat

SEQ ID NO: 2817233 - DNA, 25 bp, Homo sapien
agatgactgcccaagatgaagtgga

SEQ ID NO: 2817234 - DNA, 25 bp, Homo sapien
ttgcccttccttgctgcaagatgac

SEQ ID NO: 2817235 - DNA, 25 bp, Homo sapien
agctctggagtccatagaaactcgg

SEQ ID NO: 2817236 - DNA, 25 bp, Homo sapien
atgagctctggagtccatagaaact

SEQ ID NO: 2817237 - DNA, 25 bp, Homo sapien
ggttctactccaagctgtgtaaact

SEQ ID NO: 2817238 - DNA, 25 bp, Homo sapien
tagaaactcgggttctactccaagc

SEQ ID NO: 2817239 - DNA, 25 bp, Homo sapien
ctaacacccgccgtaatggatgaaa

SEQ ID NO: 2817240 - DNA, 25 bp, Homo sapien
tgcctgagtctgcacaacagtccgt

SEQ ID NO: 2817241 - DNA, 25 bp, Homo sapien
gggtgacgataatcactgtctgctg

SEQ ID NO: 2817242 - DNA, 25 bp, Homo sapien
cacccgccgtaatggatgaaagcag

SEQ ID NO: 2817243 - DNA, 25 bp, Homo sapien
ctatttgaatttaattttaagtgca

SEQ ID NO: 2817244 - DNA, 25 bp, Homo sapien
tatttgaatttaattttaagtgcat

SEQ ID NO: 2817245 - DNA, 25 bp, Homo sapien
gaagaaaaactatgtcccagctgga

SEQ ID NO: 2817246 - DNA, 25 bp, Homo sapien
gaacctatagtgtagttccatctga

SEQ ID NO: 2817247 - DNA, 25 bp, Homo sapien
ggtgttagttcgaatccatgtggaa

SEQ ID NO: 2817248 - DNA, 25 bp, Homo sapien
gagaagcaggcgagctgatggtgtt

SEQ ID NO: 2817249 - DNA, 25 bp, Homo sapien
gtcacagtacttattatcatttaac

SEQ ID NO: 2817250 - DNA, 25 bp, Homo sapien
gtacttattatcatttaaccctctg

SEQ ID NO: 2817251 - DNA, 25 bp, Homo sapien
tttgatatgtcacagtacttattat

SEQ ID NO: 2817252 - DNA, 25 bp, Homo sapien
gatatgtcacagtacttattatcat

SEQ ID NO: 2817253 - DNA, 25 bp, Homo sapien
agacagagcctctgtaggaagcagt

SEQ ID NO: 2817254 - DNA, 25 bp, Homo sapien
ctgagacagagcctctgtaggaagc

SEQ ID NO: 2817255 - DNA, 25 bp, Homo sapien
gcagtgctggggtaggaaaacctaa

SEQ ID NO: 2817256 - DNA, 25 bp, Homo sapien
agcagtgctggggtaggaaaaccta

SEQ ID NO: 2817257 - DNA, 25 bp, Homo sapien
tagactatcggtctgatagaagaga

SEQ ID NO: 2817258 - DNA, 25 bp, Homo sapien
ttgtggagtgttgcttgataatgtg

SEQ ID NO: 2817259 - DNA, 25 bp, Homo sapien
tccagcgtaaagaagtagactatcg

SEQ ID NO: 2817260 - DNA, 25 bp, Homo sapien
tgcaacacgatgttcagcagctttg

SEQ ID NO: 2817261 - DNA, 25 bp, Homo sapien
tgctgtgtgctcaagttgggatgca

SEQ ID NO: 2817262 - DNA, 25 bp, Homo sapien
tgatcctccacccacatgaggtcac

SEQ ID NO: 2817263 - DNA, 25 bp, Homo sapien
aagacaccgggtatgctgtgtgctc

SEQ ID NO: 2817264 - DNA, 25 bp, Homo sapien
ttaaccagcactggagctttgacct

SEQ ID NO: 2817265 - DNA, 25 bp, Homo sapien
tgcaatgacgtgttcacaggagacc

SEQ ID NO: 2817266 - DNA, 25 bp, Homo sapien
tgcaggcattgtcccttacaaacat

SEQ ID NO: 2817267 - DNA, 25 bp, Homo sapien
ctatggcagaggttgtgaagtacag

SEQ ID NO: 2817268 - DNA, 25 bp, Homo sapien
tagggtatatcaccaagatcaggga

SEQ ID NO: 2817269 - DNA, 25 bp, Homo sapien
tactctccatgctttttacccatct

SEQ ID NO: 2817270 - DNA, 25 bp, Homo sapien
taacttccctggttccccatcatac

SEQ ID NO: 2817271 - DNA, 25 bp, Homo sapien
ttactctccatgctttttacccatc

SEQ ID NO: 2817272 - DNA, 25 bp, Homo sapien
tacccatctctaacttccctggttc

SEQ ID NO: 2817273 - DNA, 25 bp, Homo sapien
gccacgttgaaagctctcttcacca

SEQ ID NO: 2817274 - DNA, 25 bp, Homo sapien
taatgtgctcttagatggcatccaa

SEQ ID NO: 2817275 - DNA, 25 bp, Homo sapien
cattgctgtagaaactaatgtgctc

SEQ ID NO: 2817276 - DNA, 25 bp, Homo sapien
tccaaaatgtaccctctgccacgtt

SEQ ID NO: 2817277 - DNA, 25 bp, Homo sapien
tctgaattcctatagtccattgaca

SEQ ID NO: 2817278 - DNA, 25 bp, Homo sapien
cacgttcctttaaatgagggcaact

SEQ ID NO: 2817279 - DNA, 25 bp, Homo sapien
taccacgttcctttaaatgagggca

SEQ ID NO: 2817280 - DNA, 25 bp, Homo sapien
ttcttctgaattcctatagtccatt

SEQ ID NO: 2817281 - DNA, 25 bp, Homo sapien
cacaggcacttcaatcacgctcaat

SEQ ID NO: 2817282 - DNA, 25 bp, Homo sapien
gctcaattcacttgggttctggtaa

SEQ ID NO: 2817283 - DNA, 25 bp, Homo sapien
cagcattacatagaggagcccagcc

SEQ ID NO: 2817284 - DNA, 25 bp, Homo sapien
tgggtccactcaaaccagtccgaca

SEQ ID NO: 2817285 - DNA, 25 bp, Homo sapien
tgtgataacgtcgtgggtctcccag

SEQ ID NO: 2817286 - DNA, 25 bp, Homo sapien
tcttgccgtagacagaaagtggtgc

SEQ ID NO: 2817287 - DNA, 25 bp, Homo sapien
aaagtggtgctttgacctcctcgtc

SEQ ID NO: 2817288 - DNA, 25 bp, Homo sapien
cacaagtttcagcatatccagagca

SEQ ID NO: 2817289 - DNA, 25 bp, Homo sapien
cagcccctacccaggagcttttcag

SEQ ID NO: 2817290 - DNA, 25 bp, Homo sapien
agcccctacccaggagcttttcagt

SEQ ID NO: 2817291 - DNA, 25 bp, Homo sapien
ccttccccaggtagtcataataact

SEQ ID NO: 2817292 - DNA, 25 bp, Homo sapien
tgtccatagttctcacaggatagct

SEQ ID NO: 2817293 - DNA, 25 bp, Homo sapien
aggcccttccccaggtagtcataat

SEQ ID NO: 2817294 - DNA, 25 bp, Homo sapien
ctaaggaatgtccatagttctcaca

SEQ ID NO: 2817295 - DNA, 25 bp, Homo sapien
tgttgccccagtgacacgtccactg

SEQ ID NO: 2817296 - DNA, 25 bp, Homo sapien
tgtccttgacttagtctgagctgtt

SEQ ID NO: 2817297 - DNA, 25 bp, Homo sapien
tagtctgagctgttgccccagtgac

SEQ ID NO: 2817298 - DNA, 25 bp, Homo sapien
gacttagtctgagctgttgccccag

SEQ ID NO: 2817299 - DNA, 25 bp, Homo sapien
cacaccacatacacaactgtcccaa

SEQ ID NO: 2817300 - DNA, 25 bp, Homo sapien
tgtcccaactctcccagcgttgagg

SEQ ID NO: 2817301 - DNA, 25 bp, Homo sapien
cccagcgttgaggtgaaataaggca

SEQ ID NO: 2817302 - DNA, 25 bp, Homo sapien
ggtgaaataaggcaaagagcagttt

SEQ ID NO: 2817303 - DNA, 25 bp, Homo sapien
tgcccccaggagaagatgtgtcttg

SEQ ID NO: 2817304 - DNA, 25 bp, Homo sapien
tcttggggcaagtagtagtgaccaa

SEQ ID NO: 2817305 - DNA, 25 bp, Homo sapien
ggtgaaatgggccagtcattggctg

SEQ ID NO: 2817306 - DNA, 25 bp, Homo sapien
aagatgtgtcttggggcaagtagta

SEQ ID NO: 2817307 - DNA, 25 bp, Homo sapien
agtcaccaccttcacccaactccca

SEQ ID NO: 2817308 - DNA, 25 bp, Homo sapien
agagtgggtcagctgatagctgcca

SEQ ID NO: 2817309 - DNA, 25 bp, Homo sapien
taggccaattcctggagagtgggtc

SEQ ID NO: 2817310 - DNA, 25 bp, Homo sapien
cttaggccaattcctggagagtggg

SEQ ID NO: 2817311 - DNA, 25 bp, Homo sapien
caagcatttcccaacatgcccgcac

SEQ ID NO: 2817312 - DNA, 25 bp, Homo sapien
tcaagcatttcccaacatgcccgca

SEQ ID NO: 2817313 - DNA, 25 bp, Homo sapien
tgccactgagggaccctgcacaaag

SEQ ID NO: 2817314 - DNA, 25 bp, Homo sapien
caggaagtgcatagttgtagctgcc

SEQ ID NO: 2817315 - DNA, 25 bp, Homo sapien
gttccaaagttctgccctggcagtg

SEQ ID NO: 2817316 - DNA, 25 bp, Homo sapien
atatttcaccggcagtgctgaagcc

SEQ ID NO: 2817317 - DNA, 25 bp, Homo sapien
tctggacatccttaacagatgctgc

SEQ ID NO: 2817318 - DNA, 25 bp, Homo sapien
gaagctgttgaacgtttcctcaggc

SEQ ID NO: 2817319 - DNA, 25 bp, Homo sapien
tagcgagtgaatgagtctggacatc

SEQ ID NO: 2817320 - DNA, 25 bp, Homo sapien
tgctagatcgcctctgcttcagctg

SEQ ID NO: 2817321 - DNA, 25 bp, Homo sapien
gatgtggtcattccctccacctagg

SEQ ID NO: 2817322 - DNA, 25 bp, Homo sapien
ggcagtggcattgcacaggatccga

SEQ ID NO: 2817323 - DNA, 25 bp, Homo sapien
gaagacctcatgaaacagggcagtg

SEQ ID NO: 2817324 - DNA, 25 bp, Homo sapien
ctccacctaggaggacaaactgagc

SEQ ID NO: 2817325 - DNA, 25 bp, Homo sapien
tttcttgacttgaccttaacacatc

SEQ ID NO: 2817326 - DNA, 25 bp, Homo sapien
tgagaaacaatctgtctggtataac

SEQ ID NO: 2817327 - DNA, 25 bp, Homo sapien
accttttgccggtgaaatgaacaga

SEQ ID NO: 2817328 - DNA, 25 bp, Homo sapien
tctccgtgacatgggacatattgtc

SEQ ID NO: 2817329 - DNA, 25 bp, Homo sapien
ttggccacccgaggatacacggagt

SEQ ID NO: 2817330 - DNA, 25 bp, Homo sapien
cagagccctggtgtagatgtgcaca

SEQ ID NO: 2817331 - DNA, 25 bp, Homo sapien
tttagagaataagtgcaagtcccca

SEQ ID NO: 2817332 - DNA, 25 bp, Homo sapien
taattaactttcgtgagctggccag

SEQ ID NO: 2817333 - DNA, 25 bp, Homo sapien
atgtgggggtactgctgcaccagct

SEQ ID NO: 2817334 - DNA, 25 bp, Homo sapien
agctgttccaccgtcacttcgttga

SEQ ID NO: 2817335 - DNA, 25 bp, Homo sapien
catctgataggctctctccaaggtc

SEQ ID NO: 2817336 - DNA, 25 bp, Homo sapien
gggtccagcccatctgataggctct

SEQ ID NO: 2817337 - DNA, 25 bp, Homo sapien
tttataccgagtaagctagtctgaa

SEQ ID NO: 2817338 - DNA, 25 bp, Homo sapien
aagatgattgcagttcatatcacag

SEQ ID NO: 2817339 - DNA, 25 bp, Homo sapien
tgcagttcatatcacagaagtagac

SEQ ID NO: 2817340 - DNA, 25 bp, Homo sapien
attgctgtgctgtgaagggattaat

SEQ ID NO: 2817341 - DNA, 25 bp, Homo sapien
tcatacccatggtgattctttgggc

SEQ ID NO: 2817342 - DNA, 25 bp, Homo sapien
taaagtcctgataatatggcagccc

SEQ ID NO: 2817343 - DNA, 25 bp, Homo sapien
ctcagctagagtggtagcagtctct

SEQ ID NO: 2817344 - DNA, 25 bp, Homo sapien
taattttgcacaggagaccaaagca

SEQ ID NO: 2817345 - DNA, 25 bp, Homo sapien
taattaggcaaagccaaaggtggct

SEQ ID NO: 2817346 - DNA, 25 bp, Homo sapien
tggtaaaaatggactggcttcctct

SEQ ID NO: 2817347 - DNA, 25 bp, Homo sapien
tgaaggcaaggtctgaactaagcac

SEQ ID NO: 2817348 - DNA, 25 bp, Homo sapien
catgacatgacacctctgagctaga

SEQ ID NO: 2817349 - DNA, 25 bp, Homo sapien
gagtccctgcaggtatatgctttgt

SEQ ID NO: 2817350 - DNA, 25 bp, Homo sapien
catggctgaattgctaccaaaacag

SEQ ID NO: 2817351 - DNA, 25 bp, Homo sapien
ggctatgggcaacctggaaacagct

SEQ ID NO: 2817352 - DNA, 25 bp, Homo sapien
ttcctgctcatgattcctaaacaag

SEQ ID NO: 2817353 - DNA, 25 bp, Homo sapien
taatttctacgaccaaagccgctgt

SEQ ID NO: 2817354 - DNA, 25 bp, Homo sapien
gaatgctgcattgttgcacgactgg

SEQ ID NO: 2817355 - DNA, 25 bp, Homo sapien
taattgcggaaaacagagggaacat

SEQ ID NO: 2817356 - DNA, 25 bp, Homo sapien
tctaattcccaaggtcaagtaagcc

SEQ ID NO: 2817357 - DNA, 25 bp, Homo sapien
tgcccgcggtgacacaactagtaag

SEQ ID NO: 2817358 - DNA, 25 bp, Homo sapien
tgagaggttagtaactgcccgcggt

SEQ ID NO: 2817359 - DNA, 25 bp, Homo sapien
tcgtgctggagccaatgggttctca

SEQ ID NO: 2817360 - DNA, 25 bp, Homo sapien
ttgcaaacgagggaacaggcactga

SEQ ID NO: 2817361 - DNA, 25 bp, Homo sapien
taaattagtacaagatggcggcact

SEQ ID NO: 2817362 - DNA, 25 bp, Homo sapien
tacagtgtatctccgaagatggagc

SEQ ID NO: 2817363 - DNA, 25 bp, Homo sapien
ggactatgcctatggtggacccttt

SEQ ID NO: 2817364 - DNA, 25 bp, Homo sapien
taaacataactagctggcaaaggtc

SEQ ID NO: 2817365 - DNA, 25 bp, Homo sapien
aaggagagaggatatgacatcaagc

SEQ ID NO: 2817366 - DNA, 25 bp, Homo sapien
taatatataatacacgggggtggag

SEQ ID NO: 2817367 - DNA, 25 bp, Homo sapien
taactatactgatatgtagaaagca

SEQ ID NO: 2817368 - DNA, 25 bp, Homo sapien
aaagcaggcaaacaatgcatagcta

SEQ ID NO: 2817369 - DNA, 25 bp, Homo sapien
ctgtatcgcccaatggctatcagtg

SEQ ID NO: 2817370 - DNA, 25 bp, Homo sapien
tgtcatgctgtatcgcccaatggct

SEQ ID NO: 2817371 - DNA, 25 bp, Homo sapien
catccgacatccacagtctctattg

SEQ ID NO: 2817372 - DNA, 25 bp, Homo sapien
agtctctattgtcatgctgtatcgc

SEQ ID NO: 2817373 - DNA, 25 bp, Homo sapien
cgcagagaaagcattaatgttagca

SEQ ID NO: 2817374 - DNA, 25 bp, Homo sapien
gaagggacgcagagaaagcattaat

SEQ ID NO: 2817375 - DNA, 25 bp, Homo sapien
gggagctctatcttattatgactat

SEQ ID NO: 2817376 - DNA, 25 bp, Homo sapien
aatgttagcagtgtaagggagctct

SEQ ID NO: 2817377 - DNA, 25 bp, Homo sapien
gaggagtgttatactgcaagtgaat

SEQ ID NO: 2817378 - DNA, 25 bp, Homo sapien
tatactgcaagtgaatgtctttacc

SEQ ID NO: 2817379 - DNA, 25 bp, Homo sapien
caagtgaatgtctttaccaattggc

SEQ ID NO: 2817380 - DNA, 25 bp, Homo sapien
gaatgtctttaccaattggcataat

SEQ ID NO: 2817381 - DNA, 25 bp, Homo sapien
taatgaagtctgctagggaaggcct

SEQ ID NO: 2817382 - DNA, 25 bp, Homo sapien
cagagaccaggatgagagtgttgca

SEQ ID NO: 2817383 - DNA, 25 bp, Homo sapien
caaattcctggtcttgtggagcttg

SEQ ID NO: 2817384 - DNA, 25 bp, Homo sapien
gagaaaacctagtgccaagccatga

SEQ ID NO: 2817385 - DNA, 25 bp, Homo sapien
taaaggtgtttcacctatatccagc

SEQ ID NO: 2817386 - DNA, 25 bp, Homo sapien
tttcacctatatccagctgatgaat

SEQ ID NO: 2817387 - DNA, 25 bp, Homo sapien
ggtgtttcacctatatccagctgat

SEQ ID NO: 2817388 - DNA, 25 bp, Homo sapien
tgtttcacctatatccagctgatga

SEQ ID NO: 2817389 - DNA, 25 bp, Homo sapien
taaagagagtcaataacgttgagaa

SEQ ID NO: 2817390 - DNA, 25 bp, Homo sapien
tgtatgttaaccagaagtatcccgc

SEQ ID NO: 2817391 - DNA, 25 bp, Homo sapien
tgctgagccaactagaaggtgagta

SEQ ID NO: 2817392 - DNA, 25 bp, Homo sapien
cgttgagaaattatgcaatgaacta

SEQ ID NO: 2817393 - DNA, 25 bp, Homo sapien
gtactttatcaactggagaactgta

SEQ ID NO: 2817394 - DNA, 25 bp, Homo sapien
ttctgatgtaaccagcaccttacat

SEQ ID NO: 2817395 - DNA, 25 bp, Homo sapien
taaccagcaccttacatacactaaa

SEQ ID NO: 2817396 - DNA, 25 bp, Homo sapien
tacctgttgggtctaatattcacta

SEQ ID NO: 2817397 - DNA, 25 bp, Homo sapien
cagcaagtggccgtcgtgatagatt

SEQ ID NO: 2817398 - DNA, 25 bp, Homo sapien
cacagcaagtggccgtcgtgataga

SEQ ID NO: 2817399 - DNA, 25 bp, Homo sapien
gcaagtggccgtcgtgatagattgt

SEQ ID NO: 2817400 - DNA, 25 bp, Homo sapien
agcaagtggccgtcgtgatagattg

SEQ ID NO: 2817401 - DNA, 25 bp, Homo sapien
ttaagtgaagtaggtccaccaactc

SEQ ID NO: 2817402 - DNA, 25 bp, Homo sapien
caccaactcttgactgcactgcatc

SEQ ID NO: 2817403 - DNA, 25 bp, Homo sapien
agtgaagtaggtccaccaactcttg

SEQ ID NO: 2817404 - DNA, 25 bp, Homo sapien
tccaccaactcttgactgcactgca

SEQ ID NO: 2817405 - DNA, 25 bp, Homo sapien
atacccaaattatgagttctctctg

SEQ ID NO: 2817406 - DNA, 25 bp, Homo sapien
aagaactttacacatctgccagcag

SEQ ID NO: 2817407 - DNA, 25 bp, Homo sapien
gacatctattggttcaaagaacttt

SEQ ID NO: 2817408 - DNA, 25 bp, Homo sapien
ccctgtctgtgttcaatcaggctga

SEQ ID NO: 2817409 - DNA, 25 bp, Homo sapien
tcatcgttattgctagttcctgctg

SEQ ID NO: 2817410 - DNA, 25 bp, Homo sapien
aaaatccagagaatgagcattctat

SEQ ID NO: 2817411 - DNA, 25 bp, Homo sapien
tgaggatgctggtaaaaccacagct

SEQ ID NO: 2817412 - DNA, 25 bp, Homo sapien
gagggtttaaaatgatcttgtgagg

SEQ ID NO: 2817413 - DNA, 25 bp, Homo sapien
ccagagaatgagcattctataaaac

SEQ ID NO: 2817414 - DNA, 25 bp, Homo sapien
ccaactccacatacaacttgaagag

SEQ ID NO: 2817415 - DNA, 25 bp, Homo sapien
tccaagccagctgtcatgatggctg

SEQ ID NO: 2817416 - DNA, 25 bp, Homo sapien
gctgcccaaggtgaacagtccaaca

SEQ ID NO: 2817417 - DNA, 25 bp, Homo sapien
cttgaagagttaaatccaagccagc

SEQ ID NO: 2817418 - DNA, 25 bp, Homo sapien
tccaaaatggattaagctcagacag

SEQ ID NO: 2817419 - DNA, 25 bp, Homo sapien
gacagaaataccacgaggcatgcag

SEQ ID NO: 2817420 - DNA, 25 bp, Homo sapien
gaatctctgaaagcggatggtttgc

SEQ ID NO: 2817421 - DNA, 25 bp, Homo sapien
tacacaagtactaagcgatgttggg

SEQ ID NO: 2817422 - DNA, 25 bp, Homo sapien
tctatgcaaggatcttaactggctc

SEQ ID NO: 2817423 - DNA, 25 bp, Homo sapien
caattgactatcagtgtagctgcac

SEQ ID NO: 2817424 - DNA, 25 bp, Homo sapien
ccactgggcagaagactgtatagac

SEQ ID NO: 2817425 - DNA, 25 bp, Homo sapien
taactggctcaatcccagtgggtaa

SEQ ID NO: 2817426 - DNA, 25 bp, Homo sapien
agtacctaaacatatcaggcactca

SEQ ID NO: 2817427 - DNA, 25 bp, Homo sapien
caggtagggctgctaacatatttga

SEQ ID NO: 2817428 - DNA, 25 bp, Homo sapien
gaggagtgcattgacagagattaca

SEQ ID NO: 2817429 - DNA, 25 bp, Homo sapien
ggcactcactaaatatgttgcataa

SEQ ID NO: 2817430 - DNA, 25 bp, Homo sapien
tgaaaattgcataagtgaatgagca

SEQ ID NO: 2817431 - DNA, 25 bp, Homo sapien
ttaggaacacttagtacttcaaaca

SEQ ID NO: 2817432 - DNA, 25 bp, Homo sapien
ttttggagctatctacaactgattt

SEQ ID NO: 2817433 - DNA, 25 bp, Homo sapien
gttatgattttgctagcccattcag

SEQ ID NO: 2817434 - DNA, 25 bp, Homo sapien
gaaagcctgtaggagcatcacctgt

SEQ ID NO: 2817435 - DNA, 25 bp, Homo sapien
tgctgatgtatccagaggaccccat

SEQ ID NO: 2817436 - DNA, 25 bp, Homo sapien
gaccccataatgtgttagatctctg

SEQ ID NO: 2817437 - DNA, 25 bp, Homo sapien
aagagatgggagctagcaattgcaa

SEQ ID NO: 2817438 - DNA, 25 bp, Homo sapien
gcctaatggcatactgactgacaga

SEQ ID NO: 2817439 - DNA, 25 bp, Homo sapien
gactgacagagtagaaaatcatatc

SEQ ID NO: 2817440 - DNA, 25 bp, Homo sapien
aaatcatatcaagaaggccagtatg

SEQ ID NO: 2817441 - DNA, 25 bp, Homo sapien
ctcactggcaatattgagattacag

SEQ ID NO: 2817442 - DNA, 25 bp, Homo sapien
caaatgcaattaatctgtgggaggg

SEQ ID NO: 2817443 - DNA, 25 bp, Homo sapien
aaaggcaggcgttctcaaacctggc

SEQ ID NO: 2817444 - DNA, 25 bp, Homo sapien
tagcatgagcttatctgggagggta

SEQ ID NO: 2817445 - DNA, 25 bp, Homo sapien
taattcaaataggtagcctaggctg

SEQ ID NO: 2817446 - DNA, 25 bp, Homo sapien
gaattctcctttccccatttcctca

SEQ ID NO: 2817447 - DNA, 25 bp, Homo sapien
ctaagtggaattctcctttccccat

SEQ ID NO: 2817448 - DNA, 25 bp, Homo sapien
ttctctaagtattttggcaactgct

SEQ ID NO: 2817449 - DNA, 25 bp, Homo sapien
ccacttgcttctctaagtattttgg

SEQ ID NO: 2817450 - DNA, 25 bp, Homo sapien
gcttctctaagtattttggcaactg

SEQ ID NO: 2817451 - DNA, 25 bp, Homo sapien
acttgcttctctaagtattttggca

SEQ ID NO: 2817452 - DNA, 25 bp, Homo sapien
tcataatggactggctaggcaggag

SEQ ID NO: 2817453 - DNA, 25 bp, Homo sapien
tggcaggcacacactagaaaggctg

SEQ ID NO: 2817454 - DNA, 25 bp, Homo sapien
taatgtcctaataaatggcaggcac

SEQ ID NO: 2817455 - DNA, 25 bp, Homo sapien
catctggacgatggcctgccactaa

SEQ ID NO: 2817456 - DNA, 25 bp, Homo sapien
tcagcaaccgtcacattggcattca

SEQ ID NO: 2817457 - DNA, 25 bp, Homo sapien
taaaaaactgccagtgcattctggc

SEQ ID NO: 2817458 - DNA, 25 bp, Homo sapien
tttcagcaaccgtcacattggcatt

SEQ ID NO: 2817459 - DNA, 25 bp, Homo sapien
cattggcattcagataaaaaactgc

SEQ ID NO: 2817460 - DNA, 25 bp, Homo sapien
taatgtcccataggttaatccatgt

SEQ ID NO: 2817461 - DNA, 25 bp, Homo sapien
tgttcttgggtctaactacaactac

SEQ ID NO: 2817462 - DNA, 25 bp, Homo sapien
gctgtgcaacacacctcaaaaacat

SEQ ID NO: 2817463 - DNA, 25 bp, Homo sapien
gcttccaggagttcaactttagatt

SEQ ID NO: 2817464 - DNA, 25 bp, Homo sapien
ggagacatgtctatctataagctaa

SEQ ID NO: 2817465 - DNA, 25 bp, Homo sapien
aggtgctaatctcatactatcaaag

SEQ ID NO: 2817466 - DNA, 25 bp, Homo sapien
tatacaatgcataccacccaaatct

SEQ ID NO: 2817467 - DNA, 25 bp, Homo sapien
tggtgtcctgatcttttactaaagt

SEQ ID NO: 2817468 - DNA, 25 bp, Homo sapien
gttagacactctgaattaggaccaa

SEQ ID NO: 2817469 - DNA, 25 bp, Homo sapien
tcaaagggataagccctgactatct

SEQ ID NO: 2817470 - DNA, 25 bp, Homo sapien
caactcttgcaagccattgcgttgg

SEQ ID NO: 2817471 - DNA, 25 bp, Homo sapien
ttaaatcagaaatggctcaaaggga

SEQ ID NO: 2817472 - DNA, 25 bp, Homo sapien
tacagtcactgcctgagagtcttca

SEQ ID NO: 2817473 - DNA, 25 bp, Homo sapien
atgggtcttgggtataatcttggca

SEQ ID NO: 2817474 - DNA, 25 bp, Homo sapien
aatgagtgccctactataatgctag

SEQ ID NO: 2817475 - DNA, 25 bp, Homo sapien
gagtcttcacctgaaatctatggac

SEQ ID NO: 2817476 - DNA, 25 bp, Homo sapien
tcaaattcataatggtcaggaaggt

SEQ ID NO: 2817477 - DNA, 25 bp, Homo sapien
cctggtgctaaagccgatcttgaaa

SEQ ID NO: 2817478 - DNA, 25 bp, Homo sapien
aatgaattttacctccctggtgcta

SEQ ID NO: 2817479 - DNA, 25 bp, Homo sapien
gataggaaaacacaagagagggaat

SEQ ID NO: 2817480 - DNA, 25 bp, Homo sapien
tgctatcaaacaataccacgtattc

SEQ ID NO: 2817481 - DNA, 25 bp, Homo sapien
tattcgtcaccctaaacatttacca

SEQ ID NO: 2817482 - DNA, 25 bp, Homo sapien
ggtacaggcgacattttgatacata

SEQ ID NO: 2817483 - DNA, 25 bp, Homo sapien
ctatagttgtcctactatgctatca

SEQ ID NO: 2817484 - DNA, 25 bp, Homo sapien
ggacttctacatgaaaaggaccacc

SEQ ID NO: 2817485 - DNA, 25 bp, Homo sapien
gagcaacatattctagggatgaaac

SEQ ID NO: 2817486 - DNA, 25 bp, Homo sapien
ggctatcgccctagggagacaaggt

SEQ ID NO: 2817487 - DNA, 25 bp, Homo sapien
tgctgggctctagaagaaagctgtg

SEQ ID NO: 2817488 - DNA, 25 bp, Homo sapien
tgtctgatgttcttgtctgtcttcc

SEQ ID NO: 2817489 - DNA, 25 bp, Homo sapien
gcaggtttcattacaagagggcaag

SEQ ID NO: 2817490 - DNA, 25 bp, Homo sapien
tgatgttcttgtctgtcttccaaga

SEQ ID NO: 2817491 - DNA, 25 bp, Homo sapien
gctttatttataaacgcgactgagg

SEQ ID NO: 2817492 - DNA, 25 bp, Homo sapien
catcctcaagtactctaacatcttc

SEQ ID NO: 2817493 - DNA, 25 bp, Homo sapien
tctcatcctcaagtactctaacatc

SEQ ID NO: 2817494 - DNA, 25 bp, Homo sapien
atcctcaagtactctaacatcttcc

SEQ ID NO: 2817495 - DNA, 25 bp, Homo sapien
tcatcctcaagtactctaacatctt

SEQ ID NO: 2817496 - DNA, 25 bp, Homo sapien
agtctaaatactgaaggcgaatacc

SEQ ID NO: 2817497 - DNA, 25 bp, Homo sapien
cagtccaagcttgagcagtgctcct

SEQ ID NO: 2817498 - DNA, 25 bp, Homo sapien
gaaggcgaataccatgcccttccca

SEQ ID NO: 2817499 - DNA, 25 bp, Homo sapien
ggtctgctggcgatctctccttgcc

SEQ ID NO: 2817500 - DNA, 25 bp, Homo sapien
gaataggcacaagcaagattctggg

SEQ ID NO: 2817501 - DNA, 25 bp, Homo sapien
tacttattcctgtggctatgtctgg

SEQ ID NO: 2817502 - DNA, 25 bp, Homo sapien
gattttgctgcctcgtattagctag

SEQ ID NO: 2817503 - DNA, 25 bp, Homo sapien
tacgtaaagtatcagagtcccaggt

SEQ ID NO: 2817504 - DNA, 25 bp, Homo sapien
gctattgctgtaatttaactcactg

SEQ ID NO: 2817505 - DNA, 25 bp, Homo sapien
catgtgttaaattgaaacaacccca

SEQ ID NO: 2817506 - DNA, 25 bp, Homo sapien
tggtggttgagaaatatgctattgc

SEQ ID NO: 2817507 - DNA, 25 bp, Homo sapien
caaaacgcagctttaagtgtgcagc

SEQ ID NO: 2817508 - DNA, 25 bp, Homo sapien
caaaagcatccattcagacacctgt

SEQ ID NO: 2817509 - DNA, 25 bp, Homo sapien
gaataaccaacgcatacaaaagcat

SEQ ID NO: 2817510 - DNA, 25 bp, Homo sapien
ttgagccccaacatgtcataggcag

SEQ ID NO: 2817511 - DNA, 25 bp, Homo sapien
caagggttgttctacctcaaatgcc

SEQ ID NO: 2817512 - DNA, 25 bp, Homo sapien
ggaaatttgcaagcatagatttagc

SEQ ID NO: 2817513 - DNA, 25 bp, Homo sapien
tccattatatactagtccgctttca

SEQ ID NO: 2817514 - DNA, 25 bp, Homo sapien
aagaacataacacctgctaaatgta

SEQ ID NO: 2817515 - DNA, 25 bp, Homo sapien
attcactaccgccacaacagtatag

SEQ ID NO: 2817516 - DNA, 25 bp, Homo sapien
gacaccaaatatagctctttcaggt

SEQ ID NO: 2817517 - DNA, 25 bp, Homo sapien
taatctgtgattttacaggacacca

SEQ ID NO: 2817518 - DNA, 25 bp, Homo sapien
tacaggacaccaaatatagctcttt

SEQ ID NO: 2817519 - DNA, 25 bp, Homo sapien
ttttacaggacaccaaatatagctc

SEQ ID NO: 2817520 - DNA, 25 bp, Homo sapien
tttattgacatgaagggtaatttat

SEQ ID NO: 2817521 - DNA, 25 bp, Homo sapien
tcatttattgacatgaagggtaatt

SEQ ID NO: 2817522 - DNA, 25 bp, Homo sapien
catgaagggtaatttatcttctctc

SEQ ID NO: 2817523 - DNA, 25 bp, Homo sapien
tatcaacctcaaggttttcatttat

SEQ ID NO: 2817524 - DNA, 25 bp, Homo sapien
acaaaataaacggatataggaacat

SEQ ID NO: 2817525 - DNA, 25 bp, Homo sapien
taaacggatataggaacatttacca

SEQ ID NO: 2817526 - DNA, 25 bp, Homo sapien
cggatataggaacatttaccaagca

SEQ ID NO: 2817527 - DNA, 25 bp, Homo sapien
caaaataaacggatataggaacatt

SEQ ID NO: 2817528 - DNA, 25 bp, Homo sapien
tatggaagggattttcatggactcc

SEQ ID NO: 2817529 - DNA, 25 bp, Homo sapien
gaaatggcttcataagggaataggg

SEQ ID NO: 2817530 - DNA, 25 bp, Homo sapien
gactatcgaaggttaggtttatgga

SEQ ID NO: 2817531 - DNA, 25 bp, Homo sapien
gactcccctcctgataagaaattct

SEQ ID NO: 2817532 - DNA, 25 bp, Homo sapien
tgtatttaatggactttctgcttct

SEQ ID NO: 2817533 - DNA, 25 bp, Homo sapien
aaagctagttttcaatatatgtatt

SEQ ID NO: 2817534 - DNA, 25 bp, Homo sapien
gtatttaatggactttctgcttctt

SEQ ID NO: 2817535 - DNA, 25 bp, Homo sapien
tgccttgccactatgacctgattta

SEQ ID NO: 2817536 - DNA, 25 bp, Homo sapien
tctctagctgggatctcggaaagat

SEQ ID NO: 2817537 - DNA, 25 bp, Homo sapien
gccttaatcttccagccttgaacga

SEQ ID NO: 2817538 - DNA, 25 bp, Homo sapien
gattaacccagagtttgacacctta

SEQ ID NO: 2817539 - DNA, 25 bp, Homo sapien
catcaatatgaaggatctgactgac

SEQ ID NO: 2817540 - DNA, 25 bp, Homo sapien
tccacagcttggagactggtgctca

SEQ ID NO: 2817541 - DNA, 25 bp, Homo sapien
atgaaggatctgactgacacctaag

SEQ ID NO: 2817542 - DNA, 25 bp, Homo sapien
ctggtgctcagcatcatcaatatga

SEQ ID NO: 2817543 - DNA, 25 bp, Homo sapien
aacacttacaattcctatatgccag

SEQ ID NO: 2817544 - DNA, 25 bp, Homo sapien
taagtgtcagcctgcaatctcaacc

SEQ ID NO: 2817545 - DNA, 25 bp, Homo sapien
tctcaaccacttagtaaaggcagag

SEQ ID NO: 2817546 - DNA, 25 bp, Homo sapien
caatacaataggtgtcccagatggg

SEQ ID NO: 2817547 - DNA, 25 bp, Homo sapien
gcaagagcaaactgaataggacata

SEQ ID NO: 2817548 - DNA, 25 bp, Homo sapien
ggggcctcagtcaccttgctaccaa

SEQ ID NO: 2817549 - DNA, 25 bp, Homo sapien
tgctaccaacagagaggccggcctg

SEQ ID NO: 2817550 - DNA, 25 bp, Homo sapien
ctgaataggacatacgctttccata

SEQ ID NO: 2817551 - DNA, 25 bp, Homo sapien
gacatggacatactctctatgccaa

SEQ ID NO: 2817552 - DNA, 25 bp, Homo sapien
ggcatcattcacagagttttcaaca

SEQ ID NO: 2817553 - DNA, 25 bp, Homo sapien
tagacaggtaagatcattgcaagac

SEQ ID NO: 2817554 - DNA, 25 bp, Homo sapien
gataaatcaatttcctagacaggta

SEQ ID NO: 2817555 - DNA, 25 bp, Homo sapien
atcatactgacacagggcctgtgcc

SEQ ID NO: 2817556 - DNA, 25 bp, Homo sapien
aatgtgtgtacatagacctctgtcc

SEQ ID NO: 2817557 - DNA, 25 bp, Homo sapien
tgaacaatgccatggttagctcatc

SEQ ID NO: 2817558 - DNA, 25 bp, Homo sapien
tgtccacaagccaagattttatttc

SEQ ID NO: 2817559 - DNA, 25 bp, Homo sapien
aatctcatactcctgtagtaaaact

SEQ ID NO: 2817560 - DNA, 25 bp, Homo sapien
tttttcaactgtttcaggacaaaga

SEQ ID NO: 2817561 - DNA, 25 bp, Homo sapien
gccagtagggcttttattatagtta

SEQ ID NO: 2817562 - DNA, 25 bp, Homo sapien
gtattgactacatgtatttgacttc

SEQ ID NO: 2817563 - DNA, 25 bp, Homo sapien
gcatcaagtctcttttactaggaca

SEQ ID NO: 2817564 - DNA, 25 bp, Homo sapien
tctcactgtttcagaatgacctatt

SEQ ID NO: 2817565 - DNA, 25 bp, Homo sapien
agtccacattcaccagcatcaagtc

SEQ ID NO: 2817566 - DNA, 25 bp, Homo sapien
tggcaacaagaaatcttcaacaagt

SEQ ID NO: 2817567 - DNA, 25 bp, Homo sapien
tgcagaccctgcttttcaaaacatg

SEQ ID NO: 2817568 - DNA, 25 bp, Homo sapien
taaataactatctgcagaccctgct

SEQ ID NO: 2817569 - DNA, 25 bp, Homo sapien
tatctgcagaccctgcttttcaaaa

SEQ ID NO: 2817570 - DNA, 25 bp, Homo sapien
atataaataactatctgcagaccct

SEQ ID NO: 2817571 - DNA, 25 bp, Homo sapien
aacagtttgacagtaatttgtatca

SEQ ID NO: 2817572 - DNA, 25 bp, Homo sapien
aatttgtatcattctcacgggaaaa

SEQ ID NO: 2817573 - DNA, 25 bp, Homo sapien
ttttacagcaagcataaacagtttg

SEQ ID NO: 2817574 - DNA, 25 bp, Homo sapien
gggaaaataacttctccaatctcat

SEQ ID NO: 2817575 - DNA, 25 bp, Homo sapien
atcagatacatcagccaaaaacact

SEQ ID NO: 2817576 - DNA, 25 bp, Homo sapien
aatcagatacatcagccaaaaacac

SEQ ID NO: 2817577 - DNA, 25 bp, Homo sapien
caaaatacttgcttcacggctccta

SEQ ID NO: 2817578 - DNA, 25 bp, Homo sapien
cataacagtctgctgaagtactcag

SEQ ID NO: 2817579 - DNA, 25 bp, Homo sapien
gaaccataggttctttcgtgaggcc

SEQ ID NO: 2817580 - DNA, 25 bp, Homo sapien
tcacaggatcacatatgaaggcaca

SEQ ID NO: 2817581 - DNA, 25 bp, Homo sapien
gctgttacacccaaaacatgctgct

SEQ ID NO: 2817582 - DNA, 25 bp, Homo sapien
gagtggatgagacgtaataaccaga

SEQ ID NO: 2817583 - DNA, 25 bp, Homo sapien
tggactccgcgtcaaacatataaaa

SEQ ID NO: 2817584 - DNA, 25 bp, Homo sapien
tcagaccagttttttacacatcagc

SEQ ID NO: 2817585 - DNA, 25 bp, Homo sapien
gatccagttcagacagagattgaga

SEQ ID NO: 2817586 - DNA, 25 bp, Homo sapien
agttcagtgatatgacgtaggtcca

SEQ ID NO: 2817587 - DNA, 25 bp, Homo sapien
cacggtttcattatccagttcagtg

SEQ ID NO: 2817588 - DNA, 25 bp, Homo sapien
gatatgacgtaggtccaagctggaa

SEQ ID NO: 2817589 - DNA, 25 bp, Homo sapien
cctaggtgggcctgacataatcagt

SEQ ID NO: 2817590 - DNA, 25 bp, Homo sapien
gacaggacccacgattaggatggaa

SEQ ID NO: 2817591 - DNA, 25 bp, Homo sapien
taaacaggtatggtaggcaaaattc

SEQ ID NO: 2817592 - DNA, 25 bp, Homo sapien
cccttacaaaggatctagaggtctg

SEQ ID NO: 2817593 - DNA, 25 bp, Homo sapien
cctttttgccacatcactagccaga

SEQ ID NO: 2817594 - DNA, 25 bp, Homo sapien
tgccattctcctactagatctgaca

SEQ ID NO: 2817595 - DNA, 25 bp, Homo sapien
gaaacaactttgatcaaatctccca

SEQ ID NO: 2817596 - DNA, 25 bp, Homo sapien
tctaggacattttacggcccgcttc

SEQ ID NO: 2817597 - DNA, 25 bp, Homo sapien
catttcctcatatcaagttcagaga

SEQ ID NO: 2817598 - DNA, 25 bp, Homo sapien
atttcctcatatcaagttcagagat

SEQ ID NO: 2817599 - DNA, 25 bp, Homo sapien
tcatttcctcatatcaagttcagag

SEQ ID NO: 2817600 - DNA, 25 bp, Homo sapien
gagccacctgcaatctttgggtctt

SEQ ID NO: 2817601 - DNA, 25 bp, Homo sapien
tcagtttttctatcccgtgatcaga

SEQ ID NO: 2817602 - DNA, 25 bp, Homo sapien
gagaaactttcgtcttttgagccaa

SEQ ID NO: 2817603 - DNA, 25 bp, Homo sapien
tgtagtgcacaggatgataaccatc

SEQ ID NO: 2817604 - DNA, 25 bp, Homo sapien
catttgtactgatttgatataaata

SEQ ID NO: 2817605 - DNA, 25 bp, Homo sapien
ggcttgcctttgaactacatgtaaa

SEQ ID NO: 2817606 - DNA, 25 bp, Homo sapien
ttactatattaatagcccaggctgg

SEQ ID NO: 2817607 - DNA, 25 bp, Homo sapien
aaaaaaggtcttcttgactactgat

SEQ ID NO: 2817608 - DNA, 25 bp, Homo sapien
ccacaagtatgtgtaactggaccac

SEQ ID NO: 2817609 - DNA, 25 bp, Homo sapien
tacagaggcagattagattcaggct

SEQ ID NO: 2817610 - DNA, 25 bp, Homo sapien
ggtaactgataccacccatggaaag

SEQ ID NO: 2817611 - DNA, 25 bp, Homo sapien
tgatgatgatcattgcctcggtcca

SEQ ID NO: 2817612 - DNA, 25 bp, Homo sapien
gggatcagtgttgatattccctata

SEQ ID NO: 2817613 - DNA, 25 bp, Homo sapien
caatttcttcctcatttagacttgg

SEQ ID NO: 2817614 - DNA, 25 bp, Homo sapien
tacttctggtagaatgctgctgtga

SEQ ID NO: 2817615 - DNA, 25 bp, Homo sapien
actaccaggttttggtaacaggatg

SEQ ID NO: 2817616 - DNA, 25 bp, Homo sapien
accttcaggtacatcaatcaaacat

SEQ ID NO: 2817617 - DNA, 25 bp, Homo sapien
ccatcaccttcaggtacatcaatca

SEQ ID NO: 2817618 - DNA, 25 bp, Homo sapien
aatcaaacatagatttggtcttttc

SEQ ID NO: 2817619 - DNA, 25 bp, Homo sapien
caccttcaggtacatcaatcaaaca

SEQ ID NO: 2817620 - DNA, 25 bp, Homo sapien
tattctattccagttagcgattcgt

SEQ ID NO: 2817621 - DNA, 25 bp, Homo sapien
gattgccgcctgatctttcctcagg

SEQ ID NO: 2817622 - DNA, 25 bp, Homo sapien
ttgattttcgtgacctctgaatggg

SEQ ID NO: 2817623 - DNA, 25 bp, Homo sapien
ggtctttgagtcgacatgctcttcc

SEQ ID NO: 2817624 - DNA, 25 bp, Homo sapien
tcaagacacttaccagatatgtgat

SEQ ID NO: 2817625 - DNA, 25 bp, Homo sapien
tagtaggtgtgaagctgtacctcac

SEQ ID NO: 2817626 - DNA, 25 bp, Homo sapien
tggcagccaagtatatcttctctgg

SEQ ID NO: 2817627 - DNA, 25 bp, Homo sapien
tcttattctgtcgattgcctcttca

SEQ ID NO: 2817628 - DNA, 25 bp, Homo sapien
gccttacctcatatactgaaaggag

SEQ ID NO: 2817629 - DNA, 25 bp, Homo sapien
tacggctcttcagttgtcctgcaat

SEQ ID NO: 2817630 - DNA, 25 bp, Homo sapien
tgtggagtggccagatcaagataat

SEQ ID NO: 2817631 - DNA, 25 bp, Homo sapien
gagaaaaaattcaagcggcaggtac

SEQ ID NO: 2817632 - DNA, 25 bp, Homo sapien
agccccacagtggatactcccattc

SEQ ID NO: 2817633 - DNA, 25 bp, Homo sapien
acagtggatactcccattccagacc

SEQ ID NO: 2817634 - DNA, 25 bp, Homo sapien
tcagcccgattgttcccaggccaag

SEQ ID NO: 2817635 - DNA, 25 bp, Homo sapien
aatcatcacctcagcccgattgttc

SEQ ID NO: 2817636 - DNA, 25 bp, Homo sapien
tctgagctataacattggcaagttt

SEQ ID NO: 2817637 - DNA, 25 bp, Homo sapien
tatccttttaatgcctgtagtatct

SEQ ID NO: 2817638 - DNA, 25 bp, Homo sapien
ctaagtagtactttagtagcatcac

SEQ ID NO: 2817639 - DNA, 25 bp, Homo sapien
gtagcatcacactaaatctgataca

SEQ ID NO: 2817640 - DNA, 25 bp, Homo sapien
gccaatacagcaactttctaatagt

SEQ ID NO: 2817641 - DNA, 25 bp, Homo sapien
tcattgtgttgccaatacagcaact

SEQ ID NO: 2817642 - DNA, 25 bp, Homo sapien
tgtgttgccaatacagcaactttct

SEQ ID NO: 2817643 - DNA, 25 bp, Homo sapien
tttttcatcattgtgttgccaatac

SEQ ID NO: 2817644 - DNA, 25 bp, Homo sapien
cttggttaggtgaatgactccttta

SEQ ID NO: 2817645 - DNA, 25 bp, Homo sapien
gactgaacaacccatgaagcctaca

SEQ ID NO: 2817646 - DNA, 25 bp, Homo sapien
gcctacatattgaagctcaggacag

SEQ ID NO: 2817647 - DNA, 25 bp, Homo sapien
ccatgaagcctacatattgaagctc

SEQ ID NO: 2817648 - DNA, 25 bp, Homo sapien
ctccatgccatttgttgtcctcaca

SEQ ID NO: 2817649 - DNA, 25 bp, Homo sapien
ttctccatgccatttgttgtcctca

SEQ ID NO: 2817650 - DNA, 25 bp, Homo sapien
tctccatgccatttgttgtcctcac

SEQ ID NO: 2817651 - DNA, 25 bp, Homo sapien
tcttctccatgccatttgttgtcct

SEQ ID NO: 2817652 - DNA, 25 bp, Homo sapien
tctacctccatttactagttctctt

SEQ ID NO: 2817653 - DNA, 25 bp, Homo sapien
actctacctccatttactagttctc

SEQ ID NO: 2817654 - DNA, 25 bp, Homo sapien
ctctacctccatttactagttctct

SEQ ID NO: 2817655 - DNA, 25 bp, Homo sapien
ccaataatgggaagtaagatggaga

SEQ ID NO: 2817656 - DNA, 25 bp, Homo sapien
agtaagatggagaatccaccatcca

SEQ ID NO: 2817657 - DNA, 25 bp, Homo sapien
ctttaaataaggttctccaataatg

SEQ ID NO: 2817658 - DNA, 25 bp, Homo sapien
taaataaggttctccaataatggga

SEQ ID NO: 2817659 - DNA, 25 bp, Homo sapien
taatatgctttatccagggccctca

SEQ ID NO: 2817660 - DNA, 25 bp, Homo sapien
catttaaataacaagtgtctgtgcg

SEQ ID NO: 2817661 - DNA, 25 bp, Homo sapien
ccttgaacaataagtcttcggcgac

SEQ ID NO: 2817662 - DNA, 25 bp, Homo sapien
tgtctgtgcgttaaaagtggcaggt

SEQ ID NO: 2817663 - DNA, 25 bp, Homo sapien
gcatacatcttcaccacggcatggg

SEQ ID NO: 2817664 - DNA, 25 bp, Homo sapien
tacgttgaagtcaggatgctgcagc

SEQ ID NO: 2817665 - DNA, 25 bp, Homo sapien
ccacacagggtagctatatccagga

SEQ ID NO: 2817666 - DNA, 25 bp, Homo sapien
tgccaggcaacatcgtattacaagg

SEQ ID NO: 2817667 - DNA, 25 bp, Homo sapien
gactatgtggcaatttaaagactca

SEQ ID NO: 2817668 - DNA, 25 bp, Homo sapien
tatcccaaaagcattaccagtaaaa

SEQ ID NO: 2817669 - DNA, 25 bp, Homo sapien
aatctacaacagtaaaggcattctg

SEQ ID NO: 2817670 - DNA, 25 bp, Homo sapien
taactgtttattctgtgcagaggga

SEQ ID NO: 2817671 - DNA, 25 bp, Homo sapien
aatggcatatgacccaactgactga

SEQ ID NO: 2817672 - DNA, 25 bp, Homo sapien
gaattgccacaaatacccatgtagg

SEQ ID NO: 2817673 - DNA, 25 bp, Homo sapien
tactgaaagcatctaaagccctaag

SEQ ID NO: 2817674 - DNA, 25 bp, Homo sapien
gaaattctagaaagtacagctccat

SEQ ID NO: 2817675 - DNA, 25 bp, Homo sapien
tagtttaaagcgttagggcagatcc

SEQ ID NO: 2817676 - DNA, 25 bp, Homo sapien
ttaaacaaatggcagagttggacct

SEQ ID NO: 2817677 - DNA, 25 bp, Homo sapien
tgacatacatacaggataaattccc

SEQ ID NO: 2817678 - DNA, 25 bp, Homo sapien
tcagtttcatatatagtgccagcat

SEQ ID NO: 2817679 - DNA, 25 bp, Homo sapien
taccctagctatccaaagaaatgcc

SEQ ID NO: 2817680 - DNA, 25 bp, Homo sapien
tataaatagaaacacgaccttgtcc

SEQ ID NO: 2817681 - DNA, 25 bp, Homo sapien
ttggatgaccaatgaatactgcctc

SEQ ID NO: 2817682 - DNA, 25 bp, Homo sapien
caatcacaaggctagtaagggtgga

SEQ ID NO: 2817683 - DNA, 25 bp, Homo sapien
tctctgttaaaaaaaaatgaatctc

SEQ ID NO: 2817684 - DNA, 25 bp, Homo sapien
ctctgttaaaaaaaaatgaatctct

SEQ ID NO: 2817685 - DNA, 25 bp, Homo sapien
gagtagcagattgcttgactgtagc

SEQ ID NO: 2817686 - DNA, 25 bp, Homo sapien
atatcctgagtagcagattgcttga

SEQ ID NO: 2817687 - DNA, 25 bp, Homo sapien
ctgagtagcagattgcttgactgta

SEQ ID NO: 2817688 - DNA, 25 bp, Homo sapien
gcttgactgtagcagtccaagccat

SEQ ID NO: 2817689 - DNA, 25 bp, Homo sapien
tgataagctaataacagagactctg

SEQ ID NO: 2817690 - DNA, 25 bp, Homo sapien
cacatgttatgacactgcccagatg

SEQ ID NO: 2817691 - DNA, 25 bp, Homo sapien
aatctgactgtccaatgttcaagca

SEQ ID NO: 2817692 - DNA, 25 bp, Homo sapien
gaaggcagccccaatagtagggaga

SEQ ID NO: 2817693 - DNA, 25 bp, Homo sapien
cactaggtctggtatagctataaaa

SEQ ID NO: 2817694 - DNA, 25 bp, Homo sapien
tttctttaagccagcagcatacaga

SEQ ID NO: 2817695 - DNA, 25 bp, Homo sapien
tacagacccaaagtggcctatgtca

SEQ ID NO: 2817696 - DNA, 25 bp, Homo sapien
tttaagccagcagcatacagaccca

SEQ ID NO: 2817697 - DNA, 25 bp, Homo sapien
tagaccctacctcacatctgtcaga

SEQ ID NO: 2817698 - DNA, 25 bp, Homo sapien
tgccctctgtctagtaatgacttcc

SEQ ID NO: 2817699 - DNA, 25 bp, Homo sapien
gaataaagggcatcaaactgagacc

SEQ ID NO: 2817700 - DNA, 25 bp, Homo sapien
acttttgatctgacactgccctctg

SEQ ID NO: 2817701 - DNA, 25 bp, Homo sapien
gagcttgaaggtagtaatgaacaca

SEQ ID NO: 2817702 - DNA, 25 bp, Homo sapien
tcagctgagcttgaaggtagtaatg

SEQ ID NO: 2817703 - DNA, 25 bp, Homo sapien
agctgagcttgaaggtagtaatgaa

SEQ ID NO: 2817704 - DNA, 25 bp, Homo sapien
gcttgaaggtagtaatgaacacatt

SEQ ID NO: 2817705 - DNA, 25 bp, Homo sapien
taatgtatccatgcaatccaaaggg

SEQ ID NO: 2817706 - DNA, 25 bp, Homo sapien
caaacgtgtgtggattagcattaca

SEQ ID NO: 2817707 - DNA, 25 bp, Homo sapien
gaagttgctacttggttcaaacgtg

SEQ ID NO: 2817708 - DNA, 25 bp, Homo sapien
tttgatgtctcacagcactggtcca

SEQ ID NO: 2817709 - DNA, 25 bp, Homo sapien
cttagctatgacgatcatgccttca

SEQ ID NO: 2817710 - DNA, 25 bp, Homo sapien
ggccgaaatgaatatctttgagttc

SEQ ID NO: 2817711 - DNA, 25 bp, Homo sapien
tctgagatcttgtaacactggccga

SEQ ID NO: 2817712 - DNA, 25 bp, Homo sapien
taatttcagacagcccttagctatg

SEQ ID NO: 2817713 - DNA, 25 bp, Homo sapien
tattatgatgaggaagcatcactct

SEQ ID NO: 2817714 - DNA, 25 bp, Homo sapien
tttgcacaccaattaagatgactgg

SEQ ID NO: 2817715 - DNA, 25 bp, Homo sapien
tagccccacagaataagttaagaag

SEQ ID NO: 2817716 - DNA, 25 bp, Homo sapien
catagtaggttacggtgtagaatcc

SEQ ID NO: 2817717 - DNA, 25 bp, Homo sapien
tccatagcttttctgtcctctatca

SEQ ID NO: 2817718 - DNA, 25 bp, Homo sapien
tatctctggtctggttattatttcc

SEQ ID NO: 2817719 - DNA, 25 bp, Homo sapien
tgttggtatgcagttattcatggtt

SEQ ID NO: 2817720 - DNA, 25 bp, Homo sapien
cagaatttctacttcttgggtcagt

SEQ ID NO: 2817721 - DNA, 25 bp, Homo sapien
gaaatatcttaatgtccccttgagt

SEQ ID NO: 2817722 - DNA, 25 bp, Homo sapien
tagctctcttctggtgtggaatatc

SEQ ID NO: 2817723 - DNA, 25 bp, Homo sapien
tagggcagatctattagtaacaaac

SEQ ID NO: 2817724 - DNA, 25 bp, Homo sapien
tgagtgcccctattctttaacagtt

SEQ ID NO: 2817725 - DNA, 25 bp, Homo sapien
atgtgatgagtcacttatcttttgc

SEQ ID NO: 2817726 - DNA, 25 bp, Homo sapien
tctctttgacattatcctccctgaa

SEQ ID NO: 2817727 - DNA, 25 bp, Homo sapien
tgtatatctctttgacattatcctc

SEQ ID NO: 2817728 - DNA, 25 bp, Homo sapien
atcctccctgaatttattgagtttc

SEQ ID NO: 2817729 - DNA, 25 bp, Homo sapien
tccatgagctggagtgttaaactgc

SEQ ID NO: 2817730 - DNA, 25 bp, Homo sapien
tactggcaagtgctagatgataaca

SEQ ID NO: 2817731 - DNA, 25 bp, Homo sapien
tactattatcgtttgtttactggca

SEQ ID NO: 2817732 - DNA, 25 bp, Homo sapien
aatatttcagggtggtatttcacaa

SEQ ID NO: 2817733 - DNA, 25 bp, Homo sapien
gacagtgagaggcaaccgcaataat

SEQ ID NO: 2817734 - DNA, 25 bp, Homo sapien
ggctgtatacctaagaagtccagga

SEQ ID NO: 2817735 - DNA, 25 bp, Homo sapien
cgcaataatagaggtgtcagaaagc

SEQ ID NO: 2817736 - DNA, 25 bp, Homo sapien
gaaagctgtttacacctgtaggctg

SEQ ID NO: 2817737 - DNA, 25 bp, Homo sapien
atattctgacttcttgatgcaattt

SEQ ID NO: 2817738 - DNA, 25 bp, Homo sapien
tattctgacttcttgatgcaatttt

SEQ ID NO: 2817739 - DNA, 25 bp, Homo sapien
tgacgactactaagatccagctgct

SEQ ID NO: 2817740 - DNA, 25 bp, Homo sapien
tggaagtctaaacaaaggtcacgcc

SEQ ID NO: 2817741 - DNA, 25 bp, Homo sapien
cagtacttgcaaaccaatgatgcgg

SEQ ID NO: 2817742 - DNA, 25 bp, Homo sapien
gaaaggcaacgctcatccagtgaca

SEQ ID NO: 2817743 - DNA, 25 bp, Homo sapien
gcccacagcacggagaaatcagttt

SEQ ID NO: 2817744 - DNA, 25 bp, Homo sapien
gacacaaacttcatgcaggacaccc

SEQ ID NO: 2817745 - DNA, 25 bp, Homo sapien
taataatagctgaaccctgaatggt

SEQ ID NO: 2817746 - DNA, 25 bp, Homo sapien
tatatataaagtctggcgcagtgcc

SEQ ID NO: 2817747 - DNA, 25 bp, Homo sapien
cctcctccgcgcttagggggaggag

SEQ ID NO: 2817748 - DNA, 25 bp, Homo sapien
cctccgcgcttagggggaggagaga

SEQ ID NO: 2817749 - DNA, 25 bp, Homo sapien
ggaaagcgagcatccctgcgcctct

SEQ ID NO: 2817750 - DNA, 25 bp, Homo sapien
gtgggggaaagcgagcatccctgcg

SEQ ID NO: 2817751 - DNA, 25 bp, Homo sapien
cagctggttgatgtctggggtttcg

SEQ ID NO: 2817752 - DNA, 25 bp, Homo sapien
gcagctggttgatgtctggggtttc

SEQ ID NO: 2817753 - DNA, 25 bp, Homo sapien
gctggttgatgtctggggtttcggg

SEQ ID NO: 2817754 - DNA, 25 bp, Homo sapien
agctggttgatgtctggggtttcgg

SEQ ID NO: 2817755 - DNA, 25 bp, Homo sapien
agtccgcgtcgccacattcatgctg

SEQ ID NO: 2817756 - DNA, 25 bp, Homo sapien
ccgacagtccgcgtcgccacattca

SEQ ID NO: 2817757 - DNA, 25 bp, Homo sapien
ggactcccgacagtccgcgtcgcca

SEQ ID NO: 2817758 - DNA, 25 bp, Homo sapien
gggactcccgacagtccgcgtcgcc

SEQ ID NO: 2817759 - DNA, 25 bp, Homo sapien
cggacagcgtccccgccagcttcgg

SEQ ID NO: 2817760 - DNA, 25 bp, Homo sapien
ctcggacagcgtccccgccagcttc

SEQ ID NO: 2817761 - DNA, 25 bp, Homo sapien
gctcggacagcgtccccgccagctt

SEQ ID NO: 2817762 - DNA, 25 bp, Homo sapien
cggctcggacagcgtccccgccagc

SEQ ID NO: 2817763 - DNA, 25 bp, Homo sapien
cttcggaggtgggagaagagggcgg

SEQ ID NO: 2817764 - DNA, 25 bp, Homo sapien
agaagagggcggagggcagagcggc

SEQ ID NO: 2817765 - DNA, 25 bp, Homo sapien
gagaagagggcggagggcagagcgg

SEQ ID NO: 2817766 - DNA, 25 bp, Homo sapien
tgggagaagagggcggagggcagag

SEQ ID NO: 2817767 - DNA, 25 bp, Homo sapien
gcagcagccggcgtcggggggccgg

SEQ ID NO: 2817768 - DNA, 25 bp, Homo sapien
ggcggcgaagcgcctccccccgcag

SEQ ID NO: 2817769 - DNA, 25 bp, Homo sapien
ctggcagcagccggcgtcggggggc

SEQ ID NO: 2817770 - DNA, 25 bp, Homo sapien
gggcggcgaagcgcctccccccgca

SEQ ID NO: 2817771 - DNA, 25 bp, Homo sapien
tgcagggggtgcaggcggggacccc

SEQ ID NO: 2817772 - DNA, 25 bp, Homo sapien
gctgcttgcagggggtgcaggcggg

SEQ ID NO: 2817773 - DNA, 25 bp, Homo sapien
tgcttgcagggggtgcaggcgggga

SEQ ID NO: 2817774 - DNA, 25 bp, Homo sapien
cttgcagggggtgcaggcggggacc

SEQ ID NO: 2817775 - DNA, 25 bp, Homo sapien
gggcgtagggagctcggccggtgac

SEQ ID NO: 2817776 - DNA, 25 bp, Homo sapien
gtgtcggcccccggaagagctgcac

SEQ ID NO: 2817777 - DNA, 25 bp, Homo sapien
ggagctcggccggtgacggtgtcgg

SEQ ID NO: 2817778 - DNA, 25 bp, Homo sapien
catttcggggggcgtagggagctcg

SEQ ID NO: 2817779 - DNA, 25 bp, Homo sapien
aggaagagacttcggccctgctgct

SEQ ID NO: 2817780 - DNA, 25 bp, Homo sapien
caggaagagacttcggccctgctgc

SEQ ID NO: 2817781 - DNA, 25 bp, Homo sapien
gaagagacttcggccctgctgctcc

SEQ ID NO: 2817782 - DNA, 25 bp, Homo sapien
ggccaggaagagacttcggccctgc

SEQ ID NO: 2817783 - DNA, 25 bp, Homo sapien
gcggcggccgaggatagcaggaagc

SEQ ID NO: 2817784 - DNA, 25 bp, Homo sapien
aggcggcagcgtaggccccgtcccg

SEQ ID NO: 2817785 - DNA, 25 bp, Homo sapien
agcagcggcgcagtcctcggcggcc

SEQ ID NO: 2817786 - DNA, 25 bp, Homo sapien
aggaggcgggcgacgaagccgaggc

SEQ ID NO: 2817787 - DNA, 25 bp, Homo sapien
cgcggaagaagcagtcccggctccg

SEQ ID NO: 2817788 - DNA, 25 bp, Homo sapien
gcccgcggaagaagcagtcccggct

SEQ ID NO: 2817789 - DNA, 25 bp, Homo sapien
agagcatgcagggcccgcggaagaa

SEQ ID NO: 2817790 - DNA, 25 bp, Homo sapien
atgcagggcccgcggaagaagcagt

SEQ ID NO: 2817791 - DNA, 25 bp, Homo sapien
gcagcctgaggagagggcgccggcg

SEQ ID NO: 2817792 - DNA, 25 bp, Homo sapien
gcctcttctggctcgggcggttacg

SEQ ID NO: 2817793 - DNA, 25 bp, Homo sapien
ggcggcaccaactgcaacagcgagg

SEQ ID NO: 2817794 - DNA, 25 bp, Homo sapien
aactgcaacagcgaggcctcttctg

SEQ ID NO: 2817795 - DNA, 25 bp, Homo sapien
ggagacccagagaggcgggctcccg

SEQ ID NO: 2817796 - DNA, 25 bp, Homo sapien
agcggggcaggccgctcgctggctc

SEQ ID NO: 2817797 - DNA, 25 bp, Homo sapien
gggagacccagagaggcgggctccc

SEQ ID NO: 2817798 - DNA, 25 bp, Homo sapien
gcaggccgctcgctggctcggcccc

SEQ ID NO: 2817799 - DNA, 25 bp, Homo sapien
cacacacgcgacggtggggggtggg

SEQ ID NO: 2817800 - DNA, 25 bp, Homo sapien
cacacgcgacggtggggggtgggcg

SEQ ID NO: 2817801 - DNA, 25 bp, Homo sapien
ggcacacacgcgacggtggggggtg

SEQ ID NO: 2817802 - DNA, 25 bp, Homo sapien
acgggcacacacgcgacggtggggg

SEQ ID NO: 2817803 - DNA, 25 bp, Homo sapien
ctgcgggccgccggagtgcccgacg

SEQ ID NO: 2817804 - DNA, 25 bp, Homo sapien
cgggagaacgatgggcgcgagcttt

SEQ ID NO: 2817805 - DNA, 25 bp, Homo sapien
gagcctgccggctaggcgaccagtc

SEQ ID NO: 2817806 - DNA, 25 bp, Homo sapien
agccggctcagtcagtcagcggagc

SEQ ID NO: 2817807 - DNA, 25 bp, Homo sapien
gtcccgctcggaccattttaactgc

SEQ ID NO: 2817808 - DNA, 25 bp, Homo sapien
agcgcgcggcccgttccggcagggg

SEQ ID NO: 2817809 - DNA, 25 bp, Homo sapien
gccagttgcggtggcgcgctcgtgg

SEQ ID NO: 2817810 - DNA, 25 bp, Homo sapien
cgcgactctgctcggagccgcagga

SEQ ID NO: 2817811 - DNA, 25 bp, Homo sapien
gcacccggctgctcacccgggacgg

SEQ ID NO: 2817812 - DNA, 25 bp, Homo sapien
gaggtgtaagttcaagagctgccat

SEQ ID NO: 2817813 - DNA, 25 bp, Homo sapien
tcgaggtgtaagttcaagagctgcc

SEQ ID NO: 2817814 - DNA, 25 bp, Homo sapien
gtctcgaggtgtaagttcaagagct

SEQ ID NO: 2817815 - DNA, 25 bp, Homo sapien
tctcgaggtgtaagttcaagagctg

SEQ ID NO: 2817816 - DNA, 25 bp, Homo sapien
ctgtcaccacccctgactcggaaac

SEQ ID NO: 2817817 - DNA, 25 bp, Homo sapien
ccagtgtgggcgctgaccgcgcttc

SEQ ID NO: 2817818 - DNA, 25 bp, Homo sapien
cgaggccacttcgaagccgcgaggc

SEQ ID NO: 2817819 - DNA, 25 bp, Homo sapien
ctgaccgcgcttcgggcagagtggc

SEQ ID NO: 2817820 - DNA, 25 bp, Homo sapien
ggttgattggttgtgcggcaccact

SEQ ID NO: 2817821 - DNA, 25 bp, Homo sapien
gcggcaccactgtttacccacttgt

SEQ ID NO: 2817822 - DNA, 25 bp, Homo sapien
tgatgcgcaccgaagtcatgtgagg

SEQ ID NO: 2817823 - DNA, 25 bp, Homo sapien
ttcttaattgttgcgtactactgcc

SEQ ID NO: 2817824 - DNA, 25 bp, Homo sapien
ctggtgcggagaggttagctttcac

SEQ ID NO: 2817825 - DNA, 25 bp, Homo sapien
ggtgcggagaggttagctttcacaa

SEQ ID NO: 2817826 - DNA, 25 bp, Homo sapien
gcgaaaaattagaggaggcaaatac

SEQ ID NO: 2817827 - DNA, 25 bp, Homo sapien
ttagctttcacaagcgaaaaattag

SEQ ID NO: 2817828 - DNA, 25 bp, Homo sapien
ttccaccttcagttacttctcccac

SEQ ID NO: 2817829 - DNA, 25 bp, Homo sapien
ccaccttcagttacttctcccacta

SEQ ID NO: 2817830 - DNA, 25 bp, Homo sapien
caccttcagttacttctcccactac

SEQ ID NO: 2817831 - DNA, 25 bp, Homo sapien
tccaccttcagttacttctcccact

SEQ ID NO: 2817832 - DNA, 25 bp, Homo sapien
gtggaccctggaccagcaacttgga

SEQ ID NO: 2817833 - DNA, 25 bp, Homo sapien
gaaaagtgtccttgcagtcattgct

SEQ ID NO: 2817834 - DNA, 25 bp, Homo sapien
caacttggaagtacagctagtgcct

SEQ ID NO: 2817835 - DNA, 25 bp, Homo sapien
acagctagtgcctgccatgttgtga

SEQ ID NO: 2817836 - DNA, 25 bp, Homo sapien
ggcagtattattcgttctgaatgct

SEQ ID NO: 2817837 - DNA, 25 bp, Homo sapien
tcctcccatccctatagggttcaaa

SEQ ID NO: 2817838 - DNA, 25 bp, Homo sapien
tctcttccagagttgcactcatcct

SEQ ID NO: 2817839 - DNA, 25 bp, Homo sapien
ggttcaaatatactcggctgaggca

SEQ ID NO: 2817840 - DNA, 25 bp, Homo sapien
tactatcatctgagacttgtggccc

SEQ ID NO: 2817841 - DNA, 25 bp, Homo sapien
tcatgcacagcagaagaacctcaca

SEQ ID NO: 2817842 - DNA, 25 bp, Homo sapien
ctttcccttcatgcacagcagaaga

SEQ ID NO: 2817843 - DNA, 25 bp, Homo sapien
tcatctgagacttgtggccccttct

SEQ ID NO: 2817844 - DNA, 25 bp, Homo sapien
cctccgtaaattggcagttgaggta

SEQ ID NO: 2817845 - DNA, 25 bp, Homo sapien
ttggcagttgaggtaagcactttcc

SEQ ID NO: 2817846 - DNA, 25 bp, Homo sapien
tccacagagatcctccgtaaattgg

SEQ ID NO: 2817847 - DNA, 25 bp, Homo sapien
taccatccacagagatcctccgtaa

SEQ ID NO: 2817848 - DNA, 25 bp, Homo sapien
ctacagtcaatataaaaacaggcat

SEQ ID NO: 2817849 - DNA, 25 bp, Homo sapien
ttgcccaaatagccacatcatctct

SEQ ID NO: 2817850 - DNA, 25 bp, Homo sapien
tttgcccaaatagccacatcatctc

SEQ ID NO: 2817851 - DNA, 25 bp, Homo sapien
aatactgtacctctgagaagtagag

SEQ ID NO: 2817852 - DNA, 25 bp, Homo sapien
gatggccccaagataaagctgcatt

SEQ ID NO: 2817853 - DNA, 25 bp, Homo sapien
ttactccagtgtgacataagtaggg

SEQ ID NO: 2817854 - DNA, 25 bp, Homo sapien
tcagcatggtgtgattcaaaacgac

SEQ ID NO: 2817855 - DNA, 25 bp, Homo sapien
tgattcttccgttttcataggattt

SEQ ID NO: 2817856 - DNA, 25 bp, Homo sapien
tctgattcttccgttttcataggat

SEQ ID NO: 2817857 - DNA, 25 bp, Homo sapien
ctgattcttccgttttcataggatt

SEQ ID NO: 2817858 - DNA, 25 bp, Homo sapien
ctcattggttctttagcatcatcag

SEQ ID NO: 2817859 - DNA, 25 bp, Homo sapien
ttttctcattggttctttagcatca

SEQ ID NO: 2817860 - DNA, 25 bp, Homo sapien
ttctcattggttctttagcatcatc

SEQ ID NO: 2817861 - DNA, 25 bp, Homo sapien
tctcattggttctttagcatcatca

SEQ ID NO: 2817862 - DNA, 25 bp, Homo sapien
actctgctgaagatgcctcagcata

SEQ ID NO: 2817863 - DNA, 25 bp, Homo sapien
tctgctgaagatgcctcagcatact

SEQ ID NO: 2817864 - DNA, 25 bp, Homo sapien
ttactctgctgaagatgcctcagca

SEQ ID NO: 2817865 - DNA, 25 bp, Homo sapien
tgctgaagatgcctcagcatactga

SEQ ID NO: 2817866 - DNA, 25 bp, Homo sapien
ttccacatgccttttcgggtacttc

SEQ ID NO: 2817867 - DNA, 25 bp, Homo sapien
tgccttttcgggtacttctctgctt

SEQ ID NO: 2817868 - DNA, 25 bp, Homo sapien
cacatgccttttcgggtacttctct

SEQ ID NO: 2817869 - DNA, 25 bp, Homo sapien
atgccttttcgggtacttctctgct

SEQ ID NO: 2817870 - DNA, 25 bp, Homo sapien
tagactggggctacttgccgttctc

SEQ ID NO: 2817871 - DNA, 25 bp, Homo sapien
gactggggctacttgccgttctcat

SEQ ID NO: 2817872 - DNA, 25 bp, Homo sapien
agtagactggggctacttgccgttc

SEQ ID NO: 2817873 - DNA, 25 bp, Homo sapien
gacctgttgattccagtagactggg

SEQ ID NO: 2817874 - DNA, 25 bp, Homo sapien
cacggtttagatggttgttgatctc

SEQ ID NO: 2817875 - DNA, 25 bp, Homo sapien
catgtgagaaacgtgtacaaataaa

SEQ ID NO: 2817876 - DNA, 25 bp, Homo sapien
tccaggctcatgtgagaaacgtgta

SEQ ID NO: 2817877 - DNA, 25 bp, Homo sapien
ggtttagatggttgttgatctccct

SEQ ID NO: 2817878 - DNA, 25 bp, Homo sapien
tgctgctgatatatctggtcacacc

SEQ ID NO: 2817879 - DNA, 25 bp, Homo sapien
gtttggcggcttgaacagaaatata

SEQ ID NO: 2817880 - DNA, 25 bp, Homo sapien
tgccagagcctctagtgacaaggtc

SEQ ID NO: 2817881 - DNA, 25 bp, Homo sapien
tcactgggctgtttagatattggcc

SEQ ID NO: 2817882 - DNA, 25 bp, Homo sapien
catactgcccactagagtaggccag

SEQ ID NO: 2817883 - DNA, 25 bp, Homo sapien
tggccatatgtactaacagaaagac

SEQ ID NO: 2817884 - DNA, 25 bp, Homo sapien
ctgtgtacatactgcccactagagt

SEQ ID NO: 2817885 - DNA, 25 bp, Homo sapien
agtaggccagttggccatatgtact

SEQ ID NO: 2817886 - DNA, 25 bp, Homo sapien
ggtcatggctactgtcaacttctct

SEQ ID NO: 2817887 - DNA, 25 bp, Homo sapien
tattatggcctgtgcatcttcactt

SEQ ID NO: 2817888 - DNA, 25 bp, Homo sapien
tttggaggtcatggctactgtcaac

SEQ ID NO: 2817889 - DNA, 25 bp, Homo sapien
tcatctgtaccgctgttctgtatta

SEQ ID NO: 2817890 - DNA, 25 bp, Homo sapien
taaccagaccaaccatgagtccgct

SEQ ID NO: 2817891 - DNA, 25 bp, Homo sapien
cacaacaaagttagagtctgtcagc

SEQ ID NO: 2817892 - DNA, 25 bp, Homo sapien
tcagcccacagcaggtagcgaagat

SEQ ID NO: 2817893 - DNA, 25 bp, Homo sapien
tttgattgccacattgcagctgtat

SEQ ID NO: 2817894 - DNA, 25 bp, Homo sapien
gttgaagacccctgagtcttgacac

SEQ ID NO: 2817895 - DNA, 25 bp, Homo sapien
gcaaagagggagtagaagttttgat

SEQ ID NO: 2817896 - DNA, 25 bp, Homo sapien
caaagagggagtagaagttttgata

SEQ ID NO: 2817897 - DNA, 25 bp, Homo sapien
gcttctatcagactctcaccacttg

SEQ ID NO: 2817898 - DNA, 25 bp, Homo sapien
tctatcctacctctaaccctttggc

SEQ ID NO: 2817899 - DNA, 25 bp, Homo sapien
tgtctctgcaccttcaacttctatc

SEQ ID NO: 2817900 - DNA, 25 bp, Homo sapien
ctacctctaaccctttggccttgat

SEQ ID NO: 2817901 - DNA, 25 bp, Homo sapien
tccagggtgtgtgcgtaaggtgggt

SEQ ID NO: 2817902 - DNA, 25 bp, Homo sapien
ctcctctgaagaatgacctgttcct

SEQ ID NO: 2817903 - DNA, 25 bp, Homo sapien
ggtgggtggtaacattgtcccagta

SEQ ID NO: 2817904 - DNA, 25 bp, Homo sapien
tacaaccaggtctctaaattccagg

SEQ ID NO: 2817905 - DNA, 25 bp, Homo sapien
tctttaaatcaatacaaggcctaaa

SEQ ID NO: 2817906 - DNA, 25 bp, Homo sapien
ttaaatcaatacaaggcctaaaatg

SEQ ID NO: 2817907 - DNA, 25 bp, Homo sapien
ttctttaaatcaatacaaggcctaa

SEQ ID NO: 2817908 - DNA, 25 bp, Homo sapien
tggacttgttcagttgctactggga

SEQ ID NO: 2817909 - DNA, 25 bp, Homo sapien
ggacttgttcagttgctactgggat

SEQ ID NO: 2817910 - DNA, 25 bp, Homo sapien
gtggacttgttcagttgctactggg

SEQ ID NO: 2817911 - DNA, 25 bp, Homo sapien
gacttgttcagttgctactgggatg

SEQ ID NO: 2817912 - DNA, 25 bp, Homo sapien
gtttgcaaagcccattctgggtctg

SEQ ID NO: 2817913 - DNA, 25 bp, Homo sapien
ggtaataggcatccgttgtttgcaa

SEQ ID NO: 2817914 - DNA, 25 bp, Homo sapien
ggcatccgttgtttgcaaagcccat

SEQ ID NO: 2817915 - DNA, 25 bp, Homo sapien
ttagatgcttcaaggtaataggcat

SEQ ID NO: 2817916 - DNA, 25 bp, Homo sapien
ttctacttctccctgtttgggccat

SEQ ID NO: 2817917 - DNA, 25 bp, Homo sapien
tacttgaatctaccaccttcattct

SEQ ID NO: 2817918 - DNA, 25 bp, Homo sapien
ttcctacttgaatctaccaccttca

SEQ ID NO: 2817919 - DNA, 25 bp, Homo sapien
tttctacttctccctgtttgggcca

SEQ ID NO: 2817920 - DNA, 25 bp, Homo sapien
aatggcccttgagtcaggtgggctt

SEQ ID NO: 2817921 - DNA, 25 bp, Homo sapien
caagactttagatgcccgggaaaat

SEQ ID NO: 2817922 - DNA, 25 bp, Homo sapien
gggcaagactttagatgcccgggaa

SEQ ID NO: 2817923 - DNA, 25 bp, Homo sapien
caggtgggctttatcgtaaaaatca

SEQ ID NO: 2817924 - DNA, 25 bp, Homo sapien
ctgtgggccacaccccttcttgttc

SEQ ID NO: 2817925 - DNA, 25 bp, Homo sapien
tgtgggccacaccccttcttgttct

SEQ ID NO: 2817926 - DNA, 25 bp, Homo sapien
tgggccacaccccttcttgttctgt

SEQ ID NO: 2817927 - DNA, 25 bp, Homo sapien
ggccacaccccttcttgttctgtcc

SEQ ID NO: 2817928 - DNA, 25 bp, Homo sapien
tggaggccataagtctgagatgaac

SEQ ID NO: 2817929 - DNA, 25 bp, Homo sapien
agcactcccgctagaagatctaggg

SEQ ID NO: 2817930 - DNA, 25 bp, Homo sapien
gatgatcgacagcatcctcagtctg

SEQ ID NO: 2817931 - DNA, 25 bp, Homo sapien
agatgaacgtgtggacagggccaca

SEQ ID NO: 2817932 - DNA, 25 bp, Homo sapien
tggacaatttaacctaccttggaga

SEQ ID NO: 2817933 - DNA, 25 bp, Homo sapien
tgtgtcgctttatgaagagactggt

SEQ ID NO: 2817934 - DNA, 25 bp, Homo sapien
ggttaatctgaatgtcgaactaccg

SEQ ID NO: 2817935 - DNA, 25 bp, Homo sapien
tgtttattaaggactgccattctaa

SEQ ID NO: 2817936 - DNA, 25 bp, Homo sapien
gattccatcatatggtctcttcagc

SEQ ID NO: 2817937 - DNA, 25 bp, Homo sapien
aggtgcttctgagaactctcaggat

SEQ ID NO: 2817938 - DNA, 25 bp, Homo sapien
tgagaactctcaggattccatcata

SEQ ID NO: 2817939 - DNA, 25 bp, Homo sapien
ctctcaggattccatcatatggtct

SEQ ID NO: 2817940 - DNA, 25 bp, Homo sapien
acacacatatcactgcaatagaaaa

SEQ ID NO: 2817941 - DNA, 25 bp, Homo sapien
tcttctgagataattgtcttgctgg

SEQ ID NO: 2817942 - DNA, 25 bp, Homo sapien
ggtaaatgcggaaataatacttcac

SEQ ID NO: 2817943 - DNA, 25 bp, Homo sapien
gaaagagcagggtttgaacactagt

SEQ ID NO: 2817944 - DNA, 25 bp, Homo sapien
ccaggcattgagctaagtaaaagaa

SEQ ID NO: 2817945 - DNA, 25 bp, Homo sapien
aagactggataagttagcctcccac

SEQ ID NO: 2817946 - DNA, 25 bp, Homo sapien
taagtggagaatgacacaaacaaca

SEQ ID NO: 2817947 - DNA, 25 bp, Homo sapien
gggatcgctaggcattttcaaagac

SEQ ID NO: 2817948 - DNA, 25 bp, Homo sapien
ttcccgaggcctgaaacacgagtct

SEQ ID NO: 2817949 - DNA, 25 bp, Homo sapien
aaggcattgagtggcgttctactac

SEQ ID NO: 2817950 - DNA, 25 bp, Homo sapien
taataatggaaggactattcggacc

SEQ ID NO: 2817951 - DNA, 25 bp, Homo sapien
tcagcataaggactcaacccggaag

SEQ ID NO: 2817952 - DNA, 25 bp, Homo sapien
ctcaaatgtcttcacaaggtcggtg

SEQ ID NO: 2817953 - DNA, 25 bp, Homo sapien
gacaggaaagtcactgagtagcaaa

SEQ ID NO: 2817954 - DNA, 25 bp, Homo sapien
cagcaccttgcagtattgacaggaa

SEQ ID NO: 2817955 - DNA, 25 bp, Homo sapien
tgttaatattgccaggcccacagga

SEQ ID NO: 2817956 - DNA, 25 bp, Homo sapien
ttccgcctgaggacagtactcgggc

SEQ ID NO: 2817957 - DNA, 25 bp, Homo sapien
gccggaccagcgaaaaagctccatg

SEQ ID NO: 2817958 - DNA, 25 bp, Homo sapien
caactgctgtctagaaaaccgagga

SEQ ID NO: 2817959 - DNA, 25 bp, Homo sapien
ctttccgccgtcagaaggaggctcc

SEQ ID NO: 2817960 - DNA, 25 bp, Homo sapien
agaagtttactcacagaaccacagt

SEQ ID NO: 2817961 - DNA, 25 bp, Homo sapien
catgaagcagtctccaaagttgtat

SEQ ID NO: 2817962 - DNA, 25 bp, Homo sapien
ggaaaggtattcagtcatgaagcag

SEQ ID NO: 2817963 - DNA, 25 bp, Homo sapien
ccaacattctgggtataggcattgt

SEQ ID NO: 2817964 - DNA, 25 bp, Homo sapien
gatgctactccgttgatatgtgcag

SEQ ID NO: 2817965 - DNA, 25 bp, Homo sapien
ggaaggtagttttgcaacacggagc

SEQ ID NO: 2817966 - DNA, 25 bp, Homo sapien
gcaagttgctcaccgaagttacgct

SEQ ID NO: 2817967 - DNA, 25 bp, Homo sapien
gaaagggacgggaaatctcatcctc

SEQ ID NO: 2817968 - DNA, 25 bp, Homo sapien
gaaataccggattgacgctatgtgg

SEQ ID NO: 2817969 - DNA, 25 bp, Homo sapien
cactgaagagcagacccgtttgggt

SEQ ID NO: 2817970 - DNA, 25 bp, Homo sapien
caggattgaaagacagttcccgtcc

SEQ ID NO: 2817971 - DNA, 25 bp, Homo sapien
gcattctagactcccgaagaggtaa

SEQ ID NO: 2817972 - DNA, 25 bp, Homo sapien
tccgggcacacttaacattttaatc

SEQ ID NO: 2817973 - DNA, 25 bp, Homo sapien
cacttaacattttaatcacgcctcc

SEQ ID NO: 2817974 - DNA, 25 bp, Homo sapien
ctccgggcacacttaacattttaat

SEQ ID NO: 2817975 - DNA, 25 bp, Homo sapien
gcacacttaacattttaatcacgcc

SEQ ID NO: 2817976 - DNA, 25 bp, Homo sapien
atctcaccacggcagcccaggacac

SEQ ID NO: 2817977 - DNA, 25 bp, Homo sapien
tcctgtgaggccttcgtccgtctcc

SEQ ID NO: 2817978 - DNA, 25 bp, Homo sapien
gcggcctcagcttatcatcgccggt

SEQ ID NO: 2817979 - DNA, 25 bp, Homo sapien
gccgagtagtcccttccaggcggcc

SEQ ID NO: 2817980 - DNA, 25 bp, Homo sapien
ttctaggtaggtgcgtttcgcgccg

SEQ ID NO: 2817981 - DNA, 25 bp, Homo sapien
gttcgtgacagtggcgcctattggc

SEQ ID NO: 2817982 - DNA, 25 bp, Homo sapien
ttcgggcttgtcaggttctaggtag

SEQ ID NO: 2817983 - DNA, 25 bp, Homo sapien
gcagcttgggctaagcgtgcgccca

SEQ ID NO: 2817984 - DNA, 25 bp, Homo sapien
ggctgcagggtcatccgctcatcct

SEQ ID NO: 2817985 - DNA, 25 bp, Homo sapien
gggctgtgccgaggctcttcctccg

SEQ ID NO: 2817986 - DNA, 25 bp, Homo sapien
cgcccgggattcggccagggcgttg

SEQ ID NO: 2817987 - DNA, 25 bp, Homo sapien
gggcaacaatgcctgcccgcagagg

SEQ ID NO: 2817988 - DNA, 25 bp, Homo sapien
ccacgagggccgcccctcccaccat

SEQ ID NO: 2817989 - DNA, 25 bp, Homo sapien
tcctccggtcttggccagaggtgtc

SEQ ID NO: 2817990 - DNA, 25 bp, Homo sapien
caagagatagatcttaagtgtgaag

SEQ ID NO: 2817991 - DNA, 25 bp, Homo sapien
taagtgtgaagctagtggtgtcgtc

SEQ ID NO: 2817992 - DNA, 25 bp, Homo sapien
ggtgtcgtcggtaatttctgctctg

SEQ ID NO: 2817993 - DNA, 25 bp, Homo sapien
tttcccaagcttccgtggattgatg

SEQ ID NO: 2817994 - DNA, 25 bp, Homo sapien
ccttggtcgctgtaatgcttttctg

SEQ ID NO: 2817995 - DNA, 25 bp, Homo sapien
cacaaagcttgctgcgttgtcacaa

SEQ ID NO: 2817996 - DNA, 25 bp, Homo sapien
tctccttggagttgaacacttctgt

SEQ ID NO: 2817997 - DNA, 25 bp, Homo sapien
tgtttcagtatagaagtgtgtgatg

SEQ ID NO: 2817998 - DNA, 25 bp, Homo sapien
atccagtcactatcgcatttcctga

SEQ ID NO: 2817999 - DNA, 25 bp, Homo sapien
agtcactatcgcatttcctgaccat

SEQ ID NO: 2818000 - DNA, 25 bp, Homo sapien
ttgtttcagtatagaagtgtgtgat

SEQ ID NO: 2818001 - DNA, 25 bp, Homo sapien
cactgccaaagaatcgcatttaaga

SEQ ID NO: 2818002 - DNA, 25 bp, Homo sapien
aatttagaaaattggccatatgcgg

SEQ ID NO: 2818003 - DNA, 25 bp, Homo sapien
gccaaagaatcgcatttaagaattt

SEQ ID NO: 2818004 - DNA, 25 bp, Homo sapien
aattggccatatgcggtagctgacg

SEQ ID NO: 2818005 - DNA, 25 bp, Homo sapien
tgttgtaatagtctaagccagaggt

SEQ ID NO: 2818006 - DNA, 25 bp, Homo sapien
cagaggtaatcataaccttcaaagg

SEQ ID NO: 2818007 - DNA, 25 bp, Homo sapien
gaatctgaaagacttgctgatgcat

SEQ ID NO: 2818008 - DNA, 25 bp, Homo sapien
ggatttgtgattgactttggagaca

SEQ ID NO: 2818009 - DNA, 25 bp, Homo sapien
ttgagcctaggagtacgaagttata

SEQ ID NO: 2818010 - DNA, 25 bp, Homo sapien
actttctgtaatcaatataggctat

SEQ ID NO: 2818011 - DNA, 25 bp, Homo sapien
caatataggctattttagcccagta

SEQ ID NO: 2818012 - DNA, 25 bp, Homo sapien
cctaggagtacgaagttatatgcca

SEQ ID NO: 2818013 - DNA, 25 bp, Homo sapien
tgctgcaagggttccttccttgctg

SEQ ID NO: 2818014 - DNA, 25 bp, Homo sapien
tttctgctgcaagggttccttcctt

SEQ ID NO: 2818015 - DNA, 25 bp, Homo sapien
actgtttctgctgcaagggttcctt

SEQ ID NO: 2818016 - DNA, 25 bp, Homo sapien
tgtttctgctgcaagggttccttcc

SEQ ID NO: 2818017 - DNA, 25 bp, Homo sapien
ctcgtctgctggcaactgcatgtat

SEQ ID NO: 2818018 - DNA, 25 bp, Homo sapien
tggcaactgcatgtatcggaccact

SEQ ID NO: 2818019 - DNA, 25 bp, Homo sapien
tgcatgtatcggaccactgagccct

SEQ ID NO: 2818020 - DNA, 25 bp, Homo sapien
gtatcggaccactgagccctgaatg

SEQ ID NO: 2818021 - DNA, 25 bp, Homo sapien
acagaatggagggttccacagatgc

SEQ ID NO: 2818022 - DNA, 25 bp, Homo sapien
gttgagataccgatccacagaatgg

SEQ ID NO: 2818023 - DNA, 25 bp, Homo sapien
ctgataacatgtgaggatatttctc

SEQ ID NO: 2818024 - DNA, 25 bp, Homo sapien
gagtctatgacactgatattagtta

SEQ ID NO: 2818025 - DNA, 25 bp, Homo sapien
tggaagctttaagtacataatgggt

SEQ ID NO: 2818026 - DNA, 25 bp, Homo sapien
taagtacataatgggtgcagtcttt

SEQ ID NO: 2818027 - DNA, 25 bp, Homo sapien
tacataatgggtgcagtcttttcca

SEQ ID NO: 2818028 - DNA, 25 bp, Homo sapien
ctttaagtacataatgggtgcagtc

SEQ ID NO: 2818029 - DNA, 25 bp, Homo sapien
gagcagtatacgctgtacccagtgt

SEQ ID NO: 2818030 - DNA, 25 bp, Homo sapien
tagtcttatatccctgattccctcc

SEQ ID NO: 2818031 - DNA, 25 bp, Homo sapien
tgtagtcttatatccctgattccct

SEQ ID NO: 2818032 - DNA, 25 bp, Homo sapien
gtagtcttatatccctgattccctc

SEQ ID NO: 2818033 - DNA, 25 bp, Homo sapien
gaaagccctttactataactgtcta

SEQ ID NO: 2818034 - DNA, 25 bp, Homo sapien
aatttgcttcaatgtgggattatgg

SEQ ID NO: 2818035 - DNA, 25 bp, Homo sapien
tacagctgatttggggcattaactc

SEQ ID NO: 2818036 - DNA, 25 bp, Homo sapien
tgtctaatttcactacatagcacac

SEQ ID NO: 2818037 - DNA, 25 bp, Homo sapien
agccctcagtccttgatcaaagtaa

SEQ ID NO: 2818038 - DNA, 25 bp, Homo sapien
cagtccttgatcaaagtaaccatct

SEQ ID NO: 2818039 - DNA, 25 bp, Homo sapien
ggtgctccgcacttagttctttcct

SEQ ID NO: 2818040 - DNA, 25 bp, Homo sapien
attcgccgcactctttggtgctccg

SEQ ID NO: 2818041 - DNA, 25 bp, Homo sapien
agtatatgtgctgctgaagcgagca

SEQ ID NO: 2818042 - DNA, 25 bp, Homo sapien
atcttccctgtatcgttccaatttt

SEQ ID NO: 2818043 - DNA, 25 bp, Homo sapien
tcatccttgcgcaggggccatgcta

SEQ ID NO: 2818044 - DNA, 25 bp, Homo sapien
atatggaatgcttaatgaatttgcg

SEQ ID NO: 2818045 - DNA, 25 bp, Homo sapien
ttcccctccatactccgaagaatgt

SEQ ID NO: 2818046 - DNA, 25 bp, Homo sapien
ttagttttgaatgagttgctgtcat

SEQ ID NO: 2818047 - DNA, 25 bp, Homo sapien
tgctgtcattcagaaattggctttt

SEQ ID NO: 2818048 - DNA, 25 bp, Homo sapien
tgtctttaatgtttgaaccactatg

SEQ ID NO: 2818049 - DNA, 25 bp, Homo sapien
tcctgaatgggggtgattatttgca

SEQ ID NO: 2818050 - DNA, 25 bp, Homo sapien
ctttggatgctcctgaatgggggtg

SEQ ID NO: 2818051 - DNA, 25 bp, Homo sapien
gctttggatgctcctgaatgggggt

SEQ ID NO: 2818052 - DNA, 25 bp, Homo sapien
gatgctcctgaatgggggtgattat

SEQ ID NO: 2818053 - DNA, 25 bp, Homo sapien
gtctctgatgatatcagaccagctt

SEQ ID NO: 2818054 - DNA, 25 bp, Homo sapien
tctgatgatatcagaccagctttct

SEQ ID NO: 2818055 - DNA, 25 bp, Homo sapien
ctgatgatatcagaccagctttctc

SEQ ID NO: 2818056 - DNA, 25 bp, Homo sapien
tctctgatgatatcagaccagcttt

SEQ ID NO: 2818057 - DNA, 25 bp, Homo sapien
tcaggttccaacagcccaacaaaat

SEQ ID NO: 2818058 - DNA, 25 bp, Homo sapien
ctgtgtattccttgaagcctggaca

SEQ ID NO: 2818059 - DNA, 25 bp, Homo sapien
aacagcccaacaaaatgacaccact

SEQ ID NO: 2818060 - DNA, 25 bp, Homo sapien
cctggacaaggttcactccttgcat

SEQ ID NO: 2818061 - DNA, 25 bp, Homo sapien
tgccaagcccatctgatagagaccc

SEQ ID NO: 2818062 - DNA, 25 bp, Homo sapien
ttttttctggtagccactggggaca

SEQ ID NO: 2818063 - DNA, 25 bp, Homo sapien
gcccatctgatagagaccccttctt

SEQ ID NO: 2818064 - DNA, 25 bp, Homo sapien
caagcccatctgatagagacccctt

SEQ ID NO: 2818065 - DNA, 25 bp, Homo sapien
gaatttcaaatatgtccctgtgccc

SEQ ID NO: 2818066 - DNA, 25 bp, Homo sapien
tacttgagatcgaatttcaaatatg

SEQ ID NO: 2818067 - DNA, 25 bp, Homo sapien
tgagatcgaatttcaaatatgtccc

SEQ ID NO: 2818068 - DNA, 25 bp, Homo sapien
gatcgaatttcaaatatgtccctgt

SEQ ID NO: 2818069 - DNA, 25 bp, Homo sapien
ccccttctctaccagcgtagttaat

SEQ ID NO: 2818070 - DNA, 25 bp, Homo sapien
atactgagtcccataggagtggtgg

SEQ ID NO: 2818071 - DNA, 25 bp, Homo sapien
gagtggtggcttctgtgggctatgc

SEQ ID NO: 2818072 - DNA, 25 bp, Homo sapien
tgtgggctatgccagagagactgct

SEQ ID NO: 2818073 - DNA, 25 bp, Homo sapien
tctccagaacacatgatctgatgga

SEQ ID NO: 2818074 - DNA, 25 bp, Homo sapien
gaataaagaacactctccagaacac

SEQ ID NO: 2818075 - DNA, 25 bp, Homo sapien
taacatggaatgtcaaacaaattag

SEQ ID NO: 2818076 - DNA, 25 bp, Homo sapien
attgaataaagaacactctccagaa

SEQ ID NO: 2818077 - DNA, 25 bp, Homo sapien
tatatgtataatgctgagattttca

SEQ ID NO: 2818078 - DNA, 25 bp, Homo sapien
tatgtataatgctgagattttcaaa

SEQ ID NO: 2818079 - DNA, 25 bp, Homo sapien
tataatgctgagattttcaaatgca

SEQ ID NO: 2818080 - DNA, 25 bp, Homo sapien
tgtataatgctgagattttcaaatg

SEQ ID NO: 2818081 - DNA, 25 bp, Homo sapien
acaagtgagaggaatcttgatactt

SEQ ID NO: 2818082 - DNA, 25 bp, Homo sapien
caagtgagaggaatcttgatacttt

SEQ ID NO: 2818083 - DNA, 25 bp, Homo sapien
cagcgggccagtggtcgcatggtaa

SEQ ID NO: 2818084 - DNA, 25 bp, Homo sapien
ggctcagcgggccagtggtcgcatg

SEQ ID NO: 2818085 - DNA, 25 bp, Homo sapien
caggctgactcaaccactgtcttca

SEQ ID NO: 2818086 - DNA, 25 bp, Homo sapien
tttcacagcagtagtagtcgcccat

SEQ ID NO: 2818087 - DNA, 25 bp, Homo sapien
atttggttagtggtcagagcattga

SEQ ID NO: 2818088 - DNA, 25 bp, Homo sapien
ttggttagtggtcagagcattgatg

SEQ ID NO: 2818089 - DNA, 25 bp, Homo sapien
gaatttggttagtggtcagagcatt

SEQ ID NO: 2818090 - DNA, 25 bp, Homo sapien
aatttggttagtggtcagagcattg

SEQ ID NO: 2818091 - DNA, 25 bp, Homo sapien
ggtaactccagattggtgctctgaa

SEQ ID NO: 2818092 - DNA, 25 bp, Homo sapien
cacaagggacgatgtttattgggag

SEQ ID NO: 2818093 - DNA, 25 bp, Homo sapien
cttatggtgccatattagaccatat

SEQ ID NO: 2818094 - DNA, 25 bp, Homo sapien
ctgggaagcaattgaaggcttgttt

SEQ ID NO: 2818095 - DNA, 25 bp, Homo sapien
agttctctcctaatcctgaccccat

SEQ ID NO: 2818096 - DNA, 25 bp, Homo sapien
ctgtcagacatcatagccaagccaa

SEQ ID NO: 2818097 - DNA, 25 bp, Homo sapien
ccctgcttaaactgccctgcaatgt

SEQ ID NO: 2818098 - DNA, 25 bp, Homo sapien
taaactgccctgcaatgtagctgtc

SEQ ID NO: 2818099 - DNA, 25 bp, Homo sapien
ttttttggaggtctgtctgaaggac

SEQ ID NO: 2818100 - DNA, 25 bp, Homo sapien
agtctggcttggcttagtgcctttc

SEQ ID NO: 2818101 - DNA, 25 bp, Homo sapien
ttcggaggaagcacccaacttgtgg

SEQ ID NO: 2818102 - DNA, 25 bp, Homo sapien
tggagtgtgcatccagtattctggt

SEQ ID NO: 2818103 - DNA, 25 bp, Homo sapien
gaggataccctctgagtgagacttg

SEQ ID NO: 2818104 - DNA, 25 bp, Homo sapien
taccctctgagtgagacttggtgga

SEQ ID NO: 2818105 - DNA, 25 bp, Homo sapien
gcagaggataccctctgagtgagac

SEQ ID NO: 2818106 - DNA, 25 bp, Homo sapien
tgggtgtgtcactgaatagaaggag

SEQ ID NO: 2818107 - DNA, 25 bp, Homo sapien
tgaaacggtgaaggctaaaactgct

SEQ ID NO: 2818108 - DNA, 25 bp, Homo sapien
gaaagaatgaaacggtgaaggctaa

SEQ ID NO: 2818109 - DNA, 25 bp, Homo sapien
tgactgtttcgggactctttgttct

SEQ ID NO: 2818110 - DNA, 25 bp, Homo sapien
taaaactgctacatccacagatggc

SEQ ID NO: 2818111 - DNA, 25 bp, Homo sapien
ttatctgtggataatcagaattatg

SEQ ID NO: 2818112 - DNA, 25 bp, Homo sapien
gcttggaaataattgtagttcttag

SEQ ID NO: 2818113 - DNA, 25 bp, Homo sapien
taatcagaattatgtgcttggaaat

SEQ ID NO: 2818114 - DNA, 25 bp, Homo sapien
gtcagactccctgatcttttttgga

SEQ ID NO: 2818115 - DNA, 25 bp, Homo sapien
taaggtgaagttctaataaccagcg

SEQ ID NO: 2818116 - DNA, 25 bp, Homo sapien
ggtgatttctgctactataaggtga

SEQ ID NO: 2818117 - DNA, 25 bp, Homo sapien
ccagttgcctttggctgacacttct

SEQ ID NO: 2818118 - DNA, 25 bp, Homo sapien
tttgactttaccagtccagttgcct

SEQ ID NO: 2818119 - DNA, 25 bp, Homo sapien
taacagattcacacaagacttgcat

SEQ ID NO: 2818120 - DNA, 25 bp, Homo sapien
tatctctggccctagggaaccactc

SEQ ID NO: 2818121 - DNA, 25 bp, Homo sapien
gaaaatatctagaaggtgagtggct

SEQ ID NO: 2818122 - DNA, 25 bp, Homo sapien
ccaatctccagttgataaacaggtg

SEQ ID NO: 2818123 - DNA, 25 bp, Homo sapien
atttgctggcgccagaggtattcca

SEQ ID NO: 2818124 - DNA, 25 bp, Homo sapien
gagtatggcatttgctggcgccaga

SEQ ID NO: 2818125 - DNA, 25 bp, Homo sapien
aagtggtagtagtagaatcctcgga

SEQ ID NO: 2818126 - DNA, 25 bp, Homo sapien
tagaatcctcggagtatggcatttg

SEQ ID NO: 2818127 - DNA, 25 bp, Homo sapien
tttacatggtatcaggaatgttcca

SEQ ID NO: 2818128 - DNA, 25 bp, Homo sapien
gtctcttgtggcctacactccagaa

SEQ ID NO: 2818129 - DNA, 25 bp, Homo sapien
cactccagaacttcataccatcact

SEQ ID NO: 2818130 - DNA, 25 bp, Homo sapien
gcttctttacatggtatcaggaatg

SEQ ID NO: 2818131 - DNA, 25 bp, Homo sapien
acctctgtgaggctagattcatctg

SEQ ID NO: 2818132 - DNA, 25 bp, Homo sapien
tattgtcaacatggaaagctctttg

SEQ ID NO: 2818133 - DNA, 25 bp, Homo sapien
ccatctaccacctctgtgaggctag

SEQ ID NO: 2818134 - DNA, 25 bp, Homo sapien
agctctttgccaggaccatctacca

SEQ ID NO: 2818135 - DNA, 25 bp, Homo sapien
caacctcagtttcttggtgtgctct

SEQ ID NO: 2818136 - DNA, 25 bp, Homo sapien
gccagaaacaggcaatcctactgtc

SEQ ID NO: 2818137 - DNA, 25 bp, Homo sapien
cttgcccaacctcagtttcttggtg

SEQ ID NO: 2818138 - DNA, 25 bp, Homo sapien
gctctaagagacagtttatggttcc

SEQ ID NO: 2818139 - DNA, 25 bp, Homo sapien
tagaaatacagaccccagagcacat

SEQ ID NO: 2818140 - DNA, 25 bp, Homo sapien
acagatatcagtgggaaacgtcggc

SEQ ID NO: 2818141 - DNA, 25 bp, Homo sapien
aaacgtcggcgttctgagcaacaca

SEQ ID NO: 2818142 - DNA, 25 bp, Homo sapien
cacaggataaatgtaggagggcctt

SEQ ID NO: 2818143 - DNA, 25 bp, Homo sapien
taatgttttgctcggaaatgaggtg

SEQ ID NO: 2818144 - DNA, 25 bp, Homo sapien
aaggatcctccctaagcgagctgct

SEQ ID NO: 2818145 - DNA, 25 bp, Homo sapien
gctgctgtgtaatgttttgctcgga

SEQ ID NO: 2818146 - DNA, 25 bp, Homo sapien
tccctaagcgagctgctgtgtaatg

SEQ ID NO: 2818147 - DNA, 25 bp, Homo sapien
attccagtgcaacacagcccatttc

SEQ ID NO: 2818148 - DNA, 25 bp, Homo sapien
tcattccagtgcaacacagcccatt

SEQ ID NO: 2818149 - DNA, 25 bp, Homo sapien
tccagtgcaacacagcccatttccc

SEQ ID NO: 2818150 - DNA, 25 bp, Homo sapien
cagtgcaacacagcccatttcccag

SEQ ID NO: 2818151 - DNA, 25 bp, Homo sapien
cagatgtggccaggagcaactcgcc

SEQ ID NO: 2818152 - DNA, 25 bp, Homo sapien
taatgcagatgtggccaggagcaac

SEQ ID NO: 2818153 - DNA, 25 bp, Homo sapien
ttaatgcagatgtggccaggagcaa

SEQ ID NO: 2818154 - DNA, 25 bp, Homo sapien
tgcagatgtggccaggagcaactcg

SEQ ID NO: 2818155 - DNA, 25 bp, Homo sapien
tttatttcaagccctcattttgcca

SEQ ID NO: 2818156 - DNA, 25 bp, Homo sapien
ggcgggtaggagtggttatggagaa

SEQ ID NO: 2818157 - DNA, 25 bp, Homo sapien
gaagcacctttgtgttggggtagac

SEQ ID NO: 2818158 - DNA, 25 bp, Homo sapien
ggtagacacaggagcacgtggccct

SEQ ID NO: 2818159 - DNA, 25 bp, Homo sapien
tcctgtcggaaaggcacctgcaggc

SEQ ID NO: 2818160 - DNA, 25 bp, Homo sapien
ttcctcttgttcctgtcggaaaggc

SEQ ID NO: 2818161 - DNA, 25 bp, Homo sapien
cacactggaatgttaccacgttcct

SEQ ID NO: 2818162 - DNA, 25 bp, Homo sapien
tcttgttcctgtcggaaaggcacct

SEQ ID NO: 2818163 - DNA, 25 bp, Homo sapien
cactttttcccgattgccttcaggg

SEQ ID NO: 2818164 - DNA, 25 bp, Homo sapien
ggcaagaggccttcgttctcaaatg

SEQ ID NO: 2818165 - DNA, 25 bp, Homo sapien
ggtgtgtcaactctcctctaggcag

SEQ ID NO: 2818166 - DNA, 25 bp, Homo sapien
ttcctataatccctacatgtggtgg

SEQ ID NO: 2818167 - DNA, 25 bp, Homo sapien
tagggcacaacgctagcatccagct

SEQ ID NO: 2818168 - DNA, 25 bp, Homo sapien
ctgtagggcacaacgctagcatcca

SEQ ID NO: 2818169 - DNA, 25 bp, Homo sapien
ggcacaacgctagcatccagctggt

SEQ ID NO: 2818170 - DNA, 25 bp, Homo sapien
caacgctagcatccagctggtgctg

SEQ ID NO: 2818171 - DNA, 25 bp, Homo sapien
aagttctcttgtgggtccctgaata

SEQ ID NO: 2818172 - DNA, 25 bp, Homo sapien
tgccatcttttttgacttaaccatc

SEQ ID NO: 2818173 - DNA, 25 bp, Homo sapien
tcttttttgacttaaccatccatct

SEQ ID NO: 2818174 - DNA, 25 bp, Homo sapien
ctgggctcaagttctcttgtgggtc

SEQ ID NO: 2818175 - DNA, 25 bp, Homo sapien
ctgcttcggctcctgacagccaagg

SEQ ID NO: 2818176 - DNA, 25 bp, Homo sapien
gagctggaaacaggcgttagatcta

SEQ ID NO: 2818177 - DNA, 25 bp, Homo sapien
tacttcccaggggtgtgaaagccat

SEQ ID NO: 2818178 - DNA, 25 bp, Homo sapien
caggcgttagatctaaggcggaaca

SEQ ID NO: 2818179 - DNA, 25 bp, Homo sapien
gaacatagacactcaagttgctctg

SEQ ID NO: 2818180 - DNA, 25 bp, Homo sapien
ttacattgcgggctgacatgtgtct

SEQ ID NO: 2818181 - DNA, 25 bp, Homo sapien
tgcgcggctggccattgatcccagt

SEQ ID NO: 2818182 - DNA, 25 bp, Homo sapien
tcatatctcatagcctgctcccggg

SEQ ID NO: 2818183 - DNA, 25 bp, Homo sapien
tcatagccgaagagtaaaacaaccc

SEQ ID NO: 2818184 - DNA, 25 bp, Homo sapien
ttaaatataaatggactaaattctg

SEQ ID NO: 2818185 - DNA, 25 bp, Homo sapien
taaatataaatggactaaattctgc

SEQ ID NO: 2818186 - DNA, 25 bp, Homo sapien
aatataaatggactaaattctgcaa

SEQ ID NO: 2818187 - DNA, 25 bp, Homo sapien
tataaatggactaaattctgcaatt

SEQ ID NO: 2818188 - DNA, 25 bp, Homo sapien
ggcagattagaggtagtgttagcat

SEQ ID NO: 2818189 - DNA, 25 bp, Homo sapien
tcaaaacaatatctgcacccctatg

SEQ ID NO: 2818190 - DNA, 25 bp, Homo sapien
aagataaaatagtgagcagagattc

SEQ ID NO: 2818191 - DNA, 25 bp, Homo sapien
taaggagagctcaaacaatgctata

SEQ ID NO: 2818192 - DNA, 25 bp, Homo sapien
tggccccggtttgagctttctgtcc

SEQ ID NO: 2818193 - DNA, 25 bp, Homo sapien
gactcaaggtctgctggaggcaaga

SEQ ID NO: 2818194 - DNA, 25 bp, Homo sapien
agaggcagagtgtgaaaccaccggt

SEQ ID NO: 2818195 - DNA, 25 bp, Homo sapien
gttccggagagtagcgtcgcagctc

SEQ ID NO: 2818196 - DNA, 25 bp, Homo sapien
ctggcagcctccctgatggcaatcc

SEQ ID NO: 2818197 - DNA, 25 bp, Homo sapien
tgtaggaccggctggcagcctccct

SEQ ID NO: 2818198 - DNA, 25 bp, Homo sapien
ctgtaggaccggctggcagcctccc

SEQ ID NO: 2818199 - DNA, 25 bp, Homo sapien
agcctccctgatggcaatcccctgc

SEQ ID NO: 2818200 - DNA, 25 bp, Homo sapien
tgctggaattatgttagccatcctc

SEQ ID NO: 2818201 - DNA, 25 bp, Homo sapien
ttgctggaattatgttagccatcct

SEQ ID NO: 2818202 - DNA, 25 bp, Homo sapien
tgtcaggctttgctggaattatgtt

SEQ ID NO: 2818203 - DNA, 25 bp, Homo sapien
tcaggctttgctggaattatgttag

SEQ ID NO: 2818204 - DNA, 25 bp, Homo sapien
tccacagtcggttccaggtctggtt

SEQ ID NO: 2818205 - DNA, 25 bp, Homo sapien
cttccacagtcggttccaggtctgg

SEQ ID NO: 2818206 - DNA, 25 bp, Homo sapien
tgcttccacagtcggttccaggtct

SEQ ID NO: 2818207 - DNA, 25 bp, Homo sapien
ttccacagtcggttccaggtctggt

SEQ ID NO: 2818208 - DNA, 25 bp, Homo sapien
tctgccgttgagtggctatagcaca

SEQ ID NO: 2818209 - DNA, 25 bp, Homo sapien
gacggcttcgcacaaagccaagcag

SEQ ID NO: 2818210 - DNA, 25 bp, Homo sapien
ttcagagccaaatgtagcagcaccc

SEQ ID NO: 2818211 - DNA, 25 bp, Homo sapien
ttcactgggtctggcatgacggctt

SEQ ID NO: 2818212 - DNA, 25 bp, Homo sapien
accaggagtctcttgttgtcaagct

SEQ ID NO: 2818213 - DNA, 25 bp, Homo sapien
caggagtctcttgttgtcaagctct

SEQ ID NO: 2818214 - DNA, 25 bp, Homo sapien
tcccacagctgtcaaatgtgctcat

SEQ ID NO: 2818215 - DNA, 25 bp, Homo sapien
atgtcccacagctgtcaaatgtgct

SEQ ID NO: 2818216 - DNA, 25 bp, Homo sapien
agtcacaggcaactgcatatcatcc

SEQ ID NO: 2818217 - DNA, 25 bp, Homo sapien
ggtcagcctcaaactgagtcacagg

SEQ ID NO: 2818218 - DNA, 25 bp, Homo sapien
cagagcaatgagcaccaagaagagc

SEQ ID NO: 2818219 - DNA, 25 bp, Homo sapien
gctgtgctcgccttgtggagaggtc

SEQ ID NO: 2818220 - DNA, 25 bp, Homo sapien
tggggtagggctcttcactacacag

SEQ ID NO: 2818221 - DNA, 25 bp, Homo sapien
tacacagcaagtaggtactccatgc

SEQ ID NO: 2818222 - DNA, 25 bp, Homo sapien
gaagagcggatggtgggccagtgcc

SEQ ID NO: 2818223 - DNA, 25 bp, Homo sapien
gaaggtggtagggaagagcggatgg

SEQ ID NO: 2818224 - DNA, 25 bp, Homo sapien
gaaaaactcacgcacaatatacgct

SEQ ID NO: 2818225 - DNA, 25 bp, Homo sapien
tagcaggctcacagacacctggtgg

SEQ ID NO: 2818226 - DNA, 25 bp, Homo sapien
acctggtgtggtatatttgcctgac

SEQ ID NO: 2818227 - DNA, 25 bp, Homo sapien
acagcctggcaacttggagtagaaa

SEQ ID NO: 2818228 - DNA, 25 bp, Homo sapien
caggtgaagcatggtaaatggtccc

SEQ ID NO: 2818229 - DNA, 25 bp, Homo sapien
agaggattttaacaggtcccaggcg

SEQ ID NO: 2818230 - DNA, 25 bp, Homo sapien
aaaataagcgctaagctgccaggca

SEQ ID NO: 2818231 - DNA, 25 bp, Homo sapien
tcagggtgcccttaattgattggga

SEQ ID NO: 2818232 - DNA, 25 bp, Homo sapien
cacacagctgatgccgggtctaaaa

SEQ ID NO: 2818233 - DNA, 25 bp, Homo sapien
tatttgcctgactccggtgttgacc

SEQ ID NO: 2818234 - DNA, 25 bp, Homo sapien
tctatcatgcccctctaaggaagag

SEQ ID NO: 2818235 - DNA, 25 bp, Homo sapien
tctaaaagtggacgctgaggcagca

SEQ ID NO: 2818236 - DNA, 25 bp, Homo sapien
aatatcacagaagtcctaaatgcct

SEQ ID NO: 2818237 - DNA, 25 bp, Homo sapien
taaatgcctcttgtcaggtggcaca

SEQ ID NO: 2818238 - DNA, 25 bp, Homo sapien
tgatgtttcttcatagtcagattca

SEQ ID NO: 2818239 - DNA, 25 bp, Homo sapien
gagtcaggtgatgtctgccagccat

SEQ ID NO: 2818240 - DNA, 25 bp, Homo sapien
cctcagcttggggttcgattctctg

SEQ ID NO: 2818241 - DNA, 25 bp, Homo sapien
cttggggttcgattctctgtgctgg

SEQ ID NO: 2818242 - DNA, 25 bp, Homo sapien
tcttcagggacactgtccatactta

SEQ ID NO: 2818243 - DNA, 25 bp, Homo sapien
cttcagggacactgtccatacttac

SEQ ID NO: 2818244 - DNA, 25 bp, Homo sapien
gtttccttcaccctggcgcccatac

SEQ ID NO: 2818245 - DNA, 25 bp, Homo sapien
tggcgcccatacagtcttcgctctg

SEQ ID NO: 2818246 - DNA, 25 bp, Homo sapien
cactgcactctgtgccactgtggtt

SEQ ID NO: 2818247 - DNA, 25 bp, Homo sapien
ttgggctccaatactctgtaggact

SEQ ID NO: 2818248 - DNA, 25 bp, Homo sapien
tggaactcgaaatgaaccatgacct

SEQ ID NO: 2818249 - DNA, 25 bp, Homo sapien
cagctgcacccatagtggatgacca

SEQ ID NO: 2818250 - DNA, 25 bp, Homo sapien
gaacaacagaggtggtgcatcagct

SEQ ID NO: 2818251 - DNA, 25 bp, Homo sapien
tgaccacgcacatccttcagagagg

SEQ ID NO: 2818252 - DNA, 25 bp, Homo sapien
ggagagtggatttcagtattattca

SEQ ID NO: 2818253 - DNA, 25 bp, Homo sapien
tttaggagagtggatttcagtatta

SEQ ID NO: 2818254 - DNA, 25 bp, Homo sapien
ctgtttaggagagtggatttcagta

SEQ ID NO: 2818255 - DNA, 25 bp, Homo sapien
taggagagtggatttcagtattatt

SEQ ID NO: 2818256 - DNA, 25 bp, Homo sapien
gaagggtatcatagtcggccaggac

SEQ ID NO: 2818257 - DNA, 25 bp, Homo sapien
tgggaactcctgacaacaacatggc

SEQ ID NO: 2818258 - DNA, 25 bp, Homo sapien
catagatcgtgcaagtccctgtgtg

SEQ ID NO: 2818259 - DNA, 25 bp, Homo sapien
agagattgcttcacacgtccacgga

SEQ ID NO: 2818260 - DNA, 25 bp, Homo sapien
ttcccaacataaattagtgagagaa

SEQ ID NO: 2818261 - DNA, 25 bp, Homo sapien
caacataaattagtgagagaagctg

SEQ ID NO: 2818262 - DNA, 25 bp, Homo sapien
cataaattagtgagagaagctgaca

SEQ ID NO: 2818263 - DNA, 25 bp, Homo sapien
cccaacataaattagtgagagaagc

SEQ ID NO: 2818264 - DNA, 25 bp, Homo sapien
cgctggtcaacctctgaatgcagga

SEQ ID NO: 2818265 - DNA, 25 bp, Homo sapien
agcaccgggtcgctggtcaacctct

SEQ ID NO: 2818266 - DNA, 25 bp, Homo sapien
agtcaggtgcccaacagtccaatca

SEQ ID NO: 2818267 - DNA, 25 bp, Homo sapien
aatgcaggagccttgagtcaggtgc

SEQ ID NO: 2818268 - DNA, 25 bp, Homo sapien
gtttatagatagtagggagccaaga

SEQ ID NO: 2818269 - DNA, 25 bp, Homo sapien
ggacagctgctatctagaagaaaac

SEQ ID NO: 2818270 - DNA, 25 bp, Homo sapien
tgccagccttagcttataccagagc

SEQ ID NO: 2818271 - DNA, 25 bp, Homo sapien
caaccattacatttagacctgggct

SEQ ID NO: 2818272 - DNA, 25 bp, Homo sapien
taagcctcatatgtgccaacagtga

SEQ ID NO: 2818273 - DNA, 25 bp, Homo sapien
tttctcagcatatgaaccaagaggt

SEQ ID NO: 2818274 - DNA, 25 bp, Homo sapien
gatgaccctgtgcaagttttcagac

SEQ ID NO: 2818275 - DNA, 25 bp, Homo sapien
tatcaatgtaccagttagacggaca

SEQ ID NO: 2818276 - DNA, 25 bp, Homo sapien
ttcaataaccgcaggtgggaaatga

SEQ ID NO: 2818277 - DNA, 25 bp, Homo sapien
cagatgcttcaataaccgcaggtgg

SEQ ID NO: 2818278 - DNA, 25 bp, Homo sapien
aaatgacggcggcacacagggcatg

SEQ ID NO: 2818279 - DNA, 25 bp, Homo sapien
tactgtcatttgaaggtggggcatc

SEQ ID NO: 2818280 - DNA, 25 bp, Homo sapien
ggaatttaaactgcacctacctata

SEQ ID NO: 2818281 - DNA, 25 bp, Homo sapien
ttagctgagcgttgcagcatgcgcc

SEQ ID NO: 2818282 - DNA, 25 bp, Homo sapien
taagtctctgaagctatcatgggaa

SEQ ID NO: 2818283 - DNA, 25 bp, Homo sapien
gccagacttcaggagcaaatgcata

SEQ ID NO: 2818284 - DNA, 25 bp, Homo sapien
tagaggttggtatattgtacagcac

SEQ ID NO: 2818285 - DNA, 25 bp, Homo sapien
cctgacaggcactatgggttatctc

SEQ ID NO: 2818286 - DNA, 25 bp, Homo sapien
cacattagcacgtgctgtttactga

SEQ ID NO: 2818287 - DNA, 25 bp, Homo sapien
tactgggcacttactacctgacagg

SEQ ID NO: 2818288 - DNA, 25 bp, Homo sapien
gacagggcaactctgttgctatatc

SEQ ID NO: 2818289 - DNA, 25 bp, Homo sapien
tatcatccttaatatactcactgca

SEQ ID NO: 2818290 - DNA, 25 bp, Homo sapien
ccaaattgagacacaaggtttgtga

SEQ ID NO: 2818291 - DNA, 25 bp, Homo sapien
ggacagcattgttcctgaccaatag

SEQ ID NO: 2818292 - DNA, 25 bp, Homo sapien
catcaatgctttccttactagctgg

SEQ ID NO: 2818293 - DNA, 25 bp, Homo sapien
caacatccactgcaagagactctaa

SEQ ID NO: 2818294 - DNA, 25 bp, Homo sapien
ttccttactagctggtggattggcc

SEQ ID NO: 2818295 - DNA, 25 bp, Homo sapien
gagactctaaatgggccagagcagt

SEQ ID NO: 2818296 - DNA, 25 bp, Homo sapien
taggttatctgggttgtgaatttca

SEQ ID NO: 2818297 - DNA, 25 bp, Homo sapien
tcaaatatctgtgtcaaattactgt

SEQ ID NO: 2818298 - DNA, 25 bp, Homo sapien
tttacaggttcaaatatctgtgtca

SEQ ID NO: 2818299 - DNA, 25 bp, Homo sapien
aagtattactaggttatctgggttg

SEQ ID NO: 2818300 - DNA, 25 bp, Homo sapien
tactcatcttaggtggttctgcagc

SEQ ID NO: 2818301 - DNA, 25 bp, Homo sapien
catgctgcttatccagtaactggta

SEQ ID NO: 2818302 - DNA, 25 bp, Homo sapien
gcaagttctgccagcacagtaccat

SEQ ID NO: 2818303 - DNA, 25 bp, Homo sapien
tgtgtccttcccaataaggtctggc

SEQ ID NO: 2818304 - DNA, 25 bp, Homo sapien
tagagacacagatataaggagacaa

SEQ ID NO: 2818305 - DNA, 25 bp, Homo sapien
ctcctcactcaaattagagacacag

SEQ ID NO: 2818306 - DNA, 25 bp, Homo sapien
cagatataaggagacaaatacatac

SEQ ID NO: 2818307 - DNA, 25 bp, Homo sapien
cctctcctcactcaaattagagaca

SEQ ID NO: 2818308 - DNA, 25 bp, Homo sapien
ggtaaggaactgaggatccacatat

SEQ ID NO: 2818309 - DNA, 25 bp, Homo sapien
agcaactcctagtccatctgcaaag

SEQ ID NO: 2818310 - DNA, 25 bp, Homo sapien
gaggatccacatatgaaatagcttc

SEQ ID NO: 2818311 - DNA, 25 bp, Homo sapien
tagcctgggctaagcgttcttctag

SEQ ID NO: 2818312 - DNA, 25 bp, Homo sapien
cattgtactgtaaccaaggaatttc

SEQ ID NO: 2818313 - DNA, 25 bp, Homo sapien
tcatcctccaggttattgttaccat

SEQ ID NO: 2818314 - DNA, 25 bp, Homo sapien
tccaatccacatctaagtcttcact

SEQ ID NO: 2818315 - DNA, 25 bp, Homo sapien
aattcattggcaggttcatttccct

SEQ ID NO: 2818316 - DNA, 25 bp, Homo sapien
gaaaatcgatgaggcaaagaagcag

SEQ ID NO: 2818317 - DNA, 25 bp, Homo sapien
tctgtaccagaaaatcgatgaggca

SEQ ID NO: 2818318 - DNA, 25 bp, Homo sapien
ttcatcacttgaggattgatctttt

SEQ ID NO: 2818319 - DNA, 25 bp, Homo sapien
tcacttgaggattgatctttttctg

SEQ ID NO: 2818320 - DNA, 25 bp, Homo sapien
gtggatccaagaacatacagtcatg

SEQ ID NO: 2818321 - DNA, 25 bp, Homo sapien
ttttggcctcactacctgttcagga

SEQ ID NO: 2818322 - DNA, 25 bp, Homo sapien
taactcttgagtatggtggatccaa

SEQ ID NO: 2818323 - DNA, 25 bp, Homo sapien
tagagttggtaataatctccacagc

SEQ ID NO: 2818324 - DNA, 25 bp, Homo sapien
tgatgtactgcaacaaaggattgac

SEQ ID NO: 2818325 - DNA, 25 bp, Homo sapien
gattcaatgctgaaccacaagtggg

SEQ ID NO: 2818326 - DNA, 25 bp, Homo sapien
tgaaagaccagtgtatgcctctgcc

SEQ ID NO: 2818327 - DNA, 25 bp, Homo sapien
gacaaactcagtatcaccagcagaa

SEQ ID NO: 2818328 - DNA, 25 bp, Homo sapien
gaccctagctagtaattcagattct

SEQ ID NO: 2818329 - DNA, 25 bp, Homo sapien
atgggatgaccctagctagtaattc

SEQ ID NO: 2818330 - DNA, 25 bp, Homo sapien
gaacgaagggttcttcaatgggatg

SEQ ID NO: 2818331 - DNA, 25 bp, Homo sapien
tcttcaatgggatgaccctagctag

SEQ ID NO: 2818332 - DNA, 25 bp, Homo sapien
ggccagacagccttaccagattctt

SEQ ID NO: 2818333 - DNA, 25 bp, Homo sapien
ggtcatacatggtttaaaactgaca

SEQ ID NO: 2818334 - DNA, 25 bp, Homo sapien
atagtcatcaccagcccgacctaag

SEQ ID NO: 2818335 - DNA, 25 bp, Homo sapien
taattgtctgataccctcctgctgg

SEQ ID NO: 2818336 - DNA, 25 bp, Homo sapien
tggctccttttcagtgtactgtgac

SEQ ID NO: 2818337 - DNA, 25 bp, Homo sapien
gctggctccttttcagtgtactgtg

SEQ ID NO: 2818338 - DNA, 25 bp, Homo sapien
gctccttttcagtgtactgtgacat

SEQ ID NO: 2818339 - DNA, 25 bp, Homo sapien
ctgctggctccttttcagtgtactg

SEQ ID NO: 2818340 - DNA, 25 bp, Homo sapien
cactatggacaagccgcagaagatt

SEQ ID NO: 2818341 - DNA, 25 bp, Homo sapien
tgaccagttcagtagaattatagat

SEQ ID NO: 2818342 - DNA, 25 bp, Homo sapien
gtgtgaccagttcagtagaattata

SEQ ID NO: 2818343 - DNA, 25 bp, Homo sapien
ttcacactatggacaagccgcagaa

SEQ ID NO: 2818344 - DNA, 25 bp, Homo sapien
taaaatatcattatcttagtggttt

SEQ ID NO: 2818345 - DNA, 25 bp, Homo sapien
aaaatatcattatcttagtggtttt

SEQ ID NO: 2818346 - DNA, 25 bp, Homo sapien
gattgtcttaacatcacagaagtct

SEQ ID NO: 2818347 - DNA, 25 bp, Homo sapien
tatattgcaagtagattgtcttaac

SEQ ID NO: 2818348 - DNA, 25 bp, Homo sapien
ggcaggcaattatattgcaagtaga

SEQ ID NO: 2818349 - DNA, 25 bp, Homo sapien
cttttggcaggcaattatattgcaa

SEQ ID NO: 2818350 - DNA, 25 bp, Homo sapien
cagccacatgctagttctcgacttg

SEQ ID NO: 2818351 - DNA, 25 bp, Homo sapien
cgacttggctggtgtttatattgac

SEQ ID NO: 2818352 - DNA, 25 bp, Homo sapien
gcaacaggtttttatggaccactga

SEQ ID NO: 2818353 - DNA, 25 bp, Homo sapien
tgaaaactaggctgtctaagacact

SEQ ID NO: 2818354 - DNA, 25 bp, Homo sapien
ctcattttaagagcagagtaaaatc

SEQ ID NO: 2818355 - DNA, 25 bp, Homo sapien
taaaatcttcatgaactagccagac

SEQ ID NO: 2818356 - DNA, 25 bp, Homo sapien
atagaaaaggatttcataagcttgt

SEQ ID NO: 2818357 - DNA, 25 bp, Homo sapien
gaactagccagacaaggctcatgcc

SEQ ID NO: 2818358 - DNA, 25 bp, Homo sapien
caggcctgtggcgtaagatggttcc

SEQ ID NO: 2818359 - DNA, 25 bp, Homo sapien
gcaaaacgacggcaacagaaggctc

SEQ ID NO: 2818360 - DNA, 25 bp, Homo sapien
atcccgggagtagagcgactgctgc

SEQ ID NO: 2818361 - DNA, 25 bp, Homo sapien
gattaccagtcatctgagggaggcc

SEQ ID NO: 2818362 - DNA, 25 bp, Homo sapien
aatgtgcagcggctccggagcgaga

SEQ ID NO: 2818363 - DNA, 25 bp, Homo sapien
cggctccggagcgagaacagcgctc

SEQ ID NO: 2818364 - DNA, 25 bp, Homo sapien
tccggagcgagaacagcgctcgaac

SEQ ID NO: 2818365 - DNA, 25 bp, Homo sapien
ggagcgagaacagcgctcgaacctc

SEQ ID NO: 2818366 - DNA, 25 bp, Homo sapien
gaggacattaactggccatcttttt

SEQ ID NO: 2818367 - DNA, 25 bp, Homo sapien
acagcagttgttccttactatcttt

SEQ ID NO: 2818368 - DNA, 25 bp, Homo sapien
gcagttgttccttactatcttttgt

SEQ ID NO: 2818369 - DNA, 25 bp, Homo sapien
tcttcatagtgatctttctgccatt

SEQ ID NO: 2818370 - DNA, 25 bp, Homo sapien
tgtctctgttcatgccagctccagg

SEQ ID NO: 2818371 - DNA, 25 bp, Homo sapien
ttaggagtatatcccattccatggc

SEQ ID NO: 2818372 - DNA, 25 bp, Homo sapien
ctccattaccattacattgtctctg

SEQ ID NO: 2818373 - DNA, 25 bp, Homo sapien
tgtctccacactcgaaggcacattc

SEQ ID NO: 2818374 - DNA, 25 bp, Homo sapien
agaccagagacctggaatccttcat

SEQ ID NO: 2818375 - DNA, 25 bp, Homo sapien
tgactggagtttggatgtggtggct

SEQ ID NO: 2818376 - DNA, 25 bp, Homo sapien
gatgtggtggctaagaccagagacc

SEQ ID NO: 2818377 - DNA, 25 bp, Homo sapien
tgtggtggctaagaccagagacctg

SEQ ID NO: 2818378 - DNA, 25 bp, Homo sapien
taagtccaccatcacaacatctctc

SEQ ID NO: 2818379 - DNA, 25 bp, Homo sapien
caacatctctcaaatccgttcttca

SEQ ID NO: 2818380 - DNA, 25 bp, Homo sapien
ttctgtctttatccaagtcctaagt

SEQ ID NO: 2818381 - DNA, 25 bp, Homo sapien
ctttatccaagtcctaagtccacca

SEQ ID NO: 2818382 - DNA, 25 bp, Homo sapien
gcatgccaagaagtacttaatggca

SEQ ID NO: 2818383 - DNA, 25 bp, Homo sapien
agtccttcatcagcatgccaagaag

SEQ ID NO: 2818384 - DNA, 25 bp, Homo sapien
catgaatggcaaggtttctttgtgg

SEQ ID NO: 2818385 - DNA, 25 bp, Homo sapien
ctgggaaatgtggagtccttcatca

SEQ ID NO: 2818386 - DNA, 25 bp, Homo sapien
gcaaatcgacatcaagctatcatgg

SEQ ID NO: 2818387 - DNA, 25 bp, Homo sapien
tttccaaagcaaatcgacatcaagc

SEQ ID NO: 2818388 - DNA, 25 bp, Homo sapien
tcaagctatcatggacaataatttt

SEQ ID NO: 2818389 - DNA, 25 bp, Homo sapien
ggctttccaaagcaaatcgacatca

SEQ ID NO: 2818390 - DNA, 25 bp, Homo sapien
tcattaagttttacagggtggaaga

SEQ ID NO: 2818391 - DNA, 25 bp, Homo sapien
atcattaagttttacagggtggaag

SEQ ID NO: 2818392 - DNA, 25 bp, Homo sapien
caaatcattaagttttacagggtgg

SEQ ID NO: 2818393 - DNA, 25 bp, Homo sapien
gttccatctgccgaagctgaaaaac

SEQ ID NO: 2818394 - DNA, 25 bp, Homo sapien
ccatctgccgaagctgaaaaacaca

SEQ ID NO: 2818395 - DNA, 25 bp, Homo sapien
tccatctgccgaagctgaaaaacac

SEQ ID NO: 2818396 - DNA, 25 bp, Homo sapien
atgttccatctgccgaagctgaaaa

SEQ ID NO: 2818397 - DNA, 25 bp, Homo sapien
ttcttgctttgtagctgcctgccca

SEQ ID NO: 2818398 - DNA, 25 bp, Homo sapien
tgatcactaggacacacattatggc

SEQ ID NO: 2818399 - DNA, 25 bp, Homo sapien
tcttgcttctatctaatggctgtgg

SEQ ID NO: 2818400 - DNA, 25 bp, Homo sapien
tgtagattgctgagctcctcttgac

SEQ ID NO: 2818401 - DNA, 25 bp, Homo sapien
cacagggccctttgaattgatcact

SEQ ID NO: 2818402 - DNA, 25 bp, Homo sapien
acgtctactgaaaacacttgtttca

SEQ ID NO: 2818403 - DNA, 25 bp, Homo sapien
aaagagcacctgaacgtctactgaa

SEQ ID NO: 2818404 - DNA, 25 bp, Homo sapien
tggccttcattaaccatctggcttt

SEQ ID NO: 2818405 - DNA, 25 bp, Homo sapien
cctggctggccttcattaaccatct

SEQ ID NO: 2818406 - DNA, 25 bp, Homo sapien
ttatccaaaggaaatatcagctgtg

SEQ ID NO: 2818407 - DNA, 25 bp, Homo sapien
gctgtgtcatcaagtcttgattctg

SEQ ID NO: 2818408 - DNA, 25 bp, Homo sapien
tccaaaggaaatatcagctgtgtca

SEQ ID NO: 2818409 - DNA, 25 bp, Homo sapien
caagtcttgattctgtaagctcctt

SEQ ID NO: 2818410 - DNA, 25 bp, Homo sapien
tgtgttcactctcttccatccagtg

SEQ ID NO: 2818411 - DNA, 25 bp, Homo sapien
ttgtgttcactctcttccatccagt

SEQ ID NO: 2818412 - DNA, 25 bp, Homo sapien
cactctcttccatccagtgaaccat

SEQ ID NO: 2818413 - DNA, 25 bp, Homo sapien
gttcactctcttccatccagtgaac

SEQ ID NO: 2818414 - DNA, 25 bp, Homo sapien
gcttgacccaggtagagggactctg

SEQ ID NO: 2818415 - DNA, 25 bp, Homo sapien
gctgtgaaagcaacgaagactaagt

SEQ ID NO: 2818416 - DNA, 25 bp, Homo sapien
gatgtgataggccaatactcttacc

SEQ ID NO: 2818417 - DNA, 25 bp, Homo sapien
caaaagcacctgagagctgtgaaag

SEQ ID NO: 2818418 - DNA, 25 bp, Homo sapien
gatccgggagtcagaatgacactac

SEQ ID NO: 2818419 - DNA, 25 bp, Homo sapien
gaattgagtccttggcgatctctga

SEQ ID NO: 2818420 - DNA, 25 bp, Homo sapien
gaaccaaattctagggcacactcat

SEQ ID NO: 2818421 - DNA, 25 bp, Homo sapien
cttttgcagtgggtacaggcatctt

SEQ ID NO: 2818422 - DNA, 25 bp, Homo sapien
aaaatgcatcacgtctgtcttttct

SEQ ID NO: 2818423 - DNA, 25 bp, Homo sapien
taaaatgcatcacgtctgtcttttc

SEQ ID NO: 2818424 - DNA, 25 bp, Homo sapien
acatctcacattccattgatagtgc

SEQ ID NO: 2818425 - DNA, 25 bp, Homo sapien
caagacatctcacattccattgata

SEQ ID NO: 2818426 - DNA, 25 bp, Homo sapien
ctacagctttgattttccgatatcc

SEQ ID NO: 2818427 - DNA, 25 bp, Homo sapien
ttgcctacagctttgattttccgat

SEQ ID NO: 2818428 - DNA, 25 bp, Homo sapien
aatgacagtcccatacttgcctaca

SEQ ID NO: 2818429 - DNA, 25 bp, Homo sapien
caatgacagtcccatacttgcctac

SEQ ID NO: 2818430 - DNA, 25 bp, Homo sapien
tcttggtaacatttggaagggccac

SEQ ID NO: 2818431 - DNA, 25 bp, Homo sapien
ttggtaacatttggaagggccacga

SEQ ID NO: 2818432 - DNA, 25 bp, Homo sapien
cttggtaacatttggaagggccacg

SEQ ID NO: 2818433 - DNA, 25 bp, Homo sapien
actatgatttcattgggcccttcaa

SEQ ID NO: 2818434 - DNA, 25 bp, Homo sapien
gcttccaactatgatttcattgggc

SEQ ID NO: 2818435 - DNA, 25 bp, Homo sapien
ctgggcagtgcttccaactatgatt

SEQ ID NO: 2818436 - DNA, 25 bp, Homo sapien
ggcagtgcttccaactatgatttca

SEQ ID NO: 2818437 - DNA, 25 bp, Homo sapien
cttggtccaagtggtggtgcaggtc

SEQ ID NO: 2818438 - DNA, 25 bp, Homo sapien
gcatctctattcagggttcttagaa

SEQ ID NO: 2818439 - DNA, 25 bp, Homo sapien
ggtccaatgagctctatggcatctc

SEQ ID NO: 2818440 - DNA, 25 bp, Homo sapien
ccaatgagctctatggcatctctat

SEQ ID NO: 2818441 - DNA, 25 bp, Homo sapien
gccagcataatcttgacagcaaaat

SEQ ID NO: 2818442 - DNA, 25 bp, Homo sapien
gcagacaatgatagtcagcttattt

SEQ ID NO: 2818443 - DNA, 25 bp, Homo sapien
taatcttgacagcaaaatcctgtaa

SEQ ID NO: 2818444 - DNA, 25 bp, Homo sapien
ttgacagcaaaatcctgtaagaata

SEQ ID NO: 2818445 - DNA, 25 bp, Homo sapien
gtatgtgaaaatggcatttaggact

SEQ ID NO: 2818446 - DNA, 25 bp, Homo sapien
tcctaacacagcatcgcttattaat

SEQ ID NO: 2818447 - DNA, 25 bp, Homo sapien
aacacagcatcgcttattaatagac

SEQ ID NO: 2818448 - DNA, 25 bp, Homo sapien
gcatcgcttattaatagacctagaa

SEQ ID NO: 2818449 - DNA, 25 bp, Homo sapien
ttcttcaagttcgtcccggagggca

SEQ ID NO: 2818450 - DNA, 25 bp, Homo sapien
cttcaagttcgtcccggagggcatc

SEQ ID NO: 2818451 - DNA, 25 bp, Homo sapien
tcattcttcaagttcgtcccggagg

SEQ ID NO: 2818452 - DNA, 25 bp, Homo sapien
tcccggagggcatcgtttttcctgc

SEQ ID NO: 2818453 - DNA, 25 bp, Homo sapien
agaaattaaaatagcatgtggtggt

SEQ ID NO: 2818454 - DNA, 25 bp, Homo sapien
ggtgaggacttcaatcttggtgatg

SEQ ID NO: 2818455 - DNA, 25 bp, Homo sapien
tgaggacttcaatcttggtgatgcc

SEQ ID NO: 2818456 - DNA, 25 bp, Homo sapien
cgccgcctgctggaaaatggtgagg

SEQ ID NO: 2818457 - DNA, 25 bp, Homo sapien
ggaaaatggtgaggacttcaatctt

SEQ ID NO: 2818458 - DNA, 25 bp, Homo sapien
tgtgaacattgtttcaagctctgag

SEQ ID NO: 2818459 - DNA, 25 bp, Homo sapien
ttaactgcttagatagttctggacc

SEQ ID NO: 2818460 - DNA, 25 bp, Homo sapien
gagtacctggataatttgttctgga

SEQ ID NO: 2818461 - DNA, 25 bp, Homo sapien
gcttagatagttctggacctcttcc

SEQ ID NO: 2818462 - DNA, 25 bp, Homo sapien
taaaccatctcgccatctattgtct

SEQ ID NO: 2818463 - DNA, 25 bp, Homo sapien
tcataaaccatctcgccatctattg

SEQ ID NO: 2818464 - DNA, 25 bp, Homo sapien
aaccatctcgccatctattgtcttc

SEQ ID NO: 2818465 - DNA, 25 bp, Homo sapien
cataaaccatctcgccatctattgt

SEQ ID NO: 2818466 - DNA, 25 bp, Homo sapien
gctctttgggtttcccttctgagtc

SEQ ID NO: 2818467 - DNA, 25 bp, Homo sapien
aagaataacatctttctgacttcca

SEQ ID NO: 2818468 - DNA, 25 bp, Homo sapien
cacaatatttggaggtttgtggggt

SEQ ID NO: 2818469 - DNA, 25 bp, Homo sapien
tcacaatatttggaggtttgtgggg

SEQ ID NO: 2818470 - DNA, 25 bp, Homo sapien
ctttcttgcttcaactgccttggaa

SEQ ID NO: 2818471 - DNA, 25 bp, Homo sapien
ttggtgccatcgtactggtccctgg

SEQ ID NO: 2818472 - DNA, 25 bp, Homo sapien
atctgctgccttcccaatgtctgtg

SEQ ID NO: 2818473 - DNA, 25 bp, Homo sapien
gatcctcctctagttgtcatctgct

SEQ ID NO: 2818474 - DNA, 25 bp, Homo sapien
gctatcctgatgactagaaaaacag

SEQ ID NO: 2818475 - DNA, 25 bp, Homo sapien
agcccccagctcaatgtcagcattg

SEQ ID NO: 2818476 - DNA, 25 bp, Homo sapien
ctatcctgatgactagaaaaacagc

SEQ ID NO: 2818477 - DNA, 25 bp, Homo sapien
tgaccatgtgactcttcttgtctcc

SEQ ID NO: 2818478 - DNA, 25 bp, Homo sapien
cttcctcgtcttatattgaccatgt

SEQ ID NO: 2818479 - DNA, 25 bp, Homo sapien
tatcctggggtctgattaattcatc

SEQ ID NO: 2818480 - DNA, 25 bp, Homo sapien
gtctcctatcctggggtctgattaa

SEQ ID NO: 2818481 - DNA, 25 bp, Homo sapien
tgaatccaaagaatccaggactttg

SEQ ID NO: 2818482 - DNA, 25 bp, Homo sapien
tgttttgaatccaaagaatccagga

SEQ ID NO: 2818483 - DNA, 25 bp, Homo sapien
ctgatgttttgaatccaaagaatcc

SEQ ID NO: 2818484 - DNA, 25 bp, Homo sapien
gaatccaggactttgacaaggaccc

SEQ ID NO: 2818485 - DNA, 25 bp, Homo sapien
cccacctgcaggcatactgatggta

SEQ ID NO: 2818486 - DNA, 25 bp, Homo sapien
gctataagtaattgtggctcttgca

SEQ ID NO: 2818487 - DNA, 25 bp, Homo sapien
cctgctgcagcgctataagtaattg

SEQ ID NO: 2818488 - DNA, 25 bp, Homo sapien
gatggtacgacagtgagtagcctgc

SEQ ID NO: 2818489 - DNA, 25 bp, Homo sapien
atatttctgatgctgtatattgcac

SEQ ID NO: 2818490 - DNA, 25 bp, Homo sapien
gaggtgaggccagggttgagcttca

SEQ ID NO: 2818491 - DNA, 25 bp, Homo sapien
cattgtttgatacttcttgtgagga

SEQ ID NO: 2818492 - DNA, 25 bp, Homo sapien
tgtgaggattgacgaagccctagag

SEQ ID NO: 2818493 - DNA, 25 bp, Homo sapien
gattcacaacagtccctgagtcgaa

SEQ ID NO: 2818494 - DNA, 25 bp, Homo sapien
caggatcacaggaaaggtctgttca

SEQ ID NO: 2818495 - DNA, 25 bp, Homo sapien
cacaacagtccctgagtcgaaggtc

SEQ ID NO: 2818496 - DNA, 25 bp, Homo sapien
ggtctgttcagattcacaacagtcc

SEQ ID NO: 2818497 - DNA, 25 bp, Homo sapien
gccagaccttacacattgccaggat

SEQ ID NO: 2818498 - DNA, 25 bp, Homo sapien
tacttatttgactcagagactctgt

SEQ ID NO: 2818499 - DNA, 25 bp, Homo sapien
gagactctgttactctcacacattt

SEQ ID NO: 2818500 - DNA, 25 bp, Homo sapien
gaccgtatacttatttgactcagag

SEQ ID NO: 2818501 - DNA, 25 bp, Homo sapien
caatttgatcgtcaactgccagcat

SEQ ID NO: 2818502 - DNA, 25 bp, Homo sapien
gtaccacattaacaacccaatttga

SEQ ID NO: 2818503 - DNA, 25 bp, Homo sapien
taagattttcgtactgcacagattg

SEQ ID NO: 2818504 - DNA, 25 bp, Homo sapien
ctttaagattttcgtactgcacaga

SEQ ID NO: 2818505 - DNA, 25 bp, Homo sapien
aaagcacgcaaaagaatccatccca

SEQ ID NO: 2818506 - DNA, 25 bp, Homo sapien
taaccatagcagtcaagtgtagcag

SEQ ID NO: 2818507 - DNA, 25 bp, Homo sapien
tcagttggcacttcatcaggatcaa

SEQ ID NO: 2818508 - DNA, 25 bp, Homo sapien
catcaggatcaaccacaggtaattg

SEQ ID NO: 2818509 - DNA, 25 bp, Homo sapien
tagcagtcaagtgtagcagccactt

SEQ ID NO: 2818510 - DNA, 25 bp, Homo sapien
ccagcatgtcatgaattacatttcc

SEQ ID NO: 2818511 - DNA, 25 bp, Homo sapien
ttgagatgcccagcatgtcatgaat

SEQ ID NO: 2818512 - DNA, 25 bp, Homo sapien
tgcccagcatgtcatgaattacatt

SEQ ID NO: 2818513 - DNA, 25 bp, Homo sapien
cttaattgagatgcccagcatgtca

SEQ ID NO: 2818514 - DNA, 25 bp, Homo sapien
gcaaggagctaaagctcaaaacctc

SEQ ID NO: 2818515 - DNA, 25 bp, Homo sapien
tggcaaggagctaaagctcaaaacc

SEQ ID NO: 2818516 - DNA, 25 bp, Homo sapien
ttggcaaggagctaaagctcaaaac

SEQ ID NO: 2818517 - DNA, 25 bp, Homo sapien
ctttggcaaggagctaaagctcaaa

SEQ ID NO: 2818518 - DNA, 25 bp, Homo sapien
gctggagcgggcttctctccgggga

SEQ ID NO: 2818519 - DNA, 25 bp, Homo sapien
ttccttctttccgcgttgccgccgc

SEQ ID NO: 2818520 - DNA, 25 bp, Homo sapien
cagctggagcgggcttctctccggg

SEQ ID NO: 2818521 - DNA, 25 bp, Homo sapien
tggagcgggcttctctccggggacg

SEQ ID NO: 2818522 - DNA, 25 bp, Homo sapien
cgcttctctgacctagctgcgcggc

SEQ ID NO: 2818523 - DNA, 25 bp, Homo sapien
tgtagggcttggctcctcgcgatct

SEQ ID NO: 2818524 - DNA, 25 bp, Homo sapien
tggctcctcgcgatcttgttccttt

SEQ ID NO: 2818525 - DNA, 25 bp, Homo sapien
tttcccctccgcttctctgacctag

SEQ ID NO: 2818526 - DNA, 25 bp, Homo sapien
tcggcgctgagcttgcgatcaagtt

SEQ ID NO: 2818527 - DNA, 25 bp, Homo sapien
aaaacttttcctgccgactcagttg

SEQ ID NO: 2818528 - DNA, 25 bp, Homo sapien
cgcctgccctcgtcgagaaaacttt

SEQ ID NO: 2818529 - DNA, 25 bp, Homo sapien
tgcttcctagagtccacagtgcgct

SEQ ID NO: 2818530 - DNA, 25 bp, Homo sapien
ccgggcgcgccaagttaacaaagtg

SEQ ID NO: 2818531 - DNA, 25 bp, Homo sapien
gccaagttaacaaagtgctgggcgg

SEQ ID NO: 2818532 - DNA, 25 bp, Homo sapien
ggcgcgccaagttaacaaagtgctg

SEQ ID NO: 2818533 - DNA, 25 bp, Homo sapien
tcgcccgggcgcgccaagttaacaa

SEQ ID NO: 2818534 - DNA, 25 bp, Homo sapien
taaggagagtggatagagactttcc

SEQ ID NO: 2818535 - DNA, 25 bp, Homo sapien
tccaaggcctctggttttgaactct

SEQ ID NO: 2818536 - DNA, 25 bp, Homo sapien
tgctgagtcagctaactatgagtga

SEQ ID NO: 2818537 - DNA, 25 bp, Homo sapien
tgccacctgtctttatagggccatg

SEQ ID NO: 2818538 - DNA, 25 bp, Homo sapien
gggctcacatagagtggtgagggag

SEQ ID NO: 2818539 - DNA, 25 bp, Homo sapien
accgaagacccgtcctccatcaggg

SEQ ID NO: 2818540 - DNA, 25 bp, Homo sapien
gcagcttcaggaggggctcacatag

SEQ ID NO: 2818541 - DNA, 25 bp, Homo sapien
cttgaccgaagacccgtcctccatc

SEQ ID NO: 2818542 - DNA, 25 bp, Homo sapien
aatgtggcatttatgggtcctggcc

SEQ ID NO: 2818543 - DNA, 25 bp, Homo sapien
tgaagatgtactttgcagcagttcc

SEQ ID NO: 2818544 - DNA, 25 bp, Homo sapien
gcatcggaacattgaagactgagaa

SEQ ID NO: 2818545 - DNA, 25 bp, Homo sapien
cattttacctgtagagcatcggaac

SEQ ID NO: 2818546 - DNA, 25 bp, Homo sapien
gaagtggtctctcacccaaggaagt

SEQ ID NO: 2818547 - DNA, 25 bp, Homo sapien
cacttcacctgatttccttttggga

SEQ ID NO: 2818548 - DNA, 25 bp, Homo sapien
caaaacatggtgtaacttgccttga

SEQ ID NO: 2818549 - DNA, 25 bp, Homo sapien
gctgtgggtactagttattactggc

SEQ ID NO: 2818550 - DNA, 25 bp, Homo sapien
aacgtctccttagttcctctgttgg

SEQ ID NO: 2818551 - DNA, 25 bp, Homo sapien
acgtctccttagttcctctgttgga

SEQ ID NO: 2818552 - DNA, 25 bp, Homo sapien
ccaggtaggagatgtgtgtctgaat

SEQ ID NO: 2818553 - DNA, 25 bp, Homo sapien
cctgtaagccaggtaggagatgtgt

SEQ ID NO: 2818554 - DNA, 25 bp, Homo sapien
tttgtgtggcctgtaagccaggtag

SEQ ID NO: 2818555 - DNA, 25 bp, Homo sapien
ttgtttttgtgtggcctgtaagcca

SEQ ID NO: 2818556 - DNA, 25 bp, Homo sapien
aggtgctctgcccatcccttggata

SEQ ID NO: 2818557 - DNA, 25 bp, Homo sapien
ggtgctctgcccatcccttggatac

SEQ ID NO: 2818558 - DNA, 25 bp, Homo sapien
tctcaggtgctctgcccatcccttg

SEQ ID NO: 2818559 - DNA, 25 bp, Homo sapien
tcaggtgctctgcccatcccttgga

SEQ ID NO: 2818560 - DNA, 25 bp, Homo sapien
gcagcattgacatcgatcactccat

SEQ ID NO: 2818561 - DNA, 25 bp, Homo sapien
agctctttcactttcgggtctattc

SEQ ID NO: 2818562 - DNA, 25 bp, Homo sapien
tggctttgaagtgaccttgagctct

SEQ ID NO: 2818563 - DNA, 25 bp, Homo sapien
tctattctggcactgctgaccattc

SEQ ID NO: 2818564 - DNA, 25 bp, Homo sapien
tgtcagttatatcttctgatgtact

SEQ ID NO: 2818565 - DNA, 25 bp, Homo sapien
caggtgtgtccagaaagctttcggt

SEQ ID NO: 2818566 - DNA, 25 bp, Homo sapien
tatttggtgcgatattcatagaaag

SEQ ID NO: 2818567 - DNA, 25 bp, Homo sapien
taaatggattcttgtcagttatatc

SEQ ID NO: 2818568 - DNA, 25 bp, Homo sapien
gcaaacttagttctctgtccacttt

SEQ ID NO: 2818569 - DNA, 25 bp, Homo sapien
ttcctcccagtgtccatcatgtctt

SEQ ID NO: 2818570 - DNA, 25 bp, Homo sapien
cttcagtagcttattgttttcagtt

SEQ ID NO: 2818571 - DNA, 25 bp, Homo sapien
gtttcttgcaaacttagttctctgt

SEQ ID NO: 2818572 - DNA, 25 bp, Homo sapien
ggagggtaatgggattctgagtgct

SEQ ID NO: 2818573 - DNA, 25 bp, Homo sapien
tagttgctgcatcagtgcttctagc

SEQ ID NO: 2818574 - DNA, 25 bp, Homo sapien
agtgcttctagcacgtgcaccctga

SEQ ID NO: 2818575 - DNA, 25 bp, Homo sapien
ctgctggggtgaatatagagcagtc

SEQ ID NO: 2818576 - DNA, 25 bp, Homo sapien
tttccttggacaaatggctctccat

SEQ ID NO: 2818577 - DNA, 25 bp, Homo sapien
atcttttccttggacaaatggctct

SEQ ID NO: 2818578 - DNA, 25 bp, Homo sapien
cttttccttggacaaatggctctcc

SEQ ID NO: 2818579 - DNA, 25 bp, Homo sapien
tccttttgaatcttttccttggaca

SEQ ID NO: 2818580 - DNA, 25 bp, Homo sapien
gcctctcccttgctgagaattggca

SEQ ID NO: 2818581 - DNA, 25 bp, Homo sapien
ccagtgatttcttccagactttcca

SEQ ID NO: 2818582 - DNA, 25 bp, Homo sapien
cactaggttttgcatggaactcaca

SEQ ID NO: 2818583 - DNA, 25 bp, Homo sapien
tgatctctttgttccccagtgattt

SEQ ID NO: 2818584 - DNA, 25 bp, Homo sapien
tgagatcccaataatgaagcagctg

SEQ ID NO: 2818585 - DNA, 25 bp, Homo sapien
tcctttagaacaagaccgaatctcg

SEQ ID NO: 2818586 - DNA, 25 bp, Homo sapien
aagtcagcgcagtttgggatacagc

SEQ ID NO: 2818587 - DNA, 25 bp, Homo sapien
tgtgagttccccgacagtgcaagtg

SEQ ID NO: 2818588 - DNA, 25 bp, Homo sapien
tttcgagcacatataccgccattgg

SEQ ID NO: 2818589 - DNA, 25 bp, Homo sapien
gaaggtataacactagagaactcct

SEQ ID NO: 2818590 - DNA, 25 bp, Homo sapien
gatagcggaattttcaccataaaga

SEQ ID NO: 2818591 - DNA, 25 bp, Homo sapien
gactgaaagtgtataagattttgga

SEQ ID NO: 2818592 - DNA, 25 bp, Homo sapien
tggaaaagggagtatttctgtgact

SEQ ID NO: 2818593 - DNA, 25 bp, Homo sapien
tgcagtccttcaagcaatttgaaga

SEQ ID NO: 2818594 - DNA, 25 bp, Homo sapien
ggtaatgattcctcctacaggtgca

SEQ ID NO: 2818595 - DNA, 25 bp, Homo sapien
tcttgacttctataggtccttgcag

SEQ ID NO: 2818596 - DNA, 25 bp, Homo sapien
tgtgagctggcctaccaagtgaaag

SEQ ID NO: 2818597 - DNA, 25 bp, Homo sapien
tgagcatggacctgaggagaaatga

SEQ ID NO: 2818598 - DNA, 25 bp, Homo sapien
ccagataaggactaagttcaggtgc

SEQ ID NO: 2818599 - DNA, 25 bp, Homo sapien
aaccaaggcatgaggttacctaaca

SEQ ID NO: 2818600 - DNA, 25 bp, Homo sapien
ccattgttgagggagcaatggagcc

SEQ ID NO: 2818601 - DNA, 25 bp, Homo sapien
ttgttgagggagcaatggagccagc

SEQ ID NO: 2818602 - DNA, 25 bp, Homo sapien
ctgtgagggagcatgaaccccgtgt

SEQ ID NO: 2818603 - DNA, 25 bp, Homo sapien
gctgtgagggagcatgaaccccgtg

SEQ ID NO: 2818604 - DNA, 25 bp, Homo sapien
cccagtgggttcagactgcagtcct

SEQ ID NO: 2818605 - DNA, 25 bp, Homo sapien
ccaagcttgcaagtcggagtccagt

SEQ ID NO: 2818606 - DNA, 25 bp, Homo sapien
tcgacctgttcacgacccagtgggt

SEQ ID NO: 2818607 - DNA, 25 bp, Homo sapien
ggagccgtccacatggtattgggaa

SEQ ID NO: 2818608 - DNA, 25 bp, Homo sapien
cactctcttattacaaatgggtaag

SEQ ID NO: 2818609 - DNA, 25 bp, Homo sapien
cttcactctcttattacaaatgggt

SEQ ID NO: 2818610 - DNA, 25 bp, Homo sapien
tttttcgtctatatccatggtattt

SEQ ID NO: 2818611 - DNA, 25 bp, Homo sapien
tgggtttttttcgtctatatccatg

SEQ ID NO: 2818612 - DNA, 25 bp, Homo sapien
ttcctgaaacacggatgtgtcagtg

SEQ ID NO: 2818613 - DNA, 25 bp, Homo sapien
cctgaaacacggatgtgtcagtgta

SEQ ID NO: 2818614 - DNA, 25 bp, Homo sapien
tcctgaaacacggatgtgtcagtgt

SEQ ID NO: 2818615 - DNA, 25 bp, Homo sapien
ctgaaacacggatgtgtcagtgtag

SEQ ID NO: 2818616 - DNA, 25 bp, Homo sapien
tccagcttgtgctttcccactgtct

SEQ ID NO: 2818617 - DNA, 25 bp, Homo sapien
tcacttatatctgaggttgtcaaag

SEQ ID NO: 2818618 - DNA, 25 bp, Homo sapien
ctttgaaatacttgctcgctccagg

SEQ ID NO: 2818619 - DNA, 25 bp, Homo sapien
caaagttttgcctattgtaagtgaa

SEQ ID NO: 2818620 - DNA, 25 bp, Homo sapien
catgtgtaagatgattaaaagggcc

SEQ ID NO: 2818621 - DNA, 25 bp, Homo sapien
aactaattttatcatggtcagagag

SEQ ID NO: 2818622 - DNA, 25 bp, Homo sapien
ttctgtggtccaacatgtgtaagat

SEQ ID NO: 2818623 - DNA, 25 bp, Homo sapien
aaagtgtgttcaggtatgttctgtg

SEQ ID NO: 2818624 - DNA, 25 bp, Homo sapien
ggcccatagagctagctttattcag

SEQ ID NO: 2818625 - DNA, 25 bp, Homo sapien
gtcatttctcgtggttatcagcctc

SEQ ID NO: 2818626 - DNA, 25 bp, Homo sapien
ttgcctccaaggacacccatagagt

SEQ ID NO: 2818627 - DNA, 25 bp, Homo sapien
agctttattcagagtttcattgcaa

SEQ ID NO: 2818628 - DNA, 25 bp, Homo sapien
gttggggctagatcagccttttggc

SEQ ID NO: 2818629 - DNA, 25 bp, Homo sapien
ttggttggggctagatcagcctttt

SEQ ID NO: 2818630 - DNA, 25 bp, Homo sapien
ggaggaatcaggagctgttccacat

SEQ ID NO: 2818631 - DNA, 25 bp, Homo sapien
cagttggttggggctagatcagcct

SEQ ID NO: 2818632 - DNA, 25 bp, Homo sapien
tgacttgtccttgctatctttgtcc

SEQ ID NO: 2818633 - DNA, 25 bp, Homo sapien
gtggctttcggttgtgaatgacagc

SEQ ID NO: 2818634 - DNA, 25 bp, Homo sapien
tgtttttggcaaggacagagatgtt

SEQ ID NO: 2818635 - DNA, 25 bp, Homo sapien
gcctgtggctttcggttgtgaatga

SEQ ID NO: 2818636 - DNA, 25 bp, Homo sapien
tctatatcccacttggggacagaaa

SEQ ID NO: 2818637 - DNA, 25 bp, Homo sapien
tatatcccacttggggacagaaaat

SEQ ID NO: 2818638 - DNA, 25 bp, Homo sapien
aatggatgcatcagcaatgcaaagg

SEQ ID NO: 2818639 - DNA, 25 bp, Homo sapien
agaaaatggatgcatcagcaatgca

SEQ ID NO: 2818640 - DNA, 25 bp, Homo sapien
gttaatgatggctatttttctttgt

SEQ ID NO: 2818641 - DNA, 25 bp, Homo sapien
gtgcctccatatgttaatgatggct

SEQ ID NO: 2818642 - DNA, 25 bp, Homo sapien
tgtgcctccatatgttaatgatggc

SEQ ID NO: 2818643 - DNA, 25 bp, Homo sapien
ggagaggagttagcagaggctcccc

SEQ ID NO: 2818644 - DNA, 25 bp, Homo sapien
cccactacagaggagtcggagtgaa

SEQ ID NO: 2818645 - DNA, 25 bp, Homo sapien
gagtgaacatcctgacatgcccagt

SEQ ID NO: 2818646 - DNA, 25 bp, Homo sapien
aacaatggctacactgacagatggc

SEQ ID NO: 2818647 - DNA, 25 bp, Homo sapien
tttttcaagggccagaagttgcaat

SEQ ID NO: 2818648 - DNA, 25 bp, Homo sapien
cagaagttgcaattctttagaggac

SEQ ID NO: 2818649 - DNA, 25 bp, Homo sapien
tcaagggccagaagttgcaattctt

SEQ ID NO: 2818650 - DNA, 25 bp, Homo sapien
gttgcaattctttagaggaccaccc

SEQ ID NO: 2818651 - DNA, 25 bp, Homo sapien
gggatgtattctagaagtcaagaga

SEQ ID NO: 2818652 - DNA, 25 bp, Homo sapien
agttctttcatgttgctaccagtta

SEQ ID NO: 2818653 - DNA, 25 bp, Homo sapien
tggagatggcatgattgaagtgtca

SEQ ID NO: 2818654 - DNA, 25 bp, Homo sapien
ataattatttttctagcctaaatgg

SEQ ID NO: 2818655 - DNA, 25 bp, Homo sapien
gaacagaatgtaatcaagcaaggag

SEQ ID NO: 2818656 - DNA, 25 bp, Homo sapien
catgtcgttcctggctcttccgtga

SEQ ID NO: 2818657 - DNA, 25 bp, Homo sapien
gtctcagactcacaccaataaaggt

SEQ ID NO: 2818658 - DNA, 25 bp, Homo sapien
tctggatatagtttgcaatggtagg

SEQ ID NO: 2818659 - DNA, 25 bp, Homo sapien
gcatgtctgctaggaacttctaagg

SEQ ID NO: 2818660 - DNA, 25 bp, Homo sapien
tatgcggcatactaatgcttgctcc

SEQ ID NO: 2818661 - DNA, 25 bp, Homo sapien
catgggttctgacatccaacagagg

SEQ ID NO: 2818662 - DNA, 25 bp, Homo sapien
ggaagaagcccagcattacaccttt

SEQ ID NO: 2818663 - DNA, 25 bp, Homo sapien
ttccacatgcagtgagtagttctcc

SEQ ID NO: 2818664 - DNA, 25 bp, Homo sapien
cagtgagtagttctccatcctcctg

SEQ ID NO: 2818665 - DNA, 25 bp, Homo sapien
catgcagtgagtagttctccatcct

SEQ ID NO: 2818666 - DNA, 25 bp, Homo sapien
aattccacatgcagtgagtagttct

SEQ ID NO: 2818667 - DNA, 25 bp, Homo sapien
catcagtggaccatccattggcgct

SEQ ID NO: 2818668 - DNA, 25 bp, Homo sapien
tggcgcttccaatgtgtgcactccc

SEQ ID NO: 2818669 - DNA, 25 bp, Homo sapien
tgtcatcgatttctgggtgctcaga

SEQ ID NO: 2818670 - DNA, 25 bp, Homo sapien
gacaataccatttgttgtcatcgat

SEQ ID NO: 2818671 - DNA, 25 bp, Homo sapien
agagcaaatccacatgaatgagtcc

SEQ ID NO: 2818672 - DNA, 25 bp, Homo sapien
gagcaaatccacatgaatgagtcca

SEQ ID NO: 2818673 - DNA, 25 bp, Homo sapien
agcaaatccacatgaatgagtccat

SEQ ID NO: 2818674 - DNA, 25 bp, Homo sapien
tcttctggtctgacatggccgctgt

SEQ ID NO: 2818675 - DNA, 25 bp, Homo sapien
ctcaagtttggaagagtctcctgtt

SEQ ID NO: 2818676 - DNA, 25 bp, Homo sapien
ggttcttttcacatccctcattcct

SEQ ID NO: 2818677 - DNA, 25 bp, Homo sapien
ccagcaaactcaaagcttggtataa

SEQ ID NO: 2818678 - DNA, 25 bp, Homo sapien
ttgccttctctagtctgaggccagt

SEQ ID NO: 2818679 - DNA, 25 bp, Homo sapien
ctcattctctttacagcggcagttt

SEQ ID NO: 2818680 - DNA, 25 bp, Homo sapien
tacagcggcagtttgctcactcttg

SEQ ID NO: 2818681 - DNA, 25 bp, Homo sapien
ccagtgtggatcctgtataccagca

SEQ ID NO: 2818682 - DNA, 25 bp, Homo sapien
ggtagtgacacagtagcatctcttg

SEQ ID NO: 2818683 - DNA, 25 bp, Homo sapien
ggtagagtcaataattccacctttg

SEQ ID NO: 2818684 - DNA, 25 bp, Homo sapien
taagaaggttgctgtttgcagaagg

SEQ ID NO: 2818685 - DNA, 25 bp, Homo sapien
cacctttgagtatctcagtatgccc

SEQ ID NO: 2818686 - DNA, 25 bp, Homo sapien
tccatcgtatctattggcaagtcca

SEQ ID NO: 2818687 - DNA, 25 bp, Homo sapien
tattggcaagtccatgaattctgcc

SEQ ID NO: 2818688 - DNA, 25 bp, Homo sapien
ttgtcaagtccatcgtatctattgg

SEQ ID NO: 2818689 - DNA, 25 bp, Homo sapien
ttccatctaatatattgtcaagtcc

SEQ ID NO: 2818690 - DNA, 25 bp, Homo sapien
tttggagtctttcataggttccttg

SEQ ID NO: 2818691 - DNA, 25 bp, Homo sapien
tggagtctttcataggttccttgtc

SEQ ID NO: 2818692 - DNA, 25 bp, Homo sapien
gagtctttcataggttccttgtcca

SEQ ID NO: 2818693 - DNA, 25 bp, Homo sapien
gaagtctgtccctctcattttggag

SEQ ID NO: 2818694 - DNA, 25 bp, Homo sapien
caggtcctggttaggtccaagttca

SEQ ID NO: 2818695 - DNA, 25 bp, Homo sapien
ccaagttcagggacatggcggtgat

SEQ ID NO: 2818696 - DNA, 25 bp, Homo sapien
tagctttacccaagactagatctgg

SEQ ID NO: 2818697 - DNA, 25 bp, Homo sapien
tctagtgtaactggcagtagatcca

SEQ ID NO: 2818698 - DNA, 25 bp, Homo sapien
caccactgggccagtcatggatgca

SEQ ID NO: 2818699 - DNA, 25 bp, Homo sapien
cactgggccagtcatggatgcaggt

SEQ ID NO: 2818700 - DNA, 25 bp, Homo sapien
tgggagaagtaagccagcaggctgt

SEQ ID NO: 2818701 - DNA, 25 bp, Homo sapien
atgggagaagtaagccagcaggctg

SEQ ID NO: 2818702 - DNA, 25 bp, Homo sapien
catagctggacagttggctgtaagg

SEQ ID NO: 2818703 - DNA, 25 bp, Homo sapien
tagctggacagttggctgtaaggaa

SEQ ID NO: 2818704 - DNA, 25 bp, Homo sapien
gtgggcatagctggacagttggctg

SEQ ID NO: 2818705 - DNA, 25 bp, Homo sapien
ggcatagctggacagttggctgtaa

SEQ ID NO: 2818706 - DNA, 25 bp, Homo sapien
cctttgtgttactctggtctggtca

SEQ ID NO: 2818707 - DNA, 25 bp, Homo sapien
ttcatagaaatcatggaccatgagg

SEQ ID NO: 2818708 - DNA, 25 bp, Homo sapien
gttactctggtctggtcatttttca

SEQ ID NO: 2818709 - DNA, 25 bp, Homo sapien
ttgcctttgtgttactctggtctgg

SEQ ID NO: 2818710 - DNA, 25 bp, Homo sapien
gaatcttcagtcccagttctaaagc

SEQ ID NO: 2818711 - DNA, 25 bp, Homo sapien
agtggcccatagcactgctctctga

SEQ ID NO: 2818712 - DNA, 25 bp, Homo sapien
ctcagtggcccatagcactgctctc

SEQ ID NO: 2818713 - DNA, 25 bp, Homo sapien
tgaatcttcagtcccagttctaaag

SEQ ID NO: 2818714 - DNA, 25 bp, Homo sapien
gctggcttcggtaacagtctcccca

SEQ ID NO: 2818715 - DNA, 25 bp, Homo sapien
gagcttggctggcttcggtaacagt

SEQ ID NO: 2818716 - DNA, 25 bp, Homo sapien
ccgctggaatctgcaaagtgcctcc

SEQ ID NO: 2818717 - DNA, 25 bp, Homo sapien
gagccgctggaatctgcaaagtgcc

SEQ ID NO: 2818718 - DNA, 25 bp, Homo sapien
catggggaacctttattcttgtgcc

SEQ ID NO: 2818719 - DNA, 25 bp, Homo sapien
tccacatggggaacctttattcttg

SEQ ID NO: 2818720 - DNA, 25 bp, Homo sapien
ccacatggggaacctttattcttgt

SEQ ID NO: 2818721 - DNA, 25 bp, Homo sapien
gggaacctttattcttgtgcctcat

SEQ ID NO: 2818722 - DNA, 25 bp, Homo sapien
ttccttcagaagctcagagttatgt

SEQ ID NO: 2818723 - DNA, 25 bp, Homo sapien
gaggaaggcttgttgcattagctat

SEQ ID NO: 2818724 - DNA, 25 bp, Homo sapien
ggatgttttaataagccagaagtat

SEQ ID NO: 2818725 - DNA, 25 bp, Homo sapien
gctcagagttatgtaaatggcttcc

SEQ ID NO: 2818726 - DNA, 25 bp, Homo sapien
tgaaggaatgatattggtgtcactg

SEQ ID NO: 2818727 - DNA, 25 bp, Homo sapien
ggaatgatattggtgtcactgaaaa

SEQ ID NO: 2818728 - DNA, 25 bp, Homo sapien
aaggaatgatattggtgtcactgaa

SEQ ID NO: 2818729 - DNA, 25 bp, Homo sapien
tttgaaggaatgatattggtgtcac

SEQ ID NO: 2818730 - DNA, 25 bp, Homo sapien
tggatgctgtagcacaaaaaatgat

SEQ ID NO: 2818731 - DNA, 25 bp, Homo sapien
ggatgctgtagcacaaaaaatgatg

SEQ ID NO: 2818732 - DNA, 25 bp, Homo sapien
gatgctgtagcacaaaaaatgatgt

SEQ ID NO: 2818733 - DNA, 25 bp, Homo sapien
tctggatgctgtagcacaaaaaatg

SEQ ID NO: 2818734 - DNA, 25 bp, Homo sapien
tgggggaagaaggagccacaatcat

SEQ ID NO: 2818735 - DNA, 25 bp, Homo sapien
ctgggggaagaaggagccacaatca

SEQ ID NO: 2818736 - DNA, 25 bp, Homo sapien
ctttcaaactactccaagtcttgca

SEQ ID NO: 2818737 - DNA, 25 bp, Homo sapien
tctttcaaactactccaagtcttgc

SEQ ID NO: 2818738 - DNA, 25 bp, Homo sapien
cagctgcttttagaagtcacaagtt

SEQ ID NO: 2818739 - DNA, 25 bp, Homo sapien
ttctttcaaactactccaagtcttg

SEQ ID NO: 2818740 - DNA, 25 bp, Homo sapien
gacttttccacgaggttgcttgggc

SEQ ID NO: 2818741 - DNA, 25 bp, Homo sapien
taacggtcaaagtagtcctaggcca

SEQ ID NO: 2818742 - DNA, 25 bp, Homo sapien
gctcagttggcgctgctgtctacag

SEQ ID NO: 2818743 - DNA, 25 bp, Homo sapien
cctaggccagctcatatgcaagagg

SEQ ID NO: 2818744 - DNA, 25 bp, Homo sapien
tgtgcaccttgcaaccaaccagagt

SEQ ID NO: 2818745 - DNA, 25 bp, Homo sapien
tcaaggatgagataagcagctcgct

SEQ ID NO: 2818746 - DNA, 25 bp, Homo sapien
tgggagccaaaatgtcaggagagcc

SEQ ID NO: 2818747 - DNA, 25 bp, Homo sapien
gaaattccaattcccaaggcgacag

SEQ ID NO: 2818748 - DNA, 25 bp, Homo sapien
ttatgctcctaagatccattgcttc

SEQ ID NO: 2818749 - DNA, 25 bp, Homo sapien
tctcccattagagaaaaagcttgtc

SEQ ID NO: 2818750 - DNA, 25 bp, Homo sapien
aacttctctcccattagagaaaaag

SEQ ID NO: 2818751 - DNA, 25 bp, Homo sapien
agcttgtccagggttctggttggtt

SEQ ID NO: 2818752 - DNA, 25 bp, Homo sapien
caatgtctggtatggtaaaacatgc

SEQ ID NO: 2818753 - DNA, 25 bp, Homo sapien
taaaggagcaagttgtttgcctggc

SEQ ID NO: 2818754 - DNA, 25 bp, Homo sapien
tgggctgctggaagcaactgtttca

SEQ ID NO: 2818755 - DNA, 25 bp, Homo sapien
taacattccataaggctctgcttct

SEQ ID NO: 2818756 - DNA, 25 bp, Homo sapien
tccaaagggagcctggatggctgcc

SEQ ID NO: 2818757 - DNA, 25 bp, Homo sapien
cctgcataatgtatcttggcatcca

SEQ ID NO: 2818758 - DNA, 25 bp, Homo sapien
ccatcattgcccataaaagccttca

SEQ ID NO: 2818759 - DNA, 25 bp, Homo sapien
ctttgtatctcccatcattgcccat

SEQ ID NO: 2818760 - DNA, 25 bp, Homo sapien
ctgactcctgcattgatgatccaaa

SEQ ID NO: 2818761 - DNA, 25 bp, Homo sapien
aatgacgtgactgattttgctagga

SEQ ID NO: 2818762 - DNA, 25 bp, Homo sapien
catagaactagttctgtaattgacc

SEQ ID NO: 2818763 - DNA, 25 bp, Homo sapien
cagatcattccaggtggtagaatct

SEQ ID NO: 2818764 - DNA, 25 bp, Homo sapien
tggtcctctaaggctatgtggccac

SEQ ID NO: 2818765 - DNA, 25 bp, Homo sapien
ctggtcctctaaggctatgtggcca

SEQ ID NO: 2818766 - DNA, 25 bp, Homo sapien
attaagctggtcctctaaggctatg

SEQ ID NO: 2818767 - DNA, 25 bp, Homo sapien
taagctggtcctctaaggctatgtg

SEQ ID NO: 2818768 - DNA, 25 bp, Homo sapien
gaagtttagtggagttatctgggaa

SEQ ID NO: 2818769 - DNA, 25 bp, Homo sapien
cagaagtttagtggagttatctggg

SEQ ID NO: 2818770 - DNA, 25 bp, Homo sapien
caccagaagtttagtggagttatct

SEQ ID NO: 2818771 - DNA, 25 bp, Homo sapien
tgccaccagaagtttagtggagtta

SEQ ID NO: 2818772 - DNA, 25 bp, Homo sapien
cggccactttaagagagtttcacca

SEQ ID NO: 2818773 - DNA, 25 bp, Homo sapien
actaaaaccattctacatcattctg

SEQ ID NO: 2818774 - DNA, 25 bp, Homo sapien
ttccagcaacactctttacccaaat

SEQ ID NO: 2818775 - DNA, 25 bp, Homo sapien
tatgtctcaaaaatcattacttcaa

SEQ ID NO: 2818776 - DNA, 25 bp, Homo sapien
gctcatgacatgtgggcctgtggct

SEQ ID NO: 2818777 - DNA, 25 bp, Homo sapien
tgcaagctctagatctggaagtttc

SEQ ID NO: 2818778 - DNA, 25 bp, Homo sapien
gaggaatacacagttgcgtctgtgc

SEQ ID NO: 2818779 - DNA, 25 bp, Homo sapien
gaagtttctgtaaagcgcagaccag

SEQ ID NO: 2818780 - DNA, 25 bp, Homo sapien
tgaagcttaaacaaagtatcactgt

SEQ ID NO: 2818781 - DNA, 25 bp, Homo sapien
ctgaagcttaaacaaagtatcactg

SEQ ID NO: 2818782 - DNA, 25 bp, Homo sapien
gaagcttaaacaaagtatcactgtc

SEQ ID NO: 2818783 - DNA, 25 bp, Homo sapien
tatttactagtttccttggtgtcat

SEQ ID NO: 2818784 - DNA, 25 bp, Homo sapien
atagcatccactgtcgggcccacca

SEQ ID NO: 2818785 - DNA, 25 bp, Homo sapien
ccaccagattatttactagtttcct

SEQ ID NO: 2818786 - DNA, 25 bp, Homo sapien
ccactgtcgggcccaccagattatt

SEQ ID NO: 2818787 - DNA, 25 bp, Homo sapien
actctctggatgtgtcgggcaggct

SEQ ID NO: 2818788 - DNA, 25 bp, Homo sapien
agtaactctgggaattcagtgcatt

SEQ ID NO: 2818789 - DNA, 25 bp, Homo sapien
tagatgccgccagaatatttgactc

SEQ ID NO: 2818790 - DNA, 25 bp, Homo sapien
tttttccccttcagctagatgccgc

SEQ ID NO: 2818791 - DNA, 25 bp, Homo sapien
ttgtacttcattatagcactctttc

SEQ ID NO: 2818792 - DNA, 25 bp, Homo sapien
gtacttcattatagcactctttctc

SEQ ID NO: 2818793 - DNA, 25 bp, Homo sapien
ctttgtacttcattatagcactctt

SEQ ID NO: 2818794 - DNA, 25 bp, Homo sapien
cactttgtacttcattatagcactc

SEQ ID NO: 2818795 - DNA, 25 bp, Homo sapien
tactttctgttttgctcccagatct

SEQ ID NO: 2818796 - DNA, 25 bp, Homo sapien
gtactttctgttttgctcccagatc

SEQ ID NO: 2818797 - DNA, 25 bp, Homo sapien
ttctgttttgctcccagatctccag

SEQ ID NO: 2818798 - DNA, 25 bp, Homo sapien
ctttctgttttgctcccagatctcc

SEQ ID NO: 2818799 - DNA, 25 bp, Homo sapien
ttttctgattcccatatgcccatag

SEQ ID NO: 2818800 - DNA, 25 bp, Homo sapien
tccatgaaaatacccttctagatgt

SEQ ID NO: 2818801 - DNA, 25 bp, Homo sapien
ccttaaactcaccagtcaatggtga

SEQ ID NO: 2818802 - DNA, 25 bp, Homo sapien
gacttcactgtaggcttctgaaaaa

SEQ ID NO: 2818803 - DNA, 25 bp, Homo sapien
tccttgtgaagtggcatcactgtct

SEQ ID NO: 2818804 - DNA, 25 bp, Homo sapien
tataggtcaaactccttttcgctga

SEQ ID NO: 2818805 - DNA, 25 bp, Homo sapien
ctctgagaagggctttaacatctgt

SEQ ID NO: 2818806 - DNA, 25 bp, Homo sapien
cactggattggatttgcctgttgtc

SEQ ID NO: 2818807 - DNA, 25 bp, Homo sapien
tgaaaagggaaatgtggcagaccgc

SEQ ID NO: 2818808 - DNA, 25 bp, Homo sapien
tattcctatcggcacaactgctggc

SEQ ID NO: 2818809 - DNA, 25 bp, Homo sapien
cagaccgcagcagattttattggca

SEQ ID NO: 2818810 - DNA, 25 bp, Homo sapien
tcacgggtgcacaagagaggcgtct

SEQ ID NO: 2818811 - DNA, 25 bp, Homo sapien
tgtcgcagtccagccgaaaatcaga

SEQ ID NO: 2818812 - DNA, 25 bp, Homo sapien
tgggaaaatctgagctgagtccaac

SEQ ID NO: 2818813 - DNA, 25 bp, Homo sapien
cgaaaatcagatcttttacatggga

SEQ ID NO: 2818814 - DNA, 25 bp, Homo sapien
cacatcagaggctattgatctctct

SEQ ID NO: 2818815 - DNA, 25 bp, Homo sapien
aaatattctcttgtgagtgccttac

SEQ ID NO: 2818816 - DNA, 25 bp, Homo sapien
tagataggatcgtatgatgggtgat

SEQ ID NO: 2818817 - DNA, 25 bp, Homo sapien
ctaaggaaaatgacgaagtagatag

SEQ ID NO: 2818818 - DNA, 25 bp, Homo sapien
tgacgaagtagataggatcgtatga

SEQ ID NO: 2818819 - DNA, 25 bp, Homo sapien
gtcttctcagctgctgtaacatgat

SEQ ID NO: 2818820 - DNA, 25 bp, Homo sapien
tcttctcagctgctgtaacatgatg

SEQ ID NO: 2818821 - DNA, 25 bp, Homo sapien
gcagcattgatgtgatatatgttgt

SEQ ID NO: 2818822 - DNA, 25 bp, Homo sapien
aatattcagtatgcagcttgggccc

SEQ ID NO: 2818823 - DNA, 25 bp, Homo sapien
atattcagtatgcagcttgggccca

SEQ ID NO: 2818824 - DNA, 25 bp, Homo sapien
aaatattcagtatgcagcttgggcc

SEQ ID NO: 2818825 - DNA, 25 bp, Homo sapien
agaaatattcagtatgcagcttggg

SEQ ID NO: 2818826 - DNA, 25 bp, Homo sapien
cctctttaataccaaacttgccaca

SEQ ID NO: 2818827 - DNA, 25 bp, Homo sapien
ctttaataccaaacttgccacagga

SEQ ID NO: 2818828 - DNA, 25 bp, Homo sapien
tctttaataccaaacttgccacagg

SEQ ID NO: 2818829 - DNA, 25 bp, Homo sapien
tctgagcctactgtgttgttaggac

SEQ ID NO: 2818830 - DNA, 25 bp, Homo sapien
gagcctactgtgttgttaggacatt

SEQ ID NO: 2818831 - DNA, 25 bp, Homo sapien
actgtgttgttaggacattttatcc

SEQ ID NO: 2818832 - DNA, 25 bp, Homo sapien
gtgttgttaggacattttatcctca

SEQ ID NO: 2818833 - DNA, 25 bp, Homo sapien
ctgacagcaggagataattgggaat

SEQ ID NO: 2818834 - DNA, 25 bp, Homo sapien
taattgggaattcaaccctgaacaa

SEQ ID NO: 2818835 - DNA, 25 bp, Homo sapien
atagagctaattacatttgatgccg

SEQ ID NO: 2818836 - DNA, 25 bp, Homo sapien
tgccgaaggctttgttttatccagc

SEQ ID NO: 2818837 - DNA, 25 bp, Homo sapien
cttgtctctacctgaaattatatca

SEQ ID NO: 2818838 - DNA, 25 bp, Homo sapien
aatccttagaaaggtcattcctgct

SEQ ID NO: 2818839 - DNA, 25 bp, Homo sapien
ttgttcttcacttgtctctacctga

SEQ ID NO: 2818840 - DNA, 25 bp, Homo sapien
tccttagaaaggtcattcctgctgt

SEQ ID NO: 2818841 - DNA, 25 bp, Homo sapien
caactaaggctgagaaatcataagc

SEQ ID NO: 2818842 - DNA, 25 bp, Homo sapien
aggtgactaagagccatgcaaggta

SEQ ID NO: 2818843 - DNA, 25 bp, Homo sapien
tattctcaatgaggcagcatgtgtg

SEQ ID NO: 2818844 - DNA, 25 bp, Homo sapien
gatagaactttagacctgagatacg

SEQ ID NO: 2818845 - DNA, 25 bp, Homo sapien
tgtgatgccggagaacaggaagcac

SEQ ID NO: 2818846 - DNA, 25 bp, Homo sapien
tccgagtccggctgtgtgaagtgcc

SEQ ID NO: 2818847 - DNA, 25 bp, Homo sapien
tccaaatgtggtagcagtttccagc

SEQ ID NO: 2818848 - DNA, 25 bp, Homo sapien
aatgtctccctgtcaaggatccgag

SEQ ID NO: 2818849 - DNA, 25 bp, Homo sapien
actctttacataaattgtgtcaatt

SEQ ID NO: 2818850 - DNA, 25 bp, Homo sapien
gcttctaaatgatatcactctttac

SEQ ID NO: 2818851 - DNA, 25 bp, Homo sapien
tactttcctaattagcttctaaatg

SEQ ID NO: 2818852 - DNA, 25 bp, Homo sapien
tgactgacaggtttgtttactttcc

SEQ ID NO: 2818853 - DNA, 25 bp, Homo sapien
tcaaaacagcaacctacaggcaaca

SEQ ID NO: 2818854 - DNA, 25 bp, Homo sapien
tagctatacaggaaatcaaaacagc

SEQ ID NO: 2818855 - DNA, 25 bp, Homo sapien
tttggcccatggataaaacttctta

SEQ ID NO: 2818856 - DNA, 25 bp, Homo sapien
cataatataggtcacaaactttggc

SEQ ID NO: 2818857 - DNA, 25 bp, Homo sapien
gaaaggctggatgattttacaatac

SEQ ID NO: 2818858 - DNA, 25 bp, Homo sapien
catttgagtttgacacccctgataa

SEQ ID NO: 2818859 - DNA, 25 bp, Homo sapien
taaccgagtgatgggaaatttctct

SEQ ID NO: 2818860 - DNA, 25 bp, Homo sapien
gataggtattccttagccggcttca

SEQ ID NO: 2818861 - DNA, 25 bp, Homo sapien
taattcttatctggtgacccattaa

SEQ ID NO: 2818862 - DNA, 25 bp, Homo sapien
tcaagtgtgattaaaagttggtcat

SEQ ID NO: 2818863 - DNA, 25 bp, Homo sapien
caagtatgctgtacaatcatgagat

SEQ ID NO: 2818864 - DNA, 25 bp, Homo sapien
tctgagaatcagttatcaagtatgc

SEQ ID NO: 2818865 - DNA, 25 bp, Homo sapien
cctcaattttgggaggtgacatttt

SEQ ID NO: 2818866 - DNA, 25 bp, Homo sapien
ctcaattttgggaggtgacattttc

SEQ ID NO: 2818867 - DNA, 25 bp, Homo sapien
catcttctttttctcggatctttag

SEQ ID NO: 2818868 - DNA, 25 bp, Homo sapien
tatctttaagttcttgggccttgca

SEQ ID NO: 2818869 - DNA, 25 bp, Homo sapien
gggccttgcatattgcatcttcttt

SEQ ID NO: 2818870 - DNA, 25 bp, Homo sapien
agttcatagggcttggtttgcttat

SEQ ID NO: 2818871 - DNA, 25 bp, Homo sapien
tgaagaaatctggatatggaaacat

SEQ ID NO: 2818872 - DNA, 25 bp, Homo sapien
aatttctgatacagaaggatgttcc

SEQ ID NO: 2818873 - DNA, 25 bp, Homo sapien
gaatttctgatacagaaggatgttc

SEQ ID NO: 2818874 - DNA, 25 bp, Homo sapien
ggaatttctgatacagaaggatgtt

SEQ ID NO: 2818875 - DNA, 25 bp, Homo sapien
gggaatttctgatacagaaggatgt

SEQ ID NO: 2818876 - DNA, 25 bp, Homo sapien
gttggtatggcttttctcagtatat

SEQ ID NO: 2818877 - DNA, 25 bp, Homo sapien
tggttggtatggcttttctcagtat

SEQ ID NO: 2818878 - DNA, 25 bp, Homo sapien
gtatatttagtctcctttttgagat

SEQ ID NO: 2818879 - DNA, 25 bp, Homo sapien
tcagtatatttagtctcctttttga

SEQ ID NO: 2818880 - DNA, 25 bp, Homo sapien
ttagaagagaatgatagtagaaacc

SEQ ID NO: 2818881 - DNA, 25 bp, Homo sapien
gttctattgcaatttcttccgatga

SEQ ID NO: 2818882 - DNA, 25 bp, Homo sapien
tatagacactgtccatggagccttg

SEQ ID NO: 2818883 - DNA, 25 bp, Homo sapien
gatgaaggccttactttctgaaggc

SEQ ID NO: 2818884 - DNA, 25 bp, Homo sapien
gcttgccatagcaactatacagatt

SEQ ID NO: 2818885 - DNA, 25 bp, Homo sapien
tgcttgccatagcaactatacagat

SEQ ID NO: 2818886 - DNA, 25 bp, Homo sapien
tacgtgttctgactgctcaactgac

SEQ ID NO: 2818887 - DNA, 25 bp, Homo sapien
tctagtaccaaatagtcaagctgtg

SEQ ID NO: 2818888 - DNA, 25 bp, Homo sapien
catactctgtctatagaagatggca

SEQ ID NO: 2818889 - DNA, 25 bp, Homo sapien
tgtgcgcactcggtgtctctgtgtc

SEQ ID NO: 2818890 - DNA, 25 bp, Homo sapien
aaagtgttactgagtctgcggttag

SEQ ID NO: 2818891 - DNA, 25 bp, Homo sapien
tgcggttaggtctacattactgtgg

SEQ ID NO: 2818892 - DNA, 25 bp, Homo sapien
tactgtggtagaactagaaattcct

SEQ ID NO: 2818893 - DNA, 25 bp, Homo sapien
tctatatatagcttcgtgacttccc

SEQ ID NO: 2818894 - DNA, 25 bp, Homo sapien
cactggtgtgaagaagttacagatg

SEQ ID NO: 2818895 - DNA, 25 bp, Homo sapien
tgaagaagttacagatgtttcttct

SEQ ID NO: 2818896 - DNA, 25 bp, Homo sapien
tgtgaagaagttacagatgtttctt

SEQ ID NO: 2818897 - DNA, 25 bp, Homo sapien
ctcactggtgtgaagaagttacaga

SEQ ID NO: 2818898 - DNA, 25 bp, Homo sapien
taagctgttcaatgttaaattgcac

SEQ ID NO: 2818899 - DNA, 25 bp, Homo sapien
cactgttataggtgctaaaatgact

SEQ ID NO: 2818900 - DNA, 25 bp, Homo sapien
ggaaaagcaacataagtcagcaaat

SEQ ID NO: 2818901 - DNA, 25 bp, Homo sapien
cctagatctgttgttgaagagctaa

SEQ ID NO: 2818902 - DNA, 25 bp, Homo sapien
gagggtgtctattgctctgagctag

SEQ ID NO: 2818903 - DNA, 25 bp, Homo sapien
taactgtctagcataccttacggat

SEQ ID NO: 2818904 - DNA, 25 bp, Homo sapien
tggcccaaatcagactcgcatatct

SEQ ID NO: 2818905 - DNA, 25 bp, Homo sapien
tggtcagttcaacagtgctgtccac

SEQ ID NO: 2818906 - DNA, 25 bp, Homo sapien
gacagagttggcattgaaagtggaa

SEQ ID NO: 2818907 - DNA, 25 bp, Homo sapien
gattagtgttggatgtagatgtacc

SEQ ID NO: 2818908 - DNA, 25 bp, Homo sapien
tattgcactgacagagttggcattg

SEQ ID NO: 2818909 - DNA, 25 bp, Homo sapien
tcatatattgcactgacagagttgg

SEQ ID NO: 2818910 - DNA, 25 bp, Homo sapien
gtgactcttctttgatataaatttc

SEQ ID NO: 2818911 - DNA, 25 bp, Homo sapien
tagaaagtgactcttctttgatata

SEQ ID NO: 2818912 - DNA, 25 bp, Homo sapien
aagtgactcttctttgatataaatt

SEQ ID NO: 2818913 - DNA, 25 bp, Homo sapien
gaaagtgactcttctttgatataaa

SEQ ID NO: 2818914 - DNA, 25 bp, Homo sapien
tcatacaaaggaaagagaatcacat

SEQ ID NO: 2818915 - DNA, 25 bp, Homo sapien
taaaacgcttgataataccttagtc

SEQ ID NO: 2818916 - DNA, 25 bp, Homo sapien
caaaaggctcttacattaggttgta

SEQ ID NO: 2818917 - DNA, 25 bp, Homo sapien
tcagcaactatttagtccaggtaag

SEQ ID NO: 2818918 - DNA, 25 bp, Homo sapien
agtgaaatgtagaacttgctttttc

SEQ ID NO: 2818919 - DNA, 25 bp, Homo sapien
aaagaatagtttggaaagagtgttg

SEQ ID NO: 2818920 - DNA, 25 bp, Homo sapien
ttattgatggtttcttcaaaggaag

SEQ ID NO: 2818921 - DNA, 25 bp, Homo sapien
ttttattgatggtttcttcaaagga

SEQ ID NO: 2818922 - DNA, 25 bp, Homo sapien
ttggaaagagtgttggcaattctcc

SEQ ID NO: 2818923 - DNA, 25 bp, Homo sapien
tcttctcctacatttgatgaaatat

SEQ ID NO: 2818924 - DNA, 25 bp, Homo sapien
ggatcagttgggtcatttaactcag

SEQ ID NO: 2818925 - DNA, 25 bp, Homo sapien
tgaaatatttgtactatatctagtg

SEQ ID NO: 2818926 - DNA, 25 bp, Homo sapien
tactatatctagtgaaaggatcagt

SEQ ID NO: 2818927 - DNA, 25 bp, Homo sapien
gcagctcattactagtgactcagga

SEQ ID NO: 2818928 - DNA, 25 bp, Homo sapien
tcttgtaaataagtcggatactgcc

SEQ ID NO: 2818929 - DNA, 25 bp, Homo sapien
aaagtggccagaggcatattttctc

SEQ ID NO: 2818930 - DNA, 25 bp, Homo sapien
tatcaatcttgcgataggaaagaca

SEQ ID NO: 2818931 - DNA, 25 bp, Homo sapien
caagatgcacggcaaatggtccaaa

SEQ ID NO: 2818932 - DNA, 25 bp, Homo sapien
tctgacagactaagacagggctcaa

SEQ ID NO: 2818933 - DNA, 25 bp, Homo sapien
ggctcaaaaggtgaatgcccctggg

SEQ ID NO: 2818934 - DNA, 25 bp, Homo sapien
taggaagcccttaagaaacactcat

SEQ ID NO: 2818935 - DNA, 25 bp, Homo sapien
tagaaaacccagatgtaacccttga

SEQ ID NO: 2818936 - DNA, 25 bp, Homo sapien
gtaactgatcattcctgcgagcagg

SEQ ID NO: 2818937 - DNA, 25 bp, Homo sapien
taacccctcatcaggtgaagtcagt

SEQ ID NO: 2818938 - DNA, 25 bp, Homo sapien
ccaagtttcccgtgggcaatcccag

SEQ ID NO: 2818939 - DNA, 25 bp, Homo sapien
tatgattgatacctgctcttcttta

SEQ ID NO: 2818940 - DNA, 25 bp, Homo sapien
tgaggtaaagaggagtacttcctcc

SEQ ID NO: 2818941 - DNA, 25 bp, Homo sapien
tattattggtctctgtagggttttg

SEQ ID NO: 2818942 - DNA, 25 bp, Homo sapien
tagtttgtgcgcatagaggttttgt

SEQ ID NO: 2818943 - DNA, 25 bp, Homo sapien
gatcggtctgttgaagacaggtctt

SEQ ID NO: 2818944 - DNA, 25 bp, Homo sapien
tatccttgcacgtgagatcggtctg

SEQ ID NO: 2818945 - DNA, 25 bp, Homo sapien
gcatttttgtagtgcccagtaacag

SEQ ID NO: 2818946 - DNA, 25 bp, Homo sapien
tcgtattgcttcataggccttcctc

SEQ ID NO: 2818947 - DNA, 25 bp, Homo sapien
gcatacagttgtaaattgatccttt

SEQ ID NO: 2818948 - DNA, 25 bp, Homo sapien
ttagaaaatcatttattgcactata

SEQ ID NO: 2818949 - DNA, 25 bp, Homo sapien
tatattagctagtctaaaatagttt

SEQ ID NO: 2818950 - DNA, 25 bp, Homo sapien
aatcacattccctttacccttccag

SEQ ID NO: 2818951 - DNA, 25 bp, Homo sapien
tcagccttcttcctggtatttctgg

SEQ ID NO: 2818952 - DNA, 25 bp, Homo sapien
agccttcttcctggtatttctggtc

SEQ ID NO: 2818953 - DNA, 25 bp, Homo sapien
ttcttcctggtatttctggtcactg

SEQ ID NO: 2818954 - DNA, 25 bp, Homo sapien
cttcctggtatttctggtcactgaa

SEQ ID NO: 2818955 - DNA, 25 bp, Homo sapien
tattgattgcattttggattcgtac

SEQ ID NO: 2818956 - DNA, 25 bp, Homo sapien
tgcattttggattcgtacatcttcc

SEQ ID NO: 2818957 - DNA, 25 bp, Homo sapien
ttttggattcgtacatcttcctcat

SEQ ID NO: 2818958 - DNA, 25 bp, Homo sapien
tgattgcattttggattcgtacatc

SEQ ID NO: 2818959 - DNA, 25 bp, Homo sapien
taagtccatcctgttcttcgtctcc

SEQ ID NO: 2818960 - DNA, 25 bp, Homo sapien
gtccatcctgttcttcgtctccttg

SEQ ID NO: 2818961 - DNA, 25 bp, Homo sapien
ccatcctgttcttcgtctccttgaa

SEQ ID NO: 2818962 - DNA, 25 bp, Homo sapien
gtttctaagtccatcctgttcttcg

SEQ ID NO: 2818963 - DNA, 25 bp, Homo sapien
agtaaccagtccagactacttgatc

SEQ ID NO: 2818964 - DNA, 25 bp, Homo sapien
tagtaaccagtccagactacttgat

SEQ ID NO: 2818965 - DNA, 25 bp, Homo sapien
ttgaagtactaatgcaaacaaaaaa

SEQ ID NO: 2818966 - DNA, 25 bp, Homo sapien
ctaatgcaaacaaaaaaggcaaaag

SEQ ID NO: 2818967 - DNA, 25 bp, Homo sapien
atgcaaacaaaaaaggcaaaagcat

SEQ ID NO: 2818968 - DNA, 25 bp, Homo sapien
cttgaagtactaatgcaaacaaaaa

SEQ ID NO: 2818969 - DNA, 25 bp, Homo sapien
tgagtctgtttagtggtggtttaaa

SEQ ID NO: 2818970 - DNA, 25 bp, Homo sapien
aaaatcatgtattgagctgctatgt

SEQ ID NO: 2818971 - DNA, 25 bp, Homo sapien
ttgtagatgagtctgtttagtggtg

SEQ ID NO: 2818972 - DNA, 25 bp, Homo sapien
catgtattgagctgctatgtaggaa

SEQ ID NO: 2818973 - DNA, 25 bp, Homo sapien
gcagtttttcgcaaatcagaagtgg

SEQ ID NO: 2818974 - DNA, 25 bp, Homo sapien
ggaaaaatcatctaccttgcaactt

SEQ ID NO: 2818975 - DNA, 25 bp, Homo sapien
tatatgtagactacattccaggccc

SEQ ID NO: 2818976 - DNA, 25 bp, Homo sapien
tcagaagtggctgcatacaagcaga

SEQ ID NO: 2818977 - DNA, 25 bp, Homo sapien
cagtaaagccagtactgaatccaac

SEQ ID NO: 2818978 - DNA, 25 bp, Homo sapien
tacgtccattaaagctttcaagcag

SEQ ID NO: 2818979 - DNA, 25 bp, Homo sapien
gaaacaaaatctctcactacgtcca

SEQ ID NO: 2818980 - DNA, 25 bp, Homo sapien
gattttgaacagacataatgcttga

SEQ ID NO: 2818981 - DNA, 25 bp, Homo sapien
gtgaagtttctctctaggtaaagca

SEQ ID NO: 2818982 - DNA, 25 bp, Homo sapien
ttgaaaaaatgtagaccagcagcca

SEQ ID NO: 2818983 - DNA, 25 bp, Homo sapien
ccatagtatttgtgcagagcttctc

SEQ ID NO: 2818984 - DNA, 25 bp, Homo sapien
agtttctctctaggtaaagcacagg

SEQ ID NO: 2818985 - DNA, 25 bp, Homo sapien
taactgcgttaagtggaaatctgcc

SEQ ID NO: 2818986 - DNA, 25 bp, Homo sapien
tatctccccagagcaaatagtgccg

SEQ ID NO: 2818987 - DNA, 25 bp, Homo sapien
catgttagattagaaagtcttttgc

SEQ ID NO: 2818988 - DNA, 25 bp, Homo sapien
tgcgttgacttgagctatctcccca

SEQ ID NO: 2818989 - DNA, 25 bp, Homo sapien
tgtatgcctgtggtgccagctactt

SEQ ID NO: 2818990 - DNA, 25 bp, Homo sapien
aaaatagccagtgtggtggtgtatg

SEQ ID NO: 2818991 - DNA, 25 bp, Homo sapien
ggtgtatgcctgtggtgccagctac

SEQ ID NO: 2818992 - DNA, 25 bp, Homo sapien
gtggtgtatgcctgtggtgccagct

SEQ ID NO: 2818993 - DNA, 25 bp, Homo sapien
cacgttattcaactgaggactgtta

SEQ ID NO: 2818994 - DNA, 25 bp, Homo sapien
gctgtgtcttatggaagacgagatg

SEQ ID NO: 2818995 - DNA, 25 bp, Homo sapien
tatggaagacgagatgttcaagcac

SEQ ID NO: 2818996 - DNA, 25 bp, Homo sapien
cgagatgttcaagcacgttattcaa

SEQ ID NO: 2818997 - DNA, 25 bp, Homo sapien
gcaacacagtgccagagcaggtggt

SEQ ID NO: 2818998 - DNA, 25 bp, Homo sapien
gcagcaacacagtgccagagcaggt

SEQ ID NO: 2818999 - DNA, 25 bp, Homo sapien
ccagagcaggtggttaatttcatat

SEQ ID NO: 2819000 - DNA, 25 bp, Homo sapien
cagcaacacagtgccagagcaggtg

SEQ ID NO: 2819001 - DNA, 25 bp, Homo sapien
cacataagggatagctattagacac

SEQ ID NO: 2819002 - DNA, 25 bp, Homo sapien
ccaagtggagcaatttacataagca

SEQ ID NO: 2819003 - DNA, 25 bp, Homo sapien
tgaagtacatacagttaacccgaac

SEQ ID NO: 2819004 - DNA, 25 bp, Homo sapien
ggaccaaaatgtatgcctagcaaga

SEQ ID NO: 2819005 - DNA, 25 bp, Homo sapien
ggatacttgtgatatgatgctccag

SEQ ID NO: 2819006 - DNA, 25 bp, Homo sapien
tacctataatttccgaggctttcag

SEQ ID NO: 2819007 - DNA, 25 bp, Homo sapien
cacaggtctaaaaatggattcagaa

SEQ ID NO: 2819008 - DNA, 25 bp, Homo sapien
taaaaatggattcagaacggagttc

SEQ ID NO: 2819009 - DNA, 25 bp, Homo sapien
aattcagtacttagatgcagaaact

SEQ ID NO: 2819010 - DNA, 25 bp, Homo sapien
tgcagaaactgctagtttcctattt

SEQ ID NO: 2819011 - DNA, 25 bp, Homo sapien
gaaactgctagtttcctatttaaga

SEQ ID NO: 2819012 - DNA, 25 bp, Homo sapien
actataattaaattcagtacttaga

SEQ ID NO: 2819013 - DNA, 25 bp, Homo sapien
actgggtatgctcccaagatcagca

SEQ ID NO: 2819014 - DNA, 25 bp, Homo sapien
tcagcagtgattttctgattgtaga

SEQ ID NO: 2819015 - DNA, 25 bp, Homo sapien
aattccgcttccacctctccactgg

SEQ ID NO: 2819016 - DNA, 25 bp, Homo sapien
atcagcagtgattttctgattgtag

SEQ ID NO: 2819017 - DNA, 25 bp, Homo sapien
tagtgacagtctgagcttatcaaaa

SEQ ID NO: 2819018 - DNA, 25 bp, Homo sapien
gacagtctgagcttatcaaaatata

SEQ ID NO: 2819019 - DNA, 25 bp, Homo sapien
ctttatagtgacagtctgagcttat

SEQ ID NO: 2819020 - DNA, 25 bp, Homo sapien
tatagtgacagtctgagcttatcaa

SEQ ID NO: 2819021 - DNA, 25 bp, Homo sapien
tgaagcctaagtaaatgttgtttaa

SEQ ID NO: 2819022 - DNA, 25 bp, Homo sapien
cagtctgtataaaaccgattccgca

SEQ ID NO: 2819023 - DNA, 25 bp, Homo sapien
gcaggcagatgatcataatcaaagg

SEQ ID NO: 2819024 - DNA, 25 bp, Homo sapien
gggatgcatcacaacacagtctgta

SEQ ID NO: 2819025 - DNA, 25 bp, Homo sapien
ttccgcaacaaaaaataaggcaggc

SEQ ID NO: 2819026 - DNA, 25 bp, Homo sapien
caggaagatgcacatgccttccaga

SEQ ID NO: 2819027 - DNA, 25 bp, Homo sapien
agatatattacttcagtccatgcag

SEQ ID NO: 2819028 - DNA, 25 bp, Homo sapien
tcccctttgcattgagccagatata

SEQ ID NO: 2819029 - DNA, 25 bp, Homo sapien
catgcagcaggaagatgcacatgcc

SEQ ID NO: 2819030 - DNA, 25 bp, Homo sapien
gaatctcaagatgaattcttttgtg

SEQ ID NO: 2819031 - DNA, 25 bp, Homo sapien
tgtttgattgaatctcaagatgaat

SEQ ID NO: 2819032 - DNA, 25 bp, Homo sapien
caagatgaattcttttgtgattgaa

SEQ ID NO: 2819033 - DNA, 25 bp, Homo sapien
ttttctagctagttccaacaattct

SEQ ID NO: 2819034 - DNA, 25 bp, Homo sapien
aggagaatctttgggctctcctaaa

SEQ ID NO: 2819035 - DNA, 25 bp, Homo sapien
gagaatctttgggctctcctaaacg

SEQ ID NO: 2819036 - DNA, 25 bp, Homo sapien
aatctttgggctctcctaaacgcat

SEQ ID NO: 2819037 - DNA, 25 bp, Homo sapien
gaatctttgggctctcctaaacgca

SEQ ID NO: 2819038 - DNA, 25 bp, Homo sapien
cagactgcataaggactcactcact

SEQ ID NO: 2819039 - DNA, 25 bp, Homo sapien
gggaagcaccagacacctatcaaac

SEQ ID NO: 2819040 - DNA, 25 bp, Homo sapien
tttgggacgaaaaggagtgccgatc

SEQ ID NO: 2819041 - DNA, 25 bp, Homo sapien
tatagccaacctgtatcagtcccca

SEQ ID NO: 2819042 - DNA, 25 bp, Homo sapien
tgggacaaggatagcacagaaaaca

SEQ ID NO: 2819043 - DNA, 25 bp, Homo sapien
ggattctaggtggataacaacttct

SEQ ID NO: 2819044 - DNA, 25 bp, Homo sapien
cttctctgtaggattctaggtggat

SEQ ID NO: 2819045 - DNA, 25 bp, Homo sapien
caatatggatcactatggtattggg

SEQ ID NO: 2819046 - DNA, 25 bp, Homo sapien
gaagatatgcctccacatgtattaa

SEQ ID NO: 2819047 - DNA, 25 bp, Homo sapien
catgataaggggaagatatgcctcc

SEQ ID NO: 2819048 - DNA, 25 bp, Homo sapien
ggtgatttgttaacaggcatattca

SEQ ID NO: 2819049 - DNA, 25 bp, Homo sapien
gttaacaggcatattcataaatcat

SEQ ID NO: 2819050 - DNA, 25 bp, Homo sapien
taaaatgagaatggtatttcctcat

SEQ ID NO: 2819051 - DNA, 25 bp, Homo sapien
ctgtaaaatgagaatggtatttcct

SEQ ID NO: 2819052 - DNA, 25 bp, Homo sapien
agaatggtatttcctcatagagttc

SEQ ID NO: 2819053 - DNA, 25 bp, Homo sapien
atgagaatggtatttcctcatagag

SEQ ID NO: 2819054 - DNA, 25 bp, Homo sapien
gcactggccgcgatcttggggctca

SEQ ID NO: 2819055 - DNA, 25 bp, Homo sapien
catgccggacccttcatcttttatt

SEQ ID NO: 2819056 - DNA, 25 bp, Homo sapien
cgctttggccgctcaaataactggg

SEQ ID NO: 2819057 - DNA, 25 bp, Homo sapien
ctcactgcaatctgcaacttccgcc

SEQ ID NO: 2819058 - DNA, 25 bp, Homo sapien
ggtctaaagtagctgccacattttc

SEQ ID NO: 2819059 - DNA, 25 bp, Homo sapien
tctaaagtagctgccacattttctt

SEQ ID NO: 2819060 - DNA, 25 bp, Homo sapien
gatggtctaaagtagctgccacatt

SEQ ID NO: 2819061 - DNA, 25 bp, Homo sapien
gaagatggtctaaagtagctgccac

SEQ ID NO: 2819062 - DNA, 25 bp, Homo sapien
taagaaaaccatacctagggatatc

SEQ ID NO: 2819063 - DNA, 25 bp, Homo sapien
taatcaaaagaataaccagcacgct

SEQ ID NO: 2819064 - DNA, 25 bp, Homo sapien
taaaacacttgagctaagcccctgg

SEQ ID NO: 2819065 - DNA, 25 bp, Homo sapien
tagtgacatgagttttagtgccagt

SEQ ID NO: 2819066 - DNA, 25 bp, Homo sapien
ggacctgggctgagttgtatacggg

SEQ ID NO: 2819067 - DNA, 25 bp, Homo sapien
cacaatatagacaaggcacaggacc

SEQ ID NO: 2819068 - DNA, 25 bp, Homo sapien
tacagtcaatgcaagcacacagctg

SEQ ID NO: 2819069 - DNA, 25 bp, Homo sapien
acggggtgtgtttactctatctctt

SEQ ID NO: 2819070 - DNA, 25 bp, Homo sapien
gttgacatcaaaccacatcctgtgg

SEQ ID NO: 2819071 - DNA, 25 bp, Homo sapien
cctgggtctcttgggacatgcagaa

SEQ ID NO: 2819072 - DNA, 25 bp, Homo sapien
tctaggacttcagaggccaaactac

SEQ ID NO: 2819073 - DNA, 25 bp, Homo sapien
tatagttctaaccaagtgcgcaagt

SEQ ID NO: 2819074 - DNA, 25 bp, Homo sapien
taaaatcatacgctttctggactag

SEQ ID NO: 2819075 - DNA, 25 bp, Homo sapien
tataccactccacgttaacacatgc

SEQ ID NO: 2819076 - DNA, 25 bp, Homo sapien
tctggactagaagcttgactgagtg

SEQ ID NO: 2819077 - DNA, 25 bp, Homo sapien
gctcaactgttgatgcactgtcatt

SEQ ID NO: 2819078 - DNA, 25 bp, Homo sapien
tcttttacggtctcgtgaccagggc

SEQ ID NO: 2819079 - DNA, 25 bp, Homo sapien
ctaaggacgctgtgggagtcgctct

SEQ ID NO: 2819080 - DNA, 25 bp, Homo sapien
aaccaaggctggttgctaaggacgc

SEQ ID NO: 2819081 - DNA, 25 bp, Homo sapien
tgaccagggcttagccaatcaggac

SEQ ID NO: 2819082 - DNA, 25 bp, Homo sapien
cttggcaacacagtgatgccctgtc

SEQ ID NO: 2819083 - DNA, 25 bp, Homo sapien
ccagccttggcaacacagtgatgcc

SEQ ID NO: 2819084 - DNA, 25 bp, Homo sapien
cagccttggcaacacagtgatgccc

SEQ ID NO: 2819085 - DNA, 25 bp, Homo sapien
gccttggcaacacagtgatgccctg

SEQ ID NO: 2819086 - DNA, 25 bp, Homo sapien
taactccaggaggacagtattcgag

SEQ ID NO: 2819087 - DNA, 25 bp, Homo sapien
tctggaagatcgagaactgcacgtc

SEQ ID NO: 2819088 - DNA, 25 bp, Homo sapien
tcaatcaaggttcgcatctggaaga

SEQ ID NO: 2819089 - DNA, 25 bp, Homo sapien
gcccaagagcccgtggagctaatga

SEQ ID NO: 2819090 - DNA, 25 bp, Homo sapien
gggttatcggctccctccaagaagc

SEQ ID NO: 2819091 - DNA, 25 bp, Homo sapien
ggtactgtgtttcattaatcccaca

SEQ ID NO: 2819092 - DNA, 25 bp, Homo sapien
tgcaggccctattcctacaccagtt

SEQ ID NO: 2819093 - DNA, 25 bp, Homo sapien
gtctccctagcaaccgtgcccttta

SEQ ID NO: 2819094 - DNA, 25 bp, Homo sapien
cagaggtgagtgggaaagtacagac

SEQ ID NO: 2819095 - DNA, 25 bp, Homo sapien
ttcagaggtgagtgggaaagtacag

SEQ ID NO: 2819096 - DNA, 25 bp, Homo sapien
ggttcagaggtgagtgggaaagtac

SEQ ID NO: 2819097 - DNA, 25 bp, Homo sapien
gaagtgggttcagaggtgagtggga

SEQ ID NO: 2819098 - DNA, 25 bp, Homo sapien
gttgtgtgaatcattgggctgtttt

SEQ ID NO: 2819099 - DNA, 25 bp, Homo sapien
atcatgacaattactactgtttcca

SEQ ID NO: 2819100 - DNA, 25 bp, Homo sapien
gctgtttttagagccactgttaaga

SEQ ID NO: 2819101 - DNA, 25 bp, Homo sapien
cagtgtttcagtgctagcaacttaa

SEQ ID NO: 2819102 - DNA, 25 bp, Homo sapien
gataactgtaagatacgctcgttcc

SEQ ID NO: 2819103 - DNA, 25 bp, Homo sapien
taaatgttccacaggcccactggtc

SEQ ID NO: 2819104 - DNA, 25 bp, Homo sapien
ttggccatggagcttgtgatacact

SEQ ID NO: 2819105 - DNA, 25 bp, Homo sapien
tatgtagaccttcccgaaatgccat

SEQ ID NO: 2819106 - DNA, 25 bp, Homo sapien
tcatataaacggaatgcataatgtc

SEQ ID NO: 2819107 - DNA, 25 bp, Homo sapien
taccaagttgtatagcagagtaaca

SEQ ID NO: 2819108 - DNA, 25 bp, Homo sapien
taagatctcttggtaacaattgaca

SEQ ID NO: 2819109 - DNA, 25 bp, Homo sapien
gtcagcttctaataagatagccagg

SEQ ID NO: 2819110 - DNA, 25 bp, Homo sapien
tagctcccgttgtcagtgagtctca

SEQ ID NO: 2819111 - DNA, 25 bp, Homo sapien
tattttgaagccctcttgcctcctt

SEQ ID NO: 2819112 - DNA, 25 bp, Homo sapien
ttttgtcaatttctcttggcagtgg

SEQ ID NO: 2819113 - DNA, 25 bp, Homo sapien
cattgctacaattctaggacaacag

SEQ ID NO: 2819114 - DNA, 25 bp, Homo sapien
tttctcacaagcttgaagctcacca

SEQ ID NO: 2819115 - DNA, 25 bp, Homo sapien
cttcatctcctaggtttactttctc

SEQ ID NO: 2819116 - DNA, 25 bp, Homo sapien
actttctcacaagcttgaagctcac

SEQ ID NO: 2819117 - DNA, 25 bp, Homo sapien
acaagcttgaagctcaccatcatct

SEQ ID NO: 2819118 - DNA, 25 bp, Homo sapien
gctccactctgtagtctaagtagcc

SEQ ID NO: 2819119 - DNA, 25 bp, Homo sapien
ccataagctcctcaggaccatttgt

SEQ ID NO: 2819120 - DNA, 25 bp, Homo sapien
agtagcctctggttccccataagct

SEQ ID NO: 2819121 - DNA, 25 bp, Homo sapien
tgcaatggcacttgtagtagctcca

SEQ ID NO: 2819122 - DNA, 25 bp, Homo sapien
ttcaaaccatgaagtttgtcttcat

SEQ ID NO: 2819123 - DNA, 25 bp, Homo sapien
tcaaaccatgaagtttgtcttcatt

SEQ ID NO: 2819124 - DNA, 25 bp, Homo sapien
caaaccatgaagtttgtcttcattt

SEQ ID NO: 2819125 - DNA, 25 bp, Homo sapien
ctctccttcttgttcctcatcatcc

SEQ ID NO: 2819126 - DNA, 25 bp, Homo sapien
tccttcttgttcctcatcatcccca

SEQ ID NO: 2819127 - DNA, 25 bp, Homo sapien
ctttgtcatcacctctccttcttgt

SEQ ID NO: 2819128 - DNA, 25 bp, Homo sapien
tttgtcatcacctctccttcttgtt

SEQ ID NO: 2819129 - DNA, 25 bp, Homo sapien
cttctgacctcgtgaaaccccaaca

SEQ ID NO: 2819130 - DNA, 25 bp, Homo sapien
accccaacaggctcccgactctctg

SEQ ID NO: 2819131 - DNA, 25 bp, Homo sapien
caacaggctcccgactctctgtgac

SEQ ID NO: 2819132 - DNA, 25 bp, Homo sapien
cacacccacaaggacagcctgcctt

SEQ ID NO: 2819133 - DNA, 25 bp, Homo sapien
aagtgcaaggcgctcctacttgggc

SEQ ID NO: 2819134 - DNA, 25 bp, Homo sapien
ggtcagaaccacagccaaaagggag

SEQ ID NO: 2819135 - DNA, 25 bp, Homo sapien
cattttgctgcaaggtgatgtcctc

SEQ ID NO: 2819136 - DNA, 25 bp, Homo sapien
tcagttaccaccacgctgaggcctg

SEQ ID NO: 2819137 - DNA, 25 bp, Homo sapien
ctgtagatctcccacgtgctccagg

SEQ ID NO: 2819138 - DNA, 25 bp, Homo sapien
agccctgtagatctcccacgtgctc

SEQ ID NO: 2819139 - DNA, 25 bp, Homo sapien
gtagatctcccacgtgctccaggag

SEQ ID NO: 2819140 - DNA, 25 bp, Homo sapien
ccctgtagatctcccacgtgctcca

SEQ ID NO: 2819141 - DNA, 25 bp, Homo sapien
gtgtcccgggcatgtgggccactgt

SEQ ID NO: 2819142 - DNA, 25 bp, Homo sapien
gcaagatgaaacccaccctcccttc

SEQ ID NO: 2819143 - DNA, 25 bp, Homo sapien
catccctggaggcaaccactggcct

SEQ ID NO: 2819144 - DNA, 25 bp, Homo sapien
aggcaagatgaaacccaccctccct

SEQ ID NO: 2819145 - DNA, 25 bp, Homo sapien
ccatttggatgaaggcgatggcctt

SEQ ID NO: 2819146 - DNA, 25 bp, Homo sapien
ttaacagcccgtaagggcagctgct

SEQ ID NO: 2819147 - DNA, 25 bp, Homo sapien
ctcttaacagcccgtaagggcagct

SEQ ID NO: 2819148 - DNA, 25 bp, Homo sapien
catttggatgaaggcgatggccttg

SEQ ID NO: 2819149 - DNA, 25 bp, Homo sapien
cataggcccagggacattgttgttg

SEQ ID NO: 2819150 - DNA, 25 bp, Homo sapien
ccactgctgcgcataggcccaggga

SEQ ID NO: 2819151 - DNA, 25 bp, Homo sapien
agggacattgttgttggccctgtca

SEQ ID NO: 2819152 - DNA, 25 bp, Homo sapien
gccactgctgcgcataggcccaggg

SEQ ID NO: 2819153 - DNA, 25 bp, Homo sapien
ggactgaattcatgcactaggcccc

SEQ ID NO: 2819154 - DNA, 25 bp, Homo sapien
caaaatggagccacttgtgctaaac

SEQ ID NO: 2819155 - DNA, 25 bp, Homo sapien
tgtttccccaggtgttattacagat

SEQ ID NO: 2819156 - DNA, 25 bp, Homo sapien
tacagcagctttgcctagttgcagt

SEQ ID NO: 2819157 - DNA, 25 bp, Homo sapien
aaattgtggtttagacgcctttgca

SEQ ID NO: 2819158 - DNA, 25 bp, Homo sapien
aattgtggtttagacgcctttgcac

SEQ ID NO: 2819159 - DNA, 25 bp, Homo sapien
gctggtgatatagcagctatttggg

SEQ ID NO: 2819160 - DNA, 25 bp, Homo sapien
agtggcagtattctgactgatgggt

SEQ ID NO: 2819161 - DNA, 25 bp, Homo sapien
ctgatgggttgtgaggggtcatcac

SEQ ID NO: 2819162 - DNA, 25 bp, Homo sapien
ggccaagtggcagtattctgactga

SEQ ID NO: 2819163 - DNA, 25 bp, Homo sapien
ataaggagtgtgctccccaaggact

SEQ ID NO: 2819164 - DNA, 25 bp, Homo sapien
taaggagtgtgctccccaaggactt

SEQ ID NO: 2819165 - DNA, 25 bp, Homo sapien
cataaggagtgtgctccccaaggac

SEQ ID NO: 2819166 - DNA, 25 bp, Homo sapien
agaactgctgacgtcccagctagag

SEQ ID NO: 2819167 - DNA, 25 bp, Homo sapien
gaactgctgacgtcccagctagagg

SEQ ID NO: 2819168 - DNA, 25 bp, Homo sapien
tgctgacgtcccagctagaggccca

SEQ ID NO: 2819169 - DNA, 25 bp, Homo sapien
actgctgacgtcccagctagaggcc

SEQ ID NO: 2819170 - DNA, 25 bp, Homo sapien
caccctgtcttgtggaccataggat

SEQ ID NO: 2819171 - DNA, 25 bp, Homo sapien
tgtggaccataggatctctccacca

SEQ ID NO: 2819172 - DNA, 25 bp, Homo sapien
actgccaccctgtcttgtggaccat

SEQ ID NO: 2819173 - DNA, 25 bp, Homo sapien
cctgtcttgtggaccataggatctc

SEQ ID NO: 2819174 - DNA, 25 bp, Homo sapien
agttatgtcctgattaatgcaatac

SEQ ID NO: 2819175 - DNA, 25 bp, Homo sapien
tgcaatacatacttcctttggcagg

SEQ ID NO: 2819176 - DNA, 25 bp, Homo sapien
tcagaaagacatgttaaggttggaa

SEQ ID NO: 2819177 - DNA, 25 bp, Homo sapien
gaacaggagaatattagttatgtcc

SEQ ID NO: 2819178 - DNA, 25 bp, Homo sapien
ttctgggatttatacgtagagctaa

SEQ ID NO: 2819179 - DNA, 25 bp, Homo sapien
tgttctgggatttatacgtagagct

SEQ ID NO: 2819180 - DNA, 25 bp, Homo sapien
gttctgggatttatacgtagagcta

SEQ ID NO: 2819181 - DNA, 25 bp, Homo sapien
tctgggatttatacgtagagctaac

SEQ ID NO: 2819182 - DNA, 25 bp, Homo sapien
tatagactacttgcaaacagtaaaa

SEQ ID NO: 2819183 - DNA, 25 bp, Homo sapien
atagactacttgcaaacagtaaaat

SEQ ID NO: 2819184 - DNA, 25 bp, Homo sapien
tagactacttgcaaacagtaaaatt

SEQ ID NO: 2819185 - DNA, 25 bp, Homo sapien
ctatagactacttgcaaacagtaaa

SEQ ID NO: 2819186 - DNA, 25 bp, Homo sapien
atggtgggtacaacttctgctctgc

SEQ ID NO: 2819187 - DNA, 25 bp, Homo sapien
tccatttaggactgctacctgattt

SEQ ID NO: 2819188 - DNA, 25 bp, Homo sapien
ggtatttgtcatgagtccatttagg

SEQ ID NO: 2819189 - DNA, 25 bp, Homo sapien
cacgttgaaaagtaccacgacctct

SEQ ID NO: 2819190 - DNA, 25 bp, Homo sapien
tctgccacgttgaaaagtaccacga

SEQ ID NO: 2819191 - DNA, 25 bp, Homo sapien
aatacttcttgctctttgggatata

SEQ ID NO: 2819192 - DNA, 25 bp, Homo sapien
tgtcatgatgcaagaaatacttctt

SEQ ID NO: 2819193 - DNA, 25 bp, Homo sapien
ctgtcatgatgcaagaaatacttct

SEQ ID NO: 2819194 - DNA, 25 bp, Homo sapien
acttcttgctctttgggatatattc

SEQ ID NO: 2819195 - DNA, 25 bp, Homo sapien
tgcaaagcctgagtattctttcatt

SEQ ID NO: 2819196 - DNA, 25 bp, Homo sapien
tctttcatttcatggtgagttttaa

SEQ ID NO: 2819197 - DNA, 25 bp, Homo sapien
tcatggtgagttttaaattcttctt

SEQ ID NO: 2819198 - DNA, 25 bp, Homo sapien
tcctgcaaagcctgagtattctttc

SEQ ID NO: 2819199 - DNA, 25 bp, Homo sapien
tttctgatgggaagtaaaccgcttg

SEQ ID NO: 2819200 - DNA, 25 bp, Homo sapien
tctgatgggaagtaaaccgcttgtt

SEQ ID NO: 2819201 - DNA, 25 bp, Homo sapien
tggctttctgatgggaagtaaaccg

SEQ ID NO: 2819202 - DNA, 25 bp, Homo sapien
cagtggctttctgatgggaagtaaa

SEQ ID NO: 2819203 - DNA, 25 bp, Homo sapien
tgactctgaagtgcttttgctggcc

SEQ ID NO: 2819204 - DNA, 25 bp, Homo sapien
ggcctgtggcaacttaatgtggtca

SEQ ID NO: 2819205 - DNA, 25 bp, Homo sapien
gaacaggtgccattttgagtttgac

SEQ ID NO: 2819206 - DNA, 25 bp, Homo sapien
cattttgatcctaagtgggctttcc

SEQ ID NO: 2819207 - DNA, 25 bp, Homo sapien
cctgaactgtctataatcctctgtc

SEQ ID NO: 2819208 - DNA, 25 bp, Homo sapien
gaaactttggacttgtacttgagtc

SEQ ID NO: 2819209 - DNA, 25 bp, Homo sapien
tcctcctcagtattccggtgagatg

SEQ ID NO: 2819210 - DNA, 25 bp, Homo sapien
tatcttttgtagtgctaggcctttc

SEQ ID NO: 2819211 - DNA, 25 bp, Homo sapien
aagtaatctagagcttcctgatctt

SEQ ID NO: 2819212 - DNA, 25 bp, Homo sapien
tcttttgaagcctctttatccctgg

SEQ ID NO: 2819213 - DNA, 25 bp, Homo sapien
tctagagcttcctgatcttcccatt

SEQ ID NO: 2819214 - DNA, 25 bp, Homo sapien
cttttgaagcctctttatccctggc

SEQ ID NO: 2819215 - DNA, 25 bp, Homo sapien
tcaagcaggaatactctagactctt

SEQ ID NO: 2819216 - DNA, 25 bp, Homo sapien
aagcaggaatactctagactcttca

SEQ ID NO: 2819217 - DNA, 25 bp, Homo sapien
ctatcaagcaggaatactctagact

SEQ ID NO: 2819218 - DNA, 25 bp, Homo sapien
tatcaagcaggaatactctagactc

SEQ ID NO: 2819219 - DNA, 25 bp, Homo sapien
gacttcttcgtgaagggatgtgatg

SEQ ID NO: 2819220 - DNA, 25 bp, Homo sapien
tctcttggagcattctgtggtgcga

SEQ ID NO: 2819221 - DNA, 25 bp, Homo sapien
cggcccctagactcatctcttggag

SEQ ID NO: 2819222 - DNA, 25 bp, Homo sapien
tgtggtgcgattgtctttgcaggac

SEQ ID NO: 2819223 - DNA, 25 bp, Homo sapien
catttccaacagaaccagacccaga

SEQ ID NO: 2819224 - DNA, 25 bp, Homo sapien
tccatttccaacagaaccagaccca

SEQ ID NO: 2819225 - DNA, 25 bp, Homo sapien
ccatttccaacagaaccagacccag

SEQ ID NO: 2819226 - DNA, 25 bp, Homo sapien
tactgagcatgggagcatcagagca

SEQ ID NO: 2819227 - DNA, 25 bp, Homo sapien
caagatgaactctgactaggtggtg

SEQ ID NO: 2819228 - DNA, 25 bp, Homo sapien
aaggccaggccaaatatcaccggat

SEQ ID NO: 2819229 - DNA, 25 bp, Homo sapien
taaattcatcgatagactcagatgg

SEQ ID NO: 2819230 - DNA, 25 bp, Homo sapien
tgaagaacgagaagagaatgatctt

SEQ ID NO: 2819231 - DNA, 25 bp, Homo sapien
acgagaagagaatgatcttggagac

SEQ ID NO: 2819232 - DNA, 25 bp, Homo sapien
gaacgagaagagaatgatcttggag

SEQ ID NO: 2819233 - DNA, 25 bp, Homo sapien
tatggagatgaagaacgagaagaga

SEQ ID NO: 2819234 - DNA, 25 bp, Homo sapien
gctatatgaccagtgagatctgctt

SEQ ID NO: 2819235 - DNA, 25 bp, Homo sapien
gagctatatgaccagtgagatctgc

SEQ ID NO: 2819236 - DNA, 25 bp, Homo sapien
gaagagctatatgaccagtgagatc

SEQ ID NO: 2819237 - DNA, 25 bp, Homo sapien
ctagaagagctatatgaccagtgag

SEQ ID NO: 2819238 - DNA, 25 bp, Homo sapien
ctcgtctaggactcctagagtgcct

SEQ ID NO: 2819239 - DNA, 25 bp, Homo sapien
ctccttgataataccctctacccct

SEQ ID NO: 2819240 - DNA, 25 bp, Homo sapien
acgacctcgtctaggactcctagag

SEQ ID NO: 2819241 - DNA, 25 bp, Homo sapien
tgaacgacctcgtctaggactccta

SEQ ID NO: 2819242 - DNA, 25 bp, Homo sapien
tactcacgacgatcatctctagaat

SEQ ID NO: 2819243 - DNA, 25 bp, Homo sapien
cctagaactgtgtcgcttctttcta

SEQ ID NO: 2819244 - DNA, 25 bp, Homo sapien
tctgtactcacgacgatcatctcta

SEQ ID NO: 2819245 - DNA, 25 bp, Homo sapien
tattatttctgtactcacgacgatc

SEQ ID NO: 2819246 - DNA, 25 bp, Homo sapien
gccagacttcccctgaggcagactt

SEQ ID NO: 2819247 - DNA, 25 bp, Homo sapien
catattcttgggatgcttccctgag

SEQ ID NO: 2819248 - DNA, 25 bp, Homo sapien
tctacgagctgacctcccatggtgg

SEQ ID NO: 2819249 - DNA, 25 bp, Homo sapien
cctgaggcagacttttatctacgag

SEQ ID NO: 2819250 - DNA, 25 bp, Homo sapien
cctttgcaaagttgaattgtagggt

SEQ ID NO: 2819251 - DNA, 25 bp, Homo sapien
taagggaaacaaggattctatcctg

SEQ ID NO: 2819252 - DNA, 25 bp, Homo sapien
tatcttgggattggtagcgaacaca

SEQ ID NO: 2819253 - DNA, 25 bp, Homo sapien
cagagcatcttgagcatatcaggca

SEQ ID NO: 2819254 - DNA, 25 bp, Homo sapien
tcaagaaggtatccagaggtagagc

SEQ ID NO: 2819255 - DNA, 25 bp, Homo sapien
gagggaacacttattttagggatca

SEQ ID NO: 2819256 - DNA, 25 bp, Homo sapien
cctttgccattagttctgacagtgc

SEQ ID NO: 2819257 - DNA, 25 bp, Homo sapien
tgcagccagatctgtgggtatatgc

SEQ ID NO: 2819258 - DNA, 25 bp, Homo sapien
ccattgccgttgacatcccaatttc

SEQ ID NO: 2819259 - DNA, 25 bp, Homo sapien
atgcccattgccgttgacatcccaa

SEQ ID NO: 2819260 - DNA, 25 bp, Homo sapien
gcccattgccgttgacatcccaatt

SEQ ID NO: 2819261 - DNA, 25 bp, Homo sapien
tcatgcccattgccgttgacatccc

SEQ ID NO: 2819262 - DNA, 25 bp, Homo sapien
ctcacggcaaagatgccagagccac

SEQ ID NO: 2819263 - DNA, 25 bp, Homo sapien
cagtaccacatctcgggcagctagg

SEQ ID NO: 2819264 - DNA, 25 bp, Homo sapien
agcatcccatccagtgtgctcacgg

SEQ ID NO: 2819265 - DNA, 25 bp, Homo sapien
ggcagctagggtctccctactgcca

SEQ ID NO: 2819266 - DNA, 25 bp, Homo sapien
aggcaggaggggaccctgtgtcctt

SEQ ID NO: 2819267 - DNA, 25 bp, Homo sapien
agaggcaggaggggaccctgtgtcc

SEQ ID NO: 2819268 - DNA, 25 bp, Homo sapien
cttcagaggcaggaggggaccctgt

SEQ ID NO: 2819269 - DNA, 25 bp, Homo sapien
tcagaggcaggaggggaccctgtgt

SEQ ID NO: 2819270 - DNA, 25 bp, Homo sapien
gcccgcagggataaatgtctgcctg

SEQ ID NO: 2819271 - DNA, 25 bp, Homo sapien
gagtcttcaacccatgtgcacccaa

SEQ ID NO: 2819272 - DNA, 25 bp, Homo sapien
gggataaatgtctgcctgattgggt

SEQ ID NO: 2819273 - DNA, 25 bp, Homo sapien
aacccatgtgcacccaacaaatagc

SEQ ID NO: 2819274 - DNA, 25 bp, Homo sapien
cagcctaagggagtaaggatttgcc

SEQ ID NO: 2819275 - DNA, 25 bp, Homo sapien
tctccagcctaagggagtaaggatt

SEQ ID NO: 2819276 - DNA, 25 bp, Homo sapien
gcctaagggagtaaggatttgcctc

SEQ ID NO: 2819277 - DNA, 25 bp, Homo sapien
cacttctccagcctaagggagtaag

SEQ ID NO: 2819278 - DNA, 25 bp, Homo sapien
gagtaacagtttactttcctatgga

SEQ ID NO: 2819279 - DNA, 25 bp, Homo sapien
catgcgaacagtacttgagtaacag

SEQ ID NO: 2819280 - DNA, 25 bp, Homo sapien
aatggtacttcacatgcgaacagta

SEQ ID NO: 2819281 - DNA, 25 bp, Homo sapien
aagtgctagaattcatagatgttct

SEQ ID NO: 2819282 - DNA, 25 bp, Homo sapien
gttatgtgcgaagataaatacatgg

SEQ ID NO: 2819283 - DNA, 25 bp, Homo sapien
gcccctaaggatcaatcagttcttg

SEQ ID NO: 2819284 - DNA, 25 bp, Homo sapien
catccaaagtgttatgtgcgaagat

SEQ ID NO: 2819285 - DNA, 25 bp, Homo sapien
gaaatcgcattttcaccccgaagcc

SEQ ID NO: 2819286 - DNA, 25 bp, Homo sapien
atccaaagggttatggtgtgaagat

SEQ ID NO: 2819287 - DNA, 25 bp, Homo sapien
ggttatggtgtgaagataaatacgt

SEQ ID NO: 2819288 - DNA, 25 bp, Homo sapien
ggtgtgaagataaatacgtggaaag

SEQ ID NO: 2819289 - DNA, 25 bp, Homo sapien
ccaaagggttatggtgtgaagataa

SEQ ID NO: 2819290 - DNA, 25 bp, Homo sapien
tcattttttcaacttgtattgaagg

SEQ ID NO: 2819291 - DNA, 25 bp, Homo sapien
cattttttcaacttgtattgaaggt

SEQ ID NO: 2819292 - DNA, 25 bp, Homo sapien
ctttttcagccagggaactatccta

SEQ ID NO: 2819293 - DNA, 25 bp, Homo sapien
ttctttttcagccagggaactatcc

SEQ ID NO: 2819294 - DNA, 25 bp, Homo sapien
tctttttcagccagggaactatcct

SEQ ID NO: 2819295 - DNA, 25 bp, Homo sapien
tttttcagccagggaactatcctac

SEQ ID NO: 2819296 - DNA, 25 bp, Homo sapien
cacttgagccagtgtgataggcaca

SEQ ID NO: 2819297 - DNA, 25 bp, Homo sapien
tgggagacacatgcccacttgagcc

SEQ ID NO: 2819298 - DNA, 25 bp, Homo sapien
gttgaggaattacaccactggtgca

SEQ ID NO: 2819299 - DNA, 25 bp, Homo sapien
ccatgggagcccagtctattctgta

SEQ ID NO: 2819300 - DNA, 25 bp, Homo sapien
gtcattggaggttctaaattcatcc

SEQ ID NO: 2819301 - DNA, 25 bp, Homo sapien
ccaaatgagggcctgctgtcattgg

SEQ ID NO: 2819302 - DNA, 25 bp, Homo sapien
aaatgagggcctgctgtcattggag

SEQ ID NO: 2819303 - DNA, 25 bp, Homo sapien
aattcatccttacaatgcccttgac

SEQ ID NO: 2819304 - DNA, 25 bp, Homo sapien
tgaattttttcagtccccagttggc

SEQ ID NO: 2819305 - DNA, 25 bp, Homo sapien
ttttttcagtccccagttggctcag

SEQ ID NO: 2819306 - DNA, 25 bp, Homo sapien
ttttcagtccccagttggctcagct

SEQ ID NO: 2819307 - DNA, 25 bp, Homo sapien
tctgaattttttcagtccccagttg

SEQ ID NO: 2819308 - DNA, 25 bp, Homo sapien
tgtatgcagtacttgagcggaccca

SEQ ID NO: 2819309 - DNA, 25 bp, Homo sapien
gttttgtgtctctgtatgcagtact

SEQ ID NO: 2819310 - DNA, 25 bp, Homo sapien
gtcacttgctatcaaaacaagaggc

SEQ ID NO: 2819311 - DNA, 25 bp, Homo sapien
cttgctatcaaaacaagaggcagct

SEQ ID NO: 2819312 - DNA, 25 bp, Homo sapien
aggaccagagcgatgcaggctccga

SEQ ID NO: 2819313 - DNA, 25 bp, Homo sapien
aacctcctttctccgagcgatgact

SEQ ID NO: 2819314 - DNA, 25 bp, Homo sapien
taggaacttcccaaggaccagagcg

SEQ ID NO: 2819315 - DNA, 25 bp, Homo sapien
tctcagcaacctgatcggtgtcggc

SEQ ID NO: 2819316 - DNA, 25 bp, Homo sapien
gatagacagcgcgttatgcgtcaaa

SEQ ID NO: 2819317 - DNA, 25 bp, Homo sapien
cagatgcggacatccaaaggatggc

SEQ ID NO: 2819318 - DNA, 25 bp, Homo sapien
taaactctaaggattgatgctgtgc

SEQ ID NO: 2819319 - DNA, 25 bp, Homo sapien
tgaatggccacagtacagatgcgga

SEQ ID NO: 2819320 - DNA, 25 bp, Homo sapien
tcctcataacaatcccataaagtaa

SEQ ID NO: 2819321 - DNA, 25 bp, Homo sapien
ggagcttatttttccagggtcatac

SEQ ID NO: 2819322 - DNA, 25 bp, Homo sapien
tacacaaatttactcattgaatcct

SEQ ID NO: 2819323 - DNA, 25 bp, Homo sapien
cacagggagcttatttttccagggt

SEQ ID NO: 2819324 - DNA, 25 bp, Homo sapien
cactttttaatgtgtagctgatatt

SEQ ID NO: 2819325 - DNA, 25 bp, Homo sapien
taatgtgtagctgatattgttttcc

SEQ ID NO: 2819326 - DNA, 25 bp, Homo sapien
aagttggagtgacagctcttcagca

SEQ ID NO: 2819327 - DNA, 25 bp, Homo sapien
tgtagtaaacttctatatacatttc

SEQ ID NO: 2819328 - DNA, 25 bp, Homo sapien
aaaagaagcagtcctcaaaaggcat

SEQ ID NO: 2819329 - DNA, 25 bp, Homo sapien
caaaaggcatttaccagtgatatct

SEQ ID NO: 2819330 - DNA, 25 bp, Homo sapien
agagagttttgtagaatgatctcca

SEQ ID NO: 2819331 - DNA, 25 bp, Homo sapien
cattctcgttcgttgttagggtaag

SEQ ID NO: 2819332 - DNA, 25 bp, Homo sapien
tataggactgatttggagagaccga

SEQ ID NO: 2819333 - DNA, 25 bp, Homo sapien
gagagaccgacaataccgagtgcag

SEQ ID NO: 2819334 - DNA, 25 bp, Homo sapien
ttggtatctagttccaggacccctg

SEQ ID NO: 2819335 - DNA, 25 bp, Homo sapien
aaaaattggttaactgctggtgagc

SEQ ID NO: 2819336 - DNA, 25 bp, Homo sapien
cgaagaacatcagggtggagagttt

SEQ ID NO: 2819337 - DNA, 25 bp, Homo sapien
tagaaataatccacttgattccaca

SEQ ID NO: 2819338 - DNA, 25 bp, Homo sapien
aaagcacgaagaacatcagggtgga

SEQ ID NO: 2819339 - DNA, 25 bp, Homo sapien
agtttcactctcagcgacaaataga

SEQ ID NO: 2819340 - DNA, 25 bp, Homo sapien
agaaatgctgtttctagcacagagt

SEQ ID NO: 2819341 - DNA, 25 bp, Homo sapien
gaaatgctgtttctagcacagagta

SEQ ID NO: 2819342 - DNA, 25 bp, Homo sapien
aatgctgtttctagcacagagtaag

SEQ ID NO: 2819343 - DNA, 25 bp, Homo sapien
atgctgtttctagcacagagtaagt

SEQ ID NO: 2819344 - DNA, 25 bp, Homo sapien
tttgccactatttgaagtctgaact

SEQ ID NO: 2819345 - DNA, 25 bp, Homo sapien
tatttgccactatttgaagtctgaa

SEQ ID NO: 2819346 - DNA, 25 bp, Homo sapien
atttgccactatttgaagtctgaac

SEQ ID NO: 2819347 - DNA, 25 bp, Homo sapien
tttatttgccactatttgaagtctg

SEQ ID NO: 2819348 - DNA, 25 bp, Homo sapien
gttcaactttagcacttgtctcatc

SEQ ID NO: 2819349 - DNA, 25 bp, Homo sapien
tcgttcaactttagcacttgtctca

SEQ ID NO: 2819350 - DNA, 25 bp, Homo sapien
gcacttgtctcatccccagtggctc

SEQ ID NO: 2819351 - DNA, 25 bp, Homo sapien
ttgtctcatccccagtggctcttcc

SEQ ID NO: 2819352 - DNA, 25 bp, Homo sapien
gacatcatggagaggataaataggt

SEQ ID NO: 2819353 - DNA, 25 bp, Homo sapien
agaggataaataggttggcaagcct

SEQ ID NO: 2819354 - DNA, 25 bp, Homo sapien
ttctaacgaagacatcatggagagg

SEQ ID NO: 2819355 - DNA, 25 bp, Homo sapien
atggagaggataaataggttggcaa

SEQ ID NO: 2819356 - DNA, 25 bp, Homo sapien
tttccatcatcttcttccggatttg

SEQ ID NO: 2819357 - DNA, 25 bp, Homo sapien
ttgtctgcacctctggggtcatgat

SEQ ID NO: 2819358 - DNA, 25 bp, Homo sapien
tctttcaagtcatttgtctgcacct

SEQ ID NO: 2819359 - DNA, 25 bp, Homo sapien
catcatcttcttccggatttggcgg

SEQ ID NO: 2819360 - DNA, 25 bp, Homo sapien
ccatggaagttgctcaggcagtttt

SEQ ID NO: 2819361 - DNA, 25 bp, Homo sapien
catgccatggaagttgctcaggcag

SEQ ID NO: 2819362 - DNA, 25 bp, Homo sapien
aacacattttatcacgggtaagatc

SEQ ID NO: 2819363 - DNA, 25 bp, Homo sapien
cattttatcacgggtaagatccatg

SEQ ID NO: 2819364 - DNA, 25 bp, Homo sapien
aaggcacttgttcttgccaactgcc

SEQ ID NO: 2819365 - DNA, 25 bp, Homo sapien
cgtaaggcacttgttcttgccaact

SEQ ID NO: 2819366 - DNA, 25 bp, Homo sapien
tttcgtaaggcacttgttcttgcca

SEQ ID NO: 2819367 - DNA, 25 bp, Homo sapien
ctttcgtaaggcacttgttcttgcc

SEQ ID NO: 2819368 - DNA, 25 bp, Homo sapien
tggacctgggcgcttccttttcctc

SEQ ID NO: 2819369 - DNA, 25 bp, Homo sapien
gggatcggcgaccacagtactccct

SEQ ID NO: 2819370 - DNA, 25 bp, Homo sapien
aggtgagtcaggtcagtgtggacct

SEQ ID NO: 2819371 - DNA, 25 bp, Homo sapien
gagccctgagggatcggcgaccaca

SEQ ID NO: 2819372 - DNA, 25 bp, Homo sapien
gccaagtagtggaggggagtgatcc

SEQ ID NO: 2819373 - DNA, 25 bp, Homo sapien
ggggagtgatcctcggggagccacc

SEQ ID NO: 2819374 - DNA, 25 bp, Homo sapien
gagcgttggtccgagcctgagccaa

SEQ ID NO: 2819375 - DNA, 25 bp, Homo sapien
agagcgttggtccgagcctgagcca

SEQ ID NO: 2819376 - DNA, 25 bp, Homo sapien
tgaaggtctgctgagcaaggcaggg

SEQ ID NO: 2819377 - DNA, 25 bp, Homo sapien
caagcaggccattctggacagctgg

SEQ ID NO: 2819378 - DNA, 25 bp, Homo sapien
gcaggccattctggacagctggatt

SEQ ID NO: 2819379 - DNA, 25 bp, Homo sapien
gatgaaggtctgctgagcaaggcag

SEQ ID NO: 2819380 - DNA, 25 bp, Homo sapien
ttcttttgacaaccagaggccaggg

SEQ ID NO: 2819381 - DNA, 25 bp, Homo sapien
atctttcttttgacaaccagaggcc

SEQ ID NO: 2819382 - DNA, 25 bp, Homo sapien
ctttcttttgacaaccagaggccag

SEQ ID NO: 2819383 - DNA, 25 bp, Homo sapien
gccaggggagcgtggtgaaaggaaa

SEQ ID NO: 2819384 - DNA, 25 bp, Homo sapien
tttctgagtccagttacccctaggc

SEQ ID NO: 2819385 - DNA, 25 bp, Homo sapien
tgagtccagttacccctaggcccag

SEQ ID NO: 2819386 - DNA, 25 bp, Homo sapien
tccagttacccctaggcccagagca

SEQ ID NO: 2819387 - DNA, 25 bp, Homo sapien
ttctgagtccagttacccctaggcc

SEQ ID NO: 2819388 - DNA, 25 bp, Homo sapien
cttggatcccactgtgcatccgtac

SEQ ID NO: 2819389 - DNA, 25 bp, Homo sapien
gctttccaagtgtcaatgcctgcca

SEQ ID NO: 2819390 - DNA, 25 bp, Homo sapien
tttccaagtgtcaatgcctgccagc

SEQ ID NO: 2819391 - DNA, 25 bp, Homo sapien
tggctttccaagtgtcaatgcctgc

SEQ ID NO: 2819392 - DNA, 25 bp, Homo sapien
ttccaagtgtcaatgcctgccagct

SEQ ID NO: 2819393 - DNA, 25 bp, Homo sapien
cagacctctcaagccagcagcaggt

SEQ ID NO: 2819394 - DNA, 25 bp, Homo sapien
agcaggtgccggctgccctgcttgc

SEQ ID NO: 2819395 - DNA, 25 bp, Homo sapien
gctgtgtgctgatggtgcttttcta

SEQ ID NO: 2819396 - DNA, 25 bp, Homo sapien
aaggaccttcgggttctggcagctg

SEQ ID NO: 2819397 - DNA, 25 bp, Homo sapien
gatacgggtctctaatttagctaag

SEQ ID NO: 2819398 - DNA, 25 bp, Homo sapien
ggacacatagtcatagagcaagaac

SEQ ID NO: 2819399 - DNA, 25 bp, Homo sapien
taaggaagtaaatctcaacatacgg

SEQ ID NO: 2819400 - DNA, 25 bp, Homo sapien
gtaaaactgtcagccccaaatccag

SEQ ID NO: 2819401 - DNA, 25 bp, Homo sapien
gacttatgcattgattacaagcaga

SEQ ID NO: 2819402 - DNA, 25 bp, Homo sapien
catgcaaaagttggagagaatgccc

SEQ ID NO: 2819403 - DNA, 25 bp, Homo sapien
tagtgtcacgtttatcatgcaaaag

SEQ ID NO: 2819404 - DNA, 25 bp, Homo sapien
tgcctcttaccccttcaggtatggg

SEQ ID NO: 2819405 - DNA, 25 bp, Homo sapien
gctgcagagattgagccctcttctt

SEQ ID NO: 2819406 - DNA, 25 bp, Homo sapien
tgtcactggtgatactttaagagtc

SEQ ID NO: 2819407 - DNA, 25 bp, Homo sapien
ctgttgaaatggctgcagagattga

SEQ ID NO: 2819408 - DNA, 25 bp, Homo sapien
ttcatggcaaggttccaaggatgga

SEQ ID NO: 2819409 - DNA, 25 bp, Homo sapien
tgagttttccagttgagctgcagca

SEQ ID NO: 2819410 - DNA, 25 bp, Homo sapien
gagttttactgcgaccaacattagc

SEQ ID NO: 2819411 - DNA, 25 bp, Homo sapien
gcagcatcagcataaagttttggaa

SEQ ID NO: 2819412 - DNA, 25 bp, Homo sapien
taatcaccaagaccttgacatgtgg

SEQ ID NO: 2819413 - DNA, 25 bp, Homo sapien
agaaatagtggccacataaccagtc

SEQ ID NO: 2819414 - DNA, 25 bp, Homo sapien
taaccagtccacatcatctggacct

SEQ ID NO: 2819415 - DNA, 25 bp, Homo sapien
gaccttcctgggtccttgctgtgca

SEQ ID NO: 2819416 - DNA, 25 bp, Homo sapien
cctccatgaactcttagcaggagaa

SEQ ID NO: 2819417 - DNA, 25 bp, Homo sapien
tacaagggcttcctgtgtcatgtcc

SEQ ID NO: 2819418 - DNA, 25 bp, Homo sapien
gatatggcagcgtttcatttcctcc

SEQ ID NO: 2819419 - DNA, 25 bp, Homo sapien
ggtgttatactgtcagaatatctgc

SEQ ID NO: 2819420 - DNA, 25 bp, Homo sapien
gaatatctgctggaaatcatgattt

SEQ ID NO: 2819421 - DNA, 25 bp, Homo sapien
gatttttcataggcttgtacttcat

SEQ ID NO: 2819422 - DNA, 25 bp, Homo sapien
tttgtcactttcatccatgatttca

SEQ ID NO: 2819423 - DNA, 25 bp, Homo sapien
ctttgtcactttcatccatgatttc

SEQ ID NO: 2819424 - DNA, 25 bp, Homo sapien
ttgtcactttcatccatgatttcat

SEQ ID NO: 2819425 - DNA, 25 bp, Homo sapien
tgtcactttcatccatgatttcatg

SEQ ID NO: 2819426 - DNA, 25 bp, Homo sapien
ggatcatggtaaagtgtccctccat

SEQ ID NO: 2819427 - DNA, 25 bp, Homo sapien
tccaggtccggatcatggtaaagtg

SEQ ID NO: 2819428 - DNA, 25 bp, Homo sapien
ctggagttttccaggtccggatcat

SEQ ID NO: 2819429 - DNA, 25 bp, Homo sapien
tccggatcatggtaaagtgtccctc

SEQ ID NO: 2819430 - DNA, 25 bp, Homo sapien
ggaaagttgaaggattctttgctct

SEQ ID NO: 2819431 - DNA, 25 bp, Homo sapien
catccaaaggaaagttgaaggattc

SEQ ID NO: 2819432 - DNA, 25 bp, Homo sapien
cagagctgtcattttcatccaaagg

SEQ ID NO: 2819433 - DNA, 25 bp, Homo sapien
tcttgggaatttttgcaaagccttc

SEQ ID NO: 2819434 - DNA, 25 bp, Homo sapien
ccatcattgttcaaatccagataag

SEQ ID NO: 2819435 - DNA, 25 bp, Homo sapien
tccagataaggcttgaccaacagca

SEQ ID NO: 2819436 - DNA, 25 bp, Homo sapien
ttgaccaacagcatatccatataat

SEQ ID NO: 2819437 - DNA, 25 bp, Homo sapien
tgttcaaatccagataaggcttgac

SEQ ID NO: 2819438 - DNA, 25 bp, Homo sapien
taactgtcacctgagatattgcgaa

SEQ ID NO: 2819439 - DNA, 25 bp, Homo sapien
tgctagataactgtcacctgagata

SEQ ID NO: 2819440 - DNA, 25 bp, Homo sapien
cagcttcttctgctagataactgtc

SEQ ID NO: 2819441 - DNA, 25 bp, Homo sapien
gagatattgcgaagggctgcaatgc

SEQ ID NO: 2819442 - DNA, 25 bp, Homo sapien
gtgacctaataacctcagcaaagac

SEQ ID NO: 2819443 - DNA, 25 bp, Homo sapien
tatcattgcagagatccagctggag

SEQ ID NO: 2819444 - DNA, 25 bp, Homo sapien
ctggagcggagaaacatggtagtca

SEQ ID NO: 2819445 - DNA, 25 bp, Homo sapien
gacttctgtgtgataagagattcca

SEQ ID NO: 2819446 - DNA, 25 bp, Homo sapien
ccatttggtgggttcatgacgtata

SEQ ID NO: 2819447 - DNA, 25 bp, Homo sapien
gaatccccagtattgtctcctagga

SEQ ID NO: 2819448 - DNA, 25 bp, Homo sapien
tcaagaatccccaagggcaacaggc

SEQ ID NO: 2819449 - DNA, 25 bp, Homo sapien
caacaggctggtttaaaggctggct

SEQ ID NO: 2819450 - DNA, 25 bp, Homo sapien
ggacattctggaagggtcatcctgt

SEQ ID NO: 2819451 - DNA, 25 bp, Homo sapien
tgtagtagcacaataccaaacccct

SEQ ID NO: 2819452 - DNA, 25 bp, Homo sapien
gacttgtagggataattagggaata

SEQ ID NO: 2819453 - DNA, 25 bp, Homo sapien
gaagggtcatcctgtagtagcacaa

SEQ ID NO: 2819454 - DNA, 25 bp, Homo sapien
gaatgcagttgtcaacgaattttga

SEQ ID NO: 2819455 - DNA, 25 bp, Homo sapien
gaattgttgtaaaactgaatgcagt

SEQ ID NO: 2819456 - DNA, 25 bp, Homo sapien
gccataaaagccaagagtcagtaga

SEQ ID NO: 2819457 - DNA, 25 bp, Homo sapien
tatggagctaaagctatgaattgtt

SEQ ID NO: 2819458 - DNA, 25 bp, Homo sapien
tgctttctcgtatattctgttgatg

SEQ ID NO: 2819459 - DNA, 25 bp, Homo sapien
caggcctgttgagctggtcatggga

SEQ ID NO: 2819460 - DNA, 25 bp, Homo sapien
ggtcatgggagatagtagttcctta

SEQ ID NO: 2819461 - DNA, 25 bp, Homo sapien
tcacagccagacagtcctaaccagg

SEQ ID NO: 2819462 - DNA, 25 bp, Homo sapien
ctttgcctgaggatggagtaatttc

SEQ ID NO: 2819463 - DNA, 25 bp, Homo sapien
gcctgaggatggagtaatttcttca

SEQ ID NO: 2819464 - DNA, 25 bp, Homo sapien
ctctttgcctgaggatggagtaatt

SEQ ID NO: 2819465 - DNA, 25 bp, Homo sapien
ttgcctgaggatggagtaatttctt

SEQ ID NO: 2819466 - DNA, 25 bp, Homo sapien
caagccgtcatataactgccacagg

SEQ ID NO: 2819467 - DNA, 25 bp, Homo sapien
atcatggagaggaaagggactctgc

SEQ ID NO: 2819468 - DNA, 25 bp, Homo sapien
gagtcagttgagtagtgccaggtaa

SEQ ID NO: 2819469 - DNA, 25 bp, Homo sapien
ctaaggagattgtgtccccaagccg

SEQ ID NO: 2819470 - DNA, 25 bp, Homo sapien
tcaggcagcggtgaaggctgtggtg

SEQ ID NO: 2819471 - DNA, 25 bp, Homo sapien
ggcagcggtgaaggctgtggtggcc

SEQ ID NO: 2819472 - DNA, 25 bp, Homo sapien
caggcagcggtgaaggctgtggtgg

SEQ ID NO: 2819473 - DNA, 25 bp, Homo sapien
cagcggtgaaggctgtggtggcctc

SEQ ID NO: 2819474 - DNA, 25 bp, Homo sapien
gtaagttcactcagacagacatgtc

SEQ ID NO: 2819475 - DNA, 25 bp, Homo sapien
tagaaatttgacctgagggccaatg

SEQ ID NO: 2819476 - DNA, 25 bp, Homo sapien
gaagcctatatcttgctgctgggaa

SEQ ID NO: 2819477 - DNA, 25 bp, Homo sapien
gctgggaaatgtaaagcagttggca

SEQ ID NO: 2819478 - DNA, 25 bp, Homo sapien
cagggtagggatcactacagtccca

SEQ ID NO: 2819479 - DNA, 25 bp, Homo sapien
tgaggtagaataaccccttgagcgg

SEQ ID NO: 2819480 - DNA, 25 bp, Homo sapien
tgattctaaggacggtggtacactc

SEQ ID NO: 2819481 - DNA, 25 bp, Homo sapien
tctaccggctatgcagaaaagtgga

SEQ ID NO: 2819482 - DNA, 25 bp, Homo sapien
agcttttcgtaaatcaccatagaag

SEQ ID NO: 2819483 - DNA, 25 bp, Homo sapien
cataaagcttttcgtaaatcaccat

SEQ ID NO: 2819484 - DNA, 25 bp, Homo sapien
tttcgtaaatcaccatagaagttgg

SEQ ID NO: 2819485 - DNA, 25 bp, Homo sapien
tcataaagcttttcgtaaatcacca

SEQ ID NO: 2819486 - DNA, 25 bp, Homo sapien
tatcctcgaacaaattctggtctct

SEQ ID NO: 2819487 - DNA, 25 bp, Homo sapien
gatctgtctgaatatatcctgtcaa

SEQ ID NO: 2819488 - DNA, 25 bp, Homo sapien
ccacagggatggttatatcctcgaa

SEQ ID NO: 2819489 - DNA, 25 bp, Homo sapien
gaggaatcatcccacgcagatctgt

SEQ ID NO: 2819490 - DNA, 25 bp, Homo sapien
ccatggcagagtgaaaaagagactt

SEQ ID NO: 2819491 - DNA, 25 bp, Homo sapien
taaatcccaaagtgaccatggcaga

SEQ ID NO: 2819492 - DNA, 25 bp, Homo sapien
tcttagaggcagtcatgtgatccac

SEQ ID NO: 2819493 - DNA, 25 bp, Homo sapien
aaatcttggttgtagtatccaggcc

SEQ ID NO: 2819494 - DNA, 25 bp, Homo sapien
aggaaagagacatccagccaagaaa

SEQ ID NO: 2819495 - DNA, 25 bp, Homo sapien
aaggaaagagacatccagccaagaa

SEQ ID NO: 2819496 - DNA, 25 bp, Homo sapien
attctcttggggaaattatattcca

SEQ ID NO: 2819497 - DNA, 25 bp, Homo sapien
acaaattctcttggggaaattatat

SEQ ID NO: 2819498 - DNA, 25 bp, Homo sapien
gcccacagtataggagaaatcaaca

SEQ ID NO: 2819499 - DNA, 25 bp, Homo sapien
ccacagtataggagaaatcaacaaa

SEQ ID NO: 2819500 - DNA, 25 bp, Homo sapien
agcagtagtgtaacgcatcacacag

SEQ ID NO: 2819501 - DNA, 25 bp, Homo sapien
cagtagtgtaacgcatcacacagca

SEQ ID NO: 2819502 - DNA, 25 bp, Homo sapien
agtagtgtaacgcatcacacagcaa

SEQ ID NO: 2819503 - DNA, 25 bp, Homo sapien
gcagtagtgtaacgcatcacacagc

SEQ ID NO: 2819504 - DNA, 25 bp, Homo sapien
tcatcaagctgtcccaatccaaacg

SEQ ID NO: 2819505 - DNA, 25 bp, Homo sapien
ggccctgggcgtatatggtctatta

SEQ ID NO: 2819506 - DNA, 25 bp, Homo sapien
gtcatctataacaccttgggctttg

SEQ ID NO: 2819507 - DNA, 25 bp, Homo sapien
ctattatactatagacaaggtcatc

SEQ ID NO: 2819508 - DNA, 25 bp, Homo sapien
aaagcatgtgaagctatttaatcat

SEQ ID NO: 2819509 - DNA, 25 bp, Homo sapien
aaagtatgaaacaggaacaacacac

SEQ ID NO: 2819510 - DNA, 25 bp, Homo sapien
gcttcagctctatcagtaccttttt

SEQ ID NO: 2819511 - DNA, 25 bp, Homo sapien
acacacataacttcaggacagcagt

SEQ ID NO: 2819512 - DNA, 25 bp, Homo sapien
ttttgatcacatatccctttaagac

SEQ ID NO: 2819513 - DNA, 25 bp, Homo sapien
tcttttgatcacatatccctttaag

SEQ ID NO: 2819514 - DNA, 25 bp, Homo sapien
ctcttttgatcacatatccctttaa

SEQ ID NO: 2819515 - DNA, 25 bp, Homo sapien
tttgatcacatatccctttaagact

SEQ ID NO: 2819516 - DNA, 25 bp, Homo sapien
tgagggttttctccaaacagttaca

SEQ ID NO: 2819517 - DNA, 25 bp, Homo sapien
ggtactggatgagagtgtttttaag

SEQ ID NO: 2819518 - DNA, 25 bp, Homo sapien
aactcgccacttatcttcttcaatg

SEQ ID NO: 2819519 - DNA, 25 bp, Homo sapien
tttaagtttagttgcaaaagaagca

SEQ ID NO: 2819520 - DNA, 25 bp, Homo sapien
cttcaatgctatggtactggatgag

SEQ ID NO: 2819521 - DNA, 25 bp, Homo sapien
gcgagctccccagatccatggtctg

SEQ ID NO: 2819522 - DNA, 25 bp, Homo sapien
tgtgaggtcctctcccgcccggacg

SEQ ID NO: 2819523 - DNA, 25 bp, Homo sapien
ctgtgaggtcctctcccgcccggac

SEQ ID NO: 2819524 - DNA, 25 bp, Homo sapien
cgccatccccaacgtccaccgcgag

SEQ ID NO: 2819525 - DNA, 25 bp, Homo sapien
cctgccgcggctccgtggctctcct

SEQ ID NO: 2819526 - DNA, 25 bp, Homo sapien
ctccacacgggccaccccaatcctg

SEQ ID NO: 2819527 - DNA, 25 bp, Homo sapien
tccacacgggccaccccaatcctgc

SEQ ID NO: 2819528 - DNA, 25 bp, Homo sapien
caccccaatcctgccgcggctccgt

SEQ ID NO: 2819529 - DNA, 25 bp, Homo sapien
tggaagcagctacggcgcgctacca

SEQ ID NO: 2819530 - DNA, 25 bp, Homo sapien
aagcaaggacgtggaagcagctacg

SEQ ID NO: 2819531 - DNA, 25 bp, Homo sapien
gctaccaagcacctcacaccgctct

SEQ ID NO: 2819532 - DNA, 25 bp, Homo sapien
aggtgaagcaaggacgtggaagcag

SEQ ID NO: 2819533 - DNA, 25 bp, Homo sapien
ccggcccgccgatgcgcaggcgaca

SEQ ID NO: 2819534 - DNA, 25 bp, Homo sapien
ggcgacagcagccaacttgtaagtc

SEQ ID NO: 2819535 - DNA, 25 bp, Homo sapien
gcaggcgacagcagccaacttgtaa

SEQ ID NO: 2819536 - DNA, 25 bp, Homo sapien
cgacagcagccaacttgtaagtcac

SEQ ID NO: 2819537 - DNA, 25 bp, Homo sapien
caacgtgcgcttgttcggattggct

SEQ ID NO: 2819538 - DNA, 25 bp, Homo sapien
gaaattgaaacagaaggcgaagtga

SEQ ID NO: 2819539 - DNA, 25 bp, Homo sapien
gaattttgtcaagcagtaaaccgac

SEQ ID NO: 2819540 - DNA, 25 bp, Homo sapien
taaatggaatgattccgcgtgggtg

SEQ ID NO: 2819541 - DNA, 25 bp, Homo sapien
tccgctcgtacttgggctgtgcttc

SEQ ID NO: 2819542 - DNA, 25 bp, Homo sapien
gagaaatgcctttatcaagttccat

SEQ ID NO: 2819543 - DNA, 25 bp, Homo sapien
cacgtcacaccaacctttgaagtca

SEQ ID NO: 2819544 - DNA, 25 bp, Homo sapien
aacctttgaagtcaagttcctgctg

SEQ ID NO: 2819545 - DNA, 25 bp, Homo sapien
aaattcctagggttcttctgtctct

SEQ ID NO: 2819546 - DNA, 25 bp, Homo sapien
taaattcctagggttcttctgtctc

SEQ ID NO: 2819547 - DNA, 25 bp, Homo sapien
gctacagttaaccacttctcaatct

SEQ ID NO: 2819548 - DNA, 25 bp, Homo sapien
aactgctacagttaaccacttctca

SEQ ID NO: 2819549 - DNA, 25 bp, Homo sapien
cagttaaccacttctcaatctgtat

SEQ ID NO: 2819550 - DNA, 25 bp, Homo sapien
tcaaactgctacagttaaccacttc

SEQ ID NO: 2819551 - DNA, 25 bp, Homo sapien
caatctgctagaatggggtatgtct

SEQ ID NO: 2819552 - DNA, 25 bp, Homo sapien
ttcttccaatctgctagaatggggt

SEQ ID NO: 2819553 - DNA, 25 bp, Homo sapien
gaatggggtatgtcttctccacctc

SEQ ID NO: 2819554 - DNA, 25 bp, Homo sapien
gctagaatggggtatgtcttctcca

SEQ ID NO: 2819555 - DNA, 25 bp, Homo sapien
tatgacagcatatctaactgcatcc

SEQ ID NO: 2819556 - DNA, 25 bp, Homo sapien
atgacagcatatctaactgcatcct

SEQ ID NO: 2819557 - DNA, 25 bp, Homo sapien
tgacagcatatctaactgcatcctc

SEQ ID NO: 2819558 - DNA, 25 bp, Homo sapien
ttatgacagcatatctaactgcatc

SEQ ID NO: 2819559 - DNA, 25 bp, Homo sapien
ctgctagattgaacatgtctaggac

SEQ ID NO: 2819560 - DNA, 25 bp, Homo sapien
gcgactgttgtatcaaagcgaagga

SEQ ID NO: 2819561 - DNA, 25 bp, Homo sapien
gtctaggacaatagcaattgtttcc

SEQ ID NO: 2819562 - DNA, 25 bp, Homo sapien
ttgtttccaattgtacgcatttcca

SEQ ID NO: 2819563 - DNA, 25 bp, Homo sapien
catttccatctctggcacgtgagag

SEQ ID NO: 2819564 - DNA, 25 bp, Homo sapien
cctcagccacaagggttagcaaggc

SEQ ID NO: 2819565 - DNA, 25 bp, Homo sapien
tagcaaggctaatgggtacagtgaa

SEQ ID NO: 2819566 - DNA, 25 bp, Homo sapien
tgtattaatacatcccgccaggaaa

SEQ ID NO: 2819567 - DNA, 25 bp, Homo sapien
gcagctctccaatgtttaggaacct

SEQ ID NO: 2819568 - DNA, 25 bp, Homo sapien
caaacttgccgaagacttctcttag

SEQ ID NO: 2819569 - DNA, 25 bp, Homo sapien
agcagctctccaatgtttaggaacc

SEQ ID NO: 2819570 - DNA, 25 bp, Homo sapien
aacatgaccctcaaacttgccgaag

SEQ ID NO: 2819571 - DNA, 25 bp, Homo sapien
tgtttgatggcgtcccacagatccc

SEQ ID NO: 2819572 - DNA, 25 bp, Homo sapien
tcaggaagttattagccattgcttc

SEQ ID NO: 2819573 - DNA, 25 bp, Homo sapien
catgatcccctttttgtgactagcc

SEQ ID NO: 2819574 - DNA, 25 bp, Homo sapien
tctggaactcacacaatgtatatgt

SEQ ID NO: 2819575 - DNA, 25 bp, Homo sapien
tattgacaggtgatttcgcaagcac

SEQ ID NO: 2819576 - DNA, 25 bp, Homo sapien
cgcaagcactagttttggagcattg

SEQ ID NO: 2819577 - DNA, 25 bp, Homo sapien
ggagcattgttttcatagtccgtca

SEQ ID NO: 2819578 - DNA, 25 bp, Homo sapien
tgcatatcgcatccaaagctctgag

SEQ ID NO: 2819579 - DNA, 25 bp, Homo sapien
atagctagggcagagcaacataaca

SEQ ID NO: 2819580 - DNA, 25 bp, Homo sapien
gctgcaaatcaacactgttccaccc

SEQ ID NO: 2819581 - DNA, 25 bp, Homo sapien
gcaaatcaacactgttccaccccag

SEQ ID NO: 2819582 - DNA, 25 bp, Homo sapien
tgcaaatcaacactgttccacccca

SEQ ID NO: 2819583 - DNA, 25 bp, Homo sapien
caattgcatggagtgagagaccagc

SEQ ID NO: 2819584 - DNA, 25 bp, Homo sapien
tgcccaggaaggacccaattgcatg

SEQ ID NO: 2819585 - DNA, 25 bp, Homo sapien
ggaaccacagtctcaacaatacggg

SEQ ID NO: 2819586 - DNA, 25 bp, Homo sapien
tagtgatgcataagacaacagtcca

SEQ ID NO: 2819587 - DNA, 25 bp, Homo sapien
tcagctcagcacaaggggtggtgaa

SEQ ID NO: 2819588 - DNA, 25 bp, Homo sapien
gaggagatcagtgaggttgtcagct

SEQ ID NO: 2819589 - DNA, 25 bp, Homo sapien
catcagaggctggacattcttcagt

SEQ ID NO: 2819590 - DNA, 25 bp, Homo sapien
tgcccaaaaggaaggtcagctcagc

SEQ ID NO: 2819591 - DNA, 25 bp, Homo sapien
agatcggtgatgatgtcccctttat

SEQ ID NO: 2819592 - DNA, 25 bp, Homo sapien
gagatcggtgatgatgtccccttta

SEQ ID NO: 2819593 - DNA, 25 bp, Homo sapien
atttctgtgagatcggtgatgatgt

SEQ ID NO: 2819594 - DNA, 25 bp, Homo sapien
tctgtgagatcggtgatgatgtccc

SEQ ID NO: 2819595 - DNA, 25 bp, Homo sapien
agtagttgctggcaactactctctg

SEQ ID NO: 2819596 - DNA, 25 bp, Homo sapien
cttcacttccctgatagtagttgct

SEQ ID NO: 2819597 - DNA, 25 bp, Homo sapien
gttgctggcaactactctctgctcc

SEQ ID NO: 2819598 - DNA, 25 bp, Homo sapien
tggcaactactctctgctccagcat

SEQ ID NO: 2819599 - DNA, 25 bp, Homo sapien
tgtctaccatgaagcttgttccata

SEQ ID NO: 2819600 - DNA, 25 bp, Homo sapien
cttctctaacagactgtgactatct

SEQ ID NO: 2819601 - DNA, 25 bp, Homo sapien
tctctaacagactgtgactatctcc

SEQ ID NO: 2819602 - DNA, 25 bp, Homo sapien
tttcccaatcttgttccagtgtcta

SEQ ID NO: 2819603 - DNA, 25 bp, Homo sapien
gcgtcttcagacactaagaccagga

SEQ ID NO: 2819604 - DNA, 25 bp, Homo sapien
taagaccaggaaatacaatgggtta

SEQ ID NO: 2819605 - DNA, 25 bp, Homo sapien
attttttatggcaataagtctttat

SEQ ID NO: 2819606 - DNA, 25 bp, Homo sapien
ggtgagcgtcttcagacactaagac

SEQ ID NO: 2819607 - DNA, 25 bp, Homo sapien
agatcttggtggcactacactgagc

SEQ ID NO: 2819608 - DNA, 25 bp, Homo sapien
atcctgattgaatctccagatcttg

SEQ ID NO: 2819609 - DNA, 25 bp, Homo sapien
tgttcacacaataaaccatcctgat

SEQ ID NO: 2819610 - DNA, 25 bp, Homo sapien
ttggtggcactacactgagctgtgc

SEQ ID NO: 2819611 - DNA, 25 bp, Homo sapien
ttttaagatcacacagagatggtcc

SEQ ID NO: 2819612 - DNA, 25 bp, Homo sapien
aaggtccaaggaggcactgtgtttc

SEQ ID NO: 2819613 - DNA, 25 bp, Homo sapien
caggcccctttatatgtgctctatg

SEQ ID NO: 2819614 - DNA, 25 bp, Homo sapien
ctttgggatgagcactaagtttatt

SEQ ID NO: 2819615 - DNA, 25 bp, Homo sapien
gcacagtcttggtctccatgagacg

SEQ ID NO: 2819616 - DNA, 25 bp, Homo sapien
tggaggtgatatcttatcctgggac

SEQ ID NO: 2819617 - DNA, 25 bp, Homo sapien
gcaaagggtcatcagattgccctaa

SEQ ID NO: 2819618 - DNA, 25 bp, Homo sapien
cacagagcagtgaaactgtagggat

SEQ ID NO: 2819619 - DNA, 25 bp, Homo sapien
tattccttctcccacggtgtcttgt

SEQ ID NO: 2819620 - DNA, 25 bp, Homo sapien
gattttgtctctccgcttgtctctc

SEQ ID NO: 2819621 - DNA, 25 bp, Homo sapien
cacggtgtcttgtactgtgtcagaa

SEQ ID NO: 2819622 - DNA, 25 bp, Homo sapien
cagaaaccctagtaacactgatgat

SEQ ID NO: 2819623 - DNA, 25 bp, Homo sapien
tgaaactgaccctagtggagccagg

SEQ ID NO: 2819624 - DNA, 25 bp, Homo sapien
tacctcttagggaaggatctactac

SEQ ID NO: 2819625 - DNA, 25 bp, Homo sapien
tactacctacgtcctctgaagaagg

SEQ ID NO: 2819626 - DNA, 25 bp, Homo sapien
tggagccaggatcagctcactgagg

SEQ ID NO: 2819627 - DNA, 25 bp, Homo sapien
tgttccgtcaccagctcagatttac

SEQ ID NO: 2819628 - DNA, 25 bp, Homo sapien
tttactcttctcaagggtgccagtg

SEQ ID NO: 2819629 - DNA, 25 bp, Homo sapien
ctttgtgtgcaaagaatgttccgtc

SEQ ID NO: 2819630 - DNA, 25 bp, Homo sapien
cacacaggtagttgattgtgcagct

SEQ ID NO: 2819631 - DNA, 25 bp, Homo sapien
gaaaagacgtttctcaaagactgaa

SEQ ID NO: 2819632 - DNA, 25 bp, Homo sapien
tgctgttagtcccaaaaagttctgg

SEQ ID NO: 2819633 - DNA, 25 bp, Homo sapien
cccaaaaagttctggcacagattgg

SEQ ID NO: 2819634 - DNA, 25 bp, Homo sapien
tagctagttccatgaaaagacgttt

SEQ ID NO: 2819635 - DNA, 25 bp, Homo sapien
ctgtggccttgacaaaattctcagt

SEQ ID NO: 2819636 - DNA, 25 bp, Homo sapien
aatgtggctggccaaaaacaacact

SEQ ID NO: 2819637 - DNA, 25 bp, Homo sapien
tctgaagtacctttgatacatcttc

SEQ ID NO: 2819638 - DNA, 25 bp, Homo sapien
ctattctgataacaagtgcaggcac

SEQ ID NO: 2819639 - DNA, 25 bp, Homo sapien
caattcgagaggcttgatgtatcac

SEQ ID NO: 2819640 - DNA, 25 bp, Homo sapien
ctatcagacacctgctgcttagggc

SEQ ID NO: 2819641 - DNA, 25 bp, Homo sapien
aattctcggacccacaattcaagtt

SEQ ID NO: 2819642 - DNA, 25 bp, Homo sapien
caacacacgggaattctcggaccca

SEQ ID NO: 2819643 - DNA, 25 bp, Homo sapien
cacgggaattctcggacccacaatt

SEQ ID NO: 2819644 - DNA, 25 bp, Homo sapien
ggaattctcggacccacaattcaag

SEQ ID NO: 2819645 - DNA, 25 bp, Homo sapien
ttcaggtatgcttccaatctggtta

SEQ ID NO: 2819646 - DNA, 25 bp, Homo sapien
caggtatgcttccaatctggttatt

SEQ ID NO: 2819647 - DNA, 25 bp, Homo sapien
ggtatgcttccaatctggttattgc

SEQ ID NO: 2819648 - DNA, 25 bp, Homo sapien
cttttcaggtatgcttccaatctgg

SEQ ID NO: 2819649 - DNA, 25 bp, Homo sapien
cagagttcggtcaaatctttaggct

SEQ ID NO: 2819650 - DNA, 25 bp, Homo sapien
caaaggctagggatgaagtccaact

SEQ ID NO: 2819651 - DNA, 25 bp, Homo sapien
gacttacacactccttctgaatggt

SEQ ID NO: 2819652 - DNA, 25 bp, Homo sapien
gactctaagctatataagggcaggc

SEQ ID NO: 2819653 - DNA, 25 bp, Homo sapien
tcatgggatctttgtacaggcacta

SEQ ID NO: 2819654 - DNA, 25 bp, Homo sapien
tcagaggctgatataagggtcccca

SEQ ID NO: 2819655 - DNA, 25 bp, Homo sapien
gatagtatgaggctagtttccccac

SEQ ID NO: 2819656 - DNA, 25 bp, Homo sapien
tcagtggtcttggattccctaggcc

SEQ ID NO: 2819657 - DNA, 25 bp, Homo sapien
tgacaaagaagcttggttatccctg

SEQ ID NO: 2819658 - DNA, 25 bp, Homo sapien
aattgtatctgaaagcacttatcag

SEQ ID NO: 2819659 - DNA, 25 bp, Homo sapien
gaagcttggttatccctgtggttta

SEQ ID NO: 2819660 - DNA, 25 bp, Homo sapien
gagtcttataccctattataaacca

SEQ ID NO: 2819661 - DNA, 25 bp, Homo sapien
tgagagccctgaaaatccgacaaaa

SEQ ID NO: 2819662 - DNA, 25 bp, Homo sapien
aagattaatgagctagagttccagg

SEQ ID NO: 2819663 - DNA, 25 bp, Homo sapien
ctttctaggtgagagtgagcatgac

SEQ ID NO: 2819664 - DNA, 25 bp, Homo sapien
gagttccaggtatatgtgagcagca

SEQ ID NO: 2819665 - DNA, 25 bp, Homo sapien
caatgatcagtgcaagatccctgag

SEQ ID NO: 2819666 - DNA, 25 bp, Homo sapien
tacaaattggcatgccaggctgctg

SEQ ID NO: 2819667 - DNA, 25 bp, Homo sapien
caggtaatctgcctcttggaccggc

SEQ ID NO: 2819668 - DNA, 25 bp, Homo sapien
ctcttggaccggctctgaaaatggg

SEQ ID NO: 2819669 - DNA, 25 bp, Homo sapien
tgttccatttgagagcccagctgaa

SEQ ID NO: 2819670 - DNA, 25 bp, Homo sapien
tgctgtagcagtcttagcaggctgg

SEQ ID NO: 2819671 - DNA, 25 bp, Homo sapien
tttatgaggacagcaatctgaccag

SEQ ID NO: 2819672 - DNA, 25 bp, Homo sapien
gaaacaaagattgcccggctgttcc

SEQ ID NO: 2819673 - DNA, 25 bp, Homo sapien
ccaattgaggactgaaattatattt

SEQ ID NO: 2819674 - DNA, 25 bp, Homo sapien
gggagtccaattgaggactgaaatt

SEQ ID NO: 2819675 - DNA, 25 bp, Homo sapien
gatgttctgacaatatataagtttt

SEQ ID NO: 2819676 - DNA, 25 bp, Homo sapien
ggagccagggcagatttcaactgat

SEQ ID NO: 2819677 - DNA, 25 bp, Homo sapien
gggaagagatcaatgtcacaaagcc

SEQ ID NO: 2819678 - DNA, 25 bp, Homo sapien
tttctctttataatgctgcttctaa

SEQ ID NO: 2819679 - DNA, 25 bp, Homo sapien
aacaacacagcaatatttgctttca

SEQ ID NO: 2819680 - DNA, 25 bp, Homo sapien
agaggtggcaccagttgtgggaaga

SEQ ID NO: 2819681 - DNA, 25 bp, Homo sapien
tcttccattgttatgactccatgaa

SEQ ID NO: 2819682 - DNA, 25 bp, Homo sapien
gaacctcttccattgttatgactcc

SEQ ID NO: 2819683 - DNA, 25 bp, Homo sapien
aacctcttccattgttatgactcca

SEQ ID NO: 2819684 - DNA, 25 bp, Homo sapien
cctcttccattgttatgactccatg

SEQ ID NO: 2819685 - DNA, 25 bp, Homo sapien
cataacgctgcgcttgttgttgttt

SEQ ID NO: 2819686 - DNA, 25 bp, Homo sapien
ctcacaactctgtcctggaggaacg

SEQ ID NO: 2819687 - DNA, 25 bp, Homo sapien
gggtgcaagatcctgcctcataacg

SEQ ID NO: 2819688 - DNA, 25 bp, Homo sapien
tgtcctggaggaacgaaagtcccac

SEQ ID NO: 2819689 - DNA, 25 bp, Homo sapien
atatacacaggcttttctaagatca

SEQ ID NO: 2819690 - DNA, 25 bp, Homo sapien
catatacacaggcttttctaagatc

SEQ ID NO: 2819691 - DNA, 25 bp, Homo sapien
ccagggtgtagctccatatggcgta

SEQ ID NO: 2819692 - DNA, 25 bp, Homo sapien
tgactgaattgtgctccggagcggt

SEQ ID NO: 2819693 - DNA, 25 bp, Homo sapien
cataacttgtaaatgggtccagtgg

SEQ ID NO: 2819694 - DNA, 25 bp, Homo sapien
gatttcaggcttgctatttcaccca

SEQ ID NO: 2819695 - DNA, 25 bp, Homo sapien
gccattaaggtcttttgtgagagaa

SEQ ID NO: 2819696 - DNA, 25 bp, Homo sapien
aaagaagattgagcttttggataaa

SEQ ID NO: 2819697 - DNA, 25 bp, Homo sapien
agaagattgagcttttggataaagc

SEQ ID NO: 2819698 - DNA, 25 bp, Homo sapien
ccattaaggtcttttgtgagagaaa

SEQ ID NO: 2819699 - DNA, 25 bp, Homo sapien
aatctagggagtgtccgctctgaca

SEQ ID NO: 2819700 - DNA, 25 bp, Homo sapien
ttctttgatcctcagccgattttgg

SEQ ID NO: 2819701 - DNA, 25 bp, Homo sapien
agccgattttggtgcagaccctcca

SEQ ID NO: 2819702 - DNA, 25 bp, Homo sapien
caaatctagggagtgtccgctctga

SEQ ID NO: 2819703 - DNA, 25 bp, Homo sapien
gattgttgaggaatcaccacactgt

SEQ ID NO: 2819704 - DNA, 25 bp, Homo sapien
tagattgttgaggaatcaccacact

SEQ ID NO: 2819705 - DNA, 25 bp, Homo sapien
ctagattgttgaggaatcaccacac

SEQ ID NO: 2819706 - DNA, 25 bp, Homo sapien
agattgttgaggaatcaccacactg

SEQ ID NO: 2819707 - DNA, 25 bp, Homo sapien
ttcttcccagaataagagcttggtt

SEQ ID NO: 2819708 - DNA, 25 bp, Homo sapien
caggagccaccttctaattatggat

SEQ ID NO: 2819709 - DNA, 25 bp, Homo sapien
tgtgccatgatcttcaacacttgga

SEQ ID NO: 2819710 - DNA, 25 bp, Homo sapien
ttggtttactccctgatacggctga

SEQ ID NO: 2819711 - DNA, 25 bp, Homo sapien
cacctaaccagccagattagttgaa

SEQ ID NO: 2819712 - DNA, 25 bp, Homo sapien
tagtgagggagaatagggacagcca

SEQ ID NO: 2819713 - DNA, 25 bp, Homo sapien
gctcaaattgccacaccactttggg

SEQ ID NO: 2819714 - DNA, 25 bp, Homo sapien
gggagtggccttcttgctcaaattg

SEQ ID NO: 2819715 - DNA, 25 bp, Homo sapien
gcagatggccctccctagtgtgagt

SEQ ID NO: 2819716 - DNA, 25 bp, Homo sapien
aaacaccaacactagctttcctggg

SEQ ID NO: 2819717 - DNA, 25 bp, Homo sapien
gactgaaatctacaccattggttct

SEQ ID NO: 2819718 - DNA, 25 bp, Homo sapien
cattggtactcatggttgtcaggcc

SEQ ID NO: 2819719 - DNA, 25 bp, Homo sapien
gacgtggctcaggattgggactacc

SEQ ID NO: 2819720 - DNA, 25 bp, Homo sapien
cccgaagtgataggtagaatagagc

SEQ ID NO: 2819721 - DNA, 25 bp, Homo sapien
gaagctgggtcagttgcaaacaaga

SEQ ID NO: 2819722 - DNA, 25 bp, Homo sapien
tataggaccctactggagacgtggc

SEQ ID NO: 2819723 - DNA, 25 bp, Homo sapien
tcatatgttgatggagtagacccca

SEQ ID NO: 2819724 - DNA, 25 bp, Homo sapien
tcataaaacctcattggcagggcca

SEQ ID NO: 2819725 - DNA, 25 bp, Homo sapien
taaaacccgtatcaccagaaatggc

SEQ ID NO: 2819726 - DNA, 25 bp, Homo sapien
tatttttaatcttcgggcacatgac

SEQ ID NO: 2819727 - DNA, 25 bp, Homo sapien
catgtgtataagaggcaaaagccca

SEQ ID NO: 2819728 - DNA, 25 bp, Homo sapien
tacatcctagggaaggatattgaca

SEQ ID NO: 2819729 - DNA, 25 bp, Homo sapien
ccttgggttctatctgtctactgca

SEQ ID NO: 2819730 - DNA, 25 bp, Homo sapien
catcaaatctgaaagaaccatgtga

SEQ ID NO: 2819731 - DNA, 25 bp, Homo sapien
caatggttgttagcagtctcctccc

SEQ ID NO: 2819732 - DNA, 25 bp, Homo sapien
aaaatgagtgcaaaacgtcccctgg

SEQ ID NO: 2819733 - DNA, 25 bp, Homo sapien
catgtgatctcaatccctggaggag

SEQ ID NO: 2819734 - DNA, 25 bp, Homo sapien
tcaaaggattctaacgagggcccag

SEQ ID NO: 2819735 - DNA, 25 bp, Homo sapien
catggactaacctgtattgggagca

SEQ ID NO: 2819736 - DNA, 25 bp, Homo sapien
aagttttgaagcgtatgggaatgcc

SEQ ID NO: 2819737 - DNA, 25 bp, Homo sapien
taagcaacctgtgtacaagccaagt

SEQ ID NO: 2819738 - DNA, 25 bp, Homo sapien
gacatttctcatgcacagggagtgc

SEQ ID NO: 2819739 - DNA, 25 bp, Homo sapien
cattgggtacttgtcatgagtgcat

SEQ ID NO: 2819740 - DNA, 25 bp, Homo sapien
aaatacattgggtacttgtcatgag

SEQ ID NO: 2819741 - DNA, 25 bp, Homo sapien
gctaaaatacattgggtacttgtca

SEQ ID NO: 2819742 - DNA, 25 bp, Homo sapien
aaatagctaaaatacattgggtact

SEQ ID NO: 2819743 - DNA, 25 bp, Homo sapien
tacataaatgccacagatgcagaat

SEQ ID NO: 2819744 - DNA, 25 bp, Homo sapien
gatcacactgttacaaaagcctgca

SEQ ID NO: 2819745 - DNA, 25 bp, Homo sapien
tgctctatttacacagctgatatac

SEQ ID NO: 2819746 - DNA, 25 bp, Homo sapien
gcattttcagcagtacacaactgca

SEQ ID NO: 2819747 - DNA, 25 bp, Homo sapien
gcatctcggtcacttaccacaagga

SEQ ID NO: 2819748 - DNA, 25 bp, Homo sapien
tacctcgccaaggagcatgttgaaa

SEQ ID NO: 2819749 - DNA, 25 bp, Homo sapien
tttgtgattgctcccgctaccgtga

SEQ ID NO: 2819750 - DNA, 25 bp, Homo sapien
cagtctagagaacaacattcaggga

SEQ ID NO: 2819751 - DNA, 25 bp, Homo sapien
catatgtaatacaaatggaggtgtt

SEQ ID NO: 2819752 - DNA, 25 bp, Homo sapien
caaggctcagagtcccatagtttct

SEQ ID NO: 2819753 - DNA, 25 bp, Homo sapien
gataccatgacctcatcaataccca

SEQ ID NO: 2819754 - DNA, 25 bp, Homo sapien
aaaatcccatatatgataccatgac

SEQ ID NO: 2819755 - DNA, 25 bp, Homo sapien
gaggtaactgattcttggggagcgg

SEQ ID NO: 2819756 - DNA, 25 bp, Homo sapien
ctgattcttggggagcggagttcac

SEQ ID NO: 2819757 - DNA, 25 bp, Homo sapien
taactgattcttggggagcggagtt

SEQ ID NO: 2819758 - DNA, 25 bp, Homo sapien
tgattcttggggagcggagttcact

SEQ ID NO: 2819759 - DNA, 25 bp, Homo sapien
tagaataactcaatctcagtgtgac

SEQ ID NO: 2819760 - DNA, 25 bp, Homo sapien
tcagtgtgactactgatccgccgcc

SEQ ID NO: 2819761 - DNA, 25 bp, Homo sapien
tcctcacaatcctgatgagaaaggt

SEQ ID NO: 2819762 - DNA, 25 bp, Homo sapien
gcgccaacagtggagaggagctctc

SEQ ID NO: 2819763 - DNA, 25 bp, Homo sapien
tcaatcttggaatcttggtacacag

SEQ ID NO: 2819764 - DNA, 25 bp, Homo sapien
gatagattttatgccctgtacaggt

SEQ ID NO: 2819765 - DNA, 25 bp, Homo sapien
gcccacatgatgcacaatacaggta

SEQ ID NO: 2819766 - DNA, 25 bp, Homo sapien
cacagtgaagatttgacgatggtct

SEQ ID NO: 2819767 - DNA, 25 bp, Homo sapien
gctttctaagggtacggtgaggcac

SEQ ID NO: 2819768 - DNA, 25 bp, Homo sapien
caagtctagttcaggcagggtcaaa

SEQ ID NO: 2819769 - DNA, 25 bp, Homo sapien
tatttgtgccaacagagctgaggga

SEQ ID NO: 2819770 - DNA, 25 bp, Homo sapien
caagaactaatgtgaaggcctcagc

SEQ ID NO: 2819771 - DNA, 25 bp, Homo sapien
ttattttcagtggattctgtttttc

SEQ ID NO: 2819772 - DNA, 25 bp, Homo sapien
gttagtcaattacacttatgaaact

SEQ ID NO: 2819773 - DNA, 25 bp, Homo sapien
aaattttattttcagtggattctgt

SEQ ID NO: 2819774 - DNA, 25 bp, Homo sapien
cgttagtcaattacacttatgaaac

SEQ ID NO: 2819775 - DNA, 25 bp, Homo sapien
gaccttcagacttcattagcagaca

SEQ ID NO: 2819776 - DNA, 25 bp, Homo sapien
aaacaagtattcaccctaagaggca

SEQ ID NO: 2819777 - DNA, 25 bp, Homo sapien
aaaagtatactctccccgcttgaag

SEQ ID NO: 2819778 - DNA, 25 bp, Homo sapien
gaggcaaagtccagtatctacagta

SEQ ID NO: 2819779 - DNA, 25 bp, Homo sapien
ggttcttgactgacccagacaaaga

SEQ ID NO: 2819780 - DNA, 25 bp, Homo sapien
ccctccatgtccttgtttggaaatg

SEQ ID NO: 2819781 - DNA, 25 bp, Homo sapien
aatggttcttgactgacccagacaa

SEQ ID NO: 2819782 - DNA, 25 bp, Homo sapien
ccagacaaagagttctgggtaataa

SEQ ID NO: 2819783 - DNA, 25 bp, Homo sapien
gtagcacatcctagcttacaaagca

SEQ ID NO: 2819784 - DNA, 25 bp, Homo sapien
gctgccctcgcattatcccagaatg

SEQ ID NO: 2819785 - DNA, 25 bp, Homo sapien
tgaaactcaaaaaggtcgacttgcc

SEQ ID NO: 2819786 - DNA, 25 bp, Homo sapien
cacgtttgggtcttaaagagagctc

SEQ ID NO: 2819787 - DNA, 25 bp, Homo sapien
tgacctttggtattccgcaagggcc

SEQ ID NO: 2819788 - DNA, 25 bp, Homo sapien
tgctctcaaatgattcagacctgac

SEQ ID NO: 2819789 - DNA, 25 bp, Homo sapien
ggtattccgcaagggcctgaacttc

SEQ ID NO: 2819790 - DNA, 25 bp, Homo sapien
gattcagacctgacctttggtattc

SEQ ID NO: 2819791 - DNA, 25 bp, Homo sapien
gtggagaatgggtgatcccaagcaa

SEQ ID NO: 2819792 - DNA, 25 bp, Homo sapien
atgggtgatcccaagcaacaatcat

SEQ ID NO: 2819793 - DNA, 25 bp, Homo sapien
gagaatgggtgatcccaagcaacaa

SEQ ID NO: 2819794 - DNA, 25 bp, Homo sapien
aatgggtgatcccaagcaacaatca

SEQ ID NO: 2819795 - DNA, 25 bp, Homo sapien
acaaactgtgctgcccgctggaaaa

SEQ ID NO: 2819796 - DNA, 25 bp, Homo sapien
ttaataccctcacgcatagtggcgc

SEQ ID NO: 2819797 - DNA, 25 bp, Homo sapien
tgaaaccagggcagatttggtctac

SEQ ID NO: 2819798 - DNA, 25 bp, Homo sapien
tgaaccaagcagtctaaaatcaggg

SEQ ID NO: 2819799 - DNA, 25 bp, Homo sapien
tgcaaggcagcaacatactctctgg

SEQ ID NO: 2819800 - DNA, 25 bp, Homo sapien
tactctctggccaagcagacactgc

SEQ ID NO: 2819801 - DNA, 25 bp, Homo sapien
tctgccaatgaaagtgctgccagtt

SEQ ID NO: 2819802 - DNA, 25 bp, Homo sapien
gataagcatgctcccttttcccttc

SEQ ID NO: 2819803 - DNA, 25 bp, Homo sapien
cttgatctatagagttagttttggt

SEQ ID NO: 2819804 - DNA, 25 bp, Homo sapien
aacatggtatcttactctttgagct

SEQ ID NO: 2819805 - DNA, 25 bp, Homo sapien
ttactctttgagcttgatctataga

SEQ ID NO: 2819806 - DNA, 25 bp, Homo sapien
ggtatcttactctttgagcttgatc

SEQ ID NO: 2819807 - DNA, 25 bp, Homo sapien
ttgctgtactgcaacgctcccagga

SEQ ID NO: 2819808 - DNA, 25 bp, Homo sapien
tttgggtaacttcggcctagctcta

SEQ ID NO: 2819809 - DNA, 25 bp, Homo sapien
gctggacagactcctcagttttggg

SEQ ID NO: 2819810 - DNA, 25 bp, Homo sapien
tataaacatctgcagtaggacacgc

SEQ ID NO: 2819811 - DNA, 25 bp, Homo sapien
ctccctctcttcagtccagggagac

SEQ ID NO: 2819812 - DNA, 25 bp, Homo sapien
ctctcttcagtccagggagaccaac

SEQ ID NO: 2819813 - DNA, 25 bp, Homo sapien
cctctcttcagtccagggagaccaa

SEQ ID NO: 2819814 - DNA, 25 bp, Homo sapien
ccctctcttcagtccagggagacca

SEQ ID NO: 2819815 - DNA, 25 bp, Homo sapien
tagaggttacagacgaataaccatt

SEQ ID NO: 2819816 - DNA, 25 bp, Homo sapien
aaaaatgcctctttagaggttacag

SEQ ID NO: 2819817 - DNA, 25 bp, Homo sapien
caaacgaaaaatgcctctttagagg

SEQ ID NO: 2819818 - DNA, 25 bp, Homo sapien
cacaggtcagcaaacgaaaaatgcc

SEQ ID NO: 2819819 - DNA, 25 bp, Homo sapien
gaagaccgctcttttgttaacacag

SEQ ID NO: 2819820 - DNA, 25 bp, Homo sapien
ggaatcagccttccaccgtgtagtg

SEQ ID NO: 2819821 - DNA, 25 bp, Homo sapien
gatcgaatgcctaagaagaccctcg

SEQ ID NO: 2819822 - DNA, 25 bp, Homo sapien
tgaagggtccagctaagagcaacgg

SEQ ID NO: 2819823 - DNA, 25 bp, Homo sapien
agacaaaagccccgctccctgttca

SEQ ID NO: 2819824 - DNA, 25 bp, Homo sapien
gtggttgaaaaagggcaacatgcta

SEQ ID NO: 2819825 - DNA, 25 bp, Homo sapien
tggttgaaaaagggcaacatgctag

SEQ ID NO: 2819826 - DNA, 25 bp, Homo sapien
gttgaaaaagggcaacatgctagaa

SEQ ID NO: 2819827 - DNA, 25 bp, Homo sapien
tgtggttgaaaaagggcaacatgct

SEQ ID NO: 2819828 - DNA, 25 bp, Homo sapien
cttccaagaagtgcagccttggaaa

SEQ ID NO: 2819829 - DNA, 25 bp, Homo sapien
acttccaagaagtgcagccttggaa

SEQ ID NO: 2819830 - DNA, 25 bp, Homo sapien
caagaagtgcagccttggaaaaagg

SEQ ID NO: 2819831 - DNA, 25 bp, Homo sapien
agaagtgcagccttggaaaaaggag

SEQ ID NO: 2819832 - DNA, 25 bp, Homo sapien
tcgcgctctctctccaagagtgtgt

SEQ ID NO: 2819833 - DNA, 25 bp, Homo sapien
ctcgcgctctctctccaagagtgtg

SEQ ID NO: 2819834 - DNA, 25 bp, Homo sapien
ctctctctccaagagtgtgtgtgtc

SEQ ID NO: 2819835 - DNA, 25 bp, Homo sapien
cgctctctctccaagagtgtgtgtg

SEQ ID NO: 2819836 - DNA, 25 bp, Homo sapien
cgcgccgtccccactgcaccgcgcg

SEQ ID NO: 2819837 - DNA, 25 bp, Homo sapien
gctctgggccccgtcggcgagcggc

SEQ ID NO: 2819838 - DNA, 25 bp, Homo sapien
tcggcaggaatcggcggctctgggc

SEQ ID NO: 2819839 - DNA, 25 bp, Homo sapien
ggcgagcggccaacaggcgcgcgcg

SEQ ID NO: 2819840 - DNA, 25 bp, Homo sapien
gcctgtcctgagcgaagcagaaaat

SEQ ID NO: 2819841 - DNA, 25 bp, Homo sapien
aaagaggacggcgacgggcggcagc

SEQ ID NO: 2819842 - DNA, 25 bp, Homo sapien
tccttttatgtgcctgtcctgagcg

SEQ ID NO: 2819843 - DNA, 25 bp, Homo sapien
tgtcctgagcgaagcagaaaatggt

SEQ ID NO: 2819844 - DNA, 25 bp, Homo sapien
ttccagagcatgaagggcaatgacc

SEQ ID NO: 2819845 - DNA, 25 bp, Homo sapien
tgaccagagtcataggtggtgatgt

SEQ ID NO: 2819846 - DNA, 25 bp, Homo sapien
gtttttcccattcggcccatgtctg

SEQ ID NO: 2819847 - DNA, 25 bp, Homo sapien
gatggttcaatatgtaagtttttcc

SEQ ID NO: 2819848 - DNA, 25 bp, Homo sapien
tcttcccgtttacctagagccaaca

SEQ ID NO: 2819849 - DNA, 25 bp, Homo sapien
acactgaagaccttagtgccccctt

SEQ ID NO: 2819850 - DNA, 25 bp, Homo sapien
tagtgccccctttgattgcctcttc

SEQ ID NO: 2819851 - DNA, 25 bp, Homo sapien
ttcagcaagatctgtcatgtgtttc

SEQ ID NO: 2819852 - DNA, 25 bp, Homo sapien
gcctcgttctgaagcaatagacagc

SEQ ID NO: 2819853 - DNA, 25 bp, Homo sapien
cctcgttctgaagcaatagacagca

SEQ ID NO: 2819854 - DNA, 25 bp, Homo sapien
ctgcctcgttctgaagcaatagaca

SEQ ID NO: 2819855 - DNA, 25 bp, Homo sapien
tgcctcgttctgaagcaatagacag

SEQ ID NO: 2819856 - DNA, 25 bp, Homo sapien
tcagatgggcagtgcacaagctggt

SEQ ID NO: 2819857 - DNA, 25 bp, Homo sapien
ccttttgaacactctatgcctgggt

SEQ ID NO: 2819858 - DNA, 25 bp, Homo sapien
tttaggaaggcataggctcaaagcc

SEQ ID NO: 2819859 - DNA, 25 bp, Homo sapien
tcaaccaatgcatcaccttgcaggg

SEQ ID NO: 2819860 - DNA, 25 bp, Homo sapien
ctcctctgggttcgtgtttcatctt

SEQ ID NO: 2819861 - DNA, 25 bp, Homo sapien
tgctcctctgggttcgtgtttcatc

SEQ ID NO: 2819862 - DNA, 25 bp, Homo sapien
gctcctctgggttcgtgtttcatct

SEQ ID NO: 2819863 - DNA, 25 bp, Homo sapien
gcttttattgggctccttggataac

SEQ ID NO: 2819864 - DNA, 25 bp, Homo sapien
agtgtcagcaaactcaatcagtagg

SEQ ID NO: 2819865 - DNA, 25 bp, Homo sapien
atgaatcaaatctgcccaagcccca

SEQ ID NO: 2819866 - DNA, 25 bp, Homo sapien
ttggataaccagacagctcatagca

SEQ ID NO: 2819867 - DNA, 25 bp, Homo sapien
ccatcacagccagccttcttatggc

SEQ ID NO: 2819868 - DNA, 25 bp, Homo sapien
tcacagccagccttcttatggccat

SEQ ID NO: 2819869 - DNA, 25 bp, Homo sapien
ctcccatcacagccagccttcttat

SEQ ID NO: 2819870 - DNA, 25 bp, Homo sapien
atcacagccagccttcttatggcca

SEQ ID NO: 2819871 - DNA, 25 bp, Homo sapien
caggtaggcaaggagctcatgccct

SEQ ID NO: 2819872 - DNA, 25 bp, Homo sapien
tataggtctgatgttccaccaggtc

SEQ ID NO: 2819873 - DNA, 25 bp, Homo sapien
ctcaactgtgagtgaaaaggctact

SEQ ID NO: 2819874 - DNA, 25 bp, Homo sapien
tcaaggtttaacctcctgacagcag

SEQ ID NO: 2819875 - DNA, 25 bp, Homo sapien
tgtcaagcaagagcccaaagtagat

SEQ ID NO: 2819876 - DNA, 25 bp, Homo sapien
gaagcagtgacaatttgaaggagac

SEQ ID NO: 2819877 - DNA, 25 bp, Homo sapien
tgtctttgtaaataccctgtctcga

SEQ ID NO: 2819878 - DNA, 25 bp, Homo sapien
gaatggaggagtaaagcctttccac

SEQ ID NO: 2819879 - DNA, 25 bp, Homo sapien
gtaaaagtagatgcacttagtcatt

SEQ ID NO: 2819880 - DNA, 25 bp, Homo sapien
aaaagtagatgcacttagtcatttc

SEQ ID NO: 2819881 - DNA, 25 bp, Homo sapien
aaagtagatgcacttagtcatttct

SEQ ID NO: 2819882 - DNA, 25 bp, Homo sapien
ctgtaaaagtagatgcacttagtca

SEQ ID NO: 2819883 - DNA, 25 bp, Homo sapien
caactgggtaatccttaagatctaa

SEQ ID NO: 2819884 - DNA, 25 bp, Homo sapien
cacagggagtgaagaaattcttcta

SEQ ID NO: 2819885 - DNA, 25 bp, Homo sapien
gaagccaactttgcccctggtaggc

SEQ ID NO: 2819886 - DNA, 25 bp, Homo sapien
catttagcattaggtcaactgggta

SEQ ID NO: 2819887 - DNA, 25 bp, Homo sapien
tgtatactgactagcctctgaaagc

SEQ ID NO: 2819888 - DNA, 25 bp, Homo sapien
gcagaagaccctaagcttgacaaac

SEQ ID NO: 2819889 - DNA, 25 bp, Homo sapien
gcacgacctatagcttaaaattgga

SEQ ID NO: 2819890 - DNA, 25 bp, Homo sapien
tgtgacttgataccaagcacgacct

SEQ ID NO: 2819891 - DNA, 25 bp, Homo sapien
accaacatccaccagagacctgcat

SEQ ID NO: 2819892 - DNA, 25 bp, Homo sapien
gccactgccatagtgaagtttctgt

SEQ ID NO: 2819893 - DNA, 25 bp, Homo sapien
tcccattgtctgacccagggtttct

SEQ ID NO: 2819894 - DNA, 25 bp, Homo sapien
taatggagtggatttaaaggaggga

SEQ ID NO: 2819895 - DNA, 25 bp, Homo sapien
taaaggagggagatatctcccattg

SEQ ID NO: 2819896 - DNA, 25 bp, Homo sapien
aaagctgtgggatgattccaaatct

SEQ ID NO: 2819897 - DNA, 25 bp, Homo sapien
aacctcaatctccaccagaacttcc

SEQ ID NO: 2819898 - DNA, 25 bp, Homo sapien
agaacttcctcatatccaaaagcta

SEQ ID NO: 2819899 - DNA, 25 bp, Homo sapien
aacttcctcatatccaaaagctaca

SEQ ID NO: 2819900 - DNA, 25 bp, Homo sapien
tccccaacctcaatctccaccagaa

SEQ ID NO: 2819901 - DNA, 25 bp, Homo sapien
taaaaagaatatctcgtgcaccttc

SEQ ID NO: 2819902 - DNA, 25 bp, Homo sapien
aaagacctgctgtgataagtgccca

SEQ ID NO: 2819903 - DNA, 25 bp, Homo sapien
tagaagctgccttacaagcagggca

SEQ ID NO: 2819904 - DNA, 25 bp, Homo sapien
tggaaccactcttccctcttcgaag

SEQ ID NO: 2819905 - DNA, 25 bp, Homo sapien
gggaagccagttgccattttgtgag

SEQ ID NO: 2819906 - DNA, 25 bp, Homo sapien
tgtgagctgttctatgcagaagtct

SEQ ID NO: 2819907 - DNA, 25 bp, Homo sapien
tgtaactatagagtagtggatgtgg

SEQ ID NO: 2819908 - DNA, 25 bp, Homo sapien
gagtgtgggttgaactagtgacaca

SEQ ID NO: 2819909 - DNA, 25 bp, Homo sapien
ttattgtggatacaaatatgagcaa

SEQ ID NO: 2819910 - DNA, 25 bp, Homo sapien
tgagcaaaaatgcttatgggtgtgg

SEQ ID NO: 2819911 - DNA, 25 bp, Homo sapien
ttttattgtggatacaaatatgagc

SEQ ID NO: 2819912 - DNA, 25 bp, Homo sapien
aaatgcttatgggtgtgggtcaaga

SEQ ID NO: 2819913 - DNA, 25 bp, Homo sapien
tttcggtcagaagattaaggcccaa

SEQ ID NO: 2819914 - DNA, 25 bp, Homo sapien
tcagaagtagttgcgtgccagtgcc

SEQ ID NO: 2819915 - DNA, 25 bp, Homo sapien
tatgaatgaggccaccctagactag

SEQ ID NO: 2819916 - DNA, 25 bp, Homo sapien
tgccagtgccaagagtgagccatga

SEQ ID NO: 2819917 - DNA, 25 bp, Homo sapien
ctctgccctttctaggtctggaggt

SEQ ID NO: 2819918 - DNA, 25 bp, Homo sapien
tccagaagtgtattatgagagacct

SEQ ID NO: 2819919 - DNA, 25 bp, Homo sapien
ttctctgccctttctaggtctggag

SEQ ID NO: 2819920 - DNA, 25 bp, Homo sapien
tcacttcatccagaagtgtattatg

SEQ ID NO: 2819921 - DNA, 25 bp, Homo sapien
tgggttttctgtaccaggattcagg

SEQ ID NO: 2819922 - DNA, 25 bp, Homo sapien
ctgtacttagtaattgggttttctg

SEQ ID NO: 2819923 - DNA, 25 bp, Homo sapien
gttttctgtaccaggattcaggagg

SEQ ID NO: 2819924 - DNA, 25 bp, Homo sapien
attgggttttctgtaccaggattca

SEQ ID NO: 2819925 - DNA, 25 bp, Homo sapien
caggctcacaatggtggtcacatac

SEQ ID NO: 2819926 - DNA, 25 bp, Homo sapien
ctcaggctcacaatggtggtcacat

SEQ ID NO: 2819927 - DNA, 25 bp, Homo sapien
ggaaactcaggctcacaatggtggt

SEQ ID NO: 2819928 - DNA, 25 bp, Homo sapien
aaactcaggctcacaatggtggtca

SEQ ID NO: 2819929 - DNA, 25 bp, Homo sapien
acacatccgcagaggtgactcgggc

SEQ ID NO: 2819930 - DNA, 25 bp, Homo sapien
gggtccttccacttgtagaaaagca

SEQ ID NO: 2819931 - DNA, 25 bp, Homo sapien
caccctgagtctggtgagtcgactg

SEQ ID NO: 2819932 - DNA, 25 bp, Homo sapien
gaaaagcattgtgggacggaagcct

SEQ ID NO: 2819933 - DNA, 25 bp, Homo sapien
tgtccggggccgtgaacaagggcag

SEQ ID NO: 2819934 - DNA, 25 bp, Homo sapien
tggcctcaggcctgcgttcccacgt

SEQ ID NO: 2819935 - DNA, 25 bp, Homo sapien
tgtgtccgaagtgtccggggccgtg

SEQ ID NO: 2819936 - DNA, 25 bp, Homo sapien
caggcctgcgttcccacgtttggaa

SEQ ID NO: 2819937 - DNA, 25 bp, Homo sapien
tcgtcagtgaaaaggccttaccgta

SEQ ID NO: 2819938 - DNA, 25 bp, Homo sapien
gccttaccgtataactgactttatg

SEQ ID NO: 2819939 - DNA, 25 bp, Homo sapien
cttcgtcgatttgtgtttacatcat

SEQ ID NO: 2819940 - DNA, 25 bp, Homo sapien
agttctccagataagcctggtttta

SEQ ID NO: 2819941 - DNA, 25 bp, Homo sapien
gaccctgctagccttaagtgtatgg

SEQ ID NO: 2819942 - DNA, 25 bp, Homo sapien
tagactgctgctagctgaataccat

SEQ ID NO: 2819943 - DNA, 25 bp, Homo sapien
tggatgcctgaagtgtagactgctg

SEQ ID NO: 2819944 - DNA, 25 bp, Homo sapien
gagctgcataagtaacagttgctgc

SEQ ID NO: 2819945 - DNA, 25 bp, Homo sapien
tgacataattacctgctggagtctg

SEQ ID NO: 2819946 - DNA, 25 bp, Homo sapien
taagtgattaactgccagaaacagc

SEQ ID NO: 2819947 - DNA, 25 bp, Homo sapien
tgactcaaaaatcgtggctagaact

SEQ ID NO: 2819948 - DNA, 25 bp, Homo sapien
aaaatagcttgtgtttggcccaaag

SEQ ID NO: 2819949 - DNA, 25 bp, Homo sapien
gaaagcactgtactaggagctgaga

SEQ ID NO: 2819950 - DNA, 25 bp, Homo sapien
aatgacatatacagaggcttgggct

SEQ ID NO: 2819951 - DNA, 25 bp, Homo sapien
cacgatgatgagcacaacacagttc

SEQ ID NO: 2819952 - DNA, 25 bp, Homo sapien
tccctttggaaacatagataagtgg

SEQ ID NO: 2819953 - DNA, 25 bp, Homo sapien
cttgtaagatggctattatgggagg

SEQ ID NO: 2819954 - DNA, 25 bp, Homo sapien
tttagaactgagtccttactgaggc

SEQ ID NO: 2819955 - DNA, 25 bp, Homo sapien
gaggtgagagtgttacaaaatgagg

SEQ ID NO: 2819956 - DNA, 25 bp, Homo sapien
tgggaggtgagagtgttacaaaatg

SEQ ID NO: 2819957 - DNA, 25 bp, Homo sapien
ggtgtccataactgctaggtgtcca

SEQ ID NO: 2819958 - DNA, 25 bp, Homo sapien
gcatctgggcactagttgagaacca

SEQ ID NO: 2819959 - DNA, 25 bp, Homo sapien
cataatgaccctagattcagctggg

SEQ ID NO: 2819960 - DNA, 25 bp, Homo sapien
gatgacagagccaactagacgtggt

SEQ ID NO: 2819961 - DNA, 25 bp, Homo sapien
ggctatctttagacccatttcttct

SEQ ID NO: 2819962 - DNA, 25 bp, Homo sapien
tcttccatcaggctatctttagacc

SEQ ID NO: 2819963 - DNA, 25 bp, Homo sapien
ggtttttcttccatcaggctatctt

SEQ ID NO: 2819964 - DNA, 25 bp, Homo sapien
tccatcaggctatctttagacccat

SEQ ID NO: 2819965 - DNA, 25 bp, Homo sapien
tatttgaaaaatgtagaaagattca

SEQ ID NO: 2819966 - DNA, 25 bp, Homo sapien
atatttgaaaaatgtagaaagattc

SEQ ID NO: 2819967 - DNA, 25 bp, Homo sapien
ttgaaaaatgtagaaagattcagaa

SEQ ID NO: 2819968 - DNA, 25 bp, Homo sapien
aaaaatgtagaaagattcagaagaa

SEQ ID NO: 2819969 - DNA, 25 bp, Homo sapien
aacaatgtcttgtgagcccctatca

SEQ ID NO: 2819970 - DNA, 25 bp, Homo sapien
tattctgcctatcatgggaagcatg

SEQ ID NO: 2819971 - DNA, 25 bp, Homo sapien
aaacagggcagctcattaccagagc

SEQ ID NO: 2819972 - DNA, 25 bp, Homo sapien
gaagatttctagatagccagaggtg

SEQ ID NO: 2819973 - DNA, 25 bp, Homo sapien
taaactacatcctgtttgtgtcacg

SEQ ID NO: 2819974 - DNA, 25 bp, Homo sapien
ccaggtctaggctagggtcatcaaa

SEQ ID NO: 2819975 - DNA, 25 bp, Homo sapien
gcagactagatttggcccttaggcc

SEQ ID NO: 2819976 - DNA, 25 bp, Homo sapien
gaccaccctaaacatgtaaagtgag

SEQ ID NO: 2819977 - DNA, 25 bp, Homo sapien
tagatactgctggtgtcaggcttct

SEQ ID NO: 2819978 - DNA, 25 bp, Homo sapien
atgatagatactgctggtgtcaggc

SEQ ID NO: 2819979 - DNA, 25 bp, Homo sapien
gatagatactgctggtgtcaggctt

SEQ ID NO: 2819980 - DNA, 25 bp, Homo sapien
gatactgctggtgtcaggcttctta

SEQ ID NO: 2819981 - DNA, 25 bp, Homo sapien
tgggatgagagtcagtagatacaac

SEQ ID NO: 2819982 - DNA, 25 bp, Homo sapien
aactgtacatgtgcttagatgcatt

SEQ ID NO: 2819983 - DNA, 25 bp, Homo sapien
gtcagtagatacaactggcttttct

SEQ ID NO: 2819984 - DNA, 25 bp, Homo sapien
gatgcatttttatgggatgagagtc

SEQ ID NO: 2819985 - DNA, 25 bp, Homo sapien
gaaccctgagcatccgaagaacggg

SEQ ID NO: 2819986 - DNA, 25 bp, Homo sapien
ccggaagtggtggtacaagatctgt

SEQ ID NO: 2819987 - DNA, 25 bp, Homo sapien
tgatgaactgtagcatccccagaac

SEQ ID NO: 2819988 - DNA, 25 bp, Homo sapien
gcatccgaagaacgggtcaccggaa

SEQ ID NO: 2819989 - DNA, 25 bp, Homo sapien
cttcgtggcgaatgagaatgcctga

SEQ ID NO: 2819990 - DNA, 25 bp, Homo sapien
gatactggcggtaacttcgtggcga

SEQ ID NO: 2819991 - DNA, 25 bp, Homo sapien
tctgaacactgggacctgcgatact

SEQ ID NO: 2819992 - DNA, 25 bp, Homo sapien
gagaactgatcgctccccatctgaa

SEQ ID NO: 2819993 - DNA, 25 bp, Homo sapien
gcagcatagctacagaagggaaaca

SEQ ID NO: 2819994 - DNA, 25 bp, Homo sapien
tacactggtgactaaggactcctgc

SEQ ID NO: 2819995 - DNA, 25 bp, Homo sapien
cacagtcaacaggtacggttcctct

SEQ ID NO: 2819996 - DNA, 25 bp, Homo sapien
ggactcctgctgtgctttcacgaag

SEQ ID NO: 2819997 - DNA, 25 bp, Homo sapien
gctactgtcacctagttttgtttaa

SEQ ID NO: 2819998 - DNA, 25 bp, Homo sapien
tagaataagtagctttaatgcacac

SEQ ID NO: 2819999 - DNA, 25 bp, Homo sapien
tacctaccaagtacaaagaggtggc

SEQ ID NO: 2820000 - DNA, 25 bp, Homo sapien
tgaagaattagaatggattactcac

SEQ ID NO: 2820001 - DNA, 25 bp, Homo sapien
ctaataaagctttggtgagaagatt

SEQ ID NO: 2820002 - DNA, 25 bp, Homo sapien
ctttggtgagaagattctgaaaggc

SEQ ID NO: 2820003 - DNA, 25 bp, Homo sapien
aagctttggtgagaagattctgaaa

SEQ ID NO: 2820004 - DNA, 25 bp, Homo sapien
ttggtgagaagattctgaaaggcac

SEQ ID NO: 2820005 - DNA, 25 bp, Homo sapien
tcttttaattgttcttcggacaatc

SEQ ID NO: 2820006 - DNA, 25 bp, Homo sapien
ggacaatccggatggatccacaagt

SEQ ID NO: 2820007 - DNA, 25 bp, Homo sapien
ttgttcttcggacaatccggatgga

SEQ ID NO: 2820008 - DNA, 25 bp, Homo sapien
tcttcggacaatccggatggatcca

SEQ ID NO: 2820009 - DNA, 25 bp, Homo sapien
cttttgcttggatatcggggcttct

SEQ ID NO: 2820010 - DNA, 25 bp, Homo sapien
tgaatgtgcttccataactcttctt

SEQ ID NO: 2820011 - DNA, 25 bp, Homo sapien
atgtgcttccataactcttcttttg

SEQ ID NO: 2820012 - DNA, 25 bp, Homo sapien
tcttcttttgcttggatatcggggc

SEQ ID NO: 2820013 - DNA, 25 bp, Homo sapien
tataaatagagaaaacaacattcat

SEQ ID NO: 2820014 - DNA, 25 bp, Homo sapien
ctataaatagagaaaacaacattca

SEQ ID NO: 2820015 - DNA, 25 bp, Homo sapien
cattcccatctcagaagaattagag

SEQ ID NO: 2820016 - DNA, 25 bp, Homo sapien
ttcattcccatctcagaagaattag

SEQ ID NO: 2820017 - DNA, 25 bp, Homo sapien
gcttttcattcccatctcagaagaa

SEQ ID NO: 2820018 - DNA, 25 bp, Homo sapien
aatgcttttcattcccatctcagaa

SEQ ID NO: 2820019 - DNA, 25 bp, Homo sapien
aaggttcacccatgtagaaaagcag

SEQ ID NO: 2820020 - DNA, 25 bp, Homo sapien
gtgataaacatcaactgtagctgaa

SEQ ID NO: 2820021 - DNA, 25 bp, Homo sapien
tactactctactcttatgtctctgg

SEQ ID NO: 2820022 - DNA, 25 bp, Homo sapien
gattttctagctatttgttgcggat

SEQ ID NO: 2820023 - DNA, 25 bp, Homo sapien
tttggccgtatcagctgagaaatct

SEQ ID NO: 2820024 - DNA, 25 bp, Homo sapien
ttctactttaactgcactttggccg

SEQ ID NO: 2820025 - DNA, 25 bp, Homo sapien
aatctgacacaggtcctactggact

SEQ ID NO: 2820026 - DNA, 25 bp, Homo sapien
ttctaaatgaactactatccacaca

SEQ ID NO: 2820027 - DNA, 25 bp, Homo sapien
aaaccatatgctaggccttaaaaca

SEQ ID NO: 2820028 - DNA, 25 bp, Homo sapien
gagtctacagattattcatcattaa

SEQ ID NO: 2820029 - DNA, 25 bp, Homo sapien
cttgagtctacagattattcatcat

SEQ ID NO: 2820030 - DNA, 25 bp, Homo sapien
tgctaggccttaaaacaagtctcaa

SEQ ID NO: 2820031 - DNA, 25 bp, Homo sapien
cacagtaaaaagagtcctggtgtga

SEQ ID NO: 2820032 - DNA, 25 bp, Homo sapien
taaacatctaagactgagaagtgtc

SEQ ID NO: 2820033 - DNA, 25 bp, Homo sapien
gagaagtgtcccttagtgtcccaca

SEQ ID NO: 2820034 - DNA, 25 bp, Homo sapien
tttaacctgatgtggcactcacagc

SEQ ID NO: 2820035 - DNA, 25 bp, Homo sapien
ggttcagtctggaacaagacttcag

SEQ ID NO: 2820036 - DNA, 25 bp, Homo sapien
tcagagaattgtgcagactcaaact

SEQ ID NO: 2820037 - DNA, 25 bp, Homo sapien
gagcacgcaaattccaacactgagg

SEQ ID NO: 2820038 - DNA, 25 bp, Homo sapien
tttagaagacctgaatatccacatg

SEQ ID NO: 2820039 - DNA, 25 bp, Homo sapien
tctgtgtctggatcgcctgttgttg

SEQ ID NO: 2820040 - DNA, 25 bp, Homo sapien
tgtctccttaatacagcttcccact

SEQ ID NO: 2820041 - DNA, 25 bp, Homo sapien
gaggcgctgaatcaaccatatcatt

SEQ ID NO: 2820042 - DNA, 25 bp, Homo sapien
gcttcccactgaggcgctgaatcaa

SEQ ID NO: 2820043 - DNA, 25 bp, Homo sapien
tactgcaactgcatgagcataactg

SEQ ID NO: 2820044 - DNA, 25 bp, Homo sapien
agagtgttcatctcccagggtatac

SEQ ID NO: 2820045 - DNA, 25 bp, Homo sapien
tacaggtgcaaatcagtggatgggt

SEQ ID NO: 2820046 - DNA, 25 bp, Homo sapien
tacagagcggcatggaattgccagg

SEQ ID NO: 2820047 - DNA, 25 bp, Homo sapien
gacatactcccttaagaccagcaag

SEQ ID NO: 2820048 - DNA, 25 bp, Homo sapien
tactacaatgggctacctctggcgc

SEQ ID NO: 2820049 - DNA, 25 bp, Homo sapien
ttgcatctgcagtacggtgaacact

SEQ ID NO: 2820050 - DNA, 25 bp, Homo sapien
ttcctggcaaggaagcggttaccta

SEQ ID NO: 2820051 - DNA, 25 bp, Homo sapien
ttattctgtgtcataccattggctc

SEQ ID NO: 2820052 - DNA, 25 bp, Homo sapien
gggttaacaactggcatgactggca

SEQ ID NO: 2820053 - DNA, 25 bp, Homo sapien
caaatacttcttgttttcgagtgca

SEQ ID NO: 2820054 - DNA, 25 bp, Homo sapien
gattaatgcattaagccaccactaa

SEQ ID NO: 2820055 - DNA, 25 bp, Homo sapien
gactggcaaccaaatccctctgact

SEQ ID NO: 2820056 - DNA, 25 bp, Homo sapien
tctctttttccggtattctctatta

SEQ ID NO: 2820057 - DNA, 25 bp, Homo sapien
tctttttccggtattctctattaga

SEQ ID NO: 2820058 - DNA, 25 bp, Homo sapien
ctctttttccggtattctctattag

SEQ ID NO: 2820059 - DNA, 25 bp, Homo sapien
tgctggtgttacagcgtgaacgtga

SEQ ID NO: 2820060 - DNA, 25 bp, Homo sapien
gctggtgttacagcgtgaacgtgac

SEQ ID NO: 2820061 - DNA, 25 bp, Homo sapien
ctgctggtgttacagcgtgaacgtg

SEQ ID NO: 2820062 - DNA, 25 bp, Homo sapien
tttgcttaagatctgaatcttcacc

SEQ ID NO: 2820063 - DNA, 25 bp, Homo sapien
aggaccactattctggactcggcca

SEQ ID NO: 2820064 - DNA, 25 bp, Homo sapien
gcaaagtgtattatcctggtatcca

SEQ ID NO: 2820065 - DNA, 25 bp, Homo sapien
tccacctcatgataaacaaaatagg

SEQ ID NO: 2820066 - DNA, 25 bp, Homo sapien
ccaacatttcaccagatctcagagg

SEQ ID NO: 2820067 - DNA, 25 bp, Homo sapien
tcccatgtgtgccacagaggacaag

SEQ ID NO: 2820068 - DNA, 25 bp, Homo sapien
taaatgagggctatcactatctcca

SEQ ID NO: 2820069 - DNA, 25 bp, Homo sapien
taaagtatttcccagtggtgttgct

SEQ ID NO: 2820070 - DNA, 25 bp, Homo sapien
tttcagatgtacaggctgggattcc

SEQ ID NO: 2820071 - DNA, 25 bp, Homo sapien
cagctagatctcttgagttacacca

SEQ ID NO: 2820072 - DNA, 25 bp, Homo sapien
cattgttggacctgatctagcaccc

SEQ ID NO: 2820073 - DNA, 25 bp, Homo sapien
tctgctagaatcacatcatgcctga

SEQ ID NO: 2820074 - DNA, 25 bp, Homo sapien
catgagataatatagagcaagcact

SEQ ID NO: 2820075 - DNA, 25 bp, Homo sapien
cgcgtgtaagggaactttggcgact

SEQ ID NO: 2820076 - DNA, 25 bp, Homo sapien
tcacttccacaggaggggtttcggc

SEQ ID NO: 2820077 - DNA, 25 bp, Homo sapien
tggcgacttagtgcgatcactggga

SEQ ID NO: 2820078 - DNA, 25 bp, Homo sapien
acaggctgtacagaatcattgtcac

SEQ ID NO: 2820079 - DNA, 25 bp, Homo sapien
tcttcccacggtgcatgagatttgc

SEQ ID NO: 2820080 - DNA, 25 bp, Homo sapien
cccacggtgcatgagatttgcttct

SEQ ID NO: 2820081 - DNA, 25 bp, Homo sapien
ttcccacggtgcatgagatttgctt

SEQ ID NO: 2820082 - DNA, 25 bp, Homo sapien
tctttgggtatcagggctattttca

SEQ ID NO: 2820083 - DNA, 25 bp, Homo sapien
ttccgccttatcttggcttcatccc

SEQ ID NO: 2820084 - DNA, 25 bp, Homo sapien
ccagatgagaatgactttcaaatgc

SEQ ID NO: 2820085 - DNA, 25 bp, Homo sapien
ttggcttcatccctccagatgagaa

SEQ ID NO: 2820086 - DNA, 25 bp, Homo sapien
gatgagaatgactttcaaatgctat

SEQ ID NO: 2820087 - DNA, 25 bp, Homo sapien
cagcatataattgtacgtttcttca

SEQ ID NO: 2820088 - DNA, 25 bp, Homo sapien
tgtacgtttcttcagttaacttcac

SEQ ID NO: 2820089 - DNA, 25 bp, Homo sapien
catataattgtacgtttcttcagtt

SEQ ID NO: 2820090 - DNA, 25 bp, Homo sapien
ttacaacagcatataattgtacgtt

SEQ ID NO: 2820091 - DNA, 25 bp, Homo sapien
actggtgaaggtgcaataattttaa

SEQ ID NO: 2820092 - DNA, 25 bp, Homo sapien
ctttttactggtgaaggtgcaataa

SEQ ID NO: 2820093 - DNA, 25 bp, Homo sapien
tttttactggtgaaggtgcaataat

SEQ ID NO: 2820094 - DNA, 25 bp, Homo sapien
ggtgaaggtgcaataattttaattg

SEQ ID NO: 2820095 - DNA, 25 bp, Homo sapien
gtttgcagttatcctactgatgctg

SEQ ID NO: 2820096 - DNA, 25 bp, Homo sapien
gttatcctactgatgctgtttgatt

SEQ ID NO: 2820097 - DNA, 25 bp, Homo sapien
agttatcctactgatgctgtttgat

SEQ ID NO: 2820098 - DNA, 25 bp, Homo sapien
tgcagttatcctactgatgctgttt

SEQ ID NO: 2820099 - DNA, 25 bp, Homo sapien
agtgattcccttacctcagcctcat

SEQ ID NO: 2820100 - DNA, 25 bp, Homo sapien
gtgattcccttacctcagcctcatg

SEQ ID NO: 2820101 - DNA, 25 bp, Homo sapien
ctcagactcgggctacagagaaaag

SEQ ID NO: 2820102 - DNA, 25 bp, Homo sapien
gaaaagtgacctgacaaatccatcc

SEQ ID NO: 2820103 - DNA, 25 bp, Homo sapien
ccactaatgggcttatgtcttcatg

SEQ ID NO: 2820104 - DNA, 25 bp, Homo sapien
agaatccctcctacatcagctcaga

SEQ ID NO: 2820105 - DNA, 25 bp, Homo sapien
tagtagcagtatattagtacaccat

SEQ ID NO: 2820106 - DNA, 25 bp, Homo sapien
tatcaccttatcatacttctctatg

SEQ ID NO: 2820107 - DNA, 25 bp, Homo sapien
tcccatgaccataaagctctaaatg

SEQ ID NO: 2820108 - DNA, 25 bp, Homo sapien
agtacaccatactaatgctgataaa

SEQ ID NO: 2820109 - DNA, 25 bp, Homo sapien
ctcacagtgagccaactccattctt

SEQ ID NO: 2820110 - DNA, 25 bp, Homo sapien
ttctcacagtgagccaactccattc

SEQ ID NO: 2820111 - DNA, 25 bp, Homo sapien
ctctgttcaaagctgtacctggtac

SEQ ID NO: 2820112 - DNA, 25 bp, Homo sapien
gattctcacagtgagccaactccat

SEQ ID NO: 2820113 - DNA, 25 bp, Homo sapien
tccccagataactgactcatctgct

SEQ ID NO: 2820114 - DNA, 25 bp, Homo sapien
gagaaggaatctgggcggtttcctc

SEQ ID NO: 2820115 - DNA, 25 bp, Homo sapien
ctggaccgtaaagcagccccaaaag

SEQ ID NO: 2820116 - DNA, 25 bp, Homo sapien
gactgcacatcatcttttctggaga

SEQ ID NO: 2820117 - DNA, 25 bp, Homo sapien
tggctttacccaagctcctctgagg

SEQ ID NO: 2820118 - DNA, 25 bp, Homo sapien
tgtaacaggagggcactttttcctc

SEQ ID NO: 2820119 - DNA, 25 bp, Homo sapien
tctcctttgacaggaatccaactgt

SEQ ID NO: 2820120 - DNA, 25 bp, Homo sapien
cagagagagggttgtaacaggaggg

SEQ ID NO: 2820121 - DNA, 25 bp, Homo sapien
gccagggcctgcacttggcaaattc

SEQ ID NO: 2820122 - DNA, 25 bp, Homo sapien
ttttagctgccagggcatttattac

SEQ ID NO: 2820123 - DNA, 25 bp, Homo sapien
ggtgcagggcacttgattctggaat

SEQ ID NO: 2820124 - DNA, 25 bp, Homo sapien
tacttcctcataaaggtgccagggc

SEQ ID NO: 2820125 - DNA, 25 bp, Homo sapien
gctgttataaatatcgtgtgcaagt

SEQ ID NO: 2820126 - DNA, 25 bp, Homo sapien
tataaatatcgtgtgcaagtgtctt

SEQ ID NO: 2820127 - DNA, 25 bp, Homo sapien
aattgtgctgttataaatatcgtgt

SEQ ID NO: 2820128 - DNA, 25 bp, Homo sapien
tagtgtacatagtaatataaacacc

SEQ ID NO: 2820129 - DNA, 25 bp, Homo sapien
gaatgcttaaagatatcactacaag

SEQ ID NO: 2820130 - DNA, 25 bp, Homo sapien
tcctgctgatttcagttcctcgtag

SEQ ID NO: 2820131 - DNA, 25 bp, Homo sapien
aaaaatgatgaatacacaccactgt

SEQ ID NO: 2820132 - DNA, 25 bp, Homo sapien
tggctatgaacagctttgcctaagc

SEQ ID NO: 2820133 - DNA, 25 bp, Homo sapien
taacacttctggaggtcaagatgta

SEQ ID NO: 2820134 - DNA, 25 bp, Homo sapien
ttctggaggtcaagatgtaaggatt

SEQ ID NO: 2820135 - DNA, 25 bp, Homo sapien
cctaacacttctggaggtcaagatg

SEQ ID NO: 2820136 - DNA, 25 bp, Homo sapien
tcctaacacttctggaggtcaagat

SEQ ID NO: 2820137 - DNA, 25 bp, Homo sapien
tctgtgagcaatgagcactgaacat

SEQ ID NO: 2820138 - DNA, 25 bp, Homo sapien
gtcaaacacaagaatactcacagca

SEQ ID NO: 2820139 - DNA, 25 bp, Homo sapien
gagaaatgcccatgtggcacttttg

SEQ ID NO: 2820140 - DNA, 25 bp, Homo sapien
cacactgtatataatgttggcagga

SEQ ID NO: 2820141 - DNA, 25 bp, Homo sapien
cagctggctgtgtttgtgctattcg

SEQ ID NO: 2820142 - DNA, 25 bp, Homo sapien
cgcttagggtaagtcttgcttcgac

SEQ ID NO: 2820143 - DNA, 25 bp, Homo sapien
cttgtcacattctgatcaggccggg

SEQ ID NO: 2820144 - DNA, 25 bp, Homo sapien
ttcttgtcacattctgatcaggccg

SEQ ID NO: 2820145 - DNA, 25 bp, Homo sapien
tgagagtgcaacattttgattagca

SEQ ID NO: 2820146 - DNA, 25 bp, Homo sapien
cttgagagtgcaacattttgattag

SEQ ID NO: 2820147 - DNA, 25 bp, Homo sapien
ttgagagtgcaacattttgattagc

SEQ ID NO: 2820148 - DNA, 25 bp, Homo sapien
tactcacacagcaggttgtaaacca

SEQ ID NO: 2820149 - DNA, 25 bp, Homo sapien
gatcaagggagtggttattaaattc

SEQ ID NO: 2820150 - DNA, 25 bp, Homo sapien
tctcattgcaatattgatcaaggga

SEQ ID NO: 2820151 - DNA, 25 bp, Homo sapien
gatttcagtagaatgatgggctaga

SEQ ID NO: 2820152 - DNA, 25 bp, Homo sapien
taagtatttatttacaaacacatcc

SEQ ID NO: 2820153 - DNA, 25 bp, Homo sapien
tgcttataacgtatggatccaaact

SEQ ID NO: 2820154 - DNA, 25 bp, Homo sapien
ataacgtatggatccaaacttgctg

SEQ ID NO: 2820155 - DNA, 25 bp, Homo sapien
gcggtgcttataacgtatggatcca

SEQ ID NO: 2820156 - DNA, 25 bp, Homo sapien
ctgtagcggtgcttataacgtatgg

SEQ ID NO: 2820157 - DNA, 25 bp, Homo sapien
tgcttgcaagcagttttactccgag

SEQ ID NO: 2820158 - DNA, 25 bp, Homo sapien
aaatgtatgatgttccacactgcac

SEQ ID NO: 2820159 - DNA, 25 bp, Homo sapien
acactgcacttccagaggtgcttgc

SEQ ID NO: 2820160 - DNA, 25 bp, Homo sapien
tactccgagcttcaaaaaagaatga

SEQ ID NO: 2820161 - DNA, 25 bp, Homo sapien
taaagcaagccggagagttctgcca

SEQ ID NO: 2820162 - DNA, 25 bp, Homo sapien
agttctgccaagtggatctcattac

SEQ ID NO: 2820163 - DNA, 25 bp, Homo sapien
cagagttgccaggaaccttttggtt

SEQ ID NO: 2820164 - DNA, 25 bp, Homo sapien
tggatctcattactcacagccagag

SEQ ID NO: 2820165 - DNA, 25 bp, Homo sapien
tgagtctccttgaagtgaacctttg

SEQ ID NO: 2820166 - DNA, 25 bp, Homo sapien
ttgagtctccttgaagtgaaccttt

SEQ ID NO: 2820167 - DNA, 25 bp, Homo sapien
attgagtctccttgaagtgaacctt

SEQ ID NO: 2820168 - DNA, 25 bp, Homo sapien
gaagtgaacctttgtaatccgaggc

SEQ ID NO: 2820169 - DNA, 25 bp, Homo sapien
cacaacaacaccaaccggagttaat

SEQ ID NO: 2820170 - DNA, 25 bp, Homo sapien
tattcttgtacacaacaacaccaac

SEQ ID NO: 2820171 - DNA, 25 bp, Homo sapien
gctttttattcttgtacacaacaac

SEQ ID NO: 2820172 - DNA, 25 bp, Homo sapien
tgtacacaacaacaccaaccggagt

SEQ ID NO: 2820173 - DNA, 25 bp, Homo sapien
aacgccatacatctccagggatttg

SEQ ID NO: 2820174 - DNA, 25 bp, Homo sapien
cagggatttggcagtcctcaagtaa

SEQ ID NO: 2820175 - DNA, 25 bp, Homo sapien
gctcagcctcagaaggaatctgacc

SEQ ID NO: 2820176 - DNA, 25 bp, Homo sapien
atagacgggatggaggtcaacgcca

SEQ ID NO: 2820177 - DNA, 25 bp, Homo sapien
tctacaatcaggttggagagccttc

SEQ ID NO: 2820178 - DNA, 25 bp, Homo sapien
tgctaatacaacatagagggcctct

SEQ ID NO: 2820179 - DNA, 25 bp, Homo sapien
caaaggtttcacactggcatcatca

SEQ ID NO: 2820180 - DNA, 25 bp, Homo sapien
tccagactcgttgctatggcctgaa

SEQ ID NO: 2820181 - DNA, 25 bp, Homo sapien
tatgggtcataatctccaagctccg

SEQ ID NO: 2820182 - DNA, 25 bp, Homo sapien
aggaacaaaccggtactcagataca

SEQ ID NO: 2820183 - DNA, 25 bp, Homo sapien
caagttcttccttctgatcaggaac

SEQ ID NO: 2820184 - DNA, 25 bp, Homo sapien
tcagatacatatcctgcagtatgtt

SEQ ID NO: 2820185 - DNA, 25 bp, Homo sapien
gatggcatacgctcccagctgagca

SEQ ID NO: 2820186 - DNA, 25 bp, Homo sapien
acagggcagacggccctgaaggaca

SEQ ID NO: 2820187 - DNA, 25 bp, Homo sapien
actggatggcatacgctcccagctg

SEQ ID NO: 2820188 - DNA, 25 bp, Homo sapien
tgagcagcagtgttgacgggacagg

SEQ ID NO: 2820189 - DNA, 25 bp, Homo sapien
cacaacatgctcttactgggaggaa

SEQ ID NO: 2820190 - DNA, 25 bp, Homo sapien
gaacccaagcaatctgaccctggaa

SEQ ID NO: 2820191 - DNA, 25 bp, Homo sapien
cacggttgtcgctaaaaagtgcggc

SEQ ID NO: 2820192 - DNA, 25 bp, Homo sapien
caaacctgaggtttcggaccctgat

SEQ ID NO: 2820193 - DNA, 25 bp, Homo sapien
tgttttgtaaggtgactcgatgtca

SEQ ID NO: 2820194 - DNA, 25 bp, Homo sapien
ctgttttgtaaggtgactcgatgtc

SEQ ID NO: 2820195 - DNA, 25 bp, Homo sapien
tatttcaggaagattggcatcaact

SEQ ID NO: 2820196 - DNA, 25 bp, Homo sapien
taaacctgggaacaacgtgtaatca

SEQ ID NO: 2820197 - DNA, 25 bp, Homo sapien
cccgccttcagatgtccacgtaaaa

SEQ ID NO: 2820198 - DNA, 25 bp, Homo sapien
tgttagatatcagacaccacattga

SEQ ID NO: 2820199 - DNA, 25 bp, Homo sapien
cacttgataatgatcatctgtgctc

SEQ ID NO: 2820200 - DNA, 25 bp, Homo sapien
aatccacttgataatgatcatctgt

SEQ ID NO: 2820201 - DNA, 25 bp, Homo sapien
cttgataatgatcatctgtgctcct

SEQ ID NO: 2820202 - DNA, 25 bp, Homo sapien
tccacttgataatgatcatctgtgc

SEQ ID NO: 2820203 - DNA, 25 bp, Homo sapien
taatgacatgtaaccctcaactctg

SEQ ID NO: 2820204 - DNA, 25 bp, Homo sapien
aatgacatgtaaccctcaactctga

SEQ ID NO: 2820205 - DNA, 25 bp, Homo sapien
cctttcgcttccataatgacatgta

SEQ ID NO: 2820206 - DNA, 25 bp, Homo sapien
tcacaaagtcctttcgcttccataa

SEQ ID NO: 2820207 - DNA, 25 bp, Homo sapien
ggatcttcagcatagaatttaatac

SEQ ID NO: 2820208 - DNA, 25 bp, Homo sapien
tttacatggatcttcagcatagaat

SEQ ID NO: 2820209 - DNA, 25 bp, Homo sapien
agtttacatggatcttcagcataga

SEQ ID NO: 2820210 - DNA, 25 bp, Homo sapien
catggatcttcagcatagaatttaa

SEQ ID NO: 2820211 - DNA, 25 bp, Homo sapien
atgggtctgcctgtgcccgcaggca

SEQ ID NO: 2820212 - DNA, 25 bp, Homo sapien
tccatgttcctgagcagatgggtct

SEQ ID NO: 2820213 - DNA, 25 bp, Homo sapien
catgttcctgagcagatgggtctgc

SEQ ID NO: 2820214 - DNA, 25 bp, Homo sapien
ctgagcagatgggtctgcctgtgcc

SEQ ID NO: 2820215 - DNA, 25 bp, Homo sapien
gaaactgagtggtctgaatggcaaa

SEQ ID NO: 2820216 - DNA, 25 bp, Homo sapien
gaatggcaaaaccatgccataaccc

SEQ ID NO: 2820217 - DNA, 25 bp, Homo sapien
tggcttaggaaactgagtggtctga

SEQ ID NO: 2820218 - DNA, 25 bp, Homo sapien
gccataacccaagaaactcaagctc

SEQ ID NO: 2820219 - DNA, 25 bp, Homo sapien
ctttgtgttcagcaagggtttttgc

SEQ ID NO: 2820220 - DNA, 25 bp, Homo sapien
taaacagatctatggccctctaagc

SEQ ID NO: 2820221 - DNA, 25 bp, Homo sapien
gtcacagaagccttaggacctcaag

SEQ ID NO: 2820222 - DNA, 25 bp, Homo sapien
gaatccaggacttaggttatggcta

SEQ ID NO: 2820223 - DNA, 25 bp, Homo sapien
taatagagctatcttgcagtggcga

SEQ ID NO: 2820224 - DNA, 25 bp, Homo sapien
aaaatatttacagtcggtggtgcac

SEQ ID NO: 2820225 - DNA, 25 bp, Homo sapien
tccttaaagggaagactgcgctgct

SEQ ID NO: 2820226 - DNA, 25 bp, Homo sapien
tacgtgctgattatgcgaacttggg

SEQ ID NO: 2820227 - DNA, 25 bp, Homo sapien
gaattctggtcctaatacgtgctga

SEQ ID NO: 2820228 - DNA, 25 bp, Homo sapien
cacagtaacgtagcccaaaataatc

SEQ ID NO: 2820229 - DNA, 25 bp, Homo sapien
aatctatctccacaaggtttacgtg

SEQ ID NO: 2820230 - DNA, 25 bp, Homo sapien
gaatacgtggtcaaggacaacggaa

SEQ ID NO: 2820231 - DNA, 25 bp, Homo sapien
ggtttacgtgatggaatacgtggtc

SEQ ID NO: 2820232 - DNA, 25 bp, Homo sapien
ctggcatatgaagatagtcttccat

SEQ ID NO: 2820233 - DNA, 25 bp, Homo sapien
tgctggcatatgaagatagtcttcc

SEQ ID NO: 2820234 - DNA, 25 bp, Homo sapien
gaatgctggcatatgaagatagtct

SEQ ID NO: 2820235 - DNA, 25 bp, Homo sapien
atgctggcatatgaagatagtcttc

SEQ ID NO: 2820236 - DNA, 25 bp, Homo sapien
gcatcttttgttaccctctaccgag

SEQ ID NO: 2820237 - DNA, 25 bp, Homo sapien
ccagctcgggagtttacaaagtata

SEQ ID NO: 2820238 - DNA, 25 bp, Homo sapien
tctaccgagaggacacaaggaaagc

SEQ ID NO: 2820239 - DNA, 25 bp, Homo sapien
taactagagcaggtagagccacaca

SEQ ID NO: 2820240 - DNA, 25 bp, Homo sapien
tcaggtccattcacactcccttttt

SEQ ID NO: 2820241 - DNA, 25 bp, Homo sapien
caggtccattcacactccctttttc

SEQ ID NO: 2820242 - DNA, 25 bp, Homo sapien
cttacgtatcttgttgaggtcaaca

SEQ ID NO: 2820243 - DNA, 25 bp, Homo sapien
gaggaggggcctgcactcttcattg

SEQ ID NO: 2820244 - DNA, 25 bp, Homo sapien
cttcggagacagcagttaggaggat

SEQ ID NO: 2820245 - DNA, 25 bp, Homo sapien
aacaggccatcttccgtaacagaag

SEQ ID NO: 2820246 - DNA, 25 bp, Homo sapien
tcaaatttaggttcataatttcaaa

SEQ ID NO: 2820247 - DNA, 25 bp, Homo sapien
tttgggcaatggctttgaaagaggt

SEQ ID NO: 2820248 - DNA, 25 bp, Homo sapien
catggtttcttaagtccccagtgct

SEQ ID NO: 2820249 - DNA, 25 bp, Homo sapien
tcagcagtcaatacaagttttagcc

SEQ ID NO: 2820250 - DNA, 25 bp, Homo sapien
gaaatcccctcaagctttttgggca

SEQ ID NO: 2820251 - DNA, 25 bp, Homo sapien
gttagagtccaaacagccagctgta

SEQ ID NO: 2820252 - DNA, 25 bp, Homo sapien
aaggatctgggagtaggcgcccaat

SEQ ID NO: 2820253 - DNA, 25 bp, Homo sapien
gagtaggcgcccaatatttagcatt

SEQ ID NO: 2820254 - DNA, 25 bp, Homo sapien
gatctgggagtaggcgcccaatatt

SEQ ID NO: 2820255 - DNA, 25 bp, Homo sapien
cagtgtgctaagatctacacaaaat

SEQ ID NO: 2820256 - DNA, 25 bp, Homo sapien
taaaccaactgtgtcctgaaccaca

SEQ ID NO: 2820257 - DNA, 25 bp, Homo sapien
aactgtgtcctgaaccacaacagtg

SEQ ID NO: 2820258 - DNA, 25 bp, Homo sapien
aagccaataaaccaactgtgtcctg

SEQ ID NO: 2820259 - DNA, 25 bp, Homo sapien
taaccaactggagaagtgaaccttg

SEQ ID NO: 2820260 - DNA, 25 bp, Homo sapien
caggataccagggagcttaaaagcc

SEQ ID NO: 2820261 - DNA, 25 bp, Homo sapien
ttcacattcagcacaagagacgccc

SEQ ID NO: 2820262 - DNA, 25 bp, Homo sapien
tagatcatttgctgagaccgaggag

SEQ ID NO: 2820263 - DNA, 25 bp, Homo sapien
gaatctggattccacagtaatagtc

SEQ ID NO: 2820264 - DNA, 25 bp, Homo sapien
acataagttatcagtcgagtaatgt

SEQ ID NO: 2820265 - DNA, 25 bp, Homo sapien
tagctccccatttacaaacaccatc

SEQ ID NO: 2820266 - DNA, 25 bp, Homo sapien
gttatcagtcgagtaatgtttttct

SEQ ID NO: 2820267 - DNA, 25 bp, Homo sapien
tccttccaggtcttgatgctcttgc

SEQ ID NO: 2820268 - DNA, 25 bp, Homo sapien
gctcttgccatctttatggaatttc

SEQ ID NO: 2820269 - DNA, 25 bp, Homo sapien
tttatggaatttcccactccgcatc

SEQ ID NO: 2820270 - DNA, 25 bp, Homo sapien
cttccaggtcttgatgctcttgcca

SEQ ID NO: 2820271 - DNA, 25 bp, Homo sapien
atccccttgcacttgagagcacgaa

SEQ ID NO: 2820272 - DNA, 25 bp, Homo sapien
catctctttgccccttacttgtaaa

SEQ ID NO: 2820273 - DNA, 25 bp, Homo sapien
gtaaaatattccctcatccccttgc

SEQ ID NO: 2820274 - DNA, 25 bp, Homo sapien
gagcacgaattatcttgtctgaggc

SEQ ID NO: 2820275 - DNA, 25 bp, Homo sapien
cttttcacacggtgaaaggatagag

SEQ ID NO: 2820276 - DNA, 25 bp, Homo sapien
tgcctaatccctcctgctttctcat

SEQ ID NO: 2820277 - DNA, 25 bp, Homo sapien
atgcctaatccctcctgctttctca

SEQ ID NO: 2820278 - DNA, 25 bp, Homo sapien
tcaaggtgacacgtccagggcctta

SEQ ID NO: 2820279 - DNA, 25 bp, Homo sapien
caaggtgacacgtccagggccttaa

SEQ ID NO: 2820280 - DNA, 25 bp, Homo sapien
aggtgacacgtccagggccttaaag

SEQ ID NO: 2820281 - DNA, 25 bp, Homo sapien
tgtatgcaagctgatactcctcttt

SEQ ID NO: 2820282 - DNA, 25 bp, Homo sapien
tagtaacaccaactgtatgcaagct

SEQ ID NO: 2820283 - DNA, 25 bp, Homo sapien
caaagtcaaattcaagacacttctc

SEQ ID NO: 2820284 - DNA, 25 bp, Homo sapien
agcccactgacctaggagctccagt

SEQ ID NO: 2820285 - DNA, 25 bp, Homo sapien
ggtcaactcaccagttactgcagca

SEQ ID NO: 2820286 - DNA, 25 bp, Homo sapien
aaaagcacgggagtgcttgcttcag

SEQ ID NO: 2820287 - DNA, 25 bp, Homo sapien
gaaaagtacgtggaagactcggcac

SEQ ID NO: 2820288 - DNA, 25 bp, Homo sapien
gactcggcactacagacatttatca

SEQ ID NO: 2820289 - DNA, 25 bp, Homo sapien
taggaggccctgcaaattgtccagc

SEQ ID NO: 2820290 - DNA, 25 bp, Homo sapien
ttggaagatgtttaggaggtgggaa

SEQ ID NO: 2820291 - DNA, 25 bp, Homo sapien
agggattaggaggccctgcaaattg

SEQ ID NO: 2820292 - DNA, 25 bp, Homo sapien
aggccctgcaaattgtccagctgag

SEQ ID NO: 2820293 - DNA, 25 bp, Homo sapien
ctgacttgtcatgtttacaacaggc

SEQ ID NO: 2820294 - DNA, 25 bp, Homo sapien
agatgcagccagtttgatctctgac

SEQ ID NO: 2820295 - DNA, 25 bp, Homo sapien
agagaggcaggagccgtagatgcag

SEQ ID NO: 2820296 - DNA, 25 bp, Homo sapien
ctctgacttgtcatgtttacaacag

SEQ ID NO: 2820297 - DNA, 25 bp, Homo sapien
gaaataccgaatgagaatcgaactg

SEQ ID NO: 2820298 - DNA, 25 bp, Homo sapien
gaaactggaattctgtacactaaga

SEQ ID NO: 2820299 - DNA, 25 bp, Homo sapien
gaatggcaacattaacgctgaaact

SEQ ID NO: 2820300 - DNA, 25 bp, Homo sapien
cgctgaaacttttagccaggaatag

SEQ ID NO: 2820301 - DNA, 25 bp, Homo sapien
gaactcgatttctcagaaagccagc

SEQ ID NO: 2820302 - DNA, 25 bp, Homo sapien
cttctgagatgaagcgactaagaga

SEQ ID NO: 2820303 - DNA, 25 bp, Homo sapien
aagcgactaagagaggatacttggc

SEQ ID NO: 2820304 - DNA, 25 bp, Homo sapien
ctgaactcgatttctcagaaagcca

SEQ ID NO: 2820305 - DNA, 25 bp, Homo sapien
gcgcgtcggtcaggttgtcactaca

SEQ ID NO: 2820306 - DNA, 25 bp, Homo sapien
gactcagctgttgccttatctaaaa

SEQ ID NO: 2820307 - DNA, 25 bp, Homo sapien
caaaacgctccggatttagatctcc

SEQ ID NO: 2820308 - DNA, 25 bp, Homo sapien
aagcaaaacaagcacgcaggcgcgt

SEQ ID NO: 2820309 - DNA, 25 bp, Homo sapien
tgtttgggctctctaggttaatgta

SEQ ID NO: 2820310 - DNA, 25 bp, Homo sapien
catccaatgtaaggaagaggatctc

SEQ ID NO: 2820311 - DNA, 25 bp, Homo sapien
gttattactgggtcgctttgagaga

SEQ ID NO: 2820312 - DNA, 25 bp, Homo sapien
cacaaacaggagcaaagttattact

SEQ ID NO: 2820313 - DNA, 25 bp, Homo sapien
taaatgtgaggataaacccaggtcg

SEQ ID NO: 2820314 - DNA, 25 bp, Homo sapien
ttaaatgtgaggataaacccaggtc

SEQ ID NO: 2820315 - DNA, 25 bp, Homo sapien
cttaaatgtgaggataaacccaggt

SEQ ID NO: 2820316 - DNA, 25 bp, Homo sapien
cgtccaccctctccctgcgcgcagg

SEQ ID NO: 2820317 - DNA, 25 bp, Homo sapien
ggtacgtccaccctctccctgcgcg

SEQ ID NO: 2820318 - DNA, 25 bp, Homo sapien
cctggtacgtccaccctctccctgc

SEQ ID NO: 2820319 - DNA, 25 bp, Homo sapien
ctccccaccgcgcagagtcgcggcc

SEQ ID NO: 2820320 - DNA, 25 bp, Homo sapien
ctgccgccaacccccggaacgcgct

SEQ ID NO: 2820321 - DNA, 25 bp, Homo sapien
tgacagccctcaaagcgatggaccc

SEQ ID NO: 2820322 - DNA, 25 bp, Homo sapien
cggtgacagccctcaaagcgatgga

SEQ ID NO: 2820323 - DNA, 25 bp, Homo sapien
tgccgccaacccccggaacgcgctc

SEQ ID NO: 2820324 - DNA, 25 bp, Homo sapien
ccggaacagcgcagaaacagcccat

SEQ ID NO: 2820325 - DNA, 25 bp, Homo sapien
gtaagggttaacttggattcatcca

SEQ ID NO: 2820326 - DNA, 25 bp, Homo sapien
aaaattcttccggaacagcgcagaa

SEQ ID NO: 2820327 - DNA, 25 bp, Homo sapien
gggttaacttggattcatccaggag

SEQ ID NO: 2820328 - DNA, 25 bp, Homo sapien
ttaatttattgtccgcgccgtggcg

SEQ ID NO: 2820329 - DNA, 25 bp, Homo sapien
gccaggagagaaagctaccaccgag

SEQ ID NO: 2820330 - DNA, 25 bp, Homo sapien
tcggttgtggtcgtctccagccagg

SEQ ID NO: 2820331 - DNA, 25 bp, Homo sapien
ccactcaagcgcgatgcattaattt

SEQ ID NO: 2820332 - DNA, 25 bp, Homo sapien
aagcgccggcggaactgggcgcgga

SEQ ID NO: 2820333 - DNA, 25 bp, Homo sapien
gcgccggcggaactgggcgcggagg

SEQ ID NO: 2820334 - DNA, 25 bp, Homo sapien
agggcggtggcgcgtccccgcgcat

SEQ ID NO: 2820335 - DNA, 25 bp, Homo sapien
gggaagcgccggcggaactgggcgc

SEQ ID NO: 2820336 - DNA, 25 bp, Homo sapien
ttttgtgtgaggagcacccacgacg

SEQ ID NO: 2820337 - DNA, 25 bp, Homo sapien
gagtgatgggaattcgaggctctcc

SEQ ID NO: 2820338 - DNA, 25 bp, Homo sapien
ggacgacaaaagtctcctggcactg

SEQ ID NO: 2820339 - DNA, 25 bp, Homo sapien
tcagatccgccgagtatgaagcgct

SEQ ID NO: 2820340 - DNA, 25 bp, Homo sapien
agctcattacgggtggccgtgtgta

SEQ ID NO: 2820341 - DNA, 25 bp, Homo sapien
ggtggccgtgtgtagccaagttcaa

SEQ ID NO: 2820342 - DNA, 25 bp, Homo sapien
tgtgtagccaagttcaagctctccc

SEQ ID NO: 2820343 - DNA, 25 bp, Homo sapien
tcaagctctccctccgggaatgcct

SEQ ID NO: 2820344 - DNA, 25 bp, Homo sapien
caaagcggggaggcggggacctgcg

SEQ ID NO: 2820345 - DNA, 25 bp, Homo sapien
gcaaagcggggaggcggggacctgc

SEQ ID NO: 2820346 - DNA, 25 bp, Homo sapien
gaatgcagtaggcaaaattggcttc

SEQ ID NO: 2820347 - DNA, 25 bp, Homo sapien
cactcttcgaatgcagtaggcaaaa

SEQ ID NO: 2820348 - DNA, 25 bp, Homo sapien
gatcaaaacactcttcgaatgcagt

SEQ ID NO: 2820349 - DNA, 25 bp, Homo sapien
gaacaacatgggtccccaaatagga

SEQ ID NO: 2820350 - DNA, 25 bp, Homo sapien
tcagttgtggaaggaaacttccgca

SEQ ID NO: 2820351 - DNA, 25 bp, Homo sapien
caaattgatacaaacaaggacaagc

SEQ ID NO: 2820352 - DNA, 25 bp, Homo sapien
caatcagaacgtcagttgtggaagg

SEQ ID NO: 2820353 - DNA, 25 bp, Homo sapien
caaggacaagcaatcagaacgtcag

SEQ ID NO: 2820354 - DNA, 25 bp, Homo sapien
cttcctcctcattgtctttgccttc

SEQ ID NO: 2820355 - DNA, 25 bp, Homo sapien
cacctctttctgggcaactttagca

SEQ ID NO: 2820356 - DNA, 25 bp, Homo sapien
cctcctcattgtctttgccttcctc

SEQ ID NO: 2820357 - DNA, 25 bp, Homo sapien
tcctcattgtctttgccttcctctt

SEQ ID NO: 2820358 - DNA, 25 bp, Homo sapien
tcacccagcatttttgccatgtctc

SEQ ID NO: 2820359 - DNA, 25 bp, Homo sapien
cccagcatttttgccatgtctccaa

SEQ ID NO: 2820360 - DNA, 25 bp, Homo sapien
cagcatttttgccatgtctccaata

SEQ ID NO: 2820361 - DNA, 25 bp, Homo sapien
tctcacccagcatttttgccatgtc

SEQ ID NO: 2820362 - DNA, 25 bp, Homo sapien
tgcaaatatctcatgggccagaact

SEQ ID NO: 2820363 - DNA, 25 bp, Homo sapien
taccaccaggtatagattgcagctg

SEQ ID NO: 2820364 - DNA, 25 bp, Homo sapien
taatattggaagtgcaccggtagcc

SEQ ID NO: 2820365 - DNA, 25 bp, Homo sapien
tgctattaagaccaagacccaaagt

SEQ ID NO: 2820366 - DNA, 25 bp, Homo sapien
ggcagcaaacgactgtggcagagcc

SEQ ID NO: 2820367 - DNA, 25 bp, Homo sapien
agagcccccaagtggacgatgaaag

SEQ ID NO: 2820368 - DNA, 25 bp, Homo sapien
ccaagtggacgatgaaagagcagca

SEQ ID NO: 2820369 - DNA, 25 bp, Homo sapien
tagcagcagtgagagggcgcaaacc

SEQ ID NO: 2820370 - DNA, 25 bp, Homo sapien
ctgccaacatggtggagcttccaga

SEQ ID NO: 2820371 - DNA, 25 bp, Homo sapien
cctgccaacatggtggagcttccag

SEQ ID NO: 2820372 - DNA, 25 bp, Homo sapien
gagcttccagagcccaataccagag

SEQ ID NO: 2820373 - DNA, 25 bp, Homo sapien
caataccagagcctgtttattacac

SEQ ID NO: 2820374 - DNA, 25 bp, Homo sapien
ggagaagcctagttgtgtgaatacc

SEQ ID NO: 2820375 - DNA, 25 bp, Homo sapien
tgaataccccagacacttcactaac

SEQ ID NO: 2820376 - DNA, 25 bp, Homo sapien
ctctctctgcgtggagaagcctagt

SEQ ID NO: 2820377 - DNA, 25 bp, Homo sapien
tctgcgtggagaagcctagttgtgt

SEQ ID NO: 2820378 - DNA, 25 bp, Homo sapien
ggcatctttcagcaaagtagctttt

SEQ ID NO: 2820379 - DNA, 25 bp, Homo sapien
tggcatctttcagcaaagtagcttt

SEQ ID NO: 2820380 - DNA, 25 bp, Homo sapien
tgtcttcgtgctctgaacttcttac

SEQ ID NO: 2820381 - DNA, 25 bp, Homo sapien
gtcttcgtgctctgaacttcttact

SEQ ID NO: 2820382 - DNA, 25 bp, Homo sapien
ttgtcttcgtgctctgaacttctta

SEQ ID NO: 2820383 - DNA, 25 bp, Homo sapien
tgtgagccaaaccacaatgattgct

SEQ ID NO: 2820384 - DNA, 25 bp, Homo sapien
cccataggatattcccttgatgtag

SEQ ID NO: 2820385 - DNA, 25 bp, Homo sapien
gtctagagctataggctgttgttca

SEQ ID NO: 2820386 - DNA, 25 bp, Homo sapien
tctctcagctgtcgatgctagtggc

SEQ ID NO: 2820387 - DNA, 25 bp, Homo sapien
ctttcttcaccttgcacaggctctg

SEQ ID NO: 2820388 - DNA, 25 bp, Homo sapien
tgccaccccatgtgtgacaaggcat

SEQ ID NO: 2820389 - DNA, 25 bp, Homo sapien
actttcttcaccttgcacaggctct

SEQ ID NO: 2820390 - DNA, 25 bp, Homo sapien
ctcaactcatttgactccagtgtct

SEQ ID NO: 2820391 - DNA, 25 bp, Homo sapien
tcaactcatttgactccagtgtctg

SEQ ID NO: 2820392 - DNA, 25 bp, Homo sapien
ttcttctctttctttgctttcagat

SEQ ID NO: 2820393 - DNA, 25 bp, Homo sapien
attcttctctttctttgctttcaga

SEQ ID NO: 2820394 - DNA, 25 bp, Homo sapien
ttaattcttctctttctttgctttc

SEQ ID NO: 2820395 - DNA, 25 bp, Homo sapien
aattcttctctttctttgctttcag

SEQ ID NO: 2820396 - DNA, 25 bp, Homo sapien
tctgatctggccatgacaaggtaga

SEQ ID NO: 2820397 - DNA, 25 bp, Homo sapien
ctggctgcgagcacctagcttgaat

SEQ ID NO: 2820398 - DNA, 25 bp, Homo sapien
taagctgtgcggatttcatagtgac

SEQ ID NO: 2820399 - DNA, 25 bp, Homo sapien
tctctgctaccaataaatatgggag

SEQ ID NO: 2820400 - DNA, 25 bp, Homo sapien
ctgagtgaccatggagaattatgcc

SEQ ID NO: 2820401 - DNA, 25 bp, Homo sapien
gatatagtcgctgtgcccaagagaa

SEQ ID NO: 2820402 - DNA, 25 bp, Homo sapien
tatgccaattatgatgcagctgtca

SEQ ID NO: 2820403 - DNA, 25 bp, Homo sapien
gaagtgactcgttttccaggcccac

SEQ ID NO: 2820404 - DNA, 25 bp, Homo sapien
gcccagtggcattgattttgcaaga

SEQ ID NO: 2820405 - DNA, 25 bp, Homo sapien
gctgctggcagagcttcacctggtt

SEQ ID NO: 2820406 - DNA, 25 bp, Homo sapien
caccaagagctcaatagtgccagag

SEQ ID NO: 2820407 - DNA, 25 bp, Homo sapien
tacccgtgcagacctgagtagtaca

SEQ ID NO: 2820408 - DNA, 25 bp, Homo sapien
catcaggagggttggtgtgggccat

SEQ ID NO: 2820409 - DNA, 25 bp, Homo sapien
ccatcaggagggttggtgtgggcca

SEQ ID NO: 2820410 - DNA, 25 bp, Homo sapien
agaagtcaagtagccatcaggaggg

SEQ ID NO: 2820411 - DNA, 25 bp, Homo sapien
agtcaagtagccatcaggagggttg

SEQ ID NO: 2820412 - DNA, 25 bp, Homo sapien
gaaggaagacagacctaggctggac

SEQ ID NO: 2820413 - DNA, 25 bp, Homo sapien
ccatggatcagctcactgcgaagtc

SEQ ID NO: 2820414 - DNA, 25 bp, Homo sapien
gagattccatgagaacgtctgcaca

SEQ ID NO: 2820415 - DNA, 25 bp, Homo sapien
ggaatcagctaaacccattgggcag

SEQ ID NO: 2820416 - DNA, 25 bp, Homo sapien
tcaccccacagttatggctgaatga

SEQ ID NO: 2820417 - DNA, 25 bp, Homo sapien
tatggctgaatgacccatcacagcc

SEQ ID NO: 2820418 - DNA, 25 bp, Homo sapien
agcctctgaccaccgagaaggcagg

SEQ ID NO: 2820419 - DNA, 25 bp, Homo sapien
agccaaagcctctgaccaccgagaa

SEQ ID NO: 2820420 - DNA, 25 bp, Homo sapien
cagcagctgtccacacactgaacaa

SEQ ID NO: 2820421 - DNA, 25 bp, Homo sapien
gatccaggtggacaatgtaaaggat

SEQ ID NO: 2820422 - DNA, 25 bp, Homo sapien
tggacaatgtaaaggatggcacact

SEQ ID NO: 2820423 - DNA, 25 bp, Homo sapien
caaggaactgatatcaccatcagga

SEQ ID NO: 2820424 - DNA, 25 bp, Homo sapien
ggtgcatccaagcagctaatctgag

SEQ ID NO: 2820425 - DNA, 25 bp, Homo sapien
caatggaactgccatggtgcatcca

SEQ ID NO: 2820426 - DNA, 25 bp, Homo sapien
ctaatctgagtatacctggagccac

SEQ ID NO: 2820427 - DNA, 25 bp, Homo sapien
tgactgggcatagacagtagtctcc

SEQ ID NO: 2820428 - DNA, 25 bp, Homo sapien
gcttttgtgagccaagaacctggga

SEQ ID NO: 2820429 - DNA, 25 bp, Homo sapien
ggaggctttcattccttgtgacggc

SEQ ID NO: 2820430 - DNA, 25 bp, Homo sapien
tgacggctcacagaatcatcttgtg

SEQ ID NO: 2820431 - DNA, 25 bp, Homo sapien
gccatctagagacttgacaggtgct

SEQ ID NO: 2820432 - DNA, 25 bp, Homo sapien
aataaactgcttccactcactttct

SEQ ID NO: 2820433 - DNA, 25 bp, Homo sapien
aaacgccatgctcgcagaacaactg

SEQ ID NO: 2820434 - DNA, 25 bp, Homo sapien
ccacttgaggaggtactatgtccgt

SEQ ID NO: 2820435 - DNA, 25 bp, Homo sapien
gcacaaacgccatgctcgcagaaca

SEQ ID NO: 2820436 - DNA, 25 bp, Homo sapien
ggaggtactatgtccgttctcagag

SEQ ID NO: 2820437 - DNA, 25 bp, Homo sapien
agctctggagactggaagttcaaga

SEQ ID NO: 2820438 - DNA, 25 bp, Homo sapien
tcatgtttgtagtgttcggcatcat

SEQ ID NO: 2820439 - DNA, 25 bp, Homo sapien
ggttcactaccactgtcatgtttgt

SEQ ID NO: 2820440 - DNA, 25 bp, Homo sapien
actggttcactaccactgtcatgtt

SEQ ID NO: 2820441 - DNA, 25 bp, Homo sapien
gtagtgttcggcatcatgagacatg

SEQ ID NO: 2820442 - DNA, 25 bp, Homo sapien
tttctttgttgtccccagtcccatg

SEQ ID NO: 2820443 - DNA, 25 bp, Homo sapien
tggcaacagagtccacaccagaatc

SEQ ID NO: 2820444 - DNA, 25 bp, Homo sapien
aagactttggtctgcagatggcaac

SEQ ID NO: 2820445 - DNA, 25 bp, Homo sapien
ctgggcaacatctagtgatgctgct

SEQ ID NO: 2820446 - DNA, 25 bp, Homo sapien
tcagaccttggtcacagcatcactg

SEQ ID NO: 2820447 - DNA, 25 bp, Homo sapien
gaatacttgttagttaccactgcag

SEQ ID NO: 2820448 - DNA, 25 bp, Homo sapien
aactgttgttcagcgactggcttga

SEQ ID NO: 2820449 - DNA, 25 bp, Homo sapien
ccactgcagatctttgaagtaggca

SEQ ID NO: 2820450 - DNA, 25 bp, Homo sapien
ttctgtaccaccctcagttctcggg

SEQ ID NO: 2820451 - DNA, 25 bp, Homo sapien
gccccctatgtacgcctccctgggc

SEQ ID NO: 2820452 - DNA, 25 bp, Homo sapien
agttctcgggtcctggagcaccggc

SEQ ID NO: 2820453 - DNA, 25 bp, Homo sapien
tcagttgccttctcgggcctcggcg

SEQ ID NO: 2820454 - DNA, 25 bp, Homo sapien
cccgggcggcgctcgtacttctggc

SEQ ID NO: 2820455 - DNA, 25 bp, Homo sapien
aggagacgaagagcccgggcggcgc

SEQ ID NO: 2820456 - DNA, 25 bp, Homo sapien
caggagacgaagagcccgggcggcg

SEQ ID NO: 2820457 - DNA, 25 bp, Homo sapien
cgggcggcgctcgtacttctggcca

SEQ ID NO: 2820458 - DNA, 25 bp, Homo sapien
tgaggctgcaggcattgacgtctcc

SEQ ID NO: 2820459 - DNA, 25 bp, Homo sapien
tacggtgctcggcccgactctgtgg

SEQ ID NO: 2820460 - DNA, 25 bp, Homo sapien
tcccggcaaagcttcctcggctttg

SEQ ID NO: 2820461 - DNA, 25 bp, Homo sapien
ctgctcgggaccctacggtgctcgg

SEQ ID NO: 2820462 - DNA, 25 bp, Homo sapien
ccccattcaggcctccagttggccc

SEQ ID NO: 2820463 - DNA, 25 bp, Homo sapien
ccagttggcccctggctttgcaggt

SEQ ID NO: 2820464 - DNA, 25 bp, Homo sapien
cacgcagtggatgggggtcgcgacg

SEQ ID NO: 2820465 - DNA, 25 bp, Homo sapien
attcaggcctccagttggcccctgg

SEQ ID NO: 2820466 - DNA, 25 bp, Homo sapien
gcaagtggtgccccattcgcgttag

SEQ ID NO: 2820467 - DNA, 25 bp, Homo sapien
aagtggtgccccattcgcgttaggt

SEQ ID NO: 2820468 - DNA, 25 bp, Homo sapien
ctgcaagtggtgccccattcgcgtt

SEQ ID NO: 2820469 - DNA, 25 bp, Homo sapien
agtggtgccccattcgcgttaggtg

SEQ ID NO: 2820470 - DNA, 25 bp, Homo sapien
tcctcacccttggtgggtctcagac

SEQ ID NO: 2820471 - DNA, 25 bp, Homo sapien
cctcacccttggtgggtctcagact

SEQ ID NO: 2820472 - DNA, 25 bp, Homo sapien
ttagggtctcagccggaagccaatg

SEQ ID NO: 2820473 - DNA, 25 bp, Homo sapien
tcagccggaagccaatgctgttttc

SEQ ID NO: 2820474 - DNA, 25 bp, Homo sapien
gcaaaaatcatagcaatcgagatgt

SEQ ID NO: 2820475 - DNA, 25 bp, Homo sapien
gatgtaatttattactctccctccc

SEQ ID NO: 2820476 - DNA, 25 bp, Homo sapien
tagcaatcgagatgtaatttattac

SEQ ID NO: 2820477 - DNA, 25 bp, Homo sapien
tctctgtgctgcaaaaatcatagca

SEQ ID NO: 2820478 - DNA, 25 bp, Homo sapien
ccccgactctttactatgcgtgtca

SEQ ID NO: 2820479 - DNA, 25 bp, Homo sapien
attcccgtcgggagcccgccgattg

SEQ ID NO: 2820480 - DNA, 25 bp, Homo sapien
gagaagcagctgtgtaatccgctgg

SEQ ID NO: 2820481 - DNA, 25 bp, Homo sapien
gtgtcaactgccatcaacttccttg

SEQ ID NO: 2820482 - DNA, 25 bp, Homo sapien
aaagccttttagtttgtcagcagca

SEQ ID NO: 2820483 - DNA, 25 bp, Homo sapien
ctgaaccatctaaattttctttagg

SEQ ID NO: 2820484 - DNA, 25 bp, Homo sapien
cctgaaccatctaaattttctttag

SEQ ID NO: 2820485 - DNA, 25 bp, Homo sapien
tcaattaaccctgaaccatctaaat

SEQ ID NO: 2820486 - DNA, 25 bp, Homo sapien
gcttcaattaaccctgaaccatcta

SEQ ID NO: 2820487 - DNA, 25 bp, Homo sapien
tcacagattcttccggctctgcctc

SEQ ID NO: 2820488 - DNA, 25 bp, Homo sapien
atcacagattcttccggctctgcct

SEQ ID NO: 2820489 - DNA, 25 bp, Homo sapien
cttgtccttttaaaatcctgttgca

SEQ ID NO: 2820490 - DNA, 25 bp, Homo sapien
ttgtccttttaaaatcctgttgcat

SEQ ID NO: 2820491 - DNA, 25 bp, Homo sapien
tgctaggatttagagtcatcatgcc

SEQ ID NO: 2820492 - DNA, 25 bp, Homo sapien
gtgctaggatttagagtcatcatgc

SEQ ID NO: 2820493 - DNA, 25 bp, Homo sapien
agtgctaggatttagagtcatcatg

SEQ ID NO: 2820494 - DNA, 25 bp, Homo sapien
gctaggatttagagtcatcatgccc

SEQ ID NO: 2820495 - DNA, 25 bp, Homo sapien
tttattctggaatgccgtatccttc

SEQ ID NO: 2820496 - DNA, 25 bp, Homo sapien
tattctggaatgccgtatccttcat

SEQ ID NO: 2820497 - DNA, 25 bp, Homo sapien
ttattctggaatgccgtatccttca

SEQ ID NO: 2820498 - DNA, 25 bp, Homo sapien
tttgtcttcagtgtatcgaagcgtg

SEQ ID NO: 2820499 - DNA, 25 bp, Homo sapien
tggaaatgaggaaactagttagaat

SEQ ID NO: 2820500 - DNA, 25 bp, Homo sapien
tcagtgtatcgaagcgtgcaggcag

SEQ ID NO: 2820501 - DNA, 25 bp, Homo sapien
tcataatagtgaacaaccacttctt

SEQ ID NO: 2820502 - DNA, 25 bp, Homo sapien
tacacagttccatgcctttatcagt

SEQ ID NO: 2820503 - DNA, 25 bp, Homo sapien
gaagtgtaatacacagttccatgcc

SEQ ID NO: 2820504 - DNA, 25 bp, Homo sapien
cgagatagtcgaccgccaatcgtac

SEQ ID NO: 2820505 - DNA, 25 bp, Homo sapien
caatcgtactggaggttatgaagtg

SEQ ID NO: 2820506 - DNA, 25 bp, Homo sapien
gatgactccccatgatatacttcaa

SEQ ID NO: 2820507 - DNA, 25 bp, Homo sapien
aattactcgcaggtttctgttaggc

SEQ ID NO: 2820508 - DNA, 25 bp, Homo sapien
gaagtagaatcagtcaagcttaggg

SEQ ID NO: 2820509 - DNA, 25 bp, Homo sapien
gaaggagaagtcgagaattactcgc

SEQ ID NO: 2820510 - DNA, 25 bp, Homo sapien
tcattgctgatcttgtcaaatgcaa

SEQ ID NO: 2820511 - DNA, 25 bp, Homo sapien
gaagatgaatacctagcctaaaatt

SEQ ID NO: 2820512 - DNA, 25 bp, Homo sapien
tccccaatgagtatacagtgagaag

SEQ ID NO: 2820513 - DNA, 25 bp, Homo sapien
tgccatgaggactaaaaaatcacct

SEQ ID NO: 2820514 - DNA, 25 bp, Homo sapien
aagacaattcgaatgatgtcctgca

SEQ ID NO: 2820515 - DNA, 25 bp, Homo sapien
gccagagcctgtatatctgaaagac

SEQ ID NO: 2820516 - DNA, 25 bp, Homo sapien
tctagagtaggaggtgccatctcac

SEQ ID NO: 2820517 - DNA, 25 bp, Homo sapien
ctcaaaacctattactcccattgtg

SEQ ID NO: 2820518 - DNA, 25 bp, Homo sapien
ggacatgttctatgccttatgccaa

SEQ ID NO: 2820519 - DNA, 25 bp, Homo sapien
caaatgaaaccctcgattgaatcct

SEQ ID NO: 2820520 - DNA, 25 bp, Homo sapien
tcagccattcatacctctcaggaag

SEQ ID NO: 2820521 - DNA, 25 bp, Homo sapien
agaagttctgggtctaccactgaat

SEQ ID NO: 2820522 - DNA, 25 bp, Homo sapien
cagaagtacagatgaggctcaagga

SEQ ID NO: 2820523 - DNA, 25 bp, Homo sapien
ccctccaaatgagttagctgctgga

SEQ ID NO: 2820524 - DNA, 25 bp, Homo sapien
gacacgtgtaagaaaaaatgcagac

SEQ ID NO: 2820525 - DNA, 25 bp, Homo sapien
taagtgatctaacaatcgaatcccc

SEQ ID NO: 2820526 - DNA, 25 bp, Homo sapien
gaatgtataagctccgcaatgccaa

SEQ ID NO: 2820527 - DNA, 25 bp, Homo sapien
catagtcccagaaatatgggtggca

SEQ ID NO: 2820528 - DNA, 25 bp, Homo sapien
cagccaataaatcgaggtcagccta

SEQ ID NO: 2820529 - DNA, 25 bp, Homo sapien
gattcagaacatggtctatcccctg

SEQ ID NO: 2820530 - DNA, 25 bp, Homo sapien
gaaaatcgcctgaactcctttattc

SEQ ID NO: 2820531 - DNA, 25 bp, Homo sapien
catgcgtaccgtgggtttggaaaat

SEQ ID NO: 2820532 - DNA, 25 bp, Homo sapien
ccccggtgattgacagtgtttcaga

SEQ ID NO: 2820533 - DNA, 25 bp, Homo sapien
cctagatctggaagatctcccacag

SEQ ID NO: 2820534 - DNA, 25 bp, Homo sapien
ggtagaatttttgctatgctgtaat

SEQ ID NO: 2820535 - DNA, 25 bp, Homo sapien
tatttgaggtgagatggctgctctt

SEQ ID NO: 2820536 - DNA, 25 bp, Homo sapien
tgaatgaaactattttacctgaact

SEQ ID NO: 2820537 - DNA, 25 bp, Homo sapien
aaaaatctgtgtaactgtaaaacat

SEQ ID NO: 2820538 - DNA, 25 bp, Homo sapien
tgtttgctgtgtaacaaaacaatga

SEQ ID NO: 2820539 - DNA, 25 bp, Homo sapien
catgagctagctggcctgttgactt

SEQ ID NO: 2820540 - DNA, 25 bp, Homo sapien
tgaacataatagtataagacttagt

SEQ ID NO: 2820541 - DNA, 25 bp, Homo sapien
tatagtgaacataatagtataagac

SEQ ID NO: 2820542 - DNA, 25 bp, Homo sapien
cttagtttcattgttgagaactgtg

SEQ ID NO: 2820543 - DNA, 25 bp, Homo sapien
tgacaggtccatctctagctgcaaa

SEQ ID NO: 2820544 - DNA, 25 bp, Homo sapien
gaccataggcatgagatttctcaaa

SEQ ID NO: 2820545 - DNA, 25 bp, Homo sapien
gagaaagtgaacacagcagtcctcc

SEQ ID NO: 2820546 - DNA, 25 bp, Homo sapien
tttctagcattctattctcagttca

SEQ ID NO: 2820547 - DNA, 25 bp, Homo sapien
gtgtttcacaccgtcacccagactg

SEQ ID NO: 2820548 - DNA, 25 bp, Homo sapien
ttatagtcttattgtttccaagttc

SEQ ID NO: 2820549 - DNA, 25 bp, Homo sapien
ctattctcagttcatggatgtaatt

SEQ ID NO: 2820550 - DNA, 25 bp, Homo sapien
taacagtgtgaagggtgtgctcatt

SEQ ID NO: 2820551 - DNA, 25 bp, Homo sapien
cacatcttcaggataggtgataaca

SEQ ID NO: 2820552 - DNA, 25 bp, Homo sapien
gtgtatcacatcttcaggataggtg

SEQ ID NO: 2820553 - DNA, 25 bp, Homo sapien
caggataggtgataacagtgtgaag

SEQ ID NO: 2820554 - DNA, 25 bp, Homo sapien
ccgagagtagcagttgttgatccaa

SEQ ID NO: 2820555 - DNA, 25 bp, Homo sapien
tgtgagtagaggagtcttcccgaga

SEQ ID NO: 2820556 - DNA, 25 bp, Homo sapien
atccaaatgattgaagccttcaggt

SEQ ID NO: 2820557 - DNA, 25 bp, Homo sapien
tcaggtaagggaataactgctgcag

SEQ ID NO: 2820558 - DNA, 25 bp, Homo sapien
tctgacttgtaaactagggaagcct

SEQ ID NO: 2820559 - DNA, 25 bp, Homo sapien
ggagagcccagtaaagtacacagcc

SEQ ID NO: 2820560 - DNA, 25 bp, Homo sapien
agaaaatgcgtgcagggagagccca

SEQ ID NO: 2820561 - DNA, 25 bp, Homo sapien
catatactacggaaacaaccaggcc

SEQ ID NO: 2820562 - DNA, 25 bp, Homo sapien
actgcccactgcattaagtttaaag

SEQ ID NO: 2820563 - DNA, 25 bp, Homo sapien
taagtttaaagtgctccctatatat

SEQ ID NO: 2820564 - DNA, 25 bp, Homo sapien
taaagtgctccctatatatatagac

SEQ ID NO: 2820565 - DNA, 25 bp, Homo sapien
tccaaaaacgtggacactgcccact

SEQ ID NO: 2820566 - DNA, 25 bp, Homo sapien
aaataattataccacagtccctaat

SEQ ID NO: 2820567 - DNA, 25 bp, Homo sapien
taatataacatcaagctccagtagg

SEQ ID NO: 2820568 - DNA, 25 bp, Homo sapien
cacagtccctaatataacatcaagc

SEQ ID NO: 2820569 - DNA, 25 bp, Homo sapien
caagctccagtaggaaggtacagag

SEQ ID NO: 2820570 - DNA, 25 bp, Homo sapien
cttttcttcacccagtaaattcacg

SEQ ID NO: 2820571 - DNA, 25 bp, Homo sapien
ttcacccagtaaattcacggtagct

SEQ ID NO: 2820572 - DNA, 25 bp, Homo sapien
ttcttcacccagtaaattcacggta

SEQ ID NO: 2820573 - DNA, 25 bp, Homo sapien
cacccagtaaattcacggtagcttt

SEQ ID NO: 2820574 - DNA, 25 bp, Homo sapien
aatgcaagcttgcaagctttgtgcc

SEQ ID NO: 2820575 - DNA, 25 bp, Homo sapien
aagctctttctttggaatgcaagct

SEQ ID NO: 2820576 - DNA, 25 bp, Homo sapien
tctttctttggaatgcaagcttgca

SEQ ID NO: 2820577 - DNA, 25 bp, Homo sapien
tctttggaatgcaagcttgcaagct

SEQ ID NO: 2820578 - DNA, 25 bp, Homo sapien
gatgactcatgttcaggtgcgatca

SEQ ID NO: 2820579 - DNA, 25 bp, Homo sapien
tggagaaggtacctcttagagcaca

SEQ ID NO: 2820580 - DNA, 25 bp, Homo sapien
tagcctagccccttgttgtgacagt

SEQ ID NO: 2820581 - DNA, 25 bp, Homo sapien
catggcgacaaatcagagaagtcct

SEQ ID NO: 2820582 - DNA, 25 bp, Homo sapien
tagagagcgggtctccataggagac

SEQ ID NO: 2820583 - DNA, 25 bp, Homo sapien
actgcctatctctcaactagactgt

SEQ ID NO: 2820584 - DNA, 25 bp, Homo sapien
gagccttctggtatagatttcctaa

SEQ ID NO: 2820585 - DNA, 25 bp, Homo sapien
taaaatcataaccatccctccagtc

SEQ ID NO: 2820586 - DNA, 25 bp, Homo sapien
gcctccaaagtactgcttctgtctg

SEQ ID NO: 2820587 - DNA, 25 bp, Homo sapien
aatctgaactgaatcaggctggccg

SEQ ID NO: 2820588 - DNA, 25 bp, Homo sapien
tgaactgaatcaggctggccgtcag

SEQ ID NO: 2820589 - DNA, 25 bp, Homo sapien
agccttggccagctaggccctgctg

SEQ ID NO: 2820590 - DNA, 25 bp, Homo sapien
tcatggtgccagcccagagaggagc

SEQ ID NO: 2820591 - DNA, 25 bp, Homo sapien
gtgccagcccagagaggagccagcc

SEQ ID NO: 2820592 - DNA, 25 bp, Homo sapien
cccagagaggagccagccaggagat

SEQ ID NO: 2820593 - DNA, 25 bp, Homo sapien
aggagccagccaggagatggtgagt

SEQ ID NO: 2820594 - DNA, 25 bp, Homo sapien
ggtggggagccccaaggagaaggca

SEQ ID NO: 2820595 - DNA, 25 bp, Homo sapien
cctttccccttcagcgacatggcct

SEQ ID NO: 2820596 - DNA, 25 bp, Homo sapien
gcctctccacttggtgcaaaccatt

SEQ ID NO: 2820597 - DNA, 25 bp, Homo sapien
cgacatggcctctccacttggtgca

SEQ ID NO: 2820598 - DNA, 25 bp, Homo sapien
actgtgggtatgagggctccccttt

SEQ ID NO: 2820599 - DNA, 25 bp, Homo sapien
gtgttctcaataggcaaagactttg

SEQ ID NO: 2820600 - DNA, 25 bp, Homo sapien
actgaaggctacattaaatgtggca

SEQ ID NO: 2820601 - DNA, 25 bp, Homo sapien
gagtcttgggaaaagtcgagaactg

SEQ ID NO: 2820602 - DNA, 25 bp, Homo sapien
ccaggaagcctgttatttgagccca

SEQ ID NO: 2820603 - DNA, 25 bp, Homo sapien
tggccttgtctttaaggtccttgac

SEQ ID NO: 2820604 - DNA, 25 bp, Homo sapien
gcagttcagccccattagaagggct

SEQ ID NO: 2820605 - DNA, 25 bp, Homo sapien
tccttgaccacactgtccatctggg

SEQ ID NO: 2820606 - DNA, 25 bp, Homo sapien
gatgatgcgcttgtagagcagttca

SEQ ID NO: 2820607 - DNA, 25 bp, Homo sapien
agcatgggtaacaggagggtggagg

SEQ ID NO: 2820608 - DNA, 25 bp, Homo sapien
cagcatgggtaacaggagggtggag

SEQ ID NO: 2820609 - DNA, 25 bp, Homo sapien
cagtgttttctgcaggttaaaggtg

SEQ ID NO: 2820610 - DNA, 25 bp, Homo sapien
agtgttttctgcaggttaaaggtgg

SEQ ID NO: 2820611 - DNA, 25 bp, Homo sapien
tgttttctgcaggttaaaggtgggc

SEQ ID NO: 2820612 - DNA, 25 bp, Homo sapien
cgttttagtatatagctgtaagagg

SEQ ID NO: 2820613 - DNA, 25 bp, Homo sapien
cagataagcctaatatctaggaggc

SEQ ID NO: 2820614 - DNA, 25 bp, Homo sapien
ccaggtccaggagcttaactatctt

SEQ ID NO: 2820615 - DNA, 25 bp, Homo sapien
ttaactatcttcctaacttggacca

SEQ ID NO: 2820616 - DNA, 25 bp, Homo sapien
cttcctttggtggacctcagttttg

SEQ ID NO: 2820617 - DNA, 25 bp, Homo sapien
tgaattcttcctttggtggacctca

SEQ ID NO: 2820618 - DNA, 25 bp, Homo sapien
gggtagatcttagccttcaaggaat

SEQ ID NO: 2820619 - DNA, 25 bp, Homo sapien
ttttgggtagatcttagccttcaag

SEQ ID NO: 2820620 - DNA, 25 bp, Homo sapien
gaaacgtcggcaggaacttgctcga

SEQ ID NO: 2820621 - DNA, 25 bp, Homo sapien
cactgacagtggcagctatgaacaa

SEQ ID NO: 2820622 - DNA, 25 bp, Homo sapien
aaagtctaactgcaatataaaggag

SEQ ID NO: 2820623 - DNA, 25 bp, Homo sapien
gatgacgtttcccaagaagatgaca

SEQ ID NO: 2820624 - DNA, 25 bp, Homo sapien
gaccactactacagcaggcagcggg

SEQ ID NO: 2820625 - DNA, 25 bp, Homo sapien
accacgaccactactacagcaggca

SEQ ID NO: 2820626 - DNA, 25 bp, Homo sapien
acgaccactactacagcaggcagcg

SEQ ID NO: 2820627 - DNA, 25 bp, Homo sapien
ccacgaccactactacagcaggcag

SEQ ID NO: 2820628 - DNA, 25 bp, Homo sapien
cacatggaggttctaaataaatctg

SEQ ID NO: 2820629 - DNA, 25 bp, Homo sapien
gcacatggaggttctaaataaatct

SEQ ID NO: 2820630 - DNA, 25 bp, Homo sapien
tattcgccaaagtatctcccagatg

SEQ ID NO: 2820631 - DNA, 25 bp, Homo sapien
tgttttattcgccaaagtatctccc

SEQ ID NO: 2820632 - DNA, 25 bp, Homo sapien
ccttagaattgttaagagtatcatt

SEQ ID NO: 2820633 - DNA, 25 bp, Homo sapien
taatgtttacattatgcagttcata

SEQ ID NO: 2820634 - DNA, 25 bp, Homo sapien
aaaatgctgccatgaatatctttgt

SEQ ID NO: 2820635 - DNA, 25 bp, Homo sapien
aaagctagcacaactgtcctgtata

SEQ ID NO: 2820636 - DNA, 25 bp, Homo sapien
gactgtacagtgaagctttgacctg

SEQ ID NO: 2820637 - DNA, 25 bp, Homo sapien
gtgcctgatgggatagctgatactc

SEQ ID NO: 2820638 - DNA, 25 bp, Homo sapien
caggtggacactaactaaaggcagt

SEQ ID NO: 2820639 - DNA, 25 bp, Homo sapien
cttactagtactagcatggactggg

SEQ ID NO: 2820640 - DNA, 25 bp, Homo sapien
tctcctgcctcacctcctgagtagc

SEQ ID NO: 2820641 - DNA, 25 bp, Homo sapien
acctctgcatcccagattcaagcag

SEQ ID NO: 2820642 - DNA, 25 bp, Homo sapien
ctcacctcctgagtagctgggacta

SEQ ID NO: 2820643 - DNA, 25 bp, Homo sapien
cctctgcatcccagattcaagcagt

SEQ ID NO: 2820644 - DNA, 25 bp, Homo sapien
gggaaccatgacaggaagatatcag

SEQ ID NO: 2820645 - DNA, 25 bp, Homo sapien
gaaccatgacaggaagatatcagag

SEQ ID NO: 2820646 - DNA, 25 bp, Homo sapien
cagtaggtcagccactgggtatcat

SEQ ID NO: 2820647 - DNA, 25 bp, Homo sapien
caatgctgaacacaccatacactac

SEQ ID NO: 2820648 - DNA, 25 bp, Homo sapien
tagaatatgacgtaaaaacctcaaa

SEQ ID NO: 2820649 - DNA, 25 bp, Homo sapien
tctagaatatgacgtaaaaacctca

SEQ ID NO: 2820650 - DNA, 25 bp, Homo sapien
ttctagaatatgacgtaaaaacctc

SEQ ID NO: 2820651 - DNA, 25 bp, Homo sapien
tcttttctagaatatgacgtaaaaa

SEQ ID NO: 2820652 - DNA, 25 bp, Homo sapien
tacttactagatatatgaccctggg

SEQ ID NO: 2820653 - DNA, 25 bp, Homo sapien
gcagcatttcaccacccttagtttg

SEQ ID NO: 2820654 - DNA, 25 bp, Homo sapien
cactgaactatggaatggccagggc

SEQ ID NO: 2820655 - DNA, 25 bp, Homo sapien
tctagtatggataagcctcattgtg

SEQ ID NO: 2820656 - DNA, 25 bp, Homo sapien
caaatcccatatgctacaggtagta

SEQ ID NO: 2820657 - DNA, 25 bp, Homo sapien
gaaattctttacattggcattggac

SEQ ID NO: 2820658 - DNA, 25 bp, Homo sapien
gctaaaaggagattagagttaccca

SEQ ID NO: 2820659 - DNA, 25 bp, Homo sapien
cattggactggtacatatatgaaca

SEQ ID NO: 2820660 - DNA, 25 bp, Homo sapien
cagtactgttaaggaaacagctctg

SEQ ID NO: 2820661 - DNA, 25 bp, Homo sapien
cctccagtactgttaaggaaacagc

SEQ ID NO: 2820662 - DNA, 25 bp, Homo sapien
catcctccagtactgttaaggaaac

SEQ ID NO: 2820663 - DNA, 25 bp, Homo sapien
tccagtactgttaaggaaacagctc

SEQ ID NO: 2820664 - DNA, 25 bp, Homo sapien
caggtggccttgtgctagtaaaaca

SEQ ID NO: 2820665 - DNA, 25 bp, Homo sapien
ttaggaaatccagttcagtgtgcca

SEQ ID NO: 2820666 - DNA, 25 bp, Homo sapien
cagtgtgccattttcaggtggcctt

SEQ ID NO: 2820667 - DNA, 25 bp, Homo sapien
aagcctctgctgtcataagtcaaag

SEQ ID NO: 2820668 - DNA, 25 bp, Homo sapien
catctacatgctccaacgtgcagca

SEQ ID NO: 2820669 - DNA, 25 bp, Homo sapien
tatacaataaggtactggttgctcc

SEQ ID NO: 2820670 - DNA, 25 bp, Homo sapien
agggaaattatgcacacggaaagaa

SEQ ID NO: 2820671 - DNA, 25 bp, Homo sapien
gggcaagtcttcaaccatctacatg

SEQ ID NO: 2820672 - DNA, 25 bp, Homo sapien
agggagaaaagctaggaagccaagt

SEQ ID NO: 2820673 - DNA, 25 bp, Homo sapien
ttcactcacagacttccaaagggag

SEQ ID NO: 2820674 - DNA, 25 bp, Homo sapien
gaagccaagtgagcttttcccaatt

SEQ ID NO: 2820675 - DNA, 25 bp, Homo sapien
tcttgacccaatactgacactactc

SEQ ID NO: 2820676 - DNA, 25 bp, Homo sapien
tcacttttctcccgggaattgcgga

SEQ ID NO: 2820677 - DNA, 25 bp, Homo sapien
tctcccgggaattgcggatgtgcag

SEQ ID NO: 2820678 - DNA, 25 bp, Homo sapien
gaattgcggatgtgcagtctactgc

SEQ ID NO: 2820679 - DNA, 25 bp, Homo sapien
ccgggaattgcggatgtgcagtcta

SEQ ID NO: 2820680 - DNA, 25 bp, Homo sapien
gatgtaggctgggtagccaaatcct

SEQ ID NO: 2820681 - DNA, 25 bp, Homo sapien
gccaaatcctatcaggttgcagagg

SEQ ID NO: 2820682 - DNA, 25 bp, Homo sapien
ggctccataaccgaacaccaggtac

SEQ ID NO: 2820683 - DNA, 25 bp, Homo sapien
aggtacaaggccaccagtccgatga

SEQ ID NO: 2820684 - DNA, 25 bp, Homo sapien
cgcgcccaccgcgcaggacagcagg

SEQ ID NO: 2820685 - DNA, 25 bp, Homo sapien
agcaggaatagggcgccgggccgcg

SEQ ID NO: 2820686 - DNA, 25 bp, Homo sapien
gcaggggccccgccgtccgcgccca

SEQ ID NO: 2820687 - DNA, 25 bp, Homo sapien
gacagcaggaatagggcgccgggcc

SEQ ID NO: 2820688 - DNA, 25 bp, Homo sapien
cccttccagctgccagcgcccggcg

SEQ ID NO: 2820689 - DNA, 25 bp, Homo sapien
atacgtcagcgctggcccttccagc

SEQ ID NO: 2820690 - DNA, 25 bp, Homo sapien
gcccggcgccgcagctgccctccag

SEQ ID NO: 2820691 - DNA, 25 bp, Homo sapien
cttccagctgccagcgcccggcgcc

SEQ ID NO: 2820692 - DNA, 25 bp, Homo sapien
tatgctgcttgtcccgtctgtctcc

SEQ ID NO: 2820693 - DNA, 25 bp, Homo sapien
acgctttccgggaggccagcctgat

SEQ ID NO: 2820694 - DNA, 25 bp, Homo sapien
atccctgaatatgctgcttgtcccg

SEQ ID NO: 2820695 - DNA, 25 bp, Homo sapien
gggtcctccgatgcccacgctttcc

SEQ ID NO: 2820696 - DNA, 25 bp, Homo sapien
ttctcgtgcaggaaccggtcgaacc

SEQ ID NO: 2820697 - DNA, 25 bp, Homo sapien
agcttggccagaaggtcagtcatgc

SEQ ID NO: 2820698 - DNA, 25 bp, Homo sapien
tgttcacgccggttttggcctcgag

SEQ ID NO: 2820699 - DNA, 25 bp, Homo sapien
caagagcgatgaagctcctgttcac

SEQ ID NO: 2820700 - DNA, 25 bp, Homo sapien
ggaccgcggcgcgtctacgcgtcct

SEQ ID NO: 2820701 - DNA, 25 bp, Homo sapien
tcctagtgccggatagactggagcg

SEQ ID NO: 2820702 - DNA, 25 bp, Homo sapien
ccgctcggggctgttcctagtgccg

SEQ ID NO: 2820703 - DNA, 25 bp, Homo sapien
ggatagactggagcggcgactgcgg

SEQ ID NO: 2820704 - DNA, 25 bp, Homo sapien
tgagatcagacaactggtgtaagtc

SEQ ID NO: 2820705 - DNA, 25 bp, Homo sapien
ggtgtaagtcctttcactcacatca

SEQ ID NO: 2820706 - DNA, 25 bp, Homo sapien
ccctggaaagaatgaacatattgag

SEQ ID NO: 2820707 - DNA, 25 bp, Homo sapien
aaccagcatcaagttccctggaaag

SEQ ID NO: 2820708 - DNA, 25 bp, Homo sapien
gaatatccaaaaaggagccaggagg

SEQ ID NO: 2820709 - DNA, 25 bp, Homo sapien
gaggacagctgatccagactagaac

SEQ ID NO: 2820710 - DNA, 25 bp, Homo sapien
acatgacctctgtgggataaaggca

SEQ ID NO: 2820711 - DNA, 25 bp, Homo sapien
taaaggcacagggaactataggatg

SEQ ID NO: 2820712 - DNA, 25 bp, Homo sapien
aaaaaattgtgtcagagattgtgta

SEQ ID NO: 2820713 - DNA, 25 bp, Homo sapien
tgtattatcaagagtgactactacc

SEQ ID NO: 2820714 - DNA, 25 bp, Homo sapien
tggacataaaccgtgaagaacattt

SEQ ID NO: 2820715 - DNA, 25 bp, Homo sapien
ctactacctggacataaaccgtgaa

SEQ ID NO: 2820716 - DNA, 25 bp, Homo sapien
tacattcgtttcatctaaatttaga

SEQ ID NO: 2820717 - DNA, 25 bp, Homo sapien
aggaaaatgtacattcgtttcatct

SEQ ID NO: 2820718 - DNA, 25 bp, Homo sapien
tgtacattcgtttcatctaaattta

SEQ ID NO: 2820719 - DNA, 25 bp, Homo sapien
gaaaatgtacattcgtttcatctaa

SEQ ID NO: 2820720 - DNA, 25 bp, Homo sapien
ggcaaccactgcagcaaaagccata

SEQ ID NO: 2820721 - DNA, 25 bp, Homo sapien
catcttaatagttacagagagctct

SEQ ID NO: 2820722 - DNA, 25 bp, Homo sapien
tggtgtagtcgaaccaaattccgcc

SEQ ID NO: 2820723 - DNA, 25 bp, Homo sapien
tatttcctgacggttctcctggtga

SEQ ID NO: 2820724 - DNA, 25 bp, Homo sapien
tcgttcagtgccatttgaagacctg

SEQ ID NO: 2820725 - DNA, 25 bp, Homo sapien
tggctactgttcgttcagtgccatt

SEQ ID NO: 2820726 - DNA, 25 bp, Homo sapien
ttcagtgccatttgaagacctgttg

SEQ ID NO: 2820727 - DNA, 25 bp, Homo sapien
tactgttcgttcagtgccatttgaa

SEQ ID NO: 2820728 - DNA, 25 bp, Homo sapien
ccaggaaaaagtccattgagtcctt

SEQ ID NO: 2820729 - DNA, 25 bp, Homo sapien
caggaaaaagtccattgagtccttt

SEQ ID NO: 2820730 - DNA, 25 bp, Homo sapien
aaaatttgtttcacatctttatagc

SEQ ID NO: 2820731 - DNA, 25 bp, Homo sapien
aatttgtttcacatctttatagcaa

SEQ ID NO: 2820732 - DNA, 25 bp, Homo sapien
tttgtttcacatctttatagcaaac

SEQ ID NO: 2820733 - DNA, 25 bp, Homo sapien
ctgtagaataatccatattttaaaa

SEQ ID NO: 2820734 - DNA, 25 bp, Homo sapien
tatagctttcacattggcttgggaa

SEQ ID NO: 2820735 - DNA, 25 bp, Homo sapien
tttgatgtttgggtcacctgtggac

SEQ ID NO: 2820736 - DNA, 25 bp, Homo sapien
ggaaaagactatggatggcagcaaa

SEQ ID NO: 2820737 - DNA, 25 bp, Homo sapien
cagtctttgagaggtcttaggcaac

SEQ ID NO: 2820738 - DNA, 25 bp, Homo sapien
cacctgtagtgttcaccttgttata

SEQ ID NO: 2820739 - DNA, 25 bp, Homo sapien
tccctcagtgttaacgaaaggataa

SEQ ID NO: 2820740 - DNA, 25 bp, Homo sapien
ggtggtatacagttcttggtgctct

SEQ ID NO: 2820741 - DNA, 25 bp, Homo sapien
caagggattctgttcatggtggtat

SEQ ID NO: 2820742 - DNA, 25 bp, Homo sapien
tgttgggtatgactatcaaaggatt

SEQ ID NO: 2820743 - DNA, 25 bp, Homo sapien
tgggtatgactatcaaaggatttcc

SEQ ID NO: 2820744 - DNA, 25 bp, Homo sapien
tgtattgttgggtatgactatcaaa

SEQ ID NO: 2820745 - DNA, 25 bp, Homo sapien
tatgactatcaaaggatttccggtg

SEQ ID NO: 2820746 - DNA, 25 bp, Homo sapien
caatttgaacgatggaaggttgttc

SEQ ID NO: 2820747 - DNA, 25 bp, Homo sapien
tgtactctgtactctccactgagaa

SEQ ID NO: 2820748 - DNA, 25 bp, Homo sapien
tgcaggattactgtacttccaaaga

SEQ ID NO: 2820749 - DNA, 25 bp, Homo sapien
cagatactggctttctgtaaaaaca

SEQ ID NO: 2820750 - DNA, 25 bp, Homo sapien
tacaaggtatagtacagtgttaagt

SEQ ID NO: 2820751 - DNA, 25 bp, Homo sapien
aaacaattctatatcaaataacgca

SEQ ID NO: 2820752 - DNA, 25 bp, Homo sapien
tttacagcagctaaaactaaaggca

SEQ ID NO: 2820753 - DNA, 25 bp, Homo sapien
tacagtgttaagtagcaattttaaa

SEQ ID NO: 2820754 - DNA, 25 bp, Homo sapien
tggcactcgcaactacggacagaag

SEQ ID NO: 2820755 - DNA, 25 bp, Homo sapien
tagctggtaagctcacactgatggc

SEQ ID NO: 2820756 - DNA, 25 bp, Homo sapien
gagaaaaattcaggtagcgccaggt

SEQ ID NO: 2820757 - DNA, 25 bp, Homo sapien
tcttgatcgggtaactacggtgcac

SEQ ID NO: 2820758 - DNA, 25 bp, Homo sapien
aaactgcccatttgatgcctgctta

SEQ ID NO: 2820759 - DNA, 25 bp, Homo sapien
aggacgtttccctaggcaagctgga

SEQ ID NO: 2820760 - DNA, 25 bp, Homo sapien
tactaaaactaaggtcaggtagcat

SEQ ID NO: 2820761 - DNA, 25 bp, Homo sapien
ttttacctggagcaagaatggagac

SEQ ID NO: 2820762 - DNA, 25 bp, Homo sapien
tatcctccagcgaacagaaggctgt

SEQ ID NO: 2820763 - DNA, 25 bp, Homo sapien
gagctacaaatgcacccatgtggaa

SEQ ID NO: 2820764 - DNA, 25 bp, Homo sapien
tatggccgcctctatcttaaagttg

SEQ ID NO: 2820765 - DNA, 25 bp, Homo sapien
gtgatcaaagcaccccaaagctggt

SEQ ID NO: 2820766 - DNA, 25 bp, Homo sapien
ggcctgctgcagtttacttcccatg

SEQ ID NO: 2820767 - DNA, 25 bp, Homo sapien
ccatgggcagaactccggtgcgtga

SEQ ID NO: 2820768 - DNA, 25 bp, Homo sapien
ttcccatgggcagaactccggtgcg

SEQ ID NO: 2820769 - DNA, 25 bp, Homo sapien
caacaagtacatgggcccttctgtc

SEQ ID NO: 2820770 - DNA, 25 bp, Homo sapien
tgtggcctggagttctcctcctcta

SEQ ID NO: 2820771 - DNA, 25 bp, Homo sapien
gtgtgtggcctggagttctcctcct

SEQ ID NO: 2820772 - DNA, 25 bp, Homo sapien
agcgaagtttcattggtgtgtggcc

SEQ ID NO: 2820773 - DNA, 25 bp, Homo sapien
ttaaagcgaagtttcattggtgtgt

SEQ ID NO: 2820774 - DNA, 25 bp, Homo sapien
atcatctgcgactctaacttcttca

SEQ ID NO: 2820775 - DNA, 25 bp, Homo sapien
catggccatcatctgcgactctaac

SEQ ID NO: 2820776 - DNA, 25 bp, Homo sapien
gccatcatctgcgactctaacttct

SEQ ID NO: 2820777 - DNA, 25 bp, Homo sapien
tgtctctccaccatggccatcatct

SEQ ID NO: 2820778 - DNA, 25 bp, Homo sapien
gatagtctgaggactcaccccagag

SEQ ID NO: 2820779 - DNA, 25 bp, Homo sapien
agtgagcccaggtaggtccattcca

SEQ ID NO: 2820780 - DNA, 25 bp, Homo sapien
caaagtgaccatacctgggacgaga

SEQ ID NO: 2820781 - DNA, 25 bp, Homo sapien
gcttaaccctgatgaatccagccgg

SEQ ID NO: 2820782 - DNA, 25 bp, Homo sapien
gagatgccactctaaggaagaccag

SEQ ID NO: 2820783 - DNA, 25 bp, Homo sapien
taccaggaggcatataccacagtat

SEQ ID NO: 2820784 - DNA, 25 bp, Homo sapien
gcagggtgtcagtccaagtaccaca

SEQ ID NO: 2820785 - DNA, 25 bp, Homo sapien
gagtcctgagcccagtcttagagca

SEQ ID NO: 2820786 - DNA, 25 bp, Homo sapien
cattcacgaactctgcagattgctg

SEQ ID NO: 2820787 - DNA, 25 bp, Homo sapien
gcagattgctgatgtcggatttcac

SEQ ID NO: 2820788 - DNA, 25 bp, Homo sapien
gatgtcggatttcactgctcttggt

SEQ ID NO: 2820789 - DNA, 25 bp, Homo sapien
tggcccgctttagatcattcacgaa

SEQ ID NO: 2820790 - DNA, 25 bp, Homo sapien
gaaggagcgtgtgtttttcctgggc

SEQ ID NO: 2820791 - DNA, 25 bp, Homo sapien
tcccggcattggagagtggcagcat

SEQ ID NO: 2820792 - DNA, 25 bp, Homo sapien
gacatctcggatctggctgcatttc

SEQ ID NO: 2820793 - DNA, 25 bp, Homo sapien
atttcctcccggcattggagagtgg

SEQ ID NO: 2820794 - DNA, 25 bp, Homo sapien
tgttggttcctacaagtctggaagt

SEQ ID NO: 2820795 - DNA, 25 bp, Homo sapien
ttaatgtcctgcagacccatgtgct

SEQ ID NO: 2820796 - DNA, 25 bp, Homo sapien
catgaaccagtgaagattctgctgc

SEQ ID NO: 2820797 - DNA, 25 bp, Homo sapien
tatttgcgtgctaatgaagccacag

SEQ ID NO: 2820798 - DNA, 25 bp, Homo sapien
gcatgacttaggctgacatatgcca

SEQ ID NO: 2820799 - DNA, 25 bp, Homo sapien
catgacttaggctgacatatgccat

SEQ ID NO: 2820800 - DNA, 25 bp, Homo sapien
ttccatcccgtgtttctggcacagt

SEQ ID NO: 2820801 - DNA, 25 bp, Homo sapien
gaaatagcgagtgggatttccatcc

SEQ ID NO: 2820802 - DNA, 25 bp, Homo sapien
aatggctcccactggaaatagcgag

SEQ ID NO: 2820803 - DNA, 25 bp, Homo sapien
aagtcattaggatttgttgagggca

SEQ ID NO: 2820804 - DNA, 25 bp, Homo sapien
cgacgaatggcgttggtgaactccg

SEQ ID NO: 2820805 - DNA, 25 bp, Homo sapien
gtgaactccgcagccagctcattct

SEQ ID NO: 2820806 - DNA, 25 bp, Homo sapien
tcctgagttcggctagggacagagc

SEQ ID NO: 2820807 - DNA, 25 bp, Homo sapien
tctcgctgcacgttgtcctgagttc

SEQ ID NO: 2820808 - DNA, 25 bp, Homo sapien
cgggtggcgccctcaggtcatgcca

SEQ ID NO: 2820809 - DNA, 25 bp, Homo sapien
aacagcaaacacattccagttaggc

SEQ ID NO: 2820810 - DNA, 25 bp, Homo sapien
ggcgccctcaggtcatgccaaaggg

SEQ ID NO: 2820811 - DNA, 25 bp, Homo sapien
ttaggcctgaatccaagccggcagc

SEQ ID NO: 2820812 - DNA, 25 bp, Homo sapien
ttagactagcaagttggcatatgtc

SEQ ID NO: 2820813 - DNA, 25 bp, Homo sapien
ttggcatatgtctgcgagtcctggg

SEQ ID NO: 2820814 - DNA, 25 bp, Homo sapien
caagttggcatatgtctgcgagtcc

SEQ ID NO: 2820815 - DNA, 25 bp, Homo sapien
tagcaagttggcatatgtctgcgag

SEQ ID NO: 2820816 - DNA, 25 bp, Homo sapien
tgatgtggacttcgtaacccaaggc

SEQ ID NO: 2820817 - DNA, 25 bp, Homo sapien
tcctctgccggcaggctgattcctg

SEQ ID NO: 2820818 - DNA, 25 bp, Homo sapien
tgtggacttcgtaacccaaggcttc

SEQ ID NO: 2820819 - DNA, 25 bp, Homo sapien
agatgatgtggacttcgtaacccaa

SEQ ID NO: 2820820 - DNA, 25 bp, Homo sapien
tatgggggattttggatcatatcac

SEQ ID NO: 2820821 - DNA, 25 bp, Homo sapien
gggttcagtattacctgtggtttca

SEQ ID NO: 2820822 - DNA, 25 bp, Homo sapien
gtggtttcaggcatctatgggggat

SEQ ID NO: 2820823 - DNA, 25 bp, Homo sapien
tatgtataggggaaaacgtagaata

SEQ ID NO: 2820824 - DNA, 25 bp, Homo sapien
tagagctgggccttcaactcggcca

SEQ ID NO: 2820825 - DNA, 25 bp, Homo sapien
tctttctccagtaggtagagctggg

SEQ ID NO: 2820826 - DNA, 25 bp, Homo sapien
gtgctcaatgtgcaccaggtaggcc

SEQ ID NO: 2820827 - DNA, 25 bp, Homo sapien
gagctgagggatcgcatccgctgct

SEQ ID NO: 2820828 - DNA, 25 bp, Homo sapien
ggtgcctggcattccacaccagaaa

SEQ ID NO: 2820829 - DNA, 25 bp, Homo sapien
tcttgttgtaggtatggcggtttaa

SEQ ID NO: 2820830 - DNA, 25 bp, Homo sapien
caagaaagctcccttctgtagaaat

SEQ ID NO: 2820831 - DNA, 25 bp, Homo sapien
cagcaggtaggtatctccactagca

SEQ ID NO: 2820832 - DNA, 25 bp, Homo sapien
gggcccagtgtttcagatccactga

SEQ ID NO: 2820833 - DNA, 25 bp, Homo sapien
agggcccagtgtttcagatccactg

SEQ ID NO: 2820834 - DNA, 25 bp, Homo sapien
ggcccagtgtttcagatccactgaa

SEQ ID NO: 2820835 - DNA, 25 bp, Homo sapien
gcccagtgtttcagatccactgaaa

SEQ ID NO: 2820836 - DNA, 25 bp, Homo sapien
gccctgtcattcttgagctgctgga

SEQ ID NO: 2820837 - DNA, 25 bp, Homo sapien
tcttctttagtgaactcggtgtcgc

SEQ ID NO: 2820838 - DNA, 25 bp, Homo sapien
gtctccccgaggcttgacgtcatag

SEQ ID NO: 2820839 - DNA, 25 bp, Homo sapien
tcggtgtcgcaactactggctgtgg

SEQ ID NO: 2820840 - DNA, 25 bp, Homo sapien
agcaccactggaaaacggaggccac

SEQ ID NO: 2820841 - DNA, 25 bp, Homo sapien
aataaggcccactccactcggttga

SEQ ID NO: 2820842 - DNA, 25 bp, Homo sapien
aaacggaggccacggctttcaagtg

SEQ ID NO: 2820843 - DNA, 25 bp, Homo sapien
cagtgtgcaccgacagcagtttctc

SEQ ID NO: 2820844 - DNA, 25 bp, Homo sapien
aggggtgactcgcccctcatggaac

SEQ ID NO: 2820845 - DNA, 25 bp, Homo sapien
ggggtgactcgcccctcatggaact

SEQ ID NO: 2820846 - DNA, 25 bp, Homo sapien
ggccacgagtgatctccacaggccg

SEQ ID NO: 2820847 - DNA, 25 bp, Homo sapien
cgagtgatctccacaggccgccaga

SEQ ID NO: 2820848 - DNA, 25 bp, Homo sapien
acgagtgatctccacaggccgccag

SEQ ID NO: 2820849 - DNA, 25 bp, Homo sapien
aggggccacgagtgatctccacagg

SEQ ID NO: 2820850 - DNA, 25 bp, Homo sapien
gagctcttaacgtttcactgcggaa

SEQ ID NO: 2820851 - DNA, 25 bp, Homo sapien
aattctgctttgagctcttaacgtt

SEQ ID NO: 2820852 - DNA, 25 bp, Homo sapien
gaatatgattatgacaatggtaggg

SEQ ID NO: 2820853 - DNA, 25 bp, Homo sapien
tcactgcggaatatgattatgacaa

SEQ ID NO: 2820854 - DNA, 25 bp, Homo sapien
cagcttggaatgctggatgatctca

SEQ ID NO: 2820855 - DNA, 25 bp, Homo sapien
tgtgggtttctcctttccgtgatgc

SEQ ID NO: 2820856 - DNA, 25 bp, Homo sapien
tgctgggcaagggttaagtcatcca

SEQ ID NO: 2820857 - DNA, 25 bp, Homo sapien
aaaaaccctcgccacacatgtgtgt

SEQ ID NO: 2820858 - DNA, 25 bp, Homo sapien
ttgtggattgagatcgatgactacg

SEQ ID NO: 2820859 - DNA, 25 bp, Homo sapien
tcctgtcttggccacagttcctttg

SEQ ID NO: 2820860 - DNA, 25 bp, Homo sapien
cttgctgtggccgatcctgtcttgg

SEQ ID NO: 2820861 - DNA, 25 bp, Homo sapien
tcagtctctgagagtacagacttgc

SEQ ID NO: 2820862 - DNA, 25 bp, Homo sapien
cagggccttggcagcgttctcagct

SEQ ID NO: 2820863 - DNA, 25 bp, Homo sapien
agctcgcttgagcatctgagtgatg

SEQ ID NO: 2820864 - DNA, 25 bp, Homo sapien
gctgcagccggccacggcaaaggct

SEQ ID NO: 2820865 - DNA, 25 bp, Homo sapien
tgtcttccggcagtcatgagctcgc

SEQ ID NO: 2820866 - DNA, 25 bp, Homo sapien
tgtgtcctggatggacaagtcctaa

SEQ ID NO: 2820867 - DNA, 25 bp, Homo sapien
gattcctgtgcaagtcgaaactgaa

SEQ ID NO: 2820868 - DNA, 25 bp, Homo sapien
tgagtgttcagtgcaaaagtgagcc

SEQ ID NO: 2820869 - DNA, 25 bp, Homo sapien
tggaagctcacagcagaaatccagt

SEQ ID NO: 2820870 - DNA, 25 bp, Homo sapien
ttcgtaggcttcgatgcactgctcg

SEQ ID NO: 2820871 - DNA, 25 bp, Homo sapien
ggaactgccccaggatgaggctctg

SEQ ID NO: 2820872 - DNA, 25 bp, Homo sapien
ctgccagcgccaggaggagttcgta

SEQ ID NO: 2820873 - DNA, 25 bp, Homo sapien
gccgctcggaactgccccaggatga

SEQ ID NO: 2820874 - DNA, 25 bp, Homo sapien
agcccttgcagagaacagcggacac

SEQ ID NO: 2820875 - DNA, 25 bp, Homo sapien
cccttgcagagaacagcggacacct

SEQ ID NO: 2820876 - DNA, 25 bp, Homo sapien
ttgcagagaacagcggacaccttca

SEQ ID NO: 2820877 - DNA, 25 bp, Homo sapien
cagagaacagcggacaccttcaatg

SEQ ID NO: 2820878 - DNA, 25 bp, Homo sapien
gtactgcaaggccagcctcagcgct

SEQ ID NO: 2820879 - DNA, 25 bp, Homo sapien
tgtactgcaaggccagcctcagcgc

SEQ ID NO: 2820880 - DNA, 25 bp, Homo sapien
ctgtactgcaaggccagcctcagcg

SEQ ID NO: 2820881 - DNA, 25 bp, Homo sapien
tactgcaaggccagcctcagcgctg

SEQ ID NO: 2820882 - DNA, 25 bp, Homo sapien
tccaaggttatggtcaggaggtcat

SEQ ID NO: 2820883 - DNA, 25 bp, Homo sapien
caccagcatgctcatcctctcggca

SEQ ID NO: 2820884 - DNA, 25 bp, Homo sapien
gcattgcttttacattcctccaagg

SEQ ID NO: 2820885 - DNA, 25 bp, Homo sapien
catcctctcggcattgcttttacat

SEQ ID NO: 2820886 - DNA, 25 bp, Homo sapien
tgccctggcataccacaaagattgt

SEQ ID NO: 2820887 - DNA, 25 bp, Homo sapien
tatgtttggcccgagacattgctct

SEQ ID NO: 2820888 - DNA, 25 bp, Homo sapien
taagaatatcagttcgccatatggc

SEQ ID NO: 2820889 - DNA, 25 bp, Homo sapien
tgctttcagcaccacacatggcgtg

SEQ ID NO: 2820890 - DNA, 25 bp, Homo sapien
caaggccacagcgaggttgggggac

SEQ ID NO: 2820891 - DNA, 25 bp, Homo sapien
tgggggacgggcgtccgccactgct

SEQ ID NO: 2820892 - DNA, 25 bp, Homo sapien
ctgccctgactacccaccgaaaaat

SEQ ID NO: 2820893 - DNA, 25 bp, Homo sapien
tgtaagcctcccatcttcagatgcc

SEQ ID NO: 2820894 - DNA, 25 bp, Homo sapien
gcgccacgctcgaattctcactggg

SEQ ID NO: 2820895 - DNA, 25 bp, Homo sapien
gcacttggagcagccggctggtgcc

SEQ ID NO: 2820896 - DNA, 25 bp, Homo sapien
taccacagcacttccggcccgctcg

SEQ ID NO: 2820897 - DNA, 25 bp, Homo sapien
agctgtggagggtgcaccgggtacc

SEQ ID NO: 2820898 - DNA, 25 bp, Homo sapien
tgctttctgagatggcagatccgtg

SEQ ID NO: 2820899 - DNA, 25 bp, Homo sapien
ctcttggatattggagcagtcctga

SEQ ID NO: 2820900 - DNA, 25 bp, Homo sapien
tattcagccgttctgtttccacctc

SEQ ID NO: 2820901 - DNA, 25 bp, Homo sapien
gagtgtttggaaaatctcttggata

SEQ ID NO: 2820902 - DNA, 25 bp, Homo sapien
tgacgattcggaccttgtctttgat

SEQ ID NO: 2820903 - DNA, 25 bp, Homo sapien
caggactggccgatcagatgatgac

SEQ ID NO: 2820904 - DNA, 25 bp, Homo sapien
ttgtctttgatagcttcaccctctc

SEQ ID NO: 2820905 - DNA, 25 bp, Homo sapien
gatcagatgatgacgattcggacct

SEQ ID NO: 2820906 - DNA, 25 bp, Homo sapien
tcattactcaaggtccctgactggg

SEQ ID NO: 2820907 - DNA, 25 bp, Homo sapien
cattactcaaggtccctgactgggc

SEQ ID NO: 2820908 - DNA, 25 bp, Homo sapien
attactcaaggtccctgactgggct

SEQ ID NO: 2820909 - DNA, 25 bp, Homo sapien
ctttgagagcaactctgtccactgt

SEQ ID NO: 2820910 - DNA, 25 bp, Homo sapien
aagtactggagcacttgacaaaacg

SEQ ID NO: 2820911 - DNA, 25 bp, Homo sapien
actgtgaagtactggagcacttgac

SEQ ID NO: 2820912 - DNA, 25 bp, Homo sapien
gtctttgagagcaactctgtccact

SEQ ID NO: 2820913 - DNA, 25 bp, Homo sapien
tgtcagctgtgacattctccagctg

SEQ ID NO: 2820914 - DNA, 25 bp, Homo sapien
tggctgattaatgagagctggcgtc

SEQ ID NO: 2820915 - DNA, 25 bp, Homo sapien
gagagagacttaaaactattagtgg

SEQ ID NO: 2820916 - DNA, 25 bp, Homo sapien
tccataatgacttgtcagctgtgac

SEQ ID NO: 2820917 - DNA, 25 bp, Homo sapien
catgcctgtacagtggctaggatga

SEQ ID NO: 2820918 - DNA, 25 bp, Homo sapien
gcctggtgcttccagataacaggag

SEQ ID NO: 2820919 - DNA, 25 bp, Homo sapien
gaggtgttcccgctcatcgggtcca

SEQ ID NO: 2820920 - DNA, 25 bp, Homo sapien
cctgtacagtggctaggatgagcct

SEQ ID NO: 2820921 - DNA, 25 bp, Homo sapien
tggcgatgggaatgtcattgctgct

SEQ ID NO: 2820922 - DNA, 25 bp, Homo sapien
gtggcctgcacgctctgtagtcgag

SEQ ID NO: 2820923 - DNA, 25 bp, Homo sapien
ctctgtagtcgagtttgaagctctc

SEQ ID NO: 2820924 - DNA, 25 bp, Homo sapien
cttggcgatgggaatgtcattgctg

SEQ ID NO: 2820925 - DNA, 25 bp, Homo sapien
ggatcagcccactgaaaagctaggt

SEQ ID NO: 2820926 - DNA, 25 bp, Homo sapien
ggtggtttccctggctaaagagcaa

SEQ ID NO: 2820927 - DNA, 25 bp, Homo sapien
tagacatagttggtggtttccctgg

SEQ ID NO: 2820928 - DNA, 25 bp, Homo sapien
gaatcggtttcttaaatcacatgta

SEQ ID NO: 2820929 - DNA, 25 bp, Homo sapien
tactatctgcatactgtgggactcc

SEQ ID NO: 2820930 - DNA, 25 bp, Homo sapien
acttgacatgaacactggaaactgg

SEQ ID NO: 2820931 - DNA, 25 bp, Homo sapien
tgctcgacccataggtgaaaagctg

SEQ ID NO: 2820932 - DNA, 25 bp, Homo sapien
tgtgcagcggagtcaaccttcagaa

SEQ ID NO: 2820933 - DNA, 25 bp, Homo sapien
tacaagagctgacactgacgtaggt

SEQ ID NO: 2820934 - DNA, 25 bp, Homo sapien
gcaagggactatgccccggagcatt

SEQ ID NO: 2820935 - DNA, 25 bp, Homo sapien
ggctggccagatttcccaaaagctg

SEQ ID NO: 2820936 - DNA, 25 bp, Homo sapien
gctgtaaatgcaataggtgggtcac

SEQ ID NO: 2820937 - DNA, 25 bp, Homo sapien
gctacaggaaagtggtctaaacaag

SEQ ID NO: 2820938 - DNA, 25 bp, Homo sapien
taaggccaccagatcccaaattttg

SEQ ID NO: 2820939 - DNA, 25 bp, Homo sapien
taacatcaacgtagacttgggcaag

SEQ ID NO: 2820940 - DNA, 25 bp, Homo sapien
tctgtgaaaccctaaggaatctggc

SEQ ID NO: 2820941 - DNA, 25 bp, Homo sapien
aattctgccgaacatttctatcctg

SEQ ID NO: 2820942 - DNA, 25 bp, Homo sapien
cacagaagtgcttgtgggttcctgg

SEQ ID NO: 2820943 - DNA, 25 bp, Homo sapien
tagctccttcagtaatggatacatg

SEQ ID NO: 2820944 - DNA, 25 bp, Homo sapien
ccctagggtgaatagcaggagtcac

SEQ ID NO: 2820945 - DNA, 25 bp, Homo sapien
caaatgccacaaaattctcacggtg

SEQ ID NO: 2820946 - DNA, 25 bp, Homo sapien
tcacggtgcccctggtgctatacac

SEQ ID NO: 2820947 - DNA, 25 bp, Homo sapien
tgaccattatggatgcagcatgctc

SEQ ID NO: 2820948 - DNA, 25 bp, Homo sapien
cgaactactttcaagaaggacttca

SEQ ID NO: 2820949 - DNA, 25 bp, Homo sapien
gttgggatacaggtcccggccaagc

SEQ ID NO: 2820950 - DNA, 25 bp, Homo sapien
caggttgggatacaggtcccggcca

SEQ ID NO: 2820951 - DNA, 25 bp, Homo sapien
cgctcttcccggatggcattcatgg

SEQ ID NO: 2820952 - DNA, 25 bp, Homo sapien
tggtggccttagtccggttcagttc

SEQ ID NO: 2820953 - DNA, 25 bp, Homo sapien
ccacacaatgcttatttccttcact

SEQ ID NO: 2820954 - DNA, 25 bp, Homo sapien
tcagagtaagaaaaacagtgagtcc

SEQ ID NO: 2820955 - DNA, 25 bp, Homo sapien
agttccagagttggtggatacacac

SEQ ID NO: 2820956 - DNA, 25 bp, Homo sapien
tgtctgtggtgctagctgacacatc

SEQ ID NO: 2820957 - DNA, 25 bp, Homo sapien
ctgctcaatgtgcttgtccacctcg

SEQ ID NO: 2820958 - DNA, 25 bp, Homo sapien
gctcttcttcctgccgcagacaaca

SEQ ID NO: 2820959 - DNA, 25 bp, Homo sapien
agacaacattctccagccctgtcag

SEQ ID NO: 2820960 - DNA, 25 bp, Homo sapien
gctgctcaatgtgcttgtccacctc

SEQ ID NO: 2820961 - DNA, 25 bp, Homo sapien
ctttcactcaaagcagccacatctt

SEQ ID NO: 2820962 - DNA, 25 bp, Homo sapien
tttcactcaaagcagccacatcttg

SEQ ID NO: 2820963 - DNA, 25 bp, Homo sapien
tgtctttcactcaaagcagccacat

SEQ ID NO: 2820964 - DNA, 25 bp, Homo sapien
ttgtctttcactcaaagcagccaca

SEQ ID NO: 2820965 - DNA, 25 bp, Homo sapien
tcccctgttcactatgccccattca

SEQ ID NO: 2820966 - DNA, 25 bp, Homo sapien
tcactatgccccattcacactcctt

SEQ ID NO: 2820967 - DNA, 25 bp, Homo sapien
ttcactatgccccattcacactcct

SEQ ID NO: 2820968 - DNA, 25 bp, Homo sapien
ttcccctcattcactatgccccatt

SEQ ID NO: 2820969 - DNA, 25 bp, Homo sapien
ctgtgtaaacacatttctccaggtc

SEQ ID NO: 2820970 - DNA, 25 bp, Homo sapien
gagtggctgcttgacacttgtaaac

SEQ ID NO: 2820971 - DNA, 25 bp, Homo sapien
tgtgtaaacacatttctccaggtct

SEQ ID NO: 2820972 - DNA, 25 bp, Homo sapien
tctcctcactctgagtggctgcttg

SEQ ID NO: 2820973 - DNA, 25 bp, Homo sapien
ggctctggctgagttctgatcgcag

SEQ ID NO: 2820974 - DNA, 25 bp, Homo sapien
ttggtccatgcttcgagagtcctcg

SEQ ID NO: 2820975 - DNA, 25 bp, Homo sapien
tcagcagtaaccatggtagactggt

SEQ ID NO: 2820976 - DNA, 25 bp, Homo sapien
cgttgacctcgtgttggctctggct

SEQ ID NO: 2820977 - DNA, 25 bp, Homo sapien
ctaacagaggatataagacaacccc

SEQ ID NO: 2820978 - DNA, 25 bp, Homo sapien
taagacaaccccctagagaatatgt

SEQ ID NO: 2820979 - DNA, 25 bp, Homo sapien
aaggagaattggcaaccactaacag

SEQ ID NO: 2820980 - DNA, 25 bp, Homo sapien
tggcaaccactaacagaggatataa

SEQ ID NO: 2820981 - DNA, 25 bp, Homo sapien
ggtcttacttcttctatctacctat

SEQ ID NO: 2820982 - DNA, 25 bp, Homo sapien
actaggtcttacttcttctatctac

SEQ ID NO: 2820983 - DNA, 25 bp, Homo sapien
aataaccaccaaaatactctctatc

SEQ ID NO: 2820984 - DNA, 25 bp, Homo sapien
ctagtagctactttgaattataaaa

SEQ ID NO: 2820985 - DNA, 25 bp, Homo sapien
ttaacccatttgtgctggagcctga

SEQ ID NO: 2820986 - DNA, 25 bp, Homo sapien
cactaggcataaatagattaacaat

SEQ ID NO: 2820987 - DNA, 25 bp, Homo sapien
atccataagcatggggatctttcca

SEQ ID NO: 2820988 - DNA, 25 bp, Homo sapien
ttccaatccataagcatggggatct

SEQ ID NO: 2820989 - DNA, 25 bp, Homo sapien
gattgagtccataatgcgacttacc

SEQ ID NO: 2820990 - DNA, 25 bp, Homo sapien
gtgccatcactaggtccactatgat

SEQ ID NO: 2820991 - DNA, 25 bp, Homo sapien
gtccactatgatttggattgagtcc

SEQ ID NO: 2820992 - DNA, 25 bp, Homo sapien
cataatgcgacttaccacctgactt

SEQ ID NO: 2820993 - DNA, 25 bp, Homo sapien
atctgcaacctgcagtatctgattt

SEQ ID NO: 2820994 - DNA, 25 bp, Homo sapien
gcgaagtgtcgttcgctcctggaca

SEQ ID NO: 2820995 - DNA, 25 bp, Homo sapien
gatgcgttcctcatagcgaagtgtc

SEQ ID NO: 2820996 - DNA, 25 bp, Homo sapien
ctctcatgaggtgggactgctcgca

SEQ ID NO: 2820997 - DNA, 25 bp, Homo sapien
atggtggtgccttgcagacggtcta

SEQ ID NO: 2820998 - DNA, 25 bp, Homo sapien
tgctggagacgtttattaagttcca

SEQ ID NO: 2820999 - DNA, 25 bp, Homo sapien
ttgctggagacgtttattaagttcc

SEQ ID NO: 2821000 - DNA, 25 bp, Homo sapien
tttgctggagacgtttattaagttc

SEQ ID NO: 2821001 - DNA, 25 bp, Homo sapien
gctggagacgtttattaagttccac

SEQ ID NO: 2821002 - DNA, 25 bp, Homo sapien
tgttgggtcttccctcctctttgcc

SEQ ID NO: 2821003 - DNA, 25 bp, Homo sapien
gtcttccctcctctttgcctcccca

SEQ ID NO: 2821004 - DNA, 25 bp, Homo sapien
tgggtcttccctcctctttgcctcc

SEQ ID NO: 2821005 - DNA, 25 bp, Homo sapien
ttgggtcttccctcctctttgcctc

SEQ ID NO: 2821006 - DNA, 25 bp, Homo sapien
tcccccgaaaggctgtactggccag

SEQ ID NO: 2821007 - DNA, 25 bp, Homo sapien
gtactggccagacagatgcttatgt

SEQ ID NO: 2821008 - DNA, 25 bp, Homo sapien
gatgcttatgtgctagcaggccctc

SEQ ID NO: 2821009 - DNA, 25 bp, Homo sapien
agcaccagaactctgacaaatgacg

SEQ ID NO: 2821010 - DNA, 25 bp, Homo sapien
ggggtccaggatgggtcactatcat

SEQ ID NO: 2821011 - DNA, 25 bp, Homo sapien
tgtcaaatcccaatgccaaaatctg

SEQ ID NO: 2821012 - DNA, 25 bp, Homo sapien
tcccaatgccaaaatctgcgaatat

SEQ ID NO: 2821013 - DNA, 25 bp, Homo sapien
gaaaggcagtgtcaaatcccaatgc

SEQ ID NO: 2821014 - DNA, 25 bp, Homo sapien
gcagaggaaaggcagtgtcaaatcc

SEQ ID NO: 2821015 - DNA, 25 bp, Homo sapien
taaaaagctcggcaactcctcagac

SEQ ID NO: 2821016 - DNA, 25 bp, Homo sapien
caagcctgctcactgttggatagct

SEQ ID NO: 2821017 - DNA, 25 bp, Homo sapien
caagctcccagtgtattcagagaga

SEQ ID NO: 2821018 - DNA, 25 bp, Homo sapien
cattggtctagttccacaagtagga

SEQ ID NO: 2821019 - DNA, 25 bp, Homo sapien
gagcagtcaccttttgaactgctgt

SEQ ID NO: 2821020 - DNA, 25 bp, Homo sapien
tcagaagctctatatggggtcacat

SEQ ID NO: 2821021 - DNA, 25 bp, Homo sapien
aatgcattgacttgacctcttcccc

SEQ ID NO: 2821022 - DNA, 25 bp, Homo sapien
ttccccaagagcagtcaccttttga

SEQ ID NO: 2821023 - DNA, 25 bp, Homo sapien
ttaagctgaagagtgggtgtttggc

SEQ ID NO: 2821024 - DNA, 25 bp, Homo sapien
tgggcgttctgcatccagaactgag

SEQ ID NO: 2821025 - DNA, 25 bp, Homo sapien
tacatgcgtccctaaagctttggct

SEQ ID NO: 2821026 - DNA, 25 bp, Homo sapien
gcaccgagtacatgcgtccctaaag

SEQ ID NO: 2821027 - DNA, 25 bp, Homo sapien
taatttagctattcacagagtggca

SEQ ID NO: 2821028 - DNA, 25 bp, Homo sapien
tgcttatcttaagacagaacagacc

SEQ ID NO: 2821029 - DNA, 25 bp, Homo sapien
tacttgagatggtcaaactttgatg

SEQ ID NO: 2821030 - DNA, 25 bp, Homo sapien
gaaaggtcctagatggttctcaaca

SEQ ID NO: 2821031 - DNA, 25 bp, Homo sapien
cataaagtgtagatggcattagtgc

SEQ ID NO: 2821032 - DNA, 25 bp, Homo sapien
cattagtgcagcaaaggattctggc

SEQ ID NO: 2821033 - DNA, 25 bp, Homo sapien
gcagctttcctagcaaggtggctag

SEQ ID NO: 2821034 - DNA, 25 bp, Homo sapien
gttatggaaccagataaggcagtgg

SEQ ID NO: 2821035 - DNA, 25 bp, Homo sapien
aagtggccactcaaccacatttcct

SEQ ID NO: 2821036 - DNA, 25 bp, Homo sapien
gacaagtggccactcaaccacattt

SEQ ID NO: 2821037 - DNA, 25 bp, Homo sapien
ctatgacaagtggccactcaaccac

SEQ ID NO: 2821038 - DNA, 25 bp, Homo sapien
atgacaagtggccactcaaccacat

SEQ ID NO: 2821039 - DNA, 25 bp, Homo sapien
tggcccttgcagagatagctaaact

SEQ ID NO: 2821040 - DNA, 25 bp, Homo sapien
actactgtcttctatcactgttgcg

SEQ ID NO: 2821041 - DNA, 25 bp, Homo sapien
gccaacaaccggattcctttctata

SEQ ID NO: 2821042 - DNA, 25 bp, Homo sapien
tatcactgttgcgttaacctcaaca

SEQ ID NO: 2821043 - DNA, 25 bp, Homo sapien
tatcaggtgcattatctgctcatca

SEQ ID NO: 2821044 - DNA, 25 bp, Homo sapien
ccacgcagatatgttgctctccaag

SEQ ID NO: 2821045 - DNA, 25 bp, Homo sapien
agttgccacgcagatatgttgctct

SEQ ID NO: 2821046 - DNA, 25 bp, Homo sapien
caaggaccccattccctatcaggtg

SEQ ID NO: 2821047 - DNA, 25 bp, Homo sapien
tataaagtactcatgacacacactg

SEQ ID NO: 2821048 - DNA, 25 bp, Homo sapien
aaatccttagagtccactgatggag

SEQ ID NO: 2821049 - DNA, 25 bp, Homo sapien
cacgcccagcttatagcagtttggt

SEQ ID NO: 2821050 - DNA, 25 bp, Homo sapien
ccaactgaaatagatgggcaaacca

SEQ ID NO: 2821051 - DNA, 25 bp, Homo sapien
cccattaccatgtgcatggccatct

SEQ ID NO: 2821052 - DNA, 25 bp, Homo sapien
ccccattaccatgtgcatggccatc

SEQ ID NO: 2821053 - DNA, 25 bp, Homo sapien
agccccattaccatgtgcatggcca

SEQ ID NO: 2821054 - DNA, 25 bp, Homo sapien
gccccattaccatgtgcatggccat

SEQ ID NO: 2821055 - DNA, 25 bp, Homo sapien
ctggtctcttcccatccaatgttag

SEQ ID NO: 2821056 - DNA, 25 bp, Homo sapien
ttagaagtgggaaaggctggtctcc

SEQ ID NO: 2821057 - DNA, 25 bp, Homo sapien
tcccatccaatgttagaagtgggaa

SEQ ID NO: 2821058 - DNA, 25 bp, Homo sapien
tagaagtgggaaaggctggtctccc

SEQ ID NO: 2821059 - DNA, 25 bp, Homo sapien
tgggctttccttctgtcattctctt

SEQ ID NO: 2821060 - DNA, 25 bp, Homo sapien
tcttgggtttgtgagcctgggcttt

SEQ ID NO: 2821061 - DNA, 25 bp, Homo sapien
tctatctcttcataggaataagagg

SEQ ID NO: 2821062 - DNA, 25 bp, Homo sapien
tcttcataggaataagaggaggtcc

SEQ ID NO: 2821063 - DNA, 25 bp, Homo sapien
cagctctgtgggtcaagatgacttg

SEQ ID NO: 2821064 - DNA, 25 bp, Homo sapien
aagatgacttgacagtgaaccacga

SEQ ID NO: 2821065 - DNA, 25 bp, Homo sapien
gacagtgaaccacgagttgctgtga

SEQ ID NO: 2821066 - DNA, 25 bp, Homo sapien
gttgctgtgaggatacatcactgcc

SEQ ID NO: 2821067 - DNA, 25 bp, Homo sapien
cagtaaagcgcatacaattttccct

SEQ ID NO: 2821068 - DNA, 25 bp, Homo sapien
gccaccaagccaggaaatcttttgg

SEQ ID NO: 2821069 - DNA, 25 bp, Homo sapien
cttggggaatacaagggttcctgca

SEQ ID NO: 2821070 - DNA, 25 bp, Homo sapien
caggaaatcttttggtgaccactcc

SEQ ID NO: 2821071 - DNA, 25 bp, Homo sapien
ccttgcccaagaggtgtggggatgg

SEQ ID NO: 2821072 - DNA, 25 bp, Homo sapien
cctccttgcccaagaggtgtgggga

SEQ ID NO: 2821073 - DNA, 25 bp, Homo sapien
gacatgtgctctggtcctccttgcc

SEQ ID NO: 2821074 - DNA, 25 bp, Homo sapien
cttgacatgtgctctggtcctcctt

SEQ ID NO: 2821075 - DNA, 25 bp, Homo sapien
tctgttctctcgtctctgttcaacg

SEQ ID NO: 2821076 - DNA, 25 bp, Homo sapien
cgtctctgttcaacgcagttaggca

SEQ ID NO: 2821077 - DNA, 25 bp, Homo sapien
tcaacgcagttaggcagatctgagg

SEQ ID NO: 2821078 - DNA, 25 bp, Homo sapien
gatctgagggtgctgcggagagtat

SEQ ID NO: 2821079 - DNA, 25 bp, Homo sapien
tgagagcctttgtgtagtgggcact

SEQ ID NO: 2821080 - DNA, 25 bp, Homo sapien
caaagatacgtaaaacagagttcag

SEQ ID NO: 2821081 - DNA, 25 bp, Homo sapien
tactccattaattcaaatgagagcc

SEQ ID NO: 2821082 - DNA, 25 bp, Homo sapien
tagtgggcactgtagttggaaccaa

SEQ ID NO: 2821083 - DNA, 25 bp, Homo sapien
gacggtgccgatggcaattccactg

SEQ ID NO: 2821084 - DNA, 25 bp, Homo sapien
ggtgccgatggcaattccactgggt

SEQ ID NO: 2821085 - DNA, 25 bp, Homo sapien
gccgatggcaattccactgggttcc

SEQ ID NO: 2821086 - DNA, 25 bp, Homo sapien
tcagacggtgccgatggcaattcca

SEQ ID NO: 2821087 - DNA, 25 bp, Homo sapien
ttgagcgttgttgttctcttctcac

SEQ ID NO: 2821088 - DNA, 25 bp, Homo sapien
ctatgtttgagcgttgttgttctct

SEQ ID NO: 2821089 - DNA, 25 bp, Homo sapien
atgtttgagcgttgttgttctcttc

SEQ ID NO: 2821090 - DNA, 25 bp, Homo sapien
gtttgagcgttgttgttctcttctc

SEQ ID NO: 2821091 - DNA, 25 bp, Homo sapien
ggctcttgtagcacacatttgacat

SEQ ID NO: 2821092 - DNA, 25 bp, Homo sapien
tagcacagggataaagtagggcagg

SEQ ID NO: 2821093 - DNA, 25 bp, Homo sapien
gtagcacacatttgacattagcaca

SEQ ID NO: 2821094 - DNA, 25 bp, Homo sapien
gccataatgtgatataccctatgac

SEQ ID NO: 2821095 - DNA, 25 bp, Homo sapien
tccgctgaaaaagtatgctcataga

SEQ ID NO: 2821096 - DNA, 25 bp, Homo sapien
tgctgtcacacgcaatgccattgct

SEQ ID NO: 2821097 - DNA, 25 bp, Homo sapien
tgataagccaaagtgttgctgtcac

SEQ ID NO: 2821098 - DNA, 25 bp, Homo sapien
tgcctctttcctagggtctctgcaa

SEQ ID NO: 2821099 - DNA, 25 bp, Homo sapien
caatcagaggcctcgaggaactaag

SEQ ID NO: 2821100 - DNA, 25 bp, Homo sapien
taaagcaatcagaggcctcgaggaa

SEQ ID NO: 2821101 - DNA, 25 bp, Homo sapien
gcctcgaggaactaagtttagcagg

SEQ ID NO: 2821102 - DNA, 25 bp, Homo sapien
taaacattaaagcaatcagaggcct

SEQ ID NO: 2821103 - DNA, 25 bp, Homo sapien
tttcagtacatctagcccaaaactg

SEQ ID NO: 2821104 - DNA, 25 bp, Homo sapien
cattttcagtacatctagcccaaaa

SEQ ID NO: 2821105 - DNA, 25 bp, Homo sapien
tacatctagcccaaaactggcactc

SEQ ID NO: 2821106 - DNA, 25 bp, Homo sapien
tcagtacatctagcccaaaactggc

SEQ ID NO: 2821107 - DNA, 25 bp, Homo sapien
agaccttccccatgtgaatcacaaa

SEQ ID NO: 2821108 - DNA, 25 bp, Homo sapien
caggccaaggactcctagaccttcc

SEQ ID NO: 2821109 - DNA, 25 bp, Homo sapien
cccatgtgaatcacaaactccttgc

SEQ ID NO: 2821110 - DNA, 25 bp, Homo sapien
ctagaccttccccatgtgaatcaca

SEQ ID NO: 2821111 - DNA, 25 bp, Homo sapien
catgaatatatgctccatggagtcc

SEQ ID NO: 2821112 - DNA, 25 bp, Homo sapien
gatcttctaacacaattacagtaag

SEQ ID NO: 2821113 - DNA, 25 bp, Homo sapien
aagaggataagaatcactacccagg

SEQ ID NO: 2821114 - DNA, 25 bp, Homo sapien
tacccaggaaacctataccaggcac

SEQ ID NO: 2821115 - DNA, 25 bp, Homo sapien
atgtaactggaaaggcaggagccat

SEQ ID NO: 2821116 - DNA, 25 bp, Homo sapien
aagggatgaatgtaactggaaaggc

SEQ ID NO: 2821117 - DNA, 25 bp, Homo sapien
atgaatgtaactggaaaggcaggag

SEQ ID NO: 2821118 - DNA, 25 bp, Homo sapien
gaatgtaactggaaaggcaggagcc

SEQ ID NO: 2821119 - DNA, 25 bp, Homo sapien
gatgcgacacactgccggtgattta

SEQ ID NO: 2821120 - DNA, 25 bp, Homo sapien
tcattgattagtctcagctccgcga

SEQ ID NO: 2821121 - DNA, 25 bp, Homo sapien
tgcaaggctctcatagaacccagac

SEQ ID NO: 2821122 - DNA, 25 bp, Homo sapien
ctttgatgttggctggatgcgacac

SEQ ID NO: 2821123 - DNA, 25 bp, Homo sapien
tctgtagtatgaataccacagacct

SEQ ID NO: 2821124 - DNA, 25 bp, Homo sapien
cttgaccacattccctaaaagaaca

SEQ ID NO: 2821125 - DNA, 25 bp, Homo sapien
agacctcagttactacaggctttga

SEQ ID NO: 2821126 - DNA, 25 bp, Homo sapien
cacattccctaaaagaacagagaac

SEQ ID NO: 2821127 - DNA, 25 bp, Homo sapien
aagcacagtgttgagagtcgcccaa

SEQ ID NO: 2821128 - DNA, 25 bp, Homo sapien
cagatgctgaactaaagccctggaa

SEQ ID NO: 2821129 - DNA, 25 bp, Homo sapien
caggagggagctttacaactcagta

SEQ ID NO: 2821130 - DNA, 25 bp, Homo sapien
tgaatgagatatccaaggagtccca

SEQ ID NO: 2821131 - DNA, 25 bp, Homo sapien
acctgggttaatgccaatttttgct

SEQ ID NO: 2821132 - DNA, 25 bp, Homo sapien
tccacaccatatcagatttttgctt

SEQ ID NO: 2821133 - DNA, 25 bp, Homo sapien
cagaaagtgctagtaaagcaaaacc

SEQ ID NO: 2821134 - DNA, 25 bp, Homo sapien
tgctttatttccacaccatatcaga

SEQ ID NO: 2821135 - DNA, 25 bp, Homo sapien
taaaatccagtggtctatttgcgac

SEQ ID NO: 2821136 - DNA, 25 bp, Homo sapien
catcttttgagatagctgtgggtat

SEQ ID NO: 2821137 - DNA, 25 bp, Homo sapien
gaaaatgaagggtgtcttgcaatca

SEQ ID NO: 2821138 - DNA, 25 bp, Homo sapien
ccatgtggcctgcattcattataaa

SEQ ID NO: 2821139 - DNA, 25 bp, Homo sapien
aagtgggactcttgtttacccagca

SEQ ID NO: 2821140 - DNA, 25 bp, Homo sapien
cagagtcagtccttgggagttggca

SEQ ID NO: 2821141 - DNA, 25 bp, Homo sapien
acgatcaatgatgccacttacaaac

SEQ ID NO: 2821142 - DNA, 25 bp, Homo sapien
tcttacacatacagccagagtcagt

SEQ ID NO: 2821143 - DNA, 25 bp, Homo sapien
aacaccagcaggcaagttccctccc

SEQ ID NO: 2821144 - DNA, 25 bp, Homo sapien
caagttccctccctggcgtcagggc

SEQ ID NO: 2821145 - DNA, 25 bp, Homo sapien
taacaatgtgtcgtcccctttgcac

SEQ ID NO: 2821146 - DNA, 25 bp, Homo sapien
tgttcatctttaggtcatccacgcc

SEQ ID NO: 2821147 - DNA, 25 bp, Homo sapien
cctaggtacccaagataacaatgtg

SEQ ID NO: 2821148 - DNA, 25 bp, Homo sapien
tgctgacttcggtggctggactaag

SEQ ID NO: 2821149 - DNA, 25 bp, Homo sapien
aaacctaagaccatcctagcaacca

SEQ ID NO: 2821150 - DNA, 25 bp, Homo sapien
caaaaacctaagaccatcctagcaa

SEQ ID NO: 2821151 - DNA, 25 bp, Homo sapien
acctaagaccatcctagcaaccaaa

SEQ ID NO: 2821152 - DNA, 25 bp, Homo sapien
acaaaaacctaagaccatcctagca

SEQ ID NO: 2821153 - DNA, 25 bp, Homo sapien
tggctgggcctatgtgtactcgtca

SEQ ID NO: 2821154 - DNA, 25 bp, Homo sapien
tagagatggtctcacggtgttaccg

SEQ ID NO: 2821155 - DNA, 25 bp, Homo sapien
cctgggtagaacaacagatggtcct

SEQ ID NO: 2821156 - DNA, 25 bp, Homo sapien
tgattctggccccaaagggtaacca

SEQ ID NO: 2821157 - DNA, 25 bp, Homo sapien
atgcgatattggcatctactgtgga

SEQ ID NO: 2821158 - DNA, 25 bp, Homo sapien
tattggcatctactgtggagagact

SEQ ID NO: 2821159 - DNA, 25 bp, Homo sapien
tggagagactggaataaactatatg

SEQ ID NO: 2821160 - DNA, 25 bp, Homo sapien
gagactggaataaactatatgtcta

SEQ ID NO: 2821161 - DNA, 25 bp, Homo sapien
aaaatcccttcaaatctttatgaca

SEQ ID NO: 2821162 - DNA, 25 bp, Homo sapien
gctttcaaaaaagcgttcagacttg

SEQ ID NO: 2821163 - DNA, 25 bp, Homo sapien
caaatcactagtttatccgtctaca

SEQ ID NO: 2821164 - DNA, 25 bp, Homo sapien
ggaacagctatagccaagaaaaaag

SEQ ID NO: 2821165 - DNA, 25 bp, Homo sapien
gagtactaggtgcagaggccaacac

SEQ ID NO: 2821166 - DNA, 25 bp, Homo sapien
ctcctgggcaatcagagagatggca

SEQ ID NO: 2821167 - DNA, 25 bp, Homo sapien
tcagtggttgaccaaagcttgctgc

SEQ ID NO: 2821168 - DNA, 25 bp, Homo sapien
tacagaaggagtaagcccgcaagtc

SEQ ID NO: 2821169 - DNA, 25 bp, Homo sapien
gtaaatactaaagttattgcccatg

SEQ ID NO: 2821170 - DNA, 25 bp, Homo sapien
aggtatgaaccacacactctcttgc

SEQ ID NO: 2821171 - DNA, 25 bp, Homo sapien
tattgcccatgttaaattgaactga

SEQ ID NO: 2821172 - DNA, 25 bp, Homo sapien
tgagatttagggtccacaaggtatg

SEQ ID NO: 2821173 - DNA, 25 bp, Homo sapien
tgctcaaggacgtgccaataggact

SEQ ID NO: 2821174 - DNA, 25 bp, Homo sapien
aatgcagggactacaaagcactctc

SEQ ID NO: 2821175 - DNA, 25 bp, Homo sapien
tcatggtacctaaaactggctcgaa

SEQ ID NO: 2821176 - DNA, 25 bp, Homo sapien
tgagcagacaccgatgagaagaaaa

SEQ ID NO: 2821177 - DNA, 25 bp, Homo sapien
gcatgacacttaagagcaccaggca

SEQ ID NO: 2821178 - DNA, 25 bp, Homo sapien
gccgttaaggattagcaaatgctct

SEQ ID NO: 2821179 - DNA, 25 bp, Homo sapien
aggcagggcccaatagcattcacca

SEQ ID NO: 2821180 - DNA, 25 bp, Homo sapien
tatttcaaaccggagcaggaacagc

SEQ ID NO: 2821181 - DNA, 25 bp, Homo sapien
gacatcaccattatctgccttccgg

SEQ ID NO: 2821182 - DNA, 25 bp, Homo sapien
ccataaatggctcagtgatggaacc

SEQ ID NO: 2821183 - DNA, 25 bp, Homo sapien
gaaacacggactacttatgctactt

SEQ ID NO: 2821184 - DNA, 25 bp, Homo sapien
cttcagccatactcaagaaacacgg

SEQ ID NO: 2821185 - DNA, 25 bp, Homo sapien
taatcttcaattgcgctgcctccag

SEQ ID NO: 2821186 - DNA, 25 bp, Homo sapien
gactgtcgtgagtaaaacgcctcgc

SEQ ID NO: 2821187 - DNA, 25 bp, Homo sapien
ggctttgggcatcttaccgctcaca

SEQ ID NO: 2821188 - DNA, 25 bp, Homo sapien
gcttaaactcatcgggaatgtccgt

SEQ ID NO: 2821189 - DNA, 25 bp, Homo sapien
ctcactcagctcggccgaggagtcg

SEQ ID NO: 2821190 - DNA, 25 bp, Homo sapien
gaggagtcgtttccatatttcatgg

SEQ ID NO: 2821191 - DNA, 25 bp, Homo sapien
gctcggccgaggagtcgtttccata

SEQ ID NO: 2821192 - DNA, 25 bp, Homo sapien
atttcatggcaactccggaattcat

SEQ ID NO: 2821193 - DNA, 25 bp, Homo sapien
ttaaaaagagcagccgtggctcgcg

SEQ ID NO: 2821194 - DNA, 25 bp, Homo sapien
gtctagacagccattttcacccagg

SEQ ID NO: 2821195 - DNA, 25 bp, Homo sapien
tcgcgtttcacggacgagccattgc

SEQ ID NO: 2821196 - DNA, 25 bp, Homo sapien
taagagttggacttcacaggctcaa

SEQ ID NO: 2821197 - DNA, 25 bp, Homo sapien
tcctgaggccttgtcttctctaaag

SEQ ID NO: 2821198 - DNA, 25 bp, Homo sapien
tgaggccttgtcttctctaaagccc

SEQ ID NO: 2821199 - DNA, 25 bp, Homo sapien
aggccttgtcttctctaaagcccag

SEQ ID NO: 2821200 - DNA, 25 bp, Homo sapien
tcaggcaatagcctggtgcttgggt

SEQ ID NO: 2821201 - DNA, 25 bp, Homo sapien
cataacggacatcatttgctcaagg

SEQ ID NO: 2821202 - DNA, 25 bp, Homo sapien
aatggcctgccccataacggacatc

SEQ ID NO: 2821203 - DNA, 25 bp, Homo sapien
tgccccataacggacatcatttgct

SEQ ID NO: 2821204 - DNA, 25 bp, Homo sapien
accagcctcaatggcctgccccata

SEQ ID NO: 2821205 - DNA, 25 bp, Homo sapien
tggcattgtagcatatggccatgta

SEQ ID NO: 2821206 - DNA, 25 bp, Homo sapien
aaatggcattgtagcatatggccat

SEQ ID NO: 2821207 - DNA, 25 bp, Homo sapien
gcattgtagcatatggccatgtaaa

SEQ ID NO: 2821208 - DNA, 25 bp, Homo sapien
tatggccatgtaaattgtaaatgca

SEQ ID NO: 2821209 - DNA, 25 bp, Homo sapien
aaagatgaggtcacagaggcggtct

SEQ ID NO: 2821210 - DNA, 25 bp, Homo sapien
cccaggagttctaggttgtactgca

SEQ ID NO: 2821211 - DNA, 25 bp, Homo sapien
tttcaaaaatctcacgtgggcctgg

SEQ ID NO: 2821212 - DNA, 25 bp, Homo sapien
tcctgggcaccatatcgagacaatg

SEQ ID NO: 2821213 - DNA, 25 bp, Homo sapien
catttaatgctaatcctccttgttg

SEQ ID NO: 2821214 - DNA, 25 bp, Homo sapien
tctctgatagatgcctctaactgca

SEQ ID NO: 2821215 - DNA, 25 bp, Homo sapien
cattctcggcaattaggatgaagtc

SEQ ID NO: 2821216 - DNA, 25 bp, Homo sapien
tttaagtctagctgaaaacaacctc

SEQ ID NO: 2821217 - DNA, 25 bp, Homo sapien
atacagagataggaaacagccaact

SEQ ID NO: 2821218 - DNA, 25 bp, Homo sapien
tggaaccctccagagaaggtaccat

SEQ ID NO: 2821219 - DNA, 25 bp, Homo sapien
aaactggtcggccatgaacctggaa

SEQ ID NO: 2821220 - DNA, 25 bp, Homo sapien
tgatttctgctataacccatcctgt

SEQ ID NO: 2821221 - DNA, 25 bp, Homo sapien
tcacccaaaatggccaggccatcgg

SEQ ID NO: 2821222 - DNA, 25 bp, Homo sapien
ccaaaatggccaggccatcggccac

SEQ ID NO: 2821223 - DNA, 25 bp, Homo sapien
cccaaaatggccaggccatcggcca

SEQ ID NO: 2821224 - DNA, 25 bp, Homo sapien
acccaaaatggccaggccatcggcc

SEQ ID NO: 2821225 - DNA, 25 bp, Homo sapien
catttggcagccctgacttagaaga

SEQ ID NO: 2821226 - DNA, 25 bp, Homo sapien
atttggcagccctgacttagaagag

SEQ ID NO: 2821227 - DNA, 25 bp, Homo sapien
tagatagcttcctcctacagagttg

SEQ ID NO: 2821228 - DNA, 25 bp, Homo sapien
cttctggagggctgactggctctgc

SEQ ID NO: 2821229 - DNA, 25 bp, Homo sapien
aagagcttccgccatactcgagcag

SEQ ID NO: 2821230 - DNA, 25 bp, Homo sapien
tggcaccagagtcgtattcccagct

SEQ ID NO: 2821231 - DNA, 25 bp, Homo sapien
gagaaaatgaaaagacatttccttc

SEQ ID NO: 2821232 - DNA, 25 bp, Homo sapien
atgaaaagacatttccttcattagc

SEQ ID NO: 2821233 - DNA, 25 bp, Homo sapien
gaaaatgaaaagacatttccttcat

SEQ ID NO: 2821234 - DNA, 25 bp, Homo sapien
ctaagtccgagagaagcagagaaaa

SEQ ID NO: 2821235 - DNA, 25 bp, Homo sapien
ccaggctgcatgctaagcgctttct

SEQ ID NO: 2821236 - DNA, 25 bp, Homo sapien
gcaatgatttggaacctcctaagcc

SEQ ID NO: 2821237 - DNA, 25 bp, Homo sapien
caactgtcccatgaatatgtgctcc

SEQ ID NO: 2821238 - DNA, 25 bp, Homo sapien
tcagaacacatgtgatgcccaggct

SEQ ID NO: 2821239 - DNA, 25 bp, Homo sapien
gaaagaccgtcttgaatcaccaaca

SEQ ID NO: 2821240 - DNA, 25 bp, Homo sapien
taaccatcaggtaagcaatcacagt

SEQ ID NO: 2821241 - DNA, 25 bp, Homo sapien
caatcatgcccctgtgcaggaatac

SEQ ID NO: 2821242 - DNA, 25 bp, Homo sapien
tcccgtactctccagcagtggttat

SEQ ID NO: 2821243 - DNA, 25 bp, Homo sapien
gagttctcgaacaaatgacaaggcc

SEQ ID NO: 2821244 - DNA, 25 bp, Homo sapien
gttctcgaacaaatgacaaggccat

SEQ ID NO: 2821245 - DNA, 25 bp, Homo sapien
tgagttctcgaacaaatgacaaggc

SEQ ID NO: 2821246 - DNA, 25 bp, Homo sapien
agttctcgaacaaatgacaaggcca

SEQ ID NO: 2821247 - DNA, 25 bp, Homo sapien
tgggggttcatgagcactagctttg

SEQ ID NO: 2821248 - DNA, 25 bp, Homo sapien
gggttcatgagcactagctttggct

SEQ ID NO: 2821249 - DNA, 25 bp, Homo sapien
gttcatgagcactagctttggcttt

SEQ ID NO: 2821250 - DNA, 25 bp, Homo sapien
tctgggggttcatgagcactagctt

SEQ ID NO: 2821251 - DNA, 25 bp, Homo sapien
aataaaccctgacttggccaccttg

SEQ ID NO: 2821252 - DNA, 25 bp, Homo sapien
taggtagacgtcaccagtgaagctg

SEQ ID NO: 2821253 - DNA, 25 bp, Homo sapien
tgctacctgtgcaaagcagaggccc

SEQ ID NO: 2821254 - DNA, 25 bp, Homo sapien
ggacatgcccttagctagcccagta

SEQ ID NO: 2821255 - DNA, 25 bp, Homo sapien
cttctgttcccagagtccataaggt

SEQ ID NO: 2821256 - DNA, 25 bp, Homo sapien
ctgttcccagagtccataaggtcat

SEQ ID NO: 2821257 - DNA, 25 bp, Homo sapien
cgctgaaatttgtcttctgttccca

SEQ ID NO: 2821258 - DNA, 25 bp, Homo sapien
ctgagaagacgctgaaatttgtctt

SEQ ID NO: 2821259 - DNA, 25 bp, Homo sapien
gaggttcagacaataagtaagagtg

SEQ ID NO: 2821260 - DNA, 25 bp, Homo sapien
gacaataagtaagagtggcttggtg

SEQ ID NO: 2821261 - DNA, 25 bp, Homo sapien
gttcagacaataagtaagagtggct

SEQ ID NO: 2821262 - DNA, 25 bp, Homo sapien
cagacaataagtaagagtggcttgg

SEQ ID NO: 2821263 - DNA, 25 bp, Homo sapien
gtttgctgcttgtcaccaaaaagcc

SEQ ID NO: 2821264 - DNA, 25 bp, Homo sapien
tcttcttcaaagtattagagttggg

SEQ ID NO: 2821265 - DNA, 25 bp, Homo sapien
ttcttcaaagtattagagttgggtg

SEQ ID NO: 2821266 - DNA, 25 bp, Homo sapien
cttcttcttcaaagtattagagttg

SEQ ID NO: 2821267 - DNA, 25 bp, Homo sapien
gctgcatgcggcatcttgtgaaatc

SEQ ID NO: 2821268 - DNA, 25 bp, Homo sapien
cttcctaatttctcgaacaagctgc

SEQ ID NO: 2821269 - DNA, 25 bp, Homo sapien
tgttgtcactgctcgtgggccagga

SEQ ID NO: 2821270 - DNA, 25 bp, Homo sapien
tgggccaggaagcaattctatccct

SEQ ID NO: 2821271 - DNA, 25 bp, Homo sapien
tggcgacagaccattagcaagtcat

SEQ ID NO: 2821272 - DNA, 25 bp, Homo sapien
ctggcgacagaccattagcaagtca

SEQ ID NO: 2821273 - DNA, 25 bp, Homo sapien
gcgacagaccattagcaagtcattt

SEQ ID NO: 2821274 - DNA, 25 bp, Homo sapien
ggcgacagaccattagcaagtcatt

SEQ ID NO: 2821275 - DNA, 25 bp, Homo sapien
gaatcgcagggtatttccatacgcc

SEQ ID NO: 2821276 - DNA, 25 bp, Homo sapien
gagacagtatgaggcacagcctgga

SEQ ID NO: 2821277 - DNA, 25 bp, Homo sapien
tagcatctcggacattaataacagg

SEQ ID NO: 2821278 - DNA, 25 bp, Homo sapien
aataggtggaggctatttccctgcc

SEQ ID NO: 2821279 - DNA, 25 bp, Homo sapien
cagcaacaatgccagtattagccat

SEQ ID NO: 2821280 - DNA, 25 bp, Homo sapien
aacagcaacaatgccagtattagcc

SEQ ID NO: 2821281 - DNA, 25 bp, Homo sapien
gaacagcaacaatgccagtattagc

SEQ ID NO: 2821282 - DNA, 25 bp, Homo sapien
acagcaacaatgccagtattagcca

SEQ ID NO: 2821283 - DNA, 25 bp, Homo sapien
ccttgttccctttcaatgcctcctg

SEQ ID NO: 2821284 - DNA, 25 bp, Homo sapien
gagataaggatcacgctcaggttga

SEQ ID NO: 2821285 - DNA, 25 bp, Homo sapien
tggcctgagataaggatcacgctca

SEQ ID NO: 2821286 - DNA, 25 bp, Homo sapien
tctggcctgagataaggatcacgct

SEQ ID NO: 2821287 - DNA, 25 bp, Homo sapien
cctgagataaggatcacgctcaggt

SEQ ID NO: 2821288 - DNA, 25 bp, Homo sapien
ttctccagttgccatgctactcctg

SEQ ID NO: 2821289 - DNA, 25 bp, Homo sapien
tattatcgctgcaaggtttgaacag

SEQ ID NO: 2821290 - DNA, 25 bp, Homo sapien
cctgaggatctaggataatactgaa

SEQ ID NO: 2821291 - DNA, 25 bp, Homo sapien
agtttatggatcttgcccagagctg

SEQ ID NO: 2821292 - DNA, 25 bp, Homo sapien
aaggaggataaatggtgcccaaggt

SEQ ID NO: 2821293 - DNA, 25 bp, Homo sapien
agcagggtcacgcaactgccccggg

SEQ ID NO: 2821294 - DNA, 25 bp, Homo sapien
tgtcactgagccgttgcggccagtg

SEQ ID NO: 2821295 - DNA, 25 bp, Homo sapien
ccaaggtggacagcggtgccttcct

SEQ ID NO: 2821296 - DNA, 25 bp, Homo sapien
cacctaggggccacgggagaaccat

SEQ ID NO: 2821297 - DNA, 25 bp, Homo sapien
ggagtcgcacgactgtctcagcctt

SEQ ID NO: 2821298 - DNA, 25 bp, Homo sapien
ggctttaagccgtgagctccatctc

SEQ ID NO: 2821299 - DNA, 25 bp, Homo sapien
cagccttggatttgactttggcctc

SEQ ID NO: 2821300 - DNA, 25 bp, Homo sapien
gcttgaggacagcagcgtcatccat

SEQ ID NO: 2821301 - DNA, 25 bp, Homo sapien
gaacttcttgcgagcttcgtcctca

SEQ ID NO: 2821302 - DNA, 25 bp, Homo sapien
tctgtctccatagtcgacggcttgc

SEQ ID NO: 2821303 - DNA, 25 bp, Homo sapien
gcttaatgccattcgaccactgtca

SEQ ID NO: 2821304 - DNA, 25 bp, Homo sapien
tgccaggaatgcccagtgcctctga

SEQ ID NO: 2821305 - DNA, 25 bp, Homo sapien
aatgcccagtgcctctgaggctgcc

SEQ ID NO: 2821306 - DNA, 25 bp, Homo sapien
tgcccagtgcctctgaggctgccct

SEQ ID NO: 2821307 - DNA, 25 bp, Homo sapien
ggtgccaggaatgcccagtgcctct

SEQ ID NO: 2821308 - DNA, 25 bp, Homo sapien
cccgaggcgcatgggccagcagtgt

SEQ ID NO: 2821309 - DNA, 25 bp, Homo sapien
cctggatagagagtcctttgggctg

SEQ ID NO: 2821310 - DNA, 25 bp, Homo sapien
agcagtgtgctcatttacatcctgg

SEQ ID NO: 2821311 - DNA, 25 bp, Homo sapien
ttacatcctggatagagagtccttt

SEQ ID NO: 2821312 - DNA, 25 bp, Homo sapien
tagaaatcatctagtccgaccacct

SEQ ID NO: 2821313 - DNA, 25 bp, Homo sapien
tcaaatgtaagtcctgcatgagaca

SEQ ID NO: 2821314 - DNA, 25 bp, Homo sapien
gcggcccaccgagagagagcatttt

SEQ ID NO: 2821315 - DNA, 25 bp, Homo sapien
cattgatgccaaaagtccagcagtg

SEQ ID NO: 2821316 - DNA, 25 bp, Homo sapien
caacgtgcactacttttgagtgtca

SEQ ID NO: 2821317 - DNA, 25 bp, Homo sapien
ggatgaaatcataatgagaggtgac

SEQ ID NO: 2821318 - DNA, 25 bp, Homo sapien
tcagatttggggtgcctaacctcta

SEQ ID NO: 2821319 - DNA, 25 bp, Homo sapien
aacctctatctcaaggcatctatga

SEQ ID NO: 2821320 - DNA, 25 bp, Homo sapien
taattatttggccaagccgggaggc

SEQ ID NO: 2821321 - DNA, 25 bp, Homo sapien
taaataccgcctctgtaggaagtgc

SEQ ID NO: 2821322 - DNA, 25 bp, Homo sapien
gaattcatgggttctgcggcacaag

SEQ ID NO: 2821323 - DNA, 25 bp, Homo sapien
caagtcttcaatggccggtgtcaac

SEQ ID NO: 2821324 - DNA, 25 bp, Homo sapien
tacgcgctctcggagtcgcggccaa

SEQ ID NO: 2821325 - DNA, 25 bp, Homo sapien
ggactgatctcgctcctgtcggttt

SEQ ID NO: 2821326 - DNA, 25 bp, Homo sapien
aacttttcccgcgagcttctgagca

SEQ ID NO: 2821327 - DNA, 25 bp, Homo sapien
gagcttctgagcaacttgccgcaag

SEQ ID NO: 2821328 - DNA, 25 bp, Homo sapien
cccgtcgccgtcgcacgtctggaag

SEQ ID NO: 2821329 - DNA, 25 bp, Homo sapien
ccgtcgcacgtctggaagaggcgcc

SEQ ID NO: 2821330 - DNA, 25 bp, Homo sapien
tggaagaggcgccgcatcctctcct

SEQ ID NO: 2821331 - DNA, 25 bp, Homo sapien
tcgccgtcgcacgtctggaagaggc

SEQ ID NO: 2821332 - DNA, 25 bp, Homo sapien
cgccgctgctggagctccccgcagc

SEQ ID NO: 2821333 - DNA, 25 bp, Homo sapien
ccgccgctgctggagctccccgcag

SEQ ID NO: 2821334 - DNA, 25 bp, Homo sapien
tgtcagcattgtgcatccggcaacg

SEQ ID NO: 2821335 - DNA, 25 bp, Homo sapien
gaacacaagaggaggcagaatacac

SEQ ID NO: 2821336 - DNA, 25 bp, Homo sapien
gaacttgcctgacaacggagcatgc

SEQ ID NO: 2821337 - DNA, 25 bp, Homo sapien
gctaagggtggcaacgggaacacaa

SEQ ID NO: 2821338 - DNA, 25 bp, Homo sapien
tccttctgcaaactcaaaacggtgc

SEQ ID NO: 2821339 - DNA, 25 bp, Homo sapien
tagccaccaatgagaaccggaatga

SEQ ID NO: 2821340 - DNA, 25 bp, Homo sapien
gattgttccgggttctgtacccata

SEQ ID NO: 2821341 - DNA, 25 bp, Homo sapien
tttccagagaagctatataaacact

SEQ ID NO: 2821342 - DNA, 25 bp, Homo sapien
caacacctgcgaattataattcaag

SEQ ID NO: 2821343 - DNA, 25 bp, Homo sapien
aagtaactacagaataagaccaact

SEQ ID NO: 2821344 - DNA, 25 bp, Homo sapien
taagagataccagattcccataatt

SEQ ID NO: 2821345 - DNA, 25 bp, Homo sapien
tccctcaacacctgcgaattataat

SEQ ID NO: 2821346 - DNA, 25 bp, Homo sapien
gaagagctgtgtgattacatgacaa

SEQ ID NO: 2821347 - DNA, 25 bp, Homo sapien
tcttaagctaatgtctccattgcag

SEQ ID NO: 2821348 - DNA, 25 bp, Homo sapien
atcaggatcttcttgctagcacagc

SEQ ID NO: 2821349 - DNA, 25 bp, Homo sapien
cgtatgtactaccaataattgcaca

SEQ ID NO: 2821350 - DNA, 25 bp, Homo sapien
tctgcctggatatgacgaaattgtt

SEQ ID NO: 2821351 - DNA, 25 bp, Homo sapien
gaaattgttggactgagagatcgca

SEQ ID NO: 2821352 - DNA, 25 bp, Homo sapien
tgacaagcggtttgctgacagtaca

SEQ ID NO: 2821353 - DNA, 25 bp, Homo sapien
gacagtacacataggtaagggctaa

SEQ ID NO: 2821354 - DNA, 25 bp, Homo sapien
atcagggacctgtacaaagaagcag

SEQ ID NO: 2821355 - DNA, 25 bp, Homo sapien
tcctgggggttattggcctgttgct

SEQ ID NO: 2821356 - DNA, 25 bp, Homo sapien
catccagactgcctgtatagccatc

SEQ ID NO: 2821357 - DNA, 25 bp, Homo sapien
aggaatgagatcagggacctgtaca

SEQ ID NO: 2821358 - DNA, 25 bp, Homo sapien
tgtaatccttttgcaaacaacagtt

SEQ ID NO: 2821359 - DNA, 25 bp, Homo sapien
tatatcctcctttagaaagcttgca

SEQ ID NO: 2821360 - DNA, 25 bp, Homo sapien
tggtagtagaagctctagctgtaac

SEQ ID NO: 2821361 - DNA, 25 bp, Homo sapien
tgttgagttgattctggcctaaaac

SEQ ID NO: 2821362 - DNA, 25 bp, Homo sapien
ctaaatagacaggtttgatggcact

SEQ ID NO: 2821363 - DNA, 25 bp, Homo sapien
aacacgtgaaaaatcatgggtcaac

SEQ ID NO: 2821364 - DNA, 25 bp, Homo sapien
gcaacttgtgtttccctgataatgt

SEQ ID NO: 2821365 - DNA, 25 bp, Homo sapien
taaatccgtgcttgtgccaagtctc

SEQ ID NO: 2821366 - DNA, 25 bp, Homo sapien
tatagtacaattgttatagacaagg

SEQ ID NO: 2821367 - DNA, 25 bp, Homo sapien
caattgttatagacaagggttaagg

SEQ ID NO: 2821368 - DNA, 25 bp, Homo sapien
cagtgacatactaagatataacagg

SEQ ID NO: 2821369 - DNA, 25 bp, Homo sapien
caggtacatttcttgctgtccagga

SEQ ID NO: 2821370 - DNA, 25 bp, Homo sapien
tacttgtgtatttaatgaatactca

SEQ ID NO: 2821371 - DNA, 25 bp, Homo sapien
ctgagttacttgtgtatttaatgaa

SEQ ID NO: 2821372 - DNA, 25 bp, Homo sapien
atctgagttacttgtgtatttaatg

SEQ ID NO: 2821373 - DNA, 25 bp, Homo sapien
gagttacttgtgtatttaatgaata

SEQ ID NO: 2821374 - DNA, 25 bp, Homo sapien
tctatgtccactgtacacagttatg

SEQ ID NO: 2821375 - DNA, 25 bp, Homo sapien
gatttgactaattcttattctctaa

SEQ ID NO: 2821376 - DNA, 25 bp, Homo sapien
ttatttctatgtccactgtacacag

SEQ ID NO: 2821377 - DNA, 25 bp, Homo sapien
cacagttatgaatctaagatttgac

SEQ ID NO: 2821378 - DNA, 25 bp, Homo sapien
tctcccacaaaaggtctcacatctg

SEQ ID NO: 2821379 - DNA, 25 bp, Homo sapien
tctttccttcgatctcccacaaaag

SEQ ID NO: 2821380 - DNA, 25 bp, Homo sapien
ctcacatctgagaatttgtcatccc

SEQ ID NO: 2821381 - DNA, 25 bp, Homo sapien
acatctgagaatttgtcatcccaag

SEQ ID NO: 2821382 - DNA, 25 bp, Homo sapien
ggcagcacaggcaccgataggtgct

SEQ ID NO: 2821383 - DNA, 25 bp, Homo sapien
catcaatgggataactgacagctgg

SEQ ID NO: 2821384 - DNA, 25 bp, Homo sapien
gcaaaacgtcctttgaattcagctg

SEQ ID NO: 2821385 - DNA, 25 bp, Homo sapien
gaaacaggaagcactcgttgcagag

SEQ ID NO: 2821386 - DNA, 25 bp, Homo sapien
ctcctctgcaggatgagaacactgg

SEQ ID NO: 2821387 - DNA, 25 bp, Homo sapien
tctgcaggatgagaacactggttcc

SEQ ID NO: 2821388 - DNA, 25 bp, Homo sapien
tgcaggatgagaacactggttccca

SEQ ID NO: 2821389 - DNA, 25 bp, Homo sapien
ttagcaggacaggatgaaggccttg

SEQ ID NO: 2821390 - DNA, 25 bp, Homo sapien
ttatcactggtgaaagtgtgcctca

SEQ ID NO: 2821391 - DNA, 25 bp, Homo sapien
tggtgaaagtgtgcctcataggatt

SEQ ID NO: 2821392 - DNA, 25 bp, Homo sapien
aggaagaggatttatcactggtgaa

SEQ ID NO: 2821393 - DNA, 25 bp, Homo sapien
gatttatcactggtgaaagtgtgcc

SEQ ID NO: 2821394 - DNA, 25 bp, Homo sapien
gagtgtccaagttaacagctcatac

SEQ ID NO: 2821395 - DNA, 25 bp, Homo sapien
gtgtccaagttaacagctcatacat

SEQ ID NO: 2821396 - DNA, 25 bp, Homo sapien
gcgagtgagtgtccaagttaacagc

SEQ ID NO: 2821397 - DNA, 25 bp, Homo sapien
gagtgagtgtccaagttaacagctc

SEQ ID NO: 2821398 - DNA, 25 bp, Homo sapien
aatctttgaaaaaattcactggcat

SEQ ID NO: 2821399 - DNA, 25 bp, Homo sapien
ctaaatctttgaaaaaattcactgg

SEQ ID NO: 2821400 - DNA, 25 bp, Homo sapien
tgtctaaatctttgaaaaaattcac

SEQ ID NO: 2821401 - DNA, 25 bp, Homo sapien
ttgtctaaatctttgaaaaaattca

SEQ ID NO: 2821402 - DNA, 25 bp, Homo sapien
tgggctttttctgttataccgagtc

SEQ ID NO: 2821403 - DNA, 25 bp, Homo sapien
tgttcttgatttgactgatattgag

SEQ ID NO: 2821404 - DNA, 25 bp, Homo sapien
tggattcagatgcaagtcctagaag

SEQ ID NO: 2821405 - DNA, 25 bp, Homo sapien
catgggctttcccaaatggattcag

SEQ ID NO: 2821406 - DNA, 25 bp, Homo sapien
ttaaggttttacaggcttgatgtgg

SEQ ID NO: 2821407 - DNA, 25 bp, Homo sapien
ttgaggcagagatttcctgtgtcca

SEQ ID NO: 2821408 - DNA, 25 bp, Homo sapien
ttttgaggcagagatttcctgtgtc

SEQ ID NO: 2821409 - DNA, 25 bp, Homo sapien
ttacaggcttgatgtggactttaga

SEQ ID NO: 2821410 - DNA, 25 bp, Homo sapien
gccatcaaccattaactgtcgaata

SEQ ID NO: 2821411 - DNA, 25 bp, Homo sapien
caaccattaactgtcgaatatttcc

SEQ ID NO: 2821412 - DNA, 25 bp, Homo sapien
ccattaactgtcgaatatttcccat

SEQ ID NO: 2821413 - DNA, 25 bp, Homo sapien
catcaaccattaactgtcgaatatt

SEQ ID NO: 2821414 - DNA, 25 bp, Homo sapien
gctctgtatggcaggcatctaatga

SEQ ID NO: 2821415 - DNA, 25 bp, Homo sapien
ggcaggcatctaatgacagttctct

SEQ ID NO: 2821416 - DNA, 25 bp, Homo sapien
tgtatggcaggcatctaatgacagt

SEQ ID NO: 2821417 - DNA, 25 bp, Homo sapien
tatggcaggcatctaatgacagttc

SEQ ID NO: 2821418 - DNA, 25 bp, Homo sapien
tttccaagcagggaatcaggtggaa

SEQ ID NO: 2821419 - DNA, 25 bp, Homo sapien
cagcgggttaacctgtttattaatg

SEQ ID NO: 2821420 - DNA, 25 bp, Homo sapien
tataccatgcccagcgggttaacct

SEQ ID NO: 2821421 - DNA, 25 bp, Homo sapien
gtggtctgggacatttccaagcagg

SEQ ID NO: 2821422 - DNA, 25 bp, Homo sapien
gacatgcctttcactggacatcagc

SEQ ID NO: 2821423 - DNA, 25 bp, Homo sapien
catctggtgtaatatctctgtggaa

SEQ ID NO: 2821424 - DNA, 25 bp, Homo sapien
ttcttcaattatgaaacaacgcccg

SEQ ID NO: 2821425 - DNA, 25 bp, Homo sapien
tcctctgcggcttcatctggtgtaa

SEQ ID NO: 2821426 - DNA, 25 bp, Homo sapien
gagatgggtgcctgtgcttgtgtgt

SEQ ID NO: 2821427 - DNA, 25 bp, Homo sapien
agatgggtgcctgtgcttgtgtgtg

SEQ ID NO: 2821428 - DNA, 25 bp, Homo sapien
ttttagctgcttattgatcatttcc

SEQ ID NO: 2821429 - DNA, 25 bp, Homo sapien
cactagctttagtgccaggccacca

SEQ ID NO: 2821430 - DNA, 25 bp, Homo sapien
gaagagttgtagctcattctcagag

SEQ ID NO: 2821431 - DNA, 25 bp, Homo sapien
caggccaccacacttttagctgctt

SEQ ID NO: 2821432 - DNA, 25 bp, Homo sapien
gcactgcgctgtggcaggataacag

SEQ ID NO: 2821433 - DNA, 25 bp, Homo sapien
ggatttccccggcactgcgctgtgg

SEQ ID NO: 2821434 - DNA, 25 bp, Homo sapien
tcatgaaggatttccccggcactgc

SEQ ID NO: 2821435 - DNA, 25 bp, Homo sapien
ggcaggataacagatgggcttctct

SEQ ID NO: 2821436 - DNA, 25 bp, Homo sapien
tcactgcaggcaagcaaataggagg

SEQ ID NO: 2821437 - DNA, 25 bp, Homo sapien
aaagctgtcagccatgaagagtgcc

SEQ ID NO: 2821438 - DNA, 25 bp, Homo sapien
gagggccttgtaagcaccacttctg

SEQ ID NO: 2821439 - DNA, 25 bp, Homo sapien
ttttgtcttcgccaatgcccttcac

SEQ ID NO: 2821440 - DNA, 25 bp, Homo sapien
cagcttctggaatgcttgagtgaaa

SEQ ID NO: 2821441 - DNA, 25 bp, Homo sapien
aatgcttgagtgaaaagccaaaggc

SEQ ID NO: 2821442 - DNA, 25 bp, Homo sapien
gagacgcagcttctggaatgcttga

SEQ ID NO: 2821443 - DNA, 25 bp, Homo sapien
gtccttgtttagagacgcagcttct

SEQ ID NO: 2821444 - DNA, 25 bp, Homo sapien
gcttgatggctgtaaacttatcttt

SEQ ID NO: 2821445 - DNA, 25 bp, Homo sapien
ttcagtagcagggtgcttgatggct

SEQ ID NO: 2821446 - DNA, 25 bp, Homo sapien
aattaatgacacattcagtagcagg

SEQ ID NO: 2821447 - DNA, 25 bp, Homo sapien
ggctgtaaacttatctttgaggaaa

SEQ ID NO: 2821448 - DNA, 25 bp, Homo sapien
agggagagaagcttgagatctgcca

SEQ ID NO: 2821449 - DNA, 25 bp, Homo sapien
gccaaccagttcatcagtccttgaa

SEQ ID NO: 2821450 - DNA, 25 bp, Homo sapien
ggagagaagcttgagatctgccaac

SEQ ID NO: 2821451 - DNA, 25 bp, Homo sapien
agatctgccaaccagttcatcagtc

SEQ ID NO: 2821452 - DNA, 25 bp, Homo sapien
ttaggaccgcaaatccttcccagga

SEQ ID NO: 2821453 - DNA, 25 bp, Homo sapien
aggaagcatctggatagcagggcct

SEQ ID NO: 2821454 - DNA, 25 bp, Homo sapien
aagcatctggatagcagggccttgc

SEQ ID NO: 2821455 - DNA, 25 bp, Homo sapien
gaagcatctggatagcagggccttg

SEQ ID NO: 2821456 - DNA, 25 bp, Homo sapien
ttgacagatgctccagtctgccacg

SEQ ID NO: 2821457 - DNA, 25 bp, Homo sapien
cagtgccctgttaccttgacagatg

SEQ ID NO: 2821458 - DNA, 25 bp, Homo sapien
tctgccacgcagctatgacttggct

SEQ ID NO: 2821459 - DNA, 25 bp, Homo sapien
gcattcatagttattcagtgccctg

SEQ ID NO: 2821460 - DNA, 25 bp, Homo sapien
ctgttaccacctgccccagctctca

SEQ ID NO: 2821461 - DNA, 25 bp, Homo sapien
tgttaccacctgccccagctctcat

SEQ ID NO: 2821462 - DNA, 25 bp, Homo sapien
actgttaccacctgccccagctctc

SEQ ID NO: 2821463 - DNA, 25 bp, Homo sapien
ccactgccttgtttaccagcttgat

SEQ ID NO: 2821464 - DNA, 25 bp, Homo sapien
tcctccatgggtatgtctggtttgt

SEQ ID NO: 2821465 - DNA, 25 bp, Homo sapien
ttgttttgtacctcaagcaccagtt

SEQ ID NO: 2821466 - DNA, 25 bp, Homo sapien
tatgtgaggcttaacacaaatctcc

SEQ ID NO: 2821467 - DNA, 25 bp, Homo sapien
actgactttcttcatcagtattcca

SEQ ID NO: 2821468 - DNA, 25 bp, Homo sapien
ttactgactttcttcatcagtattc

SEQ ID NO: 2821469 - DNA, 25 bp, Homo sapien
tgactttcttcatcagtattccaaa

SEQ ID NO: 2821470 - DNA, 25 bp, Homo sapien
gactttcttcatcagtattccaaat

SEQ ID NO: 2821471 - DNA, 25 bp, Homo sapien
agcttcaggtcttcacacatgaagg

SEQ ID NO: 2821472 - DNA, 25 bp, Homo sapien
tcttcacacatgaaggtgcagctgc

SEQ ID NO: 2821473 - DNA, 25 bp, Homo sapien
ttcaggtcttcacacatgaaggtgc

SEQ ID NO: 2821474 - DNA, 25 bp, Homo sapien
caggtcttcacacatgaaggtgcag

SEQ ID NO: 2821475 - DNA, 25 bp, Homo sapien
tttttttgtatttcatcctctcttc

SEQ ID NO: 2821476 - DNA, 25 bp, Homo sapien
ttttttgtatttcatcctctcttcc

SEQ ID NO: 2821477 - DNA, 25 bp, Homo sapien
tccgcttgccgtttctttggctgcc

SEQ ID NO: 2821478 - DNA, 25 bp, Homo sapien
gctggttgcacctccctttgaacga

SEQ ID NO: 2821479 - DNA, 25 bp, Homo sapien
gctgaatggggctccgcttgccgtt

SEQ ID NO: 2821480 - DNA, 25 bp, Homo sapien
cctttgaacgactgtgctgaatggg

SEQ ID NO: 2821481 - DNA, 25 bp, Homo sapien
cccctagtactttggacagttcagc

SEQ ID NO: 2821482 - DNA, 25 bp, Homo sapien
agatgatgccccctagtactttgga

SEQ ID NO: 2821483 - DNA, 25 bp, Homo sapien
tgccacgggcaaagaatttcttgac

SEQ ID NO: 2821484 - DNA, 25 bp, Homo sapien
agaatttcttgacctctttagaagc

SEQ ID NO: 2821485 - DNA, 25 bp, Homo sapien
ttagcagtgttttttcctttctcca

SEQ ID NO: 2821486 - DNA, 25 bp, Homo sapien
tagcagtgttttttcctttctccat

SEQ ID NO: 2821487 - DNA, 25 bp, Homo sapien
cactgtctgccgttttgtcctgtta

SEQ ID NO: 2821488 - DNA, 25 bp, Homo sapien
gaaaaatgctgtctgagtacactca

SEQ ID NO: 2821489 - DNA, 25 bp, Homo sapien
tgggcagtcaccgtagtccgtatgt

SEQ ID NO: 2821490 - DNA, 25 bp, Homo sapien
cataataacacgtgatgggcagtca

SEQ ID NO: 2821491 - DNA, 25 bp, Homo sapien
cacgcaccaaggcccaatctgtagc

SEQ ID NO: 2821492 - DNA, 25 bp, Homo sapien
cctgggaggcccctgtggatcagta

SEQ ID NO: 2821493 - DNA, 25 bp, Homo sapien
tgtagcccttctgtgtccctgagcc

SEQ ID NO: 2821494 - DNA, 25 bp, Homo sapien
aaggcccaatctgtagcccttctgt

SEQ ID NO: 2821495 - DNA, 25 bp, Homo sapien
ggattgcagcggtagctgtgttttt

SEQ ID NO: 2821496 - DNA, 25 bp, Homo sapien
tttggattgcagcggtagctgtgtt

SEQ ID NO: 2821497 - DNA, 25 bp, Homo sapien
tggattgcagcggtagctgtgtttt

SEQ ID NO: 2821498 - DNA, 25 bp, Homo sapien
ctttggattgcagcggtagctgtgt

SEQ ID NO: 2821499 - DNA, 25 bp, Homo sapien
ccagaccagtctgtctggtagactg

SEQ ID NO: 2821500 - DNA, 25 bp, Homo sapien
tggtagactggtagctcctcctcaa

SEQ ID NO: 2821501 - DNA, 25 bp, Homo sapien
ttttcatactcaattaggacagagc

SEQ ID NO: 2821502 - DNA, 25 bp, Homo sapien
tactcaattaggacagagctcatca

SEQ ID NO: 2821503 - DNA, 25 bp, Homo sapien
gccgagcgtgggctcggctaatttt

SEQ ID NO: 2821504 - DNA, 25 bp, Homo sapien
ctacagccgagcgtgggctcggcta

SEQ ID NO: 2821505 - DNA, 25 bp, Homo sapien
gcccgctgagcgggactacagccga

SEQ ID NO: 2821506 - DNA, 25 bp, Homo sapien
ccgctgagcgggactacagccgagc

SEQ ID NO: 2821507 - DNA, 25 bp, Homo sapien
cagagtcagctaagtggcgtatata

SEQ ID NO: 2821508 - DNA, 25 bp, Homo sapien
caagacagtgttgtgtgcatacaca

SEQ ID NO: 2821509 - DNA, 25 bp, Homo sapien
cagttgcatttcattcagagtcagc

SEQ ID NO: 2821510 - DNA, 25 bp, Homo sapien
tcaacaggctagctgcaggtactca

SEQ ID NO: 2821511 - DNA, 25 bp, Homo sapien
gaacatggataagcattgacagaaa

SEQ ID NO: 2821512 - DNA, 25 bp, Homo sapien
ctggaacatggataagcattgacag

SEQ ID NO: 2821513 - DNA, 25 bp, Homo sapien
ggataagcattgacagaaatattct

SEQ ID NO: 2821514 - DNA, 25 bp, Homo sapien
gaaatattctttttcacgagaaaca

SEQ ID NO: 2821515 - DNA, 25 bp, Homo sapien
ttgaggaaattggaagtgtagctga

SEQ ID NO: 2821516 - DNA, 25 bp, Homo sapien
ggaagtgtagctgaatgcagtttaa

SEQ ID NO: 2821517 - DNA, 25 bp, Homo sapien
aaattggaagtgtagctgaatgcag

SEQ ID NO: 2821518 - DNA, 25 bp, Homo sapien
ggaaattggaagtgtagctgaatgc

SEQ ID NO: 2821519 - DNA, 25 bp, Homo sapien
tacctgctgctaacattgctacttg

SEQ ID NO: 2821520 - DNA, 25 bp, Homo sapien
ccctgaatattttgggctctcttta

SEQ ID NO: 2821521 - DNA, 25 bp, Homo sapien
tattgtaccttgtgaaatacagcca

SEQ ID NO: 2821522 - DNA, 25 bp, Homo sapien
taactctgcaaaaccctgaatattt

SEQ ID NO: 2821523 - DNA, 25 bp, Homo sapien
taaggtgacattgactagggccaca

SEQ ID NO: 2821524 - DNA, 25 bp, Homo sapien
tgagcttcaaatggagcgggactcc

SEQ ID NO: 2821525 - DNA, 25 bp, Homo sapien
caaggccgcatttaccgctttgagg

SEQ ID NO: 2821526 - DNA, 25 bp, Homo sapien
cagaacgaggtaaggtcgcgactaa

SEQ ID NO: 2821527 - DNA, 25 bp, Homo sapien
ctgcaatgccctcttggtactggga

SEQ ID NO: 2821528 - DNA, 25 bp, Homo sapien
gccctcttggtactgggattgggca

SEQ ID NO: 2821529 - DNA, 25 bp, Homo sapien
cctgccctgctacatttgggcttgg

SEQ ID NO: 2821530 - DNA, 25 bp, Homo sapien
gccctgctacatttgggcttggcat

SEQ ID NO: 2821531 - DNA, 25 bp, Homo sapien
tcatcatcgagtatggcaccaggaa

SEQ ID NO: 2821532 - DNA, 25 bp, Homo sapien
agacagatgatcagcagggcaccag

SEQ ID NO: 2821533 - DNA, 25 bp, Homo sapien
aatatcagaagggaaggtaccatcc

SEQ ID NO: 2821534 - DNA, 25 bp, Homo sapien
agcgcctgtcttgtgtcatcatcga

SEQ ID NO: 2821535 - DNA, 25 bp, Homo sapien
ctggagcagaaggataaatcagttc

SEQ ID NO: 2821536 - DNA, 25 bp, Homo sapien
actttctcttccctgcataacttct

SEQ ID NO: 2821537 - DNA, 25 bp, Homo sapien
ctcgtggtactcctcctgtgttcca

SEQ ID NO: 2821538 - DNA, 25 bp, Homo sapien
tccctctctccctcgtggtactcct

SEQ ID NO: 2821539 - DNA, 25 bp, Homo sapien
tcactgtagccccaggaaggtccct

SEQ ID NO: 2821540 - DNA, 25 bp, Homo sapien
ctgccacagaaaccctggtgatcta

SEQ ID NO: 2821541 - DNA, 25 bp, Homo sapien
ccacagaaaccctggtgatctacca

SEQ ID NO: 2821542 - DNA, 25 bp, Homo sapien
acagaaaccctggtgatctaccatc

SEQ ID NO: 2821543 - DNA, 25 bp, Homo sapien
tctgccacagaaaccctggtgatct

SEQ ID NO: 2821544 - DNA, 25 bp, Homo sapien
cactagtgtcatgggtatatgttta

SEQ ID NO: 2821545 - DNA, 25 bp, Homo sapien
gtgtcatgggtatatgtttagcatt

SEQ ID NO: 2821546 - DNA, 25 bp, Homo sapien
cctgtagttgatggtcactagtgtc

SEQ ID NO: 2821547 - DNA, 25 bp, Homo sapien
ctgtagttgatggtcactagtgtca

SEQ ID NO: 2821548 - DNA, 25 bp, Homo sapien
tagtaaacatagtggataccacagc

SEQ ID NO: 2821549 - DNA, 25 bp, Homo sapien
taccacagcttattccctgacaggg

SEQ ID NO: 2821550 - DNA, 25 bp, Homo sapien
tgtacttgggtgacaacagtctgcc

SEQ ID NO: 2821551 - DNA, 25 bp, Homo sapien
tcagcaacggcaaaatgtacttggg

SEQ ID NO: 2821552 - DNA, 25 bp, Homo sapien
gccgtggattgtctgcatgcagata

SEQ ID NO: 2821553 - DNA, 25 bp, Homo sapien
tgtctgcatgcagatatggacccag

SEQ ID NO: 2821554 - DNA, 25 bp, Homo sapien
ttgagccgtggattgtctgcatgca

SEQ ID NO: 2821555 - DNA, 25 bp, Homo sapien
tgaattgcttgagccgtggattgtc

SEQ ID NO: 2821556 - DNA, 25 bp, Homo sapien
tcgcataggttttgaggacaattga

SEQ ID NO: 2821557 - DNA, 25 bp, Homo sapien
tatgtcttggtgtctcgcataggtt

SEQ ID NO: 2821558 - DNA, 25 bp, Homo sapien
ggtgtctcgcataggttttgaggac

SEQ ID NO: 2821559 - DNA, 25 bp, Homo sapien
cttggtgtctcgcataggttttgag

SEQ ID NO: 2821560 - DNA, 25 bp, Homo sapien
tctgtaacttcagctggatggtgtt

SEQ ID NO: 2821561 - DNA, 25 bp, Homo sapien
gtaacttcagctggatggtgttctg

SEQ ID NO: 2821562 - DNA, 25 bp, Homo sapien
tcttctgtaacttcagctggatggt

SEQ ID NO: 2821563 - DNA, 25 bp, Homo sapien
ttaactcttctgtaacttcagctgg

SEQ ID NO: 2821564 - DNA, 25 bp, Homo sapien
catctggtgacccagtcctccggta

SEQ ID NO: 2821565 - DNA, 25 bp, Homo sapien
cctctattgtgtggcagcaacccaa

SEQ ID NO: 2821566 - DNA, 25 bp, Homo sapien
ccttgtcagggtcaataatcttggc

SEQ ID NO: 2821567 - DNA, 25 bp, Homo sapien
aatacctgagtttcacacgtggtcc

SEQ ID NO: 2821568 - DNA, 25 bp, Homo sapien
gactctgatgtctactgctttcact

SEQ ID NO: 2821569 - DNA, 25 bp, Homo sapien
cactgttgttgcccctttatgcagg

SEQ ID NO: 2821570 - DNA, 25 bp, Homo sapien
ttatgcagggcattaggtagtctgt

SEQ ID NO: 2821571 - DNA, 25 bp, Homo sapien
cattttgtatggactctgatgtcta

SEQ ID NO: 2821572 - DNA, 25 bp, Homo sapien
ctccacatgaagttggggccgccat

SEQ ID NO: 2821573 - DNA, 25 bp, Homo sapien
ctatgcatcacacctccacatgaag

SEQ ID NO: 2821574 - DNA, 25 bp, Homo sapien
tgcatcacacctccacatgaagttg

SEQ ID NO: 2821575 - DNA, 25 bp, Homo sapien
catcacacctccacatgaagttggg

SEQ ID NO: 2821576 - DNA, 25 bp, Homo sapien
caaagtgtacagaacattccgagtt

SEQ ID NO: 2821577 - DNA, 25 bp, Homo sapien
tttctgtgtctcaaaaagctagggc

SEQ ID NO: 2821578 - DNA, 25 bp, Homo sapien
gacacctagagagatggccacacat

SEQ ID NO: 2821579 - DNA, 25 bp, Homo sapien
cattgcatagttccaagggcagtga

SEQ ID NO: 2821580 - DNA, 25 bp, Homo sapien
ttagcattctagatgaagtttccgg

SEQ ID NO: 2821581 - DNA, 25 bp, Homo sapien
gatatgtagaagtacagacttcagg

SEQ ID NO: 2821582 - DNA, 25 bp, Homo sapien
tagcattctagatgaagtttccgga

SEQ ID NO: 2821583 - DNA, 25 bp, Homo sapien
ttgtgatatgtagaagtacagactt

SEQ ID NO: 2821584 - DNA, 25 bp, Homo sapien
aagctcctgaatccatgatttctgt

SEQ ID NO: 2821585 - DNA, 25 bp, Homo sapien
tccatgatttctgttagcgacatca

SEQ ID NO: 2821586 - DNA, 25 bp, Homo sapien
ccatgatttctgttagcgacatcat

SEQ ID NO: 2821587 - DNA, 25 bp, Homo sapien
tgtggtggtgtcacctttactggtc

SEQ ID NO: 2821588 - DNA, 25 bp, Homo sapien
agcagccttcctgaaatacccatct

SEQ ID NO: 2821589 - DNA, 25 bp, Homo sapien
tggtgtcacctttactggtctcctt

SEQ ID NO: 2821590 - DNA, 25 bp, Homo sapien
agagcagccttcctgaaatacccat

SEQ ID NO: 2821591 - DNA, 25 bp, Homo sapien
tctgcattgattactccctggacac

SEQ ID NO: 2821592 - DNA, 25 bp, Homo sapien
agccactctctgcacatcgaaattt

SEQ ID NO: 2821593 - DNA, 25 bp, Homo sapien
tacaaatcggacaccccttttgcat

SEQ ID NO: 2821594 - DNA, 25 bp, Homo sapien
tgcacatcgaaattttcactgtgtg

SEQ ID NO: 2821595 - DNA, 25 bp, Homo sapien
tgtcaattgatagcatccatcgttt

SEQ ID NO: 2821596 - DNA, 25 bp, Homo sapien
ctgggcacaaatacatgtcaattga

SEQ ID NO: 2821597 - DNA, 25 bp, Homo sapien
catcgtttgacactaacagttttga

SEQ ID NO: 2821598 - DNA, 25 bp, Homo sapien
gatagcatccatcgtttgacactaa

SEQ ID NO: 2821599 - DNA, 25 bp, Homo sapien
aactgctttgagattatgaccaaga

SEQ ID NO: 2821600 - DNA, 25 bp, Homo sapien
tcttgaactgctttgagattatgac

SEQ ID NO: 2821601 - DNA, 25 bp, Homo sapien
cttgaactgctttgagattatgacc

SEQ ID NO: 2821602 - DNA, 25 bp, Homo sapien
tgaactgctttgagattatgaccaa

SEQ ID NO: 2821603 - DNA, 25 bp, Homo sapien
ctgtgtccacgataatgagtacttc

SEQ ID NO: 2821604 - DNA, 25 bp, Homo sapien
caatatatcaggcttaaccaaaagt

SEQ ID NO: 2821605 - DNA, 25 bp, Homo sapien
ccacgataatgagtacttcgcaata

SEQ ID NO: 2821606 - DNA, 25 bp, Homo sapien
tgagtacttcgcaatatatcaggct

SEQ ID NO: 2821607 - DNA, 25 bp, Homo sapien
aaaatggcattcaggagatagctcg

SEQ ID NO: 2821608 - DNA, 25 bp, Homo sapien
taattgggtcctataagtgatgtaa

SEQ ID NO: 2821609 - DNA, 25 bp, Homo sapien
agtgatgtaatgaagtctatggccc

SEQ ID NO: 2821610 - DNA, 25 bp, Homo sapien
gtctatggcccctgaaggaatgcag

SEQ ID NO: 2821611 - DNA, 25 bp, Homo sapien
tagatgtggtcacgtgtgcattcca

SEQ ID NO: 2821612 - DNA, 25 bp, Homo sapien
ctagatgtggtcacgtgtgcattcc

SEQ ID NO: 2821613 - DNA, 25 bp, Homo sapien
agatgtggtcacgtgtgcattccac

SEQ ID NO: 2821614 - DNA, 25 bp, Homo sapien
ttctggaccctgagtatatttttta

SEQ ID NO: 2821615 - DNA, 25 bp, Homo sapien
gaactgttatattttgcatcttctc

SEQ ID NO: 2821616 - DNA, 25 bp, Homo sapien
cctcagatagtgtagattcttttaa

SEQ ID NO: 2821617 - DNA, 25 bp, Homo sapien
tcttctggaccctgagtatattttt

SEQ ID NO: 2821618 - DNA, 25 bp, Homo sapien
cagtatggctcttggtgagcatgtt

SEQ ID NO: 2821619 - DNA, 25 bp, Homo sapien
tcagtatggctcttggtgagcatgt

SEQ ID NO: 2821620 - DNA, 25 bp, Homo sapien
aatcctcacgaatgcccccccaggg

SEQ ID NO: 2821621 - DNA, 25 bp, Homo sapien
atgcttgaatcctcacgaatgcccc

SEQ ID NO: 2821622 - DNA, 25 bp, Homo sapien
cctcacgaatgcccccccagggcag

SEQ ID NO: 2821623 - DNA, 25 bp, Homo sapien
catgcttgaatcctcacgaatgccc

SEQ ID NO: 2821624 - DNA, 25 bp, Homo sapien
gctttgctccgtaggttatatgacc

SEQ ID NO: 2821625 - DNA, 25 bp, Homo sapien
gctccgtaggttatatgaccttgcc

SEQ ID NO: 2821626 - DNA, 25 bp, Homo sapien
ctgctttgctccgtaggttatatga

SEQ ID NO: 2821627 - DNA, 25 bp, Homo sapien
ttgctccgtaggttatatgaccttg

SEQ ID NO: 2821628 - DNA, 25 bp, Homo sapien
ctgtgctctttgccaggcactggaa

SEQ ID NO: 2821629 - DNA, 25 bp, Homo sapien
tcaccatcaatagcctctagagtat

SEQ ID NO: 2821630 - DNA, 25 bp, Homo sapien
ctgatctcaccatcaatagcctcta

SEQ ID NO: 2821631 - DNA, 25 bp, Homo sapien
gatctcaccatcaatagcctctaga

SEQ ID NO: 2821632 - DNA, 25 bp, Homo sapien
tgcagtttgcactttcatggctaat

SEQ ID NO: 2821633 - DNA, 25 bp, Homo sapien
ggcactttggccagagtaagaatga

SEQ ID NO: 2821634 - DNA, 25 bp, Homo sapien
ggtgacttcaggaccttgaacctca

SEQ ID NO: 2821635 - DNA, 25 bp, Homo sapien
caggaagaggggatattcttcaggt

SEQ ID NO: 2821636 - DNA, 25 bp, Homo sapien
caagccatttccacaagaataggca

SEQ ID NO: 2821637 - DNA, 25 bp, Homo sapien
tcatatagctgccataagacggctg

SEQ ID NO: 2821638 - DNA, 25 bp, Homo sapien
tatagctgccataagacggctgaat

SEQ ID NO: 2821639 - DNA, 25 bp, Homo sapien
gctgccataagacggctgaataaag

SEQ ID NO: 2821640 - DNA, 25 bp, Homo sapien
gccataagacggctgaataaagtac

SEQ ID NO: 2821641 - DNA, 25 bp, Homo sapien
ccagaggcagtaaacttcgatatac

SEQ ID NO: 2821642 - DNA, 25 bp, Homo sapien
tagaacaatcttagcaaagcccaga

SEQ ID NO: 2821643 - DNA, 25 bp, Homo sapien
gaggctccatagacaggaatatgca

SEQ ID NO: 2821644 - DNA, 25 bp, Homo sapien
gagagataacacaagcctctatgga

SEQ ID NO: 2821645 - DNA, 25 bp, Homo sapien
gctttctcatggtggtgttgaccat

SEQ ID NO: 2821646 - DNA, 25 bp, Homo sapien
tttggctgtagctttctcatggtgg

SEQ ID NO: 2821647 - DNA, 25 bp, Homo sapien
gctgtagctttctcatggtggtgtt

SEQ ID NO: 2821648 - DNA, 25 bp, Homo sapien
tagctttctcatggtggtgttgacc

SEQ ID NO: 2821649 - DNA, 25 bp, Homo sapien
cagatctctgatggaatgcgaaagg

SEQ ID NO: 2821650 - DNA, 25 bp, Homo sapien
taactgtcaagtatcctgtcatgga

SEQ ID NO: 2821651 - DNA, 25 bp, Homo sapien
tggaatgcgaaaggctccagctgag

SEQ ID NO: 2821652 - DNA, 25 bp, Homo sapien
gaggttcaagaggaaataccccatc

SEQ ID NO: 2821653 - DNA, 25 bp, Homo sapien
ggttagacctcaagtagcgggtaca

SEQ ID NO: 2821654 - DNA, 25 bp, Homo sapien
ggtgcactggaattccccactggaa

SEQ ID NO: 2821655 - DNA, 25 bp, Homo sapien
cacgtgggtcttagggcagtactat

SEQ ID NO: 2821656 - DNA, 25 bp, Homo sapien
tctgggcctgtggtcaaacacttca

SEQ ID NO: 2821657 - DNA, 25 bp, Homo sapien
actgcttctttgctgggcctggtgg

SEQ ID NO: 2821658 - DNA, 25 bp, Homo sapien
ggcctggtggccctgatgctgctgt

SEQ ID NO: 2821659 - DNA, 25 bp, Homo sapien
cctggtggccctgatgctgctgtgt

SEQ ID NO: 2821660 - DNA, 25 bp, Homo sapien
ggtggccctgatgctgctgtgtcat

SEQ ID NO: 2821661 - DNA, 25 bp, Homo sapien
tgctttgtgtctgcgctgcaggtga

SEQ ID NO: 2821662 - DNA, 25 bp, Homo sapien
atttgtgaccggtctttgctttgtg

SEQ ID NO: 2821663 - DNA, 25 bp, Homo sapien
caaagatgctcgatatttgcgtatt

SEQ ID NO: 2821664 - DNA, 25 bp, Homo sapien
ccgccgctgcagttaggacttggca

SEQ ID NO: 2821665 - DNA, 25 bp, Homo sapien
gactacgcgctcatcttcggcatgt

SEQ ID NO: 2821666 - DNA, 25 bp, Homo sapien
cagaacatcggctacaagctgggcc

SEQ ID NO: 2821667 - DNA, 25 bp, Homo sapien
ccgagatcgtggtgtctaagcccga

SEQ ID NO: 2821668 - DNA, 25 bp, Homo sapien
cctgttcgaaaagcgcaagcggctc

SEQ ID NO: 2821669 - DNA, 25 bp, Homo sapien
gcgtcgctgtattccttagctctga

SEQ ID NO: 2821670 - DNA, 25 bp, Homo sapien
tagactttgggctcatgtatcacat

SEQ ID NO: 2821671 - DNA, 25 bp, Homo sapien
ggcatgtgttcccagttgctaaggc

SEQ ID NO: 2821672 - DNA, 25 bp, Homo sapien
tggtttcagctccaatagagcctct

SEQ ID NO: 2821673 - DNA, 25 bp, Homo sapien
agttcagcccgaagaatcattctgg

SEQ ID NO: 2821674 - DNA, 25 bp, Homo sapien
agagactagactctctgacatttca

SEQ ID NO: 2821675 - DNA, 25 bp, Homo sapien
ctgagggagactcagagactagact

SEQ ID NO: 2821676 - DNA, 25 bp, Homo sapien
gagactcagagactagactctctga

SEQ ID NO: 2821677 - DNA, 25 bp, Homo sapien
cagagactagactctctgacatttc

SEQ ID NO: 2821678 - DNA, 25 bp, Homo sapien
cagaaactcatgcatatccttccgt

SEQ ID NO: 2821679 - DNA, 25 bp, Homo sapien
attcagaaactcatgcatatccttc

SEQ ID NO: 2821680 - DNA, 25 bp, Homo sapien
tcagaaactcatgcatatccttccg

SEQ ID NO: 2821681 - DNA, 25 bp, Homo sapien
gaaactcatgcatatccttccgttc

SEQ ID NO: 2821682 - DNA, 25 bp, Homo sapien
tatcttggatgttgccttacgggct

SEQ ID NO: 2821683 - DNA, 25 bp, Homo sapien
cttacgggctctcagcaactgtgca

SEQ ID NO: 2821684 - DNA, 25 bp, Homo sapien
gatgttgccttacgggctctcagca

SEQ ID NO: 2821685 - DNA, 25 bp, Homo sapien
ttttatcttggatgttgccttacgg

SEQ ID NO: 2821686 - DNA, 25 bp, Homo sapien
agtattccatcctattgattcctgc

SEQ ID NO: 2821687 - DNA, 25 bp, Homo sapien
cctcgatggcctttggttaactgca

SEQ ID NO: 2821688 - DNA, 25 bp, Homo sapien
gagctcaagctcatgggtctgtttg

SEQ ID NO: 2821689 - DNA, 25 bp, Homo sapien
tgtttgggaagtatagtttaacaga

SEQ ID NO: 2821690 - DNA, 25 bp, Homo sapien
cttgaaactgtgaagtgctggaggc

SEQ ID NO: 2821691 - DNA, 25 bp, Homo sapien
tctccccgaggaataatgcaatgac

SEQ ID NO: 2821692 - DNA, 25 bp, Homo sapien
agaaaatctgtgctcattctcctca

SEQ ID NO: 2821693 - DNA, 25 bp, Homo sapien
tgagaactctctcagctcgctgggt

SEQ ID NO: 2821694 - DNA, 25 bp, Homo sapien
cagcaaaacgtagtgtagggtagaa

SEQ ID NO: 2821695 - DNA, 25 bp, Homo sapien
cagtggcagcaaaacgtagtgtagg

SEQ ID NO: 2821696 - DNA, 25 bp, Homo sapien
ggagcaaaaccaaagctgcgcatac

SEQ ID NO: 2821697 - DNA, 25 bp, Homo sapien
aagctgcgcatactctgagcagccc

SEQ ID NO: 2821698 - DNA, 25 bp, Homo sapien
tatctacttttacgtaaatagagta

SEQ ID NO: 2821699 - DNA, 25 bp, Homo sapien
ttgtatctacttttacgtaaataga

SEQ ID NO: 2821700 - DNA, 25 bp, Homo sapien
tgtatctacttttacgtaaatagag

SEQ ID NO: 2821701 - DNA, 25 bp, Homo sapien
gatctggctgaactctgcagagcag

SEQ ID NO: 2821702 - DNA, 25 bp, Homo sapien
gcactgatctggctgaactctgcag

SEQ ID NO: 2821703 - DNA, 25 bp, Homo sapien
ctgatctggctgaactctgcagagc

SEQ ID NO: 2821704 - DNA, 25 bp, Homo sapien
tggggataaactggtgtggcactgc

SEQ ID NO: 2821705 - DNA, 25 bp, Homo sapien
aggtgccgtgcatccgtcagctggc

SEQ ID NO: 2821706 - DNA, 25 bp, Homo sapien
tgcctctgaggtgccgtgcatccgt

SEQ ID NO: 2821707 - DNA, 25 bp, Homo sapien
ctctgaggtgccgtgcatccgtcag

SEQ ID NO: 2821708 - DNA, 25 bp, Homo sapien
tttgcctctgaggtgccgtgcatcc

SEQ ID NO: 2821709 - DNA, 25 bp, Homo sapien
cttgaacctagaaagctttcggaag

SEQ ID NO: 2821710 - DNA, 25 bp, Homo sapien
tgaacctagaaagctttcggaagtg

SEQ ID NO: 2821711 - DNA, 25 bp, Homo sapien
gctttcggaagtgagccagcttcat

SEQ ID NO: 2821712 - DNA, 25 bp, Homo sapien
ggaagtgagccagcttcatcttgca

SEQ ID NO: 2821713 - DNA, 25 bp, Homo sapien
caaggctcttgattccagtgatttt

SEQ ID NO: 2821714 - DNA, 25 bp, Homo sapien
ttttccactcctgttaggattttga

SEQ ID NO: 2821715 - DNA, 25 bp, Homo sapien
tttccactcctgttaggattttgat

SEQ ID NO: 2821716 - DNA, 25 bp, Homo sapien
gatcagtagcactttctttctgagg

SEQ ID NO: 2821717 - DNA, 25 bp, Homo sapien
gaattcatgtatacggaacccatgg

SEQ ID NO: 2821718 - DNA, 25 bp, Homo sapien
agcagtattggctcatcattgtggc

SEQ ID NO: 2821719 - DNA, 25 bp, Homo sapien
ctagatggaacaggctatttaagcc

SEQ ID NO: 2821720 - DNA, 25 bp, Homo sapien
gcacagaagactctcacaacttgga

SEQ ID NO: 2821721 - DNA, 25 bp, Homo sapien
ggaatgagcacaccttgatcacgga

SEQ ID NO: 2821722 - DNA, 25 bp, Homo sapien
aatcggtgccccagcaagtagttgc

SEQ ID NO: 2821723 - DNA, 25 bp, Homo sapien
tcacggagcgggaggactgtaattc

SEQ ID NO: 2821724 - DNA, 25 bp, Homo sapien
ccaggttcagatgctacattttcag

SEQ ID NO: 2821725 - DNA, 25 bp, Homo sapien
ctatcagacagtcctgtgatacttc

SEQ ID NO: 2821726 - DNA, 25 bp, Homo sapien
aggtccacgtttatagtagatggtc

SEQ ID NO: 2821727 - DNA, 25 bp, Homo sapien
cttcattgcagttagtaggtccacg

SEQ ID NO: 2821728 - DNA, 25 bp, Homo sapien
tgtagttgctgtattccagggcctc

SEQ ID NO: 2821729 - DNA, 25 bp, Homo sapien
ccttggcactcgtgacttttttggc

SEQ ID NO: 2821730 - DNA, 25 bp, Homo sapien
ggatgtttctcaccatacttgactt

SEQ ID NO: 2821731 - DNA, 25 bp, Homo sapien
tttatgaagttcaccgaggtcaacc

SEQ ID NO: 2821732 - DNA, 25 bp, Homo sapien
gagctgtgcctaaagcactgaggta

SEQ ID NO: 2821733 - DNA, 25 bp, Homo sapien
tgtgcctaaagcactgaggtagaga

SEQ ID NO: 2821734 - DNA, 25 bp, Homo sapien
gcctaaagcactgaggtagagagac

SEQ ID NO: 2821735 - DNA, 25 bp, Homo sapien
tagtacgagctgtgcctaaagcact

SEQ ID NO: 2821736 - DNA, 25 bp, Homo sapien
tggtagtgttacttatacgcagtgc

SEQ ID NO: 2821737 - DNA, 25 bp, Homo sapien
gatggatctaagaatttactcgaac

SEQ ID NO: 2821738 - DNA, 25 bp, Homo sapien
ttacttatacgcagtgctggcactt

SEQ ID NO: 2821739 - DNA, 25 bp, Homo sapien
tttgaaaggacatgaggatcagatg

SEQ ID NO: 2821740 - DNA, 25 bp, Homo sapien
cctccgggctggcataatccttact

SEQ ID NO: 2821741 - DNA, 25 bp, Homo sapien
taagtattattcatgtgggtatcga

SEQ ID NO: 2821742 - DNA, 25 bp, Homo sapien
tctagtaagatgcactgataatttg

SEQ ID NO: 2821743 - DNA, 25 bp, Homo sapien
aaagtaacaatctatatctagtaag

SEQ ID NO: 2821744 - DNA, 25 bp, Homo sapien
tctgggtcctttcctgtcagtcaga

SEQ ID NO: 2821745 - DNA, 25 bp, Homo sapien
tgcctccaggatcttatctgggtcc

SEQ ID NO: 2821746 - DNA, 25 bp, Homo sapien
gaaggtatgtatgtccagggtggaa

SEQ ID NO: 2821747 - DNA, 25 bp, Homo sapien
tatgagatgacacggcagtgagcaa

SEQ ID NO: 2821748 - DNA, 25 bp, Homo sapien
tactcattacttgctggaggcatct

SEQ ID NO: 2821749 - DNA, 25 bp, Homo sapien
ctctgtactcattacttgctggagg

SEQ ID NO: 2821750 - DNA, 25 bp, Homo sapien
ctcattacttgctggaggcatctgg

SEQ ID NO: 2821751 - DNA, 25 bp, Homo sapien
gtactcattacttgctggaggcatc

SEQ ID NO: 2821752 - DNA, 25 bp, Homo sapien
aatgctgagcggtcccggtcctcgt

SEQ ID NO: 2821753 - DNA, 25 bp, Homo sapien
gaggcggcggtcctcttccacagca

SEQ ID NO: 2821754 - DNA, 25 bp, Homo sapien
gcaccaccaacttcatcagagagta

SEQ ID NO: 2821755 - DNA, 25 bp, Homo sapien
gagcggtcccggtcctcgtccagga

SEQ ID NO: 2821756 - DNA, 25 bp, Homo sapien
tattctgcatatcccagtatcttct

SEQ ID NO: 2821757 - DNA, 25 bp, Homo sapien
caggttgagtgtgttgcaggatgca

SEQ ID NO: 2821758 - DNA, 25 bp, Homo sapien
gagtgtgttgcaggatgcaccttga

SEQ ID NO: 2821759 - DNA, 25 bp, Homo sapien
atattctgcatatcccagtatcttc

SEQ ID NO: 2821760 - DNA, 25 bp, Homo sapien
tcttcataaacagagaagagtgttg

SEQ ID NO: 2821761 - DNA, 25 bp, Homo sapien
gacaatggacaagacctcttcttca

SEQ ID NO: 2821762 - DNA, 25 bp, Homo sapien
cataaacagagaagagtgttgtgtt

SEQ ID NO: 2821763 - DNA, 25 bp, Homo sapien
ccttctgcttcaggtgacaatggac

SEQ ID NO: 2821764 - DNA, 25 bp, Homo sapien
caatattccacattcattagttttg

SEQ ID NO: 2821765 - DNA, 25 bp, Homo sapien
tgggattcaacatagacaatgggat

SEQ ID NO: 2821766 - DNA, 25 bp, Homo sapien
agaaccgctacttcgtactccaact

SEQ ID NO: 2821767 - DNA, 25 bp, Homo sapien
tagttttggtcatcaagctgtcaca

SEQ ID NO: 2821768 - DNA, 25 bp, Homo sapien
gaagaataacaacctgacacacttt

SEQ ID NO: 2821769 - DNA, 25 bp, Homo sapien
catccatgatgcctgattctcagag

SEQ ID NO: 2821770 - DNA, 25 bp, Homo sapien
tgtctcctttggtgtattggtgtcc

SEQ ID NO: 2821771 - DNA, 25 bp, Homo sapien
tctcagagatccatgaagaataaca

SEQ ID NO: 2821772 - DNA, 25 bp, Homo sapien
tactcatataccagctcatatccca

SEQ ID NO: 2821773 - DNA, 25 bp, Homo sapien
gatccttgtactcatataccagctc

SEQ ID NO: 2821774 - DNA, 25 bp, Homo sapien
gcagatccttgtactcatataccag

SEQ ID NO: 2821775 - DNA, 25 bp, Homo sapien
ccttgtactcatataccagctcata

SEQ ID NO: 2821776 - DNA, 25 bp, Homo sapien
cacataaggaacactgagatatact

SEQ ID NO: 2821777 - DNA, 25 bp, Homo sapien
aattgcatacggtaataatctgggg

SEQ ID NO: 2821778 - DNA, 25 bp, Homo sapien
catacggtaataatctggggcacat

SEQ ID NO: 2821779 - DNA, 25 bp, Homo sapien
ttgcatacggtaataatctggggca

SEQ ID NO: 2821780 - DNA, 25 bp, Homo sapien
cctatttcaccggagaaaataatgc

SEQ ID NO: 2821781 - DNA, 25 bp, Homo sapien
aaaacatgatatttgcagtaagtgc

SEQ ID NO: 2821782 - DNA, 25 bp, Homo sapien
gcccaacaccgaggtaaaacatgat

SEQ ID NO: 2821783 - DNA, 25 bp, Homo sapien
tcattgtgcccaacaccgaggtaaa

SEQ ID NO: 2821784 - DNA, 25 bp, Homo sapien
gagaatatcctgcccattgtgtctg

SEQ ID NO: 2821785 - DNA, 25 bp, Homo sapien
cctttcaagttatccttcagctggg

SEQ ID NO: 2821786 - DNA, 25 bp, Homo sapien
tcaagttatccttcagctgggccat

SEQ ID NO: 2821787 - DNA, 25 bp, Homo sapien
ttcactacctttcaagttatccttc

SEQ ID NO: 2821788 - DNA, 25 bp, Homo sapien
tcactacctttcaagttatccttca

SEQ ID NO: 2821789 - DNA, 25 bp, Homo sapien
tagagactcaggctttgttcctcac

SEQ ID NO: 2821790 - DNA, 25 bp, Homo sapien
ttagagactcaggctttgttcctca

SEQ ID NO: 2821791 - DNA, 25 bp, Homo sapien
gcttggggaggcaaatgtaggttgg

SEQ ID NO: 2821792 - DNA, 25 bp, Homo sapien
cttggggaggcaaatgtaggttggt

SEQ ID NO: 2821793 - DNA, 25 bp, Homo sapien
tggggaggcaaatgtaggttggttc

SEQ ID NO: 2821794 - DNA, 25 bp, Homo sapien
tgccttcccctaagacactcttttg

SEQ ID NO: 2821795 - DNA, 25 bp, Homo sapien
ccttgcccagagaagatctgtgctt

SEQ ID NO: 2821796 - DNA, 25 bp, Homo sapien
ttttatatacaccagtgccttcccc

SEQ ID NO: 2821797 - DNA, 25 bp, Homo sapien
atctgtgcttctgcgcttttatata

SEQ ID NO: 2821798 - DNA, 25 bp, Homo sapien
ggcgtggttcacttgctcttatttg

SEQ ID NO: 2821799 - DNA, 25 bp, Homo sapien
gaaggattcccagtctaagctatgt

SEQ ID NO: 2821800 - DNA, 25 bp, Homo sapien
catagtcgtaagtgtggcgtggttc

SEQ ID NO: 2821801 - DNA, 25 bp, Homo sapien
atttgctatgtctgtgcatagatgc

SEQ ID NO: 2821802 - DNA, 25 bp, Homo sapien
ttcagcgagtccagtgtggaggaga

SEQ ID NO: 2821803 - DNA, 25 bp, Homo sapien
cttcagcgagtccagtgtggaggag

SEQ ID NO: 2821804 - DNA, 25 bp, Homo sapien
tcagcgagtccagtgtggaggagag

SEQ ID NO: 2821805 - DNA, 25 bp, Homo sapien
tccattccagctctccttaagcctg

SEQ ID NO: 2821806 - DNA, 25 bp, Homo sapien
gtttgatatgttacttcctaggaag

SEQ ID NO: 2821807 - DNA, 25 bp, Homo sapien
tgcaacccagatgttagatgagaat

SEQ ID NO: 2821808 - DNA, 25 bp, Homo sapien
tcctaggaagtccatgttaacatac

SEQ ID NO: 2821809 - DNA, 25 bp, Homo sapien
gcttttgtatgactctcgaccttgt

SEQ ID NO: 2821810 - DNA, 25 bp, Homo sapien
ttgtatgactctcgaccttgtaaag

SEQ ID NO: 2821811 - DNA, 25 bp, Homo sapien
tgactctcgaccttgtaaagtttta

SEQ ID NO: 2821812 - DNA, 25 bp, Homo sapien
ggcttttgtatgactctcgaccttg

SEQ ID NO: 2821813 - DNA, 25 bp, Homo sapien
gatccaaaccatgattcttgaactt

SEQ ID NO: 2821814 - DNA, 25 bp, Homo sapien
tgcttctcagatttaccactggatg

SEQ ID NO: 2821815 - DNA, 25 bp, Homo sapien
tcttgaactttctacatgacatcat

SEQ ID NO: 2821816 - DNA, 25 bp, Homo sapien
cagatttaccactggatgatccaaa

SEQ ID NO: 2821817 - DNA, 25 bp, Homo sapien
caacaaagtaagggctggtataact

SEQ ID NO: 2821818 - DNA, 25 bp, Homo sapien
aaataagaattgtgcaggtaatcaa

SEQ ID NO: 2821819 - DNA, 25 bp, Homo sapien
ccaaaataagaattgtgcaggtaat

SEQ ID NO: 2821820 - DNA, 25 bp, Homo sapien
aacaaagtaagggctggtataactg

SEQ ID NO: 2821821 - DNA, 25 bp, Homo sapien
tgatgctaacataaaagtactttgc

SEQ ID NO: 2821822 - DNA, 25 bp, Homo sapien
tgtttgatgctaacataaaagtact

SEQ ID NO: 2821823 - DNA, 25 bp, Homo sapien
tggctgtttgatgctaacataaaag

SEQ ID NO: 2821824 - DNA, 25 bp, Homo sapien
aaagtactttgcatttgctttgctt

SEQ ID NO: 2821825 - DNA, 25 bp, Homo sapien
ccctgtctcgatggcatcttctatt

SEQ ID NO: 2821826 - DNA, 25 bp, Homo sapien
tgttcctattagtgcccagacccaa

SEQ ID NO: 2821827 - DNA, 25 bp, Homo sapien
taattccagggtttagagcctcaca

SEQ ID NO: 2821828 - DNA, 25 bp, Homo sapien
gattcctggtaatgcaatgtttggg

SEQ ID NO: 2821829 - DNA, 25 bp, Homo sapien
cagacccaaagatctcgtccttgag

SEQ ID NO: 2821830 - DNA, 25 bp, Homo sapien
aacatcctgcagttgcacaatactg

SEQ ID NO: 2821831 - DNA, 25 bp, Homo sapien
gcagttgcacaatactgctgttgga

SEQ ID NO: 2821832 - DNA, 25 bp, Homo sapien
catctaacatcctgcagttgcacaa

SEQ ID NO: 2821833 - DNA, 25 bp, Homo sapien
ccacacatctaacatcctgcagttg

SEQ ID NO: 2821834 - DNA, 25 bp, Homo sapien
attccagaaggccacgggcatcagc

SEQ ID NO: 2821835 - DNA, 25 bp, Homo sapien
caatgccagcctaatctcagtaggg

SEQ ID NO: 2821836 - DNA, 25 bp, Homo sapien
tgtatgtggcccctaagccaagtgc

SEQ ID NO: 2821837 - DNA, 25 bp, Homo sapien
gattgggtttagatactctgcctct

SEQ ID NO: 2821838 - DNA, 25 bp, Homo sapien
tgggacaattctccacagggctcag

SEQ ID NO: 2821839 - DNA, 25 bp, Homo sapien
acagctggacccttcgaaactggct

SEQ ID NO: 2821840 - DNA, 25 bp, Homo sapien
gacaattctccacagggctcaggaa

SEQ ID NO: 2821841 - DNA, 25 bp, Homo sapien
tggacccttcgaaactggctgggca

SEQ ID NO: 2821842 - DNA, 25 bp, Homo sapien
tgccgcacctttgggtctgatactg

SEQ ID NO: 2821843 - DNA, 25 bp, Homo sapien
aggatctctggttccctgtgccgca

SEQ ID NO: 2821844 - DNA, 25 bp, Homo sapien
tgaattagcaggtcttgctttccca

SEQ ID NO: 2821845 - DNA, 25 bp, Homo sapien
ctagacactacgatgatggaggatc

SEQ ID NO: 2821846 - DNA, 25 bp, Homo sapien
gtgaagagtagactgcacaatcata

SEQ ID NO: 2821847 - DNA, 25 bp, Homo sapien
atcatactgtctaccagaaacctac

SEQ ID NO: 2821848 - DNA, 25 bp, Homo sapien
tgcacaatcatactgtctaccagaa

SEQ ID NO: 2821849 - DNA, 25 bp, Homo sapien
gagtagactgcacaatcatactgtc

SEQ ID NO: 2821850 - DNA, 25 bp, Homo sapien
taaccgcaatacttcattacttgaa

SEQ ID NO: 2821851 - DNA, 25 bp, Homo sapien
ccctgagcttttctgcaataaccgc

SEQ ID NO: 2821852 - DNA, 25 bp, Homo sapien
ttgaaattcagcatcacgggtcctt

SEQ ID NO: 2821853 - DNA, 25 bp, Homo sapien
tttgttggctgagtcttcttctgtc

SEQ ID NO: 2821854 - DNA, 25 bp, Homo sapien
ggatcttcgtctcctggcagaaaca

SEQ ID NO: 2821855 - DNA, 25 bp, Homo sapien
tatagagtttgaagattgtgtgcca

SEQ ID NO: 2821856 - DNA, 25 bp, Homo sapien
accaggacaggacgtagagctcttc

SEQ ID NO: 2821857 - DNA, 25 bp, Homo sapien
tgtctaaccctgttgcagtcagcgg

SEQ ID NO: 2821858 - DNA, 25 bp, Homo sapien
cctgtgggtgtttttgattccacac

SEQ ID NO: 2821859 - DNA, 25 bp, Homo sapien
tttctcctgtgggtgtttttgattc

SEQ ID NO: 2821860 - DNA, 25 bp, Homo sapien
tgggtgtttttgattccacactgtc

SEQ ID NO: 2821861 - DNA, 25 bp, Homo sapien
ggtgtttttgattccacactgtctg

SEQ ID NO: 2821862 - DNA, 25 bp, Homo sapien
ttgttgctgagacattgttatccct

SEQ ID NO: 2821863 - DNA, 25 bp, Homo sapien
aatttctccaggtaagttcctctag

SEQ ID NO: 2821864 - DNA, 25 bp, Homo sapien
gattgccagttcagcgcttgggaag

SEQ ID NO: 2821865 - DNA, 25 bp, Homo sapien
ccctttggaagtcaggattgccagt

SEQ ID NO: 2821866 - DNA, 25 bp, Homo sapien
tggaacaatcacaggcctagtatgg

SEQ ID NO: 2821867 - DNA, 25 bp, Homo sapien
gaacaatcacaggcctagtatgggg

SEQ ID NO: 2821868 - DNA, 25 bp, Homo sapien
ctccaagttatctggaacaatcaca

SEQ ID NO: 2821869 - DNA, 25 bp, Homo sapien
gagaaatcagactcattggctccaa

SEQ ID NO: 2821870 - DNA, 25 bp, Homo sapien
ttgtcagtacatggtccagtcatca

SEQ ID NO: 2821871 - DNA, 25 bp, Homo sapien
gactggtttgtcagtacatggtcca

SEQ ID NO: 2821872 - DNA, 25 bp, Homo sapien
ccacagcatgcttagctttgactgg

SEQ ID NO: 2821873 - DNA, 25 bp, Homo sapien
tagctttgactggtttgtcagtaca

SEQ ID NO: 2821874 - DNA, 25 bp, Homo sapien
aaatattataccattggtgggtagc

SEQ ID NO: 2821875 - DNA, 25 bp, Homo sapien
aaatgcaattgcaaatgtgtagaaa

SEQ ID NO: 2821876 - DNA, 25 bp, Homo sapien
tgaattatattaaagggctcaggta

SEQ ID NO: 2821877 - DNA, 25 bp, Homo sapien
tgggtagcaagaggtaagtaatgaa

SEQ ID NO: 2821878 - DNA, 25 bp, Homo sapien
gaaaactagaagagcgtgatgtccc

SEQ ID NO: 2821879 - DNA, 25 bp, Homo sapien
agtactcatggagagcagattttaa

SEQ ID NO: 2821880 - DNA, 25 bp, Homo sapien
taattactgacatggaagtgtacat

SEQ ID NO: 2821881 - DNA, 25 bp, Homo sapien
taagaagagacaagggcctaggaca

SEQ ID NO: 2821882 - DNA, 25 bp, Homo sapien
gaaatttgttgacaggtccactcct

SEQ ID NO: 2821883 - DNA, 25 bp, Homo sapien
tttaggtatctggattcctctggtc

SEQ ID NO: 2821884 - DNA, 25 bp, Homo sapien
ggtggcatctcccaagttgtaagtt

SEQ ID NO: 2821885 - DNA, 25 bp, Homo sapien
ggtcctcaggtctgcgggaaatttg

SEQ ID NO: 2821886 - DNA, 25 bp, Homo sapien
caaggataggccagtcataggagtg

SEQ ID NO: 2821887 - DNA, 25 bp, Homo sapien
taccatgtgcgcaatgatgccgcag

SEQ ID NO: 2821888 - DNA, 25 bp, Homo sapien
aatgatgccgcagcaaggataggcc

SEQ ID NO: 2821889 - DNA, 25 bp, Homo sapien
agtgtgtccagtatgcctgctggca

SEQ ID NO: 2821890 - DNA, 25 bp, Homo sapien
ccacttcatattggttaccacctga

SEQ ID NO: 2821891 - DNA, 25 bp, Homo sapien
taccacctgaggcactcggagaagc

SEQ ID NO: 2821892 - DNA, 25 bp, Homo sapien
cacctgaggcactcggagaagccaa

SEQ ID NO: 2821893 - DNA, 25 bp, Homo sapien
ggttaccacctgaggcactcggaga

SEQ ID NO: 2821894 - DNA, 25 bp, Homo sapien
gagctgctacttctaaaagtgtcat

SEQ ID NO: 2821895 - DNA, 25 bp, Homo sapien
tgagctgctacttctaaaagtgtca

SEQ ID NO: 2821896 - DNA, 25 bp, Homo sapien
actcttcaccaaaatgagctgctac

SEQ ID NO: 2821897 - DNA, 25 bp, Homo sapien
aactcttcaccaaaatgagctgcta

SEQ ID NO: 2821898 - DNA, 25 bp, Homo sapien
caacgacatgaagacacaaggctgt

SEQ ID NO: 2821899 - DNA, 25 bp, Homo sapien
cgaaggttaacgctaaggcattgct

SEQ ID NO: 2821900 - DNA, 25 bp, Homo sapien
gggtgacagaacactcagcgatatg

SEQ ID NO: 2821901 - DNA, 25 bp, Homo sapien
catagatgggaaattaacagcctgc

SEQ ID NO: 2821902 - DNA, 25 bp, Homo sapien
agtccacttggcgttcataaaggca

SEQ ID NO: 2821903 - DNA, 25 bp, Homo sapien
aatcccaatacttgttggcataggg

SEQ ID NO: 2821904 - DNA, 25 bp, Homo sapien
gatacagtgtatgtgaacagtccac

SEQ ID NO: 2821905 - DNA, 25 bp, Homo sapien
cactgcccattaatgcaaatgctgg

SEQ ID NO: 2821906 - DNA, 25 bp, Homo sapien
tagtttatcgctagaagcaactccc

SEQ ID NO: 2821907 - DNA, 25 bp, Homo sapien
atatggttccacacggaaggcccag

SEQ ID NO: 2821908 - DNA, 25 bp, Homo sapien
tgtaatgccagtatctccaatgatg

SEQ ID NO: 2821909 - DNA, 25 bp, Homo sapien
tgtgtaataacccacttggatgcgt

SEQ ID NO: 2821910 - DNA, 25 bp, Homo sapien
aatccagctctactctctacacggt

SEQ ID NO: 2821911 - DNA, 25 bp, Homo sapien
acacggtctctcttcaagttcagca

SEQ ID NO: 2821912 - DNA, 25 bp, Homo sapien
gattaaatccagctctactctctac

SEQ ID NO: 2821913 - DNA, 25 bp, Homo sapien
agcagaagattaaatccagctctac

SEQ ID NO: 2821914 - DNA, 25 bp, Homo sapien
gctgcaaggactacagattgaaccc

SEQ ID NO: 2821915 - DNA, 25 bp, Homo sapien
tcctcattgatctctggcacgtcta

SEQ ID NO: 2821916 - DNA, 25 bp, Homo sapien
tactctgaaagcataggtactactg

SEQ ID NO: 2821917 - DNA, 25 bp, Homo sapien
aagaatcaattctctgctgcaagga

SEQ ID NO: 2821918 - DNA, 25 bp, Homo sapien
tgtgcccggcctctcaatgaatatt

SEQ ID NO: 2821919 - DNA, 25 bp, Homo sapien
taagtctggtaagaatatcaaactc

SEQ ID NO: 2821920 - DNA, 25 bp, Homo sapien
caaaaactgactcaaagccacaagt

SEQ ID NO: 2821921 - DNA, 25 bp, Homo sapien
tctacctactgaataacagcccagg

SEQ ID NO: 2821922 - DNA, 25 bp, Homo sapien
ctccaagaagttctgtttgtttaga

SEQ ID NO: 2821923 - DNA, 25 bp, Homo sapien
agaagtctgagctgcaggtctaaag

SEQ ID NO: 2821924 - DNA, 25 bp, Homo sapien
gtctgagctgcaggtctaaagctct

SEQ ID NO: 2821925 - DNA, 25 bp, Homo sapien
aagtctgagctgcaggtctaaagct

SEQ ID NO: 2821926 - DNA, 25 bp, Homo sapien
aggagtcaattgctttcaaaacaga

SEQ ID NO: 2821927 - DNA, 25 bp, Homo sapien
tagcacttcttgagcatatcccaca

SEQ ID NO: 2821928 - DNA, 25 bp, Homo sapien
tccattgttctctagaagtccctgg

SEQ ID NO: 2821929 - DNA, 25 bp, Homo sapien
ctgatctgtctcctttagcacttct

SEQ ID NO: 2821930 - DNA, 25 bp, Homo sapien
ctttcattaacaagtttagttcaga

SEQ ID NO: 2821931 - DNA, 25 bp, Homo sapien
taacaagtttagttcagatatttga

SEQ ID NO: 2821932 - DNA, 25 bp, Homo sapien
cttaccaataaggtaatcaatatcc

SEQ ID NO: 2821933 - DNA, 25 bp, Homo sapien
tccttaccaataaggtaatcaatat

SEQ ID NO: 2821934 - DNA, 25 bp, Homo sapien
tacacggtggttggcatgattacca

SEQ ID NO: 2821935 - DNA, 25 bp, Homo sapien
ggcaaactggcctcctacataattc

SEQ ID NO: 2821936 - DNA, 25 bp, Homo sapien
actgctcatagtggttacacggtgg

SEQ ID NO: 2821937 - DNA, 25 bp, Homo sapien
taaggttttgtaggcactgctcata

SEQ ID NO: 2821938 - DNA, 25 bp, Homo sapien
cataacattaagttaaaataacatt

SEQ ID NO: 2821939 - DNA, 25 bp, Homo sapien
tcataacattaagttaaaataacat

SEQ ID NO: 2821940 - DNA, 25 bp, Homo sapien
ccccaagggtgatgaattttgaagc

SEQ ID NO: 2821941 - DNA, 25 bp, Homo sapien
tggctgccctagctgcttgacgata

SEQ ID NO: 2821942 - DNA, 25 bp, Homo sapien
gccagggcaagggaaaacagttgtc

SEQ ID NO: 2821943 - DNA, 25 bp, Homo sapien
ttacaaaggtcacacataatggctg

SEQ ID NO: 2821944 - DNA, 25 bp, Homo sapien
cagtaggaaaatgattagaatgaag

SEQ ID NO: 2821945 - DNA, 25 bp, Homo sapien
gcagtaggaaaatgattagaatgaa

SEQ ID NO: 2821946 - DNA, 25 bp, Homo sapien
agtaggaaaatgattagaatgaaga

SEQ ID NO: 2821947 - DNA, 25 bp, Homo sapien
gtaggaaaatgattagaatgaagaa

SEQ ID NO: 2821948 - DNA, 25 bp, Homo sapien
caaaaggtctttaaacagctacatc

SEQ ID NO: 2821949 - DNA, 25 bp, Homo sapien
caggcatatcatgaaataagcagca

SEQ ID NO: 2821950 - DNA, 25 bp, Homo sapien
catgctatatggcattgggccccaa

SEQ ID NO: 2821951 - DNA, 25 bp, Homo sapien
ggtgcagtggtcaagtttaaacaaa

SEQ ID NO: 2821952 - DNA, 25 bp, Homo sapien
gcccccatcaagtcgtttttgcctg

SEQ ID NO: 2821953 - DNA, 25 bp, Homo sapien
tccttccggagaacggccagaggct

SEQ ID NO: 2821954 - DNA, 25 bp, Homo sapien
tcactgggcccccatcaagtcgttt

SEQ ID NO: 2821955 - DNA, 25 bp, Homo sapien
gactggccctttggactgtgtggga

SEQ ID NO: 2821956 - DNA, 25 bp, Homo sapien
tcccaaagtgccgggccaccatacc

SEQ ID NO: 2821957 - DNA, 25 bp, Homo sapien
ccaaagtgccgggccaccatacccg

SEQ ID NO: 2821958 - DNA, 25 bp, Homo sapien
ctctccaccccacagatctccgttg

SEQ ID NO: 2821959 - DNA, 25 bp, Homo sapien
tccaccccacagatctccgttgtga

SEQ ID NO: 2821960 - DNA, 25 bp, Homo sapien
tctccaccccacagatctccgttgt

SEQ ID NO: 2821961 - DNA, 25 bp, Homo sapien
caccccacagatctccgttgtgatg

SEQ ID NO: 2821962 - DNA, 25 bp, Homo sapien
catcccagcccacagttctaacaca

SEQ ID NO: 2821963 - DNA, 25 bp, Homo sapien
tcccagcccacagttctaacacata

SEQ ID NO: 2821964 - DNA, 25 bp, Homo sapien
cccagcccacagttctaacacatac

SEQ ID NO: 2821965 - DNA, 25 bp, Homo sapien
accatcccagcccacagttctaaca

SEQ ID NO: 2821966 - DNA, 25 bp, Homo sapien
gagccgaagtcgaggactgctttga

SEQ ID NO: 2821967 - DNA, 25 bp, Homo sapien
ctggtctgttaattcggtcaatttt

SEQ ID NO: 2821968 - DNA, 25 bp, Homo sapien
tgattggagttgtctgatcccacat

SEQ ID NO: 2821969 - DNA, 25 bp, Homo sapien
tcggtcaattttatccatactaggg

SEQ ID NO: 2821970 - DNA, 25 bp, Homo sapien
atgaatcatcgagagtcagcaggag

SEQ ID NO: 2821971 - DNA, 25 bp, Homo sapien
gaatgaatcatcgagagtcagcagg

SEQ ID NO: 2821972 - DNA, 25 bp, Homo sapien
ttgaatgaatcatcgagagtcagca

SEQ ID NO: 2821973 - DNA, 25 bp, Homo sapien
cgttgaatgaatcatcgagagtcag

SEQ ID NO: 2821974 - DNA, 25 bp, Homo sapien
gagctccctttcgatattcttaatg

SEQ ID NO: 2821975 - DNA, 25 bp, Homo sapien
atgggtgggtaaacagctccttgca

SEQ ID NO: 2821976 - DNA, 25 bp, Homo sapien
ttgcatgctgggcaaatgagctccc

SEQ ID NO: 2821977 - DNA, 25 bp, Homo sapien
gagaatcaatgggtgggtaaacagc

SEQ ID NO: 2821978 - DNA, 25 bp, Homo sapien
tattctccctaaagtgacaccaagt

SEQ ID NO: 2821979 - DNA, 25 bp, Homo sapien
aatttaactgcattagagccaactg

SEQ ID NO: 2821980 - DNA, 25 bp, Homo sapien
gtgcttcaataatctctgacaattt

SEQ ID NO: 2821981 - DNA, 25 bp, Homo sapien
caactggttttatcattgtcagtgg

SEQ ID NO: 2821982 - DNA, 25 bp, Homo sapien
taagcagttcctcgagaaacttcgg

SEQ ID NO: 2821983 - DNA, 25 bp, Homo sapien
tggcggctccctcaattaagcagtt

SEQ ID NO: 2821984 - DNA, 25 bp, Homo sapien
aactgattaagtgtgatgtggcggc

SEQ ID NO: 2821985 - DNA, 25 bp, Homo sapien
caagagaaaatttagttcatctgtc

SEQ ID NO: 2821986 - DNA, 25 bp, Homo sapien
acaccggctaccgagcgcagggtct

SEQ ID NO: 2821987 - DNA, 25 bp, Homo sapien
ggcggccgtggagcctcggtccgaa

SEQ ID NO: 2821988 - DNA, 25 bp, Homo sapien
gaatctgagccatcgccctccatgg

SEQ ID NO: 2821989 - DNA, 25 bp, Homo sapien
gccaggtgtcatcagcggcacgttc

SEQ ID NO: 2821990 - DNA, 25 bp, Homo sapien
gaagatgagctggtcagctgtacgt

SEQ ID NO: 2821991 - DNA, 25 bp, Homo sapien
agcgagctttgctcccagcgactac

SEQ ID NO: 2821992 - DNA, 25 bp, Homo sapien
agaagcgagctttgctcccagcgac

SEQ ID NO: 2821993 - DNA, 25 bp, Homo sapien
ctgtacgtggccagcggaccgacgc

SEQ ID NO: 2821994 - DNA, 25 bp, Homo sapien
tcctgtttgggagaagtctgtcgct

SEQ ID NO: 2821995 - DNA, 25 bp, Homo sapien
ggtagcctcgtctccaatccggcat

SEQ ID NO: 2821996 - DNA, 25 bp, Homo sapien
agccctgtctgcagcggtagcctcg

SEQ ID NO: 2821997 - DNA, 25 bp, Homo sapien
tggcaagttccgtcgtcttcccaca

SEQ ID NO: 2821998 - DNA, 25 bp, Homo sapien
atatattccaggtattaagtttgta

SEQ ID NO: 2821999 - DNA, 25 bp, Homo sapien
cattacaaacccgaactacaaagtg

SEQ ID NO: 2822000 - DNA, 25 bp, Homo sapien
caactacaggcctctactctcttaa

SEQ ID NO: 2822001 - DNA, 25 bp, Homo sapien
caaagtggaaccgaaccccacagag

SEQ ID NO: 2822002 - DNA, 25 bp, Homo sapien
taattagaccagtttcccattattc

SEQ ID NO: 2822003 - DNA, 25 bp, Homo sapien
gagagactgctttccaacctcagag

SEQ ID NO: 2822004 - DNA, 25 bp, Homo sapien
cctttagaagtcaaccgggaatgct

SEQ ID NO: 2822005 - DNA, 25 bp, Homo sapien
caaaggtctgctattccatggttaa

SEQ ID NO: 2822006 - DNA, 25 bp, Homo sapien
gaaatggttaggagcctactccaga

SEQ ID NO: 2822007 - DNA, 25 bp, Homo sapien
tagtgagcatactgtgatgaaccca

SEQ ID NO: 2822008 - DNA, 25 bp, Homo sapien
aatgaagccagaaagttagtttgtg

SEQ ID NO: 2822009 - DNA, 25 bp, Homo sapien
gtgatgaacccattggtattctgag

SEQ ID NO: 2822010 - DNA, 25 bp, Homo sapien
tgttttttcattatagtgagcatac

SEQ ID NO: 2822011 - DNA, 25 bp, Homo sapien
catatgctatatctgcggcgttgga

SEQ ID NO: 2822012 - DNA, 25 bp, Homo sapien
caaagagctcggatatactggacag

SEQ ID NO: 2822013 - DNA, 25 bp, Homo sapien
gaagaatatctgagcgccataggac

SEQ ID NO: 2822014 - DNA, 25 bp, Homo sapien
gactgcagggtttcaggtgctcaca

SEQ ID NO: 2822015 - DNA, 25 bp, Homo sapien
caatttctcggatgcagcgcggagc

SEQ ID NO: 2822016 - DNA, 25 bp, Homo sapien
gggagtcgagtgctcctttgtgcca

SEQ ID NO: 2822017 - DNA, 25 bp, Homo sapien
ttctcgaagctccaggcgcagaggg

SEQ ID NO: 2822018 - DNA, 25 bp, Homo sapien
gttccgcctgcaaaccacttaggag

SEQ ID NO: 2822019 - DNA, 25 bp, Homo sapien
cagggcagggcgaacgaacgtgctg

SEQ ID NO: 2822020 - DNA, 25 bp, Homo sapien
agggcagggcgaacgaacgtgctgt

SEQ ID NO: 2822021 - DNA, 25 bp, Homo sapien
ccagggcagggcgaacgaacgtgct

SEQ ID NO: 2822022 - DNA, 25 bp, Homo sapien
gccagggcagggcgaacgaacgtgc

SEQ ID NO: 2822023 - DNA, 25 bp, Homo sapien
gagcctgttcactcgctgggcggac

SEQ ID NO: 2822024 - DNA, 25 bp, Homo sapien
gctgaccctgatcgcacacttcgag

SEQ ID NO: 2822025 - DNA, 25 bp, Homo sapien
gaagtcaccacgtttgagtagccct

SEQ ID NO: 2822026 - DNA, 25 bp, Homo sapien
tcggcgtccgagagcccctattgct

SEQ ID NO: 2822027 - DNA, 25 bp, Homo sapien
agcgtccgaaagtcccctcttggct

SEQ ID NO: 2822028 - DNA, 25 bp, Homo sapien
cttcccaggcgctggaatggacacg

SEQ ID NO: 2822029 - DNA, 25 bp, Homo sapien
gaaaaggcggctactttgcattccg

SEQ ID NO: 2822030 - DNA, 25 bp, Homo sapien
gatgccacgcaataaagaaaaggcg

SEQ ID NO: 2822031 - DNA, 25 bp, Homo sapien
gcctttagctatcaattccatgatg

SEQ ID NO: 2822032 - DNA, 25 bp, Homo sapien
tgcctttagctatcaattccatgat

SEQ ID NO: 2822033 - DNA, 25 bp, Homo sapien
ttgcctttagctatcaattccatga

SEQ ID NO: 2822034 - DNA, 25 bp, Homo sapien
tagtctgagttttgccgagctcccc

SEQ ID NO: 2822035 - DNA, 25 bp, Homo sapien
ggcctttatcgcatgccggcaggtt

SEQ ID NO: 2822036 - DNA, 25 bp, Homo sapien
gggctgcgcgatctaacggaacaaa

SEQ ID NO: 2822037 - DNA, 25 bp, Homo sapien
gaaatgaaggccatcgagggctccc

SEQ ID NO: 2822038 - DNA, 25 bp, Homo sapien
gtgacctccacttacacctttgtga

SEQ ID NO: 2822039 - DNA, 25 bp, Homo sapien
gaaatgggtaatatgcatcccctag

SEQ ID NO: 2822040 - DNA, 25 bp, Homo sapien
tagagacaagagcacacaagacatt

SEQ ID NO: 2822041 - DNA, 25 bp, Homo sapien
aaccacagtgttagagctgaacagc

SEQ ID NO: 2822042 - DNA, 25 bp, Homo sapien
caaacgacttgataacagggactca

SEQ ID NO: 2822043 - DNA, 25 bp, Homo sapien
ccagggctcattgctacatttttca

SEQ ID NO: 2822044 - DNA, 25 bp, Homo sapien
gctagaatcaaaaacagagagaata

SEQ ID NO: 2822045 - DNA, 25 bp, Homo sapien
caataagatactacctcatactcac

SEQ ID NO: 2822046 - DNA, 25 bp, Homo sapien
taaagagagcaacaaaattccttgg

SEQ ID NO: 2822047 - DNA, 25 bp, Homo sapien
ggatgatatttctctagcaagcaag

SEQ ID NO: 2822048 - DNA, 25 bp, Homo sapien
catgcccagccttaacagtgtgttt

SEQ ID NO: 2822049 - DNA, 25 bp, Homo sapien
tgtgcacatatcctaaagctatcct

SEQ ID NO: 2822050 - DNA, 25 bp, Homo sapien
aaatacagatgtccttttaatacca

SEQ ID NO: 2822051 - DNA, 25 bp, Homo sapien
aatacagatgtccttttaataccat

SEQ ID NO: 2822052 - DNA, 25 bp, Homo sapien
ggtacacagtgaaatgatacaccat

SEQ ID NO: 2822053 - DNA, 25 bp, Homo sapien
tatttccctgcagggtacacagtga

SEQ ID NO: 2822054 - DNA, 25 bp, Homo sapien
ctttttgatgctacggcaatatgat

SEQ ID NO: 2822055 - DNA, 25 bp, Homo sapien
cggcaatatgatcttggtaggtagg

SEQ ID NO: 2822056 - DNA, 25 bp, Homo sapien
gcctctgatcaatacagctgcagca

SEQ ID NO: 2822057 - DNA, 25 bp, Homo sapien
taaggtcctgactagctattcaccc

SEQ ID NO: 2822058 - DNA, 25 bp, Homo sapien
aattctttgggcgatgacaacttct

SEQ ID NO: 2822059 - DNA, 25 bp, Homo sapien
gacaacttctataggtacaaggaaa

SEQ ID NO: 2822060 - DNA, 25 bp, Homo sapien
gaccctaagagctatcatcctgttg

SEQ ID NO: 2822061 - DNA, 25 bp, Homo sapien
gaagaaccttctagtcatacctcag

SEQ ID NO: 2822062 - DNA, 25 bp, Homo sapien
gaggtttcttattaggctgacccta

SEQ ID NO: 2822063 - DNA, 25 bp, Homo sapien
catcttgcctggttgtgttactgcc

SEQ ID NO: 2822064 - DNA, 25 bp, Homo sapien
taaacagcttagaattgtagccaac

SEQ ID NO: 2822065 - DNA, 25 bp, Homo sapien
tttcccaccgccttcttcagagatg

SEQ ID NO: 2822066 - DNA, 25 bp, Homo sapien
actttgcagattacaggtcattctg

SEQ ID NO: 2822067 - DNA, 25 bp, Homo sapien
aaagacctgggtaaagagcataaca

SEQ ID NO: 2822068 - DNA, 25 bp, Homo sapien
cccgtttcccctttcattgacatct

SEQ ID NO: 2822069 - DNA, 25 bp, Homo sapien
agtacagagttcccaactattctgc

SEQ ID NO: 2822070 - DNA, 25 bp, Homo sapien
gagttcccaactattctgcacccgt

SEQ ID NO: 2822071 - DNA, 25 bp, Homo sapien
ctgcacccgtttcccctttcattga

SEQ ID NO: 2822072 - DNA, 25 bp, Homo sapien
tgcagtgggacttaattcatgccag

SEQ ID NO: 2822073 - DNA, 25 bp, Homo sapien
gaaatcttggctccagttcacctct

SEQ ID NO: 2822074 - DNA, 25 bp, Homo sapien
cagttcacctctgcagtgggactta

SEQ ID NO: 2822075 - DNA, 25 bp, Homo sapien
ccccagtagtaatcatttggagatt

SEQ ID NO: 2822076 - DNA, 25 bp, Homo sapien
tctccatgttagaaacggctttatg

SEQ ID NO: 2822077 - DNA, 25 bp, Homo sapien
tacttttgacagaaacttaactgcc

SEQ ID NO: 2822078 - DNA, 25 bp, Homo sapien
gcttcacaggtgaggctttgtaatc

SEQ ID NO: 2822079 - DNA, 25 bp, Homo sapien
tattactgatgaacctcctaggaaa

SEQ ID NO: 2822080 - DNA, 25 bp, Homo sapien
gccttcagtggccagccacttaaca

SEQ ID NO: 2822081 - DNA, 25 bp, Homo sapien
tcagtggccagccacttaacagaag

SEQ ID NO: 2822082 - DNA, 25 bp, Homo sapien
tggccagccacttaacagaagtgtg

SEQ ID NO: 2822083 - DNA, 25 bp, Homo sapien
gccacttaacagaagtgtgagaggc

SEQ ID NO: 2822084 - DNA, 25 bp, Homo sapien
cagcagtagcaatggagaacttgct

SEQ ID NO: 2822085 - DNA, 25 bp, Homo sapien
gcagcagtagcaatggagaacttgc

SEQ ID NO: 2822086 - DNA, 25 bp, Homo sapien
ctgtgtgcggtcctaaaagaatcag

SEQ ID NO: 2822087 - DNA, 25 bp, Homo sapien
tctccaggcatagcctagaaaaggc

SEQ ID NO: 2822088 - DNA, 25 bp, Homo sapien
aggctgtgtgcggtcctaaaagaat

SEQ ID NO: 2822089 - DNA, 25 bp, Homo sapien
taaaatttagacatggtaatgtggg

SEQ ID NO: 2822090 - DNA, 25 bp, Homo sapien
taagcttgataaaatccggtgtcac

SEQ ID NO: 2822091 - DNA, 25 bp, Homo sapien
aatggctacactgtttctggatggc

SEQ ID NO: 2822092 - DNA, 25 bp, Homo sapien
tgcactttctaacgagtacccaggt

SEQ ID NO: 2822093 - DNA, 25 bp, Homo sapien
taaggtaccgccagagaatctgcac

SEQ ID NO: 2822094 - DNA, 25 bp, Homo sapien
tagtacaaccttcttaaaaagcagc

SEQ ID NO: 2822095 - DNA, 25 bp, Homo sapien
tacattttcaaggatctcacagcaa

SEQ ID NO: 2822096 - DNA, 25 bp, Homo sapien
aaattgtgcacactttttgccccag

SEQ ID NO: 2822097 - DNA, 25 bp, Homo sapien
ttgaggaacgaagccacaaaggtct

SEQ ID NO: 2822098 - DNA, 25 bp, Homo sapien
aagagggtgctgatttctgacacca

SEQ ID NO: 2822099 - DNA, 25 bp, Homo sapien
tgtaccctctttcagtcctactgag

SEQ ID NO: 2822100 - DNA, 25 bp, Homo sapien
aacattaccagcaccgcagagtctc

SEQ ID NO: 2822101 - DNA, 25 bp, Homo sapien
ggtgaatgcacctacgtaaccagca

SEQ ID NO: 2822102 - DNA, 25 bp, Homo sapien
gagttggactgtaatcctggctcac

SEQ ID NO: 2822103 - DNA, 25 bp, Homo sapien
agtttatctgactcaactccccgca

SEQ ID NO: 2822104 - DNA, 25 bp, Homo sapien
tactaactttgactggagttggact

SEQ ID NO: 2822105 - DNA, 25 bp, Homo sapien
ccggtgtgctttcattgtctgtgag

SEQ ID NO: 2822106 - DNA, 25 bp, Homo sapien
tgtcactgagcaagtaacggatatg

SEQ ID NO: 2822107 - DNA, 25 bp, Homo sapien
gaaattagagcagctaacacactgg

SEQ ID NO: 2822108 - DNA, 25 bp, Homo sapien
tggtattcaccacagcaatgtctag

SEQ ID NO: 2822109 - DNA, 25 bp, Homo sapien
gacgcaatagttctgaatgtcactg

SEQ ID NO: 2822110 - DNA, 25 bp, Homo sapien
ccagtataaagattactggctcaag

SEQ ID NO: 2822111 - DNA, 25 bp, Homo sapien
cagcaggagatttgattgtaagact

SEQ ID NO: 2822112 - DNA, 25 bp, Homo sapien
tatcccaaagtgaaatcagcaggag

SEQ ID NO: 2822113 - DNA, 25 bp, Homo sapien
aacttcatttatataggccacacag

SEQ ID NO: 2822114 - DNA, 25 bp, Homo sapien
agctacagttatgctacaaatcccc

SEQ ID NO: 2822115 - DNA, 25 bp, Homo sapien
gagcacacttggttatacatggctt

SEQ ID NO: 2822116 - DNA, 25 bp, Homo sapien
taaacttgagctacagttatgctac

SEQ ID NO: 2822117 - DNA, 25 bp, Homo sapien
cacttggttatacatggcttttaaa

SEQ ID NO: 2822118 - DNA, 25 bp, Homo sapien
ttcagaagtccgtgtgcttacattc

SEQ ID NO: 2822119 - DNA, 25 bp, Homo sapien
cagaagtccgtgtgcttacattcag

SEQ ID NO: 2822120 - DNA, 25 bp, Homo sapien
gaagtccgtgtgcttacattcagag

SEQ ID NO: 2822121 - DNA, 25 bp, Homo sapien
agaagtccgtgtgcttacattcaga

SEQ ID NO: 2822122 - DNA, 25 bp, Homo sapien
caaatagctgtgcttactcaatgcc

SEQ ID NO: 2822123 - DNA, 25 bp, Homo sapien
taatggaggcccatgttgatcacct

SEQ ID NO: 2822124 - DNA, 25 bp, Homo sapien
aaatacttaggtttcttctggctca

SEQ ID NO: 2822125 - DNA, 25 bp, Homo sapien
agaagggcatattccttgagccaca

SEQ ID NO: 2822126 - DNA, 25 bp, Homo sapien
ttttctcaaagttagtgtattggaa

SEQ ID NO: 2822127 - DNA, 25 bp, Homo sapien
atttttctcaaagttagtgtattgg

SEQ ID NO: 2822128 - DNA, 25 bp, Homo sapien
tctcaaagttagtgtattggaaaat

SEQ ID NO: 2822129 - DNA, 25 bp, Homo sapien
ttctcaaagttagtgtattggaaaa

SEQ ID NO: 2822130 - DNA, 25 bp, Homo sapien
cttctagtttacccatcagacatag

SEQ ID NO: 2822131 - DNA, 25 bp, Homo sapien
tgtctacaggcttattaggtcttcc

SEQ ID NO: 2822132 - DNA, 25 bp, Homo sapien
tctagtttacccatcagacatagtg

SEQ ID NO: 2822133 - DNA, 25 bp, Homo sapien
ggtgtctacaggcttattaggtctt

SEQ ID NO: 2822134 - DNA, 25 bp, Homo sapien
catgagattcaagtccagctccctg

SEQ ID NO: 2822135 - DNA, 25 bp, Homo sapien
gagattcaagtccagctccctgtgc

SEQ ID NO: 2822136 - DNA, 25 bp, Homo sapien
ccctgtgccagtccattgtcatagg

SEQ ID NO: 2822137 - DNA, 25 bp, Homo sapien
ctccctgtgccagtccattgtcata

SEQ ID NO: 2822138 - DNA, 25 bp, Homo sapien
ttgagcatatagcaaatacaggaag

SEQ ID NO: 2822139 - DNA, 25 bp, Homo sapien
atgtggccactatcataaggatgag

SEQ ID NO: 2822140 - DNA, 25 bp, Homo sapien
tatttactcggcttaagtcgtctcc

SEQ ID NO: 2822141 - DNA, 25 bp, Homo sapien
ctatcataaggatgagctgttccag

SEQ ID NO: 2822142 - DNA, 25 bp, Homo sapien
cggcttaagtcgtctccaagaataa

SEQ ID NO: 2822143 - DNA, 25 bp, Homo sapien
gaatacccaggtatgaagagcctcg

SEQ ID NO: 2822144 - DNA, 25 bp, Homo sapien
tcggaaaccacagcgatttagattt

SEQ ID NO: 2822145 - DNA, 25 bp, Homo sapien
gagcctcggaaaccacagcgattta

SEQ ID NO: 2822146 - DNA, 25 bp, Homo sapien
ggtatgaagagcctcggaaaccaca

SEQ ID NO: 2822147 - DNA, 25 bp, Homo sapien
tctacctaacacaggttgggcgcgg

SEQ ID NO: 2822148 - DNA, 25 bp, Homo sapien
tactgagcccacctgtacacatgtc

SEQ ID NO: 2822149 - DNA, 25 bp, Homo sapien
tgcaattccatgacgaacgtttctg

SEQ ID NO: 2822150 - DNA, 25 bp, Homo sapien
cacatgtcacctatggataagctcc

SEQ ID NO: 2822151 - DNA, 25 bp, Homo sapien
tctaaggaatccaacatatccagcc

SEQ ID NO: 2822152 - DNA, 25 bp, Homo sapien
atatccagcccggagagtgcaaaaa

SEQ ID NO: 2822153 - DNA, 25 bp, Homo sapien
ttgttcaccacatctaaggaatcca

SEQ ID NO: 2822154 - DNA, 25 bp, Homo sapien
gcccggagagtgcaaaaaatgcaat

SEQ ID NO: 2822155 - DNA, 25 bp, Homo sapien
tccctggtggaaaaagactagcagc

SEQ ID NO: 2822156 - DNA, 25 bp, Homo sapien
cagtggaactcctttatgtgggaag

SEQ ID NO: 2822157 - DNA, 25 bp, Homo sapien
catgtattagacactgagctgggac

SEQ ID NO: 2822158 - DNA, 25 bp, Homo sapien
actacagagatttgggtgcacttca

SEQ ID NO: 2822159 - DNA, 25 bp, Homo sapien
cgcgcctttccgctggagcccgggc

SEQ ID NO: 2822160 - DNA, 25 bp, Homo sapien
cggcgcccagtttgcggtccgactc

SEQ ID NO: 2822161 - DNA, 25 bp, Homo sapien
agtttgcggtccgactccgccgcgc

SEQ ID NO: 2822162 - DNA, 25 bp, Homo sapien
tccgccgcgcctttccgctggagcc

SEQ ID NO: 2822163 - DNA, 25 bp, Homo sapien
aggcagcgctggaaaaatcgcacgt

SEQ ID NO: 2822164 - DNA, 25 bp, Homo sapien
ggcagcgctggaaaaatcgcacgtg

SEQ ID NO: 2822165 - DNA, 25 bp, Homo sapien
gcagcgctggaaaaatcgcacgtgc

SEQ ID NO: 2822166 - DNA, 25 bp, Homo sapien
cgccgcgacccggaatcagtgcccg

SEQ ID NO: 2822167 - DNA, 25 bp, Homo sapien
gctgctccggaagcgacgtccgccg

SEQ ID NO: 2822168 - DNA, 25 bp, Homo sapien
gcgacccggaatcagtgcccgcgga

SEQ ID NO: 2822169 - DNA, 25 bp, Homo sapien
cccggaatcagtgcccgcggagaga

SEQ ID NO: 2822170 - DNA, 25 bp, Homo sapien
cgccgcagactaagccagtatttga

SEQ ID NO: 2822171 - DNA, 25 bp, Homo sapien
gaaaccgctatcatctgggtcctgt

SEQ ID NO: 2822172 - DNA, 25 bp, Homo sapien
gcagcacttcctctctccgatatct

SEQ ID NO: 2822173 - DNA, 25 bp, Homo sapien
gatatctccctagctagcgcatgac

SEQ ID NO: 2822174 - DNA, 25 bp, Homo sapien
tgggaagcgcaaggtcaaaagcatc

SEQ ID NO: 2822175 - DNA, 25 bp, Homo sapien
tcaagtacgctttgagacaattctg

SEQ ID NO: 2822176 - DNA, 25 bp, Homo sapien
aattctggctctgtagaacctgagg

SEQ ID NO: 2822177 - DNA, 25 bp, Homo sapien
ttttctactcaaagccctcgaggct

SEQ ID NO: 2822178 - DNA, 25 bp, Homo sapien
gaatcagctatggacactctataca

SEQ ID NO: 2822179 - DNA, 25 bp, Homo sapien
aatcagctatggacactctatacat

SEQ ID NO: 2822180 - DNA, 25 bp, Homo sapien
tctcagaaaattaattctaataaac

SEQ ID NO: 2822181 - DNA, 25 bp, Homo sapien
ctcagaaaattaattctaataaaca

SEQ ID NO: 2822182 - DNA, 25 bp, Homo sapien
tcagaaaattaattctaataaacat

SEQ ID NO: 2822183 - DNA, 25 bp, Homo sapien
aatgaccatgacgaagttgcccagg

SEQ ID NO: 2822184 - DNA, 25 bp, Homo sapien
gctgtagaccttagagatggcataa

SEQ ID NO: 2822185 - DNA, 25 bp, Homo sapien
aaaaatgaccatgacgaagttgccc

SEQ ID NO: 2822186 - DNA, 25 bp, Homo sapien
ccagaggtcagggttcagcctgctg

SEQ ID NO: 2822187 - DNA, 25 bp, Homo sapien
tgtagcagtcattgatagctgccat

SEQ ID NO: 2822188 - DNA, 25 bp, Homo sapien
gtcattgatagctgccatcagcagc

SEQ ID NO: 2822189 - DNA, 25 bp, Homo sapien
agcagtcattgatagctgccatcag

SEQ ID NO: 2822190 - DNA, 25 bp, Homo sapien
gcttcttggccatgggggccgagac

SEQ ID NO: 2822191 - DNA, 25 bp, Homo sapien
gttctggccggtgcaggtctgcttc

SEQ ID NO: 2822192 - DNA, 25 bp, Homo sapien
gggatgacccgcgccagcacagagc

SEQ ID NO: 2822193 - DNA, 25 bp, Homo sapien
tgggcgcagggatgacccgcgccag

SEQ ID NO: 2822194 - DNA, 25 bp, Homo sapien
ctggtgttctggccggtgcaggtct

SEQ ID NO: 2822195 - DNA, 25 bp, Homo sapien
gatcacagactccttgatgggcaga

SEQ ID NO: 2822196 - DNA, 25 bp, Homo sapien
aaagtcaatgatcacagactccttg

SEQ ID NO: 2822197 - DNA, 25 bp, Homo sapien
aaaaagtcaatgatcacagactcct

SEQ ID NO: 2822198 - DNA, 25 bp, Homo sapien
agtcaatgatcacagactccttgat

SEQ ID NO: 2822199 - DNA, 25 bp, Homo sapien
tggatacaggaatttgaaagctgca

SEQ ID NO: 2822200 - DNA, 25 bp, Homo sapien
ttggatacaggaatttgaaagctgc

SEQ ID NO: 2822201 - DNA, 25 bp, Homo sapien
ggatacaggaatttgaaagctgcat

SEQ ID NO: 2822202 - DNA, 25 bp, Homo sapien
cttggatacaggaatttgaaagctg

SEQ ID NO: 2822203 - DNA, 25 bp, Homo sapien
aatttggaattgctgaaggaaacca

SEQ ID NO: 2822204 - DNA, 25 bp, Homo sapien
caattaatagggtatatgagagaca

SEQ ID NO: 2822205 - DNA, 25 bp, Homo sapien
tttcctattttgaggcaaacagaag

SEQ ID NO: 2822206 - DNA, 25 bp, Homo sapien
tttaagtgccatcaagagaaatcac

SEQ ID NO: 2822207 - DNA, 25 bp, Homo sapien
gaagcaggaatactaatgacaaagc

SEQ ID NO: 2822208 - DNA, 25 bp, Homo sapien
tacatcaataataggccaacacata

SEQ ID NO: 2822209 - DNA, 25 bp, Homo sapien
taaataccttcttggtagaagcagg

SEQ ID NO: 2822210 - DNA, 25 bp, Homo sapien
tctctccctggtataacttagtatg

SEQ ID NO: 2822211 - DNA, 25 bp, Homo sapien
tcttctctgtattccttgtctccag

SEQ ID NO: 2822212 - DNA, 25 bp, Homo sapien
ctgtattccttgtctccaggttgga

SEQ ID NO: 2822213 - DNA, 25 bp, Homo sapien
ttccttgtctccaggttggaatagc

SEQ ID NO: 2822214 - DNA, 25 bp, Homo sapien
tccttgtctccaggttggaatagcc

SEQ ID NO: 2822215 - DNA, 25 bp, Homo sapien
ggttcatatgggcatgtaggtttgc

SEQ ID NO: 2822216 - DNA, 25 bp, Homo sapien
tgtaggtttgcaaccctcattaagg

SEQ ID NO: 2822217 - DNA, 25 bp, Homo sapien
ttggctggttcatatgggcatgtag

SEQ ID NO: 2822218 - DNA, 25 bp, Homo sapien
tttatttctagctctagctctcaaa

SEQ ID NO: 2822219 - DNA, 25 bp, Homo sapien
gatatgtagaagtggcccagagcct

SEQ ID NO: 2822220 - DNA, 25 bp, Homo sapien
gagggatctctactaacattgtttt

SEQ ID NO: 2822221 - DNA, 25 bp, Homo sapien
tgggtttgtaaagcctagagggatc

SEQ ID NO: 2822222 - DNA, 25 bp, Homo sapien
gagcctgttggtcctatctttttgg

SEQ ID NO: 2822223 - DNA, 25 bp, Homo sapien
taggataagtaactaccaataagtc

SEQ ID NO: 2822224 - DNA, 25 bp, Homo sapien
aggataagtaactaccaataagtct

SEQ ID NO: 2822225 - DNA, 25 bp, Homo sapien
ctagtgatatagccagacaacaaat

SEQ ID NO: 2822226 - DNA, 25 bp, Homo sapien
gagggtcaccaatatctttagctct

SEQ ID NO: 2822227 - DNA, 25 bp, Homo sapien
tatccatgagggtcaccaatatctt

SEQ ID NO: 2822228 - DNA, 25 bp, Homo sapien
agcaatgctcatagctgccattgat

SEQ ID NO: 2822229 - DNA, 25 bp, Homo sapien
ctgcaagagagattaagcaatgctc

SEQ ID NO: 2822230 - DNA, 25 bp, Homo sapien
gagagattaagcaatgctcatagct

SEQ ID NO: 2822231 - DNA, 25 bp, Homo sapien
gattaagcaatgctcatagctgcca

SEQ ID NO: 2822232 - DNA, 25 bp, Homo sapien
ttcctttgcctgtctatctagaatt

SEQ ID NO: 2822233 - DNA, 25 bp, Homo sapien
tcttcctttgcctgtctatctagaa

SEQ ID NO: 2822234 - DNA, 25 bp, Homo sapien
gtctatctagaattttcagttcaag

SEQ ID NO: 2822235 - DNA, 25 bp, Homo sapien
ctatctagaattttcagttcaagtt

SEQ ID NO: 2822236 - DNA, 25 bp, Homo sapien
ctcatggagcctacattatggtggg

SEQ ID NO: 2822237 - DNA, 25 bp, Homo sapien
caatgcacttaactctagggtacaa

SEQ ID NO: 2822238 - DNA, 25 bp, Homo sapien
ttgaccacccagcaataatctcgat

SEQ ID NO: 2822239 - DNA, 25 bp, Homo sapien
aacacaccactaatgccctcatgga

SEQ ID NO: 2822240 - DNA, 25 bp, Homo sapien
acttaaactggcgctggcgttcttt

SEQ ID NO: 2822241 - DNA, 25 bp, Homo sapien
attttaacttaaactggcgctggcg

SEQ ID NO: 2822242 - DNA, 25 bp, Homo sapien
ttaacttaaactggcgctggcgttc

SEQ ID NO: 2822243 - DNA, 25 bp, Homo sapien
taacttaaactggcgctggcgttct

SEQ ID NO: 2822244 - DNA, 25 bp, Homo sapien
aagcacaggtgtgttgtctgccttt

SEQ ID NO: 2822245 - DNA, 25 bp, Homo sapien
tggagcccgctaagttctaataagg

SEQ ID NO: 2822246 - DNA, 25 bp, Homo sapien
gacattataagcatctacccgctgg

SEQ ID NO: 2822247 - DNA, 25 bp, Homo sapien
cagtggacaactggctagaggcatt

SEQ ID NO: 2822248 - DNA, 25 bp, Homo sapien
taaactagaggacttggtaaagcac

SEQ ID NO: 2822249 - DNA, 25 bp, Homo sapien
gcttgagattgctctgaaagctttc

SEQ ID NO: 2822250 - DNA, 25 bp, Homo sapien
actttgtctacaggaactttgcttg

SEQ ID NO: 2822251 - DNA, 25 bp, Homo sapien
tctgtttctgaattacccaaagccc

SEQ ID NO: 2822252 - DNA, 25 bp, Homo sapien
gatcataatcatcccaggcaccttg

SEQ ID NO: 2822253 - DNA, 25 bp, Homo sapien
atcaacctctgctcttctttaaaag

SEQ ID NO: 2822254 - DNA, 25 bp, Homo sapien
taaaagtgttaattgcattttcaat

SEQ ID NO: 2822255 - DNA, 25 bp, Homo sapien
ctcttctttaaaagtgttaattgca

SEQ ID NO: 2822256 - DNA, 25 bp, Homo sapien
cttctttaaaagtgttaattgcatt

SEQ ID NO: 2822257 - DNA, 25 bp, Homo sapien
ttattatgtattttggccaattgtt

SEQ ID NO: 2822258 - DNA, 25 bp, Homo sapien
attatgtattttggccaattgttgc

SEQ ID NO: 2822259 - DNA, 25 bp, Homo sapien
tattatgtattttggccaattgttg

SEQ ID NO: 2822260 - DNA, 25 bp, Homo sapien
tatgtattttggccaattgttgctg

SEQ ID NO: 2822261 - DNA, 25 bp, Homo sapien
tactatgctcaattctgaagtcact

SEQ ID NO: 2822262 - DNA, 25 bp, Homo sapien
caattcttctagcatactatgctca

SEQ ID NO: 2822263 - DNA, 25 bp, Homo sapien
cacttttttggttgtagaaatgact

SEQ ID NO: 2822264 - DNA, 25 bp, Homo sapien
tctagcatactatgctcaattctga

SEQ ID NO: 2822265 - DNA, 25 bp, Homo sapien
ctgaagtactaaaacagccatcact

SEQ ID NO: 2822266 - DNA, 25 bp, Homo sapien
tgaagatgaaaaggacgaattccac

SEQ ID NO: 2822267 - DNA, 25 bp, Homo sapien
atttttctgctgtgcgtacaaattc

SEQ ID NO: 2822268 - DNA, 25 bp, Homo sapien
tctgctgtgcgtacaaattctgctt

SEQ ID NO: 2822269 - DNA, 25 bp, Homo sapien
tttagatgacaattgcaagaatctc

SEQ ID NO: 2822270 - DNA, 25 bp, Homo sapien
caggtttagatgacaattgcaagaa

SEQ ID NO: 2822271 - DNA, 25 bp, Homo sapien
gagcaggtttagatgacaattgcaa

SEQ ID NO: 2822272 - DNA, 25 bp, Homo sapien
taggagcaggtttagatgacaattg

SEQ ID NO: 2822273 - DNA, 25 bp, Homo sapien
taaactgcacgtggaatctaacaca

SEQ ID NO: 2822274 - DNA, 25 bp, Homo sapien
tacgctaagtgaaacagagatgcaa

SEQ ID NO: 2822275 - DNA, 25 bp, Homo sapien
caaactcaccataagtgcagtggct

SEQ ID NO: 2822276 - DNA, 25 bp, Homo sapien
tagtagggctacattcattctggaa

SEQ ID NO: 2822277 - DNA, 25 bp, Homo sapien
catatgttcttatcacgcggctagg

SEQ ID NO: 2822278 - DNA, 25 bp, Homo sapien
gaaagcggtcctaagccgatcactg

SEQ ID NO: 2822279 - DNA, 25 bp, Homo sapien
acataacgttagtccaaagctcggg

SEQ ID NO: 2822280 - DNA, 25 bp, Homo sapien
tccgaaaccacatggaggcggctct

SEQ ID NO: 2822281 - DNA, 25 bp, Homo sapien
cgcctgccgccagagcagctctcgg

SEQ ID NO: 2822282 - DNA, 25 bp, Homo sapien
ctcgcctgccgccagagcagctctc

SEQ ID NO: 2822283 - DNA, 25 bp, Homo sapien
agagcagctctcggttctcccggat

SEQ ID NO: 2822284 - DNA, 25 bp, Homo sapien
tcgcctgccgccagagcagctctcg

SEQ ID NO: 2822285 - DNA, 25 bp, Homo sapien
gctaccacaaccgtcgtcagtgcgg

SEQ ID NO: 2822286 - DNA, 25 bp, Homo sapien
tgttgaggcgctggcgtcgctccca

SEQ ID NO: 2822287 - DNA, 25 bp, Homo sapien
acagccccggctaccgcggtggccg

SEQ ID NO: 2822288 - DNA, 25 bp, Homo sapien
tcgctcccacgccggtcccggtggc

SEQ ID NO: 2822289 - DNA, 25 bp, Homo sapien
cggtgcctggggattcgtggcaggc

SEQ ID NO: 2822290 - DNA, 25 bp, Homo sapien
ttacccgccgagctactcgggccgc

SEQ ID NO: 2822291 - DNA, 25 bp, Homo sapien
cccgccgagctactcgggccgcggc

SEQ ID NO: 2822292 - DNA, 25 bp, Homo sapien
ccggtgcctggggattcgtggcagg

SEQ ID NO: 2822293 - DNA, 25 bp, Homo sapien
tatgatggttgtgatttagggaacg

SEQ ID NO: 2822294 - DNA, 25 bp, Homo sapien
ttagggaacgctgacgtttcaatac

SEQ ID NO: 2822295 - DNA, 25 bp, Homo sapien
aaggaaaagctttaagttggacatg

SEQ ID NO: 2822296 - DNA, 25 bp, Homo sapien
gctttaagttggacatgatatgatg

SEQ ID NO: 2822297 - DNA, 25 bp, Homo sapien
tatacaagggtctaaaggcaagcca

SEQ ID NO: 2822298 - DNA, 25 bp, Homo sapien
tagatgaccagagagtatacaaggg

SEQ ID NO: 2822299 - DNA, 25 bp, Homo sapien
tctgtcctagcccaagaagttcttt

SEQ ID NO: 2822300 - DNA, 25 bp, Homo sapien
tgagaggagtctgctgtgttaccct

SEQ ID NO: 2822301 - DNA, 25 bp, Homo sapien
ttgcggcgagatggtcagctatcct

SEQ ID NO: 2822302 - DNA, 25 bp, Homo sapien
aatgaggctgcccaatcaacgtcca

SEQ ID NO: 2822303 - DNA, 25 bp, Homo sapien
ccattccacgggtagggtagtcttg

SEQ ID NO: 2822304 - DNA, 25 bp, Homo sapien
taccacttttaggtgttgcggcgag

SEQ ID NO: 2822305 - DNA, 25 bp, Homo sapien
ggttagatcttagttacacagaaca

SEQ ID NO: 2822306 - DNA, 25 bp, Homo sapien
gtggtgagaccagatgactcattgt

SEQ ID NO: 2822307 - DNA, 25 bp, Homo sapien
ccaagttcaactcataggttagatc

SEQ ID NO: 2822308 - DNA, 25 bp, Homo sapien
caaatacaaacacgtggcaaagtcc

SEQ ID NO: 2822309 - DNA, 25 bp, Homo sapien
tgtctccggcaggatgcttctccga

SEQ ID NO: 2822310 - DNA, 25 bp, Homo sapien
ttcaatgcatagtggttcctgccca

SEQ ID NO: 2822311 - DNA, 25 bp, Homo sapien
gtctataggaacatggtcaggccca

SEQ ID NO: 2822312 - DNA, 25 bp, Homo sapien
tccaatgtccagctgtagtcctgtc

SEQ ID NO: 2822313 - DNA, 25 bp, Homo sapien
aagcaaatcgggcacaaaaatagtc

SEQ ID NO: 2822314 - DNA, 25 bp, Homo sapien
tcactgcagacattgaagttctgca

SEQ ID NO: 2822315 - DNA, 25 bp, Homo sapien
tcctccagttgagtaggtgatggtt

SEQ ID NO: 2822316 - DNA, 25 bp, Homo sapien
aaatagtctcctccagttgagtagg

SEQ ID NO: 2822317 - DNA, 25 bp, Homo sapien
aaatctgatgacattgaattgctca

SEQ ID NO: 2822318 - DNA, 25 bp, Homo sapien
gtgctccatgacttctttatgatag

SEQ ID NO: 2822319 - DNA, 25 bp, Homo sapien
ggccttgggcccattgatcagcttg

SEQ ID NO: 2822320 - DNA, 25 bp, Homo sapien
tatgatagtaccaggccttgggccc

SEQ ID NO: 2822321 - DNA, 25 bp, Homo sapien
atttgacctgagcccgtcatctgca

SEQ ID NO: 2822322 - DNA, 25 bp, Homo sapien
tttgacctgagcccgtcatctgcat

SEQ ID NO: 2822323 - DNA, 25 bp, Homo sapien
catttgacctgagcccgtcatctgc

SEQ ID NO: 2822324 - DNA, 25 bp, Homo sapien
cccacaggcccacaaactttggact

SEQ ID NO: 2822325 - DNA, 25 bp, Homo sapien
gccttgtgtattgtcagccctctca

SEQ ID NO: 2822326 - DNA, 25 bp, Homo sapien
gttctcttgctgactccctgacccc

SEQ ID NO: 2822327 - DNA, 25 bp, Homo sapien
accagtggatctggcgtaagaagcc

SEQ ID NO: 2822328 - DNA, 25 bp, Homo sapien
cagcagccggaagaagccgaaagag

SEQ ID NO: 2822329 - DNA, 25 bp, Homo sapien
tgctactcagcagccggaagaagcc

SEQ ID NO: 2822330 - DNA, 25 bp, Homo sapien
tcctgctactcagcagccggaagaa

SEQ ID NO: 2822331 - DNA, 25 bp, Homo sapien
ctcagcagccggaagaagccgaaag

SEQ ID NO: 2822332 - DNA, 25 bp, Homo sapien
ggtgtacataattaacaggtgtgag

SEQ ID NO: 2822333 - DNA, 25 bp, Homo sapien
tagggtcttgagctgtcaatgattt

SEQ ID NO: 2822334 - DNA, 25 bp, Homo sapien
ggtcctgttagcagttcccatgcaa

SEQ ID NO: 2822335 - DNA, 25 bp, Homo sapien
gcagggtactcggaaggtcctgtta

SEQ ID NO: 2822336 - DNA, 25 bp, Homo sapien
ttaatctcgctctgtgactcatcct

SEQ ID NO: 2822337 - DNA, 25 bp, Homo sapien
ggttgcccagatcagggacgtagcg

SEQ ID NO: 2822338 - DNA, 25 bp, Homo sapien
cttggttgcccagatcagggacgta

SEQ ID NO: 2822339 - DNA, 25 bp, Homo sapien
tggttgcccagatcagggacgtagc

SEQ ID NO: 2822340 - DNA, 25 bp, Homo sapien
ttggttgcccagatcagggacgtag

SEQ ID NO: 2822341 - DNA, 25 bp, Homo sapien
cattccagggacaatgaactccctg

SEQ ID NO: 2822342 - DNA, 25 bp, Homo sapien
ctgtccattccagggacaatgaact

SEQ ID NO: 2822343 - DNA, 25 bp, Homo sapien
gaactccctgccgagattctgcatc

SEQ ID NO: 2822344 - DNA, 25 bp, Homo sapien
ggacaatgaactccctgccgagatt

SEQ ID NO: 2822345 - DNA, 25 bp, Homo sapien
agcaggtggcagtagagggcgatgc

SEQ ID NO: 2822346 - DNA, 25 bp, Homo sapien
aggtaggccagcaggccaagtcagg

SEQ ID NO: 2822347 - DNA, 25 bp, Homo sapien
ggtaggccagcaggccaagtcaggg

SEQ ID NO: 2822348 - DNA, 25 bp, Homo sapien
ggtggcagtagagggcgatgcagtg

SEQ ID NO: 2822349 - DNA, 25 bp, Homo sapien
ctttacctcaggtaaagtcagtcac

SEQ ID NO: 2822350 - DNA, 25 bp, Homo sapien
tgcaggccgagtcggggcagtggtc

SEQ ID NO: 2822351 - DNA, 25 bp, Homo sapien
tgatggtgcagccaagcttgtccat

SEQ ID NO: 2822352 - DNA, 25 bp, Homo sapien
ttgcagcactgattacatctaatgt

SEQ ID NO: 2822353 - DNA, 25 bp, Homo sapien
tgatgtcattggcactgttgtccca

SEQ ID NO: 2822354 - DNA, 25 bp, Homo sapien
tgttgtcccatttggacacttcagc

SEQ ID NO: 2822355 - DNA, 25 bp, Homo sapien
ggacacttcagcgtccagcttgctc

SEQ ID NO: 2822356 - DNA, 25 bp, Homo sapien
gttctgcagtcttcgctttttgctc

SEQ ID NO: 2822357 - DNA, 25 bp, Homo sapien
tctggatgctcatcctacttctgac

SEQ ID NO: 2822358 - DNA, 25 bp, Homo sapien
tgtctggatgctcatcctacttctg

SEQ ID NO: 2822359 - DNA, 25 bp, Homo sapien
gtctggatgctcatcctacttctga

SEQ ID NO: 2822360 - DNA, 25 bp, Homo sapien
tttgtctggatgctcatcctacttc

SEQ ID NO: 2822361 - DNA, 25 bp, Homo sapien
ggtgactatgtgaatggcccaggct

SEQ ID NO: 2822362 - DNA, 25 bp, Homo sapien
gcaggaggcattgataaactcattc

SEQ ID NO: 2822363 - DNA, 25 bp, Homo sapien
cccggatgccaccatatactaggca

SEQ ID NO: 2822364 - DNA, 25 bp, Homo sapien
caaccttgaattgcactagctgtgc

SEQ ID NO: 2822365 - DNA, 25 bp, Homo sapien
caatgatgcatttgttccattttcc

SEQ ID NO: 2822366 - DNA, 25 bp, Homo sapien
tggagagcaatgatgcatttgttcc

SEQ ID NO: 2822367 - DNA, 25 bp, Homo sapien
agagcaatgatgcatttgttccatt

SEQ ID NO: 2822368 - DNA, 25 bp, Homo sapien
cttggagagcaatgatgcatttgtt

SEQ ID NO: 2822369 - DNA, 25 bp, Homo sapien
cagccaagaagtcatcaatggaagt

SEQ ID NO: 2822370 - DNA, 25 bp, Homo sapien
ccaagaagtcatcaatggaagtaat

SEQ ID NO: 2822371 - DNA, 25 bp, Homo sapien
gagacagccaagaagtcatcaatgg

SEQ ID NO: 2822372 - DNA, 25 bp, Homo sapien
gacagccaagaagtcatcaatggaa

SEQ ID NO: 2822373 - DNA, 25 bp, Homo sapien
ttaaaaagatccatgttctcttggg

SEQ ID NO: 2822374 - DNA, 25 bp, Homo sapien
aagatccatgttctcttgggccagt

SEQ ID NO: 2822375 - DNA, 25 bp, Homo sapien
agatccatgttctcttgggccagtc

SEQ ID NO: 2822376 - DNA, 25 bp, Homo sapien
aaaagatccatgttctcttgggcca

SEQ ID NO: 2822377 - DNA, 25 bp, Homo sapien
gttttgctaaagccaatgcagcatt

SEQ ID NO: 2822378 - DNA, 25 bp, Homo sapien
ggttttgctaaagccaatgcagcat

SEQ ID NO: 2822379 - DNA, 25 bp, Homo sapien
tgtggttttgctaaagccaatgcag

SEQ ID NO: 2822380 - DNA, 25 bp, Homo sapien
tggttttgctaaagccaatgcagca

SEQ ID NO: 2822381 - DNA, 25 bp, Homo sapien
tggcttgcagacattcgaacaagtt

SEQ ID NO: 2822382 - DNA, 25 bp, Homo sapien
cattcgaacaagttttacaccttct

SEQ ID NO: 2822383 - DNA, 25 bp, Homo sapien
ttgcagacattcgaacaagttttac

SEQ ID NO: 2822384 - DNA, 25 bp, Homo sapien
cagacattcgaacaagttttacacc

SEQ ID NO: 2822385 - DNA, 25 bp, Homo sapien
aaccaatttgttgccatgttcacag

SEQ ID NO: 2822386 - DNA, 25 bp, Homo sapien
caaccaatttgttgccatgttcaca

SEQ ID NO: 2822387 - DNA, 25 bp, Homo sapien
tcacgatggtcatcatgcttgcagg

SEQ ID NO: 2822388 - DNA, 25 bp, Homo sapien
tctatagcagaattgagggaattac

SEQ ID NO: 2822389 - DNA, 25 bp, Homo sapien
gcagctccgctaatgatgccttcca

SEQ ID NO: 2822390 - DNA, 25 bp, Homo sapien
caggacctggaggacagtgttacac

SEQ ID NO: 2822391 - DNA, 25 bp, Homo sapien
cagggaaggcctcaagcactccttg

SEQ ID NO: 2822392 - DNA, 25 bp, Homo sapien
tccagggaaggcctcaagcactcct

SEQ ID NO: 2822393 - DNA, 25 bp, Homo sapien
ctccagggaaggcctcaagcactcc

SEQ ID NO: 2822394 - DNA, 25 bp, Homo sapien
ccagggaaggcctcaagcactcctt

SEQ ID NO: 2822395 - DNA, 25 bp, Homo sapien
tatcagttattgagtacatatgcta

SEQ ID NO: 2822396 - DNA, 25 bp, Homo sapien
cagttattgagtacatatgctagtt

SEQ ID NO: 2822397 - DNA, 25 bp, Homo sapien
tattgagtacatatgctagttctac

SEQ ID NO: 2822398 - DNA, 25 bp, Homo sapien
tgtttatcagttattgagtacatat

SEQ ID NO: 2822399 - DNA, 25 bp, Homo sapien
catgcccgggatgccgtatagaaga

SEQ ID NO: 2822400 - DNA, 25 bp, Homo sapien
tgactgccataatgttcaccttatt

SEQ ID NO: 2822401 - DNA, 25 bp, Homo sapien
ggcatgcccgggatgccgtatagaa

SEQ ID NO: 2822402 - DNA, 25 bp, Homo sapien
ccgggatgccgtatagaagatcaga

SEQ ID NO: 2822403 - DNA, 25 bp, Homo sapien
gagcaaagttcaagctgcctgaacc

SEQ ID NO: 2822404 - DNA, 25 bp, Homo sapien
gcagagagcaaagttcaagctgcct

SEQ ID NO: 2822405 - DNA, 25 bp, Homo sapien
caatttcaagatatcatcttccaca

SEQ ID NO: 2822406 - DNA, 25 bp, Homo sapien
atttcccatgttcagccaaaatcag

SEQ ID NO: 2822407 - DNA, 25 bp, Homo sapien
aaaagctattcctagagaaaactgg

SEQ ID NO: 2822408 - DNA, 25 bp, Homo sapien
tattcctagagaaaactggctctcc

SEQ ID NO: 2822409 - DNA, 25 bp, Homo sapien
ttcctagagaaaactggctctcctt

SEQ ID NO: 2822410 - DNA, 25 bp, Homo sapien
gctattcctagagaaaactggctct

SEQ ID NO: 2822411 - DNA, 25 bp, Homo sapien
gtttaagtggcctgcgtggacagca

SEQ ID NO: 2822412 - DNA, 25 bp, Homo sapien
tttaagtggcctgcgtggacagcag

SEQ ID NO: 2822413 - DNA, 25 bp, Homo sapien
agtggcctgcgtggacagcagtcat

SEQ ID NO: 2822414 - DNA, 25 bp, Homo sapien
taagtggcctgcgtggacagcagtc

SEQ ID NO: 2822415 - DNA, 25 bp, Homo sapien
gggggccaggctccagcaagcacac

SEQ ID NO: 2822416 - DNA, 25 bp, Homo sapien
atgggggccaggctccagcaagcac

SEQ ID NO: 2822417 - DNA, 25 bp, Homo sapien
tgggggccaggctccagcaagcaca

SEQ ID NO: 2822418 - DNA, 25 bp, Homo sapien
tcatgggggccaggctccagcaagc

SEQ ID NO: 2822419 - DNA, 25 bp, Homo sapien
tgccatcgtgcataatcaaaccctt

SEQ ID NO: 2822420 - DNA, 25 bp, Homo sapien
catcgtgcataatcaaaccctttga

SEQ ID NO: 2822421 - DNA, 25 bp, Homo sapien
gccatcgtgcataatcaaacccttt

SEQ ID NO: 2822422 - DNA, 25 bp, Homo sapien
cctgccatcgtgcataatcaaaccc

SEQ ID NO: 2822423 - DNA, 25 bp, Homo sapien
tatagtgtggacagtggtaaggcga

SEQ ID NO: 2822424 - DNA, 25 bp, Homo sapien
tctgccacatctgcctaaggcaagg

SEQ ID NO: 2822425 - DNA, 25 bp, Homo sapien
caaggctgggtgacagtagtttttt

SEQ ID NO: 2822426 - DNA, 25 bp, Homo sapien
ggagatgatacaaccttctgccaca

SEQ ID NO: 2822427 - DNA, 25 bp, Homo sapien
ctcccactcataaagtgatctctaa

SEQ ID NO: 2822428 - DNA, 25 bp, Homo sapien
tgctgagtttccttgtgcgggtaat

SEQ ID NO: 2822429 - DNA, 25 bp, Homo sapien
tgtgcgggtaatttgtaacacttac

SEQ ID NO: 2822430 - DNA, 25 bp, Homo sapien
tgccacatgtaattcttggaaactg

SEQ ID NO: 2822431 - DNA, 25 bp, Homo sapien
acagctgcagattgcccgggctttg

SEQ ID NO: 2822432 - DNA, 25 bp, Homo sapien
tcacagctgcagattgcccgggctt

SEQ ID NO: 2822433 - DNA, 25 bp, Homo sapien
agctgcagattgcccgggctttgct

SEQ ID NO: 2822434 - DNA, 25 bp, Homo sapien
atcacagctgcagattgcccgggct

SEQ ID NO: 2822435 - DNA, 25 bp, Homo sapien
tggttatccatagtaaagctttgcc

SEQ ID NO: 2822436 - DNA, 25 bp, Homo sapien
ggacatctgacacaatccacttgct

SEQ ID NO: 2822437 - DNA, 25 bp, Homo sapien
cagcatgcggttgcatctgtggtta

SEQ ID NO: 2822438 - DNA, 25 bp, Homo sapien
ttcctaaagacacagcatgcggttg

SEQ ID NO: 2822439 - DNA, 25 bp, Homo sapien
tgtttcgaaataggtctgtgtctga

SEQ ID NO: 2822440 - DNA, 25 bp, Homo sapien
tgtgtctgatgacctttcctgtagg

SEQ ID NO: 2822441 - DNA, 25 bp, Homo sapien
gggaaggactggcaatgctgcacat

SEQ ID NO: 2822442 - DNA, 25 bp, Homo sapien
ctgtaggaagagttccagaatattc

SEQ ID NO: 2822443 - DNA, 25 bp, Homo sapien
agcgcccaacagacgccagactgcc

SEQ ID NO: 2822444 - DNA, 25 bp, Homo sapien
ccaacagacgccagactgccccagg

SEQ ID NO: 2822445 - DNA, 25 bp, Homo sapien
acagacgccagactgccccaggcag

SEQ ID NO: 2822446 - DNA, 25 bp, Homo sapien
gcagcgcccaacagacgccagactg

SEQ ID NO: 2822447 - DNA, 25 bp, Homo sapien
cccagtgaatgctggatagtgctca

SEQ ID NO: 2822448 - DNA, 25 bp, Homo sapien
ctccccagtgaatgctggatagtgc

SEQ ID NO: 2822449 - DNA, 25 bp, Homo sapien
tccccagtgaatgctggatagtgct

SEQ ID NO: 2822450 - DNA, 25 bp, Homo sapien
ccagtgaatgctggatagtgctcac

SEQ ID NO: 2822451 - DNA, 25 bp, Homo sapien
gaggggctagaacagctgaacacac

SEQ ID NO: 2822452 - DNA, 25 bp, Homo sapien
tccatttcagacaaaggcttaagag

SEQ ID NO: 2822453 - DNA, 25 bp, Homo sapien
gactctggaagtaacagcaacacgc

SEQ ID NO: 2822454 - DNA, 25 bp, Homo sapien
tatgggtgtaatctgtagttctgct

SEQ ID NO: 2822455 - DNA, 25 bp, Homo sapien
ttccatgggaaataaggggaggtga

SEQ ID NO: 2822456 - DNA, 25 bp, Homo sapien
tccatgggaaataaggggaggtgat

SEQ ID NO: 2822457 - DNA, 25 bp, Homo sapien
ccatgggaaataaggggaggtgatc

SEQ ID NO: 2822458 - DNA, 25 bp, Homo sapien
cactttcaatgagaggttggtctgt

SEQ ID NO: 2822459 - DNA, 25 bp, Homo sapien
cagcacttaagtcactttcaatgag

SEQ ID NO: 2822460 - DNA, 25 bp, Homo sapien
taaccagcacttaagtcactttcaa

SEQ ID NO: 2822461 - DNA, 25 bp, Homo sapien
ttaagtcactttcaatgagaggttg

SEQ ID NO: 2822462 - DNA, 25 bp, Homo sapien
catgttctcactgtcaccaatctgg

SEQ ID NO: 2822463 - DNA, 25 bp, Homo sapien
acctggcaaatgagcctcttggatg

SEQ ID NO: 2822464 - DNA, 25 bp, Homo sapien
tcttggatgcttccaatcacattgg

SEQ ID NO: 2822465 - DNA, 25 bp, Homo sapien
gacctcattgttcttgctccacctg

SEQ ID NO: 2822466 - DNA, 25 bp, Homo sapien
tctacacagtgttctgaaacctgct

SEQ ID NO: 2822467 - DNA, 25 bp, Homo sapien
tcttgtggccaatttcccatcagag

SEQ ID NO: 2822468 - DNA, 25 bp, Homo sapien
tatgtatttggagttggaccacacc

SEQ ID NO: 2822469 - DNA, 25 bp, Homo sapien
aaatgtgtctacagttgggtccaga

SEQ ID NO: 2822470 - DNA, 25 bp, Homo sapien
ggcttgataagatgatggtggataa

SEQ ID NO: 2822471 - DNA, 25 bp, Homo sapien
gatggtggataaggatggtgatatg

SEQ ID NO: 2822472 - DNA, 25 bp, Homo sapien
agaacatcacttgggccaaatgggc

SEQ ID NO: 2822473 - DNA, 25 bp, Homo sapien
gatgagaacatcacttgggccaaat

SEQ ID NO: 2822474 - DNA, 25 bp, Homo sapien
tcacgatgctttgtgtgtcatcagc

SEQ ID NO: 2822475 - DNA, 25 bp, Homo sapien
gagggtttgctgagatatcctgtgc

SEQ ID NO: 2822476 - DNA, 25 bp, Homo sapien
cgataatcgtgtggcatacagagga

SEQ ID NO: 2822477 - DNA, 25 bp, Homo sapien
aacctcatccgcgataatcgtgtgg

SEQ ID NO: 2822478 - DNA, 25 bp, Homo sapien
tatgtcattatctcatccagcctgc

SEQ ID NO: 2822479 - DNA, 25 bp, Homo sapien
catctaaaattcaggaggccccaaa

SEQ ID NO: 2822480 - DNA, 25 bp, Homo sapien
gacaatttattagctggcatccgaa

SEQ ID NO: 2822481 - DNA, 25 bp, Homo sapien
taactccagtcaataacaccgtgct

SEQ ID NO: 2822482 - DNA, 25 bp, Homo sapien
tataagagcatgtaagccctcccac

SEQ ID NO: 2822483 - DNA, 25 bp, Homo sapien
tgagatgtgcctcactataagagca

SEQ ID NO: 2822484 - DNA, 25 bp, Homo sapien
cccaatggcatttgtggagatggca

SEQ ID NO: 2822485 - DNA, 25 bp, Homo sapien
tgatccagctcattgaactcacagg

SEQ ID NO: 2822486 - DNA, 25 bp, Homo sapien
gctggtgttatcacaacagtgctca

SEQ ID NO: 2822487 - DNA, 25 bp, Homo sapien
caagtttaagcctgtgcatagagaa

SEQ ID NO: 2822488 - DNA, 25 bp, Homo sapien
taactgcaaatggtaacgagtcctt

SEQ ID NO: 2822489 - DNA, 25 bp, Homo sapien
gaaatggttaactctgccccaaaca

SEQ ID NO: 2822490 - DNA, 25 bp, Homo sapien
cccttggatgcagcttaagaaacct

SEQ ID NO: 2822491 - DNA, 25 bp, Homo sapien
agggtaccgccctacacatgtagta

SEQ ID NO: 2822492 - DNA, 25 bp, Homo sapien
taactgtaatgggtcagctggacac

SEQ ID NO: 2822493 - DNA, 25 bp, Homo sapien
gattcactatgacacgagcagcaag

SEQ ID NO: 2822494 - DNA, 25 bp, Homo sapien
gaccagtcacacttgctgagagaag

SEQ ID NO: 2822495 - DNA, 25 bp, Homo sapien
gaaggaccaagaatacgttctctga

SEQ ID NO: 2822496 - DNA, 25 bp, Homo sapien
tctcatcaggatcagcaataagacc

SEQ ID NO: 2822497 - DNA, 25 bp, Homo sapien
cagagtctgcatagacagcgcctct

SEQ ID NO: 2822498 - DNA, 25 bp, Homo sapien
gaagaatatgctctatgtgacccct

SEQ ID NO: 2822499 - DNA, 25 bp, Homo sapien
gctcaacatagcatgtgtaccagaa

SEQ ID NO: 2822500 - DNA, 25 bp, Homo sapien
gatttctctacacttcacctgcggc

SEQ ID NO: 2822501 - DNA, 25 bp, Homo sapien
ttaacaatgagtaagctaaccaagc

SEQ ID NO: 2822502 - DNA, 25 bp, Homo sapien
tcatctctccaataacataggcttt

SEQ ID NO: 2822503 - DNA, 25 bp, Homo sapien
gagagaacagacataccctcacata

SEQ ID NO: 2822504 - DNA, 25 bp, Homo sapien
gaaagagctcaaaggtaatcaagtt

SEQ ID NO: 2822505 - DNA, 25 bp, Homo sapien
tatctccacaagtacataaagaagc

SEQ ID NO: 2822506 - DNA, 25 bp, Homo sapien
catgatttaacaaggactggaccac

SEQ ID NO: 2822507 - DNA, 25 bp, Homo sapien
cattgctctaggaggaattccacca

SEQ ID NO: 2822508 - DNA, 25 bp, Homo sapien
ggagtttgccatcccgagctgcgtt

SEQ ID NO: 2822509 - DNA, 25 bp, Homo sapien
tccaaatggccatcgaaacacgcag

SEQ ID NO: 2822510 - DNA, 25 bp, Homo sapien
gtttaactctatcgacacaggcaag

SEQ ID NO: 2822511 - DNA, 25 bp, Homo sapien
tgttaattgctgcaccccagaacgg

SEQ ID NO: 2822512 - DNA, 25 bp, Homo sapien
caaccacgaagagtatgttccgtcc

SEQ ID NO: 2822513 - DNA, 25 bp, Homo sapien
ttccaacatctgacaaccagggcac

SEQ ID NO: 2822514 - DNA, 25 bp, Homo sapien
gccgccgctggtcactcgggctttg

SEQ ID NO: 2822515 - DNA, 25 bp, Homo sapien
tggtcactcgggctttgtccgtccc

SEQ ID NO: 2822516 - DNA, 25 bp, Homo sapien
gccgctggtcactcgggctttgtcc

SEQ ID NO: 2822517 - DNA, 25 bp, Homo sapien
ccgctggtcactcgggctttgtccg

SEQ ID NO: 2822518 - DNA, 25 bp, Homo sapien
tccgcgccccaaaggaatgaatccg

SEQ ID NO: 2822519 - DNA, 25 bp, Homo sapien
ccccaaaggaatgaatccggccgcg

SEQ ID NO: 2822520 - DNA, 25 bp, Homo sapien
tgctccgcgccccaaaggaatgaat

SEQ ID NO: 2822521 - DNA, 25 bp, Homo sapien
cgcgccccaaaggaatgaatccggc

SEQ ID NO: 2822522 - DNA, 25 bp, Homo sapien
tgcagcgactgctgcgacggatggt

SEQ ID NO: 2822523 - DNA, 25 bp, Homo sapien
tgcctcccgcccttagtcggctcgg

SEQ ID NO: 2822524 - DNA, 25 bp, Homo sapien
ttagtcggctcggactgcagcggct

SEQ ID NO: 2822525 - DNA, 25 bp, Homo sapien
cggatggtgtaatgggctgcgagcc

SEQ ID NO: 2822526 - DNA, 25 bp, Homo sapien
atcactgactgtgccgccacgccat

SEQ ID NO: 2822527 - DNA, 25 bp, Homo sapien
cacatcactgactgtgccgccacgc

SEQ ID NO: 2822528 - DNA, 25 bp, Homo sapien
tgactgtgccgccacgccattgggc

SEQ ID NO: 2822529 - DNA, 25 bp, Homo sapien
actgactgtgccgccacgccattgg

SEQ ID NO: 2822530 - DNA, 25 bp, Homo sapien
ctcctgctgccaattggcagttcca

SEQ ID NO: 2822531 - DNA, 25 bp, Homo sapien
caatatgtcttgtccatatcccagc

SEQ ID NO: 2822532 - DNA, 25 bp, Homo sapien
ggcagttccaatatgtcttgtccat

SEQ ID NO: 2822533 - DNA, 25 bp, Homo sapien
catatcccagccctgaactcagtca

SEQ ID NO: 2822534 - DNA, 25 bp, Homo sapien
taactgggatttcattgccaaaagt

SEQ ID NO: 2822535 - DNA, 25 bp, Homo sapien
gtaccatgatgaagaacgcaaccag

SEQ ID NO: 2822536 - DNA, 25 bp, Homo sapien
cagtctaagactataccttttaagg

SEQ ID NO: 2822537 - DNA, 25 bp, Homo sapien
tatagaacttctccagtgaggacca

SEQ ID NO: 2822538 - DNA, 25 bp, Homo sapien
aagtaacacatatggccttgaaggg

SEQ ID NO: 2822539 - DNA, 25 bp, Homo sapien
taggcaaggtcaggatgaaagcgac

SEQ ID NO: 2822540 - DNA, 25 bp, Homo sapien
ttaactagtctcttagcagtcagcc

SEQ ID NO: 2822541 - DNA, 25 bp, Homo sapien
tagggcaactatcaagatctggatc

SEQ ID NO: 2822542 - DNA, 25 bp, Homo sapien
tgacaagagtattgccacatatgac

SEQ ID NO: 2822543 - DNA, 25 bp, Homo sapien
cttacctcaatccaaacttaatatg

SEQ ID NO: 2822544 - DNA, 25 bp, Homo sapien
gctctgagttattaattaatggcac

SEQ ID NO: 2822545 - DNA, 25 bp, Homo sapien
aatggcactttcaagtattacttac

SEQ ID NO: 2822546 - DNA, 25 bp, Homo sapien
aagaaagttgtccttatccagccgt

SEQ ID NO: 2822547 - DNA, 25 bp, Homo sapien
ttctacttggaatctcataagaaac

SEQ ID NO: 2822548 - DNA, 25 bp, Homo sapien
tatccagccgttaagtgttcaaaat

SEQ ID NO: 2822549 - DNA, 25 bp, Homo sapien
tttttctacttggaatctcataaga

SEQ ID NO: 2822550 - DNA, 25 bp, Homo sapien
caggtgtggagggtacgtcactttc

SEQ ID NO: 2822551 - DNA, 25 bp, Homo sapien
ttcatttcatcaagtgcctgacagc

SEQ ID NO: 2822552 - DNA, 25 bp, Homo sapien
tggcttaaggacatcaacttccaga

SEQ ID NO: 2822553 - DNA, 25 bp, Homo sapien
cttgcccttcagaccatccacaggt

SEQ ID NO: 2822554 - DNA, 25 bp, Homo sapien
accaggcggtgtaagactgagaaga

SEQ ID NO: 2822555 - DNA, 25 bp, Homo sapien
agcgcagattgctcagggcaaacac

SEQ ID NO: 2822556 - DNA, 25 bp, Homo sapien
gcaaacacacggaatcccaccttac

SEQ ID NO: 2822557 - DNA, 25 bp, Homo sapien
ttagcagatgacctaagaccaggcg

SEQ ID NO: 2822558 - DNA, 25 bp, Homo sapien
cagcatggcatgtggtttctttacc

SEQ ID NO: 2822559 - DNA, 25 bp, Homo sapien
tttccaggctggaacaacatccacc

SEQ ID NO: 2822560 - DNA, 25 bp, Homo sapien
gggccttaggaatgagctgttgcaa

SEQ ID NO: 2822561 - DNA, 25 bp, Homo sapien
gaaatcctttgcctgcactgaaatg

SEQ ID NO: 2822562 - DNA, 25 bp, Homo sapien
ggactgaagcggaaaacatccctga

SEQ ID NO: 2822563 - DNA, 25 bp, Homo sapien
tcaaggcagaacttaagttagtcag

SEQ ID NO: 2822564 - DNA, 25 bp, Homo sapien
gttaaccccagcaaacagcttgttg

SEQ ID NO: 2822565 - DNA, 25 bp, Homo sapien
cttgtgctggaaagcgttaacccca

SEQ ID NO: 2822566 - DNA, 25 bp, Homo sapien
tagtctgactcagaaacggtgttgg

SEQ ID NO: 2822567 - DNA, 25 bp, Homo sapien
tggaagggagctcaaccgaaacact

SEQ ID NO: 2822568 - DNA, 25 bp, Homo sapien
agaacatcacttacagaggacagag

SEQ ID NO: 2822569 - DNA, 25 bp, Homo sapien
catcttattaggctggacactgtca

SEQ ID NO: 2822570 - DNA, 25 bp, Homo sapien
tacatgaggctcaactcgggttctc

SEQ ID NO: 2822571 - DNA, 25 bp, Homo sapien
tcccctgtaaagctccagggtgggc

SEQ ID NO: 2822572 - DNA, 25 bp, Homo sapien
ggcggacctcttgttaagtcggata

SEQ ID NO: 2822573 - DNA, 25 bp, Homo sapien
tactcaaaatgaaagctccccagca

SEQ ID NO: 2822574 - DNA, 25 bp, Homo sapien
tcttccacaatcttcattggagttg

SEQ ID NO: 2822575 - DNA, 25 bp, Homo sapien
agtacaaatcgatgcttcatttcaa

SEQ ID NO: 2822576 - DNA, 25 bp, Homo sapien
acattgtgtctggtgctctatgaag

SEQ ID NO: 2822577 - DNA, 25 bp, Homo sapien
cattggagttgaaaataaacaagtt

SEQ ID NO: 2822578 - DNA, 25 bp, Homo sapien
ttagcatcaattgccccaagtttgg

SEQ ID NO: 2822579 - DNA, 25 bp, Homo sapien
caattgccccaagtttggcaggcat

SEQ ID NO: 2822580 - DNA, 25 bp, Homo sapien
ttgccccaagtttggcaggcatgaa

SEQ ID NO: 2822581 - DNA, 25 bp, Homo sapien
accatttagcatcaattgccccaag

SEQ ID NO: 2822582 - DNA, 25 bp, Homo sapien
gcatgctcctcatagaacgttttgg

SEQ ID NO: 2822583 - DNA, 25 bp, Homo sapien
taagctactatcagaacgttaaggc

SEQ ID NO: 2822584 - DNA, 25 bp, Homo sapien
caaaaagatgtgtgcagatcccggt

SEQ ID NO: 2822585 - DNA, 25 bp, Homo sapien
taggaggcttgacttacttgcatgc

SEQ ID NO: 2822586 - DNA, 25 bp, Homo sapien
tgaatcggtggtgggaaatgcctcc

SEQ ID NO: 2822587 - DNA, 25 bp, Homo sapien
tattgcaacatccatgagaggtgcc

SEQ ID NO: 2822588 - DNA, 25 bp, Homo sapien
caagtctcatgatcccgaagagggc

SEQ ID NO: 2822589 - DNA, 25 bp, Homo sapien
cagttacattcatcctcagtggcag

SEQ ID NO: 2822590 - DNA, 25 bp, Homo sapien
tctacttgtgtaggaaatccacgac

SEQ ID NO: 2822591 - DNA, 25 bp, Homo sapien
cattagggacgtatagaactggaaa

SEQ ID NO: 2822592 - DNA, 25 bp, Homo sapien
tgtaaatgctgtctgccacatggca

SEQ ID NO: 2822593 - DNA, 25 bp, Homo sapien
gccgcatgggtataacagagttgta

SEQ ID NO: 2822594 - DNA, 25 bp, Homo sapien
tggaatctgactcatgatatcctgg

SEQ ID NO: 2822595 - DNA, 25 bp, Homo sapien
tcctggacttgtatccacactgtgc

SEQ ID NO: 2822596 - DNA, 25 bp, Homo sapien
acattacacaaggatagatcttcag

SEQ ID NO: 2822597 - DNA, 25 bp, Homo sapien
tcctgttggcccctctgttgtattg

SEQ ID NO: 2822598 - DNA, 25 bp, Homo sapien
cttttaccccaagagagagaaagag

SEQ ID NO: 2822599 - DNA, 25 bp, Homo sapien
gagagagaaagagggcaggaattta

SEQ ID NO: 2822600 - DNA, 25 bp, Homo sapien
agagaaagagggcaggaatttattt

SEQ ID NO: 2822601 - DNA, 25 bp, Homo sapien
agagggcaggaatttattttagact

SEQ ID NO: 2822602 - DNA, 25 bp, Homo sapien
tataaatatccaaggcagaagagga

SEQ ID NO: 2822603 - DNA, 25 bp, Homo sapien
agaggaaaactttatgtatttctca

SEQ ID NO: 2822604 - DNA, 25 bp, Homo sapien
aaatatccaaggcagaagaggaaaa

SEQ ID NO: 2822605 - DNA, 25 bp, Homo sapien
aaactttatgtatttctcagcattt

SEQ ID NO: 2822606 - DNA, 25 bp, Homo sapien
agtaaggagactgccaagggaacaa

SEQ ID NO: 2822607 - DNA, 25 bp, Homo sapien
gactgccaagggaacaagctgtgga

SEQ ID NO: 2822608 - DNA, 25 bp, Homo sapien
ctgtggaaagttgtgctgttcccac

SEQ ID NO: 2822609 - DNA, 25 bp, Homo sapien
agctgtggaaagttgtgctgttccc

SEQ ID NO: 2822610 - DNA, 25 bp, Homo sapien
cacgactgtgcttcactgttggcca

SEQ ID NO: 2822611 - DNA, 25 bp, Homo sapien
ccttagtgcactgtggttcccaggg

SEQ ID NO: 2822612 - DNA, 25 bp, Homo sapien
tgttggccagttaactccatcagta

SEQ ID NO: 2822613 - DNA, 25 bp, Homo sapien
gactcagacatggagagatggtcag

SEQ ID NO: 2822614 - DNA, 25 bp, Homo sapien
gcttcagctaaatggaaggagagtg

SEQ ID NO: 2822615 - DNA, 25 bp, Homo sapien
tcacctccttgcttcagctaaatgg

SEQ ID NO: 2822616 - DNA, 25 bp, Homo sapien
ctccatcagaacaatgaacaccagg

SEQ ID NO: 2822617 - DNA, 25 bp, Homo sapien
gaacaaaggaaaggcatggcgtggt

SEQ ID NO: 2822618 - DNA, 25 bp, Homo sapien
tatcaggtgccatgaaagcactcag

SEQ ID NO: 2822619 - DNA, 25 bp, Homo sapien
gccatgaaagcactcaggagggcca

SEQ ID NO: 2822620 - DNA, 25 bp, Homo sapien
ccatctgcagcacgggacgcttcac

SEQ ID NO: 2822621 - DNA, 25 bp, Homo sapien
tattcagaatatcaggtgccatgaa

SEQ ID NO: 2822622 - DNA, 25 bp, Homo sapien
cttgcaagacaaagacaggtggaca

SEQ ID NO: 2822623 - DNA, 25 bp, Homo sapien
ttgcaagacaaagacaggtggacat

SEQ ID NO: 2822624 - DNA, 25 bp, Homo sapien
agggaatttgctagtaaagagggtg

SEQ ID NO: 2822625 - DNA, 25 bp, Homo sapien
gggaatttgctagtaaagagggtga

SEQ ID NO: 2822626 - DNA, 25 bp, Homo sapien
ggaatttgctagtaaagagggtgaa

SEQ ID NO: 2822627 - DNA, 25 bp, Homo sapien
gaattaaggtcttatcctcttgggc

SEQ ID NO: 2822628 - DNA, 25 bp, Homo sapien
ggccacttaactcttgagtgtgctg

SEQ ID NO: 2822629 - DNA, 25 bp, Homo sapien
gtgtggaagcgtcttagaattaagg

SEQ ID NO: 2822630 - DNA, 25 bp, Homo sapien
taactcttgagtgtgctgggtcaca

SEQ ID NO: 2822631 - DNA, 25 bp, Homo sapien
tctgtggcatactaagatttagtgg

SEQ ID NO: 2822632 - DNA, 25 bp, Homo sapien
tgtggcatactaagatttagtggtg

SEQ ID NO: 2822633 - DNA, 25 bp, Homo sapien
actctgtggcatactaagatttagt

SEQ ID NO: 2822634 - DNA, 25 bp, Homo sapien
ctctgtggcatactaagatttagtg

SEQ ID NO: 2822635 - DNA, 25 bp, Homo sapien
gcgagcgccaccacagtcagcccgc

SEQ ID NO: 2822636 - DNA, 25 bp, Homo sapien
cacagtcagcccgcggcttttctgt

SEQ ID NO: 2822637 - DNA, 25 bp, Homo sapien
gtcagcccgcggcttttctgtcttc

SEQ ID NO: 2822638 - DNA, 25 bp, Homo sapien
ccaccacagtcagcccgcggctttt

SEQ ID NO: 2822639 - DNA, 25 bp, Homo sapien
ccttggaggtcgccgcttgtcaggc

SEQ ID NO: 2822640 - DNA, 25 bp, Homo sapien
cgctcgaggccggactgctgctttg

SEQ ID NO: 2822641 - DNA, 25 bp, Homo sapien
tcgccgcttgtcaggcctgactgct

SEQ ID NO: 2822642 - DNA, 25 bp, Homo sapien
gccgctcgaggccggactgctgctt

SEQ ID NO: 2822643 - DNA, 25 bp, Homo sapien
caggggttaatgtggcgggataact

SEQ ID NO: 2822644 - DNA, 25 bp, Homo sapien
gtgagtcaggggttaatgtggcggg

SEQ ID NO: 2822645 - DNA, 25 bp, Homo sapien
gagtcaggggttaatgtggcgggat

SEQ ID NO: 2822646 - DNA, 25 bp, Homo sapien
tcaggggttaatgtggcgggataac

SEQ ID NO: 2822647 - DNA, 25 bp, Homo sapien
ccacaaccgaacagattggaactcc

SEQ ID NO: 2822648 - DNA, 25 bp, Homo sapien
gatcctttttctcaggttcgttctc

SEQ ID NO: 2822649 - DNA, 25 bp, Homo sapien
tctcaggttcgttctccacaaccga

SEQ ID NO: 2822650 - DNA, 25 bp, Homo sapien
cgttctccacaaccgaacagattgg

SEQ ID NO: 2822651 - DNA, 25 bp, Homo sapien
gaggacccagttaagccatgctgaa

SEQ ID NO: 2822652 - DNA, 25 bp, Homo sapien
catacctttgtgtggacaacgcctg

SEQ ID NO: 2822653 - DNA, 25 bp, Homo sapien
taaaaaggcatgtcacgttacactg

SEQ ID NO: 2822654 - DNA, 25 bp, Homo sapien
gaagttctgctgaccttaaaaaggc

SEQ ID NO: 2822655 - DNA, 25 bp, Homo sapien
tagcaaataagaataggtgggaaat

SEQ ID NO: 2822656 - DNA, 25 bp, Homo sapien
tttttctcaatagagctttttgaaa

SEQ ID NO: 2822657 - DNA, 25 bp, Homo sapien
gaatgcctacacatgacctattcaa

SEQ ID NO: 2822658 - DNA, 25 bp, Homo sapien
cctgcaaatttaattaggcaagaaa

SEQ ID NO: 2822659 - DNA, 25 bp, Homo sapien
gaaatggcatgttcaaccaaatgag

SEQ ID NO: 2822660 - DNA, 25 bp, Homo sapien
cacagtacagaagatattcatgacc

SEQ ID NO: 2822661 - DNA, 25 bp, Homo sapien
aaaagtgcaaagaactgatcacagc

SEQ ID NO: 2822662 - DNA, 25 bp, Homo sapien
gatggatacatttcactaggagcag

SEQ ID NO: 2822663 - DNA, 25 bp, Homo sapien
cattacaagcctagattttccaaag

SEQ ID NO: 2822664 - DNA, 25 bp, Homo sapien
taagcaacgaggtaccattacaagc

SEQ ID NO: 2822665 - DNA, 25 bp, Homo sapien
agaatgatccaaatgccttcatgga

SEQ ID NO: 2822666 - DNA, 25 bp, Homo sapien
tatcctatgacccaccaattccatt

SEQ ID NO: 2822667 - DNA, 25 bp, Homo sapien
gaagtgtggtcccatattgatccca

SEQ ID NO: 2822668 - DNA, 25 bp, Homo sapien
catagtgcttgagaaagagggctct

SEQ ID NO: 2822669 - DNA, 25 bp, Homo sapien
cagatggcatcaccttagcagcaga

SEQ ID NO: 2822670 - DNA, 25 bp, Homo sapien
ctaaaaacagagtatgccagaccag

SEQ ID NO: 2822671 - DNA, 25 bp, Homo sapien
taagacctctttagagcaactgatg

SEQ ID NO: 2822672 - DNA, 25 bp, Homo sapien
tacaaattaggcagtacagacgtgg

SEQ ID NO: 2822673 - DNA, 25 bp, Homo sapien
tcattacagaactgtactctaggct

SEQ ID NO: 2822674 - DNA, 25 bp, Homo sapien
ggacagtccctcagatattttaata

SEQ ID NO: 2822675 - DNA, 25 bp, Homo sapien
aaaacaatagtcatagggcctgctt

SEQ ID NO: 2822676 - DNA, 25 bp, Homo sapien
tgataggtgcaatcctgttaaagaa

SEQ ID NO: 2822677 - DNA, 25 bp, Homo sapien
cctatttaactataaatgttacaca

SEQ ID NO: 2822678 - DNA, 25 bp, Homo sapien
caaaaatgcatagtacagagattta

SEQ ID NO: 2822679 - DNA, 25 bp, Homo sapien
gcttttcagtccactgtattttcaa

SEQ ID NO: 2822680 - DNA, 25 bp, Homo sapien
tcgaaagaataaatttgcttttcag

SEQ ID NO: 2822681 - DNA, 25 bp, Homo sapien
gaaatcttcgaaagaataaatttgc

SEQ ID NO: 2822682 - DNA, 25 bp, Homo sapien
tgcttttcagtccactgtattttca

SEQ ID NO: 2822683 - DNA, 25 bp, Homo sapien
gaatgtgtagattattagcaaagta

SEQ ID NO: 2822684 - DNA, 25 bp, Homo sapien
gcaaagtaatgccttaaaatgtatc

SEQ ID NO: 2822685 - DNA, 25 bp, Homo sapien
tgtatcttcacacagttgaaatttt

SEQ ID NO: 2822686 - DNA, 25 bp, Homo sapien
ttttagtataaacttgtatatcaag

SEQ ID NO: 2822687 - DNA, 25 bp, Homo sapien
tataaagggacacttgcaaagccgc

SEQ ID NO: 2822688 - DNA, 25 bp, Homo sapien
taaggagtagctggtcttcaaacac

SEQ ID NO: 2822689 - DNA, 25 bp, Homo sapien
tttaagctgggaatgactcacagac

SEQ ID NO: 2822690 - DNA, 25 bp, Homo sapien
cacaatagcatagagaggcaaccag

SEQ ID NO: 2822691 - DNA, 25 bp, Homo sapien
tggtgcatcaattctcaaaacgtag

SEQ ID NO: 2822692 - DNA, 25 bp, Homo sapien
gggcttgggctacagttcatcacat

SEQ ID NO: 2822693 - DNA, 25 bp, Homo sapien
tagaggacagcaatattacagtggc

SEQ ID NO: 2822694 - DNA, 25 bp, Homo sapien
taaacaactgcgaacagagtagatc

SEQ ID NO: 2822695 - DNA, 25 bp, Homo sapien
gatccaacacgagttgtggtggttc

SEQ ID NO: 2822696 - DNA, 25 bp, Homo sapien
ttatgatccaacacgagttgtggtg

SEQ ID NO: 2822697 - DNA, 25 bp, Homo sapien
caacacgagttgtggtggttctttt

SEQ ID NO: 2822698 - DNA, 25 bp, Homo sapien
cacgagttgtggtggttcttttatc

SEQ ID NO: 2822699 - DNA, 25 bp, Homo sapien
aagaatgagggcttctcctactgac

SEQ ID NO: 2822700 - DNA, 25 bp, Homo sapien
ccaccagaagaatgagggcttctcc

SEQ ID NO: 2822701 - DNA, 25 bp, Homo sapien
gccctatgctaaccaccagaagaat

SEQ ID NO: 2822702 - DNA, 25 bp, Homo sapien
ctgccctatgctaaccaccagaaga

SEQ ID NO: 2822703 - DNA, 25 bp, Homo sapien
tctcttaaacggaaatgagtctgat

SEQ ID NO: 2822704 - DNA, 25 bp, Homo sapien
tcctctgctcggcttcggccttgag

SEQ ID NO: 2822705 - DNA, 25 bp, Homo sapien
tgataatcgatgacagacttcagag

SEQ ID NO: 2822706 - DNA, 25 bp, Homo sapien
aataggccactcttgtatttagatc

SEQ ID NO: 2822707 - DNA, 25 bp, Homo sapien
gaggctgtgaaggtaaaactatcat

SEQ ID NO: 2822708 - DNA, 25 bp, Homo sapien
gactcggttctcactaggaaacaaa

SEQ ID NO: 2822709 - DNA, 25 bp, Homo sapien
tacatcatagtgaccaccagtaatc

SEQ ID NO: 2822710 - DNA, 25 bp, Homo sapien
ccatcaggatcttctaatcgacaat

SEQ ID NO: 2822711 - DNA, 25 bp, Homo sapien
gaactccagggtgcacttggtgccc

SEQ ID NO: 2822712 - DNA, 25 bp, Homo sapien
caggaagctcgaaggtgatctcaga

SEQ ID NO: 2822713 - DNA, 25 bp, Homo sapien
gcccagcgctgcgcggaccccggcc

SEQ ID NO: 2822714 - DNA, 25 bp, Homo sapien
cccagcgctgcgcggaccccggccg

SEQ ID NO: 2822715 - DNA, 25 bp, Homo sapien
cgcccagcgctgcgcggaccccggc

SEQ ID NO: 2822716 - DNA, 25 bp, Homo sapien
ccgcccagcgctgcgcggaccccgg

SEQ ID NO: 2822717 - DNA, 25 bp, Homo sapien
gaaggcggcggcggcctcaaccgag

SEQ ID NO: 2822718 - DNA, 25 bp, Homo sapien
cccgagaaggcggcggcggcctcaa

SEQ ID NO: 2822719 - DNA, 25 bp, Homo sapien
gagaaggcggcggcggcctcaaccg

SEQ ID NO: 2822720 - DNA, 25 bp, Homo sapien
ccgagaaggcggcggcggcctcaac

SEQ ID NO: 2822721 - DNA, 25 bp, Homo sapien
gcggcaggcctcagcgcaggccacc

SEQ ID NO: 2822722 - DNA, 25 bp, Homo sapien
aggccaccccgcaaagatacacagc

SEQ ID NO: 2822723 - DNA, 25 bp, Homo sapien
gagattcgggatcagagcgaccctc

SEQ ID NO: 2822724 - DNA, 25 bp, Homo sapien
tctgcgcggactcaccgcgcgcggc

SEQ ID NO: 2822725 - DNA, 25 bp, Homo sapien
aaaagagaagcggaaaaggcctgag

SEQ ID NO: 2822726 - DNA, 25 bp, Homo sapien
aaaaggcctgagagggtcggaagtg

SEQ ID NO: 2822727 - DNA, 25 bp, Homo sapien
aggcctgagagggtcggaagtgggg

SEQ ID NO: 2822728 - DNA, 25 bp, Homo sapien
aaagagaagcggaaaaggcctgaga

SEQ ID NO: 2822729 - DNA, 25 bp, Homo sapien
ggcgttggctctgcctccgttgcag

SEQ ID NO: 2822730 - DNA, 25 bp, Homo sapien
cgttggagtgcgtacgtggaagccc

SEQ ID NO: 2822731 - DNA, 25 bp, Homo sapien
gagcctgagacaccggctcccgtga

SEQ ID NO: 2822732 - DNA, 25 bp, Homo sapien
gatgcgttcttctccgggaacacgc

SEQ ID NO: 2822733 - DNA, 25 bp, Homo sapien
cagttcttctagttgggtcagggcc

SEQ ID NO: 2822734 - DNA, 25 bp, Homo sapien
ccaggaagtgtcctccggagtgtcc

SEQ ID NO: 2822735 - DNA, 25 bp, Homo sapien
accaggtgctttggcagaaggatga

SEQ ID NO: 2822736 - DNA, 25 bp, Homo sapien
tgccagtgctatggaccctctgagt

SEQ ID NO: 2822737 - DNA, 25 bp, Homo sapien
gacttgtgtggtatagaatctgacc

SEQ ID NO: 2822738 - DNA, 25 bp, Homo sapien
tataacatgttactcaccatcagaa

SEQ ID NO: 2822739 - DNA, 25 bp, Homo sapien
tcaatatgattagataactgcacac

SEQ ID NO: 2822740 - DNA, 25 bp, Homo sapien
gaatctgaccccatcaagaaaggca

SEQ ID NO: 2822741 - DNA, 25 bp, Homo sapien
agaatagcgtcaggcaagtaatagg

SEQ ID NO: 2822742 - DNA, 25 bp, Homo sapien
cactaagtacttgttgctccaagaa

SEQ ID NO: 2822743 - DNA, 25 bp, Homo sapien
tgttgctccaagaatagcgtcaggc

SEQ ID NO: 2822744 - DNA, 25 bp, Homo sapien
tgcctggcactaagtacttgttgct

SEQ ID NO: 2822745 - DNA, 25 bp, Homo sapien
ttcattaatcggtggtagtcttggg

SEQ ID NO: 2822746 - DNA, 25 bp, Homo sapien
gccggtaacggtgtagcctgagaaa

SEQ ID NO: 2822747 - DNA, 25 bp, Homo sapien
taaacagatctttgcacgatgctga

SEQ ID NO: 2822748 - DNA, 25 bp, Homo sapien
tcatcttccttggaactggccggta

SEQ ID NO: 2822749 - DNA, 25 bp, Homo sapien
tcagagtagcacactgtggtagtga

SEQ ID NO: 2822750 - DNA, 25 bp, Homo sapien
catttttcctctgctactatgtcag

SEQ ID NO: 2822751 - DNA, 25 bp, Homo sapien
cactgtggtagtgatcatttttcct

SEQ ID NO: 2822752 - DNA, 25 bp, Homo sapien
gctactatgtcaggagctccacatt

SEQ ID NO: 2822753 - DNA, 25 bp, Homo sapien
ttgaattgccaattttactcctccg

SEQ ID NO: 2822754 - DNA, 25 bp, Homo sapien
actcctccgacatctgttggcagtg

SEQ ID NO: 2822755 - DNA, 25 bp, Homo sapien
gccaattttactcctccgacatctg

SEQ ID NO: 2822756 - DNA, 25 bp, Homo sapien
tttactcctccgacatctgttggca

SEQ ID NO: 2822757 - DNA, 25 bp, Homo sapien
cagggaaacattccagggaataaag

SEQ ID NO: 2822758 - DNA, 25 bp, Homo sapien
cccaaggtcctgagtattcattcac

SEQ ID NO: 2822759 - DNA, 25 bp, Homo sapien
tatataatcctgtatgctagtcaca

SEQ ID NO: 2822760 - DNA, 25 bp, Homo sapien
cattcacaggtgacatatcttcaga

SEQ ID NO: 2822761 - DNA, 25 bp, Homo sapien
ccttttggttgcctcagggtccagc

SEQ ID NO: 2822762 - DNA, 25 bp, Homo sapien
aaaattggtccaggcgataagggag

SEQ ID NO: 2822763 - DNA, 25 bp, Homo sapien
gaagactttctgtgagggcactttc

SEQ ID NO: 2822764 - DNA, 25 bp, Homo sapien
tgcaacataatgtcgctggcaaaga

SEQ ID NO: 2822765 - DNA, 25 bp, Homo sapien
gcactttctctagtggaccaagtct

SEQ ID NO: 2822766 - DNA, 25 bp, Homo sapien
atcttctgtgtcactggcagatcac

SEQ ID NO: 2822767 - DNA, 25 bp, Homo sapien
ctgtgtcactggcagatcacacttt

SEQ ID NO: 2822768 - DNA, 25 bp, Homo sapien
cttctgtgtcactggcagatcacac

SEQ ID NO: 2822769 - DNA, 25 bp, Homo sapien
atgcagtttgcatcttctgtgtcac

SEQ ID NO: 2822770 - DNA, 25 bp, Homo sapien
gagtgaccagccttttatctggaga

SEQ ID NO: 2822771 - DNA, 25 bp, Homo sapien
ttttatctggagatctgaggcattc

SEQ ID NO: 2822772 - DNA, 25 bp, Homo sapien
gggaccgagtgaccagccttttatc

SEQ ID NO: 2822773 - DNA, 25 bp, Homo sapien
cagccttttatctggagatctgagg

SEQ ID NO: 2822774 - DNA, 25 bp, Homo sapien
ctgtcacgggcattggaaccccacc

SEQ ID NO: 2822775 - DNA, 25 bp, Homo sapien
tcacgggcattggaaccccaccgac

SEQ ID NO: 2822776 - DNA, 25 bp, Homo sapien
aagacaacaagctgtcacgggcatt

SEQ ID NO: 2822777 - DNA, 25 bp, Homo sapien
tgtcacgggcattggaaccccaccg

SEQ ID NO: 2822778 - DNA, 25 bp, Homo sapien
ttccacttgaatgaactgcccgtac

SEQ ID NO: 2822779 - DNA, 25 bp, Homo sapien
tggcacatacggaggacaggaattt

SEQ ID NO: 2822780 - DNA, 25 bp, Homo sapien
catacggaggacaggaattttccac

SEQ ID NO: 2822781 - DNA, 25 bp, Homo sapien
ctgttcaccgaaactcccctgagga

SEQ ID NO: 2822782 - DNA, 25 bp, Homo sapien
catggcaacagtagagatgctttgc

SEQ ID NO: 2822783 - DNA, 25 bp, Homo sapien
cacccatggcaacagtagagatgct

SEQ ID NO: 2822784 - DNA, 25 bp, Homo sapien
tgtcacacccatggcaacagtagag

SEQ ID NO: 2822785 - DNA, 25 bp, Homo sapien
ttttgtcacacccatggcaacagta

SEQ ID NO: 2822786 - DNA, 25 bp, Homo sapien
atacacagaagctctaattatgtag

SEQ ID NO: 2822787 - DNA, 25 bp, Homo sapien
cacagaagctctaattatgtagtag

SEQ ID NO: 2822788 - DNA, 25 bp, Homo sapien
cagaagctctaattatgtagtagac

SEQ ID NO: 2822789 - DNA, 25 bp, Homo sapien
gaagctctaattatgtagtagacct

SEQ ID NO: 2822790 - DNA, 25 bp, Homo sapien
tcaagagttatccattttgtggctt

SEQ ID NO: 2822791 - DNA, 25 bp, Homo sapien
ccctcaagagttatccattttgtgg

SEQ ID NO: 2822792 - DNA, 25 bp, Homo sapien
tttccctcaagagttatccattttg

SEQ ID NO: 2822793 - DNA, 25 bp, Homo sapien
gtcatttccctcaagagttatccat

SEQ ID NO: 2822794 - DNA, 25 bp, Homo sapien
ctatccatgccaaacgtgtaacaat

SEQ ID NO: 2822795 - DNA, 25 bp, Homo sapien
gctatccatgccaaacgtgtaacaa

SEQ ID NO: 2822796 - DNA, 25 bp, Homo sapien
ggataaggccttcataaacagcagt

SEQ ID NO: 2822797 - DNA, 25 bp, Homo sapien
gaaggccagtgtctgcttgctcacc

SEQ ID NO: 2822798 - DNA, 25 bp, Homo sapien
tagcccaagggatagagcctctgac

SEQ ID NO: 2822799 - DNA, 25 bp, Homo sapien
tattaagccctttgaggcccactag

SEQ ID NO: 2822800 - DNA, 25 bp, Homo sapien
gatcttacccaggccgagaagtggt

SEQ ID NO: 2822801 - DNA, 25 bp, Homo sapien
gcaagttactagtccatctactagc

SEQ ID NO: 2822802 - DNA, 25 bp, Homo sapien
ccatctactagctccaaaaatccat

SEQ ID NO: 2822803 - DNA, 25 bp, Homo sapien
ttcaatatattatcctccgatagag

SEQ ID NO: 2822804 - DNA, 25 bp, Homo sapien
cttgtgacagtgaggctatgaaata

SEQ ID NO: 2822805 - DNA, 25 bp, Homo sapien
agtggcagaaattccccaactgtga

SEQ ID NO: 2822806 - DNA, 25 bp, Homo sapien
gctatgaaatacaggctcagagcca

SEQ ID NO: 2822807 - DNA, 25 bp, Homo sapien
gcagaaattccccaactgtgaccat

SEQ ID NO: 2822808 - DNA, 25 bp, Homo sapien
aagccacgtggggcttctatttggg

SEQ ID NO: 2822809 - DNA, 25 bp, Homo sapien
tactggtctggtgccatggaatata

SEQ ID NO: 2822810 - DNA, 25 bp, Homo sapien
ggtctggtgccatggaatatagcca

SEQ ID NO: 2822811 - DNA, 25 bp, Homo sapien
ggtgccatggaatatagccatgaac

SEQ ID NO: 2822812 - DNA, 25 bp, Homo sapien
ctggaatactggtctggtgccatgg

SEQ ID NO: 2822813 - DNA, 25 bp, Homo sapien
gttggctcctgcataaatgttgtta

SEQ ID NO: 2822814 - DNA, 25 bp, Homo sapien
caagcaaacagtaagctctgggaga

SEQ ID NO: 2822815 - DNA, 25 bp, Homo sapien
gatgccatcactgccttgcttatgt

SEQ ID NO: 2822816 - DNA, 25 bp, Homo sapien
tctgggagaagcagtacgttggctc

SEQ ID NO: 2822817 - DNA, 25 bp, Homo sapien
aaatctttgactatgaccatgggac

SEQ ID NO: 2822818 - DNA, 25 bp, Homo sapien
tgtccaaggcaaacatacagcgaac

SEQ ID NO: 2822819 - DNA, 25 bp, Homo sapien
actggatagcacgtggtaggtagcc

SEQ ID NO: 2822820 - DNA, 25 bp, Homo sapien
aaagctatgaaaaccctcactgacg

SEQ ID NO: 2822821 - DNA, 25 bp, Homo sapien
ttagttgttctccagcgagcccgaa

SEQ ID NO: 2822822 - DNA, 25 bp, Homo sapien
ttgttctccagcgagcccgaagttg

SEQ ID NO: 2822823 - DNA, 25 bp, Homo sapien
agttgttctccagcgagcccgaagt

SEQ ID NO: 2822824 - DNA, 25 bp, Homo sapien
tgttctccagcgagcccgaagttgc

SEQ ID NO: 2822825 - DNA, 25 bp, Homo sapien
ttatttcagaggtagaagactgccc

SEQ ID NO: 2822826 - DNA, 25 bp, Homo sapien
gactcaaggattgctttggtctcca

SEQ ID NO: 2822827 - DNA, 25 bp, Homo sapien
gagccttgttgtttttcccgcaata

SEQ ID NO: 2822828 - DNA, 25 bp, Homo sapien
aagataaagatgaagcggagcgata

SEQ ID NO: 2822829 - DNA, 25 bp, Homo sapien
cctgttctttgatcaaaggcatggc

SEQ ID NO: 2822830 - DNA, 25 bp, Homo sapien
tatcaaaaggtggactgtacaagtg

SEQ ID NO: 2822831 - DNA, 25 bp, Homo sapien
tgaaggctcacagcaggttccgtat

SEQ ID NO: 2822832 - DNA, 25 bp, Homo sapien
caggttccgtatggctgatgttctc

SEQ ID NO: 2822833 - DNA, 25 bp, Homo sapien
taagtgacacgcatgcattagcctc

SEQ ID NO: 2822834 - DNA, 25 bp, Homo sapien
tcagcagcagagtaaggtctagtct

SEQ ID NO: 2822835 - DNA, 25 bp, Homo sapien
gcacaggaattgacagcaccaggta

SEQ ID NO: 2822836 - DNA, 25 bp, Homo sapien
gataaaggagcctagataacagctg

SEQ ID NO: 2822837 - DNA, 25 bp, Homo sapien
tatgaagcagagttaggtccaggcc

SEQ ID NO: 2822838 - DNA, 25 bp, Homo sapien
tatggtcatggtgtaccctctgtca

SEQ ID NO: 2822839 - DNA, 25 bp, Homo sapien
gcatgctgccaccaaatcgatcaag

SEQ ID NO: 2822840 - DNA, 25 bp, Homo sapien
aaatgttcaacactgcaggtccacg

SEQ ID NO: 2822841 - DNA, 25 bp, Homo sapien
catccttccccctgatcactatcca

SEQ ID NO: 2822842 - DNA, 25 bp, Homo sapien
acatccttccccctgatcactatcc

SEQ ID NO: 2822843 - DNA, 25 bp, Homo sapien
tgcaacatccttccccctgatcact

SEQ ID NO: 2822844 - DNA, 25 bp, Homo sapien
ccttccccctgatcactatccatct

SEQ ID NO: 2822845 - DNA, 25 bp, Homo sapien
ttatgtgaatgagcgacaacttccc

SEQ ID NO: 2822846 - DNA, 25 bp, Homo sapien
tatgaggcttgtatactccagttca

SEQ ID NO: 2822847 - DNA, 25 bp, Homo sapien
gccacataggaaactaacatccttg

SEQ ID NO: 2822848 - DNA, 25 bp, Homo sapien
tctggtgtgccttatagatagcaac

SEQ ID NO: 2822849 - DNA, 25 bp, Homo sapien
ggattttttgtcaggccaggcaaat

SEQ ID NO: 2822850 - DNA, 25 bp, Homo sapien
tggttttccctcaagactctttcag

SEQ ID NO: 2822851 - DNA, 25 bp, Homo sapien
cattgatgtaggcacactggttttc

SEQ ID NO: 2822852 - DNA, 25 bp, Homo sapien
ggccaggcaaataatgtctccttta

SEQ ID NO: 2822853 - DNA, 25 bp, Homo sapien
ggagttggtatgatcatgaatactg

SEQ ID NO: 2822854 - DNA, 25 bp, Homo sapien
gggagttggtatgatcatgaatact

SEQ ID NO: 2822855 - DNA, 25 bp, Homo sapien
tgggagttggtatgatcatgaatac

SEQ ID NO: 2822856 - DNA, 25 bp, Homo sapien
ccttgatccacaagatttcgggtat

SEQ ID NO: 2822857 - DNA, 25 bp, Homo sapien
ttgatccacaagatttcgggtatac

SEQ ID NO: 2822858 - DNA, 25 bp, Homo sapien
tgccatgtccttcaccccaacagag

SEQ ID NO: 2822859 - DNA, 25 bp, Homo sapien
ccccaacagagaatcatcagattaa

SEQ ID NO: 2822860 - DNA, 25 bp, Homo sapien
tgcaaaccacgaccacgactgtgaa

SEQ ID NO: 2822861 - DNA, 25 bp, Homo sapien
gaaccgctgcatttacagaggtagc

SEQ ID NO: 2822862 - DNA, 25 bp, Homo sapien
tgaaaagtcttccacaaataccgtg

SEQ ID NO: 2822863 - DNA, 25 bp, Homo sapien
taatggcacgggaaaaataacagga

SEQ ID NO: 2822864 - DNA, 25 bp, Homo sapien
tcctccagaagtcttaggataatct

SEQ ID NO: 2822865 - DNA, 25 bp, Homo sapien
agtaaactgagttcctgcagaagga

SEQ ID NO: 2822866 - DNA, 25 bp, Homo sapien
gaagtcttaggataatctttgttgc

SEQ ID NO: 2822867 - DNA, 25 bp, Homo sapien
gcccacacgggagcatattctgtct

SEQ ID NO: 2822868 - DNA, 25 bp, Homo sapien
tcagcaaggccagtaggatccacct

SEQ ID NO: 2822869 - DNA, 25 bp, Homo sapien
cctggcattgaagctgcagcgcgct

SEQ ID NO: 2822870 - DNA, 25 bp, Homo sapien
agcttcccgagccagtcactttggg

SEQ ID NO: 2822871 - DNA, 25 bp, Homo sapien
gaacagaaaatctcgcagacgcgcg

SEQ ID NO: 2822872 - DNA, 25 bp, Homo sapien
acattgacctcatcgccggcaaaga

SEQ ID NO: 2822873 - DNA, 25 bp, Homo sapien
tgcggatcagatcagccagggtccg

SEQ ID NO: 2822874 - DNA, 25 bp, Homo sapien
ttggcgtacattgcccactcggtgg

SEQ ID NO: 2822875 - DNA, 25 bp, Homo sapien
gggtcgctctcgtaggcttccatga

SEQ ID NO: 2822876 - DNA, 25 bp, Homo sapien
gctgcgcgcgcgtctcactgctggg

SEQ ID NO: 2822877 - DNA, 25 bp, Homo sapien
gagctggctgcgcgcgcgtctcact

SEQ ID NO: 2822878 - DNA, 25 bp, Homo sapien
tggggagctggctgcgcgcgcgtct

SEQ ID NO: 2822879 - DNA, 25 bp, Homo sapien
tggctgcgcgcgcgtctcactgctg

SEQ ID NO: 2822880 - DNA, 25 bp, Homo sapien
gagggagcctaacagcccgctagac

SEQ ID NO: 2822881 - DNA, 25 bp, Homo sapien
gggagcctaacagcccgctagaccg

SEQ ID NO: 2822882 - DNA, 25 bp, Homo sapien
cgagggagcctaacagcccgctaga

SEQ ID NO: 2822883 - DNA, 25 bp, Homo sapien
ggcgagggagcctaacagcccgcta

SEQ ID NO: 2822884 - DNA, 25 bp, Homo sapien
tgccgaaacgtaaggatgtcgtcgc

SEQ ID NO: 2822885 - DNA, 25 bp, Homo sapien
cattagagtgccgaaacgtaaggat

SEQ ID NO: 2822886 - DNA, 25 bp, Homo sapien
ggatgtcgtcgcagagacagcaaga

SEQ ID NO: 2822887 - DNA, 25 bp, Homo sapien
cacaaacccagcattagagtgccga

SEQ ID NO: 2822888 - DNA, 25 bp, Homo sapien
ggccccttttaagcgcttggagtca

SEQ ID NO: 2822889 - DNA, 25 bp, Homo sapien
acgaggcggagagccacccaagaaa

SEQ ID NO: 2822890 - DNA, 25 bp, Homo sapien
cggtgcacacacaaatcaggttcag

SEQ ID NO: 2822891 - DNA, 25 bp, Homo sapien
taggaatgtaccaacggccctcgga

SEQ ID NO: 2822892 - DNA, 25 bp, Homo sapien
gagctttattagtgttattccaata

SEQ ID NO: 2822893 - DNA, 25 bp, Homo sapien
ccaatatttaggacatagtaggcac

SEQ ID NO: 2822894 - DNA, 25 bp, Homo sapien
ccctaaaagtgatataccaactcat

SEQ ID NO: 2822895 - DNA, 25 bp, Homo sapien
gacaggttatacgaacaaactgaag

SEQ ID NO: 2822896 - DNA, 25 bp, Homo sapien
tagttttcattacgtggcctgtagc

SEQ ID NO: 2822897 - DNA, 25 bp, Homo sapien
tagctggcttccttagtgccaaaag

SEQ ID NO: 2822898 - DNA, 25 bp, Homo sapien
tgcacgagcagaagtagataacaga

SEQ ID NO: 2822899 - DNA, 25 bp, Homo sapien
tgtgtgtgggtaccagataaaaacc

SEQ ID NO: 2822900 - DNA, 25 bp, Homo sapien
gaaatacactgtacttcgttctagt

SEQ ID NO: 2822901 - DNA, 25 bp, Homo sapien
catatactttgtgtgccatgggtca

SEQ ID NO: 2822902 - DNA, 25 bp, Homo sapien
tgtaggttctagtcacccaataact

SEQ ID NO: 2822903 - DNA, 25 bp, Homo sapien
cccaataacttatcggatccaggct

SEQ ID NO: 2822904 - DNA, 25 bp, Homo sapien
catatttagctaaccttagatttaa

SEQ ID NO: 2822905 - DNA, 25 bp, Homo sapien
ttttgaggtctatcatctgaaccct

SEQ ID NO: 2822906 - DNA, 25 bp, Homo sapien
agtgcaaagtcctatgtattcttca

SEQ ID NO: 2822907 - DNA, 25 bp, Homo sapien
gaaaacaaataaggttagctacata

SEQ ID NO: 2822908 - DNA, 25 bp, Homo sapien
ggtggactgccctctactggactat

SEQ ID NO: 2822909 - DNA, 25 bp, Homo sapien
gaaacactcaaaaagatgctactgg

SEQ ID NO: 2822910 - DNA, 25 bp, Homo sapien
gactatttgaggtattcagccagca

SEQ ID NO: 2822911 - DNA, 25 bp, Homo sapien
gcaaagatgtgaaaccaaaacgcct

SEQ ID NO: 2822912 - DNA, 25 bp, Homo sapien
cccacgcctgagacttgcagtaatg

SEQ ID NO: 2822913 - DNA, 25 bp, Homo sapien
tcatccccacgcctgagacttgcag

SEQ ID NO: 2822914 - DNA, 25 bp, Homo sapien
tccccacgcctgagacttgcagtaa

SEQ ID NO: 2822915 - DNA, 25 bp, Homo sapien
ttgcagtaatgtaaaaccagtttac

SEQ ID NO: 2822916 - DNA, 25 bp, Homo sapien
cagatgtgcatactcgattaagaaa

SEQ ID NO: 2822917 - DNA, 25 bp, Homo sapien
gataacagaacaagaaagtcatctt

SEQ ID NO: 2822918 - DNA, 25 bp, Homo sapien
tccttggttcttcaatcattgtata

SEQ ID NO: 2822919 - DNA, 25 bp, Homo sapien
taagaatggcatgccatctcttgaa

SEQ ID NO: 2822920 - DNA, 25 bp, Homo sapien
tcatagagagttccaacttcttggt

SEQ ID NO: 2822921 - DNA, 25 bp, Homo sapien
tggggaaggagcaaaggactgattc

SEQ ID NO: 2822922 - DNA, 25 bp, Homo sapien
gcaaaggactgattcacataaataa

SEQ ID NO: 2822923 - DNA, 25 bp, Homo sapien
catagagagttccaacttcttggtc

SEQ ID NO: 2822924 - DNA, 25 bp, Homo sapien
tgctctttaaaggattcactgctca

SEQ ID NO: 2822925 - DNA, 25 bp, Homo sapien
caattccagttcctagaacagtggt

SEQ ID NO: 2822926 - DNA, 25 bp, Homo sapien
gtcacagtgttgaagtgccctttaa

SEQ ID NO: 2822927 - DNA, 25 bp, Homo sapien
gatactattttgatcaccaaccatg

SEQ ID NO: 2822928 - DNA, 25 bp, Homo sapien
tctagcctagcaaaagggtcagtga

SEQ ID NO: 2822929 - DNA, 25 bp, Homo sapien
tgtgccccgattaagtcagttatgc

SEQ ID NO: 2822930 - DNA, 25 bp, Homo sapien
taaagctctctgtctagtggattcc

SEQ ID NO: 2822931 - DNA, 25 bp, Homo sapien
cagaaaacagcagactcgatggagc

SEQ ID NO: 2822932 - DNA, 25 bp, Homo sapien
tacttttctcagtgccgtcagatgc

SEQ ID NO: 2822933 - DNA, 25 bp, Homo sapien
tgtcatcacgtgctacagaagaggg

SEQ ID NO: 2822934 - DNA, 25 bp, Homo sapien
tggctcactttacttcccggtcagg

SEQ ID NO: 2822935 - DNA, 25 bp, Homo sapien
cactgtacgggatttgaccttgtta

SEQ ID NO: 2822936 - DNA, 25 bp, Homo sapien
ccactgtgaagtgcttaacgtgtac

SEQ ID NO: 2822937 - DNA, 25 bp, Homo sapien
gaattaacctttactacaactgcca

SEQ ID NO: 2822938 - DNA, 25 bp, Homo sapien
cacttttgtgagagcacttgcagcc

SEQ ID NO: 2822939 - DNA, 25 bp, Homo sapien
cttgcagccaaactcttagatcaga

SEQ ID NO: 2822940 - DNA, 25 bp, Homo sapien
ctcccacagcctttagcaaaatgtc

SEQ ID NO: 2822941 - DNA, 25 bp, Homo sapien
caactgttctgaggccacaagttta

SEQ ID NO: 2822942 - DNA, 25 bp, Homo sapien
tctcccacagcctttagcaaaatgt

SEQ ID NO: 2822943 - DNA, 25 bp, Homo sapien
tactcctggaatgaacgcatctaga

SEQ ID NO: 2822944 - DNA, 25 bp, Homo sapien
gatcctacaaagttctcccaacagg

SEQ ID NO: 2822945 - DNA, 25 bp, Homo sapien
aaatggtataccctttgtggaatgc

SEQ ID NO: 2822946 - DNA, 25 bp, Homo sapien
ggtttcaacgatccaaaacacagat

SEQ ID NO: 2822947 - DNA, 25 bp, Homo sapien
gaaaaagcaatgagaccaatgtctt

SEQ ID NO: 2822948 - DNA, 25 bp, Homo sapien
caaaacactgtaaaacctgcggaat

SEQ ID NO: 2822949 - DNA, 25 bp, Homo sapien
gaacgtccgctcttgcctatagtaa

SEQ ID NO: 2822950 - DNA, 25 bp, Homo sapien
gaaatacttatagtgcatcaggtgg

SEQ ID NO: 2822951 - DNA, 25 bp, Homo sapien
ccaccgcgcccggccagagaccact

SEQ ID NO: 2822952 - DNA, 25 bp, Homo sapien
gcgcccggccagagaccactgtcat

SEQ ID NO: 2822953 - DNA, 25 bp, Homo sapien
accgcgcccggccagagaccactgt

SEQ ID NO: 2822954 - DNA, 25 bp, Homo sapien
cgcgcccggccagagaccactgtca

SEQ ID NO: 2822955 - DNA, 25 bp, Homo sapien
gcctctctgaatcgaggatgcttat

SEQ ID NO: 2822956 - DNA, 25 bp, Homo sapien
ctaaggacgaaatcagcctctctga

SEQ ID NO: 2822957 - DNA, 25 bp, Homo sapien
gaatcgaggatgcttatatgctgct

SEQ ID NO: 2822958 - DNA, 25 bp, Homo sapien
gaaaacgtctaaggacgaaatcagc

SEQ ID NO: 2822959 - DNA, 25 bp, Homo sapien
aaggtaacatctatgcctttagctt

SEQ ID NO: 2822960 - DNA, 25 bp, Homo sapien
ctttagctttcccttagcagtcttc

SEQ ID NO: 2822961 - DNA, 25 bp, Homo sapien
tcaggccctacaccgatagacagag

SEQ ID NO: 2822962 - DNA, 25 bp, Homo sapien
tccttcaaagagctcgcagtctggc

SEQ ID NO: 2822963 - DNA, 25 bp, Homo sapien
caaaatgcaggtctaggacaggcgc

SEQ ID NO: 2822964 - DNA, 25 bp, Homo sapien
tgtggcagccaagtatcaggcccta

SEQ ID NO: 2822965 - DNA, 25 bp, Homo sapien
tgcaacacagactgcggctcctccg

SEQ ID NO: 2822966 - DNA, 25 bp, Homo sapien
cctccagcagcaattgaagtaggaa

SEQ ID NO: 2822967 - DNA, 25 bp, Homo sapien
gcaacacagactgcggctcctccgc

SEQ ID NO: 2822968 - DNA, 25 bp, Homo sapien
ccctccagcagcaattgaagtagga

SEQ ID NO: 2822969 - DNA, 25 bp, Homo sapien
ctcgagagcggaagtagcgactgag

SEQ ID NO: 2822970 - DNA, 25 bp, Homo sapien
agagcggaagtagcgactgagcgcg

SEQ ID NO: 2822971 - DNA, 25 bp, Homo sapien
cgactgagcgcgtgcagtgggcgtg

SEQ ID NO: 2822972 - DNA, 25 bp, Homo sapien
gaagtagcgactgagcgcgtgcagt

SEQ ID NO: 2822973 - DNA, 25 bp, Homo sapien
gaaacttggtgttcccggctagtca

SEQ ID NO: 2822974 - DNA, 25 bp, Homo sapien
tagggggacgcaattacacagtgaa

SEQ ID NO: 2822975 - DNA, 25 bp, Homo sapien
cgtcgcaaaggaggcgccggagtag

SEQ ID NO: 2822976 - DNA, 25 bp, Homo sapien
cttttctccagggagcgtcgcaaag

SEQ ID NO: 2822977 - DNA, 25 bp, Homo sapien
cgcgactacagacctcgggagagga

SEQ ID NO: 2822978 - DNA, 25 bp, Homo sapien
gcaacatgtgtttctccgcgactac

SEQ ID NO: 2822979 - DNA, 25 bp, Homo sapien
tgggcaacgtgtctgtgctcggtcg

SEQ ID NO: 2822980 - DNA, 25 bp, Homo sapien
aaatcgaagctgtcgcagacctctg

SEQ ID NO: 2822981 - DNA, 25 bp, Homo sapien
tgttctttggacagatgggctaccg

SEQ ID NO: 2822982 - DNA, 25 bp, Homo sapien
tgtggtcctctcatagcacaggaac

SEQ ID NO: 2822983 - DNA, 25 bp, Homo sapien
tttcgatacgtgacagactgcccag

SEQ ID NO: 2822984 - DNA, 25 bp, Homo sapien
accggcgacgtttgtagttgactga

SEQ ID NO: 2822985 - DNA, 25 bp, Homo sapien
caggaacctgcctaagaataaaagg

SEQ ID NO: 2822986 - DNA, 25 bp, Homo sapien
gccagatcctgaaagagagaagcaa

SEQ ID NO: 2822987 - DNA, 25 bp, Homo sapien
tctggagcctgacgcgcaagaatcg

SEQ ID NO: 2822988 - DNA, 25 bp, Homo sapien
caagaatcgcccgattccgggaggc

SEQ ID NO: 2822989 - DNA, 25 bp, Homo sapien
aatctttaagaactatgttgtactg

SEQ ID NO: 2822990 - DNA, 25 bp, Homo sapien
ctgaaactgtgtatactactgaacc

SEQ ID NO: 2822991 - DNA, 25 bp, Homo sapien
agagaacagttataacagtataatg

SEQ ID NO: 2822992 - DNA, 25 bp, Homo sapien
ctgtgtatactactgaaccttatat

SEQ ID NO: 2822993 - DNA, 25 bp, Homo sapien
tataagtgtaaaccatagtgtccaa

SEQ ID NO: 2822994 - DNA, 25 bp, Homo sapien
caacagtcgacaccatctttggtca

SEQ ID NO: 2822995 - DNA, 25 bp, Homo sapien
tattcttgttagcagccaacagtcg

SEQ ID NO: 2822996 - DNA, 25 bp, Homo sapien
ttagtttagctcttcatggtacagg

SEQ ID NO: 2822997 - DNA, 25 bp, Homo sapien
aagtttaccatgcagttgtttacca

SEQ ID NO: 2822998 - DNA, 25 bp, Homo sapien
caatgttgctgttcttgctcagtga

SEQ ID NO: 2822999 - DNA, 25 bp, Homo sapien
tatggatcacaagtgcagcattcct

SEQ ID NO: 2823000 - DNA, 25 bp, Homo sapien
tacggcatgcctctatgtattggct

SEQ ID NO: 2823001 - DNA, 25 bp, Homo sapien
tttaggaagaatcggctcacagctg

SEQ ID NO: 2823002 - DNA, 25 bp, Homo sapien
tcggcccgagcgtttcatggacact

SEQ ID NO: 2823003 - DNA, 25 bp, Homo sapien
tgagcgttctgagcaacttgcacac

SEQ ID NO: 2823004 - DNA, 25 bp, Homo sapien
gagaagatgtgaactgtcggcccga

SEQ ID NO: 2823005 - DNA, 25 bp, Homo sapien
tacaatttgtcaagctgatcaccag

SEQ ID NO: 2823006 - DNA, 25 bp, Homo sapien
tgggcacgatagatttagcatttct

SEQ ID NO: 2823007 - DNA, 25 bp, Homo sapien
ttccatgattaatgaagtgggcacg

SEQ ID NO: 2823008 - DNA, 25 bp, Homo sapien
aatttgtcaagctgatcaccagcct

SEQ ID NO: 2823009 - DNA, 25 bp, Homo sapien
tttgtcctggacaactcagggtaac

SEQ ID NO: 2823010 - DNA, 25 bp, Homo sapien
cattactactcagtgtgctagtttc

SEQ ID NO: 2823011 - DNA, 25 bp, Homo sapien
tgctagtttctactcccacttctac

SEQ ID NO: 2823012 - DNA, 25 bp, Homo sapien
gctgctcctggtgaatgatagttat

SEQ ID NO: 2823013 - DNA, 25 bp, Homo sapien
cgcgagtctcaagacgggatagttt

SEQ ID NO: 2823014 - DNA, 25 bp, Homo sapien
tcagcctgcagtgggatctaactac

SEQ ID NO: 2823015 - DNA, 25 bp, Homo sapien
acacacgcgcgcgagtctcaagacg

SEQ ID NO: 2823016 - DNA, 25 bp, Homo sapien
gacgggatagtttaaaatcttcagc

SEQ ID NO: 2823017 - DNA, 25 bp, Homo sapien
atgcagactccagatccagcgcaga

SEQ ID NO: 2823018 - DNA, 25 bp, Homo sapien
gtgcctcctgatgcttgcaatctca

SEQ ID NO: 2823019 - DNA, 25 bp, Homo sapien
ccagtgcctcctgatgcttgcaatc

SEQ ID NO: 2823020 - DNA, 25 bp, Homo sapien
attcccaattcaccagcgtgcgtga

SEQ ID NO: 2823021 - DNA, 25 bp, Homo sapien
caggccccttcttgtggtaacgcgg

SEQ ID NO: 2823022 - DNA, 25 bp, Homo sapien
tatttaggaagcgaagttagcgcca

SEQ ID NO: 2823023 - DNA, 25 bp, Homo sapien
gaaagcctcagcgactagggtaccg

SEQ ID NO: 2823024 - DNA, 25 bp, Homo sapien
agctaagaaaaaccatcccgccagg

SEQ ID NO: 2823025 - DNA, 25 bp, Homo sapien
gcaggtgtgttgctggtagctcatc

SEQ ID NO: 2823026 - DNA, 25 bp, Homo sapien
gtagctcatcgctggcttggagata

SEQ ID NO: 2823027 - DNA, 25 bp, Homo sapien
ggtcatttctgaacgcattcccaaa

SEQ ID NO: 2823028 - DNA, 25 bp, Homo sapien
agaaatttgttctgacggcgcggcc

SEQ ID NO: 2823029 - DNA, 25 bp, Homo sapien
tccggattcgtttggcttgaccacc

SEQ ID NO: 2823030 - DNA, 25 bp, Homo sapien
caaccctggaggcatcttccgtggg

SEQ ID NO: 2823031 - DNA, 25 bp, Homo sapien
gtctgggtgagccaggtccgcctct

SEQ ID NO: 2823032 - DNA, 25 bp, Homo sapien
caaatatccacgtttaaggtgtccg

SEQ ID NO: 2823033 - DNA, 25 bp, Homo sapien
tgtctgattagctgggagggggaag

SEQ ID NO: 2823034 - DNA, 25 bp, Homo sapien
ctgtgtctgattagctgggaggggg

SEQ ID NO: 2823035 - DNA, 25 bp, Homo sapien
tgattagctgggagggggaagccat

SEQ ID NO: 2823036 - DNA, 25 bp, Homo sapien
gtctgattagctgggagggggaagc

SEQ ID NO: 2823037 - DNA, 25 bp, Homo sapien
ggtcccaaccgctgtctgctgagct

SEQ ID NO: 2823038 - DNA, 25 bp, Homo sapien
tgaacatcacggtgcgctgcacggt

SEQ ID NO: 2823039 - DNA, 25 bp, Homo sapien
tgccgctgcactacgatctggagct

SEQ ID NO: 2823040 - DNA, 25 bp, Homo sapien
tcgcgctggacacggaatacatggt

SEQ ID NO: 2823041 - DNA, 25 bp, Homo sapien
taggttacacttctcaggctgacaa

SEQ ID NO: 2823042 - DNA, 25 bp, Homo sapien
tgaactgaatatggccaagttgcct

SEQ ID NO: 2823043 - DNA, 25 bp, Homo sapien
tatgatatcaacacctttcctaagg

SEQ ID NO: 2823044 - DNA, 25 bp, Homo sapien
catccagtcttttgggagttgccaa

SEQ ID NO: 2823045 - DNA, 25 bp, Homo sapien
tcagaacaacattgaaaggcatcgt

SEQ ID NO: 2823046 - DNA, 25 bp, Homo sapien
cgtcaaatgtgcaactaggattggg

SEQ ID NO: 2823047 - DNA, 25 bp, Homo sapien
ccttgcagagcaattggccatgcct

SEQ ID NO: 2823048 - DNA, 25 bp, Homo sapien
cagtttgggctacccctgtaagatc

SEQ ID NO: 2823049 - DNA, 25 bp, Homo sapien
gcctatcttgatagctgctattttg

SEQ ID NO: 2823050 - DNA, 25 bp, Homo sapien
gctgctattttgattccacgggagt

SEQ ID NO: 2823051 - DNA, 25 bp, Homo sapien
attttgattccacgggagtccatgg

SEQ ID NO: 2823052 - DNA, 25 bp, Homo sapien
ctcttctttgcctatcttgatagct

SEQ ID NO: 2823053 - DNA, 25 bp, Homo sapien
tggcactgttgtcatttggtctcat

SEQ ID NO: 2823054 - DNA, 25 bp, Homo sapien
gctggcactgttgtcatttggtctc

SEQ ID NO: 2823055 - DNA, 25 bp, Homo sapien
ttgagctggcactgttgtcatttgg

SEQ ID NO: 2823056 - DNA, 25 bp, Homo sapien
gagctggcactgttgtcatttggtc

SEQ ID NO: 2823057 - DNA, 25 bp, Homo sapien
gccaattaataaccaagactcagaa

SEQ ID NO: 2823058 - DNA, 25 bp, Homo sapien
taacatgtttagtctaggcatggtg

SEQ ID NO: 2823059 - DNA, 25 bp, Homo sapien
taattacagttttcacagccaccca

SEQ ID NO: 2823060 - DNA, 25 bp, Homo sapien
taacatccctcagcagtattagagt

SEQ ID NO: 2823061 - DNA, 25 bp, Homo sapien
tcagacttggccacaggtcataggt

SEQ ID NO: 2823062 - DNA, 25 bp, Homo sapien
tgttacatacgctcaaagcaatgtg

SEQ ID NO: 2823063 - DNA, 25 bp, Homo sapien
gggacttcaccacgtggacaaacga

SEQ ID NO: 2823064 - DNA, 25 bp, Homo sapien
tcttgtataagttaaggcagccata

SEQ ID NO: 2823065 - DNA, 25 bp, Homo sapien
tttgctccaataaaagctgtctttt

SEQ ID NO: 2823066 - DNA, 25 bp, Homo sapien
tctttgctccaataaaagctgtctt

SEQ ID NO: 2823067 - DNA, 25 bp, Homo sapien
ctttgctccaataaaagctgtcttt

SEQ ID NO: 2823068 - DNA, 25 bp, Homo sapien
aaataagtcagtcctagaggtgaaa

SEQ ID NO: 2823069 - DNA, 25 bp, Homo sapien
tgaaatagagcaaggtggcatctga

SEQ ID NO: 2823070 - DNA, 25 bp, Homo sapien
ggcatctgaaccagtgggaattgag

SEQ ID NO: 2823071 - DNA, 25 bp, Homo sapien
tcctagaggtgaaatagagcaaggt

SEQ ID NO: 2823072 - DNA, 25 bp, Homo sapien
tccgcgaggacacttgcttcagtag

SEQ ID NO: 2823073 - DNA, 25 bp, Homo sapien
agcactgtattcaaggccaaagcca

SEQ ID NO: 2823074 - DNA, 25 bp, Homo sapien
aacaaagcagccacttggtccgcga

SEQ ID NO: 2823075 - DNA, 25 bp, Homo sapien
tcctcacaatggttaaacaaagcag

SEQ ID NO: 2823076 - DNA, 25 bp, Homo sapien
tccaaatgtacagctggttggacct

SEQ ID NO: 2823077 - DNA, 25 bp, Homo sapien
atttttccaaatgtacagctggttg

SEQ ID NO: 2823078 - DNA, 25 bp, Homo sapien
tttatttttccaaatgtacagctgg

SEQ ID NO: 2823079 - DNA, 25 bp, Homo sapien
ccaaatgtacagctggttggaccta

SEQ ID NO: 2823080 - DNA, 25 bp, Homo sapien
cgtccttcttctcgtcgtccttggg

SEQ ID NO: 2823081 - DNA, 25 bp, Homo sapien
tgactttccagcgtccttcttctcg

SEQ ID NO: 2823082 - DNA, 25 bp, Homo sapien
tttccagcgtccttcttctcgtcgt

SEQ ID NO: 2823083 - DNA, 25 bp, Homo sapien
tcttctcgtcgtccttgggcggcat

SEQ ID NO: 2823084 - DNA, 25 bp, Homo sapien
agacaccgcagccttgcaaagatgt

SEQ ID NO: 2823085 - DNA, 25 bp, Homo sapien
cagacaccgcagccttgcaaagatg

SEQ ID NO: 2823086 - DNA, 25 bp, Homo sapien
gcaagtgctgactgcagagctaaaa

SEQ ID NO: 2823087 - DNA, 25 bp, Homo sapien
tggcagtcagacatgggtagcagat

SEQ ID NO: 2823088 - DNA, 25 bp, Homo sapien
ggcaacagcgtctgcaggtgaacgt

SEQ ID NO: 2823089 - DNA, 25 bp, Homo sapien
tagcagatagtttgagtctcctgcc

SEQ ID NO: 2823090 - DNA, 25 bp, Homo sapien
tctactgctgaaacgtaactaatcc

SEQ ID NO: 2823091 - DNA, 25 bp, Homo sapien
ccaatgcctttttagtaccacagga

SEQ ID NO: 2823092 - DNA, 25 bp, Homo sapien
atttaatgtgcaatctggtttctcc

SEQ ID NO: 2823093 - DNA, 25 bp, Homo sapien
gattattgcagtagtttccaggtag

SEQ ID NO: 2823094 - DNA, 25 bp, Homo sapien
tgtccatttagactgccggcaaacc

SEQ ID NO: 2823095 - DNA, 25 bp, Homo sapien
ctctctgtagcccaaacgctggaaa

SEQ ID NO: 2823096 - DNA, 25 bp, Homo sapien
tgaacgtacatactacaagccctgc

SEQ ID NO: 2823097 - DNA, 25 bp, Homo sapien
tatttatgcaaacatggtgtctccc

SEQ ID NO: 2823098 - DNA, 25 bp, Homo sapien
tatgcacagacttaactccaacacg

SEQ ID NO: 2823099 - DNA, 25 bp, Homo sapien
tagcgcctctacagtcacggtggtc

SEQ ID NO: 2823100 - DNA, 25 bp, Homo sapien
cgttaagctcttgcggtagccgcgc

SEQ ID NO: 2823101 - DNA, 25 bp, Homo sapien
cgagaaagccgaagatggcggtccc

SEQ ID NO: 2823102 - DNA, 25 bp, Homo sapien
ttacgggtgatggagcacttagaat

SEQ ID NO: 2823103 - DNA, 25 bp, Homo sapien
ggctttacgggtgatggagcactta

SEQ ID NO: 2823104 - DNA, 25 bp, Homo sapien
atgaccttgataaagggttgggttg

SEQ ID NO: 2823105 - DNA, 25 bp, Homo sapien
tgaccttgataaagggttgggttga

SEQ ID NO: 2823106 - DNA, 25 bp, Homo sapien
agattttggagcttgaattcttcat

SEQ ID NO: 2823107 - DNA, 25 bp, Homo sapien
cctcatctgagatagtaagattttg

SEQ ID NO: 2823108 - DNA, 25 bp, Homo sapien
agtaagattttggagcttgaattct

SEQ ID NO: 2823109 - DNA, 25 bp, Homo sapien
ctttcctcatctgagatagtaagat

SEQ ID NO: 2823110 - DNA, 25 bp, Homo sapien
cctcccatggtaaaccttctgtttg

SEQ ID NO: 2823111 - DNA, 25 bp, Homo sapien
tgaatttggtagttaaaggtgcatg

SEQ ID NO: 2823112 - DNA, 25 bp, Homo sapien
tactggaagagtatctaaaggatat

SEQ ID NO: 2823113 - DNA, 25 bp, Homo sapien
ggatatagtctgatcactctctacc

SEQ ID NO: 2823114 - DNA, 25 bp, Homo sapien
ccagtggtagtccttctgtattggg

SEQ ID NO: 2823115 - DNA, 25 bp, Homo sapien
agaagtagtaatcctctctccaggc

SEQ ID NO: 2823116 - DNA, 25 bp, Homo sapien
ctacatatccaagccagtggtagtc

SEQ ID NO: 2823117 - DNA, 25 bp, Homo sapien
gaagtagtaatcctctctccaggca

SEQ ID NO: 2823118 - DNA, 25 bp, Homo sapien
tcttcaatggactaccgaaaatcag

SEQ ID NO: 2823119 - DNA, 25 bp, Homo sapien
aatggactaccgaaaatcagaaagc

SEQ ID NO: 2823120 - DNA, 25 bp, Homo sapien
ctaccgaaaatcagaaagccactat

SEQ ID NO: 2823121 - DNA, 25 bp, Homo sapien
gactaccgaaaatcagaaagccact

SEQ ID NO: 2823122 - DNA, 25 bp, Homo sapien
ggccatatgtgtcaaagtcgcggaa

SEQ ID NO: 2823123 - DNA, 25 bp, Homo sapien
catatgtgtcaaagtcgcggaatcc

SEQ ID NO: 2823124 - DNA, 25 bp, Homo sapien
ccatatgtgtcaaagtcgcggaatc

SEQ ID NO: 2823125 - DNA, 25 bp, Homo sapien
tggccatatgtgtcaaagtcgcgga

SEQ ID NO: 2823126 - DNA, 25 bp, Homo sapien
agtacacagttatcaaaaatgcaca

SEQ ID NO: 2823127 - DNA, 25 bp, Homo sapien
acacagttatcaaaaatgcacacac

SEQ ID NO: 2823128 - DNA, 25 bp, Homo sapien
cagaagtacacagttatcaaaaatg

SEQ ID NO: 2823129 - DNA, 25 bp, Homo sapien
gaagtacacagttatcaaaaatgca

SEQ ID NO: 2823130 - DNA, 25 bp, Homo sapien
tttagcggacaaccttgcagatctt

SEQ ID NO: 2823131 - DNA, 25 bp, Homo sapien
tgcctgatctgttttgacatctcca

SEQ ID NO: 2823132 - DNA, 25 bp, Homo sapien
ggtttagcggacaaccttgcagatc

SEQ ID NO: 2823133 - DNA, 25 bp, Homo sapien
gcaggtttagcggacaaccttgcag

SEQ ID NO: 2823134 - DNA, 25 bp, Homo sapien
tctttagccagtgcgatgccatttt

SEQ ID NO: 2823135 - DNA, 25 bp, Homo sapien
tggtcagtgccttgcagccagtatg

SEQ ID NO: 2823136 - DNA, 25 bp, Homo sapien
tagctgtagctatggagtttggtca

SEQ ID NO: 2823137 - DNA, 25 bp, Homo sapien
gctttttcactaggcttcataggcc

SEQ ID NO: 2823138 - DNA, 25 bp, Homo sapien
tgcatgagaacttcatagagaacct

SEQ ID NO: 2823139 - DNA, 25 bp, Homo sapien
tgagaacttcatagagaacctgaga

SEQ ID NO: 2823140 - DNA, 25 bp, Homo sapien
tgttgcatgagaacttcatagagaa

SEQ ID NO: 2823141 - DNA, 25 bp, Homo sapien
atgagaacttcatagagaacctgag

SEQ ID NO: 2823142 - DNA, 25 bp, Homo sapien
tgttcattaagtatttgttccccat

SEQ ID NO: 2823143 - DNA, 25 bp, Homo sapien
tattgttcattaagtatttgttccc

SEQ ID NO: 2823144 - DNA, 25 bp, Homo sapien
cagtttattgttcattaagtatttg

SEQ ID NO: 2823145 - DNA, 25 bp, Homo sapien
ttattgttcattaagtatttgttcc

SEQ ID NO: 2823146 - DNA, 25 bp, Homo sapien
ttggttgtgtctttgcccggctttg

SEQ ID NO: 2823147 - DNA, 25 bp, Homo sapien
gtctttgcccggctttggtatcaga

SEQ ID NO: 2823148 - DNA, 25 bp, Homo sapien
ctttgcccggctttggtatcagaat

SEQ ID NO: 2823149 - DNA, 25 bp, Homo sapien
ttattcttgggagagtatatgtgtc

SEQ ID NO: 2823150 - DNA, 25 bp, Homo sapien
tactatgtagattctcattacagaa

SEQ ID NO: 2823151 - DNA, 25 bp, Homo sapien
acttcttgtactatgtagattctca

SEQ ID NO: 2823152 - DNA, 25 bp, Homo sapien
tcagcccaaatgagaatcccttttt

SEQ ID NO: 2823153 - DNA, 25 bp, Homo sapien
atccctttttacttcttgtactatg

SEQ ID NO: 2823154 - DNA, 25 bp, Homo sapien
tgtttctctaatctgggactctcca

SEQ ID NO: 2823155 - DNA, 25 bp, Homo sapien
ttctgtttctctaatctgggactct

SEQ ID NO: 2823156 - DNA, 25 bp, Homo sapien
taaattggctgctaccttgttctgt

SEQ ID NO: 2823157 - DNA, 25 bp, Homo sapien
ctgggtttcggactacatttccata

SEQ ID NO: 2823158 - DNA, 25 bp, Homo sapien
gtttgtacatctaatggcctgctgg

SEQ ID NO: 2823159 - DNA, 25 bp, Homo sapien
cactcttaagtattaatctgtagcc

SEQ ID NO: 2823160 - DNA, 25 bp, Homo sapien
tggaaatacctgtcttaaactgaac

SEQ ID NO: 2823161 - DNA, 25 bp, Homo sapien
gatcttcttgacacatttgccttaa

SEQ ID NO: 2823162 - DNA, 25 bp, Homo sapien
caaggtgtgttttgattggctccaa

SEQ ID NO: 2823163 - DNA, 25 bp, Homo sapien
caagtttgtgatctgctcatggata

SEQ ID NO: 2823164 - DNA, 25 bp, Homo sapien
cctcagccaagatagtaacacatgt

SEQ ID NO: 2823165 - DNA, 25 bp, Homo sapien
tagtattgagtacagaaaaagctcc

SEQ ID NO: 2823166 - DNA, 25 bp, Homo sapien
taccataatgtatcaaggagcgtcc

SEQ ID NO: 2823167 - DNA, 25 bp, Homo sapien
ggtatcagttaattccagtctgagc

SEQ ID NO: 2823168 - DNA, 25 bp, Homo sapien
tagtttttacttgctggatgatacc

SEQ ID NO: 2823169 - DNA, 25 bp, Homo sapien
tcactttatagtttgggagacagaa

SEQ ID NO: 2823170 - DNA, 25 bp, Homo sapien
tcctggaagtacctacctaatactg

SEQ ID NO: 2823171 - DNA, 25 bp, Homo sapien
cctacctaatactgcagacatttgg

SEQ ID NO: 2823172 - DNA, 25 bp, Homo sapien
aatactgcagacatttggtgggtgc

SEQ ID NO: 2823173 - DNA, 25 bp, Homo sapien
gaagtacctacctaatactgcagac

SEQ ID NO: 2823174 - DNA, 25 bp, Homo sapien
catgtttatcgatggccagatcaac

SEQ ID NO: 2823175 - DNA, 25 bp, Homo sapien
ccataaaaagaccatgcccatggat

SEQ ID NO: 2823176 - DNA, 25 bp, Homo sapien
tcagttaaagtattggttggccatg

SEQ ID NO: 2823177 - DNA, 25 bp, Homo sapien
aatggcttgccattcatgtttggtc

SEQ ID NO: 2823178 - DNA, 25 bp, Homo sapien
atttttcagtgataaacgtagagag

SEQ ID NO: 2823179 - DNA, 25 bp, Homo sapien
tctgctccccgttcctggcatggtg

SEQ ID NO: 2823180 - DNA, 25 bp, Homo sapien
caatagaccattgagagtctctgct

SEQ ID NO: 2823181 - DNA, 25 bp, Homo sapien
ttgagagtctctgctccccgttcct

SEQ ID NO: 2823182 - DNA, 25 bp, Homo sapien
cttcctgccacaatagaccattgag

SEQ ID NO: 2823183 - DNA, 25 bp, Homo sapien
cttgaacttcaacatccccctctag

SEQ ID NO: 2823184 - DNA, 25 bp, Homo sapien
tgaacttcaacatccccctctagct

SEQ ID NO: 2823185 - DNA, 25 bp, Homo sapien
ttgaacttcaacatccccctctagc

SEQ ID NO: 2823186 - DNA, 25 bp, Homo sapien
gaacttcaacatccccctctagctc

SEQ ID NO: 2823187 - DNA, 25 bp, Homo sapien
caggagcttaaccttcacacagaga

SEQ ID NO: 2823188 - DNA, 25 bp, Homo sapien
atattctaataggatgctgagcacg

SEQ ID NO: 2823189 - DNA, 25 bp, Homo sapien
gagagcagtgctcaagattccaaga

SEQ ID NO: 2823190 - DNA, 25 bp, Homo sapien
gagccagatgtcaggaggttccttt

SEQ ID NO: 2823191 - DNA, 25 bp, Homo sapien
ggttacttctggagtgctgtagttc

SEQ ID NO: 2823192 - DNA, 25 bp, Homo sapien
ggccagtcaaatgaggttacttctg

SEQ ID NO: 2823193 - DNA, 25 bp, Homo sapien
tgtatttacccattaactaataggc

SEQ ID NO: 2823194 - DNA, 25 bp, Homo sapien
caggatctacaataaaagcattgcc

SEQ ID NO: 2823195 - DNA, 25 bp, Homo sapien
ttaggtcctcaggtagaggttgatc

SEQ ID NO: 2823196 - DNA, 25 bp, Homo sapien
gtagaggttgatcaggggcagaaag

SEQ ID NO: 2823197 - DNA, 25 bp, Homo sapien
aggtagaggttgatcaggggcagaa

SEQ ID NO: 2823198 - DNA, 25 bp, Homo sapien
aggtcctcaggtagaggttgatcag

SEQ ID NO: 2823199 - DNA, 25 bp, Homo sapien
cacccttgagagactatggttagtc

SEQ ID NO: 2823200 - DNA, 25 bp, Homo sapien
aaatggagaatgattagtgtgggcc

SEQ ID NO: 2823201 - DNA, 25 bp, Homo sapien
cataattgagtagacacagcaatac

SEQ ID NO: 2823202 - DNA, 25 bp, Homo sapien
cagcaataccttcacgagactatcc

SEQ ID NO: 2823203 - DNA, 25 bp, Homo sapien
gtgttaggaaagtcacacaggcccc

SEQ ID NO: 2823204 - DNA, 25 bp, Homo sapien
ctcgacatgatttccacaggtaggg

SEQ ID NO: 2823205 - DNA, 25 bp, Homo sapien
tccagacccagacaccattaagtag

SEQ ID NO: 2823206 - DNA, 25 bp, Homo sapien
cattaagtaggcacagggtacggct

SEQ ID NO: 2823207 - DNA, 25 bp, Homo sapien
tttgttcctgctcttagggtatagc

SEQ ID NO: 2823208 - DNA, 25 bp, Homo sapien
cgttgagaacctggtatggccatgg

SEQ ID NO: 2823209 - DNA, 25 bp, Homo sapien
tgctcttagggtatagcccttcaaa

SEQ ID NO: 2823210 - DNA, 25 bp, Homo sapien
tttccgttgagaacctggtatggcc

SEQ ID NO: 2823211 - DNA, 25 bp, Homo sapien
atcagccatggtggctggatgcagt

SEQ ID NO: 2823212 - DNA, 25 bp, Homo sapien
aaaatcagccatggtggctggatgc

SEQ ID NO: 2823213 - DNA, 25 bp, Homo sapien
ggcttcatgttgatttcttaaaatc

SEQ ID NO: 2823214 - DNA, 25 bp, Homo sapien
caactccccatacaatggcttcatg

SEQ ID NO: 2823215 - DNA, 25 bp, Homo sapien
tataacactggtctatgcaaggatt

SEQ ID NO: 2823216 - DNA, 25 bp, Homo sapien
catgcagaaggataagactacaccc

SEQ ID NO: 2823217 - DNA, 25 bp, Homo sapien
ttcacaatatgttgcaaagctgttg

SEQ ID NO: 2823218 - DNA, 25 bp, Homo sapien
taagacttgaaaacccaggcaacaa

SEQ ID NO: 2823219 - DNA, 25 bp, Homo sapien
tcctagggccttgactcgaagcttg

SEQ ID NO: 2823220 - DNA, 25 bp, Homo sapien
ttgccctgtgccttttaacctctgt

SEQ ID NO: 2823221 - DNA, 25 bp, Homo sapien
atttatgccatgaatattaacgtgg

SEQ ID NO: 2823222 - DNA, 25 bp, Homo sapien
tcgaagcttggagttgcatctggga

SEQ ID NO: 2823223 - DNA, 25 bp, Homo sapien
tctatctgggtgaaattggtccaca

SEQ ID NO: 2823224 - DNA, 25 bp, Homo sapien
cctggtttggtgtagtgaacagccc

SEQ ID NO: 2823225 - DNA, 25 bp, Homo sapien
tatatttgaacctagccttgcagac

SEQ ID NO: 2823226 - DNA, 25 bp, Homo sapien
cctaagtatcatgtcagagctggga

SEQ ID NO: 2823227 - DNA, 25 bp, Homo sapien
gttcaacagcttacccacagttctg

SEQ ID NO: 2823228 - DNA, 25 bp, Homo sapien
tctttataaagaaggacatgtaggc

SEQ ID NO: 2823229 - DNA, 25 bp, Homo sapien
gcttggagaggttcaacagcttacc

SEQ ID NO: 2823230 - DNA, 25 bp, Homo sapien
tgtccccatcatgaccctaggaagg

SEQ ID NO: 2823231 - DNA, 25 bp, Homo sapien
ctgttacactggatggagtacttgt

SEQ ID NO: 2823232 - DNA, 25 bp, Homo sapien
ggctcttgaaccttggcctctgagg

SEQ ID NO: 2823233 - DNA, 25 bp, Homo sapien
caggctcttgaaccttggcctctga

SEQ ID NO: 2823234 - DNA, 25 bp, Homo sapien
cactggatggagtacttgtggtctg

SEQ ID NO: 2823235 - DNA, 25 bp, Homo sapien
agcagccatggccggagattctaga

SEQ ID NO: 2823236 - DNA, 25 bp, Homo sapien
ggagattctagaagatcttcactca

SEQ ID NO: 2823237 - DNA, 25 bp, Homo sapien
ccatggccggagattctagaagatc

SEQ ID NO: 2823238 - DNA, 25 bp, Homo sapien
tctagaagatcttcactcatgtgct

SEQ ID NO: 2823239 - DNA, 25 bp, Homo sapien
ccccaattgccctgagataggccat

SEQ ID NO: 2823240 - DNA, 25 bp, Homo sapien
tggcctagaataaccccgctggctg

SEQ ID NO: 2823241 - DNA, 25 bp, Homo sapien
taggccatgcggaggaatctcccct

SEQ ID NO: 2823242 - DNA, 25 bp, Homo sapien
ggctctctttcagcggacgtaataa

SEQ ID NO: 2823243 - DNA, 25 bp, Homo sapien
gaagaataaggcctatgctgtgatt

SEQ ID NO: 2823244 - DNA, 25 bp, Homo sapien
gactcctggcaaaatcagactgttt

SEQ ID NO: 2823245 - DNA, 25 bp, Homo sapien
cctctctcccctatccactgactcc

SEQ ID NO: 2823246 - DNA, 25 bp, Homo sapien
tgtatggggtggacttcttgcccct

SEQ ID NO: 2823247 - DNA, 25 bp, Homo sapien
ctgtgaactggtgataggaagaaat

SEQ ID NO: 2823248 - DNA, 25 bp, Homo sapien
tgtgaactggtgataggaagaaata

SEQ ID NO: 2823249 - DNA, 25 bp, Homo sapien
gtgaactggtgataggaagaaatac

SEQ ID NO: 2823250 - DNA, 25 bp, Homo sapien
atttccttaggagtggccctttgcg

SEQ ID NO: 2823251 - DNA, 25 bp, Homo sapien
ggccctttgcgaggcagtgctggag

SEQ ID NO: 2823252 - DNA, 25 bp, Homo sapien
cagggaatttcatttcccagatttg

SEQ ID NO: 2823253 - DNA, 25 bp, Homo sapien
cccctggtctttgaatgatgtggcc

SEQ ID NO: 2823254 - DNA, 25 bp, Homo sapien
caggagtaaaggctcccagccatca

SEQ ID NO: 2823255 - DNA, 25 bp, Homo sapien
tgcaggagtaaaggctcccagccat

SEQ ID NO: 2823256 - DNA, 25 bp, Homo sapien
gctgtgcaggagtaaaggctcccag

SEQ ID NO: 2823257 - DNA, 25 bp, Homo sapien
tgtgcaggagtaaaggctcccagcc

SEQ ID NO: 2823258 - DNA, 25 bp, Homo sapien
tctctatgagggaatccaaacagag

SEQ ID NO: 2823259 - DNA, 25 bp, Homo sapien
ctgtctctatgagggaatccaaaca

SEQ ID NO: 2823260 - DNA, 25 bp, Homo sapien
tatgagggaatccaaacagagctca

SEQ ID NO: 2823261 - DNA, 25 bp, Homo sapien
tctatgagggaatccaaacagagct

SEQ ID NO: 2823262 - DNA, 25 bp, Homo sapien
ttgccacccagatcacgggggaagt

SEQ ID NO: 2823263 - DNA, 25 bp, Homo sapien
tgccacccagatcacgggggaagtg

SEQ ID NO: 2823264 - DNA, 25 bp, Homo sapien
aattgccacccagatcacgggggaa

SEQ ID NO: 2823265 - DNA, 25 bp, Homo sapien
ttaattgccacccagatcacggggg

SEQ ID NO: 2823266 - DNA, 25 bp, Homo sapien
ggcggtattgcctgtgcgtagaatc

SEQ ID NO: 2823267 - DNA, 25 bp, Homo sapien
gcttctgcggcggtattgcctgtgc

SEQ ID NO: 2823268 - DNA, 25 bp, Homo sapien
tctgcggcggtattgcctgtgcgta

SEQ ID NO: 2823269 - DNA, 25 bp, Homo sapien
ttgcctgtgcgtagaatccaagaag

SEQ ID NO: 2823270 - DNA, 25 bp, Homo sapien
taagggctatcattcttccatcatg

SEQ ID NO: 2823271 - DNA, 25 bp, Homo sapien
gcaaaagtgggtgtcattttaccac

SEQ ID NO: 2823272 - DNA, 25 bp, Homo sapien
ttattttgagaggagctcggattgc

SEQ ID NO: 2823273 - DNA, 25 bp, Homo sapien
tgcagctgacaaggatatgggaact

SEQ ID NO: 2823274 - DNA, 25 bp, Homo sapien
tgacagcagcgaagatgcactgagc

SEQ ID NO: 2823275 - DNA, 25 bp, Homo sapien
tcctattacacacgagctccacgag

SEQ ID NO: 2823276 - DNA, 25 bp, Homo sapien
gctccacgagaacaatgtaggcctg

SEQ ID NO: 2823277 - DNA, 25 bp, Homo sapien
gaagagtggatctggacgccacagc

SEQ ID NO: 2823278 - DNA, 25 bp, Homo sapien
ttctgtatgggtgcctctcacacca

SEQ ID NO: 2823279 - DNA, 25 bp, Homo sapien
cagattcccaatggagacctttcgg

SEQ ID NO: 2823280 - DNA, 25 bp, Homo sapien
agacctttcggttggtctctgtgtg

SEQ ID NO: 2823281 - DNA, 25 bp, Homo sapien
gacagattcccaatggagacctttc

SEQ ID NO: 2823282 - DNA, 25 bp, Homo sapien
ttcggttggtctctgtgtgggtcat

SEQ ID NO: 2823283 - DNA, 25 bp, Homo sapien
ccttgggcagtagggtcagaaagta

SEQ ID NO: 2823284 - DNA, 25 bp, Homo sapien
acgccttgggcagtagggtcagaaa

SEQ ID NO: 2823285 - DNA, 25 bp, Homo sapien
aacgccttgggcagtagggtcagaa

SEQ ID NO: 2823286 - DNA, 25 bp, Homo sapien
tcaaacgccttgggcagtagggtca

SEQ ID NO: 2823287 - DNA, 25 bp, Homo sapien
tccagcctggcgcagcaactccttc

SEQ ID NO: 2823288 - DNA, 25 bp, Homo sapien
tccaatccagcctggcgcagcaact

SEQ ID NO: 2823289 - DNA, 25 bp, Homo sapien
aacatctctccatatttcctgtttc

SEQ ID NO: 2823290 - DNA, 25 bp, Homo sapien
gcctggcgcagcaactccttctcct

SEQ ID NO: 2823291 - DNA, 25 bp, Homo sapien
ctgagttggcagcaggaatacaagg

SEQ ID NO: 2823292 - DNA, 25 bp, Homo sapien
aggaatacaaggactcccctggctt

SEQ ID NO: 2823293 - DNA, 25 bp, Homo sapien
tgagttggcagcaggaatacaagga

SEQ ID NO: 2823294 - DNA, 25 bp, Homo sapien
tgttggaatggtcctcatataaacc

SEQ ID NO: 2823295 - DNA, 25 bp, Homo sapien
taccttgacctctgtaacccagggc

SEQ ID NO: 2823296 - DNA, 25 bp, Homo sapien
cacagaagggcacacttaggcatgc

SEQ ID NO: 2823297 - DNA, 25 bp, Homo sapien
catctggaacccatagcctgggaca

SEQ ID NO: 2823298 - DNA, 25 bp, Homo sapien
gcaggtgccggtgaatttgtctccc

SEQ ID NO: 2823299 - DNA, 25 bp, Homo sapien
tgccggtgaatttgtctcccactcc

SEQ ID NO: 2823300 - DNA, 25 bp, Homo sapien
ggtgccggtgaatttgtctcccact

SEQ ID NO: 2823301 - DNA, 25 bp, Homo sapien
atgatgtcctggcatatgcaggtgc

SEQ ID NO: 2823302 - DNA, 25 bp, Homo sapien
tggctggaaagaaacttatcaacag

SEQ ID NO: 2823303 - DNA, 25 bp, Homo sapien
acttatcaacagtgaggtacttcat

SEQ ID NO: 2823304 - DNA, 25 bp, Homo sapien
tgtgtgggcccaaggagatcatggc

SEQ ID NO: 2823305 - DNA, 25 bp, Homo sapien
gggcccaaggagatcatggctggaa

SEQ ID NO: 2823306 - DNA, 25 bp, Homo sapien
ggtcttgatagtcataaaatgaaag

SEQ ID NO: 2823307 - DNA, 25 bp, Homo sapien
tctgcacacagaggtcttgatagtc

SEQ ID NO: 2823308 - DNA, 25 bp, Homo sapien
tgtgggtcacaattaatgctcagga

SEQ ID NO: 2823309 - DNA, 25 bp, Homo sapien
gctgtgggtcacaattaatgctcag

SEQ ID NO: 2823310 - DNA, 25 bp, Homo sapien
ctgcgtgtgcttcacaggaaagggt

SEQ ID NO: 2823311 - DNA, 25 bp, Homo sapien
cagagcctggatgctagagcaagct

SEQ ID NO: 2823312 - DNA, 25 bp, Homo sapien
cttcagaaaagctaggaaaaatcca

SEQ ID NO: 2823313 - DNA, 25 bp, Homo sapien
aaaatccattgctacctgcgtgtgc

SEQ ID NO: 2823314 - DNA, 25 bp, Homo sapien
attcatttgaatctagttcaacctg

SEQ ID NO: 2823315 - DNA, 25 bp, Homo sapien
aaaatgtgtcgggtggggttgcgag

SEQ ID NO: 2823316 - DNA, 25 bp, Homo sapien
gcatgagcttgggtcccataaggag

SEQ ID NO: 2823317 - DNA, 25 bp, Homo sapien
tgtcgttcggcatgagcttgggtcc

SEQ ID NO: 2823318 - DNA, 25 bp, Homo sapien
cataaggagggtccgccttaaggag

SEQ ID NO: 2823319 - DNA, 25 bp, Homo sapien
caaggccctgccgtgtcgttcggca

SEQ ID NO: 2823320 - DNA, 25 bp, Homo sapien
cttaaggaggacccccataagcctg

SEQ ID NO: 2823321 - DNA, 25 bp, Homo sapien
ctgggtccaccttaaggaggaccat

SEQ ID NO: 2823322 - DNA, 25 bp, Homo sapien
ataagcctgggtccaccttaaggag

SEQ ID NO: 2823323 - DNA, 25 bp, Homo sapien
gggtacagggcatttcttcttctct

SEQ ID NO: 2823324 - DNA, 25 bp, Homo sapien
cagggtttcaggagacagagttcac

SEQ ID NO: 2823325 - DNA, 25 bp, Homo sapien
tactctcgggagtcaagcatgggaa

SEQ ID NO: 2823326 - DNA, 25 bp, Homo sapien
gacacaggtctccttaacagctgag

SEQ ID NO: 2823327 - DNA, 25 bp, Homo sapien
gacagccgcttacgtcaatgatggg

SEQ ID NO: 2823328 - DNA, 25 bp, Homo sapien
tctagccagtggacgcagcagaaaa

SEQ ID NO: 2823329 - DNA, 25 bp, Homo sapien
tactcgttaatcacagcagggacca

SEQ ID NO: 2823330 - DNA, 25 bp, Homo sapien
tattgcaagctggtgccttcacaga

SEQ ID NO: 2823331 - DNA, 25 bp, Homo sapien
caaagggtggttccagttggcacaa

SEQ ID NO: 2823332 - DNA, 25 bp, Homo sapien
cacgtcccgtgaagttgtggacaaa

SEQ ID NO: 2823333 - DNA, 25 bp, Homo sapien
tatttgcgcatagtaaacttctgcc

SEQ ID NO: 2823334 - DNA, 25 bp, Homo sapien
agagttacttgcgttaacggtcacg

SEQ ID NO: 2823335 - DNA, 25 bp, Homo sapien
ggttggaacgcaaacccagtctggc

SEQ ID NO: 2823336 - DNA, 25 bp, Homo sapien
cacgcggcccagttttcgtgagtac

SEQ ID NO: 2823337 - DNA, 25 bp, Homo sapien
ggtaggtatgtgcttttggctcatg

SEQ ID NO: 2823338 - DNA, 25 bp, Homo sapien
cttcttggtctggtgggtactcgag

SEQ ID NO: 2823339 - DNA, 25 bp, Homo sapien
cagttgagaaccttgctgagctgag

SEQ ID NO: 2823340 - DNA, 25 bp, Homo sapien
tgtacacgcatcattgggcttcatg

SEQ ID NO: 2823341 - DNA, 25 bp, Homo sapien
ttatgtacacgcatcattgggcttc

SEQ ID NO: 2823342 - DNA, 25 bp, Homo sapien
tatgtacacgcatcattgggcttca

SEQ ID NO: 2823343 - DNA, 25 bp, Homo sapien
atgtacacgcatcattgggcttcat

SEQ ID NO: 2823344 - DNA, 25 bp, Homo sapien
gctgggctgcctcgagacagtcacg

SEQ ID NO: 2823345 - DNA, 25 bp, Homo sapien
gcttcagccccgaccttgtcagtga

SEQ ID NO: 2823346 - DNA, 25 bp, Homo sapien
tacgtccggctttagcgagggcgta

SEQ ID NO: 2823347 - DNA, 25 bp, Homo sapien
gacagtcacggcctggccagatggc

SEQ ID NO: 2823348 - DNA, 25 bp, Homo sapien
gatgatcacagacgcagtagacggt

SEQ ID NO: 2823349 - DNA, 25 bp, Homo sapien
catgacgaaagccaggatgactgca

SEQ ID NO: 2823350 - DNA, 25 bp, Homo sapien
taatgagcatcttggccgtgttgcc

SEQ ID NO: 2823351 - DNA, 25 bp, Homo sapien
atagtcaaccccgtaggaagaggag

SEQ ID NO: 2823352 - DNA, 25 bp, Homo sapien
tccagttgggatcttttccgacggc

SEQ ID NO: 2823353 - DNA, 25 bp, Homo sapien
gccaccggagcctccgtctggggaa

SEQ ID NO: 2823354 - DNA, 25 bp, Homo sapien
gtggccaccggagcctccgtctggg

SEQ ID NO: 2823355 - DNA, 25 bp, Homo sapien
cggagcctccgtctggggaaaagtg

SEQ ID NO: 2823356 - DNA, 25 bp, Homo sapien
cacccttgcttttgaagtcatggaa

SEQ ID NO: 2823357 - DNA, 25 bp, Homo sapien
cacagagctcttagttgggtaactc

SEQ ID NO: 2823358 - DNA, 25 bp, Homo sapien
gggcaagtaccacattttttcggca

SEQ ID NO: 2823359 - DNA, 25 bp, Homo sapien
tcagtggagtgcaaatcctgggcaa

SEQ ID NO: 2823360 - DNA, 25 bp, Homo sapien
tattccgtgcaaagggaacctagca

SEQ ID NO: 2823361 - DNA, 25 bp, Homo sapien
agtcctgctcatggatactattccg

SEQ ID NO: 2823362 - DNA, 25 bp, Homo sapien
gcccctagaccctgcaacatgtgat

SEQ ID NO: 2823363 - DNA, 25 bp, Homo sapien
gaaaagattatgaaggaccctgccc

SEQ ID NO: 2823364 - DNA, 25 bp, Homo sapien
tgaatccattatcgcaaaactcttg

SEQ ID NO: 2823365 - DNA, 25 bp, Homo sapien
cattgcatcaaaagcacagctagtc

SEQ ID NO: 2823366 - DNA, 25 bp, Homo sapien
cctgcaccttacacaaatagctggg

SEQ ID NO: 2823367 - DNA, 25 bp, Homo sapien
aatagctgggagatgttatctgtcc

SEQ ID NO: 2823368 - DNA, 25 bp, Homo sapien
gcaaccagtaacctaactcgaaatg

SEQ ID NO: 2823369 - DNA, 25 bp, Homo sapien
caccctaagcgtgtaagacacaggc

SEQ ID NO: 2823370 - DNA, 25 bp, Homo sapien
tggttaagtgtgcactttcccctct

SEQ ID NO: 2823371 - DNA, 25 bp, Homo sapien
ccaattaccaccctaagcgtgtaag

SEQ ID NO: 2823372 - DNA, 25 bp, Homo sapien
taggcatctgtgtaaagtggacccg

SEQ ID NO: 2823373 - DNA, 25 bp, Homo sapien
agtggacccggtgaccacaaagaca

SEQ ID NO: 2823374 - DNA, 25 bp, Homo sapien
gctgctgtgatatgatggatgtgtc

SEQ ID NO: 2823375 - DNA, 25 bp, Homo sapien
tggacggcccgtttctgagctgctg

SEQ ID NO: 2823376 - DNA, 25 bp, Homo sapien
tccattatttctatactgttcataa

SEQ ID NO: 2823377 - DNA, 25 bp, Homo sapien
cattatttctatactgttcataatg

SEQ ID NO: 2823378 - DNA, 25 bp, Homo sapien
ttatttctatactgttcataatgac

SEQ ID NO: 2823379 - DNA, 25 bp, Homo sapien
tatttctatactgttcataatgact

SEQ ID NO: 2823380 - DNA, 25 bp, Homo sapien
tcaatcttgctatctttgtctttcc

SEQ ID NO: 2823381 - DNA, 25 bp, Homo sapien
caatcttgctatctttgtctttccc

SEQ ID NO: 2823382 - DNA, 25 bp, Homo sapien
tgtcaatcttgctatctttgtcttt

SEQ ID NO: 2823383 - DNA, 25 bp, Homo sapien
tcttcccaacgtctaccttcccatc

SEQ ID NO: 2823384 - DNA, 25 bp, Homo sapien
tctttatgggtcgtgtatagcacaa

SEQ ID NO: 2823385 - DNA, 25 bp, Homo sapien
taccagcttatgtaccaaatttctt

SEQ ID NO: 2823386 - DNA, 25 bp, Homo sapien
aatttcttacgaactttgaagatgc

SEQ ID NO: 2823387 - DNA, 25 bp, Homo sapien
tcatagtcagcaacaataccagctt

SEQ ID NO: 2823388 - DNA, 25 bp, Homo sapien
gataaattctgcttgagacacctca

SEQ ID NO: 2823389 - DNA, 25 bp, Homo sapien
aattctgcttgagacacctcagaaa

SEQ ID NO: 2823390 - DNA, 25 bp, Homo sapien
taaattctgcttgagacacctcaga

SEQ ID NO: 2823391 - DNA, 25 bp, Homo sapien
agtgataaattctgcttgagacacc

SEQ ID NO: 2823392 - DNA, 25 bp, Homo sapien
catgaaactcttgcatcccgggaga

SEQ ID NO: 2823393 - DNA, 25 bp, Homo sapien
taagggacgccatcatgagtcagaa

SEQ ID NO: 2823394 - DNA, 25 bp, Homo sapien
catcattaaggcaccgacatcaggg

SEQ ID NO: 2823395 - DNA, 25 bp, Homo sapien
gacaatcgacccagtagaaagagca

SEQ ID NO: 2823396 - DNA, 25 bp, Homo sapien
ctgtcaggtgagtcaagcagatgct

SEQ ID NO: 2823397 - DNA, 25 bp, Homo sapien
tcatacccctcttgagccgtcgaat

SEQ ID NO: 2823398 - DNA, 25 bp, Homo sapien
aatctgatgtggttgtgctgggcaa

SEQ ID NO: 2823399 - DNA, 25 bp, Homo sapien
cttcttgtcttggtgattatgggaa

SEQ ID NO: 2823400 - DNA, 25 bp, Homo sapien
cacaaatacagttaggaaaacatca

SEQ ID NO: 2823401 - DNA, 25 bp, Homo sapien
aaatacagttaggaaaacatcacca

SEQ ID NO: 2823402 - DNA, 25 bp, Homo sapien
ttttcatcacaaatacagttaggaa

SEQ ID NO: 2823403 - DNA, 25 bp, Homo sapien
acagttaggaaaacatcaccagaga

SEQ ID NO: 2823404 - DNA, 25 bp, Homo sapien
ggacacccaagctggctgtaagact

SEQ ID NO: 2823405 - DNA, 25 bp, Homo sapien
cattggaatggaggcttcaacggct

SEQ ID NO: 2823406 - DNA, 25 bp, Homo sapien
tcaacggctacacgctattacggct

SEQ ID NO: 2823407 - DNA, 25 bp, Homo sapien
tatctctcatacttgctgggtgggc

SEQ ID NO: 2823408 - DNA, 25 bp, Homo sapien
tgcttgaggataggaaacacgtgcc

SEQ ID NO: 2823409 - DNA, 25 bp, Homo sapien
taataagagcctgacctgtgtatcc

SEQ ID NO: 2823410 - DNA, 25 bp, Homo sapien
tataaactactgctggatgaatgac

SEQ ID NO: 2823411 - DNA, 25 bp, Homo sapien
tgtatagattttcgccagcagaggg

SEQ ID NO: 2823412 - DNA, 25 bp, Homo sapien
gagggtattgtcctgagtgccagca

SEQ ID NO: 2823413 - DNA, 25 bp, Homo sapien
tcattatctggtagaggagttgaaa

SEQ ID NO: 2823414 - DNA, 25 bp, Homo sapien
ccaccagtatggaattatgagagta

SEQ ID NO: 2823415 - DNA, 25 bp, Homo sapien
gaacatactcaagaggattaatgaa

SEQ ID NO: 2823416 - DNA, 25 bp, Homo sapien
gaattatgagagtaatatcttcctt

SEQ ID NO: 2823417 - DNA, 25 bp, Homo sapien
atagacattctcagataggtttcca

SEQ ID NO: 2823418 - DNA, 25 bp, Homo sapien
atatctcttccaccaagtgaatttc

SEQ ID NO: 2823419 - DNA, 25 bp, Homo sapien
caagagttggcagacgaaatggtaa

SEQ ID NO: 2823420 - DNA, 25 bp, Homo sapien
tatctcttccaccaagtgaatttcc

SEQ ID NO: 2823421 - DNA, 25 bp, Homo sapien
aatgcaagagttggcagacgaaatg

SEQ ID NO: 2823422 - DNA, 25 bp, Homo sapien
gggcttgcttgaccactaagattac

SEQ ID NO: 2823423 - DNA, 25 bp, Homo sapien
tacaaagcacgaaggcagatccagg

SEQ ID NO: 2823424 - DNA, 25 bp, Homo sapien
ttaaaggtcaaaggcacactacaaa

SEQ ID NO: 2823425 - DNA, 25 bp, Homo sapien
caaaggcacactacaaagcacgaag

SEQ ID NO: 2823426 - DNA, 25 bp, Homo sapien
tgagagcgtcccctatgctacatac

SEQ ID NO: 2823427 - DNA, 25 bp, Homo sapien
cccctatgctacatacagaggcttc

SEQ ID NO: 2823428 - DNA, 25 bp, Homo sapien
acagggttgggacctgagagcgtcc

SEQ ID NO: 2823429 - DNA, 25 bp, Homo sapien
gcgtcccctatgctacatacagagg

SEQ ID NO: 2823430 - DNA, 25 bp, Homo sapien
ccacgctctatgtcctgctcaaaag

SEQ ID NO: 2823431 - DNA, 25 bp, Homo sapien
catctgtattgccacgctctatgtc

SEQ ID NO: 2823432 - DNA, 25 bp, Homo sapien
tgtattgccacgctctatgtcctgc

SEQ ID NO: 2823433 - DNA, 25 bp, Homo sapien
tgccacgctctatgtcctgctcaaa

SEQ ID NO: 2823434 - DNA, 25 bp, Homo sapien
cagagctctaagattatagcatgtc

SEQ ID NO: 2823435 - DNA, 25 bp, Homo sapien
tgcaaaggtacagagctctaagatt

SEQ ID NO: 2823436 - DNA, 25 bp, Homo sapien
tcaataatgctacttgcaaagctgt

SEQ ID NO: 2823437 - DNA, 25 bp, Homo sapien
ccaccttgagggttcccatgcaaag

SEQ ID NO: 2823438 - DNA, 25 bp, Homo sapien
tcctttatccatccacaatatgggt

SEQ ID NO: 2823439 - DNA, 25 bp, Homo sapien
tatccatccacaatatgggtctctg

SEQ ID NO: 2823440 - DNA, 25 bp, Homo sapien
tccacaatatgggtctctggaggca

SEQ ID NO: 2823441 - DNA, 25 bp, Homo sapien
ttgggtgataaatggctgcaggcac

SEQ ID NO: 2823442 - DNA, 25 bp, Homo sapien
tgtcttcgactccatcatagctgca

SEQ ID NO: 2823443 - DNA, 25 bp, Homo sapien
tgcatgcccatgatccttttgtctt

SEQ ID NO: 2823444 - DNA, 25 bp, Homo sapien
ccatatcgttcacaccggccaaggg

SEQ ID NO: 2823445 - DNA, 25 bp, Homo sapien
gtagagaacgcaacatacagagagc

SEQ ID NO: 2823446 - DNA, 25 bp, Homo sapien
cactatttcctattctggccaaaaa

SEQ ID NO: 2823447 - DNA, 25 bp, Homo sapien
aaaaaccacagtgtgattctgatat

SEQ ID NO: 2823448 - DNA, 25 bp, Homo sapien
cactgcaattttggtaaggcggtat

SEQ ID NO: 2823449 - DNA, 25 bp, Homo sapien
ccacagtgtgattctgatatggccc

SEQ ID NO: 2823450 - DNA, 25 bp, Homo sapien
catatctttctaaggaggatgagcc

SEQ ID NO: 2823451 - DNA, 25 bp, Homo sapien
cctcatccatgagcgggtgcgtctt

SEQ ID NO: 2823452 - DNA, 25 bp, Homo sapien
tgaagttcagggtatcatcagggaa

SEQ ID NO: 2823453 - DNA, 25 bp, Homo sapien
catcagggaactcattggaggttgc

SEQ ID NO: 2823454 - DNA, 25 bp, Homo sapien
caagcatgtcataggcacagactgc

SEQ ID NO: 2823455 - DNA, 25 bp, Homo sapien
taggaactcgttcatcaggaactgg

SEQ ID NO: 2823456 - DNA, 25 bp, Homo sapien
tgtccaggtggaatcaggagacttc

SEQ ID NO: 2823457 - DNA, 25 bp, Homo sapien
aaacactggcaatgtcaagcatgtc

SEQ ID NO: 2823458 - DNA, 25 bp, Homo sapien
caaaaggtactgatcccgtcatgag

SEQ ID NO: 2823459 - DNA, 25 bp, Homo sapien
gacctagaagagacaggacgaacat

SEQ ID NO: 2823460 - DNA, 25 bp, Homo sapien
gcccaacttggtgagtgagcttgcc

SEQ ID NO: 2823461 - DNA, 25 bp, Homo sapien
gaatcctagatttcaccctgtagca

SEQ ID NO: 2823462 - DNA, 25 bp, Homo sapien
tataaggtgtagaaaacgttgccag

SEQ ID NO: 2823463 - DNA, 25 bp, Homo sapien
caggacaacatcacgcccgttgata

SEQ ID NO: 2823464 - DNA, 25 bp, Homo sapien
aaaaatgagagtctccaggaactga

SEQ ID NO: 2823465 - DNA, 25 bp, Homo sapien
gaactgagcagttcaagcgcgcctt

SEQ ID NO: 2823466 - DNA, 25 bp, Homo sapien
tcccatggtgttatactccactgct

SEQ ID NO: 2823467 - DNA, 25 bp, Homo sapien
ctttcccatggtgttatactccact

SEQ ID NO: 2823468 - DNA, 25 bp, Homo sapien
tagatataatctccgtaatccacgg

SEQ ID NO: 2823469 - DNA, 25 bp, Homo sapien
tccacggcttgaacaaagtatggtt

SEQ ID NO: 2823470 - DNA, 25 bp, Homo sapien
tgactgcgtcaatggcaaggaagtc

SEQ ID NO: 2823471 - DNA, 25 bp, Homo sapien
tgaatcgtgcttgacggtccgcagg

SEQ ID NO: 2823472 - DNA, 25 bp, Homo sapien
caagactccggtaaatgactgcgtc

SEQ ID NO: 2823473 - DNA, 25 bp, Homo sapien
gaagtcagtcactgtggctgagtat

SEQ ID NO: 2823474 - DNA, 25 bp, Homo sapien
tgcaacgaggagaaatcaggtcgct

SEQ ID NO: 2823475 - DNA, 25 bp, Homo sapien
gctatgctgttatcctttcctgaag

SEQ ID NO: 2823476 - DNA, 25 bp, Homo sapien
ctctagagcagattcacagtgacag

SEQ ID NO: 2823477 - DNA, 25 bp, Homo sapien
tgtgactccacgaatcctctagagc

SEQ ID NO: 2823478 - DNA, 25 bp, Homo sapien
caacgttggcatgtttggcatcata

SEQ ID NO: 2823479 - DNA, 25 bp, Homo sapien
tgcaaacagtgcaacgttggcatgt

SEQ ID NO: 2823480 - DNA, 25 bp, Homo sapien
ttggcatcatatgggcatctggcca

SEQ ID NO: 2823481 - DNA, 25 bp, Homo sapien
tggcatgtttggcatcatatgggca

SEQ ID NO: 2823482 - DNA, 25 bp, Homo sapien
gaattcatccccgaatggttccaat

SEQ ID NO: 2823483 - DNA, 25 bp, Homo sapien
ttcatccccgaatggttccaatgta

SEQ ID NO: 2823484 - DNA, 25 bp, Homo sapien
tccgctgaattcatccccgaatggt

SEQ ID NO: 2823485 - DNA, 25 bp, Homo sapien
tccccgaatggttccaatgtatcca

SEQ ID NO: 2823486 - DNA, 25 bp, Homo sapien
agctgtgcacgctctaatcctagca

SEQ ID NO: 2823487 - DNA, 25 bp, Homo sapien
gaaatgcccttatcctaagctgtgc

SEQ ID NO: 2823488 - DNA, 25 bp, Homo sapien
cacagtgatgcaacggaaatgccct

SEQ ID NO: 2823489 - DNA, 25 bp, Homo sapien
tgtaatcactttgagatggaccctg

SEQ ID NO: 2823490 - DNA, 25 bp, Homo sapien
ctatagctggtcaaaggcaagaagt

SEQ ID NO: 2823491 - DNA, 25 bp, Homo sapien
gaagtgaaaactaacccttgaagca

SEQ ID NO: 2823492 - DNA, 25 bp, Homo sapien
gaagtagtgaagtacaaatgtttcg

SEQ ID NO: 2823493 - DNA, 25 bp, Homo sapien
ggcaaaagccatggtgacttcctct

SEQ ID NO: 2823494 - DNA, 25 bp, Homo sapien
ttgtgcttccataatccattgcatg

SEQ ID NO: 2823495 - DNA, 25 bp, Homo sapien
cataatccattgcatgatgtcacca

SEQ ID NO: 2823496 - DNA, 25 bp, Homo sapien
ggcaggaacttttgtgttgtgcttc

SEQ ID NO: 2823497 - DNA, 25 bp, Homo sapien
ctcatgcatggcaggaacttttgtg

SEQ ID NO: 2823498 - DNA, 25 bp, Homo sapien
gcatcatcgtttttctttagaagaa

SEQ ID NO: 2823499 - DNA, 25 bp, Homo sapien
tttctgcaggaagggttgaaggcat

SEQ ID NO: 2823500 - DNA, 25 bp, Homo sapien
ggttgaaggcattagttccacagac

SEQ ID NO: 2823501 - DNA, 25 bp, Homo sapien
tccacagacaaacaatgcatcatcg

SEQ ID NO: 2823502 - DNA, 25 bp, Homo sapien
tatgagctcttccacagactccctg

SEQ ID NO: 2823503 - DNA, 25 bp, Homo sapien
ggcagccggctttgtgtccataatc

SEQ ID NO: 2823504 - DNA, 25 bp, Homo sapien
tctgcggcagccttttatgagctct

SEQ ID NO: 2823505 - DNA, 25 bp, Homo sapien
tcggcgtacactcagaagacaagac

SEQ ID NO: 2823506 - DNA, 25 bp, Homo sapien
tgcgcctaagtagttcatgatgcag

SEQ ID NO: 2823507 - DNA, 25 bp, Homo sapien
tgtgcgcctaagtagttcatgatgc

SEQ ID NO: 2823508 - DNA, 25 bp, Homo sapien
ctgtgtgcgcctaagtagttcatga

SEQ ID NO: 2823509 - DNA, 25 bp, Homo sapien
tgtgtgcgcctaagtagttcatgat

SEQ ID NO: 2823510 - DNA, 25 bp, Homo sapien
tcggcctgtctagatttccatgtca

SEQ ID NO: 2823511 - DNA, 25 bp, Homo sapien
gcatgtgtctacatcggcctgtcta

SEQ ID NO: 2823512 - DNA, 25 bp, Homo sapien
tctacatcggcctgtctagatttcc

SEQ ID NO: 2823513 - DNA, 25 bp, Homo sapien
gcctgtctagatttccatgtcagtt

SEQ ID NO: 2823514 - DNA, 25 bp, Homo sapien
cttccgtgtgtgatgtgtctatatc

SEQ ID NO: 2823515 - DNA, 25 bp, Homo sapien
gtgatgtgtctatatcaacagtata

SEQ ID NO: 2823516 - DNA, 25 bp, Homo sapien
caataaatttcttccgtgtgtgatg

SEQ ID NO: 2823517 - DNA, 25 bp, Homo sapien
tttgctacaataaatttcttccgtg

SEQ ID NO: 2823518 - DNA, 25 bp, Homo sapien
tgcttgactttattggtggtgctgt

SEQ ID NO: 2823519 - DNA, 25 bp, Homo sapien
cttgactttattggtggtgctgtgg

SEQ ID NO: 2823520 - DNA, 25 bp, Homo sapien
gcttgactttattggtggtgctgtg

SEQ ID NO: 2823521 - DNA, 25 bp, Homo sapien
ctagcagcaatgtagagggttccgt

SEQ ID NO: 2823522 - DNA, 25 bp, Homo sapien
gagggttccgttcatgatcataatc

SEQ ID NO: 2823523 - DNA, 25 bp, Homo sapien
tctgtgtggtgttccgtcctggctt

SEQ ID NO: 2823524 - DNA, 25 bp, Homo sapien
tgtggcccacaaacaccggatactg

SEQ ID NO: 2823525 - DNA, 25 bp, Homo sapien
caaatgcaatgtggtctggaggcga

SEQ ID NO: 2823526 - DNA, 25 bp, Homo sapien
gaaaaatacagtctccacaggcgtc

SEQ ID NO: 2823527 - DNA, 25 bp, Homo sapien
taatccactattgaaggcagcccct

SEQ ID NO: 2823528 - DNA, 25 bp, Homo sapien
tcagggctcaactcgctagtgaacc

SEQ ID NO: 2823529 - DNA, 25 bp, Homo sapien
actggcgagcctccagacaaactca

SEQ ID NO: 2823530 - DNA, 25 bp, Homo sapien
aacatctctgcctttacacctacga

SEQ ID NO: 2823531 - DNA, 25 bp, Homo sapien
tacgatctccagagcactggcgagc

SEQ ID NO: 2823532 - DNA, 25 bp, Homo sapien
gcctttacacctacgatctccagag

SEQ ID NO: 2823533 - DNA, 25 bp, Homo sapien
agttgccatgcgaaatactgattgg

SEQ ID NO: 2823534 - DNA, 25 bp, Homo sapien
gccatgcgaaatactgattggctca

SEQ ID NO: 2823535 - DNA, 25 bp, Homo sapien
tgccatgcgaaatactgattggctc

SEQ ID NO: 2823536 - DNA, 25 bp, Homo sapien
gttgccatgcgaaatactgattggc

SEQ ID NO: 2823537 - DNA, 25 bp, Homo sapien
tagttcagcggggagactttatttc

SEQ ID NO: 2823538 - DNA, 25 bp, Homo sapien
agtagttcagcggggagactttatt

SEQ ID NO: 2823539 - DNA, 25 bp, Homo sapien
agttcagcggggagactttatttct

SEQ ID NO: 2823540 - DNA, 25 bp, Homo sapien
ctccaatatggaacaaagagcttta

SEQ ID NO: 2823541 - DNA, 25 bp, Homo sapien
gcaaagtttctccaatatggaacaa

SEQ ID NO: 2823542 - DNA, 25 bp, Homo sapien
agtttctccaatatggaacaaagag

SEQ ID NO: 2823543 - DNA, 25 bp, Homo sapien
tctgagcccttttgcaaagtttctc

SEQ ID NO: 2823544 - DNA, 25 bp, Homo sapien
gcagcattaagagggtgctgctgtc

SEQ ID NO: 2823545 - DNA, 25 bp, Homo sapien
ctctgtttcaaggaccgcagcatta

SEQ ID NO: 2823546 - DNA, 25 bp, Homo sapien
aaggaccgcagcattaagagggtgc

SEQ ID NO: 2823547 - DNA, 25 bp, Homo sapien
ttcaaggaccgcagcattaagaggg

SEQ ID NO: 2823548 - DNA, 25 bp, Homo sapien
gcattcaatggaggataataataaa

SEQ ID NO: 2823549 - DNA, 25 bp, Homo sapien
taaatatcgactgggtgtaatagat

SEQ ID NO: 2823550 - DNA, 25 bp, Homo sapien
aataataaatatcgactgggtgtaa

SEQ ID NO: 2823551 - DNA, 25 bp, Homo sapien
gaggataataataaatatcgactgg

SEQ ID NO: 2823552 - DNA, 25 bp, Homo sapien
tcaactgtgccctggtaacctggga

SEQ ID NO: 2823553 - DNA, 25 bp, Homo sapien
cgtctcttcgcagtatggtcagcca

SEQ ID NO: 2823554 - DNA, 25 bp, Homo sapien
tgagtagacaaatatcggagccgct

SEQ ID NO: 2823555 - DNA, 25 bp, Homo sapien
catgtgaatactgcacgaggaagcc

SEQ ID NO: 2823556 - DNA, 25 bp, Homo sapien
aaagatatagctggccccgaatctc

SEQ ID NO: 2823557 - DNA, 25 bp, Homo sapien
tattcctaatgcttcaatacgagga

SEQ ID NO: 2823558 - DNA, 25 bp, Homo sapien
cccgaatctcctgggtgtgaaaaga

SEQ ID NO: 2823559 - DNA, 25 bp, Homo sapien
aacatggccaaaagacgaatattgc

SEQ ID NO: 2823560 - DNA, 25 bp, Homo sapien
ggatcctatggctttatctcagcaa

SEQ ID NO: 2823561 - DNA, 25 bp, Homo sapien
tcaaaaaggcaatcagactatctac

SEQ ID NO: 2823562 - DNA, 25 bp, Homo sapien
gaaattcacatgtgtgcagcataaa

SEQ ID NO: 2823563 - DNA, 25 bp, Homo sapien
tgatactccctaaatatgcctgtct

SEQ ID NO: 2823564 - DNA, 25 bp, Homo sapien
tttaaatagatgaagctaaccagat

SEQ ID NO: 2823565 - DNA, 25 bp, Homo sapien
ctgcttggctggttttaaatagatg

SEQ ID NO: 2823566 - DNA, 25 bp, Homo sapien
taaatagatgaagctaaccagatat

SEQ ID NO: 2823567 - DNA, 25 bp, Homo sapien
tagatgaagctaaccagatatttac

SEQ ID NO: 2823568 - DNA, 25 bp, Homo sapien
cattgtcctggggagcccgagtcat

SEQ ID NO: 2823569 - DNA, 25 bp, Homo sapien
taagtggactatgaccaatcaaagt

SEQ ID NO: 2823570 - DNA, 25 bp, Homo sapien
tgggaactcagtccacacagtaacg

SEQ ID NO: 2823571 - DNA, 25 bp, Homo sapien
cacagtaacgcattgcgaactgtaa

SEQ ID NO: 2823572 - DNA, 25 bp, Homo sapien
tagaacccctaggatatatcagtgc

SEQ ID NO: 2823573 - DNA, 25 bp, Homo sapien
tccagttgcatgacctagagacaaa

SEQ ID NO: 2823574 - DNA, 25 bp, Homo sapien
tgctctgcacgtgaagcagtgttga

SEQ ID NO: 2823575 - DNA, 25 bp, Homo sapien
ggtgactacgcttattgccattagg

SEQ ID NO: 2823576 - DNA, 25 bp, Homo sapien
tacttttacagtagactttgcaggc

SEQ ID NO: 2823577 - DNA, 25 bp, Homo sapien
catggatgcagtttacagaggtctc

SEQ ID NO: 2823578 - DNA, 25 bp, Homo sapien
taaatgcaccctagtagaaaatagg

SEQ ID NO: 2823579 - DNA, 25 bp, Homo sapien
taaattgatgccaaaactagcacgt

SEQ ID NO: 2823580 - DNA, 25 bp, Homo sapien
gatcattatgtcaaaaagttgcaag

SEQ ID NO: 2823581 - DNA, 25 bp, Homo sapien
tagactttggcataaaaggtgaagt

SEQ ID NO: 2823582 - DNA, 25 bp, Homo sapien
tctagtcaatgtttctctaacttgg

SEQ ID NO: 2823583 - DNA, 25 bp, Homo sapien
caccctccactgatagaggcaacta

SEQ ID NO: 2823584 - DNA, 25 bp, Homo sapien
caagggacacagtagagctatttca

SEQ ID NO: 2823585 - DNA, 25 bp, Homo sapien
gccattcatcataactctgcagggt

SEQ ID NO: 2823586 - DNA, 25 bp, Homo sapien
caaaagaggtgctccgaagacaggc

SEQ ID NO: 2823587 - DNA, 25 bp, Homo sapien
tctgcagggttaatggcataagtcc

SEQ ID NO: 2823588 - DNA, 25 bp, Homo sapien
ggatcactcttcatattatcaggct

SEQ ID NO: 2823589 - DNA, 25 bp, Homo sapien
ggtgataaccataatcccaaaggcc

SEQ ID NO: 2823590 - DNA, 25 bp, Homo sapien
ttcttatctcagctccatttgccca

SEQ ID NO: 2823591 - DNA, 25 bp, Homo sapien
ttggggctcttacgcaagtactggc

SEQ ID NO: 2823592 - DNA, 25 bp, Homo sapien
tgagacactctgattgctttacaac

SEQ ID NO: 2823593 - DNA, 25 bp, Homo sapien
catgtaatgacttccctgagacact

SEQ ID NO: 2823594 - DNA, 25 bp, Homo sapien
agtcacaggcttgtaaaggtccatg

SEQ ID NO: 2823595 - DNA, 25 bp, Homo sapien
tgacacagagtcacaagctcagagt

SEQ ID NO: 2823596 - DNA, 25 bp, Homo sapien
aggataaccctactactgcacccca

SEQ ID NO: 2823597 - DNA, 25 bp, Homo sapien
gtatgtgtcctcacatcttgtgtcc

SEQ ID NO: 2823598 - DNA, 25 bp, Homo sapien
tgtatgtgtcctcacatcttgtgtc

SEQ ID NO: 2823599 - DNA, 25 bp, Homo sapien
tttcctaggataaccctactactgc

SEQ ID NO: 2823600 - DNA, 25 bp, Homo sapien
cacaagggagaattacagggcttcc

SEQ ID NO: 2823601 - DNA, 25 bp, Homo sapien
caatgaacataacagcacaagggag

SEQ ID NO: 2823602 - DNA, 25 bp, Homo sapien
ggcactctggtatcaggcctgagca

SEQ ID NO: 2823603 - DNA, 25 bp, Homo sapien
ccaagctgactgtagggatgtaact

SEQ ID NO: 2823604 - DNA, 25 bp, Homo sapien
tatccccggcctcacatttgtgctg

SEQ ID NO: 2823605 - DNA, 25 bp, Homo sapien
gactctgaccttcatggtagcatgg

SEQ ID NO: 2823606 - DNA, 25 bp, Homo sapien
taacaagcaagcattaagactggcc

SEQ ID NO: 2823607 - DNA, 25 bp, Homo sapien
aaaaagccaaatgatcccctgagtc

SEQ ID NO: 2823608 - DNA, 25 bp, Homo sapien
tacctgtacgatcggtcacggcaca

SEQ ID NO: 2823609 - DNA, 25 bp, Homo sapien
tctttgcccaagtgctacctgtacg

SEQ ID NO: 2823610 - DNA, 25 bp, Homo sapien
gatggatcctaaccttgtacaagca

SEQ ID NO: 2823611 - DNA, 25 bp, Homo sapien
gctcttgggccttctaaatggtcgt

SEQ ID NO: 2823612 - DNA, 25 bp, Homo sapien
agtggacatctctgcaccctgtagc

SEQ ID NO: 2823613 - DNA, 25 bp, Homo sapien
gctctgagggctggaaactttgcct

SEQ ID NO: 2823614 - DNA, 25 bp, Homo sapien
tctaatgatacaggaatcccatggc

SEQ ID NO: 2823615 - DNA, 25 bp, Homo sapien
gatctgtcagcatgtgcccagtgga

SEQ ID NO: 2823616 - DNA, 25 bp, Homo sapien
ttgggcaacccagtacctcaagcag

SEQ ID NO: 2823617 - DNA, 25 bp, Homo sapien
tgaggtacacatacaggtcatgacc

SEQ ID NO: 2823618 - DNA, 25 bp, Homo sapien
tctcactctgaaggataggaatcta

SEQ ID NO: 2823619 - DNA, 25 bp, Homo sapien
gagatcaggtttgtcttgggcaacc

SEQ ID NO: 2823620 - DNA, 25 bp, Homo sapien
ggtcaactgatgatttgctaataaa

SEQ ID NO: 2823621 - DNA, 25 bp, Homo sapien
ctttctgggtcaactgatgatttgc

SEQ ID NO: 2823622 - DNA, 25 bp, Homo sapien
ctggccactttctgggtcaactgat

SEQ ID NO: 2823623 - DNA, 25 bp, Homo sapien
taataaatgaaatactccgggttca

SEQ ID NO: 2823624 - DNA, 25 bp, Homo sapien
aaaagctttgatcttactcccactg

SEQ ID NO: 2823625 - DNA, 25 bp, Homo sapien
catctagcctatgcgaatactgtaa

SEQ ID NO: 2823626 - DNA, 25 bp, Homo sapien
cagaacctattttcttaccctgcca

SEQ ID NO: 2823627 - DNA, 25 bp, Homo sapien
taacccgacacccaagagtaatcac

SEQ ID NO: 2823628 - DNA, 25 bp, Homo sapien
tagaagcccggtgaaaccagtagca

SEQ ID NO: 2823629 - DNA, 25 bp, Homo sapien
tcttacacaaaaatgttggcaggct

SEQ ID NO: 2823630 - DNA, 25 bp, Homo sapien
gagaaatttaaaacgctgccttgaa

SEQ ID NO: 2823631 - DNA, 25 bp, Homo sapien
agaaattccggtgcctagaagcccg

SEQ ID NO: 2823632 - DNA, 25 bp, Homo sapien
cacgtgaagcacataaatcgccaga

SEQ ID NO: 2823633 - DNA, 25 bp, Homo sapien
tatccgttgcacaaggccaaatttg

SEQ ID NO: 2823634 - DNA, 25 bp, Homo sapien
cgagttgacaaagcagtagacctac

SEQ ID NO: 2823635 - DNA, 25 bp, Homo sapien
atttgccaaccagaagcaagctgtg

SEQ ID NO: 2823636 - DNA, 25 bp, Homo sapien
gatgtgcacataacaaggtccaggg

SEQ ID NO: 2823637 - DNA, 25 bp, Homo sapien
tatggcaaccgaataagaaagcagc

SEQ ID NO: 2823638 - DNA, 25 bp, Homo sapien
taacagatgaagatcccagcgacag

SEQ ID NO: 2823639 - DNA, 25 bp, Homo sapien
cgacagtgtctagctagggccatca

SEQ ID NO: 2823640 - DNA, 25 bp, Homo sapien
gatggaaacttctactagtcctggt

SEQ ID NO: 2823641 - DNA, 25 bp, Homo sapien
gacctccgcaatgcctctagagttg

SEQ ID NO: 2823642 - DNA, 25 bp, Homo sapien
aaatccacgtgcattgtctgtcaaa

SEQ ID NO: 2823643 - DNA, 25 bp, Homo sapien
cctggcagaatggtactcctatgac

SEQ ID NO: 2823644 - DNA, 25 bp, Homo sapien
gatgcttaattaaagcatttgcaat

SEQ ID NO: 2823645 - DNA, 25 bp, Homo sapien
gcttagcttgttctgtgattccttc

SEQ ID NO: 2823646 - DNA, 25 bp, Homo sapien
gcaattagcttagcttgttctgtga

SEQ ID NO: 2823647 - DNA, 25 bp, Homo sapien
taaagcatttgcaattagcttagct

SEQ ID NO: 2823648 - DNA, 25 bp, Homo sapien
cttgatgcccaagatgtgtccacca

SEQ ID NO: 2823649 - DNA, 25 bp, Homo sapien
ggaaggacgacgaacaatttcagga

SEQ ID NO: 2823650 - DNA, 25 bp, Homo sapien
atgcccaagatgtgtccaccagggg

SEQ ID NO: 2823651 - DNA, 25 bp, Homo sapien
tgtccaccaggggaaggacgacgaa

SEQ ID NO: 2823652 - DNA, 25 bp, Homo sapien
tgaccccgccgctgtaaagtgggag

SEQ ID NO: 2823653 - DNA, 25 bp, Homo sapien
gaagctgcctacttgcaagccactg

SEQ ID NO: 2823654 - DNA, 25 bp, Homo sapien
gatagccacgctgggaaatcgtgcg

SEQ ID NO: 2823655 - DNA, 25 bp, Homo sapien
agatggctcgggattctgcacctga

SEQ ID NO: 2823656 - DNA, 25 bp, Homo sapien
gcgtgtatcccatttagtaatccat

SEQ ID NO: 2823657 - DNA, 25 bp, Homo sapien
ttttcggtgcatcgacggacaggcg

SEQ ID NO: 2823658 - DNA, 25 bp, Homo sapien
cattatcgaggggatctctccgggc

SEQ ID NO: 2823659 - DNA, 25 bp, Homo sapien
ctcggagcgaactggtacagcgtgt

SEQ ID NO: 2823660 - DNA, 25 bp, Homo sapien
tctgggatgcaaacgcgatgtgttc

SEQ ID NO: 2823661 - DNA, 25 bp, Homo sapien
caagtcccggactggattgcgcaga

SEQ ID NO: 2823662 - DNA, 25 bp, Homo sapien
ggtgtctgcgccgattaacaagtca

SEQ ID NO: 2823663 - DNA, 25 bp, Homo sapien
tcgcggcgactactttctgggatgc

SEQ ID NO: 2823664 - DNA, 25 bp, Homo sapien
tcactcagtgaagagggcgatgtgt

SEQ ID NO: 2823665 - DNA, 25 bp, Homo sapien
cactcagtgaagagggcgatgtgtc

SEQ ID NO: 2823666 - DNA, 25 bp, Homo sapien
tctgtcaatgtgcacaatgtagcca

SEQ ID NO: 2823667 - DNA, 25 bp, Homo sapien
ttacggcacacagggtaggcctgag

SEQ ID NO: 2823668 - DNA, 25 bp, Homo sapien
ctggcaggcttcctagtgggctgct

SEQ ID NO: 2823669 - DNA, 25 bp, Homo sapien
ggaatctttgtgaaggctgcttata

SEQ ID NO: 2823670 - DNA, 25 bp, Homo sapien
tagaatgtgaatagagaatctcttt

SEQ ID NO: 2823671 - DNA, 25 bp, Homo sapien
aatgtgaatagagaatctctttccc

SEQ ID NO: 2823672 - DNA, 25 bp, Homo sapien
ctttagaatgtgaatagagaatctc

SEQ ID NO: 2823673 - DNA, 25 bp, Homo sapien
tctttagaatgtgaatagagaatct

SEQ ID NO: 2823674 - DNA, 25 bp, Homo sapien
accagctgctgtgtagtactaactc

SEQ ID NO: 2823675 - DNA, 25 bp, Homo sapien
cagctgctgtgtagtactaactcat

SEQ ID NO: 2823676 - DNA, 25 bp, Homo sapien
gctgtgtagtactaactcatgaatc

SEQ ID NO: 2823677 - DNA, 25 bp, Homo sapien
gctgctgtgtagtactaactcatga

SEQ ID NO: 2823678 - DNA, 25 bp, Homo sapien
tgggggtaggttgtgccttcctgcc

SEQ ID NO: 2823679 - DNA, 25 bp, Homo sapien
gggggtaggttgtgccttcctgcca

SEQ ID NO: 2823680 - DNA, 25 bp, Homo sapien
tgctccatcacctgtatccccatat

SEQ ID NO: 2823681 - DNA, 25 bp, Homo sapien
gtgatataggcccactcccttcaca

SEQ ID NO: 2823682 - DNA, 25 bp, Homo sapien
ctgcctccaagcacgcagatggctt

SEQ ID NO: 2823683 - DNA, 25 bp, Homo sapien
gcgaatattgccctcttgggtgctt

SEQ ID NO: 2823684 - DNA, 25 bp, Homo sapien
tgcggcatgaaacagtgtcttcctt

SEQ ID NO: 2823685 - DNA, 25 bp, Homo sapien
ggcatgaaacagtgtcttccttcat

SEQ ID NO: 2823686 - DNA, 25 bp, Homo sapien
ctgcggcatgaaacagtgtcttcct

SEQ ID NO: 2823687 - DNA, 25 bp, Homo sapien
gcggcatgaaacagtgtcttccttc

SEQ ID NO: 2823688 - DNA, 25 bp, Homo sapien
gggaagtaaagtttcagagaatgga

SEQ ID NO: 2823689 - DNA, 25 bp, Homo sapien
agtttcagagaatggagtgatgaag

SEQ ID NO: 2823690 - DNA, 25 bp, Homo sapien
tctaggggaagtaaagtttcagaga

SEQ ID NO: 2823691 - DNA, 25 bp, Homo sapien
taaagtttcagagaatggagtgatg

SEQ ID NO: 2823692 - DNA, 25 bp, Homo sapien
gaatatgtcagggtcagaggcaaga

SEQ ID NO: 2823693 - DNA, 25 bp, Homo sapien
ttagaatatgtcagggtcagaggca

SEQ ID NO: 2823694 - DNA, 25 bp, Homo sapien
atgtcagggtcagaggcaagacttt

SEQ ID NO: 2823695 - DNA, 25 bp, Homo sapien
tatgtcagggtcagaggcaagactt

SEQ ID NO: 2823696 - DNA, 25 bp, Homo sapien
taatctccctatgaggcagtggttc

SEQ ID NO: 2823697 - DNA, 25 bp, Homo sapien
gatagcagccctgaatccaacctgg

SEQ ID NO: 2823698 - DNA, 25 bp, Homo sapien
tctgagattgtgatacccagcgtgg

SEQ ID NO: 2823699 - DNA, 25 bp, Homo sapien
gagtaccccaaaatgtgctgtgtga

SEQ ID NO: 2823700 - DNA, 25 bp, Homo sapien
atggtaaacctttgcaggacttttg

SEQ ID NO: 2823701 - DNA, 25 bp, Homo sapien
cggatggtaaacctttgcaggactt

SEQ ID NO: 2823702 - DNA, 25 bp, Homo sapien
ctccggatggtaaacctttgcagga

SEQ ID NO: 2823703 - DNA, 25 bp, Homo sapien
tccggatggtaaacctttgcaggac

SEQ ID NO: 2823704 - DNA, 25 bp, Homo sapien
cagtttctctgtaggttctcttcaa

SEQ ID NO: 2823705 - DNA, 25 bp, Homo sapien
acccagtttctctgtaggttctctt

SEQ ID NO: 2823706 - DNA, 25 bp, Homo sapien
agtttctctgtaggttctcttcaaa

SEQ ID NO: 2823707 - DNA, 25 bp, Homo sapien
ctgacccagtttctctgtaggttct

SEQ ID NO: 2823708 - DNA, 25 bp, Homo sapien
ctacagctgatacggtctgggacca

SEQ ID NO: 2823709 - DNA, 25 bp, Homo sapien
tgggaactggaacacctacagctga

SEQ ID NO: 2823710 - DNA, 25 bp, Homo sapien
tcaatacatagcgaagaaagccgga

SEQ ID NO: 2823711 - DNA, 25 bp, Homo sapien
cagagcgaatttgtgccactgagcc

SEQ ID NO: 2823712 - DNA, 25 bp, Homo sapien
tatgcctcataataaaatatcctgc

SEQ ID NO: 2823713 - DNA, 25 bp, Homo sapien
cttgcccattctggccagtgtctgg

SEQ ID NO: 2823714 - DNA, 25 bp, Homo sapien
aacgcctatcctgcaagacatcttg

SEQ ID NO: 2823715 - DNA, 25 bp, Homo sapien
attttcttcactccctcatatgcct

SEQ ID NO: 2823716 - DNA, 25 bp, Homo sapien
gaatgaagtacgtgcttcctctctg

SEQ ID NO: 2823717 - DNA, 25 bp, Homo sapien
tctacactgggctgctaagactgga

SEQ ID NO: 2823718 - DNA, 25 bp, Homo sapien
cacaaggcccactggtttaccggca

SEQ ID NO: 2823719 - DNA, 25 bp, Homo sapien
tctacaattattgacaaggacagca

SEQ ID NO: 2823720 - DNA, 25 bp, Homo sapien
cctgctgattttgattaagtaattc

SEQ ID NO: 2823721 - DNA, 25 bp, Homo sapien
taaaatgagggctctcaactgagag

SEQ ID NO: 2823722 - DNA, 25 bp, Homo sapien
caggatctggcagcaaaaataggcg

SEQ ID NO: 2823723 - DNA, 25 bp, Homo sapien
taggcgagaatctcacttccactga

SEQ ID NO: 2823724 - DNA, 25 bp, Homo sapien
gatgagaatgggaagatcgtgaaac

SEQ ID NO: 2823725 - DNA, 25 bp, Homo sapien
gaatgggaagatcgtgaaactcttc

SEQ ID NO: 2823726 - DNA, 25 bp, Homo sapien
aagatcgtgaaactcttccaaggcc

SEQ ID NO: 2823727 - DNA, 25 bp, Homo sapien
gggaagatcgtgaaactcttccaag

SEQ ID NO: 2823728 - DNA, 25 bp, Homo sapien
tggaggacctttcccggagagccat

SEQ ID NO: 2823729 - DNA, 25 bp, Homo sapien
ttggaggacctttcccggagagcca

SEQ ID NO: 2823730 - DNA, 25 bp, Homo sapien
cctggtcatggcgtcagccttggag

SEQ ID NO: 2823731 - DNA, 25 bp, Homo sapien
gtcatggcgtcagccttggaggacc

SEQ ID NO: 2823732 - DNA, 25 bp, Homo sapien
tattgtcgtggataattgccataga

SEQ ID NO: 2823733 - DNA, 25 bp, Homo sapien
tcctggattacaaaatgacaccatt

SEQ ID NO: 2823734 - DNA, 25 bp, Homo sapien
gattacaaaatgacaccattaggca

SEQ ID NO: 2823735 - DNA, 25 bp, Homo sapien
cattaggcaattcttattgtcgtgg

SEQ ID NO: 2823736 - DNA, 25 bp, Homo sapien
aagacattctcttctttgccgcctc

SEQ ID NO: 2823737 - DNA, 25 bp, Homo sapien
tttttgaaagacattctcttctttg

SEQ ID NO: 2823738 - DNA, 25 bp, Homo sapien
ttgaaagacattctcttctttgccg

SEQ ID NO: 2823739 - DNA, 25 bp, Homo sapien
ttatcttgtatgtttttgaaagaca

SEQ ID NO: 2823740 - DNA, 25 bp, Homo sapien
ttccaaagtcttgccagttgatgag

SEQ ID NO: 2823741 - DNA, 25 bp, Homo sapien
atgccaaaacctcttgctccaaact

SEQ ID NO: 2823742 - DNA, 25 bp, Homo sapien
tccaggagatccgtgggtgctgcca

SEQ ID NO: 2823743 - DNA, 25 bp, Homo sapien
cagtggagactcaggcatctgctct

SEQ ID NO: 2823744 - DNA, 25 bp, Homo sapien
catgtccccattctttcaacctcag

SEQ ID NO: 2823745 - DNA, 25 bp, Homo sapien
cccattctttcaacctcagactcat

SEQ ID NO: 2823746 - DNA, 25 bp, Homo sapien
attctttcaacctcagactcatcac

SEQ ID NO: 2823747 - DNA, 25 bp, Homo sapien
tcatgtccccattctttcaacctca

SEQ ID NO: 2823748 - DNA, 25 bp, Homo sapien
tctggtcctcatgctccaaggagag

SEQ ID NO: 2823749 - DNA, 25 bp, Homo sapien
tatcaggcacacaataggaacattg

SEQ ID NO: 2823750 - DNA, 25 bp, Homo sapien
taagggatccgtacatatcaggcac

SEQ ID NO: 2823751 - DNA, 25 bp, Homo sapien
tccagtcacagaaggcttagttgct

SEQ ID NO: 2823752 - DNA, 25 bp, Homo sapien
aagtccctcggcctggagctctcac

SEQ ID NO: 2823753 - DNA, 25 bp, Homo sapien
ccctcggcctggagctctcactcat

SEQ ID NO: 2823754 - DNA, 25 bp, Homo sapien
aggtaagtccctcggcctggagctc

SEQ ID NO: 2823755 - DNA, 25 bp, Homo sapien
acaggtaagtccctcggcctggagc

SEQ ID NO: 2823756 - DNA, 25 bp, Homo sapien
tcgtttcttcggtgttttcagacat

SEQ ID NO: 2823757 - DNA, 25 bp, Homo sapien
ctcgtttcttcggtgttttcagaca

SEQ ID NO: 2823758 - DNA, 25 bp, Homo sapien
tcctcgtttcttcggtgttttcaga

SEQ ID NO: 2823759 - DNA, 25 bp, Homo sapien
agaaagccttctgtgaggctgagag

SEQ ID NO: 2823760 - DNA, 25 bp, Homo sapien
tctggcctgcaccagaaagccttct

SEQ ID NO: 2823761 - DNA, 25 bp, Homo sapien
cccctgctctttgttaacatgtttt

SEQ ID NO: 2823762 - DNA, 25 bp, Homo sapien
tctcccctgctctttgttaacatgt

SEQ ID NO: 2823763 - DNA, 25 bp, Homo sapien
aagtcaatttcgcctcaaactgttg

SEQ ID NO: 2823764 - DNA, 25 bp, Homo sapien
atttcgcctcaaactgttgcattta

SEQ ID NO: 2823765 - DNA, 25 bp, Homo sapien
caatttcgcctcaaactgttgcatt

SEQ ID NO: 2823766 - DNA, 25 bp, Homo sapien
gtcaatttcgcctcaaactgttgca

SEQ ID NO: 2823767 - DNA, 25 bp, Homo sapien
atgggcctcattcgcaccaaaaccg

SEQ ID NO: 2823768 - DNA, 25 bp, Homo sapien
ggcctcattcgcaccaaaaccgtga

SEQ ID NO: 2823769 - DNA, 25 bp, Homo sapien
gggcctcattcgcaccaaaaccgtg

SEQ ID NO: 2823770 - DNA, 25 bp, Homo sapien
acatgggcctcattcgcaccaaaac

SEQ ID NO: 2823771 - DNA, 25 bp, Homo sapien
tgctgggctgtgagcttggaggacc

SEQ ID NO: 2823772 - DNA, 25 bp, Homo sapien
ctgggctgtgagcttggaggacctt

SEQ ID NO: 2823773 - DNA, 25 bp, Homo sapien
cactgctgggctgtgagcttggagg

SEQ ID NO: 2823774 - DNA, 25 bp, Homo sapien
tcatgcactgctgggctgtgagctt

SEQ ID NO: 2823775 - DNA, 25 bp, Homo sapien
tgcaggcccagccaggtgaatatct

SEQ ID NO: 2823776 - DNA, 25 bp, Homo sapien
tcactcctcggaagctggcactggg

SEQ ID NO: 2823777 - DNA, 25 bp, Homo sapien
gcccagccaggtgaatatctggggc

SEQ ID NO: 2823778 - DNA, 25 bp, Homo sapien
aggcccagccaggtgaatatctggg

SEQ ID NO: 2823779 - DNA, 25 bp, Homo sapien
tggagaaagggtgatgtcctcctct

SEQ ID NO: 2823780 - DNA, 25 bp, Homo sapien
gtcctcctctttctggtaatgctga

SEQ ID NO: 2823781 - DNA, 25 bp, Homo sapien
cagttgcgggaactcaagaagctca

SEQ ID NO: 2823782 - DNA, 25 bp, Homo sapien
tggtaatgctgaaagctcagtcagt

SEQ ID NO: 2823783 - DNA, 25 bp, Homo sapien
gctgactccccttaagactttcagg

SEQ ID NO: 2823784 - DNA, 25 bp, Homo sapien
ctgtggttgaaggaccagtgctgac

SEQ ID NO: 2823785 - DNA, 25 bp, Homo sapien
taagactttcaggttttccagcaaa

SEQ ID NO: 2823786 - DNA, 25 bp, Homo sapien
ggaccagtgctgactccccttaaga

SEQ ID NO: 2823787 - DNA, 25 bp, Homo sapien
gagattcctgtctatctccgcccag

SEQ ID NO: 2823788 - DNA, 25 bp, Homo sapien
tgttcggcgtctttcaaagcacatg

SEQ ID NO: 2823789 - DNA, 25 bp, Homo sapien
tgttttttgttgcagctgttcggcg

SEQ ID NO: 2823790 - DNA, 25 bp, Homo sapien
tgagtgtgactgttcctttctcccg

SEQ ID NO: 2823791 - DNA, 25 bp, Homo sapien
aaagtgatgttacagggtctcccaa

SEQ ID NO: 2823792 - DNA, 25 bp, Homo sapien
gtcacaaatgtgacacactcagagg

SEQ ID NO: 2823793 - DNA, 25 bp, Homo sapien
cactcagaggtacgaagggtaattg

SEQ ID NO: 2823794 - DNA, 25 bp, Homo sapien
gaacgctgagcaccatacgaacaag

SEQ ID NO: 2823795 - DNA, 25 bp, Homo sapien
atagaattatgaactataagggctg

SEQ ID NO: 2823796 - DNA, 25 bp, Homo sapien
agagggaccacccagctatgggcag

SEQ ID NO: 2823797 - DNA, 25 bp, Homo sapien
cagtcaagatcaaccaagcctgccc

SEQ ID NO: 2823798 - DNA, 25 bp, Homo sapien
gctctaattgccaaactatagaatt

SEQ ID NO: 2823799 - DNA, 25 bp, Homo sapien
gacacatcgagtgcctgagcaccac

SEQ ID NO: 2823800 - DNA, 25 bp, Homo sapien
gtgtgctgagacacatcgagtgcct

SEQ ID NO: 2823801 - DNA, 25 bp, Homo sapien
ttggccagaccaatgggagaaaatg

SEQ ID NO: 2823802 - DNA, 25 bp, Homo sapien
tgctgagacacatcgagtgcctgag

SEQ ID NO: 2823803 - DNA, 25 bp, Homo sapien
gtcctcagctatgcgtccctccgga

SEQ ID NO: 2823804 - DNA, 25 bp, Homo sapien
caggcttgcgttccagcgtcctcag

SEQ ID NO: 2823805 - DNA, 25 bp, Homo sapien
agctatgcgtccctccggaggctga

SEQ ID NO: 2823806 - DNA, 25 bp, Homo sapien
agcgtcctcagctatgcgtccctcc

SEQ ID NO: 2823807 - DNA, 25 bp, Homo sapien
gcactcaaaagtgccctcgataatg

SEQ ID NO: 2823808 - DNA, 25 bp, Homo sapien
ttggcgactttgtttgttcaaagac

SEQ ID NO: 2823809 - DNA, 25 bp, Homo sapien
tttgctcttgagagaggaactgtag

SEQ ID NO: 2823810 - DNA, 25 bp, Homo sapien
gacatggaatcaggcactcaaaagt

SEQ ID NO: 2823811 - DNA, 25 bp, Homo sapien
aattggccatgctttatagcccaaa

SEQ ID NO: 2823812 - DNA, 25 bp, Homo sapien
ggggattatattctccatcctgaga

SEQ ID NO: 2823813 - DNA, 25 bp, Homo sapien
tgaggaatttgtttgtcttgctgtc

SEQ ID NO: 2823814 - DNA, 25 bp, Homo sapien
cttgctgtcaagcttgcgttctgag

SEQ ID NO: 2823815 - DNA, 25 bp, Homo sapien
ctaaataggccagaaagggtgaaga

SEQ ID NO: 2823816 - DNA, 25 bp, Homo sapien
aataggccagaaagggtgaagaata

SEQ ID NO: 2823817 - DNA, 25 bp, Homo sapien
aaataggccagaaagggtgaagaat

SEQ ID NO: 2823818 - DNA, 25 bp, Homo sapien
taaataggccagaaagggtgaagaa

SEQ ID NO: 2823819 - DNA, 25 bp, Homo sapien
gtctctgggctccaactctacttct

SEQ ID NO: 2823820 - DNA, 25 bp, Homo sapien
ctctgggctccaactctacttcttt

SEQ ID NO: 2823821 - DNA, 25 bp, Homo sapien
tctctgggctccaactctacttctt

SEQ ID NO: 2823822 - DNA, 25 bp, Homo sapien
agagaaggcttgtgaaattgcctgc

SEQ ID NO: 2823823 - DNA, 25 bp, Homo sapien
ggaaccagtagctcctatgctgact

SEQ ID NO: 2823824 - DNA, 25 bp, Homo sapien
tgtttttgtgaaacctgctgtgcac

SEQ ID NO: 2823825 - DNA, 25 bp, Homo sapien
gctgactgtctgctctagcttaaag

SEQ ID NO: 2823826 - DNA, 25 bp, Homo sapien
caccaacgtttttagctctccagga

SEQ ID NO: 2823827 - DNA, 25 bp, Homo sapien
atgtgtgtggccaaactgagcccga

SEQ ID NO: 2823828 - DNA, 25 bp, Homo sapien
tgtgtggccaaactgagcccgaagt

SEQ ID NO: 2823829 - DNA, 25 bp, Homo sapien
tgtgtgtggccaaactgagcccgaa

SEQ ID NO: 2823830 - DNA, 25 bp, Homo sapien
tgtggccaaactgagcccgaagtac

SEQ ID NO: 2823831 - DNA, 25 bp, Homo sapien
gacacagggtgaagatttcgcagca

SEQ ID NO: 2823832 - DNA, 25 bp, Homo sapien
ttcgcagcaacacccaaagccggtt

SEQ ID NO: 2823833 - DNA, 25 bp, Homo sapien
tctggaagccgtggaacaatgtaag

SEQ ID NO: 2823834 - DNA, 25 bp, Homo sapien
caggaatgcgttctcaacacagcgg

SEQ ID NO: 2823835 - DNA, 25 bp, Homo sapien
gaggagaagaagtcacatttctcca

SEQ ID NO: 2823836 - DNA, 25 bp, Homo sapien
ccagggtggaggagaagaagtcaca

SEQ ID NO: 2823837 - DNA, 25 bp, Homo sapien
tggaggagaagaagtcacatttctc

SEQ ID NO: 2823838 - DNA, 25 bp, Homo sapien
gggtggaggagaagaagtcacattt

SEQ ID NO: 2823839 - DNA, 25 bp, Homo sapien
ggaagattaaactggcaaatttatc

SEQ ID NO: 2823840 - DNA, 25 bp, Homo sapien
gtactggaagattaaactggcaaat

SEQ ID NO: 2823841 - DNA, 25 bp, Homo sapien
tcaaatctgccaaatatcgtatttt

SEQ ID NO: 2823842 - DNA, 25 bp, Homo sapien
cacattcaaatctgccaaatatcgt

SEQ ID NO: 2823843 - DNA, 25 bp, Homo sapien
ctcaaacttgggtgcatattagaac

SEQ ID NO: 2823844 - DNA, 25 bp, Homo sapien
cttgccttgacctttaaagttgtat

SEQ ID NO: 2823845 - DNA, 25 bp, Homo sapien
taatgatagggcaacatggttctgc

SEQ ID NO: 2823846 - DNA, 25 bp, Homo sapien
ccaggctgtacctcagacaaattaa

SEQ ID NO: 2823847 - DNA, 25 bp, Homo sapien
tctgctccatatgtcttattctggc

SEQ ID NO: 2823848 - DNA, 25 bp, Homo sapien
gggcaattctgctccatatgtctta

SEQ ID NO: 2823849 - DNA, 25 bp, Homo sapien
attctgctccatatgtcttattctg

SEQ ID NO: 2823850 - DNA, 25 bp, Homo sapien
tgctccatatgtcttattctggctc

SEQ ID NO: 2823851 - DNA, 25 bp, Homo sapien
aacggatgcttagcattcccagtgc

SEQ ID NO: 2823852 - DNA, 25 bp, Homo sapien
attaaatagtaaacggatgcttagc

SEQ ID NO: 2823853 - DNA, 25 bp, Homo sapien
taaggactatgtgctctggtaaaat

SEQ ID NO: 2823854 - DNA, 25 bp, Homo sapien
ttttacagtagacactggttcgtaa

SEQ ID NO: 2823855 - DNA, 25 bp, Homo sapien
ataagttcatactgggtctggcaat

SEQ ID NO: 2823856 - DNA, 25 bp, Homo sapien
ttctataagttcatactgggtctgg

SEQ ID NO: 2823857 - DNA, 25 bp, Homo sapien
tataagttcatactgggtctggcaa

SEQ ID NO: 2823858 - DNA, 25 bp, Homo sapien
tctataagttcatactgggtctggc

SEQ ID NO: 2823859 - DNA, 25 bp, Homo sapien
agggcctacagcatcccccacaaag

SEQ ID NO: 2823860 - DNA, 25 bp, Homo sapien
gcctacagcatcccccacaaaggcc

SEQ ID NO: 2823861 - DNA, 25 bp, Homo sapien
ctacagcatcccccacaaaggccca

SEQ ID NO: 2823862 - DNA, 25 bp, Homo sapien
gggcctacagcatcccccacaaagg

SEQ ID NO: 2823863 - DNA, 25 bp, Homo sapien
acacagatatattaagtaacttcat

SEQ ID NO: 2823864 - DNA, 25 bp, Homo sapien
gctgagtacgcggtaacacagatat

SEQ ID NO: 2823865 - DNA, 25 bp, Homo sapien
tgaattcaaccagcaagtcactctc

SEQ ID NO: 2823866 - DNA, 25 bp, Homo sapien
tttttaatagctgagtacgcggtaa

SEQ ID NO: 2823867 - DNA, 25 bp, Homo sapien
tttctgtaactcaatatcctgtttg

SEQ ID NO: 2823868 - DNA, 25 bp, Homo sapien
aactcaatatcctgtttggcctctg

SEQ ID NO: 2823869 - DNA, 25 bp, Homo sapien
tctgtaactcaatatcctgtttggc

SEQ ID NO: 2823870 - DNA, 25 bp, Homo sapien
tgtaactcaatatcctgtttggcct

SEQ ID NO: 2823871 - DNA, 25 bp, Homo sapien
taatatcccccactgcagtggtaca

SEQ ID NO: 2823872 - DNA, 25 bp, Homo sapien
tatccccccacccatgcatagcttc

SEQ ID NO: 2823873 - DNA, 25 bp, Homo sapien
cctattattaatatcccccactgca

SEQ ID NO: 2823874 - DNA, 25 bp, Homo sapien
cagaagtttctcatatccccccacc

SEQ ID NO: 2823875 - DNA, 25 bp, Homo sapien
ctaaaaaaataggtcgctttgcaat

SEQ ID NO: 2823876 - DNA, 25 bp, Homo sapien
tctaaaaaaataggtcgctttgcaa

SEQ ID NO: 2823877 - DNA, 25 bp, Homo sapien
ttctaaaaaaataggtcgctttgca

SEQ ID NO: 2823878 - DNA, 25 bp, Homo sapien
cctgtgtcgaggccttgaacccatg

SEQ ID NO: 2823879 - DNA, 25 bp, Homo sapien
cccaaagtccctgtgtcgaggcctt

SEQ ID NO: 2823880 - DNA, 25 bp, Homo sapien
aagtccctgtgtcgaggccttgaac

SEQ ID NO: 2823881 - DNA, 25 bp, Homo sapien
caaagtccctgtgtcgaggccttga

SEQ ID NO: 2823882 - DNA, 25 bp, Homo sapien
ccacctttatcttgtctgtgtgttc

SEQ ID NO: 2823883 - DNA, 25 bp, Homo sapien
tgtgtgttcttcagtcgttcctacg

SEQ ID NO: 2823884 - DNA, 25 bp, Homo sapien
ggcttttgtaaggagcatagtgctc

SEQ ID NO: 2823885 - DNA, 25 bp, Homo sapien
tcgttcctacgataaggcttttgta

SEQ ID NO: 2823886 - DNA, 25 bp, Homo sapien
ttcatatcaggattgacattaatca

SEQ ID NO: 2823887 - DNA, 25 bp, Homo sapien
tcatatcaggattgacattaatcat

SEQ ID NO: 2823888 - DNA, 25 bp, Homo sapien
ctttggcactatctgagcaaaactg

SEQ ID NO: 2823889 - DNA, 25 bp, Homo sapien
tcattccccgaaagcttcacttctg

SEQ ID NO: 2823890 - DNA, 25 bp, Homo sapien
tttcattccccgaaagcttcacttc

SEQ ID NO: 2823891 - DNA, 25 bp, Homo sapien
cattccccgaaagcttcacttctga

SEQ ID NO: 2823892 - DNA, 25 bp, Homo sapien
ttcattccccgaaagcttcacttct

SEQ ID NO: 2823893 - DNA, 25 bp, Homo sapien
gtgcgtccttctacatccccagaga

SEQ ID NO: 2823894 - DNA, 25 bp, Homo sapien
gaaaacagggcactgagtatcccca

SEQ ID NO: 2823895 - DNA, 25 bp, Homo sapien
tccaggattgtcttgtgcgtccttc

SEQ ID NO: 2823896 - DNA, 25 bp, Homo sapien
ctttcctcttgtggagaagagtgag

SEQ ID NO: 2823897 - DNA, 25 bp, Homo sapien
ttctcgggagcttgtatcaaatgaa

SEQ ID NO: 2823898 - DNA, 25 bp, Homo sapien
tttgtgcccgcaggttctatggagc

SEQ ID NO: 2823899 - DNA, 25 bp, Homo sapien
ggagccttgaagttctcgggagctt

SEQ ID NO: 2823900 - DNA, 25 bp, Homo sapien
cccgcaggttctatggagccttgaa

SEQ ID NO: 2823901 - DNA, 25 bp, Homo sapien
ttccactccaccagttcttttcaaa

SEQ ID NO: 2823902 - DNA, 25 bp, Homo sapien
ttcttttcaaagacttgatctcaga

SEQ ID NO: 2823903 - DNA, 25 bp, Homo sapien
tcaaagacttgatctcagagctttc

SEQ ID NO: 2823904 - DNA, 25 bp, Homo sapien
ctgttgtttcccttccactccacca

SEQ ID NO: 2823905 - DNA, 25 bp, Homo sapien
tgaaagcattgagagatttgctcat

SEQ ID NO: 2823906 - DNA, 25 bp, Homo sapien
ctgaaagcattgagagatttgctca

SEQ ID NO: 2823907 - DNA, 25 bp, Homo sapien
cagcaaccaggactcatcttggata

SEQ ID NO: 2823908 - DNA, 25 bp, Homo sapien
tattccccgtgaacatgtccaggaa

SEQ ID NO: 2823909 - DNA, 25 bp, Homo sapien
cccgtgaacatgtccaggaatgtag

SEQ ID NO: 2823910 - DNA, 25 bp, Homo sapien
tccccgtgaacatgtccaggaatgt

SEQ ID NO: 2823911 - DNA, 25 bp, Homo sapien
ttattccccgtgaacatgtccagga

SEQ ID NO: 2823912 - DNA, 25 bp, Homo sapien
aaaggacactttcctcaagacccat

SEQ ID NO: 2823913 - DNA, 25 bp, Homo sapien
tatccacacagaatctctggggggt

SEQ ID NO: 2823914 - DNA, 25 bp, Homo sapien
cttcaaattctctccttctgtgcaa

SEQ ID NO: 2823915 - DNA, 25 bp, Homo sapien
ttttgcatttcccactgtgtatgtg

SEQ ID NO: 2823916 - DNA, 25 bp, Homo sapien
cacagaaggttgtgctgatgggccc

SEQ ID NO: 2823917 - DNA, 25 bp, Homo sapien
cttgctgagcggatttgtggactcg

SEQ ID NO: 2823918 - DNA, 25 bp, Homo sapien
cattaaatccatgccttgggctgac

SEQ ID NO: 2823919 - DNA, 25 bp, Homo sapien
tcgtgctgctgtttgatgtggcttc

SEQ ID NO: 2823920 - DNA, 25 bp, Homo sapien
gaagagccattagtgtgaccagatg

SEQ ID NO: 2823921 - DNA, 25 bp, Homo sapien
ccattagtgtgaccagatgtgccct

SEQ ID NO: 2823922 - DNA, 25 bp, Homo sapien
tggaagagccattagtgtgaccaga

SEQ ID NO: 2823923 - DNA, 25 bp, Homo sapien
gtgaccagatgtgcccttggagagc

SEQ ID NO: 2823924 - DNA, 25 bp, Homo sapien
tcaaaaacaaccacagcgccttcct

SEQ ID NO: 2823925 - DNA, 25 bp, Homo sapien
aacaaccacagcgccttccttattt

SEQ ID NO: 2823926 - DNA, 25 bp, Homo sapien
aaccacagcgccttccttattttct

SEQ ID NO: 2823927 - DNA, 25 bp, Homo sapien
tggttctcagtgtttaattctccct

SEQ ID NO: 2823928 - DNA, 25 bp, Homo sapien
tcattagtgctgaatgctccacgac

SEQ ID NO: 2823929 - DNA, 25 bp, Homo sapien
ccctccagttctgccgttgggctga

SEQ ID NO: 2823930 - DNA, 25 bp, Homo sapien
cttcctggtgtataaggtcttcatt

SEQ ID NO: 2823931 - DNA, 25 bp, Homo sapien
tcactaggctttgaacaactgaaaa

SEQ ID NO: 2823932 - DNA, 25 bp, Homo sapien
ttcttagcagttctcttggatccat

SEQ ID NO: 2823933 - DNA, 25 bp, Homo sapien
cttcttagcagttctcttggatcca

SEQ ID NO: 2823934 - DNA, 25 bp, Homo sapien
gcggctactgtgtttaatccagtca

SEQ ID NO: 2823935 - DNA, 25 bp, Homo sapien
atggccagcggctactgtgtttaat

SEQ ID NO: 2823936 - DNA, 25 bp, Homo sapien
ccagcggctactgtgtttaatccag

SEQ ID NO: 2823937 - DNA, 25 bp, Homo sapien
ggccagcggctactgtgtttaatcc

SEQ ID NO: 2823938 - DNA, 25 bp, Homo sapien
tgtgcaactgtctattcagagtttg

SEQ ID NO: 2823939 - DNA, 25 bp, Homo sapien
aatgatcctgtgcaactgtctattc

SEQ ID NO: 2823940 - DNA, 25 bp, Homo sapien
tcctgtgcaactgtctattcagagt

SEQ ID NO: 2823941 - DNA, 25 bp, Homo sapien
gcaactgtctattcagagtttggcc

SEQ ID NO: 2823942 - DNA, 25 bp, Homo sapien
taaggggcccttcatacttgagcag

SEQ ID NO: 2823943 - DNA, 25 bp, Homo sapien
gggcttggtctcttgacatcaagtc

SEQ ID NO: 2823944 - DNA, 25 bp, Homo sapien
cttgagcagccgttctttgatgctg

SEQ ID NO: 2823945 - DNA, 25 bp, Homo sapien
ttaaggtccaagcatagctaagggg

SEQ ID NO: 2823946 - DNA, 25 bp, Homo sapien
ttcccaggcatagggtcgtctggag

SEQ ID NO: 2823947 - DNA, 25 bp, Homo sapien
cccagaattcccaggcatagggtcg

SEQ ID NO: 2823948 - DNA, 25 bp, Homo sapien
gaattcccaggcatagggtcgtctg

SEQ ID NO: 2823949 - DNA, 25 bp, Homo sapien
catagggtcgtctggaggccggtat

SEQ ID NO: 2823950 - DNA, 25 bp, Homo sapien
gcccgagtgtggcacgatcgggacc

SEQ ID NO: 2823951 - DNA, 25 bp, Homo sapien
agtgtggcacgatcgggacccagca

SEQ ID NO: 2823952 - DNA, 25 bp, Homo sapien
gcagcagtggctgaagtaccatctg

SEQ ID NO: 2823953 - DNA, 25 bp, Homo sapien
cagcaggcccgagtgtggcacgatc

SEQ ID NO: 2823954 - DNA, 25 bp, Homo sapien
tgtacacctgccatataacctcggg

SEQ ID NO: 2823955 - DNA, 25 bp, Homo sapien
cctcgggctaggaaatgacttcgct

SEQ ID NO: 2823956 - DNA, 25 bp, Homo sapien
cagaattttgaactggaccccaaga

SEQ ID NO: 2823957 - DNA, 25 bp, Homo sapien
tgacccggaatgaagcacaggaaca

SEQ ID NO: 2823958 - DNA, 25 bp, Homo sapien
cataaatcctcgtatattagtctgg

SEQ ID NO: 2823959 - DNA, 25 bp, Homo sapien
cagatgaccctaagccagtgtttgt

SEQ ID NO: 2823960 - DNA, 25 bp, Homo sapien
tcattatccgcagtatcttccagct

SEQ ID NO: 2823961 - DNA, 25 bp, Homo sapien
ctgtgttccagatgtaacgttgtgt

SEQ ID NO: 2823962 - DNA, 25 bp, Homo sapien
caaataaactcatggagatatggag

SEQ ID NO: 2823963 - DNA, 25 bp, Homo sapien
tgtcatgtccaagaacctcataaag

SEQ ID NO: 2823964 - DNA, 25 bp, Homo sapien
cctcataaagctcataaagaatgct

SEQ ID NO: 2823965 - DNA, 25 bp, Homo sapien
tgcctcactgtcatgtccaagaacc

SEQ ID NO: 2823966 - DNA, 25 bp, Homo sapien
tgtccaagaacctcataaagctcat

SEQ ID NO: 2823967 - DNA, 25 bp, Homo sapien
tcccaaaactgccctctatcttgtt

SEQ ID NO: 2823968 - DNA, 25 bp, Homo sapien
tggtactggctgcatatactctcga

SEQ ID NO: 2823969 - DNA, 25 bp, Homo sapien
ccgtgagtacctgaactttcctcca

SEQ ID NO: 2823970 - DNA, 25 bp, Homo sapien
tactctcgacactagtctcccgtga

SEQ ID NO: 2823971 - DNA, 25 bp, Homo sapien
tgcaacagacttctcttcttagctc

SEQ ID NO: 2823972 - DNA, 25 bp, Homo sapien
gggtcattgcaacagacttctcttc

SEQ ID NO: 2823973 - DNA, 25 bp, Homo sapien
tcaagtctgggtcattgcaacagac

SEQ ID NO: 2823974 - DNA, 25 bp, Homo sapien
gacttctcttcttagctcctggctg

SEQ ID NO: 2823975 - DNA, 25 bp, Homo sapien
tgcagaatctatgtcaagttgtctg

SEQ ID NO: 2823976 - DNA, 25 bp, Homo sapien
atgcagaatctatgtcaagttgtct

SEQ ID NO: 2823977 - DNA, 25 bp, Homo sapien
ttatgcagaatctatgtcaagttgt

SEQ ID NO: 2823978 - DNA, 25 bp, Homo sapien
tatgcagaatctatgtcaagttgtc

SEQ ID NO: 2823979 - DNA, 25 bp, Homo sapien
ggctttcaagtaatcgagaatggtc

SEQ ID NO: 2823980 - DNA, 25 bp, Homo sapien
tgggctttcaagtaatcgagaatgg

SEQ ID NO: 2823981 - DNA, 25 bp, Homo sapien
agtttgggctttcaagtaatcgaga

SEQ ID NO: 2823982 - DNA, 25 bp, Homo sapien
tcaagtaatcgagaatggtctacat

SEQ ID NO: 2823983 - DNA, 25 bp, Homo sapien
gtcatttggggtattatgctggcat

SEQ ID NO: 2823984 - DNA, 25 bp, Homo sapien
tcatttggggtattatgctggcatg

SEQ ID NO: 2823985 - DNA, 25 bp, Homo sapien
cttgaaggcgttgtaaacttccgtg

SEQ ID NO: 2823986 - DNA, 25 bp, Homo sapien
tgcacttctggctcattataggaac

SEQ ID NO: 2823987 - DNA, 25 bp, Homo sapien
tgtaaacttccgtgcacttctggct

SEQ ID NO: 2823988 - DNA, 25 bp, Homo sapien
tctggctcattataggaacaaaacc

SEQ ID NO: 2823989 - DNA, 25 bp, Homo sapien
tgccagcaccggaaaggctttttca

SEQ ID NO: 2823990 - DNA, 25 bp, Homo sapien
ctgccagcaccggaaaggctttttc

SEQ ID NO: 2823991 - DNA, 25 bp, Homo sapien
cttctgccagcaccggaaaggcttt

SEQ ID NO: 2823992 - DNA, 25 bp, Homo sapien
tctgccagcaccggaaaggcttttt

SEQ ID NO: 2823993 - DNA, 25 bp, Homo sapien
gaacgttgtggtggatgtctctcat

SEQ ID NO: 2823994 - DNA, 25 bp, Homo sapien
tctccacgtagttctttttgtgtcc

SEQ ID NO: 2823995 - DNA, 25 bp, Homo sapien
ctttcagtagacaggcagccttgct

SEQ ID NO: 2823996 - DNA, 25 bp, Homo sapien
tgtctctcatttctccacgtagttc

SEQ ID NO: 2823997 - DNA, 25 bp, Homo sapien
ccgggctatgctgttgtgctctgga

SEQ ID NO: 2823998 - DNA, 25 bp, Homo sapien
cagagccgggctatgctgttgtgct

SEQ ID NO: 2823999 - DNA, 25 bp, Homo sapien
agccgggctatgctgttgtgctctg

SEQ ID NO: 2824000 - DNA, 25 bp, Homo sapien
agagccgggctatgctgttgtgctc

SEQ ID NO: 2824001 - DNA, 25 bp, Homo sapien
aatatttggcagtgtttctccttta

SEQ ID NO: 2824002 - DNA, 25 bp, Homo sapien
tcctccgaagttggaaatatttggc

SEQ ID NO: 2824003 - DNA, 25 bp, Homo sapien
cactgaacaataagtttcagatgtc

SEQ ID NO: 2824004 - DNA, 25 bp, Homo sapien
gtttcagatgtcctccgaagttgga

SEQ ID NO: 2824005 - DNA, 25 bp, Homo sapien
ctatagagagaaattggccaggaat

SEQ ID NO: 2824006 - DNA, 25 bp, Homo sapien
tagctaatttgcttgctagatttgc

SEQ ID NO: 2824007 - DNA, 25 bp, Homo sapien
gctaatttgcttgctagatttgcag

SEQ ID NO: 2824008 - DNA, 25 bp, Homo sapien
aagtgtagctaatttgcttgctaga

SEQ ID NO: 2824009 - DNA, 25 bp, Homo sapien
aatttgcttgctagatttgcagtca

SEQ ID NO: 2824010 - DNA, 25 bp, Homo sapien
aatgaagacataagtgcctgtagca

SEQ ID NO: 2824011 - DNA, 25 bp, Homo sapien
aatagaagccggatatagaccattc

SEQ ID NO: 2824012 - DNA, 25 bp, Homo sapien
gggaatgacaaaatagaagccggat

SEQ ID NO: 2824013 - DNA, 25 bp, Homo sapien
tagtattgtcaaaggtgggaatgac

SEQ ID NO: 2824014 - DNA, 25 bp, Homo sapien
gacagcaagttaccttgtctgttat

SEQ ID NO: 2824015 - DNA, 25 bp, Homo sapien
ctgccagcataaatctctgcagatg

SEQ ID NO: 2824016 - DNA, 25 bp, Homo sapien
atggatgacagcaagttaccttgtc

SEQ ID NO: 2824017 - DNA, 25 bp, Homo sapien
caagttaccttgtctgttatctccc

SEQ ID NO: 2824018 - DNA, 25 bp, Homo sapien
gactcttgcaggtaccacttttcca

SEQ ID NO: 2824019 - DNA, 25 bp, Homo sapien
tgcttcaactgagggaagactcagg

SEQ ID NO: 2824020 - DNA, 25 bp, Homo sapien
ggtctgactcttgcaggtaccactt

SEQ ID NO: 2824021 - DNA, 25 bp, Homo sapien
ctgggtgcttcaactgagggaagac

SEQ ID NO: 2824022 - DNA, 25 bp, Homo sapien
ggaaaggcttcccaatcaactgcac

SEQ ID NO: 2824023 - DNA, 25 bp, Homo sapien
tgcatttaaatcctagtgcggccat

SEQ ID NO: 2824024 - DNA, 25 bp, Homo sapien
catgaatgttcatgcgacacaacgc

SEQ ID NO: 2824025 - DNA, 25 bp, Homo sapien
tcaactgcaccgatgtcagtcgttc

SEQ ID NO: 2824026 - DNA, 25 bp, Homo sapien
tacttgctgcgactgggtcgctgtc

SEQ ID NO: 2824027 - DNA, 25 bp, Homo sapien
tggctctcacagtaacggctgatgc

SEQ ID NO: 2824028 - DNA, 25 bp, Homo sapien
ccagagaggaaatgctaccagtact

SEQ ID NO: 2824029 - DNA, 25 bp, Homo sapien
gtcgctgtccctgcactttggctct

SEQ ID NO: 2824030 - DNA, 25 bp, Homo sapien
gctaatcctttgtgattgtgttgca

SEQ ID NO: 2824031 - DNA, 25 bp, Homo sapien
gttgttctgaatgaatccctccatc

SEQ ID NO: 2824032 - DNA, 25 bp, Homo sapien
tgtgattgtgttgcattctgtgccc

SEQ ID NO: 2824033 - DNA, 25 bp, Homo sapien
gttcagttgttctgaatgaatccct

SEQ ID NO: 2824034 - DNA, 25 bp, Homo sapien
tatgcaaaagaacaacggagactaa

SEQ ID NO: 2824035 - DNA, 25 bp, Homo sapien
ctcctgggaattggtatgcttctgc

SEQ ID NO: 2824036 - DNA, 25 bp, Homo sapien
cagtagcaacagcatcgcgctttgt

SEQ ID NO: 2824037 - DNA, 25 bp, Homo sapien
caggtggtcttgaacataagcagtt

SEQ ID NO: 2824038 - DNA, 25 bp, Homo sapien
cgataaggatattggtcttccagct

SEQ ID NO: 2824039 - DNA, 25 bp, Homo sapien
tacaaaagccccatttgaggaacat

SEQ ID NO: 2824040 - DNA, 25 bp, Homo sapien
tatatcactctgtctagaagaatgg

SEQ ID NO: 2824041 - DNA, 25 bp, Homo sapien
ttctgttgaaccctctggtctggca

SEQ ID NO: 2824042 - DNA, 25 bp, Homo sapien
tttgggcagataaccaatagtggga

SEQ ID NO: 2824043 - DNA, 25 bp, Homo sapien
gatttaaggatagttcaaatattac

SEQ ID NO: 2824044 - DNA, 25 bp, Homo sapien
caacattgtgtaaagcattcccttt

SEQ ID NO: 2824045 - DNA, 25 bp, Homo sapien
tgggattgttggatttaaggatagt

SEQ ID NO: 2824046 - DNA, 25 bp, Homo sapien
taaatttaactggttggttagcagc

SEQ ID NO: 2824047 - DNA, 25 bp, Homo sapien
tgtgtgtttaggtatcccacagtta

SEQ ID NO: 2824048 - DNA, 25 bp, Homo sapien
ctggttggttagcagcttgtttgtc

SEQ ID NO: 2824049 - DNA, 25 bp, Homo sapien
tttaggtatcccacagttatagttc

SEQ ID NO: 2824050 - DNA, 25 bp, Homo sapien
gtcctgtgaaaaccctgcatcactc

SEQ ID NO: 2824051 - DNA, 25 bp, Homo sapien
cattcattatatggccgtcatgacc

SEQ ID NO: 2824052 - DNA, 25 bp, Homo sapien
taacattcattatatggccgtcatg

SEQ ID NO: 2824053 - DNA, 25 bp, Homo sapien
cctgtgaaaaccctgcatcactctc

SEQ ID NO: 2824054 - DNA, 25 bp, Homo sapien
ctttgcacagcttgacatgatgagt

SEQ ID NO: 2824055 - DNA, 25 bp, Homo sapien
cttgacatgatgagtaagctttggt

SEQ ID NO: 2824056 - DNA, 25 bp, Homo sapien
gagtaagctttggttcactccttgg

SEQ ID NO: 2824057 - DNA, 25 bp, Homo sapien
catgatgagtaagctttggttcact

SEQ ID NO: 2824058 - DNA, 25 bp, Homo sapien
cttctatttcatatgtgggcctaga

SEQ ID NO: 2824059 - DNA, 25 bp, Homo sapien
tctatttcatatgtgggcctagaac

SEQ ID NO: 2824060 - DNA, 25 bp, Homo sapien
tcttctatttcatatgtgggcctag

SEQ ID NO: 2824061 - DNA, 25 bp, Homo sapien
ttctatttcatatgtgggcctagaa

SEQ ID NO: 2824062 - DNA, 25 bp, Homo sapien
catttgagaatacgaaggtttgatg

SEQ ID NO: 2824063 - DNA, 25 bp, Homo sapien
tctgcaaagccctctcgccttccag

SEQ ID NO: 2824064 - DNA, 25 bp, Homo sapien
ttcccactcatttgagaatacgaag

SEQ ID NO: 2824065 - DNA, 25 bp, Homo sapien
cactcatttgagaatacgaaggttt

SEQ ID NO: 2824066 - DNA, 25 bp, Homo sapien
tattatatagtctcttgtgagccag

SEQ ID NO: 2824067 - DNA, 25 bp, Homo sapien
atcttcaggctattatatagtctct

SEQ ID NO: 2824068 - DNA, 25 bp, Homo sapien
tagtctcttgtgagccagggatagg

SEQ ID NO: 2824069 - DNA, 25 bp, Homo sapien
caggctattatatagtctcttgtga

SEQ ID NO: 2824070 - DNA, 25 bp, Homo sapien
ttctcttcatagcataagatatcat

SEQ ID NO: 2824071 - DNA, 25 bp, Homo sapien
cttctcttcatagcataagatatca

SEQ ID NO: 2824072 - DNA, 25 bp, Homo sapien
cataagatatcatcagtgaatcttt

SEQ ID NO: 2824073 - DNA, 25 bp, Homo sapien
tctcttcatagcataagatatcatc

SEQ ID NO: 2824074 - DNA, 25 bp, Homo sapien
tatgcactaccatcatcataaatgg

SEQ ID NO: 2824075 - DNA, 25 bp, Homo sapien
cagaggctattttacaaggttcttc

SEQ ID NO: 2824076 - DNA, 25 bp, Homo sapien
tgagaagcccatttactgaggcacg

SEQ ID NO: 2824077 - DNA, 25 bp, Homo sapien
tttcagaggaggttcgtcagaggct

SEQ ID NO: 2824078 - DNA, 25 bp, Homo sapien
gactaggtatgaaggcagcatgaga

SEQ ID NO: 2824079 - DNA, 25 bp, Homo sapien
agcttgccatgaccaattaagtcca

SEQ ID NO: 2824080 - DNA, 25 bp, Homo sapien
ctgttggggcgattgaaatcagcct

SEQ ID NO: 2824081 - DNA, 25 bp, Homo sapien
gaaataggtaacatgagggtgtaga

SEQ ID NO: 2824082 - DNA, 25 bp, Homo sapien
ttaaaaaacagcttgccatgaccaa

SEQ ID NO: 2824083 - DNA, 25 bp, Homo sapien
agtccttgaacatgaacacacctcc

SEQ ID NO: 2824084 - DNA, 25 bp, Homo sapien
gtataatgcagtccttgaacatgaa

SEQ ID NO: 2824085 - DNA, 25 bp, Homo sapien
gactgtctaacattatctgtggtat

SEQ ID NO: 2824086 - DNA, 25 bp, Homo sapien
tgttgactgtctaacattatctgtg

SEQ ID NO: 2824087 - DNA, 25 bp, Homo sapien
gctgggtgctgccttctggcctctg

SEQ ID NO: 2824088 - DNA, 25 bp, Homo sapien
tctgctgggtgctgccttctggcct

SEQ ID NO: 2824089 - DNA, 25 bp, Homo sapien
ctccagtttgcctttctctgctggg

SEQ ID NO: 2824090 - DNA, 25 bp, Homo sapien
tccagtttgcctttctctgctgggt

SEQ ID NO: 2824091 - DNA, 25 bp, Homo sapien
tcagcatcgttacaaatggacacag

SEQ ID NO: 2824092 - DNA, 25 bp, Homo sapien
cacgatatctccttggatgtctgga

SEQ ID NO: 2824093 - DNA, 25 bp, Homo sapien
ctgatatggtccagggattctgcct

SEQ ID NO: 2824094 - DNA, 25 bp, Homo sapien
agttcacactgggacacgatatctc

SEQ ID NO: 2824095 - DNA, 25 bp, Homo sapien
ctaggactttggggccataaagctg

SEQ ID NO: 2824096 - DNA, 25 bp, Homo sapien
ggactttggggccataaagctgcct

SEQ ID NO: 2824097 - DNA, 25 bp, Homo sapien
tttctgacaatccaaaaaagtggct

SEQ ID NO: 2824098 - DNA, 25 bp, Homo sapien
ttttctgacaatccaaaaaagtggc

SEQ ID NO: 2824099 - DNA, 25 bp, Homo sapien
agcagggttcggatttgggcataag

SEQ ID NO: 2824100 - DNA, 25 bp, Homo sapien
cagcagggttcggatttgggcataa

SEQ ID NO: 2824101 - DNA, 25 bp, Homo sapien
agccagcagggttcggatttgggca

SEQ ID NO: 2824102 - DNA, 25 bp, Homo sapien
cacagccagcagggttcggatttgg

SEQ ID NO: 2824103 - DNA, 25 bp, Homo sapien
tggacaaaatttcgctgtcaccggg

SEQ ID NO: 2824104 - DNA, 25 bp, Homo sapien
cccaataactggacaaaatttcgct

SEQ ID NO: 2824105 - DNA, 25 bp, Homo sapien
tggctgaaacgtgagggaattccac

SEQ ID NO: 2824106 - DNA, 25 bp, Homo sapien
tccaaggcgcaaatgctcaaggtct

SEQ ID NO: 2824107 - DNA, 25 bp, Homo sapien
ctacctggcttgcacctgtgctggc

SEQ ID NO: 2824108 - DNA, 25 bp, Homo sapien
tctacctggcttgcacctgtgctgg

SEQ ID NO: 2824109 - DNA, 25 bp, Homo sapien
cctggtcctttagggactctgatct

SEQ ID NO: 2824110 - DNA, 25 bp, Homo sapien
actgcatgtaaagattgtagcatta

SEQ ID NO: 2824111 - DNA, 25 bp, Homo sapien
tcaactgcatgtaaagattgtagca

SEQ ID NO: 2824112 - DNA, 25 bp, Homo sapien
aactgcatgtaaagattgtagcatt

SEQ ID NO: 2824113 - DNA, 25 bp, Homo sapien
caactgcatgtaaagattgtagcat

SEQ ID NO: 2824114 - DNA, 25 bp, Homo sapien
ttcctgttcctactatctttctaag

SEQ ID NO: 2824115 - DNA, 25 bp, Homo sapien
tatctttctaagagtgcgagttaag

SEQ ID NO: 2824116 - DNA, 25 bp, Homo sapien
cctactatctttctaagagtgcgag

SEQ ID NO: 2824117 - DNA, 25 bp, Homo sapien
ctaagagtgcgagttaagaagtatc

SEQ ID NO: 2824118 - DNA, 25 bp, Homo sapien
ttccaggccaatgaatttccctctt

SEQ ID NO: 2824119 - DNA, 25 bp, Homo sapien
cagaatttatctagttgttcattcc

SEQ ID NO: 2824120 - DNA, 25 bp, Homo sapien
tccaggccaatgaatttccctcttt

SEQ ID NO: 2824121 - DNA, 25 bp, Homo sapien
tctagttgttcattccccttttcat

SEQ ID NO: 2824122 - DNA, 25 bp, Homo sapien
gccaagcagcttgagagttaacgta

SEQ ID NO: 2824123 - DNA, 25 bp, Homo sapien
caattgactgattgctttcaccaac

SEQ ID NO: 2824124 - DNA, 25 bp, Homo sapien
catggttgcaataccgaaaaggaat

SEQ ID NO: 2824125 - DNA, 25 bp, Homo sapien
gttaacgtagagatccatggttgca

SEQ ID NO: 2824126 - DNA, 25 bp, Homo sapien
catcatggacagagatacactggtc

SEQ ID NO: 2824127 - DNA, 25 bp, Homo sapien
tctagctggaactttggtatttaca

SEQ ID NO: 2824128 - DNA, 25 bp, Homo sapien
tgggttctcattaaagttgcatagg

SEQ ID NO: 2824129 - DNA, 25 bp, Homo sapien
ggtatttacacaagtaactgcctct

SEQ ID NO: 2824130 - DNA, 25 bp, Homo sapien
gctcagtgttccatttagggttcca

SEQ ID NO: 2824131 - DNA, 25 bp, Homo sapien
aagctcagtgttccatttagggttc

SEQ ID NO: 2824132 - DNA, 25 bp, Homo sapien
ctcagtgttccatttagggttccac

SEQ ID NO: 2824133 - DNA, 25 bp, Homo sapien
cagtgttccatttagggttccactt

SEQ ID NO: 2824134 - DNA, 25 bp, Homo sapien
tgggtgagggtttctctgccttaac

SEQ ID NO: 2824135 - DNA, 25 bp, Homo sapien
tataaaaatcctgtactagctcctt

SEQ ID NO: 2824136 - DNA, 25 bp, Homo sapien
gaaaaccccatctcacagggactaa

SEQ ID NO: 2824137 - DNA, 25 bp, Homo sapien
taactagcaaccaactcaggtgaat

SEQ ID NO: 2824138 - DNA, 25 bp, Homo sapien
agaacctgagccagtcgaggcagct

SEQ ID NO: 2824139 - DNA, 25 bp, Homo sapien
tgagccagtcgaggcagctgcatct

SEQ ID NO: 2824140 - DNA, 25 bp, Homo sapien
gcagctgcatctgtctacatgtttt

SEQ ID NO: 2824141 - DNA, 25 bp, Homo sapien
ctcctcttagaacctgagccagtcg

SEQ ID NO: 2824142 - DNA, 25 bp, Homo sapien
cagtctctgttttgagccacagttg

SEQ ID NO: 2824143 - DNA, 25 bp, Homo sapien
aacaaattactgtactcttggtggc

SEQ ID NO: 2824144 - DNA, 25 bp, Homo sapien
ttaggtgttgcactcattccttggc

SEQ ID NO: 2824145 - DNA, 25 bp, Homo sapien
tctaacaaaggtcttcgtgagctaa

SEQ ID NO: 2824146 - DNA, 25 bp, Homo sapien
gattgatgtgttcaccctgatagcc

SEQ ID NO: 2824147 - DNA, 25 bp, Homo sapien
gctgattgatgtgttcaccctgata

SEQ ID NO: 2824148 - DNA, 25 bp, Homo sapien
atgtgttcaccctgatagccaggtg

SEQ ID NO: 2824149 - DNA, 25 bp, Homo sapien
ctgggttcagctggcggatgagctg

SEQ ID NO: 2824150 - DNA, 25 bp, Homo sapien
ctcttcttttggtagcatgaagggc

SEQ ID NO: 2824151 - DNA, 25 bp, Homo sapien
ttcttttggtagcatgaagggccat

SEQ ID NO: 2824152 - DNA, 25 bp, Homo sapien
cttcttttggtagcatgaagggcca

SEQ ID NO: 2824153 - DNA, 25 bp, Homo sapien
tcttcttttggtagcatgaagggcc

SEQ ID NO: 2824154 - DNA, 25 bp, Homo sapien
atgctttcttaggaaggcaatttca

SEQ ID NO: 2824155 - DNA, 25 bp, Homo sapien
ctcctggaaatgctttcttaggaag

SEQ ID NO: 2824156 - DNA, 25 bp, Homo sapien
tcctggaaatgctttcttaggaagg

SEQ ID NO: 2824157 - DNA, 25 bp, Homo sapien
ggaaatgctttcttaggaaggcaat

SEQ ID NO: 2824158 - DNA, 25 bp, Homo sapien
cagagggatggtcttattattgacc

SEQ ID NO: 2824159 - DNA, 25 bp, Homo sapien
ggtcttattattgaccttggcttgt

SEQ ID NO: 2824160 - DNA, 25 bp, Homo sapien
ggatggtcttattattgaccttggc

SEQ ID NO: 2824161 - DNA, 25 bp, Homo sapien
gatggtcttattattgaccttggct

SEQ ID NO: 2824162 - DNA, 25 bp, Homo sapien
actcatgctgtcaatcctttcgatg

SEQ ID NO: 2824163 - DNA, 25 bp, Homo sapien
ggtggtgggatgacttttacaaaga

SEQ ID NO: 2824164 - DNA, 25 bp, Homo sapien
cagtaaactcatgctgtcaatcctt

SEQ ID NO: 2824165 - DNA, 25 bp, Homo sapien
catttttaggttctgtgtggcgggg

SEQ ID NO: 2824166 - DNA, 25 bp, Homo sapien
agcagcccagctctgatgttgaaca

SEQ ID NO: 2824167 - DNA, 25 bp, Homo sapien
agctctgatgttgaacatgggccat

SEQ ID NO: 2824168 - DNA, 25 bp, Homo sapien
ctactgtcaaagcagcccagctctg

SEQ ID NO: 2824169 - DNA, 25 bp, Homo sapien
tactgtcaaagcagcccagctctga

SEQ ID NO: 2824170 - DNA, 25 bp, Homo sapien
tgagtggaccaattataaactggat

SEQ ID NO: 2824171 - DNA, 25 bp, Homo sapien
gagtggaccaattataaactggatt

SEQ ID NO: 2824172 - DNA, 25 bp, Homo sapien
ttgagtggaccaattataaactgga

SEQ ID NO: 2824173 - DNA, 25 bp, Homo sapien
agtggaccaattataaactggattt

SEQ ID NO: 2824174 - DNA, 25 bp, Homo sapien
cagtgataggtaacatttagtgaat

SEQ ID NO: 2824175 - DNA, 25 bp, Homo sapien
caacatctcagtggcaatatttctt

SEQ ID NO: 2824176 - DNA, 25 bp, Homo sapien
acatttagtgaatagacagaccatt

SEQ ID NO: 2824177 - DNA, 25 bp, Homo sapien
ttacagtgataggtaacatttagtg

SEQ ID NO: 2824178 - DNA, 25 bp, Homo sapien
ttatgggtgatagtttcttgagtgt

SEQ ID NO: 2824179 - DNA, 25 bp, Homo sapien
ctttatgggtgatagtttcttgagt

SEQ ID NO: 2824180 - DNA, 25 bp, Homo sapien
ttgagcctattctaggatacataga

SEQ ID NO: 2824181 - DNA, 25 bp, Homo sapien
tattctaggatacatagacatgatg

SEQ ID NO: 2824182 - DNA, 25 bp, Homo sapien
ttgagcaatagggtgaaggtcctac

SEQ ID NO: 2824183 - DNA, 25 bp, Homo sapien
gaaatgcaccctttaggagtgtagg

SEQ ID NO: 2824184 - DNA, 25 bp, Homo sapien
tcttgaaacctgtggtagtggccat

SEQ ID NO: 2824185 - DNA, 25 bp, Homo sapien
accctcaccatagggccgaaatgca

SEQ ID NO: 2824186 - DNA, 25 bp, Homo sapien
tgtaaattcagagatatggcagcct

SEQ ID NO: 2824187 - DNA, 25 bp, Homo sapien
agaatcggaaagtttgcctctgcaa

SEQ ID NO: 2824188 - DNA, 25 bp, Homo sapien
aaaatgaaagctagaatcggaaagt

SEQ ID NO: 2824189 - DNA, 25 bp, Homo sapien
tatggcagcctgagtgtaaagagaa

SEQ ID NO: 2824190 - DNA, 25 bp, Homo sapien
aggcttgcagctcagtgtggcttca

SEQ ID NO: 2824191 - DNA, 25 bp, Homo sapien
caggttcccttttatcttcagagca

SEQ ID NO: 2824192 - DNA, 25 bp, Homo sapien
cagctgctcttgtcaaaagccaatc

SEQ ID NO: 2824193 - DNA, 25 bp, Homo sapien
tgtggcttcagcaaactgaacccat

SEQ ID NO: 2824194 - DNA, 25 bp, Homo sapien
gaatgcttgtctaatagcttctttc

SEQ ID NO: 2824195 - DNA, 25 bp, Homo sapien
tccctgcgaagtggcaatgaaccca

SEQ ID NO: 2824196 - DNA, 25 bp, Homo sapien
ctgggaatgcttgtctaatagcttc

SEQ ID NO: 2824197 - DNA, 25 bp, Homo sapien
aagaatccctgcgaagtggcaatga

SEQ ID NO: 2824198 - DNA, 25 bp, Homo sapien
ttgctatgactctagggaagccatc

SEQ ID NO: 2824199 - DNA, 25 bp, Homo sapien
cccagtagagcatgttgtagcacct

SEQ ID NO: 2824200 - DNA, 25 bp, Homo sapien
tacagcatgattcactaaatccgtc

SEQ ID NO: 2824201 - DNA, 25 bp, Homo sapien
gccacaaagtatcctctctggtaga

SEQ ID NO: 2824202 - DNA, 25 bp, Homo sapien
ggcgttcagagggattatacagtga

SEQ ID NO: 2824203 - DNA, 25 bp, Homo sapien
tcagctgtgccagtaaggtattaac

SEQ ID NO: 2824204 - DNA, 25 bp, Homo sapien
gaattgcgccaagcttcagctgtgc

SEQ ID NO: 2824205 - DNA, 25 bp, Homo sapien
tattaactgtgactacttttctcct

SEQ ID NO: 2824206 - DNA, 25 bp, Homo sapien
aactgcacatattggatccagggca

SEQ ID NO: 2824207 - DNA, 25 bp, Homo sapien
aaactgcacatattggatccagggc

SEQ ID NO: 2824208 - DNA, 25 bp, Homo sapien
gaaactgcacatattggatccaggg

SEQ ID NO: 2824209 - DNA, 25 bp, Homo sapien
taagtcttagagctaatcttcttac

SEQ ID NO: 2824210 - DNA, 25 bp, Homo sapien
ttgatgcttcgtggacttcatagct

SEQ ID NO: 2824211 - DNA, 25 bp, Homo sapien
tagagctaatcttcttacttgatgc

SEQ ID NO: 2824212 - DNA, 25 bp, Homo sapien
agctcttagtaacatccatttccag

SEQ ID NO: 2824213 - DNA, 25 bp, Homo sapien
ttgtggcagaaatttcatgccatga

SEQ ID NO: 2824214 - DNA, 25 bp, Homo sapien
ggcagaaatttcatgccatgatgta

SEQ ID NO: 2824215 - DNA, 25 bp, Homo sapien
tggcagaaatttcatgccatgatgt

SEQ ID NO: 2824216 - DNA, 25 bp, Homo sapien
gtggcagaaatttcatgccatgatg

SEQ ID NO: 2824217 - DNA, 25 bp, Homo sapien
caaaggcattgaacttgacgcagaa

SEQ ID NO: 2824218 - DNA, 25 bp, Homo sapien
taagcaaaggcattgaacttgacgc

SEQ ID NO: 2824219 - DNA, 25 bp, Homo sapien
agcaaaggcattgaacttgacgcag

SEQ ID NO: 2824220 - DNA, 25 bp, Homo sapien
gcaaaggcattgaacttgacgcaga

SEQ ID NO: 2824221 - DNA, 25 bp, Homo sapien
ccacaggcaatttgagtccagagcc

SEQ ID NO: 2824222 - DNA, 25 bp, Homo sapien
agacaaaattctgagtactccacag

SEQ ID NO: 2824223 - DNA, 25 bp, Homo sapien
acaggcaatttgagtccagagcccc

SEQ ID NO: 2824224 - DNA, 25 bp, Homo sapien
catgttctagacaaaattctgagta

SEQ ID NO: 2824225 - DNA, 25 bp, Homo sapien
gcctgagtagacatcactcagcatt

SEQ ID NO: 2824226 - DNA, 25 bp, Homo sapien
aaactgatgtctccactactaccct

SEQ ID NO: 2824227 - DNA, 25 bp, Homo sapien
atctgcgcttacactgccatccttg

SEQ ID NO: 2824228 - DNA, 25 bp, Homo sapien
caggcattctgggtctgtctcagag

SEQ ID NO: 2824229 - DNA, 25 bp, Homo sapien
tctgaattcttgctcataatgctca

SEQ ID NO: 2824230 - DNA, 25 bp, Homo sapien
cctgaatagttgagttcaatgtcac

SEQ ID NO: 2824231 - DNA, 25 bp, Homo sapien
ttcaccttggaacctgtcatcctag

SEQ ID NO: 2824232 - DNA, 25 bp, Homo sapien
gtcatcctagactgtccctgaatag

SEQ ID NO: 2824233 - DNA, 25 bp, Homo sapien
gaatagttgagttcaatgtcaccca

SEQ ID NO: 2824234 - DNA, 25 bp, Homo sapien
cactatgtctctgctgacaacctcc

SEQ ID NO: 2824235 - DNA, 25 bp, Homo sapien
gccactatgtctctgctgacaacct

SEQ ID NO: 2824236 - DNA, 25 bp, Homo sapien
ctatgtctctgctgacaacctccat

SEQ ID NO: 2824237 - DNA, 25 bp, Homo sapien
ctgccactatgtctctgctgacaac

SEQ ID NO: 2824238 - DNA, 25 bp, Homo sapien
cttgatacctagcatatccagagga

SEQ ID NO: 2824239 - DNA, 25 bp, Homo sapien
gatcgtataaaccttgatacctagc

SEQ ID NO: 2824240 - DNA, 25 bp, Homo sapien
atttaaaggctctaagttagttgtg

SEQ ID NO: 2824241 - DNA, 25 bp, Homo sapien
tagttgtgatcgtataaaccttgat

SEQ ID NO: 2824242 - DNA, 25 bp, Homo sapien
agagggaatctatactgcagtggca

SEQ ID NO: 2824243 - DNA, 25 bp, Homo sapien
caaagagagttcctcaaagtccctt

SEQ ID NO: 2824244 - DNA, 25 bp, Homo sapien
caactgactgatgaaagttcctgca

SEQ ID NO: 2824245 - DNA, 25 bp, Homo sapien
tagggaagctcacaaccaaagagag

SEQ ID NO: 2824246 - DNA, 25 bp, Homo sapien
tcggcaagaaatgtaatagatggca

SEQ ID NO: 2824247 - DNA, 25 bp, Homo sapien
tggaccactgtatgagccactcttc

SEQ ID NO: 2824248 - DNA, 25 bp, Homo sapien
cctggacaagtccagacaaggctgt

SEQ ID NO: 2824249 - DNA, 25 bp, Homo sapien
tagttatctctggaagcatacatcc

SEQ ID NO: 2824250 - DNA, 25 bp, Homo sapien
tggaatccagatgcatcgggagacg

SEQ ID NO: 2824251 - DNA, 25 bp, Homo sapien
atccagatgcatcgggagacgtggc

SEQ ID NO: 2824252 - DNA, 25 bp, Homo sapien
gatgcatcgggagacgtggctcctc

SEQ ID NO: 2824253 - DNA, 25 bp, Homo sapien
catcgggagacgtggctcctctaag

SEQ ID NO: 2824254 - DNA, 25 bp, Homo sapien
tgcataaaagactagctttcagtat

SEQ ID NO: 2824255 - DNA, 25 bp, Homo sapien
cacactcttcgtagtgaatcacctg

SEQ ID NO: 2824256 - DNA, 25 bp, Homo sapien
ggatcctcacactcttcgtagtgaa

SEQ ID NO: 2824257 - DNA, 25 bp, Homo sapien
tcgtagtgaatcacctgaaagatga

SEQ ID NO: 2824258 - DNA, 25 bp, Homo sapien
tgtaaactacaagcttcattttggc

SEQ ID NO: 2824259 - DNA, 25 bp, Homo sapien
gcaccaagcctaggactctaacata

SEQ ID NO: 2824260 - DNA, 25 bp, Homo sapien
catgtgtataaccatagttgttgag

SEQ ID NO: 2824261 - DNA, 25 bp, Homo sapien
tcataaatcgtacttgaccaagtgc

SEQ ID NO: 2824262 - DNA, 25 bp, Homo sapien
ctaactttcaaggtgtttgaccttg

SEQ ID NO: 2824263 - DNA, 25 bp, Homo sapien
tctgatctggcaactgtacttgatg

SEQ ID NO: 2824264 - DNA, 25 bp, Homo sapien
gatctaaagtgtagcttctctctgg

SEQ ID NO: 2824265 - DNA, 25 bp, Homo sapien
tccctgagctcaaaaatcccatgat

SEQ ID NO: 2824266 - DNA, 25 bp, Homo sapien
ttctctctggatacgctggtgattc

SEQ ID NO: 2824267 - DNA, 25 bp, Homo sapien
gttatctggcctaaagtctttgaac

SEQ ID NO: 2824268 - DNA, 25 bp, Homo sapien
gaaattaagtagcagttatctggcc

SEQ ID NO: 2824269 - DNA, 25 bp, Homo sapien
tgaacagggccttcatatggattat

SEQ ID NO: 2824270 - DNA, 25 bp, Homo sapien
cagggccttcatatggattatgtcc

SEQ ID NO: 2824271 - DNA, 25 bp, Homo sapien
ctgaaattgtgagggttgtatgaac

SEQ ID NO: 2824272 - DNA, 25 bp, Homo sapien
aactaatgcctgactttcatctgag

SEQ ID NO: 2824273 - DNA, 25 bp, Homo sapien
tagacatcttggtcggcgttctctg

SEQ ID NO: 2824274 - DNA, 25 bp, Homo sapien
ggttgtatgaactaatgcctgactt

SEQ ID NO: 2824275 - DNA, 25 bp, Homo sapien
gactgtagcacttcttaattccatc

SEQ ID NO: 2824276 - DNA, 25 bp, Homo sapien
gcacaaggctaattatcattttatc

SEQ ID NO: 2824277 - DNA, 25 bp, Homo sapien
attagcacaaggctaattatcattt

SEQ ID NO: 2824278 - DNA, 25 bp, Homo sapien
agctgactgtagcacttcttaattc

SEQ ID NO: 2824279 - DNA, 25 bp, Homo sapien
catacttgcaagctaggagctcaga

SEQ ID NO: 2824280 - DNA, 25 bp, Homo sapien
ccagccccaggtgtacttgtgtaga

SEQ ID NO: 2824281 - DNA, 25 bp, Homo sapien
gacacagtccccatgaattctacag

SEQ ID NO: 2824282 - DNA, 25 bp, Homo sapien
atcggttactaatcagaaggcttcc

SEQ ID NO: 2824283 - DNA, 25 bp, Homo sapien
tgctgcttagaaccatttgctccaa

SEQ ID NO: 2824284 - DNA, 25 bp, Homo sapien
gaattacctccaccatggagaaagc

SEQ ID NO: 2824285 - DNA, 25 bp, Homo sapien
cataaggtatacttgtgtagagcaa

SEQ ID NO: 2824286 - DNA, 25 bp, Homo sapien
cagtttcagacacccacattgctgc

SEQ ID NO: 2824287 - DNA, 25 bp, Homo sapien
gctagttgccttatgctaaatactg

SEQ ID NO: 2824288 - DNA, 25 bp, Homo sapien
tgcaggtgaccatggatctcagcct

SEQ ID NO: 2824289 - DNA, 25 bp, Homo sapien
tatcaatttgtgttccaatgctggc

SEQ ID NO: 2824290 - DNA, 25 bp, Homo sapien
ccccattctgagtgtaaagaatcac

SEQ ID NO: 2824291 - DNA, 25 bp, Homo sapien
tgggccaatgaatagaataatccaa

SEQ ID NO: 2824292 - DNA, 25 bp, Homo sapien
gtacatctcgataaaactccctaaa

SEQ ID NO: 2824293 - DNA, 25 bp, Homo sapien
tctgattcgtattatgcctctgggc

SEQ ID NO: 2824294 - DNA, 25 bp, Homo sapien
tgatctctcgtcaaaacccttaggg

SEQ ID NO: 2824295 - DNA, 25 bp, Homo sapien
tcacggttggaactttgccgctcat

SEQ ID NO: 2824296 - DNA, 25 bp, Homo sapien
gcatcctttagtcacggttggaact

SEQ ID NO: 2824297 - DNA, 25 bp, Homo sapien
cagttccacttttgctatgcatcct

SEQ ID NO: 2824298 - DNA, 25 bp, Homo sapien
tttgctatgcatcctttagtcacgg

SEQ ID NO: 2824299 - DNA, 25 bp, Homo sapien
ttctactcaactgcacagtcttcct

SEQ ID NO: 2824300 - DNA, 25 bp, Homo sapien
tctggtatctctttctcagagacct

SEQ ID NO: 2824301 - DNA, 25 bp, Homo sapien
tgaagggaaaaggtggttctactca

SEQ ID NO: 2824302 - DNA, 25 bp, Homo sapien
tctcagagaccttcttctatgtttt

SEQ ID NO: 2824303 - DNA, 25 bp, Homo sapien
tactcaagtgctgtgtcgtttcctt

SEQ ID NO: 2824304 - DNA, 25 bp, Homo sapien
tcaagtgctgtgtcgtttcctttca

SEQ ID NO: 2824305 - DNA, 25 bp, Homo sapien
aaaaaaatactcaagtgctgtgtcg

SEQ ID NO: 2824306 - DNA, 25 bp, Homo sapien
aatactcaagtgctgtgtcgtttcc

SEQ ID NO: 2824307 - DNA, 25 bp, Homo sapien
cttgacagtgccttctatgcttcag

SEQ ID NO: 2824308 - DNA, 25 bp, Homo sapien
tgttccttcaaatatccttcttgac

SEQ ID NO: 2824309 - DNA, 25 bp, Homo sapien
ccttcaaatatccttcttgacagtg

SEQ ID NO: 2824310 - DNA, 25 bp, Homo sapien
gacagtgccttctatgcttcagaat

SEQ ID NO: 2824311 - DNA, 25 bp, Homo sapien
gaggtaatatgaatagctgttgcca

SEQ ID NO: 2824312 - DNA, 25 bp, Homo sapien
tattcttggcaattgtacaatctca

SEQ ID NO: 2824313 - DNA, 25 bp, Homo sapien
ggtctgtggccatattcttggcaat

SEQ ID NO: 2824314 - DNA, 25 bp, Homo sapien
tagctgttgccatcatccaaggtgg

SEQ ID NO: 2824315 - DNA, 25 bp, Homo sapien
tggaatcattccagactgatctatc

SEQ ID NO: 2824316 - DNA, 25 bp, Homo sapien
cttaggttgtaaggagctaaatgca

SEQ ID NO: 2824317 - DNA, 25 bp, Homo sapien
tcattccagactgatctatcttccc

SEQ ID NO: 2824318 - DNA, 25 bp, Homo sapien
gattgaatactctcatcagaaatga

SEQ ID NO: 2824319 - DNA, 25 bp, Homo sapien
acattgatgtccaaaagttaccgac

SEQ ID NO: 2824320 - DNA, 25 bp, Homo sapien
aattctgagtgttgatcacattcat

SEQ ID NO: 2824321 - DNA, 25 bp, Homo sapien
caaaagttaccgacagtgaacagtg

SEQ ID NO: 2824322 - DNA, 25 bp, Homo sapien
gttaccgacagtgaacagtgagttc

SEQ ID NO: 2824323 - DNA, 25 bp, Homo sapien
gaccatcagggactcaagttggaga

SEQ ID NO: 2824324 - DNA, 25 bp, Homo sapien
tctaaacactgaaccaggtggtagt

SEQ ID NO: 2824325 - DNA, 25 bp, Homo sapien
tattttggccagaactagtgatcac

SEQ ID NO: 2824326 - DNA, 25 bp, Homo sapien
tagtaatgaagaactgaccatcagg

SEQ ID NO: 2824327 - DNA, 25 bp, Homo sapien
cctcgtgtcatttttccatctatca

SEQ ID NO: 2824328 - DNA, 25 bp, Homo sapien
tcttcctcgtgtcatttttccatct

SEQ ID NO: 2824329 - DNA, 25 bp, Homo sapien
cgtgtcatttttccatctatcattt

SEQ ID NO: 2824330 - DNA, 25 bp, Homo sapien
tctatcttcctcgtgtcatttttcc

SEQ ID NO: 2824331 - DNA, 25 bp, Homo sapien
aacaaatgaacacagacgcatattg

SEQ ID NO: 2824332 - DNA, 25 bp, Homo sapien
tgaacacagacgcatattgcttcaa

SEQ ID NO: 2824333 - DNA, 25 bp, Homo sapien
tacaatcatggcatttaaacaaatg

SEQ ID NO: 2824334 - DNA, 25 bp, Homo sapien
ttttggctacatctatatctctgat

SEQ ID NO: 2824335 - DNA, 25 bp, Homo sapien
gacatacgatttgctcttgtggctt

SEQ ID NO: 2824336 - DNA, 25 bp, Homo sapien
gtggcttttagtatctgcatagggc

SEQ ID NO: 2824337 - DNA, 25 bp, Homo sapien
tctttggagtgacatacgatttgct

SEQ ID NO: 2824338 - DNA, 25 bp, Homo sapien
tggcttttagtatctgcatagggca

SEQ ID NO: 2824339 - DNA, 25 bp, Homo sapien
cagaaataaccagcacacgcaaggg

SEQ ID NO: 2824340 - DNA, 25 bp, Homo sapien
gcaaggggccggtcacttttccaga

SEQ ID NO: 2824341 - DNA, 25 bp, Homo sapien
gcccacactgtagtgaggatttgag

SEQ ID NO: 2824342 - DNA, 25 bp, Homo sapien
cacactgtagtgaggatttgaggag

SEQ ID NO: 2824343 - DNA, 25 bp, Homo sapien
aaactggtccctattctccactgaa

SEQ ID NO: 2824344 - DNA, 25 bp, Homo sapien
gattattccggtacaagtaggagcc

SEQ ID NO: 2824345 - DNA, 25 bp, Homo sapien
tttgagttcctcctcataaggacca

SEQ ID NO: 2824346 - DNA, 25 bp, Homo sapien
actgaatcctctttgcaacaaggat

SEQ ID NO: 2824347 - DNA, 25 bp, Homo sapien
gtctataacaatgcattcccaccat

SEQ ID NO: 2824348 - DNA, 25 bp, Homo sapien
tttgtctataacaatgcattcccac

SEQ ID NO: 2824349 - DNA, 25 bp, Homo sapien
tgtctataacaatgcattcccacca

SEQ ID NO: 2824350 - DNA, 25 bp, Homo sapien
ctataacaatgcattcccaccattc

SEQ ID NO: 2824351 - DNA, 25 bp, Homo sapien
ttcaactgaacaatggtttccatta

SEQ ID NO: 2824352 - DNA, 25 bp, Homo sapien
cctttcaactgaacaatggtttcca

SEQ ID NO: 2824353 - DNA, 25 bp, Homo sapien
ctttcaactgaacaatggtttccat

SEQ ID NO: 2824354 - DNA, 25 bp, Homo sapien
aactgaacaatggtttccattatcc

SEQ ID NO: 2824355 - DNA, 25 bp, Homo sapien
tgacaaagacattcatcaactccat

SEQ ID NO: 2824356 - DNA, 25 bp, Homo sapien
atgacaaagacattcatcaactcca

SEQ ID NO: 2824357 - DNA, 25 bp, Homo sapien
catgacaaagacattcatcaactcc

SEQ ID NO: 2824358 - DNA, 25 bp, Homo sapien
tacacagatagcatttaggagcaat

SEQ ID NO: 2824359 - DNA, 25 bp, Homo sapien
tcctataaggtactctcagactgat

SEQ ID NO: 2824360 - DNA, 25 bp, Homo sapien
tcagactgatcacttctctacccag

SEQ ID NO: 2824361 - DNA, 25 bp, Homo sapien
tgtcccaggctaccattagcgctgt

SEQ ID NO: 2824362 - DNA, 25 bp, Homo sapien
tagggacgagatagtccgccagtca

SEQ ID NO: 2824363 - DNA, 25 bp, Homo sapien
ggacgagatagtccgccagtcagtt

SEQ ID NO: 2824364 - DNA, 25 bp, Homo sapien
ctagtagggacgagatagtccgcca

SEQ ID NO: 2824365 - DNA, 25 bp, Homo sapien
gagatagtccgccagtcagtttcca

SEQ ID NO: 2824366 - DNA, 25 bp, Homo sapien
gggtcttggaatagggtatcctata

SEQ ID NO: 2824367 - DNA, 25 bp, Homo sapien
ggtcttggaatagggtatcctatat

SEQ ID NO: 2824368 - DNA, 25 bp, Homo sapien
acctgtcggaaacctgagattttct

SEQ ID NO: 2824369 - DNA, 25 bp, Homo sapien
ggtccaacctgtcggaaacctgaga

SEQ ID NO: 2824370 - DNA, 25 bp, Homo sapien
tccaacctgtcggaaacctgagatt

SEQ ID NO: 2824371 - DNA, 25 bp, Homo sapien
taggtccaacctgtcggaaacctga

SEQ ID NO: 2824372 - DNA, 25 bp, Homo sapien
taatcccagattgtgcagttataag

SEQ ID NO: 2824373 - DNA, 25 bp, Homo sapien
tataagcgtcaagtaagttccgtgg

SEQ ID NO: 2824374 - DNA, 25 bp, Homo sapien
cccaatcaggaagtaaaggttatca

SEQ ID NO: 2824375 - DNA, 25 bp, Homo sapien
gggttctacatgtctgaggctcaga

SEQ ID NO: 2824376 - DNA, 25 bp, Homo sapien
tatcttaaatgatgggcttgtgaaa

SEQ ID NO: 2824377 - DNA, 25 bp, Homo sapien
tccattatcttaaatgatgggcttg

SEQ ID NO: 2824378 - DNA, 25 bp, Homo sapien
tgccatggaagaacatgcaatatcc

SEQ ID NO: 2824379 - DNA, 25 bp, Homo sapien
tgcagtcttcaatgcatggaataaa

SEQ ID NO: 2824380 - DNA, 25 bp, Homo sapien
gaataatagatcaggcagttaaagt

SEQ ID NO: 2824381 - DNA, 25 bp, Homo sapien
taaagtccttggaataatagatcag

SEQ ID NO: 2824382 - DNA, 25 bp, Homo sapien
tggttctaaagtccttggaataata

SEQ ID NO: 2824383 - DNA, 25 bp, Homo sapien
ccttggaataatagatcaggcagtt

SEQ ID NO: 2824384 - DNA, 25 bp, Homo sapien
caacttcgttttagcattttgcgtc

SEQ ID NO: 2824385 - DNA, 25 bp, Homo sapien
acaatatccaacttcgttttagcat

SEQ ID NO: 2824386 - DNA, 25 bp, Homo sapien
cgttttagcattttgcgtcaaagta

SEQ ID NO: 2824387 - DNA, 25 bp, Homo sapien
agcattttgcgtcaaagtataataa

SEQ ID NO: 2824388 - DNA, 25 bp, Homo sapien
gctgctgatggatagggatgaggaa

SEQ ID NO: 2824389 - DNA, 25 bp, Homo sapien
tgctgatggatagggatgaggaaga

SEQ ID NO: 2824390 - DNA, 25 bp, Homo sapien
aagctgctgatggatagggatgagg

SEQ ID NO: 2824391 - DNA, 25 bp, Homo sapien
ccaagctgctgatggatagggatga

SEQ ID NO: 2824392 - DNA, 25 bp, Homo sapien
tacttgggccaaaaagatggctctc

SEQ ID NO: 2824393 - DNA, 25 bp, Homo sapien
acttggatacatgtcagaaccttct

SEQ ID NO: 2824394 - DNA, 25 bp, Homo sapien
tggatacatgtcagaaccttctaag

SEQ ID NO: 2824395 - DNA, 25 bp, Homo sapien
tctaagattccaacaaaacgtacag

SEQ ID NO: 2824396 - DNA, 25 bp, Homo sapien
tgtatcatatttgcacagctcatgc

SEQ ID NO: 2824397 - DNA, 25 bp, Homo sapien
cctgtatcatatttgcacagctcat

SEQ ID NO: 2824398 - DNA, 25 bp, Homo sapien
gtatcatatttgcacagctcatgct

SEQ ID NO: 2824399 - DNA, 25 bp, Homo sapien
gcctgtatcatatttgcacagctca

SEQ ID NO: 2824400 - DNA, 25 bp, Homo sapien
ggaggaatctacaggcaaagggtat

SEQ ID NO: 2824401 - DNA, 25 bp, Homo sapien
ggcaaagggtatgccaatcctccaa

SEQ ID NO: 2824402 - DNA, 25 bp, Homo sapien
gaatctacaggcaaagggtatgcca

SEQ ID NO: 2824403 - DNA, 25 bp, Homo sapien
ggtctgaggaggaatctacaggcaa

SEQ ID NO: 2824404 - DNA, 25 bp, Homo sapien
ttcttaaatagatagccataactca

SEQ ID NO: 2824405 - DNA, 25 bp, Homo sapien
aaatagatagccataactcacaggg

SEQ ID NO: 2824406 - DNA, 25 bp, Homo sapien
cttaaatagatagccataactcaca

SEQ ID NO: 2824407 - DNA, 25 bp, Homo sapien
ttttcttaaatagatagccataact

SEQ ID NO: 2824408 - DNA, 25 bp, Homo sapien
tacaggacttagtgttcaggcagaa

SEQ ID NO: 2824409 - DNA, 25 bp, Homo sapien
tctccattgggtgttagatagacca

SEQ ID NO: 2824410 - DNA, 25 bp, Homo sapien
tcattaagctacaattagggacagc

SEQ ID NO: 2824411 - DNA, 25 bp, Homo sapien
taaactgccaaatgcatggttcgga

SEQ ID NO: 2824412 - DNA, 25 bp, Homo sapien
gtcagggcactcatttgcaaatgac

SEQ ID NO: 2824413 - DNA, 25 bp, Homo sapien
gagaagtcagggcactcatttgcaa

SEQ ID NO: 2824414 - DNA, 25 bp, Homo sapien
gactggtttccaatagctcctaatt

SEQ ID NO: 2824415 - DNA, 25 bp, Homo sapien
aatgactggtttccaatagctccta

SEQ ID NO: 2824416 - DNA, 25 bp, Homo sapien
accataatggtaacaaatttagatc

SEQ ID NO: 2824417 - DNA, 25 bp, Homo sapien
taatggtaacaaatttagatcgttc

SEQ ID NO: 2824418 - DNA, 25 bp, Homo sapien
tggtaacaaatttagatcgttctgg

SEQ ID NO: 2824419 - DNA, 25 bp, Homo sapien
cataatggtaacaaatttagatcgt

SEQ ID NO: 2824420 - DNA, 25 bp, Homo sapien
cataatgttaaagggccttgaattt

SEQ ID NO: 2824421 - DNA, 25 bp, Homo sapien
acataatgttaaagggccttgaatt

SEQ ID NO: 2824422 - DNA, 25 bp, Homo sapien
gaaatcgagtatgaggactcaaggg

SEQ ID NO: 2824423 - DNA, 25 bp, Homo sapien
tgcctttgtcatcgcctgttgtgca

SEQ ID NO: 2824424 - DNA, 25 bp, Homo sapien
aacaaagaatcctgcattgggaaat

SEQ ID NO: 2824425 - DNA, 25 bp, Homo sapien
agcctgagcctcttgttgcagctta

SEQ ID NO: 2824426 - DNA, 25 bp, Homo sapien
ttcaaagcactaaatagtactgtac

SEQ ID NO: 2824427 - DNA, 25 bp, Homo sapien
taccatagttaatgataccaaccat

SEQ ID NO: 2824428 - DNA, 25 bp, Homo sapien
agcactaaatagtactgtaccatag

SEQ ID NO: 2824429 - DNA, 25 bp, Homo sapien
gtactgtaccatagttaatgatacc

SEQ ID NO: 2824430 - DNA, 25 bp, Homo sapien
ggttcattccatgctctaaatttcc

SEQ ID NO: 2824431 - DNA, 25 bp, Homo sapien
ttcccagaataagtaatgccagcag

SEQ ID NO: 2824432 - DNA, 25 bp, Homo sapien
tcattcacccggagaaggggccagt

SEQ ID NO: 2824433 - DNA, 25 bp, Homo sapien
tttttccggttcattccatgctcta

SEQ ID NO: 2824434 - DNA, 25 bp, Homo sapien
tccttgggggaatactgcagcagat

SEQ ID NO: 2824435 - DNA, 25 bp, Homo sapien
gcagcagatcagcaacagtggcttc

SEQ ID NO: 2824436 - DNA, 25 bp, Homo sapien
cagatcagcaacagtggcttccagt

SEQ ID NO: 2824437 - DNA, 25 bp, Homo sapien
gggaatactgcagcagatcagcaac

SEQ ID NO: 2824438 - DNA, 25 bp, Homo sapien
agcatgcccaggcactcagagacct

SEQ ID NO: 2824439 - DNA, 25 bp, Homo sapien
cacatggcttcaagggatcatggag

SEQ ID NO: 2824440 - DNA, 25 bp, Homo sapien
ttctgcatatctggcggacagcatg

SEQ ID NO: 2824441 - DNA, 25 bp, Homo sapien
tcatggagttctgcatatctggcgg

SEQ ID NO: 2824442 - DNA, 25 bp, Homo sapien
ggaatcaatctccttcttagacagg

SEQ ID NO: 2824443 - DNA, 25 bp, Homo sapien
gaacccatgtgaccaccatctgcat

SEQ ID NO: 2824444 - DNA, 25 bp, Homo sapien
tctgcattctctgctttattctggg

SEQ ID NO: 2824445 - DNA, 25 bp, Homo sapien
tcttagacagggtaactgttgtaag

SEQ ID NO: 2824446 - DNA, 25 bp, Homo sapien
gcttgattctgcttcgtgcttcggt

SEQ ID NO: 2824447 - DNA, 25 bp, Homo sapien
tgaaacaagcttcatggcaacagct

SEQ ID NO: 2824448 - DNA, 25 bp, Homo sapien
aaagcagtagtaaaggagtccctgg

SEQ ID NO: 2824449 - DNA, 25 bp, Homo sapien
tccttgagcactggatataaccctc

SEQ ID NO: 2824450 - DNA, 25 bp, Homo sapien
caaattgtggtctcttgttctaatc

SEQ ID NO: 2824451 - DNA, 25 bp, Homo sapien
ggtggcctggacatcctaagtgcat

SEQ ID NO: 2824452 - DNA, 25 bp, Homo sapien
ctagaataacatgggctggaagatc

SEQ ID NO: 2824453 - DNA, 25 bp, Homo sapien
caaggagactcaaacagctgtagct

SEQ ID NO: 2824454 - DNA, 25 bp, Homo sapien
gtgatgagggccctaagtctttaga

SEQ ID NO: 2824455 - DNA, 25 bp, Homo sapien
catattgtttgactgtggactgtga

SEQ ID NO: 2824456 - DNA, 25 bp, Homo sapien
gccctaagtctttagaggacaaaca

SEQ ID NO: 2824457 - DNA, 25 bp, Homo sapien
ccttcattctgcacatattgtttga

SEQ ID NO: 2824458 - DNA, 25 bp, Homo sapien
tgtgcattctgttccagggactgcc

SEQ ID NO: 2824459 - DNA, 25 bp, Homo sapien
aactgcaaagctcccaaatgccatg

SEQ ID NO: 2824460 - DNA, 25 bp, Homo sapien
catgcacaaacctggtaatggccca

SEQ ID NO: 2824461 - DNA, 25 bp, Homo sapien
gcatttgtagcatcgtaatctgtca

SEQ ID NO: 2824462 - DNA, 25 bp, Homo sapien
cagaaagccaccatccctgaaggct

SEQ ID NO: 2824463 - DNA, 25 bp, Homo sapien
ctgcagaaagccaccatccctgaag

SEQ ID NO: 2824464 - DNA, 25 bp, Homo sapien
gcagtcacaacctgctcaaattcca

SEQ ID NO: 2824465 - DNA, 25 bp, Homo sapien
caagtaaactggcagtcacaacctg

SEQ ID NO: 2824466 - DNA, 25 bp, Homo sapien
cacaagcatgaatcggatggccagt

SEQ ID NO: 2824467 - DNA, 25 bp, Homo sapien
tccaaggactgcacaagcatgaatc

SEQ ID NO: 2824468 - DNA, 25 bp, Homo sapien
gactgcacaagcatgaatcggatgg

SEQ ID NO: 2824469 - DNA, 25 bp, Homo sapien
catgaatcggatggccagtcttcct

SEQ ID NO: 2824470 - DNA, 25 bp, Homo sapien
tgtacaagctaaagcccatccccat

SEQ ID NO: 2824471 - DNA, 25 bp, Homo sapien
tcttccctggaacactggtcaaagg

SEQ ID NO: 2824472 - DNA, 25 bp, Homo sapien
gaacgttcatatacccactgttggg

SEQ ID NO: 2824473 - DNA, 25 bp, Homo sapien
tgtccacaccaaccaggcaggattg

SEQ ID NO: 2824474 - DNA, 25 bp, Homo sapien
ttcctattctggcaattaaggacaa

SEQ ID NO: 2824475 - DNA, 25 bp, Homo sapien
gcaattaaggacaactatgttttct

SEQ ID NO: 2824476 - DNA, 25 bp, Homo sapien
tctggcaattaaggacaactatgtt

SEQ ID NO: 2824477 - DNA, 25 bp, Homo sapien
tttgactttgataagtatatagctc

SEQ ID NO: 2824478 - DNA, 25 bp, Homo sapien
gatgaataacagagtactttgtcct

SEQ ID NO: 2824479 - DNA, 25 bp, Homo sapien
agatgaataacagagtactttgtcc

SEQ ID NO: 2824480 - DNA, 25 bp, Homo sapien
gatggctggacctctgtggttgtaa

SEQ ID NO: 2824481 - DNA, 25 bp, Homo sapien
gacctctgtggttgtaaatcttcca

SEQ ID NO: 2824482 - DNA, 25 bp, Homo sapien
aatatttgatggccacagtgtcagc

SEQ ID NO: 2824483 - DNA, 25 bp, Homo sapien
taaatcttccaatatttgatggcca

SEQ ID NO: 2824484 - DNA, 25 bp, Homo sapien
tctgcctagttccagaagccatgga

SEQ ID NO: 2824485 - DNA, 25 bp, Homo sapien
cacgtgaggaagtccaaatgataca

SEQ ID NO: 2824486 - DNA, 25 bp, Homo sapien
gagaggcatctgtatgactgacagg

SEQ ID NO: 2824487 - DNA, 25 bp, Homo sapien
gccctgcaaggtaggtgtcactatc

SEQ ID NO: 2824488 - DNA, 25 bp, Homo sapien
gagagatagtggagggcatgaccag

SEQ ID NO: 2824489 - DNA, 25 bp, Homo sapien
cttgatttgctatttgccatgagga

SEQ ID NO: 2824490 - DNA, 25 bp, Homo sapien
cctgagcttgccgtgaataatcaat

SEQ ID NO: 2824491 - DNA, 25 bp, Homo sapien
ccatgaggatgggtttattcagcct

SEQ ID NO: 2824492 - DNA, 25 bp, Homo sapien
gagaagcagtagtctcttccaaacc

SEQ ID NO: 2824493 - DNA, 25 bp, Homo sapien
agccatcgctaatgccagtgtgtct

SEQ ID NO: 2824494 - DNA, 25 bp, Homo sapien
tcagccatcgctaatgccagtgtgt

SEQ ID NO: 2824495 - DNA, 25 bp, Homo sapien
cattgtgggtgtggcgatgcttagc

SEQ ID NO: 2824496 - DNA, 25 bp, Homo sapien
tgtggcgatgcttagcaggtactct

SEQ ID NO: 2824497 - DNA, 25 bp, Homo sapien
ctttcacttgagcaaattatagcac

SEQ ID NO: 2824498 - DNA, 25 bp, Homo sapien
tcacttgagcaaattatagcacact

SEQ ID NO: 2824499 - DNA, 25 bp, Homo sapien
tagcacactcatagctacttccaaa

SEQ ID NO: 2824500 - DNA, 25 bp, Homo sapien
caaattatagcacactcatagctac

SEQ ID NO: 2824501 - DNA, 25 bp, Homo sapien
gctttgtggagtaatggttttcggc

SEQ ID NO: 2824502 - DNA, 25 bp, Homo sapien
ggttttcggccatcatacattgcat

SEQ ID NO: 2824503 - DNA, 25 bp, Homo sapien
gcctctgattgttctggtcatgtca

SEQ ID NO: 2824504 - DNA, 25 bp, Homo sapien
tacattgcatgttcaccttgcctct

SEQ ID NO: 2824505 - DNA, 25 bp, Homo sapien
tgcaaccgatatagagaaaatccca

SEQ ID NO: 2824506 - DNA, 25 bp, Homo sapien
gaaaagcatgcaaccgatatagaga

SEQ ID NO: 2824507 - DNA, 25 bp, Homo sapien
gcagaaaagcatgcaaccgatatag

SEQ ID NO: 2824508 - DNA, 25 bp, Homo sapien
aagcatgcaaccgatatagagaaaa

SEQ ID NO: 2824509 - DNA, 25 bp, Homo sapien
ttatccagtagtcaaaaccttcatt

SEQ ID NO: 2824510 - DNA, 25 bp, Homo sapien
tttcaacacaactgatctcatctac

SEQ ID NO: 2824511 - DNA, 25 bp, Homo sapien
tccagtagtcaaaaccttcatttca

SEQ ID NO: 2824512 - DNA, 25 bp, Homo sapien
tatccagtagtcaaaaccttcattt

SEQ ID NO: 2824513 - DNA, 25 bp, Homo sapien
caaccatatcccctaatcttggcat

SEQ ID NO: 2824514 - DNA, 25 bp, Homo sapien
gtgcgagatatgtggggacatcaac

SEQ ID NO: 2824515 - DNA, 25 bp, Homo sapien
tcaaattcttgtgcgagatatgtgg

SEQ ID NO: 2824516 - DNA, 25 bp, Homo sapien
catcaaccatatcccctaatcttgg

SEQ ID NO: 2824517 - DNA, 25 bp, Homo sapien
cctatagcctctactagaaagtgag

SEQ ID NO: 2824518 - DNA, 25 bp, Homo sapien
aggagcttgcatctcaggatttaca

SEQ ID NO: 2824519 - DNA, 25 bp, Homo sapien
taggatccttagtcttgcctatagc

SEQ ID NO: 2824520 - DNA, 25 bp, Homo sapien
gtcttctccaaaacaaggagcttgc

SEQ ID NO: 2824521 - DNA, 25 bp, Homo sapien
taatagtagtttgggctgcaaggga

SEQ ID NO: 2824522 - DNA, 25 bp, Homo sapien
caagggaacgaagtgagatggaaat

SEQ ID NO: 2824523 - DNA, 25 bp, Homo sapien
taaagccaggtagttttctactcca

SEQ ID NO: 2824524 - DNA, 25 bp, Homo sapien
tccatgaggctgattgtaatagtag

SEQ ID NO: 2824525 - DNA, 25 bp, Homo sapien
gatccagttccacctcatctgctcc

SEQ ID NO: 2824526 - DNA, 25 bp, Homo sapien
cttgccgaggactgaaaggatccag

SEQ ID NO: 2824527 - DNA, 25 bp, Homo sapien
aaggatccagttccacctcatctgc

SEQ ID NO: 2824528 - DNA, 25 bp, Homo sapien
ccagttccacctcatctgctccacc

SEQ ID NO: 2824529 - DNA, 25 bp, Homo sapien
gacatagtcagagggcatttatctt

SEQ ID NO: 2824530 - DNA, 25 bp, Homo sapien
tatcaactgctctcaaacataatgg

SEQ ID NO: 2824531 - DNA, 25 bp, Homo sapien
gaattggacagtcgtgaaggtcaac

SEQ ID NO: 2824532 - DNA, 25 bp, Homo sapien
cagagaacccatgatttgcccaaag

SEQ ID NO: 2824533 - DNA, 25 bp, Homo sapien
cccttccttactccatatacagtaa

SEQ ID NO: 2824534 - DNA, 25 bp, Homo sapien
gcaatgagggaaggactccctattt

SEQ ID NO: 2824535 - DNA, 25 bp, Homo sapien
actccatatacagtaattaactcaa

SEQ ID NO: 2824536 - DNA, 25 bp, Homo sapien
ctacaaaaaccagagaagaaagtct

SEQ ID NO: 2824537 - DNA, 25 bp, Homo sapien
gtatgccagatcgaggaacttttgc

SEQ ID NO: 2824538 - DNA, 25 bp, Homo sapien
ccagtaagtatgccagatcgaggaa

SEQ ID NO: 2824539 - DNA, 25 bp, Homo sapien
taagtatgccagatcgaggaacttt

SEQ ID NO: 2824540 - DNA, 25 bp, Homo sapien
agtaagtatgccagatcgaggaact

SEQ ID NO: 2824541 - DNA, 25 bp, Homo sapien
caggctctcaggagtcatccagaag

SEQ ID NO: 2824542 - DNA, 25 bp, Homo sapien
gcaaggccttttccaggctctcagg

SEQ ID NO: 2824543 - DNA, 25 bp, Homo sapien
ggtaaagcttgactaggccttcttg

SEQ ID NO: 2824544 - DNA, 25 bp, Homo sapien
aagagccttcaaaccaacttctgga

SEQ ID NO: 2824545 - DNA, 25 bp, Homo sapien
tttccacaggtaatgctatggcagc

SEQ ID NO: 2824546 - DNA, 25 bp, Homo sapien
cattcatttccacaggtaatgctat

SEQ ID NO: 2824547 - DNA, 25 bp, Homo sapien
gcagctttccactctgtttatctct

SEQ ID NO: 2824548 - DNA, 25 bp, Homo sapien
agctttccactctgtttatctctgc

SEQ ID NO: 2824549 - DNA, 25 bp, Homo sapien
tagaacagcaaagggctacttcccc

SEQ ID NO: 2824550 - DNA, 25 bp, Homo sapien
cactcaggagctatgtcagaaatca

SEQ ID NO: 2824551 - DNA, 25 bp, Homo sapien
gagaaaatgcacctgaactggagga

SEQ ID NO: 2824552 - DNA, 25 bp, Homo sapien
tcaagtacaaagtgcaatgccgggc

SEQ ID NO: 2824553 - DNA, 25 bp, Homo sapien
gcaatggtcataaacaggcccaacc

SEQ ID NO: 2824554 - DNA, 25 bp, Homo sapien
ccacatatgctatctctggtgcaag

SEQ ID NO: 2824555 - DNA, 25 bp, Homo sapien
aagacagccaaatctggtgcagggc

SEQ ID NO: 2824556 - DNA, 25 bp, Homo sapien
ggttctatcacaaagaagtacagag

SEQ ID NO: 2824557 - DNA, 25 bp, Homo sapien
cattcagcagttttttgcgtatgaa

SEQ ID NO: 2824558 - DNA, 25 bp, Homo sapien
tccccagaggtatggacagtagcta

SEQ ID NO: 2824559 - DNA, 25 bp, Homo sapien
tggagccaattgttcatatctaagc

SEQ ID NO: 2824560 - DNA, 25 bp, Homo sapien
cagctgaggaaatgtcattcagcag

SEQ ID NO: 2824561 - DNA, 25 bp, Homo sapien
ttttccatatcaaatgtggctgtta

SEQ ID NO: 2824562 - DNA, 25 bp, Homo sapien
gactacagccacgtgagtgagcata

SEQ ID NO: 2824563 - DNA, 25 bp, Homo sapien
tagtcccaaccaagctaccagctga

SEQ ID NO: 2824564 - DNA, 25 bp, Homo sapien
tagtcattccaatctcaactgaggc

SEQ ID NO: 2824565 - DNA, 25 bp, Homo sapien
aatttagacggtttgttacgcagca

SEQ ID NO: 2824566 - DNA, 25 bp, Homo sapien
tgtaggatccaaatgcatactaaac

SEQ ID NO: 2824567 - DNA, 25 bp, Homo sapien
taacaacagaacaaacttcataggg

SEQ ID NO: 2824568 - DNA, 25 bp, Homo sapien
caggagtcataaaaacctaagtcca

SEQ ID NO: 2824569 - DNA, 25 bp, Homo sapien
gacagttaatatgaaaggctcagga

SEQ ID NO: 2824570 - DNA, 25 bp, Homo sapien
gtgtccccacaaaactcacaggttg

SEQ ID NO: 2824571 - DNA, 25 bp, Homo sapien
gacaggagtcaagtgatcagcacgg

SEQ ID NO: 2824572 - DNA, 25 bp, Homo sapien
taagggtctcagagagctagctcga

SEQ ID NO: 2824573 - DNA, 25 bp, Homo sapien
tagctcgacccttccactaggtgaa

SEQ ID NO: 2824574 - DNA, 25 bp, Homo sapien
tacaggcaagggtcaacaatttagc

SEQ ID NO: 2824575 - DNA, 25 bp, Homo sapien
tcaatacctctcattacacgcagtg

SEQ ID NO: 2824576 - DNA, 25 bp, Homo sapien
tgagaacaggtgactagagaagcat

SEQ ID NO: 2824577 - DNA, 25 bp, Homo sapien
tacacaacatcaaagtgcagatggg

SEQ ID NO: 2824578 - DNA, 25 bp, Homo sapien
taaacattaatggacacaacaccgt

SEQ ID NO: 2824579 - DNA, 25 bp, Homo sapien
tgagttcaaatttggcccctaaaca

SEQ ID NO: 2824580 - DNA, 25 bp, Homo sapien
cataattgcagtagacttgtgctga

SEQ ID NO: 2824581 - DNA, 25 bp, Homo sapien
agtttaccagagtcaataagcctgt

SEQ ID NO: 2824582 - DNA, 25 bp, Homo sapien
tccttgctgaggcgaatttgggcac

SEQ ID NO: 2824583 - DNA, 25 bp, Homo sapien
tgttccttgctgaggcgaatttggg

SEQ ID NO: 2824584 - DNA, 25 bp, Homo sapien
ccatttttcagaaggtgttccttgc

SEQ ID NO: 2824585 - DNA, 25 bp, Homo sapien
gttccttgctgaggcgaatttgggc

SEQ ID NO: 2824586 - DNA, 25 bp, Homo sapien
ctgaagttgaaaggagcataaagct

SEQ ID NO: 2824587 - DNA, 25 bp, Homo sapien
gttgaaaggagcataaagcttgaag

SEQ ID NO: 2824588 - DNA, 25 bp, Homo sapien
gaagttgaaaggagcataaagcttg

SEQ ID NO: 2824589 - DNA, 25 bp, Homo sapien
aaaggagcataaagcttgaagaggg

SEQ ID NO: 2824590 - DNA, 25 bp, Homo sapien
tgtagaaaggcatctattagtcggc

SEQ ID NO: 2824591 - DNA, 25 bp, Homo sapien
agtcggctgcatccgaattacatac

SEQ ID NO: 2824592 - DNA, 25 bp, Homo sapien
gcatctattagtcggctgcatccga

SEQ ID NO: 2824593 - DNA, 25 bp, Homo sapien
gaaaggcatctattagtcggctgca

SEQ ID NO: 2824594 - DNA, 25 bp, Homo sapien
tacaggtagttagataggcatgagc

SEQ ID NO: 2824595 - DNA, 25 bp, Homo sapien
tcctggtcatgctcactaagagaca

SEQ ID NO: 2824596 - DNA, 25 bp, Homo sapien
taataggcaatttataacactggga

SEQ ID NO: 2824597 - DNA, 25 bp, Homo sapien
ccactaggaatatcaggtgaggttt

SEQ ID NO: 2824598 - DNA, 25 bp, Homo sapien
caacacttaaatgcttcggaagggc

SEQ ID NO: 2824599 - DNA, 25 bp, Homo sapien
gacactggaacatgttagacaacac

SEQ ID NO: 2824600 - DNA, 25 bp, Homo sapien
gcttttataagccacctcagacaga

SEQ ID NO: 2824601 - DNA, 25 bp, Homo sapien
ggtaacagcctgactctgatagaag

SEQ ID NO: 2824602 - DNA, 25 bp, Homo sapien
tattaatgtaccagacttccggcaa

SEQ ID NO: 2824603 - DNA, 25 bp, Homo sapien
ttccaaattagcagcttcagcccct

SEQ ID NO: 2824604 - DNA, 25 bp, Homo sapien
tttgggatgtcggaacaaggagttc

SEQ ID NO: 2824605 - DNA, 25 bp, Homo sapien
gaaaatgtccttagcctggctccat

SEQ ID NO: 2824606 - DNA, 25 bp, Homo sapien
ctagtagaggaactgtacgcaacac

SEQ ID NO: 2824607 - DNA, 25 bp, Homo sapien
agtagaggaactgtacgcaacactt

SEQ ID NO: 2824608 - DNA, 25 bp, Homo sapien
aagcgacgaccgatcttcactttac

SEQ ID NO: 2824609 - DNA, 25 bp, Homo sapien
gaactgtacgcaacactttgttttc

SEQ ID NO: 2824610 - DNA, 25 bp, Homo sapien
agagatatgcagagggtgcgctggg

SEQ ID NO: 2824611 - DNA, 25 bp, Homo sapien
gagatatgcagagggtgcgctggga

SEQ ID NO: 2824612 - DNA, 25 bp, Homo sapien
gccatctttgcattgttcctcgtcc

SEQ ID NO: 2824613 - DNA, 25 bp, Homo sapien
ccatctttgcattgttcctcgtccg

SEQ ID NO: 2824614 - DNA, 25 bp, Homo sapien
catctttgcattgttcctcgtccgc

SEQ ID NO: 2824615 - DNA, 25 bp, Homo sapien
ccgacgaggatgactagacagcaaa

SEQ ID NO: 2824616 - DNA, 25 bp, Homo sapien
aagagacgcccctgctaacgggaat

SEQ ID NO: 2824617 - DNA, 25 bp, Homo sapien
gagacgcccctgctaacgggaatgc

SEQ ID NO: 2824618 - DNA, 25 bp, Homo sapien
agacgcccctgctaacgggaatgct

SEQ ID NO: 2824619 - DNA, 25 bp, Homo sapien
gatgtatgtgtgaaacaatgttgtc

SEQ ID NO: 2824620 - DNA, 25 bp, Homo sapien
tgttgtccaacaataaacaggaatt

SEQ ID NO: 2824621 - DNA, 25 bp, Homo sapien
acaatgttgtccaacaataaacagg

SEQ ID NO: 2824622 - DNA, 25 bp, Homo sapien
atgtatgtgtgaaacaatgttgtcc

SEQ ID NO: 2824623 - DNA, 25 bp, Homo sapien
tccgcttgatcgatttggctactga

SEQ ID NO: 2824624 - DNA, 25 bp, Homo sapien
cattgagtttatcttcaatttctga

SEQ ID NO: 2824625 - DNA, 25 bp, Homo sapien
cgcttgatcgatttggctactgata

SEQ ID NO: 2824626 - DNA, 25 bp, Homo sapien
cttccgcttgatcgatttggctact

SEQ ID NO: 2824627 - DNA, 25 bp, Homo sapien
attagaagcaaaacactcttcagca

SEQ ID NO: 2824628 - DNA, 25 bp, Homo sapien
aattagaagcaaaacactcttcagc

SEQ ID NO: 2824629 - DNA, 25 bp, Homo sapien
taattagaagcaaaacactcttcag

SEQ ID NO: 2824630 - DNA, 25 bp, Homo sapien
ataattagaagcaaaacactcttca

SEQ ID NO: 2824631 - DNA, 25 bp, Homo sapien
cgccctaatcgcagagctgcccgag

SEQ ID NO: 2824632 - DNA, 25 bp, Homo sapien
tgtgcctggcatttccgagatttcc

SEQ ID NO: 2824633 - DNA, 25 bp, Homo sapien
tggcatttccgagatttccaacgtg

SEQ ID NO: 2824634 - DNA, 25 bp, Homo sapien
gagatttccaacgtgcacccgccaa

SEQ ID NO: 2824635 - DNA, 25 bp, Homo sapien
gagtgttcgtgcctctttctgcgac

SEQ ID NO: 2824636 - DNA, 25 bp, Homo sapien
tgcagcgggtgcactcaggcctccg

SEQ ID NO: 2824637 - DNA, 25 bp, Homo sapien
ttgtcgttcggcgtctgagagcttg

SEQ ID NO: 2824638 - DNA, 25 bp, Homo sapien
cagaaggccgcgcaacgggctcctg

SEQ ID NO: 2824639 - DNA, 25 bp, Homo sapien
tcaggccgtggcattgaagcccggc

SEQ ID NO: 2824640 - DNA, 25 bp, Homo sapien
ggcgccacgcgctgtagaaaccggc

SEQ ID NO: 2824641 - DNA, 25 bp, Homo sapien
gccgctgggaaggaacgagcccatt

SEQ ID NO: 2824642 - DNA, 25 bp, Homo sapien
gcccattggtccgtgcccagtggga

SEQ ID NO: 2824643 - DNA, 25 bp, Homo sapien
ggcaagtgtgggcagtgttggagtg

SEQ ID NO: 2824644 - DNA, 25 bp, Homo sapien
tgggtaggcaagtgtgggcagtgtt

SEQ ID NO: 2824645 - DNA, 25 bp, Homo sapien
gaactgggtaggcaagtgtgggcag

SEQ ID NO: 2824646 - DNA, 25 bp, Homo sapien
ctagaactgggtaggcaagtgtggg

SEQ ID NO: 2824647 - DNA, 25 bp, Homo sapien
gagaggaccccagtaccaagcccga

SEQ ID NO: 2824648 - DNA, 25 bp, Homo sapien
attttccgccttgggatggcagttt

SEQ ID NO: 2824649 - DNA, 25 bp, Homo sapien
atttgcaggatttccacgcgtgcat

SEQ ID NO: 2824650 - DNA, 25 bp, Homo sapien
taagtagcgtcattgggagaggtaa

SEQ ID NO: 2824651 - DNA, 25 bp, Homo sapien
catcgcaggtgcggcagctgatgca

SEQ ID NO: 2824652 - DNA, 25 bp, Homo sapien
gcatcgcaggtgcggcagctgatgc

SEQ ID NO: 2824653 - DNA, 25 bp, Homo sapien
cttatgtgaatttcctgctcttcta

SEQ ID NO: 2824654 - DNA, 25 bp, Homo sapien
tgtcttgtgctaataagacatcaag

SEQ ID NO: 2824655 - DNA, 25 bp, Homo sapien
agctggtccgtttccttatgtgaat

SEQ ID NO: 2824656 - DNA, 25 bp, Homo sapien
cctgctcttctatgtcttgtgctaa

SEQ ID NO: 2824657 - DNA, 25 bp, Homo sapien
atagactttactcaattgataaaag

SEQ ID NO: 2824658 - DNA, 25 bp, Homo sapien
ggaatagactttactcaattgataa

SEQ ID NO: 2824659 - DNA, 25 bp, Homo sapien
aggaatagactttactcaattgata

SEQ ID NO: 2824660 - DNA, 25 bp, Homo sapien
gaatagactttactcaattgataaa

SEQ ID NO: 2824661 - DNA, 25 bp, Homo sapien
taccctttgcgttagtgtactatta

SEQ ID NO: 2824662 - DNA, 25 bp, Homo sapien
aatctatccaatttttatgtctgat

SEQ ID NO: 2824663 - DNA, 25 bp, Homo sapien
caaagggtattccaatgaataccct

SEQ ID NO: 2824664 - DNA, 25 bp, Homo sapien
ccagagtcagccaatcagtgctgca

SEQ ID NO: 2824665 - DNA, 25 bp, Homo sapien
gtccggggtctcctcagtatcactt

SEQ ID NO: 2824666 - DNA, 25 bp, Homo sapien
cctcagtatcacttctttgggattc

SEQ ID NO: 2824667 - DNA, 25 bp, Homo sapien
ttgggattcatcaggaagatgttac

SEQ ID NO: 2824668 - DNA, 25 bp, Homo sapien
tgagctgaggcaataagtaattgaa

SEQ ID NO: 2824669 - DNA, 25 bp, Homo sapien
ttgtagtcctaaattctacaagatg

SEQ ID NO: 2824670 - DNA, 25 bp, Homo sapien
tttcaccacagcagtaatcattacc

SEQ ID NO: 2824671 - DNA, 25 bp, Homo sapien
ttaatgtaccgcaatccaatttggg

SEQ ID NO: 2824672 - DNA, 25 bp, Homo sapien
tactctaggctcaaataattctgca

SEQ ID NO: 2824673 - DNA, 25 bp, Homo sapien
tgtccaaggccaaggaacttgtctg

SEQ ID NO: 2824674 - DNA, 25 bp, Homo sapien
tggtcatggtcacggtcacacaata

SEQ ID NO: 2824675 - DNA, 25 bp, Homo sapien
tcccagtgaccaatgctagaacaat

SEQ ID NO: 2824676 - DNA, 25 bp, Homo sapien
taagagtggtctgcgcatagtaact

SEQ ID NO: 2824677 - DNA, 25 bp, Homo sapien
gtaagtactccattctcaaggaggg

SEQ ID NO: 2824678 - DNA, 25 bp, Homo sapien
ttcactccctaagagtggtctgcgc

SEQ ID NO: 2824679 - DNA, 25 bp, Homo sapien
gcagaagagtcccaagtaatttatg

SEQ ID NO: 2824680 - DNA, 25 bp, Homo sapien
gaacacgtgattaacaaatataatg

SEQ ID NO: 2824681 - DNA, 25 bp, Homo sapien
ataatgtggtaacttggatggaatc

SEQ ID NO: 2824682 - DNA, 25 bp, Homo sapien
tcaaggttattgagaacaaagcaaa

SEQ ID NO: 2824683 - DNA, 25 bp, Homo sapien
gaagccaaagaacacgtgattaaca

SEQ ID NO: 2824684 - DNA, 25 bp, Homo sapien
taaaatctacacatggtggctgagt

SEQ ID NO: 2824685 - DNA, 25 bp, Homo sapien
gtagtatagcccagaaaatttgagg

SEQ ID NO: 2824686 - DNA, 25 bp, Homo sapien
gactgcatgataccaagcaggctag

SEQ ID NO: 2824687 - DNA, 25 bp, Homo sapien
gcaggctagcttacacatggataca

SEQ ID NO: 2824688 - DNA, 25 bp, Homo sapien
aattttgccccaagtcatataatta

SEQ ID NO: 2824689 - DNA, 25 bp, Homo sapien
tataattacagtctcaattgactcg

SEQ ID NO: 2824690 - DNA, 25 bp, Homo sapien
taatagcttttgaatacaagctcca

SEQ ID NO: 2824691 - DNA, 25 bp, Homo sapien
gctgaccacagttaattttgcccca

SEQ ID NO: 2824692 - DNA, 25 bp, Homo sapien
ctgtacgccagcatgcacgacagaa

SEQ ID NO: 2824693 - DNA, 25 bp, Homo sapien
ctggctgtggtgattcgtgactgta

SEQ ID NO: 2824694 - DNA, 25 bp, Homo sapien
ctgtggtgattcgtgactgtagtcc

SEQ ID NO: 2824695 - DNA, 25 bp, Homo sapien
cgccagcatgcacgacagaacaaga

SEQ ID NO: 2824696 - DNA, 25 bp, Homo sapien
ggaaggagcctatctctgaaggaga

SEQ ID NO: 2824697 - DNA, 25 bp, Homo sapien
ggacaatatactttaagaggtcttc

SEQ ID NO: 2824698 - DNA, 25 bp, Homo sapien
gacctgaaacaacgagaaatcccca

SEQ ID NO: 2824699 - DNA, 25 bp, Homo sapien
gagacaacgtaagtggcagtgacct

SEQ ID NO: 2824700 - DNA, 25 bp, Homo sapien
tgtgggtcctatgcagagctgagaa

SEQ ID NO: 2824701 - DNA, 25 bp, Homo sapien
gcatagtaccataacaagtccaagt

SEQ ID NO: 2824702 - DNA, 25 bp, Homo sapien
tcaccgctacgtttccagcacagag

SEQ ID NO: 2824703 - DNA, 25 bp, Homo sapien
gaagtcagggctgccttactcaccg

SEQ ID NO: 2824704 - DNA, 25 bp, Homo sapien
caggaatgttatcggttgtattggc

SEQ ID NO: 2824705 - DNA, 25 bp, Homo sapien
caggaactcaggtttgaccagcagc

SEQ ID NO: 2824706 - DNA, 25 bp, Homo sapien
tggctgagtagggttaaaggtttca

SEQ ID NO: 2824707 - DNA, 25 bp, Homo sapien
ttatcggttgtattggctgagtagg

SEQ ID NO: 2824708 - DNA, 25 bp, Homo sapien
gagtcagaggtacgactgttccaat

SEQ ID NO: 2824709 - DNA, 25 bp, Homo sapien
gacttttcctaaatgggagaagcag

SEQ ID NO: 2824710 - DNA, 25 bp, Homo sapien
tactagattctccatgagtcagagg

SEQ ID NO: 2824711 - DNA, 25 bp, Homo sapien
tctaaagtaattgtcaggagaatca

SEQ ID NO: 2824712 - DNA, 25 bp, Homo sapien
cataagagatccagtaattctagaa

SEQ ID NO: 2824713 - DNA, 25 bp, Homo sapien
gagatccagtaattctagaacagta

SEQ ID NO: 2824714 - DNA, 25 bp, Homo sapien
aagagatccagtaattctagaacag

SEQ ID NO: 2824715 - DNA, 25 bp, Homo sapien
taattctagaacagtatgatgttgg

SEQ ID NO: 2824716 - DNA, 25 bp, Homo sapien
gaagcatagctggtgttattctgac

SEQ ID NO: 2824717 - DNA, 25 bp, Homo sapien
taaatgataaacaccatgcacaaag

SEQ ID NO: 2824718 - DNA, 25 bp, Homo sapien
caccatgcacaaagcgctatggaca

SEQ ID NO: 2824719 - DNA, 25 bp, Homo sapien
tgcacaaagcgctatggacacagag

SEQ ID NO: 2824720 - DNA, 25 bp, Homo sapien
ttctagtgctatgagtactggcatt

SEQ ID NO: 2824721 - DNA, 25 bp, Homo sapien
cattgccatagcaacatcgttgacc

SEQ ID NO: 2824722 - DNA, 25 bp, Homo sapien
ttgccatagcaacatcgttgaccca

SEQ ID NO: 2824723 - DNA, 25 bp, Homo sapien
tctagtgctatgagtactggcattg

SEQ ID NO: 2824724 - DNA, 25 bp, Homo sapien
ccaggaattgccatcgtaatatgaa

SEQ ID NO: 2824725 - DNA, 25 bp, Homo sapien
tgtatggaaacctttggagcaatct

SEQ ID NO: 2824726 - DNA, 25 bp, Homo sapien
ttttaaaggtagcaatcaaggtcag

SEQ ID NO: 2824727 - DNA, 25 bp, Homo sapien
taaggagctacttcttagataggcc

SEQ ID NO: 2824728 - DNA, 25 bp, Homo sapien
tactggcgctgcatacagcaagact

SEQ ID NO: 2824729 - DNA, 25 bp, Homo sapien
taattagactcaataattctccggg

SEQ ID NO: 2824730 - DNA, 25 bp, Homo sapien
gcacacagtcagtgagcattcaaag

SEQ ID NO: 2824731 - DNA, 25 bp, Homo sapien
taagacaaggtctatcgcccaggtt

SEQ ID NO: 2824732 - DNA, 25 bp, Homo sapien
agggagggacgtctcacacaagtgt

SEQ ID NO: 2824733 - DNA, 25 bp, Homo sapien
cagatgatggcgcaacaaggtttga

SEQ ID NO: 2824734 - DNA, 25 bp, Homo sapien
ttgagggagggacgtctcacacaag

SEQ ID NO: 2824735 - DNA, 25 bp, Homo sapien
ggtaatgtgcagatgatggcgcaac

SEQ ID NO: 2824736 - DNA, 25 bp, Homo sapien
cctggcctattggagagttttgagg

SEQ ID NO: 2824737 - DNA, 25 bp, Homo sapien
atcgtgcctggcctattggagagtt

SEQ ID NO: 2824738 - DNA, 25 bp, Homo sapien
cgtgcctggcctattggagagtttt

SEQ ID NO: 2824739 - DNA, 25 bp, Homo sapien
cctattggagagttttgagggttgt

SEQ ID NO: 2824740 - DNA, 25 bp, Homo sapien
gacttgtagtcctaccagaaccgag

SEQ ID NO: 2824741 - DNA, 25 bp, Homo sapien
tactcaagagacactcaggtcgccc

SEQ ID NO: 2824742 - DNA, 25 bp, Homo sapien
tagggacttggaaacacgcgcaagg

SEQ ID NO: 2824743 - DNA, 25 bp, Homo sapien
caaacgctcaatgcagggctggtgt

SEQ ID NO: 2824744 - DNA, 25 bp, Homo sapien
ctcattctgggttcatcaggcttct

SEQ ID NO: 2824745 - DNA, 25 bp, Homo sapien
cacatctcactcattctgggttcat

SEQ ID NO: 2824746 - DNA, 25 bp, Homo sapien
tctgccaggcttatcaggttcaagc

SEQ ID NO: 2824747 - DNA, 25 bp, Homo sapien
ggttcaagctcaaacgcacggcgtt

SEQ ID NO: 2824748 - DNA, 25 bp, Homo sapien
gaagtctcgcgatatttcggccgca

SEQ ID NO: 2824749 - DNA, 25 bp, Homo sapien
ttctccgtgggcagcattggcgacc

SEQ ID NO: 2824750 - DNA, 25 bp, Homo sapien
tcacttgctgatacgcacgctgtgg

SEQ ID NO: 2824751 - DNA, 25 bp, Homo sapien
tggcgaccagcgcttcacggtgagt

SEQ ID NO: 2824752 - DNA, 25 bp, Homo sapien
acgacgggcagaggcgcgaggtctt

SEQ ID NO: 2824753 - DNA, 25 bp, Homo sapien
aggcgcgaggtcttgtctccccagg

SEQ ID NO: 2824754 - DNA, 25 bp, Homo sapien
agcttggcccagaacgacgggcaga

SEQ ID NO: 2824755 - DNA, 25 bp, Homo sapien
gcagaggcgcgaggtcttgtctccc

SEQ ID NO: 2824756 - DNA, 25 bp, Homo sapien
tttaggtggtcctcaatttactatc

SEQ ID NO: 2824757 - DNA, 25 bp, Homo sapien
tactattacccattgcaagtctaaa

SEQ ID NO: 2824758 - DNA, 25 bp, Homo sapien
tattggcatttctctggtatcagca

SEQ ID NO: 2824759 - DNA, 25 bp, Homo sapien
tactatcagtgtagtcagtaaccaa

SEQ ID NO: 2824760 - DNA, 25 bp, Homo sapien
gctatgaaactcaccaccaaaggta

SEQ ID NO: 2824761 - DNA, 25 bp, Homo sapien
ggctatgaaactcaccaccaaaggt

SEQ ID NO: 2824762 - DNA, 25 bp, Homo sapien
ctgtaaaagcataatgatgtatgcc

SEQ ID NO: 2824763 - DNA, 25 bp, Homo sapien
tatgcctgtaccaagaatgttgact

SEQ ID NO: 2824764 - DNA, 25 bp, Homo sapien
tacgcctaatgttatgatgatatca

SEQ ID NO: 2824765 - DNA, 25 bp, Homo sapien
gcttatttcttctggtcacaataaa

SEQ ID NO: 2824766 - DNA, 25 bp, Homo sapien
cacttaacattggagtgcagctatc

SEQ ID NO: 2824767 - DNA, 25 bp, Homo sapien
taaccatagcttgtatatgcactgg

SEQ ID NO: 2824768 - DNA, 25 bp, Homo sapien
gcacagttaatagaccacagtatga

SEQ ID NO: 2824769 - DNA, 25 bp, Homo sapien
ggtctgaaatcgaacccatggtatc

SEQ ID NO: 2824770 - DNA, 25 bp, Homo sapien
catgaagcctatagtgtaaggagtc

SEQ ID NO: 2824771 - DNA, 25 bp, Homo sapien
gtcaggtgagaactaaaaagcagtc

SEQ ID NO: 2824772 - DNA, 25 bp, Homo sapien
tacgctgtacgaaacaaggctcaag

SEQ ID NO: 2824773 - DNA, 25 bp, Homo sapien
ggctcaagagaaccgtatatgtaaa

SEQ ID NO: 2824774 - DNA, 25 bp, Homo sapien
tattacctatatggaagtggccaac

SEQ ID NO: 2824775 - DNA, 25 bp, Homo sapien
catgctcggcagtccatttttagaa

SEQ ID NO: 2824776 - DNA, 25 bp, Homo sapien
gagctttgcccttgatgcactgatg

SEQ ID NO: 2824777 - DNA, 25 bp, Homo sapien
tacttttgtcagtgaacatgctcgg

SEQ ID NO: 2824778 - DNA, 25 bp, Homo sapien
cccgctgccatgtactaggtgctta

SEQ ID NO: 2824779 - DNA, 25 bp, Homo sapien
aatggaaaccaggaatcgggagcgc

SEQ ID NO: 2824780 - DNA, 25 bp, Homo sapien
gaagccctgcattctccgcaaatgg

SEQ ID NO: 2824781 - DNA, 25 bp, Homo sapien
tggattcatcgtactcccaccaagg

SEQ ID NO: 2824782 - DNA, 25 bp, Homo sapien
agcactgcccgggttatcagggtgc

SEQ ID NO: 2824783 - DNA, 25 bp, Homo sapien
ggcctgagattgtaatccaaccttg

SEQ ID NO: 2824784 - DNA, 25 bp, Homo sapien
tccaaccttgcattgtaaaacgggc

SEQ ID NO: 2824785 - DNA, 25 bp, Homo sapien
ggtgccccagattgcagactgagat

SEQ ID NO: 2824786 - DNA, 25 bp, Homo sapien
ctcctcacactgcccacatcctgca

SEQ ID NO: 2824787 - DNA, 25 bp, Homo sapien
cctcctcacactgcccacatcctgc

SEQ ID NO: 2824788 - DNA, 25 bp, Homo sapien
acacagcaagaactcaacaaacact

SEQ ID NO: 2824789 - DNA, 25 bp, Homo sapien
ccaactgcagtttctaggcttctat

SEQ ID NO: 2824790 - DNA, 25 bp, Homo sapien
gccaactgcagtttctaggcttcta

SEQ ID NO: 2824791 - DNA, 25 bp, Homo sapien
gagccaactgcagtttctaggcttc

SEQ ID NO: 2824792 - DNA, 25 bp, Homo sapien
agccaactgcagtttctaggcttct

SEQ ID NO: 2824793 - DNA, 25 bp, Homo sapien
cagaaggtatgtgggtgcagcaccc

SEQ ID NO: 2824794 - DNA, 25 bp, Homo sapien
ctagcatgttgggaactcctggcgc

SEQ ID NO: 2824795 - DNA, 25 bp, Homo sapien
tcctggcgcacagagtgtctgactc

SEQ ID NO: 2824796 - DNA, 25 bp, Homo sapien
tttgcctttgtgctccttgaaacgg

SEQ ID NO: 2824797 - DNA, 25 bp, Homo sapien
caccctgttaggtcctggcctgtgg

SEQ ID NO: 2824798 - DNA, 25 bp, Homo sapien
ttttattcatgacctgcactagttc

SEQ ID NO: 2824799 - DNA, 25 bp, Homo sapien
catgacctgcactagttcagcaaga

SEQ ID NO: 2824800 - DNA, 25 bp, Homo sapien
catgtggtgatgaccttgggctgcc

SEQ ID NO: 2824801 - DNA, 25 bp, Homo sapien
tcagtgccctgaagtaaggagttgt

SEQ ID NO: 2824802 - DNA, 25 bp, Homo sapien
gtcagtgccctgaagtaaggagttg

SEQ ID NO: 2824803 - DNA, 25 bp, Homo sapien
cagtgccctgaagtaaggagttgta

SEQ ID NO: 2824804 - DNA, 25 bp, Homo sapien
agtgccctgaagtaaggagttgtag

SEQ ID NO: 2824805 - DNA, 25 bp, Homo sapien
tcctcttgcaggaactatgccacct

SEQ ID NO: 2824806 - DNA, 25 bp, Homo sapien
cttaagttgttacccaaggtcagag

SEQ ID NO: 2824807 - DNA, 25 bp, Homo sapien
caatctgatgttcaaatccggtggt

SEQ ID NO: 2824808 - DNA, 25 bp, Homo sapien
agggcagtaacagagctgggttcca

SEQ ID NO: 2824809 - DNA, 25 bp, Homo sapien
aatgagtcagtgtaatctgcattct

SEQ ID NO: 2824810 - DNA, 25 bp, Homo sapien
ttatgaatgagtcagtgtaatctgc

SEQ ID NO: 2824811 - DNA, 25 bp, Homo sapien
tgaatgagtcagtgtaatctgcatt

SEQ ID NO: 2824812 - DNA, 25 bp, Homo sapien
ctgcattctgcttgacataaagaga

SEQ ID NO: 2824813 - DNA, 25 bp, Homo sapien
ttggccttgtaatggactgcctgcg

SEQ ID NO: 2824814 - DNA, 25 bp, Homo sapien
ggagaacaagctataccttttggca

SEQ ID NO: 2824815 - DNA, 25 bp, Homo sapien
cctctacctctagcgtggagaacaa

SEQ ID NO: 2824816 - DNA, 25 bp, Homo sapien
caccctccagtgttgcgtgtggttg

SEQ ID NO: 2824817 - DNA, 25 bp, Homo sapien
gcctgatcgtcatacagcccagaac

SEQ ID NO: 2824818 - DNA, 25 bp, Homo sapien
gacgcctgatcgtcatacagcccag

SEQ ID NO: 2824819 - DNA, 25 bp, Homo sapien
cgcctgatcgtcatacagcccagaa

SEQ ID NO: 2824820 - DNA, 25 bp, Homo sapien
gtggacgcctgatcgtcatacagcc

SEQ ID NO: 2824821 - DNA, 25 bp, Homo sapien
gaagaccccgaggtgtaatggacag

SEQ ID NO: 2824822 - DNA, 25 bp, Homo sapien
ggcataaccagtagattggcacaca

SEQ ID NO: 2824823 - DNA, 25 bp, Homo sapien
tgtagccacagtctagctcccaggg

SEQ ID NO: 2824824 - DNA, 25 bp, Homo sapien
tctgcagaagttggagtcaggccca

SEQ ID NO: 2824825 - DNA, 25 bp, Homo sapien
taaagaacgccgaggtggatttgta

SEQ ID NO: 2824826 - DNA, 25 bp, Homo sapien
tatgttaaagaacgccgaggtggat

SEQ ID NO: 2824827 - DNA, 25 bp, Homo sapien
ctttatgttaaagaacgccgaggtg

SEQ ID NO: 2824828 - DNA, 25 bp, Homo sapien
aagaacgccgaggtggatttgtagc

SEQ ID NO: 2824829 - DNA, 25 bp, Homo sapien
cattccaaacgagtccatgctgctc

SEQ ID NO: 2824830 - DNA, 25 bp, Homo sapien
attccaaacgagtccatgctgctcc

SEQ ID NO: 2824831 - DNA, 25 bp, Homo sapien
tatagcagagctcccattctagact

SEQ ID NO: 2824832 - DNA, 25 bp, Homo sapien
gcttgtggagagaactcatcctgaa

SEQ ID NO: 2824833 - DNA, 25 bp, Homo sapien
taattgtctcctagcctgtatccag

SEQ ID NO: 2824834 - DNA, 25 bp, Homo sapien
gtatccagtggacaaagtgacatga

SEQ ID NO: 2824835 - DNA, 25 bp, Homo sapien
cagtaggccgtaagaaagcttgaca

SEQ ID NO: 2824836 - DNA, 25 bp, Homo sapien
tgccaaggctaataggacaacaaag

SEQ ID NO: 2824837 - DNA, 25 bp, Homo sapien
taaactggagcattacagcatttgc

SEQ ID NO: 2824838 - DNA, 25 bp, Homo sapien
gcaggtggactttgagcacattcta

SEQ ID NO: 2824839 - DNA, 25 bp, Homo sapien
cagtagcactgcagatcacaaaggg

SEQ ID NO: 2824840 - DNA, 25 bp, Homo sapien
gattgccaacccctgatgacaaatg

SEQ ID NO: 2824841 - DNA, 25 bp, Homo sapien
caaatgtcagatgctatcagggaga

SEQ ID NO: 2824842 - DNA, 25 bp, Homo sapien
tcagaggtcgataaagcatcaccaa

SEQ ID NO: 2824843 - DNA, 25 bp, Homo sapien
tgtttgcatttgctcggcactctgt

SEQ ID NO: 2824844 - DNA, 25 bp, Homo sapien
ggttgcctctgtaaagataagcaca

SEQ ID NO: 2824845 - DNA, 25 bp, Homo sapien
taaggatgtcgaaggaagtgcgtcc

SEQ ID NO: 2824846 - DNA, 25 bp, Homo sapien
gataggtggctagtaaggttgcctc

SEQ ID NO: 2824847 - DNA, 25 bp, Homo sapien
tttatagattgtcgaaaattactaa

SEQ ID NO: 2824848 - DNA, 25 bp, Homo sapien
ttggctccttttctgacagaacttt

SEQ ID NO: 2824849 - DNA, 25 bp, Homo sapien
tctgacagaacttttgtaaacttga

SEQ ID NO: 2824850 - DNA, 25 bp, Homo sapien
ttttatagattgtcgaaaattacta

SEQ ID NO: 2824851 - DNA, 25 bp, Homo sapien
gatagcagatatttatgtacatagt

SEQ ID NO: 2824852 - DNA, 25 bp, Homo sapien
ttctgcagatgccatgcagattttc

SEQ ID NO: 2824853 - DNA, 25 bp, Homo sapien
atatttatgtacatagtttcttgta

SEQ ID NO: 2824854 - DNA, 25 bp, Homo sapien
agatgccatgcagattttcttgtct

SEQ ID NO: 2824855 - DNA, 25 bp, Homo sapien
cttcttcctggtgaatcccttctgt

SEQ ID NO: 2824856 - DNA, 25 bp, Homo sapien
cctcttcttcctggtgaatcccttc

SEQ ID NO: 2824857 - DNA, 25 bp, Homo sapien
ttcctggtgaatcccttctgtggcc

SEQ ID NO: 2824858 - DNA, 25 bp, Homo sapien
tcttcctggtgaatcccttctgtgg

SEQ ID NO: 2824859 - DNA, 25 bp, Homo sapien
ttatgtcaataagccccaggtgagt

SEQ ID NO: 2824860 - DNA, 25 bp, Homo sapien
gacctagtacatatctgagagcagc

SEQ ID NO: 2824861 - DNA, 25 bp, Homo sapien
caattttgtatcaggcgggcggtaa

SEQ ID NO: 2824862 - DNA, 25 bp, Homo sapien
ggagccctagagaatcagctgccct

SEQ ID NO: 2824863 - DNA, 25 bp, Homo sapien
ctttcggtggcgaggtcagtttccg

SEQ ID NO: 2824864 - DNA, 25 bp, Homo sapien
tccgggaggctctgcaacactgata

SEQ ID NO: 2824865 - DNA, 25 bp, Homo sapien
cagtttccgggaggctctgcaacac

SEQ ID NO: 2824866 - DNA, 25 bp, Homo sapien
ggctggctatatcttcctcccttca

SEQ ID NO: 2824867 - DNA, 25 bp, Homo sapien
ttttccgcccgtctggtgcgtttgc

SEQ ID NO: 2824868 - DNA, 25 bp, Homo sapien
gacggttcttctcggccctgtgtct

SEQ ID NO: 2824869 - DNA, 25 bp, Homo sapien
cctgtgtctcgggagagtcggctgc

SEQ ID NO: 2824870 - DNA, 25 bp, Homo sapien
tctggtgcgtttgccgacggttctt

SEQ ID NO: 2824871 - DNA, 25 bp, Homo sapien
tatcccatttagtgtgagatcacca

SEQ ID NO: 2824872 - DNA, 25 bp, Homo sapien
gggatattgttaagccatcagagct

SEQ ID NO: 2824873 - DNA, 25 bp, Homo sapien
tcatgcctgatacgctgtaagagga

SEQ ID NO: 2824874 - DNA, 25 bp, Homo sapien
aaactgcctttggatgcttcatgcc

SEQ ID NO: 2824875 - DNA, 25 bp, Homo sapien
cacagaatgtgctattgcaaaagca

SEQ ID NO: 2824876 - DNA, 25 bp, Homo sapien
atttgcggggctgcagcgcactgcc

SEQ ID NO: 2824877 - DNA, 25 bp, Homo sapien
tggagcacattgcagcaggcccggt

SEQ ID NO: 2824878 - DNA, 25 bp, Homo sapien
tttctctggagcacattgcagcagg

SEQ ID NO: 2824879 - DNA, 25 bp, Homo sapien
ctgccaagtcacatggacgggttaa

SEQ ID NO: 2824880 - DNA, 25 bp, Homo sapien
gacgggttaataatgtgtttgatca

SEQ ID NO: 2824881 - DNA, 25 bp, Homo sapien
tttgaccggaatgtgttatccaggc

SEQ ID NO: 2824882 - DNA, 25 bp, Homo sapien
tgctgcaccaaatcattcagcgcca

SEQ ID NO: 2824883 - DNA, 25 bp, Homo sapien
caggtccaaagtcgtgattagcaag

SEQ ID NO: 2824884 - DNA, 25 bp, Homo sapien
tctctggacacactggatcataggg

SEQ ID NO: 2824885 - DNA, 25 bp, Homo sapien
gaaaagcatgtcttggatcaggtcc

SEQ ID NO: 2824886 - DNA, 25 bp, Homo sapien
tgtagctatagacaggaccaaccag

SEQ ID NO: 2824887 - DNA, 25 bp, Homo sapien
gcctttcatatacaactcaaaatta

SEQ ID NO: 2824888 - DNA, 25 bp, Homo sapien
ttctgattattaggcctttcatata

SEQ ID NO: 2824889 - DNA, 25 bp, Homo sapien
cctttcatatacaactcaaaattag

SEQ ID NO: 2824890 - DNA, 25 bp, Homo sapien
tagcctttttctgattattaggcct

SEQ ID NO: 2824891 - DNA, 25 bp, Homo sapien
ctttgatcgtacagaaatattgcgt

SEQ ID NO: 2824892 - DNA, 25 bp, Homo sapien
taagcagttgcaatttagcatacaa

SEQ ID NO: 2824893 - DNA, 25 bp, Homo sapien
tatccttgagatacttgatgagtgt

SEQ ID NO: 2824894 - DNA, 25 bp, Homo sapien
ttgtggtctgtaccggtcagttgga

SEQ ID NO: 2824895 - DNA, 25 bp, Homo sapien
tgcggaatgtgatgagtctccaaaa

SEQ ID NO: 2824896 - DNA, 25 bp, Homo sapien
tagccagctgcatgtttgcacactg

SEQ ID NO: 2824897 - DNA, 25 bp, Homo sapien
caaaattgcaatatgctcctccaag

SEQ ID NO: 2824898 - DNA, 25 bp, Homo sapien
gatctctgtagtgaagagccttggc

SEQ ID NO: 2824899 - DNA, 25 bp, Homo sapien
tctgtttgaagaagtttggttattc

SEQ ID NO: 2824900 - DNA, 25 bp, Homo sapien
tcaataggcttcctcagtggatctg

SEQ ID NO: 2824901 - DNA, 25 bp, Homo sapien
ttggttattctctgtttctgtagct

SEQ ID NO: 2824902 - DNA, 25 bp, Homo sapien
tcctcagtggatctgtttgaagaag

SEQ ID NO: 2824903 - DNA, 25 bp, Homo sapien
ttgttgcctatgcttccgaggtctc

SEQ ID NO: 2824904 - DNA, 25 bp, Homo sapien
cattgctgtttgagtagctatagct

SEQ ID NO: 2824905 - DNA, 25 bp, Homo sapien
tatttttatgtcactaccattgctg

SEQ ID NO: 2824906 - DNA, 25 bp, Homo sapien
gcttccgaggtctcatttataaaat

SEQ ID NO: 2824907 - DNA, 25 bp, Homo sapien
tagctggggtcatgatcctgcagcc

SEQ ID NO: 2824908 - DNA, 25 bp, Homo sapien
tggggtcatgatcctgcagccttct

SEQ ID NO: 2824909 - DNA, 25 bp, Homo sapien
cagatggcacccctaggatgtggag

SEQ ID NO: 2824910 - DNA, 25 bp, Homo sapien
agtggtaccactgaaactagctggg

SEQ ID NO: 2824911 - DNA, 25 bp, Homo sapien
cataatttggccagggtagtcagta

SEQ ID NO: 2824912 - DNA, 25 bp, Homo sapien
tacgtttgtgctccgataacatgag

SEQ ID NO: 2824913 - DNA, 25 bp, Homo sapien
ggatctcatgatatgctaggcagtg

SEQ ID NO: 2824914 - DNA, 25 bp, Homo sapien
taatactgctagtagaggagctgac

SEQ ID NO: 2824915 - DNA, 25 bp, Homo sapien
ttgacttcccacatgctcgttcttg

SEQ ID NO: 2824916 - DNA, 25 bp, Homo sapien
attggacaacttactgggacagaaa

SEQ ID NO: 2824917 - DNA, 25 bp, Homo sapien
ctataggtctgtggccctttcaaga

SEQ ID NO: 2824918 - DNA, 25 bp, Homo sapien
aacctacatatccagttgagatggg

SEQ ID NO: 2824919 - DNA, 25 bp, Homo sapien
ggataatgacgtccaactgtatcca

SEQ ID NO: 2824920 - DNA, 25 bp, Homo sapien
taggataatgacgtccaactgtatc

SEQ ID NO: 2824921 - DNA, 25 bp, Homo sapien
ttaggataatgacgtccaactgtat

SEQ ID NO: 2824922 - DNA, 25 bp, Homo sapien
gataatgacgtccaactgtatccat

SEQ ID NO: 2824923 - DNA, 25 bp, Homo sapien
aaagtgattagaactaagatgcagg

SEQ ID NO: 2824924 - DNA, 25 bp, Homo sapien
tatataagctagcacataattatcc

SEQ ID NO: 2824925 - DNA, 25 bp, Homo sapien
tctcttcacccaaatatgcttgatt

SEQ ID NO: 2824926 - DNA, 25 bp, Homo sapien
ttacaaggaactatatataagctag

SEQ ID NO: 2824927 - DNA, 25 bp, Homo sapien
gatgaagtgcactgggagatgctct

SEQ ID NO: 2824928 - DNA, 25 bp, Homo sapien
gtcactagcaagtactgccacatca

SEQ ID NO: 2824929 - DNA, 25 bp, Homo sapien
aagaatcagcagtctcaaaacagaa

SEQ ID NO: 2824930 - DNA, 25 bp, Homo sapien
cctcagcatttagctctgatgaagt

SEQ ID NO: 2824931 - DNA, 25 bp, Homo sapien
tgtacttcgctgagtggagcagact

SEQ ID NO: 2824932 - DNA, 25 bp, Homo sapien
cggttctcacagtgtacttcgctga

SEQ ID NO: 2824933 - DNA, 25 bp, Homo sapien
tcccatcggttctcacagtgtactt

SEQ ID NO: 2824934 - DNA, 25 bp, Homo sapien
cacagtgtacttcgctgagtggagc

SEQ ID NO: 2824935 - DNA, 25 bp, Homo sapien
tggcttctttttctgattattttcc

SEQ ID NO: 2824936 - DNA, 25 bp, Homo sapien
aatgtgttcaataagcgcattaatt

SEQ ID NO: 2824937 - DNA, 25 bp, Homo sapien
acaataaggccaacagcatgccagg

SEQ ID NO: 2824938 - DNA, 25 bp, Homo sapien
tacaataaggccaacagcatgccag

SEQ ID NO: 2824939 - DNA, 25 bp, Homo sapien
gcttaatgtgttcaataagcgcatt

SEQ ID NO: 2824940 - DNA, 25 bp, Homo sapien
tttctaaaacgcttagagaccatat

SEQ ID NO: 2824941 - DNA, 25 bp, Homo sapien
ttctaaaacgcttagagaccatata

SEQ ID NO: 2824942 - DNA, 25 bp, Homo sapien
catatgtaaaggtgcagtctgagtt

SEQ ID NO: 2824943 - DNA, 25 bp, Homo sapien
cttctgatgtcgaaccaatgtgcca

SEQ ID NO: 2824944 - DNA, 25 bp, Homo sapien
cccctgagtgtgagaaaactgtatg

SEQ ID NO: 2824945 - DNA, 25 bp, Homo sapien
tctgccgtcacctgtagtttctttg

SEQ ID NO: 2824946 - DNA, 25 bp, Homo sapien
tttttcaggtagctcccaagcaatg

SEQ ID NO: 2824947 - DNA, 25 bp, Homo sapien
ctatggaggtgtgctgtttggatct

SEQ ID NO: 2824948 - DNA, 25 bp, Homo sapien
gtgccttcagaatctgcctcagctt

SEQ ID NO: 2824949 - DNA, 25 bp, Homo sapien
gcttttgatccaaggctacactttt

SEQ ID NO: 2824950 - DNA, 25 bp, Homo sapien
gtgtcaatgtcataacaaagttcaa

SEQ ID NO: 2824951 - DNA, 25 bp, Homo sapien
tgtcaatgtcataacaaagttcaag

SEQ ID NO: 2824952 - DNA, 25 bp, Homo sapien
tgtgtcaatgtcataacaaagttca

SEQ ID NO: 2824953 - DNA, 25 bp, Homo sapien
gtcaatgtcataacaaagttcaagg

SEQ ID NO: 2824954 - DNA, 25 bp, Homo sapien
cacatttgaaatacgggagagttga

SEQ ID NO: 2824955 - DNA, 25 bp, Homo sapien
gaaatacgggagagttgaattcatt

SEQ ID NO: 2824956 - DNA, 25 bp, Homo sapien
tctgccacatttgaaatacgggaga

SEQ ID NO: 2824957 - DNA, 25 bp, Homo sapien
ggagagttgaattcattagaggact

SEQ ID NO: 2824958 - DNA, 25 bp, Homo sapien
cacagactgtgttggacctaggtcc

SEQ ID NO: 2824959 - DNA, 25 bp, Homo sapien
acctaggtccgtagaacgccgtgat

SEQ ID NO: 2824960 - DNA, 25 bp, Homo sapien
gaaaatgatgtctctgcagttgcac

SEQ ID NO: 2824961 - DNA, 25 bp, Homo sapien
tctgcgatgggcctggtgacctttg

SEQ ID NO: 2824962 - DNA, 25 bp, Homo sapien
atttcctgagagccaagaagggcca

SEQ ID NO: 2824963 - DNA, 25 bp, Homo sapien
tttaatgaatttcctgagagccaag

SEQ ID NO: 2824964 - DNA, 25 bp, Homo sapien
taatgaatttcctgagagccaagaa

SEQ ID NO: 2824965 - DNA, 25 bp, Homo sapien
aatgaatttcctgagagccaagaag

SEQ ID NO: 2824966 - DNA, 25 bp, Homo sapien
gagaatgtaccacctatgcagtagg

SEQ ID NO: 2824967 - DNA, 25 bp, Homo sapien
actgaggagaatgtaccacctatgc

SEQ ID NO: 2824968 - DNA, 25 bp, Homo sapien
gagaaactgaggagaatgtaccacc

SEQ ID NO: 2824969 - DNA, 25 bp, Homo sapien
gaggagaatgtaccacctatgcagt

SEQ ID NO: 2824970 - DNA, 25 bp, Homo sapien
gacggacaggaagttcagatgccac

SEQ ID NO: 2824971 - DNA, 25 bp, Homo sapien
ctggctgttggctgatgcccgcaca

SEQ ID NO: 2824972 - DNA, 25 bp, Homo sapien
cttgagggtacccagatgtgagacg

SEQ ID NO: 2824973 - DNA, 25 bp, Homo sapien
gctgatgcccgcacatccatcttga

SEQ ID NO: 2824974 - DNA, 25 bp, Homo sapien
ggaactatgccagtctcaggcaggc

SEQ ID NO: 2824975 - DNA, 25 bp, Homo sapien
tcaggcaggcgggggacccacttac

SEQ ID NO: 2824976 - DNA, 25 bp, Homo sapien
aactatgccagtctcaggcaggcgg

SEQ ID NO: 2824977 - DNA, 25 bp, Homo sapien
ctggaactatgccagtctcaggcag

SEQ ID NO: 2824978 - DNA, 25 bp, Homo sapien
agacccagtgatgcagcctgagtct

SEQ ID NO: 2824979 - DNA, 25 bp, Homo sapien
agtctcatctttctctcgtattctc

SEQ ID NO: 2824980 - DNA, 25 bp, Homo sapien
aaagacccagtgatgcagcctgagt

SEQ ID NO: 2824981 - DNA, 25 bp, Homo sapien
gagtctcatctttctctcgtattct

SEQ ID NO: 2824982 - DNA, 25 bp, Homo sapien
gaatgtcaaagtcccaagaggatgc

SEQ ID NO: 2824983 - DNA, 25 bp, Homo sapien
tgtgaggttccttgagcatgagact

SEQ ID NO: 2824984 - DNA, 25 bp, Homo sapien
ctccttaggcatgggattgggtgca

SEQ ID NO: 2824985 - DNA, 25 bp, Homo sapien
taagggtgcagggttccttcggcac

SEQ ID NO: 2824986 - DNA, 25 bp, Homo sapien
cccagggcagttggatatgatcaga

SEQ ID NO: 2824987 - DNA, 25 bp, Homo sapien
gaaacccagggcagttggatatgat

SEQ ID NO: 2824988 - DNA, 25 bp, Homo sapien
tggatatgatcagagctctgcagag

SEQ ID NO: 2824989 - DNA, 25 bp, Homo sapien
ggcagttggatatgatcagagctct

SEQ ID NO: 2824990 - DNA, 25 bp, Homo sapien
ccaccgttgaggacacacccagagc

SEQ ID NO: 2824991 - DNA, 25 bp, Homo sapien
caagactcctgactggctggtgacc

SEQ ID NO: 2824992 - DNA, 25 bp, Homo sapien
gcatggcctgctgccgggtgttcac

SEQ ID NO: 2824993 - DNA, 25 bp, Homo sapien
tggtgaccatggagaacggcttcag

SEQ ID NO: 2824994 - DNA, 25 bp, Homo sapien
tttggagaggtaacaacatcatcct

SEQ ID NO: 2824995 - DNA, 25 bp, Homo sapien
ctgatgagacaccaagagaactgga

SEQ ID NO: 2824996 - DNA, 25 bp, Homo sapien
tttgatctggaaatgaactcactgt

SEQ ID NO: 2824997 - DNA, 25 bp, Homo sapien
gaaatgaactcactgtgggttgcat

SEQ ID NO: 2824998 - DNA, 25 bp, Homo sapien
agaaagagccatggagatagtagca

SEQ ID NO: 2824999 - DNA, 25 bp, Homo sapien
gactctgagcttcaaaacaaaggtg

SEQ ID NO: 2825000 - DNA, 25 bp, Homo sapien
tagcaatgcttgtattgtttcttgc

SEQ ID NO: 2825001 - DNA, 25 bp, Homo sapien
tgaagggtaactgactagcaatgct

SEQ ID NO: 2825002 - DNA, 25 bp, Homo sapien
cagacttgagtttgaagatcacctt

SEQ ID NO: 2825003 - DNA, 25 bp, Homo sapien
ggtacagacttgagtttgaagatca

SEQ ID NO: 2825004 - DNA, 25 bp, Homo sapien
ccaggtacagacttgagtttgaaga

SEQ ID NO: 2825005 - DNA, 25 bp, Homo sapien
gaccaggtacagacttgagtttgaa

SEQ ID NO: 2825006 - DNA, 25 bp, Homo sapien
ttaatactcttcactctcatccttt

SEQ ID NO: 2825007 - DNA, 25 bp, Homo sapien
cactctcatcctttccctcagcact

SEQ ID NO: 2825008 - DNA, 25 bp, Homo sapien
ctttccctcagcactatctgctcca

SEQ ID NO: 2825009 - DNA, 25 bp, Homo sapien
ttccctcagcactatctgctccaac

SEQ ID NO: 2825010 - DNA, 25 bp, Homo sapien
aggcctcagcgacagctgtggtgtt

SEQ ID NO: 2825011 - DNA, 25 bp, Homo sapien
caggcctcagcgacagctgtggtgt

SEQ ID NO: 2825012 - DNA, 25 bp, Homo sapien
gcaccacagtgggaggttggtagtt

SEQ ID NO: 2825013 - DNA, 25 bp, Homo sapien
ctaggcaccacagtgggaggttggt

SEQ ID NO: 2825014 - DNA, 25 bp, Homo sapien
ccacagtgggaggttggtagttaat

SEQ ID NO: 2825015 - DNA, 25 bp, Homo sapien
cacagtgggaggttggtagttaata

SEQ ID NO: 2825016 - DNA, 25 bp, Homo sapien
tcttgatggtggcaatggcagcatt

SEQ ID NO: 2825017 - DNA, 25 bp, Homo sapien
tgatggtggcaatggcagcattgac

SEQ ID NO: 2825018 - DNA, 25 bp, Homo sapien
atggtggcaatggcagcattgacat

SEQ ID NO: 2825019 - DNA, 25 bp, Homo sapien
ttggtcttgatggtggcaatggcag

SEQ ID NO: 2825020 - DNA, 25 bp, Homo sapien
gtcaccatggtatgacagacagcaa

SEQ ID NO: 2825021 - DNA, 25 bp, Homo sapien
tcaccatggtatgacagacagcaag

SEQ ID NO: 2825022 - DNA, 25 bp, Homo sapien
gatggctggctcaaagcaagcactg

SEQ ID NO: 2825023 - DNA, 25 bp, Homo sapien
agggtcacatttcactacctggatg

SEQ ID NO: 2825024 - DNA, 25 bp, Homo sapien
gtcacatttcactacctggatggct

SEQ ID NO: 2825025 - DNA, 25 bp, Homo sapien
atggctggctcaaagcaagcactgg

SEQ ID NO: 2825026 - DNA, 25 bp, Homo sapien
tcaacaactttagggttgggaagca

SEQ ID NO: 2825027 - DNA, 25 bp, Homo sapien
gctcttcttggtttgtggaatcaac

SEQ ID NO: 2825028 - DNA, 25 bp, Homo sapien
ctttacctaacaggatgcttagagg

SEQ ID NO: 2825029 - DNA, 25 bp, Homo sapien
gcttagaggtaggtagtgctcttct

SEQ ID NO: 2825030 - DNA, 25 bp, Homo sapien
tttgcttctgggatctggactttga

SEQ ID NO: 2825031 - DNA, 25 bp, Homo sapien
ttgcttctgggatctggactttgaa

SEQ ID NO: 2825032 - DNA, 25 bp, Homo sapien
ccagttgaccactctgaaatctctc

SEQ ID NO: 2825033 - DNA, 25 bp, Homo sapien
cagggatgccggtgggtaagagtag

SEQ ID NO: 2825034 - DNA, 25 bp, Homo sapien
gagtagacctgttagtaagtgaacc

SEQ ID NO: 2825035 - DNA, 25 bp, Homo sapien
gtgaaccagttgaccactctgaaat

SEQ ID NO: 2825036 - DNA, 25 bp, Homo sapien
cagtgtaggcagtatgggcagtatt

SEQ ID NO: 2825037 - DNA, 25 bp, Homo sapien
tgcttctttcagtgtaggcagtatg

SEQ ID NO: 2825038 - DNA, 25 bp, Homo sapien
tctttcagtgtaggcagtatgggca

SEQ ID NO: 2825039 - DNA, 25 bp, Homo sapien
tctctgcttctttcagtgtaggcag

SEQ ID NO: 2825040 - DNA, 25 bp, Homo sapien
cgcatcatcaaaagacaaggatcag

SEQ ID NO: 2825041 - DNA, 25 bp, Homo sapien
tcaacatcacgcatcatcaaaagac

SEQ ID NO: 2825042 - DNA, 25 bp, Homo sapien
aagacaaggatcagcctcgtgcacc

SEQ ID NO: 2825043 - DNA, 25 bp, Homo sapien
agacaaggatcagcctcgtgcacca

SEQ ID NO: 2825044 - DNA, 25 bp, Homo sapien
tcttaggaggttagccacacatatc

SEQ ID NO: 2825045 - DNA, 25 bp, Homo sapien
taagccctcatcaagccttcatggt

SEQ ID NO: 2825046 - DNA, 25 bp, Homo sapien
aatgacaggtataacttctcccagg

SEQ ID NO: 2825047 - DNA, 25 bp, Homo sapien
cagcagcatgatttccttaaggaca

SEQ ID NO: 2825048 - DNA, 25 bp, Homo sapien
gaactttgcattgtaaacccaacag

SEQ ID NO: 2825049 - DNA, 25 bp, Homo sapien
tcattaaggatatagaccatggctg

SEQ ID NO: 2825050 - DNA, 25 bp, Homo sapien
cagcttttagtcatgctgctgagaa

SEQ ID NO: 2825051 - DNA, 25 bp, Homo sapien
ttgacttatgctctgtcgcctccct

SEQ ID NO: 2825052 - DNA, 25 bp, Homo sapien
aaaaaatgcctgaggtgttgagcgt

SEQ ID NO: 2825053 - DNA, 25 bp, Homo sapien
gaggattgtaggagaaggtaataaa

SEQ ID NO: 2825054 - DNA, 25 bp, Homo sapien
agatctggtgacagatttagtgtga

SEQ ID NO: 2825055 - DNA, 25 bp, Homo sapien
aaaaatgcctgaggtgttgagcgtg

SEQ ID NO: 2825056 - DNA, 25 bp, Homo sapien
tcacttttcgctgagtgaacagaca

SEQ ID NO: 2825057 - DNA, 25 bp, Homo sapien
gtgagctacggaagtccctaaagtc

SEQ ID NO: 2825058 - DNA, 25 bp, Homo sapien
acttttcgctgagtgaacagacaac

SEQ ID NO: 2825059 - DNA, 25 bp, Homo sapien
tgagcaaaccattcatagggtgtgg

SEQ ID NO: 2825060 - DNA, 25 bp, Homo sapien
gagcaaccctaagagatgtgatcat

SEQ ID NO: 2825061 - DNA, 25 bp, Homo sapien
agcaaccctaagagatgtgatcatc

SEQ ID NO: 2825062 - DNA, 25 bp, Homo sapien
agagcaaccctaagagatgtgatca

SEQ ID NO: 2825063 - DNA, 25 bp, Homo sapien
caggaggtgcagtcatattatctct

SEQ ID NO: 2825064 - DNA, 25 bp, Homo sapien
agcccagaaatttttgacgtgtagg

SEQ ID NO: 2825065 - DNA, 25 bp, Homo sapien
caagtgttgtcgcttcattcagttc

SEQ ID NO: 2825066 - DNA, 25 bp, Homo sapien
gacgtgtaggtgtcatccttctgtg

SEQ ID NO: 2825067 - DNA, 25 bp, Homo sapien
tagtttctcattcccgttgagtggg

SEQ ID NO: 2825068 - DNA, 25 bp, Homo sapien
tgtgtcctgagcatacacactcata

SEQ ID NO: 2825069 - DNA, 25 bp, Homo sapien
cataaggggcttatagaggtcatca

SEQ ID NO: 2825070 - DNA, 25 bp, Homo sapien
gtggttctccgtagctacttctcag

SEQ ID NO: 2825071 - DNA, 25 bp, Homo sapien
ttagaatatgtatggtggttctccg

SEQ ID NO: 2825072 - DNA, 25 bp, Homo sapien
gactgacattgtcaagtagactcat

SEQ ID NO: 2825073 - DNA, 25 bp, Homo sapien
ctacaactgacagaatggcatttat

SEQ ID NO: 2825074 - DNA, 25 bp, Homo sapien
tacaactgacagaatggcatttata

SEQ ID NO: 2825075 - DNA, 25 bp, Homo sapien
gatctgccacattcttccacagagc

SEQ ID NO: 2825076 - DNA, 25 bp, Homo sapien
ggatctgccacattcttccacagag

SEQ ID NO: 2825077 - DNA, 25 bp, Homo sapien
cacattcttccacagagcctgtttc

SEQ ID NO: 2825078 - DNA, 25 bp, Homo sapien
cttccacagagcctgtttccactga

SEQ ID NO: 2825079 - DNA, 25 bp, Homo sapien
acagcttcaggctgtacagtcccca

SEQ ID NO: 2825080 - DNA, 25 bp, Homo sapien
tcgctggtgctcattattgtagtat

SEQ ID NO: 2825081 - DNA, 25 bp, Homo sapien
cgctggtgctcattattgtagtatg

SEQ ID NO: 2825082 - DNA, 25 bp, Homo sapien
gtcgctggtgctcattattgtagta

SEQ ID NO: 2825083 - DNA, 25 bp, Homo sapien
ctggtgctcattattgtagtatgtt

SEQ ID NO: 2825084 - DNA, 25 bp, Homo sapien
agtcattgatgtagataataaaaaa

SEQ ID NO: 2825085 - DNA, 25 bp, Homo sapien
ttagtcattgatgtagataataaaa

SEQ ID NO: 2825086 - DNA, 25 bp, Homo sapien
tagtcattgatgtagataataaaaa

SEQ ID NO: 2825087 - DNA, 25 bp, Homo sapien
tgatgttacccacgcaatcttcttt

SEQ ID NO: 2825088 - DNA, 25 bp, Homo sapien
gttacccacgcaatcttctttcaat

SEQ ID NO: 2825089 - DNA, 25 bp, Homo sapien
gttgatgttacccacgcaatcttct

SEQ ID NO: 2825090 - DNA, 25 bp, Homo sapien
ttagttgatgttacccacgcaatct

SEQ ID NO: 2825091 - DNA, 25 bp, Homo sapien
gaccgttgataaccacattccacag

SEQ ID NO: 2825092 - DNA, 25 bp, Homo sapien
gaatggcaaatgtttttatcgagta

SEQ ID NO: 2825093 - DNA, 25 bp, Homo sapien
cattccacagccaaccatgaatggc

SEQ ID NO: 2825094 - DNA, 25 bp, Homo sapien
tgttttctgaacactaagagaccgt

SEQ ID NO: 2825095 - DNA, 25 bp, Homo sapien
gatctggggacccttcttgactcct

SEQ ID NO: 2825096 - DNA, 25 bp, Homo sapien
ctttgggttcctctgatctggggac

SEQ ID NO: 2825097 - DNA, 25 bp, Homo sapien
tatgctgcattcagagaatacttcc

SEQ ID NO: 2825098 - DNA, 25 bp, Homo sapien
ttaacttcagtacaccagatatgct

SEQ ID NO: 2825099 - DNA, 25 bp, Homo sapien
ggcagagaaggaacactacccacca

SEQ ID NO: 2825100 - DNA, 25 bp, Homo sapien
cactacccaccagtggaaagtcatg

SEQ ID NO: 2825101 - DNA, 25 bp, Homo sapien
gctgtgggggtcttacttcataata

SEQ ID NO: 2825102 - DNA, 25 bp, Homo sapien
aagtcatgtaattgctgtgggggtc

SEQ ID NO: 2825103 - DNA, 25 bp, Homo sapien
caatgtgctgttggatgttaggtga

SEQ ID NO: 2825104 - DNA, 25 bp, Homo sapien
tgttaggtgagacaggagtctgggt

SEQ ID NO: 2825105 - DNA, 25 bp, Homo sapien
agacaggagtctgggtgagcacagc

SEQ ID NO: 2825106 - DNA, 25 bp, Homo sapien
aaggcttatctgacctcccaatgtg

SEQ ID NO: 2825107 - DNA, 25 bp, Homo sapien
ggaagaccctttaggattgaggcat

SEQ ID NO: 2825108 - DNA, 25 bp, Homo sapien
caggaaatttctgcattaggtccat

SEQ ID NO: 2825109 - DNA, 25 bp, Homo sapien
tgctcaggaaatttctgcattaggt

SEQ ID NO: 2825110 - DNA, 25 bp, Homo sapien
ctttaggattgaggcatgctcagga

SEQ ID NO: 2825111 - DNA, 25 bp, Homo sapien
aacagtgtgtgggaagtaagttgtc

SEQ ID NO: 2825112 - DNA, 25 bp, Homo sapien
ggaagtaagttgtcagatcaggtct

SEQ ID NO: 2825113 - DNA, 25 bp, Homo sapien
aactatgaaagcctgtatgctacat

SEQ ID NO: 2825114 - DNA, 25 bp, Homo sapien
aaagcctgtatgctacatatctgca

SEQ ID NO: 2825115 - DNA, 25 bp, Homo sapien
tctgctccttgctttccacactcag

SEQ ID NO: 2825116 - DNA, 25 bp, Homo sapien
tgtatctgctccttgctttccacac

SEQ ID NO: 2825117 - DNA, 25 bp, Homo sapien
catgtatctgctccttgctttccac

SEQ ID NO: 2825118 - DNA, 25 bp, Homo sapien
gctccttgctttccacactcagctt

SEQ ID NO: 2825119 - DNA, 25 bp, Homo sapien
tgtttcatggaaatagaggtgcaga

SEQ ID NO: 2825120 - DNA, 25 bp, Homo sapien
gctggatcattattcctctacgagg

SEQ ID NO: 2825121 - DNA, 25 bp, Homo sapien
agcatcttctgcaatctctacggaa

SEQ ID NO: 2825122 - DNA, 25 bp, Homo sapien
tacggaagtgtgaacagtcaggact

SEQ ID NO: 2825123 - DNA, 25 bp, Homo sapien
ttccttaaagagaagttcattattc

SEQ ID NO: 2825124 - DNA, 25 bp, Homo sapien
caaagtcttggagtacatggtgtac

SEQ ID NO: 2825125 - DNA, 25 bp, Homo sapien
tggtgtacttcaaactgtagggtgc

SEQ ID NO: 2825126 - DNA, 25 bp, Homo sapien
tgtagggtgctgaatgttccgctgc

SEQ ID NO: 2825127 - DNA, 25 bp, Homo sapien
caaacagtgtcctgatctccaaagt

SEQ ID NO: 2825128 - DNA, 25 bp, Homo sapien
cttcagggtatgtaagaggagactt

SEQ ID NO: 2825129 - DNA, 25 bp, Homo sapien
tcagggtatgtaagaggagacttga

SEQ ID NO: 2825130 - DNA, 25 bp, Homo sapien
ttcagggtatgtaagaggagacttg

SEQ ID NO: 2825131 - DNA, 25 bp, Homo sapien
tgctttcctatggagccaaggctgg

SEQ ID NO: 2825132 - DNA, 25 bp, Homo sapien
caggatatcctggtgtcccatgact

SEQ ID NO: 2825133 - DNA, 25 bp, Homo sapien
caccataggttattctgaggcccaa

SEQ ID NO: 2825134 - DNA, 25 bp, Homo sapien
tatcgactagacaaaaagaaggaca

SEQ ID NO: 2825135 - DNA, 25 bp, Homo sapien
gtcattgtgatattgtgctcctgaa

SEQ ID NO: 2825136 - DNA, 25 bp, Homo sapien
ggtcattgtgatattgtgctcctga

SEQ ID NO: 2825137 - DNA, 25 bp, Homo sapien
tcattgtgatattgtgctcctgaat

SEQ ID NO: 2825138 - DNA, 25 bp, Homo sapien
cattgtgatattgtgctcctgaatt

SEQ ID NO: 2825139 - DNA, 25 bp, Homo sapien
ctccaattggtaaaatcccctcctg

SEQ ID NO: 2825140 - DNA, 25 bp, Homo sapien
tcccaggctcagtcttagagtatgc

SEQ ID NO: 2825141 - DNA, 25 bp, Homo sapien
gcctatcctttctccaattggtaaa

SEQ ID NO: 2825142 - DNA, 25 bp, Homo sapien
tgttttcactcattgttcttctgcc

SEQ ID NO: 2825143 - DNA, 25 bp, Homo sapien
atatctggaaagagatctggccaac

SEQ ID NO: 2825144 - DNA, 25 bp, Homo sapien
aaatatctggaaagagatctggcca

SEQ ID NO: 2825145 - DNA, 25 bp, Homo sapien
aatatctggaaagagatctggccaa

SEQ ID NO: 2825146 - DNA, 25 bp, Homo sapien
ccaggagtagagtgctgtaagtgac

SEQ ID NO: 2825147 - DNA, 25 bp, Homo sapien
ggctgaatctttactcgcagcacaa

SEQ ID NO: 2825148 - DNA, 25 bp, Homo sapien
taagtgacatataatgggctgaatc

SEQ ID NO: 2825149 - DNA, 25 bp, Homo sapien
cattcgtccttgaaatgacagcagc

SEQ ID NO: 2825150 - DNA, 25 bp, Homo sapien
ggaattctgtgctaacagtgttagc

SEQ ID NO: 2825151 - DNA, 25 bp, Homo sapien
catatttctcaaatcgtaggaattc

SEQ ID NO: 2825152 - DNA, 25 bp, Homo sapien
agtgttagccagcaacatgcaaagc

SEQ ID NO: 2825153 - DNA, 25 bp, Homo sapien
gacggcaagtggaacagcagttttg

SEQ ID NO: 2825154 - DNA, 25 bp, Homo sapien
tttagattcacttttcaagctctct

SEQ ID NO: 2825155 - DNA, 25 bp, Homo sapien
gattcacttttcaagctctctgaat

SEQ ID NO: 2825156 - DNA, 25 bp, Homo sapien
ttgctgctttgatcccatgcctatt

SEQ ID NO: 2825157 - DNA, 25 bp, Homo sapien
gctttgatcccatgcctatttcttt

SEQ ID NO: 2825158 - DNA, 25 bp, Homo sapien
ttacccaaagttgtaactttgtgca

SEQ ID NO: 2825159 - DNA, 25 bp, Homo sapien
ttggctttacaggtaatgcctgaaa

SEQ ID NO: 2825160 - DNA, 25 bp, Homo sapien
tacaggtaatgcctgaaagttgagg

SEQ ID NO: 2825161 - DNA, 25 bp, Homo sapien
taatgcctgaaagttgaggtatctg

SEQ ID NO: 2825162 - DNA, 25 bp, Homo sapien
ctgaaagttgaggtatctggtttcc

SEQ ID NO: 2825163 - DNA, 25 bp, Homo sapien
tggtcttagaattcgtgacttgtag

SEQ ID NO: 2825164 - DNA, 25 bp, Homo sapien
cttgtagacaagtttttgatctacc

SEQ ID NO: 2825165 - DNA, 25 bp, Homo sapien
ttgatctaccatggtaataagtggt

SEQ ID NO: 2825166 - DNA, 25 bp, Homo sapien
tctaccatggtaataagtggtttac

SEQ ID NO: 2825167 - DNA, 25 bp, Homo sapien
gaagaaaggtcaatctccaaaccac

SEQ ID NO: 2825168 - DNA, 25 bp, Homo sapien
tggaagaaaggtcaatctccaaacc

SEQ ID NO: 2825169 - DNA, 25 bp, Homo sapien
ccatgctgcgtgcaaagcttttgcg

SEQ ID NO: 2825170 - DNA, 25 bp, Homo sapien
ggaatgaccttccaggagaaaactc

SEQ ID NO: 2825171 - DNA, 25 bp, Homo sapien
tttgtttagaacaagcctctgtgga

SEQ ID NO: 2825172 - DNA, 25 bp, Homo sapien
gaatagtacccataaccatgctgcg

SEQ ID NO: 2825173 - DNA, 25 bp, Homo sapien
ctagtacatcaaatccgatgaagga

SEQ ID NO: 2825174 - DNA, 25 bp, Homo sapien
cagagcactgcagtattcactacat

SEQ ID NO: 2825175 - DNA, 25 bp, Homo sapien
tacatcaaatccgatgaaggatctg

SEQ ID NO: 2825176 - DNA, 25 bp, Homo sapien
tcaaatccgatgaaggatctgggca

SEQ ID NO: 2825177 - DNA, 25 bp, Homo sapien
aaaagccttgttccctcctacagat

SEQ ID NO: 2825178 - DNA, 25 bp, Homo sapien
cagaggataagcagtagttgagcaa

SEQ ID NO: 2825179 - DNA, 25 bp, Homo sapien
catttggagacgatatcccagagaa

SEQ ID NO: 2825180 - DNA, 25 bp, Homo sapien
tgagctgaatcgatccacaaaggac

SEQ ID NO: 2825181 - DNA, 25 bp, Homo sapien
tcttcaccttgcactccagcaacac

SEQ ID NO: 2825182 - DNA, 25 bp, Homo sapien
tcaccttgcactccagcaacaccat

SEQ ID NO: 2825183 - DNA, 25 bp, Homo sapien
catcttcaccttgcactccagcaac

SEQ ID NO: 2825184 - DNA, 25 bp, Homo sapien
tgtctttcatcttcaccttgcactc

SEQ ID NO: 2825185 - DNA, 25 bp, Homo sapien
tccctgatgggaaagacattgtctt

SEQ ID NO: 2825186 - DNA, 25 bp, Homo sapien
cattgtctttcaatgcaacatgtac

SEQ ID NO: 2825187 - DNA, 25 bp, Homo sapien
ctgatgggaaagacattgtctttca

SEQ ID NO: 2825188 - DNA, 25 bp, Homo sapien
aaaaatccctgatgggaaagacatt

SEQ ID NO: 2825189 - DNA, 25 bp, Homo sapien
gacgtctcttatgtttctgattgct

SEQ ID NO: 2825190 - DNA, 25 bp, Homo sapien
tattatcatcaatcatagacgctgt

SEQ ID NO: 2825191 - DNA, 25 bp, Homo sapien
ctgattcaattagatgtagagaaaa

SEQ ID NO: 2825192 - DNA, 25 bp, Homo sapien
cgcacgactcgtataattttttggg

SEQ ID NO: 2825193 - DNA, 25 bp, Homo sapien
tgacagatcatcaacccagtggtca

SEQ ID NO: 2825194 - DNA, 25 bp, Homo sapien
gacagatcatcaacccagtggtcat

SEQ ID NO: 2825195 - DNA, 25 bp, Homo sapien
gttctacccatggatgacagatcat

SEQ ID NO: 2825196 - DNA, 25 bp, Homo sapien
ctacccatggatgacagatcatcaa

SEQ ID NO: 2825197 - DNA, 25 bp, Homo sapien
tgttcagagttcctgctaatctctg

SEQ ID NO: 2825198 - DNA, 25 bp, Homo sapien
cctctttgttcagagttcctgctaa

SEQ ID NO: 2825199 - DNA, 25 bp, Homo sapien
agagttcctgctaatctctgaatgg

SEQ ID NO: 2825200 - DNA, 25 bp, Homo sapien
cctgctaatctctgaatggcatcaa

SEQ ID NO: 2825201 - DNA, 25 bp, Homo sapien
cacacactgggacatattggagagt

SEQ ID NO: 2825202 - DNA, 25 bp, Homo sapien
gatgggtgcataaattcgtttagcc

SEQ ID NO: 2825203 - DNA, 25 bp, Homo sapien
tagaggccaatatccttagagaact

SEQ ID NO: 2825204 - DNA, 25 bp, Homo sapien
ggaatcatcctaaatgcctcagtga

SEQ ID NO: 2825205 - DNA, 25 bp, Homo sapien
atcttcaatcaaaatatgtgcatct

SEQ ID NO: 2825206 - DNA, 25 bp, Homo sapien
atattagcaattgcaatatcttcaa

SEQ ID NO: 2825207 - DNA, 25 bp, Homo sapien
tcttcaatcaaaatatgtgcatctt

SEQ ID NO: 2825208 - DNA, 25 bp, Homo sapien
atccctagagcactgggttcctgcc

SEQ ID NO: 2825209 - DNA, 25 bp, Homo sapien
ttctggtaaaaatccctagagcact

SEQ ID NO: 2825210 - DNA, 25 bp, Homo sapien
tttctggtaaaaatccctagagcac

SEQ ID NO: 2825211 - DNA, 25 bp, Homo sapien
ttttctggtaaaaatccctagagca

SEQ ID NO: 2825212 - DNA, 25 bp, Homo sapien
gaaatctaggtggtacatctccacg

SEQ ID NO: 2825213 - DNA, 25 bp, Homo sapien
tgatgttgctctacagctcaggcct

SEQ ID NO: 2825214 - DNA, 25 bp, Homo sapien
gatgtctttgggatgaacgcctatg

SEQ ID NO: 2825215 - DNA, 25 bp, Homo sapien
gattctgctgactcacgtagggcgt

SEQ ID NO: 2825216 - DNA, 25 bp, Homo sapien
aagctgcttattaggaggaatgtcc

SEQ ID NO: 2825217 - DNA, 25 bp, Homo sapien
tctgatctgtgtcgcgtctctctct

SEQ ID NO: 2825218 - DNA, 25 bp, Homo sapien
gcattcgcttgctcattctctctgt

SEQ ID NO: 2825219 - DNA, 25 bp, Homo sapien
aggaatgtcctctgcgccctgcatt

SEQ ID NO: 2825220 - DNA, 25 bp, Homo sapien
aggtcatatatgatctcagaatgat

SEQ ID NO: 2825221 - DNA, 25 bp, Homo sapien
ctaggtcatatatgatctcagaatg

SEQ ID NO: 2825222 - DNA, 25 bp, Homo sapien
ggtcatatatgatctcagaatgatt

SEQ ID NO: 2825223 - DNA, 25 bp, Homo sapien
taggtcatatatgatctcagaatga

SEQ ID NO: 2825224 - DNA, 25 bp, Homo sapien
ctgaatttgcagcaataccataaac

SEQ ID NO: 2825225 - DNA, 25 bp, Homo sapien
tttgcagcaataccataaacaccat

SEQ ID NO: 2825226 - DNA, 25 bp, Homo sapien
gaatttgcagcaataccataaacac

SEQ ID NO: 2825227 - DNA, 25 bp, Homo sapien
aatttgcagcaataccataaacacc

SEQ ID NO: 2825228 - DNA, 25 bp, Homo sapien
cacggtgcttatatctggtgagagc

SEQ ID NO: 2825229 - DNA, 25 bp, Homo sapien
cttatatctggtgagagctttcatg

SEQ ID NO: 2825230 - DNA, 25 bp, Homo sapien
aaaagcacggtgcttatatctggtg

SEQ ID NO: 2825231 - DNA, 25 bp, Homo sapien
agaattccaaaagcacggtgcttat

SEQ ID NO: 2825232 - DNA, 25 bp, Homo sapien
gtcactttcatgtaccgcaatcgga

SEQ ID NO: 2825233 - DNA, 25 bp, Homo sapien
taccgcaatcggatgtagatttggt

SEQ ID NO: 2825234 - DNA, 25 bp, Homo sapien
tttcatgtaccgcaatcggatgtag

SEQ ID NO: 2825235 - DNA, 25 bp, Homo sapien
cggatgtagatttggtcgtttcaga

SEQ ID NO: 2825236 - DNA, 25 bp, Homo sapien
tggcaacacactcgaatcagtagtc

SEQ ID NO: 2825237 - DNA, 25 bp, Homo sapien
gaatcagtagtcttttgaagtctta

SEQ ID NO: 2825238 - DNA, 25 bp, Homo sapien
catgttgcatcacctcaagttgtaa

SEQ ID NO: 2825239 - DNA, 25 bp, Homo sapien
gattctgctagaagtaaacaaccaa

SEQ ID NO: 2825240 - DNA, 25 bp, Homo sapien
gcctgctttgaagtagtctgtcaca

SEQ ID NO: 2825241 - DNA, 25 bp, Homo sapien
cacatactgactgggatgacatgtc

SEQ ID NO: 2825242 - DNA, 25 bp, Homo sapien
atttaaaaagagcagtgagtcgccc

SEQ ID NO: 2825243 - DNA, 25 bp, Homo sapien
catctactgtcttgagactgcctgc

SEQ ID NO: 2825244 - DNA, 25 bp, Homo sapien
tgccattccaataaatcccccaagg

SEQ ID NO: 2825245 - DNA, 25 bp, Homo sapien
ctgtgccattccaataaatccccca

SEQ ID NO: 2825246 - DNA, 25 bp, Homo sapien
gtgccattccaataaatcccccaag

SEQ ID NO: 2825247 - DNA, 25 bp, Homo sapien
gccattccaataaatcccccaaggc

SEQ ID NO: 2825248 - DNA, 25 bp, Homo sapien
gttacagatctgtaggcaaagaaat

SEQ ID NO: 2825249 - DNA, 25 bp, Homo sapien
gaaatgccttgcatcttcaaggatt

SEQ ID NO: 2825250 - DNA, 25 bp, Homo sapien
caaagaaatgccttgcatcttcaag

SEQ ID NO: 2825251 - DNA, 25 bp, Homo sapien
agttacagatctgtaggcaaagaaa

SEQ ID NO: 2825252 - DNA, 25 bp, Homo sapien
ggtcattgtgacctaaatgcaggat

SEQ ID NO: 2825253 - DNA, 25 bp, Homo sapien
agacagccaggggtcattgtgacct

SEQ ID NO: 2825254 - DNA, 25 bp, Homo sapien
aaaggatcgttcggggaagcttgct

SEQ ID NO: 2825255 - DNA, 25 bp, Homo sapien
caggggtcattgtgacctaaatgca

SEQ ID NO: 2825256 - DNA, 25 bp, Homo sapien
ttgtgggggctacggcaactgcact

SEQ ID NO: 2825257 - DNA, 25 bp, Homo sapien
atccccccttcatctctggctgttt

SEQ ID NO: 2825258 - DNA, 25 bp, Homo sapien
tttccaccttgtgggggctacggca

SEQ ID NO: 2825259 - DNA, 25 bp, Homo sapien
tcacaggcagattattgcttccttg

SEQ ID NO: 2825260 - DNA, 25 bp, Homo sapien
tgcattaatgtgttgcagttgcaga

SEQ ID NO: 2825261 - DNA, 25 bp, Homo sapien
tgtgttgcagttgcagaaaaaaaga

SEQ ID NO: 2825262 - DNA, 25 bp, Homo sapien
ctcctaaatggttccaaataatctt

SEQ ID NO: 2825263 - DNA, 25 bp, Homo sapien
ttaaggtatcagtcatctgaattac

SEQ ID NO: 2825264 - DNA, 25 bp, Homo sapien
cagtagttatagttgggcctggagt

SEQ ID NO: 2825265 - DNA, 25 bp, Homo sapien
tggctgctgactagcaattgcatcg

SEQ ID NO: 2825266 - DNA, 25 bp, Homo sapien
cagcctgcttagggctactgctggg

SEQ ID NO: 2825267 - DNA, 25 bp, Homo sapien
gcatcgtgagtttgttccctggagg

SEQ ID NO: 2825268 - DNA, 25 bp, Homo sapien
gatatttgccaatatactctgtgct

SEQ ID NO: 2825269 - DNA, 25 bp, Homo sapien
ttgccaatatactctgtgctttctt

SEQ ID NO: 2825270 - DNA, 25 bp, Homo sapien
tatttgccaatatactctgtgcttt

SEQ ID NO: 2825271 - DNA, 25 bp, Homo sapien
aggatatttgccaatatactctgtg

SEQ ID NO: 2825272 - DNA, 25 bp, Homo sapien
gagcccatgtcgacttttacgttga

SEQ ID NO: 2825273 - DNA, 25 bp, Homo sapien
gctcaaggccattatttctctgctt

SEQ ID NO: 2825274 - DNA, 25 bp, Homo sapien
tacgttgataatttccgtgatcaca

SEQ ID NO: 2825275 - DNA, 25 bp, Homo sapien
tttccgtgatcacaatccttcagct

SEQ ID NO: 2825276 - DNA, 25 bp, Homo sapien
ttcaaaaagaactggttctgccatg

SEQ ID NO: 2825277 - DNA, 25 bp, Homo sapien
ctaaatgtgcagaagacattcagca

SEQ ID NO: 2825278 - DNA, 25 bp, Homo sapien
caaaaagaactggttctgccatgtt

SEQ ID NO: 2825279 - DNA, 25 bp, Homo sapien
gtgcagaagacattcagcactagaa

SEQ ID NO: 2825280 - DNA, 25 bp, Homo sapien
tcccactcaggcctaacatgtctat

SEQ ID NO: 2825281 - DNA, 25 bp, Homo sapien
caggcctaacatgtctattggatat

SEQ ID NO: 2825282 - DNA, 25 bp, Homo sapien
gatatagctgcagtttcaagattca

SEQ ID NO: 2825283 - DNA, 25 bp, Homo sapien
aggtccactccactttccacccatc

SEQ ID NO: 2825284 - DNA, 25 bp, Homo sapien
tacaatcttgatttgggctcatgga

SEQ ID NO: 2825285 - DNA, 25 bp, Homo sapien
taatccatcggccattgtgatcaat

SEQ ID NO: 2825286 - DNA, 25 bp, Homo sapien
ccccagggtgaagttaaaacatctg

SEQ ID NO: 2825287 - DNA, 25 bp, Homo sapien
aatatgagaaggaacctgctgaagc

SEQ ID NO: 2825288 - DNA, 25 bp, Homo sapien
taattcaccatcagtgaagtagcag

SEQ ID NO: 2825289 - DNA, 25 bp, Homo sapien
tgaagtagcagtttttaaggcagta

SEQ ID NO: 2825290 - DNA, 25 bp, Homo sapien
cccataatagtcttgtaattcacca

SEQ ID NO: 2825291 - DNA, 25 bp, Homo sapien
tataatgccccccataatagtcttg

SEQ ID NO: 2825292 - DNA, 25 bp, Homo sapien
cagagctactattaggcattaactc

SEQ ID NO: 2825293 - DNA, 25 bp, Homo sapien
aattgaactggcttattggctaggc

SEQ ID NO: 2825294 - DNA, 25 bp, Homo sapien
cagtgacttggctgactttctgcag

SEQ ID NO: 2825295 - DNA, 25 bp, Homo sapien
ggcagtctgtgaattggctctcagt

SEQ ID NO: 2825296 - DNA, 25 bp, Homo sapien
ggtcatttacaatagaaagatccat

SEQ ID NO: 2825297 - DNA, 25 bp, Homo sapien
ctggtcatttacaatagaaagatcc

SEQ ID NO: 2825298 - DNA, 25 bp, Homo sapien
tggtcatttacaatagaaagatcca

SEQ ID NO: 2825299 - DNA, 25 bp, Homo sapien
ctgactgtgatacccggtataacat

SEQ ID NO: 2825300 - DNA, 25 bp, Homo sapien
ccaccgggaaagattcctcaccaag

SEQ ID NO: 2825301 - DNA, 25 bp, Homo sapien
ggtccacttacacagtgaacctgtc

SEQ ID NO: 2825302 - DNA, 25 bp, Homo sapien
gaatgggaataagccacagtaacag

SEQ ID NO: 2825303 - DNA, 25 bp, Homo sapien
gactgtgacacttttcgatgtcggg

SEQ ID NO: 2825304 - DNA, 25 bp, Homo sapien
cagataatttccttgcgataaagca

SEQ ID NO: 2825305 - DNA, 25 bp, Homo sapien
gatccaagcccgatcccaaggtaga

SEQ ID NO: 2825306 - DNA, 25 bp, Homo sapien
ggtagagctttctagcaaccacaca

SEQ ID NO: 2825307 - DNA, 25 bp, Homo sapien
caatatcgccacttaattgtgttct

SEQ ID NO: 2825308 - DNA, 25 bp, Homo sapien
ccttggtaagtgttgggctggcatt

SEQ ID NO: 2825309 - DNA, 25 bp, Homo sapien
ttttgtgctgccagcacgactcagc

SEQ ID NO: 2825310 - DNA, 25 bp, Homo sapien
ttttctctccacaatatcgccactt

SEQ ID NO: 2825311 - DNA, 25 bp, Homo sapien
gtcgaatatcagacttcaagtcatc

SEQ ID NO: 2825312 - DNA, 25 bp, Homo sapien
ttgccaaagtcgaatatcagacttc

SEQ ID NO: 2825313 - DNA, 25 bp, Homo sapien
aaacctcagtgggtgtaatactgcc

SEQ ID NO: 2825314 - DNA, 25 bp, Homo sapien
cagttagcaagaatcataccttgga

SEQ ID NO: 2825315 - DNA, 25 bp, Homo sapien
catctctcttggattggacacactt

SEQ ID NO: 2825316 - DNA, 25 bp, Homo sapien
caagccttgtagtgcataagagata

SEQ ID NO: 2825317 - DNA, 25 bp, Homo sapien
gctgtgctgtacaaagtcctgcttt

SEQ ID NO: 2825318 - DNA, 25 bp, Homo sapien
aaacttagatatgcgatctgggcca

SEQ ID NO: 2825319 - DNA, 25 bp, Homo sapien
taggccttctctctatagagtagcc

SEQ ID NO: 2825320 - DNA, 25 bp, Homo sapien
agagtagccgttgaagcgccactcc

SEQ ID NO: 2825321 - DNA, 25 bp, Homo sapien
tatagagtagccgttgaagcgccac

SEQ ID NO: 2825322 - DNA, 25 bp, Homo sapien
tcacataggccttctctctatagag

SEQ ID NO: 2825323 - DNA, 25 bp, Homo sapien
cttaatgtccctacttatttcacct

SEQ ID NO: 2825324 - DNA, 25 bp, Homo sapien
gcttggagcctgaagcgggagggct

SEQ ID NO: 2825325 - DNA, 25 bp, Homo sapien
cctggccagagtattggctccggtg

SEQ ID NO: 2825326 - DNA, 25 bp, Homo sapien
tccggtgaccatctgggcttcccag

SEQ ID NO: 2825327 - DNA, 25 bp, Homo sapien
tcccagggagaagccgcataagggg

SEQ ID NO: 2825328 - DNA, 25 bp, Homo sapien
catcatttcctaggatgcctgtgtt

SEQ ID NO: 2825329 - DNA, 25 bp, Homo sapien
catttcctaggatgcctgtgttgat

SEQ ID NO: 2825330 - DNA, 25 bp, Homo sapien
tcctaggatgcctgtgttgatcatt

SEQ ID NO: 2825331 - DNA, 25 bp, Homo sapien
ttgcatcatttcctaggatgcctgt

SEQ ID NO: 2825332 - DNA, 25 bp, Homo sapien
ctgcatgggccactggtgtagttga

SEQ ID NO: 2825333 - DNA, 25 bp, Homo sapien
gcatgggccactggtgtagttgatt

SEQ ID NO: 2825334 - DNA, 25 bp, Homo sapien
ttccatgcacttgtgtatattccag

SEQ ID NO: 2825335 - DNA, 25 bp, Homo sapien
ggtgtagttgattttccatgcactt

SEQ ID NO: 2825336 - DNA, 25 bp, Homo sapien
tgtctccttcctttttactagctaa

SEQ ID NO: 2825337 - DNA, 25 bp, Homo sapien
ctctgtctccttcctttttactagc

SEQ ID NO: 2825338 - DNA, 25 bp, Homo sapien
tcctttttactagctaaggccttca

SEQ ID NO: 2825339 - DNA, 25 bp, Homo sapien
cctttttactagctaaggccttcat

SEQ ID NO: 2825340 - DNA, 25 bp, Homo sapien
gattataagggaagttggttgaagc

SEQ ID NO: 2825341 - DNA, 25 bp, Homo sapien
gggcaatttactcattatcttcctg

SEQ ID NO: 2825342 - DNA, 25 bp, Homo sapien
tcagggaacttctaataagaactga

SEQ ID NO: 2825343 - DNA, 25 bp, Homo sapien
gcagacaggtcattgatatagagta

SEQ ID NO: 2825344 - DNA, 25 bp, Homo sapien
gacattgtctttatgtcattcccat

SEQ ID NO: 2825345 - DNA, 25 bp, Homo sapien
tcctcaaaaacgtggatacccaatc

SEQ ID NO: 2825346 - DNA, 25 bp, Homo sapien
ccattatcttcaggtgacattgtct

SEQ ID NO: 2825347 - DNA, 25 bp, Homo sapien
tggatacccaatccctgctgttcag

SEQ ID NO: 2825348 - DNA, 25 bp, Homo sapien
gaggatgaatctgtgagtacagctc

SEQ ID NO: 2825349 - DNA, 25 bp, Homo sapien
tccagcaagttatgaggatgaatct

SEQ ID NO: 2825350 - DNA, 25 bp, Homo sapien
ctgattctgcacctggattccagca

SEQ ID NO: 2825351 - DNA, 25 bp, Homo sapien
tgcacctggattccagcaagttatg

SEQ ID NO: 2825352 - DNA, 25 bp, Homo sapien
cattcttgttaatactgttgtagac

SEQ ID NO: 2825353 - DNA, 25 bp, Homo sapien
ttctccattcttgttaatactgttg

SEQ ID NO: 2825354 - DNA, 25 bp, Homo sapien
cttgttaatactgttgtagaccaca

SEQ ID NO: 2825355 - DNA, 25 bp, Homo sapien
tccattcttgttaatactgttgtag

SEQ ID NO: 2825356 - DNA, 25 bp, Homo sapien
atttcataggatttttagctgcatt

SEQ ID NO: 2825357 - DNA, 25 bp, Homo sapien
agtttcctcttccaaatttgccagc

SEQ ID NO: 2825358 - DNA, 25 bp, Homo sapien
cataggatttttagctgcattcggg

SEQ ID NO: 2825359 - DNA, 25 bp, Homo sapien
agctgcattcggggtatattcagtt

SEQ ID NO: 2825360 - DNA, 25 bp, Homo sapien
tatgagccagtaatgtcacttgctg

SEQ ID NO: 2825361 - DNA, 25 bp, Homo sapien
catcagcaatggagctgttgcatgg

SEQ ID NO: 2825362 - DNA, 25 bp, Homo sapien
tgcctctgcaactctataggatgaa

SEQ ID NO: 2825363 - DNA, 25 bp, Homo sapien
gtgactcagtagtgatttaacaacc

SEQ ID NO: 2825364 - DNA, 25 bp, Homo sapien
gcttttactccatacataaggtgcc

SEQ ID NO: 2825365 - DNA, 25 bp, Homo sapien
tactccatacataaggtgccttcat

SEQ ID NO: 2825366 - DNA, 25 bp, Homo sapien
tttactccatacataaggtgccttc

SEQ ID NO: 2825367 - DNA, 25 bp, Homo sapien
tgagcttttactccatacataaggt

SEQ ID NO: 2825368 - DNA, 25 bp, Homo sapien
cacatcctgcttgagatccaacccc

SEQ ID NO: 2825369 - DNA, 25 bp, Homo sapien
ccacatcctgcttgagatccaaccc

SEQ ID NO: 2825370 - DNA, 25 bp, Homo sapien
ctgcagcaggatgatgcatttcctc

SEQ ID NO: 2825371 - DNA, 25 bp, Homo sapien
agggttgagactcctcagtaaacca

SEQ ID NO: 2825372 - DNA, 25 bp, Homo sapien
ttatgcaaagggttgagactcctca

SEQ ID NO: 2825373 - DNA, 25 bp, Homo sapien
tatgcaaagggttgagactcctcag

SEQ ID NO: 2825374 - DNA, 25 bp, Homo sapien
tgcaaagggttgagactcctcagta

SEQ ID NO: 2825375 - DNA, 25 bp, Homo sapien
gggttatcaccactccaaataccac

SEQ ID NO: 2825376 - DNA, 25 bp, Homo sapien
ggttatcaccactccaaataccacc

SEQ ID NO: 2825377 - DNA, 25 bp, Homo sapien
ggggttatcaccactccaaatacca

SEQ ID NO: 2825378 - DNA, 25 bp, Homo sapien
gcagttagtttgttgtaatcccatt

SEQ ID NO: 2825379 - DNA, 25 bp, Homo sapien
cagttagtttgttgtaatcccattt

SEQ ID NO: 2825380 - DNA, 25 bp, Homo sapien
tgcagttagtttgttgtaatcccat

SEQ ID NO: 2825381 - DNA, 25 bp, Homo sapien
agttagtttgttgtaatcccatttg

SEQ ID NO: 2825382 - DNA, 25 bp, Homo sapien
gacagtggcttcagatgcatggcct

SEQ ID NO: 2825383 - DNA, 25 bp, Homo sapien
tgagaggctgacaacccagtagagc

SEQ ID NO: 2825384 - DNA, 25 bp, Homo sapien
tccaggccgaggacgactgacttgt

SEQ ID NO: 2825385 - DNA, 25 bp, Homo sapien
ggtcattgagggcttcagctacctt

SEQ ID NO: 2825386 - DNA, 25 bp, Homo sapien
ttgtgtacacaagcgatggaggaag

SEQ ID NO: 2825387 - DNA, 25 bp, Homo sapien
catgtctttgtgtacacaagcgatg

SEQ ID NO: 2825388 - DNA, 25 bp, Homo sapien
gaagggtcatctcaattttggagga

SEQ ID NO: 2825389 - DNA, 25 bp, Homo sapien
tcattgcaatgagggctgacaaagg

SEQ ID NO: 2825390 - DNA, 25 bp, Homo sapien
atcagaatcacttcggataccttta

SEQ ID NO: 2825391 - DNA, 25 bp, Homo sapien
gaatcacttcggatacctttaagaa

SEQ ID NO: 2825392 - DNA, 25 bp, Homo sapien
atcacttcggatacctttaagaaag

SEQ ID NO: 2825393 - DNA, 25 bp, Homo sapien
agaatcacttcggatacctttaaga

SEQ ID NO: 2825394 - DNA, 25 bp, Homo sapien
tggaatatctgatgtgtagtcattg

SEQ ID NO: 2825395 - DNA, 25 bp, Homo sapien
ctgtggaatatctgatgtgtagtca

SEQ ID NO: 2825396 - DNA, 25 bp, Homo sapien
ggaatatctgatgtgtagtcattgt

SEQ ID NO: 2825397 - DNA, 25 bp, Homo sapien
tgtggaatatctgatgtgtagtcat

SEQ ID NO: 2825398 - DNA, 25 bp, Homo sapien
tgatcagctttggtattggaattgc

SEQ ID NO: 2825399 - DNA, 25 bp, Homo sapien
tctctggacagatgatcagctttgg

SEQ ID NO: 2825400 - DNA, 25 bp, Homo sapien
gaattgctctgcaaggtatggatcc

SEQ ID NO: 2825401 - DNA, 25 bp, Homo sapien
gatttggtctgtgagctttatgacc

SEQ ID NO: 2825402 - DNA, 25 bp, Homo sapien
tgatttacccttattaaccattgtc

SEQ ID NO: 2825403 - DNA, 25 bp, Homo sapien
cttgatttacccttattaaccattg

SEQ ID NO: 2825404 - DNA, 25 bp, Homo sapien
tagactaccactaacaatcgttgcc

SEQ ID NO: 2825405 - DNA, 25 bp, Homo sapien
aatcgttgccgatggtggttttcta

SEQ ID NO: 2825406 - DNA, 25 bp, Homo sapien
cattttctgtatggcccgtgatatt

SEQ ID NO: 2825407 - DNA, 25 bp, Homo sapien
gatattttttagactaccactaaca

SEQ ID NO: 2825408 - DNA, 25 bp, Homo sapien
ttatcactcgaaatgtaaacagcac

SEQ ID NO: 2825409 - DNA, 25 bp, Homo sapien
taaacagcacctcattcaagatagt

SEQ ID NO: 2825410 - DNA, 25 bp, Homo sapien
tttcttccagatcgtagacactgcc

SEQ ID NO: 2825411 - DNA, 25 bp, Homo sapien
ttctaagtctggtgaaaactgtgtc

SEQ ID NO: 2825412 - DNA, 25 bp, Homo sapien
tgaatgatataagtaggaaccagcc

SEQ ID NO: 2825413 - DNA, 25 bp, Homo sapien
caagggatgttataaggcagtgaca

SEQ ID NO: 2825414 - DNA, 25 bp, Homo sapien
caaaaccagcaagctagggagcctt

SEQ ID NO: 2825415 - DNA, 25 bp, Homo sapien
gaatcttcgtaatcacaaaaccagc

SEQ ID NO: 2825416 - DNA, 25 bp, Homo sapien
taacttcccattatgtcatcataca

SEQ ID NO: 2825417 - DNA, 25 bp, Homo sapien
ctaacaggttatagaatttctcata

SEQ ID NO: 2825418 - DNA, 25 bp, Homo sapien
agttgtgaggcaaatcctaacttcc

SEQ ID NO: 2825419 - DNA, 25 bp, Homo sapien
catacataatatttgttcttgataa

SEQ ID NO: 2825420 - DNA, 25 bp, Homo sapien
tttacagaaacgactaccacattat

SEQ ID NO: 2825421 - DNA, 25 bp, Homo sapien
ctttttacagaaacgactaccacat

SEQ ID NO: 2825422 - DNA, 25 bp, Homo sapien
tgctttttacagaaacgactaccac

SEQ ID NO: 2825423 - DNA, 25 bp, Homo sapien
ttttacagaaacgactaccacatta

SEQ ID NO: 2825424 - DNA, 25 bp, Homo sapien
tgaagtagatgtcaggaatccgcag

SEQ ID NO: 2825425 - DNA, 25 bp, Homo sapien
aatccgcagttgaagatcaacagac

SEQ ID NO: 2825426 - DNA, 25 bp, Homo sapien
caacagacttcaagagtagagtgtg

SEQ ID NO: 2825427 - DNA, 25 bp, Homo sapien
ggaatggttccagatgaatcaatga

SEQ ID NO: 2825428 - DNA, 25 bp, Homo sapien
agggccgtgttccacgggatggaga

SEQ ID NO: 2825429 - DNA, 25 bp, Homo sapien
tgagggccgtgttccacgggatgga

SEQ ID NO: 2825430 - DNA, 25 bp, Homo sapien
gttgagggccgtgttccacgggatg

SEQ ID NO: 2825431 - DNA, 25 bp, Homo sapien
ggccgtgttccacgggatggagatg

SEQ ID NO: 2825432 - DNA, 25 bp, Homo sapien
atttctctgtaagggaatgcagctt

SEQ ID NO: 2825433 - DNA, 25 bp, Homo sapien
taatttctctgtaagggaatgcagc

SEQ ID NO: 2825434 - DNA, 25 bp, Homo sapien
cataatttctctgtaagggaatgca

SEQ ID NO: 2825435 - DNA, 25 bp, Homo sapien
tcataatttctctgtaagggaatgc

SEQ ID NO: 2825436 - DNA, 25 bp, Homo sapien
cagcctccaactgaatggagctact

SEQ ID NO: 2825437 - DNA, 25 bp, Homo sapien
tccaactgaatggagctactcacaa

SEQ ID NO: 2825438 - DNA, 25 bp, Homo sapien
caactgaatggagctactcacaact

SEQ ID NO: 2825439 - DNA, 25 bp, Homo sapien
tgaatggagctactcacaacttcat

SEQ ID NO: 2825440 - DNA, 25 bp, Homo sapien
cacaagtctttttagtctgagctag

SEQ ID NO: 2825441 - DNA, 25 bp, Homo sapien
gaagccaagtgctaatctccatgag

SEQ ID NO: 2825442 - DNA, 25 bp, Homo sapien
caaggtcagccatgcttaagtgtga

SEQ ID NO: 2825443 - DNA, 25 bp, Homo sapien
tcagataagtatgtgggtctctaaa

SEQ ID NO: 2825444 - DNA, 25 bp, Homo sapien
tgtccacaccatatggctagacatg

SEQ ID NO: 2825445 - DNA, 25 bp, Homo sapien
tgcttctaaagttccaaacataagg

SEQ ID NO: 2825446 - DNA, 25 bp, Homo sapien
taattctgagaggaatagaaggaag

SEQ ID NO: 2825447 - DNA, 25 bp, Homo sapien
taacctttaacagtggttgcttcta

SEQ ID NO: 2825448 - DNA, 25 bp, Homo sapien
aactgttcagtctcatagttgattc

SEQ ID NO: 2825449 - DNA, 25 bp, Homo sapien
tttcttctctaacatgccagtctag

SEQ ID NO: 2825450 - DNA, 25 bp, Homo sapien
gccagtctagaaattcagctcctgt

SEQ ID NO: 2825451 - DNA, 25 bp, Homo sapien
ctactgagaaaggtagcattgcaaa

SEQ ID NO: 2825452 - DNA, 25 bp, Homo sapien
caccaggactctgatctgaacccag

SEQ ID NO: 2825453 - DNA, 25 bp, Homo sapien
gaacccaggaagatgtttactgccc

SEQ ID NO: 2825454 - DNA, 25 bp, Homo sapien
tgtggccttgacctgcataagcgga

SEQ ID NO: 2825455 - DNA, 25 bp, Homo sapien
cataagcggagattggctgattcca

SEQ ID NO: 2825456 - DNA, 25 bp, Homo sapien
tccctatccagaactagagtgtgcc

SEQ ID NO: 2825457 - DNA, 25 bp, Homo sapien
tgggtattattgcttctagacactt

SEQ ID NO: 2825458 - DNA, 25 bp, Homo sapien
tctcacagtgaggtattccaggcct

SEQ ID NO: 2825459 - DNA, 25 bp, Homo sapien
tgttccaaggaactacaggagtcct

SEQ ID NO: 2825460 - DNA, 25 bp, Homo sapien
cactttcttcatgtaagtttgacat

SEQ ID NO: 2825461 - DNA, 25 bp, Homo sapien
catccacaatgaatacaagcatgtt

SEQ ID NO: 2825462 - DNA, 25 bp, Homo sapien
cacaatgaatacaagcatgttgttg

SEQ ID NO: 2825463 - DNA, 25 bp, Homo sapien
tccacaatgaatacaagcatgttgt

SEQ ID NO: 2825464 - DNA, 25 bp, Homo sapien
aacatccacaatgaatacaagcatg

SEQ ID NO: 2825465 - DNA, 25 bp, Homo sapien
tgatgacagcatagtagtcaagatt

SEQ ID NO: 2825466 - DNA, 25 bp, Homo sapien
gattgtttctcctggcggcactctt

SEQ ID NO: 2825467 - DNA, 25 bp, Homo sapien
agtcaagattgtttctcctggcggc

SEQ ID NO: 2825468 - DNA, 25 bp, Homo sapien
gcggcactcttctgaggatatctgg

SEQ ID NO: 2825469 - DNA, 25 bp, Homo sapien
caggttgctctatctctgcttaaac

SEQ ID NO: 2825470 - DNA, 25 bp, Homo sapien
taattagacaatattcatagtgggc

SEQ ID NO: 2825471 - DNA, 25 bp, Homo sapien
aatgcaagcctccagcctgtattcc

SEQ ID NO: 2825472 - DNA, 25 bp, Homo sapien
catagtgggcttcttagagatacta

SEQ ID NO: 2825473 - DNA, 25 bp, Homo sapien
aaatgtacttgtagaaatgtgaggt

SEQ ID NO: 2825474 - DNA, 25 bp, Homo sapien
caaatgtacttgtagaaatgtgagg

SEQ ID NO: 2825475 - DNA, 25 bp, Homo sapien
tcaaatgtacttgtagaaatgtgag

SEQ ID NO: 2825476 - DNA, 25 bp, Homo sapien
tattccatagctcttgctggtattt

SEQ ID NO: 2825477 - DNA, 25 bp, Homo sapien
ttttattccatagctcttgctggta

SEQ ID NO: 2825478 - DNA, 25 bp, Homo sapien
ttccatagctcttgctggtatttca

SEQ ID NO: 2825479 - DNA, 25 bp, Homo sapien
tccatagctcttgctggtatttcat

SEQ ID NO: 2825480 - DNA, 25 bp, Homo sapien
aaggatttgcaacattaagttggtt

SEQ ID NO: 2825481 - DNA, 25 bp, Homo sapien
tgcaacattaagttggttctcaggt

SEQ ID NO: 2825482 - DNA, 25 bp, Homo sapien
caacattaagttggttctcaggtaa

SEQ ID NO: 2825483 - DNA, 25 bp, Homo sapien
gatttgcaacattaagttggttctc

SEQ ID NO: 2825484 - DNA, 25 bp, Homo sapien
attctgtttctatgggtgccactgg

SEQ ID NO: 2825485 - DNA, 25 bp, Homo sapien
tctgtttctatgggtgccactggct

SEQ ID NO: 2825486 - DNA, 25 bp, Homo sapien
cattctgtttctatgggtgccactg

SEQ ID NO: 2825487 - DNA, 25 bp, Homo sapien
ttctgtttctatgggtgccactggc

SEQ ID NO: 2825488 - DNA, 25 bp, Homo sapien
gggtgttccacgtaaaattgtctca

SEQ ID NO: 2825489 - DNA, 25 bp, Homo sapien
ctaggcatctatgcggctgggtgtt

SEQ ID NO: 2825490 - DNA, 25 bp, Homo sapien
tatgcggctgggtgttccacgtaaa

SEQ ID NO: 2825491 - DNA, 25 bp, Homo sapien
catctatgcggctgggtgttccacg

SEQ ID NO: 2825492 - DNA, 25 bp, Homo sapien
actaccaagagaacaatatgaggaa

SEQ ID NO: 2825493 - DNA, 25 bp, Homo sapien
caagagaacaatatgaggaaaaacc

SEQ ID NO: 2825494 - DNA, 25 bp, Homo sapien
gatttaccatattgcattagtctgt

SEQ ID NO: 2825495 - DNA, 25 bp, Homo sapien
aaaacctcctcacgattcaaattat

SEQ ID NO: 2825496 - DNA, 25 bp, Homo sapien
tcccaaaatatttgccgatccttcc

SEQ ID NO: 2825497 - DNA, 25 bp, Homo sapien
aaaatatttgccgatccttcccctg

SEQ ID NO: 2825498 - DNA, 25 bp, Homo sapien
ctttcccaaaatatttgccgatcct

SEQ ID NO: 2825499 - DNA, 25 bp, Homo sapien
aatatttgccgatccttcccctggc

SEQ ID NO: 2825500 - DNA, 25 bp, Homo sapien
gcaaaagtaacacataccgaaaaca

SEQ ID NO: 2825501 - DNA, 25 bp, Homo sapien
tgtcccgtgagctccaaaaagtatg

SEQ ID NO: 2825502 - DNA, 25 bp, Homo sapien
tcccgtgagctccaaaaagtatgca

SEQ ID NO: 2825503 - DNA, 25 bp, Homo sapien
ctctgtgtcccgtgagctccaaaaa

SEQ ID NO: 2825504 - DNA, 25 bp, Homo sapien
tgtgtcccgtgagctccaaaaagta

SEQ ID NO: 2825505 - DNA, 25 bp, Homo sapien
tgtcagagacaatgcagaggcacca

SEQ ID NO: 2825506 - DNA, 25 bp, Homo sapien
tagtgccagtaggacaatgcttttc

SEQ ID NO: 2825507 - DNA, 25 bp, Homo sapien
aggcaccaacaaggctagtgccagt

SEQ ID NO: 2825508 - DNA, 25 bp, Homo sapien
tcagagacaatgcagaggcaccaac

SEQ ID NO: 2825509 - DNA, 25 bp, Homo sapien
gctgctgctgctcaaacagtcactg

SEQ ID NO: 2825510 - DNA, 25 bp, Homo sapien
tgctgctgctcaaacagtcactggg

SEQ ID NO: 2825511 - DNA, 25 bp, Homo sapien
taagagcagtcacttgaggcgctgc

SEQ ID NO: 2825512 - DNA, 25 bp, Homo sapien
cactggggcaactgtttttcaccca

SEQ ID NO: 2825513 - DNA, 25 bp, Homo sapien
catgttccacatccaagaggttcac

SEQ ID NO: 2825514 - DNA, 25 bp, Homo sapien
gaggactgttgttcaccagtattgg

SEQ ID NO: 2825515 - DNA, 25 bp, Homo sapien
acatccaagaggttcactccaggga

SEQ ID NO: 2825516 - DNA, 25 bp, Homo sapien
gttcaccagtattggttctgtcatg

SEQ ID NO: 2825517 - DNA, 25 bp, Homo sapien
ggctctgtggtcaagctcagttgtt

SEQ ID NO: 2825518 - DNA, 25 bp, Homo sapien
gctctgtggtcaagctcagttgttg

SEQ ID NO: 2825519 - DNA, 25 bp, Homo sapien
ccaggctctgtggtcaagctcagtt

SEQ ID NO: 2825520 - DNA, 25 bp, Homo sapien
caggctctgtggtcaagctcagttg

SEQ ID NO: 2825521 - DNA, 25 bp, Homo sapien
tgaggttctgaggcacagacatatg

SEQ ID NO: 2825522 - DNA, 25 bp, Homo sapien
gccaggagactcttgaggaatatct

SEQ ID NO: 2825523 - DNA, 25 bp, Homo sapien
caggtagggtgaaagctgaggttct

SEQ ID NO: 2825524 - DNA, 25 bp, Homo sapien
ggttctgaggcacagacatatgatg

SEQ ID NO: 2825525 - DNA, 25 bp, Homo sapien
tagccctctttccattgcccttaga

SEQ ID NO: 2825526 - DNA, 25 bp, Homo sapien
ttagccctctttccattgcccttag

SEQ ID NO: 2825527 - DNA, 25 bp, Homo sapien
ttccattgcccttagagtcatccat

SEQ ID NO: 2825528 - DNA, 25 bp, Homo sapien
cctctttccattgcccttagagtca

SEQ ID NO: 2825529 - DNA, 25 bp, Homo sapien
ttcccaggcggcagctagagcagaa

SEQ ID NO: 2825530 - DNA, 25 bp, Homo sapien
tctgagagaccggttcacgtgcagg

SEQ ID NO: 2825531 - DNA, 25 bp, Homo sapien
cggttttcccttccaagcgtcaatg

SEQ ID NO: 2825532 - DNA, 25 bp, Homo sapien
cggatgagttttggacagaagaggc

SEQ ID NO: 2825533 - DNA, 25 bp, Homo sapien
tattctccatttgccaatagaaggg

SEQ ID NO: 2825534 - DNA, 25 bp, Homo sapien
gactttctatcactggatggccatt

SEQ ID NO: 2825535 - DNA, 25 bp, Homo sapien
ccaggatcactggtcatggagtatt

SEQ ID NO: 2825536 - DNA, 25 bp, Homo sapien
tgtatcgagtagcagaacagggaca

SEQ ID NO: 2825537 - DNA, 25 bp, Homo sapien
tatttccactgatggctaagcaaag

SEQ ID NO: 2825538 - DNA, 25 bp, Homo sapien
tgctttatacatcacagtactgcta

SEQ ID NO: 2825539 - DNA, 25 bp, Homo sapien
gaagttgtaagatgactcactgagg

SEQ ID NO: 2825540 - DNA, 25 bp, Homo sapien
tgtctaggacaattttgggattctt

SEQ ID NO: 2825541 - DNA, 25 bp, Homo sapien
tcggaggagtggcaactctcccctt

SEQ ID NO: 2825542 - DNA, 25 bp, Homo sapien
tatatgaaacggcaacactgttcgt

SEQ ID NO: 2825543 - DNA, 25 bp, Homo sapien
caaaatactataatcggaggagtgg

SEQ ID NO: 2825544 - DNA, 25 bp, Homo sapien
cactgttcgtgaagtcagagctaca

SEQ ID NO: 2825545 - DNA, 25 bp, Homo sapien
gcctcagaggtcaagacatctttaa

SEQ ID NO: 2825546 - DNA, 25 bp, Homo sapien
ggaacataaagccaatgtctgagca

SEQ ID NO: 2825547 - DNA, 25 bp, Homo sapien
tcatcatgagatcgctaatatggca

SEQ ID NO: 2825548 - DNA, 25 bp, Homo sapien
cagcaccattttagcttagaggata

SEQ ID NO: 2825549 - DNA, 25 bp, Homo sapien
tttttaattattagaaatacataca

SEQ ID NO: 2825550 - DNA, 25 bp, Homo sapien
gattgaacacatttttaattattag

SEQ ID NO: 2825551 - DNA, 25 bp, Homo sapien
taattattagaaatacatacatgca

SEQ ID NO: 2825552 - DNA, 25 bp, Homo sapien
tttaattattagaaatacatacatg

SEQ ID NO: 2825553 - DNA, 25 bp, Homo sapien
tctcattacgcagcacagtccttgg

SEQ ID NO: 2825554 - DNA, 25 bp, Homo sapien
catgtaatacaggatgccgaggcac

SEQ ID NO: 2825555 - DNA, 25 bp, Homo sapien
taaccatgctatgcacccagtgagt

SEQ ID NO: 2825556 - DNA, 25 bp, Homo sapien
tatgtaccgctatatccgccagttg

SEQ ID NO: 2825557 - DNA, 25 bp, Homo sapien
caggcactgatttatccattgggag

SEQ ID NO: 2825558 - DNA, 25 bp, Homo sapien
tcagacaggattgggcagctccctt

SEQ ID NO: 2825559 - DNA, 25 bp, Homo sapien
gagggcagcctcaagaaatatcaga

SEQ ID NO: 2825560 - DNA, 25 bp, Homo sapien
tagtaatatttcttgacaccaatgg

SEQ ID NO: 2825561 - DNA, 25 bp, Homo sapien
tgtccaccaagaagtagagtcaagg

SEQ ID NO: 2825562 - DNA, 25 bp, Homo sapien
catcttgaattagtccttctccagc

SEQ ID NO: 2825563 - DNA, 25 bp, Homo sapien
gaccaggggaattcattccatggaa

SEQ ID NO: 2825564 - DNA, 25 bp, Homo sapien
catggaacaagggtggcatgtccac

SEQ ID NO: 2825565 - DNA, 25 bp, Homo sapien
tgctgcttacacagccaccagactg

SEQ ID NO: 2825566 - DNA, 25 bp, Homo sapien
caccagactgacctgatggccttag

SEQ ID NO: 2825567 - DNA, 25 bp, Homo sapien
cctattcaactatttactgggtggc

SEQ ID NO: 2825568 - DNA, 25 bp, Homo sapien
gagagagggtacattaacagcacat

SEQ ID NO: 2825569 - DNA, 25 bp, Homo sapien
tacgcatgatgtcctgtgtagcgaa

SEQ ID NO: 2825570 - DNA, 25 bp, Homo sapien
tgatgtcctgtgtagcgaatgtcac

SEQ ID NO: 2825571 - DNA, 25 bp, Homo sapien
ctgaggcatacgcatgatgtcctgt

SEQ ID NO: 2825572 - DNA, 25 bp, Homo sapien
catacgcatgatgtcctgtgtagcg

SEQ ID NO: 2825573 - DNA, 25 bp, Homo sapien
gcgcacaacattgttggtatagtca

SEQ ID NO: 2825574 - DNA, 25 bp, Homo sapien
tatagtcagattcaggaaccaggta

SEQ ID NO: 2825575 - DNA, 25 bp, Homo sapien
gtcagattcaggaaccaggtagctg

SEQ ID NO: 2825576 - DNA, 25 bp, Homo sapien
ttggtatagtcagattcaggaacca

SEQ ID NO: 2825577 - DNA, 25 bp, Homo sapien
gcagtctatgtctgcaccataggta

SEQ ID NO: 2825578 - DNA, 25 bp, Homo sapien
tctgtaatatcaatccactggcagt

SEQ ID NO: 2825579 - DNA, 25 bp, Homo sapien
ggtatcataacagccaggactcaat

SEQ ID NO: 2825580 - DNA, 25 bp, Homo sapien
gcaccataggtatcataacagccag

SEQ ID NO: 2825581 - DNA, 25 bp, Homo sapien
gcaggtcatagtggctaaactcatc

SEQ ID NO: 2825582 - DNA, 25 bp, Homo sapien
ggtagccatagtcacaggatgtgtc

SEQ ID NO: 2825583 - DNA, 25 bp, Homo sapien
tgtgtgcagtacatgcaaatcgcct

SEQ ID NO: 2825584 - DNA, 25 bp, Homo sapien
cctctgggtgttggcatcaagcagg

SEQ ID NO: 2825585 - DNA, 25 bp, Homo sapien
tctctgacatctgccctgtatgctg

SEQ ID NO: 2825586 - DNA, 25 bp, Homo sapien
tgagcagcaccctgtgatcataatc

SEQ ID NO: 2825587 - DNA, 25 bp, Homo sapien
caggaatatcttggtcggctgggta

SEQ ID NO: 2825588 - DNA, 25 bp, Homo sapien
tggtcggctgggtaagaaatctgat

SEQ ID NO: 2825589 - DNA, 25 bp, Homo sapien
gctgaatccaaagctcctagaaccg

SEQ ID NO: 2825590 - DNA, 25 bp, Homo sapien
tggagtagtcagagctcaatgaata

SEQ ID NO: 2825591 - DNA, 25 bp, Homo sapien
tatagtagtgacaatcctcctttcc

SEQ ID NO: 2825592 - DNA, 25 bp, Homo sapien
gaatgaataacacctatggaaatcc

SEQ ID NO: 2825593 - DNA, 25 bp, Homo sapien
ttcccagctcttgtcccacttccta

SEQ ID NO: 2825594 - DNA, 25 bp, Homo sapien
tcccagctcttgtcccacttcctaa

SEQ ID NO: 2825595 - DNA, 25 bp, Homo sapien
gttgtacatggacatcttctgcacg

SEQ ID NO: 2825596 - DNA, 25 bp, Homo sapien
catcttctgcacgtacgtggacgcc

SEQ ID NO: 2825597 - DNA, 25 bp, Homo sapien
tacgtggacgcctggatgtagtagg

SEQ ID NO: 2825598 - DNA, 25 bp, Homo sapien
tccgccgcgcatctcaggttgtaca

SEQ ID NO: 2825599 - DNA, 25 bp, Homo sapien
gcgcagcagtgaaacaacccggcgc

SEQ ID NO: 2825600 - DNA, 25 bp, Homo sapien
ctaaacgtcagcaggcgacgggcgc

SEQ ID NO: 2825601 - DNA, 25 bp, Homo sapien
gcgacgggcgcagcagtgaaacaac

SEQ ID NO: 2825602 - DNA, 25 bp, Homo sapien
taaacgtcagcaggcgacgggcgca

SEQ ID NO: 2825603 - DNA, 25 bp, Homo sapien
gactgcagagtggagcggaggacag

SEQ ID NO: 2825604 - DNA, 25 bp, Homo sapien
agcggaggacagcaagagaactggg

SEQ ID NO: 2825605 - DNA, 25 bp, Homo sapien
tggagcggaggacagcaagagaact

SEQ ID NO: 2825606 - DNA, 25 bp, Homo sapien
cagagtggagcggaggacagcaaga

SEQ ID NO: 2825607 - DNA, 25 bp, Homo sapien
ccacgtcgagaagccacatagctgg

SEQ ID NO: 2825608 - DNA, 25 bp, Homo sapien
agacgcgcggtttgcactggattcc

SEQ ID NO: 2825609 - DNA, 25 bp, Homo sapien
gaccaggtgcacgggtgcttccagc

SEQ ID NO: 2825610 - DNA, 25 bp, Homo sapien
gagggatcggatctgcgaggaccgg

SEQ ID NO: 2825611 - DNA, 25 bp, Homo sapien
gaagtagccagtgccgtatccgggc

SEQ ID NO: 2825612 - DNA, 25 bp, Homo sapien
tctagatgtcgagtagccagcttgg

SEQ ID NO: 2825613 - DNA, 25 bp, Homo sapien
taataagggttgtcgtcagagtact

SEQ ID NO: 2825614 - DNA, 25 bp, Homo sapien
caggtctgggcctttcataagtatc

SEQ ID NO: 2825615 - DNA, 25 bp, Homo sapien
cactagcgcgcagagctgcaaaggc

SEQ ID NO: 2825616 - DNA, 25 bp, Homo sapien
ccaggctcagcaagctgaacacctg

SEQ ID NO: 2825617 - DNA, 25 bp, Homo sapien
aaggcccgagcaggagcacggtcca

SEQ ID NO: 2825618 - DNA, 25 bp, Homo sapien
gctggtactgtgagcccaggctcag

SEQ ID NO: 2825619 - DNA, 25 bp, Homo sapien
tttctcagtcctggaaggcaacggg

SEQ ID NO: 2825620 - DNA, 25 bp, Homo sapien
caaagttacacaagccgttctggcc

SEQ ID NO: 2825621 - DNA, 25 bp, Homo sapien
aatcttcaaccaaggaggcgagcgg

SEQ ID NO: 2825622 - DNA, 25 bp, Homo sapien
gggtatctcagtctccaccaagcaa

SEQ ID NO: 2825623 - DNA, 25 bp, Homo sapien
caagaatctccctgattttttgtgg

SEQ ID NO: 2825624 - DNA, 25 bp, Homo sapien
gccctgccggtgcattacaaatgga

SEQ ID NO: 2825625 - DNA, 25 bp, Homo sapien
caccgaggtggaacaagggatgagt

SEQ ID NO: 2825626 - DNA, 25 bp, Homo sapien
tacaaatggatggaacctgaacccc

SEQ ID NO: 2825627 - DNA, 25 bp, Homo sapien
gagggcgacaggatcactgctcaac

SEQ ID NO: 2825628 - DNA, 25 bp, Homo sapien
caaatttagggagcagagggcgaca

SEQ ID NO: 2825629 - DNA, 25 bp, Homo sapien
caaagtgttacttcagatgtgccca

SEQ ID NO: 2825630 - DNA, 25 bp, Homo sapien
tccagaggtaggacagctaaaatcc

SEQ ID NO: 2825631 - DNA, 25 bp, Homo sapien
aatttcagtgtgttgttgagtcaat

SEQ ID NO: 2825632 - DNA, 25 bp, Homo sapien
aaatttcagtgtgttgttgagtcaa

SEQ ID NO: 2825633 - DNA, 25 bp, Homo sapien
ttccccaagattcagctgctcttga

SEQ ID NO: 2825634 - DNA, 25 bp, Homo sapien
ttttccccaagattcagctgctctt

SEQ ID NO: 2825635 - DNA, 25 bp, Homo sapien
tttccccaagattcagctgctcttg

SEQ ID NO: 2825636 - DNA, 25 bp, Homo sapien
cagcgatcactattctcttcagaca

SEQ ID NO: 2825637 - DNA, 25 bp, Homo sapien
gggaagcccggaacatttgcctgct

SEQ ID NO: 2825638 - DNA, 25 bp, Homo sapien
taccacagacttccttgggcggctg

SEQ ID NO: 2825639 - DNA, 25 bp, Homo sapien
tttttgtgcattaacccctgtacca

SEQ ID NO: 2825640 - DNA, 25 bp, Homo sapien
gacctgtttggactggttgctgaaa

SEQ ID NO: 2825641 - DNA, 25 bp, Homo sapien
aagacattcgaatgagctgagcaga

SEQ ID NO: 2825642 - DNA, 25 bp, Homo sapien
ttatcatgccagcttacggtgactg

SEQ ID NO: 2825643 - DNA, 25 bp, Homo sapien
gaatcaggcagcattccatctacaa

SEQ ID NO: 2825644 - DNA, 25 bp, Homo sapien
tgaagcacctgtgcccaaccgtgtc

SEQ ID NO: 2825645 - DNA, 25 bp, Homo sapien
tagtctctcgttttcccaagtggta

SEQ ID NO: 2825646 - DNA, 25 bp, Homo sapien
tgtggaatggtttgttgaagcacct

SEQ ID NO: 2825647 - DNA, 25 bp, Homo sapien
ccgtgtctggacatagttactagtc

SEQ ID NO: 2825648 - DNA, 25 bp, Homo sapien
ggtgtttcacatagaaagtgagcat

SEQ ID NO: 2825649 - DNA, 25 bp, Homo sapien
atgctgtgaacacttcccttcatga

SEQ ID NO: 2825650 - DNA, 25 bp, Homo sapien
cccttcatgaaaagactgttttgct

SEQ ID NO: 2825651 - DNA, 25 bp, Homo sapien
tgcgtttggcatcgaatcatttagg

SEQ ID NO: 2825652 - DNA, 25 bp, Homo sapien
tgatagaataaattggatttaatcc

SEQ ID NO: 2825653 - DNA, 25 bp, Homo sapien
taaattggatttaatcccagagaaa

SEQ ID NO: 2825654 - DNA, 25 bp, Homo sapien
tagaataaattggatttaatcccag

SEQ ID NO: 2825655 - DNA, 25 bp, Homo sapien
aataaattggatttaatcccagaga

SEQ ID NO: 2825656 - DNA, 25 bp, Homo sapien
ggatgaaaggtacatggaacaattt

SEQ ID NO: 2825657 - DNA, 25 bp, Homo sapien
catctgttttgtcatggcttgtctt

SEQ ID NO: 2825658 - DNA, 25 bp, Homo sapien
ctggtaatgaggatgaaaggtacat

SEQ ID NO: 2825659 - DNA, 25 bp, Homo sapien
tttgtgtctatctgagtcactgagt

SEQ ID NO: 2825660 - DNA, 25 bp, Homo sapien
atgggaagtttattaaaatgtattg

SEQ ID NO: 2825661 - DNA, 25 bp, Homo sapien
aagtttattaaaatgtattgactca

SEQ ID NO: 2825662 - DNA, 25 bp, Homo sapien
tgggaagtttattaaaatgtattga

SEQ ID NO: 2825663 - DNA, 25 bp, Homo sapien
gaagtttattaaaatgtattgactc

SEQ ID NO: 2825664 - DNA, 25 bp, Homo sapien
gtttctacatcaagaagagcctgtg

SEQ ID NO: 2825665 - DNA, 25 bp, Homo sapien
cctggagtccaatgctctaaggcag

SEQ ID NO: 2825666 - DNA, 25 bp, Homo sapien
aaagtccctagaaaagatcaataag

SEQ ID NO: 2825667 - DNA, 25 bp, Homo sapien
tcagtccatcggtaaagttcctgga

SEQ ID NO: 2825668 - DNA, 25 bp, Homo sapien
aaaactcagaggtgctcagcatgcc

SEQ ID NO: 2825669 - DNA, 25 bp, Homo sapien
ctgaaaactcagaggtgctcagcat

SEQ ID NO: 2825670 - DNA, 25 bp, Homo sapien
gaaaactcagaggtgctcagcatgc

SEQ ID NO: 2825671 - DNA, 25 bp, Homo sapien
tgaaaactcagaggtgctcagcatg

SEQ ID NO: 2825672 - DNA, 25 bp, Homo sapien
cgcaagaattagaatcaggttgggc

SEQ ID NO: 2825673 - DNA, 25 bp, Homo sapien
gaaccatacgcaagaattagaatca

SEQ ID NO: 2825674 - DNA, 25 bp, Homo sapien
tagtgaaccatacgcaagaattaga

SEQ ID NO: 2825675 - DNA, 25 bp, Homo sapien
ccatacgcaagaattagaatcaggt

SEQ ID NO: 2825676 - DNA, 25 bp, Homo sapien
ctgcacccggccctagctaattttt

SEQ ID NO: 2825677 - DNA, 25 bp, Homo sapien
tagtaatgacgggattttgtcatgt

SEQ ID NO: 2825678 - DNA, 25 bp, Homo sapien
actgcacccggccctagctaatttt

SEQ ID NO: 2825679 - DNA, 25 bp, Homo sapien
ttttagtaatgacgggattttgtca

SEQ ID NO: 2825680 - DNA, 25 bp, Homo sapien
attgaaaacattgtgttccatagcc

SEQ ID NO: 2825681 - DNA, 25 bp, Homo sapien
ttgaaaacattgtgttccatagccc

SEQ ID NO: 2825682 - DNA, 25 bp, Homo sapien
gctggtgagagcttagttaccttcc

SEQ ID NO: 2825683 - DNA, 25 bp, Homo sapien
agctggtgagagcttagttaccttc

SEQ ID NO: 2825684 - DNA, 25 bp, Homo sapien
cagctggtgagagcttagttacctt

SEQ ID NO: 2825685 - DNA, 25 bp, Homo sapien
ctggtgagagcttagttaccttccc

SEQ ID NO: 2825686 - DNA, 25 bp, Homo sapien
ccagggtttccatattaccaggact

SEQ ID NO: 2825687 - DNA, 25 bp, Homo sapien
ccgtgatgtagaggatccagcttca

SEQ ID NO: 2825688 - DNA, 25 bp, Homo sapien
tttgttggcaccaaagtacaggagc

SEQ ID NO: 2825689 - DNA, 25 bp, Homo sapien
gctggccttgcactgtccaaactga

SEQ ID NO: 2825690 - DNA, 25 bp, Homo sapien
tagaagattccaagacaatgattcg

SEQ ID NO: 2825691 - DNA, 25 bp, Homo sapien
gattcgaaagctgaagagtcactca

SEQ ID NO: 2825692 - DNA, 25 bp, Homo sapien
tcttcaagctggtcttataaacgtg

SEQ ID NO: 2825693 - DNA, 25 bp, Homo sapien
gctgggcaagttttccgatgaacat

SEQ ID NO: 2825694 - DNA, 25 bp, Homo sapien
caaaatagattggctcaggtccctt

SEQ ID NO: 2825695 - DNA, 25 bp, Homo sapien
aatagattggctcaggtcccttatg

SEQ ID NO: 2825696 - DNA, 25 bp, Homo sapien
attggctcaggtcccttatgataca

SEQ ID NO: 2825697 - DNA, 25 bp, Homo sapien
tagattggctcaggtcccttatgat

SEQ ID NO: 2825698 - DNA, 25 bp, Homo sapien
ggccttctgctggttctgccagagc

SEQ ID NO: 2825699 - DNA, 25 bp, Homo sapien
ttatgccatgccactgaaagctaca

SEQ ID NO: 2825700 - DNA, 25 bp, Homo sapien
ggttctgccagagctacagtctctt

SEQ ID NO: 2825701 - DNA, 25 bp, Homo sapien
gcacatttgctaagagggggccttc

SEQ ID NO: 2825702 - DNA, 25 bp, Homo sapien
gaggccaaataggaaaaccttggca

SEQ ID NO: 2825703 - DNA, 25 bp, Homo sapien
aggccaaataggaaaaccttggcag

SEQ ID NO: 2825704 - DNA, 25 bp, Homo sapien
aacaagcagctgcatgtgcataggc

SEQ ID NO: 2825705 - DNA, 25 bp, Homo sapien
tattatgcagttgggcaaatgctct

SEQ ID NO: 2825706 - DNA, 25 bp, Homo sapien
atgctctggttttaacaagcagctg

SEQ ID NO: 2825707 - DNA, 25 bp, Homo sapien
tgcagttgggcaaatgctctggttt

SEQ ID NO: 2825708 - DNA, 25 bp, Homo sapien
ctgctctctgtgagcactgtggcaa

SEQ ID NO: 2825709 - DNA, 25 bp, Homo sapien
ataagaaaaacgaagcttttctgca

SEQ ID NO: 2825710 - DNA, 25 bp, Homo sapien
agataagaaaaacgaagcttttctg

SEQ ID NO: 2825711 - DNA, 25 bp, Homo sapien
gtctggaccactcaaactgctgtgc

SEQ ID NO: 2825712 - DNA, 25 bp, Homo sapien
tctgtactagaagtcatattccttt

SEQ ID NO: 2825713 - DNA, 25 bp, Homo sapien
gtctgtactagaagtcatattcctt

SEQ ID NO: 2825714 - DNA, 25 bp, Homo sapien
ctgtctgtactagaagtcatattcc

SEQ ID NO: 2825715 - DNA, 25 bp, Homo sapien
tgtctgtactagaagtcatattcct

SEQ ID NO: 2825716 - DNA, 25 bp, Homo sapien
cagaaagaagacaataactgcataa

SEQ ID NO: 2825717 - DNA, 25 bp, Homo sapien
taaacaaggcactgactgaaaaaat

SEQ ID NO: 2825718 - DNA, 25 bp, Homo sapien
tggtagagttattacaggaacctct

SEQ ID NO: 2825719 - DNA, 25 bp, Homo sapien
aggaacctctaaacaaggcactgac

SEQ ID NO: 2825720 - DNA, 25 bp, Homo sapien
gggtgttcaaaagcacctgatttga

SEQ ID NO: 2825721 - DNA, 25 bp, Homo sapien
caaaataacttgcttgtagggtaga

SEQ ID NO: 2825722 - DNA, 25 bp, Homo sapien
ctatattatcaagaaagaaacccac

SEQ ID NO: 2825723 - DNA, 25 bp, Homo sapien
aaaagggtgttcaaaagcacctgat

SEQ ID NO: 2825724 - DNA, 25 bp, Homo sapien
catcaatttccccatcaaggtttct

SEQ ID NO: 2825725 - DNA, 25 bp, Homo sapien
ttctgcccaccactgcgcagtggag

SEQ ID NO: 2825726 - DNA, 25 bp, Homo sapien
tccctctttgaaccttctgcatcaa

SEQ ID NO: 2825727 - DNA, 25 bp, Homo sapien
caaaaactcgagtgctccatgatcc

SEQ ID NO: 2825728 - DNA, 25 bp, Homo sapien
atggaaataaggatgggaggattca

SEQ ID NO: 2825729 - DNA, 25 bp, Homo sapien
gaatgaaagcttgtacagaaaatct

SEQ ID NO: 2825730 - DNA, 25 bp, Homo sapien
cagaaaatctgagcccttgagaagg

SEQ ID NO: 2825731 - DNA, 25 bp, Homo sapien
gagtaggaggaatgaaagcttgtac

SEQ ID NO: 2825732 - DNA, 25 bp, Homo sapien
cctcctgactcagcatgtgtgggag

SEQ ID NO: 2825733 - DNA, 25 bp, Homo sapien
accctcctgactcagcatgtgtggg

SEQ ID NO: 2825734 - DNA, 25 bp, Homo sapien
cttattccaccctcctgactcagca

SEQ ID NO: 2825735 - DNA, 25 bp, Homo sapien
tcctgactcagcatgtgtgggagcc

SEQ ID NO: 2825736 - DNA, 25 bp, Homo sapien
tactagaggatatctctgtatgcat

SEQ ID NO: 2825737 - DNA, 25 bp, Homo sapien
gaggcttgctgccaagggatacaga

SEQ ID NO: 2825738 - DNA, 25 bp, Homo sapien
ggcttggtgacccttactacacagc

SEQ ID NO: 2825739 - DNA, 25 bp, Homo sapien
tacagaactgatccttgcaatccag

SEQ ID NO: 2825740 - DNA, 25 bp, Homo sapien
gaatgctgcatgtatatctggttga

SEQ ID NO: 2825741 - DNA, 25 bp, Homo sapien
cgttttactgcttctactgtagcag

SEQ ID NO: 2825742 - DNA, 25 bp, Homo sapien
tcttggcgttttactgcttctactg

SEQ ID NO: 2825743 - DNA, 25 bp, Homo sapien
tgggatatttcttggcgttttactg

SEQ ID NO: 2825744 - DNA, 25 bp, Homo sapien
gggatatttcttggcgttttactgc

SEQ ID NO: 2825745 - DNA, 25 bp, Homo sapien
gggcagacccacaacaggaaagaga

SEQ ID NO: 2825746 - DNA, 25 bp, Homo sapien
ctaccaatagggcagacccacaaca

SEQ ID NO: 2825747 - DNA, 25 bp, Homo sapien
taccaatagggcagacccacaacag

SEQ ID NO: 2825748 - DNA, 25 bp, Homo sapien
atagggcagacccacaacaggaaag

SEQ ID NO: 2825749 - DNA, 25 bp, Homo sapien
accaataacgcctgaagacccaagc

SEQ ID NO: 2825750 - DNA, 25 bp, Homo sapien
aaaatttagattcccacttgtgcaa

SEQ ID NO: 2825751 - DNA, 25 bp, Homo sapien
tggtggctgttcctcctaactgtgg

SEQ ID NO: 2825752 - DNA, 25 bp, Homo sapien
actgtgggtctgtatgaccttgagc

SEQ ID NO: 2825753 - DNA, 25 bp, Homo sapien
agctacagttgcagctctgttagga

SEQ ID NO: 2825754 - DNA, 25 bp, Homo sapien
cagctctgttaggatattccatgaa

SEQ ID NO: 2825755 - DNA, 25 bp, Homo sapien
aagaggagggctaaggactgctgag

SEQ ID NO: 2825756 - DNA, 25 bp, Homo sapien
actgctgagctacagttgcagctct

SEQ ID NO: 2825757 - DNA, 25 bp, Homo sapien
ggtaattgacagcagctgacaatga

SEQ ID NO: 2825758 - DNA, 25 bp, Homo sapien
acttgtaaccctcttgatttagaca

SEQ ID NO: 2825759 - DNA, 25 bp, Homo sapien
ctaactgtcttgtgtggtaattgac

SEQ ID NO: 2825760 - DNA, 25 bp, Homo sapien
gacaatagacatctgcctgaaggtg

SEQ ID NO: 2825761 - DNA, 25 bp, Homo sapien
gacccagtgtacacaaggatctgtg

SEQ ID NO: 2825762 - DNA, 25 bp, Homo sapien
ttggcccttgtccttagatcattag

SEQ ID NO: 2825763 - DNA, 25 bp, Homo sapien
ttcgtagcttgcaattagagaactg

SEQ ID NO: 2825764 - DNA, 25 bp, Homo sapien
tgccaatttcatcagacccagtgta

SEQ ID NO: 2825765 - DNA, 25 bp, Homo sapien
tttcagaactagtctttcttcccaa

SEQ ID NO: 2825766 - DNA, 25 bp, Homo sapien
tcagaactagtctttcttcccaaaa

SEQ ID NO: 2825767 - DNA, 25 bp, Homo sapien
ttcattttcagaactagtctttctt

SEQ ID NO: 2825768 - DNA, 25 bp, Homo sapien
cattttcagaactagtctttcttcc

SEQ ID NO: 2825769 - DNA, 25 bp, Homo sapien
cctggctcgaccagagctaatgaat

SEQ ID NO: 2825770 - DNA, 25 bp, Homo sapien
tgtacatacagcactatcagacccc

SEQ ID NO: 2825771 - DNA, 25 bp, Homo sapien
tattcccttggctatgcaaaaatgg

SEQ ID NO: 2825772 - DNA, 25 bp, Homo sapien
tacactgtagcatgctattcccttg

SEQ ID NO: 2825773 - DNA, 25 bp, Homo sapien
aagatgtgcttttctcgaagtttac

SEQ ID NO: 2825774 - DNA, 25 bp, Homo sapien
ttctctgtagatcatgtcaagggtg

SEQ ID NO: 2825775 - DNA, 25 bp, Homo sapien
gaaatgaagtatgttctctgtagat

SEQ ID NO: 2825776 - DNA, 25 bp, Homo sapien
tccatatctactggatgaaagcaag

SEQ ID NO: 2825777 - DNA, 25 bp, Homo sapien
agtgtggtcctcaatggctttgctg

SEQ ID NO: 2825778 - DNA, 25 bp, Homo sapien
caagagtgtggtcctcaatggcttt

SEQ ID NO: 2825779 - DNA, 25 bp, Homo sapien
gaacaagagtgtggtcctcaatggc

SEQ ID NO: 2825780 - DNA, 25 bp, Homo sapien
tgtggtcctcaatggctttgctgag

SEQ ID NO: 2825781 - DNA, 25 bp, Homo sapien
atccacccacacttgagcacagaac

SEQ ID NO: 2825782 - DNA, 25 bp, Homo sapien
aaaatactctgccaaaaggcttctc

SEQ ID NO: 2825783 - DNA, 25 bp, Homo sapien
gtgaagactccgtgccaacgcaaaa

SEQ ID NO: 2825784 - DNA, 25 bp, Homo sapien
gcggttaacgcttggatcacggtga

SEQ ID NO: 2825785 - DNA, 25 bp, Homo sapien
ccaccgcccgcctacttcggctgag

SEQ ID NO: 2825786 - DNA, 25 bp, Homo sapien
gcggccgggccgcattgtgacgtag

SEQ ID NO: 2825787 - DNA, 25 bp, Homo sapien
ctgccgctgcggtccgtcggtcggt

SEQ ID NO: 2825788 - DNA, 25 bp, Homo sapien
agtcagtcccttcgcgctcctgagc

SEQ ID NO: 2825789 - DNA, 25 bp, Homo sapien
gaataaagctttgattgggctcttc

SEQ ID NO: 2825790 - DNA, 25 bp, Homo sapien
taagggctccagtactattgttgaa

SEQ ID NO: 2825791 - DNA, 25 bp, Homo sapien
tggcgactgccaagtggccagacac

SEQ ID NO: 2825792 - DNA, 25 bp, Homo sapien
tgaagcagtttgtctgccactaagc

SEQ ID NO: 2825793 - DNA, 25 bp, Homo sapien
gtactgctgcatataaaatgcaggc

SEQ ID NO: 2825794 - DNA, 25 bp, Homo sapien
cagaaaataaaagcgtcttatggaa

SEQ ID NO: 2825795 - DNA, 25 bp, Homo sapien
tggaaggaagttgtactgctgcata

SEQ ID NO: 2825796 - DNA, 25 bp, Homo sapien
aataaaagcgtcttatggaaggaag

SEQ ID NO: 2825797 - DNA, 25 bp, Homo sapien
ggatccattgaatctcgtctgtgga

SEQ ID NO: 2825798 - DNA, 25 bp, Homo sapien
tattccatagataaatagaaggagc

SEQ ID NO: 2825799 - DNA, 25 bp, Homo sapien
gatgtccacacataccccgctttgt

SEQ ID NO: 2825800 - DNA, 25 bp, Homo sapien
gtctgagagtcttaagagcatcata

SEQ ID NO: 2825801 - DNA, 25 bp, Homo sapien
ttctttgtagcccttgatgggtcgg

SEQ ID NO: 2825802 - DNA, 25 bp, Homo sapien
tgtagcccttgatgggtcggtcccc

SEQ ID NO: 2825803 - DNA, 25 bp, Homo sapien
tgatgggtcggtccccctgttgtct

SEQ ID NO: 2825804 - DNA, 25 bp, Homo sapien
tctcattccataggcatttccccca

SEQ ID NO: 2825805 - DNA, 25 bp, Homo sapien
tgctccaatagaaggttcacaaggt

SEQ ID NO: 2825806 - DNA, 25 bp, Homo sapien
gtttagaaagcccaccattggcagt

SEQ ID NO: 2825807 - DNA, 25 bp, Homo sapien
gggataactgtaactccaggagttg

SEQ ID NO: 2825808 - DNA, 25 bp, Homo sapien
ttacttacctcaattcagaatggcc

SEQ ID NO: 2825809 - DNA, 25 bp, Homo sapien
ctgtccaacccctgctccctggctc

SEQ ID NO: 2825810 - DNA, 25 bp, Homo sapien
ctgctccctggctctgttcccccat

SEQ ID NO: 2825811 - DNA, 25 bp, Homo sapien
cccctgctccctggctctgttcccc

SEQ ID NO: 2825812 - DNA, 25 bp, Homo sapien
acccctgctccctggctctgttccc

SEQ ID NO: 2825813 - DNA, 25 bp, Homo sapien
tcctgtttcaatctcccatctttgt

SEQ ID NO: 2825814 - DNA, 25 bp, Homo sapien
ttcaatctcccatctttgtccagtg

SEQ ID NO: 2825815 - DNA, 25 bp, Homo sapien
gggctcctgtttcaatctcccatct

SEQ ID NO: 2825816 - DNA, 25 bp, Homo sapien
gtttcaatctcccatctttgtccag

SEQ ID NO: 2825817 - DNA, 25 bp, Homo sapien
gacaggaggcatctccagtcacaca

SEQ ID NO: 2825818 - DNA, 25 bp, Homo sapien
gattgaatggacaggaggcatctcc

SEQ ID NO: 2825819 - DNA, 25 bp, Homo sapien
gaggcatctccagtcacacatctag

SEQ ID NO: 2825820 - DNA, 25 bp, Homo sapien
agtcagattgaatggacaggaggca

SEQ ID NO: 2825821 - DNA, 25 bp, Homo sapien
gactggatttgtcgaagtggtgaaa

SEQ ID NO: 2825822 - DNA, 25 bp, Homo sapien
tcataaatgaggtctccaagctgtg

SEQ ID NO: 2825823 - DNA, 25 bp, Homo sapien
gctgtgttttaaccatagaattcca

SEQ ID NO: 2825824 - DNA, 25 bp, Homo sapien
acttggactggatttgtcgaagtgg

SEQ ID NO: 2825825 - DNA, 25 bp, Homo sapien
aagacttgaccatagggagcaacaa

SEQ ID NO: 2825826 - DNA, 25 bp, Homo sapien
cacataggtattagtgggtgagtaa

SEQ ID NO: 2825827 - DNA, 25 bp, Homo sapien
gaatctgtacacataggtattagtg

SEQ ID NO: 2825828 - DNA, 25 bp, Homo sapien
tgagtaagaagagaagtggaccaag

SEQ ID NO: 2825829 - DNA, 25 bp, Homo sapien
aggacctcggtgaaattgaattggc

SEQ ID NO: 2825830 - DNA, 25 bp, Homo sapien
agaacctttgaactcagttctcaaa

SEQ ID NO: 2825831 - DNA, 25 bp, Homo sapien
ggcagagccaatgttaggttttcaa

SEQ ID NO: 2825832 - DNA, 25 bp, Homo sapien
gttcccccttgaagtgtccacatca

SEQ ID NO: 2825833 - DNA, 25 bp, Homo sapien
gctcctcaatgggactcttcaggac

SEQ ID NO: 2825834 - DNA, 25 bp, Homo sapien
gaccatgtatgtgcctctgagaaat

SEQ ID NO: 2825835 - DNA, 25 bp, Homo sapien
ctggaccatgtatgtgcctctgaga

SEQ ID NO: 2825836 - DNA, 25 bp, Homo sapien
cctctgagaaatgggctttctgctg

SEQ ID NO: 2825837 - DNA, 25 bp, Homo sapien
tcctttgcttcacagttcagtcagc

SEQ ID NO: 2825838 - DNA, 25 bp, Homo sapien
agccctggggttcaacgccacctct

SEQ ID NO: 2825839 - DNA, 25 bp, Homo sapien
agcttttgaatgcaagagccctggg

SEQ ID NO: 2825840 - DNA, 25 bp, Homo sapien
tttgcttcacagttcagtcagctgc

SEQ ID NO: 2825841 - DNA, 25 bp, Homo sapien
gctaactactgctgaaaacagcctt

SEQ ID NO: 2825842 - DNA, 25 bp, Homo sapien
aagtcatcttgagctggtgtacaga

SEQ ID NO: 2825843 - DNA, 25 bp, Homo sapien
gaggtacagaggtgtaaacaaccat

SEQ ID NO: 2825844 - DNA, 25 bp, Homo sapien
gcttggaggtctttatgaggtacag

SEQ ID NO: 2825845 - DNA, 25 bp, Homo sapien
gtcatcattattagctttgagcaat

SEQ ID NO: 2825846 - DNA, 25 bp, Homo sapien
cattattagctttgagcaatctgct

SEQ ID NO: 2825847 - DNA, 25 bp, Homo sapien
ttattagctttgagcaatctgcttt

SEQ ID NO: 2825848 - DNA, 25 bp, Homo sapien
catcattattagctttgagcaatct

SEQ ID NO: 2825849 - DNA, 25 bp, Homo sapien
gcatgcagctttattccagctgttc

SEQ ID NO: 2825850 - DNA, 25 bp, Homo sapien
cagcatgcagctttattccagctgt

SEQ ID NO: 2825851 - DNA, 25 bp, Homo sapien
catgcagctttattccagctgttct

SEQ ID NO: 2825852 - DNA, 25 bp, Homo sapien
gcagcatgcagctttattccagctg

SEQ ID NO: 2825853 - DNA, 25 bp, Homo sapien
tttgcagcagctactctaacctgac

SEQ ID NO: 2825854 - DNA, 25 bp, Homo sapien
gaagaggaggcattgtattggccac

SEQ ID NO: 2825855 - DNA, 25 bp, Homo sapien
aaaagagtgcctgagagtgccagag

SEQ ID NO: 2825856 - DNA, 25 bp, Homo sapien
ccaatgcatgccctctgtagctgtg

SEQ ID NO: 2825857 - DNA, 25 bp, Homo sapien
tggttaggtgtattctgtctccaga

SEQ ID NO: 2825858 - DNA, 25 bp, Homo sapien
cacccagctggttaggtgtattctg

SEQ ID NO: 2825859 - DNA, 25 bp, Homo sapien
agctggttaggtgtattctgtctcc

SEQ ID NO: 2825860 - DNA, 25 bp, Homo sapien
gctggttaggtgtattctgtctcca

SEQ ID NO: 2825861 - DNA, 25 bp, Homo sapien
gatacactgactgagagaacacaca

SEQ ID NO: 2825862 - DNA, 25 bp, Homo sapien
taatgtctcctgcatgtagatacac

SEQ ID NO: 2825863 - DNA, 25 bp, Homo sapien
tgaatggtagaactgtgcatctcca

SEQ ID NO: 2825864 - DNA, 25 bp, Homo sapien
tgaaggtctgaagttacatccatcc

SEQ ID NO: 2825865 - DNA, 25 bp, Homo sapien
gatgaggcactcaatcttactgcaa

SEQ ID NO: 2825866 - DNA, 25 bp, Homo sapien
aaaataagagcgcttccaagggagc

SEQ ID NO: 2825867 - DNA, 25 bp, Homo sapien
gaattttctcttgctacggtaagca

SEQ ID NO: 2825868 - DNA, 25 bp, Homo sapien
tacaggcagtataacacagcagcaa

SEQ ID NO: 2825869 - DNA, 25 bp, Homo sapien
cctgggtgcaagatagatggtatcc

SEQ ID NO: 2825870 - DNA, 25 bp, Homo sapien
tgagaggtgagaaccagttgctcag

SEQ ID NO: 2825871 - DNA, 25 bp, Homo sapien
tgttggcaaagtgtgcatcttctaa

SEQ ID NO: 2825872 - DNA, 25 bp, Homo sapien
ttgataggaaatagtccggagagct

SEQ ID NO: 2825873 - DNA, 25 bp, Homo sapien
taaaggagagcacactatggacagc

SEQ ID NO: 2825874 - DNA, 25 bp, Homo sapien
aatccagttactagagcccaagcaa

SEQ ID NO: 2825875 - DNA, 25 bp, Homo sapien
tattgactgctgaaaggtccctaga

SEQ ID NO: 2825876 - DNA, 25 bp, Homo sapien
tgatagtagtaggactggctctgct

SEQ ID NO: 2825877 - DNA, 25 bp, Homo sapien
atgatgattctgtagccaaaagcaa

SEQ ID NO: 2825878 - DNA, 25 bp, Homo sapien
cccagtggaaatctccagatgcaga

SEQ ID NO: 2825879 - DNA, 25 bp, Homo sapien
gatgattctgtagccaaaagcaagc

SEQ ID NO: 2825880 - DNA, 25 bp, Homo sapien
gagtccaagaggggattcaggttct

SEQ ID NO: 2825881 - DNA, 25 bp, Homo sapien
ccttgctcttcttttggaaaatact

SEQ ID NO: 2825882 - DNA, 25 bp, Homo sapien
tataacatgccattcagcactcttc

SEQ ID NO: 2825883 - DNA, 25 bp, Homo sapien
taacatgccattcagcactcttcca

SEQ ID NO: 2825884 - DNA, 25 bp, Homo sapien
acatgccattcagcactcttccaaa

SEQ ID NO: 2825885 - DNA, 25 bp, Homo sapien
attataacatgccattcagcactct

SEQ ID NO: 2825886 - DNA, 25 bp, Homo sapien
ttggccaatggtgagagcccaatgc

SEQ ID NO: 2825887 - DNA, 25 bp, Homo sapien
ctcacatgttgccagaagtcaggtg

SEQ ID NO: 2825888 - DNA, 25 bp, Homo sapien
tcaccagtgatctgcttgggtcagg

SEQ ID NO: 2825889 - DNA, 25 bp, Homo sapien
cagggaatcttggccaatggtgaga

SEQ ID NO: 2825890 - DNA, 25 bp, Homo sapien
ttttttatctgacacgttggaggac

SEQ ID NO: 2825891 - DNA, 25 bp, Homo sapien
catgcccggcttttatagagtttta

SEQ ID NO: 2825892 - DNA, 25 bp, Homo sapien
taaaggtgtcgcactgtacacacag

SEQ ID NO: 2825893 - DNA, 25 bp, Homo sapien
tcatcttcagaagtacacggtgctt

SEQ ID NO: 2825894 - DNA, 25 bp, Homo sapien
tattttcaaagtgttggcatggcct

SEQ ID NO: 2825895 - DNA, 25 bp, Homo sapien
cactccatgtaagcggtaagttcca

SEQ ID NO: 2825896 - DNA, 25 bp, Homo sapien
tattcttaccagtaggagggaacac

SEQ ID NO: 2825897 - DNA, 25 bp, Homo sapien
tgtggagcccgagttcataacagcc

SEQ ID NO: 2825898 - DNA, 25 bp, Homo sapien
tttgtactactgtgggatacagcac

SEQ ID NO: 2825899 - DNA, 25 bp, Homo sapien
tactgtgggatacagcactgcttct

SEQ ID NO: 2825900 - DNA, 25 bp, Homo sapien
gccctttgtactactgtgggataca

SEQ ID NO: 2825901 - DNA, 25 bp, Homo sapien
atcttttgccctttgtactactgtg

SEQ ID NO: 2825902 - DNA, 25 bp, Homo sapien
gtggtatggagcgagaatgggcgat

SEQ ID NO: 2825903 - DNA, 25 bp, Homo sapien
gattaagctggagggaggtcgtgtg

SEQ ID NO: 2825904 - DNA, 25 bp, Homo sapien
ctggagggaggtcgtgtggtaaggg

SEQ ID NO: 2825905 - DNA, 25 bp, Homo sapien
taagctggagggaggtcgtgtggta

SEQ ID NO: 2825906 - DNA, 25 bp, Homo sapien
aaaggagcgtctatacaggacctta

SEQ ID NO: 2825907 - DNA, 25 bp, Homo sapien
caggaccttaaatgggctgtaccct

SEQ ID NO: 2825908 - DNA, 25 bp, Homo sapien
ttgaggcacagtctaagttggtctg

SEQ ID NO: 2825909 - DNA, 25 bp, Homo sapien
ccttaaatgggctgtaccctgtagc

SEQ ID NO: 2825910 - DNA, 25 bp, Homo sapien
tacccgaagctcggcgtgcgtgatg

SEQ ID NO: 2825911 - DNA, 25 bp, Homo sapien
tttcactggggtcccacacagatgg

SEQ ID NO: 2825912 - DNA, 25 bp, Homo sapien
tccgattttcactggggtcccacac

SEQ ID NO: 2825913 - DNA, 25 bp, Homo sapien
gagttacccgaagctcggcgtgcgt

SEQ ID NO: 2825914 - DNA, 25 bp, Homo sapien
acctgaggccataggtggatgtttc

SEQ ID NO: 2825915 - DNA, 25 bp, Homo sapien
gaggccataggtggatgtttctcac

SEQ ID NO: 2825916 - DNA, 25 bp, Homo sapien
aggccataggtggatgtttctcacg

SEQ ID NO: 2825917 - DNA, 25 bp, Homo sapien
ctgaggccataggtggatgtttctc

SEQ ID NO: 2825918 - DNA, 25 bp, Homo sapien
tcagaccacaagttacagatatctt

SEQ ID NO: 2825919 - DNA, 25 bp, Homo sapien
caaaaaccagcactatcagaccaca

SEQ ID NO: 2825920 - DNA, 25 bp, Homo sapien
caaagatcaattacacaggagttac

SEQ ID NO: 2825921 - DNA, 25 bp, Homo sapien
gagtcagcccaggtagtcttaatga

SEQ ID NO: 2825922 - DNA, 25 bp, Homo sapien
tccatattaatgcttgatatctaat

SEQ ID NO: 2825923 - DNA, 25 bp, Homo sapien
taatatggcttgttaacatagctta

SEQ ID NO: 2825924 - DNA, 25 bp, Homo sapien
tttccatattaatgcttgatatcta

SEQ ID NO: 2825925 - DNA, 25 bp, Homo sapien
tgatatctaatatggcttgttaaca

SEQ ID NO: 2825926 - DNA, 25 bp, Homo sapien
tgccgcttgctttgaagcctcatca

SEQ ID NO: 2825927 - DNA, 25 bp, Homo sapien
taacagcattgttgctaaaacttgc

SEQ ID NO: 2825928 - DNA, 25 bp, Homo sapien
gactcatataaactggaataacagc

SEQ ID NO: 2825929 - DNA, 25 bp, Homo sapien
tctgggcataagtgtttatgggaaa

SEQ ID NO: 2825930 - DNA, 25 bp, Homo sapien
aacgtacaaccccacattgatagaa

SEQ ID NO: 2825931 - DNA, 25 bp, Homo sapien
cagaacgtacaaccccacattgata

SEQ ID NO: 2825932 - DNA, 25 bp, Homo sapien
ctagcagaacgtacaaccccacatt

SEQ ID NO: 2825933 - DNA, 25 bp, Homo sapien
cgtacaaccccacattgatagaaat

SEQ ID NO: 2825934 - DNA, 25 bp, Homo sapien
tatcatggctaccttctgagactgg

SEQ ID NO: 2825935 - DNA, 25 bp, Homo sapien
gctacattgtttcaagggctgcagg

SEQ ID NO: 2825936 - DNA, 25 bp, Homo sapien
tcagaaccacatgacaacagggatc

SEQ ID NO: 2825937 - DNA, 25 bp, Homo sapien
catactggtatcatctgggaaccct

SEQ ID NO: 2825938 - DNA, 25 bp, Homo sapien
ctgtctggcattggcttccagtgtg

SEQ ID NO: 2825939 - DNA, 25 bp, Homo sapien
gcctgtctggcattggcttccagtg

SEQ ID NO: 2825940 - DNA, 25 bp, Homo sapien
agcctgtctggcattggcttccagt

SEQ ID NO: 2825941 - DNA, 25 bp, Homo sapien
tgtctggcattggcttccagtgtgt

SEQ ID NO: 2825942 - DNA, 25 bp, Homo sapien
ctggctgtggcctgacattggcatt

SEQ ID NO: 2825943 - DNA, 25 bp, Homo sapien
tgacattggcattcttttcctagct

SEQ ID NO: 2825944 - DNA, 25 bp, Homo sapien
ttcctagcttgatctcggccatcac

SEQ ID NO: 2825945 - DNA, 25 bp, Homo sapien
tcttttcctagcttgatctcggcca

SEQ ID NO: 2825946 - DNA, 25 bp, Homo sapien
gaacatcactgggttcttgggctga

SEQ ID NO: 2825947 - DNA, 25 bp, Homo sapien
tcactgggttcttgggctgactcat

SEQ ID NO: 2825948 - DNA, 25 bp, Homo sapien
ccaagaacatcactgggttcttggg

SEQ ID NO: 2825949 - DNA, 25 bp, Homo sapien
catcactgggttcttgggctgactc

SEQ ID NO: 2825950 - DNA, 25 bp, Homo sapien
gacttgagttcatgtgtatacgtgt

SEQ ID NO: 2825951 - DNA, 25 bp, Homo sapien
ttaaggctttccttagtgttgactg

SEQ ID NO: 2825952 - DNA, 25 bp, Homo sapien
ggtttgaggtctctgatggatggca

SEQ ID NO: 2825953 - DNA, 25 bp, Homo sapien
tagtgttgactgttgacttgagttc

SEQ ID NO: 2825954 - DNA, 25 bp, Homo sapien
tctactctgtacttaagttgctttt

SEQ ID NO: 2825955 - DNA, 25 bp, Homo sapien
agtctactctgtacttaagttgctt

SEQ ID NO: 2825956 - DNA, 25 bp, Homo sapien
caagtctactctgtacttaagttgc

SEQ ID NO: 2825957 - DNA, 25 bp, Homo sapien
tccaagtctactctgtacttaagtt

SEQ ID NO: 2825958 - DNA, 25 bp, Homo sapien
caaaagctgaacatgaaatctgagc

SEQ ID NO: 2825959 - DNA, 25 bp, Homo sapien
cacagttgtgcagaagcgaagttca

SEQ ID NO: 2825960 - DNA, 25 bp, Homo sapien
aatctgagcttctaaagtgagcaca

SEQ ID NO: 2825961 - DNA, 25 bp, Homo sapien
cgaagttcagggctgcgaatagcat

SEQ ID NO: 2825962 - DNA, 25 bp, Homo sapien
ggccaggctgggttgcatttctcca

SEQ ID NO: 2825963 - DNA, 25 bp, Homo sapien
cagagggaggacgtggaatctgcag

SEQ ID NO: 2825964 - DNA, 25 bp, Homo sapien
gagggaggacgtggaatctgcagca

SEQ ID NO: 2825965 - DNA, 25 bp, Homo sapien
ttctggccaggctgggttgcatttc

SEQ ID NO: 2825966 - DNA, 25 bp, Homo sapien
caaatataattgacaccactgggtt

SEQ ID NO: 2825967 - DNA, 25 bp, Homo sapien
ttttgtagatgacaggagctaatgc

SEQ ID NO: 2825968 - DNA, 25 bp, Homo sapien
gatgacaggagctaatgcaagggaa

SEQ ID NO: 2825969 - DNA, 25 bp, Homo sapien
taaacttccccctgaaaggctgtga

SEQ ID NO: 2825970 - DNA, 25 bp, Homo sapien
gaaggcgtagcctcagaatgactgc

SEQ ID NO: 2825971 - DNA, 25 bp, Homo sapien
gatccccaggccatgatgtaagtct

SEQ ID NO: 2825972 - DNA, 25 bp, Homo sapien
tgtgagttactcaaacaccagtctg

SEQ ID NO: 2825973 - DNA, 25 bp, Homo sapien
gttggcagaaatgtcccacctccag

SEQ ID NO: 2825974 - DNA, 25 bp, Homo sapien
tcagaaacacgcatgaggagccttc

SEQ ID NO: 2825975 - DNA, 25 bp, Homo sapien
catgagattattcccggcagcctaa

SEQ ID NO: 2825976 - DNA, 25 bp, Homo sapien
gaaaaggtaccctgaccagtctgct

SEQ ID NO: 2825977 - DNA, 25 bp, Homo sapien
tgtgcaaaaccatggtcagccgcca

SEQ ID NO: 2825978 - DNA, 25 bp, Homo sapien
ccatgattgatgttcctctttcgga

SEQ ID NO: 2825979 - DNA, 25 bp, Homo sapien
tagtaagcttcagagcccatgattg

SEQ ID NO: 2825980 - DNA, 25 bp, Homo sapien
caccaagaacaaagtcactagagca

SEQ ID NO: 2825981 - DNA, 25 bp, Homo sapien
tctgaagagctatatgcattgatcc

SEQ ID NO: 2825982 - DNA, 25 bp, Homo sapien
aagctcccaccggtgactcggaaga

SEQ ID NO: 2825983 - DNA, 25 bp, Homo sapien
ggaataaagccgcatctccctggga

SEQ ID NO: 2825984 - DNA, 25 bp, Homo sapien
taattgtgaggtgccaatgtgccct

SEQ ID NO: 2825985 - DNA, 25 bp, Homo sapien
tgaaatatgccgctgtcacagctgc

SEQ ID NO: 2825986 - DNA, 25 bp, Homo sapien
aatattcttccctagcatggtcagt

SEQ ID NO: 2825987 - DNA, 25 bp, Homo sapien
taatattcttccctagcatggtcag

SEQ ID NO: 2825988 - DNA, 25 bp, Homo sapien
attcttccctagcatggtcagtgaa

SEQ ID NO: 2825989 - DNA, 25 bp, Homo sapien
tattcttccctagcatggtcagtga

SEQ ID NO: 2825990 - DNA, 25 bp, Homo sapien
ctggaagttccccagcagacgctca

SEQ ID NO: 2825991 - DNA, 25 bp, Homo sapien
ggaagttccccagcagacgctcagg

SEQ ID NO: 2825992 - DNA, 25 bp, Homo sapien
aagttccccagcagacgctcaggct

SEQ ID NO: 2825993 - DNA, 25 bp, Homo sapien
tggaagttccccagcagacgctcag

SEQ ID NO: 2825994 - DNA, 25 bp, Homo sapien
tttatttatgattccccaaagagaa

SEQ ID NO: 2825995 - DNA, 25 bp, Homo sapien
atttatgattccccaaagagaagga

SEQ ID NO: 2825996 - DNA, 25 bp, Homo sapien
cttctgtccttgattacaccactat

SEQ ID NO: 2825997 - DNA, 25 bp, Homo sapien
tgtccttgattacaccactatttta

SEQ ID NO: 2825998 - DNA, 25 bp, Homo sapien
ctctgccatagccacccgatcccca

SEQ ID NO: 2825999 - DNA, 25 bp, Homo sapien
tctgccatagccacccgatccccat

SEQ ID NO: 2826000 - DNA, 25 bp, Homo sapien
gaaggtgcattcatgcaaagttcgc

SEQ ID NO: 2826001 - DNA, 25 bp, Homo sapien
cattcatgcaaagttcgctagcgat

SEQ ID NO: 2826002 - DNA, 25 bp, Homo sapien
ggccctgaaggtgcattcatgcaaa

SEQ ID NO: 2826003 - DNA, 25 bp, Homo sapien
ggtgcattcatgcaaagttcgctag

SEQ ID NO: 2826004 - DNA, 25 bp, Homo sapien
ttaactttgcacatgtgagcatcca

SEQ ID NO: 2826005 - DNA, 25 bp, Homo sapien
tgtcctctgctgcctcaatactctt

SEQ ID NO: 2826006 - DNA, 25 bp, Homo sapien
ccagatgtggccctttaactttgca

SEQ ID NO: 2826007 - DNA, 25 bp, Homo sapien
ctgctgcctcaatactcttcagaga

SEQ ID NO: 2826008 - DNA, 25 bp, Homo sapien
cactcttagaatcactaatatccct

SEQ ID NO: 2826009 - DNA, 25 bp, Homo sapien
tagaatcactaatatccctattttt

SEQ ID NO: 2826010 - DNA, 25 bp, Homo sapien
ccattcactcttagaatcactaata

SEQ ID NO: 2826011 - DNA, 25 bp, Homo sapien
gtccattcactcttagaatcactaa

SEQ ID NO: 2826012 - DNA, 25 bp, Homo sapien
ccatgaggggagacaaaacttaatg

SEQ ID NO: 2826013 - DNA, 25 bp, Homo sapien
gagacaaaacttaatgaccattgac

SEQ ID NO: 2826014 - DNA, 25 bp, Homo sapien
gggagacaaaacttaatgaccattg

SEQ ID NO: 2826015 - DNA, 25 bp, Homo sapien
tgaggggagacaaaacttaatgacc

SEQ ID NO: 2826016 - DNA, 25 bp, Homo sapien
taaggcattgaccattgagtggcaa

SEQ ID NO: 2826017 - DNA, 25 bp, Homo sapien
cataatttatgtaactccccctctt

SEQ ID NO: 2826018 - DNA, 25 bp, Homo sapien
attgagtggcaacagcaataacagt

SEQ ID NO: 2826019 - DNA, 25 bp, Homo sapien
tttcaaggaacctggtataaacata

SEQ ID NO: 2826020 - DNA, 25 bp, Homo sapien
tttgttggtgaaaagaagccagtct

SEQ ID NO: 2826021 - DNA, 25 bp, Homo sapien
ggcaattaggcctaaagacttctcc

SEQ ID NO: 2826022 - DNA, 25 bp, Homo sapien
catgttccaggcaaaaatgaggcaa

SEQ ID NO: 2826023 - DNA, 25 bp, Homo sapien
gcgcctccagaaatcacatccatgt

SEQ ID NO: 2826024 - DNA, 25 bp, Homo sapien
atcatgaatcctcagaaccaaacat

SEQ ID NO: 2826025 - DNA, 25 bp, Homo sapien
aggaagacaggcaagcgagagttca

SEQ ID NO: 2826026 - DNA, 25 bp, Homo sapien
tgagttaaggacaatcatgaatcct

SEQ ID NO: 2826027 - DNA, 25 bp, Homo sapien
cgagagttcagtccgtgtgagttaa

SEQ ID NO: 2826028 - DNA, 25 bp, Homo sapien
tgaggttctgaatagatgaggaaag

SEQ ID NO: 2826029 - DNA, 25 bp, Homo sapien
gaggttctgaatagatgaggttctg

SEQ ID NO: 2826030 - DNA, 25 bp, Homo sapien
agatgaggttctgaatagatgaggt

SEQ ID NO: 2826031 - DNA, 25 bp, Homo sapien
tggcacaaaaatcatccctccatct

SEQ ID NO: 2826032 - DNA, 25 bp, Homo sapien
atgctctgcattctggaattgtcag

SEQ ID NO: 2826033 - DNA, 25 bp, Homo sapien
cacatgctctgcattctggaattgt

SEQ ID NO: 2826034 - DNA, 25 bp, Homo sapien
catgctctgcattctggaattgtca

SEQ ID NO: 2826035 - DNA, 25 bp, Homo sapien
ccagctgcccactgtatgtcgatat

SEQ ID NO: 2826036 - DNA, 25 bp, Homo sapien
ccagatacactattagaagtctcag

SEQ ID NO: 2826037 - DNA, 25 bp, Homo sapien
aacatagcaatgccagatacactat

SEQ ID NO: 2826038 - DNA, 25 bp, Homo sapien
gatatgggatgaacctaattttacg

SEQ ID NO: 2826039 - DNA, 25 bp, Homo sapien
ggaacttcacccataggaactctct

SEQ ID NO: 2826040 - DNA, 25 bp, Homo sapien
tgctccactctactgtcagaaatgc

SEQ ID NO: 2826041 - DNA, 25 bp, Homo sapien
gaactcgtatcctgagtcatgctca

SEQ ID NO: 2826042 - DNA, 25 bp, Homo sapien
ttctgtaagattgctccactctact

SEQ ID NO: 2826043 - DNA, 25 bp, Homo sapien
cccattattaaatagatagctccaa

SEQ ID NO: 2826044 - DNA, 25 bp, Homo sapien
ttcaactcccatgcaattaagtttc

SEQ ID NO: 2826045 - DNA, 25 bp, Homo sapien
ttattaaatagatagctccaaccat

SEQ ID NO: 2826046 - DNA, 25 bp, Homo sapien
caattaagtttccagcccattatta

SEQ ID NO: 2826047 - DNA, 25 bp, Homo sapien
cagcaggaaaatggggtacaatgct

SEQ ID NO: 2826048 - DNA, 25 bp, Homo sapien
gggtacaatgctatgcagcctttaa

SEQ ID NO: 2826049 - DNA, 25 bp, Homo sapien
caatgctatgcagcctttaagaaag

SEQ ID NO: 2826050 - DNA, 25 bp, Homo sapien
aggaaaatggggtacaatgctatgc

SEQ ID NO: 2826051 - DNA, 25 bp, Homo sapien
gatgaggccatggaagacgatgaac

SEQ ID NO: 2826052 - DNA, 25 bp, Homo sapien
ggccatggaagacgatgaacagaga

SEQ ID NO: 2826053 - DNA, 25 bp, Homo sapien
catggaagacgatgaacagagagtt

SEQ ID NO: 2826054 - DNA, 25 bp, Homo sapien
tgaggccatggaagacgatgaacag

SEQ ID NO: 2826055 - DNA, 25 bp, Homo sapien
cccatatacaaaaagggtccagcat

SEQ ID NO: 2826056 - DNA, 25 bp, Homo sapien
tctaaactgaggtggccccatatac

SEQ ID NO: 2826057 - DNA, 25 bp, Homo sapien
ctgaggtggccccatatacaaaaag

SEQ ID NO: 2826058 - DNA, 25 bp, Homo sapien
tggccccatatacaaaaagggtcca

SEQ ID NO: 2826059 - DNA, 25 bp, Homo sapien
cttaggtagatctgcctccagaact

SEQ ID NO: 2826060 - DNA, 25 bp, Homo sapien
tctcttgttcaaccgcattctaatg

SEQ ID NO: 2826061 - DNA, 25 bp, Homo sapien
aggtagatctgcctccagaactcag

SEQ ID NO: 2826062 - DNA, 25 bp, Homo sapien
ctttctcttgttcaaccgcattcta

SEQ ID NO: 2826063 - DNA, 25 bp, Homo sapien
tatccagatgggcccaatgcaataa

SEQ ID NO: 2826064 - DNA, 25 bp, Homo sapien
tccagatgggcccaatgcaataaaa

SEQ ID NO: 2826065 - DNA, 25 bp, Homo sapien
atccagatgggcccaatgcaataaa

SEQ ID NO: 2826066 - DNA, 25 bp, Homo sapien
caggcagggataagatcacttcagt

SEQ ID NO: 2826067 - DNA, 25 bp, Homo sapien
tcagctgaaataacactcttctctg

SEQ ID NO: 2826068 - DNA, 25 bp, Homo sapien
tattactagagaaggagagttacat

SEQ ID NO: 2826069 - DNA, 25 bp, Homo sapien
tcgtagtaagtcttcccacaaagtc

SEQ ID NO: 2826070 - DNA, 25 bp, Homo sapien
ggctcaaggactaagcttcaggcat

SEQ ID NO: 2826071 - DNA, 25 bp, Homo sapien
tatattggttcatgtagttgaaggc

SEQ ID NO: 2826072 - DNA, 25 bp, Homo sapien
gctatatgaggtcagttaatctcca

SEQ ID NO: 2826073 - DNA, 25 bp, Homo sapien
aagcttcaggcataacttgattcag

SEQ ID NO: 2826074 - DNA, 25 bp, Homo sapien
gcaaaagtctgcacaaattggtgat

SEQ ID NO: 2826075 - DNA, 25 bp, Homo sapien
catgaacttagagtctgtggcagga

SEQ ID NO: 2826076 - DNA, 25 bp, Homo sapien
tgaactgcgatgcaagggaatgatg

SEQ ID NO: 2826077 - DNA, 25 bp, Homo sapien
gcggtcaagtgggagtaaattgcaa

SEQ ID NO: 2826078 - DNA, 25 bp, Homo sapien
tcactgggtccctaggtaatctcag

SEQ ID NO: 2826079 - DNA, 25 bp, Homo sapien
ccattttgtctcgaatacacgccag

SEQ ID NO: 2826080 - DNA, 25 bp, Homo sapien
taatctcagtgtgcccgtggtctaa

SEQ ID NO: 2826081 - DNA, 25 bp, Homo sapien
tcacattggtggcaggaaaactcaa

SEQ ID NO: 2826082 - DNA, 25 bp, Homo sapien
tgcctctgcagttgccttggtgtgg

SEQ ID NO: 2826083 - DNA, 25 bp, Homo sapien
tgtaagtttcctgtgaagtcctggg

SEQ ID NO: 2826084 - DNA, 25 bp, Homo sapien
tgtcatttgagcagttttggccaga

SEQ ID NO: 2826085 - DNA, 25 bp, Homo sapien
gctgttccagcacatagagtgcctc

SEQ ID NO: 2826086 - DNA, 25 bp, Homo sapien
tacagctcctatgggcaatccctct

SEQ ID NO: 2826087 - DNA, 25 bp, Homo sapien
ccattgttgctagtccctggatgcc

SEQ ID NO: 2826088 - DNA, 25 bp, Homo sapien
tcagcacatcagcacgtaacaggcc

SEQ ID NO: 2826089 - DNA, 25 bp, Homo sapien
tggatgcctcaacagtccttgctgg

SEQ ID NO: 2826090 - DNA, 25 bp, Homo sapien
tagacactatatcaagagaattggc

SEQ ID NO: 2826091 - DNA, 25 bp, Homo sapien
atcaagagaattggccgttggtggc

SEQ ID NO: 2826092 - DNA, 25 bp, Homo sapien
catgcccaatttgatagacactata

SEQ ID NO: 2826093 - DNA, 25 bp, Homo sapien
gagtgacaagtcatgcccaatttga

SEQ ID NO: 2826094 - DNA, 25 bp, Homo sapien
aggatctgagattcccttgttagtc

SEQ ID NO: 2826095 - DNA, 25 bp, Homo sapien
tgattttcgagatgatttcatgtgt

SEQ ID NO: 2826096 - DNA, 25 bp, Homo sapien
cttgttagtcttaactttccaatag

SEQ ID NO: 2826097 - DNA, 25 bp, Homo sapien
tttcatgtgtgatataagaacagta

SEQ ID NO: 2826098 - DNA, 25 bp, Homo sapien
ggccaccattctgtctcatctgccc

SEQ ID NO: 2826099 - DNA, 25 bp, Homo sapien
aaatctgctcatctagccctttgaa

SEQ ID NO: 2826100 - DNA, 25 bp, Homo sapien
tgttaagcttgtaatgcctatgcat

SEQ ID NO: 2826101 - DNA, 25 bp, Homo sapien
tagtcaatgtatggtgttctagaac

SEQ ID NO: 2826102 - DNA, 25 bp, Homo sapien
gatgtttcagtacctgtgtacaatg

SEQ ID NO: 2826103 - DNA, 25 bp, Homo sapien
tctgcatcctgttataatcctctgg

SEQ ID NO: 2826104 - DNA, 25 bp, Homo sapien
caatttgcttaggttcagattccaa

SEQ ID NO: 2826105 - DNA, 25 bp, Homo sapien
ccttctgtgggcagtggttctaatc

SEQ ID NO: 2826106 - DNA, 25 bp, Homo sapien
tgtttggtcaggcaatcaatttgct

SEQ ID NO: 2826107 - DNA, 25 bp, Homo sapien
tccagatgactaccttgaatgaaag

SEQ ID NO: 2826108 - DNA, 25 bp, Homo sapien
ctgtgggatacccaacccagttgga

SEQ ID NO: 2826109 - DNA, 25 bp, Homo sapien
acatcaaacaggtaccatctgtggg

SEQ ID NO: 2826110 - DNA, 25 bp, Homo sapien
gccacactcagtaaactaagcagag

SEQ ID NO: 2826111 - DNA, 25 bp, Homo sapien
cactgagatgagcaacttatgcaaa

SEQ ID NO: 2826112 - DNA, 25 bp, Homo sapien
tctaaacaacgaaataacttatctg

SEQ ID NO: 2826113 - DNA, 25 bp, Homo sapien
tctgatatattgtgagagaacttca

SEQ ID NO: 2826114 - DNA, 25 bp, Homo sapien
aactgccttcaagtagtactcagtc

SEQ ID NO: 2826115 - DNA, 25 bp, Homo sapien
agatacctgttaaatgctctggttc

SEQ ID NO: 2826116 - DNA, 25 bp, Homo sapien
cagcatagattgtatcgaagatacc

SEQ ID NO: 2826117 - DNA, 25 bp, Homo sapien
tgtgggctactgacttaaaacgaag

SEQ ID NO: 2826118 - DNA, 25 bp, Homo sapien
tagtataatgacttcttatgtgggc

SEQ ID NO: 2826119 - DNA, 25 bp, Homo sapien
ttagtcattgacagtattcagcctg

SEQ ID NO: 2826120 - DNA, 25 bp, Homo sapien
tacataatgtagagcaacggagcag

SEQ ID NO: 2826121 - DNA, 25 bp, Homo sapien
tccacgcagtgtaattgttagtcat

SEQ ID NO: 2826122 - DNA, 25 bp, Homo sapien
tgtaacattaccagcaatacatttt

SEQ ID NO: 2826123 - DNA, 25 bp, Homo sapien
tcaccttgccaggatggcctatctc

SEQ ID NO: 2826124 - DNA, 25 bp, Homo sapien
accttgccaggatggcctatctctt

SEQ ID NO: 2826125 - DNA, 25 bp, Homo sapien
tttcaccttgccaggatggcctatc

SEQ ID NO: 2826126 - DNA, 25 bp, Homo sapien
tctttttctgtgaatgaactcttca

SEQ ID NO: 2826127 - DNA, 25 bp, Homo sapien
tgctgtagtgttatccttggactcc

SEQ ID NO: 2826128 - DNA, 25 bp, Homo sapien
tgaagacagacctcaaaacgcctgc

SEQ ID NO: 2826129 - DNA, 25 bp, Homo sapien
gtattccttatatcctgagactcag

SEQ ID NO: 2826130 - DNA, 25 bp, Homo sapien
aaggaagacacagcagacaacattg

SEQ ID NO: 2826131 - DNA, 25 bp, Homo sapien
tgtttacagtccaagaaagctcgct

SEQ ID NO: 2826132 - DNA, 25 bp, Homo sapien
taatggtggcgtctagcaaactgca

SEQ ID NO: 2826133 - DNA, 25 bp, Homo sapien
cattttagaactgcagcgtgaagcc

SEQ ID NO: 2826134 - DNA, 25 bp, Homo sapien
cagggtcccatcataaagtctagag

SEQ ID NO: 2826135 - DNA, 25 bp, Homo sapien
ttttgggccactctaaacattgaaa

SEQ ID NO: 2826136 - DNA, 25 bp, Homo sapien
gacatagactgaccattgatgtgct

SEQ ID NO: 2826137 - DNA, 25 bp, Homo sapien
tgctttatgtgtgtaagttccccaa

SEQ ID NO: 2826138 - DNA, 25 bp, Homo sapien
taacagtgagaggtgcataccacat

SEQ ID NO: 2826139 - DNA, 25 bp, Homo sapien
ttatttctgatacttctaaagacat

SEQ ID NO: 2826140 - DNA, 25 bp, Homo sapien
tgttatttctgatacttctaaagac

SEQ ID NO: 2826141 - DNA, 25 bp, Homo sapien
aatgtggagcagctattgttatttc

SEQ ID NO: 2826142 - DNA, 25 bp, Homo sapien
attgttatttctgatacttctaaag

SEQ ID NO: 2826143 - DNA, 25 bp, Homo sapien
ttgttctgtgttctggacccactgt

SEQ ID NO: 2826144 - DNA, 25 bp, Homo sapien
tggacccactgtgaatgcttggggc

SEQ ID NO: 2826145 - DNA, 25 bp, Homo sapien
gtcttgaaacatcctgattgtcaca

SEQ ID NO: 2826146 - DNA, 25 bp, Homo sapien
gacacagtcattttttcctagtatg

SEQ ID NO: 2826147 - DNA, 25 bp, Homo sapien
cacgtctgcaaagtgtgtccacgca

SEQ ID NO: 2826148 - DNA, 25 bp, Homo sapien
tggagggtgatgaattatcatcccc

SEQ ID NO: 2826149 - DNA, 25 bp, Homo sapien
tgtatcccacatcttggaccaaggg

SEQ ID NO: 2826150 - DNA, 25 bp, Homo sapien
aagcagaggcacatcggcactgtgt

SEQ ID NO: 2826151 - DNA, 25 bp, Homo sapien
caggtctttggcacacatgttgtaa

SEQ ID NO: 2826152 - DNA, 25 bp, Homo sapien
tgagttgcatatcctcttcttaagg

SEQ ID NO: 2826153 - DNA, 25 bp, Homo sapien
agctggcgaatgctgtcctaccatg

SEQ ID NO: 2826154 - DNA, 25 bp, Homo sapien
ggctccaccttggaaatcatagcag

SEQ ID NO: 2826155 - DNA, 25 bp, Homo sapien
gggctttagctgaatcaataacatt

SEQ ID NO: 2826156 - DNA, 25 bp, Homo sapien
tgttgtataggttaagtgtagggct

SEQ ID NO: 2826157 - DNA, 25 bp, Homo sapien
cagccactatggcagcactctgagt

SEQ ID NO: 2826158 - DNA, 25 bp, Homo sapien
gtttgtgtataggcagagctcagat

SEQ ID NO: 2826159 - DNA, 25 bp, Homo sapien
cctccactgtgagatctgtgcccca

SEQ ID NO: 2826160 - DNA, 25 bp, Homo sapien
tgacagcctccactgtgagatctgt

SEQ ID NO: 2826161 - DNA, 25 bp, Homo sapien
gacagcctccactgtgagatctgtg

SEQ ID NO: 2826162 - DNA, 25 bp, Homo sapien
cagcctccactgtgagatctgtgcc

SEQ ID NO: 2826163 - DNA, 25 bp, Homo sapien
ctttggagctagactagtaaatccc

SEQ ID NO: 2826164 - DNA, 25 bp, Homo sapien
aatcccttgctgttggtagggttct

SEQ ID NO: 2826165 - DNA, 25 bp, Homo sapien
tagtcttcaacatacacctggctgc

SEQ ID NO: 2826166 - DNA, 25 bp, Homo sapien
gctcttttcactcctatagtcttca

SEQ ID NO: 2826167 - DNA, 25 bp, Homo sapien
ttatgcatctaattatctcctgtgg

SEQ ID NO: 2826168 - DNA, 25 bp, Homo sapien
ctaattatctcctgtggactgggca

SEQ ID NO: 2826169 - DNA, 25 bp, Homo sapien
agctcatctttgttgcgtgaatgaa

SEQ ID NO: 2826170 - DNA, 25 bp, Homo sapien
ctcatctttgttgcgtgaatgaaga

SEQ ID NO: 2826171 - DNA, 25 bp, Homo sapien
gactttacgaaatggcctgcgttct

SEQ ID NO: 2826172 - DNA, 25 bp, Homo sapien
ttgtagtagactttacgaaatggcc

SEQ ID NO: 2826173 - DNA, 25 bp, Homo sapien
cctgcgttctttcacggacacagag

SEQ ID NO: 2826174 - DNA, 25 bp, Homo sapien
acacagaggttgtccctctccactt

SEQ ID NO: 2826175 - DNA, 25 bp, Homo sapien
acagtcagctgcttccggcctctca

SEQ ID NO: 2826176 - DNA, 25 bp, Homo sapien
cagtcagctgcttccggcctctcac

SEQ ID NO: 2826177 - DNA, 25 bp, Homo sapien
cacagtcagctgcttccggcctctc

SEQ ID NO: 2826178 - DNA, 25 bp, Homo sapien
ctgctgcttcagggcttttgcacat

SEQ ID NO: 2826179 - DNA, 25 bp, Homo sapien
ttagaacaatagttctgggccgggc

SEQ ID NO: 2826180 - DNA, 25 bp, Homo sapien
aactagcttttgtagtgtgtttcac

SEQ ID NO: 2826181 - DNA, 25 bp, Homo sapien
ttgatgactccagtttaatccaagg

SEQ ID NO: 2826182 - DNA, 25 bp, Homo sapien
ggaagatcactacaagtctatttca

SEQ ID NO: 2826183 - DNA, 25 bp, Homo sapien
acctggatagcctgagtttaaagag

SEQ ID NO: 2826184 - DNA, 25 bp, Homo sapien
cctgagtttaaagagtcagggactt

SEQ ID NO: 2826185 - DNA, 25 bp, Homo sapien
tcaggcctaattgctgccgactggc

SEQ ID NO: 2826186 - DNA, 25 bp, Homo sapien
attttccactcaggcctaattgctg

SEQ ID NO: 2826187 - DNA, 25 bp, Homo sapien
caaataaggaaagattaattgtttg

SEQ ID NO: 2826188 - DNA, 25 bp, Homo sapien
tgttccctcccaagagaaatgtggg

SEQ ID NO: 2826189 - DNA, 25 bp, Homo sapien
ctgagaacaaataaggaaagattaa

SEQ ID NO: 2826190 - DNA, 25 bp, Homo sapien
tttgttccctcccaagagaaatgtg

SEQ ID NO: 2826191 - DNA, 25 bp, Homo sapien
tgtaagacagtgacgaaatggatgg

SEQ ID NO: 2826192 - DNA, 25 bp, Homo sapien
ccgatagtgctagctagtgttgtca

SEQ ID NO: 2826193 - DNA, 25 bp, Homo sapien
ggatggggatggctcacatttctca

SEQ ID NO: 2826194 - DNA, 25 bp, Homo sapien
agtaagtaatttggctgttgggctt

SEQ ID NO: 2826195 - DNA, 25 bp, Homo sapien
cattaccgaattcagcaccgtcgca

SEQ ID NO: 2826196 - DNA, 25 bp, Homo sapien
catccattaccgaattcagcaccgt

SEQ ID NO: 2826197 - DNA, 25 bp, Homo sapien
tattccacatccattaccgaattca

SEQ ID NO: 2826198 - DNA, 25 bp, Homo sapien
aattcagcaccgtcgcacccagggt

SEQ ID NO: 2826199 - DNA, 25 bp, Homo sapien
tggattactgttaggtcaacaaaac

SEQ ID NO: 2826200 - DNA, 25 bp, Homo sapien
aaatgctgctcactttatggattac

SEQ ID NO: 2826201 - DNA, 25 bp, Homo sapien
ggcagcattgattaacttgacagtg

SEQ ID NO: 2826202 - DNA, 25 bp, Homo sapien
tctgtggactgagatgtcataggga

SEQ ID NO: 2826203 - DNA, 25 bp, Homo sapien
gaagatgcatggcttacactttggt

SEQ ID NO: 2826204 - DNA, 25 bp, Homo sapien
taacctttcaataagggaagatgca

SEQ ID NO: 2826205 - DNA, 25 bp, Homo sapien
cactttggttctgttctgcggcccg

SEQ ID NO: 2826206 - DNA, 25 bp, Homo sapien
ttccatagttaaggagcagcctgca

SEQ ID NO: 2826207 - DNA, 25 bp, Homo sapien
caagcagaaggagtttaaggtgcaa

SEQ ID NO: 2826208 - DNA, 25 bp, Homo sapien
tcactttgcttgatcccaagtaaat

SEQ ID NO: 2826209 - DNA, 25 bp, Homo sapien
cactcctactctggcaataaagagt

SEQ ID NO: 2826210 - DNA, 25 bp, Homo sapien
agaaaactcaactaatttctcaagg

SEQ ID NO: 2826211 - DNA, 25 bp, Homo sapien
ggcatcctccttggttgagtcttat

SEQ ID NO: 2826212 - DNA, 25 bp, Homo sapien
ttatttatttccctgtggcatcctc

SEQ ID NO: 2826213 - DNA, 25 bp, Homo sapien
tagtcagccacagcatgacctttca

SEQ ID NO: 2826214 - DNA, 25 bp, Homo sapien
tccttggttgagtcttatgtacata

SEQ ID NO: 2826215 - DNA, 25 bp, Homo sapien
catactgcggtgatggatgacacgt

SEQ ID NO: 2826216 - DNA, 25 bp, Homo sapien
gatgtagccagtgcattgtaagccg

SEQ ID NO: 2826217 - DNA, 25 bp, Homo sapien
aatgatcatgccgtagatgtagcca

SEQ ID NO: 2826218 - DNA, 25 bp, Homo sapien
caagagatgtcttcctccatactgc

SEQ ID NO: 2826219 - DNA, 25 bp, Homo sapien
tagctttcttcagcccatgctccac

SEQ ID NO: 2826220 - DNA, 25 bp, Homo sapien
tccactggacctgtaagatttatca

SEQ ID NO: 2826221 - DNA, 25 bp, Homo sapien
ccatgctccactggacctgtaagat

SEQ ID NO: 2826222 - DNA, 25 bp, Homo sapien
tatattctaaggcaagtttaagttg

SEQ ID NO: 2826223 - DNA, 25 bp, Homo sapien
cttgcctgcagccagcggtaatcaa

SEQ ID NO: 2826224 - DNA, 25 bp, Homo sapien
agcggtaatcaaacctgtcatctgc

SEQ ID NO: 2826225 - DNA, 25 bp, Homo sapien
gtcatctgctaacagctctttactg

SEQ ID NO: 2826226 - DNA, 25 bp, Homo sapien
tcagggatccatatgtcttgcctgc

SEQ ID NO: 2826227 - DNA, 25 bp, Homo sapien
agagagcctgtgctgattctccctc

SEQ ID NO: 2826228 - DNA, 25 bp, Homo sapien
cgagcccctctacccattcacaata

SEQ ID NO: 2826229 - DNA, 25 bp, Homo sapien
ctccacgagcccctctacccattca

SEQ ID NO: 2826230 - DNA, 25 bp, Homo sapien
tgaatgccacggcttcagagagcct

SEQ ID NO: 2826231 - DNA, 25 bp, Homo sapien
attgtgagtggcaaagaataaaggc

SEQ ID NO: 2826232 - DNA, 25 bp, Homo sapien
cttcaaatcgacttctatattgtga

SEQ ID NO: 2826233 - DNA, 25 bp, Homo sapien
gacttctatattgtgagtggcaaag

SEQ ID NO: 2826234 - DNA, 25 bp, Homo sapien
aatcgacttctatattgtgagtggc

SEQ ID NO: 2826235 - DNA, 25 bp, Homo sapien
aggagtcctccatgggatattttac

SEQ ID NO: 2826236 - DNA, 25 bp, Homo sapien
gaaggagtcctccatgggatatttt

SEQ ID NO: 2826237 - DNA, 25 bp, Homo sapien
aaggagtcctccatgggatatttta

SEQ ID NO: 2826238 - DNA, 25 bp, Homo sapien
tgaaggagtcctccatgggatattt

SEQ ID NO: 2826239 - DNA, 25 bp, Homo sapien
tcatctacagcccaggtagaaatcc

SEQ ID NO: 2826240 - DNA, 25 bp, Homo sapien
cctcatctacagcccaggtagaaat

SEQ ID NO: 2826241 - DNA, 25 bp, Homo sapien
tctacagcccaggtagaaatcctac

SEQ ID NO: 2826242 - DNA, 25 bp, Homo sapien
acagcccaggtagaaatcctacatg

SEQ ID NO: 2826243 - DNA, 25 bp, Homo sapien
gcagaagcaagtttcgaagtcacag

SEQ ID NO: 2826244 - DNA, 25 bp, Homo sapien
gctgccagcgtagaaacccatgaaa

SEQ ID NO: 2826245 - DNA, 25 bp, Homo sapien
gctagtggtaaagtgcacagtccca

SEQ ID NO: 2826246 - DNA, 25 bp, Homo sapien
cagcttaattcagggcagggacatt

SEQ ID NO: 2826247 - DNA, 25 bp, Homo sapien
ggatgatccttgaaagccctttaga

SEQ ID NO: 2826248 - DNA, 25 bp, Homo sapien
ccctttagaagggtgccatgttgga

SEQ ID NO: 2826249 - DNA, 25 bp, Homo sapien
gcttccaaggtcagtacataggtaa

SEQ ID NO: 2826250 - DNA, 25 bp, Homo sapien
ggaaacctgtacatccacaacaagt

SEQ ID NO: 2826251 - DNA, 25 bp, Homo sapien
tacaatcagccatgtgaacaacccc

SEQ ID NO: 2826252 - DNA, 25 bp, Homo sapien
tgaacaaccccaatatcaccatgac

SEQ ID NO: 2826253 - DNA, 25 bp, Homo sapien
ggtgtccttgttactgcccccatta

SEQ ID NO: 2826254 - DNA, 25 bp, Homo sapien
tactcattctgcatattggcagccc

SEQ ID NO: 2826255 - DNA, 25 bp, Homo sapien
tccatttctatgaagtatctagcgt

SEQ ID NO: 2826256 - DNA, 25 bp, Homo sapien
acattcagagacataagccagtcac

SEQ ID NO: 2826257 - DNA, 25 bp, Homo sapien
cactctcgggcagtcctttatagaa

SEQ ID NO: 2826258 - DNA, 25 bp, Homo sapien
aagtggaactttggttgacagaggc

SEQ ID NO: 2826259 - DNA, 25 bp, Homo sapien
tgaaccagacatgaacgcttaaatc

SEQ ID NO: 2826260 - DNA, 25 bp, Homo sapien
tcagaactagtattgcaatagctgc

SEQ ID NO: 2826261 - DNA, 25 bp, Homo sapien
ggcctatgtgcaattctgaaccaga

SEQ ID NO: 2826262 - DNA, 25 bp, Homo sapien
tccattctcgacacaaaaaccaggg

SEQ ID NO: 2826263 - DNA, 25 bp, Homo sapien
tacttctagaaggagcgggcacaaa

SEQ ID NO: 2826264 - DNA, 25 bp, Homo sapien
gaatgtgaactccatcagagcaggg

SEQ ID NO: 2826265 - DNA, 25 bp, Homo sapien
tataaaccatagcttcgtgacaccc

SEQ ID NO: 2826266 - DNA, 25 bp, Homo sapien
tgctcaccagtctgacaaagagtgg

SEQ ID NO: 2826267 - DNA, 25 bp, Homo sapien
aacctgtgactttgtcctcagtcaa

SEQ ID NO: 2826268 - DNA, 25 bp, Homo sapien
catggtgacagatttttgcagaacc

SEQ ID NO: 2826269 - DNA, 25 bp, Homo sapien
tttccccagtttaatctggtcagga

SEQ ID NO: 2826270 - DNA, 25 bp, Homo sapien
ggaacaaagcagagcaccgagatca

SEQ ID NO: 2826271 - DNA, 25 bp, Homo sapien
catggtgatgaatgagtctcaggag

SEQ ID NO: 2826272 - DNA, 25 bp, Homo sapien
aaggcaagtccagtgtttgacaatc

SEQ ID NO: 2826273 - DNA, 25 bp, Homo sapien
aattaggtgtgaaatactctgtctg

SEQ ID NO: 2826274 - DNA, 25 bp, Homo sapien
taccatatgagacgtgcctttaacc

SEQ ID NO: 2826275 - DNA, 25 bp, Homo sapien
gcagacacggttaaatcaagtctgg

SEQ ID NO: 2826276 - DNA, 25 bp, Homo sapien
gacacggttaaatcaagtctggagt

SEQ ID NO: 2826277 - DNA, 25 bp, Homo sapien
cacggttaaatcaagtctggagttt

SEQ ID NO: 2826278 - DNA, 25 bp, Homo sapien
caagcagacacggttaaatcaagtc

SEQ ID NO: 2826279 - DNA, 25 bp, Homo sapien
ttaacagcgctttgaaggcccacca

SEQ ID NO: 2826280 - DNA, 25 bp, Homo sapien
gacagtttgtcagagtgcagctcct

SEQ ID NO: 2826281 - DNA, 25 bp, Homo sapien
tcaaatagagatatctggatcctgg

SEQ ID NO: 2826282 - DNA, 25 bp, Homo sapien
ttaccacctcggacaaatggcggct

SEQ ID NO: 2826283 - DNA, 25 bp, Homo sapien
aaatcctccaaatctgtgagtcctc

SEQ ID NO: 2826284 - DNA, 25 bp, Homo sapien
actttacaagtgtgtaatagaaggg

SEQ ID NO: 2826285 - DNA, 25 bp, Homo sapien
ctccaaatctgtgagtcctctgcat

SEQ ID NO: 2826286 - DNA, 25 bp, Homo sapien
aactttacaagtgtgtaatagaagg

SEQ ID NO: 2826287 - DNA, 25 bp, Homo sapien
tggtggtgtccagtgtaaatttccc

SEQ ID NO: 2826288 - DNA, 25 bp, Homo sapien
ctagcaaaccttggaggcacttatg

SEQ ID NO: 2826289 - DNA, 25 bp, Homo sapien
tgctaaagagcacttgtaagagaac

SEQ ID NO: 2826290 - DNA, 25 bp, Homo sapien
tggccaaaatcttaaatccacagga

SEQ ID NO: 2826291 - DNA, 25 bp, Homo sapien
cactggtgcactagtgggttcagaa

SEQ ID NO: 2826292 - DNA, 25 bp, Homo sapien
ggtcatctggcataacaggtaacat

SEQ ID NO: 2826293 - DNA, 25 bp, Homo sapien
gggttcagaatttcagcacttccaa

SEQ ID NO: 2826294 - DNA, 25 bp, Homo sapien
tctgtatgaggcctgacccttggtg

SEQ ID NO: 2826295 - DNA, 25 bp, Homo sapien
tttacgcagcgaaaagctaagtgtg

SEQ ID NO: 2826296 - DNA, 25 bp, Homo sapien
caagtggactaaatgccaggctgac

SEQ ID NO: 2826297 - DNA, 25 bp, Homo sapien
gagttaatgaacgagtctgccaggc

SEQ ID NO: 2826298 - DNA, 25 bp, Homo sapien
taataattcttagacgcagagcatc

SEQ ID NO: 2826299 - DNA, 25 bp, Homo sapien
tctgtccattgttgtatccccaaaa

SEQ ID NO: 2826300 - DNA, 25 bp, Homo sapien
ctccaagagtgttgtagcaatttgc

SEQ ID NO: 2826301 - DNA, 25 bp, Homo sapien
gtcaaactggtacttggcagatcaa

SEQ ID NO: 2826302 - DNA, 25 bp, Homo sapien
gatcaagcactctctattatagcca

SEQ ID NO: 2826303 - DNA, 25 bp, Homo sapien
gataccccatcagtatagctcacta

SEQ ID NO: 2826304 - DNA, 25 bp, Homo sapien
atgctccccagtggccaccatattg

SEQ ID NO: 2826305 - DNA, 25 bp, Homo sapien
aacctggtggtaccatgctccccag

SEQ ID NO: 2826306 - DNA, 25 bp, Homo sapien
tgatgccaaacagtatagatacccc

SEQ ID NO: 2826307 - DNA, 25 bp, Homo sapien
aatctgttcactgttaatgctagag

SEQ ID NO: 2826308 - DNA, 25 bp, Homo sapien
aaaaatattcctattgcaactgggc

SEQ ID NO: 2826309 - DNA, 25 bp, Homo sapien
caccttaagtatatgagatgtggat

SEQ ID NO: 2826310 - DNA, 25 bp, Homo sapien
gatgtggatgggcataatttctgag

SEQ ID NO: 2826311 - DNA, 25 bp, Homo sapien
cctgtgatctgggatagaatacaaa

SEQ ID NO: 2826312 - DNA, 25 bp, Homo sapien
tttaaaatagcaccacttgaggaag

SEQ ID NO: 2826313 - DNA, 25 bp, Homo sapien
aatgttcagcattacccaatatggg

SEQ ID NO: 2826314 - DNA, 25 bp, Homo sapien
taagttcaaagtccctaagcaggtg

SEQ ID NO: 2826315 - DNA, 25 bp, Homo sapien
tggagctctatggagtgcaccactg

SEQ ID NO: 2826316 - DNA, 25 bp, Homo sapien
ggtgagtggacggtcatgcccatca

SEQ ID NO: 2826317 - DNA, 25 bp, Homo sapien
tcagcgatctcaaccacaaaaggcg

SEQ ID NO: 2826318 - DNA, 25 bp, Homo sapien
tcttgccactgttgatgatcgagca

SEQ ID NO: 2826319 - DNA, 25 bp, Homo sapien
ggcttggtcaaggtgataaagaact

SEQ ID NO: 2826320 - DNA, 25 bp, Homo sapien
acatgtttgccgtccaaccaggtgg

SEQ ID NO: 2826321 - DNA, 25 bp, Homo sapien
tgctgacccacccaatgccatagtg

SEQ ID NO: 2826322 - DNA, 25 bp, Homo sapien
ccattggtgtcaggcccagcgttgg

SEQ ID NO: 2826323 - DNA, 25 bp, Homo sapien
tcaacagatgtcttccaaaagtcag

SEQ ID NO: 2826324 - DNA, 25 bp, Homo sapien
aagtcaacagatgtcttccaaaagt

SEQ ID NO: 2826325 - DNA, 25 bp, Homo sapien
caacagatgtcttccaaaagtcagc

SEQ ID NO: 2826326 - DNA, 25 bp, Homo sapien
agaaagtcaacagatgtcttccaaa

SEQ ID NO: 2826327 - DNA, 25 bp, Homo sapien
gggaagacatgttcaaacataagca

SEQ ID NO: 2826328 - DNA, 25 bp, Homo sapien
ttagaggaatcaattactagaaccc

SEQ ID NO: 2826329 - DNA, 25 bp, Homo sapien
tagaaccctataggaggtagggatg

SEQ ID NO: 2826330 - DNA, 25 bp, Homo sapien
tcaaagggaaacataaggccttaga

SEQ ID NO: 2826331 - DNA, 25 bp, Homo sapien
gatcaagcaggtccatgacttcgct

SEQ ID NO: 2826332 - DNA, 25 bp, Homo sapien
ccttgatcaagcaggtccatgactt

SEQ ID NO: 2826333 - DNA, 25 bp, Homo sapien
caagggccaaaccttgatcaagcag

SEQ ID NO: 2826334 - DNA, 25 bp, Homo sapien
caaaccttgatcaagcaggtccatg

SEQ ID NO: 2826335 - DNA, 25 bp, Homo sapien
tgcctggggcaacctaaatgccttc

SEQ ID NO: 2826336 - DNA, 25 bp, Homo sapien
tgcagggttttccaatgagatccac

SEQ ID NO: 2826337 - DNA, 25 bp, Homo sapien
gatccacgagcgtcctcagcaaatc

SEQ ID NO: 2826338 - DNA, 25 bp, Homo sapien
cagcaccattcctatggcaggaagg

SEQ ID NO: 2826339 - DNA, 25 bp, Homo sapien
cttcatgttccacaccttttccttc

SEQ ID NO: 2826340 - DNA, 25 bp, Homo sapien
aggggaacgcagcttcatgttccac

SEQ ID NO: 2826341 - DNA, 25 bp, Homo sapien
tctggatttcaacagactgggttca

SEQ ID NO: 2826342 - DNA, 25 bp, Homo sapien
gaatacatctcaattacggaaagac

SEQ ID NO: 2826343 - DNA, 25 bp, Homo sapien
tgcttaaaataaggacgcctccctc

SEQ ID NO: 2826344 - DNA, 25 bp, Homo sapien
tcatacctgtcgagatgctgctaga

SEQ ID NO: 2826345 - DNA, 25 bp, Homo sapien
tggtaaatgggaaaggaaaaatgca

SEQ ID NO: 2826346 - DNA, 25 bp, Homo sapien
atgggaaaggaaaaatgcaaagacg

SEQ ID NO: 2826347 - DNA, 25 bp, Homo sapien
catgaaatccttgatgacacgatga

SEQ ID NO: 2826348 - DNA, 25 bp, Homo sapien
ttgatgacacgatgaaacttgcttc

SEQ ID NO: 2826349 - DNA, 25 bp, Homo sapien
gatgacacgatgaaacttgcttcct

SEQ ID NO: 2826350 - DNA, 25 bp, Homo sapien
gaaatccttgatgacacgatgaaac

SEQ ID NO: 2826351 - DNA, 25 bp, Homo sapien
tacagaacttgattctatcccagct

SEQ ID NO: 2826352 - DNA, 25 bp, Homo sapien
caatttccagaagcctaagggcact

SEQ ID NO: 2826353 - DNA, 25 bp, Homo sapien
gcactgagtgcccaaataatacata

SEQ ID NO: 2826354 - DNA, 25 bp, Homo sapien
taacaagtaacagaggccatactga

SEQ ID NO: 2826355 - DNA, 25 bp, Homo sapien
tctcctgttgctagagcaacaaaat

SEQ ID NO: 2826356 - DNA, 25 bp, Homo sapien
gccaatcacaattctgccaacatct

SEQ ID NO: 2826357 - DNA, 25 bp, Homo sapien
tccaaagaggccaatcacaattctg

SEQ ID NO: 2826358 - DNA, 25 bp, Homo sapien
tctccaatcctcacatcaaagaaga

SEQ ID NO: 2826359 - DNA, 25 bp, Homo sapien
tctgaaatagaacgcttgaaaaggc

SEQ ID NO: 2826360 - DNA, 25 bp, Homo sapien
tgattctgaaatagaacgcttgaaa

SEQ ID NO: 2826361 - DNA, 25 bp, Homo sapien
gaaatagaacgcttgaaaaggccac

SEQ ID NO: 2826362 - DNA, 25 bp, Homo sapien
ttctgaaatagaacgcttgaaaagg

SEQ ID NO: 2826363 - DNA, 25 bp, Homo sapien
agaggagagatgctgacgtaagcat

SEQ ID NO: 2826364 - DNA, 25 bp, Homo sapien
gcagaggagagatgctgacgtaagc

SEQ ID NO: 2826365 - DNA, 25 bp, Homo sapien
ggcagaggagagatgctgacgtaag

SEQ ID NO: 2826366 - DNA, 25 bp, Homo sapien
cagaggagagatgctgacgtaagca

SEQ ID NO: 2826367 - DNA, 25 bp, Homo sapien
tccaagcagactgcggcggaggtag

SEQ ID NO: 2826368 - DNA, 25 bp, Homo sapien
gacccgggacaagaagtccaagcag

SEQ ID NO: 2826369 - DNA, 25 bp, Homo sapien
aagtacttgggcagtctctttcctg

SEQ ID NO: 2826370 - DNA, 25 bp, Homo sapien
aggccacgctgaaggaagtacttgg

SEQ ID NO: 2826371 - DNA, 25 bp, Homo sapien
gaagaaaacacaagtgcgccgagcc

SEQ ID NO: 2826372 - DNA, 25 bp, Homo sapien
aagcacgagaggtagcagcagccga

SEQ ID NO: 2826373 - DNA, 25 bp, Homo sapien
gagccccacgcaaagcacgagaggt

SEQ ID NO: 2826374 - DNA, 25 bp, Homo sapien
ttggccgtcaccgaggggcctcgct

SEQ ID NO: 2826375 - DNA, 25 bp, Homo sapien
ctctgggacagctgacgggactgcc

SEQ ID NO: 2826376 - DNA, 25 bp, Homo sapien
gggcgcgttcctcccaagttcagac

SEQ ID NO: 2826377 - DNA, 25 bp, Homo sapien
gactcgcgacccgaacttgggattc

SEQ ID NO: 2826378 - DNA, 25 bp, Homo sapien
acttgggattcggaggagcgcgccc

SEQ ID NO: 2826379 - DNA, 25 bp, Homo sapien
ggcatccactgtgggccacatgctt

SEQ ID NO: 2826380 - DNA, 25 bp, Homo sapien
ccactgtgggccacatgctttatac

SEQ ID NO: 2826381 - DNA, 25 bp, Homo sapien
gagggcatccactgtgggccacatg

SEQ ID NO: 2826382 - DNA, 25 bp, Homo sapien
tctgcttcaggggagggcatccact

SEQ ID NO: 2826383 - DNA, 25 bp, Homo sapien
taagcctcgggatcgacttgtgccc

SEQ ID NO: 2826384 - DNA, 25 bp, Homo sapien
tattcacccatcgatttgggagcga

SEQ ID NO: 2826385 - DNA, 25 bp, Homo sapien
aactattgagatgcgccagggtggc

SEQ ID NO: 2826386 - DNA, 25 bp, Homo sapien
cttgaatcggattacccaggtacgc

SEQ ID NO: 2826387 - DNA, 25 bp, Homo sapien
tcgaagcatcctgaatgagacccgg

SEQ ID NO: 2826388 - DNA, 25 bp, Homo sapien
cagagactttctaatggtggcaggg

SEQ ID NO: 2826389 - DNA, 25 bp, Homo sapien
cgagcagattaattgaaacgggcct

SEQ ID NO: 2826390 - DNA, 25 bp, Homo sapien
caagaaggcaaatgacgggaccgcc

SEQ ID NO: 2826391 - DNA, 25 bp, Homo sapien
gcctgaggccaacgcggctcgggcg

SEQ ID NO: 2826392 - DNA, 25 bp, Homo sapien
cctggcgcctgaggccaacgcggct

SEQ ID NO: 2826393 - DNA, 25 bp, Homo sapien
gcctcctggcgcctgaggccaacgc

SEQ ID NO: 2826394 - DNA, 25 bp, Homo sapien
ggcgcctgaggccaacgcggctcgg

SEQ ID NO: 2826395 - DNA, 25 bp, Homo sapien
caggcccgctcaagggcagcggcgc

SEQ ID NO: 2826396 - DNA, 25 bp, Homo sapien
ctccgccggacagcctgcgcccgcg

SEQ ID NO: 2826397 - DNA, 25 bp, Homo sapien
ccgcgggtctcctgagcgcgccgca

SEQ ID NO: 2826398 - DNA, 25 bp, Homo sapien
tggcagcaactcttccctcacggag

SEQ ID NO: 2826399 - DNA, 25 bp, Homo sapien
cctcctcctgcgctgctgcggccgc

SEQ ID NO: 2826400 - DNA, 25 bp, Homo sapien
cgctgccgccgcgctggctggtctc

SEQ ID NO: 2826401 - DNA, 25 bp, Homo sapien
gcctcctcctgcgctgctgcggccg

SEQ ID NO: 2826402 - DNA, 25 bp, Homo sapien
tgccgccgcgctggctggtctctcg

SEQ ID NO: 2826403 - DNA, 25 bp, Homo sapien
tttgagtctcaccctcctcagggag

SEQ ID NO: 2826404 - DNA, 25 bp, Homo sapien
gggttgcccgtgtcaccagaatccc

SEQ ID NO: 2826405 - DNA, 25 bp, Homo sapien
gctctatgaggactaacacagccat

SEQ ID NO: 2826406 - DNA, 25 bp, Homo sapien
cctggagaggacttgcagaaagctc

SEQ ID NO: 2826407 - DNA, 25 bp, Homo sapien
gtccacaagcatcaataagcactag

SEQ ID NO: 2826408 - DNA, 25 bp, Homo sapien
tattccggttgagttgtccacaagc

SEQ ID NO: 2826409 - DNA, 25 bp, Homo sapien
tccgtgagataccacaaatatgttt

SEQ ID NO: 2826410 - DNA, 25 bp, Homo sapien
aagaaaaacatgatcgacttgcatc

SEQ ID NO: 2826411 - DNA, 25 bp, Homo sapien
cagtttccgggcatagagaagcccc

SEQ ID NO: 2826412 - DNA, 25 bp, Homo sapien
tagacttagtggcagtgacagagcc

SEQ ID NO: 2826413 - DNA, 25 bp, Homo sapien
tcctgctccgtctaaaggtggcagt

SEQ ID NO: 2826414 - DNA, 25 bp, Homo sapien
gacagagccagggtaactctcctgc

SEQ ID NO: 2826415 - DNA, 25 bp, Homo sapien
tatccacatggtgcttccacctgac

SEQ ID NO: 2826416 - DNA, 25 bp, Homo sapien
gatctctggcgtgggagactcatat

SEQ ID NO: 2826417 - DNA, 25 bp, Homo sapien
ctctggcgtgggagactcatatcca

SEQ ID NO: 2826418 - DNA, 25 bp, Homo sapien
tccacatggtgcttccacctgacaa

SEQ ID NO: 2826419 - DNA, 25 bp, Homo sapien
cagcttgaagtattgtagactcagt

SEQ ID NO: 2826420 - DNA, 25 bp, Homo sapien
gcacctgaagtccttgaaagaaaat

SEQ ID NO: 2826421 - DNA, 25 bp, Homo sapien
gaataaactctaccaggatatatga

SEQ ID NO: 2826422 - DNA, 25 bp, Homo sapien
ctcagtaggaaaactaagtagttct

SEQ ID NO: 2826423 - DNA, 25 bp, Homo sapien
ggcatctccctgtccacttgagcac

SEQ ID NO: 2826424 - DNA, 25 bp, Homo sapien
gcacagagcttcgtggcagtcatag

SEQ ID NO: 2826425 - DNA, 25 bp, Homo sapien
gagcacagagcttcgtggcagtcat

SEQ ID NO: 2826426 - DNA, 25 bp, Homo sapien
agagcttcgtggcagtcatagtccc

SEQ ID NO: 2826427 - DNA, 25 bp, Homo sapien
ctgccacgcggccttgaactggtgg

SEQ ID NO: 2826428 - DNA, 25 bp, Homo sapien
ctcagagatgatctgtggcacagca

SEQ ID NO: 2826429 - DNA, 25 bp, Homo sapien
ttcgtgccatgtagcattctcagag

SEQ ID NO: 2826430 - DNA, 25 bp, Homo sapien
ggcacagcatgaggagtgctcccag

SEQ ID NO: 2826431 - DNA, 25 bp, Homo sapien
tctgttctgattaggcaggatgaga

SEQ ID NO: 2826432 - DNA, 25 bp, Homo sapien
tgtgagaggagcttcacgcaggcca

SEQ ID NO: 2826433 - DNA, 25 bp, Homo sapien
ccagctgagccgacaccagcggatg

SEQ ID NO: 2826434 - DNA, 25 bp, Homo sapien
cctccaccaggtgcgagaggtgtga

SEQ ID NO: 2826435 - DNA, 25 bp, Homo sapien
cactgctcatgcactttttacacgg

SEQ ID NO: 2826436 - DNA, 25 bp, Homo sapien
ttcgctgagtcaatgctaccttcag

SEQ ID NO: 2826437 - DNA, 25 bp, Homo sapien
gaagcagagtgagagccttcgctga

SEQ ID NO: 2826438 - DNA, 25 bp, Homo sapien
tgcactttttacacggtttcttcca

SEQ ID NO: 2826439 - DNA, 25 bp, Homo sapien
tattgttccgaagcagctcgttgag

SEQ ID NO: 2826440 - DNA, 25 bp, Homo sapien
tgtacggagcttcataatacgttat

SEQ ID NO: 2826441 - DNA, 25 bp, Homo sapien
gaggacttattttgtcctgtcaaga

SEQ ID NO: 2826442 - DNA, 25 bp, Homo sapien
cctgtcaagattgcaagaacatgta

SEQ ID NO: 2826443 - DNA, 25 bp, Homo sapien
ccattgcgttgtagaaacttgacca

SEQ ID NO: 2826444 - DNA, 25 bp, Homo sapien
tccagtgctgccaaggattgtgcca

SEQ ID NO: 2826445 - DNA, 25 bp, Homo sapien
ggtgtcttgatctggaaatcgctgt

SEQ ID NO: 2826446 - DNA, 25 bp, Homo sapien
ttgaccaatgtacggcaagatctca

SEQ ID NO: 2826447 - DNA, 25 bp, Homo sapien
cgaaatgcttctcatgtctctgcag

SEQ ID NO: 2826448 - DNA, 25 bp, Homo sapien
gatttccagagtcacagttgtgcca

SEQ ID NO: 2826449 - DNA, 25 bp, Homo sapien
gagtccaactgtccaatccagggca

SEQ ID NO: 2826450 - DNA, 25 bp, Homo sapien
caaggtttcacagactttactcgaa

SEQ ID NO: 2826451 - DNA, 25 bp, Homo sapien
ttgagaaagtttgggtagattgtct

SEQ ID NO: 2826452 - DNA, 25 bp, Homo sapien
ggtagattgtctgcctacctatcac

SEQ ID NO: 2826453 - DNA, 25 bp, Homo sapien
tgtctgtttcagaggaaacttcggg

SEQ ID NO: 2826454 - DNA, 25 bp, Homo sapien
ggtttacatggcatccattatctaa

SEQ ID NO: 2826455 - DNA, 25 bp, Homo sapien
tctttccatcgggtatagaagatgg

SEQ ID NO: 2826456 - DNA, 25 bp, Homo sapien
ccagtaactgcatctggctcgaagt

SEQ ID NO: 2826457 - DNA, 25 bp, Homo sapien
aatggccttgcttgtgatgagaaac

SEQ ID NO: 2826458 - DNA, 25 bp, Homo sapien
tccaggatctctaggtaaacccgaa

SEQ ID NO: 2826459 - DNA, 25 bp, Homo sapien
tatcatcatccttactacagatttg

SEQ ID NO: 2826460 - DNA, 25 bp, Homo sapien
tcatccttactacagatttgctttt

SEQ ID NO: 2826461 - DNA, 25 bp, Homo sapien
gaatattctcgtatttattcttgga

SEQ ID NO: 2826462 - DNA, 25 bp, Homo sapien
tctcgtatttattcttggacttctt

SEQ ID NO: 2826463 - DNA, 25 bp, Homo sapien
taaaacagctgctaatttgaattct

SEQ ID NO: 2826464 - DNA, 25 bp, Homo sapien
aaaacagctgctaatttgaattcta

SEQ ID NO: 2826465 - DNA, 25 bp, Homo sapien
ttaaaacagctgctaatttgaattc

SEQ ID NO: 2826466 - DNA, 25 bp, Homo sapien
gtagcagtattatcctaggccttca

SEQ ID NO: 2826467 - DNA, 25 bp, Homo sapien
tgcgtggatcttgcaggcagttgca

SEQ ID NO: 2826468 - DNA, 25 bp, Homo sapien
tgtagactaagtgtagagtgttcat

SEQ ID NO: 2826469 - DNA, 25 bp, Homo sapien
tgttcataaagtccacggtagcagt

SEQ ID NO: 2826470 - DNA, 25 bp, Homo sapien
gcttttgagggacttggataactcc

SEQ ID NO: 2826471 - DNA, 25 bp, Homo sapien
cacactgcgattgcagcaggacaga

SEQ ID NO: 2826472 - DNA, 25 bp, Homo sapien
ccatgagggccgtgacatatgcaat

SEQ ID NO: 2826473 - DNA, 25 bp, Homo sapien
tgcaatacatgcctcataaccaggg

SEQ ID NO: 2826474 - DNA, 25 bp, Homo sapien
taggcgggagcagcatgtataaaat

SEQ ID NO: 2826475 - DNA, 25 bp, Homo sapien
catagacactaataggcgggagcag

SEQ ID NO: 2826476 - DNA, 25 bp, Homo sapien
tgtcaactaggtcatagacactaat

SEQ ID NO: 2826477 - DNA, 25 bp, Homo sapien
actaataggcgggagcagcatgtat

SEQ ID NO: 2826478 - DNA, 25 bp, Homo sapien
tgcccgaagcatcaggtactttcca

SEQ ID NO: 2826479 - DNA, 25 bp, Homo sapien
tgagtgtttggaaggtctcttttag

SEQ ID NO: 2826480 - DNA, 25 bp, Homo sapien
ggtactttccactaaccacgctgag

SEQ ID NO: 2826481 - DNA, 25 bp, Homo sapien
cactaaccacgctgagtgtttggaa

SEQ ID NO: 2826482 - DNA, 25 bp, Homo sapien
aagaccttagggtgtggctgggtca

SEQ ID NO: 2826483 - DNA, 25 bp, Homo sapien
ttagggtgtggctgggtcaggtaga

SEQ ID NO: 2826484 - DNA, 25 bp, Homo sapien
tcccagaagaccttagggtgtggct

SEQ ID NO: 2826485 - DNA, 25 bp, Homo sapien
accttagggtgtggctgggtcaggt

SEQ ID NO: 2826486 - DNA, 25 bp, Homo sapien
ggctgccattgtggtcttctctttt

SEQ ID NO: 2826487 - DNA, 25 bp, Homo sapien
atgtgctctcagtggcaggttccaa

SEQ ID NO: 2826488 - DNA, 25 bp, Homo sapien
tgctctcagtggcaggttccaaggc

SEQ ID NO: 2826489 - DNA, 25 bp, Homo sapien
gctctcagtggcaggttccaaggca

SEQ ID NO: 2826490 - DNA, 25 bp, Homo sapien
gactcttgtgcagaaaactttcagc

SEQ ID NO: 2826491 - DNA, 25 bp, Homo sapien
ttcagcataagaacactgggtaggc

SEQ ID NO: 2826492 - DNA, 25 bp, Homo sapien
caattctaagtttcaaggagtctcc

SEQ ID NO: 2826493 - DNA, 25 bp, Homo sapien
cagatttgaggcacagtttgaagca

SEQ ID NO: 2826494 - DNA, 25 bp, Homo sapien
aatagccaaaagagctttacaaaag

SEQ ID NO: 2826495 - DNA, 25 bp, Homo sapien
tatttgttaagttacaatagccaaa

SEQ ID NO: 2826496 - DNA, 25 bp, Homo sapien
tttatttgttaagttacaatagcca

SEQ ID NO: 2826497 - DNA, 25 bp, Homo sapien
tacaaaaggcaaaataaactacaca

SEQ ID NO: 2826498 - DNA, 25 bp, Homo sapien
gagtgaatctcgtgcgcttttgaaa

SEQ ID NO: 2826499 - DNA, 25 bp, Homo sapien
tacagagggtttaagctgacagcta

SEQ ID NO: 2826500 - DNA, 25 bp, Homo sapien
cagggcactgcataaatccaatgag

SEQ ID NO: 2826501 - DNA, 25 bp, Homo sapien
tctagcgtttgaaagcagtcacagg

SEQ ID NO: 2826502 - DNA, 25 bp, Homo sapien
ggacgcagcgtttttaaagtgcaag

SEQ ID NO: 2826503 - DNA, 25 bp, Homo sapien
taaactggttacaattggtctcaac

SEQ ID NO: 2826504 - DNA, 25 bp, Homo sapien
taaaaccagtgtgggagaggtagca

SEQ ID NO: 2826505 - DNA, 25 bp, Homo sapien
cattcaaatggaataggacgcagcg

SEQ ID NO: 2826506 - DNA, 25 bp, Homo sapien
tattattcgatcctcgtgattatac

SEQ ID NO: 2826507 - DNA, 25 bp, Homo sapien
aaatctctctgatctgtcggtcgag

SEQ ID NO: 2826508 - DNA, 25 bp, Homo sapien
tgatctgtcggtcgagttcacttat

SEQ ID NO: 2826509 - DNA, 25 bp, Homo sapien
gagttcacttattattcgatcctcg

SEQ ID NO: 2826510 - DNA, 25 bp, Homo sapien
tttcttctatcaggcgagtcaaata

SEQ ID NO: 2826511 - DNA, 25 bp, Homo sapien
tccctttcttctatcaggcgagtca

SEQ ID NO: 2826512 - DNA, 25 bp, Homo sapien
tccacttgcaatctctgtggaatcc

SEQ ID NO: 2826513 - DNA, 25 bp, Homo sapien
ccaatacactgccatgggggccatc

SEQ ID NO: 2826514 - DNA, 25 bp, Homo sapien
cgtagtctcatctgttccaattctt

SEQ ID NO: 2826515 - DNA, 25 bp, Homo sapien
tatccaacaattcttgtcgctcggt

SEQ ID NO: 2826516 - DNA, 25 bp, Homo sapien
tcagcggcaaggtaacgtagtctca

SEQ ID NO: 2826517 - DNA, 25 bp, Homo sapien
tgttttttaagacgagccatttgac

SEQ ID NO: 2826518 - DNA, 25 bp, Homo sapien
aataaatatcaaattcaggatagtg

SEQ ID NO: 2826519 - DNA, 25 bp, Homo sapien
taataaatatcaaattcaggatagt

SEQ ID NO: 2826520 - DNA, 25 bp, Homo sapien
agcattcatcataatgctctgtttc

SEQ ID NO: 2826521 - DNA, 25 bp, Homo sapien
gaagacacagttgagaaagggacac

SEQ ID NO: 2826522 - DNA, 25 bp, Homo sapien
aagcattcatcataatgctctgttt

SEQ ID NO: 2826523 - DNA, 25 bp, Homo sapien
aagacacagttgagaaagggacaca

SEQ ID NO: 2826524 - DNA, 25 bp, Homo sapien
cgtccccactgctgcttgtaatgca

SEQ ID NO: 2826525 - DNA, 25 bp, Homo sapien
gttctttcaaagctcgtccccactg

SEQ ID NO: 2826526 - DNA, 25 bp, Homo sapien
ctgtttaagtctggcaagttctttc

SEQ ID NO: 2826527 - DNA, 25 bp, Homo sapien
cagtttagacttagttgcagattcc

SEQ ID NO: 2826528 - DNA, 25 bp, Homo sapien
ctgtagacggatttctggtttgttg

SEQ ID NO: 2826529 - DNA, 25 bp, Homo sapien
tggtccttgaactgttggaactctt

SEQ ID NO: 2826530 - DNA, 25 bp, Homo sapien
ttgctggtccttgaactgttggaac

SEQ ID NO: 2826531 - DNA, 25 bp, Homo sapien
tgttttgctggtccttgaactgttg

SEQ ID NO: 2826532 - DNA, 25 bp, Homo sapien
tgttctagatgggtgaatcttcctg

SEQ ID NO: 2826533 - DNA, 25 bp, Homo sapien
gcctggcttataccagtcttagaca

SEQ ID NO: 2826534 - DNA, 25 bp, Homo sapien
gaagcattactggtgaatcccatca

SEQ ID NO: 2826535 - DNA, 25 bp, Homo sapien
gagcccctattatgtgctgacaact

SEQ ID NO: 2826536 - DNA, 25 bp, Homo sapien
ttctagttctacttggtgaatacag

SEQ ID NO: 2826537 - DNA, 25 bp, Homo sapien
aaggcggtgtttatcctcttcgagc

SEQ ID NO: 2826538 - DNA, 25 bp, Homo sapien
gaatacagtcctctttggccctacg

SEQ ID NO: 2826539 - DNA, 25 bp, Homo sapien
tgcagttcttgcaggttccgctgac

SEQ ID NO: 2826540 - DNA, 25 bp, Homo sapien
gctgctctcgcttctccaagtcaat

SEQ ID NO: 2826541 - DNA, 25 bp, Homo sapien
attccacactagcaagctgctgctc

SEQ ID NO: 2826542 - DNA, 25 bp, Homo sapien
tccttctagaatagtatattcagcc

SEQ ID NO: 2826543 - DNA, 25 bp, Homo sapien
ccaagtcaattagagttttttgaag

SEQ ID NO: 2826544 - DNA, 25 bp, Homo sapien
aatagcttaaacgtttgaggcattc

SEQ ID NO: 2826545 - DNA, 25 bp, Homo sapien
ccagagactgtctttaacgcaaata

SEQ ID NO: 2826546 - DNA, 25 bp, Homo sapien
tgaggcattctattaacttacagat

SEQ ID NO: 2826547 - DNA, 25 bp, Homo sapien
ctttacagtgaaacgcctcccttct

SEQ ID NO: 2826548 - DNA, 25 bp, Homo sapien
gcctgcatatgagccagttctttct

SEQ ID NO: 2826549 - DNA, 25 bp, Homo sapien
tgattctctttctcggtcccttttc

SEQ ID NO: 2826550 - DNA, 25 bp, Homo sapien
ctgcatatgagccagttctttctgc

SEQ ID NO: 2826551 - DNA, 25 bp, Homo sapien
agcctgcatatgagccagttctttc

SEQ ID NO: 2826552 - DNA, 25 bp, Homo sapien
tctaacgtttcacgaggctctgtct

SEQ ID NO: 2826553 - DNA, 25 bp, Homo sapien
aagacggcttttgctgtacggcaga

SEQ ID NO: 2826554 - DNA, 25 bp, Homo sapien
ctagctcaagtgctgctttgtattc

SEQ ID NO: 2826555 - DNA, 25 bp, Homo sapien
gatctctgaaggacaaggtgctgga

SEQ ID NO: 2826556 - DNA, 25 bp, Homo sapien
gtgtaagaaagatctgctatcctgt

SEQ ID NO: 2826557 - DNA, 25 bp, Homo sapien
tactagtccataatcttctagagtc

SEQ ID NO: 2826558 - DNA, 25 bp, Homo sapien
aatctcacgcatttttactagtcca

SEQ ID NO: 2826559 - DNA, 25 bp, Homo sapien
tcttctagagtcactgtgtaagaaa

SEQ ID NO: 2826560 - DNA, 25 bp, Homo sapien
gacgccaacactgttcaccattaga

SEQ ID NO: 2826561 - DNA, 25 bp, Homo sapien
tgctgctataacaggcacactttca

SEQ ID NO: 2826562 - DNA, 25 bp, Homo sapien
tccttgtgccatagttcaaccagta

SEQ ID NO: 2826563 - DNA, 25 bp, Homo sapien
tcactgtaagtttgacgccaacact

SEQ ID NO: 2826564 - DNA, 25 bp, Homo sapien
tgcagctgatgaggcatagttgcaa

SEQ ID NO: 2826565 - DNA, 25 bp, Homo sapien
gatgaggcatagttgcaaaatcaaa

SEQ ID NO: 2826566 - DNA, 25 bp, Homo sapien
tcttgcagctgatgaggcatagttg

SEQ ID NO: 2826567 - DNA, 25 bp, Homo sapien
gctgatgaggcatagttgcaaaatc

SEQ ID NO: 2826568 - DNA, 25 bp, Homo sapien
acttccaaagaatggatatgagtac

SEQ ID NO: 2826569 - DNA, 25 bp, Homo sapien
ataggagctgcacttccaaagaatg

SEQ ID NO: 2826570 - DNA, 25 bp, Homo sapien
aataggagctgcacttccaaagaat

SEQ ID NO: 2826571 - DNA, 25 bp, Homo sapien
tgcacttccaaagaatggatatgag

SEQ ID NO: 2826572 - DNA, 25 bp, Homo sapien
cttttagtccactgatttaacaaat

SEQ ID NO: 2826573 - DNA, 25 bp, Homo sapien
tactccttaagtctattgaaaagca

SEQ ID NO: 2826574 - DNA, 25 bp, Homo sapien
caatctccaaggcatgtatactcct

SEQ ID NO: 2826575 - DNA, 25 bp, Homo sapien
gttgctggtacagcaatcttctgtc

SEQ ID NO: 2826576 - DNA, 25 bp, Homo sapien
atgttgctggtacagcaatcttctg

SEQ ID NO: 2826577 - DNA, 25 bp, Homo sapien
gaagcattggatgtagtcactagct

SEQ ID NO: 2826578 - DNA, 25 bp, Homo sapien
cattggatgtagtcactagctgggc

SEQ ID NO: 2826579 - DNA, 25 bp, Homo sapien
actagctgggccagtgaagcaggta

SEQ ID NO: 2826580 - DNA, 25 bp, Homo sapien
cactagctgggccagtgaagcaggt

SEQ ID NO: 2826581 - DNA, 25 bp, Homo sapien
gtgattttggcccagtaagtgtctt

SEQ ID NO: 2826582 - DNA, 25 bp, Homo sapien
tgttggaggtgactggttgtgagat

SEQ ID NO: 2826583 - DNA, 25 bp, Homo sapien
cactgttggtgattttggcccagta

SEQ ID NO: 2826584 - DNA, 25 bp, Homo sapien
gaacaggggacactgttggtgattt

SEQ ID NO: 2826585 - DNA, 25 bp, Homo sapien
tcctttcccagtttggatattccta

SEQ ID NO: 2826586 - DNA, 25 bp, Homo sapien
ctttcccagtttggatattcctagt

SEQ ID NO: 2826587 - DNA, 25 bp, Homo sapien
cctttcccagtttggatattcctag

SEQ ID NO: 2826588 - DNA, 25 bp, Homo sapien
tccttatagcatctaggaccagaaa

SEQ ID NO: 2826589 - DNA, 25 bp, Homo sapien
acagaggaaatatgatatccagagc

SEQ ID NO: 2826590 - DNA, 25 bp, Homo sapien
tatccagagctgaataccaaaatgc

SEQ ID NO: 2826591 - DNA, 25 bp, Homo sapien
ctatttttcttcgtaatttgcaaat

SEQ ID NO: 2826592 - DNA, 25 bp, Homo sapien
tctctgcagagccacagacactccc

SEQ ID NO: 2826593 - DNA, 25 bp, Homo sapien
tctgcagagccacagacactcccac

SEQ ID NO: 2826594 - DNA, 25 bp, Homo sapien
ttctctctgcagagccacagacact

SEQ ID NO: 2826595 - DNA, 25 bp, Homo sapien
ctgggagtctatgccttctctctgc

SEQ ID NO: 2826596 - DNA, 25 bp, Homo sapien
ggctagctccacaggaataggtgca

SEQ ID NO: 2826597 - DNA, 25 bp, Homo sapien
tgatttctgtactgccctttttaag

SEQ ID NO: 2826598 - DNA, 25 bp, Homo sapien
tcaagggtaaaagcaccttcgactg

SEQ ID NO: 2826599 - DNA, 25 bp, Homo sapien
ccttcgactgtgactgggtgctggt

SEQ ID NO: 2826600 - DNA, 25 bp, Homo sapien
tcattgcttttaacggcagtaaggc

SEQ ID NO: 2826601 - DNA, 25 bp, Homo sapien
tattcaactcaagggcagattttag

SEQ ID NO: 2826602 - DNA, 25 bp, Homo sapien
tgagctaccatgctccaccaatgtt

SEQ ID NO: 2826603 - DNA, 25 bp, Homo sapien
ggagtccaattcaaaaatagttcat

SEQ ID NO: 2826604 - DNA, 25 bp, Homo sapien
taaacacgaagaatttctacactgc

SEQ ID NO: 2826605 - DNA, 25 bp, Homo sapien
tcattgaagggttcatttgtaacat

SEQ ID NO: 2826606 - DNA, 25 bp, Homo sapien
tctacactgctacggatgcgaactg

SEQ ID NO: 2826607 - DNA, 25 bp, Homo sapien
tgctacggatgcgaactgatgctct

SEQ ID NO: 2826608 - DNA, 25 bp, Homo sapien
atttgatgtcttaaccgctcaaata

SEQ ID NO: 2826609 - DNA, 25 bp, Homo sapien
atgtcttaaccgctcaaataaaatt

SEQ ID NO: 2826610 - DNA, 25 bp, Homo sapien
ttaaccgctcaaataaaatttctga

SEQ ID NO: 2826611 - DNA, 25 bp, Homo sapien
ttgatgtcttaaccgctcaaataaa

SEQ ID NO: 2826612 - DNA, 25 bp, Homo sapien
gtttattgctagatgctttctcaca

SEQ ID NO: 2826613 - DNA, 25 bp, Homo sapien
cacattgcctttgactaagttgaga

SEQ ID NO: 2826614 - DNA, 25 bp, Homo sapien
gaagcaagattgtcactagccggcc

SEQ ID NO: 2826615 - DNA, 25 bp, Homo sapien
gctaagtcactgatttgcatctgaa

SEQ ID NO: 2826616 - DNA, 25 bp, Homo sapien
caagagagcattatatgggaacaag

SEQ ID NO: 2826617 - DNA, 25 bp, Homo sapien
gaacaattatgcttccctaaggagg

SEQ ID NO: 2826618 - DNA, 25 bp, Homo sapien
ccacgtggtcagaaatacttgggcc

SEQ ID NO: 2826619 - DNA, 25 bp, Homo sapien
tacttgggccattaactagctgtaa

SEQ ID NO: 2826620 - DNA, 25 bp, Homo sapien
tgttccaactgggtagcaaatgcta

SEQ ID NO: 2826621 - DNA, 25 bp, Homo sapien
aatctgatggtagcctccctcttca

SEQ ID NO: 2826622 - DNA, 25 bp, Homo sapien
gacataataaaggagtcagtacagt

SEQ ID NO: 2826623 - DNA, 25 bp, Homo sapien
tcagtacagtattctgctggtccaa

SEQ ID NO: 2826624 - DNA, 25 bp, Homo sapien
gggtcaagtccagccaggatggcag

SEQ ID NO: 2826625 - DNA, 25 bp, Homo sapien
tcaagtccagccaggatggcaggta

SEQ ID NO: 2826626 - DNA, 25 bp, Homo sapien
gtcaagtccagccaggatggcaggt

SEQ ID NO: 2826627 - DNA, 25 bp, Homo sapien
ctggggtcaagtccagccaggatgg

SEQ ID NO: 2826628 - DNA, 25 bp, Homo sapien
cccgcgggtggactgaggcctaggg

SEQ ID NO: 2826629 - DNA, 25 bp, Homo sapien
cgcgggtggactgaggcctagggct

SEQ ID NO: 2826630 - DNA, 25 bp, Homo sapien
tcccccgcgggtggactgaggccta

SEQ ID NO: 2826631 - DNA, 25 bp, Homo sapien
ctcccccgcgggtggactgaggcct

SEQ ID NO: 2826632 - DNA, 25 bp, Homo sapien
gcaggacgtcagaggactcggacac

SEQ ID NO: 2826633 - DNA, 25 bp, Homo sapien
ggcaggacgtcagaggactcggaca

SEQ ID NO: 2826634 - DNA, 25 bp, Homo sapien
ttgggcaggacgtcagaggactcgg

SEQ ID NO: 2826635 - DNA, 25 bp, Homo sapien
tgggcaggacgtcagaggactcgga

SEQ ID NO: 2826636 - DNA, 25 bp, Homo sapien
gctgaaggagctggcgcccaggccg

SEQ ID NO: 2826637 - DNA, 25 bp, Homo sapien
gaaggagctggcgcccaggccgtag

SEQ ID NO: 2826638 - DNA, 25 bp, Homo sapien
aggagctggcgcccaggccgtagct

SEQ ID NO: 2826639 - DNA, 25 bp, Homo sapien
tgaaggagctggcgcccaggccgta

SEQ ID NO: 2826640 - DNA, 25 bp, Homo sapien
cgccctccagcagcttcttgtaggt

SEQ ID NO: 2826641 - DNA, 25 bp, Homo sapien
tccagccggctctcctcgccctcca

SEQ ID NO: 2826642 - DNA, 25 bp, Homo sapien
cctccagcagcttcttgtaggtggc

SEQ ID NO: 2826643 - DNA, 25 bp, Homo sapien
ccagcagcttcttgtaggtggcgat

SEQ ID NO: 2826644 - DNA, 25 bp, Homo sapien
tgtccagggccagcctgacgttcat

SEQ ID NO: 2826645 - DNA, 25 bp, Homo sapien
ccagggccagcctgacgttcatcag

SEQ ID NO: 2826646 - DNA, 25 bp, Homo sapien
gggccagcctgacgttcatcagctc

SEQ ID NO: 2826647 - DNA, 25 bp, Homo sapien
atgtccagggccagcctgacgttca

SEQ ID NO: 2826648 - DNA, 25 bp, Homo sapien
tgtcctgcttggcccgctgcagggc

SEQ ID NO: 2826649 - DNA, 25 bp, Homo sapien
gcagctgccacgccatgtcctgctt

SEQ ID NO: 2826650 - DNA, 25 bp, Homo sapien
cagctgccacgccatgtcctgcttg

SEQ ID NO: 2826651 - DNA, 25 bp, Homo sapien
cctgcttggcccgctgcagggcggc

SEQ ID NO: 2826652 - DNA, 25 bp, Homo sapien
ctttgtgcaccgcaggttatcccca

SEQ ID NO: 2826653 - DNA, 25 bp, Homo sapien
tgcaccgcaggttatccccatgctt

SEQ ID NO: 2826654 - DNA, 25 bp, Homo sapien
tcttagtctttgtgcaccgcaggtt

SEQ ID NO: 2826655 - DNA, 25 bp, Homo sapien
cagctcgacaacttggcgttagcat

SEQ ID NO: 2826656 - DNA, 25 bp, Homo sapien
ccacagatgtgtctgagatccagga

SEQ ID NO: 2826657 - DNA, 25 bp, Homo sapien
gatgtgtctgagatccaggactgca

SEQ ID NO: 2826658 - DNA, 25 bp, Homo sapien
agcgatgacgctgttcatgtccagg

SEQ ID NO: 2826659 - DNA, 25 bp, Homo sapien
acagatgtgtctgagatccaggact

SEQ ID NO: 2826660 - DNA, 25 bp, Homo sapien
cttcagtttctcctagcccagagtc

SEQ ID NO: 2826661 - DNA, 25 bp, Homo sapien
ctccatctctgcacgcttattgatc

SEQ ID NO: 2826662 - DNA, 25 bp, Homo sapien
tcagtttctcctagcccagagtctc

SEQ ID NO: 2826663 - DNA, 25 bp, Homo sapien
ccgcctccagcttcagtttctccta

SEQ ID NO: 2826664 - DNA, 25 bp, Homo sapien
tgtccatgttgctcccggccgtctt

SEQ ID NO: 2826665 - DNA, 25 bp, Homo sapien
atgttgctcccggccgtcttctgct

SEQ ID NO: 2826666 - DNA, 25 bp, Homo sapien
tgttgctcccggccgtcttctgctg

SEQ ID NO: 2826667 - DNA, 25 bp, Homo sapien
ccatgttgctcccggccgtcttctg

SEQ ID NO: 2826668 - DNA, 25 bp, Homo sapien
tgggtgcacacagcctggatgtcgg

SEQ ID NO: 2826669 - DNA, 25 bp, Homo sapien
ggtgcacacagcctggatgtcgggg

SEQ ID NO: 2826670 - DNA, 25 bp, Homo sapien
ctgggtgcacacagcctggatgtcg

SEQ ID NO: 2826671 - DNA, 25 bp, Homo sapien
gcacacagcctggatgtcggggtcc

SEQ ID NO: 2826672 - DNA, 25 bp, Homo sapien
tctggttgactgtgaccgcggtgat

SEQ ID NO: 2826673 - DNA, 25 bp, Homo sapien
caggctctggttgactgtgaccgcg

SEQ ID NO: 2826674 - DNA, 25 bp, Homo sapien
cgcccaggccaccccgaaagcagct

SEQ ID NO: 2826675 - DNA, 25 bp, Homo sapien
ttgactgtgaccgcggtgatgcctc

SEQ ID NO: 2826676 - DNA, 25 bp, Homo sapien
caccgggcccacttgtgtaggagtg

SEQ ID NO: 2826677 - DNA, 25 bp, Homo sapien
agcttgaggagctgatgtgggcacc

SEQ ID NO: 2826678 - DNA, 25 bp, Homo sapien
gcaccgggcccacttgtgtaggagt

SEQ ID NO: 2826679 - DNA, 25 bp, Homo sapien
gctgatgtgggcaccgggcccactt

SEQ ID NO: 2826680 - DNA, 25 bp, Homo sapien
gaggcaggcgggccgaaccaggcag

SEQ ID NO: 2826681 - DNA, 25 bp, Homo sapien
aggagtggaggcaggcgggccgaac

SEQ ID NO: 2826682 - DNA, 25 bp, Homo sapien
ctaatggacatggtggaggcaggag

SEQ ID NO: 2826683 - DNA, 25 bp, Homo sapien
tggaggcaggcgggccgaaccaggc

SEQ ID NO: 2826684 - DNA, 25 bp, Homo sapien
cctaatgaatgagatcaggtgccct

SEQ ID NO: 2826685 - DNA, 25 bp, Homo sapien
tggtggagagagttcctctcttgct

SEQ ID NO: 2826686 - DNA, 25 bp, Homo sapien
gtaggacgaagtccctcaccagatg

SEQ ID NO: 2826687 - DNA, 25 bp, Homo sapien
tatgtgaggatgtaggacgaagtcc

SEQ ID NO: 2826688 - DNA, 25 bp, Homo sapien
ttttggcaaacacatcgctgaaatt

SEQ ID NO: 2826689 - DNA, 25 bp, Homo sapien
aaacacatcgctgaaattcaattta

SEQ ID NO: 2826690 - DNA, 25 bp, Homo sapien
aatgtatgccattttggcaaacaca

SEQ ID NO: 2826691 - DNA, 25 bp, Homo sapien
catcgctgaaattcaatttaaccat

SEQ ID NO: 2826692 - DNA, 25 bp, Homo sapien
atgtttttagagatgatgcacaaac

SEQ ID NO: 2826693 - DNA, 25 bp, Homo sapien
gaatgtttttagagatgatgcacaa

SEQ ID NO: 2826694 - DNA, 25 bp, Homo sapien
gagaatgtttttagagatgatgcac

SEQ ID NO: 2826695 - DNA, 25 bp, Homo sapien
cagagaatgtttttagagatgatgc

SEQ ID NO: 2826696 - DNA, 25 bp, Homo sapien
ctcagacttgaatttggtgtattta

SEQ ID NO: 2826697 - DNA, 25 bp, Homo sapien
tatttattactcagcaactggtacc

SEQ ID NO: 2826698 - DNA, 25 bp, Homo sapien
actggtggctttgtatcggtttcca

SEQ ID NO: 2826699 - DNA, 25 bp, Homo sapien
tgctttaaagctatccactggtggc

SEQ ID NO: 2826700 - DNA, 25 bp, Homo sapien
aaacattagaagaggatgaaccacc

SEQ ID NO: 2826701 - DNA, 25 bp, Homo sapien
gggaatgctgacaattcactgaagc

SEQ ID NO: 2826702 - DNA, 25 bp, Homo sapien
taagcttccggtaatagcaacttgg

SEQ ID NO: 2826703 - DNA, 25 bp, Homo sapien
gcaagacagttcttggtcaaggaaa

SEQ ID NO: 2826704 - DNA, 25 bp, Homo sapien
aacattggagtttgataggagtacg

SEQ ID NO: 2826705 - DNA, 25 bp, Homo sapien
gtttcttgagcggttcttaaatcca

SEQ ID NO: 2826706 - DNA, 25 bp, Homo sapien
aaatccagaacgatgtaacctatgg

SEQ ID NO: 2826707 - DNA, 25 bp, Homo sapien
gatgtaacctatggtttccttggct

SEQ ID NO: 2826708 - DNA, 25 bp, Homo sapien
gctaactcagtagcaaattctggct

SEQ ID NO: 2826709 - DNA, 25 bp, Homo sapien
caagcatatgctttggacgtttggg

SEQ ID NO: 2826710 - DNA, 25 bp, Homo sapien
ttctggctggtcagtgtggtccaca

SEQ ID NO: 2826711 - DNA, 25 bp, Homo sapien
gaagcgctttcctgtcaatttccca

SEQ ID NO: 2826712 - DNA, 25 bp, Homo sapien
gcaagacgtgtaaagggaattgcct

SEQ ID NO: 2826713 - DNA, 25 bp, Homo sapien
tttaaggaatgtataatacaccctc

SEQ ID NO: 2826714 - DNA, 25 bp, Homo sapien
taagaactgtagtcccctgagtcct

SEQ ID NO: 2826715 - DNA, 25 bp, Homo sapien
gagtcctccagcaagacgtgtaaag

SEQ ID NO: 2826716 - DNA, 25 bp, Homo sapien
tctaggatggacacgacgatgagca

SEQ ID NO: 2826717 - DNA, 25 bp, Homo sapien
gcaattggtcggatttggagaccat

SEQ ID NO: 2826718 - DNA, 25 bp, Homo sapien
gacgatgagcaattggtcggatttg

SEQ ID NO: 2826719 - DNA, 25 bp, Homo sapien
taggatggacacgacgatgagcaat

SEQ ID NO: 2826720 - DNA, 25 bp, Homo sapien
ttgcggtgagcggtccgggggcgaa

SEQ ID NO: 2826721 - DNA, 25 bp, Homo sapien
tgcggtgagcggtccgggggcgaag

SEQ ID NO: 2826722 - DNA, 25 bp, Homo sapien
gttgcggtgagcggtccgggggcga

SEQ ID NO: 2826723 - DNA, 25 bp, Homo sapien
gtccagttgagtcgcgggtaatccg

SEQ ID NO: 2826724 - DNA, 25 bp, Homo sapien
taactgtgccccgactcaaggaaaa

SEQ ID NO: 2826725 - DNA, 25 bp, Homo sapien
agatcctaactgtgccccgactcaa

SEQ ID NO: 2826726 - DNA, 25 bp, Homo sapien
accgccgtctgctgcagcgcgcccg

SEQ ID NO: 2826727 - DNA, 25 bp, Homo sapien
accttttgccgcctgcgtagccgct

SEQ ID NO: 2826728 - DNA, 25 bp, Homo sapien
tgcgtagccgcttttcaaacgcccg

SEQ ID NO: 2826729 - DNA, 25 bp, Homo sapien
tgccgcctgcgtagccgcttttcaa

SEQ ID NO: 2826730 - DNA, 25 bp, Homo sapien
agacaagcccgccacccgaggacct

SEQ ID NO: 2826731 - DNA, 25 bp, Homo sapien
gagccctaaggaggacgccttcatt

SEQ ID NO: 2826732 - DNA, 25 bp, Homo sapien
gccctaaggaggacgccttcattac

SEQ ID NO: 2826733 - DNA, 25 bp, Homo sapien
agccctaaggaggacgccttcatta

SEQ ID NO: 2826734 - DNA, 25 bp, Homo sapien
gctgcgcaagcgcactactgctgta

SEQ ID NO: 2826735 - DNA, 25 bp, Homo sapien
gcttcctgaagctgcgtagccttta

SEQ ID NO: 2826736 - DNA, 25 bp, Homo sapien
agcctttaaggagcgtgagtgtagc

SEQ ID NO: 2826737 - DNA, 25 bp, Homo sapien
cgccctctgctagccggacgaggag

SEQ ID NO: 2826738 - DNA, 25 bp, Homo sapien
ttttcatgagtatgggtccctaatg

SEQ ID NO: 2826739 - DNA, 25 bp, Homo sapien
ggttttcatgagtatgggtccctaa

SEQ ID NO: 2826740 - DNA, 25 bp, Homo sapien
tggttttcatgagtatgggtcccta

SEQ ID NO: 2826741 - DNA, 25 bp, Homo sapien
gttttcatgagtatgggtccctaat

SEQ ID NO: 2826742 - DNA, 25 bp, Homo sapien
gaggtggaacttcatagcagttttt

SEQ ID NO: 2826743 - DNA, 25 bp, Homo sapien
agaggtggaacttcatagcagtttt

SEQ ID NO: 2826744 - DNA, 25 bp, Homo sapien
aagaggtggaacttcatagcagttt

SEQ ID NO: 2826745 - DNA, 25 bp, Homo sapien
aaagaggtggaacttcatagcagtt

SEQ ID NO: 2826746 - DNA, 25 bp, Homo sapien
taataaataagttggtaatacctca

SEQ ID NO: 2826747 - DNA, 25 bp, Homo sapien
ataaataagttggtaatacctcata

SEQ ID NO: 2826748 - DNA, 25 bp, Homo sapien
aatacctcataaaagtgctgttttt

SEQ ID NO: 2826749 - DNA, 25 bp, Homo sapien
taatacctcataaaagtgctgtttt

SEQ ID NO: 2826750 - DNA, 25 bp, Homo sapien
tagggaatttgcttcgatgcttcat

SEQ ID NO: 2826751 - DNA, 25 bp, Homo sapien
tcttgatgccacattctactccctt

SEQ ID NO: 2826752 - DNA, 25 bp, Homo sapien
tcctgcctcttgatgccacattcta

SEQ ID NO: 2826753 - DNA, 25 bp, Homo sapien
tctactcccttgagtgctttaggga

SEQ ID NO: 2826754 - DNA, 25 bp, Homo sapien
tctctttaaacttcacgcttggggc

SEQ ID NO: 2826755 - DNA, 25 bp, Homo sapien
tctctggcaaatggactcatgaaag

SEQ ID NO: 2826756 - DNA, 25 bp, Homo sapien
agctaaacggaagcccatcacagtg

SEQ ID NO: 2826757 - DNA, 25 bp, Homo sapien
tcacagtgcaccctctgagctatgg

SEQ ID NO: 2826758 - DNA, 25 bp, Homo sapien
acagtgcaccctctgagctatggcc

SEQ ID NO: 2826759 - DNA, 25 bp, Homo sapien
ctaagctaaacggaagcccatcaca

SEQ ID NO: 2826760 - DNA, 25 bp, Homo sapien
accatttcagggtgttccagacacc

SEQ ID NO: 2826761 - DNA, 25 bp, Homo sapien
tcatcatcagattttgtaattaaat

SEQ ID NO: 2826762 - DNA, 25 bp, Homo sapien
gaggctacaatatgatcatcatcag

SEQ ID NO: 2826763 - DNA, 25 bp, Homo sapien
aactttgataccatttcagggtgtt

SEQ ID NO: 2826764 - DNA, 25 bp, Homo sapien
tagtgatgtaagagtgctcttcact

SEQ ID NO: 2826765 - DNA, 25 bp, Homo sapien
cttagtgatgtaagagtgctcttca

SEQ ID NO: 2826766 - DNA, 25 bp, Homo sapien
ttagtgatgtaagagtgctcttcac

SEQ ID NO: 2826767 - DNA, 25 bp, Homo sapien
ccttagtgatgtaagagtgctcttc

SEQ ID NO: 2826768 - DNA, 25 bp, Homo sapien
ttctgaacagaatgggaaataccag

SEQ ID NO: 2826769 - DNA, 25 bp, Homo sapien
cttctaggggcataaaggttcttct

SEQ ID NO: 2826770 - DNA, 25 bp, Homo sapien
gatgttggtcttctaggggcataaa

SEQ ID NO: 2826771 - DNA, 25 bp, Homo sapien
gacacaaaggtttgtggatttaatc

SEQ ID NO: 2826772 - DNA, 25 bp, Homo sapien
catgtggtctttagctgtggagcac

SEQ ID NO: 2826773 - DNA, 25 bp, Homo sapien
tgtcactacagatgctcttagctag

SEQ ID NO: 2826774 - DNA, 25 bp, Homo sapien
tgatgtgaatccatccagatccaga

SEQ ID NO: 2826775 - DNA, 25 bp, Homo sapien
tcttagctaggatatgcatgtggtc

SEQ ID NO: 2826776 - DNA, 25 bp, Homo sapien
tgacgccctttatgactgccacatg

SEQ ID NO: 2826777 - DNA, 25 bp, Homo sapien
agtgacgccctttatgactgccaca

SEQ ID NO: 2826778 - DNA, 25 bp, Homo sapien
gacgccctttatgactgccacatgc

SEQ ID NO: 2826779 - DNA, 25 bp, Homo sapien
gtgacgccctttatgactgccacat

SEQ ID NO: 2826780 - DNA, 25 bp, Homo sapien
ggttgctaagcgatagcttccccaa

SEQ ID NO: 2826781 - DNA, 25 bp, Homo sapien
gatctagctgttgtatgtgactggc

SEQ ID NO: 2826782 - DNA, 25 bp, Homo sapien
cagcccctggctattgttacagttc

SEQ ID NO: 2826783 - DNA, 25 bp, Homo sapien
taaaatatgttgctctactcccagc

SEQ ID NO: 2826784 - DNA, 25 bp, Homo sapien
taagtaccaccgtacttagaccagc

SEQ ID NO: 2826785 - DNA, 25 bp, Homo sapien
gcaattcgttgtaagtaccaccgta

SEQ ID NO: 2826786 - DNA, 25 bp, Homo sapien
tgtaagtaccaccgtacttagacca

SEQ ID NO: 2826787 - DNA, 25 bp, Homo sapien
agcaattcgttgtaagtaccaccgt

SEQ ID NO: 2826788 - DNA, 25 bp, Homo sapien
tgtgcgctgcaacttgataacttgg

SEQ ID NO: 2826789 - DNA, 25 bp, Homo sapien
tttttggaacctggcgggctgagca

SEQ ID NO: 2826790 - DNA, 25 bp, Homo sapien
tagtagctctcctaaagcatggtgg

SEQ ID NO: 2826791 - DNA, 25 bp, Homo sapien
gtgatgtcatactcctaggccgggc

SEQ ID NO: 2826792 - DNA, 25 bp, Homo sapien
tagggcgcggcttaggctttataca

SEQ ID NO: 2826793 - DNA, 25 bp, Homo sapien
ggcgatccgaccaatccaagaaggt

SEQ ID NO: 2826794 - DNA, 25 bp, Homo sapien
tgcaatcttcggctctactcggctg

SEQ ID NO: 2826795 - DNA, 25 bp, Homo sapien
tactcggctgttttcgctgatgcgg

SEQ ID NO: 2826796 - DNA, 25 bp, Homo sapien
cagaaggatgtttgacctccggata

SEQ ID NO: 2826797 - DNA, 25 bp, Homo sapien
tcattccgggctgcatcggtggcga

SEQ ID NO: 2826798 - DNA, 25 bp, Homo sapien
ctccggataagcgaggcgctgctgt

SEQ ID NO: 2826799 - DNA, 25 bp, Homo sapien
agtgcagggaccgaatccgagcagc

SEQ ID NO: 2826800 - DNA, 25 bp, Homo sapien
gccgccggcgggtgtgatgtgccgc

SEQ ID NO: 2826801 - DNA, 25 bp, Homo sapien
cggccgccggcgggtgtgatgtgcc

SEQ ID NO: 2826802 - DNA, 25 bp, Homo sapien
ctccggccgccggcgggtgtgatgt

SEQ ID NO: 2826803 - DNA, 25 bp, Homo sapien
gccggcgggtgtgatgtgccgccgc

SEQ ID NO: 2826804 - DNA, 25 bp, Homo sapien
tgacactgagaagcatcgggtctct

SEQ ID NO: 2826805 - DNA, 25 bp, Homo sapien
gagaagcatcgggtctcttggtcca

SEQ ID NO: 2826806 - DNA, 25 bp, Homo sapien
agcatcgggtctcttggtccacagc

SEQ ID NO: 2826807 - DNA, 25 bp, Homo sapien
gagggagatgtgtgtctactcgtgg

SEQ ID NO: 2826808 - DNA, 25 bp, Homo sapien
taaagaattcaaagtggagtaccgc

SEQ ID NO: 2826809 - DNA, 25 bp, Homo sapien
gggacacaacactcgaggaactggg

SEQ ID NO: 2826810 - DNA, 25 bp, Homo sapien
gacctagtggtcgatcgggacacaa

SEQ ID NO: 2826811 - DNA, 25 bp, Homo sapien
ggaactgggtcttcatcgtctggag

SEQ ID NO: 2826812 - DNA, 25 bp, Homo sapien
tgttgaacatgtggtgagtctcaag

SEQ ID NO: 2826813 - DNA, 25 bp, Homo sapien
tgtgtgcgtatagctgccagaaagt

SEQ ID NO: 2826814 - DNA, 25 bp, Homo sapien
ggcaggcagaaatagctccattgac

SEQ ID NO: 2826815 - DNA, 25 bp, Homo sapien
taattgtttgaggagctcttttgcc

SEQ ID NO: 2826816 - DNA, 25 bp, Homo sapien
gaaatctcaccgaaacttactgctg

SEQ ID NO: 2826817 - DNA, 25 bp, Homo sapien
ccagaggtactgaggaaaaagcaat

SEQ ID NO: 2826818 - DNA, 25 bp, Homo sapien
aaaacatgagtgctttgcccatcag

SEQ ID NO: 2826819 - DNA, 25 bp, Homo sapien
tgcagaagtggcaaaagcgcttatt

SEQ ID NO: 2826820 - DNA, 25 bp, Homo sapien
gcaggtatgttcaggttaagccaac

SEQ ID NO: 2826821 - DNA, 25 bp, Homo sapien
taaactgcaggagttacatactgag

SEQ ID NO: 2826822 - DNA, 25 bp, Homo sapien
tctgtcaacactaatgaagtcaaca

SEQ ID NO: 2826823 - DNA, 25 bp, Homo sapien
cacatgaacaccacaaatcaggaca

SEQ ID NO: 2826824 - DNA, 25 bp, Homo sapien
tcatggacggtgtgaggctggtagt

SEQ ID NO: 2826825 - DNA, 25 bp, Homo sapien
gggtggtaaactccatctatggcta

SEQ ID NO: 2826826 - DNA, 25 bp, Homo sapien
ctgcttgggaatgcagacgaaagag

SEQ ID NO: 2826827 - DNA, 25 bp, Homo sapien
cccaggtcttcccagagttgggctg

SEQ ID NO: 2826828 - DNA, 25 bp, Homo sapien
cttctcctgatgactctgtacttcc

SEQ ID NO: 2826829 - DNA, 25 bp, Homo sapien
ctgaagagggaagaagtaatgcgtt

SEQ ID NO: 2826830 - DNA, 25 bp, Homo sapien
ggaagaagtaatgcgttgttccagg

SEQ ID NO: 2826831 - DNA, 25 bp, Homo sapien
gatgactctgtacttccttggttcc

SEQ ID NO: 2826832 - DNA, 25 bp, Homo sapien
gagctttgtctgtctataagaccca

SEQ ID NO: 2826833 - DNA, 25 bp, Homo sapien
cagtgtgtcgttctttactgcaggc

SEQ ID NO: 2826834 - DNA, 25 bp, Homo sapien
tccctgcaagagtgtattggtcctt

SEQ ID NO: 2826835 - DNA, 25 bp, Homo sapien
tgacagcagcgcttaaatcagtgtg

SEQ ID NO: 2826836 - DNA, 25 bp, Homo sapien
cccagagttgcgtgtttctgcagat

SEQ ID NO: 2826837 - DNA, 25 bp, Homo sapien
tgtgagtcagagtcaatgaaatcac

SEQ ID NO: 2826838 - DNA, 25 bp, Homo sapien
gaatggtggtgttacactgtcagac

SEQ ID NO: 2826839 - DNA, 25 bp, Homo sapien
tattgaggtcaacatctccttctgt

SEQ ID NO: 2826840 - DNA, 25 bp, Homo sapien
ccactttgtgtaagaaagcatcact

SEQ ID NO: 2826841 - DNA, 25 bp, Homo sapien
tgccttaattgaaatggcatacagc

SEQ ID NO: 2826842 - DNA, 25 bp, Homo sapien
tgttttgattcaaactcgtatgcct

SEQ ID NO: 2826843 - DNA, 25 bp, Homo sapien
gcatacagcaagaaacgctccactt

SEQ ID NO: 2826844 - DNA, 25 bp, Homo sapien
gaaactatactggtcaggaatctgg

SEQ ID NO: 2826845 - DNA, 25 bp, Homo sapien
aaccatggggtccagaaactatact

SEQ ID NO: 2826846 - DNA, 25 bp, Homo sapien
ttgagctgaaagtcagtgggccctg

SEQ ID NO: 2826847 - DNA, 25 bp, Homo sapien
tcagaagagatatggaagctggttg

SEQ ID NO: 2826848 - DNA, 25 bp, Homo sapien
cataaagattggagatacggagttg

SEQ ID NO: 2826849 - DNA, 25 bp, Homo sapien
aaagattggagatacggagttggtc

SEQ ID NO: 2826850 - DNA, 25 bp, Homo sapien
gacagcataaagattggagatacgg

SEQ ID NO: 2826851 - DNA, 25 bp, Homo sapien
gatacggagttggtcgtgggttgaa

SEQ ID NO: 2826852 - DNA, 25 bp, Homo sapien
gtttctatttcattatgcctagtaa

SEQ ID NO: 2826853 - DNA, 25 bp, Homo sapien
atttttgtctatggtttctatttca

SEQ ID NO: 2826854 - DNA, 25 bp, Homo sapien
tatggtttctatttcattatgccta

SEQ ID NO: 2826855 - DNA, 25 bp, Homo sapien
tggtttctatttcattatgcctagt

SEQ ID NO: 2826856 - DNA, 25 bp, Homo sapien
cggatggcatcaccgtgtactcctc

SEQ ID NO: 2826857 - DNA, 25 bp, Homo sapien
tccaaaagcaagacactttctttgt

SEQ ID NO: 2826858 - DNA, 25 bp, Homo sapien
tggttattagatttgtggtgggagg

SEQ ID NO: 2826859 - DNA, 25 bp, Homo sapien
tcttgtggttattagatttgtggtg

SEQ ID NO: 2826860 - DNA, 25 bp, Homo sapien
ctgtggagataagagttccttgatg

SEQ ID NO: 2826861 - DNA, 25 bp, Homo sapien
tggagataagagttccttgatgaat

SEQ ID NO: 2826862 - DNA, 25 bp, Homo sapien
tgtggagataagagttccttgatga

SEQ ID NO: 2826863 - DNA, 25 bp, Homo sapien
gagataagagttccttgatgaattg

SEQ ID NO: 2826864 - DNA, 25 bp, Homo sapien
cagtagaagtactgcccacagctct

SEQ ID NO: 2826865 - DNA, 25 bp, Homo sapien
tctgtgtgaacagtagaagtactgc

SEQ ID NO: 2826866 - DNA, 25 bp, Homo sapien
gaacagtagaagtactgcccacagc

SEQ ID NO: 2826867 - DNA, 25 bp, Homo sapien
tgtgaacagtagaagtactgcccac

SEQ ID NO: 2826868 - DNA, 25 bp, Homo sapien
ggcaagcagggatggtaaaatgact

SEQ ID NO: 2826869 - DNA, 25 bp, Homo sapien
caccactggctacgtttctttctca

SEQ ID NO: 2826870 - DNA, 25 bp, Homo sapien
cctagctttctcttcttgacaagca

SEQ ID NO: 2826871 - DNA, 25 bp, Homo sapien
agggatggtaaaatgactaacattg

SEQ ID NO: 2826872 - DNA, 25 bp, Homo sapien
cttccaacttcaaggtcgctggaac

SEQ ID NO: 2826873 - DNA, 25 bp, Homo sapien
caaggtcgctggaactgaatcagac

SEQ ID NO: 2826874 - DNA, 25 bp, Homo sapien
tgaatcagacataaccagtaggtgg

SEQ ID NO: 2826875 - DNA, 25 bp, Homo sapien
cagtaggtgggaagacagcgaaaaa

SEQ ID NO: 2826876 - DNA, 25 bp, Homo sapien
tcccatcggtgtgggcttgttggac

SEQ ID NO: 2826877 - DNA, 25 bp, Homo sapien
cttagggctgagtgcatcccatcgg

SEQ ID NO: 2826878 - DNA, 25 bp, Homo sapien
ttggacgcccgtgcaggtggtcacc

SEQ ID NO: 2826879 - DNA, 25 bp, Homo sapien
ctgagtgcatcccatcggtgtgggc

SEQ ID NO: 2826880 - DNA, 25 bp, Homo sapien
gcaagcagatatatgaaacaagttt

SEQ ID NO: 2826881 - DNA, 25 bp, Homo sapien
caagcagatatatgaaacaagttta

SEQ ID NO: 2826882 - DNA, 25 bp, Homo sapien
gagcaagcagatatatgaaacaagt

SEQ ID NO: 2826883 - DNA, 25 bp, Homo sapien
ctgagcaagcagatatatgaaacaa

SEQ ID NO: 2826884 - DNA, 25 bp, Homo sapien
agtgcttgtcaacttgtttaaattc

SEQ ID NO: 2826885 - DNA, 25 bp, Homo sapien
gtgcttgtcaacttgtttaaattca

SEQ ID NO: 2826886 - DNA, 25 bp, Homo sapien
tgcttgtcaacttgtttaaattcat

SEQ ID NO: 2826887 - DNA, 25 bp, Homo sapien
gccacgaaataaaaattgtagcctc

SEQ ID NO: 2826888 - DNA, 25 bp, Homo sapien
cacgaaataaaaattgtagcctctc

SEQ ID NO: 2826889 - DNA, 25 bp, Homo sapien
gaaataaaaattgtagcctctccat

SEQ ID NO: 2826890 - DNA, 25 bp, Homo sapien
agccacgaaataaaaattgtagcct

SEQ ID NO: 2826891 - DNA, 25 bp, Homo sapien
gccacataatgttggtatcacaaat

SEQ ID NO: 2826892 - DNA, 25 bp, Homo sapien
ttatctgtgctgtataagccgtgag

SEQ ID NO: 2826893 - DNA, 25 bp, Homo sapien
tgaggcaaggaaatgcagtgataga

SEQ ID NO: 2826894 - DNA, 25 bp, Homo sapien
ttgtccattgaacaacttggagaaa

SEQ ID NO: 2826895 - DNA, 25 bp, Homo sapien
gttgctactgctccaaataatagtc

SEQ ID NO: 2826896 - DNA, 25 bp, Homo sapien
ttttttatcatctgaagtctctttc

SEQ ID NO: 2826897 - DNA, 25 bp, Homo sapien
ctgttgctactgctccaaataatag

SEQ ID NO: 2826898 - DNA, 25 bp, Homo sapien
ctggctctgttgctactgctccaaa

SEQ ID NO: 2826899 - DNA, 25 bp, Homo sapien
gacatagtgtaacgggtgtttctga

SEQ ID NO: 2826900 - DNA, 25 bp, Homo sapien
tgctgagtttgtcggctttgagaga

SEQ ID NO: 2826901 - DNA, 25 bp, Homo sapien
cacattgaattaggtcattgctgag

SEQ ID NO: 2826902 - DNA, 25 bp, Homo sapien
gggtgtttctgacgatccgtgcaca

SEQ ID NO: 2826903 - DNA, 25 bp, Homo sapien
gtgcatttacatgtgatgatttcac

SEQ ID NO: 2826904 - DNA, 25 bp, Homo sapien
catgtgatgatttcacccccctttc

SEQ ID NO: 2826905 - DNA, 25 bp, Homo sapien
catttacatgtgatgatttcacccc

SEQ ID NO: 2826906 - DNA, 25 bp, Homo sapien
tacatgtgatgatttcacccccctt

SEQ ID NO: 2826907 - DNA, 25 bp, Homo sapien
tgagccagtgtgagtacaattttcg

SEQ ID NO: 2826908 - DNA, 25 bp, Homo sapien
cagtgtgagtacaattttcgatggc

SEQ ID NO: 2826909 - DNA, 25 bp, Homo sapien
cacagaccgtaatcagctcattagc

SEQ ID NO: 2826910 - DNA, 25 bp, Homo sapien
gctcatgtgagccagtgtgagtaca

SEQ ID NO: 2826911 - DNA, 25 bp, Homo sapien
agggaacttcagttttagcagcagc

SEQ ID NO: 2826912 - DNA, 25 bp, Homo sapien
gttttagcagcagcctagaagtgtg

SEQ ID NO: 2826913 - DNA, 25 bp, Homo sapien
gttattgatatgaattccctttatg

SEQ ID NO: 2826914 - DNA, 25 bp, Homo sapien
gatatgaattccctttatgatgtaa

SEQ ID NO: 2826915 - DNA, 25 bp, Homo sapien
tcttaagatgtcatctgaaagaccc

SEQ ID NO: 2826916 - DNA, 25 bp, Homo sapien
agaccctgtccaatcaattctgtgc

SEQ ID NO: 2826917 - DNA, 25 bp, Homo sapien
aattctgtgctacccaatttacctg

SEQ ID NO: 2826918 - DNA, 25 bp, Homo sapien
gatgtcatctgaaagaccctgtcca

SEQ ID NO: 2826919 - DNA, 25 bp, Homo sapien
ggaattctgaaacgtatgtgactga

SEQ ID NO: 2826920 - DNA, 25 bp, Homo sapien
gaaatgcatagcacatgaggcaaaa

SEQ ID NO: 2826921 - DNA, 25 bp, Homo sapien
tatctgcttcccagtagcagccaag

SEQ ID NO: 2826922 - DNA, 25 bp, Homo sapien
agtagcagccaagccgcaggaattc

SEQ ID NO: 2826923 - DNA, 25 bp, Homo sapien
ccctatatttgattttctgctctca

SEQ ID NO: 2826924 - DNA, 25 bp, Homo sapien
atttcctctatgttcacctctgata

SEQ ID NO: 2826925 - DNA, 25 bp, Homo sapien
ctataaattccccctatatttgatt

SEQ ID NO: 2826926 - DNA, 25 bp, Homo sapien
tcacctctgataaaactgacagtca

SEQ ID NO: 2826927 - DNA, 25 bp, Homo sapien
ttcatattactcctctcatgggtct

SEQ ID NO: 2826928 - DNA, 25 bp, Homo sapien
tttcatattactcctctcatgggtc

SEQ ID NO: 2826929 - DNA, 25 bp, Homo sapien
tcatattactcctctcatgggtctt

SEQ ID NO: 2826930 - DNA, 25 bp, Homo sapien
tctttcatattactcctctcatggg

SEQ ID NO: 2826931 - DNA, 25 bp, Homo sapien
ttgtcgttaatcttcagtacagcca

SEQ ID NO: 2826932 - DNA, 25 bp, Homo sapien
gcggacattttgtcgttaatcttca

SEQ ID NO: 2826933 - DNA, 25 bp, Homo sapien
agctgtttccaaatgcggacatttt

SEQ ID NO: 2826934 - DNA, 25 bp, Homo sapien
ccattatcttacttggcagagaaag

SEQ ID NO: 2826935 - DNA, 25 bp, Homo sapien
ttctgcttgtcaccaggtggtccct

SEQ ID NO: 2826936 - DNA, 25 bp, Homo sapien
gcatgccgttcaacagtgcattttt

SEQ ID NO: 2826937 - DNA, 25 bp, Homo sapien
tgcttgtcaccaggtggtcccttag

SEQ ID NO: 2826938 - DNA, 25 bp, Homo sapien
tcaccaggtggtcccttagtgtggg

SEQ ID NO: 2826939 - DNA, 25 bp, Homo sapien
cctatgtgccaccagaaacttagtg

SEQ ID NO: 2826940 - DNA, 25 bp, Homo sapien
gcttgatgtctttgatcctatgtgc

SEQ ID NO: 2826941 - DNA, 25 bp, Homo sapien
gtgagtccactacttgtgctagaaa

SEQ ID NO: 2826942 - DNA, 25 bp, Homo sapien
gaaacttagtggttgtgagtccact

SEQ ID NO: 2826943 - DNA, 25 bp, Homo sapien
tgcatttacccccagtcccagtggg

SEQ ID NO: 2826944 - DNA, 25 bp, Homo sapien
tcaggaagcattggaggactttgaa

SEQ ID NO: 2826945 - DNA, 25 bp, Homo sapien
tgcttcctcatgacgtatttctagg

SEQ ID NO: 2826946 - DNA, 25 bp, Homo sapien
cttcctcatgacgtatttctaggcc

SEQ ID NO: 2826947 - DNA, 25 bp, Homo sapien
ttttattaggagtagtgtccatgga

SEQ ID NO: 2826948 - DNA, 25 bp, Homo sapien
atcttgccaatgaagtttttattag

SEQ ID NO: 2826949 - DNA, 25 bp, Homo sapien
ttattaggagtagtgtccatggagc

SEQ ID NO: 2826950 - DNA, 25 bp, Homo sapien
tcttgccaatgaagtttttattagg

SEQ ID NO: 2826951 - DNA, 25 bp, Homo sapien
accctattcactcgctccacatgct

SEQ ID NO: 2826952 - DNA, 25 bp, Homo sapien
acaccctattcactcgctccacatg

SEQ ID NO: 2826953 - DNA, 25 bp, Homo sapien
cttgcacaccctattcactcgctcc

SEQ ID NO: 2826954 - DNA, 25 bp, Homo sapien
gcacaccctattcactcgctccaca

SEQ ID NO: 2826955 - DNA, 25 bp, Homo sapien
gctgctttagtaagttgaagatcaa

SEQ ID NO: 2826956 - DNA, 25 bp, Homo sapien
aaaatgcctgtaagtcataaaagcg

SEQ ID NO: 2826957 - DNA, 25 bp, Homo sapien
ttgaagtagaacagtaggcagctgc

SEQ ID NO: 2826958 - DNA, 25 bp, Homo sapien
aagatgttgctatccccatggccaa

SEQ ID NO: 2826959 - DNA, 25 bp, Homo sapien
tattcagtcacgcaaagggattcag

SEQ ID NO: 2826960 - DNA, 25 bp, Homo sapien
cccaataggattcacaggaggctca

SEQ ID NO: 2826961 - DNA, 25 bp, Homo sapien
cacgaactcaaggtacagaagggct

SEQ ID NO: 2826962 - DNA, 25 bp, Homo sapien
gcaagcaatgtagcctctaggaagc

SEQ ID NO: 2826963 - DNA, 25 bp, Homo sapien
gaattgcccgatggttctattgtca

SEQ ID NO: 2826964 - DNA, 25 bp, Homo sapien
tctagtctaacgatgaattgcccga

SEQ ID NO: 2826965 - DNA, 25 bp, Homo sapien
tttgttccagccatctagtctaacg

SEQ ID NO: 2826966 - DNA, 25 bp, Homo sapien
aaaatgacagcgtgaaaagagaagc

SEQ ID NO: 2826967 - DNA, 25 bp, Homo sapien
gagctgtgttcctttcaattagttg

SEQ ID NO: 2826968 - DNA, 25 bp, Homo sapien
ggccaaagatcaggacactgataat

SEQ ID NO: 2826969 - DNA, 25 bp, Homo sapien
tagttgatgaaatctctcctgaaca

SEQ ID NO: 2826970 - DNA, 25 bp, Homo sapien
actgataatgtgtctggcgttggtg

SEQ ID NO: 2826971 - DNA, 25 bp, Homo sapien
tgtagaattggctggaaatgtgttg

SEQ ID NO: 2826972 - DNA, 25 bp, Homo sapien
cctgtgatgtagaattggctggaaa

SEQ ID NO: 2826973 - DNA, 25 bp, Homo sapien
caagtagttagtgatctgaagtgca

SEQ ID NO: 2826974 - DNA, 25 bp, Homo sapien
aaatgtgttgggactttggcagcgc

SEQ ID NO: 2826975 - DNA, 25 bp, Homo sapien
tgatagaaaaaagttgacgcgtgct

SEQ ID NO: 2826976 - DNA, 25 bp, Homo sapien
caaagctttcgctaagtgtttcctc

SEQ ID NO: 2826977 - DNA, 25 bp, Homo sapien
tgatgtattgaacaccacattgcct

SEQ ID NO: 2826978 - DNA, 25 bp, Homo sapien
tgacaaccagtcagaaagaatctat

SEQ ID NO: 2826979 - DNA, 25 bp, Homo sapien
taatatctgaccgtaaactgtagtt

SEQ ID NO: 2826980 - DNA, 25 bp, Homo sapien
aatatctgaccgtaaactgtagttc

SEQ ID NO: 2826981 - DNA, 25 bp, Homo sapien
tatctgaccgtaaactgtagttcac

SEQ ID NO: 2826982 - DNA, 25 bp, Homo sapien
ctgaccgtaaactgtagttcacaag

SEQ ID NO: 2826983 - DNA, 25 bp, Homo sapien
tgggcaagggatatcttctgccaaa

SEQ ID NO: 2826984 - DNA, 25 bp, Homo sapien
gttggtcttatgctgatgcccatca

SEQ ID NO: 2826985 - DNA, 25 bp, Homo sapien
atcctcttgggcaagggatatcttc

SEQ ID NO: 2826986 - DNA, 25 bp, Homo sapien
caatgttggtcttatgctgatgccc

SEQ ID NO: 2826987 - DNA, 25 bp, Homo sapien
tgatgtgtttatggaaactctgctg

SEQ ID NO: 2826988 - DNA, 25 bp, Homo sapien
tgtttatggaaactctgctggcctt

SEQ ID NO: 2826989 - DNA, 25 bp, Homo sapien
gtttatggaaactctgctggccttg

SEQ ID NO: 2826990 - DNA, 25 bp, Homo sapien
tgtgtttatggaaactctgctggcc

SEQ ID NO: 2826991 - DNA, 25 bp, Homo sapien
tgatcactggaacataacggaggtt

SEQ ID NO: 2826992 - DNA, 25 bp, Homo sapien
aatagttacagctgatcactggaac

SEQ ID NO: 2826993 - DNA, 25 bp, Homo sapien
tgagaggccacaaaactattgtgcc

SEQ ID NO: 2826994 - DNA, 25 bp, Homo sapien
acataacggaggttctgagaggcca

SEQ ID NO: 2826995 - DNA, 25 bp, Homo sapien
cattgaacttcctgtgttttcgtat

SEQ ID NO: 2826996 - DNA, 25 bp, Homo sapien
accattgaacttcctgtgttttcgt

SEQ ID NO: 2826997 - DNA, 25 bp, Homo sapien
ccattgaacttcctgtgttttcgta

SEQ ID NO: 2826998 - DNA, 25 bp, Homo sapien
ttgaacttcctgtgttttcgtatac

SEQ ID NO: 2826999 - DNA, 25 bp, Homo sapien
tggagattctgtcttactgctgtcc

SEQ ID NO: 2827000 - DNA, 25 bp, Homo sapien
gagattctgtcttactgctgtccat

SEQ ID NO: 2827001 - DNA, 25 bp, Homo sapien
tccagttgaagttctggagattctg

SEQ ID NO: 2827002 - DNA, 25 bp, Homo sapien
ctggtacatttccagttgaagttct

SEQ ID NO: 2827003 - DNA, 25 bp, Homo sapien
gctaaaatgcccaaacccagtggga

SEQ ID NO: 2827004 - DNA, 25 bp, Homo sapien
aacagtgctgatgtttgctaaaatg

SEQ ID NO: 2827005 - DNA, 25 bp, Homo sapien
atgcccaaacccagtgggataaata

SEQ ID NO: 2827006 - DNA, 25 bp, Homo sapien
tcacactgcaacagtgctgatgttt

SEQ ID NO: 2827007 - DNA, 25 bp, Homo sapien
ttcatagagtgatgagatttctgct

SEQ ID NO: 2827008 - DNA, 25 bp, Homo sapien
tctctccaaggaccggcatttgttg

SEQ ID NO: 2827009 - DNA, 25 bp, Homo sapien
tcatgaatctggcatatgagcaatt

SEQ ID NO: 2827010 - DNA, 25 bp, Homo sapien
tggtctgattttctcgttcatagag

SEQ ID NO: 2827011 - DNA, 25 bp, Homo sapien
tcttgagcgtgacctgaaactgacc

SEQ ID NO: 2827012 - DNA, 25 bp, Homo sapien
cattaggtgaataacacagcttggc

SEQ ID NO: 2827013 - DNA, 25 bp, Homo sapien
acagcttggctttgtgtcatgaaaa

SEQ ID NO: 2827014 - DNA, 25 bp, Homo sapien
tagataaacgtgaaggcaaacagag

SEQ ID NO: 2827015 - DNA, 25 bp, Homo sapien
gcagatatggatgtgtgcagttgtc

SEQ ID NO: 2827016 - DNA, 25 bp, Homo sapien
agatatggatgtgtgcagttgtcac

SEQ ID NO: 2827017 - DNA, 25 bp, Homo sapien
cagatatggatgtgtgcagttgtca

SEQ ID NO: 2827018 - DNA, 25 bp, Homo sapien
agcagccaaattcctttcactggat

SEQ ID NO: 2827019 - DNA, 25 bp, Homo sapien
ttcactggatagaggcattgctctg

SEQ ID NO: 2827020 - DNA, 25 bp, Homo sapien
actggatagaggcattgctctgcca

SEQ ID NO: 2827021 - DNA, 25 bp, Homo sapien
ggatagaggcattgctctgccacca

SEQ ID NO: 2827022 - DNA, 25 bp, Homo sapien
tccaagaccattgtgctggccagct

SEQ ID NO: 2827023 - DNA, 25 bp, Homo sapien
ccaagaccattgtgctggccagctc

SEQ ID NO: 2827024 - DNA, 25 bp, Homo sapien
tctggagctacaagtccaagaccat

SEQ ID NO: 2827025 - DNA, 25 bp, Homo sapien
gtcattatattaggaaccaatggca

SEQ ID NO: 2827026 - DNA, 25 bp, Homo sapien
ttaggaaccaatggcaaatgattcc

SEQ ID NO: 2827027 - DNA, 25 bp, Homo sapien
gagtgggaaatcagtcattatatta

SEQ ID NO: 2827028 - DNA, 25 bp, Homo sapien
caatggcaaatgattccaattcaca

SEQ ID NO: 2827029 - DNA, 25 bp, Homo sapien
gtttgagatcagcatggacaacata

SEQ ID NO: 2827030 - DNA, 25 bp, Homo sapien
tttgagatcagcatggacaacatag

SEQ ID NO: 2827031 - DNA, 25 bp, Homo sapien
gagtttgagatcagcatggacaaca

SEQ ID NO: 2827032 - DNA, 25 bp, Homo sapien
tgagatcagcatggacaacatagtg

SEQ ID NO: 2827033 - DNA, 25 bp, Homo sapien
ttgaacccaggggactgaggctgta

SEQ ID NO: 2827034 - DNA, 25 bp, Homo sapien
ggggactgaggctgtagtgtgttgt

SEQ ID NO: 2827035 - DNA, 25 bp, Homo sapien
actgaggctgtagtgtgttgtgatc

SEQ ID NO: 2827036 - DNA, 25 bp, Homo sapien
ccaggggactgaggctgtagtgtgt

SEQ ID NO: 2827037 - DNA, 25 bp, Homo sapien
tcttcaacctgaatgtattgctctc

SEQ ID NO: 2827038 - DNA, 25 bp, Homo sapien
tatagaggtacttcacaaaacttgt

SEQ ID NO: 2827039 - DNA, 25 bp, Homo sapien
tgtactaaagctgcaatatagaggt

SEQ ID NO: 2827040 - DNA, 25 bp, Homo sapien
tctgttctgaaaagtcagaggtaag

SEQ ID NO: 2827041 - DNA, 25 bp, Homo sapien
ccttctccctttgccgctgccacag

SEQ ID NO: 2827042 - DNA, 25 bp, Homo sapien
atcccatccccgtcttcaccctcat

SEQ ID NO: 2827043 - DNA, 25 bp, Homo sapien
tccctttgccgctgccacagctgtt

SEQ ID NO: 2827044 - DNA, 25 bp, Homo sapien
cccatcccatccccgtcttcaccct

SEQ ID NO: 2827045 - DNA, 25 bp, Homo sapien
ggctgcctagtattccatgcaccac

SEQ ID NO: 2827046 - DNA, 25 bp, Homo sapien
tggctgcctagtattccatgcacca

SEQ ID NO: 2827047 - DNA, 25 bp, Homo sapien
acacagtgctcaataggtaattttt

SEQ ID NO: 2827048 - DNA, 25 bp, Homo sapien
tgcccgttgtcacagcagcagtgtt

SEQ ID NO: 2827049 - DNA, 25 bp, Homo sapien
gcccgttgtcacagcagcagtgttt

SEQ ID NO: 2827050 - DNA, 25 bp, Homo sapien
taattattcttctctgcgacagacc

SEQ ID NO: 2827051 - DNA, 25 bp, Homo sapien
ctggatgtgttaacagggcccatgt

SEQ ID NO: 2827052 - DNA, 25 bp, Homo sapien
gtccaagatacacatcaattatggg

SEQ ID NO: 2827053 - DNA, 25 bp, Homo sapien
gagctcagttaaaatctaccagtaa

SEQ ID NO: 2827054 - DNA, 25 bp, Homo sapien
gattaataggaattctcccttggga

SEQ ID NO: 2827055 - DNA, 25 bp, Homo sapien
tgggatccatcaatagcaggaccat

SEQ ID NO: 2827056 - DNA, 25 bp, Homo sapien
gcaggaccattattctctggtatat

SEQ ID NO: 2827057 - DNA, 25 bp, Homo sapien
tgattaataggaattctcccttggg

SEQ ID NO: 2827058 - DNA, 25 bp, Homo sapien
gagagagacacagcaataggcatct

SEQ ID NO: 2827059 - DNA, 25 bp, Homo sapien
aacacacctgattagcctgcagtgg

SEQ ID NO: 2827060 - DNA, 25 bp, Homo sapien
gatggctcctaccatagcactgtgg

SEQ ID NO: 2827061 - DNA, 25 bp, Homo sapien
gtaacatgtcctgacttgctgagaa

SEQ ID NO: 2827062 - DNA, 25 bp, Homo sapien
tctttaacctaatgagtcatcaaac

SEQ ID NO: 2827063 - DNA, 25 bp, Homo sapien
cagcttctttaacctaatgagtcat

SEQ ID NO: 2827064 - DNA, 25 bp, Homo sapien
acagcttctttaacctaatgagtca

SEQ ID NO: 2827065 - DNA, 25 bp, Homo sapien
gcttctttaacctaatgagtcatca

SEQ ID NO: 2827066 - DNA, 25 bp, Homo sapien
ctctccagtgtgtatgtattggtga

SEQ ID NO: 2827067 - DNA, 25 bp, Homo sapien
taatgataacgtcctctccagtgtg

SEQ ID NO: 2827068 - DNA, 25 bp, Homo sapien
tatgtattggtgaatgctttttgac

SEQ ID NO: 2827069 - DNA, 25 bp, Homo sapien
tctctttctactgtaatagccctgt

SEQ ID NO: 2827070 - DNA, 25 bp, Homo sapien
tccactgatatcagaaaaatgtctc

SEQ ID NO: 2827071 - DNA, 25 bp, Homo sapien
tccctgttgctgtgtccgcagcttc

SEQ ID NO: 2827072 - DNA, 25 bp, Homo sapien
gcttccttcccgcagatctctccat

SEQ ID NO: 2827073 - DNA, 25 bp, Homo sapien
aatgtctccctgttgctgtgtccgc

SEQ ID NO: 2827074 - DNA, 25 bp, Homo sapien
gcttccaaaatgtgttctttctctg

SEQ ID NO: 2827075 - DNA, 25 bp, Homo sapien
ttagatattctttcttgcttccaaa

SEQ ID NO: 2827076 - DNA, 25 bp, Homo sapien
gatattctttcttgcttccaaaatg

SEQ ID NO: 2827077 - DNA, 25 bp, Homo sapien
ttgcttccaaaatgtgttctttctc

SEQ ID NO: 2827078 - DNA, 25 bp, Homo sapien
tcaattgtcgttacactccaggcta

SEQ ID NO: 2827079 - DNA, 25 bp, Homo sapien
cactccaggctaggggttcctgact

SEQ ID NO: 2827080 - DNA, 25 bp, Homo sapien
tcctgacttggattcatggatgagc

SEQ ID NO: 2827081 - DNA, 25 bp, Homo sapien
gacttggattcatggatgagcttca

SEQ ID NO: 2827082 - DNA, 25 bp, Homo sapien
gagaacttccaagttggatttgaaa

SEQ ID NO: 2827083 - DNA, 25 bp, Homo sapien
ggagaacttccaagttggatttgaa

SEQ ID NO: 2827084 - DNA, 25 bp, Homo sapien
tgccaatgagtaggggaaaacagta

SEQ ID NO: 2827085 - DNA, 25 bp, Homo sapien
aagtggattattgaagaagtgcaaa

SEQ ID NO: 2827086 - DNA, 25 bp, Homo sapien
ccaaaagcaaagtgtacgtggagaa

SEQ ID NO: 2827087 - DNA, 25 bp, Homo sapien
ggtgcgggtggagctcaaagagatc

SEQ ID NO: 2827088 - DNA, 25 bp, Homo sapien
caagggttgagtagagagcacacta

SEQ ID NO: 2827089 - DNA, 25 bp, Homo sapien
gagtagagagcacactaccctgtac

SEQ ID NO: 2827090 - DNA, 25 bp, Homo sapien
ggttgagtagagagcacactaccct

SEQ ID NO: 2827091 - DNA, 25 bp, Homo sapien
agccaagggttgagtagagagcaca

SEQ ID NO: 2827092 - DNA, 25 bp, Homo sapien
catgctgtcagtgctccagactgtc

SEQ ID NO: 2827093 - DNA, 25 bp, Homo sapien
gctgtcagtgctccagactgtccct

SEQ ID NO: 2827094 - DNA, 25 bp, Homo sapien
cttttccaacacatcccacctactc

SEQ ID NO: 2827095 - DNA, 25 bp, Homo sapien
atcccacctactcatgctgtcagtg

SEQ ID NO: 2827096 - DNA, 25 bp, Homo sapien
ttcaaagacttttcataaggcagct

SEQ ID NO: 2827097 - DNA, 25 bp, Homo sapien
caacttctcggagagtatatgggaa

SEQ ID NO: 2827098 - DNA, 25 bp, Homo sapien
gagggatgtcaacttctcggagagt

SEQ ID NO: 2827099 - DNA, 25 bp, Homo sapien
tactaggggagggatgtcaacttct

SEQ ID NO: 2827100 - DNA, 25 bp, Homo sapien
gagagtatatgggaatttccttgta

SEQ ID NO: 2827101 - DNA, 25 bp, Homo sapien
tacaaggtctttggtggaatacatc

SEQ ID NO: 2827102 - DNA, 25 bp, Homo sapien
gacacagcgaagtgaggtaatctca

SEQ ID NO: 2827103 - DNA, 25 bp, Homo sapien
gctatcaaagtggaaacctgctcga

SEQ ID NO: 2827104 - DNA, 25 bp, Homo sapien
gattttcatgtgagtgcagcctaca

SEQ ID NO: 2827105 - DNA, 25 bp, Homo sapien
tatctggcaatgctgtgcataacag

SEQ ID NO: 2827106 - DNA, 25 bp, Homo sapien
tgctgtgcataacagcatgtggtac

SEQ ID NO: 2827107 - DNA, 25 bp, Homo sapien
gccttgttatctggcaatgctgtgc

SEQ ID NO: 2827108 - DNA, 25 bp, Homo sapien
tgtgcataacagcatgtggtaccta

SEQ ID NO: 2827109 - DNA, 25 bp, Homo sapien
cagccaaggcaaactgcgtgcagta

SEQ ID NO: 2827110 - DNA, 25 bp, Homo sapien
cgtgcagtaacatgccttggcgagg

SEQ ID NO: 2827111 - DNA, 25 bp, Homo sapien
gaggactttcccagtcttgctgaca

SEQ ID NO: 2827112 - DNA, 25 bp, Homo sapien
tggaggctcgttcacttacaaacaa

SEQ ID NO: 2827113 - DNA, 25 bp, Homo sapien
ctgcccatatgcaaggttaaacttg

SEQ ID NO: 2827114 - DNA, 25 bp, Homo sapien
gcccatatgcaaggttaaacttggg

SEQ ID NO: 2827115 - DNA, 25 bp, Homo sapien
aacagtcctgtgattttatcctggg

SEQ ID NO: 2827116 - DNA, 25 bp, Homo sapien
agtataggggacatagaaacagtcc

SEQ ID NO: 2827117 - DNA, 25 bp, Homo sapien
ggctgtgccaacattggcaaaagtg

SEQ ID NO: 2827118 - DNA, 25 bp, Homo sapien
taggaaatggctgtgccaacattgg

SEQ ID NO: 2827119 - DNA, 25 bp, Homo sapien
aaaagtgtcctgcagtcgacatggg

SEQ ID NO: 2827120 - DNA, 25 bp, Homo sapien
taccatcgtgatgtaactggtatcc

SEQ ID NO: 2827121 - DNA, 25 bp, Homo sapien
tgcatgaggctgtgacagggctcct

SEQ ID NO: 2827122 - DNA, 25 bp, Homo sapien
tctcttcccggcattgtctgcaggt

SEQ ID NO: 2827123 - DNA, 25 bp, Homo sapien
gtctgcaggtgccttcgccctaata

SEQ ID NO: 2827124 - DNA, 25 bp, Homo sapien
cctccgaatatttggcaatgaaagc

SEQ ID NO: 2827125 - DNA, 25 bp, Homo sapien
gcatttgggagatttccaaacagat

SEQ ID NO: 2827126 - DNA, 25 bp, Homo sapien
gatttccaaacagatgcatattcgt

SEQ ID NO: 2827127 - DNA, 25 bp, Homo sapien
gggagatttccaaacagatgcatat

SEQ ID NO: 2827128 - DNA, 25 bp, Homo sapien
aacagatgcatattcgtcttcactt

SEQ ID NO: 2827129 - DNA, 25 bp, Homo sapien
cagagacgcaatgctctgcaaacag

SEQ ID NO: 2827130 - DNA, 25 bp, Homo sapien
aatgcagagacgcaatgctctgcaa

SEQ ID NO: 2827131 - DNA, 25 bp, Homo sapien
taaaaatgcagagacgcaatgctct

SEQ ID NO: 2827132 - DNA, 25 bp, Homo sapien
aggaattaccctgtaaaaatgcaga

SEQ ID NO: 2827133 - DNA, 25 bp, Homo sapien
ctgtgtaacctgattataccctgac

SEQ ID NO: 2827134 - DNA, 25 bp, Homo sapien
tgtgtaacctgattataccctgaca

SEQ ID NO: 2827135 - DNA, 25 bp, Homo sapien
gtgtaacctgattataccctgacat

SEQ ID NO: 2827136 - DNA, 25 bp, Homo sapien
tgaggagaacacacttccaactgtg

SEQ ID NO: 2827137 - DNA, 25 bp, Homo sapien
gagtgcaccaacaattccgcctaaa

SEQ ID NO: 2827138 - DNA, 25 bp, Homo sapien
tccgcctaaaagaataacagtggct

SEQ ID NO: 2827139 - DNA, 25 bp, Homo sapien
tgattctagataggcgagtgcacca

SEQ ID NO: 2827140 - DNA, 25 bp, Homo sapien
gttcttgattggagattctgtggcc

SEQ ID NO: 2827141 - DNA, 25 bp, Homo sapien
ttgattggagattctgtggcctgtg

SEQ ID NO: 2827142 - DNA, 25 bp, Homo sapien
ctgttcttgattggagattctgtgg

SEQ ID NO: 2827143 - DNA, 25 bp, Homo sapien
tcttgattggagattctgtggcctg

SEQ ID NO: 2827144 - DNA, 25 bp, Homo sapien
gcactcaaaaggatccacatagttt

SEQ ID NO: 2827145 - DNA, 25 bp, Homo sapien
aaatccactgtcagcctgcactcaa

SEQ ID NO: 2827146 - DNA, 25 bp, Homo sapien
tagttgatgacctcaaaatccactg

SEQ ID NO: 2827147 - DNA, 25 bp, Homo sapien
aaaaggatccacatagtttgttctg

SEQ ID NO: 2827148 - DNA, 25 bp, Homo sapien
tgtctccttgagatctggtaaacca

SEQ ID NO: 2827149 - DNA, 25 bp, Homo sapien
ccttgagatctggtaaaccagttca

SEQ ID NO: 2827150 - DNA, 25 bp, Homo sapien
tctccttgagatctggtaaaccagt

SEQ ID NO: 2827151 - DNA, 25 bp, Homo sapien
tgctgtctccttgagatctggtaaa

SEQ ID NO: 2827152 - DNA, 25 bp, Homo sapien
atgcgattattgcacaggcatggcg

SEQ ID NO: 2827153 - DNA, 25 bp, Homo sapien
gaataaagagaatctctcgacacca

SEQ ID NO: 2827154 - DNA, 25 bp, Homo sapien
gtagttgaataattgcatgcgatta

SEQ ID NO: 2827155 - DNA, 25 bp, Homo sapien
caccaccaggactaattacgttgtc

SEQ ID NO: 2827156 - DNA, 25 bp, Homo sapien
tcatccctgaactagtggcttccca

SEQ ID NO: 2827157 - DNA, 25 bp, Homo sapien
tcgtttctatttcattgctgctaag

SEQ ID NO: 2827158 - DNA, 25 bp, Homo sapien
tatgtttataataccgatagttcac

SEQ ID NO: 2827159 - DNA, 25 bp, Homo sapien
aatgatccatactcataagcatggg

SEQ ID NO: 2827160 - DNA, 25 bp, Homo sapien
gactgatgctgcccgatcacctcgg

SEQ ID NO: 2827161 - DNA, 25 bp, Homo sapien
gatgctgcccgatcacctcggaagc

SEQ ID NO: 2827162 - DNA, 25 bp, Homo sapien
ctgatgctgcccgatcacctcggaa

SEQ ID NO: 2827163 - DNA, 25 bp, Homo sapien
aagactgatgctgcccgatcacctc

SEQ ID NO: 2827164 - DNA, 25 bp, Homo sapien
cctagagtgtggtaaagcctcgtaa

SEQ ID NO: 2827165 - DNA, 25 bp, Homo sapien
tactccatcagctgcttgactgcgg

SEQ ID NO: 2827166 - DNA, 25 bp, Homo sapien
ggctcagttagctgtccctccacag

SEQ ID NO: 2827167 - DNA, 25 bp, Homo sapien
cctccacagcacctagagtgtggta

SEQ ID NO: 2827168 - DNA, 25 bp, Homo sapien
gctgaaatacccaagatcactgaaa

SEQ ID NO: 2827169 - DNA, 25 bp, Homo sapien
ggctgaaatacccaagatcactgaa

SEQ ID NO: 2827170 - DNA, 25 bp, Homo sapien
cttaacactaatcttcggattttgc

SEQ ID NO: 2827171 - DNA, 25 bp, Homo sapien
tcttcggattttgctttatggacaa

SEQ ID NO: 2827172 - DNA, 25 bp, Homo sapien
gtaagaaatctccacccccaatggc

SEQ ID NO: 2827173 - DNA, 25 bp, Homo sapien
ctctttaagccataggtaagaaatc

SEQ ID NO: 2827174 - DNA, 25 bp, Homo sapien
gatgtccctcatggataaagggaga

SEQ ID NO: 2827175 - DNA, 25 bp, Homo sapien
agatgtccctcatggataaagggag

SEQ ID NO: 2827176 - DNA, 25 bp, Homo sapien
gaagatgtccctcatggataaaggg

SEQ ID NO: 2827177 - DNA, 25 bp, Homo sapien
tgtccctcatggataaagggagaca

SEQ ID NO: 2827178 - DNA, 25 bp, Homo sapien
aatggataccgtagattcagctgcc

SEQ ID NO: 2827179 - DNA, 25 bp, Homo sapien
tattattcagtggtgagactgacag

SEQ ID NO: 2827180 - DNA, 25 bp, Homo sapien
gactgacagtcttgtggagtcagaa

SEQ ID NO: 2827181 - DNA, 25 bp, Homo sapien
tccatctggaatgttagcaagagac

SEQ ID NO: 2827182 - DNA, 25 bp, Homo sapien
tagagatccagtccctctcgatcga

SEQ ID NO: 2827183 - DNA, 25 bp, Homo sapien
ccctaaggctggctctccttcatag

SEQ ID NO: 2827184 - DNA, 25 bp, Homo sapien
gtgcgttcccgtatgtcagcttcta

SEQ ID NO: 2827185 - DNA, 25 bp, Homo sapien
tctcgatcgactgtgcgttcccgta

SEQ ID NO: 2827186 - DNA, 25 bp, Homo sapien
cacactattcaaaagagagaatcca

SEQ ID NO: 2827187 - DNA, 25 bp, Homo sapien
aacacactattcaaaagagagaatc

SEQ ID NO: 2827188 - DNA, 25 bp, Homo sapien
tcccaattgctatgtctagctccat

SEQ ID NO: 2827189 - DNA, 25 bp, Homo sapien
aagttttcccaattgctatgtctag

SEQ ID NO: 2827190 - DNA, 25 bp, Homo sapien
ggctcctggaggaccatctataaac

SEQ ID NO: 2827191 - DNA, 25 bp, Homo sapien
gctccaggagcttgggagacaagcc

SEQ ID NO: 2827192 - DNA, 25 bp, Homo sapien
ctgccagtaggagccattccctttg

SEQ ID NO: 2827193 - DNA, 25 bp, Homo sapien
tattgtacgcagctttcagtcctgc

SEQ ID NO: 2827194 - DNA, 25 bp, Homo sapien
cgtccagcgtgcactgtgtgcatgc

SEQ ID NO: 2827195 - DNA, 25 bp, Homo sapien
ccacgtccagcgtgcactgtgtgca

SEQ ID NO: 2827196 - DNA, 25 bp, Homo sapien
tcaagagtcagagcccacgtccagc

SEQ ID NO: 2827197 - DNA, 25 bp, Homo sapien
agagcccacgtccagcgtgcactgt

SEQ ID NO: 2827198 - DNA, 25 bp, Homo sapien
aattgcttcaacgtctgcacagccc

SEQ ID NO: 2827199 - DNA, 25 bp, Homo sapien
ttgcttcaacgtctgcacagccctt

SEQ ID NO: 2827200 - DNA, 25 bp, Homo sapien
tgaattgcttcaacgtctgcacagc

SEQ ID NO: 2827201 - DNA, 25 bp, Homo sapien
ctgaattgcttcaacgtctgcacag

SEQ ID NO: 2827202 - DNA, 25 bp, Homo sapien
actctggcttgctgcatcactattt

SEQ ID NO: 2827203 - DNA, 25 bp, Homo sapien
ctggcttgctgcatcactatttttg

SEQ ID NO: 2827204 - DNA, 25 bp, Homo sapien
tctggcttgctgcatcactattttt

SEQ ID NO: 2827205 - DNA, 25 bp, Homo sapien
ctctggcttgctgcatcactatttt

SEQ ID NO: 2827206 - DNA, 25 bp, Homo sapien
agataaatttgttgagcctacttga

SEQ ID NO: 2827207 - DNA, 25 bp, Homo sapien
ttcaaatccacccaatatagtgtct

SEQ ID NO: 2827208 - DNA, 25 bp, Homo sapien
cacttattaatagtaagaatagctc

SEQ ID NO: 2827209 - DNA, 25 bp, Homo sapien
gacggaatctcgcaatgtcgttcag

SEQ ID NO: 2827210 - DNA, 25 bp, Homo sapien
taccttgataccaaagccaaaggaa

SEQ ID NO: 2827211 - DNA, 25 bp, Homo sapien
agcattaccttgataccaaagccaa

SEQ ID NO: 2827212 - DNA, 25 bp, Homo sapien
cttgataccaaagccaaaggaagac

SEQ ID NO: 2827213 - DNA, 25 bp, Homo sapien
cattaccttgataccaaagccaaag

SEQ ID NO: 2827214 - DNA, 25 bp, Homo sapien
tagaatgaggctccaaagccatgcc

SEQ ID NO: 2827215 - DNA, 25 bp, Homo sapien
taccttgaagagtgggtcagtcgtc

SEQ ID NO: 2827216 - DNA, 25 bp, Homo sapien
gaaagcaggtcccaaatagtgaagg

SEQ ID NO: 2827217 - DNA, 25 bp, Homo sapien
tctctggatttgactgacgtggcca

SEQ ID NO: 2827218 - DNA, 25 bp, Homo sapien
agtgaccttttcaactggacagcgc

SEQ ID NO: 2827219 - DNA, 25 bp, Homo sapien
taattgctcatttgcggcagtgacc

SEQ ID NO: 2827220 - DNA, 25 bp, Homo sapien
caaagctggtttatccaggcattgt

SEQ ID NO: 2827221 - DNA, 25 bp, Homo sapien
gacagcgcctgggatctggttccac

SEQ ID NO: 2827222 - DNA, 25 bp, Homo sapien
ttagttaatgactgagcagggttgg

SEQ ID NO: 2827223 - DNA, 25 bp, Homo sapien
gttcagaggtgaattgttagttaat

SEQ ID NO: 2827224 - DNA, 25 bp, Homo sapien
agagaccctctgggtaccattacgg

SEQ ID NO: 2827225 - DNA, 25 bp, Homo sapien
cagaggtgaattgttagttaatgac

SEQ ID NO: 2827226 - DNA, 25 bp, Homo sapien
cctgatgtacaaggttatctttcct

SEQ ID NO: 2827227 - DNA, 25 bp, Homo sapien
cagctgaattaagggtggatcaggc

SEQ ID NO: 2827228 - DNA, 25 bp, Homo sapien
tagaacatgttgtcagacgcacagc

SEQ ID NO: 2827229 - DNA, 25 bp, Homo sapien
gatgtacaaggttatctttcctgta

SEQ ID NO: 2827230 - DNA, 25 bp, Homo sapien
catggaggagtgatagatctgaaca

SEQ ID NO: 2827231 - DNA, 25 bp, Homo sapien
ctccaaggggaaccagggcatgcga

SEQ ID NO: 2827232 - DNA, 25 bp, Homo sapien
tagatctgaacagccggaaggactc

SEQ ID NO: 2827233 - DNA, 25 bp, Homo sapien
cacgaaaacttagtgagcttctcaa

SEQ ID NO: 2827234 - DNA, 25 bp, Homo sapien
cctcaggccactaccaccgagcttt

SEQ ID NO: 2827235 - DNA, 25 bp, Homo sapien
gctctcattagtgttggcctctcct

SEQ ID NO: 2827236 - DNA, 25 bp, Homo sapien
ggcctctcctgctctatctgagagc

SEQ ID NO: 2827237 - DNA, 25 bp, Homo sapien
tttccattgacactgctctcattag

SEQ ID NO: 2827238 - DNA, 25 bp, Homo sapien
taattgggcagatctatatttctca

SEQ ID NO: 2827239 - DNA, 25 bp, Homo sapien
ctgcttgagtcagcttcttcatgaa

SEQ ID NO: 2827240 - DNA, 25 bp, Homo sapien
ttgcctctgttgctacctctgcttg

SEQ ID NO: 2827241 - DNA, 25 bp, Homo sapien
gaaggagtcccttgccaatctgaag

SEQ ID NO: 2827242 - DNA, 25 bp, Homo sapien
aagggtcattcatgggtttgacaaa

SEQ ID NO: 2827243 - DNA, 25 bp, Homo sapien
ctgagaagggtcattcatgggtttg

SEQ ID NO: 2827244 - DNA, 25 bp, Homo sapien
gagaagggtcattcatgggtttgac

SEQ ID NO: 2827245 - DNA, 25 bp, Homo sapien
gtcattcatgggtttgacaaatcct

SEQ ID NO: 2827246 - DNA, 25 bp, Homo sapien
gctgaaggtctacttttgtcaaaac

SEQ ID NO: 2827247 - DNA, 25 bp, Homo sapien
tgaaatgctgaaggtctacttttgt

SEQ ID NO: 2827248 - DNA, 25 bp, Homo sapien
aatgctgaaggtctacttttgtcaa

SEQ ID NO: 2827249 - DNA, 25 bp, Homo sapien
tgaaggtctacttttgtcaaaacca

SEQ ID NO: 2827250 - DNA, 25 bp, Homo sapien
ctgaggttaagaaggatgggagggt

SEQ ID NO: 2827251 - DNA, 25 bp, Homo sapien
tgaggttaagaaggatgggagggta

SEQ ID NO: 2827252 - DNA, 25 bp, Homo sapien
aagacacagtaattgcggggagtga

SEQ ID NO: 2827253 - DNA, 25 bp, Homo sapien
ccagagatggcgtttgctggataga

SEQ ID NO: 2827254 - DNA, 25 bp, Homo sapien
ttaatggattcagtctgatctgtga

SEQ ID NO: 2827255 - DNA, 25 bp, Homo sapien
gctggatagagctgcaagttatcaa

SEQ ID NO: 2827256 - DNA, 25 bp, Homo sapien
actttcaagtctggtctgggtagca

SEQ ID NO: 2827257 - DNA, 25 bp, Homo sapien
tggtctgggtagcaaatcctttaac

SEQ ID NO: 2827258 - DNA, 25 bp, Homo sapien
tagactttcaagtctggtctgggta

SEQ ID NO: 2827259 - DNA, 25 bp, Homo sapien
caagtctggtctgggtagcaaatcc

SEQ ID NO: 2827260 - DNA, 25 bp, Homo sapien
gctggagtggacagattgaagcatt

SEQ ID NO: 2827261 - DNA, 25 bp, Homo sapien
acagattgaagcattcagctggttc

SEQ ID NO: 2827262 - DNA, 25 bp, Homo sapien
gagtggacagattgaagcattcagc

SEQ ID NO: 2827263 - DNA, 25 bp, Homo sapien
gctggttcttggaaccacgggccat

SEQ ID NO: 2827264 - DNA, 25 bp, Homo sapien
ctaatggcacgtcgccggcattctt

SEQ ID NO: 2827265 - DNA, 25 bp, Homo sapien
caatgtagaattgattaggctctca

SEQ ID NO: 2827266 - DNA, 25 bp, Homo sapien
gattaggctctcaattactaatggc

SEQ ID NO: 2827267 - DNA, 25 bp, Homo sapien
gctctcaattactaatggcacgtcg

SEQ ID NO: 2827268 - DNA, 25 bp, Homo sapien
gttgacatcaaaagtggtaggtcac

SEQ ID NO: 2827269 - DNA, 25 bp, Homo sapien
tgttgacatcaaaagtggtaggtca

SEQ ID NO: 2827270 - DNA, 25 bp, Homo sapien
tggacctgcagagtacattctgagc

SEQ ID NO: 2827271 - DNA, 25 bp, Homo sapien
caagcagacaagctatcatcagtgc

SEQ ID NO: 2827272 - DNA, 25 bp, Homo sapien
tcagtgcctgaaaccctgcaaatca

SEQ ID NO: 2827273 - DNA, 25 bp, Homo sapien
taataggctgaagtaaacagtgtca

SEQ ID NO: 2827274 - DNA, 25 bp, Homo sapien
tggaaggaggcgctttgctaatcac

SEQ ID NO: 2827275 - DNA, 25 bp, Homo sapien
aagaatggaaggaggcgctttgcta

SEQ ID NO: 2827276 - DNA, 25 bp, Homo sapien
cagtgtgttgatgacattttgaaga

SEQ ID NO: 2827277 - DNA, 25 bp, Homo sapien
aaggaggcgctttgctaatcactgt

SEQ ID NO: 2827278 - DNA, 25 bp, Homo sapien
aaagtgagaaatatgtgtcccttcc

SEQ ID NO: 2827279 - DNA, 25 bp, Homo sapien
gctcgctcaatgctgggttgccaca

SEQ ID NO: 2827280 - DNA, 25 bp, Homo sapien
taaaatggtgccaatgggctcgctc

SEQ ID NO: 2827281 - DNA, 25 bp, Homo sapien
gcaagtgggctagctttctaaagtg

SEQ ID NO: 2827282 - DNA, 25 bp, Homo sapien
ctatcaagaaatctgcaagcaggct

SEQ ID NO: 2827283 - DNA, 25 bp, Homo sapien
ggccagtatcaacactatcagcaag

SEQ ID NO: 2827284 - DNA, 25 bp, Homo sapien
gatgcttccttcgtggttacaagtt

SEQ ID NO: 2827285 - DNA, 25 bp, Homo sapien
cctcagtatgttggtgatgcttcct

SEQ ID NO: 2827286 - DNA, 25 bp, Homo sapien
tgaagagagctcttcagtcactcct

SEQ ID NO: 2827287 - DNA, 25 bp, Homo sapien
tcagtcactcctgaaattccttgaa

SEQ ID NO: 2827288 - DNA, 25 bp, Homo sapien
cagcagatgaagagagctcttcagt

SEQ ID NO: 2827289 - DNA, 25 bp, Homo sapien
agctcttcagtcactcctgaaattc

SEQ ID NO: 2827290 - DNA, 25 bp, Homo sapien
tgccgttggccaaacccagtggaag

SEQ ID NO: 2827291 - DNA, 25 bp, Homo sapien
tgccatcatggaggaatgcatgcca

SEQ ID NO: 2827292 - DNA, 25 bp, Homo sapien
aagcagcaaggaagacatgacccaa

SEQ ID NO: 2827293 - DNA, 25 bp, Homo sapien
ccagagatatagcaccaaggcaggg

SEQ ID NO: 2827294 - DNA, 25 bp, Homo sapien
tgtaggtgttgttaatgtacgttcc

SEQ ID NO: 2827295 - DNA, 25 bp, Homo sapien
gcaacaaatactgtacagcttttac

SEQ ID NO: 2827296 - DNA, 25 bp, Homo sapien
cagcttttacatggttagtgtaggt

SEQ ID NO: 2827297 - DNA, 25 bp, Homo sapien
gagaatgtgtttagctgaagacaaa

SEQ ID NO: 2827298 - DNA, 25 bp, Homo sapien
tgagtttcacttctgctatgactcc

SEQ ID NO: 2827299 - DNA, 25 bp, Homo sapien
ggcggtgcacgacttttctccacta

SEQ ID NO: 2827300 - DNA, 25 bp, Homo sapien
gtttcacttctgctatgactccctc

SEQ ID NO: 2827301 - DNA, 25 bp, Homo sapien
cttctgaggcggtgcacgacttttc

SEQ ID NO: 2827302 - DNA, 25 bp, Homo sapien
gctttgaatataagccttctccctc

SEQ ID NO: 2827303 - DNA, 25 bp, Homo sapien
tgctttgaatataagccttctccct

SEQ ID NO: 2827304 - DNA, 25 bp, Homo sapien
ctgctttgaatataagccttctccc

SEQ ID NO: 2827305 - DNA, 25 bp, Homo sapien
tgctgaagaaagcctacccacacct

SEQ ID NO: 2827306 - DNA, 25 bp, Homo sapien
ttcaccaaagcacattgccgagccc

SEQ ID NO: 2827307 - DNA, 25 bp, Homo sapien
gcacattgccgagccccttgctgaa

SEQ ID NO: 2827308 - DNA, 25 bp, Homo sapien
gcagctcaagagatagccaaactct

SEQ ID NO: 2827309 - DNA, 25 bp, Homo sapien
tcctagctacttaagaaaatgaggt

SEQ ID NO: 2827310 - DNA, 25 bp, Homo sapien
gtcctagctacttaagaaaatgagg

SEQ ID NO: 2827311 - DNA, 25 bp, Homo sapien
cctagctacttaagaaaatgaggtg

SEQ ID NO: 2827312 - DNA, 25 bp, Homo sapien
gacttctttagcactaacagcttta

SEQ ID NO: 2827313 - DNA, 25 bp, Homo sapien
tataataatgaattgctatccacag

SEQ ID NO: 2827314 - DNA, 25 bp, Homo sapien
ctatccacagtaaaggtgcttcatc

SEQ ID NO: 2827315 - DNA, 25 bp, Homo sapien
aaaggtgcttcatcataattttgct

SEQ ID NO: 2827316 - DNA, 25 bp, Homo sapien
gaattgctatccacagtaaaggtgc

SEQ ID NO: 2827317 - DNA, 25 bp, Homo sapien
cgtgtgcaggcttgcggatcctttc

SEQ ID NO: 2827318 - DNA, 25 bp, Homo sapien
tgctggccataagcgtgtccgtgtg

SEQ ID NO: 2827319 - DNA, 25 bp, Homo sapien
cttaatgctggccataagcgtgtcc

SEQ ID NO: 2827320 - DNA, 25 bp, Homo sapien
ggcttgcggatcctttcagtccttt

SEQ ID NO: 2827321 - DNA, 25 bp, Homo sapien
acatcattatatcccattgtgatga

SEQ ID NO: 2827322 - DNA, 25 bp, Homo sapien
aatagccactttatgcggtttctgc

SEQ ID NO: 2827323 - DNA, 25 bp, Homo sapien
gactttcggtatccagcgataatga

SEQ ID NO: 2827324 - DNA, 25 bp, Homo sapien
ctccctgttagctttaacatcatta

SEQ ID NO: 2827325 - DNA, 25 bp, Homo sapien
taagcactaccaaagagcacctcaa

SEQ ID NO: 2827326 - DNA, 25 bp, Homo sapien
gcttccaataagcactaccaaagag

SEQ ID NO: 2827327 - DNA, 25 bp, Homo sapien
gagcacctcaaacacattgccaaga

SEQ ID NO: 2827328 - DNA, 25 bp, Homo sapien
taccaaagagcacctcaaacacatt

SEQ ID NO: 2827329 - DNA, 25 bp, Homo sapien
gacagtctccacagtcacgctgggt

SEQ ID NO: 2827330 - DNA, 25 bp, Homo sapien
tgatacacagtagccggtgtggcaa

SEQ ID NO: 2827331 - DNA, 25 bp, Homo sapien
tctgcctgagcttgctgtaccacca

SEQ ID NO: 2827332 - DNA, 25 bp, Homo sapien
tcttttgtgacagagacaccccgcc

SEQ ID NO: 2827333 - DNA, 25 bp, Homo sapien
gttccaagaaaacctgaagctgcca

SEQ ID NO: 2827334 - DNA, 25 bp, Homo sapien
ggtctactctcaaacgctaggcaga

SEQ ID NO: 2827335 - DNA, 25 bp, Homo sapien
aatgagctccacgatgattttgtcc

SEQ ID NO: 2827336 - DNA, 25 bp, Homo sapien
gagctgtagctctagtgtgcacgaa

SEQ ID NO: 2827337 - DNA, 25 bp, Homo sapien
tgaggtcaggtatccctacagactg

SEQ ID NO: 2827338 - DNA, 25 bp, Homo sapien
tggccacggcacacacatgtcttgt

SEQ ID NO: 2827339 - DNA, 25 bp, Homo sapien
gatgctctgttaactcacccctaaa

SEQ ID NO: 2827340 - DNA, 25 bp, Homo sapien
caaagtaagcttcccatgaggtcag

SEQ ID NO: 2827341 - DNA, 25 bp, Homo sapien
gaggagtgcttccttaacttcccac

SEQ ID NO: 2827342 - DNA, 25 bp, Homo sapien
aataattacatcagctgaacagagg

SEQ ID NO: 2827343 - DNA, 25 bp, Homo sapien
ccccagagcaggtctagaaataatt

SEQ ID NO: 2827344 - DNA, 25 bp, Homo sapien
ggtagatcaggtccattccagaaga

SEQ ID NO: 2827345 - DNA, 25 bp, Homo sapien
tctttggcttggaaagataggcagc

SEQ ID NO: 2827346 - DNA, 25 bp, Homo sapien
gatttagaccttgcctggaggtgca

SEQ ID NO: 2827347 - DNA, 25 bp, Homo sapien
ccagaatactgattgtgtctttggc

SEQ ID NO: 2827348 - DNA, 25 bp, Homo sapien
taggcagcagcgtggaacacttatt

SEQ ID NO: 2827349 - DNA, 25 bp, Homo sapien
taagagagcctattttgttagaact

SEQ ID NO: 2827350 - DNA, 25 bp, Homo sapien
ttgttagaactatcagcagattttt

SEQ ID NO: 2827351 - DNA, 25 bp, Homo sapien
tagaacgagcactctttcttgctta

SEQ ID NO: 2827352 - DNA, 25 bp, Homo sapien
tcattgggttaaatagaacgagcac

SEQ ID NO: 2827353 - DNA, 25 bp, Homo sapien
ccttggtatcattgcaaaatcgaaa

SEQ ID NO: 2827354 - DNA, 25 bp, Homo sapien
tgttctctaggctgacccatggctg

SEQ ID NO: 2827355 - DNA, 25 bp, Homo sapien
tctcctcctgtcttgcaaacttctg

SEQ ID NO: 2827356 - DNA, 25 bp, Homo sapien
taaaaagcaaccgtgtcccttgatc

SEQ ID NO: 2827357 - DNA, 25 bp, Homo sapien
tccaggcaccttccgtcttcttcgt

SEQ ID NO: 2827358 - DNA, 25 bp, Homo sapien
cgtcctctacttgggccctcataac

SEQ ID NO: 2827359 - DNA, 25 bp, Homo sapien
ctccaggcaccttccgtcttcttcg

SEQ ID NO: 2827360 - DNA, 25 bp, Homo sapien
cttcgtcctctacttgggccctcat

SEQ ID NO: 2827361 - DNA, 25 bp, Homo sapien
gatttctgtgatttacgccttaaac

SEQ ID NO: 2827362 - DNA, 25 bp, Homo sapien
gatttacgccttaaacatccttgac

SEQ ID NO: 2827363 - DNA, 25 bp, Homo sapien
aacatccttgaccaaggcacagtgg

SEQ ID NO: 2827364 - DNA, 25 bp, Homo sapien
gcttgaatagatttctgtgatttac

SEQ ID NO: 2827365 - DNA, 25 bp, Homo sapien
ctccccagtgtcccgtgatggccca

SEQ ID NO: 2827366 - DNA, 25 bp, Homo sapien
tgtggctccccagtgtcccgtgatg

SEQ ID NO: 2827367 - DNA, 25 bp, Homo sapien
gtggctccccagtgtcccgtgatgg

SEQ ID NO: 2827368 - DNA, 25 bp, Homo sapien
ggctccccagtgtcccgtgatggcc

SEQ ID NO: 2827369 - DNA, 25 bp, Homo sapien
tactctgcaagtgttaatgacctgg

SEQ ID NO: 2827370 - DNA, 25 bp, Homo sapien
tcacagccagtgtgaatgtataagg

SEQ ID NO: 2827371 - DNA, 25 bp, Homo sapien
tgtataaggccacacgttttactct

SEQ ID NO: 2827372 - DNA, 25 bp, Homo sapien
cacactaaatcagggtcacagccag

SEQ ID NO: 2827373 - DNA, 25 bp, Homo sapien
taaaacaagtaaccaggcaatggcg

SEQ ID NO: 2827374 - DNA, 25 bp, Homo sapien
gatatgcaaggttcaggcacactga

SEQ ID NO: 2827375 - DNA, 25 bp, Homo sapien
cactggtgcgtctttaacaggagcc

SEQ ID NO: 2827376 - DNA, 25 bp, Homo sapien
tgatgtctgtataaagcgcttcccc

SEQ ID NO: 2827377 - DNA, 25 bp, Homo sapien
aaccagaaaaccataagaccgatag

SEQ ID NO: 2827378 - DNA, 25 bp, Homo sapien
caaatgtggaattcaattccagaga

SEQ ID NO: 2827379 - DNA, 25 bp, Homo sapien
gcccagcctctatcaacatttggca

SEQ ID NO: 2827380 - DNA, 25 bp, Homo sapien
cctctatcaacatttggcactgtaa

SEQ ID NO: 2827381 - DNA, 25 bp, Homo sapien
taaatgtctccatttgcgactttat

SEQ ID NO: 2827382 - DNA, 25 bp, Homo sapien
tgaaaataaatgtctccatttgcga

SEQ ID NO: 2827383 - DNA, 25 bp, Homo sapien
atgaaaataaatgtctccatttgcg

SEQ ID NO: 2827384 - DNA, 25 bp, Homo sapien
aaataaatgtctccatttgcgactt

SEQ ID NO: 2827385 - DNA, 25 bp, Homo sapien
tgtccaggaaacattccagatgcag

SEQ ID NO: 2827386 - DNA, 25 bp, Homo sapien
tctttgtccaggaaacattccagat

SEQ ID NO: 2827387 - DNA, 25 bp, Homo sapien
tccaggaaacattccagatgcagat

SEQ ID NO: 2827388 - DNA, 25 bp, Homo sapien
tttgtccaggaaacattccagatgc

SEQ ID NO: 2827389 - DNA, 25 bp, Homo sapien
agaggcaacaagggcagcagaggtc

SEQ ID NO: 2827390 - DNA, 25 bp, Homo sapien
aggcaacaagggcagcagaggtcaa

SEQ ID NO: 2827391 - DNA, 25 bp, Homo sapien
tgagaggcaacaagggcagcagagg

SEQ ID NO: 2827392 - DNA, 25 bp, Homo sapien
ctgctgagaggcaacaagggcagca

SEQ ID NO: 2827393 - DNA, 25 bp, Homo sapien
cagacctagtagcagcatggtgtcc

SEQ ID NO: 2827394 - DNA, 25 bp, Homo sapien
cccagtggagaagggccgcagacct

SEQ ID NO: 2827395 - DNA, 25 bp, Homo sapien
taagagtagatacaggcccagtgga

SEQ ID NO: 2827396 - DNA, 25 bp, Homo sapien
tagagtgtctgtgatctttagaagg

SEQ ID NO: 2827397 - DNA, 25 bp, Homo sapien
tctgcatggtgctaaatggtttgca

SEQ ID NO: 2827398 - DNA, 25 bp, Homo sapien
ctatctatcctttcttgaatactct

SEQ ID NO: 2827399 - DNA, 25 bp, Homo sapien
tattcgaaggagatacagcattcca

SEQ ID NO: 2827400 - DNA, 25 bp, Homo sapien
tcttaatagctattcgaaggagata

SEQ ID NO: 2827401 - DNA, 25 bp, Homo sapien
gaagcggcatgctatttgcctagaa

SEQ ID NO: 2827402 - DNA, 25 bp, Homo sapien
tcacacagtagcataagaggcaact

SEQ ID NO: 2827403 - DNA, 25 bp, Homo sapien
tgcaaacctagggaagattactgtc

SEQ ID NO: 2827404 - DNA, 25 bp, Homo sapien
tcacagtgaattacagaagcggcat

SEQ ID NO: 2827405 - DNA, 25 bp, Homo sapien
ggctgtgaagaaccctcgaatgagg

SEQ ID NO: 2827406 - DNA, 25 bp, Homo sapien
catttagtgaagtcgcagcagtgaa

SEQ ID NO: 2827407 - DNA, 25 bp, Homo sapien
tgattgttatattcagtgccccaga

SEQ ID NO: 2827408 - DNA, 25 bp, Homo sapien
tcagaacaagtaatttcaccaaagc

SEQ ID NO: 2827409 - DNA, 25 bp, Homo sapien
ttttccaaagcagaatggacaaaga

SEQ ID NO: 2827410 - DNA, 25 bp, Homo sapien
tttccaaagcagaatggacaaagac

SEQ ID NO: 2827411 - DNA, 25 bp, Homo sapien
agacacagtaatgatagagctgctg

SEQ ID NO: 2827412 - DNA, 25 bp, Homo sapien
acacagtaatgatagagctgctgac

SEQ ID NO: 2827413 - DNA, 25 bp, Homo sapien
ggattagcgggtaacccatgccaac

SEQ ID NO: 2827414 - DNA, 25 bp, Homo sapien
gggtcatattgacccgggattagcg

SEQ ID NO: 2827415 - DNA, 25 bp, Homo sapien
cgggattagcgggtaacccatgcca

SEQ ID NO: 2827416 - DNA, 25 bp, Homo sapien
cttgaaaagggtcatattgacccgg

SEQ ID NO: 2827417 - DNA, 25 bp, Homo sapien
tttctgcctcccgttcccgctcagc

SEQ ID NO: 2827418 - DNA, 25 bp, Homo sapien
ccgttcccgctcagctgtagccttt

SEQ ID NO: 2827419 - DNA, 25 bp, Homo sapien
ccgctggccgaagggggagtggcga

SEQ ID NO: 2827420 - DNA, 25 bp, Homo sapien
ctcccgttcccgctcagctgtagcc

SEQ ID NO: 2827421 - DNA, 25 bp, Homo sapien
tgtcttaagagaaagaggtgatctg

SEQ ID NO: 2827422 - DNA, 25 bp, Homo sapien
cagtggctcactcccggcccagatt

SEQ ID NO: 2827423 - DNA, 25 bp, Homo sapien
ggtgcccactaccactaggctactt

SEQ ID NO: 2827424 - DNA, 25 bp, Homo sapien
taaaaggtatcctgcaagaaaacat

SEQ ID NO: 2827425 - DNA, 25 bp, Homo sapien
aagactgttctctagcttgttcccc

SEQ ID NO: 2827426 - DNA, 25 bp, Homo sapien
tctctcatgtgtgaaagcgtcttac

SEQ ID NO: 2827427 - DNA, 25 bp, Homo sapien
gaaatcacagctgggttccgaaacc

SEQ ID NO: 2827428 - DNA, 25 bp, Homo sapien
gaacgctccattctttacgtattag

SEQ ID NO: 2827429 - DNA, 25 bp, Homo sapien
tattggttagcatgctgctggagca

SEQ ID NO: 2827430 - DNA, 25 bp, Homo sapien
tcgtgttgacgctagggctggtatt

SEQ ID NO: 2827431 - DNA, 25 bp, Homo sapien
caggagacttgctgcggtattggtt

SEQ ID NO: 2827432 - DNA, 25 bp, Homo sapien
tgacatcttcccataaacaggataa

SEQ ID NO: 2827433 - DNA, 25 bp, Homo sapien
cattaggacgggagaaacagcccgg

SEQ ID NO: 2827434 - DNA, 25 bp, Homo sapien
gttccccgagagtccttccagttca

SEQ ID NO: 2827435 - DNA, 25 bp, Homo sapien
gagacagccactcttgttccccgag

SEQ ID NO: 2827436 - DNA, 25 bp, Homo sapien
tgttaacgatacaggaaggctgggc

SEQ ID NO: 2827437 - DNA, 25 bp, Homo sapien
ctggtatacataatgatgccatgtt

SEQ ID NO: 2827438 - DNA, 25 bp, Homo sapien
tggtatacataatgatgccatgttc

SEQ ID NO: 2827439 - DNA, 25 bp, Homo sapien
ggtatacataatgatgccatgttct

SEQ ID NO: 2827440 - DNA, 25 bp, Homo sapien
tccttttactatacaccatgacaag

SEQ ID NO: 2827441 - DNA, 25 bp, Homo sapien
acagagcaagttagtggcatgaaac

SEQ ID NO: 2827442 - DNA, 25 bp, Homo sapien
aatctgcaaagcacccatccacagt

SEQ ID NO: 2827443 - DNA, 25 bp, Homo sapien
cattttagagctacatagtaactcc

SEQ ID NO: 2827444 - DNA, 25 bp, Homo sapien
tgattggagagaagctgcgatttac

SEQ ID NO: 2827445 - DNA, 25 bp, Homo sapien
gcttagctttgaagctgtcggcctg

SEQ ID NO: 2827446 - DNA, 25 bp, Homo sapien
taaatctcgaggttgggtctacacc

SEQ ID NO: 2827447 - DNA, 25 bp, Homo sapien
tgtctgcttcatagagtccatgaca

SEQ ID NO: 2827448 - DNA, 25 bp, Homo sapien
tatgtctgaataggccgggctgctt

SEQ ID NO: 2827449 - DNA, 25 bp, Homo sapien
ggatgccggtgccttcaactggtca

SEQ ID NO: 2827450 - DNA, 25 bp, Homo sapien
tatagagcccatatgcatactggcc

SEQ ID NO: 2827451 - DNA, 25 bp, Homo sapien
tcagctttgatactggccatgcggc

SEQ ID NO: 2827452 - DNA, 25 bp, Homo sapien
cccagtcgtgcttggtgcagtccag

SEQ ID NO: 2827453 - DNA, 25 bp, Homo sapien
cagtcgtgcttggtgcagtccagta

SEQ ID NO: 2827454 - DNA, 25 bp, Homo sapien
ggcccagtcgtgcttggtgcagtcc

SEQ ID NO: 2827455 - DNA, 25 bp, Homo sapien
tgcttggtgcagtccagtagggttc

SEQ ID NO: 2827456 - DNA, 25 bp, Homo sapien
aattgctttcgtttggcaagcagcc

SEQ ID NO: 2827457 - DNA, 25 bp, Homo sapien
cacataattgctttcgtttggcaag

SEQ ID NO: 2827458 - DNA, 25 bp, Homo sapien
caatataaactagcgccagttacca

SEQ ID NO: 2827459 - DNA, 25 bp, Homo sapien
agccaatataaactagcgccagtta

SEQ ID NO: 2827460 - DNA, 25 bp, Homo sapien
ggcgcccgctgcgagcactcgcgtc

SEQ ID NO: 2827461 - DNA, 25 bp, Homo sapien
gcgtttccagagaacgctggccgcg

SEQ ID NO: 2827462 - DNA, 25 bp, Homo sapien
ccgctgcgagcactcgcgtctgatt

SEQ ID NO: 2827463 - DNA, 25 bp, Homo sapien
gtttccagagaacgctggccgcgga

SEQ ID NO: 2827464 - DNA, 25 bp, Homo sapien
ggcagcggtcgggtagaggtgagcg

SEQ ID NO: 2827465 - DNA, 25 bp, Homo sapien
ggaggcaaagggacgcatcccccac

SEQ ID NO: 2827466 - DNA, 25 bp, Homo sapien
gtgagcgtggcggaggcaaagggac

SEQ ID NO: 2827467 - DNA, 25 bp, Homo sapien
gtagaggtgagcgtggcggaggcaa

SEQ ID NO: 2827468 - DNA, 25 bp, Homo sapien
tcggtctgcgtgaccgtgctgcgct

SEQ ID NO: 2827469 - DNA, 25 bp, Homo sapien
attcgcactaacgagtccggccgtg

SEQ ID NO: 2827470 - DNA, 25 bp, Homo sapien
cgtgcagtgaaagcttcggtctgcg

SEQ ID NO: 2827471 - DNA, 25 bp, Homo sapien
gcgggacacaggctcattcgcacta

SEQ ID NO: 2827472 - DNA, 25 bp, Homo sapien
ttcaccgtctcaatacaggctcaag

SEQ ID NO: 2827473 - DNA, 25 bp, Homo sapien
gaaattcaccgtctcaatacaggct

SEQ ID NO: 2827474 - DNA, 25 bp, Homo sapien
ctcagaacgaaattcaccgtctcaa

SEQ ID NO: 2827475 - DNA, 25 bp, Homo sapien
cgtctcaatacaggctcaagggaaa

SEQ ID NO: 2827476 - DNA, 25 bp, Homo sapien
gaacagtctccatcaagcagtgcta

SEQ ID NO: 2827477 - DNA, 25 bp, Homo sapien
tcttatcgaagtacaagtgatgccg

SEQ ID NO: 2827478 - DNA, 25 bp, Homo sapien
gggacccagggcaggcaattaatca

SEQ ID NO: 2827479 - DNA, 25 bp, Homo sapien
tttgcactcggaaggaatcaagtcc

SEQ ID NO: 2827480 - DNA, 25 bp, Homo sapien
cgagtactctaggactaaaagggcg

SEQ ID NO: 2827481 - DNA, 25 bp, Homo sapien
catgggtgattagcagagttccagg

SEQ ID NO: 2827482 - DNA, 25 bp, Homo sapien
caggcaggaaggcaaagtaattacc

SEQ ID NO: 2827483 - DNA, 25 bp, Homo sapien
tcttgtagatcagtaggtcatgggt

SEQ ID NO: 2827484 - DNA, 25 bp, Homo sapien
cttaagttgttggtgaacctccctg

SEQ ID NO: 2827485 - DNA, 25 bp, Homo sapien
ttgttggtgaacctccctgttcttc

SEQ ID NO: 2827486 - DNA, 25 bp, Homo sapien
gcggcagggtgaatgaggcttaagt

SEQ ID NO: 2827487 - DNA, 25 bp, Homo sapien
tttggcggcagggtgaatgaggctt

SEQ ID NO: 2827488 - DNA, 25 bp, Homo sapien
caggtgaagcaaactcagttatgcg

SEQ ID NO: 2827489 - DNA, 25 bp, Homo sapien
aagccctcccgcattcctcccaggt

SEQ ID NO: 2827490 - DNA, 25 bp, Homo sapien
gtgaagcaaactcagttatgcgcat

SEQ ID NO: 2827491 - DNA, 25 bp, Homo sapien
cgcattcctcccaggtgaagcaaac

SEQ ID NO: 2827492 - DNA, 25 bp, Homo sapien
cataatgggcatgtacgtttgtgcg

SEQ ID NO: 2827493 - DNA, 25 bp, Homo sapien
tagacaatgaaggttaggaggcatg

SEQ ID NO: 2827494 - DNA, 25 bp, Homo sapien
tgcttgtgtgtaccaaagggaaata

SEQ ID NO: 2827495 - DNA, 25 bp, Homo sapien
agttgacagagcagaaagctatctc

SEQ ID NO: 2827496 - DNA, 25 bp, Homo sapien
ggcacttcccttgtactagctgaaa

SEQ ID NO: 2827497 - DNA, 25 bp, Homo sapien
tggtgaatgcgccactactggatgc

SEQ ID NO: 2827498 - DNA, 25 bp, Homo sapien
cccaggctagatagtcaagattgtc

SEQ ID NO: 2827499 - DNA, 25 bp, Homo sapien
gatgcaatccatgtcctcaagcggc

SEQ ID NO: 2827500 - DNA, 25 bp, Homo sapien
ggacgagtcaccacgcaagataaaa

SEQ ID NO: 2827501 - DNA, 25 bp, Homo sapien
tgtcataggcgtggatcctctgcca

SEQ ID NO: 2827502 - DNA, 25 bp, Homo sapien
taccagaagtcaaataactggacga

SEQ ID NO: 2827503 - DNA, 25 bp, Homo sapien
gcctatgtatgacggtgagtgtgcc

SEQ ID NO: 2827504 - DNA, 25 bp, Homo sapien
ggtaaccatagtttctgtatcctgc

SEQ ID NO: 2827505 - DNA, 25 bp, Homo sapien
tcctgctgagacttgatatgtagag

SEQ ID NO: 2827506 - DNA, 25 bp, Homo sapien
ggcagagagtattgtacacactata

SEQ ID NO: 2827507 - DNA, 25 bp, Homo sapien
gcaatttatgagcaatgtcagctga

SEQ ID NO: 2827508 - DNA, 25 bp, Homo sapien
caaatgcttatctctaaatcggctg

SEQ ID NO: 2827509 - DNA, 25 bp, Homo sapien
caagggctaacctatctgtgtctgg

SEQ ID NO: 2827510 - DNA, 25 bp, Homo sapien
catcaggtaaagtcagacaagggct

SEQ ID NO: 2827511 - DNA, 25 bp, Homo sapien
cataaaaatcatcgtggagcttggc

SEQ ID NO: 2827512 - DNA, 25 bp, Homo sapien
atgctactggagagaagtaaccaga

SEQ ID NO: 2827513 - DNA, 25 bp, Homo sapien
ggggcgagtgcaaacaataaacgct

SEQ ID NO: 2827514 - DNA, 25 bp, Homo sapien
tactggagagaagtaaccagagaag

SEQ ID NO: 2827515 - DNA, 25 bp, Homo sapien
aagcctagagccatctgaggggcga

SEQ ID NO: 2827516 - DNA, 25 bp, Homo sapien
catatccgtgcaaatcaaaattcat

SEQ ID NO: 2827517 - DNA, 25 bp, Homo sapien
aatacaactattacatatccgtgca

SEQ ID NO: 2827518 - DNA, 25 bp, Homo sapien
tggcaggcagccaacccaactattt

SEQ ID NO: 2827519 - DNA, 25 bp, Homo sapien
tattacatatccgtgcaaatcaaaa

SEQ ID NO: 2827520 - DNA, 25 bp, Homo sapien
tattatgcctaccaactggcctggc

SEQ ID NO: 2827521 - DNA, 25 bp, Homo sapien
tacaatcatgccctttcagaggatc

SEQ ID NO: 2827522 - DNA, 25 bp, Homo sapien
gaaccatagcaagttgtagtgccag

SEQ ID NO: 2827523 - DNA, 25 bp, Homo sapien
taccccaaggaatgcatgaagtgac

SEQ ID NO: 2827524 - DNA, 25 bp, Homo sapien
agtgtagtgtaaagcctgactctcc

SEQ ID NO: 2827525 - DNA, 25 bp, Homo sapien
tgactctcctgatcaggcgtagtca

SEQ ID NO: 2827526 - DNA, 25 bp, Homo sapien
caggcgtagtcagggtagagtcaaa

SEQ ID NO: 2827527 - DNA, 25 bp, Homo sapien
cctgatcaggcgtagtcagggtaga

SEQ ID NO: 2827528 - DNA, 25 bp, Homo sapien
ggatctgacttagctgccagcctga

SEQ ID NO: 2827529 - DNA, 25 bp, Homo sapien
agcaacttatcaacagaccccaggg

SEQ ID NO: 2827530 - DNA, 25 bp, Homo sapien
ggtaatgctctccttctgaatcgtg

SEQ ID NO: 2827531 - DNA, 25 bp, Homo sapien
tatcaggcaggagtctacgaagaga

SEQ ID NO: 2827532 - DNA, 25 bp, Homo sapien
cccactgggccaggagaatacaagg

SEQ ID NO: 2827533 - DNA, 25 bp, Homo sapien
ggtctatggcctcctaatgtgtctg

SEQ ID NO: 2827534 - DNA, 25 bp, Homo sapien
cttcaagagggagccaagccaatgc

SEQ ID NO: 2827535 - DNA, 25 bp, Homo sapien
caagtaagtcctcgaagagctggca

SEQ ID NO: 2827536 - DNA, 25 bp, Homo sapien
caggaaaataccagccaaacttatt

SEQ ID NO: 2827537 - DNA, 25 bp, Homo sapien
taggaatgctttcgtagatactact

SEQ ID NO: 2827538 - DNA, 25 bp, Homo sapien
gccccagaagggcatataggaatgc

SEQ ID NO: 2827539 - DNA, 25 bp, Homo sapien
ttgaaaatccatgatatgacttctg

SEQ ID NO: 2827540 - DNA, 25 bp, Homo sapien
gatttgattcactatttgggttgcc

SEQ ID NO: 2827541 - DNA, 25 bp, Homo sapien
gtgggtagcacttgtgtacttcaga

SEQ ID NO: 2827542 - DNA, 25 bp, Homo sapien
caatgtactcagaatagaggtaact

SEQ ID NO: 2827543 - DNA, 25 bp, Homo sapien
gacaacggtgacgaacctcaaggaa

SEQ ID NO: 2827544 - DNA, 25 bp, Homo sapien
ttccattacataggatcatttgcct

SEQ ID NO: 2827545 - DNA, 25 bp, Homo sapien
gtaagattggcaagtaatactgcag

SEQ ID NO: 2827546 - DNA, 25 bp, Homo sapien
taaataattagcttgaggctgagtg

SEQ ID NO: 2827547 - DNA, 25 bp, Homo sapien
agtactgtaccaactccatgctgtt

SEQ ID NO: 2827548 - DNA, 25 bp, Homo sapien
tagcatcttgatagacactatctgc

SEQ ID NO: 2827549 - DNA, 25 bp, Homo sapien
catagcatcttgatagacactatct

SEQ ID NO: 2827550 - DNA, 25 bp, Homo sapien
ctgccatagcatcttgatagacact

SEQ ID NO: 2827551 - DNA, 25 bp, Homo sapien
gccatagcatcttgatagacactat

SEQ ID NO: 2827552 - DNA, 25 bp, Homo sapien
ccagagggaacttcactagtaacac

SEQ ID NO: 2827553 - DNA, 25 bp, Homo sapien
taccatacatcattggtcctatgca

SEQ ID NO: 2827554 - DNA, 25 bp, Homo sapien
aacatctgtgagtaattttgtacca

SEQ ID NO: 2827555 - DNA, 25 bp, Homo sapien
tttattcctgagcacaacttggttc

SEQ ID NO: 2827556 - DNA, 25 bp, Homo sapien
tcagcaagaataactctattaacag

SEQ ID NO: 2827557 - DNA, 25 bp, Homo sapien
gctccttcttgtcaccacagtaaac

SEQ ID NO: 2827558 - DNA, 25 bp, Homo sapien
cagaagtttagtttattcagcaaga

SEQ ID NO: 2827559 - DNA, 25 bp, Homo sapien
gaataactctattaacagctccagc

SEQ ID NO: 2827560 - DNA, 25 bp, Homo sapien
taacccaagctttacagctgttcca

SEQ ID NO: 2827561 - DNA, 25 bp, Homo sapien
tgacaagcaataaactgatgggagt

SEQ ID NO: 2827562 - DNA, 25 bp, Homo sapien
tttataacatctaccacccagtgag

SEQ ID NO: 2827563 - DNA, 25 bp, Homo sapien
gaggtcacactgcagggacttagtc

SEQ ID NO: 2827564 - DNA, 25 bp, Homo sapien
agtgtcagtctgaacgccttatcca

SEQ ID NO: 2827565 - DNA, 25 bp, Homo sapien
tggctgaacagacaagcaagatgag

SEQ ID NO: 2827566 - DNA, 25 bp, Homo sapien
tcacttccctctgagcaaacaaaag

SEQ ID NO: 2827567 - DNA, 25 bp, Homo sapien
acatgatagaagcttgctccccaca

SEQ ID NO: 2827568 - DNA, 25 bp, Homo sapien
ttctccctttgagtttcggccctca

SEQ ID NO: 2827569 - DNA, 25 bp, Homo sapien
tcttgcccagcaattaccctcaata

SEQ ID NO: 2827570 - DNA, 25 bp, Homo sapien
tgaataattgtgagtctcagaccct

SEQ ID NO: 2827571 - DNA, 25 bp, Homo sapien
gaccgatctaacttacagagaaaaa

SEQ ID NO: 2827572 - DNA, 25 bp, Homo sapien
aaaggttttacgtctctggccatag

SEQ ID NO: 2827573 - DNA, 25 bp, Homo sapien
gaagtgaccggcttactagggctta

SEQ ID NO: 2827574 - DNA, 25 bp, Homo sapien
ggcttgccgagttaaggaacagaaa

SEQ ID NO: 2827575 - DNA, 25 bp, Homo sapien
gcttaagtctttggccctggcctca

SEQ ID NO: 2827576 - DNA, 25 bp, Homo sapien
tcaattcagaaagtaaatataagcc

SEQ ID NO: 2827577 - DNA, 25 bp, Homo sapien
caattcagaaagtaaatataagcct

SEQ ID NO: 2827578 - DNA, 25 bp, Homo sapien
acatttgttggcaccctaagaatta

SEQ ID NO: 2827579 - DNA, 25 bp, Homo sapien
ttgttggcaccctaagaattaaata

SEQ ID NO: 2827580 - DNA, 25 bp, Homo sapien
ataaacttgagatctatctcccttc

SEQ ID NO: 2827581 - DNA, 25 bp, Homo sapien
aaacttgagatctatctcccttcct

SEQ ID NO: 2827582 - DNA, 25 bp, Homo sapien
gcttctcacagtccttccatgttag

SEQ ID NO: 2827583 - DNA, 25 bp, Homo sapien
tgcttctcacagtccttccatgtta

SEQ ID NO: 2827584 - DNA, 25 bp, Homo sapien
cttctcacagtccttccatgttagc

SEQ ID NO: 2827585 - DNA, 25 bp, Homo sapien
ggaagagggcatcgggaaatatata

SEQ ID NO: 2827586 - DNA, 25 bp, Homo sapien
gacaaacacggctcttacttccaac

SEQ ID NO: 2827587 - DNA, 25 bp, Homo sapien
tttagaaacacccaactcatctgca

SEQ ID NO: 2827588 - DNA, 25 bp, Homo sapien
taaaagcagccatgcacaagaagac

SEQ ID NO: 2827589 - DNA, 25 bp, Homo sapien
acgagtccgaaccaaaagctgttca

SEQ ID NO: 2827590 - DNA, 25 bp, Homo sapien
tactccaacttcacatgtattgaca

SEQ ID NO: 2827591 - DNA, 25 bp, Homo sapien
catgtattgacacccacagaacgag

SEQ ID NO: 2827592 - DNA, 25 bp, Homo sapien
tgtttcatgccacacgatcccttcc

SEQ ID NO: 2827593 - DNA, 25 bp, Homo sapien
ctgcaatattggatgaagatgggga

SEQ ID NO: 2827594 - DNA, 25 bp, Homo sapien
tagaatctgaggcgtgagactgctg

SEQ ID NO: 2827595 - DNA, 25 bp, Homo sapien
ggaaaagtaggagggtagaatctga

SEQ ID NO: 2827596 - DNA, 25 bp, Homo sapien
actgctggaaatcggcggtggtggc

SEQ ID NO: 2827597 - DNA, 25 bp, Homo sapien
tattgttttgaggttcacatctttg

SEQ ID NO: 2827598 - DNA, 25 bp, Homo sapien
ttgttttgaggttcacatctttgac

SEQ ID NO: 2827599 - DNA, 25 bp, Homo sapien
attgttttgaggttcacatctttga

SEQ ID NO: 2827600 - DNA, 25 bp, Homo sapien
cttcactgtagtatcggcttctcat

SEQ ID NO: 2827601 - DNA, 25 bp, Homo sapien
ctggctatttatcacgcgagagagc

SEQ ID NO: 2827602 - DNA, 25 bp, Homo sapien
gtcaagaacagacgcgcggcagtct

SEQ ID NO: 2827603 - DNA, 25 bp, Homo sapien
aaagttaatgtcaagaacagacgcg

SEQ ID NO: 2827604 - DNA, 25 bp, Homo sapien
gagcagtagcctggctatttatcac

SEQ ID NO: 2827605 - DNA, 25 bp, Homo sapien
gctggagagtgctccctcgagcact

SEQ ID NO: 2827606 - DNA, 25 bp, Homo sapien
ggtcagtgatgctttcagtaccagg

SEQ ID NO: 2827607 - DNA, 25 bp, Homo sapien
ccaggaaaccgacagccagtgagga

SEQ ID NO: 2827608 - DNA, 25 bp, Homo sapien
aaggatccaaagctggagtgttggt

SEQ ID NO: 2827609 - DNA, 25 bp, Homo sapien
cgtattccgatttctctcagcttaa

SEQ ID NO: 2827610 - DNA, 25 bp, Homo sapien
ccgatttctctcagcttaacatcag

SEQ ID NO: 2827611 - DNA, 25 bp, Homo sapien
attccgatttctctcagcttaacat

SEQ ID NO: 2827612 - DNA, 25 bp, Homo sapien
tttctctcagcttaacatcagtcat

SEQ ID NO: 2827613 - DNA, 25 bp, Homo sapien
ttagatgggttgccgtttaagccgc

SEQ ID NO: 2827614 - DNA, 25 bp, Homo sapien
gatgggttgccgtttaagccgcctc

SEQ ID NO: 2827615 - DNA, 25 bp, Homo sapien
caggccctcccctttagatgggttg

SEQ ID NO: 2827616 - DNA, 25 bp, Homo sapien
tgggttgccgtttaagccgcctcac

SEQ ID NO: 2827617 - DNA, 25 bp, Homo sapien
ggtggggagatgagcagtggccgca

SEQ ID NO: 2827618 - DNA, 25 bp, Homo sapien
tttttgccaggtgccacaatgtgcc

SEQ ID NO: 2827619 - DNA, 25 bp, Homo sapien
tccaacaagtttttgccaggtgcca

SEQ ID NO: 2827620 - DNA, 25 bp, Homo sapien
caagtttttgccaggtgccacaatg

SEQ ID NO: 2827621 - DNA, 25 bp, Homo sapien
aacacataacatggctgagcaattg

SEQ ID NO: 2827622 - DNA, 25 bp, Homo sapien
gacgcaggggctcaacacataacat

SEQ ID NO: 2827623 - DNA, 25 bp, Homo sapien
ggctgagcaattggtgctctctcac

SEQ ID NO: 2827624 - DNA, 25 bp, Homo sapien
gggctcaacacataacatggctgag

SEQ ID NO: 2827625 - DNA, 25 bp, Homo sapien
acaatctgagcacaggcccacattc

SEQ ID NO: 2827626 - DNA, 25 bp, Homo sapien
cacaatctgagcacaggcccacatt

SEQ ID NO: 2827627 - DNA, 25 bp, Homo sapien
tcacaatctgagcacaggcccacat

SEQ ID NO: 2827628 - DNA, 25 bp, Homo sapien
gtcacaatctgagcacaggcccaca

SEQ ID NO: 2827629 - DNA, 25 bp, Homo sapien
gcaaaagcaaaactgggacctgcca

SEQ ID NO: 2827630 - DNA, 25 bp, Homo sapien
aaaactgggacctgccatcccaact

SEQ ID NO: 2827631 - DNA, 25 bp, Homo sapien
gcaaaactgggacctgccatcccaa

SEQ ID NO: 2827632 - DNA, 25 bp, Homo sapien
aaaagcaaaactgggacctgccatc

SEQ ID NO: 2827633 - DNA, 25 bp, Homo sapien
ggtctttctgtgtttcccaggctgg

SEQ ID NO: 2827634 - DNA, 25 bp, Homo sapien
tttctgtgtttcccaggctggagtg

SEQ ID NO: 2827635 - DNA, 25 bp, Homo sapien
tctttctgtgtttcccaggctggag

SEQ ID NO: 2827636 - DNA, 25 bp, Homo sapien
aaggtctttctgtgtttcccaggct

SEQ ID NO: 2827637 - DNA, 25 bp, Homo sapien
tacaatggcttgtacccatgaaaaa

SEQ ID NO: 2827638 - DNA, 25 bp, Homo sapien
taagaaatggccaacaactcactag

SEQ ID NO: 2827639 - DNA, 25 bp, Homo sapien
gattactatcagattagcacagatt

SEQ ID NO: 2827640 - DNA, 25 bp, Homo sapien
aattgtagaaactacaggcaattca

SEQ ID NO: 2827641 - DNA, 25 bp, Homo sapien
taatctctccaattatgcacgcaca

SEQ ID NO: 2827642 - DNA, 25 bp, Homo sapien
cacattcaggctcaaataacatgga

SEQ ID NO: 2827643 - DNA, 25 bp, Homo sapien
ttacaattaaacctaaccatctgga

SEQ ID NO: 2827644 - DNA, 25 bp, Homo sapien
taacatggaagcaactacacctcac

SEQ ID NO: 2827645 - DNA, 25 bp, Homo sapien
tggcttctacaagcacaatgaggag

SEQ ID NO: 2827646 - DNA, 25 bp, Homo sapien
caaaaatgcccaggccccaattaag

SEQ ID NO: 2827647 - DNA, 25 bp, Homo sapien
gggctaccacaatcattgctattgt

SEQ ID NO: 2827648 - DNA, 25 bp, Homo sapien
gcagactgacctcattaaagggtaa

SEQ ID NO: 2827649 - DNA, 25 bp, Homo sapien
aaacaataaagggacctgctgaaga

SEQ ID NO: 2827650 - DNA, 25 bp, Homo sapien
gcgtcgtgaagagctgacagattta

SEQ ID NO: 2827651 - DNA, 25 bp, Homo sapien
tccatctgctcccatagcgaaaaca

SEQ ID NO: 2827652 - DNA, 25 bp, Homo sapien
tgctgaagaaaccagtgcgactgat

SEQ ID NO: 2827653 - DNA, 25 bp, Homo sapien
gatctttggaaaagctgaccgctca

SEQ ID NO: 2827654 - DNA, 25 bp, Homo sapien
cagagttggcgtgagagccttttcc

SEQ ID NO: 2827655 - DNA, 25 bp, Homo sapien
ttatctcagggaggcacaagcccag

SEQ ID NO: 2827656 - DNA, 25 bp, Homo sapien
gcctagagctgccaccacgttaaaa

SEQ ID NO: 2827657 - DNA, 25 bp, Homo sapien
ttactgcaatttcaagtttctatga

SEQ ID NO: 2827658 - DNA, 25 bp, Homo sapien
gctcatattactgcaatttcaagtt

SEQ ID NO: 2827659 - DNA, 25 bp, Homo sapien
acagtgttgctcatattactgcaat

SEQ ID NO: 2827660 - DNA, 25 bp, Homo sapien
gttgctcatattactgcaatttcaa

SEQ ID NO: 2827661 - DNA, 25 bp, Homo sapien
gtcgaaactggagcaaatcgcagcc

SEQ ID NO: 2827662 - DNA, 25 bp, Homo sapien
tcgaaactggagcaaatcgcagcca

SEQ ID NO: 2827663 - DNA, 25 bp, Homo sapien
cgtcgaaactggagcaaatcgcagc

SEQ ID NO: 2827664 - DNA, 25 bp, Homo sapien
tgaccagggccatcttaatgaaagc

SEQ ID NO: 2827665 - DNA, 25 bp, Homo sapien
tgctgtccgacaacaatggactctg

SEQ ID NO: 2827666 - DNA, 25 bp, Homo sapien
tgaacacctctgtggttagggagat

SEQ ID NO: 2827667 - DNA, 25 bp, Homo sapien
tataaagcccagctgaatgcctccc

SEQ ID NO: 2827668 - DNA, 25 bp, Homo sapien
cagagaatggccaacactacaggat

SEQ ID NO: 2827669 - DNA, 25 bp, Homo sapien
tgtttgagatcctgagccaacgccc

SEQ ID NO: 2827670 - DNA, 25 bp, Homo sapien
gcattcatgcaagggagtgccattt

SEQ ID NO: 2827671 - DNA, 25 bp, Homo sapien
tgaaatgttccgattgccagctaaa

SEQ ID NO: 2827672 - DNA, 25 bp, Homo sapien
atggctctgactccttaaccacagc

SEQ ID NO: 2827673 - DNA, 25 bp, Homo sapien
tgagcactggattagggcaattcat

SEQ ID NO: 2827674 - DNA, 25 bp, Homo sapien
taaccacagccattgtgagcactgg

SEQ ID NO: 2827675 - DNA, 25 bp, Homo sapien
gtgaatccaatcaaatggctctgac

SEQ ID NO: 2827676 - DNA, 25 bp, Homo sapien
agatttcagaacaccttttagcgga

SEQ ID NO: 2827677 - DNA, 25 bp, Homo sapien
tcaatgtggtctatgactaagcagc

SEQ ID NO: 2827678 - DNA, 25 bp, Homo sapien
ttcacgagtatcagtccagcaagtc

SEQ ID NO: 2827679 - DNA, 25 bp, Homo sapien
tgcctagtggacagaacaccttctg

SEQ ID NO: 2827680 - DNA, 25 bp, Homo sapien
taacactcttaaatctctagctaag

SEQ ID NO: 2827681 - DNA, 25 bp, Homo sapien
ttagcagccgtccagctccccagtc

SEQ ID NO: 2827682 - DNA, 25 bp, Homo sapien
gctccccagtcaggtatccaagtga

SEQ ID NO: 2827683 - DNA, 25 bp, Homo sapien
caggtatccaagtgataacactctt

SEQ ID NO: 2827684 - DNA, 25 bp, Homo sapien
ctgggtgagggaacaggggtagagt

SEQ ID NO: 2827685 - DNA, 25 bp, Homo sapien
tgggtgagggaacaggggtagagtg

SEQ ID NO: 2827686 - DNA, 25 bp, Homo sapien
accatcgagtttttctgcagttatg

SEQ ID NO: 2827687 - DNA, 25 bp, Homo sapien
ccaccaaaaccatcgagtttttctg

SEQ ID NO: 2827688 - DNA, 25 bp, Homo sapien
caagcttggggtttcattcaggacc

SEQ ID NO: 2827689 - DNA, 25 bp, Homo sapien
gaactcattcaaggatatcctttca

SEQ ID NO: 2827690 - DNA, 25 bp, Homo sapien
taggacatctaggaaggcgacttta

SEQ ID NO: 2827691 - DNA, 25 bp, Homo sapien
tattaaaagcacacggcaacctgct

SEQ ID NO: 2827692 - DNA, 25 bp, Homo sapien
cctgctgactagtgaggaaccgatc

SEQ ID NO: 2827693 - DNA, 25 bp, Homo sapien
caagagtcaagagggtgcatgagca

SEQ ID NO: 2827694 - DNA, 25 bp, Homo sapien
gaagcaggtcgtgcttgtccttcct

SEQ ID NO: 2827695 - DNA, 25 bp, Homo sapien
tctggcttttacctggcttctcctc

SEQ ID NO: 2827696 - DNA, 25 bp, Homo sapien
ttcagtttcttgattcgcctgtggc

SEQ ID NO: 2827697 - DNA, 25 bp, Homo sapien
cttttgctaacttcccctgcagcgg

SEQ ID NO: 2827698 - DNA, 25 bp, Homo sapien
ttttaggccatcagctaaggctgcg

SEQ ID NO: 2827699 - DNA, 25 bp, Homo sapien
tgaattcatgccagttgcctctcca

SEQ ID NO: 2827700 - DNA, 25 bp, Homo sapien
attgctgtttgggttgccgctgccg

SEQ ID NO: 2827701 - DNA, 25 bp, Homo sapien
tgatctcgggaatcccatacaaggc

SEQ ID NO: 2827702 - DNA, 25 bp, Homo sapien
ctagaataaaaatccgatgaacttt

SEQ ID NO: 2827703 - DNA, 25 bp, Homo sapien
ctgaagatgagctctctagaataaa

SEQ ID NO: 2827704 - DNA, 25 bp, Homo sapien
ctctctagaataaaaatccgatgaa

SEQ ID NO: 2827705 - DNA, 25 bp, Homo sapien
ctctagaataaaaatccgatgaact

SEQ ID NO: 2827706 - DNA, 25 bp, Homo sapien
gattttacaccctcagtccaggtcc

SEQ ID NO: 2827707 - DNA, 25 bp, Homo sapien
gggacattcgtttatctccgctggg

SEQ ID NO: 2827708 - DNA, 25 bp, Homo sapien
tgtccagggattttacaccctcagt

SEQ ID NO: 2827709 - DNA, 25 bp, Homo sapien
tttatctccgctgggctttctctca

SEQ ID NO: 2827710 - DNA, 25 bp, Homo sapien
aaaagtcgaatatttcttgtctggg

SEQ ID NO: 2827711 - DNA, 25 bp, Homo sapien
cttgtctgggtgttaccagaataaa

SEQ ID NO: 2827712 - DNA, 25 bp, Homo sapien
aacctatgacagtaagcatcttacg

SEQ ID NO: 2827713 - DNA, 25 bp, Homo sapien
ggtggctcatgtattgtcctcacag

SEQ ID NO: 2827714 - DNA, 25 bp, Homo sapien
tttgaaatatgcatgtcttttaaga

SEQ ID NO: 2827715 - DNA, 25 bp, Homo sapien
gaaatatgcatgtcttttaagagca

SEQ ID NO: 2827716 - DNA, 25 bp, Homo sapien
gtcttttaagagcatttctctctag

SEQ ID NO: 2827717 - DNA, 25 bp, Homo sapien
tcttttttgaaatatgcatgtcttt

SEQ ID NO: 2827718 - DNA, 25 bp, Homo sapien
gaattgctcactctcttaaatacgg

SEQ ID NO: 2827719 - DNA, 25 bp, Homo sapien
tttaagtgatctgcgccaaggtggc

SEQ ID NO: 2827720 - DNA, 25 bp, Homo sapien
aggtggcctcaatgaccgcaaatga

SEQ ID NO: 2827721 - DNA, 25 bp, Homo sapien
aatacggtgctactgactgtacaga

SEQ ID NO: 2827722 - DNA, 25 bp, Homo sapien
tgtagcaaacctacaggcgtccgct

SEQ ID NO: 2827723 - DNA, 25 bp, Homo sapien
gagacagaatgtgctaacatcggga

SEQ ID NO: 2827724 - DNA, 25 bp, Homo sapien
tcacaacagaagcaccaaaggtttt

SEQ ID NO: 2827725 - DNA, 25 bp, Homo sapien
ggcgtccgctagtaacgagacagaa

SEQ ID NO: 2827726 - DNA, 25 bp, Homo sapien
cctgcatgaagtccccgctaagtgc

SEQ ID NO: 2827727 - DNA, 25 bp, Homo sapien
agtgctatatagagacacaccacgc

SEQ ID NO: 2827728 - DNA, 25 bp, Homo sapien
agagacacaccacgcaaccgtactt

SEQ ID NO: 2827729 - DNA, 25 bp, Homo sapien
taaaactcgcacattcccctgcatg

SEQ ID NO: 2827730 - DNA, 25 bp, Homo sapien
tattggatcgagttgaccttttcct

SEQ ID NO: 2827731 - DNA, 25 bp, Homo sapien
ggatcgagttgaccttttccttcta

SEQ ID NO: 2827732 - DNA, 25 bp, Homo sapien
ggtctgtattggatcgagttgacct

SEQ ID NO: 2827733 - DNA, 25 bp, Homo sapien
tctgtattggatcgagttgaccttt

SEQ ID NO: 2827734 - DNA, 25 bp, Homo sapien
tgaatgtgtttggttgcagccgctt

SEQ ID NO: 2827735 - DNA, 25 bp, Homo sapien
tgtgtttggttgcagccgctttatt

SEQ ID NO: 2827736 - DNA, 25 bp, Homo sapien
gttgcagccgctttattttggaaat

SEQ ID NO: 2827737 - DNA, 25 bp, Homo sapien
tggttgcagccgctttattttggaa

SEQ ID NO: 2827738 - DNA, 25 bp, Homo sapien
gatggaccatcaaatgtcacagacc

SEQ ID NO: 2827739 - DNA, 25 bp, Homo sapien
ttgttctgcaacactaaatcaggac

SEQ ID NO: 2827740 - DNA, 25 bp, Homo sapien
cacagaccgtcctgtgtatttttta

SEQ ID NO: 2827741 - DNA, 25 bp, Homo sapien
cacacaacaagcttgttctgcaaca

SEQ ID NO: 2827742 - DNA, 25 bp, Homo sapien
ttctttgttcccagtgccctttcgc

SEQ ID NO: 2827743 - DNA, 25 bp, Homo sapien
gccctttcgcatcgggccaatcaga

SEQ ID NO: 2827744 - DNA, 25 bp, Homo sapien
tctctcattggctagctgctttctc

SEQ ID NO: 2827745 - DNA, 25 bp, Homo sapien
gcagcttttatgaaactgggctctc

SEQ ID NO: 2827746 - DNA, 25 bp, Homo sapien
catccccctccaacaacctccacta

SEQ ID NO: 2827747 - DNA, 25 bp, Homo sapien
actacatcattgttaaggtcatcaa

SEQ ID NO: 2827748 - DNA, 25 bp, Homo sapien
tttttaaagacagacgatctcaatg

SEQ ID NO: 2827749 - DNA, 25 bp, Homo sapien
ttttttaaagacagacgatctcaat

SEQ ID NO: 2827750 - DNA, 25 bp, Homo sapien
cttttttaaagacagacgatctcaa

SEQ ID NO: 2827751 - DNA, 25 bp, Homo sapien
agccattacgttccactccatcttt

SEQ ID NO: 2827752 - DNA, 25 bp, Homo sapien
gatcaagcacaggaagatcaagagg

SEQ ID NO: 2827753 - DNA, 25 bp, Homo sapien
caggatccagccattacgttccact

SEQ ID NO: 2827754 - DNA, 25 bp, Homo sapien
caagcacaggaagatcaagaggcag

SEQ ID NO: 2827755 - DNA, 25 bp, Homo sapien
tatcatcttgcactaattctgggcc

SEQ ID NO: 2827756 - DNA, 25 bp, Homo sapien
tcggcttgcaattaattccagtgga

SEQ ID NO: 2827757 - DNA, 25 bp, Homo sapien
tgtaatgcggatgtgataaagtggc

SEQ ID NO: 2827758 - DNA, 25 bp, Homo sapien
gagagtcattggacatcggcttgca

SEQ ID NO: 2827759 - DNA, 25 bp, Homo sapien
gatatggaatgatagccagacattt

SEQ ID NO: 2827760 - DNA, 25 bp, Homo sapien
cctgagataaaatgtggatgatcac

SEQ ID NO: 2827761 - DNA, 25 bp, Homo sapien
gaaggaatgttgttcaatatggaca

SEQ ID NO: 2827762 - DNA, 25 bp, Homo sapien
gagtaactcctagaactcttgtagg

SEQ ID NO: 2827763 - DNA, 25 bp, Homo sapien
tggactggtcctgaaagaatttccc

SEQ ID NO: 2827764 - DNA, 25 bp, Homo sapien
tttttgacttgtccgagcacagtga

SEQ ID NO: 2827765 - DNA, 25 bp, Homo sapien
gcacagtgaattcactgcccacggg

SEQ ID NO: 2827766 - DNA, 25 bp, Homo sapien
tggtgtccgtagttccagaaggatt

SEQ ID NO: 2827767 - DNA, 25 bp, Homo sapien
tatgtcatgtagaaaagccacaggg

SEQ ID NO: 2827768 - DNA, 25 bp, Homo sapien
gcagtattcgcaaaggccctctata

SEQ ID NO: 2827769 - DNA, 25 bp, Homo sapien
ctatagtatagatgcctgagagctc

SEQ ID NO: 2827770 - DNA, 25 bp, Homo sapien
ttcggtcgacaaggtcagagtgcct

SEQ ID NO: 2827771 - DNA, 25 bp, Homo sapien
tcaaccagtgtagctcttcctcaga

SEQ ID NO: 2827772 - DNA, 25 bp, Homo sapien
gctgactttttattgctttgggggc

SEQ ID NO: 2827773 - DNA, 25 bp, Homo sapien
agctgactttttattgctttggggg

SEQ ID NO: 2827774 - DNA, 25 bp, Homo sapien
tttgagaaagccagctgacttttta

SEQ ID NO: 2827775 - DNA, 25 bp, Homo sapien
tttttttgagaaagccagctgactt

SEQ ID NO: 2827776 - DNA, 25 bp, Homo sapien
accattacaggcttccggctgtgca

SEQ ID NO: 2827777 - DNA, 25 bp, Homo sapien
caccattacaggcttccggctgtgc

SEQ ID NO: 2827778 - DNA, 25 bp, Homo sapien
ttcaccattacaggcttccggctgt

SEQ ID NO: 2827779 - DNA, 25 bp, Homo sapien
ccattacaggcttccggctgtgcag

SEQ ID NO: 2827780 - DNA, 25 bp, Homo sapien
accacacctctgctgtcggctgcag

SEQ ID NO: 2827781 - DNA, 25 bp, Homo sapien
ttcttcagtatcgtgtgtctgatgc

SEQ ID NO: 2827782 - DNA, 25 bp, Homo sapien
ttcagtatcgtgtgtctgatgctgc

SEQ ID NO: 2827783 - DNA, 25 bp, Homo sapien
ttgttcttcagtatcgtgtgtctga

SEQ ID NO: 2827784 - DNA, 25 bp, Homo sapien
ctgtgctgtctgtctacttcttcct

SEQ ID NO: 2827785 - DNA, 25 bp, Homo sapien
tttagcgaaggagttgcgggccttc

SEQ ID NO: 2827786 - DNA, 25 bp, Homo sapien
caagttattgggctctgtgctgtct

SEQ ID NO: 2827787 - DNA, 25 bp, Homo sapien
tagcgaaggagttgcgggccttcaa

SEQ ID NO: 2827788 - DNA, 25 bp, Homo sapien
ccattgcagatgcgcagacatggcg

SEQ ID NO: 2827789 - DNA, 25 bp, Homo sapien
tccattgcagatgcgcagacatggc

SEQ ID NO: 2827790 - DNA, 25 bp, Homo sapien
catccattgcagatgcgcagacatg

SEQ ID NO: 2827791 - DNA, 25 bp, Homo sapien
gaccatccattgcagatgcgcagac

SEQ ID NO: 2827792 - DNA, 25 bp, Homo sapien
caggtgtggagcactcattggagac

SEQ ID NO: 2827793 - DNA, 25 bp, Homo sapien
gacaggtagtaaacccttcagacat

SEQ ID NO: 2827794 - DNA, 25 bp, Homo sapien
tggagcactcattggagactttctg

SEQ ID NO: 2827795 - DNA, 25 bp, Homo sapien
cattggagactttctgacaggtagt

SEQ ID NO: 2827796 - DNA, 25 bp, Homo sapien
tgaacccggattctcactatgtctc

SEQ ID NO: 2827797 - DNA, 25 bp, Homo sapien
ccaaggcccctttatagccagctat

SEQ ID NO: 2827798 - DNA, 25 bp, Homo sapien
ccctttatagccagctatttccctg

SEQ ID NO: 2827799 - DNA, 25 bp, Homo sapien
gtgactctgatgaacccggattctc

SEQ ID NO: 2827800 - DNA, 25 bp, Homo sapien
gtgactgaggctgatgacgtgtcat

SEQ ID NO: 2827801 - DNA, 25 bp, Homo sapien
ccttcagtgactgaggctgatgacg

SEQ ID NO: 2827802 - DNA, 25 bp, Homo sapien
tcagtgactgaggctgatgacgtgt

SEQ ID NO: 2827803 - DNA, 25 bp, Homo sapien
ctgtttccttcagtgactgaggctg

SEQ ID NO: 2827804 - DNA, 25 bp, Homo sapien
ttcctgagaatcatatgcttccctg

SEQ ID NO: 2827805 - DNA, 25 bp, Homo sapien
cctgagaatcatatgcttccctggg

SEQ ID NO: 2827806 - DNA, 25 bp, Homo sapien
tgagaatcatatgcttccctgggag

SEQ ID NO: 2827807 - DNA, 25 bp, Homo sapien
ggtgttcctgagaatcatatgcttc

SEQ ID NO: 2827808 - DNA, 25 bp, Homo sapien
atctgttttaccactccaggccgat

SEQ ID NO: 2827809 - DNA, 25 bp, Homo sapien
gttttaccactccaggccgatcctg

SEQ ID NO: 2827810 - DNA, 25 bp, Homo sapien
agaatagcggctgcgtgaatctgtt

SEQ ID NO: 2827811 - DNA, 25 bp, Homo sapien
ctctcccgactcagagaatagcggc

SEQ ID NO: 2827812 - DNA, 25 bp, Homo sapien
gactcttcggcattgtggttcctga

SEQ ID NO: 2827813 - DNA, 25 bp, Homo sapien
aatggaatgctcatcggtcatgcca

SEQ ID NO: 2827814 - DNA, 25 bp, Homo sapien
taaaaatcagggtcgactcttcggc

SEQ ID NO: 2827815 - DNA, 25 bp, Homo sapien
ggttcctgaatggaatgctcatcgg

SEQ ID NO: 2827816 - DNA, 25 bp, Homo sapien
agtttgccttttcaacctagacagg

SEQ ID NO: 2827817 - DNA, 25 bp, Homo sapien
ttttagtgggaacagtggtatctcc

SEQ ID NO: 2827818 - DNA, 25 bp, Homo sapien
cctgtggtgtatagccctgtgcaga

SEQ ID NO: 2827819 - DNA, 25 bp, Homo sapien
tctccctgcaggaaacatgcttact

SEQ ID NO: 2827820 - DNA, 25 bp, Homo sapien
tcacaaagaagtaaaagctaacctg

SEQ ID NO: 2827821 - DNA, 25 bp, Homo sapien
caaagaagtaaaagctaacctgaga

SEQ ID NO: 2827822 - DNA, 25 bp, Homo sapien
atggacggaaatgaaccctttcctg

SEQ ID NO: 2827823 - DNA, 25 bp, Homo sapien
aaatgaaccctttcctgcttacaca

SEQ ID NO: 2827824 - DNA, 25 bp, Homo sapien
gataagctgcctgtactcatcctcc

SEQ ID NO: 2827825 - DNA, 25 bp, Homo sapien
ttttcgtgcgactccgtagaggtca

SEQ ID NO: 2827826 - DNA, 25 bp, Homo sapien
gatgtcagccatacccttttcgtgc

SEQ ID NO: 2827827 - DNA, 25 bp, Homo sapien
tgattgccaatgttctgctcgggca

SEQ ID NO: 2827828 - DNA, 25 bp, Homo sapien
taacagtgcagagataaaataggct

SEQ ID NO: 2827829 - DNA, 25 bp, Homo sapien
agctttcagctctccgtcatggatg

SEQ ID NO: 2827830 - DNA, 25 bp, Homo sapien
cacattttccacgactggctctaat

SEQ ID NO: 2827831 - DNA, 25 bp, Homo sapien
ataaaataggcttgatgcatctttc

SEQ ID NO: 2827832 - DNA, 25 bp, Homo sapien
tctcaactgctaccacaccatcggt

SEQ ID NO: 2827833 - DNA, 25 bp, Homo sapien
tgaagagttttggcacccttctggg

SEQ ID NO: 2827834 - DNA, 25 bp, Homo sapien
gccttatgcaaatcgctcttcctct

SEQ ID NO: 2827835 - DNA, 25 bp, Homo sapien
ggctgttgtttaaagcgtgaagagt

SEQ ID NO: 2827836 - DNA, 25 bp, Homo sapien
taaagatgtacttggtcggttaaca

SEQ ID NO: 2827837 - DNA, 25 bp, Homo sapien
tggaaattaaagatgtacttggtcg

SEQ ID NO: 2827838 - DNA, 25 bp, Homo sapien
aaagatgtacttggtcggttaacag

SEQ ID NO: 2827839 - DNA, 25 bp, Homo sapien
ttccagtcataacccttgtagttca

SEQ ID NO: 2827840 - DNA, 25 bp, Homo sapien
cgaccctttcgtgtcttctttccag

SEQ ID NO: 2827841 - DNA, 25 bp, Homo sapien
tccagtcataacccttgtagttcat

SEQ ID NO: 2827842 - DNA, 25 bp, Homo sapien
tcgaccctttcgtgtcttctttcca

SEQ ID NO: 2827843 - DNA, 25 bp, Homo sapien
ccaagaaatgcagctttatatccat

SEQ ID NO: 2827844 - DNA, 25 bp, Homo sapien
tctgccaagaaatgcagctttatat

SEQ ID NO: 2827845 - DNA, 25 bp, Homo sapien
cctctgtgtggctattttctgccaa

SEQ ID NO: 2827846 - DNA, 25 bp, Homo sapien
tctgtgtggctattttctgccaaga

SEQ ID NO: 2827847 - DNA, 25 bp, Homo sapien
gcaaaggtaagtcaaaaccagcaag

SEQ ID NO: 2827848 - DNA, 25 bp, Homo sapien
ggcaaaggtaagtcaaaaccagcaa

SEQ ID NO: 2827849 - DNA, 25 bp, Homo sapien
tgcgggcaaaggtaagtcaaaacca

SEQ ID NO: 2827850 - DNA, 25 bp, Homo sapien
caaaggtaagtcaaaaccagcaagg

SEQ ID NO: 2827851 - DNA, 25 bp, Homo sapien
ttcttcccggagaggagaagtcagc

SEQ ID NO: 2827852 - DNA, 25 bp, Homo sapien
aagtcagcactacacccaaacagga

SEQ ID NO: 2827853 - DNA, 25 bp, Homo sapien
aagaatgaaattgtcagaaatcccc

SEQ ID NO: 2827854 - DNA, 25 bp, Homo sapien
cccttagtgggagcatctctaatct

SEQ ID NO: 2827855 - DNA, 25 bp, Homo sapien
gctatgactattaccagagagatgg

SEQ ID NO: 2827856 - DNA, 25 bp, Homo sapien
gggagtaccagatagggcacatttt

SEQ ID NO: 2827857 - DNA, 25 bp, Homo sapien
gcagccatctactttctttcagcct

SEQ ID NO: 2827858 - DNA, 25 bp, Homo sapien
tggccttttcataacgtggattggg

SEQ ID NO: 2827859 - DNA, 25 bp, Homo sapien
caaacacggctagattgcatgctag

SEQ ID NO: 2827860 - DNA, 25 bp, Homo sapien
catgctagcattaatgtcctcgtcc

SEQ ID NO: 2827861 - DNA, 25 bp, Homo sapien
tattaaaacaacaatccaacgctga

SEQ ID NO: 2827862 - DNA, 25 bp, Homo sapien
ggcagacttccagtttattaaaaca

SEQ ID NO: 2827863 - DNA, 25 bp, Homo sapien
gttgtccttagtcctcatatcactg

SEQ ID NO: 2827864 - DNA, 25 bp, Homo sapien
caattgtcctcttgttaggtgtggt

SEQ ID NO: 2827865 - DNA, 25 bp, Homo sapien
aagccagtgatgcaattgtcctctt

SEQ ID NO: 2827866 - DNA, 25 bp, Homo sapien
acagttgtccttagtcctcatatca

SEQ ID NO: 2827867 - DNA, 25 bp, Homo sapien
tcagtgttcttggtactcaatgcac

SEQ ID NO: 2827868 - DNA, 25 bp, Homo sapien
ttcttggtactcaatgcactgtgga

SEQ ID NO: 2827869 - DNA, 25 bp, Homo sapien
cagagtttgcagtttagcacaggaa

SEQ ID NO: 2827870 - DNA, 25 bp, Homo sapien
gagggagacaacgattgaaaaccag

SEQ ID NO: 2827871 - DNA, 25 bp, Homo sapien
tttgcctgatccaatggaagcctag

SEQ ID NO: 2827872 - DNA, 25 bp, Homo sapien
tgcctgatccaatggaagcctagag

SEQ ID NO: 2827873 - DNA, 25 bp, Homo sapien
ttgcctgatccaatggaagcctaga

SEQ ID NO: 2827874 - DNA, 25 bp, Homo sapien
ttttgcctgatccaatggaagccta

SEQ ID NO: 2827875 - DNA, 25 bp, Homo sapien
ttttggaagatgagtttcttgccct

SEQ ID NO: 2827876 - DNA, 25 bp, Homo sapien
gatgagtttcttgcccttgatgccc

SEQ ID NO: 2827877 - DNA, 25 bp, Homo sapien
gaagatgagtttcttgcccttgatg

SEQ ID NO: 2827878 - DNA, 25 bp, Homo sapien
cttttggaagatgagtttcttgccc

SEQ ID NO: 2827879 - DNA, 25 bp, Homo sapien
gctaggaccaaaggaaccaattcat

SEQ ID NO: 2827880 - DNA, 25 bp, Homo sapien
gaaccaggtgtttccttactgaaga

SEQ ID NO: 2827881 - DNA, 25 bp, Homo sapien
accagtaggctaatatttccatgaa

SEQ ID NO: 2827882 - DNA, 25 bp, Homo sapien
tgcaaactacataaggtattctggg

SEQ ID NO: 2827883 - DNA, 25 bp, Homo sapien
tcccagcctggtttcgttggagaaa

SEQ ID NO: 2827884 - DNA, 25 bp, Homo sapien
tgctgcctgatatgccgtgtccgga

SEQ ID NO: 2827885 - DNA, 25 bp, Homo sapien
gagaaatctggcctttttgaatgcc

SEQ ID NO: 2827886 - DNA, 25 bp, Homo sapien
gccagtgcatgatcacgattcagaa

SEQ ID NO: 2827887 - DNA, 25 bp, Homo sapien
tcacgcatcccccaaacatttcctg

SEQ ID NO: 2827888 - DNA, 25 bp, Homo sapien
cactgactgtggacgagcaagagag

SEQ ID NO: 2827889 - DNA, 25 bp, Homo sapien
ttcacgcatcccccaaacatttcct

SEQ ID NO: 2827890 - DNA, 25 bp, Homo sapien
ctgcactgactgtggacgagcaaga

SEQ ID NO: 2827891 - DNA, 25 bp, Homo sapien
agcaggacaggagagatccaaaagt

SEQ ID NO: 2827892 - DNA, 25 bp, Homo sapien
gggaacaggcacagcaggacaggag

SEQ ID NO: 2827893 - DNA, 25 bp, Homo sapien
gagagatccaaaagtaaaagacctc

SEQ ID NO: 2827894 - DNA, 25 bp, Homo sapien
caggagagatccaaaagtaaaagac

SEQ ID NO: 2827895 - DNA, 25 bp, Homo sapien
tgcaataaagtgacggactgagagg

SEQ ID NO: 2827896 - DNA, 25 bp, Homo sapien
gaaagtgtgcaataaagtgacggac

SEQ ID NO: 2827897 - DNA, 25 bp, Homo sapien
tgtgcaataaagtgacggactgaga

SEQ ID NO: 2827898 - DNA, 25 bp, Homo sapien
aagtgtgcaataaagtgacggactg

SEQ ID NO: 2827899 - DNA, 25 bp, Homo sapien
tttgtgtatagcaggagatcacatc

SEQ ID NO: 2827900 - DNA, 25 bp, Homo sapien
tatagcaggagatcacatcggtgaa

SEQ ID NO: 2827901 - DNA, 25 bp, Homo sapien
tagcaggagatcacatcggtgaaga

SEQ ID NO: 2827902 - DNA, 25 bp, Homo sapien
tgtatagcaggagatcacatcggtg

SEQ ID NO: 2827903 - DNA, 25 bp, Homo sapien
gcttctccagttcttgctttctctc

SEQ ID NO: 2827904 - DNA, 25 bp, Homo sapien
tctttgcttctccagttcttgcttt

SEQ ID NO: 2827905 - DNA, 25 bp, Homo sapien
ttcctttgcaaatttccttctttgc

SEQ ID NO: 2827906 - DNA, 25 bp, Homo sapien
tttgcttctccagttcttgctttct

SEQ ID NO: 2827907 - DNA, 25 bp, Homo sapien
caatttccaggtgttttgtcttccg

SEQ ID NO: 2827908 - DNA, 25 bp, Homo sapien
gtgatttgtcacataaccctacaat

SEQ ID NO: 2827909 - DNA, 25 bp, Homo sapien
tgtcttccgatttatgggcaagttc

SEQ ID NO: 2827910 - DNA, 25 bp, Homo sapien
aaagtggctaattagtggatcctcc

SEQ ID NO: 2827911 - DNA, 25 bp, Homo sapien
ttgtagacatatgtaatctgaaggc

SEQ ID NO: 2827912 - DNA, 25 bp, Homo sapien
tttcataaggtcttatttggtctgt

SEQ ID NO: 2827913 - DNA, 25 bp, Homo sapien
ggtctgtcgaccaagttttgattac

SEQ ID NO: 2827914 - DNA, 25 bp, Homo sapien
gtaatctgaaggcatgcaacatttt

SEQ ID NO: 2827915 - DNA, 25 bp, Homo sapien
gcatgtccgcactgcaggtgcagag

SEQ ID NO: 2827916 - DNA, 25 bp, Homo sapien
gccagtgtggccctatttccccagt

SEQ ID NO: 2827917 - DNA, 25 bp, Homo sapien
gcagagtgggcagataacacatgga

SEQ ID NO: 2827918 - DNA, 25 bp, Homo sapien
aacttctgagagagacatcgtgtga

SEQ ID NO: 2827919 - DNA, 25 bp, Homo sapien
tgtttctgtaactacaccctcagag

SEQ ID NO: 2827920 - DNA, 25 bp, Homo sapien
cagagagaacggataagagaagaat

SEQ ID NO: 2827921 - DNA, 25 bp, Homo sapien
cagacggtaagctgtgcacattgca

SEQ ID NO: 2827922 - DNA, 25 bp, Homo sapien
tgcagctagcagatggtagctctta

SEQ ID NO: 2827923 - DNA, 25 bp, Homo sapien
ggcatcatttgcttaatttgattcc

SEQ ID NO: 2827924 - DNA, 25 bp, Homo sapien
tttgattccaagtgacagccatgca

SEQ ID NO: 2827925 - DNA, 25 bp, Homo sapien
tttctttggtaagctcttggtttca

SEQ ID NO: 2827926 - DNA, 25 bp, Homo sapien
taatttgattccaagtgacagccat

SEQ ID NO: 2827927 - DNA, 25 bp, Homo sapien
tgctgaatggcttctcataaaccca

SEQ ID NO: 2827928 - DNA, 25 bp, Homo sapien
tgcaattgattcatcctcagtgcct

SEQ ID NO: 2827929 - DNA, 25 bp, Homo sapien
tgtctgtgtccgtttgatgaggaag

SEQ ID NO: 2827930 - DNA, 25 bp, Homo sapien
gctggtgctactgaagtggacccat

SEQ ID NO: 2827931 - DNA, 25 bp, Homo sapien
caatgcactgtgaggttctgctcct

SEQ ID NO: 2827932 - DNA, 25 bp, Homo sapien
ctgtcctagagggtcttcggctgca

SEQ ID NO: 2827933 - DNA, 25 bp, Homo sapien
gggctgctgcgtttctgttcaccat

SEQ ID NO: 2827934 - DNA, 25 bp, Homo sapien
aaggatcagttgtcttcccagatgc

SEQ ID NO: 2827935 - DNA, 25 bp, Homo sapien
cagcaattccggagcactctctttc

SEQ ID NO: 2827936 - DNA, 25 bp, Homo sapien
gcaattccggagcactctctttcca

SEQ ID NO: 2827937 - DNA, 25 bp, Homo sapien
caattccggagcactctctttccat

SEQ ID NO: 2827938 - DNA, 25 bp, Homo sapien
acagcaattccggagcactctcttt

SEQ ID NO: 2827939 - DNA, 25 bp, Homo sapien
gagaagtgtggattttagtgttaac

SEQ ID NO: 2827940 - DNA, 25 bp, Homo sapien
tctttccccatgcacacatctttac

SEQ ID NO: 2827941 - DNA, 25 bp, Homo sapien
ttagtgttaactgtgttctctttcc

SEQ ID NO: 2827942 - DNA, 25 bp, Homo sapien
acatctttacaccaccttttcaatg

SEQ ID NO: 2827943 - DNA, 25 bp, Homo sapien
cacctttagtctgaatcattcttct

SEQ ID NO: 2827944 - DNA, 25 bp, Homo sapien
ctcacctttagtctgaatcattctt

SEQ ID NO: 2827945 - DNA, 25 bp, Homo sapien
cttctcacctttagtctgaatcatt

SEQ ID NO: 2827946 - DNA, 25 bp, Homo sapien
cctttagtctgaatcattcttctca

SEQ ID NO: 2827947 - DNA, 25 bp, Homo sapien
gaactgtttaatgtcaccacctctc

SEQ ID NO: 2827948 - DNA, 25 bp, Homo sapien
gagtcctagtcccatgctgagaaca

SEQ ID NO: 2827949 - DNA, 25 bp, Homo sapien
ttgagagtggtttccaaggagtcct

SEQ ID NO: 2827950 - DNA, 25 bp, Homo sapien
tgagaacatctctagcctgctgatt

SEQ ID NO: 2827951 - DNA, 25 bp, Homo sapien
ttcctcggtcaccccagtgtcttta

SEQ ID NO: 2827952 - DNA, 25 bp, Homo sapien
tgtctttataagctccagattgcag

SEQ ID NO: 2827953 - DNA, 25 bp, Homo sapien
gtgtctttataagctccagattgca

SEQ ID NO: 2827954 - DNA, 25 bp, Homo sapien
ctattcctcggtcaccccagtgtct

SEQ ID NO: 2827955 - DNA, 25 bp, Homo sapien
ttctgcttgatgagactttttcttg

SEQ ID NO: 2827956 - DNA, 25 bp, Homo sapien
cagctctatatctctggcacagaaa

SEQ ID NO: 2827957 - DNA, 25 bp, Homo sapien
tctgcttgatgagactttttcttga

SEQ ID NO: 2827958 - DNA, 25 bp, Homo sapien
ttcagtcagctctatatctctggca

SEQ ID NO: 2827959 - DNA, 25 bp, Homo sapien
ctgatctgggatttctgttcgtcta

SEQ ID NO: 2827960 - DNA, 25 bp, Homo sapien
cataattagaattctgatctgggat

SEQ ID NO: 2827961 - DNA, 25 bp, Homo sapien
gatttctgttcgtctatacaatggg

SEQ ID NO: 2827962 - DNA, 25 bp, Homo sapien
ttcgtctatacaatgggaaagccat

SEQ ID NO: 2827963 - DNA, 25 bp, Homo sapien
tgtttttatggtaggtgcacgaaat

SEQ ID NO: 2827964 - DNA, 25 bp, Homo sapien
aggcatgcaatatggcaacaatgtc

SEQ ID NO: 2827965 - DNA, 25 bp, Homo sapien
tatggtaggtgcacgaaattgtaaa

SEQ ID NO: 2827966 - DNA, 25 bp, Homo sapien
cattatgaactctcttctaaggtct

SEQ ID NO: 2827967 - DNA, 25 bp, Homo sapien
tttcccacagcgagtaatgccgtct

SEQ ID NO: 2827968 - DNA, 25 bp, Homo sapien
cgcagggccagcatataaatgcaaa

SEQ ID NO: 2827969 - DNA, 25 bp, Homo sapien
tgcctctggtgaattcgcagggcca

SEQ ID NO: 2827970 - DNA, 25 bp, Homo sapien
tcttgatggtctgaataacagtggt

SEQ ID NO: 2827971 - DNA, 25 bp, Homo sapien
gaggtggtccataaccaataataaa

SEQ ID NO: 2827972 - DNA, 25 bp, Homo sapien
tagttccacggaggtggtccataac

SEQ ID NO: 2827973 - DNA, 25 bp, Homo sapien
ttagtagttccacggaggtggtcca

SEQ ID NO: 2827974 - DNA, 25 bp, Homo sapien
tccacggaggtggtccataaccaat

SEQ ID NO: 2827975 - DNA, 25 bp, Homo sapien
gattaccaattctaatcgttgtctg

SEQ ID NO: 2827976 - DNA, 25 bp, Homo sapien
attaccaattctaatcgttgtctgc

SEQ ID NO: 2827977 - DNA, 25 bp, Homo sapien
ttaccaattctaatcgttgtctgca

SEQ ID NO: 2827978 - DNA, 25 bp, Homo sapien
taccaattctaatcgttgtctgcat

SEQ ID NO: 2827979 - DNA, 25 bp, Homo sapien
tagattgtccatttatcctgttact

SEQ ID NO: 2827980 - DNA, 25 bp, Homo sapien
cataaatactttgcctaggccagaa

SEQ ID NO: 2827981 - DNA, 25 bp, Homo sapien
tttagctgtgcagaacttttgaaaa

SEQ ID NO: 2827982 - DNA, 25 bp, Homo sapien
cccattctctagattgtccatttat

SEQ ID NO: 2827983 - DNA, 25 bp, Homo sapien
atttaaacagatggctcaatgatat

SEQ ID NO: 2827984 - DNA, 25 bp, Homo sapien
tctcggcaaccagcggagaaaatgt

SEQ ID NO: 2827985 - DNA, 25 bp, Homo sapien
aacagatggctcaatgatatgcttt

SEQ ID NO: 2827986 - DNA, 25 bp, Homo sapien
agtaaaactaaggtagcacaaatat

SEQ ID NO: 2827987 - DNA, 25 bp, Homo sapien
gaaaatctgagtctgataatgacct

SEQ ID NO: 2827988 - DNA, 25 bp, Homo sapien
agaaaatctgagtctgataatgacc

SEQ ID NO: 2827989 - DNA, 25 bp, Homo sapien
gagaaaatctgagtctgataatgac

SEQ ID NO: 2827990 - DNA, 25 bp, Homo sapien
aaaatctgagtctgataatgacctt

SEQ ID NO: 2827991 - DNA, 25 bp, Homo sapien
ttgccaccccaaactggtcatttgt

SEQ ID NO: 2827992 - DNA, 25 bp, Homo sapien
tgcttgccaccccaaactggtcatt

SEQ ID NO: 2827993 - DNA, 25 bp, Homo sapien
ttatctccctgcttgccaccccaaa

SEQ ID NO: 2827994 - DNA, 25 bp, Homo sapien
tccctgcttgccaccccaaactggt

SEQ ID NO: 2827995 - DNA, 25 bp, Homo sapien
aatgtaaccacttgcaggggctgct

SEQ ID NO: 2827996 - DNA, 25 bp, Homo sapien
gaaacttgaatcttgaatcctgtct

SEQ ID NO: 2827997 - DNA, 25 bp, Homo sapien
cttgaatcttgaatcctgtctggca

SEQ ID NO: 2827998 - DNA, 25 bp, Homo sapien
aacttgaatcttgaatcctgtctgg

SEQ ID NO: 2827999 - DNA, 25 bp, Homo sapien
catgaactgtgtagcttctcatgag

SEQ ID NO: 2828000 - DNA, 25 bp, Homo sapien
ggccctcagtcaaaagggaagagaa

SEQ ID NO: 2828001 - DNA, 25 bp, Homo sapien
tgaggcacttgaagattaaggccct

SEQ ID NO: 2828002 - DNA, 25 bp, Homo sapien
aaggaacatgaactgtgtagcttct

SEQ ID NO: 2828003 - DNA, 25 bp, Homo sapien
gcattgtttgtagggagagactcat

SEQ ID NO: 2828004 - DNA, 25 bp, Homo sapien
ttctccttgactgtgaacaccactt

SEQ ID NO: 2828005 - DNA, 25 bp, Homo sapien
caggttattaaggtcaggactcttc

SEQ ID NO: 2828006 - DNA, 25 bp, Homo sapien
cttcgtagccaagcaaggtttgagg

SEQ ID NO: 2828007 - DNA, 25 bp, Homo sapien
gatttgctgtttcgtggggtttgca

SEQ ID NO: 2828008 - DNA, 25 bp, Homo sapien
gttaggtgcattttgattctctctg

SEQ ID NO: 2828009 - DNA, 25 bp, Homo sapien
gactgacttggagtcaactctttga

SEQ ID NO: 2828010 - DNA, 25 bp, Homo sapien
ggtttgcagatcctgagttaggtgc

SEQ ID NO: 2828011 - DNA, 25 bp, Homo sapien
gcaggggagggtagctacccgtata

SEQ ID NO: 2828012 - DNA, 25 bp, Homo sapien
gatggttatcctctttgagcatgca

SEQ ID NO: 2828013 - DNA, 25 bp, Homo sapien
tctttgagagctcgtttgaagtttc

SEQ ID NO: 2828014 - DNA, 25 bp, Homo sapien
gatggaaggccggccctcctctatg

SEQ ID NO: 2828015 - DNA, 25 bp, Homo sapien
taatagatgcttgtagttgcctgaa

SEQ ID NO: 2828016 - DNA, 25 bp, Homo sapien
tagtgattgagttaccccttctgtc

SEQ ID NO: 2828017 - DNA, 25 bp, Homo sapien
gattccacagaatacaggatgtctg

SEQ ID NO: 2828018 - DNA, 25 bp, Homo sapien
tggaaggacacaaggatctcaacct

SEQ ID NO: 2828019 - DNA, 25 bp, Homo sapien
tgtaacagttctaagtggtgtggcc

SEQ ID NO: 2828020 - DNA, 25 bp, Homo sapien
tatccaacccagaagatgggacatg

SEQ ID NO: 2828021 - DNA, 25 bp, Homo sapien
taacaggctctcagctagatagcaa

SEQ ID NO: 2828022 - DNA, 25 bp, Homo sapien
caatttgccttgtggtgaatgacac

SEQ ID NO: 2828023 - DNA, 25 bp, Homo sapien
ttcacctggtgctcccatcatgatc

SEQ ID NO: 2828024 - DNA, 25 bp, Homo sapien
tgtttgtggccatgaggcactggag

SEQ ID NO: 2828025 - DNA, 25 bp, Homo sapien
ctggtgctcccatcatgatctggtc

SEQ ID NO: 2828026 - DNA, 25 bp, Homo sapien
tggccatgaggcactggagggtcat

SEQ ID NO: 2828027 - DNA, 25 bp, Homo sapien
gccagaagctaattaaaatgctgcc

SEQ ID NO: 2828028 - DNA, 25 bp, Homo sapien
tgaggtttgtaaaatctagccagaa

SEQ ID NO: 2828029 - DNA, 25 bp, Homo sapien
cttgtttaagcccatagtaggcact

SEQ ID NO: 2828030 - DNA, 25 bp, Homo sapien
ttattattttgagtaagccagtgcc

SEQ ID NO: 2828031 - DNA, 25 bp, Homo sapien
ctgcctccgctccaatgcctgtgat

SEQ ID NO: 2828032 - DNA, 25 bp, Homo sapien
cactgaatccgttaccagggtaact

SEQ ID NO: 2828033 - DNA, 25 bp, Homo sapien
ctgtgatcccattacctcactgaat

SEQ ID NO: 2828034 - DNA, 25 bp, Homo sapien
tcattgccatgcaggccccgtgact

SEQ ID NO: 2828035 - DNA, 25 bp, Homo sapien
caaagtactctttatcgtctagaga

SEQ ID NO: 2828036 - DNA, 25 bp, Homo sapien
tttatcgtctagagaaggttcagag

SEQ ID NO: 2828037 - DNA, 25 bp, Homo sapien
gaatcaactggatttgaagtaacaa

SEQ ID NO: 2828038 - DNA, 25 bp, Homo sapien
ctggatttgaagtaacaaagtactc

SEQ ID NO: 2828039 - DNA, 25 bp, Homo sapien
gaggacatctctgtgcatctttccg

SEQ ID NO: 2828040 - DNA, 25 bp, Homo sapien
caggtgaggacatctctgtgcatct

SEQ ID NO: 2828041 - DNA, 25 bp, Homo sapien
aggtgaggacatctctgtgcatctt

SEQ ID NO: 2828042 - DNA, 25 bp, Homo sapien
gacatctctgtgcatctttccgaca

SEQ ID NO: 2828043 - DNA, 25 bp, Homo sapien
gagaagaaggtcacagtcctccaaa

SEQ ID NO: 2828044 - DNA, 25 bp, Homo sapien
ccttctggggcactacctagtggaa

SEQ ID NO: 2828045 - DNA, 25 bp, Homo sapien
tgagaagaaggtcacagtcctccaa

SEQ ID NO: 2828046 - DNA, 25 bp, Homo sapien
tctggggcactacctagtggaactg

SEQ ID NO: 2828047 - DNA, 25 bp, Homo sapien
tggtcaccaggcactatgttgggta

SEQ ID NO: 2828048 - DNA, 25 bp, Homo sapien
gtggacatacgagtgctgcagctgc

SEQ ID NO: 2828049 - DNA, 25 bp, Homo sapien
tagctccgtgatcagccagttgaaa

SEQ ID NO: 2828050 - DNA, 25 bp, Homo sapien
taccatggcgtggtatctagctccg

SEQ ID NO: 2828051 - DNA, 25 bp, Homo sapien
gcacgcaaatgcgtaattgcttcct

SEQ ID NO: 2828052 - DNA, 25 bp, Homo sapien
tcatagctgaactcactggtattgc

SEQ ID NO: 2828053 - DNA, 25 bp, Homo sapien
gcttcctattgcctcgcctatcgaa

SEQ ID NO: 2828054 - DNA, 25 bp, Homo sapien
catgcctctttctccgggccataga

SEQ ID NO: 2828055 - DNA, 25 bp, Homo sapien
gcgtgtgctctgtggcaataataca

SEQ ID NO: 2828056 - DNA, 25 bp, Homo sapien
tcttgatttagaatgtgcactccca

SEQ ID NO: 2828057 - DNA, 25 bp, Homo sapien
caatttgcagttgtgctgggaaaac

SEQ ID NO: 2828058 - DNA, 25 bp, Homo sapien
ttatgaaagtcagtccaatgcctat

SEQ ID NO: 2828059 - DNA, 25 bp, Homo sapien
cctgcttcctccgaggcactggctg

SEQ ID NO: 2828060 - DNA, 25 bp, Homo sapien
ctgcttcctccgaggcactggctgc

SEQ ID NO: 2828061 - DNA, 25 bp, Homo sapien
tcttccaaggacatcgatgtaatga

SEQ ID NO: 2828062 - DNA, 25 bp, Homo sapien
taatgacgtaatagaagtctgatca

SEQ ID NO: 2828063 - DNA, 25 bp, Homo sapien
ttaaaccaacattactggcatgtag

SEQ ID NO: 2828064 - DNA, 25 bp, Homo sapien
ttcctctgcattggttctctgaaca

SEQ ID NO: 2828065 - DNA, 25 bp, Homo sapien
aggagttctagtctgttgttccttg

SEQ ID NO: 2828066 - DNA, 25 bp, Homo sapien
aaggagttctagtctgttgttcctt

SEQ ID NO: 2828067 - DNA, 25 bp, Homo sapien
caaggagttctagtctgttgttcct

SEQ ID NO: 2828068 - DNA, 25 bp, Homo sapien
tagtcaccgtcacctctttgtagga

SEQ ID NO: 2828069 - DNA, 25 bp, Homo sapien
caaaaaacagcttgaattgcaaagc

SEQ ID NO: 2828070 - DNA, 25 bp, Homo sapien
aaacagcttgaattgcaaagcacag

SEQ ID NO: 2828071 - DNA, 25 bp, Homo sapien
agcacagatagtcaccgtcacctct

SEQ ID NO: 2828072 - DNA, 25 bp, Homo sapien
tgcctggtgctctaaatgcttgact

SEQ ID NO: 2828073 - DNA, 25 bp, Homo sapien
cctagtgcctggtgctctaaatgct

SEQ ID NO: 2828074 - DNA, 25 bp, Homo sapien
tccttgtttactctgcccctagtgc

SEQ ID NO: 2828075 - DNA, 25 bp, Homo sapien
tctgcccctagtgcctggtgctcta

SEQ ID NO: 2828076 - DNA, 25 bp, Homo sapien
gaggttcatttcctcaaacactgta

SEQ ID NO: 2828077 - DNA, 25 bp, Homo sapien
tatcttcagctgcttacaagtcctc

SEQ ID NO: 2828078 - DNA, 25 bp, Homo sapien
tctcaagtcctgaagcagtattgcc

SEQ ID NO: 2828079 - DNA, 25 bp, Homo sapien
ctgaaagaaacctgtcccatgaggt

SEQ ID NO: 2828080 - DNA, 25 bp, Homo sapien
gatgggatagcttattgacatagca

SEQ ID NO: 2828081 - DNA, 25 bp, Homo sapien
cagggaaggtggaatacaggactgg

SEQ ID NO: 2828082 - DNA, 25 bp, Homo sapien
gtacctacataacatgtaagggcag

SEQ ID NO: 2828083 - DNA, 25 bp, Homo sapien
caagagatagctatagtacctacat

SEQ ID NO: 2828084 - DNA, 25 bp, Homo sapien
ctccacagatccgtatatttgcatg

SEQ ID NO: 2828085 - DNA, 25 bp, Homo sapien
cgtatatttgcatgttgtggtttca

SEQ ID NO: 2828086 - DNA, 25 bp, Homo sapien
cacagatccgtatatttgcatgttg

SEQ ID NO: 2828087 - DNA, 25 bp, Homo sapien
gatccgtatatttgcatgttgtggt

SEQ ID NO: 2828088 - DNA, 25 bp, Homo sapien
cactaccactcccaatctgtgcttc

SEQ ID NO: 2828089 - DNA, 25 bp, Homo sapien
ctcctcactaccactcccaatctgt

SEQ ID NO: 2828090 - DNA, 25 bp, Homo sapien
agcctcctcactaccactcccaatc

SEQ ID NO: 2828091 - DNA, 25 bp, Homo sapien
attacagcctcctcactaccactcc

SEQ ID NO: 2828092 - DNA, 25 bp, Homo sapien
tgcagtgtgatatgtagctttgaag

SEQ ID NO: 2828093 - DNA, 25 bp, Homo sapien
gtaataactgctcttcgccaaccag

SEQ ID NO: 2828094 - DNA, 25 bp, Homo sapien
tgtagctttgaagtaataactgctc

SEQ ID NO: 2828095 - DNA, 25 bp, Homo sapien
taataactgctcttcgccaaccagc

SEQ ID NO: 2828096 - DNA, 25 bp, Homo sapien
cccgtgcctcaggtctgggagacac

SEQ ID NO: 2828097 - DNA, 25 bp, Homo sapien
tcacagatagctaatgacatgcatt

SEQ ID NO: 2828098 - DNA, 25 bp, Homo sapien
tgtgtacctttcattttacgcaaag

SEQ ID NO: 2828099 - DNA, 25 bp, Homo sapien
catgcattatacttccctgactgtg

SEQ ID NO: 2828100 - DNA, 25 bp, Homo sapien
aatgccgtaaccatagtgtagtagg

SEQ ID NO: 2828101 - DNA, 25 bp, Homo sapien
ttctgcgataaaatgaaatcacgtc

SEQ ID NO: 2828102 - DNA, 25 bp, Homo sapien
gataaaatgaaatcacgtcagcatt

SEQ ID NO: 2828103 - DNA, 25 bp, Homo sapien
tgcgataaaatgaaatcacgtcagc

SEQ ID NO: 2828104 - DNA, 25 bp, Homo sapien
aatgaaatcacgtcagcatttttca

SEQ ID NO: 2828105 - DNA, 25 bp, Homo sapien
gatcttgagctgtcataaaaataca

SEQ ID NO: 2828106 - DNA, 25 bp, Homo sapien
gtgatcttgagctgtcataaaaata

SEQ ID NO: 2828107 - DNA, 25 bp, Homo sapien
tccaaggatgggtgatcttgagctg

SEQ ID NO: 2828108 - DNA, 25 bp, Homo sapien
ttccaaggatgggtgatcttgagct

SEQ ID NO: 2828109 - DNA, 25 bp, Homo sapien
tgtaggcaaagttcagctgaattcc

SEQ ID NO: 2828110 - DNA, 25 bp, Homo sapien
gacttgtaggcaaagttcagctgaa

SEQ ID NO: 2828111 - DNA, 25 bp, Homo sapien
cacccagacttgtaggcaaagttca

SEQ ID NO: 2828112 - DNA, 25 bp, Homo sapien
cccagacttgtaggcaaagttcagc

SEQ ID NO: 2828113 - DNA, 25 bp, Homo sapien
tcagacagaaggttatgcattatag

SEQ ID NO: 2828114 - DNA, 25 bp, Homo sapien
ggaactaaatgtgaccaaatcagag

SEQ ID NO: 2828115 - DNA, 25 bp, Homo sapien
caaaactaaaactggccatcacaat

SEQ ID NO: 2828116 - DNA, 25 bp, Homo sapien
gggcatgatgataagattgttgaac

SEQ ID NO: 2828117 - DNA, 25 bp, Homo sapien
tcacatggtaaaagaggagtaagac

SEQ ID NO: 2828118 - DNA, 25 bp, Homo sapien
cattcataaaggatattctctcatg

SEQ ID NO: 2828119 - DNA, 25 bp, Homo sapien
aatcagatcttgtagtaactcatgg

SEQ ID NO: 2828120 - DNA, 25 bp, Homo sapien
actactctgcttctgatgggaacct

SEQ ID NO: 2828121 - DNA, 25 bp, Homo sapien
agacacctcacataggtgggtgccc

SEQ ID NO: 2828122 - DNA, 25 bp, Homo sapien
ttctcagtaggggccaacagacacc

SEQ ID NO: 2828123 - DNA, 25 bp, Homo sapien
gggccaacagacacctcacataggt

SEQ ID NO: 2828124 - DNA, 25 bp, Homo sapien
ccaacagacacctcacataggtggg

SEQ ID NO: 2828125 - DNA, 25 bp, Homo sapien
cctaacaatgttgtggtttcaggaa

SEQ ID NO: 2828126 - DNA, 25 bp, Homo sapien
tgtattttttatccacgaagtgctc

SEQ ID NO: 2828127 - DNA, 25 bp, Homo sapien
ctcattttctattggtctggtctca

SEQ ID NO: 2828128 - DNA, 25 bp, Homo sapien
catgaacagatgagtcctaacaatg

SEQ ID NO: 2828129 - DNA, 25 bp, Homo sapien
tctcctcgatgtaattttcttctcc

SEQ ID NO: 2828130 - DNA, 25 bp, Homo sapien
ttctcctcgatgtaattttcttctc

SEQ ID NO: 2828131 - DNA, 25 bp, Homo sapien
ttctgcttccacactaattgcccca

SEQ ID NO: 2828132 - DNA, 25 bp, Homo sapien
gcttccacactaattgccccaggat

SEQ ID NO: 2828133 - DNA, 25 bp, Homo sapien
ttgtgtgcattattccaaaatggta

SEQ ID NO: 2828134 - DNA, 25 bp, Homo sapien
aatccatttaatgttgtgtgcatta

SEQ ID NO: 2828135 - DNA, 25 bp, Homo sapien
ttctgagacaagttgtttgacctct

SEQ ID NO: 2828136 - DNA, 25 bp, Homo sapien
tcacagctgccacacgttttaagtt

SEQ ID NO: 2828137 - DNA, 25 bp, Homo sapien
tattcaccaagttctttgccagcag

SEQ ID NO: 2828138 - DNA, 25 bp, Homo sapien
cctaagaagtcaagtttgttggcag

SEQ ID NO: 2828139 - DNA, 25 bp, Homo sapien
aagccatgaatgtagtgagtaaatc

SEQ ID NO: 2828140 - DNA, 25 bp, Homo sapien
caagaacagttgtgtacatggcatt

SEQ ID NO: 2828141 - DNA, 25 bp, Homo sapien
tgacttcaaaagtgaggtaagccat

SEQ ID NO: 2828142 - DNA, 25 bp, Homo sapien
gaaggtcttagaactatggaggtgt

SEQ ID NO: 2828143 - DNA, 25 bp, Homo sapien
tggtagcttgtgtgagttggcctgg

SEQ ID NO: 2828144 - DNA, 25 bp, Homo sapien
ctgagctagtgacacagctggccac

SEQ ID NO: 2828145 - DNA, 25 bp, Homo sapien
ggccacttgatcgactctttctctc

SEQ ID NO: 2828146 - DNA, 25 bp, Homo sapien
gttagagttgcctgtaagaaacatc

SEQ ID NO: 2828147 - DNA, 25 bp, Homo sapien
gaatcactcaagtgtacatttgctg

SEQ ID NO: 2828148 - DNA, 25 bp, Homo sapien
tagttctcggcaaacatctgaagga

SEQ ID NO: 2828149 - DNA, 25 bp, Homo sapien
caacaattttccctttacggatcat

SEQ ID NO: 2828150 - DNA, 25 bp, Homo sapien
cggatcatccctctatttataaaag

SEQ ID NO: 2828151 - DNA, 25 bp, Homo sapien
tagaatgtctgtgggcaaccactcg

SEQ ID NO: 2828152 - DNA, 25 bp, Homo sapien
aaacctgaagatgtgaaacgggtca

SEQ ID NO: 2828153 - DNA, 25 bp, Homo sapien
tgggcaaccactcggtcattctagc

SEQ ID NO: 2828154 - DNA, 25 bp, Homo sapien
ctcggtcattctagcacatgcataa

SEQ ID NO: 2828155 - DNA, 25 bp, Homo sapien
ctttggcagattgcggccagagtgc

SEQ ID NO: 2828156 - DNA, 25 bp, Homo sapien
gctaattccgaggaatccgggcagc

SEQ ID NO: 2828157 - DNA, 25 bp, Homo sapien
tgcctctttaggcctgaccgtaacc

SEQ ID NO: 2828158 - DNA, 25 bp, Homo sapien
ggttgtagtctccatggaccagcag

SEQ ID NO: 2828159 - DNA, 25 bp, Homo sapien
ctttctctatcactggacatgaaca

SEQ ID NO: 2828160 - DNA, 25 bp, Homo sapien
tctctatcactggacatgaacagga

SEQ ID NO: 2828161 - DNA, 25 bp, Homo sapien
tttctctatcactggacatgaacag

SEQ ID NO: 2828162 - DNA, 25 bp, Homo sapien
ttctctatcactggacatgaacagg

SEQ ID NO: 2828163 - DNA, 25 bp, Homo sapien
tcagccaagcttatgtaggactggc

SEQ ID NO: 2828164 - DNA, 25 bp, Homo sapien
tgcctgcgcatacacagctgggcct

SEQ ID NO: 2828165 - DNA, 25 bp, Homo sapien
aagcttatgtaggactggctgccag

SEQ ID NO: 2828166 - DNA, 25 bp, Homo sapien
accgccacccgagcttcttgccaag

SEQ ID NO: 2828167 - DNA, 25 bp, Homo sapien
caaatgttgtcttgcagtctgcttt

SEQ ID NO: 2828168 - DNA, 25 bp, Homo sapien
catcaaatgttgtcttgcagtctgc

SEQ ID NO: 2828169 - DNA, 25 bp, Homo sapien
atctcacaagtccaaagtccacatc

SEQ ID NO: 2828170 - DNA, 25 bp, Homo sapien
gttaatctcacaagtccaaagtcca

SEQ ID NO: 2828171 - DNA, 25 bp, Homo sapien
cataccaaacttcaccctgcagagg

SEQ ID NO: 2828172 - DNA, 25 bp, Homo sapien
gagactgatggcaccagtaacagta

SEQ ID NO: 2828173 - DNA, 25 bp, Homo sapien
tcatttgtccagaggtgctttgctg

SEQ ID NO: 2828174 - DNA, 25 bp, Homo sapien
actgtctggttagtctgctttgctc

SEQ ID NO: 2828175 - DNA, 25 bp, Homo sapien
gaagacagcccaaatacactgagtg

SEQ ID NO: 2828176 - DNA, 25 bp, Homo sapien
cacttggacggacacagcagcatgt

SEQ ID NO: 2828177 - DNA, 25 bp, Homo sapien
ttctgcccaaagaactactacaggg

SEQ ID NO: 2828178 - DNA, 25 bp, Homo sapien
gactttaaaggctgcatctagaaac

SEQ ID NO: 2828179 - DNA, 25 bp, Homo sapien
gaaacactcaggcatcaacaggctc

SEQ ID NO: 2828180 - DNA, 25 bp, Homo sapien
gaaatgcgtcctaagccattgggac

SEQ ID NO: 2828181 - DNA, 25 bp, Homo sapien
tcaactatgcccatcaggagggtcc

SEQ ID NO: 2828182 - DNA, 25 bp, Homo sapien
gctgctgcgtcggtgagttcaacta

SEQ ID NO: 2828183 - DNA, 25 bp, Homo sapien
gtttcttcctcagccctcttgctac

SEQ ID NO: 2828184 - DNA, 25 bp, Homo sapien
tcactgtggtttcttcctcagccct

SEQ ID NO: 2828185 - DNA, 25 bp, Homo sapien
gtggtttcttcctcagccctcttgc

SEQ ID NO: 2828186 - DNA, 25 bp, Homo sapien
ctgtggtttcttcctcagccctctt

SEQ ID NO: 2828187 - DNA, 25 bp, Homo sapien
tccagtcccaccaaaagtcttgttc

SEQ ID NO: 2828188 - DNA, 25 bp, Homo sapien
ttatccagtcccaccaaaagtcttg

SEQ ID NO: 2828189 - DNA, 25 bp, Homo sapien
tgtctttatccagtcccaccaaaag

SEQ ID NO: 2828190 - DNA, 25 bp, Homo sapien
cagtcccaccaaaagtcttgttctc

SEQ ID NO: 2828191 - DNA, 25 bp, Homo sapien
agaacttcgacagcaggcagccata

SEQ ID NO: 2828192 - DNA, 25 bp, Homo sapien
agcaggcagccatagcatacaattc

SEQ ID NO: 2828193 - DNA, 25 bp, Homo sapien
ctggagaacttcgacagcaggcagc

SEQ ID NO: 2828194 - DNA, 25 bp, Homo sapien
gccatagcatacaattccataccct

SEQ ID NO: 2828195 - DNA, 25 bp, Homo sapien
caatagagatgcctgagtccttgat

SEQ ID NO: 2828196 - DNA, 25 bp, Homo sapien
tatgaggaaccgtggcaatagagat

SEQ ID NO: 2828197 - DNA, 25 bp, Homo sapien
tgcacgttgacatcacaaagcagct

SEQ ID NO: 2828198 - DNA, 25 bp, Homo sapien
tatgatgactagaggcacagtagcc

SEQ ID NO: 2828199 - DNA, 25 bp, Homo sapien
cacatactgttctattgggatccac

SEQ ID NO: 2828200 - DNA, 25 bp, Homo sapien
tttccatcttcagtgcatgatgtgc

SEQ ID NO: 2828201 - DNA, 25 bp, Homo sapien
tcgactggttacttgagggcaggaa

SEQ ID NO: 2828202 - DNA, 25 bp, Homo sapien
agtaaatcatttggctggccacata

SEQ ID NO: 2828203 - DNA, 25 bp, Homo sapien
tatttctaacttcgcttatttgtag

SEQ ID NO: 2828204 - DNA, 25 bp, Homo sapien
taacttcgcttatttgtagagaaaa

SEQ ID NO: 2828205 - DNA, 25 bp, Homo sapien
tttttatccaaatcacagtactatg

SEQ ID NO: 2828206 - DNA, 25 bp, Homo sapien
cagtactatgtgcttagagtataca

SEQ ID NO: 2828207 - DNA, 25 bp, Homo sapien
tatggccatcgagctcatctttcat

SEQ ID NO: 2828208 - DNA, 25 bp, Homo sapien
aaagcatcgtgcatatggccatcga

SEQ ID NO: 2828209 - DNA, 25 bp, Homo sapien
tgcttccaaagcatcgtgcatatgg

SEQ ID NO: 2828210 - DNA, 25 bp, Homo sapien
catcgtgcatatggccatcgagctc

SEQ ID NO: 2828211 - DNA, 25 bp, Homo sapien
taatttgggcaacgattaaatgaga

SEQ ID NO: 2828212 - DNA, 25 bp, Homo sapien
tactatttaattatggccaagtggt

SEQ ID NO: 2828213 - DNA, 25 bp, Homo sapien
tcaaaagatattagctagtacagag

SEQ ID NO: 2828214 - DNA, 25 bp, Homo sapien
tacgaaattatctagtagagatgct

SEQ ID NO: 2828215 - DNA, 25 bp, Homo sapien
tctgtgccagtaagagttgtctttt

SEQ ID NO: 2828216 - DNA, 25 bp, Homo sapien
gaaactcccatgcaggttgttgcta

SEQ ID NO: 2828217 - DNA, 25 bp, Homo sapien
tgcaggttgttgctattgtatgagg

SEQ ID NO: 2828218 - DNA, 25 bp, Homo sapien
aaggagcagaaactcccatgcaggt

SEQ ID NO: 2828219 - DNA, 25 bp, Homo sapien
gggtgcaacccagtccatggagtcg

SEQ ID NO: 2828220 - DNA, 25 bp, Homo sapien
agtagaaggcagagggagcaatggg

SEQ ID NO: 2828221 - DNA, 25 bp, Homo sapien
caatggggggtgcaacccagtccat

SEQ ID NO: 2828222 - DNA, 25 bp, Homo sapien
tccatggagtcgtaaagcagcagtc

SEQ ID NO: 2828223 - DNA, 25 bp, Homo sapien
ccttccctgctttcacccatcagct

SEQ ID NO: 2828224 - DNA, 25 bp, Homo sapien
tctgtttcccttccctgctttcacc

SEQ ID NO: 2828225 - DNA, 25 bp, Homo sapien
cccatcagcttcatccccttcactt

SEQ ID NO: 2828226 - DNA, 25 bp, Homo sapien
ctttccccttttccatcacgaccat

SEQ ID NO: 2828227 - DNA, 25 bp, Homo sapien
catatttctttttcgcttacttctt

SEQ ID NO: 2828228 - DNA, 25 bp, Homo sapien
tcatatttctttttcgcttacttct

SEQ ID NO: 2828229 - DNA, 25 bp, Homo sapien
gagtcctcatccagagtttgggaaa

SEQ ID NO: 2828230 - DNA, 25 bp, Homo sapien
gagtgcacctgagatctgagagtcc

SEQ ID NO: 2828231 - DNA, 25 bp, Homo sapien
tgagagtcctcatccagagtttggg

SEQ ID NO: 2828232 - DNA, 25 bp, Homo sapien
aatgagaagttggagtgcacctgag

SEQ ID NO: 2828233 - DNA, 25 bp, Homo sapien
tcccagtactttaatagtcgtagcg

SEQ ID NO: 2828234 - DNA, 25 bp, Homo sapien
tatgttcccagtactttaatagtcg

SEQ ID NO: 2828235 - DNA, 25 bp, Homo sapien
tactttaatagtcgtagcgtagcca

SEQ ID NO: 2828236 - DNA, 25 bp, Homo sapien
tagtcgtagcgtagccagacttttt

SEQ ID NO: 2828237 - DNA, 25 bp, Homo sapien
ggtgttatacatctgttgtccaata

SEQ ID NO: 2828238 - DNA, 25 bp, Homo sapien
catctgttgtccaatacttctatcc

SEQ ID NO: 2828239 - DNA, 25 bp, Homo sapien
tacttctatccatcatccactgatt

SEQ ID NO: 2828240 - DNA, 25 bp, Homo sapien
gtccaatacttctatccatcatcca

SEQ ID NO: 2828241 - DNA, 25 bp, Homo sapien
ttttcagttgaagctctacgtccta

SEQ ID NO: 2828242 - DNA, 25 bp, Homo sapien
acaggtacctctttggatacttgca

SEQ ID NO: 2828243 - DNA, 25 bp, Homo sapien
gaatagtcataaggttggcaaatct

SEQ ID NO: 2828244 - DNA, 25 bp, Homo sapien
tacgtcctaattggcacagcagtca

SEQ ID NO: 2828245 - DNA, 25 bp, Homo sapien
tcctggtacctggtgatgtcaaagt

SEQ ID NO: 2828246 - DNA, 25 bp, Homo sapien
cgaatctgactcaggtgttgagatt

SEQ ID NO: 2828247 - DNA, 25 bp, Homo sapien
ctggtgatgtcaaagtaggcagctc

SEQ ID NO: 2828248 - DNA, 25 bp, Homo sapien
tctctccagtatagccagagcagga

SEQ ID NO: 2828249 - DNA, 25 bp, Homo sapien
tgcagaggacctgttttctgtactc

SEQ ID NO: 2828250 - DNA, 25 bp, Homo sapien
taaacagtgcttgcaagggaccaca

SEQ ID NO: 2828251 - DNA, 25 bp, Homo sapien
ggcagcatgacaagaggttcaaagc

SEQ ID NO: 2828252 - DNA, 25 bp, Homo sapien
gccagaaagggaggcttcacattgc

SEQ ID NO: 2828253 - DNA, 25 bp, Homo sapien
ttgtacaaataggaatatagtcctc

SEQ ID NO: 2828254 - DNA, 25 bp, Homo sapien
tgtacaaataggaatatagtcctcc

SEQ ID NO: 2828255 - DNA, 25 bp, Homo sapien
tcctccagaagcccatagctcatca

SEQ ID NO: 2828256 - DNA, 25 bp, Homo sapien
tcctgtagcacctcactggacttct

SEQ ID NO: 2828257 - DNA, 25 bp, Homo sapien
cctatattcaagattatggcttccc

SEQ ID NO: 2828258 - DNA, 25 bp, Homo sapien
ggcttcccttgctttgctgcatgag

SEQ ID NO: 2828259 - DNA, 25 bp, Homo sapien
tggacttctgacaaacgggtcggtg

SEQ ID NO: 2828260 - DNA, 25 bp, Homo sapien
cattattgtagcaggattatcactt

SEQ ID NO: 2828261 - DNA, 25 bp, Homo sapien
ggtttccctccattattgtagcagg

SEQ ID NO: 2828262 - DNA, 25 bp, Homo sapien
cagtcttctgttgatggtttccctc

SEQ ID NO: 2828263 - DNA, 25 bp, Homo sapien
tgttgatggtttccctccattattg

SEQ ID NO: 2828264 - DNA, 25 bp, Homo sapien
catttcattgacggttttgctgaaa

SEQ ID NO: 2828265 - DNA, 25 bp, Homo sapien
tttcattgacggttttgctgaaatt

SEQ ID NO: 2828266 - DNA, 25 bp, Homo sapien
atttcattgacggttttgctgaaat

SEQ ID NO: 2828267 - DNA, 25 bp, Homo sapien
tgtgtgccagctattatgctaggta

SEQ ID NO: 2828268 - DNA, 25 bp, Homo sapien
tgttgaatatttgggtatgcatcac

SEQ ID NO: 2828269 - DNA, 25 bp, Homo sapien
aatgtctaccgagggcaatttggca

SEQ ID NO: 2828270 - DNA, 25 bp, Homo sapien
gatcaaaaagtttagcgctagtcac

SEQ ID NO: 2828271 - DNA, 25 bp, Homo sapien
tgaaattatcaagggtagagccacc

SEQ ID NO: 2828272 - DNA, 25 bp, Homo sapien
tcttcaaaaggtcggatcatttcct

SEQ ID NO: 2828273 - DNA, 25 bp, Homo sapien
catatttgcttgcagtccatggatc

SEQ ID NO: 2828274 - DNA, 25 bp, Homo sapien
ggccagtgtcatgcagatgaacccc

SEQ ID NO: 2828275 - DNA, 25 bp, Homo sapien
gaagtgagtatgatgtccctgagcc

SEQ ID NO: 2828276 - DNA, 25 bp, Homo sapien
tacagttgaagaaacagggcatatc

SEQ ID NO: 2828277 - DNA, 25 bp, Homo sapien
gagctagcctattagagccactggg

SEQ ID NO: 2828278 - DNA, 25 bp, Homo sapien
ttctctgggcttgtttgaggcacca

SEQ ID NO: 2828279 - DNA, 25 bp, Homo sapien
tcccaaacagttctgaatgtctcca

SEQ ID NO: 2828280 - DNA, 25 bp, Homo sapien
gatttccatgcgacagaatcccaaa

SEQ ID NO: 2828281 - DNA, 25 bp, Homo sapien
ccagctctgttttggcttagtagat

SEQ ID NO: 2828282 - DNA, 25 bp, Homo sapien
agcaaagccaactcgggcagatgcc

SEQ ID NO: 2828283 - DNA, 25 bp, Homo sapien
ggacaccacattctgtaaccaggga

SEQ ID NO: 2828284 - DNA, 25 bp, Homo sapien
tcctgccgccttcttttgtgtttct

SEQ ID NO: 2828285 - DNA, 25 bp, Homo sapien
ggccgggacaccacattctgtaacc

SEQ ID NO: 2828286 - DNA, 25 bp, Homo sapien
ttagaaacacatgggatcctgccgc

SEQ ID NO: 2828287 - DNA, 25 bp, Homo sapien
gaccagattgcttgggccatcggaa

SEQ ID NO: 2828288 - DNA, 25 bp, Homo sapien
tgcttgggccatcggaatacctcat

SEQ ID NO: 2828289 - DNA, 25 bp, Homo sapien
gactgatcgaccagattgcttgggc

SEQ ID NO: 2828290 - DNA, 25 bp, Homo sapien
tgagaatggtgactgatcgaccaga

SEQ ID NO: 2828291 - DNA, 25 bp, Homo sapien
caccctgctggtcagaggtgcaagc

SEQ ID NO: 2828292 - DNA, 25 bp, Homo sapien
cctgctggtcagaggtgcaagcaga

SEQ ID NO: 2828293 - DNA, 25 bp, Homo sapien
gttttgtttgagtgcaccctgctgg

SEQ ID NO: 2828294 - DNA, 25 bp, Homo sapien
ggtgcttcctgaggcgttttgtttg

SEQ ID NO: 2828295 - DNA, 25 bp, Homo sapien
tctgtgaggcatgtgactgaagtac

SEQ ID NO: 2828296 - DNA, 25 bp, Homo sapien
caagcaggatgtctgtattcagcat

SEQ ID NO: 2828297 - DNA, 25 bp, Homo sapien
ctatgttagtagttttcaagcagga

SEQ ID NO: 2828298 - DNA, 25 bp, Homo sapien
actatttaccatatgggttggctgg

SEQ ID NO: 2828299 - DNA, 25 bp, Homo sapien
taatgcattatggatagctcaggtg

SEQ ID NO: 2828300 - DNA, 25 bp, Homo sapien
tactgccatttgaggtcataacctg

SEQ ID NO: 2828301 - DNA, 25 bp, Homo sapien
tgacccactgacaaagaagcccagt

SEQ ID NO: 2828302 - DNA, 25 bp, Homo sapien
caaaaaactggagacctgattctgt

SEQ ID NO: 2828303 - DNA, 25 bp, Homo sapien
gatgtcttctgaaacacggaagtga

SEQ ID NO: 2828304 - DNA, 25 bp, Homo sapien
tgtccaggctgtgaccctattactc

SEQ ID NO: 2828305 - DNA, 25 bp, Homo sapien
tgttgtacagagaagcatgcatccc

SEQ ID NO: 2828306 - DNA, 25 bp, Homo sapien
tctgcctatgtaagctcttgcccgt

SEQ ID NO: 2828307 - DNA, 25 bp, Homo sapien
cattgctaccgagcatgaagaaaaa

SEQ ID NO: 2828308 - DNA, 25 bp, Homo sapien
atcattgctaccgagcatgaagaaa

SEQ ID NO: 2828309 - DNA, 25 bp, Homo sapien
aaccatcattgctaccgagcatgaa

SEQ ID NO: 2828310 - DNA, 25 bp, Homo sapien
ccatcattgctaccgagcatgaaga

SEQ ID NO: 2828311 - DNA, 25 bp, Homo sapien
tgcgtgtctaaagcagatcgtaaac

SEQ ID NO: 2828312 - DNA, 25 bp, Homo sapien
gaagccgaggtccttgaaaccacca

SEQ ID NO: 2828313 - DNA, 25 bp, Homo sapien
gatcgtaaactgagagcatttctag

SEQ ID NO: 2828314 - DNA, 25 bp, Homo sapien
cactgttggttctcgaagcagggag

SEQ ID NO: 2828315 - DNA, 25 bp, Homo sapien
ggctgcatccacatcaaagaaaata

SEQ ID NO: 2828316 - DNA, 25 bp, Homo sapien
gatgaaatttaaattggctgcatcc

SEQ ID NO: 2828317 - DNA, 25 bp, Homo sapien
tggctgcatccacatcaaagaaaat

SEQ ID NO: 2828318 - DNA, 25 bp, Homo sapien
gaaatttaaattggctgcatccaca

SEQ ID NO: 2828319 - DNA, 25 bp, Homo sapien
tttcctgagcatgcaccacaggtag

SEQ ID NO: 2828320 - DNA, 25 bp, Homo sapien
gctttcctgagcatgcaccacaggt

SEQ ID NO: 2828321 - DNA, 25 bp, Homo sapien
gagctttcctgagcatgcaccacag

SEQ ID NO: 2828322 - DNA, 25 bp, Homo sapien
cctgagcatgcaccacaggtagcag

SEQ ID NO: 2828323 - DNA, 25 bp, Homo sapien
agcctccccgaaagaggcagccctc

SEQ ID NO: 2828324 - DNA, 25 bp, Homo sapien
tagacctaggggctcacataccatt

SEQ ID NO: 2828325 - DNA, 25 bp, Homo sapien
gagggtacttatgggaaatttatgc

SEQ ID NO: 2828326 - DNA, 25 bp, Homo sapien
tacttatgggaaatttatgctctgc

SEQ ID NO: 2828327 - DNA, 25 bp, Homo sapien
tgaattgtggaaaagtgactataaa

SEQ ID NO: 2828328 - DNA, 25 bp, Homo sapien
tctaggccccaagaaagggcacagg

SEQ ID NO: 2828329 - DNA, 25 bp, Homo sapien
gttagaagcatgttcagtgacccac

SEQ ID NO: 2828330 - DNA, 25 bp, Homo sapien
ccctgtttgagattgtgagcacagc

SEQ ID NO: 2828331 - DNA, 25 bp, Homo sapien
taagtcaatgtgtcctctaggcccc

SEQ ID NO: 2828332 - DNA, 25 bp, Homo sapien
gaaatgaccaggatgctatcaagtc

SEQ ID NO: 2828333 - DNA, 25 bp, Homo sapien
gcctacagaaggacaagcaaagctt

SEQ ID NO: 2828334 - DNA, 25 bp, Homo sapien
tccagcgagatgtctctagagaagg

SEQ ID NO: 2828335 - DNA, 25 bp, Homo sapien
tagaatctacagagccacagcagag

SEQ ID NO: 2828336 - DNA, 25 bp, Homo sapien
catttgtggacctttccaatagaaa

SEQ ID NO: 2828337 - DNA, 25 bp, Homo sapien
gagcaaactctaactgcctacaaca

SEQ ID NO: 2828338 - DNA, 25 bp, Homo sapien
ttcctccaaaacaatcattggcagg

SEQ ID NO: 2828339 - DNA, 25 bp, Homo sapien
aatcgtaacatgtaccccaaatcca

SEQ ID NO: 2828340 - DNA, 25 bp, Homo sapien
gaggcttaacagattcccaccctga

SEQ ID NO: 2828341 - DNA, 25 bp, Homo sapien
acttcccagggagtcacaagagcct

SEQ ID NO: 2828342 - DNA, 25 bp, Homo sapien
cattgccagcagtagcggttggaac

SEQ ID NO: 2828343 - DNA, 25 bp, Homo sapien
caagttaggctttagtgccgtggca

SEQ ID NO: 2828344 - DNA, 25 bp, Homo sapien
gaaagtgaactttgcccagctctct

SEQ ID NO: 2828345 - DNA, 25 bp, Homo sapien
tagttaaatactgctcgcagctggc

SEQ ID NO: 2828346 - DNA, 25 bp, Homo sapien
gccataggtgggtaatgtcaagcaa

SEQ ID NO: 2828347 - DNA, 25 bp, Homo sapien
ttttctatacaactctgcacgggca

SEQ ID NO: 2828348 - DNA, 25 bp, Homo sapien
aaaaggaatctcttgatttaatcag

SEQ ID NO: 2828349 - DNA, 25 bp, Homo sapien
ctcttgatttaatcagggctttggg

SEQ ID NO: 2828350 - DNA, 25 bp, Homo sapien
tttggggtcatagggggattagtca

SEQ ID NO: 2828351 - DNA, 25 bp, Homo sapien
ggaatctcttgatttaatcagggct

SEQ ID NO: 2828352 - DNA, 25 bp, Homo sapien
tctccaaaaacagctgctggaacac

SEQ ID NO: 2828353 - DNA, 25 bp, Homo sapien
ttgtcttctccaaaaacagctgctg

SEQ ID NO: 2828354 - DNA, 25 bp, Homo sapien
tttctttgtcttctccaaaaacagc

SEQ ID NO: 2828355 - DNA, 25 bp, Homo sapien
tcttctccaaaaacagctgctggaa

SEQ ID NO: 2828356 - DNA, 25 bp, Homo sapien
ttaagggatgttcatctaaaacacc

SEQ ID NO: 2828357 - DNA, 25 bp, Homo sapien
tcaaattaagggatgttcatctaaa

SEQ ID NO: 2828358 - DNA, 25 bp, Homo sapien
taagggatgttcatctaaaacacct

SEQ ID NO: 2828359 - DNA, 25 bp, Homo sapien
aattaagggatgttcatctaaaaca

SEQ ID NO: 2828360 - DNA, 25 bp, Homo sapien
ttactgaaacttgattccttgggcc

SEQ ID NO: 2828361 - DNA, 25 bp, Homo sapien
agaggaaggtctttactgtagttga

SEQ ID NO: 2828362 - DNA, 25 bp, Homo sapien
gaaggtctttactgtagttgatagt

SEQ ID NO: 2828363 - DNA, 25 bp, Homo sapien
aaacttgattccttgggccagagga

SEQ ID NO: 2828364 - DNA, 25 bp, Homo sapien
caagtagaccttctcatgtactgtt

SEQ ID NO: 2828365 - DNA, 25 bp, Homo sapien
ttctcatgtactgtttccaggcatc

SEQ ID NO: 2828366 - DNA, 25 bp, Homo sapien
gtagaccttctcatgtactgtttcc

SEQ ID NO: 2828367 - DNA, 25 bp, Homo sapien
gaccttctcatgtactgtttccagg

SEQ ID NO: 2828368 - DNA, 25 bp, Homo sapien
gccccacttgttggaatgttgacat

SEQ ID NO: 2828369 - DNA, 25 bp, Homo sapien
caatgccacagtctgatcctttagg

SEQ ID NO: 2828370 - DNA, 25 bp, Homo sapien
aatgccacagtctgatcctttaggt

SEQ ID NO: 2828371 - DNA, 25 bp, Homo sapien
acaatgccacagtctgatcctttag

SEQ ID NO: 2828372 - DNA, 25 bp, Homo sapien
ttacaatgccacagtctgatccttt

SEQ ID NO: 2828373 - DNA, 25 bp, Homo sapien
aaaactgattttagactacagcagt

SEQ ID NO: 2828374 - DNA, 25 bp, Homo sapien
tgattttagactacagcagtttttt

SEQ ID NO: 2828375 - DNA, 25 bp, Homo sapien
gctcaaaggctttcaatactgaaaa

SEQ ID NO: 2828376 - DNA, 25 bp, Homo sapien
aactgattttagactacagcagttt

SEQ ID NO: 2828377 - DNA, 25 bp, Homo sapien
ataaatcagacttatataaattttc

SEQ ID NO: 2828378 - DNA, 25 bp, Homo sapien
taaatcagacttatataaattttca

SEQ ID NO: 2828379 - DNA, 25 bp, Homo sapien
gcgaaagattctgcccagatctttg

SEQ ID NO: 2828380 - DNA, 25 bp, Homo sapien
cctgttttacttcattattccatgc

SEQ ID NO: 2828381 - DNA, 25 bp, Homo sapien
cttcattattccatgcaaagacctc

SEQ ID NO: 2828382 - DNA, 25 bp, Homo sapien
cattattccatgcaaagacctcttc

SEQ ID NO: 2828383 - DNA, 25 bp, Homo sapien
ccctgttttacttcattattccatg

SEQ ID NO: 2828384 - DNA, 25 bp, Homo sapien
tgtcacaattgtcggttctacataa

SEQ ID NO: 2828385 - DNA, 25 bp, Homo sapien
ttgtcggttctacataatttccagg

SEQ ID NO: 2828386 - DNA, 25 bp, Homo sapien
caattgtcggttctacataatttcc

SEQ ID NO: 2828387 - DNA, 25 bp, Homo sapien
acctgtcacaattgtcggttctaca

SEQ ID NO: 2828388 - DNA, 25 bp, Homo sapien
gcagtgcagtgacatcatcatgact

SEQ ID NO: 2828389 - DNA, 25 bp, Homo sapien
tgctttgttgtccaagctgcagtgc

SEQ ID NO: 2828390 - DNA, 25 bp, Homo sapien
cagtgacatcatcatgactcattgc

SEQ ID NO: 2828391 - DNA, 25 bp, Homo sapien
ttgctttgttgtccaagctgcagtg

SEQ ID NO: 2828392 - DNA, 25 bp, Homo sapien
tatcatcattgtgcataagccatgc

SEQ ID NO: 2828393 - DNA, 25 bp, Homo sapien
taaaatacggatatgaatttgcata

SEQ ID NO: 2828394 - DNA, 25 bp, Homo sapien
tgcatatcatcattgtgcataagcc

SEQ ID NO: 2828395 - DNA, 25 bp, Homo sapien
catatcatcattgtgcataagccat

SEQ ID NO: 2828396 - DNA, 25 bp, Homo sapien
tggagtggcccatagagaacattag

SEQ ID NO: 2828397 - DNA, 25 bp, Homo sapien
ctgcctgcttggtgtggagtggccc

SEQ ID NO: 2828398 - DNA, 25 bp, Homo sapien
ccatgggttcccaactcggatctgt

SEQ ID NO: 2828399 - DNA, 25 bp, Homo sapien
catgggttcccaactcggatctgtg

SEQ ID NO: 2828400 - DNA, 25 bp, Homo sapien
gctgatggaacaactaagctgaggt

SEQ ID NO: 2828401 - DNA, 25 bp, Homo sapien
ctcgcagtggtacacctctggccag

SEQ ID NO: 2828402 - DNA, 25 bp, Homo sapien
cgcagtggtacacctctggccagct

SEQ ID NO: 2828403 - DNA, 25 bp, Homo sapien
agtcgcctcgcagtggtacacctct

SEQ ID NO: 2828404 - DNA, 25 bp, Homo sapien
ttcctccaagttccaacagacttct

SEQ ID NO: 2828405 - DNA, 25 bp, Homo sapien
tgtttcctccaagttccaacagact

SEQ ID NO: 2828406 - DNA, 25 bp, Homo sapien
caataatggcattgtttcctccaag

SEQ ID NO: 2828407 - DNA, 25 bp, Homo sapien
attgtttcctccaagttccaacaga

SEQ ID NO: 2828408 - DNA, 25 bp, Homo sapien
tataaccaaacatagtaaggcaggg

SEQ ID NO: 2828409 - DNA, 25 bp, Homo sapien
tgcacgcgcgcacagatgttgctgg

SEQ ID NO: 2828410 - DNA, 25 bp, Homo sapien
tatttactgcacactgctacacagc

SEQ ID NO: 2828411 - DNA, 25 bp, Homo sapien
gggacacatctttgacttactccaa

SEQ ID NO: 2828412 - DNA, 25 bp, Homo sapien
gttaggactcttgacagacattgcc

SEQ ID NO: 2828413 - DNA, 25 bp, Homo sapien
tataaccccactcaaatgaaagtag

SEQ ID NO: 2828414 - DNA, 25 bp, Homo sapien
agaaagaaacctatggcccataagg

SEQ ID NO: 2828415 - DNA, 25 bp, Homo sapien
tagaaaagttatatagcaggccatg

SEQ ID NO: 2828416 - DNA, 25 bp, Homo sapien
gcctcaattttagacatatgtttat

SEQ ID NO: 2828417 - DNA, 25 bp, Homo sapien
ttgcctcaattttagacatatgttt

SEQ ID NO: 2828418 - DNA, 25 bp, Homo sapien
gatgtgtttgcctcaattttagaca

SEQ ID NO: 2828419 - DNA, 25 bp, Homo sapien
tgtgtttgcctcaattttagacata

SEQ ID NO: 2828420 - DNA, 25 bp, Homo sapien
tttattactgatcttttgatcatcg

SEQ ID NO: 2828421 - DNA, 25 bp, Homo sapien
tattactgatcttttgatcatcgat

SEQ ID NO: 2828422 - DNA, 25 bp, Homo sapien
tactgatcttttgatcatcgatttc

SEQ ID NO: 2828423 - DNA, 25 bp, Homo sapien
tgatcttttgatcatcgatttcctt

SEQ ID NO: 2828424 - DNA, 25 bp, Homo sapien
ctttacagcacccaaaaacaaacat

SEQ ID NO: 2828425 - DNA, 25 bp, Homo sapien
gattcaattatacccatttagagag

SEQ ID NO: 2828426 - DNA, 25 bp, Homo sapien
taggacttccctaatattctactgc

SEQ ID NO: 2828427 - DNA, 25 bp, Homo sapien
tactgctaataactgtacccttttc

SEQ ID NO: 2828428 - DNA, 25 bp, Homo sapien
caccatcaggcccacctgttttccc

SEQ ID NO: 2828429 - DNA, 25 bp, Homo sapien
ctctcctgcaccatcaggcccacct

SEQ ID NO: 2828430 - DNA, 25 bp, Homo sapien
tcctgcaccatcaggcccacctgtt

SEQ ID NO: 2828431 - DNA, 25 bp, Homo sapien
ccatcaggcccacctgttttcccac

SEQ ID NO: 2828432 - DNA, 25 bp, Homo sapien
acagcaggttcactcgttcatcttt

SEQ ID NO: 2828433 - DNA, 25 bp, Homo sapien
cagcaggttcactcgttcatctttg

SEQ ID NO: 2828434 - DNA, 25 bp, Homo sapien
ggttcactcgttcatctttggccat

SEQ ID NO: 2828435 - DNA, 25 bp, Homo sapien
caggttcactcgttcatctttggcc

SEQ ID NO: 2828436 - DNA, 25 bp, Homo sapien
ggaacaaattgcaccaggcagcttg

SEQ ID NO: 2828437 - DNA, 25 bp, Homo sapien
aattgcaccaggcagcttgttgtcc

SEQ ID NO: 2828438 - DNA, 25 bp, Homo sapien
caatatctgctccaccacaagtcaa

SEQ ID NO: 2828439 - DNA, 25 bp, Homo sapien
gtcaaggaacaaattgcaccaggca

SEQ ID NO: 2828440 - DNA, 25 bp, Homo sapien
tgtcggtcagaaaatatcagtgccc

SEQ ID NO: 2828441 - DNA, 25 bp, Homo sapien
cagtgccctgcaggctaaagaattg

SEQ ID NO: 2828442 - DNA, 25 bp, Homo sapien
gaaattagaggtagtcaccaccagc

SEQ ID NO: 2828443 - DNA, 25 bp, Homo sapien
gaaagagcttgaggctagttcccac

SEQ ID NO: 2828444 - DNA, 25 bp, Homo sapien
agccacactaatgagggaagtggtt

SEQ ID NO: 2828445 - DNA, 25 bp, Homo sapien
gccacactaatgagggaagtggttg

SEQ ID NO: 2828446 - DNA, 25 bp, Homo sapien
ccacactaatgagggaagtggttgg

SEQ ID NO: 2828447 - DNA, 25 bp, Homo sapien
tgaatgccgtgatgattccaaccag

SEQ ID NO: 2828448 - DNA, 25 bp, Homo sapien
ctgccacagggaaattgaatgccgt

SEQ ID NO: 2828449 - DNA, 25 bp, Homo sapien
gcgttgttccaaccatacactgcca

SEQ ID NO: 2828450 - DNA, 25 bp, Homo sapien
cactgctcaatcagtgcatggccag

SEQ ID NO: 2828451 - DNA, 25 bp, Homo sapien
gatatccacatactcctgaacttca

SEQ ID NO: 2828452 - DNA, 25 bp, Homo sapien
gcatagtcacagatatccacatact

SEQ ID NO: 2828453 - DNA, 25 bp, Homo sapien
tttcagaaggcaagataggtcctcc

SEQ ID NO: 2828454 - DNA, 25 bp, Homo sapien
caatcatccttgataaaccaacagc

SEQ ID NO: 2828455 - DNA, 25 bp, Homo sapien
caagcttcctagtacttggatcttc

SEQ ID NO: 2828456 - DNA, 25 bp, Homo sapien
tcttactatttctcctcgttttgga

SEQ ID NO: 2828457 - DNA, 25 bp, Homo sapien
agcttcctagtacttggatcttctc

SEQ ID NO: 2828458 - DNA, 25 bp, Homo sapien
ctgtcttactatttctcctcgtttt

SEQ ID NO: 2828459 - DNA, 25 bp, Homo sapien
ccagattttccatgcttctcttgct

SEQ ID NO: 2828460 - DNA, 25 bp, Homo sapien
gcccagattttccatgcttctcttg

SEQ ID NO: 2828461 - DNA, 25 bp, Homo sapien
tctgcccagattttccatgcttctc

SEQ ID NO: 2828462 - DNA, 25 bp, Homo sapien
tttcttcatagtctgccacactggc

SEQ ID NO: 2828463 - DNA, 25 bp, Homo sapien
gagctccaacccagacttcggaaat

SEQ ID NO: 2828464 - DNA, 25 bp, Homo sapien
tattattcttgacctgcctaactgg

SEQ ID NO: 2828465 - DNA, 25 bp, Homo sapien
aagaaagcctgcacaaactccttgt

SEQ ID NO: 2828466 - DNA, 25 bp, Homo sapien
aaatcctcaggtacttcagaagcac

SEQ ID NO: 2828467 - DNA, 25 bp, Homo sapien
ttgttagcagggcaataggtcgtaa

SEQ ID NO: 2828468 - DNA, 25 bp, Homo sapien
tgttagcagggcaataggtcgtaat

SEQ ID NO: 2828469 - DNA, 25 bp, Homo sapien
tcgttgttagcagggcaataggtcg

SEQ ID NO: 2828470 - DNA, 25 bp, Homo sapien
tagcagggcaataggtcgtaataac

SEQ ID NO: 2828471 - DNA, 25 bp, Homo sapien
attgttttgagcagtaatgggtatc

SEQ ID NO: 2828472 - DNA, 25 bp, Homo sapien
ttttgagcagtaatgggtatcaggc

SEQ ID NO: 2828473 - DNA, 25 bp, Homo sapien
taatgggtatcaggcgcggtgttaa

SEQ ID NO: 2828474 - DNA, 25 bp, Homo sapien
ttgagcagtaatgggtatcaggcgc

SEQ ID NO: 2828475 - DNA, 25 bp, Homo sapien
ccgcgcccggtagaccataatgttt

SEQ ID NO: 2828476 - DNA, 25 bp, Homo sapien
gattctgcatagcacacaaggacct

SEQ ID NO: 2828477 - DNA, 25 bp, Homo sapien
tatgcgcgggaagtttagcccctac

SEQ ID NO: 2828478 - DNA, 25 bp, Homo sapien
tgcagagatttcttgagcgcccgcg

SEQ ID NO: 2828479 - DNA, 25 bp, Homo sapien
gggctgattgatgaggagagtggac

SEQ ID NO: 2828480 - DNA, 25 bp, Homo sapien
ggctgattgatgaggagagtggaca

SEQ ID NO: 2828481 - DNA, 25 bp, Homo sapien
gctgattgatgaggagagtggacat

SEQ ID NO: 2828482 - DNA, 25 bp, Homo sapien
gtctttgcagcgtgcacacacagcg

SEQ ID NO: 2828483 - DNA, 25 bp, Homo sapien
ggtccagagagcttgctggtctttg

SEQ ID NO: 2828484 - DNA, 25 bp, Homo sapien
acagcgcgcgaggaaggcgccacat

SEQ ID NO: 2828485 - DNA, 25 bp, Homo sapien
aaggcggcaggcctgctccaaggtc

SEQ ID NO: 2828486 - DNA, 25 bp, Homo sapien
cccgggactcgggatgagcccaagg

SEQ ID NO: 2828487 - DNA, 25 bp, Homo sapien
gctgctgaaatagagccccgccccc

SEQ ID NO: 2828488 - DNA, 25 bp, Homo sapien
ggactcgggatgagcccaaggccct

SEQ ID NO: 2828489 - DNA, 25 bp, Homo sapien
cctcccactgggcacgaccccgcca

SEQ ID NO: 2828490 - DNA, 25 bp, Homo sapien
tgtgatttatcatgcattcttacag

SEQ ID NO: 2828491 - DNA, 25 bp, Homo sapien
agtttttaaactattatcaacaatg

SEQ ID NO: 2828492 - DNA, 25 bp, Homo sapien
ctgtgatttatcatgcattcttaca

SEQ ID NO: 2828493 - DNA, 25 bp, Homo sapien
gtgatttatcatgcattcttacagt

SEQ ID NO: 2828494 - DNA, 25 bp, Homo sapien
ctagccaggtgtggttctccatgcc

SEQ ID NO: 2828495 - DNA, 25 bp, Homo sapien
agaatcacctgaacccgggaggcaa

SEQ ID NO: 2828496 - DNA, 25 bp, Homo sapien
cggctactcgggaggctgaggcagg

SEQ ID NO: 2828497 - DNA, 25 bp, Homo sapien
gtgtggttctccatgcctataatcc

SEQ ID NO: 2828498 - DNA, 25 bp, Homo sapien
ttcaagcgatcatgtgcctaagcct

SEQ ID NO: 2828499 - DNA, 25 bp, Homo sapien
gtatactgatgattcttcccactca

SEQ ID NO: 2828500 - DNA, 25 bp, Homo sapien
tacaattaagaggtgtatactgatg

SEQ ID NO: 2828501 - DNA, 25 bp, Homo sapien
cctgtggattaccacatgcattaaa

SEQ ID NO: 2828502 - DNA, 25 bp, Homo sapien
gctgacattggctagggcctttgca

SEQ ID NO: 2828503 - DNA, 25 bp, Homo sapien
ccagcccttacattgcagatggggt

SEQ ID NO: 2828504 - DNA, 25 bp, Homo sapien
tggggttcccgatgctgacattggc

SEQ ID NO: 2828505 - DNA, 25 bp, Homo sapien
gcagatggggttcccgatgctgaca

SEQ ID NO: 2828506 - DNA, 25 bp, Homo sapien
aatgagggcattgattttatcatta

SEQ ID NO: 2828507 - DNA, 25 bp, Homo sapien
atgagggcattgattttatcattat

SEQ ID NO: 2828508 - DNA, 25 bp, Homo sapien
ccttggaatgaccaagcaccttggc

SEQ ID NO: 2828509 - DNA, 25 bp, Homo sapien
cttggaatgaccaagcaccttggca

SEQ ID NO: 2828510 - DNA, 25 bp, Homo sapien
gttcatccaaggtcttaagcagcag

SEQ ID NO: 2828511 - DNA, 25 bp, Homo sapien
aagttcatccaaggtcttaagcagc

SEQ ID NO: 2828512 - DNA, 25 bp, Homo sapien
atccaaggtcttaagcagcagcatc

SEQ ID NO: 2828513 - DNA, 25 bp, Homo sapien
tcatccaaggtcttaagcagcagca

SEQ ID NO: 2828514 - DNA, 25 bp, Homo sapien
acagttctcttctccttaaattctt

SEQ ID NO: 2828515 - DNA, 25 bp, Homo sapien
gataaaccatctggtgctgctggac

SEQ ID NO: 2828516 - DNA, 25 bp, Homo sapien
ggtgctgctggacagttctcttctc

SEQ ID NO: 2828517 - DNA, 25 bp, Homo sapien
ctgataaaccatctggtgctgctgg

SEQ ID NO: 2828518 - DNA, 25 bp, Homo sapien
atagctgtagctcgtggaaactttt

SEQ ID NO: 2828519 - DNA, 25 bp, Homo sapien
tagctgtagctcgtggaaacttttc

SEQ ID NO: 2828520 - DNA, 25 bp, Homo sapien
aagtgtttaccacacaagaagtctt

SEQ ID NO: 2828521 - DNA, 25 bp, Homo sapien
tgtttaccacacaagaagtctttga

SEQ ID NO: 2828522 - DNA, 25 bp, Homo sapien
tcctaagtgtttaccacacaagaag

SEQ ID NO: 2828523 - DNA, 25 bp, Homo sapien
tatcctaagtgtttaccacacaaga

SEQ ID NO: 2828524 - DNA, 25 bp, Homo sapien
gggtccgtgatagtcccggagcttc

SEQ ID NO: 2828525 - DNA, 25 bp, Homo sapien
ccggagcttccaaagcgattgggca

SEQ ID NO: 2828526 - DNA, 25 bp, Homo sapien
tcgaagctcggggtccgtgatagtc

SEQ ID NO: 2828527 - DNA, 25 bp, Homo sapien
gtgatagtcccggagcttccaaagc

SEQ ID NO: 2828528 - DNA, 25 bp, Homo sapien
tgctgctgcctgtccagctgggctc

SEQ ID NO: 2828529 - DNA, 25 bp, Homo sapien
tcaggacacgtcttggtcaaggctg

SEQ ID NO: 2828530 - DNA, 25 bp, Homo sapien
ctgttgcccttggtccttgggcact

SEQ ID NO: 2828531 - DNA, 25 bp, Homo sapien
aaggctgtccacctgttgcccttgg

SEQ ID NO: 2828532 - DNA, 25 bp, Homo sapien
tgtctagaatttccatgtcccacat

SEQ ID NO: 2828533 - DNA, 25 bp, Homo sapien
ttgtctagaatttccatgtcccaca

SEQ ID NO: 2828534 - DNA, 25 bp, Homo sapien
tttgtctagaatttccatgtcccac

SEQ ID NO: 2828535 - DNA, 25 bp, Homo sapien
tgtagctgatagtgatcaaaagttg

SEQ ID NO: 2828536 - DNA, 25 bp, Homo sapien
gtagctgatagtgatcaaaagttgc

SEQ ID NO: 2828537 - DNA, 25 bp, Homo sapien
ccattgcaatcacaactgggttggg

SEQ ID NO: 2828538 - DNA, 25 bp, Homo sapien
cctagcctgatagctctcaccagaa

SEQ ID NO: 2828539 - DNA, 25 bp, Homo sapien
gggctatgggggaagacaccttcca

SEQ ID NO: 2828540 - DNA, 25 bp, Homo sapien
gctctcaccagaacaagactgggcc

SEQ ID NO: 2828541 - DNA, 25 bp, Homo sapien
cttccaacataagcatgagctccag

SEQ ID NO: 2828542 - DNA, 25 bp, Homo sapien
tcacttccaacataagcatgagctc

SEQ ID NO: 2828543 - DNA, 25 bp, Homo sapien
ccaacataagcatgagctccagaca

SEQ ID NO: 2828544 - DNA, 25 bp, Homo sapien
cataagcatgagctccagacatcac

SEQ ID NO: 2828545 - DNA, 25 bp, Homo sapien
caccttctcatcctgagaggttttc

SEQ ID NO: 2828546 - DNA, 25 bp, Homo sapien
gattcgtagttcaagggcctctacc

SEQ ID NO: 2828547 - DNA, 25 bp, Homo sapien
tcccagttgcttccatgatactggg

SEQ ID NO: 2828548 - DNA, 25 bp, Homo sapien
taccacttgatgtgtcaaagcccaa

SEQ ID NO: 2828549 - DNA, 25 bp, Homo sapien
cgatccaatagcgactactcgcttg

SEQ ID NO: 2828550 - DNA, 25 bp, Homo sapien
ttcaaccgatactcggtcagagtgg

SEQ ID NO: 2828551 - DNA, 25 bp, Homo sapien
tttctaaaggtttgtcccgacatga

SEQ ID NO: 2828552 - DNA, 25 bp, Homo sapien
agcctcgtactctgctctcgtgcag

SEQ ID NO: 2828553 - DNA, 25 bp, Homo sapien
tttttatagatacgcggtctttcta

SEQ ID NO: 2828554 - DNA, 25 bp, Homo sapien
atagatacgcggtctttctatattg

SEQ ID NO: 2828555 - DNA, 25 bp, Homo sapien
tatagatacgcggtctttctatatt

SEQ ID NO: 2828556 - DNA, 25 bp, Homo sapien
tttatagatacgcggtctttctata

SEQ ID NO: 2828557 - DNA, 25 bp, Homo sapien
cacattttgtgggtgctactgcagc

SEQ ID NO: 2828558 - DNA, 25 bp, Homo sapien
tatgtgttggcagcagttccgcttt

SEQ ID NO: 2828559 - DNA, 25 bp, Homo sapien
gcagaaatctcccaagtgatgatgg

SEQ ID NO: 2828560 - DNA, 25 bp, Homo sapien
taaccaagtctatgagccaatgtaa

SEQ ID NO: 2828561 - DNA, 25 bp, Homo sapien
ttttagtgtatgtacagccaaaggg

SEQ ID NO: 2828562 - DNA, 25 bp, Homo sapien
agtgtatgtacagccaaagggagca

SEQ ID NO: 2828563 - DNA, 25 bp, Homo sapien
ttgcattatacttgcacagggacca

SEQ ID NO: 2828564 - DNA, 25 bp, Homo sapien
ttcacagatttgcattatacttgca

SEQ ID NO: 2828565 - DNA, 25 bp, Homo sapien
actcctggcatgacctgcaggctcc

SEQ ID NO: 2828566 - DNA, 25 bp, Homo sapien
cacagccttgcggtgactcctggca

SEQ ID NO: 2828567 - DNA, 25 bp, Homo sapien
tttctcttctggagacctcagggac

SEQ ID NO: 2828568 - DNA, 25 bp, Homo sapien
ttctcttctggagacctcagggaca

SEQ ID NO: 2828569 - DNA, 25 bp, Homo sapien
gaaatggtgtattgcccgtgatcta

SEQ ID NO: 2828570 - DNA, 25 bp, Homo sapien
tgcttagcacactacacagtattta

SEQ ID NO: 2828571 - DNA, 25 bp, Homo sapien
gatctatcacggagcaataattctg

SEQ ID NO: 2828572 - DNA, 25 bp, Homo sapien
gatgcaggtatcttattagctgaac

SEQ ID NO: 2828573 - DNA, 25 bp, Homo sapien
cactttgagatcaacccaacttaaa

SEQ ID NO: 2828574 - DNA, 25 bp, Homo sapien
tccttatgacaatagagaattcatt

SEQ ID NO: 2828575 - DNA, 25 bp, Homo sapien
tcactttgagatcaacccaacttaa

SEQ ID NO: 2828576 - DNA, 25 bp, Homo sapien
ttcccttttccttatgacaatagag

SEQ ID NO: 2828577 - DNA, 25 bp, Homo sapien
ggacatgtgccctgacaagtaaatg

SEQ ID NO: 2828578 - DNA, 25 bp, Homo sapien
gactaacttagtatgagagaacaga

SEQ ID NO: 2828579 - DNA, 25 bp, Homo sapien
tctaaccaataatcaggacatgtgc

SEQ ID NO: 2828580 - DNA, 25 bp, Homo sapien
tacttgaataaagggagcttgacta

SEQ ID NO: 2828581 - DNA, 25 bp, Homo sapien
ttcttctctttttttgagacgcagt

SEQ ID NO: 2828582 - DNA, 25 bp, Homo sapien
taacctctgcctcccaggttcaagc

SEQ ID NO: 2828583 - DNA, 25 bp, Homo sapien
gccatctcagctcaccataacctct

SEQ ID NO: 2828584 - DNA, 25 bp, Homo sapien
tgagccaccgcgtccggcccccatt

SEQ ID NO: 2828585 - DNA, 25 bp, Homo sapien
taggaaccgcccattaacactgttg

SEQ ID NO: 2828586 - DNA, 25 bp, Homo sapien
tcaagacgcacagatctcactttca

SEQ ID NO: 2828587 - DNA, 25 bp, Homo sapien
tctgtgataatctatcggcttcaag

SEQ ID NO: 2828588 - DNA, 25 bp, Homo sapien
tgttaatcgtatcatttctgagctg

SEQ ID NO: 2828589 - DNA, 25 bp, Homo sapien
aatctagagttcatagcggagcagg

SEQ ID NO: 2828590 - DNA, 25 bp, Homo sapien
ggatgcacgcgtccttctgaaggaa

SEQ ID NO: 2828591 - DNA, 25 bp, Homo sapien
aagcgtctagcggatttgcagtgcc

SEQ ID NO: 2828592 - DNA, 25 bp, Homo sapien
tctagaatgaatgagcttcgcgcgg

SEQ ID NO: 2828593 - DNA, 25 bp, Homo sapien
cttcgagaatatgaagcagcactga

SEQ ID NO: 2828594 - DNA, 25 bp, Homo sapien
tgaattcgaaagatgcagctcttgc

SEQ ID NO: 2828595 - DNA, 25 bp, Homo sapien
ggcgcccagatcaagcttcgagaat

SEQ ID NO: 2828596 - DNA, 25 bp, Homo sapien
aaggaatctgatcttaatggcgccc

SEQ ID NO: 2828597 - DNA, 25 bp, Homo sapien
gagtttcgcaaaagcatgtatgaag

SEQ ID NO: 2828598 - DNA, 25 bp, Homo sapien
tactgaggacttggagtttcgcaaa

SEQ ID NO: 2828599 - DNA, 25 bp, Homo sapien
gcagatgaaactttacttaaagtag

SEQ ID NO: 2828600 - DNA, 25 bp, Homo sapien
gatttggagaatcgttgtcagagcc

SEQ ID NO: 2828601 - DNA, 25 bp, Homo sapien
aaacgcgcttggtagaggtggattc

SEQ ID NO: 2828602 - DNA, 25 bp, Homo sapien
tggattctgggcgtcaaattgagta

SEQ ID NO: 2828603 - DNA, 25 bp, Homo sapien
ggcgcaagcccttcatgagatgaga

SEQ ID NO: 2828604 - DNA, 25 bp, Homo sapien
tgagtatgagtacaagctggcgcaa

SEQ ID NO: 2828605 - DNA, 25 bp, Homo sapien
atacttctactgtcaacagtgccag

SEQ ID NO: 2828606 - DNA, 25 bp, Homo sapien
gagatgaatacttctactgtcaaca

SEQ ID NO: 2828607 - DNA, 25 bp, Homo sapien
aaagccgcatgagaattgagagcct

SEQ ID NO: 2828608 - DNA, 25 bp, Homo sapien
cttgagaatgccagactgtcatcag

SEQ ID NO: 2828609 - DNA, 25 bp, Homo sapien
agagatggcggaaataagggatcaa

SEQ ID NO: 2828610 - DNA, 25 bp, Homo sapien
aaagttagccctggacatggaaatc

SEQ ID NO: 2828611 - DNA, 25 bp, Homo sapien
tcgtcgcatgctgacagacaaagag

SEQ ID NO: 2828612 - DNA, 25 bp, Homo sapien
caggaaactcttagaaggcgaagaa

SEQ ID NO: 2828613 - DNA, 25 bp, Homo sapien
tgtacgtacaactagaggaaagcgg

SEQ ID NO: 2828614 - DNA, 25 bp, Homo sapien
gtgtgacagtatcccgagcatcctc

SEQ ID NO: 2828615 - DNA, 25 bp, Homo sapien
gagcatcctcaagtcgtagtgtacg

SEQ ID NO: 2828616 - DNA, 25 bp, Homo sapien
caagcccttcttcccgtgtgacagt

SEQ ID NO: 2828617 - DNA, 25 bp, Homo sapien
tttccaccagcaggtattactttat

SEQ ID NO: 2828618 - DNA, 25 bp, Homo sapien
ttattcacagaattacatgaagacc

SEQ ID NO: 2828619 - DNA, 25 bp, Homo sapien
actattgtttttaggaggttgctca

SEQ ID NO: 2828620 - DNA, 25 bp, Homo sapien
aaacaaccatacctgaagaagagga

SEQ ID NO: 2828621 - DNA, 25 bp, Homo sapien
aaataaaccactgtgcgtcttggtg

SEQ ID NO: 2828622 - DNA, 25 bp, Homo sapien
gtaagcactctggatgatggattcc

SEQ ID NO: 2828623 - DNA, 25 bp, Homo sapien
gaagattgccccatctagactagca

SEQ ID NO: 2828624 - DNA, 25 bp, Homo sapien
taacctaatcaccatgtaagcactc

SEQ ID NO: 2828625 - DNA, 25 bp, Homo sapien
tactgtgttccgcagatttactgca

SEQ ID NO: 2828626 - DNA, 25 bp, Homo sapien
agatttactgcatactttggtgccg

SEQ ID NO: 2828627 - DNA, 25 bp, Homo sapien
gccgtcgcagacacaagataaatgc

SEQ ID NO: 2828628 - DNA, 25 bp, Homo sapien
cacaaagccccagaattactgtgtt

SEQ ID NO: 2828629 - DNA, 25 bp, Homo sapien
tctgggtgtataggtgcagatcaca

SEQ ID NO: 2828630 - DNA, 25 bp, Homo sapien
gccatctgggtgtataggtgcagat

SEQ ID NO: 2828631 - DNA, 25 bp, Homo sapien
catctgggtgtataggtgcagatca

SEQ ID NO: 2828632 - DNA, 25 bp, Homo sapien
ctgggtgtataggtgcagatcacag

SEQ ID NO: 2828633 - DNA, 25 bp, Homo sapien
gggtcccacacagacgggacgcggc

SEQ ID NO: 2828634 - DNA, 25 bp, Homo sapien
ccacacagacgggacgcggcttagg

SEQ ID NO: 2828635 - DNA, 25 bp, Homo sapien
acacagacgggacgcggcttaggag

SEQ ID NO: 2828636 - DNA, 25 bp, Homo sapien
gtcccacacagacgggacgcggctt

SEQ ID NO: 2828637 - DNA, 25 bp, Homo sapien
gtgctcagtgggggtgctttctgag

SEQ ID NO: 2828638 - DNA, 25 bp, Homo sapien
ctcagtgggggtgctttctgagcca

SEQ ID NO: 2828639 - DNA, 25 bp, Homo sapien
caaggtgctcagtgggggtgctttc

SEQ ID NO: 2828640 - DNA, 25 bp, Homo sapien
ggtgctcagtgggggtgctttctga

SEQ ID NO: 2828641 - DNA, 25 bp, Homo sapien
gaatacacgcggatgtttccacagc

SEQ ID NO: 2828642 - DNA, 25 bp, Homo sapien
aaaagtgtccactgtgaccagaggg

SEQ ID NO: 2828643 - DNA, 25 bp, Homo sapien
tggcttacagctggtggccctaatc

SEQ ID NO: 2828644 - DNA, 25 bp, Homo sapien
gacttatcttgtgacccacttggct

SEQ ID NO: 2828645 - DNA, 25 bp, Homo sapien
gcaactttcaagtacacagtacata

SEQ ID NO: 2828646 - DNA, 25 bp, Homo sapien
tacatatgcgctgtatgtcacataa

SEQ ID NO: 2828647 - DNA, 25 bp, Homo sapien
aagataatatttacatatgcgctgt

SEQ ID NO: 2828648 - DNA, 25 bp, Homo sapien
gcgctgtatgtcacataatattcta

SEQ ID NO: 2828649 - DNA, 25 bp, Homo sapien
cacaggaagaggactaggctagcaa

SEQ ID NO: 2828650 - DNA, 25 bp, Homo sapien
taagcattccggaagcagggctccg

SEQ ID NO: 2828651 - DNA, 25 bp, Homo sapien
gaattgaagtgtcccagtgaagcgt

SEQ ID NO: 2828652 - DNA, 25 bp, Homo sapien
aaatgagcacatatgcagggcaggc

SEQ ID NO: 2828653 - DNA, 25 bp, Homo sapien
gccacatctacctgtcaagctagaa

SEQ ID NO: 2828654 - DNA, 25 bp, Homo sapien
caatgggaatgctaattgacatgca

SEQ ID NO: 2828655 - DNA, 25 bp, Homo sapien
tgcaaaacaggtctagggttcctag

SEQ ID NO: 2828656 - DNA, 25 bp, Homo sapien
taagacatgcactaaatgagatggg

SEQ ID NO: 2828657 - DNA, 25 bp, Homo sapien
caaagaatccatacgagaaactgag

SEQ ID NO: 2828658 - DNA, 25 bp, Homo sapien
tcaggctaccaaagtaccccaaaga

SEQ ID NO: 2828659 - DNA, 25 bp, Homo sapien
tctccttgagtaatggacgcgaaag

SEQ ID NO: 2828660 - DNA, 25 bp, Homo sapien
ccaaacaagttgaaaggagcgagct

SEQ ID NO: 2828661 - DNA, 25 bp, Homo sapien
gaattgaattgcatccgtagcagga

SEQ ID NO: 2828662 - DNA, 25 bp, Homo sapien
gctcagtgcatgaccccagtgcaga

SEQ ID NO: 2828663 - DNA, 25 bp, Homo sapien
catacgttaaagaggtgttcagaaa

SEQ ID NO: 2828664 - DNA, 25 bp, Homo sapien
gcaggacaaccttcctcatacgtta

SEQ ID NO: 2828665 - DNA, 25 bp, Homo sapien
ctcttgaccgaatggaggcccagca

SEQ ID NO: 2828666 - DNA, 25 bp, Homo sapien
caaggacggctggttagaaggtaca

SEQ ID NO: 2828667 - DNA, 25 bp, Homo sapien
gacagactttggaatgaggagaatc

SEQ ID NO: 2828668 - DNA, 25 bp, Homo sapien
tggtccgacgccactcgttgtacaa

SEQ ID NO: 2828669 - DNA, 25 bp, Homo sapien
tgtgtcctgccaaacctctcatata

SEQ ID NO: 2828670 - DNA, 25 bp, Homo sapien
cctctcatataatacatgatggtag

SEQ ID NO: 2828671 - DNA, 25 bp, Homo sapien
catataatacatgatggtagaagca

SEQ ID NO: 2828672 - DNA, 25 bp, Homo sapien
tgtcctgccaaacctctcatataat

SEQ ID NO: 2828673 - DNA, 25 bp, Homo sapien
tctgggaacattacgggaaagctgg

SEQ ID NO: 2828674 - DNA, 25 bp, Homo sapien
tgccactcacgaatgtaggagaggc

SEQ ID NO: 2828675 - DNA, 25 bp, Homo sapien
gaagtagttatgagtgcaggccgca

SEQ ID NO: 2828676 - DNA, 25 bp, Homo sapien
ccatgatgctgagagctgtgcacac

SEQ ID NO: 2828677 - DNA, 25 bp, Homo sapien
gaccacaggtttgcattgccctggg

SEQ ID NO: 2828678 - DNA, 25 bp, Homo sapien
tggttaatcactacagtctgcaggc

SEQ ID NO: 2828679 - DNA, 25 bp, Homo sapien
tgccctgggttaatgctacttctct

SEQ ID NO: 2828680 - DNA, 25 bp, Homo sapien
agttgagcacaacgccaaggagacc

SEQ ID NO: 2828681 - DNA, 25 bp, Homo sapien
aatttggcaggatgggcattaccac

SEQ ID NO: 2828682 - DNA, 25 bp, Homo sapien
tgacttaaatctcataacaccaggg

SEQ ID NO: 2828683 - DNA, 25 bp, Homo sapien
cttacattggttttgaaagcccagc

SEQ ID NO: 2828684 - DNA, 25 bp, Homo sapien
ggatttcagaaaggccttacattgg

SEQ ID NO: 2828685 - DNA, 25 bp, Homo sapien
aacagagtccgcttctcatgctggg

SEQ ID NO: 2828686 - DNA, 25 bp, Homo sapien
tactaaagtgcaggtggtccacggc

SEQ ID NO: 2828687 - DNA, 25 bp, Homo sapien
cagtgagtgcaatcagtccgacggc

SEQ ID NO: 2828688 - DNA, 25 bp, Homo sapien
aagcacaccatgtcgccaaacagag

SEQ ID NO: 2828689 - DNA, 25 bp, Homo sapien
tatgctaccgatgtccacagaaaca

SEQ ID NO: 2828690 - DNA, 25 bp, Homo sapien
gaaacactgacctcattagctaaga

SEQ ID NO: 2828691 - DNA, 25 bp, Homo sapien
ttccattttggaacagtaggccctg

SEQ ID NO: 2828692 - DNA, 25 bp, Homo sapien
tgtggcccttgacattaccctatga

SEQ ID NO: 2828693 - DNA, 25 bp, Homo sapien
tgcacacggaaaacagacgacagag

SEQ ID NO: 2828694 - DNA, 25 bp, Homo sapien
tccagcagaagtacatgatcatggg

SEQ ID NO: 2828695 - DNA, 25 bp, Homo sapien
ctggagcaccagacaaaagatgaga

SEQ ID NO: 2828696 - DNA, 25 bp, Homo sapien
gaccactccgttggactgctgttgg

SEQ ID NO: 2828697 - DNA, 25 bp, Homo sapien
ctcccccagccttgctgtggccttg

SEQ ID NO: 2828698 - DNA, 25 bp, Homo sapien
cagccttgctgtggccttgcagttt

SEQ ID NO: 2828699 - DNA, 25 bp, Homo sapien
cccagccttgctgtggccttgcagt

SEQ ID NO: 2828700 - DNA, 25 bp, Homo sapien
ccttgctgtggccttgcagtttgat

SEQ ID NO: 2828701 - DNA, 25 bp, Homo sapien
tccatcacagtgtaaatctatccct

SEQ ID NO: 2828702 - DNA, 25 bp, Homo sapien
ggtgaggcacgccacagaaacatac

SEQ ID NO: 2828703 - DNA, 25 bp, Homo sapien
ttttacaagcaccaacataaccttc

SEQ ID NO: 2828704 - DNA, 25 bp, Homo sapien
tttatcccaaacaatctcacagcgt

SEQ ID NO: 2828705 - DNA, 25 bp, Homo sapien
ggcaaagcctgaagacctgacaggg

SEQ ID NO: 2828706 - DNA, 25 bp, Homo sapien
gacggcaaagcctgaagacctgaca

SEQ ID NO: 2828707 - DNA, 25 bp, Homo sapien
atgaagaatgaggaggacggcaaag

SEQ ID NO: 2828708 - DNA, 25 bp, Homo sapien
ggaggacggcaaagcctgaagacct

SEQ ID NO: 2828709 - DNA, 25 bp, Homo sapien
cacagggcaattcctgagagttaat

SEQ ID NO: 2828710 - DNA, 25 bp, Homo sapien
ccagggcttctgcaatttatgtctc

SEQ ID NO: 2828711 - DNA, 25 bp, Homo sapien
ccctcagcagggagcgttatgcata

SEQ ID NO: 2828712 - DNA, 25 bp, Homo sapien
aggtgccttgtacccaacacagggc

SEQ ID NO: 2828713 - DNA, 25 bp, Homo sapien
tcaagactggacgactgcaggatca

SEQ ID NO: 2828714 - DNA, 25 bp, Homo sapien
tgctggcacaaagtatggttccacg

SEQ ID NO: 2828715 - DNA, 25 bp, Homo sapien
gttccacgagtccacgtggaggcag

SEQ ID NO: 2828716 - DNA, 25 bp, Homo sapien
cgactgcaggatcaaggattgttgg

SEQ ID NO: 2828717 - DNA, 25 bp, Homo sapien
tccactaacggcctgggtttgcgct

SEQ ID NO: 2828718 - DNA, 25 bp, Homo sapien
ccctgtacattcacatggagagagc

SEQ ID NO: 2828719 - DNA, 25 bp, Homo sapien
gcagctccgatgaattgtccccaag

SEQ ID NO: 2828720 - DNA, 25 bp, Homo sapien
agatcctgcacatcggccggtcatt

SEQ ID NO: 2828721 - DNA, 25 bp, Homo sapien
ctgcaagagaaggaggggcacctgc

SEQ ID NO: 2828722 - DNA, 25 bp, Homo sapien
gagaaggaggggcacctgctggtca

SEQ ID NO: 2828723 - DNA, 25 bp, Homo sapien
gcaagagaaggaggggcacctgctg

SEQ ID NO: 2828724 - DNA, 25 bp, Homo sapien
aagagaaggaggggcacctgctggt

SEQ ID NO: 2828725 - DNA, 25 bp, Homo sapien
cttaatcctgttccaataggaccac

SEQ ID NO: 2828726 - DNA, 25 bp, Homo sapien
taatcctgttccaataggaccacct

SEQ ID NO: 2828727 - DNA, 25 bp, Homo sapien
tcctgttccaataggaccacctttg

SEQ ID NO: 2828728 - DNA, 25 bp, Homo sapien
tgttccaataggaccacctttgtta

SEQ ID NO: 2828729 - DNA, 25 bp, Homo sapien
tgagcactaattacattcccattag

SEQ ID NO: 2828730 - DNA, 25 bp, Homo sapien
gacacaaagacctgagcactaatta

SEQ ID NO: 2828731 - DNA, 25 bp, Homo sapien
ctgacacaaagacctgagcactaat

SEQ ID NO: 2828732 - DNA, 25 bp, Homo sapien
aaagacctgagcactaattacattc

SEQ ID NO: 2828733 - DNA, 25 bp, Homo sapien
gacatactgcggctgcccattcact

SEQ ID NO: 2828734 - DNA, 25 bp, Homo sapien
ggcaagagtccgcactactgttgac

SEQ ID NO: 2828735 - DNA, 25 bp, Homo sapien
ccgtcttcaccacgggtgcagctga

SEQ ID NO: 2828736 - DNA, 25 bp, Homo sapien
ggctgaaacttgcatgacatactgc

SEQ ID NO: 2828737 - DNA, 25 bp, Homo sapien
acagacagcaattactctgctaatg

SEQ ID NO: 2828738 - DNA, 25 bp, Homo sapien
ctctgctaatggcttccacattcat

SEQ ID NO: 2828739 - DNA, 25 bp, Homo sapien
tgctaatggcttccacattcataca

SEQ ID NO: 2828740 - DNA, 25 bp, Homo sapien
aacagacagcaattactctgctaat

SEQ ID NO: 2828741 - DNA, 25 bp, Homo sapien
tgttataaccagacagtgcactgca

SEQ ID NO: 2828742 - DNA, 25 bp, Homo sapien
gcatggctgatgaactgacttaaga

SEQ ID NO: 2828743 - DNA, 25 bp, Homo sapien
aggacacaaaggctctccaaggaga

SEQ ID NO: 2828744 - DNA, 25 bp, Homo sapien
tagggatgccgctctttgatagaac

SEQ ID NO: 2828745 - DNA, 25 bp, Homo sapien
taaatgacgaaacgagtggatacag

SEQ ID NO: 2828746 - DNA, 25 bp, Homo sapien
taccagacttgaaatcaggcactct

SEQ ID NO: 2828747 - DNA, 25 bp, Homo sapien
caggtcccgatttgctgtgtgaggc

SEQ ID NO: 2828748 - DNA, 25 bp, Homo sapien
aaatcttctcatcctgtctaccagg

SEQ ID NO: 2828749 - DNA, 25 bp, Homo sapien
gcaggtaggattagaagttcaagcc

SEQ ID NO: 2828750 - DNA, 25 bp, Homo sapien
gaacacataaaaagcgaggtctctg

SEQ ID NO: 2828751 - DNA, 25 bp, Homo sapien
tagaatttggtagaagaatgacaat

SEQ ID NO: 2828752 - DNA, 25 bp, Homo sapien
acaatttattctggttcaaagaagg

SEQ ID NO: 2828753 - DNA, 25 bp, Homo sapien
tgagccgtgatcgtgtcactgtact

SEQ ID NO: 2828754 - DNA, 25 bp, Homo sapien
ccagcctgggccatagagcgagatt

SEQ ID NO: 2828755 - DNA, 25 bp, Homo sapien
agccgtgatcgtgtcactgtactcc

SEQ ID NO: 2828756 - DNA, 25 bp, Homo sapien
agtgagccgtgatcgtgtcactgta

SEQ ID NO: 2828757 - DNA, 25 bp, Homo sapien
ctttacagcaagctgtgacagacat

SEQ ID NO: 2828758 - DNA, 25 bp, Homo sapien
ttttaaagcccattctttacagcaa

SEQ ID NO: 2828759 - DNA, 25 bp, Homo sapien
gatggtgctaccgtgatgctggaaa

SEQ ID NO: 2828760 - DNA, 25 bp, Homo sapien
gctggaaaggatgacttcaatatcc

SEQ ID NO: 2828761 - DNA, 25 bp, Homo sapien
ctccttggataggtagcatttgtcc

SEQ ID NO: 2828762 - DNA, 25 bp, Homo sapien
tctttgtgagtgtgcctttgtcggc

SEQ ID NO: 2828763 - DNA, 25 bp, Homo sapien
caatgttccaagaaatgttccggtg

SEQ ID NO: 2828764 - DNA, 25 bp, Homo sapien
taaatccgctcctctgtgtattgcc

SEQ ID NO: 2828765 - DNA, 25 bp, Homo sapien
tacatgcccagtttcgttcatccgg

SEQ ID NO: 2828766 - DNA, 25 bp, Homo sapien
taaagtcactttgttcgcccaacgc

SEQ ID NO: 2828767 - DNA, 25 bp, Homo sapien
ccattcaggtttacacagcaagaca

SEQ ID NO: 2828768 - DNA, 25 bp, Homo sapien
tctgtaccgcaacctaacgatttct

SEQ ID NO: 2828769 - DNA, 25 bp, Homo sapien
gagatcttatatttcccattcaggt

SEQ ID NO: 2828770 - DNA, 25 bp, Homo sapien
aagcttgaactaggtccaggcatgg

SEQ ID NO: 2828771 - DNA, 25 bp, Homo sapien
cagaggagacaagttgacaacggcc

SEQ ID NO: 2828772 - DNA, 25 bp, Homo sapien
aatccaaaaagggtgtcaggactgg

SEQ ID NO: 2828773 - DNA, 25 bp, Homo sapien
caggactgggaagtatatagaagac

SEQ ID NO: 2828774 - DNA, 25 bp, Homo sapien
tatagaagacagatcaagggtactg

SEQ ID NO: 2828775 - DNA, 25 bp, Homo sapien
ttggtattccgaccagcagcacttc

SEQ ID NO: 2828776 - DNA, 25 bp, Homo sapien
ttagttatagttccaccgaaggcac

SEQ ID NO: 2828777 - DNA, 25 bp, Homo sapien
gaaggcactcagttatgctctaaga

SEQ ID NO: 2828778 - DNA, 25 bp, Homo sapien
catacaacggtttgatccagcctgg

SEQ ID NO: 2828779 - DNA, 25 bp, Homo sapien
catcgcaatgtagtctgccctggta

SEQ ID NO: 2828780 - DNA, 25 bp, Homo sapien
gatctaataagaaattatgcctcat

SEQ ID NO: 2828781 - DNA, 25 bp, Homo sapien
cagtcactgagtcatttgagctcac

SEQ ID NO: 2828782 - DNA, 25 bp, Homo sapien
gccctggtattctttggatctaata

SEQ ID NO: 2828783 - DNA, 25 bp, Homo sapien
gaggtcaacgccaagttctgaaaag

SEQ ID NO: 2828784 - DNA, 25 bp, Homo sapien
taagtcttctgagcatatgggaggt

SEQ ID NO: 2828785 - DNA, 25 bp, Homo sapien
cagaggtctggtaagtcttctgagc

SEQ ID NO: 2828786 - DNA, 25 bp, Homo sapien
gagcatatgggaggtcaacgccaag

SEQ ID NO: 2828787 - DNA, 25 bp, Homo sapien
tgattctcgtgtgtagtctccagag

SEQ ID NO: 2828788 - DNA, 25 bp, Homo sapien
gtgcttattggtcatatgtatacct

SEQ ID NO: 2828789 - DNA, 25 bp, Homo sapien
gattctatccatcttagtggatgtg

SEQ ID NO: 2828790 - DNA, 25 bp, Homo sapien
tacaggtgtaccccagcaagcccag

SEQ ID NO: 2828791 - DNA, 25 bp, Homo sapien
cacagttctaacacaggtatttgga

SEQ ID NO: 2828792 - DNA, 25 bp, Homo sapien
tctatgtatagagccccacagttct

SEQ ID NO: 2828793 - DNA, 25 bp, Homo sapien
agacagctgggttgtccagagagct

SEQ ID NO: 2828794 - DNA, 25 bp, Homo sapien
aaatggtcagcttctagtatcagca

SEQ ID NO: 2828795 - DNA, 25 bp, Homo sapien
ttccaaaaaggtccagagcaatccg

SEQ ID NO: 2828796 - DNA, 25 bp, Homo sapien
tatcggtcccaggatggttgccaac

SEQ ID NO: 2828797 - DNA, 25 bp, Homo sapien
gacatcagctatgggttaggaatgc

SEQ ID NO: 2828798 - DNA, 25 bp, Homo sapien
gagcaatccgcatgtattctgtcac

SEQ ID NO: 2828799 - DNA, 25 bp, Homo sapien
cagaggagagttcagtcttgctgat

SEQ ID NO: 2828800 - DNA, 25 bp, Homo sapien
tgctgatgtcacatgaagcagaatg

SEQ ID NO: 2828801 - DNA, 25 bp, Homo sapien
gctgatgtcacatgaagcagaatga

SEQ ID NO: 2828802 - DNA, 25 bp, Homo sapien
cttgctgatgtcacatgaagcagaa

SEQ ID NO: 2828803 - DNA, 25 bp, Homo sapien
acatgaaaggtgttgatgccattca

SEQ ID NO: 2828804 - DNA, 25 bp, Homo sapien
ggtgtgccattcaacatgaaaggtg

SEQ ID NO: 2828805 - DNA, 25 bp, Homo sapien
cattcattaattgagggtcagattc

SEQ ID NO: 2828806 - DNA, 25 bp, Homo sapien
caggcctcgggtgtgccattcaaca

SEQ ID NO: 2828807 - DNA, 25 bp, Homo sapien
ctccatccacttccacccccaacag

SEQ ID NO: 2828808 - DNA, 25 bp, Homo sapien
cacccccaacaggtttcattttctg

SEQ ID NO: 2828809 - DNA, 25 bp, Homo sapien
cattttctgcagctgctgtcaagag

SEQ ID NO: 2828810 - DNA, 25 bp, Homo sapien
cacttccacccccaacaggtttcat

SEQ ID NO: 2828811 - DNA, 25 bp, Homo sapien
aaacacattctgtatcagcctgcag

SEQ ID NO: 2828812 - DNA, 25 bp, Homo sapien
gagttgtgactatcctgtgtccacg

SEQ ID NO: 2828813 - DNA, 25 bp, Homo sapien
agaagtatagcttccacctgtaggg

SEQ ID NO: 2828814 - DNA, 25 bp, Homo sapien
tccacgtttgcatgctaggttgcac

SEQ ID NO: 2828815 - DNA, 25 bp, Homo sapien
cccagtgtgtcctacttctgaattc

SEQ ID NO: 2828816 - DNA, 25 bp, Homo sapien
tattggaccaaaagagccctctgct

SEQ ID NO: 2828817 - DNA, 25 bp, Homo sapien
caaggctacacctaagtgagggtaa

SEQ ID NO: 2828818 - DNA, 25 bp, Homo sapien
taaagtgaggtgcccagaatgaaga

SEQ ID NO: 2828819 - DNA, 25 bp, Homo sapien
gtctgttggcaacccacctgaaggg

SEQ ID NO: 2828820 - DNA, 25 bp, Homo sapien
tctgctaatgccagatgccctggga

SEQ ID NO: 2828821 - DNA, 25 bp, Homo sapien
catggatgcacccaaagtgaatcaa

SEQ ID NO: 2828822 - DNA, 25 bp, Homo sapien
cttctaaatagcgagttgaggtcca

SEQ ID NO: 2828823 - DNA, 25 bp, Homo sapien
tatgtcctctatgggacacacctgg

SEQ ID NO: 2828824 - DNA, 25 bp, Homo sapien
tcatgcagctgaggcacatcttcat

SEQ ID NO: 2828825 - DNA, 25 bp, Homo sapien
cccagggaatgacatagagggatct

SEQ ID NO: 2828826 - DNA, 25 bp, Homo sapien
cagaactatctgaccctctactggg

SEQ ID NO: 2828827 - DNA, 25 bp, Homo sapien
atgacacaatttccttcaggagccc

SEQ ID NO: 2828828 - DNA, 25 bp, Homo sapien
gcatctgcagttgcacacatggcac

SEQ ID NO: 2828829 - DNA, 25 bp, Homo sapien
aatgacacaatttccttcaggagcc

SEQ ID NO: 2828830 - DNA, 25 bp, Homo sapien
catcctccaagacaattcctaggag

SEQ ID NO: 2828831 - DNA, 25 bp, Homo sapien
agcagggagagccccattgggccct

SEQ ID NO: 2828832 - DNA, 25 bp, Homo sapien
tccacctgctcacgtggcaggcagc

SEQ ID NO: 2828833 - DNA, 25 bp, Homo sapien
ctggtttacatccaccgatcctggg

SEQ ID NO: 2828834 - DNA, 25 bp, Homo sapien
gatgcctgctcttaatgccctgcta

SEQ ID NO: 2828835 - DNA, 25 bp, Homo sapien
gcaacatgttttgggtccgaggtaa

SEQ ID NO: 2828836 - DNA, 25 bp, Homo sapien
gaaagcttagcaccaaacctgaagg

SEQ ID NO: 2828837 - DNA, 25 bp, Homo sapien
catgctgctgaagttactgttgccc

SEQ ID NO: 2828838 - DNA, 25 bp, Homo sapien
tacaaggcaacactattcggccatt

SEQ ID NO: 2828839 - DNA, 25 bp, Homo sapien
catccttagcatagaggctttctca

SEQ ID NO: 2828840 - DNA, 25 bp, Homo sapien
tacaggaatggctaaacacagcatg

SEQ ID NO: 2828841 - DNA, 25 bp, Homo sapien
tcggccattccgaaatgcaagatta

SEQ ID NO: 2828842 - DNA, 25 bp, Homo sapien
gaactgataaagtactacatgtgac

SEQ ID NO: 2828843 - DNA, 25 bp, Homo sapien
tttgcagctggatttattttggagg

SEQ ID NO: 2828844 - DNA, 25 bp, Homo sapien
ttccaatacttttgcagctggattt

SEQ ID NO: 2828845 - DNA, 25 bp, Homo sapien
gagggaactgataaagtactacatg

SEQ ID NO: 2828846 - DNA, 25 bp, Homo sapien
tggttccgctgtccaaacatttact

SEQ ID NO: 2828847 - DNA, 25 bp, Homo sapien
tctaagcttcagattacctcagact

SEQ ID NO: 2828848 - DNA, 25 bp, Homo sapien
caaagatcatgaaacctggttccgc

SEQ ID NO: 2828849 - DNA, 25 bp, Homo sapien
cctagttccaacatgttatgaggac

SEQ ID NO: 2828850 - DNA, 25 bp, Homo sapien
ccatcttccctataccatgtctgaa

SEQ ID NO: 2828851 - DNA, 25 bp, Homo sapien
gcacagcagttcatgtctttccctg

SEQ ID NO: 2828852 - DNA, 25 bp, Homo sapien
cagtgacacccctggccttgtcaca

SEQ ID NO: 2828853 - DNA, 25 bp, Homo sapien
atcttccctataccatgtctgaacc

SEQ ID NO: 2828854 - DNA, 25 bp, Homo sapien
gccataacatggatggacagcagca

SEQ ID NO: 2828855 - DNA, 25 bp, Homo sapien
taacatggatggacagcagcaaatg

SEQ ID NO: 2828856 - DNA, 25 bp, Homo sapien
cttgagccataacatggatggacag

SEQ ID NO: 2828857 - DNA, 25 bp, Homo sapien
acagcagcaaatggctctgtcttga

SEQ ID NO: 2828858 - DNA, 25 bp, Homo sapien
tgcaagcatatctaacagtactggg

SEQ ID NO: 2828859 - DNA, 25 bp, Homo sapien
gttgatcatccaaggaaactcacct

SEQ ID NO: 2828860 - DNA, 25 bp, Homo sapien
gaacctgaccttgagagtatttttc

SEQ ID NO: 2828861 - DNA, 25 bp, Homo sapien
catgctctgcatgtgaatccattgc

SEQ ID NO: 2828862 - DNA, 25 bp, Homo sapien
caggaaaccggatctacatatataa

SEQ ID NO: 2828863 - DNA, 25 bp, Homo sapien
gggaaacccacaccatctgtgaaga

SEQ ID NO: 2828864 - DNA, 25 bp, Homo sapien
taggagggccagattatatgcaaac

SEQ ID NO: 2828865 - DNA, 25 bp, Homo sapien
acactctagagtaaagcacaccccg

SEQ ID NO: 2828866 - DNA, 25 bp, Homo sapien
catatgcctagcaggttagagtctc

SEQ ID NO: 2828867 - DNA, 25 bp, Homo sapien
ttaatgctgagtgaacagtcgcccc

SEQ ID NO: 2828868 - DNA, 25 bp, Homo sapien
aaaagagaacggcatcctgtgggct

SEQ ID NO: 2828869 - DNA, 25 bp, Homo sapien
cagtcgccccaggatattcagtaca

SEQ ID NO: 2828870 - DNA, 25 bp, Homo sapien
taggctacagaaagacgagccctcc

SEQ ID NO: 2828871 - DNA, 25 bp, Homo sapien
tccgttgagtataaaaggtgctgac

SEQ ID NO: 2828872 - DNA, 25 bp, Homo sapien
tagatacatccctcctgagttaggg

SEQ ID NO: 2828873 - DNA, 25 bp, Homo sapien
gacatccccgttattttaaagcaga

SEQ ID NO: 2828874 - DNA, 25 bp, Homo sapien
tactcttggtctggtagcactctcg

SEQ ID NO: 2828875 - DNA, 25 bp, Homo sapien
tgagccaatgtaccagtgtgcaact

SEQ ID NO: 2828876 - DNA, 25 bp, Homo sapien
tgttttcaagcctgttcatgagagc

SEQ ID NO: 2828877 - DNA, 25 bp, Homo sapien
gcactctcgagatagcaccctgtta

SEQ ID NO: 2828878 - DNA, 25 bp, Homo sapien
ctgaaagccacgagtatttgaaaat

SEQ ID NO: 2828879 - DNA, 25 bp, Homo sapien
gagcctgaaagccacgagtatttga

SEQ ID NO: 2828880 - DNA, 25 bp, Homo sapien
gcctgaaagccacgagtatttgaaa

SEQ ID NO: 2828881 - DNA, 25 bp, Homo sapien
ggagcctgaaagccacgagtatttg

SEQ ID NO: 2828882 - DNA, 25 bp, Homo sapien
gcatggagaacagaaccagttatct

SEQ ID NO: 2828883 - DNA, 25 bp, Homo sapien
ttagtagatagtgggcaagagatcc

SEQ ID NO: 2828884 - DNA, 25 bp, Homo sapien
ggtgagtcacttgtacttgctatag

SEQ ID NO: 2828885 - DNA, 25 bp, Homo sapien
cttgtgggcaatcatagggttagca

SEQ ID NO: 2828886 - DNA, 25 bp, Homo sapien
acagctgcaaatgtactttctcaca

SEQ ID NO: 2828887 - DNA, 25 bp, Homo sapien
gacagctgcaaatgtactttctcac

SEQ ID NO: 2828888 - DNA, 25 bp, Homo sapien
gctgcaaatgtactttctcacactc

SEQ ID NO: 2828889 - DNA, 25 bp, Homo sapien
aatgtctctcagctgacttggtcgc

SEQ ID NO: 2828890 - DNA, 25 bp, Homo sapien
attacagcttcaccagccaatccag

SEQ ID NO: 2828891 - DNA, 25 bp, Homo sapien
ctcagctgacttggtcgctggtatt

SEQ ID NO: 2828892 - DNA, 25 bp, Homo sapien
ccaatccagttgcattgcagtaatg

SEQ ID NO: 2828893 - DNA, 25 bp, Homo sapien
gaggagtgaagagaaaaacttacaa

SEQ ID NO: 2828894 - DNA, 25 bp, Homo sapien
cttacaaaaagtggatagtgaatta

SEQ ID NO: 2828895 - DNA, 25 bp, Homo sapien
gaactggaacttgacagaacaatga

SEQ ID NO: 2828896 - DNA, 25 bp, Homo sapien
catggtatgtactaatggggaactg

SEQ ID NO: 2828897 - DNA, 25 bp, Homo sapien
cttcagacattagcagcctccaggt

SEQ ID NO: 2828898 - DNA, 25 bp, Homo sapien
aacttcagacattagcagcctccag

SEQ ID NO: 2828899 - DNA, 25 bp, Homo sapien
aaaggttccctcaacaaatgtcaag

SEQ ID NO: 2828900 - DNA, 25 bp, Homo sapien
gcttccccttcgtgctgaacttcag

SEQ ID NO: 2828901 - DNA, 25 bp, Homo sapien
gaaccgcactaggtttcttgccagt

SEQ ID NO: 2828902 - DNA, 25 bp, Homo sapien
tttagaaccgcactaggtttcttgc

SEQ ID NO: 2828903 - DNA, 25 bp, Homo sapien
tagaaccgcactaggtttcttgcca

SEQ ID NO: 2828904 - DNA, 25 bp, Homo sapien
aaccgcactaggtttcttgccagta

SEQ ID NO: 2828905 - DNA, 25 bp, Homo sapien
caatgactgtcgtatattagaggat

SEQ ID NO: 2828906 - DNA, 25 bp, Homo sapien
ggaaagttagatgccagaagaatgc

SEQ ID NO: 2828907 - DNA, 25 bp, Homo sapien
aatcagtcccattgtatgatcaggg

SEQ ID NO: 2828908 - DNA, 25 bp, Homo sapien
gaagcttgcaatgacctatggccca

SEQ ID NO: 2828909 - DNA, 25 bp, Homo sapien
taattgggcagctcaaaatactcct

SEQ ID NO: 2828910 - DNA, 25 bp, Homo sapien
gggtaacttctgatagatcctttct

SEQ ID NO: 2828911 - DNA, 25 bp, Homo sapien
tatgccagtctgaaatgggagaaca

SEQ ID NO: 2828912 - DNA, 25 bp, Homo sapien
caggatacttctcacctctgaaaga

SEQ ID NO: 2828913 - DNA, 25 bp, Homo sapien
cctccccaagccgtggctataatta

SEQ ID NO: 2828914 - DNA, 25 bp, Homo sapien
tgttgcatggtgatgtgacaagcac

SEQ ID NO: 2828915 - DNA, 25 bp, Homo sapien
caagccgtggctataattatttcac

SEQ ID NO: 2828916 - DNA, 25 bp, Homo sapien
gccatactgcaaagctgtaaacccg

SEQ ID NO: 2828917 - DNA, 25 bp, Homo sapien
gtttctgctaagagttgccccctac

SEQ ID NO: 2828918 - DNA, 25 bp, Homo sapien
gaggcaggctttgtttgtagcatgt

SEQ ID NO: 2828919 - DNA, 25 bp, Homo sapien
atgaaaatagaacttgagaggcagg

SEQ ID NO: 2828920 - DNA, 25 bp, Homo sapien
gttgtttctgctaagagttgccccc

SEQ ID NO: 2828921 - DNA, 25 bp, Homo sapien
caccccagtggtcggactgaagtgt

SEQ ID NO: 2828922 - DNA, 25 bp, Homo sapien
ccccagtggtcggactgaagtgtac

SEQ ID NO: 2828923 - DNA, 25 bp, Homo sapien
cagtggtcggactgaagtgtacatg

SEQ ID NO: 2828924 - DNA, 25 bp, Homo sapien
cccagtggtcggactgaagtgtaca

SEQ ID NO: 2828925 - DNA, 25 bp, Homo sapien
ggtattgaactgaacgctcgtaaag

SEQ ID NO: 2828926 - DNA, 25 bp, Homo sapien
aacgctcgtaaagttcatggacata

SEQ ID NO: 2828927 - DNA, 25 bp, Homo sapien
tgtaaaacaggaacgcggattctgc

SEQ ID NO: 2828928 - DNA, 25 bp, Homo sapien
ttttaacagatgggccggctggcgg

SEQ ID NO: 2828929 - DNA, 25 bp, Homo sapien
atctctgtgacccaagggaagttca

SEQ ID NO: 2828930 - DNA, 25 bp, Homo sapien
tgacccaagggaagttcaaggctga

SEQ ID NO: 2828931 - DNA, 25 bp, Homo sapien
gcagacatgcttacgcatacacact

SEQ ID NO: 2828932 - DNA, 25 bp, Homo sapien
caggcagatgcagacatgcttacgc

SEQ ID NO: 2828933 - DNA, 25 bp, Homo sapien
catgcatgtagttggtctcagaaaa

SEQ ID NO: 2828934 - DNA, 25 bp, Homo sapien
acaatctaacccagaccgagtcaca

SEQ ID NO: 2828935 - DNA, 25 bp, Homo sapien
tgaattctgtttattccgcacataa

SEQ ID NO: 2828936 - DNA, 25 bp, Homo sapien
gagtcacaaacggagtgtcaggttt

SEQ ID NO: 2828937 - DNA, 25 bp, Homo sapien
atccagacgcggacgccgggtctta

SEQ ID NO: 2828938 - DNA, 25 bp, Homo sapien
tcagccttgagatccagacgcggac

SEQ ID NO: 2828939 - DNA, 25 bp, Homo sapien
tgagcgctcgctcagccttgagatc

SEQ ID NO: 2828940 - DNA, 25 bp, Homo sapien
cttgagcccgatgagcgctcgctca

SEQ ID NO: 2828941 - DNA, 25 bp, Homo sapien
cgctccatgtcgttgccgcagaggg

SEQ ID NO: 2828942 - DNA, 25 bp, Homo sapien
cgcacagcgcgggtaatttttcagg

SEQ ID NO: 2828943 - DNA, 25 bp, Homo sapien
cagcgctccatgtcgttgccgcaga

SEQ ID NO: 2828944 - DNA, 25 bp, Homo sapien
cacagcgcgggtaatttttcaggaa

SEQ ID NO: 2828945 - DNA, 25 bp, Homo sapien
gatattggcacggagtaaatcccgc

SEQ ID NO: 2828946 - DNA, 25 bp, Homo sapien
tttgacaagaagaagttcgggagtg

SEQ ID NO: 2828947 - DNA, 25 bp, Homo sapien
ccatgtcaattacgccaagttggtg

SEQ ID NO: 2828948 - DNA, 25 bp, Homo sapien
ttggtgcggactggaaccgcgtccc

SEQ ID NO: 2828949 - DNA, 25 bp, Homo sapien
gccgagcgccaggacgcgtcccgtc

SEQ ID NO: 2828950 - DNA, 25 bp, Homo sapien
tccccacagcggtcacgctcggacg

SEQ ID NO: 2828951 - DNA, 25 bp, Homo sapien
acgctcggacgaacggaccgccgag

SEQ ID NO: 2828952 - DNA, 25 bp, Homo sapien
acagcggtcacgctcggacgaacgg

SEQ ID NO: 2828953 - DNA, 25 bp, Homo sapien
gtcctcgccgagtcccgatagcaaa

SEQ ID NO: 2828954 - DNA, 25 bp, Homo sapien
ccctgctgcggttctaagtgccaag

SEQ ID NO: 2828955 - DNA, 25 bp, Homo sapien
cgatagcaaaccgacgtccctgctg

SEQ ID NO: 2828956 - DNA, 25 bp, Homo sapien
tggaccagggcacattggttccggc

SEQ ID NO: 2828957 - DNA, 25 bp, Homo sapien
gcgtcatcagcccatgactggcgga

SEQ ID NO: 2828958 - DNA, 25 bp, Homo sapien
aaagcagggctaagccgaccaggct

SEQ ID NO: 2828959 - DNA, 25 bp, Homo sapien
tgcgggactctctgcaatgggaccc

SEQ ID NO: 2828960 - DNA, 25 bp, Homo sapien
gaagttggttattgcgaagtgccgt

SEQ ID NO: 2828961 - DNA, 25 bp, Homo sapien
aagccaaccgcagcgcgggtcgaca

SEQ ID NO: 2828962 - DNA, 25 bp, Homo sapien
agcaagaagccaaccgcagcgcggg

SEQ ID NO: 2828963 - DNA, 25 bp, Homo sapien
gcagcgcgggtcgacacgccagtat

SEQ ID NO: 2828964 - DNA, 25 bp, Homo sapien
cgcagcgcgggtcgacacgccagta

SEQ ID NO: 2828965 - DNA, 25 bp, Homo sapien
tcctcccgacccagcgcgtcgcgga

SEQ ID NO: 2828966 - DNA, 25 bp, Homo sapien
gccaacaggaggcttgggcgctcga

SEQ ID NO: 2828967 - DNA, 25 bp, Homo sapien
agcgcgtcgcggacacagctggcgg

SEQ ID NO: 2828968 - DNA, 25 bp, Homo sapien
cttgggcgctcgacggcgccggaac

SEQ ID NO: 2828969 - DNA, 25 bp, Homo sapien
catcctctgcggtgacttctgctgt

SEQ ID NO: 2828970 - DNA, 25 bp, Homo sapien
caggcgggtcgctagaattatccat

SEQ ID NO: 2828971 - DNA, 25 bp, Homo sapien
catcttcgtggacaggaagccccag

SEQ ID NO: 2828972 - DNA, 25 bp, Homo sapien
tgtcttttgggtccgccaggattcc

SEQ ID NO: 2828973 - DNA, 25 bp, Homo sapien
aatatggccttgtgggcccttcccg

SEQ ID NO: 2828974 - DNA, 25 bp, Homo sapien
ctgggatggagacatcggacgagct

SEQ ID NO: 2828975 - DNA, 25 bp, Homo sapien
gagctcggagatcccgacctctcag

SEQ ID NO: 2828976 - DNA, 25 bp, Homo sapien
gggtcactcgcagccgaacagcctg

SEQ ID NO: 2828977 - DNA, 25 bp, Homo sapien
agtttctgagcccctaccctggctg

SEQ ID NO: 2828978 - DNA, 25 bp, Homo sapien
ccctaccctggctgcagcacgtgct

SEQ ID NO: 2828979 - DNA, 25 bp, Homo sapien
tgcagcacgtgctcgcacaggcgcg

SEQ ID NO: 2828980 - DNA, 25 bp, Homo sapien
ctgcagcacgtgctcgcacaggcgc

SEQ ID NO: 2828981 - DNA, 25 bp, Homo sapien
gtcattggtttattcttcacagcac

SEQ ID NO: 2828982 - DNA, 25 bp, Homo sapien
ttcttggcaaggcaccaaagtctgt

SEQ ID NO: 2828983 - DNA, 25 bp, Homo sapien
gcaaagtggtttgtccaagagcaaa

SEQ ID NO: 2828984 - DNA, 25 bp, Homo sapien
aggcaactgagactgaaacaggcaa

SEQ ID NO: 2828985 - DNA, 25 bp, Homo sapien
cttgcaagagcctgcagtctctgag

SEQ ID NO: 2828986 - DNA, 25 bp, Homo sapien
gaattatgcctcctagagtgctcag

SEQ ID NO: 2828987 - DNA, 25 bp, Homo sapien
agagggtgagagttccctaggattc

SEQ ID NO: 2828988 - DNA, 25 bp, Homo sapien
caataagcggttcatgaattatgcc

SEQ ID NO: 2828989 - DNA, 25 bp, Homo sapien
atgaaggtgggcaaatttaagatgt

SEQ ID NO: 2828990 - DNA, 25 bp, Homo sapien
catgaaggtgggcaaatttaagatg

SEQ ID NO: 2828991 - DNA, 25 bp, Homo sapien
acatgaaggtgggcaaatttaagat

SEQ ID NO: 2828992 - DNA, 25 bp, Homo sapien
tgaaggtgggcaaatttaagatgtt

SEQ ID NO: 2828993 - DNA, 25 bp, Homo sapien
gccagtcacaaacgtggtattccca

SEQ ID NO: 2828994 - DNA, 25 bp, Homo sapien
ggcacacccttggtttattactgtg

SEQ ID NO: 2828995 - DNA, 25 bp, Homo sapien
aaaacctgaagccacacatatgata

SEQ ID NO: 2828996 - DNA, 25 bp, Homo sapien
tactgggtaaatttactggcacacc

SEQ ID NO: 2828997 - DNA, 25 bp, Homo sapien
ggacagcacactatctgaaaccacg

SEQ ID NO: 2828998 - DNA, 25 bp, Homo sapien
tgaaaccacgtaagggcatgggtcc

SEQ ID NO: 2828999 - DNA, 25 bp, Homo sapien
tgtccagcaagcaaattgtagctct

SEQ ID NO: 2829000 - DNA, 25 bp, Homo sapien
tcttgctcagatagcttccctagaa

SEQ ID NO: 2829001 - DNA, 25 bp, Homo sapien
cccttatggtgaagcgatgtctcca

SEQ ID NO: 2829002 - DNA, 25 bp, Homo sapien
taggctccacaccaatgacaaagtc

SEQ ID NO: 2829003 - DNA, 25 bp, Homo sapien
tagcaagtgagtaggactaccaaac

SEQ ID NO: 2829004 - DNA, 25 bp, Homo sapien
aaagtcttaagtagggaattgcaca

SEQ ID NO: 2829005 - DNA, 25 bp, Homo sapien
aattcaggagtcttgctagtttgca

SEQ ID NO: 2829006 - DNA, 25 bp, Homo sapien
caactcaaaggctgtgaccaccctg

SEQ ID NO: 2829007 - DNA, 25 bp, Homo sapien
tccatgcagaacaaaaggctgatac

SEQ ID NO: 2829008 - DNA, 25 bp, Homo sapien
cattgataagaaccctaacttgaga

SEQ ID NO: 2829009 - DNA, 25 bp, Homo sapien
ggccggctacctcattctagtactg

SEQ ID NO: 2829010 - DNA, 25 bp, Homo sapien
tctggatgtcgtttcttagtgggtc

SEQ ID NO: 2829011 - DNA, 25 bp, Homo sapien
gccatttttgggtgctgagctaatc

SEQ ID NO: 2829012 - DNA, 25 bp, Homo sapien
tgagctaatcaattacctctggtct

SEQ ID NO: 2829013 - DNA, 25 bp, Homo sapien
cacccagtagtgtaagcaagaaaac

SEQ ID NO: 2829014 - DNA, 25 bp, Homo sapien
gacccatccagtcagtcatgaagtt

SEQ ID NO: 2829015 - DNA, 25 bp, Homo sapien
tcttagcttctggaggccattcaca

SEQ ID NO: 2829016 - DNA, 25 bp, Homo sapien
catttccaaccatactcagtgggct

SEQ ID NO: 2829017 - DNA, 25 bp, Homo sapien
tctcttgagtatggtagaatgtcac

SEQ ID NO: 2829018 - DNA, 25 bp, Homo sapien
tgactgtgatttgcataccgcttcc

SEQ ID NO: 2829019 - DNA, 25 bp, Homo sapien
ttcttaagctttttggaggcgtgcc

SEQ ID NO: 2829020 - DNA, 25 bp, Homo sapien
gcttccatagccagttggcccaggg

SEQ ID NO: 2829021 - DNA, 25 bp, Homo sapien
gatttggtcagccaacttaggtcat

SEQ ID NO: 2829022 - DNA, 25 bp, Homo sapien
tagatttggtcagccaacttaggtc

SEQ ID NO: 2829023 - DNA, 25 bp, Homo sapien
ctatagatttggtcagccaacttag

SEQ ID NO: 2829024 - DNA, 25 bp, Homo sapien
atttggtcagccaacttaggtcatg

SEQ ID NO: 2829025 - DNA, 25 bp, Homo sapien
gagcagcaatatgaagtcccaaact

SEQ ID NO: 2829026 - DNA, 25 bp, Homo sapien
gaaagaggcactattctagagcagc

SEQ ID NO: 2829027 - DNA, 25 bp, Homo sapien
ggacccatgggtttgctgaagatct

SEQ ID NO: 2829028 - DNA, 25 bp, Homo sapien
tgcaggattcctagtcacatgacca

SEQ ID NO: 2829029 - DNA, 25 bp, Homo sapien
tgaagagctataggttaaaaccaac

SEQ ID NO: 2829030 - DNA, 25 bp, Homo sapien
gggataccttcagaaagcatctttc

SEQ ID NO: 2829031 - DNA, 25 bp, Homo sapien
taggtatatgtaaccaatactctaa

SEQ ID NO: 2829032 - DNA, 25 bp, Homo sapien
tactctaaatatgggataccttcag

SEQ ID NO: 2829033 - DNA, 25 bp, Homo sapien
attctcaggcaatagaatgccccac

SEQ ID NO: 2829034 - DNA, 25 bp, Homo sapien
tgaacattctcaggcaatagaatgc

SEQ ID NO: 2829035 - DNA, 25 bp, Homo sapien
catatcaggactcttgaacattctc

SEQ ID NO: 2829036 - DNA, 25 bp, Homo sapien
aaaacaacaggtcatatcaggactc

SEQ ID NO: 2829037 - DNA, 25 bp, Homo sapien
taagttgtatcttttccccgactga

SEQ ID NO: 2829038 - DNA, 25 bp, Homo sapien
gaaggggagcgtcttctccttgttc

SEQ ID NO: 2829039 - DNA, 25 bp, Homo sapien
tcttttccccgactgagaagccatg

SEQ ID NO: 2829040 - DNA, 25 bp, Homo sapien
gtcataatcaaaacttaagacttgg

SEQ ID NO: 2829041 - DNA, 25 bp, Homo sapien
gaacaaacgtctctaggctttctgg

SEQ ID NO: 2829042 - DNA, 25 bp, Homo sapien
cctacaggactactagaagggactg

SEQ ID NO: 2829043 - DNA, 25 bp, Homo sapien
tctaggagaagaatcagcaacctgg

SEQ ID NO: 2829044 - DNA, 25 bp, Homo sapien
gaagggactgttgagctcagcatgc

SEQ ID NO: 2829045 - DNA, 25 bp, Homo sapien
tcagttcccagaggctacccagttt

SEQ ID NO: 2829046 - DNA, 25 bp, Homo sapien
ccttgaagctataggactgatgtcc

SEQ ID NO: 2829047 - DNA, 25 bp, Homo sapien
tatcttcctgctagtttttggccga

SEQ ID NO: 2829048 - DNA, 25 bp, Homo sapien
gttccactaggcaattcacatgatg

SEQ ID NO: 2829049 - DNA, 25 bp, Homo sapien
cactttatctactgagtggaagagc

SEQ ID NO: 2829050 - DNA, 25 bp, Homo sapien
aaaacatcgctttattgaccgtgca

SEQ ID NO: 2829051 - DNA, 25 bp, Homo sapien
aatggcattgcccagtgactgtgaa

SEQ ID NO: 2829052 - DNA, 25 bp, Homo sapien
aataagacaaatggacttctccctc

SEQ ID NO: 2829053 - DNA, 25 bp, Homo sapien
ccttagggctctgtacaagtgacaa

SEQ ID NO: 2829054 - DNA, 25 bp, Homo sapien
gaagatgctttatgggaagagaggg

SEQ ID NO: 2829055 - DNA, 25 bp, Homo sapien
aagtgacaaaatgagtatcaggcca

SEQ ID NO: 2829056 - DNA, 25 bp, Homo sapien
caggccatggtcatttccttaggaa

SEQ ID NO: 2829057 - DNA, 25 bp, Homo sapien
gtgatgttcacctcctgtaaaatga

SEQ ID NO: 2829058 - DNA, 25 bp, Homo sapien
taactttgactcagtaagagccaga

SEQ ID NO: 2829059 - DNA, 25 bp, Homo sapien
tcagcatcaggacagtactcagttc

SEQ ID NO: 2829060 - DNA, 25 bp, Homo sapien
gaaaaccagtactgctcagaggaaa

SEQ ID NO: 2829061 - DNA, 25 bp, Homo sapien
tgctgcacctgctagttaactttga

SEQ ID NO: 2829062 - DNA, 25 bp, Homo sapien
aggcttgagtacttccttggcttca

SEQ ID NO: 2829063 - DNA, 25 bp, Homo sapien
taaggcttgagtacttccttggctt

SEQ ID NO: 2829064 - DNA, 25 bp, Homo sapien
ataaggcttgagtacttccttggct

SEQ ID NO: 2829065 - DNA, 25 bp, Homo sapien
aaggcttgagtacttccttggcttc

SEQ ID NO: 2829066 - DNA, 25 bp, Homo sapien
caggcaaagagagaccttgtgctga

SEQ ID NO: 2829067 - DNA, 25 bp, Homo sapien
agagagaccttgtgctgagaaactc

SEQ ID NO: 2829068 - DNA, 25 bp, Homo sapien
aaagagagaccttgtgctgagaaac

SEQ ID NO: 2829069 - DNA, 25 bp, Homo sapien
gcaaagagagaccttgtgctgagaa

SEQ ID NO: 2829070 - DNA, 25 bp, Homo sapien
taaggttctgtatttggtaggctga

SEQ ID NO: 2829071 - DNA, 25 bp, Homo sapien
attcattaattcagcgttcaaggtg

SEQ ID NO: 2829072 - DNA, 25 bp, Homo sapien
accagagactcataggaacctaact

SEQ ID NO: 2829073 - DNA, 25 bp, Homo sapien
aggtagtaagcatacacctgatagg

SEQ ID NO: 2829074 - DNA, 25 bp, Homo sapien
tgctgctgttgtgctgatagaaaaa

SEQ ID NO: 2829075 - DNA, 25 bp, Homo sapien
tatctgggtagaaaactgagttgct

SEQ ID NO: 2829076 - DNA, 25 bp, Homo sapien
gggccagatgaccattaaatacatc

SEQ ID NO: 2829077 - DNA, 25 bp, Homo sapien
gaaaaattgaagagcaggtctgaag

SEQ ID NO: 2829078 - DNA, 25 bp, Homo sapien
tcttagaggcagagcaatttctcaa

SEQ ID NO: 2829079 - DNA, 25 bp, Homo sapien
aggcagagcaatttctcaagaagag

SEQ ID NO: 2829080 - DNA, 25 bp, Homo sapien
tagaggcagagcaatttctcaagaa

SEQ ID NO: 2829081 - DNA, 25 bp, Homo sapien
gtcttagaggcagagcaatttctca

SEQ ID NO: 2829082 - DNA, 25 bp, Homo sapien
tccacttctacttggatctctctgc

SEQ ID NO: 2829083 - DNA, 25 bp, Homo sapien
ttctaaacacagctttgtctacaca

SEQ ID NO: 2829084 - DNA, 25 bp, Homo sapien
cttctaaacacagctttgtctacac

SEQ ID NO: 2829085 - DNA, 25 bp, Homo sapien
tctaaacacagctttgtctacacag

SEQ ID NO: 2829086 - DNA, 25 bp, Homo sapien
ctaaacacagctttgtctacacagg

SEQ ID NO: 2829087 - DNA, 25 bp, Homo sapien
taagtaaagtcttcagtgatgctac

SEQ ID NO: 2829088 - DNA, 25 bp, Homo sapien
gcagagttgctattcattccagatt

SEQ ID NO: 2829089 - DNA, 25 bp, Homo sapien
cagcatgtggtcttggttgcaccca

SEQ ID NO: 2829090 - DNA, 25 bp, Homo sapien
tgttcaaccaatctacagagctaag

SEQ ID NO: 2829091 - DNA, 25 bp, Homo sapien
tgcaaacaagattaaaactgtattc

SEQ ID NO: 2829092 - DNA, 25 bp, Homo sapien
tgatttctccccttcgaaataattg

SEQ ID NO: 2829093 - DNA, 25 bp, Homo sapien
gaagtattccagctggcttttggct

SEQ ID NO: 2829094 - DNA, 25 bp, Homo sapien
ttttggcttcctctgatgtacagtc

SEQ ID NO: 2829095 - DNA, 25 bp, Homo sapien
gccaacagtccatctaaataaaacc

SEQ ID NO: 2829096 - DNA, 25 bp, Homo sapien
tatttacttcccagagcgctatcac

SEQ ID NO: 2829097 - DNA, 25 bp, Homo sapien
gactatccaaatgggcagcacgcgg

SEQ ID NO: 2829098 - DNA, 25 bp, Homo sapien
gcatcggcgaatcactggaggagta

SEQ ID NO: 2829099 - DNA, 25 bp, Homo sapien
tcatggatttatggctcccggttta

SEQ ID NO: 2829100 - DNA, 25 bp, Homo sapien
tgagcctcacgccgccaacgcctct

SEQ ID NO: 2829101 - DNA, 25 bp, Homo sapien
gcctctgcttccgccctgcgccggg

SEQ ID NO: 2829102 - DNA, 25 bp, Homo sapien
tcacgccgccaacgcctctgcttcc

SEQ ID NO: 2829103 - DNA, 25 bp, Homo sapien
ctgcgccgggcacttccgcccgcac

SEQ ID NO: 2829104 - DNA, 25 bp, Homo sapien
tggccgcgcctgaacctttactcgt

SEQ ID NO: 2829105 - DNA, 25 bp, Homo sapien
tatctcaggtggtgtcccgtctacg

SEQ ID NO: 2829106 - DNA, 25 bp, Homo sapien
tcgtgaagagtgacacacaaaccaa

SEQ ID NO: 2829107 - DNA, 25 bp, Homo sapien
tgccgctgggcgttctatctcaggt

SEQ ID NO: 2829108 - DNA, 25 bp, Homo sapien
cccagaaggtttgttggagcaagac

SEQ ID NO: 2829109 - DNA, 25 bp, Homo sapien
gagcaagaccattgttgtctactcc

SEQ ID NO: 2829110 - DNA, 25 bp, Homo sapien
gttgaagtgtcctgtggatttcccc

SEQ ID NO: 2829111 - DNA, 25 bp, Homo sapien
tctgtcttgaaaagattgtggggca

SEQ ID NO: 2829112 - DNA, 25 bp, Homo sapien
gggtcagagatgaagatctgaggat

SEQ ID NO: 2829113 - DNA, 25 bp, Homo sapien
gtcagagatgaagatctgaggatag

SEQ ID NO: 2829114 - DNA, 25 bp, Homo sapien
cattcattggcagcttgtgggtcag

SEQ ID NO: 2829115 - DNA, 25 bp, Homo sapien
ttcattggcagcttgtgggtcagag

SEQ ID NO: 2829116 - DNA, 25 bp, Homo sapien
ccagatgtttgtgttcggcattact

SEQ ID NO: 2829117 - DNA, 25 bp, Homo sapien
catcaagtctgagaactgtacaaaa

SEQ ID NO: 2829118 - DNA, 25 bp, Homo sapien
ttcgactctcagaacaaaggaaatg

SEQ ID NO: 2829119 - DNA, 25 bp, Homo sapien
tcaggttgctggttcgactctcaga

SEQ ID NO: 2829120 - DNA, 25 bp, Homo sapien
catctcagttgtgtcatgagcactg

SEQ ID NO: 2829121 - DNA, 25 bp, Homo sapien
atctcagttgtgtcatgagcactga

SEQ ID NO: 2829122 - DNA, 25 bp, Homo sapien
ctcagttgtgtcatgagcactgagg

SEQ ID NO: 2829123 - DNA, 25 bp, Homo sapien
tctcagttgtgtcatgagcactgag

SEQ ID NO: 2829124 - DNA, 25 bp, Homo sapien
ttcaacagctgctgagcctctctgt

SEQ ID NO: 2829125 - DNA, 25 bp, Homo sapien
cttcaacagctgctgagcctctctg

SEQ ID NO: 2829126 - DNA, 25 bp, Homo sapien
caacagctgctgagcctctctgttt

SEQ ID NO: 2829127 - DNA, 25 bp, Homo sapien
tcaacagctgctgagcctctctgtt

SEQ ID NO: 2829128 - DNA, 25 bp, Homo sapien
tccaaggtaggcagcacctcattat

SEQ ID NO: 2829129 - DNA, 25 bp, Homo sapien
aggaagacgcttccctccaaggtag

SEQ ID NO: 2829130 - DNA, 25 bp, Homo sapien
ggcagcacctcattatccagctcag

SEQ ID NO: 2829131 - DNA, 25 bp, Homo sapien
ctgtgggtgataaagcctaagtacc

SEQ ID NO: 2829132 - DNA, 25 bp, Homo sapien
cagcttgccatactgctcctatcag

SEQ ID NO: 2829133 - DNA, 25 bp, Homo sapien
tgccatactgctcctatcagcgcag

SEQ ID NO: 2829134 - DNA, 25 bp, Homo sapien
tttgcatgcagcttgccatactgct

SEQ ID NO: 2829135 - DNA, 25 bp, Homo sapien
ctgctcctatcagcgcagctgttgg

SEQ ID NO: 2829136 - DNA, 25 bp, Homo sapien
ttttcccagtctaaggaggctcctc

SEQ ID NO: 2829137 - DNA, 25 bp, Homo sapien
ttcccagtctaaggaggctcctcag

SEQ ID NO: 2829138 - DNA, 25 bp, Homo sapien
cccatgtggctgcatatgtctgagt

SEQ ID NO: 2829139 - DNA, 25 bp, Homo sapien
gctgcatatgtctgagtctcagtaa

SEQ ID NO: 2829140 - DNA, 25 bp, Homo sapien
catgaaaagtttaagagatgtctca

SEQ ID NO: 2829141 - DNA, 25 bp, Homo sapien
tccatatacatgaaaagtttaagag

SEQ ID NO: 2829142 - DNA, 25 bp, Homo sapien
cctccatatacatgaaaagtttaag

SEQ ID NO: 2829143 - DNA, 25 bp, Homo sapien
tacatgaaaagtttaagagatgtct

SEQ ID NO: 2829144 - DNA, 25 bp, Homo sapien
ggattgtgacatctatcaacttatg

SEQ ID NO: 2829145 - DNA, 25 bp, Homo sapien
tcaattccaatgacaataagtgggt

SEQ ID NO: 2829146 - DNA, 25 bp, Homo sapien
actctgaagttcctgcgtggaaatc

SEQ ID NO: 2829147 - DNA, 25 bp, Homo sapien
cctggtggtccgtgtctgaattcca

SEQ ID NO: 2829148 - DNA, 25 bp, Homo sapien
gaaggagagataggctctttcctcc

SEQ ID NO: 2829149 - DNA, 25 bp, Homo sapien
aggagagataggctctttcctccat

SEQ ID NO: 2829150 - DNA, 25 bp, Homo sapien
gaaggaccttgcaatactgcagcca

SEQ ID NO: 2829151 - DNA, 25 bp, Homo sapien
gaccatttacttgggtgactgtaca

SEQ ID NO: 2829152 - DNA, 25 bp, Homo sapien
taagaatagaacagcaggagcatga

SEQ ID NO: 2829153 - DNA, 25 bp, Homo sapien
caaaactagagctcactgactgaag

SEQ ID NO: 2829154 - DNA, 25 bp, Homo sapien
tggagtaactcccacatcggatcct

SEQ ID NO: 2829155 - DNA, 25 bp, Homo sapien
gaagggtggagattagtaccaccac

SEQ ID NO: 2829156 - DNA, 25 bp, Homo sapien
gataagtactatcatggtgggaaag

SEQ ID NO: 2829157 - DNA, 25 bp, Homo sapien
tggccaagagtgtaaatcaaaacta

SEQ ID NO: 2829158 - DNA, 25 bp, Homo sapien
cctctggttcctggccattggcatg

SEQ ID NO: 2829159 - DNA, 25 bp, Homo sapien
gccattggcatggacttggacctac

SEQ ID NO: 2829160 - DNA, 25 bp, Homo sapien
ggccattggcatggacttggaccta

SEQ ID NO: 2829161 - DNA, 25 bp, Homo sapien
tggccattggcatggacttggacct

SEQ ID NO: 2829162 - DNA, 25 bp, Homo sapien
cctgtgtgagatctgattgactgcc

SEQ ID NO: 2829163 - DNA, 25 bp, Homo sapien
tctgacgctggcatcctggataatg

SEQ ID NO: 2829164 - DNA, 25 bp, Homo sapien
tcttggctgttctcggattaccgct

SEQ ID NO: 2829165 - DNA, 25 bp, Homo sapien
cagtatctgcacattccaggcctgt

SEQ ID NO: 2829166 - DNA, 25 bp, Homo sapien
cactggctgcacaaggccagagagg

SEQ ID NO: 2829167 - DNA, 25 bp, Homo sapien
aaaaccaaggcaacaccccaagctg

SEQ ID NO: 2829168 - DNA, 25 bp, Homo sapien
agctgagtctctcctaggtgcaggg

SEQ ID NO: 2829169 - DNA, 25 bp, Homo sapien
ccaagctgtgaggagctgagtctct

SEQ ID NO: 2829170 - DNA, 25 bp, Homo sapien
taggtggcggctctctttaaaccag

SEQ ID NO: 2829171 - DNA, 25 bp, Homo sapien
ttaggtggcggctctctttaaacca

SEQ ID NO: 2829172 - DNA, 25 bp, Homo sapien
ggcatattgacggacccagagacct

SEQ ID NO: 2829173 - DNA, 25 bp, Homo sapien
catttgtctccggatctttacttaa

SEQ ID NO: 2829174 - DNA, 25 bp, Homo sapien
catgtctttgatgcaaatgatactg

SEQ ID NO: 2829175 - DNA, 25 bp, Homo sapien
tgtctggaacctcatcatttgtctc

SEQ ID NO: 2829176 - DNA, 25 bp, Homo sapien
cttaatgaaatatcatggaaaatta

SEQ ID NO: 2829177 - DNA, 25 bp, Homo sapien
tgaaatatcatggaaaattatatgg

SEQ ID NO: 2829178 - DNA, 25 bp, Homo sapien
aatgaaatatcatggaaaattatat

SEQ ID NO: 2829179 - DNA, 25 bp, Homo sapien
aaatatcatggaaaattatatggtc

SEQ ID NO: 2829180 - DNA, 25 bp, Homo sapien
cctaaaagcgtccacccgttcagtg

SEQ ID NO: 2829181 - DNA, 25 bp, Homo sapien
ctaaaagcgtccacccgttcagtgg

SEQ ID NO: 2829182 - DNA, 25 bp, Homo sapien
gttctacataatgcacatagtgaac

SEQ ID NO: 2829183 - DNA, 25 bp, Homo sapien
tcttccctctttccgctgtcatatt

SEQ ID NO: 2829184 - DNA, 25 bp, Homo sapien
ttcttccctctttccgctgtcatat

SEQ ID NO: 2829185 - DNA, 25 bp, Homo sapien
tccctctttccgctgtcatattgaa

SEQ ID NO: 2829186 - DNA, 25 bp, Homo sapien
ctctttccgctgtcatattgaaaac

SEQ ID NO: 2829187 - DNA, 25 bp, Homo sapien
ggtatcaaaatcctcatatgtttct

SEQ ID NO: 2829188 - DNA, 25 bp, Homo sapien
ctccattggaaccagggtcagtggg

SEQ ID NO: 2829189 - DNA, 25 bp, Homo sapien
gactgatgcctctccatgagtttcc

SEQ ID NO: 2829190 - DNA, 25 bp, Homo sapien
atgactgatgcctctccatgagttt

SEQ ID NO: 2829191 - DNA, 25 bp, Homo sapien
ctttaggtcccactcttctctgctg

SEQ ID NO: 2829192 - DNA, 25 bp, Homo sapien
ctcttctctgctggatcatgtccgc

SEQ ID NO: 2829193 - DNA, 25 bp, Homo sapien
ttaggtcccactcttctctgctgga

SEQ ID NO: 2829194 - DNA, 25 bp, Homo sapien
ttctctgctggatcatgtccgcctc

SEQ ID NO: 2829195 - DNA, 25 bp, Homo sapien
gggacattcagatcaggccacagaa

SEQ ID NO: 2829196 - DNA, 25 bp, Homo sapien
gacattcagatcaggccacagaaaa

SEQ ID NO: 2829197 - DNA, 25 bp, Homo sapien
tgggcaatggtctgctttgcttcat

SEQ ID NO: 2829198 - DNA, 25 bp, Homo sapien
agagggacattcagatcaggccaca

SEQ ID NO: 2829199 - DNA, 25 bp, Homo sapien
ctgttcagatcctttcctttctttt

SEQ ID NO: 2829200 - DNA, 25 bp, Homo sapien
tttagtgaagaaactgtacggtcta

SEQ ID NO: 2829201 - DNA, 25 bp, Homo sapien
aatacagcatagtgtctgcaacgta

SEQ ID NO: 2829202 - DNA, 25 bp, Homo sapien
gctggcccatcagatgactgggaga

SEQ ID NO: 2829203 - DNA, 25 bp, Homo sapien
cagctctcatctacagtcaatttag

SEQ ID NO: 2829204 - DNA, 25 bp, Homo sapien
gctgtcccgctgcacagcgcaggga

SEQ ID NO: 2829205 - DNA, 25 bp, Homo sapien
gcataaggacggatgtctctggttc

SEQ ID NO: 2829206 - DNA, 25 bp, Homo sapien
gagcagtctcccatgccaaaatgga

SEQ ID NO: 2829207 - DNA, 25 bp, Homo sapien
agctggcataaggacggatgtctct

SEQ ID NO: 2829208 - DNA, 25 bp, Homo sapien
gagggccacgtaaattccacataag

SEQ ID NO: 2829209 - DNA, 25 bp, Homo sapien
cttccatcagagggccacgtaaatt

SEQ ID NO: 2829210 - DNA, 25 bp, Homo sapien
cttatgtacatagcacaaagcaaac

SEQ ID NO: 2829211 - DNA, 25 bp, Homo sapien
tcttatgtacatagcacaaagcaaa

SEQ ID NO: 2829212 - DNA, 25 bp, Homo sapien
ccaggtaatcttcttcagatttagc

SEQ ID NO: 2829213 - DNA, 25 bp, Homo sapien
ttttgcatggacaataatcatgacc

SEQ ID NO: 2829214 - DNA, 25 bp, Homo sapien
tctgctgttcaaccagttttgcatg

SEQ ID NO: 2829215 - DNA, 25 bp, Homo sapien
gacaataatcatgaccaggtaatct

SEQ ID NO: 2829216 - DNA, 25 bp, Homo sapien
attggtgggagagctcacaaggtgg

SEQ ID NO: 2829217 - DNA, 25 bp, Homo sapien
atccaggaattggtgggagagctca

SEQ ID NO: 2829218 - DNA, 25 bp, Homo sapien
gaattggtgggagagctcacaaggt

SEQ ID NO: 2829219 - DNA, 25 bp, Homo sapien
ccaggaattggtgggagagctcaca

SEQ ID NO: 2829220 - DNA, 25 bp, Homo sapien
aagcagcctcttagtagaagtgaca

SEQ ID NO: 2829221 - DNA, 25 bp, Homo sapien
aaataggacacaaggctcctaagca

SEQ ID NO: 2829222 - DNA, 25 bp, Homo sapien
cctaagcagcctcttagtagaagtg

SEQ ID NO: 2829223 - DNA, 25 bp, Homo sapien
gacacaaggctcctaagcagcctct

SEQ ID NO: 2829224 - DNA, 25 bp, Homo sapien
acttgggctggtctaaacagagaca

SEQ ID NO: 2829225 - DNA, 25 bp, Homo sapien
caggaagcagtgtttgtgctaggtc

SEQ ID NO: 2829226 - DNA, 25 bp, Homo sapien
tcagtggtgcttcctatccactcag

SEQ ID NO: 2829227 - DNA, 25 bp, Homo sapien
ctgcatgttggaatgttggaaggaa

SEQ ID NO: 2829228 - DNA, 25 bp, Homo sapien
ttttcccctcagtggtgcttcctat

SEQ ID NO: 2829229 - DNA, 25 bp, Homo sapien
atcgagatgccgtcctccactctca

SEQ ID NO: 2829230 - DNA, 25 bp, Homo sapien
tcgagatgccgtcctccactctcat

SEQ ID NO: 2829231 - DNA, 25 bp, Homo sapien
cgagatgccgtcctccactctcatc

SEQ ID NO: 2829232 - DNA, 25 bp, Homo sapien
gagatgccgtcctccactctcatca

SEQ ID NO: 2829233 - DNA, 25 bp, Homo sapien
gtccctgtccaaagaccaacaacta

SEQ ID NO: 2829234 - DNA, 25 bp, Homo sapien
agtgctgccttctccgattgggggt

SEQ ID NO: 2829235 - DNA, 25 bp, Homo sapien
aactatcccgcctgtgatccaggct

SEQ ID NO: 2829236 - DNA, 25 bp, Homo sapien
tgatccaggctattcagtggctcgt

SEQ ID NO: 2829237 - DNA, 25 bp, Homo sapien
gtaacgacgtttggtgtctgcaaag

SEQ ID NO: 2829238 - DNA, 25 bp, Homo sapien
caaagtctagtctaaggtggtgatc

SEQ ID NO: 2829239 - DNA, 25 bp, Homo sapien
cctcaaagggtcaagggcctgatgt

SEQ ID NO: 2829240 - DNA, 25 bp, Homo sapien
catatattgttgctggtaacgacgt

SEQ ID NO: 2829241 - DNA, 25 bp, Homo sapien
tataattttgctgaacattgctaat

SEQ ID NO: 2829242 - DNA, 25 bp, Homo sapien
tgtcactctctgttacagttgtgtc

SEQ ID NO: 2829243 - DNA, 25 bp, Homo sapien
taggttgcccaagaaaagcatctgg

SEQ ID NO: 2829244 - DNA, 25 bp, Homo sapien
gccctgtgggacatatctaggttct

SEQ ID NO: 2829245 - DNA, 25 bp, Homo sapien
tcccttggtttaagactgtatgctg

SEQ ID NO: 2829246 - DNA, 25 bp, Homo sapien
ctttccagctctctaggcaatggtg

SEQ ID NO: 2829247 - DNA, 25 bp, Homo sapien
tccagctctctaggcaatggtggca

SEQ ID NO: 2829248 - DNA, 25 bp, Homo sapien
agctccctcccttggtttaagactg

SEQ ID NO: 2829249 - DNA, 25 bp, Homo sapien
aaagccgcaccaccagaggaaagtg

SEQ ID NO: 2829250 - DNA, 25 bp, Homo sapien
ccaaagccgcaccaccagaggaaag

SEQ ID NO: 2829251 - DNA, 25 bp, Homo sapien
gccgcaccaccagaggaaagtgatc

SEQ ID NO: 2829252 - DNA, 25 bp, Homo sapien
cgcaccaccagaggaaagtgatctc

SEQ ID NO: 2829253 - DNA, 25 bp, Homo sapien
tggaggataaatatctttgtctaaa

SEQ ID NO: 2829254 - DNA, 25 bp, Homo sapien
ccacactggctgatggaggataaat

SEQ ID NO: 2829255 - DNA, 25 bp, Homo sapien
gcctgctcccatgcacagcttctgt

SEQ ID NO: 2829256 - DNA, 25 bp, Homo sapien
tatctttgtctaaaggggagcagct

SEQ ID NO: 2829257 - DNA, 25 bp, Homo sapien
aggccgcctctgtgtgcttggccac

SEQ ID NO: 2829258 - DNA, 25 bp, Homo sapien
caggccgcctctgtgtgcttggcca

SEQ ID NO: 2829259 - DNA, 25 bp, Homo sapien
aaaggctaccagctcatctccactg

SEQ ID NO: 2829260 - DNA, 25 bp, Homo sapien
ttgattttgacccttacatccctga

SEQ ID NO: 2829261 - DNA, 25 bp, Homo sapien
gaacccgacagctgattgattttga

SEQ ID NO: 2829262 - DNA, 25 bp, Homo sapien
gctgtgggaggttcacaaaggctac

SEQ ID NO: 2829263 - DNA, 25 bp, Homo sapien
attaggggtaatattcatttgggct

SEQ ID NO: 2829264 - DNA, 25 bp, Homo sapien
taagactgaggttgcaggtattagg

SEQ ID NO: 2829265 - DNA, 25 bp, Homo sapien
cactgattaagactgaggttgcagg

SEQ ID NO: 2829266 - DNA, 25 bp, Homo sapien
attcatttgggctttctgggcagac

SEQ ID NO: 2829267 - DNA, 25 bp, Homo sapien
tgctttgatgacacccgtggcaact

SEQ ID NO: 2829268 - DNA, 25 bp, Homo sapien
ccactgctttgatgacacccgtggc

SEQ ID NO: 2829269 - DNA, 25 bp, Homo sapien
actgctttgatgacacccgtggcaa

SEQ ID NO: 2829270 - DNA, 25 bp, Homo sapien
gctttgatgacacccgtggcaactg

SEQ ID NO: 2829271 - DNA, 25 bp, Homo sapien
agaggtggatagtctaagaggctcc

SEQ ID NO: 2829272 - DNA, 25 bp, Homo sapien
ggtggatagtctaagaggctcccaa

SEQ ID NO: 2829273 - DNA, 25 bp, Homo sapien
tggatagtctaagaggctcccaaca

SEQ ID NO: 2829274 - DNA, 25 bp, Homo sapien
gatagtctaagaggctcccaacata

SEQ ID NO: 2829275 - DNA, 25 bp, Homo sapien
tggttttgattccaccagtcaactg

SEQ ID NO: 2829276 - DNA, 25 bp, Homo sapien
gactctggagtctaaatgtgcaacc

SEQ ID NO: 2829277 - DNA, 25 bp, Homo sapien
tccagttgtgagattgcagacatgt

SEQ ID NO: 2829278 - DNA, 25 bp, Homo sapien
gaggttgttactttgctggtgcagc

SEQ ID NO: 2829279 - DNA, 25 bp, Homo sapien
cactggtggcagtagcctcctggtt

SEQ ID NO: 2829280 - DNA, 25 bp, Homo sapien
tgtgtgagcagcgttgtgctgtgga

SEQ ID NO: 2829281 - DNA, 25 bp, Homo sapien
aggccataggttggaactggcactg

SEQ ID NO: 2829282 - DNA, 25 bp, Homo sapien
atggcagaggccataggttggaact

SEQ ID NO: 2829283 - DNA, 25 bp, Homo sapien
aaatgcagatgctttactttccctg

SEQ ID NO: 2829284 - DNA, 25 bp, Homo sapien
cagatgctttactttccctgtgcac

SEQ ID NO: 2829285 - DNA, 25 bp, Homo sapien
atgcagatgctttactttccctgtg

SEQ ID NO: 2829286 - DNA, 25 bp, Homo sapien
tgtctggaatgctctggaaaatgca

SEQ ID NO: 2829287 - DNA, 25 bp, Homo sapien
gccaactatggagtctatgcagccg

SEQ ID NO: 2829288 - DNA, 25 bp, Homo sapien
ctgggtgccaactatggagtctatg

SEQ ID NO: 2829289 - DNA, 25 bp, Homo sapien
caactatggagtctatgcagccgct

SEQ ID NO: 2829290 - DNA, 25 bp, Homo sapien
tggagtctatgcagccgctccactc

SEQ ID NO: 2829291 - DNA, 25 bp, Homo sapien
agctgggatcatcaggtggaacctg

SEQ ID NO: 2829292 - DNA, 25 bp, Homo sapien
gcggttaaatatggcttccctggag

SEQ ID NO: 2829293 - DNA, 25 bp, Homo sapien
cagcaagcggttaaatatggcttcc

SEQ ID NO: 2829294 - DNA, 25 bp, Homo sapien
aacctgagcgggcagcaagcggtta

SEQ ID NO: 2829295 - DNA, 25 bp, Homo sapien
agataaatgatgtcaagagtatggc

SEQ ID NO: 2829296 - DNA, 25 bp, Homo sapien
tgagtaaaccagcagtattttagct

SEQ ID NO: 2829297 - DNA, 25 bp, Homo sapien
aagagtatggcagcatgagtaaacc

SEQ ID NO: 2829298 - DNA, 25 bp, Homo sapien
tccaagaaggattcaagataaatga

SEQ ID NO: 2829299 - DNA, 25 bp, Homo sapien
caggcggcaccaaatggaggatttt

SEQ ID NO: 2829300 - DNA, 25 bp, Homo sapien
agacaggcggcaccaaatggaggat

SEQ ID NO: 2829301 - DNA, 25 bp, Homo sapien
tttacctattgaggaatttggagat

SEQ ID NO: 2829302 - DNA, 25 bp, Homo sapien
gcaccaaatggaggatttttaccta

SEQ ID NO: 2829303 - DNA, 25 bp, Homo sapien
cttcgatgcctcctgcaatcagtgt

SEQ ID NO: 2829304 - DNA, 25 bp, Homo sapien
tcgatgcctcctgcaatcagtgtgc

SEQ ID NO: 2829305 - DNA, 25 bp, Homo sapien
tttctgtctcaattgcttcgatgcc

SEQ ID NO: 2829306 - DNA, 25 bp, Homo sapien
attgcttcgatgcctcctgcaatca

SEQ ID NO: 2829307 - DNA, 25 bp, Homo sapien
gggtccagcttcaggaaaggcccca

SEQ ID NO: 2829308 - DNA, 25 bp, Homo sapien
atgcatcattatccctccccggctg

SEQ ID NO: 2829309 - DNA, 25 bp, Homo sapien
gcatcattatccctccccggctgag

SEQ ID NO: 2829310 - DNA, 25 bp, Homo sapien
tgaatgcatcattatccctccccgg

SEQ ID NO: 2829311 - DNA, 25 bp, Homo sapien
tcttcgctgtgatctctttccctgt

SEQ ID NO: 2829312 - DNA, 25 bp, Homo sapien
cttctgggtcttcgctgtgatctct

SEQ ID NO: 2829313 - DNA, 25 bp, Homo sapien
ttcttctgggtcttcgctgtgatct

SEQ ID NO: 2829314 - DNA, 25 bp, Homo sapien
tgggtcttcgctgtgatctctttcc

SEQ ID NO: 2829315 - DNA, 25 bp, Homo sapien
tggtgcactgggctccgtggttccc

SEQ ID NO: 2829316 - DNA, 25 bp, Homo sapien
ggctctgaggaagcggctctgagga

SEQ ID NO: 2829317 - DNA, 25 bp, Homo sapien
ctgtgtcccgcggtagcaccgagga

SEQ ID NO: 2829318 - DNA, 25 bp, Homo sapien
ccacagaaaccagctgttcctgttt

SEQ ID NO: 2829319 - DNA, 25 bp, Homo sapien
ctggcggagggaggagcgaggcctg

SEQ ID NO: 2829320 - DNA, 25 bp, Homo sapien
tggcggagggaggagcgaggcctgc

SEQ ID NO: 2829321 - DNA, 25 bp, Homo sapien
ctatgccctttacggcacctgttta

SEQ ID NO: 2829322 - DNA, 25 bp, Homo sapien
tgtatcagccggcatggcgtctctg

SEQ ID NO: 2829323 - DNA, 25 bp, Homo sapien
gcccgcaggctacgcgggaggtgga

SEQ ID NO: 2829324 - DNA, 25 bp, Homo sapien
tcacctcctccgggcgtgtgtatca

SEQ ID NO: 2829325 - DNA, 25 bp, Homo sapien
cgagaaacgtgtgcaaagtatgtgt

SEQ ID NO: 2829326 - DNA, 25 bp, Homo sapien
tcgggctggacctcgagaaacgtgt

SEQ ID NO: 2829327 - DNA, 25 bp, Homo sapien
cgtgtgcaaagtatgtgtttttgct

SEQ ID NO: 2829328 - DNA, 25 bp, Homo sapien
ggacctcgagaaacgtgtgcaaagt

SEQ ID NO: 2829329 - DNA, 25 bp, Homo sapien
catcaataagaaaaacgaaagagtt

SEQ ID NO: 2829330 - DNA, 25 bp, Homo sapien
agcaaaaatgggcaattgagataaa

SEQ ID NO: 2829331 - DNA, 25 bp, Homo sapien
aaatgaaaaagagaggcatcaataa

SEQ ID NO: 2829332 - DNA, 25 bp, Homo sapien
aaatgggcaattgagataaatgaaa

SEQ ID NO: 2829333 - DNA, 25 bp, Homo sapien
cgattgtaggattcaagcagaggaa

SEQ ID NO: 2829334 - DNA, 25 bp, Homo sapien
gaggcaggaaagcattgcgattgta

SEQ ID NO: 2829335 - DNA, 25 bp, Homo sapien
gaagaaaagcgaaatgtctggagca

SEQ ID NO: 2829336 - DNA, 25 bp, Homo sapien
ttctgtgagccttaatcccaccttg

SEQ ID NO: 2829337 - DNA, 25 bp, Homo sapien
tatggtggccctattgttgaagttg

SEQ ID NO: 2829338 - DNA, 25 bp, Homo sapien
tgtggttccttaaaacacaggagaa

SEQ ID NO: 2829339 - DNA, 25 bp, Homo sapien
ggagaattgctcctaatttttggct

SEQ ID NO: 2829340 - DNA, 25 bp, Homo sapien
gttgtcatgaactgttgaatggcag

SEQ ID NO: 2829341 - DNA, 25 bp, Homo sapien
ctttcttcacaatggaagccctgtt

SEQ ID NO: 2829342 - DNA, 25 bp, Homo sapien
ttcacaatggaagccctgttgccaa

SEQ ID NO: 2829343 - DNA, 25 bp, Homo sapien
tggaagccctgttgccaagggtaca

SEQ ID NO: 2829344 - DNA, 25 bp, Homo sapien
gccctgttgccaagggtacagcctc

SEQ ID NO: 2829345 - DNA, 25 bp, Homo sapien
taggctccgcagaatccttgtcttc

SEQ ID NO: 2829346 - DNA, 25 bp, Homo sapien
acaggccccttgatgattgtggaaa

SEQ ID NO: 2829347 - DNA, 25 bp, Homo sapien
gtcttcttccccaggttctgctaga

SEQ ID NO: 2829348 - DNA, 25 bp, Homo sapien
acacagttaggctccgcagaatcct

SEQ ID NO: 2829349 - DNA, 25 bp, Homo sapien
cctccagcataatccacttcaggaa

SEQ ID NO: 2829350 - DNA, 25 bp, Homo sapien
cagcataatccacttcaggaaccca

SEQ ID NO: 2829351 - DNA, 25 bp, Homo sapien
cttcctggtatagggcagtagggca

SEQ ID NO: 2829352 - DNA, 25 bp, Homo sapien
ataatccacttcaggaacccaagct

SEQ ID NO: 2829353 - DNA, 25 bp, Homo sapien
ttctaattgctgtaggatattcatc

SEQ ID NO: 2829354 - DNA, 25 bp, Homo sapien
taatatcttctaattgctgtaggat

SEQ ID NO: 2829355 - DNA, 25 bp, Homo sapien
tcttctaattgctgtaggatattca

SEQ ID NO: 2829356 - DNA, 25 bp, Homo sapien
taattgctgtaggatattcatcccc

SEQ ID NO: 2829357 - DNA, 25 bp, Homo sapien
caaatacaaagtttctttcatcaca

SEQ ID NO: 2829358 - DNA, 25 bp, Homo sapien
aacaaatacaaagtttctttcatca

SEQ ID NO: 2829359 - DNA, 25 bp, Homo sapien
aatacaaagtttctttcatcacagt

SEQ ID NO: 2829360 - DNA, 25 bp, Homo sapien
aaatacaaagtttctttcatcacag

SEQ ID NO: 2829361 - DNA, 25 bp, Homo sapien
aagaaaagtgagggatttattggct

SEQ ID NO: 2829362 - DNA, 25 bp, Homo sapien
ctgaaaagtatagtgataatcttac

SEQ ID NO: 2829363 - DNA, 25 bp, Homo sapien
aactgaaaagtatagtgataatctt

SEQ ID NO: 2829364 - DNA, 25 bp, Homo sapien
aaaactgaaaagtatagtgataatc

SEQ ID NO: 2829365 - DNA, 25 bp, Homo sapien
tcattgtcctggctcggtctaagta

SEQ ID NO: 2829366 - DNA, 25 bp, Homo sapien
cattgtcctggctcggtctaagtaa

SEQ ID NO: 2829367 - DNA, 25 bp, Homo sapien
aaaaaatttcaggattgaatctcat

SEQ ID NO: 2829368 - DNA, 25 bp, Homo sapien
caggattgaatctcattgtcctggc

SEQ ID NO: 2829369 - DNA, 25 bp, Homo sapien
ggcccatgctatgccttctactgct

SEQ ID NO: 2829370 - DNA, 25 bp, Homo sapien
ggaggcccatgctatgccttctact

SEQ ID NO: 2829371 - DNA, 25 bp, Homo sapien
ctttcgaattcgaagatcatgtgaa

SEQ ID NO: 2829372 - DNA, 25 bp, Homo sapien
ctgccttactgctgcctttcgaatt

SEQ ID NO: 2829373 - DNA, 25 bp, Homo sapien
tacatacacgcgtgcagtttgtgca

SEQ ID NO: 2829374 - DNA, 25 bp, Homo sapien
catacacgcgtgcagtttgtgcact

SEQ ID NO: 2829375 - DNA, 25 bp, Homo sapien
tattagcagggctactacatacacg

SEQ ID NO: 2829376 - DNA, 25 bp, Homo sapien
gggctactacatacacgcgtgcagt

SEQ ID NO: 2829377 - DNA, 25 bp, Homo sapien
cagattatatccactttttcactct

SEQ ID NO: 2829378 - DNA, 25 bp, Homo sapien
gattatatccactttttcactcttc

SEQ ID NO: 2829379 - DNA, 25 bp, Homo sapien
tcagattatatccactttttcactc

SEQ ID NO: 2829380 - DNA, 25 bp, Homo sapien
ttatatccactttttcactcttcct

SEQ ID NO: 2829381 - DNA, 25 bp, Homo sapien
gggaattgtgtgtacattgcttctc

SEQ ID NO: 2829382 - DNA, 25 bp, Homo sapien
tgtgcctgtggcagatgtctggaca

SEQ ID NO: 2829383 - DNA, 25 bp, Homo sapien
tggtgcacacgggatggccaactgt

SEQ ID NO: 2829384 - DNA, 25 bp, Homo sapien
aaggacaggcatctgcttagctgct

SEQ ID NO: 2829385 - DNA, 25 bp, Homo sapien
agtaggcctagcaggggccccagtt

SEQ ID NO: 2829386 - DNA, 25 bp, Homo sapien
gggcaggctcttcagtaggcctagc

SEQ ID NO: 2829387 - DNA, 25 bp, Homo sapien
aggctcttcagtaggcctagcaggg

SEQ ID NO: 2829388 - DNA, 25 bp, Homo sapien
caggctcttcagtaggcctagcagg

SEQ ID NO: 2829389 - DNA, 25 bp, Homo sapien
atgaccacaacccgagttcttctgc

SEQ ID NO: 2829390 - DNA, 25 bp, Homo sapien
gtgatgaccacaacccgagttcttc

SEQ ID NO: 2829391 - DNA, 25 bp, Homo sapien
ggtgatgaccacaacccgagttctt

SEQ ID NO: 2829392 - DNA, 25 bp, Homo sapien
tgatgaccacaacccgagttcttct

SEQ ID NO: 2829393 - DNA, 25 bp, Homo sapien
ggaattctgatgactcctcttgagt

SEQ ID NO: 2829394 - DNA, 25 bp, Homo sapien
agaagtcacccattgggttgatgac

SEQ ID NO: 2829395 - DNA, 25 bp, Homo sapien
atggcaggaattctgatgactcctc

SEQ ID NO: 2829396 - DNA, 25 bp, Homo sapien
aaagaagtcacccattgggttgatg

SEQ ID NO: 2829397 - DNA, 25 bp, Homo sapien
ggttgggaatcaggcgggcacccac

SEQ ID NO: 2829398 - DNA, 25 bp, Homo sapien
tcccagggactctgccgagggactt

SEQ ID NO: 2829399 - DNA, 25 bp, Homo sapien
cgagggacttgcacccaacgtgggt

SEQ ID NO: 2829400 - DNA, 25 bp, Homo sapien
cacccaacgtgggttgggaatcagg

SEQ ID NO: 2829401 - DNA, 25 bp, Homo sapien
ctgacaccccttcggtcaccccctg

SEQ ID NO: 2829402 - DNA, 25 bp, Homo sapien
tgctaacttcgcgaccaggcctttg

SEQ ID NO: 2829403 - DNA, 25 bp, Homo sapien
aacatttgctaacttcgcgaccagg

SEQ ID NO: 2829404 - DNA, 25 bp, Homo sapien
atttgctaacttcgcgaccaggcct

SEQ ID NO: 2829405 - DNA, 25 bp, Homo sapien
tacgcctgaaagaagactcccaaag

SEQ ID NO: 2829406 - DNA, 25 bp, Homo sapien
gaagatcctgcatgttgcgctaggg

SEQ ID NO: 2829407 - DNA, 25 bp, Homo sapien
tttcccggtgcgcaaaactgggcga

SEQ ID NO: 2829408 - DNA, 25 bp, Homo sapien
ttctgggacgctgcttggacgctaa

SEQ ID NO: 2829409 - DNA, 25 bp, Homo sapien
gattctcaagatctctggacctggg

SEQ ID NO: 2829410 - DNA, 25 bp, Homo sapien
gttgggcaaactcaactccggcggc

SEQ ID NO: 2829411 - DNA, 25 bp, Homo sapien
ggagaaaaggttgcgctgcgattct

SEQ ID NO: 2829412 - DNA, 25 bp, Homo sapien
cttggccggacgccggaaggcttct

SEQ ID NO: 2829413 - DNA, 25 bp, Homo sapien
taacacaacgctgttcatgtgacag

SEQ ID NO: 2829414 - DNA, 25 bp, Homo sapien
cggagtaaaggacccattgttcagg

SEQ ID NO: 2829415 - DNA, 25 bp, Homo sapien
ggacaatggctgtaacacaacgctg

SEQ ID NO: 2829416 - DNA, 25 bp, Homo sapien
tgttcatgtgacagccggagtaaag

SEQ ID NO: 2829417 - DNA, 25 bp, Homo sapien
agcagttgctcacagtccgttgtac

SEQ ID NO: 2829418 - DNA, 25 bp, Homo sapien
aagtctcgctgtcccctcatggagc

SEQ ID NO: 2829419 - DNA, 25 bp, Homo sapien
gatgacctgagcagaccctgtagga

SEQ ID NO: 2829420 - DNA, 25 bp, Homo sapien
ctttgttgggaagtgcagcgtgact

SEQ ID NO: 2829421 - DNA, 25 bp, Homo sapien
tttactttcggttccattgctggtg

SEQ ID NO: 2829422 - DNA, 25 bp, Homo sapien
tactttcggttccattgctggtggg

SEQ ID NO: 2829423 - DNA, 25 bp, Homo sapien
tcatgttttactttcggttccattg

SEQ ID NO: 2829424 - DNA, 25 bp, Homo sapien
tatttctgtaggttcggggagatgc

SEQ ID NO: 2829425 - DNA, 25 bp, Homo sapien
gaagatgaagtggaaagttggccaa

SEQ ID NO: 2829426 - DNA, 25 bp, Homo sapien
ggcggccctgagctgaagcgccacc

SEQ ID NO: 2829427 - DNA, 25 bp, Homo sapien
ttgaagatgaagtggaaagttggcc

SEQ ID NO: 2829428 - DNA, 25 bp, Homo sapien
gcggccctgagctgaagcgccacct

SEQ ID NO: 2829429 - DNA, 25 bp, Homo sapien
cagctgatatgaataccatgcctgc

SEQ ID NO: 2829430 - DNA, 25 bp, Homo sapien
taccatgcctgcaagaatcatcacc

SEQ ID NO: 2829431 - DNA, 25 bp, Homo sapien
caagaatcatcaccaatgcagccat

SEQ ID NO: 2829432 - DNA, 25 bp, Homo sapien
gatatgaataccatgcctgcaagaa

SEQ ID NO: 2829433 - DNA, 25 bp, Homo sapien
ccatgcttgtatctaatctgctcct

SEQ ID NO: 2829434 - DNA, 25 bp, Homo sapien
catggccattggcaaaacttctacc

SEQ ID NO: 2829435 - DNA, 25 bp, Homo sapien
acataattcactgcgagctcttcct

SEQ ID NO: 2829436 - DNA, 25 bp, Homo sapien
cctttgatgcatagattgagtagac

SEQ ID NO: 2829437 - DNA, 25 bp, Homo sapien
gagatacctgtggtcactctgcttc

SEQ ID NO: 2829438 - DNA, 25 bp, Homo sapien
ggttagtggttcagaactgagtcca

SEQ ID NO: 2829439 - DNA, 25 bp, Homo sapien
caaagcctttgacaatgtgggctta

SEQ ID NO: 2829440 - DNA, 25 bp, Homo sapien
ggcaatgcctgctgcgagatacctg

SEQ ID NO: 2829441 - DNA, 25 bp, Homo sapien
ccctcccttacatgtggatccctct

SEQ ID NO: 2829442 - DNA, 25 bp, Homo sapien
gccctcccttacatgtggatccctc

SEQ ID NO: 2829443 - DNA, 25 bp, Homo sapien
tgaactccctaaatgcacctggccc

SEQ ID NO: 2829444 - DNA, 25 bp, Homo sapien
actccctaaatgcacctggccctcc

SEQ ID NO: 2829445 - DNA, 25 bp, Homo sapien
caaactgatatgtgaatggcttgac

SEQ ID NO: 2829446 - DNA, 25 bp, Homo sapien
ggaatgatctctgatttctggcagt

SEQ ID NO: 2829447 - DNA, 25 bp, Homo sapien
tctcccatgagcattgtggatagag

SEQ ID NO: 2829448 - DNA, 25 bp, Homo sapien
gctcttggcagtccaaactgatatg

SEQ ID NO: 2829449 - DNA, 25 bp, Homo sapien
aactgttttccacataggcatttca

SEQ ID NO: 2829450 - DNA, 25 bp, Homo sapien
cacctgaatctgtctcttgaaactg

SEQ ID NO: 2829451 - DNA, 25 bp, Homo sapien
ctgttttccacataggcatttcaat

SEQ ID NO: 2829452 - DNA, 25 bp, Homo sapien
tgaaactgttttccacataggcatt

SEQ ID NO: 2829453 - DNA, 25 bp, Homo sapien
gctggccctggtacaagtaagattc

SEQ ID NO: 2829454 - DNA, 25 bp, Homo sapien
ctggccctggtacaagtaagattct

SEQ ID NO: 2829455 - DNA, 25 bp, Homo sapien
ctgccagtaatagctctttgtactt

SEQ ID NO: 2829456 - DNA, 25 bp, Homo sapien
ttagacattgggtgtacaattggca

SEQ ID NO: 2829457 - DNA, 25 bp, Homo sapien
cattgggtgtacaattggcaatgtc

SEQ ID NO: 2829458 - DNA, 25 bp, Homo sapien
cttgcccttaaatgacacgaaagcc

SEQ ID NO: 2829459 - DNA, 25 bp, Homo sapien
gagtctaatgtgtgaagattctcca

SEQ ID NO: 2829460 - DNA, 25 bp, Homo sapien
gagatggcacttgtataagcgagtc

SEQ ID NO: 2829461 - DNA, 25 bp, Homo sapien
gatggtggaaaagggcatgcagcag

SEQ ID NO: 2829462 - DNA, 25 bp, Homo sapien
catctttgacgaggtttgttgctgg

SEQ ID NO: 2829463 - DNA, 25 bp, Homo sapien
gctaatgacgcatccacattttgtt

SEQ ID NO: 2829464 - DNA, 25 bp, Homo sapien
cagactttggccaaatgttagctca

SEQ ID NO: 2829465 - DNA, 25 bp, Homo sapien
tttgttttctgctaatgacgcatcc

SEQ ID NO: 2829466 - DNA, 25 bp, Homo sapien
caaatgttagctcaaggttttcata

SEQ ID NO: 2829467 - DNA, 25 bp, Homo sapien
cttaccagttgattcaggtggaact

SEQ ID NO: 2829468 - DNA, 25 bp, Homo sapien
tcaggtggaactcaattggtgtcat

SEQ ID NO: 2829469 - DNA, 25 bp, Homo sapien
tgattcaggtggaactcaattggtg

SEQ ID NO: 2829470 - DNA, 25 bp, Homo sapien
ccagttgattcaggtggaactcaat

SEQ ID NO: 2829471 - DNA, 25 bp, Homo sapien
tccagtggtaagtttccacctgctg

SEQ ID NO: 2829472 - DNA, 25 bp, Homo sapien
catggtcgctgtattgctccaaaca

SEQ ID NO: 2829473 - DNA, 25 bp, Homo sapien
ccacctgctgttgtctgtctcggga

SEQ ID NO: 2829474 - DNA, 25 bp, Homo sapien
gcccactgtgctgataaatgtgtcc

SEQ ID NO: 2829475 - DNA, 25 bp, Homo sapien
tttaagcgaattctcccatcctggg

SEQ ID NO: 2829476 - DNA, 25 bp, Homo sapien
tggctttgccacgtatgtgacacaa

SEQ ID NO: 2829477 - DNA, 25 bp, Homo sapien
gcagtcaagctgaaggccatttgca

SEQ ID NO: 2829478 - DNA, 25 bp, Homo sapien
gatggtctgtcctgatgactgtgtc

SEQ ID NO: 2829479 - DNA, 25 bp, Homo sapien
tgaaaatatagatcccagatttgcc

SEQ ID NO: 2829480 - DNA, 25 bp, Homo sapien
tggcagcagaaatcccacattcaga

SEQ ID NO: 2829481 - DNA, 25 bp, Homo sapien
attgcttcctataatgcttccttgc

SEQ ID NO: 2829482 - DNA, 25 bp, Homo sapien
cactgactccttcatagattccaac

SEQ ID NO: 2829483 - DNA, 25 bp, Homo sapien
gatagtgatctgatcttcggatcct

SEQ ID NO: 2829484 - DNA, 25 bp, Homo sapien
aatgatagtgatctgatcttcggat

SEQ ID NO: 2829485 - DNA, 25 bp, Homo sapien
gattgaagctcccaactcatgaccg

SEQ ID NO: 2829486 - DNA, 25 bp, Homo sapien
tgaagctcccaactcatgaccgatt

SEQ ID NO: 2829487 - DNA, 25 bp, Homo sapien
cattccgatgggctccatgtatcta

SEQ ID NO: 2829488 - DNA, 25 bp, Homo sapien
catgtatctattgcagagttccaag

SEQ ID NO: 2829489 - DNA, 25 bp, Homo sapien
tgcagagttccaagtttcatcagga

SEQ ID NO: 2829490 - DNA, 25 bp, Homo sapien
ggaataatcatatccggagccaccc

SEQ ID NO: 2829491 - DNA, 25 bp, Homo sapien
gccatcgtaacagtctccaggtctc

SEQ ID NO: 2829492 - DNA, 25 bp, Homo sapien
aggtctccctcttctgtcataggcc

SEQ ID NO: 2829493 - DNA, 25 bp, Homo sapien
catgccatcgtaacagtctccaggt

SEQ ID NO: 2829494 - DNA, 25 bp, Homo sapien
gtctccctcttctgtcataggccat

SEQ ID NO: 2829495 - DNA, 25 bp, Homo sapien
gaggaagattccgagctctgctacc

SEQ ID NO: 2829496 - DNA, 25 bp, Homo sapien
ggaagattccgagctctgctaccac

SEQ ID NO: 2829497 - DNA, 25 bp, Homo sapien
aggtcttcccctctaggtggtggtg

SEQ ID NO: 2829498 - DNA, 25 bp, Homo sapien
gaagaggaagattccgagctctgct

SEQ ID NO: 2829499 - DNA, 25 bp, Homo sapien
tggtcctcgatgagggttcatatct

SEQ ID NO: 2829500 - DNA, 25 bp, Homo sapien
gccacctcgtccagtaagaggagga

SEQ ID NO: 2829501 - DNA, 25 bp, Homo sapien
ggccacctcgtccagtaagaggagg

SEQ ID NO: 2829502 - DNA, 25 bp, Homo sapien
ctcgatgagggttcatatctcttct

SEQ ID NO: 2829503 - DNA, 25 bp, Homo sapien
actgggcatccagggcggtcatcaa

SEQ ID NO: 2829504 - DNA, 25 bp, Homo sapien
tgggcatccagggcggtcatcaaac

SEQ ID NO: 2829505 - DNA, 25 bp, Homo sapien
cacattggaaatcccactgggcatc

SEQ ID NO: 2829506 - DNA, 25 bp, Homo sapien
ttccccacattggaaatcccactgg

SEQ ID NO: 2829507 - DNA, 25 bp, Homo sapien
taaaaccaccataatcataggtttc

SEQ ID NO: 2829508 - DNA, 25 bp, Homo sapien
aaaccaccataatcataggtttcat

SEQ ID NO: 2829509 - DNA, 25 bp, Homo sapien
aaaaccaccataatcataggtttca

SEQ ID NO: 2829510 - DNA, 25 bp, Homo sapien
ctgtcagtgggatgagaacagcatt

SEQ ID NO: 2829511 - DNA, 25 bp, Homo sapien
tgtcagtgggatgagaacagcattc

SEQ ID NO: 2829512 - DNA, 25 bp, Homo sapien
tgatggttgtttgagcgttctctca

SEQ ID NO: 2829513 - DNA, 25 bp, Homo sapien
atggttgtttgagcgttctctcaaa

SEQ ID NO: 2829514 - DNA, 25 bp, Homo sapien
ttgtttgagcgttctctcaaagttc

SEQ ID NO: 2829515 - DNA, 25 bp, Homo sapien
ggttgtttgagcgttctctcaaagt

SEQ ID NO: 2829516 - DNA, 25 bp, Homo sapien
cagcttcaactcgcactcaaagtct

SEQ ID NO: 2829517 - DNA, 25 bp, Homo sapien
gctggttggagtgagtaatggcaac

SEQ ID NO: 2829518 - DNA, 25 bp, Homo sapien
ggctggttggagtgagtaatggcaa

SEQ ID NO: 2829519 - DNA, 25 bp, Homo sapien
taactgccccagaattcttgttctg

SEQ ID NO: 2829520 - DNA, 25 bp, Homo sapien
acactggcactgtagtctatacagg

SEQ ID NO: 2829521 - DNA, 25 bp, Homo sapien
cactgtagtctatacagggagcctt

SEQ ID NO: 2829522 - DNA, 25 bp, Homo sapien
tctccaataactgccccagaattct

SEQ ID NO: 2829523 - DNA, 25 bp, Homo sapien
tgggacacaggctgagtttgctctt

SEQ ID NO: 2829524 - DNA, 25 bp, Homo sapien
gtgggacacaggctgagtttgctct

SEQ ID NO: 2829525 - DNA, 25 bp, Homo sapien
agtgggacacaggctgagtttgctc

SEQ ID NO: 2829526 - DNA, 25 bp, Homo sapien
tggttgagtgctgaatgtgggtgtg

SEQ ID NO: 2829527 - DNA, 25 bp, Homo sapien
ggttgagtgctgaatgtgggtgtgg

SEQ ID NO: 2829528 - DNA, 25 bp, Homo sapien
ttatcctcggtgtggttgagtgctg

SEQ ID NO: 2829529 - DNA, 25 bp, Homo sapien
cagaccccgagggacggtgtccctg

SEQ ID NO: 2829530 - DNA, 25 bp, Homo sapien
aggtgagcgccaggtggctccgagg

SEQ ID NO: 2829531 - DNA, 25 bp, Homo sapien
gcatggcttgcaggcgccagagcca

SEQ ID NO: 2829532 - DNA, 25 bp, Homo sapien
gacgccgatgtcgtttgcgagcccc

SEQ ID NO: 2829533 - DNA, 25 bp, Homo sapien
ctttaggggagactggcgggagcgc

SEQ ID NO: 2829534 - DNA, 25 bp, Homo sapien
ggcgctgactttaggggagactggc

SEQ ID NO: 2829535 - DNA, 25 bp, Homo sapien
agggcgctgactttaggggagactg

SEQ ID NO: 2829536 - DNA, 25 bp, Homo sapien
ctgactttaggggagactggcggga

SEQ ID NO: 2829537 - DNA, 25 bp, Homo sapien
ccggccctgtctggcctggagacgt

SEQ ID NO: 2829538 - DNA, 25 bp, Homo sapien
ccctgtctggcctggagacgtggca

SEQ ID NO: 2829539 - DNA, 25 bp, Homo sapien
ctgtctggcctggagacgtggcaga

SEQ ID NO: 2829540 - DNA, 25 bp, Homo sapien
gtctggcctggagacgtggcagagc

SEQ ID NO: 2829541 - DNA, 25 bp, Homo sapien
tgtctcctgaaacaggatttcggcc

SEQ ID NO: 2829542 - DNA, 25 bp, Homo sapien
gaaacaggatttcggccgctctggc

SEQ ID NO: 2829543 - DNA, 25 bp, Homo sapien
tcctgaaacaggatttcggccgctc

SEQ ID NO: 2829544 - DNA, 25 bp, Homo sapien
ctgaaacaggatttcggccgctctg

SEQ ID NO: 2829545 - DNA, 25 bp, Homo sapien
ggtctagccggactgagaactcagt

SEQ ID NO: 2829546 - DNA, 25 bp, Homo sapien
gacttgagccctaaaacagttacca

SEQ ID NO: 2829547 - DNA, 25 bp, Homo sapien
tacttttcgtgacaagacttgagcc

SEQ ID NO: 2829548 - DNA, 25 bp, Homo sapien
aaattggaacaacagggtctagccg

SEQ ID NO: 2829549 - DNA, 25 bp, Homo sapien
ttgttaatgttagggattctcttac

SEQ ID NO: 2829550 - DNA, 25 bp, Homo sapien
agggattctcttacaataggacttc

SEQ ID NO: 2829551 - DNA, 25 bp, Homo sapien
gccattacggcagttttcatataaa

SEQ ID NO: 2829552 - DNA, 25 bp, Homo sapien
gactttgtattcattgtacagtttc

SEQ ID NO: 2829553 - DNA, 25 bp, Homo sapien
cttgaatgccttacagttgtaggat

SEQ ID NO: 2829554 - DNA, 25 bp, Homo sapien
gccttacagttgtaggatatgataa

SEQ ID NO: 2829555 - DNA, 25 bp, Homo sapien
tctcttcatagattttagcctgtaa

SEQ ID NO: 2829556 - DNA, 25 bp, Homo sapien
aaaagacagttatgctaccctcagc

SEQ ID NO: 2829557 - DNA, 25 bp, Homo sapien
cttatttggtttgccttaagcatta

SEQ ID NO: 2829558 - DNA, 25 bp, Homo sapien
tataatactgttcagtacttccaag

SEQ ID NO: 2829559 - DNA, 25 bp, Homo sapien
actgtatttctatttcgtggaagcc

SEQ ID NO: 2829560 - DNA, 25 bp, Homo sapien
tattgcttgtgggttagtatgtctc

SEQ ID NO: 2829561 - DNA, 25 bp, Homo sapien
tgcccctggtgacctggtaagcctc

SEQ ID NO: 2829562 - DNA, 25 bp, Homo sapien
gagaaatacatgaactgctctggcc

SEQ ID NO: 2829563 - DNA, 25 bp, Homo sapien
tcctagaatccccaaagagcagtgg

SEQ ID NO: 2829564 - DNA, 25 bp, Homo sapien
ttttgaaaagcagcggagcatgact

SEQ ID NO: 2829565 - DNA, 25 bp, Homo sapien
cagattattcaattcgggatcctcc

SEQ ID NO: 2829566 - DNA, 25 bp, Homo sapien
gcagtgctagtaatttcctcgtaat

SEQ ID NO: 2829567 - DNA, 25 bp, Homo sapien
gagacaaccctagacctaaactgtg

SEQ ID NO: 2829568 - DNA, 25 bp, Homo sapien
caacctcagttgacaaggtgctcag

SEQ ID NO: 2829569 - DNA, 25 bp, Homo sapien
cttggccccagtagatatataggag

SEQ ID NO: 2829570 - DNA, 25 bp, Homo sapien
tattttttcagctgacttggcccca

SEQ ID NO: 2829571 - DNA, 25 bp, Homo sapien
tctgtttcagaacaccccatttggg

SEQ ID NO: 2829572 - DNA, 25 bp, Homo sapien
tctaaaagggcggaggcaagtattc

SEQ ID NO: 2829573 - DNA, 25 bp, Homo sapien
accttatgaggtctagcggatgtgg

SEQ ID NO: 2829574 - DNA, 25 bp, Homo sapien
gagatgcctgaactggaccttatga

SEQ ID NO: 2829575 - DNA, 25 bp, Homo sapien
taaagattgcagttatgggcatagt

SEQ ID NO: 2829576 - DNA, 25 bp, Homo sapien
gtatggactattgccaacaggaaag

SEQ ID NO: 2829577 - DNA, 25 bp, Homo sapien
gtcatgcttgtaagcacatgtgggt

SEQ ID NO: 2829578 - DNA, 25 bp, Homo sapien
ggagtccatcagtcatgcttgtaag

SEQ ID NO: 2829579 - DNA, 25 bp, Homo sapien
gtaagcacatgtgggttagggttaa

SEQ ID NO: 2829580 - DNA, 25 bp, Homo sapien
gtgggagtccatcagtcatgcttgt

SEQ ID NO: 2829581 - DNA, 25 bp, Homo sapien
taggtccctgtgctaatgttatgac

SEQ ID NO: 2829582 - DNA, 25 bp, Homo sapien
tatatctggtgcacggtctaggtcc

SEQ ID NO: 2829583 - DNA, 25 bp, Homo sapien
ctgctgcttgggtctgtggatctga

SEQ ID NO: 2829584 - DNA, 25 bp, Homo sapien
tgttatgacgattaaagagggctgg

SEQ ID NO: 2829585 - DNA, 25 bp, Homo sapien
gatggacggccactccttcagtgtg

SEQ ID NO: 2829586 - DNA, 25 bp, Homo sapien
gatgtgactttgctgggaactgccg

SEQ ID NO: 2829587 - DNA, 25 bp, Homo sapien
tgcacttgcccaagatacaggcttg

SEQ ID NO: 2829588 - DNA, 25 bp, Homo sapien
aagagctcctgatgatgaagtgcca

SEQ ID NO: 2829589 - DNA, 25 bp, Homo sapien
tggcaaaatgagttccatggttctg

SEQ ID NO: 2829590 - DNA, 25 bp, Homo sapien
ggcaaaatgagttccatggttctga

SEQ ID NO: 2829591 - DNA, 25 bp, Homo sapien
ctggcaaaatgagttccatggttct

SEQ ID NO: 2829592 - DNA, 25 bp, Homo sapien
taaatccctccaagcgctgttcttc

SEQ ID NO: 2829593 - DNA, 25 bp, Homo sapien
tcaccaaagcgtaaatccctccaag

SEQ ID NO: 2829594 - DNA, 25 bp, Homo sapien
ccagcatccctggttatcaccaaag

SEQ ID NO: 2829595 - DNA, 25 bp, Homo sapien
ttcctccatccgttgcttggctcat

SEQ ID NO: 2829596 - DNA, 25 bp, Homo sapien
cagatgccacattctgtgctgatcc

SEQ ID NO: 2829597 - DNA, 25 bp, Homo sapien
agatgccacattctgtgctgatcct

SEQ ID NO: 2829598 - DNA, 25 bp, Homo sapien
tcagatgccacattctgtgctgatc

SEQ ID NO: 2829599 - DNA, 25 bp, Homo sapien
cttctggaatgaagtgagtttgtaa

SEQ ID NO: 2829600 - DNA, 25 bp, Homo sapien
ctggaatgaagtgagtttgtaatct

SEQ ID NO: 2829601 - DNA, 25 bp, Homo sapien
tctggaatgaagtgagtttgtaatc

SEQ ID NO: 2829602 - DNA, 25 bp, Homo sapien
gcttctggaatgaagtgagtttgta

SEQ ID NO: 2829603 - DNA, 25 bp, Homo sapien
tggtcagtgaggatggtcactgtca

SEQ ID NO: 2829604 - DNA, 25 bp, Homo sapien
gtcagtgaggatggtcactgtcaca

SEQ ID NO: 2829605 - DNA, 25 bp, Homo sapien
ttatggctgctcttggtcagtgagg

SEQ ID NO: 2829606 - DNA, 25 bp, Homo sapien
cagtgaggatggtcactgtcacatt

SEQ ID NO: 2829607 - DNA, 25 bp, Homo sapien
ggtaatggccggttgctcacaagag

SEQ ID NO: 2829608 - DNA, 25 bp, Homo sapien
gggtttccctcttagaagatgagct

SEQ ID NO: 2829609 - DNA, 25 bp, Homo sapien
tcctagagcctttgggtaatggccg

SEQ ID NO: 2829610 - DNA, 25 bp, Homo sapien
ccaggattgtggtccgttgtgagca

SEQ ID NO: 2829611 - DNA, 25 bp, Homo sapien
agtacaggtgatgtctctggagatg

SEQ ID NO: 2829612 - DNA, 25 bp, Homo sapien
agtgctgccaccgagtacaggtgat

SEQ ID NO: 2829613 - DNA, 25 bp, Homo sapien
gccaccgagtacaggtgatgtctct

SEQ ID NO: 2829614 - DNA, 25 bp, Homo sapien
ccatccttggtgaagggaaacaaag

SEQ ID NO: 2829615 - DNA, 25 bp, Homo sapien
ctcggctttgttgagaatggacaaa

SEQ ID NO: 2829616 - DNA, 25 bp, Homo sapien
ctgtctcggctttgttgagaatgga

SEQ ID NO: 2829617 - DNA, 25 bp, Homo sapien
gctggatggaaaaagggcatagaat

SEQ ID NO: 2829618 - DNA, 25 bp, Homo sapien
gaaaaagggcatagaatgagattct

SEQ ID NO: 2829619 - DNA, 25 bp, Homo sapien
atgaaaaagcaaggagtatgtcagg

SEQ ID NO: 2829620 - DNA, 25 bp, Homo sapien
tcagcgggctttcctttggcccagc

SEQ ID NO: 2829621 - DNA, 25 bp, Homo sapien
tcctctgtcatcagcgggctttcct

SEQ ID NO: 2829622 - DNA, 25 bp, Homo sapien
caaagtgagaggatcctcagtagga

SEQ ID NO: 2829623 - DNA, 25 bp, Homo sapien
ctccgcagattgatgatggaagaaa

SEQ ID NO: 2829624 - DNA, 25 bp, Homo sapien
cccttgggaacgaatcagcagattc

SEQ ID NO: 2829625 - DNA, 25 bp, Homo sapien
agcagattctagcatgtccctggag

SEQ ID NO: 2829626 - DNA, 25 bp, Homo sapien
ggaccatggatggaggacagcccat

SEQ ID NO: 2829627 - DNA, 25 bp, Homo sapien
tgggcattctcattgtccggtgctt

SEQ ID NO: 2829628 - DNA, 25 bp, Homo sapien
gaagttgttggctggagcaccaatc

SEQ ID NO: 2829629 - DNA, 25 bp, Homo sapien
aaacatcagacgttcattatcccaa

SEQ ID NO: 2829630 - DNA, 25 bp, Homo sapien
tctcaggatcaagatgctttgcaag

SEQ ID NO: 2829631 - DNA, 25 bp, Homo sapien
ccaatcatacgaggctgggctagat

SEQ ID NO: 2829632 - DNA, 25 bp, Homo sapien
tttctagcagtatacatataacttc

SEQ ID NO: 2829633 - DNA, 25 bp, Homo sapien
caatccttcctgatatactactaaa

SEQ ID NO: 2829634 - DNA, 25 bp, Homo sapien
cattcttgtacatcaatctctgaac

SEQ ID NO: 2829635 - DNA, 25 bp, Homo sapien
tccttcctgatatactactaaataa

SEQ ID NO: 2829636 - DNA, 25 bp, Homo sapien
catagaaaaagatgaggtcaaggga

SEQ ID NO: 2829637 - DNA, 25 bp, Homo sapien
gggagcatagaaaaagatgaggtca

SEQ ID NO: 2829638 - DNA, 25 bp, Homo sapien
gagaatggaaaaacaagccactctt

SEQ ID NO: 2829639 - DNA, 25 bp, Homo sapien
aaagggagcatagaaaaagatgagg

SEQ ID NO: 2829640 - DNA, 25 bp, Homo sapien
tgccctctaccaactaaagtacgaa

SEQ ID NO: 2829641 - DNA, 25 bp, Homo sapien
aaagtacgaaattcatgagagcagc

SEQ ID NO: 2829642 - DNA, 25 bp, Homo sapien
tctgtgatgacaggactgaaccact

SEQ ID NO: 2829643 - DNA, 25 bp, Homo sapien
tattttctcgataacacttgtgtct

SEQ ID NO: 2829644 - DNA, 25 bp, Homo sapien
aaagacccaggatccagttgctgat

SEQ ID NO: 2829645 - DNA, 25 bp, Homo sapien
tgtcagtccaaagccaactatgagg

SEQ ID NO: 2829646 - DNA, 25 bp, Homo sapien
tgagccaagttcaacgctgtgtagt

SEQ ID NO: 2829647 - DNA, 25 bp, Homo sapien
gaacagtgtctgtcgcaaagctgag

SEQ ID NO: 2829648 - DNA, 25 bp, Homo sapien
atattatgactacaactacacagtg

SEQ ID NO: 2829649 - DNA, 25 bp, Homo sapien
gactacaactacacagtgaacatct

SEQ ID NO: 2829650 - DNA, 25 bp, Homo sapien
taaaatattatgactacaactacac

SEQ ID NO: 2829651 - DNA, 25 bp, Homo sapien
caactacacagtgaacatctggaca

SEQ ID NO: 2829652 - DNA, 25 bp, Homo sapien
taaatgagatgagctaaagaaacag

SEQ ID NO: 2829653 - DNA, 25 bp, Homo sapien
ttaaatgagatgagctaaagaaaca

SEQ ID NO: 2829654 - DNA, 25 bp, Homo sapien
ttttaaatgagatgagctaaagaaa

SEQ ID NO: 2829655 - DNA, 25 bp, Homo sapien
aatgagatgagctaaagaaacagaa

SEQ ID NO: 2829656 - DNA, 25 bp, Homo sapien
gctttcatgagaatgtggccgggtg

SEQ ID NO: 2829657 - DNA, 25 bp, Homo sapien
aatgtggccgggtggggtcttctgt

SEQ ID NO: 2829658 - DNA, 25 bp, Homo sapien
gtcccagggaaagcagatcatcaca

SEQ ID NO: 2829659 - DNA, 25 bp, Homo sapien
tgtgcaatcctgtgttaggaaagaa

SEQ ID NO: 2829660 - DNA, 25 bp, Homo sapien
gatggctatgtggtgattcttcacc

SEQ ID NO: 2829661 - DNA, 25 bp, Homo sapien
gtgcacccctctcagacagcagtgt

SEQ ID NO: 2829662 - DNA, 25 bp, Homo sapien
tggttctggatgtaaacatgccttg

SEQ ID NO: 2829663 - DNA, 25 bp, Homo sapien
ggctgtttccttagcattggttctg

SEQ ID NO: 2829664 - DNA, 25 bp, Homo sapien
atctccagctgtgtactggaagaac

SEQ ID NO: 2829665 - DNA, 25 bp, Homo sapien
ctgtgtactggaagaaccactgctc

SEQ ID NO: 2829666 - DNA, 25 bp, Homo sapien
ctccagctgtgtactggaagaacca

SEQ ID NO: 2829667 - DNA, 25 bp, Homo sapien
cagctgtgtactggaagaaccactg

SEQ ID NO: 2829668 - DNA, 25 bp, Homo sapien
tgtccattatctgattttgtacaga

SEQ ID NO: 2829669 - DNA, 25 bp, Homo sapien
tctgtccattatctgattttgtaca

SEQ ID NO: 2829670 - DNA, 25 bp, Homo sapien
tttctgtccattatctgattttgta

SEQ ID NO: 2829671 - DNA, 25 bp, Homo sapien
tttgtacagactgggagctgttttc

SEQ ID NO: 2829672 - DNA, 25 bp, Homo sapien
catatcctcagcaacaccttttatt

SEQ ID NO: 2829673 - DNA, 25 bp, Homo sapien
gattaactttttgatcggtcaccaa

SEQ ID NO: 2829674 - DNA, 25 bp, Homo sapien
ccattgtgtgtacataatgcaattt

SEQ ID NO: 2829675 - DNA, 25 bp, Homo sapien
atgtacaagggctattatttctcca

SEQ ID NO: 2829676 - DNA, 25 bp, Homo sapien
tttgagtgcaatcagtcagctgctg

SEQ ID NO: 2829677 - DNA, 25 bp, Homo sapien
caggattgccgtctggaatgtggat

SEQ ID NO: 2829678 - DNA, 25 bp, Homo sapien
aagcaggattgccgtctggaatgtg

SEQ ID NO: 2829679 - DNA, 25 bp, Homo sapien
agtgcaatcagtcagctgctgtaca

SEQ ID NO: 2829680 - DNA, 25 bp, Homo sapien
aagctgtgaattgccgataactaca

SEQ ID NO: 2829681 - DNA, 25 bp, Homo sapien
gtgaattgccgataactacattcca

SEQ ID NO: 2829682 - DNA, 25 bp, Homo sapien
gctgtgaattgccgataactacatt

SEQ ID NO: 2829683 - DNA, 25 bp, Homo sapien
tgtgaattgccgataactacattcc

SEQ ID NO: 2829684 - DNA, 25 bp, Homo sapien
gcttaaagggccaggacccagagct

SEQ ID NO: 2829685 - DNA, 25 bp, Homo sapien
ctaggggaaggcaaacatacaagac

SEQ ID NO: 2829686 - DNA, 25 bp, Homo sapien
ggggaaggcaaacatacaagactgc

SEQ ID NO: 2829687 - DNA, 25 bp, Homo sapien
aggcaaacatacaagactgcttaaa

SEQ ID NO: 2829688 - DNA, 25 bp, Homo sapien
gggttctgaatttgtcaggtgattt

SEQ ID NO: 2829689 - DNA, 25 bp, Homo sapien
caggtgatttttgaattgctcattc

SEQ ID NO: 2829690 - DNA, 25 bp, Homo sapien
gtttagaggtatactcaaaaccaca

SEQ ID NO: 2829691 - DNA, 25 bp, Homo sapien
ccactgaagtttagaggtatactca

SEQ ID NO: 2829692 - DNA, 25 bp, Homo sapien
cacagtggctgaaaattgacatggt

SEQ ID NO: 2829693 - DNA, 25 bp, Homo sapien
tcacagtggctgaaaattgacatgg

SEQ ID NO: 2829694 - DNA, 25 bp, Homo sapien
cagtggctgaaaattgacatggtta

SEQ ID NO: 2829695 - DNA, 25 bp, Homo sapien
agtggctgaaaattgacatggttac

SEQ ID NO: 2829696 - DNA, 25 bp, Homo sapien
acttctgaaacacatctttgtcctc

SEQ ID NO: 2829697 - DNA, 25 bp, Homo sapien
aacttctgaaacacatctttgtcct

SEQ ID NO: 2829698 - DNA, 25 bp, Homo sapien
ctgaaacacatctttgtcctctatg

SEQ ID NO: 2829699 - DNA, 25 bp, Homo sapien
gaaacacatctttgtcctctatgta

SEQ ID NO: 2829700 - DNA, 25 bp, Homo sapien
tagtattgagccaatgactcatggg

SEQ ID NO: 2829701 - DNA, 25 bp, Homo sapien
gggagttactggataaataggccat

SEQ ID NO: 2829702 - DNA, 25 bp, Homo sapien
acttttcttcaagaacgagtcatag

SEQ ID NO: 2829703 - DNA, 25 bp, Homo sapien
tatgattgagtgtatcttctagttc

SEQ ID NO: 2829704 - DNA, 25 bp, Homo sapien
ttttttatgaaggtcaagcaccttc

SEQ ID NO: 2829705 - DNA, 25 bp, Homo sapien
tttttatgaaggtcaagcaccttct

SEQ ID NO: 2829706 - DNA, 25 bp, Homo sapien
ttttatgaaggtcaagcaccttctg

SEQ ID NO: 2829707 - DNA, 25 bp, Homo sapien
tttccttgctaattcatcttgtgtg

SEQ ID NO: 2829708 - DNA, 25 bp, Homo sapien
catttccttgctaattcatcttgtg

SEQ ID NO: 2829709 - DNA, 25 bp, Homo sapien
acatttccttgctaattcatcttgt

SEQ ID NO: 2829710 - DNA, 25 bp, Homo sapien
ttccttgctaattcatcttgtgtgc

SEQ ID NO: 2829711 - DNA, 25 bp, Homo sapien
gtttattatcatcagatttaccagg

SEQ ID NO: 2829712 - DNA, 25 bp, Homo sapien
ggaaatgtgagtacctacaccaata

SEQ ID NO: 2829713 - DNA, 25 bp, Homo sapien
gatacgtgatagagtcattggcaag

SEQ ID NO: 2829714 - DNA, 25 bp, Homo sapien
ccaggtggtaacatacataagagga

SEQ ID NO: 2829715 - DNA, 25 bp, Homo sapien
agggcctgatggcacacacctttcc

SEQ ID NO: 2829716 - DNA, 25 bp, Homo sapien
gagacatttgtgtccctttagagtg

SEQ ID NO: 2829717 - DNA, 25 bp, Homo sapien
ccatgaggcccttttgacgttactg

SEQ ID NO: 2829718 - DNA, 25 bp, Homo sapien
catttttggatgcatgttcctggag

SEQ ID NO: 2829719 - DNA, 25 bp, Homo sapien
tattagtaaacatgtatgtactcag

SEQ ID NO: 2829720 - DNA, 25 bp, Homo sapien
agtaaacatgtatgtactcaggaaa

SEQ ID NO: 2829721 - DNA, 25 bp, Homo sapien
taattatattagtaaacatgtatgt

SEQ ID NO: 2829722 - DNA, 25 bp, Homo sapien
ttagtaaacatgtatgtactcagga

SEQ ID NO: 2829723 - DNA, 25 bp, Homo sapien
actgagttctgctacgatggttact

SEQ ID NO: 2829724 - DNA, 25 bp, Homo sapien
gaaggtggaataggtacagaatgtc

SEQ ID NO: 2829725 - DNA, 25 bp, Homo sapien
gaatgtctttctcaggataggtgga

SEQ ID NO: 2829726 - DNA, 25 bp, Homo sapien
gatgggttgtcaagaatgtgcagtc

SEQ ID NO: 2829727 - DNA, 25 bp, Homo sapien
gagtgacagaggctgtgttgaccca

SEQ ID NO: 2829728 - DNA, 25 bp, Homo sapien
cagaaaagggagtgacagaggctgt

SEQ ID NO: 2829729 - DNA, 25 bp, Homo sapien
gtgacagaggctgtgttgacccaga

SEQ ID NO: 2829730 - DNA, 25 bp, Homo sapien
tgcttggcctcaatgaggacagaaa

SEQ ID NO: 2829731 - DNA, 25 bp, Homo sapien
agccaccacttagctcccattgctt

SEQ ID NO: 2829732 - DNA, 25 bp, Homo sapien
ttgtaaggaaaatgggcggaggtgc

SEQ ID NO: 2829733 - DNA, 25 bp, Homo sapien
gccaccacttagctcccattgcttt

SEQ ID NO: 2829734 - DNA, 25 bp, Homo sapien
taaggaaaatgggcggaggtgccag

SEQ ID NO: 2829735 - DNA, 25 bp, Homo sapien
gtgagggtgtctgctcctgcccagg

SEQ ID NO: 2829736 - DNA, 25 bp, Homo sapien
tgtgagggtgtctgctcctgcccag

SEQ ID NO: 2829737 - DNA, 25 bp, Homo sapien
ttgtgagggtgtctgctcctgccca

SEQ ID NO: 2829738 - DNA, 25 bp, Homo sapien
cttgtgagggtgtctgctcctgccc

SEQ ID NO: 2829739 - DNA, 25 bp, Homo sapien
tctcatccagcactaggctggattt

SEQ ID NO: 2829740 - DNA, 25 bp, Homo sapien
gcgacccggtgaatctttctcatcc

SEQ ID NO: 2829741 - DNA, 25 bp, Homo sapien
tcactctgagcgacccggtgaatct

SEQ ID NO: 2829742 - DNA, 25 bp, Homo sapien
catccagcactaggctggatttccc

SEQ ID NO: 2829743 - DNA, 25 bp, Homo sapien
catgtggtgccagcaatattctggc

SEQ ID NO: 2829744 - DNA, 25 bp, Homo sapien
agcaggtgtccctaaaataccaaga

SEQ ID NO: 2829745 - DNA, 25 bp, Homo sapien
tggtgccagcaatattctggcagct

SEQ ID NO: 2829746 - DNA, 25 bp, Homo sapien
agctgacaccgtcagcaggtgtccc

SEQ ID NO: 2829747 - DNA, 25 bp, Homo sapien
acaggaggaggaaataatgtctgaa

SEQ ID NO: 2829748 - DNA, 25 bp, Homo sapien
gcctcacagggccttgtgccaccat

SEQ ID NO: 2829749 - DNA, 25 bp, Homo sapien
aaataatgtctgaagcctcacaggg

SEQ ID NO: 2829750 - DNA, 25 bp, Homo sapien
aagcctcacagggccttgtgccacc

SEQ ID NO: 2829751 - DNA, 25 bp, Homo sapien
aaagtgggaatgcaggcaaattagt

SEQ ID NO: 2829752 - DNA, 25 bp, Homo sapien
tcagttctaaatctgcaggatgggc

SEQ ID NO: 2829753 - DNA, 25 bp, Homo sapien
gctttattgaggcatgattgcttct

SEQ ID NO: 2829754 - DNA, 25 bp, Homo sapien
ggttgctttattgaggcatgattgc

SEQ ID NO: 2829755 - DNA, 25 bp, Homo sapien
agttctttactcacatatctcccac

SEQ ID NO: 2829756 - DNA, 25 bp, Homo sapien
ctgacagataaaggtggtggcggct

SEQ ID NO: 2829757 - DNA, 25 bp, Homo sapien
aagttagctgcattgattagcttcc

SEQ ID NO: 2829758 - DNA, 25 bp, Homo sapien
tgacagagggtcttacctggaggtt

SEQ ID NO: 2829759 - DNA, 25 bp, Homo sapien
aaaagattggatccccctatgacag

SEQ ID NO: 2829760 - DNA, 25 bp, Homo sapien
gaaggagtcccattcaaacatgcta

SEQ ID NO: 2829761 - DNA, 25 bp, Homo sapien
gtattattttagctggtccctcctg

SEQ ID NO: 2829762 - DNA, 25 bp, Homo sapien
gaacagctttgcgtttggttgaatg

SEQ ID NO: 2829763 - DNA, 25 bp, Homo sapien
gactcctactcatgcttatacgttt

SEQ ID NO: 2829764 - DNA, 25 bp, Homo sapien
gagtgtcctgttaccaaaatgaagg

SEQ ID NO: 2829765 - DNA, 25 bp, Homo sapien
gatttggtggcattggtaacctcag

SEQ ID NO: 2829766 - DNA, 25 bp, Homo sapien
ttactctgaggaaaagctcacaggg

SEQ ID NO: 2829767 - DNA, 25 bp, Homo sapien
tctgaggaagactgtcaacagggca

SEQ ID NO: 2829768 - DNA, 25 bp, Homo sapien
taaaccttcatgagtgagtacccag

SEQ ID NO: 2829769 - DNA, 25 bp, Homo sapien
gaatatgtcctaaagctgtgccaag

SEQ ID NO: 2829770 - DNA, 25 bp, Homo sapien
tatggcaagagatgaccctggactc

SEQ ID NO: 2829771 - DNA, 25 bp, Homo sapien
aaaaccagccccatagtgagtcaga

SEQ ID NO: 2829772 - DNA, 25 bp, Homo sapien
tataggtacctaatagcagcaggct

SEQ ID NO: 2829773 - DNA, 25 bp, Homo sapien
cattttcagcaggtgtataggtacc

SEQ ID NO: 2829774 - DNA, 25 bp, Homo sapien
taacaatctaccgtggagaccacgc

SEQ ID NO: 2829775 - DNA, 25 bp, Homo sapien
tgccgactctaaagctgacttgggt

SEQ ID NO: 2829776 - DNA, 25 bp, Homo sapien
gaataacatgaacgttaggatggcc

SEQ ID NO: 2829777 - DNA, 25 bp, Homo sapien
ctctcaagaggctcccaagttttgt

SEQ ID NO: 2829778 - DNA, 25 bp, Homo sapien
ggctgatgctgtacactctcaagag

SEQ ID NO: 2829779 - DNA, 25 bp, Homo sapien
catataaacaagagttggcaagggc

SEQ ID NO: 2829780 - DNA, 25 bp, Homo sapien
atctaaccagatgatgcaacatctg

SEQ ID NO: 2829781 - DNA, 25 bp, Homo sapien
tagaagacagcttgctggaagggtt

SEQ ID NO: 2829782 - DNA, 25 bp, Homo sapien
tctgtgctctcttttaagaacgtga

SEQ ID NO: 2829783 - DNA, 25 bp, Homo sapien
gattttattctcagggtatctaacc

SEQ ID NO: 2829784 - DNA, 25 bp, Homo sapien
agtctgagcaagagagcaagattcc

SEQ ID NO: 2829785 - DNA, 25 bp, Homo sapien
ccagtctgagcaagagagcaagatt

SEQ ID NO: 2829786 - DNA, 25 bp, Homo sapien
tctgagcaagagagcaagattccat

SEQ ID NO: 2829787 - DNA, 25 bp, Homo sapien
tccagtctgagcaagagagcaagat

SEQ ID NO: 2829788 - DNA, 25 bp, Homo sapien
tcactgcatgctgaacctctgtttc

SEQ ID NO: 2829789 - DNA, 25 bp, Homo sapien
ttcactgcatgctgaacctctgttt

SEQ ID NO: 2829790 - DNA, 25 bp, Homo sapien
caacgtactgttggtcaaagatttc

SEQ ID NO: 2829791 - DNA, 25 bp, Homo sapien
catcctggtgcacagagcactatag

SEQ ID NO: 2829792 - DNA, 25 bp, Homo sapien
caggaaactgatttgcgtacttact

SEQ ID NO: 2829793 - DNA, 25 bp, Homo sapien
gaattctccgtaaaaatccaagcca

SEQ ID NO: 2829794 - DNA, 25 bp, Homo sapien
aaaagtcctggttatatattgaagt

SEQ ID NO: 2829795 - DNA, 25 bp, Homo sapien
aaagtcctggttatatattgaagtc

SEQ ID NO: 2829796 - DNA, 25 bp, Homo sapien
cacattggctaactgaatacaaaag

SEQ ID NO: 2829797 - DNA, 25 bp, Homo sapien
tttccggttcacattggctaactga

SEQ ID NO: 2829798 - DNA, 25 bp, Homo sapien
caaagaattggctttccggttcaca

SEQ ID NO: 2829799 - DNA, 25 bp, Homo sapien
attggctttccggttcacattggct

SEQ ID NO: 2829800 - DNA, 25 bp, Homo sapien
caaagcaatgaaacggaagagttcc

SEQ ID NO: 2829801 - DNA, 25 bp, Homo sapien
agatttataggatgtggtcaaagca

SEQ ID NO: 2829802 - DNA, 25 bp, Homo sapien
gaagagttccctgattccccttgca

SEQ ID NO: 2829803 - DNA, 25 bp, Homo sapien
gcaacaattttctaactccaatgaa

SEQ ID NO: 2829804 - DNA, 25 bp, Homo sapien
gctttctgtattccgagctcttttc

SEQ ID NO: 2829805 - DNA, 25 bp, Homo sapien
cgagagggggagcacgcagatgggc

SEQ ID NO: 2829806 - DNA, 25 bp, Homo sapien
tctgtattccgagctcttttccaga

SEQ ID NO: 2829807 - DNA, 25 bp, Homo sapien
ggctctggctctgcggtagcgtcta

SEQ ID NO: 2829808 - DNA, 25 bp, Homo sapien
tctctgctacgtcgttttgccgtca

SEQ ID NO: 2829809 - DNA, 25 bp, Homo sapien
agtcggcttgcctcgtatctcctca

SEQ ID NO: 2829810 - DNA, 25 bp, Homo sapien
cctcacctgctggtatgctctggag

SEQ ID NO: 2829811 - DNA, 25 bp, Homo sapien
agaaacgcctcttctcatttagggc

SEQ ID NO: 2829812 - DNA, 25 bp, Homo sapien
gaggagcctgaatcccgctaaggcc

SEQ ID NO: 2829813 - DNA, 25 bp, Homo sapien
taaagctcatggaaagccaacaggc

SEQ ID NO: 2829814 - DNA, 25 bp, Homo sapien
gacagtgaaagagagcggagctaaa

SEQ ID NO: 2829815 - DNA, 25 bp, Homo sapien
aaggagaggagcctgaatcccgcta

SEQ ID NO: 2829816 - DNA, 25 bp, Homo sapien
ctgaattaggtcacaagaacatgcc

SEQ ID NO: 2829817 - DNA, 25 bp, Homo sapien
tttactgagtcctgaattaggtcac

SEQ ID NO: 2829818 - DNA, 25 bp, Homo sapien
tccccggagattaggagacttgccc

SEQ ID NO: 2829819 - DNA, 25 bp, Homo sapien
catgcattcccctacaacgtcatta

SEQ ID NO: 2829820 - DNA, 25 bp, Homo sapien
tagactaggtctaggtcggccatac

SEQ ID NO: 2829821 - DNA, 25 bp, Homo sapien
gccatttctgtcgtagtctttctga

SEQ ID NO: 2829822 - DNA, 25 bp, Homo sapien
ccttctctgatagggagccattgca

SEQ ID NO: 2829823 - DNA, 25 bp, Homo sapien
aatacgcaactctacactaacccat

SEQ ID NO: 2829824 - DNA, 25 bp, Homo sapien
tctgagattccaccacctgtcctat

SEQ ID NO: 2829825 - DNA, 25 bp, Homo sapien
cctcatctcttgcagacttccacag

SEQ ID NO: 2829826 - DNA, 25 bp, Homo sapien
cctccctcatctcttgcagacttcc

SEQ ID NO: 2829827 - DNA, 25 bp, Homo sapien
tcttgcagacttccacagccatcca

SEQ ID NO: 2829828 - DNA, 25 bp, Homo sapien
tccctcatctcttgcagacttccac

SEQ ID NO: 2829829 - DNA, 25 bp, Homo sapien
ggtatctctaaacccgtcattctga

SEQ ID NO: 2829830 - DNA, 25 bp, Homo sapien
tcccgtcatagctgatgtgtttccg

SEQ ID NO: 2829831 - DNA, 25 bp, Homo sapien
catttattagtgtacgccctatgta

SEQ ID NO: 2829832 - DNA, 25 bp, Homo sapien
gactggagcagaattcaatggaatg

SEQ ID NO: 2829833 - DNA, 25 bp, Homo sapien
caagttttcgtaaaatctgagtcct

SEQ ID NO: 2829834 - DNA, 25 bp, Homo sapien
cattcaaggaaaacgttcaaagcca

SEQ ID NO: 2829835 - DNA, 25 bp, Homo sapien
cagtcccgaaaaggatctgatgttg

SEQ ID NO: 2829836 - DNA, 25 bp, Homo sapien
aattaggctttgtttcagcatccac

SEQ ID NO: 2829837 - DNA, 25 bp, Homo sapien
gaatgcaaacaaaatggcctccaca

SEQ ID NO: 2829838 - DNA, 25 bp, Homo sapien
gcaactgacctaaatgcctgcctta

SEQ ID NO: 2829839 - DNA, 25 bp, Homo sapien
aattcatagaacagccagacaagag

SEQ ID NO: 2829840 - DNA, 25 bp, Homo sapien
ggtcaaggcaatgcgaggcacatcc

SEQ ID NO: 2829841 - DNA, 25 bp, Homo sapien
tcttctgtcaaacctaactgagagc

SEQ ID NO: 2829842 - DNA, 25 bp, Homo sapien
tgaaggcagccacagcaatcaatga

SEQ ID NO: 2829843 - DNA, 25 bp, Homo sapien
tcaatgactgatgcttagactaagc

SEQ ID NO: 2829844 - DNA, 25 bp, Homo sapien
accatccagaggtacaatgtaagcc

SEQ ID NO: 2829845 - DNA, 25 bp, Homo sapien
aacacgtcaccctacattaggtatt

SEQ ID NO: 2829846 - DNA, 25 bp, Homo sapien
cccatcaacacgtcaccctacatta

SEQ ID NO: 2829847 - DNA, 25 bp, Homo sapien
catcaacacgtcaccctacattagg

SEQ ID NO: 2829848 - DNA, 25 bp, Homo sapien
caacacgtcaccctacattaggtat

SEQ ID NO: 2829849 - DNA, 25 bp, Homo sapien
actaagacggtggatactgaaagcc

SEQ ID NO: 2829850 - DNA, 25 bp, Homo sapien
gaccccaagtggcttgcagtcaaat

SEQ ID NO: 2829851 - DNA, 25 bp, Homo sapien
acacatgatctacttgggccccaga

SEQ ID NO: 2829852 - DNA, 25 bp, Homo sapien
gtttagatactttgggacactgaca

SEQ ID NO: 2829853 - DNA, 25 bp, Homo sapien
cataaaggacatgtttagcatccgg

SEQ ID NO: 2829854 - DNA, 25 bp, Homo sapien
tagcatccggtcaggtatgaaaagg

SEQ ID NO: 2829855 - DNA, 25 bp, Homo sapien
tactcaagaagaatgccagccctgg

SEQ ID NO: 2829856 - DNA, 25 bp, Homo sapien
caaacacaaggatctggcaatctga

SEQ ID NO: 2829857 - DNA, 25 bp, Homo sapien
gccaaggcacagatgagtctaataa

SEQ ID NO: 2829858 - DNA, 25 bp, Homo sapien
tacccaattagcatgtcagacatag

SEQ ID NO: 2829859 - DNA, 25 bp, Homo sapien
cataactttatggaaggcactgttt

SEQ ID NO: 2829860 - DNA, 25 bp, Homo sapien
tcagacataggaacctaacgcatgc

SEQ ID NO: 2829861 - DNA, 25 bp, Homo sapien
ggtctgttgtgttcggcccacagaa

SEQ ID NO: 2829862 - DNA, 25 bp, Homo sapien
cattggtgtgctcaaatatggatct

SEQ ID NO: 2829863 - DNA, 25 bp, Homo sapien
cagacattctctagtggcaccagga

SEQ ID NO: 2829864 - DNA, 25 bp, Homo sapien
cagaagagtcctgcctgcttgaagc

SEQ ID NO: 2829865 - DNA, 25 bp, Homo sapien
tataaggtaattgcacagtaactgc

SEQ ID NO: 2829866 - DNA, 25 bp, Homo sapien
gtaactacgtcaggtaaccacacag

SEQ ID NO: 2829867 - DNA, 25 bp, Homo sapien
catgcaagccatttagtaactacgt

SEQ ID NO: 2829868 - DNA, 25 bp, Homo sapien
caagataggatagcttgcattaccc

SEQ ID NO: 2829869 - DNA, 25 bp, Homo sapien
tcgagtgctcctgaagcttgaggca

SEQ ID NO: 2829870 - DNA, 25 bp, Homo sapien
catacatggactaatggcttggcta

SEQ ID NO: 2829871 - DNA, 25 bp, Homo sapien
tgtcccaggttgtgcttcaccagct

SEQ ID NO: 2829872 - DNA, 25 bp, Homo sapien
caagggctacactgactctggtcga

SEQ ID NO: 2829873 - DNA, 25 bp, Homo sapien
cagtctggagttattccctttcagc

SEQ ID NO: 2829874 - DNA, 25 bp, Homo sapien
taaatagagcttccttaacagctac

SEQ ID NO: 2829875 - DNA, 25 bp, Homo sapien
tgttgatgactcagcccacactgac

SEQ ID NO: 2829876 - DNA, 25 bp, Homo sapien
cctccttagaaaatggtgactcagt

SEQ ID NO: 2829877 - DNA, 25 bp, Homo sapien
acttaagtacgtgtcagggctgtta

SEQ ID NO: 2829878 - DNA, 25 bp, Homo sapien
gaccctggcttttgacagtatgaga

SEQ ID NO: 2829879 - DNA, 25 bp, Homo sapien
catggcggcttatttgtgggctacg

SEQ ID NO: 2829880 - DNA, 25 bp, Homo sapien
gacttccaggctaaacgctactatg

SEQ ID NO: 2829881 - DNA, 25 bp, Homo sapien
ttgttatggtccgttggtagcaata

SEQ ID NO: 2829882 - DNA, 25 bp, Homo sapien
gtgaaactgacagcccaacatgcct

SEQ ID NO: 2829883 - DNA, 25 bp, Homo sapien
ggtagcaatattctgccatgggtcc

SEQ ID NO: 2829884 - DNA, 25 bp, Homo sapien
tatcaatgtggtgtttccggcctcc

SEQ ID NO: 2829885 - DNA, 25 bp, Homo sapien
gagtacagtagtaccatctcagctt

SEQ ID NO: 2829886 - DNA, 25 bp, Homo sapien
caaactctgcctccaagactcaagt

SEQ ID NO: 2829887 - DNA, 25 bp, Homo sapien
gtacagtagtaccatctcagcttac

SEQ ID NO: 2829888 - DNA, 25 bp, Homo sapien
cagggtctcgctctggctctgtcac

SEQ ID NO: 2829889 - DNA, 25 bp, Homo sapien
agaagacgaaattagaaaatctggc

SEQ ID NO: 2829890 - DNA, 25 bp, Homo sapien
tctttaactgggtagcttgtggccc

SEQ ID NO: 2829891 - DNA, 25 bp, Homo sapien
cagagttcaactcggtagcccttac

SEQ ID NO: 2829892 - DNA, 25 bp, Homo sapien
taaaggacacctatggctcagttag

SEQ ID NO: 2829893 - DNA, 25 bp, Homo sapien
ggcacaaaatgaagtcgccctcttg

SEQ ID NO: 2829894 - DNA, 25 bp, Homo sapien
cattattgggaaggccaagctcggt

SEQ ID NO: 2829895 - DNA, 25 bp, Homo sapien
taaagtccgcagcatactcacagct

SEQ ID NO: 2829896 - DNA, 25 bp, Homo sapien
tacagcattgttcccggtaattcgg

SEQ ID NO: 2829897 - DNA, 25 bp, Homo sapien
tcagtggagcatgatatttaacccc

SEQ ID NO: 2829898 - DNA, 25 bp, Homo sapien
tacttttccacttgagggctctggc

SEQ ID NO: 2829899 - DNA, 25 bp, Homo sapien
ttgctacgtccatatcacctaaggg

SEQ ID NO: 2829900 - DNA, 25 bp, Homo sapien
gatgcatctgaattcacgcttgctg

SEQ ID NO: 2829901 - DNA, 25 bp, Homo sapien
ggctctggcacagtagaccaactga

SEQ ID NO: 2829902 - DNA, 25 bp, Homo sapien
gatagctgctctcattgtacttcat

SEQ ID NO: 2829903 - DNA, 25 bp, Homo sapien
ttccctctggcaagaagataaacag

SEQ ID NO: 2829904 - DNA, 25 bp, Homo sapien
tctttgggcccttcataaatgtaaa

SEQ ID NO: 2829905 - DNA, 25 bp, Homo sapien
caagctagattgcatttagttccca

SEQ ID NO: 2829906 - DNA, 25 bp, Homo sapien
atgcactgtaggcatatgctctgaa

SEQ ID NO: 2829907 - DNA, 25 bp, Homo sapien
aaggcagacaagaatgaagatgcac

SEQ ID NO: 2829908 - DNA, 25 bp, Homo sapien
taggcatatgctctgaatgcagatg

SEQ ID NO: 2829909 - DNA, 25 bp, Homo sapien
cagacaagaatgaagatgcactgta

SEQ ID NO: 2829910 - DNA, 25 bp, Homo sapien
tgcaggccctttggtagcaaacaca

SEQ ID NO: 2829911 - DNA, 25 bp, Homo sapien
tatgggcaatgagctatcagccaac

SEQ ID NO: 2829912 - DNA, 25 bp, Homo sapien
tggtgatccctaattccaggtgtgg

SEQ ID NO: 2829913 - DNA, 25 bp, Homo sapien
tgacctcagtgtattggctcacatg

SEQ ID NO: 2829914 - DNA, 25 bp, Homo sapien
tcaattcagtactcaagcatgctgg

SEQ ID NO: 2829915 - DNA, 25 bp, Homo sapien
catagttcagtcaggtcaattcagt

SEQ ID NO: 2829916 - DNA, 25 bp, Homo sapien
ccatagctgtaattagcccctgaac

SEQ ID NO: 2829917 - DNA, 25 bp, Homo sapien
catttacatggctcttatctctggc

SEQ ID NO: 2829918 - DNA, 25 bp, Homo sapien
aacaattccatggttggcagtgtcc

SEQ ID NO: 2829919 - DNA, 25 bp, Homo sapien
tgctgcagatgttagtggactcaat

SEQ ID NO: 2829920 - DNA, 25 bp, Homo sapien
tctttaatagcgactcaactgcact

SEQ ID NO: 2829921 - DNA, 25 bp, Homo sapien
cccgtgataattgcgtggataatgc

SEQ ID NO: 2829922 - DNA, 25 bp, Homo sapien
ctatgccagagaatgtattccaggc

SEQ ID NO: 2829923 - DNA, 25 bp, Homo sapien
tatttaagcatcacagtgcttttaa

SEQ ID NO: 2829924 - DNA, 25 bp, Homo sapien
cacctgtccgatgtagcagctggaa

SEQ ID NO: 2829925 - DNA, 25 bp, Homo sapien
aattatactggtgattgactatggc

SEQ ID NO: 2829926 - DNA, 25 bp, Homo sapien
tacaaagagcaatggtcactgagag

SEQ ID NO: 2829927 - DNA, 25 bp, Homo sapien
tgttgaattgctgcacccaagtaga

SEQ ID NO: 2829928 - DNA, 25 bp, Homo sapien
taagtgagcattgtaacccattggg

SEQ ID NO: 2829929 - DNA, 25 bp, Homo sapien
gcagttcctggagctatcatagttg

SEQ ID NO: 2829930 - DNA, 25 bp, Homo sapien
ttctgatttactgtagcctggagca

SEQ ID NO: 2829931 - DNA, 25 bp, Homo sapien
gcctggagcagaaggtcactgtctg

SEQ ID NO: 2829932 - DNA, 25 bp, Homo sapien
cattttgctgctactgatagactcg

SEQ ID NO: 2829933 - DNA, 25 bp, Homo sapien
tcactgtctgatcctcaaacttctg

SEQ ID NO: 2829934 - DNA, 25 bp, Homo sapien
ctggctaagggaggccatgacagac

SEQ ID NO: 2829935 - DNA, 25 bp, Homo sapien
tgtacctggagaaacggtacactcc

SEQ ID NO: 2829936 - DNA, 25 bp, Homo sapien
tggtctcagcaaccggtagaccagg

SEQ ID NO: 2829937 - DNA, 25 bp, Homo sapien
ctttcctggctaagggaggccatga

SEQ ID NO: 2829938 - DNA, 25 bp, Homo sapien
caagaactcattcatggcctgccat

SEQ ID NO: 2829939 - DNA, 25 bp, Homo sapien
aattcagtctatagcccattggtca

SEQ ID NO: 2829940 - DNA, 25 bp, Homo sapien
tacttgtcaagagtgaactatctcc

SEQ ID NO: 2829941 - DNA, 25 bp, Homo sapien
tctaacctgatggtggaatggaact

SEQ ID NO: 2829942 - DNA, 25 bp, Homo sapien
acatcgttttcctcaagaccatgga

SEQ ID NO: 2829943 - DNA, 25 bp, Homo sapien
aagtttgaccagtttagcaacacag

SEQ ID NO: 2829944 - DNA, 25 bp, Homo sapien
ccatggaacctctgtgtaggaagtt

SEQ ID NO: 2829945 - DNA, 25 bp, Homo sapien
aacctctgtgtaggaagtttgacca

SEQ ID NO: 2829946 - DNA, 25 bp, Homo sapien
catttctaggtagtgagattgtatc

SEQ ID NO: 2829947 - DNA, 25 bp, Homo sapien
ctatttgggtagactcatttctagg

SEQ ID NO: 2829948 - DNA, 25 bp, Homo sapien
gaatactgttaacctccaatggatg

SEQ ID NO: 2829949 - DNA, 25 bp, Homo sapien
ttcatggtatcaaccccaagagctg

SEQ ID NO: 2829950 - DNA, 25 bp, Homo sapien
tgaagtctgagttcacggtgctaga

SEQ ID NO: 2829951 - DNA, 25 bp, Homo sapien
tacctcctgcaagcgatataaccta

SEQ ID NO: 2829952 - DNA, 25 bp, Homo sapien
ctcatatggtggaaagacagctagc

SEQ ID NO: 2829953 - DNA, 25 bp, Homo sapien
tatttatctggtggatttaggcagc

SEQ ID NO: 2829954 - DNA, 25 bp, Homo sapien
gagaattttactggccataaagaag

SEQ ID NO: 2829955 - DNA, 25 bp, Homo sapien
agaagacagagaagaccgcttgcac

SEQ ID NO: 2829956 - DNA, 25 bp, Homo sapien
tgcagaaactactgggagtgaggct

SEQ ID NO: 2829957 - DNA, 25 bp, Homo sapien
gagtgaggctgccataaatctcttc

SEQ ID NO: 2829958 - DNA, 25 bp, Homo sapien
agacagatcacatgaggccagcctg

SEQ ID NO: 2829959 - DNA, 25 bp, Homo sapien
ccaaggcagacagatcacatgaggc

SEQ ID NO: 2829960 - DNA, 25 bp, Homo sapien
ggcagacagatcacatgaggccagc

SEQ ID NO: 2829961 - DNA, 25 bp, Homo sapien
gccaacatggtgaaaccctgtccct

SEQ ID NO: 2829962 - DNA, 25 bp, Homo sapien
tctcacagtcagtaatgaggaaatt

SEQ ID NO: 2829963 - DNA, 25 bp, Homo sapien
aatccagcatgaataagacttgtaa

SEQ ID NO: 2829964 - DNA, 25 bp, Homo sapien
catgaataagacttgtaatttctca

SEQ ID NO: 2829965 - DNA, 25 bp, Homo sapien
aagacttgtaatttctcacagtcag

SEQ ID NO: 2829966 - DNA, 25 bp, Homo sapien
tgccgttgaactcccaaacatgttc

SEQ ID NO: 2829967 - DNA, 25 bp, Homo sapien
gaaaccaatgccgttgaactcccaa

SEQ ID NO: 2829968 - DNA, 25 bp, Homo sapien
caatgccgttgaactcccaaacatg

SEQ ID NO: 2829969 - DNA, 25 bp, Homo sapien
cagaaaccaatgccgttgaactccc

SEQ ID NO: 2829970 - DNA, 25 bp, Homo sapien
tacatgatgcaatattatgaagcca

SEQ ID NO: 2829971 - DNA, 25 bp, Homo sapien
caaacacaatgttgacagaaggata

SEQ ID NO: 2829972 - DNA, 25 bp, Homo sapien
catccaatgtagcactgcttgctct

SEQ ID NO: 2829973 - DNA, 25 bp, Homo sapien
tactctgactttataagggtggtgg

SEQ ID NO: 2829974 - DNA, 25 bp, Homo sapien
caatgtagtgaatgcagacaaaatg

SEQ ID NO: 2829975 - DNA, 25 bp, Homo sapien
gaatgcagacaaaatgttcctataa

SEQ ID NO: 2829976 - DNA, 25 bp, Homo sapien
gttcctataacatatctgtacagat

SEQ ID NO: 2829977 - DNA, 25 bp, Homo sapien
gcagacaaaatgttcctataacata

SEQ ID NO: 2829978 - DNA, 25 bp, Homo sapien
gggcttgttccatcttccaaatatg

SEQ ID NO: 2829979 - DNA, 25 bp, Homo sapien
atatgtagcagcaacataatgacac

SEQ ID NO: 2829980 - DNA, 25 bp, Homo sapien
aacacattagttttaaggggctcag

SEQ ID NO: 2829981 - DNA, 25 bp, Homo sapien
taatgacactaaaaactgccctaaa

SEQ ID NO: 2829982 - DNA, 25 bp, Homo sapien
cctaaaggttgtatcttagccctgt

SEQ ID NO: 2829983 - DNA, 25 bp, Homo sapien
tacttgcaagaaaagatatgaccta

SEQ ID NO: 2829984 - DNA, 25 bp, Homo sapien
tgtttacatacattaggccttacca

SEQ ID NO: 2829985 - DNA, 25 bp, Homo sapien
cgaatagtactttatgtaatcctca

SEQ ID NO: 2829986 - DNA, 25 bp, Homo sapien
gcattttcaaacagttctgccaact

SEQ ID NO: 2829987 - DNA, 25 bp, Homo sapien
gatggtgttcgtctccataaagtca

SEQ ID NO: 2829988 - DNA, 25 bp, Homo sapien
caaacgatggtgttcgtctccataa

SEQ ID NO: 2829989 - DNA, 25 bp, Homo sapien
ttcaagtgttcagcaaacgatggtg

SEQ ID NO: 2829990 - DNA, 25 bp, Homo sapien
aacatgacgtctcaaagaagctccc

SEQ ID NO: 2829991 - DNA, 25 bp, Homo sapien
tattgccggcattgtattctgagag

SEQ ID NO: 2829992 - DNA, 25 bp, Homo sapien
gactccacgggtagttattgccggc

SEQ ID NO: 2829993 - DNA, 25 bp, Homo sapien
taccgaagagaaactagacctgcag

SEQ ID NO: 2829994 - DNA, 25 bp, Homo sapien
ggttatgccaatctaggtctgcctg

SEQ ID NO: 2829995 - DNA, 25 bp, Homo sapien
gcatcacaactggaactgatctctg

SEQ ID NO: 2829996 - DNA, 25 bp, Homo sapien
tctaccgctcgaaagctgcacagag

SEQ ID NO: 2829997 - DNA, 25 bp, Homo sapien
cccggagttacgagcggagattcgc

SEQ ID NO: 2829998 - DNA, 25 bp, Homo sapien
gtaccacgcgcctagtgggaagccg

SEQ ID NO: 2829999 - DNA, 25 bp, Homo sapien
tgacgcctgcagcatctcgcgagat

SEQ ID NO: 2830000 - DNA, 25 bp, Homo sapien
agcatcgcccgaaggaatcgcggct

SEQ ID NO: 2830001 - DNA, 25 bp, Homo sapien
tcgggctcagcccaagtactgcgag

SEQ ID NO: 2830002 - DNA, 25 bp, Homo sapien
actttctatgccttcagttgacaaa

SEQ ID NO: 2830003 - DNA, 25 bp, Homo sapien
tgccttcagttgacaaaagcatctt

SEQ ID NO: 2830004 - DNA, 25 bp, Homo sapien
ttgaatgggacccttgaaggtggac

SEQ ID NO: 2830005 - DNA, 25 bp, Homo sapien
aaatgacttttcctactgtgttgat

SEQ ID NO: 2830006 - DNA, 25 bp, Homo sapien
taagtttctaagctgcgacagtggc

SEQ ID NO: 2830007 - DNA, 25 bp, Homo sapien
tagggaatttgaatgctgacttgcc

SEQ ID NO: 2830008 - DNA, 25 bp, Homo sapien
tagtgttaacctccttcaagatgtg

SEQ ID NO: 2830009 - DNA, 25 bp, Homo sapien
tacctgttagagatacgtactgaca

SEQ ID NO: 2830010 - DNA, 25 bp, Homo sapien
tatcccatttggctaccttccttga

SEQ ID NO: 2830011 - DNA, 25 bp, Homo sapien
gctaccttccttgaatgggatcaga

SEQ ID NO: 2830012 - DNA, 25 bp, Homo sapien
tgggatcagactccgttaggagtcc

SEQ ID NO: 2830013 - DNA, 25 bp, Homo sapien
ttgactgaattatcaaggaaggaca

SEQ ID NO: 2830014 - DNA, 25 bp, Homo sapien
cagtggtgtgcagcatttttgcttc

SEQ ID NO: 2830015 - DNA, 25 bp, Homo sapien
tagagatctgataacttgaattcag

SEQ ID NO: 2830016 - DNA, 25 bp, Homo sapien
gcttcatgagtatgacctaggtata

SEQ ID NO: 2830017 - DNA, 25 bp, Homo sapien
tctataacgttattattttcagtgg

SEQ ID NO: 2830018 - DNA, 25 bp, Homo sapien
caacattgtgatctgtactacagga

SEQ ID NO: 2830019 - DNA, 25 bp, Homo sapien
agacaccaggtcgaaaattttcaag

SEQ ID NO: 2830020 - DNA, 25 bp, Homo sapien
tatgccatggcatttgacagttcat

SEQ ID NO: 2830021 - DNA, 25 bp, Homo sapien
ggaaccaaatgtcatgcgtcataca

SEQ ID NO: 2830022 - DNA, 25 bp, Homo sapien
gccataaaaccaccgtaaggactga

SEQ ID NO: 2830023 - DNA, 25 bp, Homo sapien
gagctaggccataaaaccaccgtaa

SEQ ID NO: 2830024 - DNA, 25 bp, Homo sapien
gttgtaagagctaggccataaaacc

SEQ ID NO: 2830025 - DNA, 25 bp, Homo sapien
aaaccaccgtaaggactgatgaaga

SEQ ID NO: 2830026 - DNA, 25 bp, Homo sapien
ttgagaagtcagaaggctggcgtct

SEQ ID NO: 2830027 - DNA, 25 bp, Homo sapien
tgatttcagtgtaactcgccgagtg

SEQ ID NO: 2830028 - DNA, 25 bp, Homo sapien
cctgagtaggtagtgatgcgaataa

SEQ ID NO: 2830029 - DNA, 25 bp, Homo sapien
agtgaggactcttggcccacgctgg

SEQ ID NO: 2830030 - DNA, 25 bp, Homo sapien
aggtggaagcctgtactccatttca

SEQ ID NO: 2830031 - DNA, 25 bp, Homo sapien
caccaaaagaaggagtgtcagtgat

SEQ ID NO: 2830032 - DNA, 25 bp, Homo sapien
aagcctgtactccatttcataataa

SEQ ID NO: 2830033 - DNA, 25 bp, Homo sapien
tcttgtggttcaccaaaagaaggag

SEQ ID NO: 2830034 - DNA, 25 bp, Homo sapien
tatccaataatctttgctcctggaa

SEQ ID NO: 2830035 - DNA, 25 bp, Homo sapien
aatggtggccctgtaaacaaaagtg

SEQ ID NO: 2830036 - DNA, 25 bp, Homo sapien
caactccgcaatgtaaatggtggcc

SEQ ID NO: 2830037 - DNA, 25 bp, Homo sapien
gtatttcagggagcgcaactccgca

SEQ ID NO: 2830038 - DNA, 25 bp, Homo sapien
acagtgttgagggaaccgggcaggg

SEQ ID NO: 2830039 - DNA, 25 bp, Homo sapien
aggagccacgctgttgatcctggca

SEQ ID NO: 2830040 - DNA, 25 bp, Homo sapien
tgttgatcctggcagggtttctgcc

SEQ ID NO: 2830041 - DNA, 25 bp, Homo sapien
tttcaaaccccacggctcggagaga

SEQ ID NO: 2830042 - DNA, 25 bp, Homo sapien
tacataggaagttgcgtgctctaca

SEQ ID NO: 2830043 - DNA, 25 bp, Homo sapien
tcagcctacataggaagttgcgtgc

SEQ ID NO: 2830044 - DNA, 25 bp, Homo sapien
gaagttgcgtgctctacactggact

SEQ ID NO: 2830045 - DNA, 25 bp, Homo sapien
tgcgtgctctacactggactccaaa

SEQ ID NO: 2830046 - DNA, 25 bp, Homo sapien
atgcactgttcgtctgaccttcttt

SEQ ID NO: 2830047 - DNA, 25 bp, Homo sapien
catgcactgttcgtctgaccttctt

SEQ ID NO: 2830048 - DNA, 25 bp, Homo sapien
gcactgttcgtctgaccttctttct

SEQ ID NO: 2830049 - DNA, 25 bp, Homo sapien
tgcactgttcgtctgaccttctttc

SEQ ID NO: 2830050 - DNA, 25 bp, Homo sapien
cctctcttccgtagccagttggata

SEQ ID NO: 2830051 - DNA, 25 bp, Homo sapien
catgtaatcaagagtatgtggcagg

SEQ ID NO: 2830052 - DNA, 25 bp, Homo sapien
gaaagagctgagtgttcaactatga

SEQ ID NO: 2830053 - DNA, 25 bp, Homo sapien
gtagatggaatgagtctggaaatcc

SEQ ID NO: 2830054 - DNA, 25 bp, Homo sapien
tctgattcatgactatcagagctgg

SEQ ID NO: 2830055 - DNA, 25 bp, Homo sapien
tatgttttcaagcagagcttcggag

SEQ ID NO: 2830056 - DNA, 25 bp, Homo sapien
cactcagtatttcccctgaggaaag

SEQ ID NO: 2830057 - DNA, 25 bp, Homo sapien
cgaatttccgatcatctattttgga

SEQ ID NO: 2830058 - DNA, 25 bp, Homo sapien
accaagtccagcgcagcctttccta

SEQ ID NO: 2830059 - DNA, 25 bp, Homo sapien
aagtccagcgcagcctttcctaact

SEQ ID NO: 2830060 - DNA, 25 bp, Homo sapien
ggaccaagtccagcgcagcctttcc

SEQ ID NO: 2830061 - DNA, 25 bp, Homo sapien
caagtccagcgcagcctttcctaac

SEQ ID NO: 2830062 - DNA, 25 bp, Homo sapien
aaattggccttttgcagtggcacat

SEQ ID NO: 2830063 - DNA, 25 bp, Homo sapien
attggccttttgcagtggcacatgc

SEQ ID NO: 2830064 - DNA, 25 bp, Homo sapien
aaaattggccttttgcagtggcaca

SEQ ID NO: 2830065 - DNA, 25 bp, Homo sapien
tacaacaggcgttgtggtctcataa

SEQ ID NO: 2830066 - DNA, 25 bp, Homo sapien
cctcccgcaaatacaacaggcgttg

SEQ ID NO: 2830067 - DNA, 25 bp, Homo sapien
tcaatacaggttcccatagacaaag

SEQ ID NO: 2830068 - DNA, 25 bp, Homo sapien
tgtctggctctctattattacttca

SEQ ID NO: 2830069 - DNA, 25 bp, Homo sapien
accccaaaataagctttattgcaag

SEQ ID NO: 2830070 - DNA, 25 bp, Homo sapien
tattgcaagaaaagtgtcatatttg

SEQ ID NO: 2830071 - DNA, 25 bp, Homo sapien
tgattacaaatttacactgttcctt

SEQ ID NO: 2830072 - DNA, 25 bp, Homo sapien
tatttgatacacagacctacaaaaa

SEQ ID NO: 2830073 - DNA, 25 bp, Homo sapien
tacagtacggtttggcctgcaatgc

SEQ ID NO: 2830074 - DNA, 25 bp, Homo sapien
catatgaggtttggtcactggtcca

SEQ ID NO: 2830075 - DNA, 25 bp, Homo sapien
aatgccaggtgttccctttcaaggg

SEQ ID NO: 2830076 - DNA, 25 bp, Homo sapien
taatggtctcacaagcagtcaaggt

SEQ ID NO: 2830077 - DNA, 25 bp, Homo sapien
gacgctgtcatcgttcccttgagag

SEQ ID NO: 2830078 - DNA, 25 bp, Homo sapien
catgtcgacactctctaggctgatc

SEQ ID NO: 2830079 - DNA, 25 bp, Homo sapien
tggccgtgtgcaagtagctgagccc

SEQ ID NO: 2830080 - DNA, 25 bp, Homo sapien
tccagtgtgtatgtgccgggcatga

SEQ ID NO: 2830081 - DNA, 25 bp, Homo sapien
ctgccccttgttaaatcccattcct

SEQ ID NO: 2830082 - DNA, 25 bp, Homo sapien
gtgggatcaggttcatgaatacttc

SEQ ID NO: 2830083 - DNA, 25 bp, Homo sapien
gaatagccgttgattttgcactcgt

SEQ ID NO: 2830084 - DNA, 25 bp, Homo sapien
tcatcgacctctgtatccagtgaca

SEQ ID NO: 2830085 - DNA, 25 bp, Homo sapien
aggcgcacttgtaactccccagggt

SEQ ID NO: 2830086 - DNA, 25 bp, Homo sapien
tggagaactggtcgaaggagaaccc

SEQ ID NO: 2830087 - DNA, 25 bp, Homo sapien
cacaggcattgggattggagcattc

SEQ ID NO: 2830088 - DNA, 25 bp, Homo sapien
tcttggaggacgagcactcattcac

SEQ ID NO: 2830089 - DNA, 25 bp, Homo sapien
gcaattagggatatctgctcatgta

SEQ ID NO: 2830090 - DNA, 25 bp, Homo sapien
ggactccattgcgagctcctttggg

SEQ ID NO: 2830091 - DNA, 25 bp, Homo sapien
aaggcaaaccggcttctggctggac

SEQ ID NO: 2830092 - DNA, 25 bp, Homo sapien
taaaccatttattcctctgctcatg

SEQ ID NO: 2830093 - DNA, 25 bp, Homo sapien
acatctgtagccacccaggatgttc

SEQ ID NO: 2830094 - DNA, 25 bp, Homo sapien
agagagaaccctctttggcattcac

SEQ ID NO: 2830095 - DNA, 25 bp, Homo sapien
tcacagttcagtccggtggcatcaa

SEQ ID NO: 2830096 - DNA, 25 bp, Homo sapien
tccctttgctccacaaagcgaaggt

SEQ ID NO: 2830097 - DNA, 25 bp, Homo sapien
ggttgagacccacattcgttgttgt

SEQ ID NO: 2830098 - DNA, 25 bp, Homo sapien
agaggaactggcagttatgctgctt

SEQ ID NO: 2830099 - DNA, 25 bp, Homo sapien
cgatacaagcagtgtgatgctgtgt

SEQ ID NO: 2830100 - DNA, 25 bp, Homo sapien
cagtgtgatgctgtgtgaaaccagg

SEQ ID NO: 2830101 - DNA, 25 bp, Homo sapien
ggaactggcagttatgctgctttgt

SEQ ID NO: 2830102 - DNA, 25 bp, Homo sapien
catgaacactgataactcccctcag

SEQ ID NO: 2830103 - DNA, 25 bp, Homo sapien
gtttcggggactgggagcattcatc

SEQ ID NO: 2830104 - DNA, 25 bp, Homo sapien
ttgcaggacataccccctcggacat

SEQ ID NO: 2830105 - DNA, 25 bp, Homo sapien
tgcagatgtagttgcatggtttcgg

SEQ ID NO: 2830106 - DNA, 25 bp, Homo sapien
gaagcatcggaatgagcccatggta

SEQ ID NO: 2830107 - DNA, 25 bp, Homo sapien
tgtagccaaccttgcagaagcatcg

SEQ ID NO: 2830108 - DNA, 25 bp, Homo sapien
ggtgcagaggtttggcattacctta

SEQ ID NO: 2830109 - DNA, 25 bp, Homo sapien
tatacaagaggttccactgatgtct

SEQ ID NO: 2830110 - DNA, 25 bp, Homo sapien
gacgagattgcgactactggatgcc

SEQ ID NO: 2830111 - DNA, 25 bp, Homo sapien
ccaggaagtgggcaaagctcgcact

SEQ ID NO: 2830112 - DNA, 25 bp, Homo sapien
tatcctgggccatgaggacatatct

SEQ ID NO: 2830113 - DNA, 25 bp, Homo sapien
gcagcattctgacttagtgacgaga

SEQ ID NO: 2830114 - DNA, 25 bp, Homo sapien
gcaaagcagagaccctgtcgattgt

SEQ ID NO: 2830115 - DNA, 25 bp, Homo sapien
tgcaaagcagagaccctgtcgattg

SEQ ID NO: 2830116 - DNA, 25 bp, Homo sapien
ctgcaaagcagagaccctgtcgatt

SEQ ID NO: 2830117 - DNA, 25 bp, Homo sapien
gaagcatgtggattattgagattgg

SEQ ID NO: 2830118 - DNA, 25 bp, Homo sapien
gattgggggatttgtttagcagaca

SEQ ID NO: 2830119 - DNA, 25 bp, Homo sapien
tatttacattacacatagatgtgca

SEQ ID NO: 2830120 - DNA, 25 bp, Homo sapien
cacatagatgtgcatataacacaca

SEQ ID NO: 2830121 - DNA, 25 bp, Homo sapien
ataatatatttggatgtcaacttac

SEQ ID NO: 2830122 - DNA, 25 bp, Homo sapien
gtataatatatttggatgtcaactt

SEQ ID NO: 2830123 - DNA, 25 bp, Homo sapien
caagtataatatatttggatgtcaa

SEQ ID NO: 2830124 - DNA, 25 bp, Homo sapien
aagtataatatatttggatgtcaac

SEQ ID NO: 2830125 - DNA, 25 bp, Homo sapien
cattacactcacatctatagcttcc

SEQ ID NO: 2830126 - DNA, 25 bp, Homo sapien
taatgttaacacaacgtccattttc

SEQ ID NO: 2830127 - DNA, 25 bp, Homo sapien
ttcattacactcacatctatagctt

SEQ ID NO: 2830128 - DNA, 25 bp, Homo sapien
taacacaacgtccattttcacagat

SEQ ID NO: 2830129 - DNA, 25 bp, Homo sapien
gaaaaacaaacaatatgaataatga

SEQ ID NO: 2830130 - DNA, 25 bp, Homo sapien
aaaacaaacaatatgaataatgaga

SEQ ID NO: 2830131 - DNA, 25 bp, Homo sapien
acaaacaatatgaataatgagaaaa

SEQ ID NO: 2830132 - DNA, 25 bp, Homo sapien
aaacaaacaatatgaataatgagaa

SEQ ID NO: 2830133 - DNA, 25 bp, Homo sapien
cacagtcgtgtaacccttcagcaca

SEQ ID NO: 2830134 - DNA, 25 bp, Homo sapien
gaaggtgccgattagattcttacac

SEQ ID NO: 2830135 - DNA, 25 bp, Homo sapien
acagccttctccatcgggccttcgg

SEQ ID NO: 2830136 - DNA, 25 bp, Homo sapien
tcttacacatcatgcccctagattc

SEQ ID NO: 2830137 - DNA, 25 bp, Homo sapien
aagtgttcatgcagcggaaagcaca

SEQ ID NO: 2830138 - DNA, 25 bp, Homo sapien
gcacgtgcattcataggacccaaaa

SEQ ID NO: 2830139 - DNA, 25 bp, Homo sapien
cagcagtgggttctgggcacattcg

SEQ ID NO: 2830140 - DNA, 25 bp, Homo sapien
tgagggcatagccaatcgggcacgt

SEQ ID NO: 2830141 - DNA, 25 bp, Homo sapien
catctagtcagctcaagtggcatga

SEQ ID NO: 2830142 - DNA, 25 bp, Homo sapien
tacttggcggtcatacacaaagcaa

SEQ ID NO: 2830143 - DNA, 25 bp, Homo sapien
gagggtctgctattgtgcctaccag

SEQ ID NO: 2830144 - DNA, 25 bp, Homo sapien
gagggaatcttagggcaaccaagtc

SEQ ID NO: 2830145 - DNA, 25 bp, Homo sapien
accgtatgctcaccagcagaatatc

SEQ ID NO: 2830146 - DNA, 25 bp, Homo sapien
ccgtatgctcaccagcagaatatca

SEQ ID NO: 2830147 - DNA, 25 bp, Homo sapien
ctggctcaaagccttcattgcaatt

SEQ ID NO: 2830148 - DNA, 25 bp, Homo sapien
aattcatcatgggccctggctcaaa

SEQ ID NO: 2830149 - DNA, 25 bp, Homo sapien
tcaaaactcccaataacattggtgc

SEQ ID NO: 2830150 - DNA, 25 bp, Homo sapien
ggctcaaagccttcattgcaattgc

SEQ ID NO: 2830151 - DNA, 25 bp, Homo sapien
acggattgccgattgaacactcatc

SEQ ID NO: 2830152 - DNA, 25 bp, Homo sapien
catttccacacggattgccgattga

SEQ ID NO: 2830153 - DNA, 25 bp, Homo sapien
tccacacggattgccgattgaacac

SEQ ID NO: 2830154 - DNA, 25 bp, Homo sapien
acacggattgccgattgaacactca

SEQ ID NO: 2830155 - DNA, 25 bp, Homo sapien
tctgagaagggcacatgtaaccctg

SEQ ID NO: 2830156 - DNA, 25 bp, Homo sapien
cacatgtaaccctggcatcccttgg

SEQ ID NO: 2830157 - DNA, 25 bp, Homo sapien
aggatctgagaagggcacatgtaac

SEQ ID NO: 2830158 - DNA, 25 bp, Homo sapien
gaagggcacatgtaaccctggcatc

SEQ ID NO: 2830159 - DNA, 25 bp, Homo sapien
tagtcaaggttgtagcccattggac

SEQ ID NO: 2830160 - DNA, 25 bp, Homo sapien
gatccgtcggtgttgatacattgac

SEQ ID NO: 2830161 - DNA, 25 bp, Homo sapien
aatgcctgggctctcaagacactca

SEQ ID NO: 2830162 - DNA, 25 bp, Homo sapien
cattcacagcgaaaagatccgtcgg

SEQ ID NO: 2830163 - DNA, 25 bp, Homo sapien
tgaagactagggacagttccatggc

SEQ ID NO: 2830164 - DNA, 25 bp, Homo sapien
tgtatcatgaagactagggacagtt

SEQ ID NO: 2830165 - DNA, 25 bp, Homo sapien
cacgtgtatcatgaagactagggac

SEQ ID NO: 2830166 - DNA, 25 bp, Homo sapien
cttcacgtgtatcatgaagactagg

SEQ ID NO: 2830167 - DNA, 25 bp, Homo sapien
ttgtgaagcagaagctctggcgagt

SEQ ID NO: 2830168 - DNA, 25 bp, Homo sapien
gtgaagcagaagctctggcgagtat

SEQ ID NO: 2830169 - DNA, 25 bp, Homo sapien
tttgtgaagcagaagctctggcgag

SEQ ID NO: 2830170 - DNA, 25 bp, Homo sapien
tgtgaagcagaagctctggcgagta

SEQ ID NO: 2830171 - DNA, 25 bp, Homo sapien
tggaagccccctggagtattagtac

SEQ ID NO: 2830172 - DNA, 25 bp, Homo sapien
tattagtacaggaaccaaaaagaca

SEQ ID NO: 2830173 - DNA, 25 bp, Homo sapien
gacaaatgttgggatcttcatcaca

SEQ ID NO: 2830174 - DNA, 25 bp, Homo sapien
aaaagacaaatgttgggatcttcat

SEQ ID NO: 2830175 - DNA, 25 bp, Homo sapien
caagagccgggaagggcgacacact

SEQ ID NO: 2830176 - DNA, 25 bp, Homo sapien
ggaagggcgacacactcattagtgt

SEQ ID NO: 2830177 - DNA, 25 bp, Homo sapien
cagatgcatctgaaggatccctcca

SEQ ID NO: 2830178 - DNA, 25 bp, Homo sapien
ctcgctttttacttcataccctggg

SEQ ID NO: 2830179 - DNA, 25 bp, Homo sapien
catagacacttgaaagaaccaattt

SEQ ID NO: 2830180 - DNA, 25 bp, Homo sapien
tgccatctggggtaagttcataacc

SEQ ID NO: 2830181 - DNA, 25 bp, Homo sapien
taaccttcgttacatagacacttga

SEQ ID NO: 2830182 - DNA, 25 bp, Homo sapien
taaaacaacgtccatttctgcacac

SEQ ID NO: 2830183 - DNA, 25 bp, Homo sapien
tcaaaccctgggtagcacagacagt

SEQ ID NO: 2830184 - DNA, 25 bp, Homo sapien
catttccacatggatgccgctcgca

SEQ ID NO: 2830185 - DNA, 25 bp, Homo sapien
cacagacagttataggatccaacgg

SEQ ID NO: 2830186 - DNA, 25 bp, Homo sapien
ggatgccgctcgcactcatcaacat

SEQ ID NO: 2830187 - DNA, 25 bp, Homo sapien
gccatgactgcaaacgttaggaatt

SEQ ID NO: 2830188 - DNA, 25 bp, Homo sapien
gatgcactggtaacttccttgcaga

SEQ ID NO: 2830189 - DNA, 25 bp, Homo sapien
gtcctgagaagccttaaagccattg

SEQ ID NO: 2830190 - DNA, 25 bp, Homo sapien
agaagccttaaagccattgtggcag

SEQ ID NO: 2830191 - DNA, 25 bp, Homo sapien
gcattccgctggcagagattatcac

SEQ ID NO: 2830192 - DNA, 25 bp, Homo sapien
tgaaagtttgaaacccgcggcacat

SEQ ID NO: 2830193 - DNA, 25 bp, Homo sapien
taccaggactattgatgcagtctgc

SEQ ID NO: 2830194 - DNA, 25 bp, Homo sapien
tacacaggccccattgggtgaaagt

SEQ ID NO: 2830195 - DNA, 25 bp, Homo sapien
tcacagcggaaactgccaatctggt

SEQ ID NO: 2830196 - DNA, 25 bp, Homo sapien
gcattcacagcggaaactgccaatc

SEQ ID NO: 2830197 - DNA, 25 bp, Homo sapien
tctggttaatgcacacaccatttgc

SEQ ID NO: 2830198 - DNA, 25 bp, Homo sapien
gaaactgccaatctggttaatgcac

SEQ ID NO: 2830199 - DNA, 25 bp, Homo sapien
aatatttccacatatggttttaaag

SEQ ID NO: 2830200 - DNA, 25 bp, Homo sapien
gaatatttccacatatggttttaaa

SEQ ID NO: 2830201 - DNA, 25 bp, Homo sapien
caaaggtgaatccaggaatatttcc

SEQ ID NO: 2830202 - DNA, 25 bp, Homo sapien
aaggtgaatccaggaatatttccac

SEQ ID NO: 2830203 - DNA, 25 bp, Homo sapien
cacaaggtttgttccaggctttgcc

SEQ ID NO: 2830204 - DNA, 25 bp, Homo sapien
caagtggttccattatagcttcggt

SEQ ID NO: 2830205 - DNA, 25 bp, Homo sapien
cccacattatatgtgcagcagcaca

SEQ ID NO: 2830206 - DNA, 25 bp, Homo sapien
gttcctggagttgggcatggttcac

SEQ ID NO: 2830207 - DNA, 25 bp, Homo sapien
ccaggatgtgcaaaacactcatcaa

SEQ ID NO: 2830208 - DNA, 25 bp, Homo sapien
cacacaccaggatgtgcaaaacact

SEQ ID NO: 2830209 - DNA, 25 bp, Homo sapien
cagggtgttatagcaggtcccaggc

SEQ ID NO: 2830210 - DNA, 25 bp, Homo sapien
ttcccagggtgttatagcaggtccc

SEQ ID NO: 2830211 - DNA, 25 bp, Homo sapien
tttccaccctggcagagacctggta

SEQ ID NO: 2830212 - DNA, 25 bp, Homo sapien
tgaggtagtagccttgtgggcactc

SEQ ID NO: 2830213 - DNA, 25 bp, Homo sapien
tcacagatgcgggtatcctcgctga

SEQ ID NO: 2830214 - DNA, 25 bp, Homo sapien
ggtaactcctggcattcgtcaatgt

SEQ ID NO: 2830215 - DNA, 25 bp, Homo sapien
aagggagacagtgcacttaaaacaa

SEQ ID NO: 2830216 - DNA, 25 bp, Homo sapien
ttgaatctgggtgacaatgggatta

SEQ ID NO: 2830217 - DNA, 25 bp, Homo sapien
tgaatctgggtgacaatgggattag

SEQ ID NO: 2830218 - DNA, 25 bp, Homo sapien
gaatctgggtgacaatgggattagc

SEQ ID NO: 2830219 - DNA, 25 bp, Homo sapien
cttcacctccgggacacagggtgta

SEQ ID NO: 2830220 - DNA, 25 bp, Homo sapien
gggttaggtctgaagccttcacctc

SEQ ID NO: 2830221 - DNA, 25 bp, Homo sapien
ccgggacacagggtgtaatattcag

SEQ ID NO: 2830222 - DNA, 25 bp, Homo sapien
taggtctgaagccttcacctccggg

SEQ ID NO: 2830223 - DNA, 25 bp, Homo sapien
ccaccccgatctcggtgttgcaaga

SEQ ID NO: 2830224 - DNA, 25 bp, Homo sapien
tctcctcgaggtccaaacttcaggt

SEQ ID NO: 2830225 - DNA, 25 bp, Homo sapien
gatctcggtgttgcaagacagactc

SEQ ID NO: 2830226 - DNA, 25 bp, Homo sapien
tcaggtagcagttgcccacacggtt

SEQ ID NO: 2830227 - DNA, 25 bp, Homo sapien
ggatttgcctatacttagccttcag

SEQ ID NO: 2830228 - DNA, 25 bp, Homo sapien
tcatttaccaactacatccaaggaa

SEQ ID NO: 2830229 - DNA, 25 bp, Homo sapien
cattggcatatacagccacaaaagg

SEQ ID NO: 2830230 - DNA, 25 bp, Homo sapien
ttttgttgatgagaggacagccgtc

SEQ ID NO: 2830231 - DNA, 25 bp, Homo sapien
cacataggccattgacacagtttat

SEQ ID NO: 2830232 - DNA, 25 bp, Homo sapien
ggttcaactgaaaatcgggtgggca

SEQ ID NO: 2830233 - DNA, 25 bp, Homo sapien
agttacactcatagcgaccaggcgt

SEQ ID NO: 2830234 - DNA, 25 bp, Homo sapien
gaccaggcgtgttgacacataggcc

SEQ ID NO: 2830235 - DNA, 25 bp, Homo sapien
ctgtccaattcataaccatcatcgc

SEQ ID NO: 2830236 - DNA, 25 bp, Homo sapien
gtccaattcataaccatcatcgcag

SEQ ID NO: 2830237 - DNA, 25 bp, Homo sapien
ccatcatcgcagatgcaatgaaaca

SEQ ID NO: 2830238 - DNA, 25 bp, Homo sapien
gttttggaaggagcattcatcaata

SEQ ID NO: 2830239 - DNA, 25 bp, Homo sapien
actgtattaataggtgcgggccacc

SEQ ID NO: 2830240 - DNA, 25 bp, Homo sapien
gcactgtattaataggtgcgggcca

SEQ ID NO: 2830241 - DNA, 25 bp, Homo sapien
tgttgtataaaagaacgcattttaa

SEQ ID NO: 2830242 - DNA, 25 bp, Homo sapien
ctgtattaataggtgcgggccacca

SEQ ID NO: 2830243 - DNA, 25 bp, Homo sapien
gatatcatactaggcacaaagaccc

SEQ ID NO: 2830244 - DNA, 25 bp, Homo sapien
tgaagaggacttccattcccagaca

SEQ ID NO: 2830245 - DNA, 25 bp, Homo sapien
gacagcagtctcaaccacgaaggta

SEQ ID NO: 2830246 - DNA, 25 bp, Homo sapien
ggctcttggccaggaaaacttcata

SEQ ID NO: 2830247 - DNA, 25 bp, Homo sapien
tgtggttgatccaacttgaaaatga

SEQ ID NO: 2830248 - DNA, 25 bp, Homo sapien
aaaatgagttggaatcctggtgacc

SEQ ID NO: 2830249 - DNA, 25 bp, Homo sapien
caacttgaaaatgagttggaatcct

SEQ ID NO: 2830250 - DNA, 25 bp, Homo sapien
atgagttggaatcctggtgacccac

SEQ ID NO: 2830251 - DNA, 25 bp, Homo sapien
gcagcgatatgcacccgggacatta

SEQ ID NO: 2830252 - DNA, 25 bp, Homo sapien
atctcacactcgcagcgatatgcac

SEQ ID NO: 2830253 - DNA, 25 bp, Homo sapien
tgtccgttctcacagaggtttatgt

SEQ ID NO: 2830254 - DNA, 25 bp, Homo sapien
gggacattaaggcactgtccgttct

SEQ ID NO: 2830255 - DNA, 25 bp, Homo sapien
cacattcacttaaaggagggtatca

SEQ ID NO: 2830256 - DNA, 25 bp, Homo sapien
gttaagttccaaatttcatgacaca

SEQ ID NO: 2830257 - DNA, 25 bp, Homo sapien
cagttttactggcttgacttaatgc

SEQ ID NO: 2830258 - DNA, 25 bp, Homo sapien
gcaaattacatctctgttaagttcc

SEQ ID NO: 2830259 - DNA, 25 bp, Homo sapien
taataggagaaacgcagacatctct

SEQ ID NO: 2830260 - DNA, 25 bp, Homo sapien
tgtgctggtggcctgacatgcattt

SEQ ID NO: 2830261 - DNA, 25 bp, Homo sapien
ccacagtgcggagaaatgccaggaa

SEQ ID NO: 2830262 - DNA, 25 bp, Homo sapien
taatgcatgttgactgagccaggat

SEQ ID NO: 2830263 - DNA, 25 bp, Homo sapien
gatacatagtcacctgcaagtcaag

SEQ ID NO: 2830264 - DNA, 25 bp, Homo sapien
tagagtgttctatgaccatcccgtc

SEQ ID NO: 2830265 - DNA, 25 bp, Homo sapien
tagtctgatccagacaaagcctgtg

SEQ ID NO: 2830266 - DNA, 25 bp, Homo sapien
taaaatggcgagtcattaacagtac

SEQ ID NO: 2830267 - DNA, 25 bp, Homo sapien
cagtgaaaccttcggagcaggcaca

SEQ ID NO: 2830268 - DNA, 25 bp, Homo sapien
tgctacactggtgggttccattaga

SEQ ID NO: 2830269 - DNA, 25 bp, Homo sapien
tatttacacactgagcattgatgct

SEQ ID NO: 2830270 - DNA, 25 bp, Homo sapien
gcaggtaaagccatcaccagtgaaa

SEQ ID NO: 2830271 - DNA, 25 bp, Homo sapien
caccagctgcatatcaatttttact

SEQ ID NO: 2830272 - DNA, 25 bp, Homo sapien
aaggacacccttaggcaggaattat

SEQ ID NO: 2830273 - DNA, 25 bp, Homo sapien
tttgtgccttagcaaaggatattta

SEQ ID NO: 2830274 - DNA, 25 bp, Homo sapien
aattaataaaagtgaagagcatgat

SEQ ID NO: 2830275 - DNA, 25 bp, Homo sapien
cctgggatattcagacatgaggcat

SEQ ID NO: 2830276 - DNA, 25 bp, Homo sapien
catgaggcatgcatgtcgcagttat

SEQ ID NO: 2830277 - DNA, 25 bp, Homo sapien
gccttctctgcagctacacttgaag

SEQ ID NO: 2830278 - DNA, 25 bp, Homo sapien
gcagttatgagcaccaatttcacac

SEQ ID NO: 2830279 - DNA, 25 bp, Homo sapien
acagcgtgctaccacagagaccagc

SEQ ID NO: 2830280 - DNA, 25 bp, Homo sapien
ggctcagacagcgtgctaccacaga

SEQ ID NO: 2830281 - DNA, 25 bp, Homo sapien
ctcagacagcgtgctaccacagaga

SEQ ID NO: 2830282 - DNA, 25 bp, Homo sapien
agacagcgtgctaccacagagacca

SEQ ID NO: 2830283 - DNA, 25 bp, Homo sapien
agctgacagtggcaaatgaaggatc

SEQ ID NO: 2830284 - DNA, 25 bp, Homo sapien
cagctgacagtggcaaatgaaggat

SEQ ID NO: 2830285 - DNA, 25 bp, Homo sapien
gctgacagtggcaaatgaaggatcc

SEQ ID NO: 2830286 - DNA, 25 bp, Homo sapien
ctgacagtggcaaatgaaggatccc

SEQ ID NO: 2830287 - DNA, 25 bp, Homo sapien
gcagatatttgaatttaggtcacat

SEQ ID NO: 2830288 - DNA, 25 bp, Homo sapien
aatgttggtacactggccgccatca

SEQ ID NO: 2830289 - DNA, 25 bp, Homo sapien
cacagatatcaggattgttttcaca

SEQ ID NO: 2830290 - DNA, 25 bp, Homo sapien
caatgcatgttttcatgtccatgga

SEQ ID NO: 2830291 - DNA, 25 bp, Homo sapien
catagcagaggcagcgatactctcc

SEQ ID NO: 2830292 - DNA, 25 bp, Homo sapien
ctgcacacgatctcccatctggcat

SEQ ID NO: 2830293 - DNA, 25 bp, Homo sapien
gctgcattcgtagcttccctctgaa

SEQ ID NO: 2830294 - DNA, 25 bp, Homo sapien
gggtgtcacagcctccgttcattat

SEQ ID NO: 2830295 - DNA, 25 bp, Homo sapien
gcctccgttcattatcatacattca

SEQ ID NO: 2830296 - DNA, 25 bp, Homo sapien
gtctggcgtagcctgatatccagga

SEQ ID NO: 2830297 - DNA, 25 bp, Homo sapien
ctgtacagccctggcggtctggcgt

SEQ ID NO: 2830298 - DNA, 25 bp, Homo sapien
tccaggattgcaagagcactgatag

SEQ ID NO: 2830299 - DNA, 25 bp, Homo sapien
cactgataggttccaatcatgttca

SEQ ID NO: 2830300 - DNA, 25 bp, Homo sapien
tcctcacgggatggtgacagctcgt

SEQ ID NO: 2830301 - DNA, 25 bp, Homo sapien
gagagggttacgttcacattcgtca

SEQ ID NO: 2830302 - DNA, 25 bp, Homo sapien
gacagctcgtgtcccagtgggcagt

SEQ ID NO: 2830303 - DNA, 25 bp, Homo sapien
agtgttcacacaggtgccaccccta

SEQ ID NO: 2830304 - DNA, 25 bp, Homo sapien
gccttcgaagcactcgcactcaaag

SEQ ID NO: 2830305 - DNA, 25 bp, Homo sapien
tcatagccttcgaagcactcgcact

SEQ ID NO: 2830306 - DNA, 25 bp, Homo sapien
caaagctgcccggtgtattgacgca

SEQ ID NO: 2830307 - DNA, 25 bp, Homo sapien
gtgtattgacgcagattccactgcc

SEQ ID NO: 2830308 - DNA, 25 bp, Homo sapien
aacgggatggtagcttgagagaaaa

SEQ ID NO: 2830309 - DNA, 25 bp, Homo sapien
cagcaggaaaacgggatggtagctt

SEQ ID NO: 2830310 - DNA, 25 bp, Homo sapien
tgaacctgtgtataagttgaggaac

SEQ ID NO: 2830311 - DNA, 25 bp, Homo sapien
aagggctgaggagatattttgaacc

SEQ ID NO: 2830312 - DNA, 25 bp, Homo sapien
ctagagagaggagagaggagcgaac

SEQ ID NO: 2830313 - DNA, 25 bp, Homo sapien
ctgctgagacaacccagagcaggag

SEQ ID NO: 2830314 - DNA, 25 bp, Homo sapien
gaagcttccgattgtatttctgcac

SEQ ID NO: 2830315 - DNA, 25 bp, Homo sapien
cataagtgcacatcccaggaaatgc

SEQ ID NO: 2830316 - DNA, 25 bp, Homo sapien
cctccatgtctagagcaaagccact

SEQ ID NO: 2830317 - DNA, 25 bp, Homo sapien
tattgcaacggcatttgaagcttcc

SEQ ID NO: 2830318 - DNA, 25 bp, Homo sapien
tcatcccacttcaagtaacactgct

SEQ ID NO: 2830319 - DNA, 25 bp, Homo sapien
aagaacatcccctcggttagcaaag

SEQ ID NO: 2830320 - DNA, 25 bp, Homo sapien
gcaggcatccatgcggaactttcca

SEQ ID NO: 2830321 - DNA, 25 bp, Homo sapien
cagcgtctcgtattccttggtgcca

SEQ ID NO: 2830322 - DNA, 25 bp, Homo sapien
gggcactcgcaatgaaaagatccct

SEQ ID NO: 2830323 - DNA, 25 bp, Homo sapien
gtcccatccaacgtaaggccttcag

SEQ ID NO: 2830324 - DNA, 25 bp, Homo sapien
catttggacaaacgccagggaacac

SEQ ID NO: 2830325 - DNA, 25 bp, Homo sapien
ttactgttgacacagcgtccatttg

SEQ ID NO: 2830326 - DNA, 25 bp, Homo sapien
ttcacacgtaacacctttaatcctg

SEQ ID NO: 2830327 - DNA, 25 bp, Homo sapien
tcacacgtaacacctttaatcctgg

SEQ ID NO: 2830328 - DNA, 25 bp, Homo sapien
ggatgttgagccaacaggtcccctt

SEQ ID NO: 2830329 - DNA, 25 bp, Homo sapien
tccattaatattcacctcacagcgg

SEQ ID NO: 2830330 - DNA, 25 bp, Homo sapien
tcagagtggctccattaatattcac

SEQ ID NO: 2830331 - DNA, 25 bp, Homo sapien
tagttcacaccgctcacaggggctc

SEQ ID NO: 2830332 - DNA, 25 bp, Homo sapien
gacacatgggttgctttcacattca

SEQ ID NO: 2830333 - DNA, 25 bp, Homo sapien
caatacagatcaatcctgtggagct

SEQ ID NO: 2830334 - DNA, 25 bp, Homo sapien
tctgcaggccccattgacacatggg

SEQ ID NO: 2830335 - DNA, 25 bp, Homo sapien
gctgccgggcgaacattcacaattg

SEQ ID NO: 2830336 - DNA, 25 bp, Homo sapien
caatccagaaggaaaagattctgtt

SEQ ID NO: 2830337 - DNA, 25 bp, Homo sapien
tccagaaggaaaagattctgttaga

SEQ ID NO: 2830338 - DNA, 25 bp, Homo sapien
ccagaaggaaaagattctgttagaa

SEQ ID NO: 2830339 - DNA, 25 bp, Homo sapien
ctacaatccagaaggaaaagattct

SEQ ID NO: 2830340 - DNA, 25 bp, Homo sapien
cacatctataggactgggaactcag

SEQ ID NO: 2830341 - DNA, 25 bp, Homo sapien
ggagacatgcattttacatcgtgga

SEQ ID NO: 2830342 - DNA, 25 bp, Homo sapien
cagtgatcagcctattgggaaagag

SEQ ID NO: 2830343 - DNA, 25 bp, Homo sapien
ggaactcagtaggaccacagtgatc

SEQ ID NO: 2830344 - DNA, 25 bp, Homo sapien
cagtgtactcactgctcagccagta

SEQ ID NO: 2830345 - DNA, 25 bp, Homo sapien
ctgtaggcccacacagtgagattta

SEQ ID NO: 2830346 - DNA, 25 bp, Homo sapien
tgttatgggacccttctgtaggccc

SEQ ID NO: 2830347 - DNA, 25 bp, Homo sapien
gggctattccacagtcatcaaagat

SEQ ID NO: 2830348 - DNA, 25 bp, Homo sapien
tcttttcactacattgcttcatcac

SEQ ID NO: 2830349 - DNA, 25 bp, Homo sapien
atgcacaaataaggcgatgaagaca

SEQ ID NO: 2830350 - DNA, 25 bp, Homo sapien
tatgcacaaataaggcgatgaagac

SEQ ID NO: 2830351 - DNA, 25 bp, Homo sapien
gcacaatccgttatcacaaagcagt

SEQ ID NO: 2830352 - DNA, 25 bp, Homo sapien
tcctggcgtgtttcggcacaatccg

SEQ ID NO: 2830353 - DNA, 25 bp, Homo sapien
taccctggtgggcacgtacagctgt

SEQ ID NO: 2830354 - DNA, 25 bp, Homo sapien
tctgtctcagtcctgaacacatacc

SEQ ID NO: 2830355 - DNA, 25 bp, Homo sapien
ccagcttgcatcacaattttttaac

SEQ ID NO: 2830356 - DNA, 25 bp, Homo sapien
acatgaccggtgtccatgtgaaaag

SEQ ID NO: 2830357 - DNA, 25 bp, Homo sapien
ttgttagggtaggttgtgagtcaac

SEQ ID NO: 2830358 - DNA, 25 bp, Homo sapien
ccatttttctaagctatggattgaa

SEQ ID NO: 2830359 - DNA, 25 bp, Homo sapien
catctggttcatagccactgttgca

SEQ ID NO: 2830360 - DNA, 25 bp, Homo sapien
cccattggcacatatatcaggatcc

SEQ ID NO: 2830361 - DNA, 25 bp, Homo sapien
taagttttcacaaatcccattggca

SEQ ID NO: 2830362 - DNA, 25 bp, Homo sapien
ttgcaattacaacggtaactaccac

SEQ ID NO: 2830363 - DNA, 25 bp, Homo sapien
tgaaagtttagtgctatcaacaaac

SEQ ID NO: 2830364 - DNA, 25 bp, Homo sapien
ttattgtttgttgataaatgcaggt

SEQ ID NO: 2830365 - DNA, 25 bp, Homo sapien
aatattgaaagtttagtgctatcaa

SEQ ID NO: 2830366 - DNA, 25 bp, Homo sapien
agtttagtgctatcaacaaacatgt

SEQ ID NO: 2830367 - DNA, 25 bp, Homo sapien
ccattcaacatatgaagtgtttaac

SEQ ID NO: 2830368 - DNA, 25 bp, Homo sapien
ctagtaaagaccattcaacatatga

SEQ ID NO: 2830369 - DNA, 25 bp, Homo sapien
ctctgcaaactcacaatttgcctgc

SEQ ID NO: 2830370 - DNA, 25 bp, Homo sapien
tgcaaactcacaatttgcctgcctt

SEQ ID NO: 2830371 - DNA, 25 bp, Homo sapien
ggatgcttcagaacatgacgtttta

SEQ ID NO: 2830372 - DNA, 25 bp, Homo sapien
gactactactactatatcaccgagg

SEQ ID NO: 2830373 - DNA, 25 bp, Homo sapien
taacgagccgtgaacatgactacta

SEQ ID NO: 2830374 - DNA, 25 bp, Homo sapien
ttactggagaggacactttaaacat

SEQ ID NO: 2830375 - DNA, 25 bp, Homo sapien
ctcttccatccacagtgatacctac

SEQ ID NO: 2830376 - DNA, 25 bp, Homo sapien
tccactactacaaaggccgtggaat

SEQ ID NO: 2830377 - DNA, 25 bp, Homo sapien
ccaaaaccatagtctggattggcac

SEQ ID NO: 2830378 - DNA, 25 bp, Homo sapien
ttcttgattcctccatagcaggtac

SEQ ID NO: 2830379 - DNA, 25 bp, Homo sapien
attcggacttggtcactgcaccggg

SEQ ID NO: 2830380 - DNA, 25 bp, Homo sapien
catagcaggtactgcgcatgtgagt

SEQ ID NO: 2830381 - DNA, 25 bp, Homo sapien
tgatactgtgaactatcagttgaga

SEQ ID NO: 2830382 - DNA, 25 bp, Homo sapien
tcacagcggaaggacccttcactgt

SEQ ID NO: 2830383 - DNA, 25 bp, Homo sapien
gggacagtcacagcggaaggaccct

SEQ ID NO: 2830384 - DNA, 25 bp, Homo sapien
gcggaaggacccttcactgttgatg

SEQ ID NO: 2830385 - DNA, 25 bp, Homo sapien
gaaggacccttcactgttgatgcag

SEQ ID NO: 2830386 - DNA, 25 bp, Homo sapien
cagtgggtgacagaagccaagcagt

SEQ ID NO: 2830387 - DNA, 25 bp, Homo sapien
ctgtgcagtgggtgacagaagccaa

SEQ ID NO: 2830388 - DNA, 25 bp, Homo sapien
tgcagtgggtgacagaagccaagca

SEQ ID NO: 2830389 - DNA, 25 bp, Homo sapien
gtgggtgacagaagccaagcagtta

SEQ ID NO: 2830390 - DNA, 25 bp, Homo sapien
tttcctatctgaaagccacacatac

SEQ ID NO: 2830391 - DNA, 25 bp, Homo sapien
tacagtaacgcccatttggagccaa

SEQ ID NO: 2830392 - DNA, 25 bp, Homo sapien
cattgatgcacattccattcaaaca

SEQ ID NO: 2830393 - DNA, 25 bp, Homo sapien
cctggtttgcagatgcacttgaagc

SEQ ID NO: 2830394 - DNA, 25 bp, Homo sapien
caaacacatgttggtagttgtacat

SEQ ID NO: 2830395 - DNA, 25 bp, Homo sapien
ccatctgtagttaattcaaagccgg

SEQ ID NO: 2830396 - DNA, 25 bp, Homo sapien
cacgcatcgaccgtttttacaaaga

SEQ ID NO: 2830397 - DNA, 25 bp, Homo sapien
gccggcattgcaaatgcactggaaa

SEQ ID NO: 2830398 - DNA, 25 bp, Homo sapien
aagaaccccattctggatgcactca

SEQ ID NO: 2830399 - DNA, 25 bp, Homo sapien
gcttggtaggagtcctctggaatcc

SEQ ID NO: 2830400 - DNA, 25 bp, Homo sapien
ggtgtgttaacacaatctccattag

SEQ ID NO: 2830401 - DNA, 25 bp, Homo sapien
tctggaatccagcatgacatttaca

SEQ ID NO: 2830402 - DNA, 25 bp, Homo sapien
cattagtgcagggatttgatgtgca

SEQ ID NO: 2830403 - DNA, 25 bp, Homo sapien
tatcgaatagggagccctttctttg

SEQ ID NO: 2830404 - DNA, 25 bp, Homo sapien
ccactgtcagaggtgtagtttgcaa

SEQ ID NO: 2830405 - DNA, 25 bp, Homo sapien
gactagccagctattgcagcatcat

SEQ ID NO: 2830406 - DNA, 25 bp, Homo sapien
cagtactgtactgttttggtagctg

SEQ ID NO: 2830407 - DNA, 25 bp, Homo sapien
gagttgtgcactccattagcagctt

SEQ ID NO: 2830408 - DNA, 25 bp, Homo sapien
gatggcacaagagcaatgatagttg

SEQ ID NO: 2830409 - DNA, 25 bp, Homo sapien
caccacgagtgcctgtctcaaggaa

SEQ ID NO: 2830410 - DNA, 25 bp, Homo sapien
gcttagcacaggttaaggcaatggc

SEQ ID NO: 2830411 - DNA, 25 bp, Homo sapien
cattcacatcggtagcttgagacag

SEQ ID NO: 2830412 - DNA, 25 bp, Homo sapien
tatacaatctccatttgcatcctgc

SEQ ID NO: 2830413 - DNA, 25 bp, Homo sapien
cttgagacagttggtatacagcgtc

SEQ ID NO: 2830414 - DNA, 25 bp, Homo sapien
gcttataacccatgttgcattcaca

SEQ ID NO: 2830415 - DNA, 25 bp, Homo sapien
catagccattgccattgccacttgg

SEQ ID NO: 2830416 - DNA, 25 bp, Homo sapien
tccagtgatgataggtccctgtccc

SEQ ID NO: 2830417 - DNA, 25 bp, Homo sapien
gagaaaagccattgcctccagggat

SEQ ID NO: 2830418 - DNA, 25 bp, Homo sapien
cctggaattcctcccattggaagtc

SEQ ID NO: 2830419 - DNA, 25 bp, Homo sapien
ggacaggcttcaggaatggttccga

SEQ ID NO: 2830420 - DNA, 25 bp, Homo sapien
aatggttccgatgccccagcagcgg

SEQ ID NO: 2830421 - DNA, 25 bp, Homo sapien
cacagcagcactgcattttcgtcat

SEQ ID NO: 2830422 - DNA, 25 bp, Homo sapien
cagaacctctgacaggacaggcttc

SEQ ID NO: 2830423 - DNA, 25 bp, Homo sapien
tccccgggagctcttgtgcacagcg

SEQ ID NO: 2830424 - DNA, 25 bp, Homo sapien
tctccccgggagctcttgtgcacag

SEQ ID NO: 2830425 - DNA, 25 bp, Homo sapien
cccgggagctcttgtgcacagcggc

SEQ ID NO: 2830426 - DNA, 25 bp, Homo sapien
cgggagctcttgtgcacagcggcca

SEQ ID NO: 2830427 - DNA, 25 bp, Homo sapien
agtacataacttcttaacaaatagg

SEQ ID NO: 2830428 - DNA, 25 bp, Homo sapien
gaatcgagttcacggcagcaggtcg

SEQ ID NO: 2830429 - DNA, 25 bp, Homo sapien
tatatataggcaaacatacaggtaa

SEQ ID NO: 2830430 - DNA, 25 bp, Homo sapien
cttaaaacagctaggatagccactg

SEQ ID NO: 2830431 - DNA, 25 bp, Homo sapien
gagtacctggtctatcaatccctca

SEQ ID NO: 2830432 - DNA, 25 bp, Homo sapien
caacataaaacaaacccagttggat

SEQ ID NO: 2830433 - DNA, 25 bp, Homo sapien
tgaagtctttgcaaagagtacctgg

SEQ ID NO: 2830434 - DNA, 25 bp, Homo sapien
tcccaaaatgactttgacaacataa

SEQ ID NO: 2830435 - DNA, 25 bp, Homo sapien
aatagcttcccacggtgttggaaca

SEQ ID NO: 2830436 - DNA, 25 bp, Homo sapien
ccagtttcacatatcccaggaatga

SEQ ID NO: 2830437 - DNA, 25 bp, Homo sapien
tgaggttacatatccacgtggacaa

SEQ ID NO: 2830438 - DNA, 25 bp, Homo sapien
cgatgcatcgagagccatctgttga

SEQ ID NO: 2830439 - DNA, 25 bp, Homo sapien
atttgaatatgggagtatttgacat

SEQ ID NO: 2830440 - DNA, 25 bp, Homo sapien
tatgaaccattagccattggaagag

SEQ ID NO: 2830441 - DNA, 25 bp, Homo sapien
tatcaccattctgaaagccttgtcc

SEQ ID NO: 2830442 - DNA, 25 bp, Homo sapien
agaaatctggcatactaacttttcc

SEQ ID NO: 2830443 - DNA, 25 bp, Homo sapien
gagtctaccaaggtgcttatatcac

SEQ ID NO: 2830444 - DNA, 25 bp, Homo sapien
tcagggctgacgtagaaatgggtca

SEQ ID NO: 2830445 - DNA, 25 bp, Homo sapien
ctacctatgtcgataaagatgatca

SEQ ID NO: 2830446 - DNA, 25 bp, Homo sapien
tatgtcgataaagatgatcagggct

SEQ ID NO: 2830447 - DNA, 25 bp, Homo sapien
gtctcagttccagctaatgaaggtg

SEQ ID NO: 2830448 - DNA, 25 bp, Homo sapien
gcaatgcaaaagtcaggaaattcca

SEQ ID NO: 2830449 - DNA, 25 bp, Homo sapien
gaaagactcccttaatgttgggcaa

SEQ ID NO: 2830450 - DNA, 25 bp, Homo sapien
ggtgtgatcataaaatcctgaggat

SEQ ID NO: 2830451 - DNA, 25 bp, Homo sapien
cattaagcatcagtacatgaaggtg

SEQ ID NO: 2830452 - DNA, 25 bp, Homo sapien
ctctcacggatgattctagggataa

SEQ ID NO: 2830453 - DNA, 25 bp, Homo sapien
tgattctagggataataactcctct

SEQ ID NO: 2830454 - DNA, 25 bp, Homo sapien
caggttcctgacagcttatcctcat

SEQ ID NO: 2830455 - DNA, 25 bp, Homo sapien
ccaggttcctgacagcttatcctca

SEQ ID NO: 2830456 - DNA, 25 bp, Homo sapien
tccaggtagttgcatggacagagcc

SEQ ID NO: 2830457 - DNA, 25 bp, Homo sapien
caccctccaggtagttgcatggaca

SEQ ID NO: 2830458 - DNA, 25 bp, Homo sapien
gccaccctccaggtagttgcatgga

SEQ ID NO: 2830459 - DNA, 25 bp, Homo sapien
ccctccaggtagttgcatggacaga

SEQ ID NO: 2830460 - DNA, 25 bp, Homo sapien
gggcagaatcccttggcagttattc

SEQ ID NO: 2830461 - DNA, 25 bp, Homo sapien
taatctgaacgatgtgtccagcgcc

SEQ ID NO: 2830462 - DNA, 25 bp, Homo sapien
tattccctcaccaatctggacagag

SEQ ID NO: 2830463 - DNA, 25 bp, Homo sapien
gacaaagtcctttaagccagggcag

SEQ ID NO: 2830464 - DNA, 25 bp, Homo sapien
cattgggctatttacatgctagtac

SEQ ID NO: 2830465 - DNA, 25 bp, Homo sapien
gtatctaaaatgtcctgttctccag

SEQ ID NO: 2830466 - DNA, 25 bp, Homo sapien
gctactgactcctgtattaatccat

SEQ ID NO: 2830467 - DNA, 25 bp, Homo sapien
ggaatagtaaagtacactcttggct

SEQ ID NO: 2830468 - DNA, 25 bp, Homo sapien
taagcagagttggaacagcagcaga

SEQ ID NO: 2830469 - DNA, 25 bp, Homo sapien
ttttctgcctcccatgtaagccagg

SEQ ID NO: 2830470 - DNA, 25 bp, Homo sapien
gcagcagaggagactgtgccaacaa

SEQ ID NO: 2830471 - DNA, 25 bp, Homo sapien
tagtctggaagggaggatcacgcaa

SEQ ID NO: 2830472 - DNA, 25 bp, Homo sapien
aacataaatggctggattactccca

SEQ ID NO: 2830473 - DNA, 25 bp, Homo sapien
ggcatgcttcccaaagtagagagac

SEQ ID NO: 2830474 - DNA, 25 bp, Homo sapien
gataacaaactagatgcaaatgctc

SEQ ID NO: 2830475 - DNA, 25 bp, Homo sapien
tcaatgcaacacaactgagataaca

SEQ ID NO: 2830476 - DNA, 25 bp, Homo sapien
ctgtattgatacagtttcctccttg

SEQ ID NO: 2830477 - DNA, 25 bp, Homo sapien
tcctccttggcatatccctgggata

SEQ ID NO: 2830478 - DNA, 25 bp, Homo sapien
ctgtttgtgaccagcagggcatctg

SEQ ID NO: 2830479 - DNA, 25 bp, Homo sapien
tatccctgggatagcctggcattca

SEQ ID NO: 2830480 - DNA, 25 bp, Homo sapien
tcgtgcagacaatgcctgtcagctg

SEQ ID NO: 2830481 - DNA, 25 bp, Homo sapien
acgcccgtccaatggtggcacagca

SEQ ID NO: 2830482 - DNA, 25 bp, Homo sapien
gacctgagtgaaacacgggcctgtc

SEQ ID NO: 2830483 - DNA, 25 bp, Homo sapien
gcacagcacagagtcttcgtgcaga

SEQ ID NO: 2830484 - DNA, 25 bp, Homo sapien
tcgatgatcggtgaaacagaactga

SEQ ID NO: 2830485 - DNA, 25 bp, Homo sapien
tttcagtgaaacttttcgatgatcg

SEQ ID NO: 2830486 - DNA, 25 bp, Homo sapien
tctgaggattcaccaattcaattat

SEQ ID NO: 2830487 - DNA, 25 bp, Homo sapien
gaaacagaactgaatcatgaactaa

SEQ ID NO: 2830488 - DNA, 25 bp, Homo sapien
taaaaatgtaggatttcctatcaac

SEQ ID NO: 2830489 - DNA, 25 bp, Homo sapien
tttattccagcagtactgttccgac

SEQ ID NO: 2830490 - DNA, 25 bp, Homo sapien
tcatgactgttagcctttattccag

SEQ ID NO: 2830491 - DNA, 25 bp, Homo sapien
aaagaccccttttgattcatgactg

SEQ ID NO: 2830492 - DNA, 25 bp, Homo sapien
cagttctgtggtctgtaaaagaccc

SEQ ID NO: 2830493 - DNA, 25 bp, Homo sapien
tataattaggattttcttcatcaga

SEQ ID NO: 2830494 - DNA, 25 bp, Homo sapien
taattaggattttcttcatcagaca

SEQ ID NO: 2830495 - DNA, 25 bp, Homo sapien
aagtataattaggattttcttcatc

SEQ ID NO: 2830496 - DNA, 25 bp, Homo sapien
taggattttcttcatcagacaactt

SEQ ID NO: 2830497 - DNA, 25 bp, Homo sapien
tacccacataacatcgcattcgaag

SEQ ID NO: 2830498 - DNA, 25 bp, Homo sapien
tgactattccttctgaagagctgag

SEQ ID NO: 2830499 - DNA, 25 bp, Homo sapien
cgtctttagcttatggataaattag

SEQ ID NO: 2830500 - DNA, 25 bp, Homo sapien
gcgcccggccgaaatctgactattc

SEQ ID NO: 2830501 - DNA, 25 bp, Homo sapien
tcctgtagctgaaatgggagcaatc

SEQ ID NO: 2830502 - DNA, 25 bp, Homo sapien
gaaatacctggctctcaaacaggag

SEQ ID NO: 2830503 - DNA, 25 bp, Homo sapien
tgaaaaagaatacttccatgacaag

SEQ ID NO: 2830504 - DNA, 25 bp, Homo sapien
agaaagaaatgggtcgggaactatg

SEQ ID NO: 2830505 - DNA, 25 bp, Homo sapien
taaccaataccccaccaattatgtg

SEQ ID NO: 2830506 - DNA, 25 bp, Homo sapien
cagtattctgctgaaaacttgagag

SEQ ID NO: 2830507 - DNA, 25 bp, Homo sapien
cactattgaggcaacactattctga

SEQ ID NO: 2830508 - DNA, 25 bp, Homo sapien
tccaggcttatgtgcaactctgagt

SEQ ID NO: 2830509 - DNA, 25 bp, Homo sapien
tggaaaaaccctttcaggcagcaag

SEQ ID NO: 2830510 - DNA, 25 bp, Homo sapien
tagtgtccaatatcatgaaaaccac

SEQ ID NO: 2830511 - DNA, 25 bp, Homo sapien
cagcaagctgcggaagtcaaaaggt

SEQ ID NO: 2830512 - DNA, 25 bp, Homo sapien
gtttcccttctctcacgggtcactg

SEQ ID NO: 2830513 - DNA, 25 bp, Homo sapien
tgtgctagacacaggccacggcact

SEQ ID NO: 2830514 - DNA, 25 bp, Homo sapien
gaaacttacgctgttcacaactgat

SEQ ID NO: 2830515 - DNA, 25 bp, Homo sapien
tctaagacagcatatcaggccaggc

SEQ ID NO: 2830516 - DNA, 25 bp, Homo sapien
tgacttaaataggtcgcaacattct

SEQ ID NO: 2830517 - DNA, 25 bp, Homo sapien
taatctttccaacgaatctgtgagg

SEQ ID NO: 2830518 - DNA, 25 bp, Homo sapien
ggtgattatgggtccacaactgttt

SEQ ID NO: 2830519 - DNA, 25 bp, Homo sapien
taacacttagtggaagcttaccatg

SEQ ID NO: 2830520 - DNA, 25 bp, Homo sapien
caggcatcagatagggcaatcacat

SEQ ID NO: 2830521 - DNA, 25 bp, Homo sapien
taacggcctcacaagtgcagaaatg

SEQ ID NO: 2830522 - DNA, 25 bp, Homo sapien
tgtgcctgagggtacatgtgagtct

SEQ ID NO: 2830523 - DNA, 25 bp, Homo sapien
tgtgagtctgacatctgcagttggt

SEQ ID NO: 2830524 - DNA, 25 bp, Homo sapien
taagggtatcaactgagctagtgcc

SEQ ID NO: 2830525 - DNA, 25 bp, Homo sapien
ggtcattgtacatatcagcaagtgt

SEQ ID NO: 2830526 - DNA, 25 bp, Homo sapien
tataaaaggtcattgtacatatcag

SEQ ID NO: 2830527 - DNA, 25 bp, Homo sapien
tccaaagaagttcaggttacccaca

SEQ ID NO: 2830528 - DNA, 25 bp, Homo sapien
aggttacccacactcagactcaagt

SEQ ID NO: 2830529 - DNA, 25 bp, Homo sapien
tactcagtctctgggtctggaaacc

SEQ ID NO: 2830530 - DNA, 25 bp, Homo sapien
ggaaaccagtctgccaaaagcccag

SEQ ID NO: 2830531 - DNA, 25 bp, Homo sapien
gggtctggaaaccagtctgccaaaa

SEQ ID NO: 2830532 - DNA, 25 bp, Homo sapien
tctggaaaccagtctgccaaaagcc

SEQ ID NO: 2830533 - DNA, 25 bp, Homo sapien
tataaacattaaacgctaacagggc

SEQ ID NO: 2830534 - DNA, 25 bp, Homo sapien
gagcttactcaccaacctcaacata

SEQ ID NO: 2830535 - DNA, 25 bp, Homo sapien
catatgactgatcccaaaaggccaa

SEQ ID NO: 2830536 - DNA, 25 bp, Homo sapien
ttatgtgttctacattaggaggaac

SEQ ID NO: 2830537 - DNA, 25 bp, Homo sapien
gaataatgacgtaattcctggaagc

SEQ ID NO: 2830538 - DNA, 25 bp, Homo sapien
tcctggaagcctctgagttgaaact

SEQ ID NO: 2830539 - DNA, 25 bp, Homo sapien
tgcttcaggatgaaagagctacaaa

SEQ ID NO: 2830540 - DNA, 25 bp, Homo sapien
tgtggaatgtacttcagtcccaaga

SEQ ID NO: 2830541 - DNA, 25 bp, Homo sapien
ttacttttcaaacttcaccatataa

SEQ ID NO: 2830542 - DNA, 25 bp, Homo sapien
caccatataattgtaatttctcagt

SEQ ID NO: 2830543 - DNA, 25 bp, Homo sapien
ttcaccatataattgtaatttctca

SEQ ID NO: 2830544 - DNA, 25 bp, Homo sapien
ttcaaacttcaccatataattgtaa

SEQ ID NO: 2830545 - DNA, 25 bp, Homo sapien
aacttgatgccacaacaagctctgg

SEQ ID NO: 2830546 - DNA, 25 bp, Homo sapien
aatgcactgaggatgtaaataacaa

SEQ ID NO: 2830547 - DNA, 25 bp, Homo sapien
gcaagatgaagttttgtcagggtaa

SEQ ID NO: 2830548 - DNA, 25 bp, Homo sapien
tataaggctttttcacgactcaaag

SEQ ID NO: 2830549 - DNA, 25 bp, Homo sapien
cgatgcaacgtccaccattctgaca

SEQ ID NO: 2830550 - DNA, 25 bp, Homo sapien
ctttcacactgtggaccagtgaacc

SEQ ID NO: 2830551 - DNA, 25 bp, Homo sapien
aagcacagcggttgggtccgatgca

SEQ ID NO: 2830552 - DNA, 25 bp, Homo sapien
tgaacccataaacacaagcacagcg

SEQ ID NO: 2830553 - DNA, 25 bp, Homo sapien
ttctattatccctgaggtaaacatt

SEQ ID NO: 2830554 - DNA, 25 bp, Homo sapien
tctattatccctgaggtaaacatta

SEQ ID NO: 2830555 - DNA, 25 bp, Homo sapien
atgttctattatccctgaggtaaac

SEQ ID NO: 2830556 - DNA, 25 bp, Homo sapien
gttctattatccctgaggtaaacat

SEQ ID NO: 2830557 - DNA, 25 bp, Homo sapien
gaatttaacacattggcccctccta

SEQ ID NO: 2830558 - DNA, 25 bp, Homo sapien
tggccaaccctagcctagagaattt

SEQ ID NO: 2830559 - DNA, 25 bp, Homo sapien
ttgtacttcccatgagctaagagga

SEQ ID NO: 2830560 - DNA, 25 bp, Homo sapien
tccatggaatgagaaactctgctgc

SEQ ID NO: 2830561 - DNA, 25 bp, Homo sapien
caataagttccaatatatcctttct

SEQ ID NO: 2830562 - DNA, 25 bp, Homo sapien
cctttctggcactggcagtggtcat

SEQ ID NO: 2830563 - DNA, 25 bp, Homo sapien
ccacaataagttccaatatatcctt

SEQ ID NO: 2830564 - DNA, 25 bp, Homo sapien
atcctttctggcactggcagtggtc

SEQ ID NO: 2830565 - DNA, 25 bp, Homo sapien
atgcatctcacactgcactgctgaa

SEQ ID NO: 2830566 - DNA, 25 bp, Homo sapien
tcatgcatctcacactgcactgctg

SEQ ID NO: 2830567 - DNA, 25 bp, Homo sapien
catgcatctcacactgcactgctga

SEQ ID NO: 2830568 - DNA, 25 bp, Homo sapien
caagtacacatgttaggacgggaac

SEQ ID NO: 2830569 - DNA, 25 bp, Homo sapien
tatttgcccactggaacaagtacac

SEQ ID NO: 2830570 - DNA, 25 bp, Homo sapien
ccacaggttgatgatatttgcccac

SEQ ID NO: 2830571 - DNA, 25 bp, Homo sapien
ccatctccacaactatttctacaaa

SEQ ID NO: 2830572 - DNA, 25 bp, Homo sapien
tattatctccacaacctagcgtatt

SEQ ID NO: 2830573 - DNA, 25 bp, Homo sapien
cctccaatgaacagaaaggtatgag

SEQ ID NO: 2830574 - DNA, 25 bp, Homo sapien
cagaaaagctactgtggcattttga

SEQ ID NO: 2830575 - DNA, 25 bp, Homo sapien
aggtatgagggtcatcacagcaaag

SEQ ID NO: 2830576 - DNA, 25 bp, Homo sapien
cacacttgtagccaagtaccttcga

SEQ ID NO: 2830577 - DNA, 25 bp, Homo sapien
tacattccacagatactccacactt

SEQ ID NO: 2830578 - DNA, 25 bp, Homo sapien
attccacagatactccacacttgta

SEQ ID NO: 2830579 - DNA, 25 bp, Homo sapien
caagtaccttcgaatgggaagtctc

SEQ ID NO: 2830580 - DNA, 25 bp, Homo sapien
tataaaggtattacactgtccctat

SEQ ID NO: 2830581 - DNA, 25 bp, Homo sapien
gaactactgaattgaatgcaggcta

SEQ ID NO: 2830582 - DNA, 25 bp, Homo sapien
tgtagatacgtcttgacacaagtgt

SEQ ID NO: 2830583 - DNA, 25 bp, Homo sapien
cttttgctaaatggtgtgatacaga

SEQ ID NO: 2830584 - DNA, 25 bp, Homo sapien
gaatgtgctgtctatgatacctggc

SEQ ID NO: 2830585 - DNA, 25 bp, Homo sapien
gaaataagacatcccagagtccgtg

SEQ ID NO: 2830586 - DNA, 25 bp, Homo sapien
tatcccttggttagtgtgccttgcc

SEQ ID NO: 2830587 - DNA, 25 bp, Homo sapien
ggtcaacactaaatccgcgagaatg

SEQ ID NO: 2830588 - DNA, 25 bp, Homo sapien
gctgcgatccctgccaagcactcac

SEQ ID NO: 2830589 - DNA, 25 bp, Homo sapien
tccaaatggctgagtgcaagaggtc

SEQ ID NO: 2830590 - DNA, 25 bp, Homo sapien
agaggtcggccggagatagggccga

SEQ ID NO: 2830591 - DNA, 25 bp, Homo sapien
atagggccgagtgcgctgccccaag

SEQ ID NO: 2830592 - DNA, 25 bp, Homo sapien
agtaggagtggaatctggagccgca

SEQ ID NO: 2830593 - DNA, 25 bp, Homo sapien
taggagtggaatctggagccgcaca

SEQ ID NO: 2830594 - DNA, 25 bp, Homo sapien
gagtggaatctggagccgcacacgt

SEQ ID NO: 2830595 - DNA, 25 bp, Homo sapien
gtggaatctggagccgcacacgttg

SEQ ID NO: 2830596 - DNA, 25 bp, Homo sapien
gcagctctaggctccagctaaaggg

SEQ ID NO: 2830597 - DNA, 25 bp, Homo sapien
aaacaaaaggctcacgagcggcggc

SEQ ID NO: 2830598 - DNA, 25 bp, Homo sapien
agagagggctttccgcccgctgagc

SEQ ID NO: 2830599 - DNA, 25 bp, Homo sapien
cgtgtcaaggaaagcgcgtcgcaag

SEQ ID NO: 2830600 - DNA, 25 bp, Homo sapien
tcctcgcgatactcgggcgctagaa

SEQ ID NO: 2830601 - DNA, 25 bp, Homo sapien
ctcggagcacgtcctgctgtcctcg

SEQ ID NO: 2830602 - DNA, 25 bp, Homo sapien
tgtagcggaccgaacctgttgcggc

SEQ ID NO: 2830603 - DNA, 25 bp, Homo sapien
gggcgctagaaacccgccttcagag

SEQ ID NO: 2830604 - DNA, 25 bp, Homo sapien
gccacaggaagtagagctggagaca

SEQ ID NO: 2830605 - DNA, 25 bp, Homo sapien
ccagccacaggaagtagagctggag

SEQ ID NO: 2830606 - DNA, 25 bp, Homo sapien
ggagacacagcctccgtcttctccc

SEQ ID NO: 2830607 - DNA, 25 bp, Homo sapien
cacaggaagtagagctggagacaca

SEQ ID NO: 2830608 - DNA, 25 bp, Homo sapien
ggtacacgttgcataaccggcctaa

SEQ ID NO: 2830609 - DNA, 25 bp, Homo sapien
gaaaaaagggcctgcacgcagagct

SEQ ID NO: 2830610 - DNA, 25 bp, Homo sapien
tgctctagctggagacctcgacaga

SEQ ID NO: 2830611 - DNA, 25 bp, Homo sapien
caaagacaaaatctgcgcgcctcag

SEQ ID NO: 2830612 - DNA, 25 bp, Homo sapien
tcccacagggcaacgaagcgcgggt

SEQ ID NO: 2830613 - DNA, 25 bp, Homo sapien
ttccctccgggctcgctcggagtcc

SEQ ID NO: 2830614 - DNA, 25 bp, Homo sapien
acgaagcgcgggtagcggctgcgga

SEQ ID NO: 2830615 - DNA, 25 bp, Homo sapien
ggctcgctcggagtcccacagggca

SEQ ID NO: 2830616 - DNA, 25 bp, Homo sapien
agctgaacttccccgccggacagag

SEQ ID NO: 2830617 - DNA, 25 bp, Homo sapien
ggacagaggccgcaaggttgaggat

SEQ ID NO: 2830618 - DNA, 25 bp, Homo sapien
tgagaacgggtctttctgtagggtc

SEQ ID NO: 2830619 - DNA, 25 bp, Homo sapien
gttgaggatgagaacgggtctttct

SEQ ID NO: 2830620 - DNA, 25 bp, Homo sapien
ctctgtgaagtcctggtcatttctc

SEQ ID NO: 2830621 - DNA, 25 bp, Homo sapien
tctgtgaagtcctggtcatttctca

SEQ ID NO: 2830622 - DNA, 25 bp, Homo sapien
cctttgtggccctcctttcatgaaa

SEQ ID NO: 2830623 - DNA, 25 bp, Homo sapien
tgtgaagtcctggtcatttctcatt

SEQ ID NO: 2830624 - DNA, 25 bp, Homo sapien
taaatctaaatgctctagaattgcc

SEQ ID NO: 2830625 - DNA, 25 bp, Homo sapien
aattgcctatgcctttaccctttga

SEQ ID NO: 2830626 - DNA, 25 bp, Homo sapien
cattaaatctaaatgctctagaatt

SEQ ID NO: 2830627 - DNA, 25 bp, Homo sapien
ctctagaattgcctatgcctttacc

SEQ ID NO: 2830628 - DNA, 25 bp, Homo sapien
aagtctttatagatgaaatgatagg

SEQ ID NO: 2830629 - DNA, 25 bp, Homo sapien
atagatgaaatgataggatgcctgg

SEQ ID NO: 2830630 - DNA, 25 bp, Homo sapien
gatgaaatgataggatgcctgggtt

SEQ ID NO: 2830631 - DNA, 25 bp, Homo sapien
tttatagatgaaatgataggatgcc

SEQ ID NO: 2830632 - DNA, 25 bp, Homo sapien
gcccatattgcctctagaggaggat

SEQ ID NO: 2830633 - DNA, 25 bp, Homo sapien
tagatcccagcccatattgcctcta

SEQ ID NO: 2830634 - DNA, 25 bp, Homo sapien
ttgcctctagaggaggatttatcaa

SEQ ID NO: 2830635 - DNA, 25 bp, Homo sapien
ccagcccatattgcctctagaggag

SEQ ID NO: 2830636 - DNA, 25 bp, Homo sapien
aatactggcggtgaacccacaggaa

SEQ ID NO: 2830637 - DNA, 25 bp, Homo sapien
tggcggtgaacccacaggaacctgt

SEQ ID NO: 2830638 - DNA, 25 bp, Homo sapien
cagggagaaatactggcggtgaacc

SEQ ID NO: 2830639 - DNA, 25 bp, Homo sapien
gaaatactggcggtgaacccacagg

SEQ ID NO: 2830640 - DNA, 25 bp, Homo sapien
gacccggaatcctctgctaaaatgc

SEQ ID NO: 2830641 - DNA, 25 bp, Homo sapien
tattcaaaggcaactgagacccgga

SEQ ID NO: 2830642 - DNA, 25 bp, Homo sapien
catcaaggtagctttggacccatga

SEQ ID NO: 2830643 - DNA, 25 bp, Homo sapien
tcagctttgggtaaaccatcaaggt

SEQ ID NO: 2830644 - DNA, 25 bp, Homo sapien
gccaacagaattctcagttatcagt

SEQ ID NO: 2830645 - DNA, 25 bp, Homo sapien
ccggccaacagaattctcagttatc

SEQ ID NO: 2830646 - DNA, 25 bp, Homo sapien
agaattctcagttatcagtagccac

SEQ ID NO: 2830647 - DNA, 25 bp, Homo sapien
tcaccggccaacagaattctcagtt

SEQ ID NO: 2830648 - DNA, 25 bp, Homo sapien
tgctggaggagacttggaattggct

SEQ ID NO: 2830649 - DNA, 25 bp, Homo sapien
ccctggatatatggctcagcgtgtc

SEQ ID NO: 2830650 - DNA, 25 bp, Homo sapien
acctcttgtggagtaggatgctgga

SEQ ID NO: 2830651 - DNA, 25 bp, Homo sapien
tcagcgtgtcttgcatctgaacctc

SEQ ID NO: 2830652 - DNA, 25 bp, Homo sapien
cacatgcgcacacacccgcacatgc

SEQ ID NO: 2830653 - DNA, 25 bp, Homo sapien
catgcgcacacacccgcacatgcat

SEQ ID NO: 2830654 - DNA, 25 bp, Homo sapien
caaacacatgcgcacacacccgcac

SEQ ID NO: 2830655 - DNA, 25 bp, Homo sapien
caggacaaacacatgcgcacacacc

SEQ ID NO: 2830656 - DNA, 25 bp, Homo sapien
tgatcatgagtgaagccagctggtc

SEQ ID NO: 2830657 - DNA, 25 bp, Homo sapien
atcatgagtgaagccagctggtctg

SEQ ID NO: 2830658 - DNA, 25 bp, Homo sapien
ctatcttgtgatcatgagtgaagcc

SEQ ID NO: 2830659 - DNA, 25 bp, Homo sapien
tcttgtgatcatgagtgaagccagc

SEQ ID NO: 2830660 - DNA, 25 bp, Homo sapien
aaccacagccacctttaggcattcc

SEQ ID NO: 2830661 - DNA, 25 bp, Homo sapien
cacagccacctttaggcattcccag

SEQ ID NO: 2830662 - DNA, 25 bp, Homo sapien
tcaaccacagccacctttaggcatt

SEQ ID NO: 2830663 - DNA, 25 bp, Homo sapien
ccacagccacctttaggcattccca

SEQ ID NO: 2830664 - DNA, 25 bp, Homo sapien
ttgtcatggacagactgatgacctg

SEQ ID NO: 2830665 - DNA, 25 bp, Homo sapien
gatgacctgaacatgctgggcattt

SEQ ID NO: 2830666 - DNA, 25 bp, Homo sapien
taatttgtaccgtaatcccagattg

SEQ ID NO: 2830667 - DNA, 25 bp, Homo sapien
tagatataaaactgaggcacccccg

SEQ ID NO: 2830668 - DNA, 25 bp, Homo sapien
tgcaaagggcctagatggagattgt

SEQ ID NO: 2830669 - DNA, 25 bp, Homo sapien
cactggggcatgtttccctaaagtt

SEQ ID NO: 2830670 - DNA, 25 bp, Homo sapien
gacctagttttgacgccagaatggc

SEQ ID NO: 2830671 - DNA, 25 bp, Homo sapien
agattgttcagtggaccgttttgca

SEQ ID NO: 2830672 - DNA, 25 bp, Homo sapien
gcagaaaactagatacagtgctctt

SEQ ID NO: 2830673 - DNA, 25 bp, Homo sapien
agcagaaaactagatacagtgctct

SEQ ID NO: 2830674 - DNA, 25 bp, Homo sapien
cagctttatcgtgaataatatggaa

SEQ ID NO: 2830675 - DNA, 25 bp, Homo sapien
gaataatatggaacagctgatcccc

SEQ ID NO: 2830676 - DNA, 25 bp, Homo sapien
ttgctatcaggtactgccaggcagc

SEQ ID NO: 2830677 - DNA, 25 bp, Homo sapien
aggcagcagacccattgaccctaca

SEQ ID NO: 2830678 - DNA, 25 bp, Homo sapien
ctggtgccagcctcttgcagagaag

SEQ ID NO: 2830679 - DNA, 25 bp, Homo sapien
attgttggcaggacatcctttggaa

SEQ ID NO: 2830680 - DNA, 25 bp, Homo sapien
tacatattcagttgtatccagcttt

SEQ ID NO: 2830681 - DNA, 25 bp, Homo sapien
tttggaatgtctgctctactcagga

SEQ ID NO: 2830682 - DNA, 25 bp, Homo sapien
ctgatagacaatatcaaccatcaga

SEQ ID NO: 2830683 - DNA, 25 bp, Homo sapien
caatatcaaccatcagacatgtgag

SEQ ID NO: 2830684 - DNA, 25 bp, Homo sapien
tatcaaccatcagacatgtgagtga

SEQ ID NO: 2830685 - DNA, 25 bp, Homo sapien
tagacaatatcaaccatcagacatg

SEQ ID NO: 2830686 - DNA, 25 bp, Homo sapien
tgtcaccttccctcatacagccagc

SEQ ID NO: 2830687 - DNA, 25 bp, Homo sapien
tttccaggaacgttccacttctgga

SEQ ID NO: 2830688 - DNA, 25 bp, Homo sapien
tccaggaacgttccacttctggaaa

SEQ ID NO: 2830689 - DNA, 25 bp, Homo sapien
ctcatacagccagccacctcggccc

SEQ ID NO: 2830690 - DNA, 25 bp, Homo sapien
tcctaaatattagcagcataggttc

SEQ ID NO: 2830691 - DNA, 25 bp, Homo sapien
ttgttatgtaatctatcatcatcca

SEQ ID NO: 2830692 - DNA, 25 bp, Homo sapien
gagctgtgggctcaatacttgcctc

SEQ ID NO: 2830693 - DNA, 25 bp, Homo sapien
catcagtagttagctggacaactgg

SEQ ID NO: 2830694 - DNA, 25 bp, Homo sapien
ggagttgtcatttgttgaactacca

SEQ ID NO: 2830695 - DNA, 25 bp, Homo sapien
tcattccttgtagaacagtagcatt

SEQ ID NO: 2830696 - DNA, 25 bp, Homo sapien
actctctgatatgtaggagttgtca

SEQ ID NO: 2830697 - DNA, 25 bp, Homo sapien
gaactaccatgcagattttctggaa

SEQ ID NO: 2830698 - DNA, 25 bp, Homo sapien
ttcaggtctatacgtttgtgcctct

SEQ ID NO: 2830699 - DNA, 25 bp, Homo sapien
aagtagacaccaggatagtcaccaa

SEQ ID NO: 2830700 - DNA, 25 bp, Homo sapien
ggtcacatggacacatgctctgttc

SEQ ID NO: 2830701 - DNA, 25 bp, Homo sapien
cattcgtttccattcaggtctatac

SEQ ID NO: 2830702 - DNA, 25 bp, Homo sapien
gacctctagttctaccttctgggag

SEQ ID NO: 2830703 - DNA, 25 bp, Homo sapien
tagtcctgttgaatgaagttccttg

SEQ ID NO: 2830704 - DNA, 25 bp, Homo sapien
tccctgtcaaaaccttctagtcctg

SEQ ID NO: 2830705 - DNA, 25 bp, Homo sapien
ataacaaggacaaaagcccacaggg

SEQ ID NO: 2830706 - DNA, 25 bp, Homo sapien
agcctgctctgctaactgtgctgac

SEQ ID NO: 2830707 - DNA, 25 bp, Homo sapien
tatttgccgtctagtctctcctctt

SEQ ID NO: 2830708 - DNA, 25 bp, Homo sapien
cctctttagatccatggctgtgtgc

SEQ ID NO: 2830709 - DNA, 25 bp, Homo sapien
tccaacagcaacatctggctctctg

SEQ ID NO: 2830710 - DNA, 25 bp, Homo sapien
gtaacaaaaatcctgagcatcataa

SEQ ID NO: 2830711 - DNA, 25 bp, Homo sapien
gatgtaacaaaaatcctgagcatca

SEQ ID NO: 2830712 - DNA, 25 bp, Homo sapien
tgtaacaaaaatcctgagcatcata

SEQ ID NO: 2830713 - DNA, 25 bp, Homo sapien
aacaaaaatcctgagcatcataaac

SEQ ID NO: 2830714 - DNA, 25 bp, Homo sapien
aacggtgattacagcatgttgacag

SEQ ID NO: 2830715 - DNA, 25 bp, Homo sapien
tgttgacagagatgtgtagccttac

SEQ ID NO: 2830716 - DNA, 25 bp, Homo sapien
gacaacaagggctagattcccaccc

SEQ ID NO: 2830717 - DNA, 25 bp, Homo sapien
tccttgacagcagtgatggtggttt

SEQ ID NO: 2830718 - DNA, 25 bp, Homo sapien
gtggtttatatcacaggtgacatca

SEQ ID NO: 2830719 - DNA, 25 bp, Homo sapien
tcacaagccattaagaggtaacttg

SEQ ID NO: 2830720 - DNA, 25 bp, Homo sapien
gtaggggactcaagggcctctccag

SEQ ID NO: 2830721 - DNA, 25 bp, Homo sapien
cacaggtgacatcagggatgaaggt

SEQ ID NO: 2830722 - DNA, 25 bp, Homo sapien
tgcgcagatccttgcctaacttcct

SEQ ID NO: 2830723 - DNA, 25 bp, Homo sapien
caaagcacactacttccgaggacaa

SEQ ID NO: 2830724 - DNA, 25 bp, Homo sapien
tgccagtgccctcggttgtcgctct

SEQ ID NO: 2830725 - DNA, 25 bp, Homo sapien
taacttcctctcatgaattgctttc

SEQ ID NO: 2830726 - DNA, 25 bp, Homo sapien
acctagggcagagtgcttccacatc

SEQ ID NO: 2830727 - DNA, 25 bp, Homo sapien
cacctagggcagagtgcttccacat

SEQ ID NO: 2830728 - DNA, 25 bp, Homo sapien
ctagggcagagtgcttccacatcat

SEQ ID NO: 2830729 - DNA, 25 bp, Homo sapien
cctagggcagagtgcttccacatca

SEQ ID NO: 2830730 - DNA, 25 bp, Homo sapien
acagaaaactggtagcttcaacaac

SEQ ID NO: 2830731 - DNA, 25 bp, Homo sapien
gatagtgagcctggtccaaaatatt

SEQ ID NO: 2830732 - DNA, 25 bp, Homo sapien
gggcaatgtaaatctactgaggata

SEQ ID NO: 2830733 - DNA, 25 bp, Homo sapien
cactaggaaagattaatggatcggg

SEQ ID NO: 2830734 - DNA, 25 bp, Homo sapien
tatgtatttttgttcccgaccttga

SEQ ID NO: 2830735 - DNA, 25 bp, Homo sapien
tattattaagaagaccggtatctcc

SEQ ID NO: 2830736 - DNA, 25 bp, Homo sapien
gaagaccggtatctcccttgaaatc

SEQ ID NO: 2830737 - DNA, 25 bp, Homo sapien
ttaagaagaccggtatctcccttga

SEQ ID NO: 2830738 - DNA, 25 bp, Homo sapien
cttatgtgccttattattaagaaga

SEQ ID NO: 2830739 - DNA, 25 bp, Homo sapien
cccatagagagacaggaacttttgc

SEQ ID NO: 2830740 - DNA, 25 bp, Homo sapien
gtctgagaactgacacttcacacgt

SEQ ID NO: 2830741 - DNA, 25 bp, Homo sapien
ccaaccggtatgatttaattgagga

SEQ ID NO: 2830742 - DNA, 25 bp, Homo sapien
cacgtcctctatgccaaccggtatg

SEQ ID NO: 2830743 - DNA, 25 bp, Homo sapien
tcacagttaccataacatcgaaaac

SEQ ID NO: 2830744 - DNA, 25 bp, Homo sapien
cctcacagttaccataacatcgaaa

SEQ ID NO: 2830745 - DNA, 25 bp, Homo sapien
agttaccataacatcgaaaacttga

SEQ ID NO: 2830746 - DNA, 25 bp, Homo sapien
cagttaccataacatcgaaaacttg

SEQ ID NO: 2830747 - DNA, 25 bp, Homo sapien
agagataaaagcaaaaagtcccttg

SEQ ID NO: 2830748 - DNA, 25 bp, Homo sapien
agtcccttgggtctttgccaaaatg

SEQ ID NO: 2830749 - DNA, 25 bp, Homo sapien
tggagagataaaagcaaaaagtccc

SEQ ID NO: 2830750 - DNA, 25 bp, Homo sapien
aaaatgacactcttgtgcttttttc

SEQ ID NO: 2830751 - DNA, 25 bp, Homo sapien
tactgattcacagctcacagtggac

SEQ ID NO: 2830752 - DNA, 25 bp, Homo sapien
actgattcacagctcacagtggaca

SEQ ID NO: 2830753 - DNA, 25 bp, Homo sapien
tcacagtggacagttttcttagcat

SEQ ID NO: 2830754 - DNA, 25 bp, Homo sapien
agctcacagtggacagttttcttag

SEQ ID NO: 2830755 - DNA, 25 bp, Homo sapien
taccagaagacagaattgagcagaa

SEQ ID NO: 2830756 - DNA, 25 bp, Homo sapien
tgggacacttttaggtgcacaaaca

SEQ ID NO: 2830757 - DNA, 25 bp, Homo sapien
ccatcagctgttataaggaagtttg

SEQ ID NO: 2830758 - DNA, 25 bp, Homo sapien
tatcttacaggcacaaacaaggtgc

SEQ ID NO: 2830759 - DNA, 25 bp, Homo sapien
tagtttagaaataggttgcttgtaa

SEQ ID NO: 2830760 - DNA, 25 bp, Homo sapien
ggagtttgcttttagcagccttttc

SEQ ID NO: 2830761 - DNA, 25 bp, Homo sapien
aggagtttgcttttagcagcctttt

SEQ ID NO: 2830762 - DNA, 25 bp, Homo sapien
tttagaaataggttgcttgtaatca

SEQ ID NO: 2830763 - DNA, 25 bp, Homo sapien
catactgacacttcggagatttatt

SEQ ID NO: 2830764 - DNA, 25 bp, Homo sapien
atacatactgacacttcggagattt

SEQ ID NO: 2830765 - DNA, 25 bp, Homo sapien
tttactgatagacaatattcctcgt

SEQ ID NO: 2830766 - DNA, 25 bp, Homo sapien
gacaatattcctcgtttaaattgtg

SEQ ID NO: 2830767 - DNA, 25 bp, Homo sapien
ggaagcatcttctttagaaagtgag

SEQ ID NO: 2830768 - DNA, 25 bp, Homo sapien
aagcatcttctttagaaagtgagcc

SEQ ID NO: 2830769 - DNA, 25 bp, Homo sapien
tagaaagtgagccatctctaagcat

SEQ ID NO: 2830770 - DNA, 25 bp, Homo sapien
gtggaagcatcttctttagaaagtg

SEQ ID NO: 2830771 - DNA, 25 bp, Homo sapien
tcagagattctttgcaaaaatattc

SEQ ID NO: 2830772 - DNA, 25 bp, Homo sapien
ttctttgcaaaaatattcattagag

SEQ ID NO: 2830773 - DNA, 25 bp, Homo sapien
ctttgcaaaaatattcattagaggc

SEQ ID NO: 2830774 - DNA, 25 bp, Homo sapien
agagattctttgcaaaaatattcat

SEQ ID NO: 2830775 - DNA, 25 bp, Homo sapien
ggaagaatttttgacgtatgagaca

SEQ ID NO: 2830776 - DNA, 25 bp, Homo sapien
catgatcagcatcttaacaaggtag

SEQ ID NO: 2830777 - DNA, 25 bp, Homo sapien
cccctttgatcaccccagaagtggt

SEQ ID NO: 2830778 - DNA, 25 bp, Homo sapien
taaaaatttactcgacatgatcagc

SEQ ID NO: 2830779 - DNA, 25 bp, Homo sapien
tgaccacgagtgaggctgttctgct

SEQ ID NO: 2830780 - DNA, 25 bp, Homo sapien
tgaaggactgtaagcccacacaagc

SEQ ID NO: 2830781 - DNA, 25 bp, Homo sapien
taaccagctagaccatttgagtacc

SEQ ID NO: 2830782 - DNA, 25 bp, Homo sapien
tacaaacgtcaaaggcttccggtgc

SEQ ID NO: 2830783 - DNA, 25 bp, Homo sapien
tatcactggtttcctggtatgcgct

SEQ ID NO: 2830784 - DNA, 25 bp, Homo sapien
tgtccatctgcctaccacagacaat

SEQ ID NO: 2830785 - DNA, 25 bp, Homo sapien
ctgaaggttcaggtcccaagtcggg

SEQ ID NO: 2830786 - DNA, 25 bp, Homo sapien
tgttatttggtagaatcgacctgtc

SEQ ID NO: 2830787 - DNA, 25 bp, Homo sapien
atactttgatctgcatttcccccat

SEQ ID NO: 2830788 - DNA, 25 bp, Homo sapien
aatactttgatctgcatttccccca

SEQ ID NO: 2830789 - DNA, 25 bp, Homo sapien
gcaatactttgatctgcatttcccc

SEQ ID NO: 2830790 - DNA, 25 bp, Homo sapien
cagcaatactttgatctgcatttcc

SEQ ID NO: 2830791 - DNA, 25 bp, Homo sapien
catcaaagcctttcagattccccat

SEQ ID NO: 2830792 - DNA, 25 bp, Homo sapien
ccatcaaagcctttcagattcccca

SEQ ID NO: 2830793 - DNA, 25 bp, Homo sapien
tgattgccttttgaactgagccctt

SEQ ID NO: 2830794 - DNA, 25 bp, Homo sapien
tttttactattctgtgtctgccctg

SEQ ID NO: 2830795 - DNA, 25 bp, Homo sapien
tgtgtttcccactcttgattgcctt

SEQ ID NO: 2830796 - DNA, 25 bp, Homo sapien
tacagggctgtctagcactgaatct

SEQ ID NO: 2830797 - DNA, 25 bp, Homo sapien
tagacttgcacacttttaacttcat

SEQ ID NO: 2830798 - DNA, 25 bp, Homo sapien
tggaactgcttgacattcatagact

SEQ ID NO: 2830799 - DNA, 25 bp, Homo sapien
tcatagacttgcacacttttaactt

SEQ ID NO: 2830800 - DNA, 25 bp, Homo sapien
tcctgctggaactgcttgacattca

SEQ ID NO: 2830801 - DNA, 25 bp, Homo sapien
taaacgtgtgcattcctggtctgtg

SEQ ID NO: 2830802 - DNA, 25 bp, Homo sapien
ctagtaaataacgttgttctgagtt

SEQ ID NO: 2830803 - DNA, 25 bp, Homo sapien
tattgcatgtctattgttaggcagt

SEQ ID NO: 2830804 - DNA, 25 bp, Homo sapien
tacaagaccttgtaaacgtgtgcat

SEQ ID NO: 2830805 - DNA, 25 bp, Homo sapien
aaacagagcagtggacataatttcc

SEQ ID NO: 2830806 - DNA, 25 bp, Homo sapien
tgtaatgtgcccaatatgctgctgg

SEQ ID NO: 2830807 - DNA, 25 bp, Homo sapien
tataagcatttcctcacgctagcct

SEQ ID NO: 2830808 - DNA, 25 bp, Homo sapien
tggcacagaaattgagcagctattg

SEQ ID NO: 2830809 - DNA, 25 bp, Homo sapien
gctatagtaacttgcattcccacca

SEQ ID NO: 2830810 - DNA, 25 bp, Homo sapien
cacattctaagaggtataaggtaat

SEQ ID NO: 2830811 - DNA, 25 bp, Homo sapien
tcttgtatatattgggtatgaaccc

SEQ ID NO: 2830812 - DNA, 25 bp, Homo sapien
ctgccataaacacggatgtacagac

SEQ ID NO: 2830813 - DNA, 25 bp, Homo sapien
tctttggtttatgattgacaagcac

SEQ ID NO: 2830814 - DNA, 25 bp, Homo sapien
acccaaataccagcaagtttctttg

SEQ ID NO: 2830815 - DNA, 25 bp, Homo sapien
tatagacccttgtggatcaggtgct

SEQ ID NO: 2830816 - DNA, 25 bp, Homo sapien
taaagattatctaccacccaaatac

SEQ ID NO: 2830817 - DNA, 25 bp, Homo sapien
ctgagctttccccaatcactgagaa

SEQ ID NO: 2830818 - DNA, 25 bp, Homo sapien
gagctttccccaatcactgagaatc

SEQ ID NO: 2830819 - DNA, 25 bp, Homo sapien
gctttccccaatcactgagaatcat

SEQ ID NO: 2830820 - DNA, 25 bp, Homo sapien
tgagctttccccaatcactgagaat

SEQ ID NO: 2830821 - DNA, 25 bp, Homo sapien
tgtattcgaattcctctacagcagg

SEQ ID NO: 2830822 - DNA, 25 bp, Homo sapien
ctgagtaaaagcttctgcagggtat

SEQ ID NO: 2830823 - DNA, 25 bp, Homo sapien
ccggtgatgtattcgaattcctcta

SEQ ID NO: 2830824 - DNA, 25 bp, Homo sapien
aaagcgcatgtgtccggtgatgtat

SEQ ID NO: 2830825 - DNA, 25 bp, Homo sapien
ggaaaagtcctcgatcactgcatag

SEQ ID NO: 2830826 - DNA, 25 bp, Homo sapien
aaaactgcacactgggtatagaagg

SEQ ID NO: 2830827 - DNA, 25 bp, Homo sapien
cattctgtcacagcaattaccaggg

SEQ ID NO: 2830828 - DNA, 25 bp, Homo sapien
tattgcttgacctggactcaaaggc

SEQ ID NO: 2830829 - DNA, 25 bp, Homo sapien
cctctgaaaaggttgtcggcatttt

SEQ ID NO: 2830830 - DNA, 25 bp, Homo sapien
aaagcctctgaaaaggttgtcggca

SEQ ID NO: 2830831 - DNA, 25 bp, Homo sapien
agcagaaagcctctgaaaaggttgt

SEQ ID NO: 2830832 - DNA, 25 bp, Homo sapien
agaaagcctctgaaaaggttgtcgg

SEQ ID NO: 2830833 - DNA, 25 bp, Homo sapien
gattctttccattgggggagtgata

SEQ ID NO: 2830834 - DNA, 25 bp, Homo sapien
ggggagtgatagtttatatcaagca

SEQ ID NO: 2830835 - DNA, 25 bp, Homo sapien
ccattgggggagtgatagtttatat

SEQ ID NO: 2830836 - DNA, 25 bp, Homo sapien
tcctgattctttccattgggggagt

SEQ ID NO: 2830837 - DNA, 25 bp, Homo sapien
tccatacgtcttaagttgtaatgct

SEQ ID NO: 2830838 - DNA, 25 bp, Homo sapien
tctatatgtagaatgaagttcaggg

SEQ ID NO: 2830839 - DNA, 25 bp, Homo sapien
tagcataactttgaaggtaacctct

SEQ ID NO: 2830840 - DNA, 25 bp, Homo sapien
tctggagaggtcagcattggcacac

SEQ ID NO: 2830841 - DNA, 25 bp, Homo sapien
tcagcgagagccagggttgaaattc

SEQ ID NO: 2830842 - DNA, 25 bp, Homo sapien
cagcgagagccagggttgaaattcc

SEQ ID NO: 2830843 - DNA, 25 bp, Homo sapien
gcagagatctgtcatggggataact

SEQ ID NO: 2830844 - DNA, 25 bp, Homo sapien
gggataactgatgagttcttgtgag

SEQ ID NO: 2830845 - DNA, 25 bp, Homo sapien
gatgagttcttgtgagacaaaccct

SEQ ID NO: 2830846 - DNA, 25 bp, Homo sapien
ccaaccacagagaagggagtaggag

SEQ ID NO: 2830847 - DNA, 25 bp, Homo sapien
gcagcagctgacctgtaactgtcag

SEQ ID NO: 2830848 - DNA, 25 bp, Homo sapien
gagcagcagctgacctgtaactgtc

SEQ ID NO: 2830849 - DNA, 25 bp, Homo sapien
tatttgtcttttgtatgatggagga

SEQ ID NO: 2830850 - DNA, 25 bp, Homo sapien
tcagagaaggggaagtaactctttg

SEQ ID NO: 2830851 - DNA, 25 bp, Homo sapien
tattgtctctccacttaaatccctg

SEQ ID NO: 2830852 - DNA, 25 bp, Homo sapien
tgtctctccacttaaatccctgtag

SEQ ID NO: 2830853 - DNA, 25 bp, Homo sapien
tctccacttaaatccctgtagtttc

SEQ ID NO: 2830854 - DNA, 25 bp, Homo sapien
tcttttattgtctctccacttaaat

SEQ ID NO: 2830855 - DNA, 25 bp, Homo sapien
actcattacctgtgttagtccaggc

SEQ ID NO: 2830856 - DNA, 25 bp, Homo sapien
ttttactcattacctgtgttagtcc

SEQ ID NO: 2830857 - DNA, 25 bp, Homo sapien
cattacctgtgttagtccaggctca

SEQ ID NO: 2830858 - DNA, 25 bp, Homo sapien
ttacctgtgttagtccaggctcagc

SEQ ID NO: 2830859 - DNA, 25 bp, Homo sapien
gtcttctattacagcgtcacttttg

SEQ ID NO: 2830860 - DNA, 25 bp, Homo sapien
tttgtggaacatcattagactttcc

SEQ ID NO: 2830861 - DNA, 25 bp, Homo sapien
tggaacatcattagactttccattg

SEQ ID NO: 2830862 - DNA, 25 bp, Homo sapien
tacagcgtcacttttgtggaacatc

SEQ ID NO: 2830863 - DNA, 25 bp, Homo sapien
gatgtcattggctcgtcacagcagg

SEQ ID NO: 2830864 - DNA, 25 bp, Homo sapien
tagggcacaccaggaaagcttcagc

SEQ ID NO: 2830865 - DNA, 25 bp, Homo sapien
catctaaagaagatccttcagccgt

SEQ ID NO: 2830866 - DNA, 25 bp, Homo sapien
cccctctcggtgtgagcttaagtga

SEQ ID NO: 2830867 - DNA, 25 bp, Homo sapien
cgctcagtgattcctatcctttgtg

SEQ ID NO: 2830868 - DNA, 25 bp, Homo sapien
aagtgttatgcgctcagtgattcct

SEQ ID NO: 2830869 - DNA, 25 bp, Homo sapien
gacagggagctcaagtgttatgcgc

SEQ ID NO: 2830870 - DNA, 25 bp, Homo sapien
ggagctcaagtgttatgcgctcagt

SEQ ID NO: 2830871 - DNA, 25 bp, Homo sapien
aaaaaggtatgcatgttattaacag

SEQ ID NO: 2830872 - DNA, 25 bp, Homo sapien
tgcatgttattaacagtactgtttc

SEQ ID NO: 2830873 - DNA, 25 bp, Homo sapien
cttctgctgagtcttatacatgttc

SEQ ID NO: 2830874 - DNA, 25 bp, Homo sapien
tatgtgctctaagttagcttcacca

SEQ ID NO: 2830875 - DNA, 25 bp, Homo sapien
tctatggaaaataactgcagagctt

SEQ ID NO: 2830876 - DNA, 25 bp, Homo sapien
tctcactgcttaggctgtatttggc

SEQ ID NO: 2830877 - DNA, 25 bp, Homo sapien
gattagtatttcctcaacacatgcg

SEQ ID NO: 2830878 - DNA, 25 bp, Homo sapien
tgataataggagtctgaaagccagt

SEQ ID NO: 2830879 - DNA, 25 bp, Homo sapien
tctgtgctgcgagtaatctctccca

SEQ ID NO: 2830880 - DNA, 25 bp, Homo sapien
gaactgatggactcacctatctgtg

SEQ ID NO: 2830881 - DNA, 25 bp, Homo sapien
tctgtgccaccataagaggcatgcc

SEQ ID NO: 2830882 - DNA, 25 bp, Homo sapien
ccataagaggcatgccaacctccat

SEQ ID NO: 2830883 - DNA, 25 bp, Homo sapien
agaatatctacatacagtcatgcaa

SEQ ID NO: 2830884 - DNA, 25 bp, Homo sapien
atcattaggtaatttaattgctgtt

SEQ ID NO: 2830885 - DNA, 25 bp, Homo sapien
ggtgtcgcatgcctgtaccctagcc

SEQ ID NO: 2830886 - DNA, 25 bp, Homo sapien
tcctagccaagtgcggtgtcgcatg

SEQ ID NO: 2830887 - DNA, 25 bp, Homo sapien
attattcctagccaagtgcggtgtc

SEQ ID NO: 2830888 - DNA, 25 bp, Homo sapien
ttcccatgcttggaatttataattg

SEQ ID NO: 2830889 - DNA, 25 bp, Homo sapien
cttctctcgggacctgtacctgctg

SEQ ID NO: 2830890 - DNA, 25 bp, Homo sapien
cgacgaagtgttgctgcggatcccg

SEQ ID NO: 2830891 - DNA, 25 bp, Homo sapien
ttctacaccggagctgtgctgcggc

SEQ ID NO: 2830892 - DNA, 25 bp, Homo sapien
cgcgcttcgcagtggaacagcggcc

SEQ ID NO: 2830893 - DNA, 25 bp, Homo sapien
tcacatttgtggcttcttgggagac

SEQ ID NO: 2830894 - DNA, 25 bp, Homo sapien
ggtgaattcatcttctcaggtagtc

SEQ ID NO: 2830895 - DNA, 25 bp, Homo sapien
tcaggtagtcacttgcaacgcctgc

SEQ ID NO: 2830896 - DNA, 25 bp, Homo sapien
caacgcctgccttagtctttgggta

SEQ ID NO: 2830897 - DNA, 25 bp, Homo sapien
aatcaagccagtttaaataagacat

SEQ ID NO: 2830898 - DNA, 25 bp, Homo sapien
tcaagccagtttaaataagacatat

SEQ ID NO: 2830899 - DNA, 25 bp, Homo sapien
tcaaaagcagttgagtctctctcca

SEQ ID NO: 2830900 - DNA, 25 bp, Homo sapien
aagccagtttaaataagacatatcc

SEQ ID NO: 2830901 - DNA, 25 bp, Homo sapien
cctactagcttgtactgctgaagac

SEQ ID NO: 2830902 - DNA, 25 bp, Homo sapien
tgctgagcttcaggcacatcatcca

SEQ ID NO: 2830903 - DNA, 25 bp, Homo sapien
acactgctgagcttcaggcacatca

SEQ ID NO: 2830904 - DNA, 25 bp, Homo sapien
tagcttgtactgctgaagacactgc

SEQ ID NO: 2830905 - DNA, 25 bp, Homo sapien
cagaattccaagagaggcccctgta

SEQ ID NO: 2830906 - DNA, 25 bp, Homo sapien
tatgggtttccataatccagaattc

SEQ ID NO: 2830907 - DNA, 25 bp, Homo sapien
atgggtttccataatccagaattcc

SEQ ID NO: 2830908 - DNA, 25 bp, Homo sapien
caagagaggcccctgtatcataggg

SEQ ID NO: 2830909 - DNA, 25 bp, Homo sapien
ctgatttttaatttgggcttcaagt

SEQ ID NO: 2830910 - DNA, 25 bp, Homo sapien
ggatatcttctgatttttaatttgg

SEQ ID NO: 2830911 - DNA, 25 bp, Homo sapien
tatcttctgatttttaatttgggct

SEQ ID NO: 2830912 - DNA, 25 bp, Homo sapien
tcttctgatttttaatttgggcttc

SEQ ID NO: 2830913 - DNA, 25 bp, Homo sapien
tcttgtgactagtaagcctttggaa

SEQ ID NO: 2830914 - DNA, 25 bp, Homo sapien
acacttacttctctggaaattgcgc

SEQ ID NO: 2830915 - DNA, 25 bp, Homo sapien
ttacatacacacttacttctctgga

SEQ ID NO: 2830916 - DNA, 25 bp, Homo sapien
ccagagtaccaagaatacagacgtc

SEQ ID NO: 2830917 - DNA, 25 bp, Homo sapien
tctgtatttctgttattggcaccat

SEQ ID NO: 2830918 - DNA, 25 bp, Homo sapien
cagacatctgtatttctgttattgg

SEQ ID NO: 2830919 - DNA, 25 bp, Homo sapien
catctgtatttctgttattggcacc

SEQ ID NO: 2830920 - DNA, 25 bp, Homo sapien
gacatctgtatttctgttattggca

SEQ ID NO: 2830921 - DNA, 25 bp, Homo sapien
cactggttgatggggtcgtttgctt

SEQ ID NO: 2830922 - DNA, 25 bp, Homo sapien
cccactggttgatggggtcgtttgc

SEQ ID NO: 2830923 - DNA, 25 bp, Homo sapien
actggttgatggggtcgtttgcttt

SEQ ID NO: 2830924 - DNA, 25 bp, Homo sapien
ccactggttgatggggtcgtttgct

SEQ ID NO: 2830925 - DNA, 25 bp, Homo sapien
aacctgcagcatacaggccatgcca

SEQ ID NO: 2830926 - DNA, 25 bp, Homo sapien
aaaggaatgcagtcccgtgtaatcc

SEQ ID NO: 2830927 - DNA, 25 bp, Homo sapien
agtcccgtgtaatccaatgcatgca

SEQ ID NO: 2830928 - DNA, 25 bp, Homo sapien
gcatgcataagatcacaggaagaca

SEQ ID NO: 2830929 - DNA, 25 bp, Homo sapien
tactcttcattctccgtcctaggaa

SEQ ID NO: 2830930 - DNA, 25 bp, Homo sapien
atactcttcattctccgtcctagga

SEQ ID NO: 2830931 - DNA, 25 bp, Homo sapien
actcttcattctccgtcctaggaaa

SEQ ID NO: 2830932 - DNA, 25 bp, Homo sapien
tgttcaccatgataaagagcagaag

SEQ ID NO: 2830933 - DNA, 25 bp, Homo sapien
cagttgtgtcaatatacgggtatct

SEQ ID NO: 2830934 - DNA, 25 bp, Homo sapien
aaaccacagcttgcctattttgagg

SEQ ID NO: 2830935 - DNA, 25 bp, Homo sapien
tacactggccagacaccgagtttca

SEQ ID NO: 2830936 - DNA, 25 bp, Homo sapien
aatatgggagggcatcatccaaccc

SEQ ID NO: 2830937 - DNA, 25 bp, Homo sapien
gcatattggccaccgcaatatggga

SEQ ID NO: 2830938 - DNA, 25 bp, Homo sapien
actgagtaaagcatattggccaccg

SEQ ID NO: 2830939 - DNA, 25 bp, Homo sapien
cttgagcaccggatgtccagatatc

SEQ ID NO: 2830940 - DNA, 25 bp, Homo sapien
ttggcagtcccaaatttcgtctttg

SEQ ID NO: 2830941 - DNA, 25 bp, Homo sapien
gcttctctacttattacctgtagtc

SEQ ID NO: 2830942 - DNA, 25 bp, Homo sapien
tgtctccctacttctaagcagttgc

SEQ ID NO: 2830943 - DNA, 25 bp, Homo sapien
ctccaacatcttacaaaaattgtca

SEQ ID NO: 2830944 - DNA, 25 bp, Homo sapien
ctttcttaaatgggtcatacttcct

SEQ ID NO: 2830945 - DNA, 25 bp, Homo sapien
tcttaaatgggtcatacttcctttc

SEQ ID NO: 2830946 - DNA, 25 bp, Homo sapien
cattccatagtttaatctttggtcc

SEQ ID NO: 2830947 - DNA, 25 bp, Homo sapien
ttaaatgggtcatacttcctttcaa

SEQ ID NO: 2830948 - DNA, 25 bp, Homo sapien
ccttggcatccaatccaggctcaat

SEQ ID NO: 2830949 - DNA, 25 bp, Homo sapien
tcaatcagtccttcaagtccagtta

SEQ ID NO: 2830950 - DNA, 25 bp, Homo sapien
tcaagtccagttagtcccactctgg

SEQ ID NO: 2830951 - DNA, 25 bp, Homo sapien
tggcatccaatccaggctcaatcag

SEQ ID NO: 2830952 - DNA, 25 bp, Homo sapien
tgcctatgtgcccaatttgtacttg

SEQ ID NO: 2830953 - DNA, 25 bp, Homo sapien
cccaatttgtacttgtgagatgatc

SEQ ID NO: 2830954 - DNA, 25 bp, Homo sapien
tatgtgcccaatttgtacttgtgag

SEQ ID NO: 2830955 - DNA, 25 bp, Homo sapien
tgcccaatttgtacttgtgagatga

SEQ ID NO: 2830956 - DNA, 25 bp, Homo sapien
gtctatcatgttcatcaaacctcat

SEQ ID NO: 2830957 - DNA, 25 bp, Homo sapien
tttgatcatcttctcatgctgattt

SEQ ID NO: 2830958 - DNA, 25 bp, Homo sapien
atgaattttgatcatcttctcatgc

SEQ ID NO: 2830959 - DNA, 25 bp, Homo sapien
aattttgatcatcttctcatgctga

SEQ ID NO: 2830960 - DNA, 25 bp, Homo sapien
atatatgaattttgatcatcttctc

SEQ ID NO: 2830961 - DNA, 25 bp, Homo sapien
acagatatcatcaggagagccgagg

SEQ ID NO: 2830962 - DNA, 25 bp, Homo sapien
ggagagaccctaacgacaatggtgc

SEQ ID NO: 2830963 - DNA, 25 bp, Homo sapien
gataagtatttccaatccctcagag

SEQ ID NO: 2830964 - DNA, 25 bp, Homo sapien
gacaagtgaccgactagagagagaa

SEQ ID NO: 2830965 - DNA, 25 bp, Homo sapien
gctggcagcggtgccgcctgcggct

SEQ ID NO: 2830966 - DNA, 25 bp, Homo sapien
ccggctggcagcggtgccgcctgcg

SEQ ID NO: 2830967 - DNA, 25 bp, Homo sapien
ctctccggctggcagcggtgccgcc

SEQ ID NO: 2830968 - DNA, 25 bp, Homo sapien
tctccggctggcagcggtgccgcct

SEQ ID NO: 2830969 - DNA, 25 bp, Homo sapien
gcgttgccgccgccgctgctcctcc

SEQ ID NO: 2830970 - DNA, 25 bp, Homo sapien
ccgccgccgctgctcctcctcctcc

SEQ ID NO: 2830971 - DNA, 25 bp, Homo sapien
tgccgccgccgctgctcctcctcct

SEQ ID NO: 2830972 - DNA, 25 bp, Homo sapien
gccgccgctgctcctcctcctcctc

SEQ ID NO: 2830973 - DNA, 25 bp, Homo sapien
gatgtctacatcaaaggtgacctcc

SEQ ID NO: 2830974 - DNA, 25 bp, Homo sapien
ctggacaagtatgagtggttcatgc

SEQ ID NO: 2830975 - DNA, 25 bp, Homo sapien
tgcgcgccgacgacgatgtctacat

SEQ ID NO: 2830976 - DNA, 25 bp, Homo sapien
tatgagtggttcatgcgcgccgacg

SEQ ID NO: 2830977 - DNA, 25 bp, Homo sapien
tcacttgctgttttcggtgccgcct

SEQ ID NO: 2830978 - DNA, 25 bp, Homo sapien
acttgctgttttcggtgccgcctcg

SEQ ID NO: 2830979 - DNA, 25 bp, Homo sapien
ttgctgttttcggtgccgcctcgcg

SEQ ID NO: 2830980 - DNA, 25 bp, Homo sapien
gctgttttcggtgccgcctcgcgct

SEQ ID NO: 2830981 - DNA, 25 bp, Homo sapien
tggcagaaggcgaaaggcacatctt

SEQ ID NO: 2830982 - DNA, 25 bp, Homo sapien
agagaatgagaaccaagtgaaaggg

SEQ ID NO: 2830983 - DNA, 25 bp, Homo sapien
ggtttccccatgtaaaaccatcaga

SEQ ID NO: 2830984 - DNA, 25 bp, Homo sapien
gagagagaatgagaaccaagtgaaa

SEQ ID NO: 2830985 - DNA, 25 bp, Homo sapien
cagttgatatcgagtgaaattgagt

SEQ ID NO: 2830986 - DNA, 25 bp, Homo sapien
tcgtttgcagaattgattgaaacag

SEQ ID NO: 2830987 - DNA, 25 bp, Homo sapien
catttcatcaagtatgtcgtttgca

SEQ ID NO: 2830988 - DNA, 25 bp, Homo sapien
aatatccaagcttgtaaaacttgaa

SEQ ID NO: 2830989 - DNA, 25 bp, Homo sapien
catagaagcggtctaaaccattggc

SEQ ID NO: 2830990 - DNA, 25 bp, Homo sapien
tcatgtacatagaagcggtctaaac

SEQ ID NO: 2830991 - DNA, 25 bp, Homo sapien
catgtggaccctgaagagattctga

SEQ ID NO: 2830992 - DNA, 25 bp, Homo sapien
ctgatagggatctccacccattgtc

SEQ ID NO: 2830993 - DNA, 25 bp, Homo sapien
tcagctccagtggtaaagccggaat

SEQ ID NO: 2830994 - DNA, 25 bp, Homo sapien
tctagtaacttcagggtggttgctg

SEQ ID NO: 2830995 - DNA, 25 bp, Homo sapien
gctgggagcctcaaaggtagatgcc

SEQ ID NO: 2830996 - DNA, 25 bp, Homo sapien
gactataacttgtaatcggtctagc

SEQ ID NO: 2830997 - DNA, 25 bp, Homo sapien
aacagatacagtgggcaacctttcc

SEQ ID NO: 2830998 - DNA, 25 bp, Homo sapien
cctcactgtttaggatggtatattg

SEQ ID NO: 2830999 - DNA, 25 bp, Homo sapien
tacagtgggcaacctttccctcaag

SEQ ID NO: 2831000 - DNA, 25 bp, Homo sapien
tatattgccagtcagaaacagatac

SEQ ID NO: 2831001 - DNA, 25 bp, Homo sapien
tcatactccacagattctgggttct

SEQ ID NO: 2831002 - DNA, 25 bp, Homo sapien
tggtgaggggagctctgtacacaca

SEQ ID NO: 2831003 - DNA, 25 bp, Homo sapien
tcgtctcatactccacagattctgg

SEQ ID NO: 2831004 - DNA, 25 bp, Homo sapien
tccatcctaacttttctgacaacat

SEQ ID NO: 2831005 - DNA, 25 bp, Homo sapien
catcatagttatgtatgaaatttga

SEQ ID NO: 2831006 - DNA, 25 bp, Homo sapien
catagttatgtatgaaatttgaact

SEQ ID NO: 2831007 - DNA, 25 bp, Homo sapien
tcatagttatgtatgaaatttgaac

SEQ ID NO: 2831008 - DNA, 25 bp, Homo sapien
gcatcatagttatgtatgaaatttg

SEQ ID NO: 2831009 - DNA, 25 bp, Homo sapien
actggactccctgtcacctaatctc

SEQ ID NO: 2831010 - DNA, 25 bp, Homo sapien
actgccatagatggtcattcccaca

SEQ ID NO: 2831011 - DNA, 25 bp, Homo sapien
tcagtccacactgccatagatggtc

SEQ ID NO: 2831012 - DNA, 25 bp, Homo sapien
gtgtagccccatagacagaggtact

SEQ ID NO: 2831013 - DNA, 25 bp, Homo sapien
cattcgtaccaagatgtttacccaa

SEQ ID NO: 2831014 - DNA, 25 bp, Homo sapien
ccagtagtaactctgttgatgaaaa

SEQ ID NO: 2831015 - DNA, 25 bp, Homo sapien
tatgtgccaaacttaatttttcatc

SEQ ID NO: 2831016 - DNA, 25 bp, Homo sapien
tgtgaaattcaatatgtgccaaact

SEQ ID NO: 2831017 - DNA, 25 bp, Homo sapien
ggagaaacttgttcctacaccagca

SEQ ID NO: 2831018 - DNA, 25 bp, Homo sapien
tgacctttttttgatactactgcct

SEQ ID NO: 2831019 - DNA, 25 bp, Homo sapien
cctccacatgggcagaacagctgaa

SEQ ID NO: 2831020 - DNA, 25 bp, Homo sapien
ccttgttctatgtagctgtctctcc

SEQ ID NO: 2831021 - DNA, 25 bp, Homo sapien
tgtggaatctggacagctctggcat

SEQ ID NO: 2831022 - DNA, 25 bp, Homo sapien
ccactttgtcaaagggtttagagca

SEQ ID NO: 2831023 - DNA, 25 bp, Homo sapien
tcagcactgtgacagaagttctgca

SEQ ID NO: 2831024 - DNA, 25 bp, Homo sapien
attagcaaatcttaccaggtacaga

SEQ ID NO: 2831025 - DNA, 25 bp, Homo sapien
tgtaagcatgtgaagaactatgaaa

SEQ ID NO: 2831026 - DNA, 25 bp, Homo sapien
gctagcctccaaccagctctggctt

SEQ ID NO: 2831027 - DNA, 25 bp, Homo sapien
cttcaatgtaagcatgtgaagaact

SEQ ID NO: 2831028 - DNA, 25 bp, Homo sapien
ttgctagcctccaaccagctctggc

SEQ ID NO: 2831029 - DNA, 25 bp, Homo sapien
tcctaccaggttcctcccacaacac

SEQ ID NO: 2831030 - DNA, 25 bp, Homo sapien
aggttcctcccacaacacatgggaa

SEQ ID NO: 2831031 - DNA, 25 bp, Homo sapien
ctcctaccaggttcctcccacaaca

SEQ ID NO: 2831032 - DNA, 25 bp, Homo sapien
cctaccaggttcctcccacaacaca

SEQ ID NO: 2831033 - DNA, 25 bp, Homo sapien
tactccagaatttactacctccttg

SEQ ID NO: 2831034 - DNA, 25 bp, Homo sapien
gatcttgatttactccagaatttac

SEQ ID NO: 2831035 - DNA, 25 bp, Homo sapien
atttactacctccttgccagttact

SEQ ID NO: 2831036 - DNA, 25 bp, Homo sapien
ttactacctccttgccagttactac

SEQ ID NO: 2831037 - DNA, 25 bp, Homo sapien
attgtctcctaaacaaccactattc

SEQ ID NO: 2831038 - DNA, 25 bp, Homo sapien
gtgaccacataaccttttcaatttc

SEQ ID NO: 2831039 - DNA, 25 bp, Homo sapien
tccttcattgtctcctaaacaacca

SEQ ID NO: 2831040 - DNA, 25 bp, Homo sapien
caagtgaccacataaccttttcaat

SEQ ID NO: 2831041 - DNA, 25 bp, Homo sapien
attattatggagtttcggtaattct

SEQ ID NO: 2831042 - DNA, 25 bp, Homo sapien
tacttgttttaaatatgtgctttgc

SEQ ID NO: 2831043 - DNA, 25 bp, Homo sapien
gcttgtatattcagtttcccaagaa

SEQ ID NO: 2831044 - DNA, 25 bp, Homo sapien
tggagtttcggtaattctttatata

SEQ ID NO: 2831045 - DNA, 25 bp, Homo sapien
taaccttgacttgacgtcctataat

SEQ ID NO: 2831046 - DNA, 25 bp, Homo sapien
ccttgacttgacgtcctataattta

SEQ ID NO: 2831047 - DNA, 25 bp, Homo sapien
tcataaccttgacttgacgtcctat

SEQ ID NO: 2831048 - DNA, 25 bp, Homo sapien
gacttgacgtcctataatttacact

SEQ ID NO: 2831049 - DNA, 25 bp, Homo sapien
cattggggcattattgcagccagcg

SEQ ID NO: 2831050 - DNA, 25 bp, Homo sapien
ttattgcagccagcgcgatctcttc

SEQ ID NO: 2831051 - DNA, 25 bp, Homo sapien
gaccattggggcattattgcagcca

SEQ ID NO: 2831052 - DNA, 25 bp, Homo sapien
gggcattattgcagccagcgcgatc

SEQ ID NO: 2831053 - DNA, 25 bp, Homo sapien
gaggtattacatgtagtagtcaaaa

SEQ ID NO: 2831054 - DNA, 25 bp, Homo sapien
ctctaaatagttgcttgtatgagta

SEQ ID NO: 2831055 - DNA, 25 bp, Homo sapien
gaagtatccatcagaaacacaaaca

SEQ ID NO: 2831056 - DNA, 25 bp, Homo sapien
acagcaacactgtacacttctctaa

SEQ ID NO: 2831057 - DNA, 25 bp, Homo sapien
cagggtcattataaggaacgaggtt

SEQ ID NO: 2831058 - DNA, 25 bp, Homo sapien
ttaacaaggcggcaggagtgtcagc

SEQ ID NO: 2831059 - DNA, 25 bp, Homo sapien
tcagcgagaaccagaaagtgcctca

SEQ ID NO: 2831060 - DNA, 25 bp, Homo sapien
ggttatgtaacatcagtggagtcca

SEQ ID NO: 2831061 - DNA, 25 bp, Homo sapien
gctttgatttcatttggattcttca

SEQ ID NO: 2831062 - DNA, 25 bp, Homo sapien
actagctttgatttcatttggattc

SEQ ID NO: 2831063 - DNA, 25 bp, Homo sapien
caactagctttgatttcatttggat

SEQ ID NO: 2831064 - DNA, 25 bp, Homo sapien
tagctttgatttcatttggattctt

SEQ ID NO: 2831065 - DNA, 25 bp, Homo sapien
ttctcaagttttgatagaaaatatg

SEQ ID NO: 2831066 - DNA, 25 bp, Homo sapien
tcttctcaagttttgatagaaaata

SEQ ID NO: 2831067 - DNA, 25 bp, Homo sapien
ctcaagttttgatagaaaatatgtc

SEQ ID NO: 2831068 - DNA, 25 bp, Homo sapien
tttcttctcaagttttgatagaaaa

SEQ ID NO: 2831069 - DNA, 25 bp, Homo sapien
catctgcggcaactgcattctccat

SEQ ID NO: 2831070 - DNA, 25 bp, Homo sapien
actcatctgcggcaactgcattctc

SEQ ID NO: 2831071 - DNA, 25 bp, Homo sapien
tctgccactcatctgcggcaactgc

SEQ ID NO: 2831072 - DNA, 25 bp, Homo sapien
tgccactcatctgcggcaactgcat

SEQ ID NO: 2831073 - DNA, 25 bp, Homo sapien
cataatgctatataagccacagagt

SEQ ID NO: 2831074 - DNA, 25 bp, Homo sapien
gggcattttagtactcttcaccaac

SEQ ID NO: 2831075 - DNA, 25 bp, Homo sapien
tatgctgctatactgttgtcaggtc

SEQ ID NO: 2831076 - DNA, 25 bp, Homo sapien
agtttgtcgttggtcttgcatctca

SEQ ID NO: 2831077 - DNA, 25 bp, Homo sapien
actaatttgccaaaggctttcccat

SEQ ID NO: 2831078 - DNA, 25 bp, Homo sapien
tagcgaactaatttgccaaaggctt

SEQ ID NO: 2831079 - DNA, 25 bp, Homo sapien
gcgaactaatttgccaaaggctttc

SEQ ID NO: 2831080 - DNA, 25 bp, Homo sapien
ttagcgaactaatttgccaaaggct

SEQ ID NO: 2831081 - DNA, 25 bp, Homo sapien
aaggcaagtcccttctacctacgag

SEQ ID NO: 2831082 - DNA, 25 bp, Homo sapien
cattctgcccctggcccctccaaaa

SEQ ID NO: 2831083 - DNA, 25 bp, Homo sapien
attctgcccctggcccctccaaaat

SEQ ID NO: 2831084 - DNA, 25 bp, Homo sapien
caagtcccttctacctacgagcctg

SEQ ID NO: 2831085 - DNA, 25 bp, Homo sapien
ttctctttcagtaaaaatgtctgtg

SEQ ID NO: 2831086 - DNA, 25 bp, Homo sapien
ttctttaacctcctccttgctcctc

SEQ ID NO: 2831087 - DNA, 25 bp, Homo sapien
tcaccataaagtgttgttttcttta

SEQ ID NO: 2831088 - DNA, 25 bp, Homo sapien
ctctttttctctttcagtaaaaatg

SEQ ID NO: 2831089 - DNA, 25 bp, Homo sapien
tacttgtacacaatgcctctcattt

SEQ ID NO: 2831090 - DNA, 25 bp, Homo sapien
tatacttgtacacaatgcctctcat

SEQ ID NO: 2831091 - DNA, 25 bp, Homo sapien
tgtacacaatgcctctcatttctac

SEQ ID NO: 2831092 - DNA, 25 bp, Homo sapien
ctctatacttgtacacaatgcctct

SEQ ID NO: 2831093 - DNA, 25 bp, Homo sapien
ttcgacgaatccacttataagcatc

SEQ ID NO: 2831094 - DNA, 25 bp, Homo sapien
tgaaataatgagttcgacgaatcca

SEQ ID NO: 2831095 - DNA, 25 bp, Homo sapien
tgagttcgacgaatccacttataag

SEQ ID NO: 2831096 - DNA, 25 bp, Homo sapien
aatccacttataagcatcctctatg

SEQ ID NO: 2831097 - DNA, 25 bp, Homo sapien
tatcacagtttgtaaagctttcaac

SEQ ID NO: 2831098 - DNA, 25 bp, Homo sapien
ttccttcaaagcactccttaacagt

SEQ ID NO: 2831099 - DNA, 25 bp, Homo sapien
ccttcaaagcactccttaacagtca

SEQ ID NO: 2831100 - DNA, 25 bp, Homo sapien
tcacagtttgtaaagctttcaacat

SEQ ID NO: 2831101 - DNA, 25 bp, Homo sapien
tgttttcgtgaccactgggctgcca

SEQ ID NO: 2831102 - DNA, 25 bp, Homo sapien
taatgtttgttttcgtgaccactgg

SEQ ID NO: 2831103 - DNA, 25 bp, Homo sapien
gatgataatgtttgttttcgtgacc

SEQ ID NO: 2831104 - DNA, 25 bp, Homo sapien
tttgaacacaagatgataatgtttg

SEQ ID NO: 2831105 - DNA, 25 bp, Homo sapien
agtctccaagggagcctgataaagc

SEQ ID NO: 2831106 - DNA, 25 bp, Homo sapien
aatgaccgcctttagtgcacagccc

SEQ ID NO: 2831107 - DNA, 25 bp, Homo sapien
ttgagcagctaagcgtaggaggaca

SEQ ID NO: 2831108 - DNA, 25 bp, Homo sapien
ggaggacaacgaatccagtctccaa

SEQ ID NO: 2831109 - DNA, 25 bp, Homo sapien
gccaagaccctgttctccctgaaga

SEQ ID NO: 2831110 - DNA, 25 bp, Homo sapien
gcctgagccttgctgcctccaaagg

SEQ ID NO: 2831111 - DNA, 25 bp, Homo sapien
ggagaaccacaaacacagaactcag

SEQ ID NO: 2831112 - DNA, 25 bp, Homo sapien
gaagccaagaccctgttctccctga

SEQ ID NO: 2831113 - DNA, 25 bp, Homo sapien
ttgtagtgatttgtttgaccttgta

SEQ ID NO: 2831114 - DNA, 25 bp, Homo sapien
taatgactgcccttaattgctcccc

SEQ ID NO: 2831115 - DNA, 25 bp, Homo sapien
tatatcctcccatggcaattccaga

SEQ ID NO: 2831116 - DNA, 25 bp, Homo sapien
taatagggactataaacagaaccac

SEQ ID NO: 2831117 - DNA, 25 bp, Homo sapien
catcatccaaatatctcaagccaag

SEQ ID NO: 2831118 - DNA, 25 bp, Homo sapien
tacagtggagttgcttactgatgcc

SEQ ID NO: 2831119 - DNA, 25 bp, Homo sapien
taggaccaaaagcaccaggaggaga

SEQ ID NO: 2831120 - DNA, 25 bp, Homo sapien
ctacatagagcctagaataggacca

SEQ ID NO: 2831121 - DNA, 25 bp, Homo sapien
tgatgcctgagaagagatctgtata

SEQ ID NO: 2831122 - DNA, 25 bp, Homo sapien
tgctgttccactactctgctgccca

SEQ ID NO: 2831123 - DNA, 25 bp, Homo sapien
catatttgtgctgttccactactct

SEQ ID NO: 2831124 - DNA, 25 bp, Homo sapien
aatgccaacaccaccatatttgtgc

SEQ ID NO: 2831125 - DNA, 25 bp, Homo sapien
agcaatgccaacaccaccatatttg

SEQ ID NO: 2831126 - DNA, 25 bp, Homo sapien
tccactaggtgctcttgagtcctgg

SEQ ID NO: 2831127 - DNA, 25 bp, Homo sapien
agttctctatgcaggactgtcttcc

SEQ ID NO: 2831128 - DNA, 25 bp, Homo sapien
tgcttttacctccaaagttctctat

SEQ ID NO: 2831129 - DNA, 25 bp, Homo sapien
cttcctcgggctttgatgtgctttt

SEQ ID NO: 2831130 - DNA, 25 bp, Homo sapien
cctttgtgaaaggtagggcactaat

SEQ ID NO: 2831131 - DNA, 25 bp, Homo sapien
attctcctttgtgaaaggtagggca

SEQ ID NO: 2831132 - DNA, 25 bp, Homo sapien
ttgtgaaaggtagggcactaatgtg

SEQ ID NO: 2831133 - DNA, 25 bp, Homo sapien
gaaaggtagggcactaatgtgaaaa

SEQ ID NO: 2831134 - DNA, 25 bp, Homo sapien
gaaagtgagaatattgatccctggg

SEQ ID NO: 2831135 - DNA, 25 bp, Homo sapien
gacttagacgaaagtgagaatattg

SEQ ID NO: 2831136 - DNA, 25 bp, Homo sapien
gtgagaatattgatccctgggtcat

SEQ ID NO: 2831137 - DNA, 25 bp, Homo sapien
ctgggtagacttagacgaaagtgag

SEQ ID NO: 2831138 - DNA, 25 bp, Homo sapien
gtcttccagtcccacgacgagggtg

SEQ ID NO: 2831139 - DNA, 25 bp, Homo sapien
tcttccagtcccacgacgagggtga

SEQ ID NO: 2831140 - DNA, 25 bp, Homo sapien
tccagtcccacgacgagggtgagga

SEQ ID NO: 2831141 - DNA, 25 bp, Homo sapien
gtcccacgacgagggtgaggaggag

SEQ ID NO: 2831142 - DNA, 25 bp, Homo sapien
tctcactctgtctcccaggctggaa

SEQ ID NO: 2831143 - DNA, 25 bp, Homo sapien
ttttttggcctagaatctcactctg

SEQ ID NO: 2831144 - DNA, 25 bp, Homo sapien
tgcaacctccacctcccaggctcaa

SEQ ID NO: 2831145 - DNA, 25 bp, Homo sapien
atgcagtggtgcaatctctgctcac

SEQ ID NO: 2831146 - DNA, 25 bp, Homo sapien
tgaggtttatgcctcaggagcccct

SEQ ID NO: 2831147 - DNA, 25 bp, Homo sapien
tatagcttatgaggtgttctggccc

SEQ ID NO: 2831148 - DNA, 25 bp, Homo sapien
accgcgcctggtccctttatataag

SEQ ID NO: 2831149 - DNA, 25 bp, Homo sapien
taccagattgcctcaccgcagtgaa

SEQ ID NO: 2831150 - DNA, 25 bp, Homo sapien
tgcatgataaaagcccagccaaccc

SEQ ID NO: 2831151 - DNA, 25 bp, Homo sapien
ttactgtggcacaaatccctccaaa

SEQ ID NO: 2831152 - DNA, 25 bp, Homo sapien
caccagcttaactaaatcagtggga

SEQ ID NO: 2831153 - DNA, 25 bp, Homo sapien
cagtgggaaagacaatatgcatgat

SEQ ID NO: 2831154 - DNA, 25 bp, Homo sapien
tccaggctaaaataggtccaactta

SEQ ID NO: 2831155 - DNA, 25 bp, Homo sapien
tctaagaacataggaaattgaccat

SEQ ID NO: 2831156 - DNA, 25 bp, Homo sapien
ggaggactcaacatatgaacatcgc

SEQ ID NO: 2831157 - DNA, 25 bp, Homo sapien
gtctctctgagtgttgcgtttgatt

SEQ ID NO: 2831158 - DNA, 25 bp, Homo sapien
tatgaacatcgcattgttttaatgg

SEQ ID NO: 2831159 - DNA, 25 bp, Homo sapien
gctttaacttcgaaatatctttcca

SEQ ID NO: 2831160 - DNA, 25 bp, Homo sapien
ccattaaaacaatgcgatgttcata

SEQ ID NO: 2831161 - DNA, 25 bp, Homo sapien
taagttggacctattttagcctgga

SEQ ID NO: 2831162 - DNA, 25 bp, Homo sapien
gaaagatatttcgaagttaaagcta

SEQ ID NO: 2831163 - DNA, 25 bp, Homo sapien
aatcaaacgcaacactcagagagac

SEQ ID NO: 2831164 - DNA, 25 bp, Homo sapien
tggtcaatttcctatgttcttagaa

SEQ ID NO: 2831165 - DNA, 25 bp, Homo sapien
gcgatgttcatatgttgagtcctcc

SEQ ID NO: 2831166 - DNA, 25 bp, Homo sapien
ctcttctttaggcaatgattaagtt

SEQ ID NO: 2831167 - DNA, 25 bp, Homo sapien
ttctcttctttaggcaatgattaag

SEQ ID NO: 2831168 - DNA, 25 bp, Homo sapien
tctcttctttaggcaatgattaagt

SEQ ID NO: 2831169 - DNA, 25 bp, Homo sapien
cctgtgtatggagagattcaagaaa

SEQ ID NO: 2831170 - DNA, 25 bp, Homo sapien
tttcttgaatctctccatacacagg

SEQ ID NO: 2831171 - DNA, 25 bp, Homo sapien
acttaatcattgcctaaagaagaga

SEQ ID NO: 2831172 - DNA, 25 bp, Homo sapien
aacttaatcattgcctaaagaagag

SEQ ID NO: 2831173 - DNA, 25 bp, Homo sapien
cttaatcattgcctaaagaagagaa

SEQ ID NO: 2831174 - DNA, 25 bp, Homo sapien
cacacttatttttgcctgtgtatgg

SEQ ID NO: 2831175 - DNA, 25 bp, Homo sapien
ttctcttctttaggcaatgattaag

SEQ ID NO: 2831176 - DNA, 25 bp, Homo sapien
cctgtgtatggagagattcaagaaa

SEQ ID NO: 2831177 - DNA, 25 bp, Homo sapien
gggataattttctcttctttaggca

SEQ ID NO: 2831178 - DNA, 25 bp, Homo sapien
ggcaatttccagtatgttaagtaac

SEQ ID NO: 2831179 - DNA, 25 bp, Homo sapien
gcaatgattaagttaggcaatttcc

SEQ ID NO: 2831180 - DNA, 25 bp, Homo sapien
tttcttgaatctctccatacacagg

SEQ ID NO: 2831181 - DNA, 25 bp, Homo sapien
ccatacacaggcaaaaataagtgtg

SEQ ID NO: 2831182 - DNA, 25 bp, Homo sapien
gttacttaacatactggaaattgcc

SEQ ID NO: 2831183 - DNA, 25 bp, Homo sapien
tgcctaaagaagagaaaattatccc

SEQ ID NO: 2831184 - DNA, 25 bp, Homo sapien
aacttaatcattgcctaaagaagag

SEQ ID NO: 2831185 - DNA, 25 bp, Homo sapien
ggaaattgcctaacttaatcattgc

SEQ ID NO: 2831186 - DNA, 25 bp, Homo sapien
catgttcttggaggtcggcaaatgc

SEQ ID NO: 2831187 - DNA, 25 bp, Homo sapien
gaaatgtgctgctgatctgggcctg

SEQ ID NO: 2831188 - DNA, 25 bp, Homo sapien
tctgggcctgaataagggttatcga

SEQ ID NO: 2831189 - DNA, 25 bp, Homo sapien
tatcgaatggtggtgaatgaaggtt

SEQ ID NO: 2831190 - DNA, 25 bp, Homo sapien
ggacagtctgtctatcacgttcatc

SEQ ID NO: 2831191 - DNA, 25 bp, Homo sapien
ggtcggcaaatgcattggcctcctg

SEQ ID NO: 2831192 - DNA, 25 bp, Homo sapien
caggaggccaatgcatttgccgacc

SEQ ID NO: 2831193 - DNA, 25 bp, Homo sapien
catttgccgacctccaagaacatgg

SEQ ID NO: 2831194 - DNA, 25 bp, Homo sapien
gaaccttcattcaccaccattcgat

SEQ ID NO: 2831195 - DNA, 25 bp, Homo sapien
ttcgataacccttattcaggcccag

SEQ ID NO: 2831196 - DNA, 25 bp, Homo sapien
tcaggcccagatcagcagcacattt

SEQ ID NO: 2831197 - DNA, 25 bp, Homo sapien
gatgaacgtgatagacagactgtcc

SEQ ID NO: 2831198 - DNA, 25 bp, Homo sapien
aatcttaatgagtctccagttgtag

SEQ ID NO: 2831199 - DNA, 25 bp, Homo sapien
gaagtaataaattgcctgtgcctaa

SEQ ID NO: 2831200 - DNA, 25 bp, Homo sapien
tcaaagggttgtgtttcaatgagag

SEQ ID NO: 2831201 - DNA, 25 bp, Homo sapien
gatatttcagcttgacagtttgtta

SEQ ID NO: 2831202 - DNA, 25 bp, Homo sapien
gctctgttgggattaagagtttcca

SEQ ID NO: 2831203 - DNA, 25 bp, Homo sapien
ccagttgtagattatgctctgttgg

SEQ ID NO: 2831204 - DNA, 25 bp, Homo sapien
ttcttaggcacaggcaatttattac

SEQ ID NO: 2831205 - DNA, 25 bp, Homo sapien
cagagcataatctacaactggagac

SEQ ID NO: 2831206 - DNA, 25 bp, Homo sapien
taacaaactgtcaagctgaaatatc

SEQ ID NO: 2831207 - DNA, 25 bp, Homo sapien
acaactggagactcattaagattag

SEQ ID NO: 2831208 - DNA, 25 bp, Homo sapien
tggaaactcttaatcccaacagagc

SEQ ID NO: 2831209 - DNA, 25 bp, Homo sapien
tctcattgaaacacaaccctttgag

SEQ ID NO: 2831210 - DNA, 25 bp, Homo sapien
cagcactttggaagttaaggtgggc

SEQ ID NO: 2831211 - DNA, 25 bp, Homo sapien
ttggagaagccccatctcaacaaaa

SEQ ID NO: 2831212 - DNA, 25 bp, Homo sapien
ttgtagtcccagctccttgggtggg

SEQ ID NO: 2831213 - DNA, 25 bp, Homo sapien
ttgcccaagcgcaggagttcgagac

SEQ ID NO: 2831214 - DNA, 25 bp, Homo sapien
cagcctggacaacattggagaagcc

SEQ ID NO: 2831215 - DNA, 25 bp, Homo sapien
taaggtgggcagattgcccaagcgc

SEQ ID NO: 2831216 - DNA, 25 bp, Homo sapien
gcccaccttaacttccaaagtgctg

SEQ ID NO: 2831217 - DNA, 25 bp, Homo sapien
cgcttgggcaatctgcccaccttaa

SEQ ID NO: 2831218 - DNA, 25 bp, Homo sapien
ccacccaaggagctgggactacaag

SEQ ID NO: 2831219 - DNA, 25 bp, Homo sapien
gtctcgaactcctgcgcttgggcaa

SEQ ID NO: 2831220 - DNA, 25 bp, Homo sapien
ggcttctccaatgttgtccaggctg

SEQ ID NO: 2831221 - DNA, 25 bp, Homo sapien
tcacccacccaaggagctgggacta

SEQ ID NO: 2831222 - DNA, 25 bp, Homo sapien
tgtgtaaatagagacaaattgactg

SEQ ID NO: 2831223 - DNA, 25 bp, Homo sapien
caagtcccgacaatgcaatagatct

SEQ ID NO: 2831224 - DNA, 25 bp, Homo sapien
tggcaacatacaaatagactccatg

SEQ ID NO: 2831225 - DNA, 25 bp, Homo sapien
caggatcctgcaagtcccgacaatg

SEQ ID NO: 2831226 - DNA, 25 bp, Homo sapien
gagcgagactaggtatttgccacag

SEQ ID NO: 2831227 - DNA, 25 bp, Homo sapien
ttattagggaagaaagctggcaaca

SEQ ID NO: 2831228 - DNA, 25 bp, Homo sapien
catggagtctatttgtatgttgcca

SEQ ID NO: 2831229 - DNA, 25 bp, Homo sapien
agaaggttgccaagagaaaagaact

SEQ ID NO: 2831230 - DNA, 25 bp, Homo sapien
tgtggcaaatacctagtctcgctct

SEQ ID NO: 2831231 - DNA, 25 bp, Homo sapien
ttattaagccccaggacagtggact

SEQ ID NO: 2831232 - DNA, 25 bp, Homo sapien
tgttgccagctttcttccctaataa

SEQ ID NO: 2831233 - DNA, 25 bp, Homo sapien
cattgtcgggacttgcaggatcctg

SEQ ID NO: 2831234 - DNA, 25 bp, Homo sapien
tgtacaatggaccttactgcatgag

SEQ ID NO: 2831235 - DNA, 25 bp, Homo sapien
tgcatatcgccacaccattgtaaag

SEQ ID NO: 2831236 - DNA, 25 bp, Homo sapien
tacaatggaccttactgcatgagta

SEQ ID NO: 2831237 - DNA, 25 bp, Homo sapien
caatggaccttactgcatgagtaag

SEQ ID NO: 2831238 - DNA, 25 bp, Homo sapien
tattttactgcatatcaccagtctg

SEQ ID NO: 2831239 - DNA, 25 bp, Homo sapien
aatgcatatcgccacaccattgtaa

SEQ ID NO: 2831240 - DNA, 25 bp, Homo sapien
atctcatgtaagagtattttactgc

SEQ ID NO: 2831241 - DNA, 25 bp, Homo sapien
tatctcatgtaagagtattttactg

SEQ ID NO: 2831242 - DNA, 25 bp, Homo sapien
cagtaaaatactcttacatgagata

SEQ ID NO: 2831243 - DNA, 25 bp, Homo sapien
gcagtaaaatactcttacatgagat

SEQ ID NO: 2831244 - DNA, 25 bp, Homo sapien
tactcatgcagtaaggtccattgta

SEQ ID NO: 2831245 - DNA, 25 bp, Homo sapien
tcatgcagtaaggtccattgtacag

SEQ ID NO: 2831246 - DNA, 25 bp, Homo sapien
tggtgtggcgatatgcattcaggag

SEQ ID NO: 2831247 - DNA, 25 bp, Homo sapien
ctttacaatggtgtggcgatatgca

SEQ ID NO: 2831248 - DNA, 25 bp, Homo sapien
cagactggtgatatgcagtaaaata

SEQ ID NO: 2831249 - DNA, 25 bp, Homo sapien
cttactcatgcagtaaggtccattg

SEQ ID NO: 2831250 - DNA, 25 bp, Homo sapien
gtccggacaagacggtctttgtggg

SEQ ID NO: 2831251 - DNA, 25 bp, Homo sapien
cccacaaagaccgtcttgtccggac

SEQ ID NO: 2831252 - DNA, 25 bp, Homo sapien
ctaatacagagcctattctgtaaca

SEQ ID NO: 2831253 - DNA, 25 bp, Homo sapien
taatacagagcctattctgtaacag

SEQ ID NO: 2831254 - DNA, 25 bp, Homo sapien
atctaatacagagcctattctgtaa

SEQ ID NO: 2831255 - DNA, 25 bp, Homo sapien
catctaatacagagcctattctgta

SEQ ID NO: 2831256 - DNA, 25 bp, Homo sapien
tctaatacagagcctattctgtaac

SEQ ID NO: 2831257 - DNA, 25 bp, Homo sapien
tgttacagaataggctctgtattag

SEQ ID NO: 2831258 - DNA, 25 bp, Homo sapien
ctgttacagaataggctctgtatta

SEQ ID NO: 2831259 - DNA, 25 bp, Homo sapien
tacagaataggctctgtattagatg

SEQ ID NO: 2831260 - DNA, 25 bp, Homo sapien
ttacagaataggctctgtattagat

SEQ ID NO: 2831261 - DNA, 25 bp, Homo sapien
gttacagaataggctctgtattaga

SEQ ID NO: 2831262 - DNA, 25 bp, Homo sapien
ctaatacagagcctattctgtaaca

SEQ ID NO: 2831263 - DNA, 25 bp, Homo sapien
aatcatctaatacagagcctattct

SEQ ID NO: 2831264 - DNA, 25 bp, Homo sapien
aaatcatctaatacagagcctattc

SEQ ID NO: 2831265 - DNA, 25 bp, Homo sapien
taatacagagcctattctgtaacag

SEQ ID NO: 2831266 - DNA, 25 bp, Homo sapien
atctaatacagagcctattctgtaa

SEQ ID NO: 2831267 - DNA, 25 bp, Homo sapien
catctaatacagagcctattctgta

SEQ ID NO: 2831268 - DNA, 25 bp, Homo sapien
tgttacagaataggctctgtattag

SEQ ID NO: 2831269 - DNA, 25 bp, Homo sapien
ctgttacagaataggctctgtatta

SEQ ID NO: 2831270 - DNA, 25 bp, Homo sapien
tacagaataggctctgtattagatg

SEQ ID NO: 2831271 - DNA, 25 bp, Homo sapien
gaataggctctgtattagatgattt

SEQ ID NO: 2831272 - DNA, 25 bp, Homo sapien
ttacagaataggctctgtattagat

SEQ ID NO: 2831273 - DNA, 25 bp, Homo sapien
cagaataggctctgtattagatgat

SEQ ID NO: 2831274 - DNA, 25 bp, Homo sapien
tgcatatgagtagacctgcacgggt

SEQ ID NO: 2831275 - DNA, 25 bp, Homo sapien
catggcattttaaggtcagagcttc

SEQ ID NO: 2831276 - DNA, 25 bp, Homo sapien
cacagagttcaaagattagagcgag

SEQ ID NO: 2831277 - DNA, 25 bp, Homo sapien
ccaggaaacgtttactgaaccagct

SEQ ID NO: 2831278 - DNA, 25 bp, Homo sapien
gcttgctcggaacacttaacgttaa

SEQ ID NO: 2831279 - DNA, 25 bp, Homo sapien
tgttgaaaatgcgtgtaagacacct

SEQ ID NO: 2831280 - DNA, 25 bp, Homo sapien
cgagcaagcttaagttagactaggc

SEQ ID NO: 2831281 - DNA, 25 bp, Homo sapien
taacgttaagtgttccgagcaagct

SEQ ID NO: 2831282 - DNA, 25 bp, Homo sapien
gaagctctgaccttaaaatgccatg

SEQ ID NO: 2831283 - DNA, 25 bp, Homo sapien
cagcagatacctatattggtcacaa

SEQ ID NO: 2831284 - DNA, 25 bp, Homo sapien
tcagtaaacgtttcctggccaacaa

SEQ ID NO: 2831285 - DNA, 25 bp, Homo sapien
tgggtttgacccgtgcaggtctact

SEQ ID NO: 2831286 - DNA, 25 bp, Homo sapien
tatccttatcaacacttgctattac

SEQ ID NO: 2831287 - DNA, 25 bp, Homo sapien
tccttatcaacacttgctattacct

SEQ ID NO: 2831288 - DNA, 25 bp, Homo sapien
gtatccttatcaacacttgctatta

SEQ ID NO: 2831289 - DNA, 25 bp, Homo sapien
tatcaacacttgctattaccttttt

SEQ ID NO: 2831290 - DNA, 25 bp, Homo sapien
ccttatcaacacttgctattacctt

SEQ ID NO: 2831291 - DNA, 25 bp, Homo sapien
atcaacacttgctattacctttttt

SEQ ID NO: 2831292 - DNA, 25 bp, Homo sapien
aaggtaatagcaagtgttgataagg

SEQ ID NO: 2831293 - DNA, 25 bp, Homo sapien
taatagcaagtgttgataaggatac

SEQ ID NO: 2831294 - DNA, 25 bp, Homo sapien
ggtaatagcaagtgttgataaggat

SEQ ID NO: 2831295 - DNA, 25 bp, Homo sapien
aaaaaaggtaatagcaagtgttgat

SEQ ID NO: 2831296 - DNA, 25 bp, Homo sapien
aaaggtaatagcaagtgttgataag

SEQ ID NO: 2831297 - DNA, 25 bp, Homo sapien
aaaaaggtaatagcaagtgttgata

SEQ ID NO: 2831298 - DNA, 25 bp, Homo sapien
agaaaaaccattaggacttcaactg

SEQ ID NO: 2831299 - DNA, 25 bp, Homo sapien
cagaaaaaccattaggacttcaact

SEQ ID NO: 2831300 - DNA, 25 bp, Homo sapien
gaaaaaccattaggacttcaactgc

SEQ ID NO: 2831301 - DNA, 25 bp, Homo sapien
agttgaagtcctaatggtttttctg

SEQ ID NO: 2831302 - DNA, 25 bp, Homo sapien
gcagttgaagtcctaatggtttttc

SEQ ID NO: 2831303 - DNA, 25 bp, Homo sapien
cagttgaagtcctaatggtttttct

SEQ ID NO: 2831304 - DNA, 25 bp, Homo sapien
cattaggacttcaactgcccagctg

SEQ ID NO: 2831305 - DNA, 25 bp, Homo sapien
tgcccagctgttttccaaagttact

SEQ ID NO: 2831306 - DNA, 25 bp, Homo sapien
aatgaatgagcgttccagcttctcc

SEQ ID NO: 2831307 - DNA, 25 bp, Homo sapien
ccagcaatgaatgagcgttccagct

SEQ ID NO: 2831308 - DNA, 25 bp, Homo sapien
gaaaaaccattaggacttcaactgc

SEQ ID NO: 2831309 - DNA, 25 bp, Homo sapien
tgcatcattttgtatcccaccagca

SEQ ID NO: 2831310 - DNA, 25 bp, Homo sapien
gcagttgaagtcctaatggtttttc

SEQ ID NO: 2831311 - DNA, 25 bp, Homo sapien
agctggaacgctcattcattgctgg

SEQ ID NO: 2831312 - DNA, 25 bp, Homo sapien
ggagaagctggaacgctcattcatt

SEQ ID NO: 2831313 - DNA, 25 bp, Homo sapien
aacagctgggcagttgaagtcctaa

SEQ ID NO: 2831314 - DNA, 25 bp, Homo sapien
agtaactttggaaaacagctgggca

SEQ ID NO: 2831315 - DNA, 25 bp, Homo sapien
tgctggtgggatacaaaatgatgca

SEQ ID NO: 2831316 - DNA, 25 bp, Homo sapien
gtaagtacatttctaacatgattta

SEQ ID NO: 2831317 - DNA, 25 bp, Homo sapien
tctaacatgatttattttcttgctt

SEQ ID NO: 2831318 - DNA, 25 bp, Homo sapien
taagtacatttctaacatgatttat

SEQ ID NO: 2831319 - DNA, 25 bp, Homo sapien
aagtacatttctaacatgatttatt

SEQ ID NO: 2831320 - DNA, 25 bp, Homo sapien
ttctaacatgatttattttcttgct

SEQ ID NO: 2831321 - DNA, 25 bp, Homo sapien
agtacatttctaacatgatttattt

SEQ ID NO: 2831322 - DNA, 25 bp, Homo sapien
agcaagaaaataaatcatgttagaa

SEQ ID NO: 2831323 - DNA, 25 bp, Homo sapien
taaaaagcaagaaaataaatcatgt

SEQ ID NO: 2831324 - DNA, 25 bp, Homo sapien
aaataaatcatgttagaaatgtact

SEQ ID NO: 2831325 - DNA, 25 bp, Homo sapien
taaatcatgttagaaatgtacttac

SEQ ID NO: 2831326 - DNA, 25 bp, Homo sapien
aagcaagaaaataaatcatgttaga

SEQ ID NO: 2831327 - DNA, 25 bp, Homo sapien
aaaataaatcatgttagaaatgtac

SEQ ID NO: 2831328 - DNA, 25 bp, Homo sapien
tggtgatacccaagaaacatatatc

SEQ ID NO: 2831329 - DNA, 25 bp, Homo sapien
tctggtgatacccaagaaacatata

SEQ ID NO: 2831330 - DNA, 25 bp, Homo sapien
ctggtgatacccaagaaacatatat

SEQ ID NO: 2831331 - DNA, 25 bp, Homo sapien
ggtgatacccaagaaacatatatcc

SEQ ID NO: 2831332 - DNA, 25 bp, Homo sapien
tatatgtttcttgggtatcaccaga

SEQ ID NO: 2831333 - DNA, 25 bp, Homo sapien
ggatatatgtttcttgggtatcacc

SEQ ID NO: 2831334 - DNA, 25 bp, Homo sapien
gatatatgtttcttgggtatcacca

SEQ ID NO: 2831335 - DNA, 25 bp, Homo sapien
atatatgtttcttgggtatcaccag

SEQ ID NO: 2831336 - DNA, 25 bp, Homo sapien
tctggtgatacccaagaaacatata

SEQ ID NO: 2831337 - DNA, 25 bp, Homo sapien
catatatcccagatttctgtggcag

SEQ ID NO: 2831338 - DNA, 25 bp, Homo sapien
tttctgtggcagaagatgatgatga

SEQ ID NO: 2831339 - DNA, 25 bp, Homo sapien
ctggtgatacccaagaaacatatat

SEQ ID NO: 2831340 - DNA, 25 bp, Homo sapien
accaacacattttctggtgataccc

SEQ ID NO: 2831341 - DNA, 25 bp, Homo sapien
ggtgatacccaagaaacatatatcc

SEQ ID NO: 2831342 - DNA, 25 bp, Homo sapien
tatatgtttcttgggtatcaccaga

SEQ ID NO: 2831343 - DNA, 25 bp, Homo sapien
ggatatatgtttcttgggtatcacc

SEQ ID NO: 2831344 - DNA, 25 bp, Homo sapien
gatatatgtttcttgggtatcacca

SEQ ID NO: 2831345 - DNA, 25 bp, Homo sapien
tcatcatcatcttctgccacagaaa

SEQ ID NO: 2831346 - DNA, 25 bp, Homo sapien
tgccacagaaatctgggatatatgt

SEQ ID NO: 2831347 - DNA, 25 bp, Homo sapien
gggtatcaccagaaaatgtgttggt

SEQ ID NO: 2831348 - DNA, 25 bp, Homo sapien
gctttccatgacatttcccctcaag

SEQ ID NO: 2831349 - DNA, 25 bp, Homo sapien
ccttgctttccatgacatttcccct

SEQ ID NO: 2831350 - DNA, 25 bp, Homo sapien
tgctttccatgacatttcccctcaa

SEQ ID NO: 2831351 - DNA, 25 bp, Homo sapien
tgccttgctttccatgacatttccc

SEQ ID NO: 2831352 - DNA, 25 bp, Homo sapien
gccttgctttccatgacatttcccc

SEQ ID NO: 2831353 - DNA, 25 bp, Homo sapien
ttgctttccatgacatttcccctca

SEQ ID NO: 2831354 - DNA, 25 bp, Homo sapien
ggggaaatgtcatggaaagcaaggc

SEQ ID NO: 2831355 - DNA, 25 bp, Homo sapien
tgaggggaaatgtcatggaaagcaa

SEQ ID NO: 2831356 - DNA, 25 bp, Homo sapien
aggggaaatgtcatggaaagcaagg

SEQ ID NO: 2831357 - DNA, 25 bp, Homo sapien
ttgaggggaaatgtcatggaaagca

SEQ ID NO: 2831358 - DNA, 25 bp, Homo sapien
cttgaggggaaatgtcatggaaagc

SEQ ID NO: 2831359 - DNA, 25 bp, Homo sapien
gggaaatgtcatggaaagcaaggca

SEQ ID NO: 2831360 - DNA, 25 bp, Homo sapien
ttagtggccagttgtatttttggga

SEQ ID NO: 2831361 - DNA, 25 bp, Homo sapien
tctcagataaagctgggcagattgg

SEQ ID NO: 2831362 - DNA, 25 bp, Homo sapien
tgtatttttgggattggatctcaga

SEQ ID NO: 2831363 - DNA, 25 bp, Homo sapien
aatcccagttgatgtgactttgaga

SEQ ID NO: 2831364 - DNA, 25 bp, Homo sapien
tgtaaattatttagtggccagttgt

SEQ ID NO: 2831365 - DNA, 25 bp, Homo sapien
ggcagattggctgatttagatagaa

SEQ ID NO: 2831366 - DNA, 25 bp, Homo sapien
tactaatgtcggttagattcaaaac

SEQ ID NO: 2831367 - DNA, 25 bp, Homo sapien
tattctactaatgtcggttagattc

SEQ ID NO: 2831368 - DNA, 25 bp, Homo sapien
tcggttagattcaaaacgttatcaa

SEQ ID NO: 2831369 - DNA, 25 bp, Homo sapien
tgtcggttagattcaaaacgttatc

SEQ ID NO: 2831370 - DNA, 25 bp, Homo sapien
ctaatgtcggttagattcaaaacgt

SEQ ID NO: 2831371 - DNA, 25 bp, Homo sapien
catttattctactaatgtcggttag

SEQ ID NO: 2831372 - DNA, 25 bp, Homo sapien
ttgataacgttttgaatctaaccga

SEQ ID NO: 2831373 - DNA, 25 bp, Homo sapien
acgttttgaatctaaccgacattag

SEQ ID NO: 2831374 - DNA, 25 bp, Homo sapien
tgaatctaaccgacattagtagaat

SEQ ID NO: 2831375 - DNA, 25 bp, Homo sapien
ctaaccgacattagtagaataaatg

SEQ ID NO: 2831376 - DNA, 25 bp, Homo sapien
gataacgttttgaatctaaccgaca

SEQ ID NO: 2831377 - DNA, 25 bp, Homo sapien
ttttgaatctaaccgacattagtag

SEQ ID NO: 2831378 - DNA, 25 bp, Homo sapien
tcccaaaaatacaactggccactaa

SEQ ID NO: 2831379 - DNA, 25 bp, Homo sapien
tctatctaaatcagccaatctgccc

SEQ ID NO: 2831380 - DNA, 25 bp, Homo sapien
caatctgcccagctttatctgagat

SEQ ID NO: 2831381 - DNA, 25 bp, Homo sapien
tctgagatccaatcccaaaaataca

SEQ ID NO: 2831382 - DNA, 25 bp, Homo sapien
caactggccactaaataatttacac

SEQ ID NO: 2831383 - DNA, 25 bp, Homo sapien
tctcaaagtcacatcaactgggatt

SEQ ID NO: 2831384 - DNA, 25 bp, Homo sapien
agagaaacccgatcgcgccctgact

SEQ ID NO: 2831385 - DNA, 25 bp, Homo sapien
gaatctcgaaatctcgccagcgctc

SEQ ID NO: 2831386 - DNA, 25 bp, Homo sapien
gacagagagaaacccgatcgcgccc

SEQ ID NO: 2831387 - DNA, 25 bp, Homo sapien
cagcaaggcattgtgctcgagggcc

SEQ ID NO: 2831388 - DNA, 25 bp, Homo sapien
gactcaggcccaatctccgcgatct

SEQ ID NO: 2831389 - DNA, 25 bp, Homo sapien
gcaaggcattgtgctcgagggcccc

SEQ ID NO: 2831390 - DNA, 25 bp, Homo sapien
gggcgcgatcgggtttctctctgtc

SEQ ID NO: 2831391 - DNA, 25 bp, Homo sapien
agatcgcggagattgggcctgagtc

SEQ ID NO: 2831392 - DNA, 25 bp, Homo sapien
cagagcgctggcgagatttcgagat

SEQ ID NO: 2831393 - DNA, 25 bp, Homo sapien
gctgtgcgcgggagatcgcggagat

SEQ ID NO: 2831394 - DNA, 25 bp, Homo sapien
agtcagggcgcgatcgggtttctct

SEQ ID NO: 2831395 - DNA, 25 bp, Homo sapien
gggccctcgagcacaatgccttgct

SEQ ID NO: 2831396 - DNA, 25 bp, Homo sapien
gtgggtatcgtccgcggatcctcgg

SEQ ID NO: 2831397 - DNA, 25 bp, Homo sapien
tgggtatcgtccgcggatcctcggg

SEQ ID NO: 2831398 - DNA, 25 bp, Homo sapien
gatcctcgggtttctcgcggaggga

SEQ ID NO: 2831399 - DNA, 25 bp, Homo sapien
ggagaggaggggtcgcgagtgtagc

SEQ ID NO: 2831400 - DNA, 25 bp, Homo sapien
ggtcgcgagtgtagcggcgacggga

SEQ ID NO: 2831401 - DNA, 25 bp, Homo sapien
tcctcgggtttctcgcggagggaga

SEQ ID NO: 2831402 - DNA, 25 bp, Homo sapien
gcggatcctcgggtttctcgcggag

SEQ ID NO: 2831403 - DNA, 25 bp, Homo sapien
cctcgggtttctcgcggagggagag

SEQ ID NO: 2831404 - DNA, 25 bp, Homo sapien
ctccgcgagaaacccgaggatccgc

SEQ ID NO: 2831405 - DNA, 25 bp, Homo sapien
ctctccctccgcgagaaacccgagg

SEQ ID NO: 2831406 - DNA, 25 bp, Homo sapien
ctccctccgcgagaaacccgaggat

SEQ ID NO: 2831407 - DNA, 25 bp, Homo sapien
ctcccgtcgccgctacactcgcgac

SEQ ID NO: 2831408 - DNA, 25 bp, Homo sapien
gtcgccgctacactcgcgacccctc

SEQ ID NO: 2831409 - DNA, 25 bp, Homo sapien
tccctccgcgagaaacccgaggatc

SEQ ID NO: 2831410 - DNA, 25 bp, Homo sapien
cccgaggatccgcggacgataccca

SEQ ID NO: 2831411 - DNA, 25 bp, Homo sapien
ccgaggatccgcggacgatacccac

SEQ ID NO: 2831412 - DNA, 25 bp, Homo sapien
taggtactgggcaccacctctctcg

SEQ ID NO: 2831413 - DNA, 25 bp, Homo sapien
gtaggtactgggcaccacctctctc

SEQ ID NO: 2831414 - DNA, 25 bp, Homo sapien
cgagagaggtggtgcccagtaccta

SEQ ID NO: 2831415 - DNA, 25 bp, Homo sapien
gagagaggtggtgcccagtacctac

SEQ ID NO: 2831416 - DNA, 25 bp, Homo sapien
taggtactgggcaccacctctctcg

SEQ ID NO: 2831417 - DNA, 25 bp, Homo sapien
aggtactgggcaccacctctctcgc

SEQ ID NO: 2831418 - DNA, 25 bp, Homo sapien
gtactgggcaccacctctctcgcct

SEQ ID NO: 2831419 - DNA, 25 bp, Homo sapien
gtaggtactgggcaccacctctctc

SEQ ID NO: 2831420 - DNA, 25 bp, Homo sapien
ggcaccacctctctcgcctgctgag

SEQ ID NO: 2831421 - DNA, 25 bp, Homo sapien
tgggcaccacctctctcgcctgctg

SEQ ID NO: 2831422 - DNA, 25 bp, Homo sapien
cgagagaggtggtgcccagtaccta

SEQ ID NO: 2831423 - DNA, 25 bp, Homo sapien
ctcagcaggcgagagaggtggtgcc

SEQ ID NO: 2831424 - DNA, 25 bp, Homo sapien
caggcgagagaggtggtgcccagta

SEQ ID NO: 2831425 - DNA, 25 bp, Homo sapien
gagagaggtggtgcccagtacctac

SEQ ID NO: 2831426 - DNA, 25 bp, Homo sapien
cagcaggcgagagaggtggtgccca

SEQ ID NO: 2831427 - DNA, 25 bp, Homo sapien
ggcgagagaggtggtgcccagtacc

SEQ ID NO: 2831428 - DNA, 25 bp, Homo sapien
cctggtggcgacacgatctttggga

SEQ ID NO: 2831429 - DNA, 25 bp, Homo sapien
ggcgacacgatctttgggaagatca

SEQ ID NO: 2831430 - DNA, 25 bp, Homo sapien
cggcctggtggcgacacgatctttg

SEQ ID NO: 2831431 - DNA, 25 bp, Homo sapien
gacacgatctttgggaagatcatcc

SEQ ID NO: 2831432 - DNA, 25 bp, Homo sapien
gtggcgacacgatctttgggaagat

SEQ ID NO: 2831433 - DNA, 25 bp, Homo sapien
atctttgggaagatcatccgcaagg

SEQ ID NO: 2831434 - DNA, 25 bp, Homo sapien
caaggctcaggtcgctcggcctggt

SEQ ID NO: 2831435 - DNA, 25 bp, Homo sapien
ccaaggctcaggtcgctcggcctgg

SEQ ID NO: 2831436 - DNA, 25 bp, Homo sapien
cagccaaaatcatttttgaggatga

SEQ ID NO: 2831437 - DNA, 25 bp, Homo sapien
gccaaaatcatttttgaggatgacc

SEQ ID NO: 2831438 - DNA, 25 bp, Homo sapien
ccagccaaaatcatttttgaggatg

SEQ ID NO: 2831439 - DNA, 25 bp, Homo sapien
ggctcaggtcgctcggcctggtggc

SEQ ID NO: 2831440 - DNA, 25 bp, Homo sapien
gccaccaggccgagcgacctgagcc

SEQ ID NO: 2831441 - DNA, 25 bp, Homo sapien
ggtcatcctcaaaaatgattttggc

SEQ ID NO: 2831442 - DNA, 25 bp, Homo sapien
tcatcctcaaaaatgattttggctg

SEQ ID NO: 2831443 - DNA, 25 bp, Homo sapien
accaggccgagcgacctgagccttg

SEQ ID NO: 2831444 - DNA, 25 bp, Homo sapien
catcctcaaaaatgattttggctgg

SEQ ID NO: 2831445 - DNA, 25 bp, Homo sapien
ccaggccgagcgacctgagccttgg

SEQ ID NO: 2831446 - DNA, 25 bp, Homo sapien
atcttcccaaagatcgtgtcgccac

SEQ ID NO: 2831447 - DNA, 25 bp, Homo sapien
ggatgatcttcccaaagatcgtgtc

SEQ ID NO: 2831448 - DNA, 25 bp, Homo sapien
ccttgcggatgatcttcccaaagat

SEQ ID NO: 2831449 - DNA, 25 bp, Homo sapien
caaagatcgtgtcgccaccaggccg

SEQ ID NO: 2831450 - DNA, 25 bp, Homo sapien
ttcccaaagatcgtgtcgccaccag

SEQ ID NO: 2831451 - DNA, 25 bp, Homo sapien
tgatcttcccaaagatcgtgtcgcc

SEQ ID NO: 2831452 - DNA, 25 bp, Homo sapien
aacgacttaggaatctccttggagc

SEQ ID NO: 2831453 - DNA, 25 bp, Homo sapien
gatagaaaaacgacttaggaatctc

SEQ ID NO: 2831454 - DNA, 25 bp, Homo sapien
tctcgcgccgcacgctctgcgggtt

SEQ ID NO: 2831455 - DNA, 25 bp, Homo sapien
ccaagccggaggtccctgaggcgct

SEQ ID NO: 2831456 - DNA, 25 bp, Homo sapien
tccctgaggcgctctagcgcgctgg

SEQ ID NO: 2831457 - DNA, 25 bp, Homo sapien
gtgcgcacgcgcaagattaggtggg

SEQ ID NO: 2831458 - DNA, 25 bp, Homo sapien
ggcgccccacctaatcttgcgcgtg

SEQ ID NO: 2831459 - DNA, 25 bp, Homo sapien
gagattcctaagtcgtttttctatc

SEQ ID NO: 2831460 - DNA, 25 bp, Homo sapien
gctccaaggagattcctaagtcgtt

SEQ ID NO: 2831461 - DNA, 25 bp, Homo sapien
ccagcgcgctagagcgcctcaggga

SEQ ID NO: 2831462 - DNA, 25 bp, Homo sapien
agcgcctcagggacctccggcttgg

SEQ ID NO: 2831463 - DNA, 25 bp, Homo sapien
ggaggaacccgcagagcgtgcggcg

SEQ ID NO: 2831464 - DNA, 25 bp, Homo sapien
taacatggcgtccaggtgatttccg

SEQ ID NO: 2831465 - DNA, 25 bp, Homo sapien
gcggctcctcgcgattttaccagtt

SEQ ID NO: 2831466 - DNA, 25 bp, Homo sapien
tcttctggccagtaattgggctctg

SEQ ID NO: 2831467 - DNA, 25 bp, Homo sapien
taccagttcccatccgtttagcaaa

SEQ ID NO: 2831468 - DNA, 25 bp, Homo sapien
gggacccatttcatatccctgggaa

SEQ ID NO: 2831469 - DNA, 25 bp, Homo sapien
acaaatctgcgacttgagttctgcc

SEQ ID NO: 2831470 - DNA, 25 bp, Homo sapien
aagtataggagacgccaaaggctga

SEQ ID NO: 2831471 - DNA, 25 bp, Homo sapien
cgtttcatcttcagaccgagtattt

SEQ ID NO: 2831472 - DNA, 25 bp, Homo sapien
ggcagccatcctttaacgtttaaca

SEQ ID NO: 2831473 - DNA, 25 bp, Homo sapien
tcagattcatttctcacgcccaagc

SEQ ID NO: 2831474 - DNA, 25 bp, Homo sapien
ctgcccggcgcacaattctcattgg

SEQ ID NO: 2831475 - DNA, 25 bp, Homo sapien
aagcatgatgcacgttcctgcccgg

SEQ ID NO: 2831476 - DNA, 25 bp, Homo sapien
ggatcaagttcctcatggagaagag

SEQ ID NO: 2831477 - DNA, 25 bp, Homo sapien
acatagtaaggttgagtttctggca

SEQ ID NO: 2831478 - DNA, 25 bp, Homo sapien
caggagtagcatcagtggtttcagg

SEQ ID NO: 2831479 - DNA, 25 bp, Homo sapien
gtggcaagagcagacatagtaaggt

SEQ ID NO: 2831480 - DNA, 25 bp, Homo sapien
catgtcctgtccttgacaagatggg

SEQ ID NO: 2831481 - DNA, 25 bp, Homo sapien
taatcggtggctacattctcatcgt

SEQ ID NO: 2831482 - DNA, 25 bp, Homo sapien
caagatgggcagtatcacaaaaggt

SEQ ID NO: 2831483 - DNA, 25 bp, Homo sapien
ggcattctaccatctaacactagga

SEQ ID NO: 2831484 - DNA, 25 bp, Homo sapien
tgtttattaaagatagtggcttaga

SEQ ID NO: 2831485 - DNA, 25 bp, Homo sapien
ttcttatagtcattattagtagcag

SEQ ID NO: 2831486 - DNA, 25 bp, Homo sapien
cattattagtagcagatgagattaa

SEQ ID NO: 2831487 - DNA, 25 bp, Homo sapien
tatattgatataggcccgggcgctg

SEQ ID NO: 2831488 - DNA, 25 bp, Homo sapien
ttaattagataaagtaattcatggc

SEQ ID NO: 2831489 - DNA, 25 bp, Homo sapien
ttagataaagtaattcatggctggg

SEQ ID NO: 2831490 - DNA, 25 bp, Homo sapien
aattagataaagtaattcatggctg

SEQ ID NO: 2831491 - DNA, 25 bp, Homo sapien
agataaagtaattcatggctgggtg

SEQ ID NO: 2831492 - DNA, 25 bp, Homo sapien
ttctgacccaccaacatgactgatg

SEQ ID NO: 2831493 - DNA, 25 bp, Homo sapien
gttgaaaaggatgaggatacacaca

SEQ ID NO: 2831494 - DNA, 25 bp, Homo sapien
cacacctgactatagggcctttttg

SEQ ID NO: 2831495 - DNA, 25 bp, Homo sapien
gcaatcctcgcaacatcattaatag

SEQ ID NO: 2831496 - DNA, 25 bp, Homo sapien
gttaaaagacaataagctactagtg

SEQ ID NO: 2831497 - DNA, 25 bp, Homo sapien
taaatgaatggcgttatgctccatg

SEQ ID NO: 2831498 - DNA, 25 bp, Homo sapien
tacattaggttttggcgatttagcc

SEQ ID NO: 2831499 - DNA, 25 bp, Homo sapien
cagtgagtatatcaacatgtaagtg

SEQ ID NO: 2831500 - DNA, 25 bp, Homo sapien
aattggctgagaggtaagctagcac

SEQ ID NO: 2831501 - DNA, 25 bp, Homo sapien
tgctcttgccctgtgataagccggc

SEQ ID NO: 2831502 - DNA, 25 bp, Homo sapien
ccctgggtgtgattgttagcactga

SEQ ID NO: 2831503 - DNA, 25 bp, Homo sapien
gatgatgtctaactgcacatgcaga

SEQ ID NO: 2831504 - DNA, 25 bp, Homo sapien
gccaatctatgtcttagaagccaag

SEQ ID NO: 2831505 - DNA, 25 bp, Homo sapien
gaacaaggaattactagggtgctag

SEQ ID NO: 2831506 - DNA, 25 bp, Homo sapien
aagtggaggttatgcaattgtgagc

SEQ ID NO: 2831507 - DNA, 25 bp, Homo sapien
taatgattacgaaaaagaacaagga

SEQ ID NO: 2831508 - DNA, 25 bp, Homo sapien
gtcttagagttagctatgaatcttc

SEQ ID NO: 2831509 - DNA, 25 bp, Homo sapien
aggtcaaaagtcttagagttagcta

SEQ ID NO: 2831510 - DNA, 25 bp, Homo sapien
tagagttagctatgaatcttctctc

SEQ ID NO: 2831511 - DNA, 25 bp, Homo sapien
caaaagtcttagagttagctatgaa

SEQ ID NO: 2831512 - DNA, 25 bp, Homo sapien
atctgggtagagtgaaggcatcagg

SEQ ID NO: 2831513 - DNA, 25 bp, Homo sapien
tctgggtagagtgaaggcatcaggc

SEQ ID NO: 2831514 - DNA, 25 bp, Homo sapien
ctgggtagagtgaaggcatcaggcc

SEQ ID NO: 2831515 - DNA, 25 bp, Homo sapien
catctgggtagagtgaaggcatcag

SEQ ID NO: 2831516 - DNA, 25 bp, Homo sapien
gggaacaccatcacatcattaatat

SEQ ID NO: 2831517 - DNA, 25 bp, Homo sapien
ccagtccagagggaacaccatcaca

SEQ ID NO: 2831518 - DNA, 25 bp, Homo sapien
tccagagggaacaccatcacatcat

SEQ ID NO: 2831519 - DNA, 25 bp, Homo sapien
gagggaacaccatcacatcattaat

SEQ ID NO: 2831520 - DNA, 25 bp, Homo sapien
cgtcttttagggtgtatatcctcat

SEQ ID NO: 2831521 - DNA, 25 bp, Homo sapien
ccttaggccagtcatgttaacacat

SEQ ID NO: 2831522 - DNA, 25 bp, Homo sapien
cagctatctggcgtcccttaggcca

SEQ ID NO: 2831523 - DNA, 25 bp, Homo sapien
ccatcacacttattatgacttaagt

SEQ ID NO: 2831524 - DNA, 25 bp, Homo sapien
gaactgtcacttcacatcgtatgtc

SEQ ID NO: 2831525 - DNA, 25 bp, Homo sapien
taaactgcgcaacttcctcttcgca

SEQ ID NO: 2831526 - DNA, 25 bp, Homo sapien
cacaagggtaatgctggagccggaa

SEQ ID NO: 2831527 - DNA, 25 bp, Homo sapien
gcaacttcctcttcgcacaagggta

SEQ ID NO: 2831528 - DNA, 25 bp, Homo sapien
tcctcttcgcacaagggtaatgctg

SEQ ID NO: 2831529 - DNA, 25 bp, Homo sapien
tgaaacactcatcgcatggtaaggc

SEQ ID NO: 2831530 - DNA, 25 bp, Homo sapien
aaacactcatcgcatggtaaggctg

SEQ ID NO: 2831531 - DNA, 25 bp, Homo sapien
agaatgaaacactcatcgcatggta

SEQ ID NO: 2831532 - DNA, 25 bp, Homo sapien
acactcatcgcatggtaaggctggt

SEQ ID NO: 2831533 - DNA, 25 bp, Homo sapien
cttggtctcccagtgttttaggatt

SEQ ID NO: 2831534 - DNA, 25 bp, Homo sapien
gccttggtctcccagtgttttagga

SEQ ID NO: 2831535 - DNA, 25 bp, Homo sapien
tggtctcccagtgttttaggattac

SEQ ID NO: 2831536 - DNA, 25 bp, Homo sapien
tgccttggtctcccagtgttttagg

SEQ ID NO: 2831537 - DNA, 25 bp, Homo sapien
cacacactggtgctagttctgctcg

SEQ ID NO: 2831538 - DNA, 25 bp, Homo sapien
tctgctcgttcttccgtgctaaggg

SEQ ID NO: 2831539 - DNA, 25 bp, Homo sapien
gtgaaccaaagagatgggagacccc

SEQ ID NO: 2831540 - DNA, 25 bp, Homo sapien
gccctggtgctgagtcttaattgcc

SEQ ID NO: 2831541 - DNA, 25 bp, Homo sapien
gctcactaagctttgtgcttcctaa

SEQ ID NO: 2831542 - DNA, 25 bp, Homo sapien
gaaatctaccacaagctttatcacc

SEQ ID NO: 2831543 - DNA, 25 bp, Homo sapien
tactcaactcaagatccattgtggt

SEQ ID NO: 2831544 - DNA, 25 bp, Homo sapien
tgcttcctaaattagtgccacatcc

SEQ ID NO: 2831545 - DNA, 25 bp, Homo sapien
gtatcatccagaccagacaccgtgg

SEQ ID NO: 2831546 - DNA, 25 bp, Homo sapien
gactgctatgaatataacattgagc

SEQ ID NO: 2831547 - DNA, 25 bp, Homo sapien
gagcaaataattatgcacacatact

SEQ ID NO: 2831548 - DNA, 25 bp, Homo sapien
ttaacattgatgaaacacattgtca

SEQ ID NO: 2831549 - DNA, 25 bp, Homo sapien
cgaccagtaccaaaatcctctcagg

SEQ ID NO: 2831550 - DNA, 25 bp, Homo sapien
ttggctctaggaccacgaccagtac

SEQ ID NO: 2831551 - DNA, 25 bp, Homo sapien
taaaagtcaagtaaatggtcatcac

SEQ ID NO: 2831552 - DNA, 25 bp, Homo sapien
gggacttgggatacatcagttgaac

SEQ ID NO: 2831553 - DNA, 25 bp, Homo sapien
ttgttacaaggtgggaagtgtcatg

SEQ ID NO: 2831554 - DNA, 25 bp, Homo sapien
aaagattgttacaaggtgggaagtg

SEQ ID NO: 2831555 - DNA, 25 bp, Homo sapien
tgatggctcactgtaacgtaactcc

SEQ ID NO: 2831556 - DNA, 25 bp, Homo sapien
tgttctattttgaaggtacaaccaa

SEQ ID NO: 2831557 - DNA, 25 bp, Homo sapien
ttgtaggcattttggtggactgctg

SEQ ID NO: 2831558 - DNA, 25 bp, Homo sapien
gctcccgcccaggtttggtcgccat

SEQ ID NO: 2831559 - DNA, 25 bp, Homo sapien
ccacaacgtgcgcagacgtcgctcc

SEQ ID NO: 2831560 - DNA, 25 bp, Homo sapien
tgtgcgcgtccaccgccccacaacg

SEQ ID NO: 2831561 - DNA, 25 bp, Homo sapien
ctccgcacggatgtccgcggcccgg

SEQ ID NO: 2831562 - DNA, 25 bp, Homo sapien
agaaactggattattccgataaaag

SEQ ID NO: 2831563 - DNA, 25 bp, Homo sapien
ctagaaaagaaactggattattccg

SEQ ID NO: 2831564 - DNA, 25 bp, Homo sapien
gaaaagaaactggattattccgata

SEQ ID NO: 2831565 - DNA, 25 bp, Homo sapien
gaaactggattattccgataaaagc

SEQ ID NO: 2831566 - DNA, 25 bp, Homo sapien
aaattgaacttagttggctcgggag

SEQ ID NO: 2831567 - DNA, 25 bp, Homo sapien
cacaaagttacaggcagcattttct

SEQ ID NO: 2831568 - DNA, 25 bp, Homo sapien
catgagtgtgtttatgaccccagct

SEQ ID NO: 2831569 - DNA, 25 bp, Homo sapien
ctggtgctactgaattaaaatatgg

SEQ ID NO: 2831570 - DNA, 25 bp, Homo sapien
tagaccgctgatgtcttgccttcat

SEQ ID NO: 2831571 - DNA, 25 bp, Homo sapien
gggtagagtagaccgctgatgtctt

SEQ ID NO: 2831572 - DNA, 25 bp, Homo sapien
tagagtagaccgctgatgtcttgcc

SEQ ID NO: 2831573 - DNA, 25 bp, Homo sapien
gagtagaccgctgatgtcttgcctt

SEQ ID NO: 2831574 - DNA, 25 bp, Homo sapien
tgaatggacgttgggttgtttgcac

SEQ ID NO: 2831575 - DNA, 25 bp, Homo sapien
tttatcagtgaatggacgttgggtt

SEQ ID NO: 2831576 - DNA, 25 bp, Homo sapien
ggacgttgggttgtttgcacatttc

SEQ ID NO: 2831577 - DNA, 25 bp, Homo sapien
tattattctgttgaatgcttataca

SEQ ID NO: 2831578 - DNA, 25 bp, Homo sapien
tttaaatgataatagaggttgccta

SEQ ID NO: 2831579 - DNA, 25 bp, Homo sapien
aaaggacttgagtctagcctggaca

SEQ ID NO: 2831580 - DNA, 25 bp, Homo sapien
atgataatagaggttgcctatggtg

SEQ ID NO: 2831581 - DNA, 25 bp, Homo sapien
tgagccaaaggacttgagtctagcc

SEQ ID NO: 2831582 - DNA, 25 bp, Homo sapien
aaataaagcattcctgcccttgacg

SEQ ID NO: 2831583 - DNA, 25 bp, Homo sapien
tacaagaaggcacgtatagggagtg

SEQ ID NO: 2831584 - DNA, 25 bp, Homo sapien
tcagaagcctctgtttactaggtaa

SEQ ID NO: 2831585 - DNA, 25 bp, Homo sapien
tatactcagcgtacagttgaccctt

SEQ ID NO: 2831586 - DNA, 25 bp, Homo sapien
gtactatctggtcaaaatatgtaca

SEQ ID NO: 2831587 - DNA, 25 bp, Homo sapien
gtacaatataaaatacgaacacgac

SEQ ID NO: 2831588 - DNA, 25 bp, Homo sapien
tatccagttttactatgggtatgta

SEQ ID NO: 2831589 - DNA, 25 bp, Homo sapien
aatataaaatacgaacacgactgtc

SEQ ID NO: 2831590 - DNA, 25 bp, Homo sapien
taagatttgaaaaacatgccattac

SEQ ID NO: 2831591 - DNA, 25 bp, Homo sapien
ttgcagcattgaggttgccaagcac

SEQ ID NO: 2831592 - DNA, 25 bp, Homo sapien
aggaccacagaacctggacttgcag

SEQ ID NO: 2831593 - DNA, 25 bp, Homo sapien
taatcccattgttggtgatcgtggt

SEQ ID NO: 2831594 - DNA, 25 bp, Homo sapien
tgtatggaatggaattcgaaaccac

SEQ ID NO: 2831595 - DNA, 25 bp, Homo sapien
tggaatggaattcgaaaccacttac

SEQ ID NO: 2831596 - DNA, 25 bp, Homo sapien
cactaattttgagttcttgtatgga

SEQ ID NO: 2831597 - DNA, 25 bp, Homo sapien
tccaagcctgtagttcaccactaat

SEQ ID NO: 2831598 - DNA, 25 bp, Homo sapien
taataagaattagttgtgcagctgc

SEQ ID NO: 2831599 - DNA, 25 bp, Homo sapien
catgtgggactgagctaatgaaaca

SEQ ID NO: 2831600 - DNA, 25 bp, Homo sapien
tgttcttggcccactcttggtgaag

SEQ ID NO: 2831601 - DNA, 25 bp, Homo sapien
gcaaccctggcaacaaggcctagga

SEQ ID NO: 2831602 - DNA, 25 bp, Homo sapien
taggctgttgctgccaatttctgtg

SEQ ID NO: 2831603 - DNA, 25 bp, Homo sapien
aggctgttgctgccaatttctgtgg

SEQ ID NO: 2831604 - DNA, 25 bp, Homo sapien
ctaggctgttgctgccaatttctgt

SEQ ID NO: 2831605 - DNA, 25 bp, Homo sapien
tgattttgttggaagggaccagaag

SEQ ID NO: 2831606 - DNA, 25 bp, Homo sapien
gctgccattattgttcttggaatcc

SEQ ID NO: 2831607 - DNA, 25 bp, Homo sapien
aagtacagcttttggtatcaccagc

SEQ ID NO: 2831608 - DNA, 25 bp, Homo sapien
caggctccaggttaccagtttcctt

SEQ ID NO: 2831609 - DNA, 25 bp, Homo sapien
tctttccagcatgacggttttaggg

SEQ ID NO: 2831610 - DNA, 25 bp, Homo sapien
gatccaagccttgttctgtagtcaa

SEQ ID NO: 2831611 - DNA, 25 bp, Homo sapien
tatgtctgcgccatggtctttccag

SEQ ID NO: 2831612 - DNA, 25 bp, Homo sapien
gctaagctcagttgggcctatgtct

SEQ ID NO: 2831613 - DNA, 25 bp, Homo sapien
gaactctagctgagggcactccatg

SEQ ID NO: 2831614 - DNA, 25 bp, Homo sapien
gcaataataacctcgtatggcacag

SEQ ID NO: 2831615 - DNA, 25 bp, Homo sapien
catgaaaggtggctagagggaactc

SEQ ID NO: 2831616 - DNA, 25 bp, Homo sapien
gattggtcaaatatgatggatctcc

SEQ ID NO: 2831617 - DNA, 25 bp, Homo sapien
tgtcaatgaatatccactaggaaga

SEQ ID NO: 2831618 - DNA, 25 bp, Homo sapien
tgtcaggcacagctactgttacaga

SEQ ID NO: 2831619 - DNA, 25 bp, Homo sapien
acagcctcaactcggaatgtttatg

SEQ ID NO: 2831620 - DNA, 25 bp, Homo sapien
gaatatgagccatgtgctgtgaatg

SEQ ID NO: 2831621 - DNA, 25 bp, Homo sapien
gctgaatccattgcacgtatttgtc

SEQ ID NO: 2831622 - DNA, 25 bp, Homo sapien
cactaaggtgcccattgacttgata

SEQ ID NO: 2831623 - DNA, 25 bp, Homo sapien
aacttggctttgttaatgctggtga

SEQ ID NO: 2831624 - DNA, 25 bp, Homo sapien
cactgacatagcactcactaaggtg

SEQ ID NO: 2831625 - DNA, 25 bp, Homo sapien
tgtatattttggaaggtatgagacc

SEQ ID NO: 2831626 - DNA, 25 bp, Homo sapien
gaaacttcagcagaatagatatctg

SEQ ID NO: 2831627 - DNA, 25 bp, Homo sapien
cctgccttacgattttattggaaag

SEQ ID NO: 2831628 - DNA, 25 bp, Homo sapien
ataaagtttagctgtggcaccaagt

SEQ ID NO: 2831629 - DNA, 25 bp, Homo sapien
aagagcaacatacataccgacctgg

SEQ ID NO: 2831630 - DNA, 25 bp, Homo sapien
gtgttgcggtcatactctcctccag

SEQ ID NO: 2831631 - DNA, 25 bp, Homo sapien
gaacttctggcctgtactactaact

SEQ ID NO: 2831632 - DNA, 25 bp, Homo sapien
tattgccagtgaaaacaacctgtac

SEQ ID NO: 2831633 - DNA, 25 bp, Homo sapien
ggaatttgcctgagtactgttgtca

SEQ ID NO: 2831634 - DNA, 25 bp, Homo sapien
aaacatttgcatcttcggagtagac

SEQ ID NO: 2831635 - DNA, 25 bp, Homo sapien
gcctttgtgtcaatcccaagcacag

SEQ ID NO: 2831636 - DNA, 25 bp, Homo sapien
caagcacagagaggatctgccaagg

SEQ ID NO: 2831637 - DNA, 25 bp, Homo sapien
tccagtgcagcattatcagtgggcc

SEQ ID NO: 2831638 - DNA, 25 bp, Homo sapien
caacgaccagcatgtgttggagcag

SEQ ID NO: 2831639 - DNA, 25 bp, Homo sapien
taagccaaaagtggacttgtcagcc

SEQ ID NO: 2831640 - DNA, 25 bp, Homo sapien
tatacaggagcacatgccaaagtgc

SEQ ID NO: 2831641 - DNA, 25 bp, Homo sapien
tccccatggagacattagagcaatg

SEQ ID NO: 2831642 - DNA, 25 bp, Homo sapien
taacctgttagggactcttcgttgc

SEQ ID NO: 2831643 - DNA, 25 bp, Homo sapien
tgattgggtccaaaatgtccgtgcc

SEQ ID NO: 2831644 - DNA, 25 bp, Homo sapien
tacgtctgcatactcaccaggtgta

SEQ ID NO: 2831645 - DNA, 25 bp, Homo sapien
tctcccttaaaggagcagcaagcaa

SEQ ID NO: 2831646 - DNA, 25 bp, Homo sapien
cagaaagaattcctaggcttatggg

SEQ ID NO: 2831647 - DNA, 25 bp, Homo sapien
tccaagctatggagttcattagagc

SEQ ID NO: 2831648 - DNA, 25 bp, Homo sapien
tcaaaatcttcagagcctcacctag

SEQ ID NO: 2831649 - DNA, 25 bp, Homo sapien
tattaagtccctgctatatgcgatg

SEQ ID NO: 2831650 - DNA, 25 bp, Homo sapien
tatgcgatgcacagcaagtatgctc

SEQ ID NO: 2831651 - DNA, 25 bp, Homo sapien
ggtttatagagccatgcagaattcc

SEQ ID NO: 2831652 - DNA, 25 bp, Homo sapien
tagtgccctcaagcaaacaaggacc

SEQ ID NO: 2831653 - DNA, 25 bp, Homo sapien
gtttgctgggccaaagcttggacac

SEQ ID NO: 2831654 - DNA, 25 bp, Homo sapien
gcttggacacctgatctcttcagag

SEQ ID NO: 2831655 - DNA, 25 bp, Homo sapien
gccaaagcttggacacctgatctct

SEQ ID NO: 2831656 - DNA, 25 bp, Homo sapien
tgctgggccaaagcttggacacctg

SEQ ID NO: 2831657 - DNA, 25 bp, Homo sapien
aaatagagctaccatccaacagtag

SEQ ID NO: 2831658 - DNA, 25 bp, Homo sapien
catgtttgttacagcactgctcata

SEQ ID NO: 2831659 - DNA, 25 bp, Homo sapien
tagagctaccatccaacagtaggat

SEQ ID NO: 2831660 - DNA, 25 bp, Homo sapien
gctaccatccaacagtaggatccaa

SEQ ID NO: 2831661 - DNA, 25 bp, Homo sapien
ctggtggttccactgtatccaacgt

SEQ ID NO: 2831662 - DNA, 25 bp, Homo sapien
tggtggttccactgtatccaacgta

SEQ ID NO: 2831663 - DNA, 25 bp, Homo sapien
ggtggttccactgtatccaacgtat

SEQ ID NO: 2831664 - DNA, 25 bp, Homo sapien
tggttccactgtatccaacgtattt

SEQ ID NO: 2831665 - DNA, 25 bp, Homo sapien
ataataattcttttccatctccaac

SEQ ID NO: 2831666 - DNA, 25 bp, Homo sapien
catctccaacactggttagttctgc

SEQ ID NO: 2831667 - DNA, 25 bp, Homo sapien
aataataattcttttccatctccaa

SEQ ID NO: 2831668 - DNA, 25 bp, Homo sapien
ctccaacactggttagttctgccat

SEQ ID NO: 2831669 - DNA, 25 bp, Homo sapien
ccggacagttttgtctgtagacttt

SEQ ID NO: 2831670 - DNA, 25 bp, Homo sapien
tcagccccggacagttttgtctgta

SEQ ID NO: 2831671 - DNA, 25 bp, Homo sapien
ccccggacagttttgtctgtagact

SEQ ID NO: 2831672 - DNA, 25 bp, Homo sapien
gacagttttgtctgtagacttttct

SEQ ID NO: 2831673 - DNA, 25 bp, Homo sapien
tatgtggacacatacggacagccat

SEQ ID NO: 2831674 - DNA, 25 bp, Homo sapien
cataggcctcaacactctgtgcaag

SEQ ID NO: 2831675 - DNA, 25 bp, Homo sapien
gcagagacagctagggaaagacaac

SEQ ID NO: 2831676 - DNA, 25 bp, Homo sapien
cagctgtaaggtgcaagtccaaaac

SEQ ID NO: 2831677 - DNA, 25 bp, Homo sapien
actgtggtcccaaggcagttccggc

SEQ ID NO: 2831678 - DNA, 25 bp, Homo sapien
cagttccggcgtgcaaagtggagac

SEQ ID NO: 2831679 - DNA, 25 bp, Homo sapien
gaaaagtatgtcctctcaagggcta

SEQ ID NO: 2831680 - DNA, 25 bp, Homo sapien
aagagtgccatacccatgaggctgg

SEQ ID NO: 2831681 - DNA, 25 bp, Homo sapien
ctagactgctgaaacttgttcattt

SEQ ID NO: 2831682 - DNA, 25 bp, Homo sapien
tagactgctgaaacttgttcatttt

SEQ ID NO: 2831683 - DNA, 25 bp, Homo sapien
gagcctttaagagagcttgtcaaca

SEQ ID NO: 2831684 - DNA, 25 bp, Homo sapien
cctttaagagagcttgtcaacatac

SEQ ID NO: 2831685 - DNA, 25 bp, Homo sapien
ttaagagcctttaagagagcttgtc

SEQ ID NO: 2831686 - DNA, 25 bp, Homo sapien
aagagcctttaagagagcttgtcaa

SEQ ID NO: 2831687 - DNA, 25 bp, Homo sapien
cctagtttaggatggaatggctgca

SEQ ID NO: 2831688 - DNA, 25 bp, Homo sapien
tgcactgccacactataatctggag

SEQ ID NO: 2831689 - DNA, 25 bp, Homo sapien
tacaatcttcgatggaacacaggcc

SEQ ID NO: 2831690 - DNA, 25 bp, Homo sapien
gccacgaggttgctactgagagaag

SEQ ID NO: 2831691 - DNA, 25 bp, Homo sapien
cattaaatagaacgagagagttgaa

SEQ ID NO: 2831692 - DNA, 25 bp, Homo sapien
actatattaagtcctgtaaacatta

SEQ ID NO: 2831693 - DNA, 25 bp, Homo sapien
accccacaaacttattacaatgaca

SEQ ID NO: 2831694 - DNA, 25 bp, Homo sapien
gaataaacttgaatgatggcagatc

SEQ ID NO: 2831695 - DNA, 25 bp, Homo sapien
ctttggaagttgtcatgggagctgc

SEQ ID NO: 2831696 - DNA, 25 bp, Homo sapien
tacgtgtcagacagagaactggagg

SEQ ID NO: 2831697 - DNA, 25 bp, Homo sapien
gagctgcttgaacacgaagtccaac

SEQ ID NO: 2831698 - DNA, 25 bp, Homo sapien
cacagacgatgagacagctaaacac

SEQ ID NO: 2831699 - DNA, 25 bp, Homo sapien
gccccagtggattcagggactgcca

SEQ ID NO: 2831700 - DNA, 25 bp, Homo sapien
gaacaccgttcatcctgtagagctg

SEQ ID NO: 2831701 - DNA, 25 bp, Homo sapien
gaaatctcactatggctggagtcag

SEQ ID NO: 2831702 - DNA, 25 bp, Homo sapien
gaacaattgctcacgatgctggacc

SEQ ID NO: 2831703 - DNA, 25 bp, Homo sapien
taacttatgtacaaatgaggcattt

SEQ ID NO: 2831704 - DNA, 25 bp, Homo sapien
acttatgtacaaatgaggcattttc

SEQ ID NO: 2831705 - DNA, 25 bp, Homo sapien
ataacttatgtacaaatgaggcatt

SEQ ID NO: 2831706 - DNA, 25 bp, Homo sapien
aataacttatgtacaaatgaggcat

SEQ ID NO: 2831707 - DNA, 25 bp, Homo sapien
tgtatacattaataactgaaaacaa

SEQ ID NO: 2831708 - DNA, 25 bp, Homo sapien
gacttgaatcgcgtatagaagcagt

SEQ ID NO: 2831709 - DNA, 25 bp, Homo sapien
cttttagacttgaatcgcgtataga

SEQ ID NO: 2831710 - DNA, 25 bp, Homo sapien
tgaatcgcgtatagaagcagtttaa

SEQ ID NO: 2831711 - DNA, 25 bp, Homo sapien
ttagacttgaatcgcgtatagaagc

SEQ ID NO: 2831712 - DNA, 25 bp, Homo sapien
ccttggctatttgaattgaagatgg

SEQ ID NO: 2831713 - DNA, 25 bp, Homo sapien
gctatttgaattgaagatggcactc

SEQ ID NO: 2831714 - DNA, 25 bp, Homo sapien
ttgatgttgcttccaacatccttca

SEQ ID NO: 2831715 - DNA, 25 bp, Homo sapien
tgaagatggcactccctttctcatc

SEQ ID NO: 2831716 - DNA, 25 bp, Homo sapien
gctgttgactagtctctcccttgaa

SEQ ID NO: 2831717 - DNA, 25 bp, Homo sapien
gcattctttccctaagtcttctaaa

SEQ ID NO: 2831718 - DNA, 25 bp, Homo sapien
ggttgtgttctcacaacttgtcctg

SEQ ID NO: 2831719 - DNA, 25 bp, Homo sapien
gtctgttcttttggctgtgctcctg

SEQ ID NO: 2831720 - DNA, 25 bp, Homo sapien
gcagctctggccactgatcttgctg

SEQ ID NO: 2831721 - DNA, 25 bp, Homo sapien
ctctggccactgatcttgctgctgt

SEQ ID NO: 2831722 - DNA, 25 bp, Homo sapien
agctctggccactgatcttgctgct

SEQ ID NO: 2831723 - DNA, 25 bp, Homo sapien
gggcagctctggccactgatcttgc

SEQ ID NO: 2831724 - DNA, 25 bp, Homo sapien
gacagaatcacggttcaaactcagg

SEQ ID NO: 2831725 - DNA, 25 bp, Homo sapien
tcacccaggttaggcaacaattctg

SEQ ID NO: 2831726 - DNA, 25 bp, Homo sapien
gagaggaaacctgaccgtataaata

SEQ ID NO: 2831727 - DNA, 25 bp, Homo sapien
tagtaacacagctacagtggaggac

SEQ ID NO: 2831728 - DNA, 25 bp, Homo sapien
gaggactagaatgtaaagatgacgc

SEQ ID NO: 2831729 - DNA, 25 bp, Homo sapien
taaagatgacgccacagaaatagtg

SEQ ID NO: 2831730 - DNA, 25 bp, Homo sapien
gatgcaggaggactagaatgtaaag

SEQ ID NO: 2831731 - DNA, 25 bp, Homo sapien
tgtatgcttcttaccacttatttct

SEQ ID NO: 2831732 - DNA, 25 bp, Homo sapien
ctgtggggttgatgcaagtgggctt

SEQ ID NO: 2831733 - DNA, 25 bp, Homo sapien
ttgtttggccagctgacctcatagg

SEQ ID NO: 2831734 - DNA, 25 bp, Homo sapien
cctgatggggtgcaaattaacagct

SEQ ID NO: 2831735 - DNA, 25 bp, Homo sapien
gaagcacctggcttactctgtgggg

SEQ ID NO: 2831736 - DNA, 25 bp, Homo sapien
tcttttctcacttaaattcttggtc

SEQ ID NO: 2831737 - DNA, 25 bp, Homo sapien
tttggctgatcttttctcacttaaa

SEQ ID NO: 2831738 - DNA, 25 bp, Homo sapien
tgatcttttctcacttaaattcttg

SEQ ID NO: 2831739 - DNA, 25 bp, Homo sapien
ttggctgatcttttctcacttaaat

SEQ ID NO: 2831740 - DNA, 25 bp, Homo sapien
catcaggaatggatgggattcagtc

SEQ ID NO: 2831741 - DNA, 25 bp, Homo sapien
ttagcgtcacataaatgaaaacttg

SEQ ID NO: 2831742 - DNA, 25 bp, Homo sapien
cacatgatgcttaaggtatgccagc

SEQ ID NO: 2831743 - DNA, 25 bp, Homo sapien
tttttggatagtgtagccatcagga

SEQ ID NO: 2831744 - DNA, 25 bp, Homo sapien
tacatcgagactggaaagatactgc

SEQ ID NO: 2831745 - DNA, 25 bp, Homo sapien
ttaagcagagagctgcggcgtgccc

SEQ ID NO: 2831746 - DNA, 25 bp, Homo sapien
ggcatcctcatatagcttcttggca

SEQ ID NO: 2831747 - DNA, 25 bp, Homo sapien
aggtaccatatgcaggctcccactg

SEQ ID NO: 2831748 - DNA, 25 bp, Homo sapien
gaaccagggttctttagcaatgagg

SEQ ID NO: 2831749 - DNA, 25 bp, Homo sapien
gcaattcaatacagtcggacatcag

SEQ ID NO: 2831750 - DNA, 25 bp, Homo sapien
taccattatagcaggcccactgtga

SEQ ID NO: 2831751 - DNA, 25 bp, Homo sapien
tatggcaagagtctggaccacgaca

SEQ ID NO: 2831752 - DNA, 25 bp, Homo sapien
tgtatcactggttctattgggttac

SEQ ID NO: 2831753 - DNA, 25 bp, Homo sapien
tcactggttctattgggttacgaaa

SEQ ID NO: 2831754 - DNA, 25 bp, Homo sapien
aaaaacccagtgtatcactggttct

SEQ ID NO: 2831755 - DNA, 25 bp, Homo sapien
acccagtgtatcactggttctattg

SEQ ID NO: 2831756 - DNA, 25 bp, Homo sapien
taacgaaggctaatatcacctacct

SEQ ID NO: 2831757 - DNA, 25 bp, Homo sapien
ccttgataccactctaacactttta

SEQ ID NO: 2831758 - DNA, 25 bp, Homo sapien
tacatgaaacggacacatataaagc

SEQ ID NO: 2831759 - DNA, 25 bp, Homo sapien
taattattacatcacccttgatacc

SEQ ID NO: 2831760 - DNA, 25 bp, Homo sapien
tactaaaccatctactttggagtca

SEQ ID NO: 2831761 - DNA, 25 bp, Homo sapien
tctgtcgaaacatcatagctgggtc

SEQ ID NO: 2831762 - DNA, 25 bp, Homo sapien
gggtccatgttagcagaagtcattc

SEQ ID NO: 2831763 - DNA, 25 bp, Homo sapien
gaagtcattcgaacaacttggcgga

SEQ ID NO: 2831764 - DNA, 25 bp, Homo sapien
aacatcaataaataatgttttcata

SEQ ID NO: 2831765 - DNA, 25 bp, Homo sapien
tgtggtaaaacatcaataaataatg

SEQ ID NO: 2831766 - DNA, 25 bp, Homo sapien
acatcaataaataatgttttcatac

SEQ ID NO: 2831767 - DNA, 25 bp, Homo sapien
catgtggtaaaacatcaataaataa

SEQ ID NO: 2831768 - DNA, 25 bp, Homo sapien
tcttgaagatgtttctcgtatttgc

SEQ ID NO: 2831769 - DNA, 25 bp, Homo sapien
ggaggctgcatactttgactactaa

SEQ ID NO: 2831770 - DNA, 25 bp, Homo sapien
gtcttgctacagatgccaggttcaa

SEQ ID NO: 2831771 - DNA, 25 bp, Homo sapien
aagagtggaataattggaggctgca

SEQ ID NO: 2831772 - DNA, 25 bp, Homo sapien
ctgccaaagatgagaatagaaacat

SEQ ID NO: 2831773 - DNA, 25 bp, Homo sapien
tgagaatagaaacattaaaaagaaa

SEQ ID NO: 2831774 - DNA, 25 bp, Homo sapien
gatgagaatagaaacattaaaaaga

SEQ ID NO: 2831775 - DNA, 25 bp, Homo sapien
gccaaagatgagaatagaaacatta

SEQ ID NO: 2831776 - DNA, 25 bp, Homo sapien
aaatcaaagtccctcattgacagct

SEQ ID NO: 2831777 - DNA, 25 bp, Homo sapien
gcatggatagctggctttccttaac

SEQ ID NO: 2831778 - DNA, 25 bp, Homo sapien
ccacctcaatggtactgagctgcag

SEQ ID NO: 2831779 - DNA, 25 bp, Homo sapien
tgtactcagtcggttcaatattacg

SEQ ID NO: 2831780 - DNA, 25 bp, Homo sapien
cagagagaatatgtgtcggatgcac

SEQ ID NO: 2831781 - DNA, 25 bp, Homo sapien
ttagctgtggtgtctttactgatga

SEQ ID NO: 2831782 - DNA, 25 bp, Homo sapien
tgcaccggtcaaaccaaattcatga

SEQ ID NO: 2831783 - DNA, 25 bp, Homo sapien
gaattctatcagctaatttggagaa

SEQ ID NO: 2831784 - DNA, 25 bp, Homo sapien
gctgaattagaaggcacgcatactt

SEQ ID NO: 2831785 - DNA, 25 bp, Homo sapien
ccctgtcaaaagtaagtaagcctct

SEQ ID NO: 2831786 - DNA, 25 bp, Homo sapien
gcaggcaatctacttcctccgtgaa

SEQ ID NO: 2831787 - DNA, 25 bp, Homo sapien
gacattatgatatgccccgttaccc

SEQ ID NO: 2831788 - DNA, 25 bp, Homo sapien
tttttgtcattatagaactctggac

SEQ ID NO: 2831789 - DNA, 25 bp, Homo sapien
gaaaagtgactttatagcatgaaca

SEQ ID NO: 2831790 - DNA, 25 bp, Homo sapien
attaggaatacaggctgggtatgac

SEQ ID NO: 2831791 - DNA, 25 bp, Homo sapien
caatgttcaacatgataagctaata

SEQ ID NO: 2831792 - DNA, 25 bp, Homo sapien
tgttcatttggtaccaatacggcaa

SEQ ID NO: 2831793 - DNA, 25 bp, Homo sapien
taactctagcacttgctgcacaagg

SEQ ID NO: 2831794 - DNA, 25 bp, Homo sapien
taagagggctgcaagtaactctagc

SEQ ID NO: 2831795 - DNA, 25 bp, Homo sapien
tcactttagaggaagtaccattcaa

SEQ ID NO: 2831796 - DNA, 25 bp, Homo sapien
ggattggaaaaatccaacatactgg

SEQ ID NO: 2831797 - DNA, 25 bp, Homo sapien
aaaatccaacatactggtggtaggc

SEQ ID NO: 2831798 - DNA, 25 bp, Homo sapien
gatgagagtgttccagggatgggca

SEQ ID NO: 2831799 - DNA, 25 bp, Homo sapien
aacatactggtggtaggctgcagga

SEQ ID NO: 2831800 - DNA, 25 bp, Homo sapien
tatagccagactatgcctacagtgc

SEQ ID NO: 2831801 - DNA, 25 bp, Homo sapien
ttcccacaatgctgtcatcttgtga

SEQ ID NO: 2831802 - DNA, 25 bp, Homo sapien
caatgctgtcatcttgtgattggct

SEQ ID NO: 2831803 - DNA, 25 bp, Homo sapien
gcctacagtgccttgttcccacaat

SEQ ID NO: 2831804 - DNA, 25 bp, Homo sapien
agggtgctccaacttttagtgtaga

SEQ ID NO: 2831805 - DNA, 25 bp, Homo sapien
tgtagttggacatttagggtgctcc

SEQ ID NO: 2831806 - DNA, 25 bp, Homo sapien
tacagaactgagtgctgctaaaggc

SEQ ID NO: 2831807 - DNA, 25 bp, Homo sapien
gaaaaattacctatgaaactatgcc

SEQ ID NO: 2831808 - DNA, 25 bp, Homo sapien
aatatttattggctagtgcggtagc

SEQ ID NO: 2831809 - DNA, 25 bp, Homo sapien
cactttatattagcacaccagtcta

SEQ ID NO: 2831810 - DNA, 25 bp, Homo sapien
ggctagtgcggtagctcaaacctgt

SEQ ID NO: 2831811 - DNA, 25 bp, Homo sapien
ttatattagcacaccagtctaaact

SEQ ID NO: 2831812 - DNA, 25 bp, Homo sapien
gcaagagacccaataatcccttctg

SEQ ID NO: 2831813 - DNA, 25 bp, Homo sapien
tgataggtaagacagctctcccaac

SEQ ID NO: 2831814 - DNA, 25 bp, Homo sapien
taatataaacttctgcagtgcagca

SEQ ID NO: 2831815 - DNA, 25 bp, Homo sapien
tgcaaaaaggccagtctgataggta

SEQ ID NO: 2831816 - DNA, 25 bp, Homo sapien
tataagccactcacctcaaggatag

SEQ ID NO: 2831817 - DNA, 25 bp, Homo sapien
gggtattttaatcctctgagttcca

SEQ ID NO: 2831818 - DNA, 25 bp, Homo sapien
gagttgacacaattccaagttgcct

SEQ ID NO: 2831819 - DNA, 25 bp, Homo sapien
ccaaatcactaacacagccatcaga

SEQ ID NO: 2831820 - DNA, 25 bp, Homo sapien
tttggaggcaagatactaaatcgtg

SEQ ID NO: 2831821 - DNA, 25 bp, Homo sapien
ctaaatcgtgttttatccaaaatct

SEQ ID NO: 2831822 - DNA, 25 bp, Homo sapien
gaggcaagatactaaatcgtgtttt

SEQ ID NO: 2831823 - DNA, 25 bp, Homo sapien
gatactaaatcgtgttttatccaaa

SEQ ID NO: 2831824 - DNA, 25 bp, Homo sapien
cctggcacatgctggatagaatggc

SEQ ID NO: 2831825 - DNA, 25 bp, Homo sapien
gctggatagaatggcgattactttt

SEQ ID NO: 2831826 - DNA, 25 bp, Homo sapien
tgtgatgtctgttcaatatctcctg

SEQ ID NO: 2831827 - DNA, 25 bp, Homo sapien
ttcaatatctcctggcacatgctgg

SEQ ID NO: 2831828 - DNA, 25 bp, Homo sapien
gccttgactttatgggctcatctga

SEQ ID NO: 2831829 - DNA, 25 bp, Homo sapien
ttcaaaaaatgtcaacctgtaaata

SEQ ID NO: 2831830 - DNA, 25 bp, Homo sapien
gtcaacctgtaaatataggtcaggc

SEQ ID NO: 2831831 - DNA, 25 bp, Homo sapien
ccttgactttatgggctcatctgat

SEQ ID NO: 2831832 - DNA, 25 bp, Homo sapien
attattcctcaaaatttcaacggct

SEQ ID NO: 2831833 - DNA, 25 bp, Homo sapien
tgttggtcttcacagtaagtgcaag

SEQ ID NO: 2831834 - DNA, 25 bp, Homo sapien
caaagttttgtccatttacttccat

SEQ ID NO: 2831835 - DNA, 25 bp, Homo sapien
tttcaacggctttcataaatgtaat

SEQ ID NO: 2831836 - DNA, 25 bp, Homo sapien
caaaggtacctacaaaagaagcgca

SEQ ID NO: 2831837 - DNA, 25 bp, Homo sapien
gagtttggacttctcttgggcaaca

SEQ ID NO: 2831838 - DNA, 25 bp, Homo sapien
tgctgacccttcacaagagggcttc

SEQ ID NO: 2831839 - DNA, 25 bp, Homo sapien
aaacatcattgtgggaagataaccc

SEQ ID NO: 2831840 - DNA, 25 bp, Homo sapien
ttgaaacagaagatacataatgtta

SEQ ID NO: 2831841 - DNA, 25 bp, Homo sapien
tgaaacagaagatacataatgttaa

SEQ ID NO: 2831842 - DNA, 25 bp, Homo sapien
gaaacagaagatacataatgttaaa

SEQ ID NO: 2831843 - DNA, 25 bp, Homo sapien
cttgaaacagaagatacataatgtt

SEQ ID NO: 2831844 - DNA, 25 bp, Homo sapien
cactccctccattaaggctgaattg

SEQ ID NO: 2831845 - DNA, 25 bp, Homo sapien
tgctaccaggttctactccttcaac

SEQ ID NO: 2831846 - DNA, 25 bp, Homo sapien
tttcagtcctgaatcagcagctttg

SEQ ID NO: 2831847 - DNA, 25 bp, Homo sapien
ggaagccttttgcagcacaacctgt

SEQ ID NO: 2831848 - DNA, 25 bp, Homo sapien
gtaatgaaagggaccaaatttgcca

SEQ ID NO: 2831849 - DNA, 25 bp, Homo sapien
tagaatgcaatgaatacctgatggc

SEQ ID NO: 2831850 - DNA, 25 bp, Homo sapien
tccccattttgtatagagcacatgt

SEQ ID NO: 2831851 - DNA, 25 bp, Homo sapien
gagcacatgtgctgccgagaagtca

SEQ ID NO: 2831852 - DNA, 25 bp, Homo sapien
ggaccactacactctgaagaataga

SEQ ID NO: 2831853 - DNA, 25 bp, Homo sapien
ggggggaccactacactctgaagaa

SEQ ID NO: 2831854 - DNA, 25 bp, Homo sapien
gggaccactacactctgaagaatag

SEQ ID NO: 2831855 - DNA, 25 bp, Homo sapien
ttgaggggggaccactacactctga

SEQ ID NO: 2831856 - DNA, 25 bp, Homo sapien
tagcagggtcaccttcaaaatcatt

SEQ ID NO: 2831857 - DNA, 25 bp, Homo sapien
tatttacccataataatacaatccg

SEQ ID NO: 2831858 - DNA, 25 bp, Homo sapien
aattcctctagaaatcgagtcatag

SEQ ID NO: 2831859 - DNA, 25 bp, Homo sapien
tacccataataatacaatccgtgtc

SEQ ID NO: 2831860 - DNA, 25 bp, Homo sapien
caaatgattgtgaagtctgtaactc

SEQ ID NO: 2831861 - DNA, 25 bp, Homo sapien
gtttatagtataaggtggtaatcca

SEQ ID NO: 2831862 - DNA, 25 bp, Homo sapien
gcaagcctgtagttttagatgttag

SEQ ID NO: 2831863 - DNA, 25 bp, Homo sapien
cacaggagagacatattaaggtttg

SEQ ID NO: 2831864 - DNA, 25 bp, Homo sapien
cttatctcttaagctgtcgatctta

SEQ ID NO: 2831865 - DNA, 25 bp, Homo sapien
ttaagctgtcgatcttaaaccattc

SEQ ID NO: 2831866 - DNA, 25 bp, Homo sapien
caatagtttgatcccaacatccaaa

SEQ ID NO: 2831867 - DNA, 25 bp, Homo sapien
taaaccattccaatagtttgatccc

SEQ ID NO: 2831868 - DNA, 25 bp, Homo sapien
tgcattatgagacgctcaggtgttg

SEQ ID NO: 2831869 - DNA, 25 bp, Homo sapien
aagttggatccacgatggaatgttc

SEQ ID NO: 2831870 - DNA, 25 bp, Homo sapien
aaatgcattatgagacgctcaggtg

SEQ ID NO: 2831871 - DNA, 25 bp, Homo sapien
ctgtaagttaatagaaaatcttcta

SEQ ID NO: 2831872 - DNA, 25 bp, Homo sapien
ctcttcctcaactttatgggtattt

SEQ ID NO: 2831873 - DNA, 25 bp, Homo sapien
tccggtctagttcccgatgctcatg

SEQ ID NO: 2831874 - DNA, 25 bp, Homo sapien
ctttcctggttccactccggtctag

SEQ ID NO: 2831875 - DNA, 25 bp, Homo sapien
gctcatgtaccataacaatttctcc

SEQ ID NO: 2831876 - DNA, 25 bp, Homo sapien
catggggacagttaatgaacctata

SEQ ID NO: 2831877 - DNA, 25 bp, Homo sapien
gacagttaatgaacctatagtacat

SEQ ID NO: 2831878 - DNA, 25 bp, Homo sapien
cacaaaggtaagaaatctagcggca

SEQ ID NO: 2831879 - DNA, 25 bp, Homo sapien
gcagagcacaaaggtaagaaatcta

SEQ ID NO: 2831880 - DNA, 25 bp, Homo sapien
ctgagctggctaatatcaaatagaa

SEQ ID NO: 2831881 - DNA, 25 bp, Homo sapien
ctcttttgaaaacttatagcttgtt

SEQ ID NO: 2831882 - DNA, 25 bp, Homo sapien
gagctattgaaactcctaattctca

SEQ ID NO: 2831883 - DNA, 25 bp, Homo sapien
ttaaaccaacagacaagaagacttg

SEQ ID NO: 2831884 - DNA, 25 bp, Homo sapien
tgcatgtactgcttatccagagtgg

SEQ ID NO: 2831885 - DNA, 25 bp, Homo sapien
tttagtcctgacaattccatgcatg

SEQ ID NO: 2831886 - DNA, 25 bp, Homo sapien
tccatctggatgactgatttccaca

SEQ ID NO: 2831887 - DNA, 25 bp, Homo sapien
tccacagtgccgtttaaaataacat

SEQ ID NO: 2831888 - DNA, 25 bp, Homo sapien
cagagttctctccttacagacatgg

SEQ ID NO: 2831889 - DNA, 25 bp, Homo sapien
agacatggtcatgtttgcaaatgca

SEQ ID NO: 2831890 - DNA, 25 bp, Homo sapien
aatagctccagcctgctctaccact

SEQ ID NO: 2831891 - DNA, 25 bp, Homo sapien
tggtgcataaactccagcaattgtt

SEQ ID NO: 2831892 - DNA, 25 bp, Homo sapien
cgaacaagatctcgcccctgcaatg

SEQ ID NO: 2831893 - DNA, 25 bp, Homo sapien
caagacattctcgaacaagatctcg

SEQ ID NO: 2831894 - DNA, 25 bp, Homo sapien
ggtccttctggaagacgtgtcaaat

SEQ ID NO: 2831895 - DNA, 25 bp, Homo sapien
ccctgcaatggatctgttcgatcaa

SEQ ID NO: 2831896 - DNA, 25 bp, Homo sapien
cttaaacccagagattacagtggga

SEQ ID NO: 2831897 - DNA, 25 bp, Homo sapien
tcctgaacgccctgaatacctggga

SEQ ID NO: 2831898 - DNA, 25 bp, Homo sapien
gactcgggggaggttgctatgctgc

SEQ ID NO: 2831899 - DNA, 25 bp, Homo sapien
aacgccctgaatacctgggaacaca

SEQ ID NO: 2831900 - DNA, 25 bp, Homo sapien
tcttaagggtctgcgattgtctgaa

SEQ ID NO: 2831901 - DNA, 25 bp, Homo sapien
gaccatgtcttatacttcctttgga

SEQ ID NO: 2831902 - DNA, 25 bp, Homo sapien
cacctacaactagaagagtctggat

SEQ ID NO: 2831903 - DNA, 25 bp, Homo sapien
aagttaaggctctgacacctacaac

SEQ ID NO: 2831904 - DNA, 25 bp, Homo sapien
tagatggctcacaacataaaaaggc

SEQ ID NO: 2831905 - DNA, 25 bp, Homo sapien
gaaggctaattatcatctgcatgag

SEQ ID NO: 2831906 - DNA, 25 bp, Homo sapien
catgactgactagtacgctctgagt

SEQ ID NO: 2831907 - DNA, 25 bp, Homo sapien
ttctcaatatgcaggagagctcact

SEQ ID NO: 2831908 - DNA, 25 bp, Homo sapien
tgtgcctgactcaccatgggataca

SEQ ID NO: 2831909 - DNA, 25 bp, Homo sapien
aacacaagactaggaaaaggcagac

SEQ ID NO: 2831910 - DNA, 25 bp, Homo sapien
gagtacttcctaaatgccaacactg

SEQ ID NO: 2831911 - DNA, 25 bp, Homo sapien
catcttcatgaagctacgggtagaa

SEQ ID NO: 2831912 - DNA, 25 bp, Homo sapien
gaacatgtggtgacttgagttgaca

SEQ ID NO: 2831913 - DNA, 25 bp, Homo sapien
gctgtgcattaggaaatcatgttgc

SEQ ID NO: 2831914 - DNA, 25 bp, Homo sapien
gatttttaagaacacgcttactgcc

SEQ ID NO: 2831915 - DNA, 25 bp, Homo sapien
tgaaaacgtggcaccagagttctga

SEQ ID NO: 2831916 - DNA, 25 bp, Homo sapien
tacaggcatgctccatcaccccagc

SEQ ID NO: 2831917 - DNA, 25 bp, Homo sapien
ctgcaggcttgagccactgtgccca

SEQ ID NO: 2831918 - DNA, 25 bp, Homo sapien
gcaggcttgagccactgtgcccagc

SEQ ID NO: 2831919 - DNA, 25 bp, Homo sapien
attacaggcatgctccatcacccca

SEQ ID NO: 2831920 - DNA, 25 bp, Homo sapien
gatatcagataaactgctgcttcca

SEQ ID NO: 2831921 - DNA, 25 bp, Homo sapien
gactagaagacacatgagtcacctg

SEQ ID NO: 2831922 - DNA, 25 bp, Homo sapien
ggcaatgctacaaccagactgacta

SEQ ID NO: 2831923 - DNA, 25 bp, Homo sapien
tgtgagatgcatcttggtaagatca

SEQ ID NO: 2831924 - DNA, 25 bp, Homo sapien
gctattcagggctatcaaaatcaat

SEQ ID NO: 2831925 - DNA, 25 bp, Homo sapien
tattctgagggaatgactgagtctg

SEQ ID NO: 2831926 - DNA, 25 bp, Homo sapien
cattccagagtagtaaaagttttgc

SEQ ID NO: 2831927 - DNA, 25 bp, Homo sapien
tcccctgctgataatggtatgttag

SEQ ID NO: 2831928 - DNA, 25 bp, Homo sapien
tcaaataatagggttaccagacaca

SEQ ID NO: 2831929 - DNA, 25 bp, Homo sapien
ggttggcaaacatcttcgttaagag

SEQ ID NO: 2831930 - DNA, 25 bp, Homo sapien
aataactgtctttaatatataccag

SEQ ID NO: 2831931 - DNA, 25 bp, Homo sapien
taaaaccaggcacatatgacgagac

SEQ ID NO: 2831932 - DNA, 25 bp, Homo sapien
gatataaaagatacgaacataatta

SEQ ID NO: 2831933 - DNA, 25 bp, Homo sapien
tcagtagcagtctgaataagcaaaa

SEQ ID NO: 2831934 - DNA, 25 bp, Homo sapien
aaatgtcatctacaattatgccata

SEQ ID NO: 2831935 - DNA, 25 bp, Homo sapien
cacgaaaacagaacaagtaaagata

SEQ ID NO: 2831936 - DNA, 25 bp, Homo sapien
ttcctgatctacctggactcaacag

SEQ ID NO: 2831937 - DNA, 25 bp, Homo sapien
tacctggactcaacagctgatcttt

SEQ ID NO: 2831938 - DNA, 25 bp, Homo sapien
caacagctgatctttcatcagcaaa

SEQ ID NO: 2831939 - DNA, 25 bp, Homo sapien
ctttctcttcctgatctacctggac

SEQ ID NO: 2831940 - DNA, 25 bp, Homo sapien
ggccagaagacagtgtagtaacttt

SEQ ID NO: 2831941 - DNA, 25 bp, Homo sapien
ctaatacgactatttattttagcaa

SEQ ID NO: 2831942 - DNA, 25 bp, Homo sapien
ccccagtagaaccatgctaatacga

SEQ ID NO: 2831943 - DNA, 25 bp, Homo sapien
aaggaaggcatttatgattcattct

SEQ ID NO: 2831944 - DNA, 25 bp, Homo sapien
cactgataagtacagcaatagccat

SEQ ID NO: 2831945 - DNA, 25 bp, Homo sapien
gaagcaagttagagtatgatcactg

SEQ ID NO: 2831946 - DNA, 25 bp, Homo sapien
tctacagatttaaaacgcacctttc

SEQ ID NO: 2831947 - DNA, 25 bp, Homo sapien
gagagtacatctcaaatgcactgca

SEQ ID NO: 2831948 - DNA, 25 bp, Homo sapien
taacagcgaacaagaaaagccattt

SEQ ID NO: 2831949 - DNA, 25 bp, Homo sapien
caattggcataacagcgaacaagaa

SEQ ID NO: 2831950 - DNA, 25 bp, Homo sapien
gaagacaattggcataacagcgaac

SEQ ID NO: 2831951 - DNA, 25 bp, Homo sapien
agccatttcctaggctggaaagggt

SEQ ID NO: 2831952 - DNA, 25 bp, Homo sapien
caagcaaatcacagtaaatgaagat

SEQ ID NO: 2831953 - DNA, 25 bp, Homo sapien
ctggctcagaatatacagacatata

SEQ ID NO: 2831954 - DNA, 25 bp, Homo sapien
gatgagtacggtgataaaattctgt

SEQ ID NO: 2831955 - DNA, 25 bp, Homo sapien
cagtgtttatataaaggcagcctct

SEQ ID NO: 2831956 - DNA, 25 bp, Homo sapien
gattctatgctctgcagtaagatga

SEQ ID NO: 2831957 - DNA, 25 bp, Homo sapien
tattgattctatgctctgcagtaag

SEQ ID NO: 2831958 - DNA, 25 bp, Homo sapien
aggagaagctcctattgattctatg

SEQ ID NO: 2831959 - DNA, 25 bp, Homo sapien
gctcctattgattctatgctctgca

SEQ ID NO: 2831960 - DNA, 25 bp, Homo sapien
tccagggaactgtatagtgaaccta

SEQ ID NO: 2831961 - DNA, 25 bp, Homo sapien
aaagaaggacctcaagctgggcaag

SEQ ID NO: 2831962 - DNA, 25 bp, Homo sapien
catagtatcttcgattccagggaac

SEQ ID NO: 2831963 - DNA, 25 bp, Homo sapien
caatcatacgtgagttggaattcca

SEQ ID NO: 2831964 - DNA, 25 bp, Homo sapien
gctccatgtctgtgcagacgctatg

SEQ ID NO: 2831965 - DNA, 25 bp, Homo sapien
ttaggaagagctggctggctccatg

SEQ ID NO: 2831966 - DNA, 25 bp, Homo sapien
ggaagagctggctggctccatgtct

SEQ ID NO: 2831967 - DNA, 25 bp, Homo sapien
ctggctccatgtctgtgcagacgct

SEQ ID NO: 2831968 - DNA, 25 bp, Homo sapien
ggcacacttggtgcttgaccttggt

SEQ ID NO: 2831969 - DNA, 25 bp, Homo sapien
tggtgaactatgatcgcataactgc

SEQ ID NO: 2831970 - DNA, 25 bp, Homo sapien
tgcagtgattagactgcgtgagccc

SEQ ID NO: 2831971 - DNA, 25 bp, Homo sapien
gaacaatgtccagattcatatttgg

SEQ ID NO: 2831972 - DNA, 25 bp, Homo sapien
tatcagataggcctacaagtgatta

SEQ ID NO: 2831973 - DNA, 25 bp, Homo sapien
cccatgtcctggagattgttttggg

SEQ ID NO: 2831974 - DNA, 25 bp, Homo sapien
gccttgctaactactatcagatagg

SEQ ID NO: 2831975 - DNA, 25 bp, Homo sapien
ggctaaacgaatggccttgctaact

SEQ ID NO: 2831976 - DNA, 25 bp, Homo sapien
ctcaacaccgtaagtcatcagggat

SEQ ID NO: 2831977 - DNA, 25 bp, Homo sapien
tctgcctcaaagatcaaagctctga

SEQ ID NO: 2831978 - DNA, 25 bp, Homo sapien
tgcaattgcccaaaactggaacaat

SEQ ID NO: 2831979 - DNA, 25 bp, Homo sapien
aatataattgatgcacacgacaggg

SEQ ID NO: 2831980 - DNA, 25 bp, Homo sapien
atgaagtgttcctaaatatactcac

SEQ ID NO: 2831981 - DNA, 25 bp, Homo sapien
ttcgggattgtctggcaggaatttc

SEQ ID NO: 2831982 - DNA, 25 bp, Homo sapien
ttccgaaatcttcttcgggattgtc

SEQ ID NO: 2831983 - DNA, 25 bp, Homo sapien
tcttcttcgggattgtctggcagga

SEQ ID NO: 2831984 - DNA, 25 bp, Homo sapien
tctctttgtagaatactatcttcat

SEQ ID NO: 2831985 - DNA, 25 bp, Homo sapien
tattactgtacctaaagttccaaga

SEQ ID NO: 2831986 - DNA, 25 bp, Homo sapien
tcatgtaagaagcaagacataatta

SEQ ID NO: 2831987 - DNA, 25 bp, Homo sapien
gacatatgaactcatagacaaatat

SEQ ID NO: 2831988 - DNA, 25 bp, Homo sapien
aacatcatgtaagaagcaagacata

SEQ ID NO: 2831989 - DNA, 25 bp, Homo sapien
tgaaaccactggtgcaccataacag

SEQ ID NO: 2831990 - DNA, 25 bp, Homo sapien
tatagccctataacctaatgcccaa

SEQ ID NO: 2831991 - DNA, 25 bp, Homo sapien
tagctcaactccagtagaaatgtgt

SEQ ID NO: 2831992 - DNA, 25 bp, Homo sapien
cagcaagagaatccaaacctagctc

SEQ ID NO: 2831993 - DNA, 25 bp, Homo sapien
caagaaaggcttacgctgaattcta

SEQ ID NO: 2831994 - DNA, 25 bp, Homo sapien
tgctagatcgtagtagtgaatcctt

SEQ ID NO: 2831995 - DNA, 25 bp, Homo sapien
tgacaagcgatttagagcatacgcc

SEQ ID NO: 2831996 - DNA, 25 bp, Homo sapien
cctttgctcttatagcactagggct

SEQ ID NO: 2831997 - DNA, 25 bp, Homo sapien
tctaatacaagacaatcacatcctc

SEQ ID NO: 2831998 - DNA, 25 bp, Homo sapien
catttctgaaggctctaatacaaga

SEQ ID NO: 2831999 - DNA, 25 bp, Homo sapien
caagacaatcacatcctctttttcc

SEQ ID NO: 2832000 - DNA, 25 bp, Homo sapien
tgaaggctctaatacaagacaatca

SEQ ID NO: 2832001 - DNA, 25 bp, Homo sapien
gaaagcattttctctaccattaccc

SEQ ID NO: 2832002 - DNA, 25 bp, Homo sapien
cattaccctaatacaaagtcttttg

SEQ ID NO: 2832003 - DNA, 25 bp, Homo sapien
agcagtaatactggactaacagaaa

SEQ ID NO: 2832004 - DNA, 25 bp, Homo sapien
ctaacagaaatgagctgaaagcatt

SEQ ID NO: 2832005 - DNA, 25 bp, Homo sapien
gatgtgtgttcacttccactgtgtt

SEQ ID NO: 2832006 - DNA, 25 bp, Homo sapien
atgtcccctcttttatgcctgattc

SEQ ID NO: 2832007 - DNA, 25 bp, Homo sapien
gatttccacttgaaccttccttgag

SEQ ID NO: 2832008 - DNA, 25 bp, Homo sapien
cattcttaagatgactagatcaaaa

SEQ ID NO: 2832009 - DNA, 25 bp, Homo sapien
ctgttcttcctgtactactatcatt

SEQ ID NO: 2832010 - DNA, 25 bp, Homo sapien
ccctatgttgacaagcagatctcaa

SEQ ID NO: 2832011 - DNA, 25 bp, Homo sapien
cctgtactactatcatttctgtcaa

SEQ ID NO: 2832012 - DNA, 25 bp, Homo sapien
gcaaagactgcaagtgtacaccacc

SEQ ID NO: 2832013 - DNA, 25 bp, Homo sapien
caaaagaggttagtctactggccca

SEQ ID NO: 2832014 - DNA, 25 bp, Homo sapien
ggcccacgtgactgattccaattag

SEQ ID NO: 2832015 - DNA, 25 bp, Homo sapien
tgggttactgcacaaaatgtaggca

SEQ ID NO: 2832016 - DNA, 25 bp, Homo sapien
gaaagactacatctggaacttaggc

SEQ ID NO: 2832017 - DNA, 25 bp, Homo sapien
cagcactgtaatgcccaaggcgggc

SEQ ID NO: 2832018 - DNA, 25 bp, Homo sapien
ttgaccagacaactgtggaccagct

SEQ ID NO: 2832019 - DNA, 25 bp, Homo sapien
cagagggtgctagagtaacactgca

SEQ ID NO: 2832020 - DNA, 25 bp, Homo sapien
tgtcccagagcaacccagtgaatgt

SEQ ID NO: 2832021 - DNA, 25 bp, Homo sapien
gtgtaagcttacagattataccctc

SEQ ID NO: 2832022 - DNA, 25 bp, Homo sapien
aaaagattaactgattcctgccaag

SEQ ID NO: 2832023 - DNA, 25 bp, Homo sapien
gattataccctcagaaataacaaaa

SEQ ID NO: 2832024 - DNA, 25 bp, Homo sapien
tccaatggtgccaacaagcaaagac

SEQ ID NO: 2832025 - DNA, 25 bp, Homo sapien
gatataccaacatctggcaatcgtt

SEQ ID NO: 2832026 - DNA, 25 bp, Homo sapien
ccagaaagtaggatataccaacatc

SEQ ID NO: 2832027 - DNA, 25 bp, Homo sapien
aggaggcaagaccatggagcctttc

SEQ ID NO: 2832028 - DNA, 25 bp, Homo sapien
gaccatggagcctttcacaagcaca

SEQ ID NO: 2832029 - DNA, 25 bp, Homo sapien
aagagaacctgattgccactgtatc

SEQ ID NO: 2832030 - DNA, 25 bp, Homo sapien
gaacctgattgccactgtatctctc

SEQ ID NO: 2832031 - DNA, 25 bp, Homo sapien
cactgtatctctcatagcgtgctct

SEQ ID NO: 2832032 - DNA, 25 bp, Homo sapien
tctcatagcgtgctcttgcagacat

SEQ ID NO: 2832033 - DNA, 25 bp, Homo sapien
ctgagatttgataatatttccattc

SEQ ID NO: 2832034 - DNA, 25 bp, Homo sapien
tgagatttgataatatttccattcc

SEQ ID NO: 2832035 - DNA, 25 bp, Homo sapien
ccattccatgaagataagaataaat

SEQ ID NO: 2832036 - DNA, 25 bp, Homo sapien
ttccatgaagataagaataaatagt

SEQ ID NO: 2832037 - DNA, 25 bp, Homo sapien
cagtggcccaaggtgaaaatatatg

SEQ ID NO: 2832038 - DNA, 25 bp, Homo sapien
gatgcaggtggccaatctagaatct

SEQ ID NO: 2832039 - DNA, 25 bp, Homo sapien
caaaacagacaagacagtggcccaa

SEQ ID NO: 2832040 - DNA, 25 bp, Homo sapien
gaagcagtctgaggccctcattgga

SEQ ID NO: 2832041 - DNA, 25 bp, Homo sapien
gaagtaggaggccaatctgggcaat

SEQ ID NO: 2832042 - DNA, 25 bp, Homo sapien
ggactctggagacaaccgtgtttaa

SEQ ID NO: 2832043 - DNA, 25 bp, Homo sapien
tgggcaatgtggagatacttggtct

SEQ ID NO: 2832044 - DNA, 25 bp, Homo sapien
cttgtgtaaacttggataatctgct

SEQ ID NO: 2832045 - DNA, 25 bp, Homo sapien
cttggaccagcctaggtaaactaag

SEQ ID NO: 2832046 - DNA, 25 bp, Homo sapien
accagcctaggtaaactaaggtctg

SEQ ID NO: 2832047 - DNA, 25 bp, Homo sapien
gattttatgcaataacagccgttaa

SEQ ID NO: 2832048 - DNA, 25 bp, Homo sapien
cagaaattagtgaccagactgggca

SEQ ID NO: 2832049 - DNA, 25 bp, Homo sapien
cagccaggagactacccagtaaggt

SEQ ID NO: 2832050 - DNA, 25 bp, Homo sapien
cactttagtcagagtgaccatcatc

SEQ ID NO: 2832051 - DNA, 25 bp, Homo sapien
tcgggagtccgctcgggtggcttct

SEQ ID NO: 2832052 - DNA, 25 bp, Homo sapien
ctcgggagtccgctcgggtggcttc

SEQ ID NO: 2832053 - DNA, 25 bp, Homo sapien
ggccacggcccgggtactccgcagc

SEQ ID NO: 2832054 - DNA, 25 bp, Homo sapien
gcgccgtaacaaggtccgaactcta

SEQ ID NO: 2832055 - DNA, 25 bp, Homo sapien
ccacgcgcgactggccggagacaag

SEQ ID NO: 2832056 - DNA, 25 bp, Homo sapien
caaggtccgaactctagcaaacaac

SEQ ID NO: 2832057 - DNA, 25 bp, Homo sapien
tcacactaggtagcgggtgcggtac

SEQ ID NO: 2832058 - DNA, 25 bp, Homo sapien
tctgccttggcgttgtggttccgtc

SEQ ID NO: 2832059 - DNA, 25 bp, Homo sapien
tgaatatgcggaagtagaagccgcc

SEQ ID NO: 2832060 - DNA, 25 bp, Homo sapien
gagaactgttgtgcccaaatccgga

SEQ ID NO: 2832061 - DNA, 25 bp, Homo sapien
tgcttgatctattcgaaacggacgt

SEQ ID NO: 2832062 - DNA, 25 bp, Homo sapien
caaaaactttaccagcgaagtgtgg

SEQ ID NO: 2832063 - DNA, 25 bp, Homo sapien
aactttaccagcgaagtgtggcata

SEQ ID NO: 2832064 - DNA, 25 bp, Homo sapien
gatcaaaaactttaccagcgaagtg

SEQ ID NO: 2832065 - DNA, 25 bp, Homo sapien
taccagcgaagtgtggcatagccat

SEQ ID NO: 2832066 - DNA, 25 bp, Homo sapien
gaaatcccggatatctttacaatac

SEQ ID NO: 2832067 - DNA, 25 bp, Homo sapien
acagctgtcaccacatagtagttga

SEQ ID NO: 2832068 - DNA, 25 bp, Homo sapien
cccggatatctttacaatacagctg

SEQ ID NO: 2832069 - DNA, 25 bp, Homo sapien
gaagaaatcccggatatctttacaa

SEQ ID NO: 2832070 - DNA, 25 bp, Homo sapien
attgcacaaatatcccctagaactg

SEQ ID NO: 2832071 - DNA, 25 bp, Homo sapien
tattgcacaaatatcccctagaact

SEQ ID NO: 2832072 - DNA, 25 bp, Homo sapien
cagtttgatggttaaggagacaccc

SEQ ID NO: 2832073 - DNA, 25 bp, Homo sapien
caatggcccgcaaatgtatgaactt

SEQ ID NO: 2832074 - DNA, 25 bp, Homo sapien
gcatgagccacccacttattgagga

SEQ ID NO: 2832075 - DNA, 25 bp, Homo sapien
caagggccttggctacctgagcact

SEQ ID NO: 2832076 - DNA, 25 bp, Homo sapien
tatttgtgcaacatatggagagtga

SEQ ID NO: 2832077 - DNA, 25 bp, Homo sapien
gagtatttgtgcaacatatggagag

SEQ ID NO: 2832078 - DNA, 25 bp, Homo sapien
tgtgcaacatatggagagtgagtgc

SEQ ID NO: 2832079 - DNA, 25 bp, Homo sapien
taaaggagtatttgtgcaacatatg

SEQ ID NO: 2832080 - DNA, 25 bp, Homo sapien
taataggagaagacacgtaaaagga

SEQ ID NO: 2832081 - DNA, 25 bp, Homo sapien
gaggaaaattccttgcctgatgaca

SEQ ID NO: 2832082 - DNA, 25 bp, Homo sapien
ctgatgacagggcaatgaaagcaaa

SEQ ID NO: 2832083 - DNA, 25 bp, Homo sapien
tgacagggcaatgaaagcaaagcca

SEQ ID NO: 2832084 - DNA, 25 bp, Homo sapien
caaccggtcttcaagatgcattaca

SEQ ID NO: 2832085 - DNA, 25 bp, Homo sapien
tccttgacatgaacacgcatctgcc

SEQ ID NO: 2832086 - DNA, 25 bp, Homo sapien
gaagtatagctcctgcaaccggtct

SEQ ID NO: 2832087 - DNA, 25 bp, Homo sapien
cccctcaggtattcagacagcattt

SEQ ID NO: 2832088 - DNA, 25 bp, Homo sapien
gtatcaatcccttttgagatatatg

SEQ ID NO: 2832089 - DNA, 25 bp, Homo sapien
tctgagtatcaatcccttttgagat

SEQ ID NO: 2832090 - DNA, 25 bp, Homo sapien
ttgttacctatgcttttggtttcaa

SEQ ID NO: 2832091 - DNA, 25 bp, Homo sapien
tgtcacaaagattatcccctaggtt

SEQ ID NO: 2832092 - DNA, 25 bp, Homo sapien
ttcgggtaatgacacaaacattcag

SEQ ID NO: 2832093 - DNA, 25 bp, Homo sapien
ccaaggtgcaagcatggttgggttc

SEQ ID NO: 2832094 - DNA, 25 bp, Homo sapien
aggccactaataccatcagagcacc

SEQ ID NO: 2832095 - DNA, 25 bp, Homo sapien
taccttagatacctcccaaagatcc

SEQ ID NO: 2832096 - DNA, 25 bp, Homo sapien
acaagttatgcttataaagctgaag

SEQ ID NO: 2832097 - DNA, 25 bp, Homo sapien
tactggccacttgaacagtccattt

SEQ ID NO: 2832098 - DNA, 25 bp, Homo sapien
gttatgcttataaagctgaagtgtg

SEQ ID NO: 2832099 - DNA, 25 bp, Homo sapien
ctgtcactcgtctctggctactggc

SEQ ID NO: 2832100 - DNA, 25 bp, Homo sapien
cagcttctgctattggttcatccaa

SEQ ID NO: 2832101 - DNA, 25 bp, Homo sapien
ttgcgatggacgatggagaggccag

SEQ ID NO: 2832102 - DNA, 25 bp, Homo sapien
atttgcgatggacgatggagaggcc

SEQ ID NO: 2832103 - DNA, 25 bp, Homo sapien
gcatttgcgatggacgatggagagg

SEQ ID NO: 2832104 - DNA, 25 bp, Homo sapien
gcgatggacgatggagaggccagac

SEQ ID NO: 2832105 - DNA, 25 bp, Homo sapien
caccctgttcgcaatgccagggtac

SEQ ID NO: 2832106 - DNA, 25 bp, Homo sapien
tgcccatccacaccagagtgacgat

SEQ ID NO: 2832107 - DNA, 25 bp, Homo sapien
gagtgacgatcttctgcaccctgtt

SEQ ID NO: 2832108 - DNA, 25 bp, Homo sapien
ctgcaccctgttcgcaatgccaggg

SEQ ID NO: 2832109 - DNA, 25 bp, Homo sapien
gttgttgccgccaaacaacactgtg

SEQ ID NO: 2832110 - DNA, 25 bp, Homo sapien
atgttgttgccgccaaacaacactg

SEQ ID NO: 2832111 - DNA, 25 bp, Homo sapien
ttgttgccgccaaacaacactgtgt

SEQ ID NO: 2832112 - DNA, 25 bp, Homo sapien
tgttgccgccaaacaacactgtgtt

SEQ ID NO: 2832113 - DNA, 25 bp, Homo sapien
agggcagcaggatagctcattgcca

SEQ ID NO: 2832114 - DNA, 25 bp, Homo sapien
gcagcaggatagctcattgccaatg

SEQ ID NO: 2832115 - DNA, 25 bp, Homo sapien
cagggcagcaggatagctcattgcc

SEQ ID NO: 2832116 - DNA, 25 bp, Homo sapien
tcagggcagcaggatagctcattgc

SEQ ID NO: 2832117 - DNA, 25 bp, Homo sapien
agccataggtgtacagggacaacat

SEQ ID NO: 2832118 - DNA, 25 bp, Homo sapien
cagccataggtgtacagggacaaca

SEQ ID NO: 2832119 - DNA, 25 bp, Homo sapien
tggtacagccataggtgtacaggga

SEQ ID NO: 2832120 - DNA, 25 bp, Homo sapien
tacagccataggtgtacagggacaa

SEQ ID NO: 2832121 - DNA, 25 bp, Homo sapien
agtcagcagcatacggtgctccttg

SEQ ID NO: 2832122 - DNA, 25 bp, Homo sapien
tgggccttgttgctcacatagaagt

SEQ ID NO: 2832123 - DNA, 25 bp, Homo sapien
ttgttgctcacatagaagtccttcc

SEQ ID NO: 2832124 - DNA, 25 bp, Homo sapien
gttgctcacatagaagtccttccga

SEQ ID NO: 2832125 - DNA, 25 bp, Homo sapien
ggccttgttgctcacatagaagtcc

SEQ ID NO: 2832126 - DNA, 25 bp, Homo sapien
gggcatcgttgcccgtgaagcagac

SEQ ID NO: 2832127 - DNA, 25 bp, Homo sapien
gggggcatcgttgcccgtgaagcag

SEQ ID NO: 2832128 - DNA, 25 bp, Homo sapien
ggcccgggggcatcgttgcccgtga

SEQ ID NO: 2832129 - DNA, 25 bp, Homo sapien
ccgggggcatcgttgcccgtgaagc

SEQ ID NO: 2832130 - DNA, 25 bp, Homo sapien
gacgacaagcacagcaatatcatta

SEQ ID NO: 2832131 - DNA, 25 bp, Homo sapien
gatgggcggcagagtggtgagggtg

SEQ ID NO: 2832132 - DNA, 25 bp, Homo sapien
gtggatgggcggcagagtggtgagg

SEQ ID NO: 2832133 - DNA, 25 bp, Homo sapien
tgtcgacgacaagcacagcaatatc

SEQ ID NO: 2832134 - DNA, 25 bp, Homo sapien
tttttaccatagtggaaggaatcca

SEQ ID NO: 2832135 - DNA, 25 bp, Homo sapien
tccaagagcaacagacctgggacca

SEQ ID NO: 2832136 - DNA, 25 bp, Homo sapien
gttttagtaacagtatggcatagca

SEQ ID NO: 2832137 - DNA, 25 bp, Homo sapien
tagcagcttaagaacaggcagttaa

SEQ ID NO: 2832138 - DNA, 25 bp, Homo sapien
gaataaggcaacgatgtccatggtc

SEQ ID NO: 2832139 - DNA, 25 bp, Homo sapien
tcactgataacatgagcctgtgtgt

SEQ ID NO: 2832140 - DNA, 25 bp, Homo sapien
gaacttcttccatctaataaagggc

SEQ ID NO: 2832141 - DNA, 25 bp, Homo sapien
aattctagccagtacaatgagtcaa

SEQ ID NO: 2832142 - DNA, 25 bp, Homo sapien
ggacatccatgaatacataaagtac

SEQ ID NO: 2832143 - DNA, 25 bp, Homo sapien
gatggacatccatgaatacataaag

SEQ ID NO: 2832144 - DNA, 25 bp, Homo sapien
ctagttgatggacatccatgaatac

SEQ ID NO: 2832145 - DNA, 25 bp, Homo sapien
catccatgaatacataaagtacttt

SEQ ID NO: 2832146 - DNA, 25 bp, Homo sapien
tcacagtgacagatacaaagatacg

SEQ ID NO: 2832147 - DNA, 25 bp, Homo sapien
ttatttgctttcacagtgacagata

SEQ ID NO: 2832148 - DNA, 25 bp, Homo sapien
agtgacagatacaaagatacgggca

SEQ ID NO: 2832149 - DNA, 25 bp, Homo sapien
cagtgacagatacaaagatacgggc

SEQ ID NO: 2832150 - DNA, 25 bp, Homo sapien
tgcacagcatgagataaatctgaca

SEQ ID NO: 2832151 - DNA, 25 bp, Homo sapien
ctgcacagcatgagataaatctgac

SEQ ID NO: 2832152 - DNA, 25 bp, Homo sapien
cagcactcacttcgattaactttga

SEQ ID NO: 2832153 - DNA, 25 bp, Homo sapien
gcaatgttgggctgaacagcactca

SEQ ID NO: 2832154 - DNA, 25 bp, Homo sapien
caaggacctcccgaagttggcaatg

SEQ ID NO: 2832155 - DNA, 25 bp, Homo sapien
cacataagatgagcagtagccaccc

SEQ ID NO: 2832156 - DNA, 25 bp, Homo sapien
gaatcaggtgacatagaatccccaa

SEQ ID NO: 2832157 - DNA, 25 bp, Homo sapien
cagtccttgctaaccgtacgggaga

SEQ ID NO: 2832158 - DNA, 25 bp, Homo sapien
caacagggaagttcacagggctctt

SEQ ID NO: 2832159 - DNA, 25 bp, Homo sapien
gtacgggagagccaatagcgccata

SEQ ID NO: 2832160 - DNA, 25 bp, Homo sapien
tagtaaacgagctatcagcctgctc

SEQ ID NO: 2832161 - DNA, 25 bp, Homo sapien
gagctatcagcctgctcctcttgct

SEQ ID NO: 2832162 - DNA, 25 bp, Homo sapien
ctcttgctctacctgcagttcttca

SEQ ID NO: 2832163 - DNA, 25 bp, Homo sapien
gatctgaagttactagtaaacgagc

SEQ ID NO: 2832164 - DNA, 25 bp, Homo sapien
tctaatacatagtgtaacagttgtc

SEQ ID NO: 2832165 - DNA, 25 bp, Homo sapien
taaaataattacagatagctacaaa

SEQ ID NO: 2832166 - DNA, 25 bp, Homo sapien
aaagtctaatacatagtgtaacagt

SEQ ID NO: 2832167 - DNA, 25 bp, Homo sapien
ataattacagatagctacaaaaaag

SEQ ID NO: 2832168 - DNA, 25 bp, Homo sapien
tttgccaacatgtccacactctgag

SEQ ID NO: 2832169 - DNA, 25 bp, Homo sapien
ttggcatgactgttggaacccaggc

SEQ ID NO: 2832170 - DNA, 25 bp, Homo sapien
ccagttgtgcccaaagtgggttata

SEQ ID NO: 2832171 - DNA, 25 bp, Homo sapien
caagatgattggtcagaactgcagt

SEQ ID NO: 2832172 - DNA, 25 bp, Homo sapien
gtaagcaaggggagtatatatgttc

SEQ ID NO: 2832173 - DNA, 25 bp, Homo sapien
aaacaaaatacatctgatcagattc

SEQ ID NO: 2832174 - DNA, 25 bp, Homo sapien
tatatatgttcatgtggccaaatgg

SEQ ID NO: 2832175 - DNA, 25 bp, Homo sapien
gatcagattccaatcagtcttcatg

SEQ ID NO: 2832176 - DNA, 25 bp, Homo sapien
ctagttataataaataaattcatac

SEQ ID NO: 2832177 - DNA, 25 bp, Homo sapien
catgaaacgatagcaaaggtggttc

SEQ ID NO: 2832178 - DNA, 25 bp, Homo sapien
gaaaggtgaactccttcatgaaacg

SEQ ID NO: 2832179 - DNA, 25 bp, Homo sapien
tggagtccccgacatcattgtaagc

SEQ ID NO: 2832180 - DNA, 25 bp, Homo sapien
gccagacaggttctccaattcgtgg

SEQ ID NO: 2832181 - DNA, 25 bp, Homo sapien
ctttgagtaagctttcaagcaatcc

SEQ ID NO: 2832182 - DNA, 25 bp, Homo sapien
aatctttgagtaagctttcaagcaa

SEQ ID NO: 2832183 - DNA, 25 bp, Homo sapien
tgcacctcgctccttaagaatcttt

SEQ ID NO: 2832184 - DNA, 25 bp, Homo sapien
cgctccttaagaatctttgagtaag

SEQ ID NO: 2832185 - DNA, 25 bp, Homo sapien
cctctgaatcccaggttcaactgat

SEQ ID NO: 2832186 - DNA, 25 bp, Homo sapien
ctgaatcccaggttcaactgatcct

SEQ ID NO: 2832187 - DNA, 25 bp, Homo sapien
ctgtcatgcaagctagagtgcaatg

SEQ ID NO: 2832188 - DNA, 25 bp, Homo sapien
tctgtcatgcaagctagagtgcaat

SEQ ID NO: 2832189 - DNA, 25 bp, Homo sapien
tcatttagggcatcaactattcgat

SEQ ID NO: 2832190 - DNA, 25 bp, Homo sapien
ctgaattcatttagggcatcaacta

SEQ ID NO: 2832191 - DNA, 25 bp, Homo sapien
tagggcatcaactattcgattatat

SEQ ID NO: 2832192 - DNA, 25 bp, Homo sapien
caactattcgattatatgccaaact

SEQ ID NO: 2832193 - DNA, 25 bp, Homo sapien
gactggcatcagctgatctccggct

SEQ ID NO: 2832194 - DNA, 25 bp, Homo sapien
ctgactggcatcagctgatctccgg

SEQ ID NO: 2832195 - DNA, 25 bp, Homo sapien
ctggcatcagctgatctccggctca

SEQ ID NO: 2832196 - DNA, 25 bp, Homo sapien
tggcatcagctgatctccggctcat

SEQ ID NO: 2832197 - DNA, 25 bp, Homo sapien
gttctattgcactctttaatttgtt

SEQ ID NO: 2832198 - DNA, 25 bp, Homo sapien
tctattgcactctttaatttgttca

SEQ ID NO: 2832199 - DNA, 25 bp, Homo sapien
ctattgcactctttaatttgttcat

SEQ ID NO: 2832200 - DNA, 25 bp, Homo sapien
ctgttctattgcactctttaatttg

SEQ ID NO: 2832201 - DNA, 25 bp, Homo sapien
taccccaattgcaatcttctttttc

SEQ ID NO: 2832202 - DNA, 25 bp, Homo sapien
ccaattgcaatcttctttttccgca

SEQ ID NO: 2832203 - DNA, 25 bp, Homo sapien
aatgaaaagattaccccaattgcaa

SEQ ID NO: 2832204 - DNA, 25 bp, Homo sapien
acaattcctgggttagggccacagc

SEQ ID NO: 2832205 - DNA, 25 bp, Homo sapien
gccaacgtcgctggtagctgctggc

SEQ ID NO: 2832206 - DNA, 25 bp, Homo sapien
tgcgtcgccaacgtcgctggtagct

SEQ ID NO: 2832207 - DNA, 25 bp, Homo sapien
ttgttgtttggctgcgtcgccaacg

SEQ ID NO: 2832208 - DNA, 25 bp, Homo sapien
tgtttggctgcgtcgccaacgtcgc

SEQ ID NO: 2832209 - DNA, 25 bp, Homo sapien
tggagtgatcagcaagctgctgaga

SEQ ID NO: 2832210 - DNA, 25 bp, Homo sapien
gtgatcagcaagctgctgagagatg

SEQ ID NO: 2832211 - DNA, 25 bp, Homo sapien
ggaaatggagtgatcagcaagctgc

SEQ ID NO: 2832212 - DNA, 25 bp, Homo sapien
aaatggagtgatcagcaagctgctg

SEQ ID NO: 2832213 - DNA, 25 bp, Homo sapien
cagaccgtgctatgccactgtctct

SEQ ID NO: 2832214 - DNA, 25 bp, Homo sapien
tctgtcctcattgagctctcttcca

SEQ ID NO: 2832215 - DNA, 25 bp, Homo sapien
agaccgtgctatgccactgtctctg

SEQ ID NO: 2832216 - DNA, 25 bp, Homo sapien
ctgtctctgtcctcattgagctctc

SEQ ID NO: 2832217 - DNA, 25 bp, Homo sapien
ctcctgatcaggcggagcggaccct

SEQ ID NO: 2832218 - DNA, 25 bp, Homo sapien
agaaagaggcgctcctgatcaggcg

SEQ ID NO: 2832219 - DNA, 25 bp, Homo sapien
gagcggaccctgctcagagaatgcc

SEQ ID NO: 2832220 - DNA, 25 bp, Homo sapien
tgcaaagaaagaggcgctcctgatc

SEQ ID NO: 2832221 - DNA, 25 bp, Homo sapien
tcccagctgttcaagagaagtggct

SEQ ID NO: 2832222 - DNA, 25 bp, Homo sapien
gcatacaacagggtgcaaaaccaga

SEQ ID NO: 2832223 - DNA, 25 bp, Homo sapien
aaatgaagctcatcagggaccagac

SEQ ID NO: 2832224 - DNA, 25 bp, Homo sapien
tcatcaagaaaaggtaactgcagtc

SEQ ID NO: 2832225 - DNA, 25 bp, Homo sapien
caatgaagtaatcaaacgagttaag

SEQ ID NO: 2832226 - DNA, 25 bp, Homo sapien
taggatgtcatacagttcaagttgg

SEQ ID NO: 2832227 - DNA, 25 bp, Homo sapien
tcccattcccttggctactacatag

SEQ ID NO: 2832228 - DNA, 25 bp, Homo sapien
tatgactagcccacagtaataggtg

SEQ ID NO: 2832229 - DNA, 25 bp, Homo sapien
caccagaagtatcgcaatacagcag

SEQ ID NO: 2832230 - DNA, 25 bp, Homo sapien
cagaagtatcgcaatacagcagcag

SEQ ID NO: 2832231 - DNA, 25 bp, Homo sapien
aagtatcgcaatacagcagcagttc

SEQ ID NO: 2832232 - DNA, 25 bp, Homo sapien
ttatgcaccagaagtatcgcaatac

SEQ ID NO: 2832233 - DNA, 25 bp, Homo sapien
taagggcttttcttatcactgacac

SEQ ID NO: 2832234 - DNA, 25 bp, Homo sapien
gctcatctgagttacaggtcacaaa

SEQ ID NO: 2832235 - DNA, 25 bp, Homo sapien
gaaggtgtaatagtcttcctcagct

SEQ ID NO: 2832236 - DNA, 25 bp, Homo sapien
tcctcagctgaaatagccaaaagaa

SEQ ID NO: 2832237 - DNA, 25 bp, Homo sapien
ctatatttccaagcagtccattaat

SEQ ID NO: 2832238 - DNA, 25 bp, Homo sapien
gcctttaatgtattgttgtcctgat

SEQ ID NO: 2832239 - DNA, 25 bp, Homo sapien
aatgtattgttgtcctgattgatga

SEQ ID NO: 2832240 - DNA, 25 bp, Homo sapien
ccaagcagtccattaataactgtgt

SEQ ID NO: 2832241 - DNA, 25 bp, Homo sapien
gaatgctttgatgctgcaacagcag

SEQ ID NO: 2832242 - DNA, 25 bp, Homo sapien
agctgagaaactacaacccattgtc

SEQ ID NO: 2832243 - DNA, 25 bp, Homo sapien
cagagctgagaaactacaacccatt

SEQ ID NO: 2832244 - DNA, 25 bp, Homo sapien
tgaatgctttgatgctgcaacagca

SEQ ID NO: 2832245 - DNA, 25 bp, Homo sapien
attgagactcccacaaatactgctg

SEQ ID NO: 2832246 - DNA, 25 bp, Homo sapien
tgctgccagtccgagcagtaaacac

SEQ ID NO: 2832247 - DNA, 25 bp, Homo sapien
cacaaatactgctgccagtccgagc

SEQ ID NO: 2832248 - DNA, 25 bp, Homo sapien
gcagtaaacactttgctgagcatga

SEQ ID NO: 2832249 - DNA, 25 bp, Homo sapien
gtggatcctttgtagctcattgcta

SEQ ID NO: 2832250 - DNA, 25 bp, Homo sapien
tggatcctttgtagctcattgctac

SEQ ID NO: 2832251 - DNA, 25 bp, Homo sapien
ttttaaggtggatcctttgtagctc

SEQ ID NO: 2832252 - DNA, 25 bp, Homo sapien
ttggcatcagaagagcaccgagaac

SEQ ID NO: 2832253 - DNA, 25 bp, Homo sapien
tggcatcagaagagcaccgagaacc

SEQ ID NO: 2832254 - DNA, 25 bp, Homo sapien
attggcatcagaagagcaccgagaa

SEQ ID NO: 2832255 - DNA, 25 bp, Homo sapien
ctggtacttaagacactggtctttt

SEQ ID NO: 2832256 - DNA, 25 bp, Homo sapien
cactggtcttttatatcagaagatg

SEQ ID NO: 2832257 - DNA, 25 bp, Homo sapien
ttcccaaagactttaacttgagcat

SEQ ID NO: 2832258 - DNA, 25 bp, Homo sapien
gtcacagaactatctaaagaggaag

SEQ ID NO: 2832259 - DNA, 25 bp, Homo sapien
tccacatggctaattgtctcaacac

SEQ ID NO: 2832260 - DNA, 25 bp, Homo sapien
gtgtcaataacacactgtttggcca

SEQ ID NO: 2832261 - DNA, 25 bp, Homo sapien
ctcaacaccatttaagatgatgcct

SEQ ID NO: 2832262 - DNA, 25 bp, Homo sapien
gatgatgccttaatcatataccaaa

SEQ ID NO: 2832263 - DNA, 25 bp, Homo sapien
tcttaacactggagtcaaacaaaac

SEQ ID NO: 2832264 - DNA, 25 bp, Homo sapien
tcagtcgaatctggcttggatcaaa

SEQ ID NO: 2832265 - DNA, 25 bp, Homo sapien
caaaacatttctccctcgtctttca

SEQ ID NO: 2832266 - DNA, 25 bp, Homo sapien
cacagtcttgatatacaatcagtcg

SEQ ID NO: 2832267 - DNA, 25 bp, Homo sapien
ttcattcactgacttaaaagcgttc

SEQ ID NO: 2832268 - DNA, 25 bp, Homo sapien
agcataatgccaggtactgggaata

SEQ ID NO: 2832269 - DNA, 25 bp, Homo sapien
taatgccaggtactgggaatatttc

SEQ ID NO: 2832270 - DNA, 25 bp, Homo sapien
cattcactgacttaaaagcgttcat

SEQ ID NO: 2832271 - DNA, 25 bp, Homo sapien
cagctagctagtaaatgtgtcaaag

SEQ ID NO: 2832272 - DNA, 25 bp, Homo sapien
gctgggtttagattccaggcagtct

SEQ ID NO: 2832273 - DNA, 25 bp, Homo sapien
taaatcattgtgtatggccttggcc

SEQ ID NO: 2832274 - DNA, 25 bp, Homo sapien
caagtttcagcttcaagtgatgggc

SEQ ID NO: 2832275 - DNA, 25 bp, Homo sapien
atagaggggcttatattttgggtca

SEQ ID NO: 2832276 - DNA, 25 bp, Homo sapien
tagaggggcttatattttgggtcat

SEQ ID NO: 2832277 - DNA, 25 bp, Homo sapien
gaggggcttatattttgggtcatat

SEQ ID NO: 2832278 - DNA, 25 bp, Homo sapien
agaggggcttatattttgggtcata

SEQ ID NO: 2832279 - DNA, 25 bp, Homo sapien
tcttcactggtatttgcttatgctc

SEQ ID NO: 2832280 - DNA, 25 bp, Homo sapien
gctcagtactcaagtgtttagaatg

SEQ ID NO: 2832281 - DNA, 25 bp, Homo sapien
tgatctctcattttaccagaaccta

SEQ ID NO: 2832282 - DNA, 25 bp, Homo sapien
tctcattttaccagaacctaagtct

SEQ ID NO: 2832283 - DNA, 25 bp, Homo sapien
atgagttgagaaatccagcaataaa

SEQ ID NO: 2832284 - DNA, 25 bp, Homo sapien
agttgagaaatccagcaataaaagg

SEQ ID NO: 2832285 - DNA, 25 bp, Homo sapien
taggatgagttgagaaatccagcaa

SEQ ID NO: 2832286 - DNA, 25 bp, Homo sapien
aaaaggcaaatgtaagcatgctttc

SEQ ID NO: 2832287 - DNA, 25 bp, Homo sapien
tctaagttatttagccaggaagcag

SEQ ID NO: 2832288 - DNA, 25 bp, Homo sapien
gttctctagagaggtggaaacaaca

SEQ ID NO: 2832289 - DNA, 25 bp, Homo sapien
ggagacccgagatgcaagcagcatg

SEQ ID NO: 2832290 - DNA, 25 bp, Homo sapien
ggaagcagtcaagcccaaatgtcat

SEQ ID NO: 2832291 - DNA, 25 bp, Homo sapien
gtgaaggttcccatgtaaacatacc

SEQ ID NO: 2832292 - DNA, 25 bp, Homo sapien
ccaaggactaacatactgtacagta

SEQ ID NO: 2832293 - DNA, 25 bp, Homo sapien
taaataaattcaggtccatgtcagt

SEQ ID NO: 2832294 - DNA, 25 bp, Homo sapien
taaacataccaagaaagaagagcaa

SEQ ID NO: 2832295 - DNA, 25 bp, Homo sapien
tgtatgtataccatcagtgtagagg

SEQ ID NO: 2832296 - DNA, 25 bp, Homo sapien
aagtaagactacctctaagattggt

SEQ ID NO: 2832297 - DNA, 25 bp, Homo sapien
gattgtctgtacctctagtctgata

SEQ ID NO: 2832298 - DNA, 25 bp, Homo sapien
caagatctccaaagtgattatcacg

SEQ ID NO: 2832299 - DNA, 25 bp, Homo sapien
acacaaagctgattgtaccatatca

SEQ ID NO: 2832300 - DNA, 25 bp, Homo sapien
taccagttgcctagtatacacaaaa

SEQ ID NO: 2832301 - DNA, 25 bp, Homo sapien
tcaactgagataacttcctaaaaca

SEQ ID NO: 2832302 - DNA, 25 bp, Homo sapien
taccatatcattgtaagttaccagt

SEQ ID NO: 2832303 - DNA, 25 bp, Homo sapien
gactgaatcaaatactaaaaaaaca

SEQ ID NO: 2832304 - DNA, 25 bp, Homo sapien
tactgatccatcttagcaccactag

SEQ ID NO: 2832305 - DNA, 25 bp, Homo sapien
gcaccactagaaatgtgacaacctg

SEQ ID NO: 2832306 - DNA, 25 bp, Homo sapien
taatggcaggatcaggttgacaccc

SEQ ID NO: 2832307 - DNA, 25 bp, Homo sapien
ggtgaatggttgataggcaacccta

SEQ ID NO: 2832308 - DNA, 25 bp, Homo sapien
gcaacagtatttacactagccaaga

SEQ ID NO: 2832309 - DNA, 25 bp, Homo sapien
caagaggctgggacgtgtataatcc

SEQ ID NO: 2832310 - DNA, 25 bp, Homo sapien
gcacactcatatttacggcaacagt

SEQ ID NO: 2832311 - DNA, 25 bp, Homo sapien
ttatctgcggcaatatggatgagcc

SEQ ID NO: 2832312 - DNA, 25 bp, Homo sapien
tgagagattccataatgtactgcag

SEQ ID NO: 2832313 - DNA, 25 bp, Homo sapien
gtactgcagttattgggcttacaga

SEQ ID NO: 2832314 - DNA, 25 bp, Homo sapien
gctctatctcgtaagattgctgtga

SEQ ID NO: 2832315 - DNA, 25 bp, Homo sapien
tgagagccttgtaaacctacgtacc

SEQ ID NO: 2832316 - DNA, 25 bp, Homo sapien
gataacattaaggtcgctcggtccg

SEQ ID NO: 2832317 - DNA, 25 bp, Homo sapien
gaaaagttactctgccagcaacagg

SEQ ID NO: 2832318 - DNA, 25 bp, Homo sapien
aactcagaagcttggccaaacgtgc

SEQ ID NO: 2832319 - DNA, 25 bp, Homo sapien
caatttggtcttccttcggcagtaa

SEQ ID NO: 2832320 - DNA, 25 bp, Homo sapien
tgaacccgcaatctgggtcccgggc

SEQ ID NO: 2832321 - DNA, 25 bp, Homo sapien
gcttctggaacagcgtaggggccat

SEQ ID NO: 2832322 - DNA, 25 bp, Homo sapien
ctgaacccgcaatctgggtcccggg

SEQ ID NO: 2832323 - DNA, 25 bp, Homo sapien
gaagagcttctggaacagcgtaggg

SEQ ID NO: 2832324 - DNA, 25 bp, Homo sapien
ccccatgggcgcctcagtcatatga

SEQ ID NO: 2832325 - DNA, 25 bp, Homo sapien
ttgctaggcccctgctcctacagcc

SEQ ID NO: 2832326 - DNA, 25 bp, Homo sapien
ggtcgctccgctgggcgcttgctag

SEQ ID NO: 2832327 - DNA, 25 bp, Homo sapien
tgggcgcctcagtcatatgacagaa

SEQ ID NO: 2832328 - DNA, 25 bp, Homo sapien
gaatttcaacatagagatatatcac

SEQ ID NO: 2832329 - DNA, 25 bp, Homo sapien
atgacaagaacctcagtagaatttc

SEQ ID NO: 2832330 - DNA, 25 bp, Homo sapien
caagaacctcagtagaatttcaaca

SEQ ID NO: 2832331 - DNA, 25 bp, Homo sapien
gacaagaacctcagtagaatttcaa

SEQ ID NO: 2832332 - DNA, 25 bp, Homo sapien
ttatagactttgacttcacactcct

SEQ ID NO: 2832333 - DNA, 25 bp, Homo sapien
caaagtggtgaaaattcagccacag

SEQ ID NO: 2832334 - DNA, 25 bp, Homo sapien
aagtggtgaaaattcagccacagct

SEQ ID NO: 2832335 - DNA, 25 bp, Homo sapien
attctgctttatagactttgacttc

SEQ ID NO: 2832336 - DNA, 25 bp, Homo sapien
acctcctctatcacatctctttggt

SEQ ID NO: 2832337 - DNA, 25 bp, Homo sapien
ccacaccacctcctctatcacatct

SEQ ID NO: 2832338 - DNA, 25 bp, Homo sapien
cctcctctatcacatctctttggtt

SEQ ID NO: 2832339 - DNA, 25 bp, Homo sapien
accacctcctctatcacatctcttt

SEQ ID NO: 2832340 - DNA, 25 bp, Homo sapien
tagttagcttggtgctttgctattt

SEQ ID NO: 2832341 - DNA, 25 bp, Homo sapien
ttagcttggtgctttgctattttta

SEQ ID NO: 2832342 - DNA, 25 bp, Homo sapien
ctagttagcttggtgctttgctatt

SEQ ID NO: 2832343 - DNA, 25 bp, Homo sapien
agttagcttggtgctttgctatttt

SEQ ID NO: 2832344 - DNA, 25 bp, Homo sapien
tcaattatgtgctttctccttgaaa

SEQ ID NO: 2832345 - DNA, 25 bp, Homo sapien
atgtgctttctccttgaaaacttca

SEQ ID NO: 2832346 - DNA, 25 bp, Homo sapien
gctttctccttgaaaacttcataac

SEQ ID NO: 2832347 - DNA, 25 bp, Homo sapien
gtgctttctccttgaaaacttcata

SEQ ID NO: 2832348 - DNA, 25 bp, Homo sapien
ttttcacttgtctagttcctggtga

SEQ ID NO: 2832349 - DNA, 25 bp, Homo sapien
ctggtgatgttctaataatacaaca

SEQ ID NO: 2832350 - DNA, 25 bp, Homo sapien
tcctggtgatgttctaataatacaa

SEQ ID NO: 2832351 - DNA, 25 bp, Homo sapien
ttcacttgtctagttcctggtgatg

SEQ ID NO: 2832352 - DNA, 25 bp, Homo sapien
gatttgctcttgcagtacacttcaa

SEQ ID NO: 2832353 - DNA, 25 bp, Homo sapien
acactgctttcataaacattcaaaa

SEQ ID NO: 2832354 - DNA, 25 bp, Homo sapien
ttactggttcactgtttagtgtttc

SEQ ID NO: 2832355 - DNA, 25 bp, Homo sapien
tagtgtttctacttaactcaagaga

SEQ ID NO: 2832356 - DNA, 25 bp, Homo sapien
cctggcctaaatggtgaatttcaaa

SEQ ID NO: 2832357 - DNA, 25 bp, Homo sapien
cgcctggcctaaatggtgaatttca

SEQ ID NO: 2832358 - DNA, 25 bp, Homo sapien
ctgcgcctggcctaaatggtgaatt

SEQ ID NO: 2832359 - DNA, 25 bp, Homo sapien
tgcgcctggcctaaatggtgaattt

SEQ ID NO: 2832360 - DNA, 25 bp, Homo sapien
tttttgtgattgtaactgtattagt

SEQ ID NO: 2832361 - DNA, 25 bp, Homo sapien
aagaaaacaaatgcagaaacccctg

SEQ ID NO: 2832362 - DNA, 25 bp, Homo sapien
gaaaacaaatgcagaaacccctgat

SEQ ID NO: 2832363 - DNA, 25 bp, Homo sapien
tttttttgtgattgtaactgtatta

SEQ ID NO: 2832364 - DNA, 25 bp, Homo sapien
cactgcaagttccatctcccgagtt

SEQ ID NO: 2832365 - DNA, 25 bp, Homo sapien
ctgcaagttccatctcccgagttca

SEQ ID NO: 2832366 - DNA, 25 bp, Homo sapien
tcactgcaagttccatctcccgagt

SEQ ID NO: 2832367 - DNA, 25 bp, Homo sapien
gcaagttccatctcccgagttcacg

SEQ ID NO: 2832368 - DNA, 25 bp, Homo sapien
ttaggccttcaatccatctcgagtt

SEQ ID NO: 2832369 - DNA, 25 bp, Homo sapien
aggccttcaatccatctcgagttga

SEQ ID NO: 2832370 - DNA, 25 bp, Homo sapien
tcattgcaatcacttttggcatctt

SEQ ID NO: 2832371 - DNA, 25 bp, Homo sapien
tgcatagtttgggaagattgtctcc

SEQ ID NO: 2832372 - DNA, 25 bp, Homo sapien
tacaaagtatctaatgtaacagtaa

SEQ ID NO: 2832373 - DNA, 25 bp, Homo sapien
catatacaaagtatctaatgtaaca

SEQ ID NO: 2832374 - DNA, 25 bp, Homo sapien
ttatagcacctcatatacaaagtat

SEQ ID NO: 2832375 - DNA, 25 bp, Homo sapien
tatacaaagtatctaatgtaacagt

SEQ ID NO: 2832376 - DNA, 25 bp, Homo sapien
gaattaacataattgctgacatttg

SEQ ID NO: 2832377 - DNA, 25 bp, Homo sapien
cataattgctgacatttggaaatag

SEQ ID NO: 2832378 - DNA, 25 bp, Homo sapien
taacataattgctgacatttggaaa

SEQ ID NO: 2832379 - DNA, 25 bp, Homo sapien
catttgaattaacataattgctgac

SEQ ID NO: 2832380 - DNA, 25 bp, Homo sapien
taattactgacatttggacataact

SEQ ID NO: 2832381 - DNA, 25 bp, Homo sapien
gaataaacgtaattactgacatttg

SEQ ID NO: 2832382 - DNA, 25 bp, Homo sapien
taaacgtaattactgacatttggac

SEQ ID NO: 2832383 - DNA, 25 bp, Homo sapien
ttcatctgaataaacgtaattactg

SEQ ID NO: 2832384 - DNA, 25 bp, Homo sapien
caaaaccagctgtctctgaagatgg

SEQ ID NO: 2832385 - DNA, 25 bp, Homo sapien
gaagatggagtacttgttaaaaggc

SEQ ID NO: 2832386 - DNA, 25 bp, Homo sapien
acaaaaccagctgtctctgaagatg

SEQ ID NO: 2832387 - DNA, 25 bp, Homo sapien
atggagtacttgttaaaaggcctct

SEQ ID NO: 2832388 - DNA, 25 bp, Homo sapien
agctgttccagtgcaaggagtgtag

SEQ ID NO: 2832389 - DNA, 25 bp, Homo sapien
tccagtgcaaggagtgtagttagct

SEQ ID NO: 2832390 - DNA, 25 bp, Homo sapien
aggagtgtagttagctgacagcccc

SEQ ID NO: 2832391 - DNA, 25 bp, Homo sapien
agtgcaaggagtgtagttagctgac

SEQ ID NO: 2832392 - DNA, 25 bp, Homo sapien
caatgcaggttttggggactgaggc

SEQ ID NO: 2832393 - DNA, 25 bp, Homo sapien
ctaaactgttctacctgcattgctt

SEQ ID NO: 2832394 - DNA, 25 bp, Homo sapien
gaactaaactgttctacctgcattg

SEQ ID NO: 2832395 - DNA, 25 bp, Homo sapien
aatgcaggttttggggactgaggca

SEQ ID NO: 2832396 - DNA, 25 bp, Homo sapien
aaaagcagacctatagtgggaagac

SEQ ID NO: 2832397 - DNA, 25 bp, Homo sapien
tatagtgggaagacggaaccttgac

SEQ ID NO: 2832398 - DNA, 25 bp, Homo sapien
gaaccttgacttttagataatgaga

SEQ ID NO: 2832399 - DNA, 25 bp, Homo sapien
gaaaatttgtaactctatgttcaga

SEQ ID NO: 2832400 - DNA, 25 bp, Homo sapien
tttgctgtcatgcactcgcccaagg

SEQ ID NO: 2832401 - DNA, 25 bp, Homo sapien
tgtccatgagatatgtccagtccga

SEQ ID NO: 2832402 - DNA, 25 bp, Homo sapien
aaggctcgccatactcttctaggtg

SEQ ID NO: 2832403 - DNA, 25 bp, Homo sapien
tgcctaaccagggtgcttcccaggg

SEQ ID NO: 2832404 - DNA, 25 bp, Homo sapien
tttctgtagtagaatcatttgagtc

SEQ ID NO: 2832405 - DNA, 25 bp, Homo sapien
tttctcggcatttgattgtctggga

SEQ ID NO: 2832406 - DNA, 25 bp, Homo sapien
tcatcatttcaccaccagttgtagg

SEQ ID NO: 2832407 - DNA, 25 bp, Homo sapien
tgtaggactcccttgagtttagtag

SEQ ID NO: 2832408 - DNA, 25 bp, Homo sapien
cctggcattggtgttagtggatcca

SEQ ID NO: 2832409 - DNA, 25 bp, Homo sapien
catatgtgttggtaggctagagcac

SEQ ID NO: 2832410 - DNA, 25 bp, Homo sapien
gactgggatgccaagtagactggtc

SEQ ID NO: 2832411 - DNA, 25 bp, Homo sapien
tgcaggtgggtgaattctagagtcc

SEQ ID NO: 2832412 - DNA, 25 bp, Homo sapien
ttatgtagttattctgcttcaatac

SEQ ID NO: 2832413 - DNA, 25 bp, Homo sapien
tgaaatgtattatgatttatgtagt

SEQ ID NO: 2832414 - DNA, 25 bp, Homo sapien
aagtatattctttattaatgaaatg

SEQ ID NO: 2832415 - DNA, 25 bp, Homo sapien
atgatttatgtagttattctgcttc

SEQ ID NO: 2832416 - DNA, 25 bp, Homo sapien
ggttgaagggcaagttttctcagca

SEQ ID NO: 2832417 - DNA, 25 bp, Homo sapien
gttgaagggcaagttttctcagcaa

SEQ ID NO: 2832418 - DNA, 25 bp, Homo sapien
agttttctcagcaagtaaaatctca

SEQ ID NO: 2832419 - DNA, 25 bp, Homo sapien
gggttgaagggcaagttttctcagc

SEQ ID NO: 2832420 - DNA, 25 bp, Homo sapien
cattttgatctgctactgtcatcac

SEQ ID NO: 2832421 - DNA, 25 bp, Homo sapien
attttgatctgctactgtcatcact

SEQ ID NO: 2832422 - DNA, 25 bp, Homo sapien
catttctgatagtcttctgaagagg

SEQ ID NO: 2832423 - DNA, 25 bp, Homo sapien
atttctgatagtcttctgaagaggt

SEQ ID NO: 2832424 - DNA, 25 bp, Homo sapien
tttctgatagtcttctgaagaggta

SEQ ID NO: 2832425 - DNA, 25 bp, Homo sapien
aagagtagaattcttccactgcatg

SEQ ID NO: 2832426 - DNA, 25 bp, Homo sapien
ctggtatccagaagagtagaattct

SEQ ID NO: 2832427 - DNA, 25 bp, Homo sapien
tgtggtgccttctctatcgctactg

SEQ ID NO: 2832428 - DNA, 25 bp, Homo sapien
ggtgccttctctatcgctactgctt

SEQ ID NO: 2832429 - DNA, 25 bp, Homo sapien
tatattctgccactgtcaggtagaa

SEQ ID NO: 2832430 - DNA, 25 bp, Homo sapien
gaatgtcctatctgtgcatgagaga

SEQ ID NO: 2832431 - DNA, 25 bp, Homo sapien
tgtctatagcgctgttcaagtctgc

SEQ ID NO: 2832432 - DNA, 25 bp, Homo sapien
tcaagtctgctgtttgcttacctgt

SEQ ID NO: 2832433 - DNA, 25 bp, Homo sapien
aagagaactggccataccatggtgc

SEQ ID NO: 2832434 - DNA, 25 bp, Homo sapien
ggccataccatggtgcaaacttaat

SEQ ID NO: 2832435 - DNA, 25 bp, Homo sapien
agagtctgtgactgaatagctcaga

SEQ ID NO: 2832436 - DNA, 25 bp, Homo sapien
tctgtgactgaatagctcagaagag

SEQ ID NO: 2832437 - DNA, 25 bp, Homo sapien
acagaagtatatagagtgccacaga

SEQ ID NO: 2832438 - DNA, 25 bp, Homo sapien
acaattacactgtggttttaagtct

SEQ ID NO: 2832439 - DNA, 25 bp, Homo sapien
agagttaaagacagacgaaaacaat

SEQ ID NO: 2832440 - DNA, 25 bp, Homo sapien
ctaattctcaatggttttagagcca

SEQ ID NO: 2832441 - DNA, 25 bp, Homo sapien
ctgatactagttcactatttgatga

SEQ ID NO: 2832442 - DNA, 25 bp, Homo sapien
cctggaggtcatcagtaactgattc

SEQ ID NO: 2832443 - DNA, 25 bp, Homo sapien
tcaacctggaggtcatcagtaactg

SEQ ID NO: 2832444 - DNA, 25 bp, Homo sapien
aacctggaggtcatcagtaactgat

SEQ ID NO: 2832445 - DNA, 25 bp, Homo sapien
tcatcctgggtgtcttcactagacc

SEQ ID NO: 2832446 - DNA, 25 bp, Homo sapien
tttctctcctgtaactcctaagcga

SEQ ID NO: 2832447 - DNA, 25 bp, Homo sapien
tcactagacctattttcttgcaggc

SEQ ID NO: 2832448 - DNA, 25 bp, Homo sapien
ctctcctgtaactcctaagcgaggg

SEQ ID NO: 2832449 - DNA, 25 bp, Homo sapien
gctttctctgcaatcttcgacaagc

SEQ ID NO: 2832450 - DNA, 25 bp, Homo sapien
caagccgtgcactttgccttttctc

SEQ ID NO: 2832451 - DNA, 25 bp, Homo sapien
ttcgacaagccgtgcactttgcctt

SEQ ID NO: 2832452 - DNA, 25 bp, Homo sapien
gcaatcttcgacaagccgtgcactt

SEQ ID NO: 2832453 - DNA, 25 bp, Homo sapien
ctcggccttcgctggagagcctagg

SEQ ID NO: 2832454 - DNA, 25 bp, Homo sapien
tttgcgggtatagacccgtagcggc

SEQ ID NO: 2832455 - DNA, 25 bp, Homo sapien
gggtatagacccgtagcggccacat

SEQ ID NO: 2832456 - DNA, 25 bp, Homo sapien
cttcgctggagagcctaggtctggc

SEQ ID NO: 2832457 - DNA, 25 bp, Homo sapien
ttacctcgggttttgagtcattgaa

SEQ ID NO: 2832458 - DNA, 25 bp, Homo sapien
tttacctcgggttttgagtcattga

SEQ ID NO: 2832459 - DNA, 25 bp, Homo sapien
atctgtattaagcactgtggtaggt

SEQ ID NO: 2832460 - DNA, 25 bp, Homo sapien
tctgtattaagcactgtggtaggtc

SEQ ID NO: 2832461 - DNA, 25 bp, Homo sapien
tactgaacaccttaatctgtattaa

SEQ ID NO: 2832462 - DNA, 25 bp, Homo sapien
tgaacaccttaatctgtattaagca

SEQ ID NO: 2832463 - DNA, 25 bp, Homo sapien
catgcaagatatttagggtacacta

SEQ ID NO: 2832464 - DNA, 25 bp, Homo sapien
tggtaccaagtttagaaatgctcac

SEQ ID NO: 2832465 - DNA, 25 bp, Homo sapien
gaagcaagaaggatttttccactga

SEQ ID NO: 2832466 - DNA, 25 bp, Homo sapien
tacacactatacctgaccagagtcc

SEQ ID NO: 2832467 - DNA, 25 bp, Homo sapien
tggaagactagaagaccccagcaag

SEQ ID NO: 2832468 - DNA, 25 bp, Homo sapien
cagttactgaatgaggtagtccaca

SEQ ID NO: 2832469 - DNA, 25 bp, Homo sapien
ggtttccaggcatagcatgggcaca

SEQ ID NO: 2832470 - DNA, 25 bp, Homo sapien
tcagtaggcccatgtgattatgtgg

SEQ ID NO: 2832471 - DNA, 25 bp, Homo sapien
gcagtccaccacaatatcattttta

SEQ ID NO: 2832472 - DNA, 25 bp, Homo sapien
gctagacagttcattacactgagaa

SEQ ID NO: 2832473 - DNA, 25 bp, Homo sapien
tgttaaagacctcttgggacaggaa

SEQ ID NO: 2832474 - DNA, 25 bp, Homo sapien
cattttcagctgtgtcattttgact

SEQ ID NO: 2832475 - DNA, 25 bp, Homo sapien
tctctcagctcaggtctcttagctt

SEQ ID NO: 2832476 - DNA, 25 bp, Homo sapien
tcagaatggatgtgaatggctttaa

SEQ ID NO: 2832477 - DNA, 25 bp, Homo sapien
cacatggagattgagtaaagctctt

SEQ ID NO: 2832478 - DNA, 25 bp, Homo sapien
cttttagtgttggtgtcagcaagcc

SEQ ID NO: 2832479 - DNA, 25 bp, Homo sapien
ttaataatggttggcctagttctag

SEQ ID NO: 2832480 - DNA, 25 bp, Homo sapien
ggcaaattggttaggtaagtgttca

SEQ ID NO: 2832481 - DNA, 25 bp, Homo sapien
gttcacattgtattgcctatgcaaa

SEQ ID NO: 2832482 - DNA, 25 bp, Homo sapien
taaatcatggttaagtatgctcaaa

SEQ ID NO: 2832483 - DNA, 25 bp, Homo sapien
tcaaaagaatggagtccactttctt

SEQ ID NO: 2832484 - DNA, 25 bp, Homo sapien
ttcctaacctcaccatatcttccaa

SEQ ID NO: 2832485 - DNA, 25 bp, Homo sapien
tttcctaacctcaccatatcttcca

SEQ ID NO: 2832486 - DNA, 25 bp, Homo sapien
ttttcctaacctcaccatatcttcc

SEQ ID NO: 2832487 - DNA, 25 bp, Homo sapien
tgcagagatctgcatatgttccttc

SEQ ID NO: 2832488 - DNA, 25 bp, Homo sapien
ccaggagggcataacttcagggtca

SEQ ID NO: 2832489 - DNA, 25 bp, Homo sapien
ttcagggtcaggcacaacaatgcct

SEQ ID NO: 2832490 - DNA, 25 bp, Homo sapien
gggtcaggcacaacaatgcctacca

SEQ ID NO: 2832491 - DNA, 25 bp, Homo sapien
tcttctcgggtgcaacatattctcc

SEQ ID NO: 2832492 - DNA, 25 bp, Homo sapien
tgtccccatggacatagatttgcgc

SEQ ID NO: 2832493 - DNA, 25 bp, Homo sapien
gccacaggttggctccggatgtaga

SEQ ID NO: 2832494 - DNA, 25 bp, Homo sapien
ctccctgagcaagtttaaatatatg

SEQ ID NO: 2832495 - DNA, 25 bp, Homo sapien
tggagctccgtggttccaaacatac

SEQ ID NO: 2832496 - DNA, 25 bp, Homo sapien
ggagctccgtggttccaaacataca

SEQ ID NO: 2832497 - DNA, 25 bp, Homo sapien
tttggagctccgtggttccaaacat

SEQ ID NO: 2832498 - DNA, 25 bp, Homo sapien
tgtttggagctccgtggttccaaac

SEQ ID NO: 2832499 - DNA, 25 bp, Homo sapien
tctggatctttcaagtagcctttga

SEQ ID NO: 2832500 - DNA, 25 bp, Homo sapien
cagggcctccttcgtcctgtctgga

SEQ ID NO: 2832501 - DNA, 25 bp, Homo sapien
gccattttccgatgtctccagtgtg

SEQ ID NO: 2832502 - DNA, 25 bp, Homo sapien
ggcagccattttccgatgtctccag

SEQ ID NO: 2832503 - DNA, 25 bp, Homo sapien
cagttcctcaacatcaacgagcttg

SEQ ID NO: 2832504 - DNA, 25 bp, Homo sapien
cagggaagtggcgcccctacgtgcc

SEQ ID NO: 2832505 - DNA, 25 bp, Homo sapien
tttgcaggcccagtagttcagttcc

SEQ ID NO: 2832506 - DNA, 25 bp, Homo sapien
aacgagcttgatatgattgcaggga

SEQ ID NO: 2832507 - DNA, 25 bp, Homo sapien
tcagtttggccataaccttcataaa

SEQ ID NO: 2832508 - DNA, 25 bp, Homo sapien
caggagtggtgaaggtacatccagc

SEQ ID NO: 2832509 - DNA, 25 bp, Homo sapien
tgcactcagtttggccataaccttc

SEQ ID NO: 2832510 - DNA, 25 bp, Homo sapien
ctgaggtccagtcgccaggagtggt

SEQ ID NO: 2832511 - DNA, 25 bp, Homo sapien
aatcccagaactgttggtgatgctg

SEQ ID NO: 2832512 - DNA, 25 bp, Homo sapien
tagagctgcccggagaaatcccaga

SEQ ID NO: 2832513 - DNA, 25 bp, Homo sapien
aatcatccgcacacacccaccaaga

SEQ ID NO: 2832514 - DNA, 25 bp, Homo sapien
gagctgcccggagaaatcccagaac

SEQ ID NO: 2832515 - DNA, 25 bp, Homo sapien
tcctgcaaggtcacccgttggatac

SEQ ID NO: 2832516 - DNA, 25 bp, Homo sapien
gagttactatttcacatgattacag

SEQ ID NO: 2832517 - DNA, 25 bp, Homo sapien
cccgttggatacttaggtgtcactc

SEQ ID NO: 2832518 - DNA, 25 bp, Homo sapien
ggtgtcactctataatcacttgttc

SEQ ID NO: 2832519 - DNA, 25 bp, Homo sapien
cgctttaatggtgtgtttgcctggc

SEQ ID NO: 2832520 - DNA, 25 bp, Homo sapien
tgatgattccactccggacctcggc

SEQ ID NO: 2832521 - DNA, 25 bp, Homo sapien
gagccagcgctttaatggtgtgttt

SEQ ID NO: 2832522 - DNA, 25 bp, Homo sapien
ggcttgcttacgctttgctgcaaac

SEQ ID NO: 2832523 - DNA, 25 bp, Homo sapien
aagatggtggggcatagagccttca

SEQ ID NO: 2832524 - DNA, 25 bp, Homo sapien
catctgagagaaggcggatatctcc

SEQ ID NO: 2832525 - DNA, 25 bp, Homo sapien
ttcagcagtcgtgggaccacaggga

SEQ ID NO: 2832526 - DNA, 25 bp, Homo sapien
gcatagagccttcatgtcatctgag

SEQ ID NO: 2832527 - DNA, 25 bp, Homo sapien
agccaacacgccctccgtggcaata

SEQ ID NO: 2832528 - DNA, 25 bp, Homo sapien
gccctccgtggcaatagacgacaga

SEQ ID NO: 2832529 - DNA, 25 bp, Homo sapien
acacgccctccgtggcaatagacga

SEQ ID NO: 2832530 - DNA, 25 bp, Homo sapien
ccaacacgccctccgtggcaataga

SEQ ID NO: 2832531 - DNA, 25 bp, Homo sapien
tcaggcctttgagatgtactacagc

SEQ ID NO: 2832532 - DNA, 25 bp, Homo sapien
tactggcgatagtccaaagctgtcc

SEQ ID NO: 2832533 - DNA, 25 bp, Homo sapien
ccttagggtggtcactactggcgat

SEQ ID NO: 2832534 - DNA, 25 bp, Homo sapien
ccccatgagtactggagatgctgct

SEQ ID NO: 2832535 - DNA, 25 bp, Homo sapien
tgcagcctgaagagccatgccagtt

SEQ ID NO: 2832536 - DNA, 25 bp, Homo sapien
gtgacaagtgacacccgctagggtt

SEQ ID NO: 2832537 - DNA, 25 bp, Homo sapien
gtacttccacaaggcctgtctcagg

SEQ ID NO: 2832538 - DNA, 25 bp, Homo sapien
taaacggagctgtactgcacagagc

SEQ ID NO: 2832539 - DNA, 25 bp, Homo sapien
tgcaccattcgctcaaacatgtgtg

SEQ ID NO: 2832540 - DNA, 25 bp, Homo sapien
aacatgtgtgctaaaggcaaatagg

SEQ ID NO: 2832541 - DNA, 25 bp, Homo sapien
gcaaataggaaatgtgcacatccgc

SEQ ID NO: 2832542 - DNA, 25 bp, Homo sapien
catccgcacaagtgggagcccactg

SEQ ID NO: 2832543 - DNA, 25 bp, Homo sapien
ggcaaggcccggtcagtcaggtggg

SEQ ID NO: 2832544 - DNA, 25 bp, Homo sapien
ccaggcaaggcccggtcagtcaggt

SEQ ID NO: 2832545 - DNA, 25 bp, Homo sapien
cccaggcaaggcccggtcagtcagg

SEQ ID NO: 2832546 - DNA, 25 bp, Homo sapien
tcaaacatgtgagccagaggcagga

SEQ ID NO: 2832547 - DNA, 25 bp, Homo sapien
cgtcctgtctcggaaagatcacttt

SEQ ID NO: 2832548 - DNA, 25 bp, Homo sapien
actctctcaaacatgtgagccagag

SEQ ID NO: 2832549 - DNA, 25 bp, Homo sapien
ggaaggagatgagcacatcgtcctg

SEQ ID NO: 2832550 - DNA, 25 bp, Homo sapien
tgcaggcgacgggcatgggagacag

SEQ ID NO: 2832551 - DNA, 25 bp, Homo sapien
gacaggaagacgacaagagaatcat

SEQ ID NO: 2832552 - DNA, 25 bp, Homo sapien
ttaggtcgcagcgtcagtgggtcta

SEQ ID NO: 2832553 - DNA, 25 bp, Homo sapien
cataggaagcggagtgttaggtcgc

SEQ ID NO: 2832554 - DNA, 25 bp, Homo sapien
agtcagtcggctctagcccggctct

SEQ ID NO: 2832555 - DNA, 25 bp, Homo sapien
tctcacagatgggactgaccctagg

SEQ ID NO: 2832556 - DNA, 25 bp, Homo sapien
cagcactttctagtccttgcagaga

SEQ ID NO: 2832557 - DNA, 25 bp, Homo sapien
gactcctaagtctatgcaactgtgg

SEQ ID NO: 2832558 - DNA, 25 bp, Homo sapien
tcagaaggtcttggctagtcagcac

SEQ ID NO: 2832559 - DNA, 25 bp, Homo sapien
tttgggccagcttgggcaaaccttg

SEQ ID NO: 2832560 - DNA, 25 bp, Homo sapien
ccacccctttgcagaggccttcact

SEQ ID NO: 2832561 - DNA, 25 bp, Homo sapien
ctcacagttttctactaagtgtttg

SEQ ID NO: 2832562 - DNA, 25 bp, Homo sapien
ctcagccaccaactgtctctcacag

SEQ ID NO: 2832563 - DNA, 25 bp, Homo sapien
aagtacagccttataaattagcagt

SEQ ID NO: 2832564 - DNA, 25 bp, Homo sapien
aaattagcagttgccgttgtttctc

SEQ ID NO: 2832565 - DNA, 25 bp, Homo sapien
catgctttggtcaggccaagacatc

SEQ ID NO: 2832566 - DNA, 25 bp, Homo sapien
aagtcctcctttgttagccagttat

SEQ ID NO: 2832567 - DNA, 25 bp, Homo sapien
tgggatcttagtactcccagaaatc

SEQ ID NO: 2832568 - DNA, 25 bp, Homo sapien
ggaaaaataggtttgcatgcttttc

SEQ ID NO: 2832569 - DNA, 25 bp, Homo sapien
aaatcaactgaatatttgtcacgta

SEQ ID NO: 2832570 - DNA, 25 bp, Homo sapien
aaataaaggtacacacaaaaccatg

SEQ ID NO: 2832571 - DNA, 25 bp, Homo sapien
gcaacagtaatgctactttattcac

SEQ ID NO: 2832572 - DNA, 25 bp, Homo sapien
ctgcaacagtaatgctactttattc

SEQ ID NO: 2832573 - DNA, 25 bp, Homo sapien
tgcaacagtaatgctactttattca

SEQ ID NO: 2832574 - DNA, 25 bp, Homo sapien
aaagcctgagaaatcagccaccacg

SEQ ID NO: 2832575 - DNA, 25 bp, Homo sapien
gtgagcatcgcaccttttgggttcc

SEQ ID NO: 2832576 - DNA, 25 bp, Homo sapien
ttcccatgggtgagcatcgcacctt

SEQ ID NO: 2832577 - DNA, 25 bp, Homo sapien
ccaccacgttcccatgggtgagcat

SEQ ID NO: 2832578 - DNA, 25 bp, Homo sapien
gcaagggctctgtactactccctgg

SEQ ID NO: 2832579 - DNA, 25 bp, Homo sapien
atagcaagggctctgtactactccc

SEQ ID NO: 2832580 - DNA, 25 bp, Homo sapien
gggctctgtactactccctgggcct

SEQ ID NO: 2832581 - DNA, 25 bp, Homo sapien
aagggctctgtactactccctgggc

SEQ ID NO: 2832582 - DNA, 25 bp, Homo sapien
cccatttgtcagagataagagcatc

SEQ ID NO: 2832583 - DNA, 25 bp, Homo sapien
catttgtcagagataagagcatcag

SEQ ID NO: 2832584 - DNA, 25 bp, Homo sapien
atttgtcagagataagagcatcagg

SEQ ID NO: 2832585 - DNA, 25 bp, Homo sapien
gacccatttgtcagagataagagca

SEQ ID NO: 2832586 - DNA, 25 bp, Homo sapien
ggcccaatctttgaattcaagagac

SEQ ID NO: 2832587 - DNA, 25 bp, Homo sapien
tcaagagacaagacacatctgtttg

SEQ ID NO: 2832588 - DNA, 25 bp, Homo sapien
cccatattgcaaatcacagaggtga

SEQ ID NO: 2832589 - DNA, 25 bp, Homo sapien
actgaaacgtatggtggatgggatt

SEQ ID NO: 2832590 - DNA, 25 bp, Homo sapien
tggtacttggagacctcctttctcc

SEQ ID NO: 2832591 - DNA, 25 bp, Homo sapien
gggctttggtgcttgagcatcctct

SEQ ID NO: 2832592 - DNA, 25 bp, Homo sapien
ctcctccctggtacttggagacctc

SEQ ID NO: 2832593 - DNA, 25 bp, Homo sapien
tcgggggctttggtgcttgagcatc

SEQ ID NO: 2832594 - DNA, 25 bp, Homo sapien
taactgcctgatgacacaagctggg

SEQ ID NO: 2832595 - DNA, 25 bp, Homo sapien
tcaaacagggtatcaaagactccag

SEQ ID NO: 2832596 - DNA, 25 bp, Homo sapien
tctttgtcaagagcaccagcaggtc

SEQ ID NO: 2832597 - DNA, 25 bp, Homo sapien
tcaaaactccctcaaagcagcgtgt

SEQ ID NO: 2832598 - DNA, 25 bp, Homo sapien
ctgctaggccaccagggaagggtgc

SEQ ID NO: 2832599 - DNA, 25 bp, Homo sapien
ccatggctggggatctgcgtgcctc

SEQ ID NO: 2832600 - DNA, 25 bp, Homo sapien
gggaagggtgcaggtagccatggct

SEQ ID NO: 2832601 - DNA, 25 bp, Homo sapien
tggggatctgcgtgcctctgcttac

SEQ ID NO: 2832602 - DNA, 25 bp, Homo sapien
tcgtgccgcttgtgaaacacacaat

SEQ ID NO: 2832603 - DNA, 25 bp, Homo sapien
ctgtcgtgccgcttgtgaaacacac

SEQ ID NO: 2832604 - DNA, 25 bp, Homo sapien
tgtcgtgccgcttgtgaaacacaca

SEQ ID NO: 2832605 - DNA, 25 bp, Homo sapien
gtgccgcttgtgaaacacacaatgg

SEQ ID NO: 2832606 - DNA, 25 bp, Homo sapien
agcctggtgattctcttggccacag

SEQ ID NO: 2832607 - DNA, 25 bp, Homo sapien
gagcctggtgattctcttggccaca

SEQ ID NO: 2832608 - DNA, 25 bp, Homo sapien
acaggagcctggtgattctcttggc

SEQ ID NO: 2832609 - DNA, 25 bp, Homo sapien
aggagcctggtgattctcttggcca

SEQ ID NO: 2832610 - DNA, 25 bp, Homo sapien
gaagttctgacttggtgaccagcca

SEQ ID NO: 2832611 - DNA, 25 bp, Homo sapien
agtagcccagcaaaccgcccagaag

SEQ ID NO: 2832612 - DNA, 25 bp, Homo sapien
cctgtctggacactgatataccctg

SEQ ID NO: 2832613 - DNA, 25 bp, Homo sapien
ggcatgagagggacagataaccaga

SEQ ID NO: 2832614 - DNA, 25 bp, Homo sapien
gaggtttgtccacaatcacggtgct

SEQ ID NO: 2832615 - DNA, 25 bp, Homo sapien
tcagggcttcttcgaatgggtccat

SEQ ID NO: 2832616 - DNA, 25 bp, Homo sapien
catgctctagcagaagcacagcctt

SEQ ID NO: 2832617 - DNA, 25 bp, Homo sapien
tgcatggacttaatgaccaccccgc

SEQ ID NO: 2832618 - DNA, 25 bp, Homo sapien
catggaatatgtgtagcaggccagc

SEQ ID NO: 2832619 - DNA, 25 bp, Homo sapien
cagggtgtcatagagcgggaccacc

SEQ ID NO: 2832620 - DNA, 25 bp, Homo sapien
ctgtattgatgatgtagcggatagc

SEQ ID NO: 2832621 - DNA, 25 bp, Homo sapien
attgatgatgtagcggatagcccca

SEQ ID NO: 2832622 - DNA, 25 bp, Homo sapien
cacagccttctggaccaggcctgta

SEQ ID NO: 2832623 - DNA, 25 bp, Homo sapien
acagccttctggaccaggcctgtac

SEQ ID NO: 2832624 - DNA, 25 bp, Homo sapien
ccacagccttctggaccaggcctgt

SEQ ID NO: 2832625 - DNA, 25 bp, Homo sapien
atgagcctgttcctcaggtctttcc

SEQ ID NO: 2832626 - DNA, 25 bp, Homo sapien
tgcatgctttacaattgtgctggag

SEQ ID NO: 2832627 - DNA, 25 bp, Homo sapien
aaacaccaataaactgatcagtgca

SEQ ID NO: 2832628 - DNA, 25 bp, Homo sapien
tgtgctggagaagtccggaccccag

SEQ ID NO: 2832629 - DNA, 25 bp, Homo sapien
gagaagtccggaccccagaaattca

SEQ ID NO: 2832630 - DNA, 25 bp, Homo sapien
tgagtgccagatctgaatgggtggc

SEQ ID NO: 2832631 - DNA, 25 bp, Homo sapien
agtgccagatctgaatgggtggcca

SEQ ID NO: 2832632 - DNA, 25 bp, Homo sapien
ccctgagtgccagatctgaatgggt

SEQ ID NO: 2832633 - DNA, 25 bp, Homo sapien
cctgagtgccagatctgaatgggtg

SEQ ID NO: 2832634 - DNA, 25 bp, Homo sapien
actggtaaggctgcttaggcttcct

SEQ ID NO: 2832635 - DNA, 25 bp, Homo sapien
cactggtaaggctgcttaggcttcc

SEQ ID NO: 2832636 - DNA, 25 bp, Homo sapien
ccactggtaaggctgcttaggcttc

SEQ ID NO: 2832637 - DNA, 25 bp, Homo sapien
gccactggtaaggctgcttaggctt

SEQ ID NO: 2832638 - DNA, 25 bp, Homo sapien
ctgagatgctaagcccacggcggaa

SEQ ID NO: 2832639 - DNA, 25 bp, Homo sapien
cacggcggaacacctggtacatggt

SEQ ID NO: 2832640 - DNA, 25 bp, Homo sapien
catcatcatagtagtgggtaagtag

SEQ ID NO: 2832641 - DNA, 25 bp, Homo sapien
cctggtacatggtccgggcatcatc

SEQ ID NO: 2832642 - DNA, 25 bp, Homo sapien
tcacagatcgccgtgccccgccact

SEQ ID NO: 2832643 - DNA, 25 bp, Homo sapien
acagatcgccgtgccccgccactgt

SEQ ID NO: 2832644 - DNA, 25 bp, Homo sapien
ccaatcacagatcgccgtgccccgc

SEQ ID NO: 2832645 - DNA, 25 bp, Homo sapien
aatcacagatcgccgtgccccgcca

SEQ ID NO: 2832646 - DNA, 25 bp, Homo sapien
cagctgctttcttacgcttgcccct

SEQ ID NO: 2832647 - DNA, 25 bp, Homo sapien
tgctttcttacgcttgcccctgtca

SEQ ID NO: 2832648 - DNA, 25 bp, Homo sapien
gctgctttcttacgcttgcccctgt

SEQ ID NO: 2832649 - DNA, 25 bp, Homo sapien
ctgcagctgctttcttacgcttgcc

SEQ ID NO: 2832650 - DNA, 25 bp, Homo sapien
gtggaacgtctcctatcctgctcac

SEQ ID NO: 2832651 - DNA, 25 bp, Homo sapien
tccgcagtggaacgtctcctatcct

SEQ ID NO: 2832652 - DNA, 25 bp, Homo sapien
gcagtggaacgtctcctatcctgct

SEQ ID NO: 2832653 - DNA, 25 bp, Homo sapien
tttccgcagtggaacgtctcctatc

SEQ ID NO: 2832654 - DNA, 25 bp, Homo sapien
catcaggaggttgcatggcggctgc

SEQ ID NO: 2832655 - DNA, 25 bp, Homo sapien
tgaaccagtaggcaaggatggcagc

SEQ ID NO: 2832656 - DNA, 25 bp, Homo sapien
cctttggccggtgagtgaaccagta

SEQ ID NO: 2832657 - DNA, 25 bp, Homo sapien
tggcggctgcaaggcctttggccgg

SEQ ID NO: 2832658 - DNA, 25 bp, Homo sapien
ggctgcggaaaaactgtcccaagtc

SEQ ID NO: 2832659 - DNA, 25 bp, Homo sapien
cgcagtatcctcaggatctcctgtg

SEQ ID NO: 2832660 - DNA, 25 bp, Homo sapien
caggcagtcgcagtatcctcaggat

SEQ ID NO: 2832661 - DNA, 25 bp, Homo sapien
tgtcccaagtcacctagctcaggca

SEQ ID NO: 2832662 - DNA, 25 bp, Homo sapien
ttctccagaagtgagaggacaaact

SEQ ID NO: 2832663 - DNA, 25 bp, Homo sapien
cttctccagaagtgagaggacaaac

SEQ ID NO: 2832664 - DNA, 25 bp, Homo sapien
caagtgggtacagtgggcccatcag

SEQ ID NO: 2832665 - DNA, 25 bp, Homo sapien
aagtgggtacagtgggcccatcagg

SEQ ID NO: 2832666 - DNA, 25 bp, Homo sapien
ccaagtgggtacagtgggcccatca

SEQ ID NO: 2832667 - DNA, 25 bp, Homo sapien
gtgggtacagtgggcccatcaggga

SEQ ID NO: 2832668 - DNA, 25 bp, Homo sapien
cttcgcattggcactgaacccacag

SEQ ID NO: 2832669 - DNA, 25 bp, Homo sapien
catcctttccttcgcattggcactg

SEQ ID NO: 2832670 - DNA, 25 bp, Homo sapien
ttccttcgcattggcactgaaccca

SEQ ID NO: 2832671 - DNA, 25 bp, Homo sapien
cctttccttcgcattggcactgaac

SEQ ID NO: 2832672 - DNA, 25 bp, Homo sapien
aaggcagtgcgcaaagggcttggct

SEQ ID NO: 2832673 - DNA, 25 bp, Homo sapien
tgcaacttctacttaggtgctcacc

SEQ ID NO: 2832674 - DNA, 25 bp, Homo sapien
tgatggaaggcagtgcgcaaagggc

SEQ ID NO: 2832675 - DNA, 25 bp, Homo sapien
ctcctccttgcaacttctacttagg

SEQ ID NO: 2832676 - DNA, 25 bp, Homo sapien
aggaccagagtccaaactaatgctc

SEQ ID NO: 2832677 - DNA, 25 bp, Homo sapien
gcttcctattgccttaggaccagag

SEQ ID NO: 2832678 - DNA, 25 bp, Homo sapien
gaggctctccatgatcctcggattc

SEQ ID NO: 2832679 - DNA, 25 bp, Homo sapien
ttccctcccctttgaatcactccag

SEQ ID NO: 2832680 - DNA, 25 bp, Homo sapien
catcttgatcaaagcacaaaagtgg

SEQ ID NO: 2832681 - DNA, 25 bp, Homo sapien
gacagtcgatggcaacagccgcctg

SEQ ID NO: 2832682 - DNA, 25 bp, Homo sapien
agttctgtaaggagttgctggcccc

SEQ ID NO: 2832683 - DNA, 25 bp, Homo sapien
ttagcagtggtagcacaggctccct

SEQ ID NO: 2832684 - DNA, 25 bp, Homo sapien
gccctggggaccttgacgggacagc

SEQ ID NO: 2832685 - DNA, 25 bp, Homo sapien
cggagatgtaacacctccacctcgg

SEQ ID NO: 2832686 - DNA, 25 bp, Homo sapien
cggcggccgcggagatgtaacacct

SEQ ID NO: 2832687 - DNA, 25 bp, Homo sapien
ggccgcggagatgtaacacctccac

SEQ ID NO: 2832688 - DNA, 25 bp, Homo sapien
tccacctcgggcgaagacctcatag

SEQ ID NO: 2832689 - DNA, 25 bp, Homo sapien
gtccgggacgcggacaggacgggca

SEQ ID NO: 2832690 - DNA, 25 bp, Homo sapien
ggacgcggacaggacgggcacttac

SEQ ID NO: 2832691 - DNA, 25 bp, Homo sapien
gagatgggagtccgggacgcggaca

SEQ ID NO: 2832692 - DNA, 25 bp, Homo sapien
tgggagtccgggacgcggacaggac

SEQ ID NO: 2832693 - DNA, 25 bp, Homo sapien
cagagggagccccccgacacgagga

SEQ ID NO: 2832694 - DNA, 25 bp, Homo sapien
gcccagcagccccagcagtagccgc

SEQ ID NO: 2832695 - DNA, 25 bp, Homo sapien
ggcctccccgacccgcagccccgca

SEQ ID NO: 2832696 - DNA, 25 bp, Homo sapien
agccccgcagccccgcagcccagca

SEQ ID NO: 2832697 - DNA, 25 bp, Homo sapien
cagcccagcagccccagcagtagcc

SEQ ID NO: 2832698 - DNA, 25 bp, Homo sapien
tggccggccgggtctggggcttgcc

SEQ ID NO: 2832699 - DNA, 25 bp, Homo sapien
cgcggtgtcggaaccgccaagctcc

SEQ ID NO: 2832700 - DNA, 25 bp, Homo sapien
cggtgtcggaaccgccaagctcccg

SEQ ID NO: 2832701 - DNA, 25 bp, Homo sapien
tgtcggaaccgccaagctcccgggc

SEQ ID NO: 2832702 - DNA, 25 bp, Homo sapien
gcggtgtcggaaccgccaagctccc

SEQ ID NO: 2832703 - DNA, 25 bp, Homo sapien
ggttttatggctgggcaggctcgaa

SEQ ID NO: 2832704 - DNA, 25 bp, Homo sapien
tggcattctgcggaaaccggctgga

SEQ ID NO: 2832705 - DNA, 25 bp, Homo sapien
agcgccagagcgtgacattgagccc

SEQ ID NO: 2832706 - DNA, 25 bp, Homo sapien
cgcgcgactcgcagcctgggtttta

SEQ ID NO: 2832707 - DNA, 25 bp, Homo sapien
cctgtgggctgttgcccgctgacac

SEQ ID NO: 2832708 - DNA, 25 bp, Homo sapien
cactcctgtgggctgttgcccgctg

SEQ ID NO: 2832709 - DNA, 25 bp, Homo sapien
catggggagcctccgggtgccacct

SEQ ID NO: 2832710 - DNA, 25 bp, Homo sapien
agtttgcagacatggggagcctccg

SEQ ID NO: 2832711 - DNA, 25 bp, Homo sapien
gagtagttcacaccagttcccagat

SEQ ID NO: 2832712 - DNA, 25 bp, Homo sapien
tctatggaaaaagcatcagagaaaa

SEQ ID NO: 2832713 - DNA, 25 bp, Homo sapien
agatgttctatggaaaaagcatcag

SEQ ID NO: 2832714 - DNA, 25 bp, Homo sapien
tgttctatggaaaaagcatcagaga

SEQ ID NO: 2832715 - DNA, 25 bp, Homo sapien
tctgctggaccaaggctactcaggt

SEQ ID NO: 2832716 - DNA, 25 bp, Homo sapien
aaatgttgtcattggcgccttggcc

SEQ ID NO: 2832717 - DNA, 25 bp, Homo sapien
acatttcctggcacacgcttccttt

SEQ ID NO: 2832718 - DNA, 25 bp, Homo sapien
gtgactgccccacaaggctggtctt

SEQ ID NO: 2832719 - DNA, 25 bp, Homo sapien
tgattcaggggacacattcagtggc

SEQ ID NO: 2832720 - DNA, 25 bp, Homo sapien
aaggtgggcactctgtgattcaggg

SEQ ID NO: 2832721 - DNA, 25 bp, Homo sapien
ctctggccctggatggacaggatag

SEQ ID NO: 2832722 - DNA, 25 bp, Homo sapien
gccctggatggacaggatagctctg

SEQ ID NO: 2832723 - DNA, 25 bp, Homo sapien
cacaggtatgatgagcacccttcgg

SEQ ID NO: 2832724 - DNA, 25 bp, Homo sapien
ccaagggtacagatgtaggtactgg

SEQ ID NO: 2832725 - DNA, 25 bp, Homo sapien
gtatgatgagcacccttcgggctct

SEQ ID NO: 2832726 - DNA, 25 bp, Homo sapien
cactgaacccgtggccaagggtaca

SEQ ID NO: 2832727 - DNA, 25 bp, Homo sapien
tgaaaccatttagtgaaatccctgg

SEQ ID NO: 2832728 - DNA, 25 bp, Homo sapien
gaaaccatttagtgaaatccctgga

SEQ ID NO: 2832729 - DNA, 25 bp, Homo sapien
tgtgcttcaactatagcaaggacct

SEQ ID NO: 2832730 - DNA, 25 bp, Homo sapien
tccttgggtagtgggctcacagccc

SEQ ID NO: 2832731 - DNA, 25 bp, Homo sapien
agcctccttgggtagtgggctcaca

SEQ ID NO: 2832732 - DNA, 25 bp, Homo sapien
tagcaaggaccttaagcagtgctcc

SEQ ID NO: 2832733 - DNA, 25 bp, Homo sapien
ggctaggggcaacagagccatccaa

SEQ ID NO: 2832734 - DNA, 25 bp, Homo sapien
caggccattcttactagcgtgacca

SEQ ID NO: 2832735 - DNA, 25 bp, Homo sapien
tgcaaatcagcaggaaaagaagtct

SEQ ID NO: 2832736 - DNA, 25 bp, Homo sapien
taaattgggccatgtagtcccctaa

SEQ ID NO: 2832737 - DNA, 25 bp, Homo sapien
tggaaacagctaaaccagagccctg

SEQ ID NO: 2832738 - DNA, 25 bp, Homo sapien
gacaaaagaggccagtcagcttctg

SEQ ID NO: 2832739 - DNA, 25 bp, Homo sapien
gcagccgctgtttttcccttgaaga

SEQ ID NO: 2832740 - DNA, 25 bp, Homo sapien
gaagaaaccagaacattgggtcagg

SEQ ID NO: 2832741 - DNA, 25 bp, Homo sapien
aattgctttcttcgatgtgcagccg

SEQ ID NO: 2832742 - DNA, 25 bp, Homo sapien
tactcttttctgatatggaacctcc

SEQ ID NO: 2832743 - DNA, 25 bp, Homo sapien
tatggaacctccacgacaaacacat

SEQ ID NO: 2832744 - DNA, 25 bp, Homo sapien
caaacacatcaacttattcatcatt

SEQ ID NO: 2832745 - DNA, 25 bp, Homo sapien
tgagggcggtgcaggagattcaggg

SEQ ID NO: 2832746 - DNA, 25 bp, Homo sapien
tgcccctgcctagctagcatctggt

SEQ ID NO: 2832747 - DNA, 25 bp, Homo sapien
cccctgcctagctagcatctggtcc

SEQ ID NO: 2832748 - DNA, 25 bp, Homo sapien
cctgcctagctagcatctggtcctg

SEQ ID NO: 2832749 - DNA, 25 bp, Homo sapien
tgtgcccctgcctagctagcatctg

SEQ ID NO: 2832750 - DNA, 25 bp, Homo sapien
caaactggaattggagcttggcgag

SEQ ID NO: 2832751 - DNA, 25 bp, Homo sapien
ctggagtgacaagggaaggacaaac

SEQ ID NO: 2832752 - DNA, 25 bp, Homo sapien
gaacctgggaataccaagaggccaa

SEQ ID NO: 2832753 - DNA, 25 bp, Homo sapien
tgtgaggtgcgtactccgcagcaaa

SEQ ID NO: 2832754 - DNA, 25 bp, Homo sapien
cataacgaaggtttacatggacatg

SEQ ID NO: 2832755 - DNA, 25 bp, Homo sapien
tttgctcttagcagaacctgagaca

SEQ ID NO: 2832756 - DNA, 25 bp, Homo sapien
gcaccagagccctgaacctgtttca

SEQ ID NO: 2832757 - DNA, 25 bp, Homo sapien
gagctctgctatgaggagtttacaa

SEQ ID NO: 2832758 - DNA, 25 bp, Homo sapien
aaatgtcagccctggtaaatggctc

SEQ ID NO: 2832759 - DNA, 25 bp, Homo sapien
tcaaggcccagtgcggcaccacaga

SEQ ID NO: 2832760 - DNA, 25 bp, Homo sapien
ctcaggggaacagggcctttcaggt

SEQ ID NO: 2832761 - DNA, 25 bp, Homo sapien
gcaccacagaaatgtcagccctggt

SEQ ID NO: 2832762 - DNA, 25 bp, Homo sapien
gaaatgccagttgcttgagtcctaa

SEQ ID NO: 2832763 - DNA, 25 bp, Homo sapien
cagactgggctacaaagctctgacc

SEQ ID NO: 2832764 - DNA, 25 bp, Homo sapien
tgaccaggaccgataaagacccatt

SEQ ID NO: 2832765 - DNA, 25 bp, Homo sapien
agttgcaaccacaacttagcccagg

SEQ ID NO: 2832766 - DNA, 25 bp, Homo sapien
ctcccatcattaccagaaattcttc

SEQ ID NO: 2832767 - DNA, 25 bp, Homo sapien
tctctgcgttgtttactcctgcatc

SEQ ID NO: 2832768 - DNA, 25 bp, Homo sapien
cttctctgcgttgtttactcctgca

SEQ ID NO: 2832769 - DNA, 25 bp, Homo sapien
tctgcgttgtttactcctgcatctc

SEQ ID NO: 2832770 - DNA, 25 bp, Homo sapien
ttgggaccaagatcagcaacaggct

SEQ ID NO: 2832771 - DNA, 25 bp, Homo sapien
aaatagcatctgtgagggagccaag

SEQ ID NO: 2832772 - DNA, 25 bp, Homo sapien
tacagaagtccggatggaaaggcaa

SEQ ID NO: 2832773 - DNA, 25 bp, Homo sapien
cggattcgggaaccatctcaaagga

SEQ ID NO: 2832774 - DNA, 25 bp, Homo sapien
caccaaaggttcttgtgcctatggg

SEQ ID NO: 2832775 - DNA, 25 bp, Homo sapien
gaagctgccagagcctcgagccata

SEQ ID NO: 2832776 - DNA, 25 bp, Homo sapien
gcagcaaccagtgttggaacccagg

SEQ ID NO: 2832777 - DNA, 25 bp, Homo sapien
tcgagccataccctgggccatggtc

SEQ ID NO: 2832778 - DNA, 25 bp, Homo sapien
ggcatttgcacgactatccgaggat

SEQ ID NO: 2832779 - DNA, 25 bp, Homo sapien
tgagtccggactctgttggcacagg

SEQ ID NO: 2832780 - DNA, 25 bp, Homo sapien
ttttaggaaccactatgagtccgga

SEQ ID NO: 2832781 - DNA, 25 bp, Homo sapien
cccagaagaggctatagtccggcat

SEQ ID NO: 2832782 - DNA, 25 bp, Homo sapien
tgctgggcatcccatcggtagtatg

SEQ ID NO: 2832783 - DNA, 25 bp, Homo sapien
tgggacatctctcttagcatgctga

SEQ ID NO: 2832784 - DNA, 25 bp, Homo sapien
ctgcctgagtgaagctatgtaaccc

SEQ ID NO: 2832785 - DNA, 25 bp, Homo sapien
tatgggacagggtaagctcctggcc

SEQ ID NO: 2832786 - DNA, 25 bp, Homo sapien
tcatgaaaaggagccctctaggtac

SEQ ID NO: 2832787 - DNA, 25 bp, Homo sapien
gaatggctactttaggtgtcaggga

SEQ ID NO: 2832788 - DNA, 25 bp, Homo sapien
tacagatactagctaccgcaaaggc

SEQ ID NO: 2832789 - DNA, 25 bp, Homo sapien
taaggtcagtatgtctagagcacag

SEQ ID NO: 2832790 - DNA, 25 bp, Homo sapien
ttctggaggaccaggtcattaaaaa

SEQ ID NO: 2832791 - DNA, 25 bp, Homo sapien
ctgctaccagctttttccttaagtt

SEQ ID NO: 2832792 - DNA, 25 bp, Homo sapien
aatctgcttgcaactctgctaccag

SEQ ID NO: 2832793 - DNA, 25 bp, Homo sapien
aaataaatctgcttgcaactctgct

SEQ ID NO: 2832794 - DNA, 25 bp, Homo sapien
tggagccctcttgccatggtagtac

SEQ ID NO: 2832795 - DNA, 25 bp, Homo sapien
cagacatgacattataatacctgat

SEQ ID NO: 2832796 - DNA, 25 bp, Homo sapien
ctcagacatgacattataatacctg

SEQ ID NO: 2832797 - DNA, 25 bp, Homo sapien
ctgtggagccctcttgccatggtag

SEQ ID NO: 2832798 - DNA, 25 bp, Homo sapien
gctctatgagggaagccacccttac

SEQ ID NO: 2832799 - DNA, 25 bp, Homo sapien
tgcaagctctatgagggaagccacc

SEQ ID NO: 2832800 - DNA, 25 bp, Homo sapien
atctgcaagctctatgagggaagcc

SEQ ID NO: 2832801 - DNA, 25 bp, Homo sapien
agctctatgagggaagccaccctta

SEQ ID NO: 2832802 - DNA, 25 bp, Homo sapien
ggctggaaagaaacagcgtttctct

SEQ ID NO: 2832803 - DNA, 25 bp, Homo sapien
acggtaacaattcaatttctatggg

SEQ ID NO: 2832804 - DNA, 25 bp, Homo sapien
gggctggaaagaaacagcgtttctc

SEQ ID NO: 2832805 - DNA, 25 bp, Homo sapien
acaggacttgtacaacggtaacaat

SEQ ID NO: 2832806 - DNA, 25 bp, Homo sapien
tctgttttggtacgactgccatgct

SEQ ID NO: 2832807 - DNA, 25 bp, Homo sapien
tatctgttttggtacgactgccatg

SEQ ID NO: 2832808 - DNA, 25 bp, Homo sapien
ttttggtacgactgccatgctgttt

SEQ ID NO: 2832809 - DNA, 25 bp, Homo sapien
tgttttggtacgactgccatgctgt

SEQ ID NO: 2832810 - DNA, 25 bp, Homo sapien
atcagtctggttagcagtctatttt

SEQ ID NO: 2832811 - DNA, 25 bp, Homo sapien
ctgattttgattttctggagggttt

SEQ ID NO: 2832812 - DNA, 25 bp, Homo sapien
tctttatcagtctggttagcagtct

SEQ ID NO: 2832813 - DNA, 25 bp, Homo sapien
ttatcagtctggttagcagtctatt

SEQ ID NO: 2832814 - DNA, 25 bp, Homo sapien
gaaattgtgtatgcttcgtgaagtt

SEQ ID NO: 2832815 - DNA, 25 bp, Homo sapien
ttgaaattgtgtatgcttcgtgaag

SEQ ID NO: 2832816 - DNA, 25 bp, Homo sapien
tattgaaattgtgtatgcttcgtga

SEQ ID NO: 2832817 - DNA, 25 bp, Homo sapien
tgaaattgtgtatgcttcgtgaagt

SEQ ID NO: 2832818 - DNA, 25 bp, Homo sapien
cccttagcagagctctatggctgtg

SEQ ID NO: 2832819 - DNA, 25 bp, Homo sapien
ccttagcagagctctatggctgtgc

SEQ ID NO: 2832820 - DNA, 25 bp, Homo sapien
ctcatgcacttctacgactgcctga

SEQ ID NO: 2832821 - DNA, 25 bp, Homo sapien
tcatgcacttctacgactgcctgat

SEQ ID NO: 2832822 - DNA, 25 bp, Homo sapien
cccctggcacctcatgcacttctac

SEQ ID NO: 2832823 - DNA, 25 bp, Homo sapien
ggcacctcatgcacttctacgactg

SEQ ID NO: 2832824 - DNA, 25 bp, Homo sapien
tagtagtctatcagggtcaacagga

SEQ ID NO: 2832825 - DNA, 25 bp, Homo sapien
tcggctggtgtcaagtagtagtcta

SEQ ID NO: 2832826 - DNA, 25 bp, Homo sapien
catcagaattgtggcaggaccatgg

SEQ ID NO: 2832827 - DNA, 25 bp, Homo sapien
gaaagaaagtaaggccaattctctg

SEQ ID NO: 2832828 - DNA, 25 bp, Homo sapien
ccttgcggagggaccgcctcacagg

SEQ ID NO: 2832829 - DNA, 25 bp, Homo sapien
gagccttgcgagctggtcctgcggg

SEQ ID NO: 2832830 - DNA, 25 bp, Homo sapien
cggagggaccgcctcacaggacaga

SEQ ID NO: 2832831 - DNA, 25 bp, Homo sapien
ccccaggagccttgcgagctggtcc

SEQ ID NO: 2832832 - DNA, 25 bp, Homo sapien
tgccagaccaggtcggaaaggaggg

SEQ ID NO: 2832833 - DNA, 25 bp, Homo sapien
ctgccagaccaggtcggaaaggagg

SEQ ID NO: 2832834 - DNA, 25 bp, Homo sapien
gtcctaacccaatatgtgactgtat

SEQ ID NO: 2832835 - DNA, 25 bp, Homo sapien
tatttgtccaattatatccatggcc

SEQ ID NO: 2832836 - DNA, 25 bp, Homo sapien
catgatgggctatatctgatgtaca

SEQ ID NO: 2832837 - DNA, 25 bp, Homo sapien
acttatttggcataaccattttggg

SEQ ID NO: 2832838 - DNA, 25 bp, Homo sapien
catagacaacacatagaccaagagg

SEQ ID NO: 2832839 - DNA, 25 bp, Homo sapien
caacggtgcctactgtagtgccaac

SEQ ID NO: 2832840 - DNA, 25 bp, Homo sapien
taatgtccaaagcataactgaccgg

SEQ ID NO: 2832841 - DNA, 25 bp, Homo sapien
gaccaagaggtgacatagacaacac

SEQ ID NO: 2832842 - DNA, 25 bp, Homo sapien
tacatttaatcagttacagaagaaa

SEQ ID NO: 2832843 - DNA, 25 bp, Homo sapien
aatcagttacagaagaaacagacaa

SEQ ID NO: 2832844 - DNA, 25 bp, Homo sapien
acatttaatcagttacagaagaaac

SEQ ID NO: 2832845 - DNA, 25 bp, Homo sapien
tttaatcagttacagaagaaacaga

SEQ ID NO: 2832846 - DNA, 25 bp, Homo sapien
tagcaattgccctagacccagtggt

SEQ ID NO: 2832847 - DNA, 25 bp, Homo sapien
tgttagggtctaccaatggaagcca

SEQ ID NO: 2832848 - DNA, 25 bp, Homo sapien
ccactagagggagattagacggcag

SEQ ID NO: 2832849 - DNA, 25 bp, Homo sapien
caaaccacctagtgtgccagtcacg

SEQ ID NO: 2832850 - DNA, 25 bp, Homo sapien
ggaatgagtaccacacatcatgaga

SEQ ID NO: 2832851 - DNA, 25 bp, Homo sapien
cactcacgtgggctccatgcttacg

SEQ ID NO: 2832852 - DNA, 25 bp, Homo sapien
gagaatgtgtataaccaccttggaa

SEQ ID NO: 2832853 - DNA, 25 bp, Homo sapien
tacagctacacaagcaacacggatg

SEQ ID NO: 2832854 - DNA, 25 bp, Homo sapien
cacaagtgttgaaaccaggtctgaa

SEQ ID NO: 2832855 - DNA, 25 bp, Homo sapien
ggacactgacacttagagggaacac

SEQ ID NO: 2832856 - DNA, 25 bp, Homo sapien
taaagcattcattatccagactctg

SEQ ID NO: 2832857 - DNA, 25 bp, Homo sapien
tctgaaatccaagacccaagatgct

SEQ ID NO: 2832858 - DNA, 25 bp, Homo sapien
cataggaaatgatgaacctggtaaa

SEQ ID NO: 2832859 - DNA, 25 bp, Homo sapien
aggaaatgatgaacctggtaaaagc

SEQ ID NO: 2832860 - DNA, 25 bp, Homo sapien
gcataggaaatgatgaacctggtaa

SEQ ID NO: 2832861 - DNA, 25 bp, Homo sapien
ctgcatgaaggtgatgcataggaaa

SEQ ID NO: 2832862 - DNA, 25 bp, Homo sapien
caaaggcaccttgctaggcgctaga

SEQ ID NO: 2832863 - DNA, 25 bp, Homo sapien
gtcacacaggagtcgccctagtatg

SEQ ID NO: 2832864 - DNA, 25 bp, Homo sapien
tgcagccactttgatcctagccttg

SEQ ID NO: 2832865 - DNA, 25 bp, Homo sapien
ggaacatacaaaggtgtctgtcacg

SEQ ID NO: 2832866 - DNA, 25 bp, Homo sapien
tcagtcaacttctgttgatccacaa

SEQ ID NO: 2832867 - DNA, 25 bp, Homo sapien
acttctgttgatccacaaggtctca

SEQ ID NO: 2832868 - DNA, 25 bp, Homo sapien
aactcctgtcctcgttcatggaacc

SEQ ID NO: 2832869 - DNA, 25 bp, Homo sapien
tgatccacaaggtctcaagaactcc

SEQ ID NO: 2832870 - DNA, 25 bp, Homo sapien
tcctattggtcagtttagtagcctg

SEQ ID NO: 2832871 - DNA, 25 bp, Homo sapien
taagacaagacatgatctcaggcct

SEQ ID NO: 2832872 - DNA, 25 bp, Homo sapien
gcaagcatgttacaatcctattggt

SEQ ID NO: 2832873 - DNA, 25 bp, Homo sapien
tgaatgactccttcatgatgacccc

SEQ ID NO: 2832874 - DNA, 25 bp, Homo sapien
ttcttgctcttagagggaagaggaa

SEQ ID NO: 2832875 - DNA, 25 bp, Homo sapien
caggagtgacaacaggatgagaaag

SEQ ID NO: 2832876 - DNA, 25 bp, Homo sapien
gctacatagaagttatcctgggaag

SEQ ID NO: 2832877 - DNA, 25 bp, Homo sapien
gatgggcatacccagatggttctct

SEQ ID NO: 2832878 - DNA, 25 bp, Homo sapien
gcttatgcagctattcgtcctcagg

SEQ ID NO: 2832879 - DNA, 25 bp, Homo sapien
tcctggacctatggtgcttatgcag

SEQ ID NO: 2832880 - DNA, 25 bp, Homo sapien
tatggtgcttatgcagctattcgtc

SEQ ID NO: 2832881 - DNA, 25 bp, Homo sapien
gcagctattcgtcctcaggccttct

SEQ ID NO: 2832882 - DNA, 25 bp, Homo sapien
gacattacatggctggatggtaata

SEQ ID NO: 2832883 - DNA, 25 bp, Homo sapien
catggacattacatggctggatggt

SEQ ID NO: 2832884 - DNA, 25 bp, Homo sapien
tggacattacatggctggatggtaa

SEQ ID NO: 2832885 - DNA, 25 bp, Homo sapien
cattacatggctggatggtaataac

SEQ ID NO: 2832886 - DNA, 25 bp, Homo sapien
tcaccttccccgctccgcaagaggt

SEQ ID NO: 2832887 - DNA, 25 bp, Homo sapien
cccgctccgcaagaggttgtaccag

SEQ ID NO: 2832888 - DNA, 25 bp, Homo sapien
tgtcttgttcggtagtcaccttccc

SEQ ID NO: 2832889 - DNA, 25 bp, Homo sapien
cagcatgtcttgttcggtagtcacc

SEQ ID NO: 2832890 - DNA, 25 bp, Homo sapien
agaacacattcttaagagactgtgc

SEQ ID NO: 2832891 - DNA, 25 bp, Homo sapien
tctgaggtagaagtctgggaactca

SEQ ID NO: 2832892 - DNA, 25 bp, Homo sapien
gccctgagcagaaacaccctcattt

SEQ ID NO: 2832893 - DNA, 25 bp, Homo sapien
gtagaagtctgggaactcacccgcc

SEQ ID NO: 2832894 - DNA, 25 bp, Homo sapien
agcccccagatcagggaagacggtg

SEQ ID NO: 2832895 - DNA, 25 bp, Homo sapien
agggaagacggtggcaccaccagct

SEQ ID NO: 2832896 - DNA, 25 bp, Homo sapien
tcttaggccaaattgcagcccccag

SEQ ID NO: 2832897 - DNA, 25 bp, Homo sapien
agatcagggaagacggtggcaccac

SEQ ID NO: 2832898 - DNA, 25 bp, Homo sapien
gagccacaaaggacatgacaaggta

SEQ ID NO: 2832899 - DNA, 25 bp, Homo sapien
gtgacactacttggtgtctgctcca

SEQ ID NO: 2832900 - DNA, 25 bp, Homo sapien
taagacatagagcttgaccctccta

SEQ ID NO: 2832901 - DNA, 25 bp, Homo sapien
tgacaaggtatatagattgccctcc

SEQ ID NO: 2832902 - DNA, 25 bp, Homo sapien
gtcatgagtgttcaagagttgaggc

SEQ ID NO: 2832903 - DNA, 25 bp, Homo sapien
ctccatgtcatgagtgttcaagagt

SEQ ID NO: 2832904 - DNA, 25 bp, Homo sapien
ccatgcctacttaaccagtgtgatt

SEQ ID NO: 2832905 - DNA, 25 bp, Homo sapien
aaaggctcttcccatgcctacttaa

SEQ ID NO: 2832906 - DNA, 25 bp, Homo sapien
gagcatgccttgactcatggccaaa

SEQ ID NO: 2832907 - DNA, 25 bp, Homo sapien
gcaaggctgtactcatgcccacaga

SEQ ID NO: 2832908 - DNA, 25 bp, Homo sapien
tcactgaagggtacttgacagacat

SEQ ID NO: 2832909 - DNA, 25 bp, Homo sapien
cacaagttccacactagcaaggctg

SEQ ID NO: 2832910 - DNA, 25 bp, Homo sapien
tctcatattggacctcaagcacaag

SEQ ID NO: 2832911 - DNA, 25 bp, Homo sapien
tgggaatcaggccattaagccttgg

SEQ ID NO: 2832912 - DNA, 25 bp, Homo sapien
tacaacctatggataaaacagaggc

SEQ ID NO: 2832913 - DNA, 25 bp, Homo sapien
tagcactgggcccatcaaaaaggaa

SEQ ID NO: 2832914 - DNA, 25 bp, Homo sapien
gatgcttgcgcactatgaatgtatt

SEQ ID NO: 2832915 - DNA, 25 bp, Homo sapien
tgagagccagaaggacctgaccatt

SEQ ID NO: 2832916 - DNA, 25 bp, Homo sapien
taacagcagatgagatcagccctga

SEQ ID NO: 2832917 - DNA, 25 bp, Homo sapien
tgaggacattatgcaccagccacac

SEQ ID NO: 2832918 - DNA, 25 bp, Homo sapien
acgattccccgtccctaaatgcttg

SEQ ID NO: 2832919 - DNA, 25 bp, Homo sapien
aagaaagtagccacacgattccccg

SEQ ID NO: 2832920 - DNA, 25 bp, Homo sapien
gtagtttaagaaagtagccacacga

SEQ ID NO: 2832921 - DNA, 25 bp, Homo sapien
gcttgaaagtatctcgctcatcatt

SEQ ID NO: 2832922 - DNA, 25 bp, Homo sapien
caggtgggcctggacccagtactta

SEQ ID NO: 2832923 - DNA, 25 bp, Homo sapien
gaacaggtgggcctggacccagtac

SEQ ID NO: 2832924 - DNA, 25 bp, Homo sapien
ctacaaaattaagtgagaatgaaca

SEQ ID NO: 2832925 - DNA, 25 bp, Homo sapien
aaattaagtgagaatgaacaggtgg

SEQ ID NO: 2832926 - DNA, 25 bp, Homo sapien
cgctaacctattcccctctgttttg

SEQ ID NO: 2832927 - DNA, 25 bp, Homo sapien
ctctgttttgaggccgctgtcaaaa

SEQ ID NO: 2832928 - DNA, 25 bp, Homo sapien
ttttgaggccgctgtcaaaaggtcg

SEQ ID NO: 2832929 - DNA, 25 bp, Homo sapien
aacgtcgctaacctattcccctctg

SEQ ID NO: 2832930 - DNA, 25 bp, Homo sapien
tgcaacagacaacaactttcaccca

SEQ ID NO: 2832931 - DNA, 25 bp, Homo sapien
caggcttcatccaccacccacaaga

SEQ ID NO: 2832932 - DNA, 25 bp, Homo sapien
cagacaacaactttcacccaagttt

SEQ ID NO: 2832933 - DNA, 25 bp, Homo sapien
ttacaacaggcttcatccaccaccc

SEQ ID NO: 2832934 - DNA, 25 bp, Homo sapien
tagagaagtcgaagtgcggttcata

SEQ ID NO: 2832935 - DNA, 25 bp, Homo sapien
gtcgaagtgcggttcatactgtcct

SEQ ID NO: 2832936 - DNA, 25 bp, Homo sapien
cctagagaagtcgaagtgcggttca

SEQ ID NO: 2832937 - DNA, 25 bp, Homo sapien
agaagtcgaagtgcggttcatactg

SEQ ID NO: 2832938 - DNA, 25 bp, Homo sapien
ggcccagttctggacaccctgtgag

SEQ ID NO: 2832939 - DNA, 25 bp, Homo sapien
tacccacttcccaactcctacagtc

SEQ ID NO: 2832940 - DNA, 25 bp, Homo sapien
tgagaccatctagccacaaataccc

SEQ ID NO: 2832941 - DNA, 25 bp, Homo sapien
ctgtgagaccatctagccacaaata

SEQ ID NO: 2832942 - DNA, 25 bp, Homo sapien
cgacgatttactcgggccacaacag

SEQ ID NO: 2832943 - DNA, 25 bp, Homo sapien
tgctgcatccgacgatttactcggg

SEQ ID NO: 2832944 - DNA, 25 bp, Homo sapien
tttactcgggccacaacagggtcat

SEQ ID NO: 2832945 - DNA, 25 bp, Homo sapien
tgatatgctgcatccgacgatttac

SEQ ID NO: 2832946 - DNA, 25 bp, Homo sapien
gtcttgggatcacgaacggtggctc

SEQ ID NO: 2832947 - DNA, 25 bp, Homo sapien
tttggaaacccggtagctggcgaca

SEQ ID NO: 2832948 - DNA, 25 bp, Homo sapien
gaaacccggtagctggcgacagtga

SEQ ID NO: 2832949 - DNA, 25 bp, Homo sapien
ctgtcttgggatcacgaacggtggc

SEQ ID NO: 2832950 - DNA, 25 bp, Homo sapien
tagtacctgacgatgtgcgggctgt

SEQ ID NO: 2832951 - DNA, 25 bp, Homo sapien
tttaggttttgcgatctccttgatc

SEQ ID NO: 2832952 - DNA, 25 bp, Homo sapien
aaaagcctcttctgtctacggggtg

SEQ ID NO: 2832953 - DNA, 25 bp, Homo sapien
tcctcatcagacatgacatcgtagt

SEQ ID NO: 2832954 - DNA, 25 bp, Homo sapien
ccttctggggttgctagctcagctt

SEQ ID NO: 2832955 - DNA, 25 bp, Homo sapien
cctccaataactgctcaaagtaccg

SEQ ID NO: 2832956 - DNA, 25 bp, Homo sapien
gattccctccagctcgttcgtggct

SEQ ID NO: 2832957 - DNA, 25 bp, Homo sapien
tcgtaaacatccctctcaggcaggt

SEQ ID NO: 2832958 - DNA, 25 bp, Homo sapien
gcatctaaccagagtacgctggtcg

SEQ ID NO: 2832959 - DNA, 25 bp, Homo sapien
tctaaccagagtacgctggtcgtaa

SEQ ID NO: 2832960 - DNA, 25 bp, Homo sapien
tccacagcatctaaccagagtacgc

SEQ ID NO: 2832961 - DNA, 25 bp, Homo sapien
cagcatctaaccagagtacgctggt

SEQ ID NO: 2832962 - DNA, 25 bp, Homo sapien
cagcatagctgaggtagtccagcac

SEQ ID NO: 2832963 - DNA, 25 bp, Homo sapien
taatagtccccttcattgtaggccg

SEQ ID NO: 2832964 - DNA, 25 bp, Homo sapien
tgcagatcacccaactggaagacag

SEQ ID NO: 2832965 - DNA, 25 bp, Homo sapien
tgacttggttgtggtggcctcctcc

SEQ ID NO: 2832966 - DNA, 25 bp, Homo sapien
ccaccaggaagcattgttgaggaca

SEQ ID NO: 2832967 - DNA, 25 bp, Homo sapien
tttaggtggcaaccaagccatgggt

SEQ ID NO: 2832968 - DNA, 25 bp, Homo sapien
gaagatgactaaggccagagctcca

SEQ ID NO: 2832969 - DNA, 25 bp, Homo sapien
gcatatcctaaagggccactgacac

SEQ ID NO: 2832970 - DNA, 25 bp, Homo sapien
tcccctctggaaattgtgcctgggt

SEQ ID NO: 2832971 - DNA, 25 bp, Homo sapien
cagctcctatctcgtcctcatcagt

SEQ ID NO: 2832972 - DNA, 25 bp, Homo sapien
ccctctggaaattgtgcctgggtcc

SEQ ID NO: 2832973 - DNA, 25 bp, Homo sapien
ggcagctcctatctcgtcctcatca

SEQ ID NO: 2832974 - DNA, 25 bp, Homo sapien
ctgcacagagaggttggcgataaaa

SEQ ID NO: 2832975 - DNA, 25 bp, Homo sapien
aaatgagagtcagaacaagagatta

SEQ ID NO: 2832976 - DNA, 25 bp, Homo sapien
atgagagtcagaacaagagattacc

SEQ ID NO: 2832977 - DNA, 25 bp, Homo sapien
aatgagagtcagaacaagagattac

SEQ ID NO: 2832978 - DNA, 25 bp, Homo sapien
caaatgagagtcagaacaagagatt

SEQ ID NO: 2832979 - DNA, 25 bp, Homo sapien
aacatccacttcagccataactggg

SEQ ID NO: 2832980 - DNA, 25 bp, Homo sapien
tcttcatagctacatggtcagggac

SEQ ID NO: 2832981 - DNA, 25 bp, Homo sapien
gacagggaccaagaagctgtaaccc

SEQ ID NO: 2832982 - DNA, 25 bp, Homo sapien
tcttcccaagagtagctgtatccac

SEQ ID NO: 2832983 - DNA, 25 bp, Homo sapien
gagtttagaatctggtggggtggga

SEQ ID NO: 2832984 - DNA, 25 bp, Homo sapien
agtttagaatctggtggggtgggag

SEQ ID NO: 2832985 - DNA, 25 bp, Homo sapien
ctaaagagtttagaatctggtgggg

SEQ ID NO: 2832986 - DNA, 25 bp, Homo sapien
aaagagtttagaatctggtggggtg

SEQ ID NO: 2832987 - DNA, 25 bp, Homo sapien
tagtcaaggcttccattttgttggc

SEQ ID NO: 2832988 - DNA, 25 bp, Homo sapien
cgcttcaccagtttgtaggcattca

SEQ ID NO: 2832989 - DNA, 25 bp, Homo sapien
cagcgcaggccagtctgtgtttagc

SEQ ID NO: 2832990 - DNA, 25 bp, Homo sapien
gtgagccaggtagccctcagcatca

SEQ ID NO: 2832991 - DNA, 25 bp, Homo sapien
taaacagtgactccttagcccatgt

SEQ ID NO: 2832992 - DNA, 25 bp, Homo sapien
gaaaaggaagactaatgcgtccacc

SEQ ID NO: 2832993 - DNA, 25 bp, Homo sapien
taatctagataacagctgggacccc

SEQ ID NO: 2832994 - DNA, 25 bp, Homo sapien
gtacttagctcctctcaagcactgg

SEQ ID NO: 2832995 - DNA, 25 bp, Homo sapien
gcataaatcaggtcagtcatgtgcc

SEQ ID NO: 2832996 - DNA, 25 bp, Homo sapien
ggatgtactctttcagagactgcac

SEQ ID NO: 2832997 - DNA, 25 bp, Homo sapien
ctcttaatcttggaaagcttggctt

SEQ ID NO: 2832998 - DNA, 25 bp, Homo sapien
cttggcttcctccacaaggatgtac

SEQ ID NO: 2832999 - DNA, 25 bp, Homo sapien
tgaagaattcggcctgcacacagct

SEQ ID NO: 2833000 - DNA, 25 bp, Homo sapien
gaggtgaagaattcggcctgcacac

SEQ ID NO: 2833001 - DNA, 25 bp, Homo sapien
aggtgaagaattcggcctgcacaca

SEQ ID NO: 2833002 - DNA, 25 bp, Homo sapien
ggtgaagaattcggcctgcacacag

SEQ ID NO: 2833003 - DNA, 25 bp, Homo sapien
caacacatatgccaggacagtgcca

SEQ ID NO: 2833004 - DNA, 25 bp, Homo sapien
acacatatgccaggacagtgccagg

SEQ ID NO: 2833005 - DNA, 25 bp, Homo sapien
acatatgccaggacagtgccaggtt

SEQ ID NO: 2833006 - DNA, 25 bp, Homo sapien
cttccaacacatatgccaggacagt

SEQ ID NO: 2833007 - DNA, 25 bp, Homo sapien
atcattagtaccaagggcaccagag

SEQ ID NO: 2833008 - DNA, 25 bp, Homo sapien
tgtcaatcattagtaccaagggcac

SEQ ID NO: 2833009 - DNA, 25 bp, Homo sapien
ctaggcataatttatgtcaatcatt

SEQ ID NO: 2833010 - DNA, 25 bp, Homo sapien
ttatgtcaatcattagtaccaaggg

SEQ ID NO: 2833011 - DNA, 25 bp, Homo sapien
tccatccttgctacgtggcttcatt

SEQ ID NO: 2833012 - DNA, 25 bp, Homo sapien
ggacactcggctgtgtaagaacaag

SEQ ID NO: 2833013 - DNA, 25 bp, Homo sapien
cttgctacgtggcttcattggctgg

SEQ ID NO: 2833014 - DNA, 25 bp, Homo sapien
acacagtggacactcggctgtgtaa

SEQ ID NO: 2833015 - DNA, 25 bp, Homo sapien
tgcttccactacaaggccataagga

SEQ ID NO: 2833016 - DNA, 25 bp, Homo sapien
gtcttgtagacagcgtccgtggaca

SEQ ID NO: 2833017 - DNA, 25 bp, Homo sapien
tcctgctgcgaaggtcaactgggca

SEQ ID NO: 2833018 - DNA, 25 bp, Homo sapien
caggcacgttatctcactccagggt

SEQ ID NO: 2833019 - DNA, 25 bp, Homo sapien
ttcctctgtccacgatgcccttttg

SEQ ID NO: 2833020 - DNA, 25 bp, Homo sapien
cagctcatgggtcacctcctccggg

SEQ ID NO: 2833021 - DNA, 25 bp, Homo sapien
tgttcctctgtccacgatgcccttt

SEQ ID NO: 2833022 - DNA, 25 bp, Homo sapien
tctgtccacgatgcccttttgccag

SEQ ID NO: 2833023 - DNA, 25 bp, Homo sapien
ccactgcccgcattcccttccagca

SEQ ID NO: 2833024 - DNA, 25 bp, Homo sapien
actgcccgcattcccttccagcaca

SEQ ID NO: 2833025 - DNA, 25 bp, Homo sapien
acccactgcccgcattcccttccag

SEQ ID NO: 2833026 - DNA, 25 bp, Homo sapien
aagtacccactgcccgcattccctt

SEQ ID NO: 2833027 - DNA, 25 bp, Homo sapien
ttccaatccgcctgtcccactgggt

SEQ ID NO: 2833028 - DNA, 25 bp, Homo sapien
cttcccgctcttccaatccgcctgt

SEQ ID NO: 2833029 - DNA, 25 bp, Homo sapien
ctgggttagcaactgcttgcggttt

SEQ ID NO: 2833030 - DNA, 25 bp, Homo sapien
cccactgggttagcaactgcttgcg

SEQ ID NO: 2833031 - DNA, 25 bp, Homo sapien
cacacagaagggtcccgtttgttga

SEQ ID NO: 2833032 - DNA, 25 bp, Homo sapien
tgaattagttaacgaattatcacgg

SEQ ID NO: 2833033 - DNA, 25 bp, Homo sapien
gcacacagaagggtcccgtttgttg

SEQ ID NO: 2833034 - DNA, 25 bp, Homo sapien
aacgaattatcacgggtctccgcag

SEQ ID NO: 2833035 - DNA, 25 bp, Homo sapien
ctgccaaggaaaaacaacgctggtt

SEQ ID NO: 2833036 - DNA, 25 bp, Homo sapien
aaaacaacgctggttccacaaggat

SEQ ID NO: 2833037 - DNA, 25 bp, Homo sapien
aacaacgctggttccacaaggatgt

SEQ ID NO: 2833038 - DNA, 25 bp, Homo sapien
tgccaaggaaaaacaacgctggttc

SEQ ID NO: 2833039 - DNA, 25 bp, Homo sapien
gcgtcgcccggtcagctcggcgcct

SEQ ID NO: 2833040 - DNA, 25 bp, Homo sapien
tttccagaacctcccgcggcgtcgc

SEQ ID NO: 2833041 - DNA, 25 bp, Homo sapien
ccacacgcctgcctgcgtcctggtc

SEQ ID NO: 2833042 - DNA, 25 bp, Homo sapien
tcccttggcgactccgcctcgggcc

SEQ ID NO: 2833043 - DNA, 25 bp, Homo sapien
tccctgcctgcgctcatgcccattg

SEQ ID NO: 2833044 - DNA, 25 bp, Homo sapien
ctggaggctgacggatttccctgcc

SEQ ID NO: 2833045 - DNA, 25 bp, Homo sapien
tggagaggtcgccacgacccgatcc

SEQ ID NO: 2833046 - DNA, 25 bp, Homo sapien
tgtagggagagcgtccctggaggct

SEQ ID NO: 2833047 - DNA, 25 bp, Homo sapien
ttgggaggcccattcccagggccga

SEQ ID NO: 2833048 - DNA, 25 bp, Homo sapien
gagaccgagattgggaggcccattc

SEQ ID NO: 2833049 - DNA, 25 bp, Homo sapien
tgggtttcagagagtcccgggctct

SEQ ID NO: 2833050 - DNA, 25 bp, Homo sapien
cagggccgagctctcagtgggtttc

SEQ ID NO: 2833051 - DNA, 25 bp, Homo sapien
ggtgtggtcagggtttacgactatc

SEQ ID NO: 2833052 - DNA, 25 bp, Homo sapien
atctggccttccatggaatttccca

SEQ ID NO: 2833053 - DNA, 25 bp, Homo sapien
ggttcaaccaatgccacacagaggg

SEQ ID NO: 2833054 - DNA, 25 bp, Homo sapien
gaatgctgatgactcttgcaggccc

SEQ ID NO: 2833055 - DNA, 25 bp, Homo sapien
tccgcatgcagctgtccactggagc

SEQ ID NO: 2833056 - DNA, 25 bp, Homo sapien
tggagctcaacccaccctaggtttc

SEQ ID NO: 2833057 - DNA, 25 bp, Homo sapien
cgcatgcagctgtccactggagctc

SEQ ID NO: 2833058 - DNA, 25 bp, Homo sapien
cactggagctcaacccaccctaggt

SEQ ID NO: 2833059 - DNA, 25 bp, Homo sapien
ggattcacatgcatacgcaagcgtg

SEQ ID NO: 2833060 - DNA, 25 bp, Homo sapien
gaaccagctagttgcagacttggaa

SEQ ID NO: 2833061 - DNA, 25 bp, Homo sapien
caaactggctgggtcgttagatgct

SEQ ID NO: 2833062 - DNA, 25 bp, Homo sapien
cagagcctgatattgactttggacc

SEQ ID NO: 2833063 - DNA, 25 bp, Homo sapien
taggccaggttgacaccagtggtca

SEQ ID NO: 2833064 - DNA, 25 bp, Homo sapien
ctgtaggccaggttgacaccagtgg

SEQ ID NO: 2833065 - DNA, 25 bp, Homo sapien
gttgacaccagtggtcacccaacag

SEQ ID NO: 2833066 - DNA, 25 bp, Homo sapien
caggttgacaccagtggtcacccaa

SEQ ID NO: 2833067 - DNA, 25 bp, Homo sapien
gaatatcctggctctgtggagagga

SEQ ID NO: 2833068 - DNA, 25 bp, Homo sapien
ggagaagagccagagaagcaggatg

SEQ ID NO: 2833069 - DNA, 25 bp, Homo sapien
gagaagcaggatgggcagtcctcat

SEQ ID NO: 2833070 - DNA, 25 bp, Homo sapien
ccagaatatcctggctctgtggaga

SEQ ID NO: 2833071 - DNA, 25 bp, Homo sapien
ttgttctcaccaccactaggataag

SEQ ID NO: 2833072 - DNA, 25 bp, Homo sapien
aatgtcacagctctccgcagtcagc

SEQ ID NO: 2833073 - DNA, 25 bp, Homo sapien
ctctgagggagaatgcttgtgcacc

SEQ ID NO: 2833074 - DNA, 25 bp, Homo sapien
agctacttctcagggactgctggtc

SEQ ID NO: 2833075 - DNA, 25 bp, Homo sapien
tagcaggactatgcaaacccaaagg

SEQ ID NO: 2833076 - DNA, 25 bp, Homo sapien
gatagcaggactatgcaaacccaaa

SEQ ID NO: 2833077 - DNA, 25 bp, Homo sapien
aacccaaaggccgagagagctgaga

SEQ ID NO: 2833078 - DNA, 25 bp, Homo sapien
ccaaaggccgagagagctgagaagc

SEQ ID NO: 2833079 - DNA, 25 bp, Homo sapien
actttcttgccaagactcgtgacca

SEQ ID NO: 2833080 - DNA, 25 bp, Homo sapien
gatgtctcgagtggctgcaagactg

SEQ ID NO: 2833081 - DNA, 25 bp, Homo sapien
gaacagaagtgatgtctcgagtggc

SEQ ID NO: 2833082 - DNA, 25 bp, Homo sapien
aagtgatgtctcgagtggctgcaag

SEQ ID NO: 2833083 - DNA, 25 bp, Homo sapien
aaaatagccagctgtggcggcatgc

SEQ ID NO: 2833084 - DNA, 25 bp, Homo sapien
aatagccagctgtggcggcatgcac

SEQ ID NO: 2833085 - DNA, 25 bp, Homo sapien
aaaaaatagccagctgtggcggcat

SEQ ID NO: 2833086 - DNA, 25 bp, Homo sapien
acctatagtccaaactactcagaag

SEQ ID NO: 2833087 - DNA, 25 bp, Homo sapien
ctactgctgcattcttcttcttctt

SEQ ID NO: 2833088 - DNA, 25 bp, Homo sapien
cattcttcttcttcttcctcttctt

SEQ ID NO: 2833089 - DNA, 25 bp, Homo sapien
gttatggctaagctctattttccct

SEQ ID NO: 2833090 - DNA, 25 bp, Homo sapien
taggccatcatatgtaacctgctgg

SEQ ID NO: 2833091 - DNA, 25 bp, Homo sapien
tcaacacggtggcttaataacagca

SEQ ID NO: 2833092 - DNA, 25 bp, Homo sapien
gaacgtgcacaagaataggccatca

SEQ ID NO: 2833093 - DNA, 25 bp, Homo sapien
catgtctgggacaagttcagcttgg

SEQ ID NO: 2833094 - DNA, 25 bp, Homo sapien
catgaggcactcctgaatggcagca

SEQ ID NO: 2833095 - DNA, 25 bp, Homo sapien
ccgcagatgcgccttcctaattcat

SEQ ID NO: 2833096 - DNA, 25 bp, Homo sapien
ttattaggacttatgcatgaggcac

SEQ ID NO: 2833097 - DNA, 25 bp, Homo sapien
ccctagagttaactaaattggcaga

SEQ ID NO: 2833098 - DNA, 25 bp, Homo sapien
gctaagtgctttgacccatagggtc

SEQ ID NO: 2833099 - DNA, 25 bp, Homo sapien
catagggtctatctatggcaatggc

SEQ ID NO: 2833100 - DNA, 25 bp, Homo sapien
taatagaccatagtgtccctagagt

SEQ ID NO: 2833101 - DNA, 25 bp, Homo sapien
tagggagatgaaacccaagctaagt

SEQ ID NO: 2833102 - DNA, 25 bp, Homo sapien
tcgtgcaaaatctccaaagaggtga

SEQ ID NO: 2833103 - DNA, 25 bp, Homo sapien
cactgttactgatcttggtcatcgc

SEQ ID NO: 2833104 - DNA, 25 bp, Homo sapien
ttttatctgcctcgtgaaccccagg

SEQ ID NO: 2833105 - DNA, 25 bp, Homo sapien
cgattttcacaacaaatgaagtttc

SEQ ID NO: 2833106 - DNA, 25 bp, Homo sapien
gagaaaggagtttgtcaccaactgt

SEQ ID NO: 2833107 - DNA, 25 bp, Homo sapien
tgaagtttcctaagaacctagatgt

SEQ ID NO: 2833108 - DNA, 25 bp, Homo sapien
tcctgggtcgtttctgtccaataag

SEQ ID NO: 2833109 - DNA, 25 bp, Homo sapien
tttacgcctggaccaagtggccatg

SEQ ID NO: 2833110 - DNA, 25 bp, Homo sapien
ggagggaccacacttctggaaagac

SEQ ID NO: 2833111 - DNA, 25 bp, Homo sapien
cattttgtagatgcactggcaggga

SEQ ID NO: 2833112 - DNA, 25 bp, Homo sapien
cctggagaggagtaagtaggcccca

SEQ ID NO: 2833113 - DNA, 25 bp, Homo sapien
taaaagagtcgaagtaggcaagccc

SEQ ID NO: 2833114 - DNA, 25 bp, Homo sapien
caaagacattttggtggctccaccc

SEQ ID NO: 2833115 - DNA, 25 bp, Homo sapien
caagtattagcacaggactggtcca

SEQ ID NO: 2833116 - DNA, 25 bp, Homo sapien
ggatttgtgacctagttctcccagg

SEQ ID NO: 2833117 - DNA, 25 bp, Homo sapien
aggttccagtgagccttgatcgcac

SEQ ID NO: 2833118 - DNA, 25 bp, Homo sapien
agccttgatcgcactactgtactcc

SEQ ID NO: 2833119 - DNA, 25 bp, Homo sapien
gtgagccttgatcgcactactgtac

SEQ ID NO: 2833120 - DNA, 25 bp, Homo sapien
gttccagtgagccttgatcgcacta

SEQ ID NO: 2833121 - DNA, 25 bp, Homo sapien
atcatagctgcagtactgttctggg

SEQ ID NO: 2833122 - DNA, 25 bp, Homo sapien
cctgcccaggcgttatatcatagct

SEQ ID NO: 2833123 - DNA, 25 bp, Homo sapien
tccagcttacattacagcctggctg

SEQ ID NO: 2833124 - DNA, 25 bp, Homo sapien
agcctggctgctattgcgaaccctg

SEQ ID NO: 2833125 - DNA, 25 bp, Homo sapien
gcttagaggataccagttgacagga

SEQ ID NO: 2833126 - DNA, 25 bp, Homo sapien
ggaacatctgtcacacatgactgag

SEQ ID NO: 2833127 - DNA, 25 bp, Homo sapien
cactgcagcctactagtttgggcaa

SEQ ID NO: 2833128 - DNA, 25 bp, Homo sapien
caaaagcagagtcatgccagaccta

SEQ ID NO: 2833129 - DNA, 25 bp, Homo sapien
gaaatgctcgtcatacagtaaactc

SEQ ID NO: 2833130 - DNA, 25 bp, Homo sapien
gactgactgtaacgattgacaccaa

SEQ ID NO: 2833131 - DNA, 25 bp, Homo sapien
cctgtggagaaattcgttgttccca

SEQ ID NO: 2833132 - DNA, 25 bp, Homo sapien
ccccatttggtgaagtgaaaaacag

SEQ ID NO: 2833133 - DNA, 25 bp, Homo sapien
aagggctaggtctggaaagattcca

SEQ ID NO: 2833134 - DNA, 25 bp, Homo sapien
gacgcatttactggaagctcctcaa

SEQ ID NO: 2833135 - DNA, 25 bp, Homo sapien
gttgagcacgtgactaaacctcctg

SEQ ID NO: 2833136 - DNA, 25 bp, Homo sapien
tatgtgccccatagccaagagaggt

SEQ ID NO: 2833137 - DNA, 25 bp, Homo sapien
ataaatttccctatataccgtgctt

SEQ ID NO: 2833138 - DNA, 25 bp, Homo sapien
tatcactttttataccatcgatttg

SEQ ID NO: 2833139 - DNA, 25 bp, Homo sapien
gatatcctttcttgatcgaatcggc

SEQ ID NO: 2833140 - DNA, 25 bp, Homo sapien
cctatataccgtgctttaagtgtgt

SEQ ID NO: 2833141 - DNA, 25 bp, Homo sapien
ctccaagctaaaacaccatcctggg

SEQ ID NO: 2833142 - DNA, 25 bp, Homo sapien
ttctccaagctaaaacaccatcctg

SEQ ID NO: 2833143 - DNA, 25 bp, Homo sapien
tgttctccaagctaaaacaccatcc

SEQ ID NO: 2833144 - DNA, 25 bp, Homo sapien
tctccaagctaaaacaccatcctgg

SEQ ID NO: 2833145 - DNA, 25 bp, Homo sapien
tggccatcttggaacggaatcctca

SEQ ID NO: 2833146 - DNA, 25 bp, Homo sapien
tggaacggaatcctcaatgagatat

SEQ ID NO: 2833147 - DNA, 25 bp, Homo sapien
gccatcttggaacggaatcctcaat

SEQ ID NO: 2833148 - DNA, 25 bp, Homo sapien
tcttggaacggaatcctcaatgaga

SEQ ID NO: 2833149 - DNA, 25 bp, Homo sapien
gcaaatagggctaagtacatagcct

SEQ ID NO: 2833150 - DNA, 25 bp, Homo sapien
aatactccagttaaagcaaataggg

SEQ ID NO: 2833151 - DNA, 25 bp, Homo sapien
tttgtaatgcccactaatactccag

SEQ ID NO: 2833152 - DNA, 25 bp, Homo sapien
ctttggagacaagtgttccaggacc

SEQ ID NO: 2833153 - DNA, 25 bp, Homo sapien
gccctggttcattctctatcctgga

SEQ ID NO: 2833154 - DNA, 25 bp, Homo sapien
tagcacctgcatagccaaatgtaga

SEQ ID NO: 2833155 - DNA, 25 bp, Homo sapien
aatggtctctcctccccgctggagt

SEQ ID NO: 2833156 - DNA, 25 bp, Homo sapien
gccttggcttcctatttcacctaga

SEQ ID NO: 2833157 - DNA, 25 bp, Homo sapien
cggcaaccagccctagtgttaatga

SEQ ID NO: 2833158 - DNA, 25 bp, Homo sapien
catggcgataccttgtcctgagtaa

SEQ ID NO: 2833159 - DNA, 25 bp, Homo sapien
gatgtactgatcaatgcaccaccta

SEQ ID NO: 2833160 - DNA, 25 bp, Homo sapien
cctgagtaaggaatcttagaagttc

SEQ ID NO: 2833161 - DNA, 25 bp, Homo sapien
acccagttggccgtagatactgaaa

SEQ ID NO: 2833162 - DNA, 25 bp, Homo sapien
ccagttggccgtagatactgaaact

SEQ ID NO: 2833163 - DNA, 25 bp, Homo sapien
tttacccagttggccgtagatactg

SEQ ID NO: 2833164 - DNA, 25 bp, Homo sapien
agttggccgtagatactgaaactgc

SEQ ID NO: 2833165 - DNA, 25 bp, Homo sapien
gaggagatttactatatgaactggc

SEQ ID NO: 2833166 - DNA, 25 bp, Homo sapien
tgaactggctcatatgattacagag

SEQ ID NO: 2833167 - DNA, 25 bp, Homo sapien
agaaacccaactaataggattacag

SEQ ID NO: 2833168 - DNA, 25 bp, Homo sapien
gaaaggtgatggtgtaattcagtcc

SEQ ID NO: 2833169 - DNA, 25 bp, Homo sapien
tggacctaccacatgctaactatag

SEQ ID NO: 2833170 - DNA, 25 bp, Homo sapien
taagatgactgtattccctagggaa

SEQ ID NO: 2833171 - DNA, 25 bp, Homo sapien
taacctggcatctagcttagaacac

SEQ ID NO: 2833172 - DNA, 25 bp, Homo sapien
gacagaccagacctctaatatggac

SEQ ID NO: 2833173 - DNA, 25 bp, Homo sapien
cattagtcacaacaggcaaaagatg

SEQ ID NO: 2833174 - DNA, 25 bp, Homo sapien
ttagtcacaacaggcaaaagatgga

SEQ ID NO: 2833175 - DNA, 25 bp, Homo sapien
attagtcacaacaggcaaaagatgg

SEQ ID NO: 2833176 - DNA, 25 bp, Homo sapien
acagttaccactctagttcaggcca

SEQ ID NO: 2833177 - DNA, 25 bp, Homo sapien
gcctgaaaatactctgataggccag

SEQ ID NO: 2833178 - DNA, 25 bp, Homo sapien
aatgctttctaatcagtcaacctgc

SEQ ID NO: 2833179 - DNA, 25 bp, Homo sapien
ggccatcataagctcttgcctataa

SEQ ID NO: 2833180 - DNA, 25 bp, Homo sapien
caagtcttgctaggctgacgctgct

SEQ ID NO: 2833181 - DNA, 25 bp, Homo sapien
tcagaccccattgacttcagtaggg

SEQ ID NO: 2833182 - DNA, 25 bp, Homo sapien
tctgtccaggccaaacaaactggag

SEQ ID NO: 2833183 - DNA, 25 bp, Homo sapien
aactgtcctgtacctcttgaagccg

SEQ ID NO: 2833184 - DNA, 25 bp, Homo sapien
tctctactctgatgctgaagctata

SEQ ID NO: 2833185 - DNA, 25 bp, Homo sapien
tataatattggactaagcttgggcc

SEQ ID NO: 2833186 - DNA, 25 bp, Homo sapien
gacagatgctctgaatcattctcta

SEQ ID NO: 2833187 - DNA, 25 bp, Homo sapien
acacggatttgagggatctacagca

SEQ ID NO: 2833188 - DNA, 25 bp, Homo sapien
ttctatcatacatccagaggctctg

SEQ ID NO: 2833189 - DNA, 25 bp, Homo sapien
tatgctaggagctcgagctaagcac

SEQ ID NO: 2833190 - DNA, 25 bp, Homo sapien
gaggctctgcacttaatcaatacaa

SEQ ID NO: 2833191 - DNA, 25 bp, Homo sapien
tactccagcctacataacgtccaga

SEQ ID NO: 2833192 - DNA, 25 bp, Homo sapien
tcaaagggctgcttataacatgaca

SEQ ID NO: 2833193 - DNA, 25 bp, Homo sapien
tcaagctgtcagtagtcatctcgac

SEQ ID NO: 2833194 - DNA, 25 bp, Homo sapien
tctcgacacccaactgatgctgaag

SEQ ID NO: 2833195 - DNA, 25 bp, Homo sapien
cactcaaggttgttggtgggcctca

SEQ ID NO: 2833196 - DNA, 25 bp, Homo sapien
gagcgagttcggactcggaccccaa

SEQ ID NO: 2833197 - DNA, 25 bp, Homo sapien
ttttcaacactggagcttcgcggcc

SEQ ID NO: 2833198 - DNA, 25 bp, Homo sapien
caagtaggccttgcaaaaagctggg

SEQ ID NO: 2833199 - DNA, 25 bp, Homo sapien
cgcccggcgctagaggagcgagttc

SEQ ID NO: 2833200 - DNA, 25 bp, Homo sapien
tggcttgcctggtcggcggcgggtg

SEQ ID NO: 2833201 - DNA, 25 bp, Homo sapien
ctggcttgcctggtcggcggcgggt

SEQ ID NO: 2833202 - DNA, 25 bp, Homo sapien
gcttgcctggtcggcggcgggtgcc

SEQ ID NO: 2833203 - DNA, 25 bp, Homo sapien
gtcttgggtcgcctgctgcctggct

SEQ ID NO: 2833204 - DNA, 25 bp, Homo sapien
gtcagttgtcactctttaagatcca

SEQ ID NO: 2833205 - DNA, 25 bp, Homo sapien
caggccgtcagttgtcactctttaa

SEQ ID NO: 2833206 - DNA, 25 bp, Homo sapien
acgccaggccgtcagttgtcactct

SEQ ID NO: 2833207 - DNA, 25 bp, Homo sapien
ggccgtcagttgtcactctttaaga

SEQ ID NO: 2833208 - DNA, 25 bp, Homo sapien
tggaaacctccttgctactatagcg

SEQ ID NO: 2833209 - DNA, 25 bp, Homo sapien
tggttccttagcctcctggtttgtg

SEQ ID NO: 2833210 - DNA, 25 bp, Homo sapien
gaatcactctggcaattgtctgcag

SEQ ID NO: 2833211 - DNA, 25 bp, Homo sapien
gctgccactggtgcaaggccttacc

SEQ ID NO: 2833212 - DNA, 25 bp, Homo sapien
caggttgactagcaccaaaggcagg

SEQ ID NO: 2833213 - DNA, 25 bp, Homo sapien
catttgtaaaggcagcccacaggtg

SEQ ID NO: 2833214 - DNA, 25 bp, Homo sapien
gagggaggctgaatacaaagatgca

SEQ ID NO: 2833215 - DNA, 25 bp, Homo sapien
caaataagttctgtcccgtgggtag

SEQ ID NO: 2833216 - DNA, 25 bp, Homo sapien
gcttaatacctggtctaagtgacgg

SEQ ID NO: 2833217 - DNA, 25 bp, Homo sapien
cctgaacattctcatggattccata

SEQ ID NO: 2833218 - DNA, 25 bp, Homo sapien
tcttatctctgtcagggttccctga

SEQ ID NO: 2833219 - DNA, 25 bp, Homo sapien
tcctgccacagatcaaagtaaaggc

SEQ ID NO: 2833220 - DNA, 25 bp, Homo sapien
gtttcctagatctggtgcacctggg

SEQ ID NO: 2833221 - DNA, 25 bp, Homo sapien
tgagcacgcctttcccttttgtaga

SEQ ID NO: 2833222 - DNA, 25 bp, Homo sapien
tgttccttgaccgagcaagctggca

SEQ ID NO: 2833223 - DNA, 25 bp, Homo sapien
tgatcacgggcatggagagcaacta

SEQ ID NO: 2833224 - DNA, 25 bp, Homo sapien
tttgcaggccaataccaagaatccc

SEQ ID NO: 2833225 - DNA, 25 bp, Homo sapien
taagttatgacaggttttgcaggcc

SEQ ID NO: 2833226 - DNA, 25 bp, Homo sapien
gatctgatcatacggcccattactg

SEQ ID NO: 2833227 - DNA, 25 bp, Homo sapien
aaaatgctgctcttgccgggcacgg

SEQ ID NO: 2833228 - DNA, 25 bp, Homo sapien
taatcaggcaaattggcagagacct

SEQ ID NO: 2833229 - DNA, 25 bp, Homo sapien
tgcttctggctcttgtcccacgacg

SEQ ID NO: 2833230 - DNA, 25 bp, Homo sapien
agcagaaactgtttgtggcccagca

SEQ ID NO: 2833231 - DNA, 25 bp, Homo sapien
tgctgttgttaagaaatgcttgact

SEQ ID NO: 2833232 - DNA, 25 bp, Homo sapien
tatgcatccatggtctgcacagcag

SEQ ID NO: 2833233 - DNA, 25 bp, Homo sapien
cagagctgtaggtccctgggcaagt

SEQ ID NO: 2833234 - DNA, 25 bp, Homo sapien
ggcttgcattatctccagacacagg

SEQ ID NO: 2833235 - DNA, 25 bp, Homo sapien
cagataagttccaagagctgcagag

SEQ ID NO: 2833236 - DNA, 25 bp, Homo sapien
ccctgggcttacagcaaggaacaaa

SEQ ID NO: 2833237 - DNA, 25 bp, Homo sapien
gccaccttgccagctattgaagaaa

SEQ ID NO: 2833238 - DNA, 25 bp, Homo sapien
gaatggcaagttcatagacctgagg

SEQ ID NO: 2833239 - DNA, 25 bp, Homo sapien
gaagcagcgagtagggcaacgcatt

SEQ ID NO: 2833240 - DNA, 25 bp, Homo sapien
aaatagtagctactgcaaagggtgc

SEQ ID NO: 2833241 - DNA, 25 bp, Homo sapien
tatggtcacctgataaagccagaga

SEQ ID NO: 2833242 - DNA, 25 bp, Homo sapien
gatgtggtactgagtgccaggtcca

SEQ ID NO: 2833243 - DNA, 25 bp, Homo sapien
gccaggtccacctttgctaagtttg

SEQ ID NO: 2833244 - DNA, 25 bp, Homo sapien
caacaccacttagaattttccttca

SEQ ID NO: 2833245 - DNA, 25 bp, Homo sapien
tcgagttgggagtgtgcttgagaaa

SEQ ID NO: 2833246 - DNA, 25 bp, Homo sapien
tagcacaggggagatgtccacacac

SEQ ID NO: 2833247 - DNA, 25 bp, Homo sapien
ctttttgcttgtgggtggtcgagtt

SEQ ID NO: 2833248 - DNA, 25 bp, Homo sapien
tagttggaaacctggaaacgcagac

SEQ ID NO: 2833249 - DNA, 25 bp, Homo sapien
tcgagagcagttaggaggtccatgt

SEQ ID NO: 2833250 - DNA, 25 bp, Homo sapien
tccagtgcgagtggtagccagacat

SEQ ID NO: 2833251 - DNA, 25 bp, Homo sapien
cagaccatgagggtggtgtcccact

SEQ ID NO: 2833252 - DNA, 25 bp, Homo sapien
tatgatacctaggatgagagctcca

SEQ ID NO: 2833253 - DNA, 25 bp, Homo sapien
tattgtctctggtcaacaaatgaga

SEQ ID NO: 2833254 - DNA, 25 bp, Homo sapien
cacatccaccaattaaagaacttcc

SEQ ID NO: 2833255 - DNA, 25 bp, Homo sapien
caaatgagaacttttatgggtcttc

SEQ ID NO: 2833256 - DNA, 25 bp, Homo sapien
tgaaagcccaacaagacggaactgg

SEQ ID NO: 2833257 - DNA, 25 bp, Homo sapien
cacattggcacattcctacaaggga

SEQ ID NO: 2833258 - DNA, 25 bp, Homo sapien
tcagcctgaagggttgagatctagc

SEQ ID NO: 2833259 - DNA, 25 bp, Homo sapien
ccaaattttgtgaagatcctcagca

SEQ ID NO: 2833260 - DNA, 25 bp, Homo sapien
taagtttgctaagtagtccctgcac

SEQ ID NO: 2833261 - DNA, 25 bp, Homo sapien
tagcctcttttagcggccgagacag

SEQ ID NO: 2833262 - DNA, 25 bp, Homo sapien
tacccaagagataggtctcccaagc

SEQ ID NO: 2833263 - DNA, 25 bp, Homo sapien
tttccatgtccagagtaggagaggc

SEQ ID NO: 2833264 - DNA, 25 bp, Homo sapien
tgagcctgacatggtcctcagcaag

SEQ ID NO: 2833265 - DNA, 25 bp, Homo sapien
ggagtaagcatcatctggagcccag

SEQ ID NO: 2833266 - DNA, 25 bp, Homo sapien
cagagctgactgtcattacccacaa

SEQ ID NO: 2833267 - DNA, 25 bp, Homo sapien
tgatgcaaccagctttcaacagaca

SEQ ID NO: 2833268 - DNA, 25 bp, Homo sapien
ttctaggccaacatgaatgggacac

SEQ ID NO: 2833269 - DNA, 25 bp, Homo sapien
caggtacttcccagtttctaggcca

SEQ ID NO: 2833270 - DNA, 25 bp, Homo sapien
gcatgtgggtccttatgcatgcgtc

SEQ ID NO: 2833271 - DNA, 25 bp, Homo sapien
tcttgaattctgtgcgtttgcatgt

SEQ ID NO: 2833272 - DNA, 25 bp, Homo sapien
gaaagaggccatagccacgcaagtg

SEQ ID NO: 2833273 - DNA, 25 bp, Homo sapien
caccaattagagagggacagcacgt

SEQ ID NO: 2833274 - DNA, 25 bp, Homo sapien
tgagccgcccaagtagtggctccct

SEQ ID NO: 2833275 - DNA, 25 bp, Homo sapien
gaagttcatgttcgtgcacaccaat

SEQ ID NO: 2833276 - DNA, 25 bp, Homo sapien
aagagcgacccttgtgtgaagtcca

SEQ ID NO: 2833277 - DNA, 25 bp, Homo sapien
gaatgcctgttacaaattagcagct

SEQ ID NO: 2833278 - DNA, 25 bp, Homo sapien
tccacagccggggtttcctacagac

SEQ ID NO: 2833279 - DNA, 25 bp, Homo sapien
agtgtgggaaagagcgacccttgtg

SEQ ID NO: 2833280 - DNA, 25 bp, Homo sapien
tcagtgggttctaccagtccagtac

SEQ ID NO: 2833281 - DNA, 25 bp, Homo sapien
gaggccgtgcctcaggtgtgctcta

SEQ ID NO: 2833282 - DNA, 25 bp, Homo sapien
cacttcccgagcatctgtggcagga

SEQ ID NO: 2833283 - DNA, 25 bp, Homo sapien
tgcaacaactccctgctcagtgggt

SEQ ID NO: 2833284 - DNA, 25 bp, Homo sapien
catcgcttggtagcagcttggaaga

SEQ ID NO: 2833285 - DNA, 25 bp, Homo sapien
ctggcaaagccatcgcttggtagca

SEQ ID NO: 2833286 - DNA, 25 bp, Homo sapien
tggaagacaccaccaaagaagctct

SEQ ID NO: 2833287 - DNA, 25 bp, Homo sapien
gctctcatggaagcggcagatttcc

SEQ ID NO: 2833288 - DNA, 25 bp, Homo sapien
tcacagcctcttccagataggcagg

SEQ ID NO: 2833289 - DNA, 25 bp, Homo sapien
gcagggcactgagctctgtgggcca

SEQ ID NO: 2833290 - DNA, 25 bp, Homo sapien
atagatgggcttcacagcctcttcc

SEQ ID NO: 2833291 - DNA, 25 bp, Homo sapien
cagcctcttccagataggcagggca

SEQ ID NO: 2833292 - DNA, 25 bp, Homo sapien
taatgagatggcagatgtgagcaca

SEQ ID NO: 2833293 - DNA, 25 bp, Homo sapien
tttgcgagggttgcaaggatgtaat

SEQ ID NO: 2833294 - DNA, 25 bp, Homo sapien
gagatggcagatgtgagcacagctc

SEQ ID NO: 2833295 - DNA, 25 bp, Homo sapien
atgtaatgagatggcagatgtgagc

SEQ ID NO: 2833296 - DNA, 25 bp, Homo sapien
agcactgatgctgagctgaaacttc

SEQ ID NO: 2833297 - DNA, 25 bp, Homo sapien
agcaccagaaaatgtccaaatgacc

SEQ ID NO: 2833298 - DNA, 25 bp, Homo sapien
catgtgcaccagaatacccacacag

SEQ ID NO: 2833299 - DNA, 25 bp, Homo sapien
tataccctgtaacccaagagtccca

SEQ ID NO: 2833300 - DNA, 25 bp, Homo sapien
cgcgcccagcgactagtctttaaaa

SEQ ID NO: 2833301 - DNA, 25 bp, Homo sapien
tctagccccgaacagcacagtgaat

SEQ ID NO: 2833302 - DNA, 25 bp, Homo sapien
tgttactgcagattgaggagcctca

SEQ ID NO: 2833303 - DNA, 25 bp, Homo sapien
gaaaacagtatatccctcagtggca

SEQ ID NO: 2833304 - DNA, 25 bp, Homo sapien
tcagactctagagccctgggcaagg

SEQ ID NO: 2833305 - DNA, 25 bp, Homo sapien
tggccctcagcagactggttatcca

SEQ ID NO: 2833306 - DNA, 25 bp, Homo sapien
ggccctcagcagactggttatccag

SEQ ID NO: 2833307 - DNA, 25 bp, Homo sapien
gccctcagcagactggttatccagt

SEQ ID NO: 2833308 - DNA, 25 bp, Homo sapien
ggaggatcacatagggtcaccacac

SEQ ID NO: 2833309 - DNA, 25 bp, Homo sapien
tcctggacttggagggaactgacta

SEQ ID NO: 2833310 - DNA, 25 bp, Homo sapien
ggcatggcctttagcactgtgggaa

SEQ ID NO: 2833311 - DNA, 25 bp, Homo sapien
tgaactacagtaggcctgtccctgg

SEQ ID NO: 2833312 - DNA, 25 bp, Homo sapien
taattataggccagtcaaggtggct

SEQ ID NO: 2833313 - DNA, 25 bp, Homo sapien
agtaattataggccagtcaaggtgg

SEQ ID NO: 2833314 - DNA, 25 bp, Homo sapien
gtaattataggccagtcaaggtggc

SEQ ID NO: 2833315 - DNA, 25 bp, Homo sapien
aagtaattataggccagtcaaggtg

SEQ ID NO: 2833316 - DNA, 25 bp, Homo sapien
gaattgtgtatagtttcacatctcc

SEQ ID NO: 2833317 - DNA, 25 bp, Homo sapien
tacaccgagattgcactaagccgag

SEQ ID NO: 2833318 - DNA, 25 bp, Homo sapien
gcctgtgaggtcgagactacaccga

SEQ ID NO: 2833319 - DNA, 25 bp, Homo sapien
tgtaatcccaccatccaaagataat

SEQ ID NO: 2833320 - DNA, 25 bp, Homo sapien
gagacaagcggtcatgctgcatgtc

SEQ ID NO: 2833321 - DNA, 25 bp, Homo sapien
ttttgcccagggctctactgcaggg

SEQ ID NO: 2833322 - DNA, 25 bp, Homo sapien
aaagaaagttgttaatgactcagcc

SEQ ID NO: 2833323 - DNA, 25 bp, Homo sapien
ctatctccagtactgccgaaaagag

SEQ ID NO: 2833324 - DNA, 25 bp, Homo sapien
tccaagtctcggaaagttggacacc

SEQ ID NO: 2833325 - DNA, 25 bp, Homo sapien
ctcggaaagttggacaccccttcag

SEQ ID NO: 2833326 - DNA, 25 bp, Homo sapien
tgttccaagtctcggaaagttggac

SEQ ID NO: 2833327 - DNA, 25 bp, Homo sapien
caggctgttccaagtctcggaaagt

SEQ ID NO: 2833328 - DNA, 25 bp, Homo sapien
caatccaaggcatttggcccgaaat

SEQ ID NO: 2833329 - DNA, 25 bp, Homo sapien
ttctggacaaattccagattgacag

SEQ ID NO: 2833330 - DNA, 25 bp, Homo sapien
aaatggatgtgaagacctcacccag

SEQ ID NO: 2833331 - DNA, 25 bp, Homo sapien
cccagcgcccgcctgatgtaaggtg

SEQ ID NO: 2833332 - DNA, 25 bp, Homo sapien
gccatagggtctgacccgagcctgg

SEQ ID NO: 2833333 - DNA, 25 bp, Homo sapien
gagccatagggtctgacccgagcct

SEQ ID NO: 2833334 - DNA, 25 bp, Homo sapien
cagagccatagggtctgacccgagc

SEQ ID NO: 2833335 - DNA, 25 bp, Homo sapien
tctgacccgagcctggtggctggga

SEQ ID NO: 2833336 - DNA, 25 bp, Homo sapien
ccttcgaaactgcaggtggcctcca

SEQ ID NO: 2833337 - DNA, 25 bp, Homo sapien
tccagggcataggtggggcaaaccc

SEQ ID NO: 2833338 - DNA, 25 bp, Homo sapien
cagggcataggtggggcaaacccta

SEQ ID NO: 2833339 - DNA, 25 bp, Homo sapien
cctccagggcataggtggggcaaac

SEQ ID NO: 2833340 - DNA, 25 bp, Homo sapien
ctggggcctgtagcggcagagccat

SEQ ID NO: 2833341 - DNA, 25 bp, Homo sapien
cctggggcctgtagcggcagagcca

SEQ ID NO: 2833342 - DNA, 25 bp, Homo sapien
ggccctggggcctgtagcggcagag

SEQ ID NO: 2833343 - DNA, 25 bp, Homo sapien
tatataagcatgttcctatgacagg

SEQ ID NO: 2833344 - DNA, 25 bp, Homo sapien
cagaatcaactgacagccctggtga

SEQ ID NO: 2833345 - DNA, 25 bp, Homo sapien
tattgaacggtacagacagagcatt

SEQ ID NO: 2833346 - DNA, 25 bp, Homo sapien
gaaactggatggcaagtgctaccca

SEQ ID NO: 2833347 - DNA, 25 bp, Homo sapien
caataataagtccatcagtgtttcc

SEQ ID NO: 2833348 - DNA, 25 bp, Homo sapien
aaagtcaagttcaggcgggatgcca

SEQ ID NO: 2833349 - DNA, 25 bp, Homo sapien
aatagatgcatgtccctgttcaccc

SEQ ID NO: 2833350 - DNA, 25 bp, Homo sapien
aaatcatctacaagttaaatttctc

SEQ ID NO: 2833351 - DNA, 25 bp, Homo sapien
ggcgccgagcaaggcactgtataaa

SEQ ID NO: 2833352 - DNA, 25 bp, Homo sapien
caattttaagtcataccaaggcgct

SEQ ID NO: 2833353 - DNA, 25 bp, Homo sapien
gatccacacgaaaaagtgccaagtt

SEQ ID NO: 2833354 - DNA, 25 bp, Homo sapien
cagggccagctttacaccacaagaa

SEQ ID NO: 2833355 - DNA, 25 bp, Homo sapien
acgctgtagactcagcccaatatcc

SEQ ID NO: 2833356 - DNA, 25 bp, Homo sapien
tgtgaagacacgctgtagactcagc

SEQ ID NO: 2833357 - DNA, 25 bp, Homo sapien
ctacggtgcacagggaatggcctgg

SEQ ID NO: 2833358 - DNA, 25 bp, Homo sapien
ggcctggatggagggcaaccggact

SEQ ID NO: 2833359 - DNA, 25 bp, Homo sapien
taagaagccataaggatccagggcc

SEQ ID NO: 2833360 - DNA, 25 bp, Homo sapien
gccataaggatccagggccttctta

SEQ ID NO: 2833361 - DNA, 25 bp, Homo sapien
gtggttctccctcatctaagaagcc

SEQ ID NO: 2833362 - DNA, 25 bp, Homo sapien
tggttctccctcatctaagaagcca

SEQ ID NO: 2833363 - DNA, 25 bp, Homo sapien
ggactccaggttcattgagtaggta

SEQ ID NO: 2833364 - DNA, 25 bp, Homo sapien
tttgttggctgccactccgactgct

SEQ ID NO: 2833365 - DNA, 25 bp, Homo sapien
cttcccatccacgtttgttggctgc

SEQ ID NO: 2833366 - DNA, 25 bp, Homo sapien
tcattgagtaggtaccccttcccat

SEQ ID NO: 2833367 - DNA, 25 bp, Homo sapien
agaagagcaagaggctatcaactcc

SEQ ID NO: 2833368 - DNA, 25 bp, Homo sapien
gagcaagaggctatcaactcccttc

SEQ ID NO: 2833369 - DNA, 25 bp, Homo sapien
aggctatcaactcccttccagtgca

SEQ ID NO: 2833370 - DNA, 25 bp, Homo sapien
cctcaatgagccagctcctctcagc

SEQ ID NO: 2833371 - DNA, 25 bp, Homo sapien
gggacccatcgctgatagtgcctga

SEQ ID NO: 2833372 - DNA, 25 bp, Homo sapien
gaagcctgatgtgcatttcccgaac

SEQ ID NO: 2833373 - DNA, 25 bp, Homo sapien
tcatattaacggatcctaaaggctg

SEQ ID NO: 2833374 - DNA, 25 bp, Homo sapien
tgtgggacaatgcaagcagccaggt

SEQ ID NO: 2833375 - DNA, 25 bp, Homo sapien
tgtcctcaggtaatttcccttcctc

SEQ ID NO: 2833376 - DNA, 25 bp, Homo sapien
tcctcaggtaatttcccttcctcat

SEQ ID NO: 2833377 - DNA, 25 bp, Homo sapien
gtcctcaggtaatttcccttcctca

SEQ ID NO: 2833378 - DNA, 25 bp, Homo sapien
agacagtcaagcaggcaggccaggc

SEQ ID NO: 2833379 - DNA, 25 bp, Homo sapien
ggaagcccttcacaggacccagaca

SEQ ID NO: 2833380 - DNA, 25 bp, Homo sapien
caatcaattcagtgccaggtggagt

SEQ ID NO: 2833381 - DNA, 25 bp, Homo sapien
gccaggtggagttctgatcatcttt

SEQ ID NO: 2833382 - DNA, 25 bp, Homo sapien
ggtgctgtccggcacaacttccact

SEQ ID NO: 2833383 - DNA, 25 bp, Homo sapien
gtgacacctggaagttgtacagatc

SEQ ID NO: 2833384 - DNA, 25 bp, Homo sapien
gtacagatcactggtgctgtccggc

SEQ ID NO: 2833385 - DNA, 25 bp, Homo sapien
tgggtgacacctggaagttgtacag

SEQ ID NO: 2833386 - DNA, 25 bp, Homo sapien
ttagtttgcaagacatcgagcgccc

SEQ ID NO: 2833387 - DNA, 25 bp, Homo sapien
cagcctgcactaatgggccaccatg

SEQ ID NO: 2833388 - DNA, 25 bp, Homo sapien
aaagagtcatcccactgacctgtgg

SEQ ID NO: 2833389 - DNA, 25 bp, Homo sapien
ccacaggtcaaggttgtgtgctttc

SEQ ID NO: 2833390 - DNA, 25 bp, Homo sapien
gaaggtatcagggctggaatcccca

SEQ ID NO: 2833391 - DNA, 25 bp, Homo sapien
ggagctgctgagtccatcagagaag

SEQ ID NO: 2833392 - DNA, 25 bp, Homo sapien
gctgtggtcatcaggcagagtggag

SEQ ID NO: 2833393 - DNA, 25 bp, Homo sapien
tagcctggaactgtgtagctgctgt

SEQ ID NO: 2833394 - DNA, 25 bp, Homo sapien
ggcccacaggtgaccaaaggcctgg

SEQ ID NO: 2833395 - DNA, 25 bp, Homo sapien
ccacaggtgaccaaaggcctggctg

SEQ ID NO: 2833396 - DNA, 25 bp, Homo sapien
gcctggctgcttaggaccacactca

SEQ ID NO: 2833397 - DNA, 25 bp, Homo sapien
caaaggcctggctgcttaggaccac

SEQ ID NO: 2833398 - DNA, 25 bp, Homo sapien
cttggccttgctcttagcatctcgg

SEQ ID NO: 2833399 - DNA, 25 bp, Homo sapien
tggccttgctcttagcatctcggct

SEQ ID NO: 2833400 - DNA, 25 bp, Homo sapien
ccttgctcttagcatctcggctgga

SEQ ID NO: 2833401 - DNA, 25 bp, Homo sapien
gccttgctcttagcatctcggctgg

SEQ ID NO: 2833402 - DNA, 25 bp, Homo sapien
tttctctggttcttggtgagaggtg

SEQ ID NO: 2833403 - DNA, 25 bp, Homo sapien
cttttctctggttcttggtgagagg

SEQ ID NO: 2833404 - DNA, 25 bp, Homo sapien
tctctggttcttggtgagaggtgga

SEQ ID NO: 2833405 - DNA, 25 bp, Homo sapien
ctctggttcttggtgagaggtggaa

SEQ ID NO: 2833406 - DNA, 25 bp, Homo sapien
tgttcctgctctggtctttcacctc

SEQ ID NO: 2833407 - DNA, 25 bp, Homo sapien
tcgcacagctgagctgcccttgttc

SEQ ID NO: 2833408 - DNA, 25 bp, Homo sapien
cttgttcctgctctggtctttcacc

SEQ ID NO: 2833409 - DNA, 25 bp, Homo sapien
actcgcacagctgagctgcccttgt

SEQ ID NO: 2833410 - DNA, 25 bp, Homo sapien
catggcacagcgaaagttggccttc

SEQ ID NO: 2833411 - DNA, 25 bp, Homo sapien
gggagttcatggcacagcgaaagtt

SEQ ID NO: 2833412 - DNA, 25 bp, Homo sapien
gttcatggcacagcgaaagttggcc

SEQ ID NO: 2833413 - DNA, 25 bp, Homo sapien
ctggcagggagttcatggcacagcg

SEQ ID NO: 2833414 - DNA, 25 bp, Homo sapien
ggcatccttgttgatgtcccagcca

SEQ ID NO: 2833415 - DNA, 25 bp, Homo sapien
ccatgggatctggaagatcatctcc

SEQ ID NO: 2833416 - DNA, 25 bp, Homo sapien
gcccagctccggaacaaacaggcat

SEQ ID NO: 2833417 - DNA, 25 bp, Homo sapien
tggcagcatgcttccatgggatctg

SEQ ID NO: 2833418 - DNA, 25 bp, Homo sapien
gaacaatacacacatacacataagg

SEQ ID NO: 2833419 - DNA, 25 bp, Homo sapien
tgaacaatacacacatacacataag

SEQ ID NO: 2833420 - DNA, 25 bp, Homo sapien
ctgaacaatacacacatacacataa

SEQ ID NO: 2833421 - DNA, 25 bp, Homo sapien
ctgtgtcaggtcagagaccacagac

SEQ ID NO: 2833422 - DNA, 25 bp, Homo sapien
tgtcaggtcagagaccacagacttt

SEQ ID NO: 2833423 - DNA, 25 bp, Homo sapien
gaccacagactttggggctgagtct

SEQ ID NO: 2833424 - DNA, 25 bp, Homo sapien
cagactttggggctgagtctgagac

SEQ ID NO: 2833425 - DNA, 25 bp, Homo sapien
gacatctggcttggacacccatctt

SEQ ID NO: 2833426 - DNA, 25 bp, Homo sapien
ctgcccagccagacaggtctgagaa

SEQ ID NO: 2833427 - DNA, 25 bp, Homo sapien
ctggcttggacacccatcttgaggc

SEQ ID NO: 2833428 - DNA, 25 bp, Homo sapien
gcccagccagacaggtctgagaaaa

SEQ ID NO: 2833429 - DNA, 25 bp, Homo sapien
tctaacccacaggactactgcgagg

SEQ ID NO: 2833430 - DNA, 25 bp, Homo sapien
tatgttgccccaagtgcaccagcta

SEQ ID NO: 2833431 - DNA, 25 bp, Homo sapien
ccagagtgactggtgcaagattaac

SEQ ID NO: 2833432 - DNA, 25 bp, Homo sapien
tatttgttcgattggagccctgcag

SEQ ID NO: 2833433 - DNA, 25 bp, Homo sapien
gaaacacctgcttgtcccgttatca

SEQ ID NO: 2833434 - DNA, 25 bp, Homo sapien
aagctttggtccctccagaagtaca

SEQ ID NO: 2833435 - DNA, 25 bp, Homo sapien
tgcatctgaagctttggtccctcca

SEQ ID NO: 2833436 - DNA, 25 bp, Homo sapien
catgggttaaaacagtggcaggaaa

SEQ ID NO: 2833437 - DNA, 25 bp, Homo sapien
cgggatttggttggaattaatctgc

SEQ ID NO: 2833438 - DNA, 25 bp, Homo sapien
tcatgcgcatccgagtgatgggcat

SEQ ID NO: 2833439 - DNA, 25 bp, Homo sapien
agccagggtctcatgcgcatccgag

SEQ ID NO: 2833440 - DNA, 25 bp, Homo sapien
gggtctcatgcgcatccgagtgatg

SEQ ID NO: 2833441 - DNA, 25 bp, Homo sapien
actacactcagtgcggaggggagct

SEQ ID NO: 2833442 - DNA, 25 bp, Homo sapien
ctcagccagctgctaggtactacac

SEQ ID NO: 2833443 - DNA, 25 bp, Homo sapien
gctaggtactacactcagtgcggag

SEQ ID NO: 2833444 - DNA, 25 bp, Homo sapien
cctcagccagctgctaggtactaca

SEQ ID NO: 2833445 - DNA, 25 bp, Homo sapien
cagtctccgtaggtcacgattccct

SEQ ID NO: 2833446 - DNA, 25 bp, Homo sapien
gcccacgcgtgggctgacactcggt

SEQ ID NO: 2833447 - DNA, 25 bp, Homo sapien
cacggcgtgtggatgcgcgggacga

SEQ ID NO: 2833448 - DNA, 25 bp, Homo sapien
cagggagcccaaaacctgtcgcctg

SEQ ID NO: 2833449 - DNA, 25 bp, Homo sapien
ggctcgggcgcacgtcttgcctcga

SEQ ID NO: 2833450 - DNA, 25 bp, Homo sapien
cgtggactgggcacggctccgggtg

SEQ ID NO: 2833451 - DNA, 25 bp, Homo sapien
cgactccgagtggaagagggaagaa

SEQ ID NO: 2833452 - DNA, 25 bp, Homo sapien
tgcaggagcgattcggcggtcgcgc

SEQ ID NO: 2833453 - DNA, 25 bp, Homo sapien
cattgcaatctgagtgctgtgacca

SEQ ID NO: 2833454 - DNA, 25 bp, Homo sapien
gggttaatcccattctggcgcattg

SEQ ID NO: 2833455 - DNA, 25 bp, Homo sapien
caggaatgggcaaaactgtctacca

SEQ ID NO: 2833456 - DNA, 25 bp, Homo sapien
tccctcccgtagaggaaatgcatgg

SEQ ID NO: 2833457 - DNA, 25 bp, Homo sapien
gagtcgtgggatcctttcttggtac

SEQ ID NO: 2833458 - DNA, 25 bp, Homo sapien
gaaaacaagtgacccctgagtcgtg

SEQ ID NO: 2833459 - DNA, 25 bp, Homo sapien
gcaaatagatgcttgtccttcccct

SEQ ID NO: 2833460 - DNA, 25 bp, Homo sapien
ggaagtttgcatctttgtggtctga

SEQ ID NO: 2833461 - DNA, 25 bp, Homo sapien
caggaccagactattgttgccccaa

SEQ ID NO: 2833462 - DNA, 25 bp, Homo sapien
ggaatgatctccctaactcggatga

SEQ ID NO: 2833463 - DNA, 25 bp, Homo sapien
tgtgatttcatagtccaggaccaga

SEQ ID NO: 2833464 - DNA, 25 bp, Homo sapien
tgtgatccccagcagaacacatagg

SEQ ID NO: 2833465 - DNA, 25 bp, Homo sapien
ggccaaatgcgagggtgaggagcaa

SEQ ID NO: 2833466 - DNA, 25 bp, Homo sapien
tgggccaaatgcgagggtgaggagc

SEQ ID NO: 2833467 - DNA, 25 bp, Homo sapien
gggccaaatgcgagggtgaggagca

SEQ ID NO: 2833468 - DNA, 25 bp, Homo sapien
gcttctgccacaggcagatccgggt

SEQ ID NO: 2833469 - DNA, 25 bp, Homo sapien
gatccgggtgatggtcagcttggct

SEQ ID NO: 2833470 - DNA, 25 bp, Homo sapien
ctgtgtgaatgggactcagtggaaa

SEQ ID NO: 2833471 - DNA, 25 bp, Homo sapien
cagcttggctgtgtgaatgggactc

SEQ ID NO: 2833472 - DNA, 25 bp, Homo sapien
ttccacttgcacgtgagcaaatagg

SEQ ID NO: 2833473 - DNA, 25 bp, Homo sapien
caaataggagcttgagcctgtcgtc

SEQ ID NO: 2833474 - DNA, 25 bp, Homo sapien
caagggaacttgcaaacaccctggc

SEQ ID NO: 2833475 - DNA, 25 bp, Homo sapien
tctagggccacgaggcagcaagtta

SEQ ID NO: 2833476 - DNA, 25 bp, Homo sapien
caagaggtggcttttcgctgttgca

SEQ ID NO: 2833477 - DNA, 25 bp, Homo sapien
gtcaccctgctccatgaatcttcaa

SEQ ID NO: 2833478 - DNA, 25 bp, Homo sapien
ttcttaacagcaagagtcaccctgc

SEQ ID NO: 2833479 - DNA, 25 bp, Homo sapien
gggctgatgacggtgagtctctcat

SEQ ID NO: 2833480 - DNA, 25 bp, Homo sapien
ttttcagcttctgagaaacaggaag

SEQ ID NO: 2833481 - DNA, 25 bp, Homo sapien
tcagcttctgagaaacaggaagcat

SEQ ID NO: 2833482 - DNA, 25 bp, Homo sapien
ctttttcagcttctgagaaacagga

SEQ ID NO: 2833483 - DNA, 25 bp, Homo sapien
tttcagcttctgagaaacaggaagc

SEQ ID NO: 2833484 - DNA, 25 bp, Homo sapien
ttcataaatactattaagttaacag

SEQ ID NO: 2833485 - DNA, 25 bp, Homo sapien
cataaatactattaagttaacagac

SEQ ID NO: 2833486 - DNA, 25 bp, Homo sapien
atactgaaaattaaggcctgactct

SEQ ID NO: 2833487 - DNA, 25 bp, Homo sapien
actgaaaattaaggcctgactcttt

SEQ ID NO: 2833488 - DNA, 25 bp, Homo sapien
gaaactcttgcaggtagtctaggaa

SEQ ID NO: 2833489 - DNA, 25 bp, Homo sapien
tgttcattacaccaagaaactcttg

SEQ ID NO: 2833490 - DNA, 25 bp, Homo sapien
gtttactctccgtctttcttctcca

SEQ ID NO: 2833491 - DNA, 25 bp, Homo sapien
ccactcggtgttcattacaccaaga

SEQ ID NO: 2833492 - DNA, 25 bp, Homo sapien
gacaagtttttgaatagtctttcca

SEQ ID NO: 2833493 - DNA, 25 bp, Homo sapien
acagtacccccttgcacagtttgac

SEQ ID NO: 2833494 - DNA, 25 bp, Homo sapien
tgtgcctattccctgaaagatttct

SEQ ID NO: 2833495 - DNA, 25 bp, Homo sapien
tccagtgtgcctattccctgaaaga

SEQ ID NO: 2833496 - DNA, 25 bp, Homo sapien
tttatgtacaggaacaggaatcctc

SEQ ID NO: 2833497 - DNA, 25 bp, Homo sapien
ttttatgtacaggaacaggaatcct

SEQ ID NO: 2833498 - DNA, 25 bp, Homo sapien
tatgtacaggaacaggaatcctcag

SEQ ID NO: 2833499 - DNA, 25 bp, Homo sapien
atttttatgtacaggaacaggaatc

SEQ ID NO: 2833500 - DNA, 25 bp, Homo sapien
tgccaaggtctctttcaccaatgca

SEQ ID NO: 2833501 - DNA, 25 bp, Homo sapien
cattggctatcagcagagttcgatg

SEQ ID NO: 2833502 - DNA, 25 bp, Homo sapien
tcgatgagtagaaagcagtgccaag

SEQ ID NO: 2833503 - DNA, 25 bp, Homo sapien
gatggcatacacgtaggcagctcca

SEQ ID NO: 2833504 - DNA, 25 bp, Homo sapien
gctctgaaacgttctgcgtttgcct

SEQ ID NO: 2833505 - DNA, 25 bp, Homo sapien
ggctctgaaacgttctgcgtttgcc

SEQ ID NO: 2833506 - DNA, 25 bp, Homo sapien
gacacaaggtcagaaagtaaaagaa

SEQ ID NO: 2833507 - DNA, 25 bp, Homo sapien
cattgtaactgtaatcttagtgaca

SEQ ID NO: 2833508 - DNA, 25 bp, Homo sapien
cttcaaagatacattaaagccttag

SEQ ID NO: 2833509 - DNA, 25 bp, Homo sapien
gaaacacttcggcaggtacgtcaga

SEQ ID NO: 2833510 - DNA, 25 bp, Homo sapien
taaggcagaagtggactagtccctc

SEQ ID NO: 2833511 - DNA, 25 bp, Homo sapien
ttagcaaggaactagcttcatctga

SEQ ID NO: 2833512 - DNA, 25 bp, Homo sapien
acatttttctgggagcaggcccatg

SEQ ID NO: 2833513 - DNA, 25 bp, Homo sapien
aactcttgtcatgatttgttggcag

SEQ ID NO: 2833514 - DNA, 25 bp, Homo sapien
cccaaatggaccaacaacaagttct

SEQ ID NO: 2833515 - DNA, 25 bp, Homo sapien
atccccaaatggaccaacaacaagt

SEQ ID NO: 2833516 - DNA, 25 bp, Homo sapien
aaatggaccaacaacaagttctgaa

SEQ ID NO: 2833517 - DNA, 25 bp, Homo sapien
aatccccaaatggaccaacaacaag

SEQ ID NO: 2833518 - DNA, 25 bp, Homo sapien
tacaaaacccaaagatagccagtgg

SEQ ID NO: 2833519 - DNA, 25 bp, Homo sapien
cagatgagggctttattcagggctc

SEQ ID NO: 2833520 - DNA, 25 bp, Homo sapien
tgcagtaaggtttcacagtagctcc

SEQ ID NO: 2833521 - DNA, 25 bp, Homo sapien
tttaaggtaacacaggaagtcagca

SEQ ID NO: 2833522 - DNA, 25 bp, Homo sapien
catagaaatacggtctgatgccgat

SEQ ID NO: 2833523 - DNA, 25 bp, Homo sapien
tgatgccgatgaaaatgtatcagct

SEQ ID NO: 2833524 - DNA, 25 bp, Homo sapien
tcttcctgtgtcagatattgaatac

SEQ ID NO: 2833525 - DNA, 25 bp, Homo sapien
cagcttctgataaaaggcggaatta

SEQ ID NO: 2833526 - DNA, 25 bp, Homo sapien
ggtatctcaaaagcctggggagcca

SEQ ID NO: 2833527 - DNA, 25 bp, Homo sapien
ccttggatatgcgaggacgatgcag

SEQ ID NO: 2833528 - DNA, 25 bp, Homo sapien
agacacagccttggatatgcgagga

SEQ ID NO: 2833529 - DNA, 25 bp, Homo sapien
gcgaggacgatgcagtgctggacaa

SEQ ID NO: 2833530 - DNA, 25 bp, Homo sapien
tacacctgaatggtgggaagctctt

SEQ ID NO: 2833531 - DNA, 25 bp, Homo sapien
taaaagaagggcctgaagcattctc

SEQ ID NO: 2833532 - DNA, 25 bp, Homo sapien
aagacccgttagagttttcatggca

SEQ ID NO: 2833533 - DNA, 25 bp, Homo sapien
accactattttatgtgccagcagga

SEQ ID NO: 2833534 - DNA, 25 bp, Homo sapien
cagcttctggtaatcactcatgatg

SEQ ID NO: 2833535 - DNA, 25 bp, Homo sapien
ttttaggacgttctgaatatgtgga

SEQ ID NO: 2833536 - DNA, 25 bp, Homo sapien
tttgtggagcttttaggacgttctg

SEQ ID NO: 2833537 - DNA, 25 bp, Homo sapien
tccagcttctggtaatcactcatga

SEQ ID NO: 2833538 - DNA, 25 bp, Homo sapien
gaagcctgtaacactcctctgcgtc

SEQ ID NO: 2833539 - DNA, 25 bp, Homo sapien
cctgtgtagcatactggcttcacca

SEQ ID NO: 2833540 - DNA, 25 bp, Homo sapien
tcctctgcgtctatcctgtgtagca

SEQ ID NO: 2833541 - DNA, 25 bp, Homo sapien
gcctgatctgcccatcgtgaagaag

SEQ ID NO: 2833542 - DNA, 25 bp, Homo sapien
tatggtcttattctagagccccgtc

SEQ ID NO: 2833543 - DNA, 25 bp, Homo sapien
tacaaactgcttagaactgcttgcc

SEQ ID NO: 2833544 - DNA, 25 bp, Homo sapien
gcattgtactcaaactgtcccgaca

SEQ ID NO: 2833545 - DNA, 25 bp, Homo sapien
tcacaggttttagtactcagagtct

SEQ ID NO: 2833546 - DNA, 25 bp, Homo sapien
atgtctttgccaacggagacccaga

SEQ ID NO: 2833547 - DNA, 25 bp, Homo sapien
tcctgactgggcatcatgtctttgc

SEQ ID NO: 2833548 - DNA, 25 bp, Homo sapien
ctttcccaggatgagctggtcggga

SEQ ID NO: 2833549 - DNA, 25 bp, Homo sapien
aagggaggtcccaatcccagcgctt

SEQ ID NO: 2833550 - DNA, 25 bp, Homo sapien
ctctgatgtagccatctgtgccgcg

SEQ ID NO: 2833551 - DNA, 25 bp, Homo sapien
cccgccacgccttggtccctggaga

SEQ ID NO: 2833552 - DNA, 25 bp, Homo sapien
ctggagaccaccctccagggcaggg

SEQ ID NO: 2833553 - DNA, 25 bp, Homo sapien
atgtagccatctgtgccgcgcctct

SEQ ID NO: 2833554 - DNA, 25 bp, Homo sapien
ggccgcgcagatcccgcttatcggg

SEQ ID NO: 2833555 - DNA, 25 bp, Homo sapien
tcgggcccatctcccgttacataag

SEQ ID NO: 2833556 - DNA, 25 bp, Homo sapien
ctggcgctcggaccgccacctttgc

SEQ ID NO: 2833557 - DNA, 25 bp, Homo sapien
gcttccagactggccggtctgcgcg

SEQ ID NO: 2833558 - DNA, 25 bp, Homo sapien
gagtgacaccttactgagccacaga

SEQ ID NO: 2833559 - DNA, 25 bp, Homo sapien
actaggggtctgcagctcgccactt

SEQ ID NO: 2833560 - DNA, 25 bp, Homo sapien
gtgcacagtgcggatggccgtcccg

SEQ ID NO: 2833561 - DNA, 25 bp, Homo sapien
tgcgaggcaggtgcacagtgcggat

SEQ ID NO: 2833562 - DNA, 25 bp, Homo sapien
agcaccgctcctcccatgggttggg

SEQ ID NO: 2833563 - DNA, 25 bp, Homo sapien
ttgggggtcttcactaggccctggc

SEQ ID NO: 2833564 - DNA, 25 bp, Homo sapien
agatcccacattgccaaagacagag

SEQ ID NO: 2833565 - DNA, 25 bp, Homo sapien
cagccagacaggactagcaccgctc

SEQ ID NO: 2833566 - DNA, 25 bp, Homo sapien
gtgtggaagtcagaccgggagtctc

SEQ ID NO: 2833567 - DNA, 25 bp, Homo sapien
cagactcatggtgtggaagtcagac

SEQ ID NO: 2833568 - DNA, 25 bp, Homo sapien
gggtgtccttgagcagactcatggt

SEQ ID NO: 2833569 - DNA, 25 bp, Homo sapien
tggtcattcagactaggggtgtcct

SEQ ID NO: 2833570 - DNA, 25 bp, Homo sapien
tgaaactgatgcaacaaactgtaat

SEQ ID NO: 2833571 - DNA, 25 bp, Homo sapien
gactacagtataagttcaaaggcac

SEQ ID NO: 2833572 - DNA, 25 bp, Homo sapien
tatacattaggaaattgggcagaca

SEQ ID NO: 2833573 - DNA, 25 bp, Homo sapien
tgggcagacattggtgtacttaaat

SEQ ID NO: 2833574 - DNA, 25 bp, Homo sapien
gtgttcatctatatcgtctcacgaa

SEQ ID NO: 2833575 - DNA, 25 bp, Homo sapien
gaggaaactacagaattgctatgac

SEQ ID NO: 2833576 - DNA, 25 bp, Homo sapien
gctaaatgaatagctctgaagtcag

SEQ ID NO: 2833577 - DNA, 25 bp, Homo sapien
aaacatggagatgcgacccttccct

SEQ ID NO: 2833578 - DNA, 25 bp, Homo sapien
gatggatatttaatgtccatctggt

SEQ ID NO: 2833579 - DNA, 25 bp, Homo sapien
ggatatttaatgtccatctggtata

SEQ ID NO: 2833580 - DNA, 25 bp, Homo sapien
tttctgagatggatatttaatgtcc

SEQ ID NO: 2833581 - DNA, 25 bp, Homo sapien
aactgctatagtaggcggggtgtgg

SEQ ID NO: 2833582 - DNA, 25 bp, Homo sapien
ccggccaggagtagcataactttaa

SEQ ID NO: 2833583 - DNA, 25 bp, Homo sapien
tttcaaccaatgtgtttcagggctg

SEQ ID NO: 2833584 - DNA, 25 bp, Homo sapien
gaatatggtctaactggattaccca

SEQ ID NO: 2833585 - DNA, 25 bp, Homo sapien
catttttatcgccacctcaagagta

SEQ ID NO: 2833586 - DNA, 25 bp, Homo sapien
tagaatgtgttcaaacaggctgggt

SEQ ID NO: 2833587 - DNA, 25 bp, Homo sapien
taattttccgcaacagtagatcctt

SEQ ID NO: 2833588 - DNA, 25 bp, Homo sapien
ggagactcttcttaactgggagaca

SEQ ID NO: 2833589 - DNA, 25 bp, Homo sapien
taacagcgcaacataggacaatctg

SEQ ID NO: 2833590 - DNA, 25 bp, Homo sapien
ctgcagtaaagagtcaattacagtt

SEQ ID NO: 2833591 - DNA, 25 bp, Homo sapien
actgcagtaaagagtcaattacagt

SEQ ID NO: 2833592 - DNA, 25 bp, Homo sapien
ttactgcagtaaagagtcaattaca

SEQ ID NO: 2833593 - DNA, 25 bp, Homo sapien
tactgcagtaaagagtcaattacag

SEQ ID NO: 2833594 - DNA, 25 bp, Homo sapien
gctcatataatgttgggccacacga

SEQ ID NO: 2833595 - DNA, 25 bp, Homo sapien
tagactaggtcatgtggccaggcca

SEQ ID NO: 2833596 - DNA, 25 bp, Homo sapien
tctgaggtactcaaaaggtgcaagt

SEQ ID NO: 2833597 - DNA, 25 bp, Homo sapien
tccatggttatagcaggccaattcc

SEQ ID NO: 2833598 - DNA, 25 bp, Homo sapien
tgcccagccaggaatttgattttta

SEQ ID NO: 2833599 - DNA, 25 bp, Homo sapien
ttttaataaatcagccaaaatatgt

SEQ ID NO: 2833600 - DNA, 25 bp, Homo sapien
gcccagccaggaatttgatttttaa

SEQ ID NO: 2833601 - DNA, 25 bp, Homo sapien
atcagccaaaatatgtatcatgttt

SEQ ID NO: 2833602 - DNA, 25 bp, Homo sapien
cctttgaagttcgtggtctttctag

SEQ ID NO: 2833603 - DNA, 25 bp, Homo sapien
gttcgtggtctttctagtttcatca

SEQ ID NO: 2833604 - DNA, 25 bp, Homo sapien
ctttgaagttcgtggtctttctagt

SEQ ID NO: 2833605 - DNA, 25 bp, Homo sapien
gaagttcgtggtctttctagtttca

SEQ ID NO: 2833606 - DNA, 25 bp, Homo sapien
tgacgcagactctcctcagtatagg

SEQ ID NO: 2833607 - DNA, 25 bp, Homo sapien
cagactctcctcagtataggcaaga

SEQ ID NO: 2833608 - DNA, 25 bp, Homo sapien
cctcagtataggcaagatacacgtg

SEQ ID NO: 2833609 - DNA, 25 bp, Homo sapien
aagatacacgtgagaaaggtccacc

SEQ ID NO: 2833610 - DNA, 25 bp, Homo sapien
aacacaaagcactcttaaggcaaag

SEQ ID NO: 2833611 - DNA, 25 bp, Homo sapien
acacaaagcactcttaaggcaaaga

SEQ ID NO: 2833612 - DNA, 25 bp, Homo sapien
aactccttgatcaaacccacagaag

SEQ ID NO: 2833613 - DNA, 25 bp, Homo sapien
acaaacacaaagcactcttaaggca

SEQ ID NO: 2833614 - DNA, 25 bp, Homo sapien
cccctcttgtggtgggaataagcct

SEQ ID NO: 2833615 - DNA, 25 bp, Homo sapien
cataatcctacgacccagagtggta

SEQ ID NO: 2833616 - DNA, 25 bp, Homo sapien
gactccaaagagtgagtccatgccc

SEQ ID NO: 2833617 - DNA, 25 bp, Homo sapien
gactgatggtaagcagaactgtcct

SEQ ID NO: 2833618 - DNA, 25 bp, Homo sapien
catgttatttcctgtataagcaaca

SEQ ID NO: 2833619 - DNA, 25 bp, Homo sapien
tgttatttcctgtataagcaacaca

SEQ ID NO: 2833620 - DNA, 25 bp, Homo sapien
ctcatgttatttcctgtataagcaa

SEQ ID NO: 2833621 - DNA, 25 bp, Homo sapien
gttatttcctgtataagcaacacat

SEQ ID NO: 2833622 - DNA, 25 bp, Homo sapien
catttccacccagaccatgatctgt

SEQ ID NO: 2833623 - DNA, 25 bp, Homo sapien
ctgagaaatcctaacattacactag

SEQ ID NO: 2833624 - DNA, 25 bp, Homo sapien
agaggtcacttagtcccacatagcc

SEQ ID NO: 2833625 - DNA, 25 bp, Homo sapien
caatactgtgagttaggcaaataac

SEQ ID NO: 2833626 - DNA, 25 bp, Homo sapien
gaagtactctttaattattacgtga

SEQ ID NO: 2833627 - DNA, 25 bp, Homo sapien
taattattacgtgaaagaatgaagg

SEQ ID NO: 2833628 - DNA, 25 bp, Homo sapien
gccagcacaatttctagaccatagg

SEQ ID NO: 2833629 - DNA, 25 bp, Homo sapien
tctagaccataggaagtactcttta

SEQ ID NO: 2833630 - DNA, 25 bp, Homo sapien
tgtcttcattccaatggacatagtt

SEQ ID NO: 2833631 - DNA, 25 bp, Homo sapien
caataataagcatctgaagtcgaag

SEQ ID NO: 2833632 - DNA, 25 bp, Homo sapien
taatcccgaggtataaagttatcaa

SEQ ID NO: 2833633 - DNA, 25 bp, Homo sapien
ctgataatcccgaggtataaagtta

SEQ ID NO: 2833634 - DNA, 25 bp, Homo sapien
cccggctaagttgccgaatgttctc

SEQ ID NO: 2833635 - DNA, 25 bp, Homo sapien
atcagcatagtccaaactttcttta

SEQ ID NO: 2833636 - DNA, 25 bp, Homo sapien
catcagcatagtccaaactttcttt

SEQ ID NO: 2833637 - DNA, 25 bp, Homo sapien
tttcttcaatatccaagcgttcttg

SEQ ID NO: 2833638 - DNA, 25 bp, Homo sapien
ttcctcttgcaaactggtatatttt

SEQ ID NO: 2833639 - DNA, 25 bp, Homo sapien
tcttttccagggcagataatttttc

SEQ ID NO: 2833640 - DNA, 25 bp, Homo sapien
tccagttccatgttagattcttcaa

SEQ ID NO: 2833641 - DNA, 25 bp, Homo sapien
tttccagggcagataatttttccag

SEQ ID NO: 2833642 - DNA, 25 bp, Homo sapien
ccagttccatgttagattcttcaag

SEQ ID NO: 2833643 - DNA, 25 bp, Homo sapien
tttcccgtttctctaattcagctct

SEQ ID NO: 2833644 - DNA, 25 bp, Homo sapien
ttttcccgtttctctaattcagctc

SEQ ID NO: 2833645 - DNA, 25 bp, Homo sapien
ttcttcttcttccatgtcgagcttt

SEQ ID NO: 2833646 - DNA, 25 bp, Homo sapien
cattatttgtatagaactgtaagtc

SEQ ID NO: 2833647 - DNA, 25 bp, Homo sapien
taaattgttaatgtctccacccaaa

SEQ ID NO: 2833648 - DNA, 25 bp, Homo sapien
gaagagtgtaaatcataagagtgta

SEQ ID NO: 2833649 - DNA, 25 bp, Homo sapien
cttccttcccaaagaactacagaag

SEQ ID NO: 2833650 - DNA, 25 bp, Homo sapien
gcaaccacatgctaggacaaccatc

SEQ ID NO: 2833651 - DNA, 25 bp, Homo sapien
tatgtgctaggtacgcaaataggaa

SEQ ID NO: 2833652 - DNA, 25 bp, Homo sapien
attaaggactcaagcaagaaacacc

SEQ ID NO: 2833653 - DNA, 25 bp, Homo sapien
taaacaatgattctacaggagtcac

SEQ ID NO: 2833654 - DNA, 25 bp, Homo sapien
taagctgcaggctggtacaagaaag

SEQ ID NO: 2833655 - DNA, 25 bp, Homo sapien
gaaaactaaattgcaacgcctccca

SEQ ID NO: 2833656 - DNA, 25 bp, Homo sapien
tggtaacttgcctacaaattgtcaa

SEQ ID NO: 2833657 - DNA, 25 bp, Homo sapien
taagtctagatggatcctgcataaa

SEQ ID NO: 2833658 - DNA, 25 bp, Homo sapien
acatgtggagtctgaactactgctg

SEQ ID NO: 2833659 - DNA, 25 bp, Homo sapien
taggcaagaacttatccagaggttt

SEQ ID NO: 2833660 - DNA, 25 bp, Homo sapien
agaggtttctctatgacagaacatg

SEQ ID NO: 2833661 - DNA, 25 bp, Homo sapien
tatgacagaacatgtggagtctgaa

SEQ ID NO: 2833662 - DNA, 25 bp, Homo sapien
tctgacccactgatatcagagcctg

SEQ ID NO: 2833663 - DNA, 25 bp, Homo sapien
tgacccactgatatcagagcctgat

SEQ ID NO: 2833664 - DNA, 25 bp, Homo sapien
ctctgacccactgatatcagagcct

SEQ ID NO: 2833665 - DNA, 25 bp, Homo sapien
tcctctgacccactgatatcagagc

SEQ ID NO: 2833666 - DNA, 25 bp, Homo sapien
ttggcataccgtaatgtactgatag

SEQ ID NO: 2833667 - DNA, 25 bp, Homo sapien
ttttaatattcttagcacgattggc

SEQ ID NO: 2833668 - DNA, 25 bp, Homo sapien
gtactgatagtttcatcataattgt

SEQ ID NO: 2833669 - DNA, 25 bp, Homo sapien
tttctggaactgacgcagcaaagca

SEQ ID NO: 2833670 - DNA, 25 bp, Homo sapien
atcatggtttttgaatttcctccta

SEQ ID NO: 2833671 - DNA, 25 bp, Homo sapien
tcatggtttttgaatttcctcctaa

SEQ ID NO: 2833672 - DNA, 25 bp, Homo sapien
catggtttttgaatttcctcctaag

SEQ ID NO: 2833673 - DNA, 25 bp, Homo sapien
catcatggtttttgaatttcctcct

SEQ ID NO: 2833674 - DNA, 25 bp, Homo sapien
gaagacgagtcagtttagagttacg

SEQ ID NO: 2833675 - DNA, 25 bp, Homo sapien
gagttacgataaggcacatgagtgc

SEQ ID NO: 2833676 - DNA, 25 bp, Homo sapien
tttaggcgctgtccagtagctccag

SEQ ID NO: 2833677 - DNA, 25 bp, Homo sapien
gctttttccatcaaccaaggcagaa

SEQ ID NO: 2833678 - DNA, 25 bp, Homo sapien
aagatggcatgggaacgggaactat

SEQ ID NO: 2833679 - DNA, 25 bp, Homo sapien
catgggaacgggaactatgttcgtt

SEQ ID NO: 2833680 - DNA, 25 bp, Homo sapien
cgggaactatgttcgttcatattag

SEQ ID NO: 2833681 - DNA, 25 bp, Homo sapien
tcgttcatattagttgcaccaacag

SEQ ID NO: 2833682 - DNA, 25 bp, Homo sapien
tgataaatctttgatataaactccc

SEQ ID NO: 2833683 - DNA, 25 bp, Homo sapien
catatcatcagcattatttaccaca

SEQ ID NO: 2833684 - DNA, 25 bp, Homo sapien
cataattctatccatatcatcagca

SEQ ID NO: 2833685 - DNA, 25 bp, Homo sapien
gatttttgtggcctagcgtcataat

SEQ ID NO: 2833686 - DNA, 25 bp, Homo sapien
ggtcacgaacttcttcattatatat

SEQ ID NO: 2833687 - DNA, 25 bp, Homo sapien
tatttccaaataagacactcgaacc

SEQ ID NO: 2833688 - DNA, 25 bp, Homo sapien
tccaaataagacactcgaaccaaaa

SEQ ID NO: 2833689 - DNA, 25 bp, Homo sapien
tgatccttgcccaaaaggtcacgaa

SEQ ID NO: 2833690 - DNA, 25 bp, Homo sapien
gcctgttccggtttgtccatatgca

SEQ ID NO: 2833691 - DNA, 25 bp, Homo sapien
cctccgcttttgcaatatgaccaaa

SEQ ID NO: 2833692 - DNA, 25 bp, Homo sapien
agctcgaacaccttccatggtaaaa

SEQ ID NO: 2833693 - DNA, 25 bp, Homo sapien
ctctaagttcaggaatagctcgaac

SEQ ID NO: 2833694 - DNA, 25 bp, Homo sapien
caagttgtttactctctggtccaaa

SEQ ID NO: 2833695 - DNA, 25 bp, Homo sapien
ttatgtacagtgatagttcccctca

SEQ ID NO: 2833696 - DNA, 25 bp, Homo sapien
ccttcacattatcgcagctttctgg

SEQ ID NO: 2833697 - DNA, 25 bp, Homo sapien
tgacagcctgtttgtagcacattga

SEQ ID NO: 2833698 - DNA, 25 bp, Homo sapien
accccagaagcgaagcgactctcct

SEQ ID NO: 2833699 - DNA, 25 bp, Homo sapien
ggccgctaggatgagaagaaacccc

SEQ ID NO: 2833700 - DNA, 25 bp, Homo sapien
cgggccaggccgctaggatgagaag

SEQ ID NO: 2833701 - DNA, 25 bp, Homo sapien
gccaggccgctaggatgagaagaaa

SEQ ID NO: 2833702 - DNA, 25 bp, Homo sapien
aaaggatggccagagactaccgaaa

SEQ ID NO: 2833703 - DNA, 25 bp, Homo sapien
gcgacaccgggtgcgcagaaaggat

SEQ ID NO: 2833704 - DNA, 25 bp, Homo sapien
ccagcgacaccgggtgcgcagaaag

SEQ ID NO: 2833705 - DNA, 25 bp, Homo sapien
ggatggccagagactaccgaaacac

SEQ ID NO: 2833706 - DNA, 25 bp, Homo sapien
gctctcgagactgcggcttctcggg

SEQ ID NO: 2833707 - DNA, 25 bp, Homo sapien
gcggcttctcgggcgagagcgccca

SEQ ID NO: 2833708 - DNA, 25 bp, Homo sapien
ctcgttgacgctctcgagactgcgg

SEQ ID NO: 2833709 - DNA, 25 bp, Homo sapien
agtgcgcagccgcattccgagctcg

SEQ ID NO: 2833710 - DNA, 25 bp, Homo sapien
cactgggacctctatattgggacgc

SEQ ID NO: 2833711 - DNA, 25 bp, Homo sapien
tattccccgaatgagctgctgagga

SEQ ID NO: 2833712 - DNA, 25 bp, Homo sapien
aagccccttacggagccatggatag

SEQ ID NO: 2833713 - DNA, 25 bp, Homo sapien
gacgccgctggacttcttgactata

SEQ ID NO: 2833714 - DNA, 25 bp, Homo sapien
agctgctgcagttcaagggctccac

SEQ ID NO: 2833715 - DNA, 25 bp, Homo sapien
ggtcatcatcaccttagagctggag

SEQ ID NO: 2833716 - DNA, 25 bp, Homo sapien
cggctggtgtgctcctatatctgat

SEQ ID NO: 2833717 - DNA, 25 bp, Homo sapien
gctgcagcactgtatggcgggccac

SEQ ID NO: 2833718 - DNA, 25 bp, Homo sapien
tcagagcatagtgtgaaacctcctt

SEQ ID NO: 2833719 - DNA, 25 bp, Homo sapien
ggtgtgtcagaatccctcagaacag

SEQ ID NO: 2833720 - DNA, 25 bp, Homo sapien
cacttgagatgggacatgtgttccc

SEQ ID NO: 2833721 - DNA, 25 bp, Homo sapien
ggagcccttgtagccaagaggactg

SEQ ID NO: 2833722 - DNA, 25 bp, Homo sapien
cataccagtttaggcatcccaggct

SEQ ID NO: 2833723 - DNA, 25 bp, Homo sapien
tttagccttgcgagagtcagataca

SEQ ID NO: 2833724 - DNA, 25 bp, Homo sapien
tgtattgccgaagtcccactcgtgg

SEQ ID NO: 2833725 - DNA, 25 bp, Homo sapien
tccttccagtgtaagtgggaccaca

SEQ ID NO: 2833726 - DNA, 25 bp, Homo sapien
gaattgtcactagaacctgctctgc

SEQ ID NO: 2833727 - DNA, 25 bp, Homo sapien
tactccagagtcctaggttggccca

SEQ ID NO: 2833728 - DNA, 25 bp, Homo sapien
taccctagagatgagccattggcag

SEQ ID NO: 2833729 - DNA, 25 bp, Homo sapien
taaattagcacgtcttcctgaggct

SEQ ID NO: 2833730 - DNA, 25 bp, Homo sapien
ggcacataacagctccgtcagggaa

SEQ ID NO: 2833731 - DNA, 25 bp, Homo sapien
tgcacctagggcaccacgtgagttg

SEQ ID NO: 2833732 - DNA, 25 bp, Homo sapien
gaacaattaggcctagcatcccggc

SEQ ID NO: 2833733 - DNA, 25 bp, Homo sapien
tttgcagcatgtataccagaccacg

SEQ ID NO: 2833734 - DNA, 25 bp, Homo sapien
ggtcacaaggtgtaactcaagcaac

SEQ ID NO: 2833735 - DNA, 25 bp, Homo sapien
gaaagcaaggctgtaaacactggag

SEQ ID NO: 2833736 - DNA, 25 bp, Homo sapien
aacactggagtctgtaccggctccc

SEQ ID NO: 2833737 - DNA, 25 bp, Homo sapien
tccgtcctcacaccatgttatggga

SEQ ID NO: 2833738 - DNA, 25 bp, Homo sapien
gcctggagaacgtatcatggagccc

SEQ ID NO: 2833739 - DNA, 25 bp, Homo sapien
caaaagacagcaagatggacaccgt

SEQ ID NO: 2833740 - DNA, 25 bp, Homo sapien
gactgaagctttctagcaggtccag

SEQ ID NO: 2833741 - DNA, 25 bp, Homo sapien
gaaatggatcccgagaatgacggcc

SEQ ID NO: 2833742 - DNA, 25 bp, Homo sapien
caccgcagccttccggcgattgaag

SEQ ID NO: 2833743 - DNA, 25 bp, Homo sapien
gattgaaggcgttggtctcctcctc

SEQ ID NO: 2833744 - DNA, 25 bp, Homo sapien
tgcaaggcctgcgactgcagggcct

SEQ ID NO: 2833745 - DNA, 25 bp, Homo sapien
tgcgaggtggcgtgcaaggcctgcg

SEQ ID NO: 2833746 - DNA, 25 bp, Homo sapien
cttggcctcgtatgtctcttgtagg

SEQ ID NO: 2833747 - DNA, 25 bp, Homo sapien
tgcagctcacttaggaactccttcc

SEQ ID NO: 2833748 - DNA, 25 bp, Homo sapien
gcagctcacttaggaactccttcct

SEQ ID NO: 2833749 - DNA, 25 bp, Homo sapien
cctcttggcctcgtatgtctcttgt

SEQ ID NO: 2833750 - DNA, 25 bp, Homo sapien
ggaggtcttccatgttcacccggat

SEQ ID NO: 2833751 - DNA, 25 bp, Homo sapien
ctccaacttgcagcgccggtagagc

SEQ ID NO: 2833752 - DNA, 25 bp, Homo sapien
cggtagagctcgtagtgccggctgt

SEQ ID NO: 2833753 - DNA, 25 bp, Homo sapien
cgaagtcgcagtgattctcattctc

SEQ ID NO: 2833754 - DNA, 25 bp, Homo sapien
tactgccgtgctcggaccagcttgt

SEQ ID NO: 2833755 - DNA, 25 bp, Homo sapien
cccaggggtactgccgtgctcggac

SEQ ID NO: 2833756 - DNA, 25 bp, Homo sapien
tgccgtgctcggaccagcttgttcc

SEQ ID NO: 2833757 - DNA, 25 bp, Homo sapien
gggtactgccgtgctcggaccagct

SEQ ID NO: 2833758 - DNA, 25 bp, Homo sapien
catgactgcgttaatctctgcaaca

SEQ ID NO: 2833759 - DNA, 25 bp, Homo sapien
tcttggagatggtgtcagccttggc

SEQ ID NO: 2833760 - DNA, 25 bp, Homo sapien
atcttgaacttgtggagctcgctct

SEQ ID NO: 2833761 - DNA, 25 bp, Homo sapien
cattgctgaccaactcgcccatgat

SEQ ID NO: 2833762 - DNA, 25 bp, Homo sapien
gagcgagcggcggatcttcagctcc

SEQ ID NO: 2833763 - DNA, 25 bp, Homo sapien
tgaagtagaggcaaacgtggatcct

SEQ ID NO: 2833764 - DNA, 25 bp, Homo sapien
tgccctgtgggcgtgatgaagtaga

SEQ ID NO: 2833765 - DNA, 25 bp, Homo sapien
ttgtgtcatggtagtcgaagagcga

SEQ ID NO: 2833766 - DNA, 25 bp, Homo sapien
cgcatcgatgtagtcaactatgggc

SEQ ID NO: 2833767 - DNA, 25 bp, Homo sapien
gcgcatcgatgtagtcaactatggg

SEQ ID NO: 2833768 - DNA, 25 bp, Homo sapien
ctgcgcatcgatgtagtcaactatg

SEQ ID NO: 2833769 - DNA, 25 bp, Homo sapien
tgcgcatcgatgtagtcaactatgg

SEQ ID NO: 2833770 - DNA, 25 bp, Homo sapien
cccaggaggctgccagctgagatca

SEQ ID NO: 2833771 - DNA, 25 bp, Homo sapien
tacagacagctccatcacccaggag

SEQ ID NO: 2833772 - DNA, 25 bp, Homo sapien
catcacccaggaggctgccagctga

SEQ ID NO: 2833773 - DNA, 25 bp, Homo sapien
ctacagacagctccatcacccagga

SEQ ID NO: 2833774 - DNA, 25 bp, Homo sapien
cccttctccagacacctaaaggagt

SEQ ID NO: 2833775 - DNA, 25 bp, Homo sapien
ccttctccagacacctaaaggagta

SEQ ID NO: 2833776 - DNA, 25 bp, Homo sapien
ccagacacctaaaggagtaactggt

SEQ ID NO: 2833777 - DNA, 25 bp, Homo sapien
tctccagacacctaaaggagtaact

SEQ ID NO: 2833778 - DNA, 25 bp, Homo sapien
atccttattgatctgatccccaaag

SEQ ID NO: 2833779 - DNA, 25 bp, Homo sapien
catccttattgatctgatccccaaa

SEQ ID NO: 2833780 - DNA, 25 bp, Homo sapien
tccttattgatctgatccccaaagc

SEQ ID NO: 2833781 - DNA, 25 bp, Homo sapien
ggcatccacaatggtcagcttgagc

SEQ ID NO: 2833782 - DNA, 25 bp, Homo sapien
caggcgcacgcatgcctcatggtga

SEQ ID NO: 2833783 - DNA, 25 bp, Homo sapien
ctctcctggaggtcataggtctggg

SEQ ID NO: 2833784 - DNA, 25 bp, Homo sapien
tcctcagtctcgaaggtcgtgttga

SEQ ID NO: 2833785 - DNA, 25 bp, Homo sapien
gagtgaccgacttgctgaccagctg

SEQ ID NO: 2833786 - DNA, 25 bp, Homo sapien
cggggaggctgtcgaaacccacatg

SEQ ID NO: 2833787 - DNA, 25 bp, Homo sapien
tggtcggggaggctgtcgaaaccca

SEQ ID NO: 2833788 - DNA, 25 bp, Homo sapien
ctgtcgaaacccacatggccgccca

SEQ ID NO: 2833789 - DNA, 25 bp, Homo sapien
aagaaaccacgaggacccaaagcag

SEQ ID NO: 2833790 - DNA, 25 bp, Homo sapien
aggttcccaggttcagcccctctgg

SEQ ID NO: 2833791 - DNA, 25 bp, Homo sapien
tccaacttgtgtggctggtttctct

SEQ ID NO: 2833792 - DNA, 25 bp, Homo sapien
gaatggggtaaaatgctgcccgagg

SEQ ID NO: 2833793 - DNA, 25 bp, Homo sapien
gttgtgcagagtcatgcctcctcca

SEQ ID NO: 2833794 - DNA, 25 bp, Homo sapien
ctccattcctgagccccactgccct

SEQ ID NO: 2833795 - DNA, 25 bp, Homo sapien
ttcctgagccccactgccctgagac

SEQ ID NO: 2833796 - DNA, 25 bp, Homo sapien
gtgcagagtcatgcctcctccattc

SEQ ID NO: 2833797 - DNA, 25 bp, Homo sapien
tgccttggcctgaacccctctggcc

SEQ ID NO: 2833798 - DNA, 25 bp, Homo sapien
actgccttggcctgaacccctctgg

SEQ ID NO: 2833799 - DNA, 25 bp, Homo sapien
tgagcagctgacctgtgccacagcc

SEQ ID NO: 2833800 - DNA, 25 bp, Homo sapien
ccactgccttggcctgaacccctct

SEQ ID NO: 2833801 - DNA, 25 bp, Homo sapien
gcgagctccgcaccgggcgggtggg

SEQ ID NO: 2833802 - DNA, 25 bp, Homo sapien
cgggtgggctgggacgagcgcaggg

SEQ ID NO: 2833803 - DNA, 25 bp, Homo sapien
gtcggtggccgccatggcgagctcc

SEQ ID NO: 2833804 - DNA, 25 bp, Homo sapien
gcggctgaatggatccaatatggcc

SEQ ID NO: 2833805 - DNA, 25 bp, Homo sapien
cggcccggccacgagcgcagccgga

SEQ ID NO: 2833806 - DNA, 25 bp, Homo sapien
ggcccggccacgagcgcagccggag

SEQ ID NO: 2833807 - DNA, 25 bp, Homo sapien
ccggcccggccacgagcgcagccgg

SEQ ID NO: 2833808 - DNA, 25 bp, Homo sapien
acaagctgcgggagacccgtcggat

SEQ ID NO: 2833809 - DNA, 25 bp, Homo sapien
tgcgggtgtcttgggccccacctga

SEQ ID NO: 2833810 - DNA, 25 bp, Homo sapien
cggcagcctagtctgcgggtgtctt

SEQ ID NO: 2833811 - DNA, 25 bp, Homo sapien
tgctccggccggagctaaggcggga

SEQ ID NO: 2833812 - DNA, 25 bp, Homo sapien
caggaggcttggagtcaactaaaaa

SEQ ID NO: 2833813 - DNA, 25 bp, Homo sapien
gactttattccaggtctacaatgga

SEQ ID NO: 2833814 - DNA, 25 bp, Homo sapien
agaagtgggacatcttaaagtttca

SEQ ID NO: 2833815 - DNA, 25 bp, Homo sapien
aataatgggaaatttctctctaaca

SEQ ID NO: 2833816 - DNA, 25 bp, Homo sapien
gtagcttacggagttttacacagac

SEQ ID NO: 2833817 - DNA, 25 bp, Homo sapien
gatcagaagctatatcatagagggc

SEQ ID NO: 2833818 - DNA, 25 bp, Homo sapien
gagtactaaaacacagaactggcca

SEQ ID NO: 2833819 - DNA, 25 bp, Homo sapien
cacagacagccaagtgatatggtta

SEQ ID NO: 2833820 - DNA, 25 bp, Homo sapien
tcgacggcgtcaagttcgtggtgct

SEQ ID NO: 2833821 - DNA, 25 bp, Homo sapien
gcagggaccgcttcaagcagttcgt

SEQ ID NO: 2833822 - DNA, 25 bp, Homo sapien
acttcgacggtcttgccgcggagcg

SEQ ID NO: 2833823 - DNA, 25 bp, Homo sapien
cagttcgtcaacaacgtggcggtgg

SEQ ID NO: 2833824 - DNA, 25 bp, Homo sapien
aaagggccgccgcagcagaagccct

SEQ ID NO: 2833825 - DNA, 25 bp, Homo sapien
tagggccccttctgaggcggcatcg

SEQ ID NO: 2833826 - DNA, 25 bp, Homo sapien
tgctgagccctgacgccgaggagtt

SEQ ID NO: 2833827 - DNA, 25 bp, Homo sapien
cagaagccctgtatgctgccggtgc

SEQ ID NO: 2833828 - DNA, 25 bp, Homo sapien
ttgcacacttaaatcagaggagggt

SEQ ID NO: 2833829 - DNA, 25 bp, Homo sapien
tataacctgtgctgattaagtgcca

SEQ ID NO: 2833830 - DNA, 25 bp, Homo sapien
tatatcacctagcaggaggcacacc

SEQ ID NO: 2833831 - DNA, 25 bp, Homo sapien
tttctgcaactataaggtaagccga

SEQ ID NO: 2833832 - DNA, 25 bp, Homo sapien
tgctgataacggaacaaatgtggtg

SEQ ID NO: 2833833 - DNA, 25 bp, Homo sapien
tctgctggcagtatcctgaagggtc

SEQ ID NO: 2833834 - DNA, 25 bp, Homo sapien
ctgcgaatggcgaagcgtaggtacc

SEQ ID NO: 2833835 - DNA, 25 bp, Homo sapien
gccctctggagaaataacgatatgg

SEQ ID NO: 2833836 - DNA, 25 bp, Homo sapien
ccaccctcgactgcccgcctcaggc

SEQ ID NO: 2833837 - DNA, 25 bp, Homo sapien
gccacatgagaacactttggagaag

SEQ ID NO: 2833838 - DNA, 25 bp, Homo sapien
ggctgctttgcaccttaagtgctcc

SEQ ID NO: 2833839 - DNA, 25 bp, Homo sapien
taagatccataaattaattaccaaa

SEQ ID NO: 2833840 - DNA, 25 bp, Homo sapien
taccaaataatacacaagacctggg

SEQ ID NO: 2833841 - DNA, 25 bp, Homo sapien
ccccacttacgtgggtgagagatag

SEQ ID NO: 2833842 - DNA, 25 bp, Homo sapien
gcagagactaaatcagcatcacccc

SEQ ID NO: 2833843 - DNA, 25 bp, Homo sapien
agataggggcggtgcaccccaccct

SEQ ID NO: 2833844 - DNA, 25 bp, Homo sapien
tccccaatccctcaagggaaaagca

SEQ ID NO: 2833845 - DNA, 25 bp, Homo sapien
gaagagggaagggcggctgaactgg

SEQ ID NO: 2833846 - DNA, 25 bp, Homo sapien
gagggaagggcggctgaactggagg

SEQ ID NO: 2833847 - DNA, 25 bp, Homo sapien
gggaagggcggctgaactggaggac

SEQ ID NO: 2833848 - DNA, 25 bp, Homo sapien
gagaagagggaagggcggctgaact

SEQ ID NO: 2833849 - DNA, 25 bp, Homo sapien
cctgggggccgcgccgggctgggag

SEQ ID NO: 2833850 - DNA, 25 bp, Homo sapien
tgggggccgcgccgggctgggagac

SEQ ID NO: 2833851 - DNA, 25 bp, Homo sapien
ctgggggccgcgccgggctgggaga

SEQ ID NO: 2833852 - DNA, 25 bp, Homo sapien
gtcgtccctgatggcgtccagttgg

SEQ ID NO: 2833853 - DNA, 25 bp, Homo sapien
gggcgcaatagacgcgcagctcctc

SEQ ID NO: 2833854 - DNA, 25 bp, Homo sapien
gatgcgctcgtccaggttgcgctgc

SEQ ID NO: 2833855 - DNA, 25 bp, Homo sapien
catgatggccaaggtcgtccctgat

SEQ ID NO: 2833856 - DNA, 25 bp, Homo sapien
ccgccctactcgcttgcaacctgaa

SEQ ID NO: 2833857 - DNA, 25 bp, Homo sapien
gccgctcccggaatggttccagccg

SEQ ID NO: 2833858 - DNA, 25 bp, Homo sapien
ggaatggttccagccggagacagca

SEQ ID NO: 2833859 - DNA, 25 bp, Homo sapien
ctcgcttgcaacctgaacccctttt

SEQ ID NO: 2833860 - DNA, 25 bp, Homo sapien
cctgctccgtgtgaaggtcctgaag

SEQ ID NO: 2833861 - DNA, 25 bp, Homo sapien
tcatcagggtcgctgtctgaggccg

SEQ ID NO: 2833862 - DNA, 25 bp, Homo sapien
cctgaagcatcttttggaggcgggc

SEQ ID NO: 2833863 - DNA, 25 bp, Homo sapien
ctaggtcggccatgaaccggctgaa

SEQ ID NO: 2833864 - DNA, 25 bp, Homo sapien
ttgtctcctcccgaggagccggcag

SEQ ID NO: 2833865 - DNA, 25 bp, Homo sapien
tgcccacatggctggtcaagcacag

SEQ ID NO: 2833866 - DNA, 25 bp, Homo sapien
ggtggcagggttttcaagccttgtc

SEQ ID NO: 2833867 - DNA, 25 bp, Homo sapien
gctgttgtttggtgcagggagcccc

SEQ ID NO: 2833868 - DNA, 25 bp, Homo sapien
ctgggtttcctgtccccaacttcag

SEQ ID NO: 2833869 - DNA, 25 bp, Homo sapien
tgggaacaaaaccagagctccctgg

SEQ ID NO: 2833870 - DNA, 25 bp, Homo sapien
tgtccagattccctagtacacctca

SEQ ID NO: 2833871 - DNA, 25 bp, Homo sapien
ttcaggggctcagtgtccagattcc

SEQ ID NO: 2833872 - DNA, 25 bp, Homo sapien
gcagcccggacctctgctaaaggaa

SEQ ID NO: 2833873 - DNA, 25 bp, Homo sapien
tctaatctggccagctcctgaacca

SEQ ID NO: 2833874 - DNA, 25 bp, Homo sapien
caagagggtcacatagagagggatc

SEQ ID NO: 2833875 - DNA, 25 bp, Homo sapien
ctaaaggaatcagtccatccagcag

SEQ ID NO: 2833876 - DNA, 25 bp, Homo sapien
ccctggctagggcagtattgtgaga

SEQ ID NO: 2833877 - DNA, 25 bp, Homo sapien
gccagtgcccctggctagggcagta

SEQ ID NO: 2833878 - DNA, 25 bp, Homo sapien
gagagggacctggagtatcattgcc

SEQ ID NO: 2833879 - DNA, 25 bp, Homo sapien
gacaggtttgaggaggtcactctct

SEQ ID NO: 2833880 - DNA, 25 bp, Homo sapien
ggcttgtgggcctggaaatacctac

SEQ ID NO: 2833881 - DNA, 25 bp, Homo sapien
tgttatcatttgcagtcccagtggg

SEQ ID NO: 2833882 - DNA, 25 bp, Homo sapien
gggtcaatagttgggatgttatcat

SEQ ID NO: 2833883 - DNA, 25 bp, Homo sapien
tggcttgtgggcctggaaataccta

SEQ ID NO: 2833884 - DNA, 25 bp, Homo sapien
gacactcatggagcgggtactctgt

SEQ ID NO: 2833885 - DNA, 25 bp, Homo sapien
tggccagttctttggcctaagccag

SEQ ID NO: 2833886 - DNA, 25 bp, Homo sapien
catacggctggtcagaggcatggac

SEQ ID NO: 2833887 - DNA, 25 bp, Homo sapien
ttggcctaagccagttccatacggc

SEQ ID NO: 2833888 - DNA, 25 bp, Homo sapien
tctggtggtgatctcattctgacca

SEQ ID NO: 2833889 - DNA, 25 bp, Homo sapien
tacatcaccgcagcctctttctgag

SEQ ID NO: 2833890 - DNA, 25 bp, Homo sapien
gggtctggtggtgatctcattctga

SEQ ID NO: 2833891 - DNA, 25 bp, Homo sapien
tctgcaggatacatcaccgcagcct

SEQ ID NO: 2833892 - DNA, 25 bp, Homo sapien
ccccaacttggtccagagtggtccg

SEQ ID NO: 2833893 - DNA, 25 bp, Homo sapien
cttggtccagagtggtccgtgtctc

SEQ ID NO: 2833894 - DNA, 25 bp, Homo sapien
ttttgggcaaaagctatgcaagctg

SEQ ID NO: 2833895 - DNA, 25 bp, Homo sapien
ggcaaaagctatgcaagctgcttcc

SEQ ID NO: 2833896 - DNA, 25 bp, Homo sapien
acaatggtctgggggtttctgctcc

SEQ ID NO: 2833897 - DNA, 25 bp, Homo sapien
aatggtctgggggtttctgctcctt

SEQ ID NO: 2833898 - DNA, 25 bp, Homo sapien
atggtctgggggtttctgctccttg

SEQ ID NO: 2833899 - DNA, 25 bp, Homo sapien
caatggtctgggggtttctgctcct

SEQ ID NO: 2833900 - DNA, 25 bp, Homo sapien
tggaagggtgaacagtcgactgaaa

SEQ ID NO: 2833901 - DNA, 25 bp, Homo sapien
ggaagggtgaacagtcgactgaaat

SEQ ID NO: 2833902 - DNA, 25 bp, Homo sapien
ctggaagggtgaacagtcgactgaa

SEQ ID NO: 2833903 - DNA, 25 bp, Homo sapien
agcctgcatctcctgacttccatac

SEQ ID NO: 2833904 - DNA, 25 bp, Homo sapien
cagcctgcatctcctgacttccata

SEQ ID NO: 2833905 - DNA, 25 bp, Homo sapien
ggacaatgggtatggtccctcctga

SEQ ID NO: 2833906 - DNA, 25 bp, Homo sapien
caaacttagccagcgccggatgctg

SEQ ID NO: 2833907 - DNA, 25 bp, Homo sapien
tcaaggacccggagtccaggttcat

SEQ ID NO: 2833908 - DNA, 25 bp, Homo sapien
aaggcatcaccgagcttcaaggacc

SEQ ID NO: 2833909 - DNA, 25 bp, Homo sapien
gacccacacgatccagctttcctgg

SEQ ID NO: 2833910 - DNA, 25 bp, Homo sapien
ctggaacgacgtctcccggagcact

SEQ ID NO: 2833911 - DNA, 25 bp, Homo sapien
tctgagaagcaccacttccgctgct

SEQ ID NO: 2833912 - DNA, 25 bp, Homo sapien
tgcggagctccttgcgctggaacga

SEQ ID NO: 2833913 - DNA, 25 bp, Homo sapien
ggccgccagcgcgtacagcagcggg

SEQ ID NO: 2833914 - DNA, 25 bp, Homo sapien
tgcctgttcagtggtcccggggtcc

SEQ ID NO: 2833915 - DNA, 25 bp, Homo sapien
tcggccgccagcgcgtacagcagcg

SEQ ID NO: 2833916 - DNA, 25 bp, Homo sapien
ggcggccctcgaggccggcgggctg

SEQ ID NO: 2833917 - DNA, 25 bp, Homo sapien
caaagggcagcgtcgggcggggcgg

SEQ ID NO: 2833918 - DNA, 25 bp, Homo sapien
gggatgtgcaaagggcagcgtcggg

SEQ ID NO: 2833919 - DNA, 25 bp, Homo sapien
gatgtgcaaagggcagcgtcgggcg

SEQ ID NO: 2833920 - DNA, 25 bp, Homo sapien
tgtgcaaagggcagcgtcgggcggg

SEQ ID NO: 2833921 - DNA, 25 bp, Homo sapien
gcgcgcatggacagatgccacaggt

SEQ ID NO: 2833922 - DNA, 25 bp, Homo sapien
agctgtaggccgagtccgcgcgcat

SEQ ID NO: 2833923 - DNA, 25 bp, Homo sapien
tccaggctgctagtggacgaggccg

SEQ ID NO: 2833924 - DNA, 25 bp, Homo sapien
ccagtctaggtaaggaaggaggtct

SEQ ID NO: 2833925 - DNA, 25 bp, Homo sapien
ggctgcgcagatgagtgctgaggct

SEQ ID NO: 2833926 - DNA, 25 bp, Homo sapien
gctgcgcagatgagtgctgaggctg

SEQ ID NO: 2833927 - DNA, 25 bp, Homo sapien
gtgctgaggctgggtggctgcgtgg

SEQ ID NO: 2833928 - DNA, 25 bp, Homo sapien
ctgaggctgggtggctgcgtgggtc

SEQ ID NO: 2833929 - DNA, 25 bp, Homo sapien
ctggccccgccaccacggacggcca

SEQ ID NO: 2833930 - DNA, 25 bp, Homo sapien
ggccccgccaccacggacggccaga

SEQ ID NO: 2833931 - DNA, 25 bp, Homo sapien
cgccaccacggacggccagacactt

SEQ ID NO: 2833932 - DNA, 25 bp, Homo sapien
cacagatgtggtgccgggtgaggag

SEQ ID NO: 2833933 - DNA, 25 bp, Homo sapien
tcctggaacgctgagaatgtaccca

SEQ ID NO: 2833934 - DNA, 25 bp, Homo sapien
gaattgggaccagctcattccctgc

SEQ ID NO: 2833935 - DNA, 25 bp, Homo sapien
ggcagaggaagtaggaccagtccca

SEQ ID NO: 2833936 - DNA, 25 bp, Homo sapien
cagattttggcagagtcaccttggg

SEQ ID NO: 2833937 - DNA, 25 bp, Homo sapien
aagcacttgccaccatagacactgg

SEQ ID NO: 2833938 - DNA, 25 bp, Homo sapien
tagacactggccaggttcctcatgc

SEQ ID NO: 2833939 - DNA, 25 bp, Homo sapien
aagaggacagaatgggtgaagcact

SEQ ID NO: 2833940 - DNA, 25 bp, Homo sapien
aatattaggtacgaacagagcaggc

SEQ ID NO: 2833941 - DNA, 25 bp, Homo sapien
tacttgtcacctgaatgaaggagcc

SEQ ID NO: 2833942 - DNA, 25 bp, Homo sapien
tcaggttgatgttcacgcaggctcc

SEQ ID NO: 2833943 - DNA, 25 bp, Homo sapien
tgtatatgcctactaagcccaggag

SEQ ID NO: 2833944 - DNA, 25 bp, Homo sapien
ctatggagacttttgggcgctggcc

SEQ ID NO: 2833945 - DNA, 25 bp, Homo sapien
tgtctccctgtcagactgagttcct

SEQ ID NO: 2833946 - DNA, 25 bp, Homo sapien
gactgagttcctgggtactggacca

SEQ ID NO: 2833947 - DNA, 25 bp, Homo sapien
ctgggtactggaccacgtctcaaaa

SEQ ID NO: 2833948 - DNA, 25 bp, Homo sapien
gtctccctgtcagactgagttcctg

SEQ ID NO: 2833949 - DNA, 25 bp, Homo sapien
gttctgggaagttcaccggctctcc

SEQ ID NO: 2833950 - DNA, 25 bp, Homo sapien
taggcggacgttctgggaagttcac

SEQ ID NO: 2833951 - DNA, 25 bp, Homo sapien
agctgggtctggctaggcggacgtt

SEQ ID NO: 2833952 - DNA, 25 bp, Homo sapien
tctggctaggcggacgttctgggaa

SEQ ID NO: 2833953 - DNA, 25 bp, Homo sapien
gagtctctggagacccgagctccgt

SEQ ID NO: 2833954 - DNA, 25 bp, Homo sapien
acgctccgagtgtgcgactggttta

SEQ ID NO: 2833955 - DNA, 25 bp, Homo sapien
tttacgggctcatcggtcgctgcac

SEQ ID NO: 2833956 - DNA, 25 bp, Homo sapien
ggagacccgagctccgtgccatgca

SEQ ID NO: 2833957 - DNA, 25 bp, Homo sapien
cagccccgcgcagttctgggccttt

SEQ ID NO: 2833958 - DNA, 25 bp, Homo sapien
gggaaggacccggcttctccagatg

SEQ ID NO: 2833959 - DNA, 25 bp, Homo sapien
cacgcggagcggctcgacagcagat

SEQ ID NO: 2833960 - DNA, 25 bp, Homo sapien
gccgaggcacgggagggagagaggc

SEQ ID NO: 2833961 - DNA, 25 bp, Homo sapien
ggtggcggagtgagaccgcgctgcc

SEQ ID NO: 2833962 - DNA, 25 bp, Homo sapien
tgacgcggcgccgagccagacacgt

SEQ ID NO: 2833963 - DNA, 25 bp, Homo sapien
ctggggtccgactccactggcgcaa

SEQ ID NO: 2833964 - DNA, 25 bp, Homo sapien
cgccagcttagagtgggccgcctct

SEQ ID NO: 2833965 - DNA, 25 bp, Homo sapien
cgcagccgcgcggtgacatcagagc

SEQ ID NO: 2833966 - DNA, 25 bp, Homo sapien
gcagcctcttggtagcgtccgcgcg

SEQ ID NO: 2833967 - DNA, 25 bp, Homo sapien
tgagggtggacagtgcgttcccgcg

SEQ ID NO: 2833968 - DNA, 25 bp, Homo sapien
ggagggcgactacggcgaccgccca

SEQ ID NO: 2833969 - DNA, 25 bp, Homo sapien
tggacactggcgctcgaggccctca

SEQ ID NO: 2833970 - DNA, 25 bp, Homo sapien
ctaaggctggacactggcgctcgag

SEQ ID NO: 2833971 - DNA, 25 bp, Homo sapien
ccactaaggctggacactggcgctc

SEQ ID NO: 2833972 - DNA, 25 bp, Homo sapien
aggctggacactggcgctcgaggcc

SEQ ID NO: 2833973 - DNA, 25 bp, Homo sapien
gctgcaagtccatccaggattgatg

SEQ ID NO: 2833974 - DNA, 25 bp, Homo sapien
gaaggtactaacctacacaggctcc

SEQ ID NO: 2833975 - DNA, 25 bp, Homo sapien
cctgatagatgccatagaaggtact

SEQ ID NO: 2833976 - DNA, 25 bp, Homo sapien
gccaaataggctcaaggttttaaga

SEQ ID NO: 2833977 - DNA, 25 bp, Homo sapien
gctcaatggtcaaaacactcaaggg

SEQ ID NO: 2833978 - DNA, 25 bp, Homo sapien
tataggcaattgagccatcgggctc

SEQ ID NO: 2833979 - DNA, 25 bp, Homo sapien
ggacagtcccctttacagtatcgag

SEQ ID NO: 2833980 - DNA, 25 bp, Homo sapien
tatttggcaggtacacatgacggtc

SEQ ID NO: 2833981 - DNA, 25 bp, Homo sapien
ctcccacaggataggcagacagact

SEQ ID NO: 2833982 - DNA, 25 bp, Homo sapien
tttcctgacctctgcggtgacggtg

SEQ ID NO: 2833983 - DNA, 25 bp, Homo sapien
tgacggtgatgggaagatctcccat

SEQ ID NO: 2833984 - DNA, 25 bp, Homo sapien
gggcttcttcaattcagaactgaca

SEQ ID NO: 2833985 - DNA, 25 bp, Homo sapien
taaacaaaccattctgtgctgaagg

SEQ ID NO: 2833986 - DNA, 25 bp, Homo sapien
gctggtctttcatgcaagtaaaatt

SEQ ID NO: 2833987 - DNA, 25 bp, Homo sapien
gggacaccagagtcatgttaaacaa

SEQ ID NO: 2833988 - DNA, 25 bp, Homo sapien
aagcctgagcacttgtgtcattcaa

SEQ ID NO: 2833989 - DNA, 25 bp, Homo sapien
tgtgagttaaaggtaaatgagtatg

SEQ ID NO: 2833990 - DNA, 25 bp, Homo sapien
ctgtgagttaaaggtaaatgagtat

SEQ ID NO: 2833991 - DNA, 25 bp, Homo sapien
gatattgtacagcaagactgacttg

SEQ ID NO: 2833992 - DNA, 25 bp, Homo sapien
gcgatccaggttaaatagcagttcc

SEQ ID NO: 2833993 - DNA, 25 bp, Homo sapien
tgccgagagtcctgctagaagactt

SEQ ID NO: 2833994 - DNA, 25 bp, Homo sapien
tgttcaacggtagtaatgcgatcca

SEQ ID NO: 2833995 - DNA, 25 bp, Homo sapien
agccgaacagtgttgtagaggtgac

SEQ ID NO: 2833996 - DNA, 25 bp, Homo sapien
ggtagcatatgtcttatagagcttc

SEQ ID NO: 2833997 - DNA, 25 bp, Homo sapien
caggagcctgcttgtgccgggtaca

SEQ ID NO: 2833998 - DNA, 25 bp, Homo sapien
taggaatcccttccttggtagcata

SEQ ID NO: 2833999 - DNA, 25 bp, Homo sapien
cacctcgcccaacagatagaacttt

SEQ ID NO: 2834000 - DNA, 25 bp, Homo sapien
tggagtctggctgcagcctaggtga

SEQ ID NO: 2834001 - DNA, 25 bp, Homo sapien
caacagatagaactttgaaaagcgc

SEQ ID NO: 2834002 - DNA, 25 bp, Homo sapien
tgcagcctaggtgacccacctcgcc

SEQ ID NO: 2834003 - DNA, 25 bp, Homo sapien
ggaccaaggcatagccccagattcc

SEQ ID NO: 2834004 - DNA, 25 bp, Homo sapien
tatatgctgcagcaaggaccaaggc

SEQ ID NO: 2834005 - DNA, 25 bp, Homo sapien
gcactagcagcaatctgagcttctc

SEQ ID NO: 2834006 - DNA, 25 bp, Homo sapien
ccaactcagcactagcagcaatctg

SEQ ID NO: 2834007 - DNA, 25 bp, Homo sapien
acagccaggcaaagcagcaaaacca

SEQ ID NO: 2834008 - DNA, 25 bp, Homo sapien
cagcaaaaccaaaggaggaatttgt

SEQ ID NO: 2834009 - DNA, 25 bp, Homo sapien
agcagcaaaaccaaaggaggaattt

SEQ ID NO: 2834010 - DNA, 25 bp, Homo sapien
ctaataggaaaacacagccaggcaa

SEQ ID NO: 2834011 - DNA, 25 bp, Homo sapien
tgtgggtggactacggtcacttctg

SEQ ID NO: 2834012 - DNA, 25 bp, Homo sapien
tctaaggcatgtggaaaagctaacc

SEQ ID NO: 2834013 - DNA, 25 bp, Homo sapien
taagatgttcgctaggtgcttgctg

SEQ ID NO: 2834014 - DNA, 25 bp, Homo sapien
taatcaggcctcaagtatgcctagc

SEQ ID NO: 2834015 - DNA, 25 bp, Homo sapien
gagtctttctttcgcgtggtgccgc

SEQ ID NO: 2834016 - DNA, 25 bp, Homo sapien
cagctacagcttgtcaccgttcgag

SEQ ID NO: 2834017 - DNA, 25 bp, Homo sapien
gaatattcctgaccgcccttaagct

SEQ ID NO: 2834018 - DNA, 25 bp, Homo sapien
taaaggaatccccaatgttctgcgc

SEQ ID NO: 2834019 - DNA, 25 bp, Homo sapien
tctgggcctcaaatactcttcttag

SEQ ID NO: 2834020 - DNA, 25 bp, Homo sapien
gaactgttaaacctcacaagcacct

SEQ ID NO: 2834021 - DNA, 25 bp, Homo sapien
caggcgtaagccatggtgctctggg

SEQ ID NO: 2834022 - DNA, 25 bp, Homo sapien
ctcttcttagctacacaaatgaact

SEQ ID NO: 2834023 - DNA, 25 bp, Homo sapien
gtggacccatccttaccttgcatag

SEQ ID NO: 2834024 - DNA, 25 bp, Homo sapien
cgggcttaacacagggcaactaact

SEQ ID NO: 2834025 - DNA, 25 bp, Homo sapien
tctggcaagatggtacgggcttaac

SEQ ID NO: 2834026 - DNA, 25 bp, Homo sapien
tacagtcttgggctcgtcctcttag

SEQ ID NO: 2834027 - DNA, 25 bp, Homo sapien
tgactctgccgtaagccctgtgatg

SEQ ID NO: 2834028 - DNA, 25 bp, Homo sapien
cagtgctggtaacccatctggagcc

SEQ ID NO: 2834029 - DNA, 25 bp, Homo sapien
ggaaatggatctcacctgtgtggca

SEQ ID NO: 2834030 - DNA, 25 bp, Homo sapien
cagtgctcctatacatgacctggga

SEQ ID NO: 2834031 - DNA, 25 bp, Homo sapien
caaaggcctctgcaatgttgtcaca

SEQ ID NO: 2834032 - DNA, 25 bp, Homo sapien
gagggtggcatacaacatagaggct

SEQ ID NO: 2834033 - DNA, 25 bp, Homo sapien
ggatgaatggtcctttccgcctaca

SEQ ID NO: 2834034 - DNA, 25 bp, Homo sapien
cacagtctctcaagtatgggatggc

SEQ ID NO: 2834035 - DNA, 25 bp, Homo sapien
aaggccacggagaatgaccccattt

SEQ ID NO: 2834036 - DNA, 25 bp, Homo sapien
ggagctccatggaaaatcccttagg

SEQ ID NO: 2834037 - DNA, 25 bp, Homo sapien
gagtgtatcacaaggctatgcaggt

SEQ ID NO: 2834038 - DNA, 25 bp, Homo sapien
gatggctccccaataccagaagtga

SEQ ID NO: 2834039 - DNA, 25 bp, Homo sapien
gctggagacacccaagtgaagcaat

SEQ ID NO: 2834040 - DNA, 25 bp, Homo sapien
ggcagatgtacgctttaaattggtc

SEQ ID NO: 2834041 - DNA, 25 bp, Homo sapien
tcaatagctacgtaatcaacttcag

SEQ ID NO: 2834042 - DNA, 25 bp, Homo sapien
gcaagttcctaagctgtggccctgg

SEQ ID NO: 2834043 - DNA, 25 bp, Homo sapien
taagatttctgttgggacaaggtga

SEQ ID NO: 2834044 - DNA, 25 bp, Homo sapien
aacaggaattgcatgaaaagggctc

SEQ ID NO: 2834045 - DNA, 25 bp, Homo sapien
gagtagtaacggaccttaagacaca

SEQ ID NO: 2834046 - DNA, 25 bp, Homo sapien
tgacatatgcacaaggacccatggc

SEQ ID NO: 2834047 - DNA, 25 bp, Homo sapien
gtttctccaactatggtttggcatt

SEQ ID NO: 2834048 - DNA, 25 bp, Homo sapien
aagatctttacaaattgaaatgtga

SEQ ID NO: 2834049 - DNA, 25 bp, Homo sapien
ttctccaactatggtttggcattgt

SEQ ID NO: 2834050 - DNA, 25 bp, Homo sapien
agtttctccaactatggtttggcat

SEQ ID NO: 2834051 - DNA, 25 bp, Homo sapien
cttttcaggcaatgtcaactggcca

SEQ ID NO: 2834052 - DNA, 25 bp, Homo sapien
ccattcaaaacggaggctagataga

SEQ ID NO: 2834053 - DNA, 25 bp, Homo sapien
gaaaagaagtcccacatggaagcag

SEQ ID NO: 2834054 - DNA, 25 bp, Homo sapien
gaaatcctagcttttgagccccaaa

SEQ ID NO: 2834055 - DNA, 25 bp, Homo sapien
taaagggccaactgacatgatcgct

SEQ ID NO: 2834056 - DNA, 25 bp, Homo sapien
caaatatcaggtcaggtagcaggtg

SEQ ID NO: 2834057 - DNA, 25 bp, Homo sapien
tcaattaaagacacacaggcggcaa

SEQ ID NO: 2834058 - DNA, 25 bp, Homo sapien
taagagccctacgacactacagaag

SEQ ID NO: 2834059 - DNA, 25 bp, Homo sapien
tatcaacttggcatcctggcgaagc

SEQ ID NO: 2834060 - DNA, 25 bp, Homo sapien
ccagtgcagtccctgccgggtataa

SEQ ID NO: 2834061 - DNA, 25 bp, Homo sapien
tgtcatgatgcttgcattaaagatg

SEQ ID NO: 2834062 - DNA, 25 bp, Homo sapien
cgggtataacgaactagatctgtca

SEQ ID NO: 2834063 - DNA, 25 bp, Homo sapien
gctttatgttgaatgttgggattcc

SEQ ID NO: 2834064 - DNA, 25 bp, Homo sapien
ttgaatgttgggattcctagcctgg

SEQ ID NO: 2834065 - DNA, 25 bp, Homo sapien
acagctttatgttgaatgttgggat

SEQ ID NO: 2834066 - DNA, 25 bp, Homo sapien
tatgttgaatgttgggattcctagc

SEQ ID NO: 2834067 - DNA, 25 bp, Homo sapien
ctactggccccagatgaataatttc

SEQ ID NO: 2834068 - DNA, 25 bp, Homo sapien
taatttcctgaattgcctggtgaca

SEQ ID NO: 2834069 - DNA, 25 bp, Homo sapien
tctgtggaatggtcactgaagaacc

SEQ ID NO: 2834070 - DNA, 25 bp, Homo sapien
cccaaatttcggtggcatagaggaa

SEQ ID NO: 2834071 - DNA, 25 bp, Homo sapien
ctttggagaaacaggggaaggcatc

SEQ ID NO: 2834072 - DNA, 25 bp, Homo sapien
aggggaaggcatccccacagctttg

SEQ ID NO: 2834073 - DNA, 25 bp, Homo sapien
ggagaaacaggggaaggcatcccca

SEQ ID NO: 2834074 - DNA, 25 bp, Homo sapien
acaggggaaggcatccccacagctt

SEQ ID NO: 2834075 - DNA, 25 bp, Homo sapien
caagccaggcgatggtgcttgagaa

SEQ ID NO: 2834076 - DNA, 25 bp, Homo sapien
tcccaagccaggcgatggtgcttga

SEQ ID NO: 2834077 - DNA, 25 bp, Homo sapien
ccaagccaggcgatggtgcttgaga

SEQ ID NO: 2834078 - DNA, 25 bp, Homo sapien
agccaggcgatggtgcttgagaatt

SEQ ID NO: 2834079 - DNA, 25 bp, Homo sapien
tgacccagcaggcaactactgaagg

SEQ ID NO: 2834080 - DNA, 25 bp, Homo sapien
catgcagtttgcctaaagcagaggt

SEQ ID NO: 2834081 - DNA, 25 bp, Homo sapien
tactgaagggttccaagtcataatc

SEQ ID NO: 2834082 - DNA, 25 bp, Homo sapien
aaagacagtgtatgtgccccatgca

SEQ ID NO: 2834083 - DNA, 25 bp, Homo sapien
tgtcagtgtctttgagtacttcaga

SEQ ID NO: 2834084 - DNA, 25 bp, Homo sapien
ggtacagcaaagactcgcatcgcag

SEQ ID NO: 2834085 - DNA, 25 bp, Homo sapien
gtacagcaaagactcgcatcgcagg

SEQ ID NO: 2834086 - DNA, 25 bp, Homo sapien
ccttcttcagtttgaacagcctcag

SEQ ID NO: 2834087 - DNA, 25 bp, Homo sapien
ctgcagctgtagcatctggtgccaa

SEQ ID NO: 2834088 - DNA, 25 bp, Homo sapien
gtgagtcgtttatctgcagctgtag

SEQ ID NO: 2834089 - DNA, 25 bp, Homo sapien
caaagtactgtgagtcgtttatctg

SEQ ID NO: 2834090 - DNA, 25 bp, Homo sapien
tactgtgagtcgtttatctgcagct

SEQ ID NO: 2834091 - DNA, 25 bp, Homo sapien
atgagatccaccgtctctgaataca

SEQ ID NO: 2834092 - DNA, 25 bp, Homo sapien
tcaagatagtatacagctttctcaa

SEQ ID NO: 2834093 - DNA, 25 bp, Homo sapien
cacagcatcaagatagtatacagct

SEQ ID NO: 2834094 - DNA, 25 bp, Homo sapien
agatccaccgtctctgaatacatag

SEQ ID NO: 2834095 - DNA, 25 bp, Homo sapien
aatacgtaagtgtaaggagaatatc

SEQ ID NO: 2834096 - DNA, 25 bp, Homo sapien
cgtaagtgtaaggagaatatctaca

SEQ ID NO: 2834097 - DNA, 25 bp, Homo sapien
gatctactatggctacaaacatcag

SEQ ID NO: 2834098 - DNA, 25 bp, Homo sapien
agaatgcaagtaatgagtaatgatc

SEQ ID NO: 2834099 - DNA, 25 bp, Homo sapien
taaataatggtctgctgaataattt

SEQ ID NO: 2834100 - DNA, 25 bp, Homo sapien
gtaaataatggtctgctgaataatt

SEQ ID NO: 2834101 - DNA, 25 bp, Homo sapien
gaagaatcaagagttggtgcagatg

SEQ ID NO: 2834102 - DNA, 25 bp, Homo sapien
tgcagatggaggacagttagaggag

SEQ ID NO: 2834103 - DNA, 25 bp, Homo sapien
tggaggacagttagaggagctactt

SEQ ID NO: 2834104 - DNA, 25 bp, Homo sapien
acagttagaggagctacttggagcc

SEQ ID NO: 2834105 - DNA, 25 bp, Homo sapien
gtgtgatagaagcatacacagtgat

SEQ ID NO: 2834106 - DNA, 25 bp, Homo sapien
tgtgatagaagcatacacagtgatt

SEQ ID NO: 2834107 - DNA, 25 bp, Homo sapien
tgatagaagcatacacagtgatttt

SEQ ID NO: 2834108 - DNA, 25 bp, Homo sapien
tagaagcatacacagtgatttttac

SEQ ID NO: 2834109 - DNA, 25 bp, Homo sapien
tggaaaagtcacatggcaagttgaa

SEQ ID NO: 2834110 - DNA, 25 bp, Homo sapien
tttcaaagcacagtgtcaccctgga

SEQ ID NO: 2834111 - DNA, 25 bp, Homo sapien
tctttcaatatgtatgtgaccagct

SEQ ID NO: 2834112 - DNA, 25 bp, Homo sapien
gacataggcctatatatttactgag

SEQ ID NO: 2834113 - DNA, 25 bp, Homo sapien
gagagccatgctctgtttttggatc

SEQ ID NO: 2834114 - DNA, 25 bp, Homo sapien
actgcttgactttaaggaagaagac

SEQ ID NO: 2834115 - DNA, 25 bp, Homo sapien
taatagtcctcttccgagagccatg

SEQ ID NO: 2834116 - DNA, 25 bp, Homo sapien
gatgtggaggaactgtttttgctgc

SEQ ID NO: 2834117 - DNA, 25 bp, Homo sapien
aaccaaacgaatgccttcatttctc

SEQ ID NO: 2834118 - DNA, 25 bp, Homo sapien
ctccacacagtaatacaggggtaat

SEQ ID NO: 2834119 - DNA, 25 bp, Homo sapien
cacacagtaatacaggggtaattga

SEQ ID NO: 2834120 - DNA, 25 bp, Homo sapien
ctgccaaaccaaacgaatgccttca

SEQ ID NO: 2834121 - DNA, 25 bp, Homo sapien
gtacccactatcaaatgatatacat

SEQ ID NO: 2834122 - DNA, 25 bp, Homo sapien
taacaacactggcatgcaacatgtt

SEQ ID NO: 2834123 - DNA, 25 bp, Homo sapien
cagaaagtacccactatcaaatgat

SEQ ID NO: 2834124 - DNA, 25 bp, Homo sapien
atattaacaacactggcatgcaaca

SEQ ID NO: 2834125 - DNA, 25 bp, Homo sapien
cactggctcggttatcatcttcatt

SEQ ID NO: 2834126 - DNA, 25 bp, Homo sapien
gctggatggcttatggcctgctgaa

SEQ ID NO: 2834127 - DNA, 25 bp, Homo sapien
ctctcactggctcggttatcatctt

SEQ ID NO: 2834128 - DNA, 25 bp, Homo sapien
ctgaattcttgtcctccgttttggg

SEQ ID NO: 2834129 - DNA, 25 bp, Homo sapien
tgatttttattcaactaacttcagc

SEQ ID NO: 2834130 - DNA, 25 bp, Homo sapien
atagaaaccgtggtctgatttttat

SEQ ID NO: 2834131 - DNA, 25 bp, Homo sapien
gatgaaaaatagaaaccgtggtctg

SEQ ID NO: 2834132 - DNA, 25 bp, Homo sapien
gatttttattcaactaacttcagct

SEQ ID NO: 2834133 - DNA, 25 bp, Homo sapien
tactgagatttccaccgcatttcag

SEQ ID NO: 2834134 - DNA, 25 bp, Homo sapien
cttgttactttgtggcttactgaga

SEQ ID NO: 2834135 - DNA, 25 bp, Homo sapien
gatttccaccgcatttcagattctg

SEQ ID NO: 2834136 - DNA, 25 bp, Homo sapien
tgtggcttactgagatttccaccgc

SEQ ID NO: 2834137 - DNA, 25 bp, Homo sapien
ttctgagcctctctcgtgtgctttt

SEQ ID NO: 2834138 - DNA, 25 bp, Homo sapien
tctgagcctctctcgtgtgcttttc

SEQ ID NO: 2834139 - DNA, 25 bp, Homo sapien
ctagtcaaaagattcaggtcaatct

SEQ ID NO: 2834140 - DNA, 25 bp, Homo sapien
gtaaggctttcctggtattctagtc

SEQ ID NO: 2834141 - DNA, 25 bp, Homo sapien
taacaggagtcctattgctctcggg

SEQ ID NO: 2834142 - DNA, 25 bp, Homo sapien
tgttactgtccactgaagaggcggg

SEQ ID NO: 2834143 - DNA, 25 bp, Homo sapien
caataagtgggtacctgtcatcagg

SEQ ID NO: 2834144 - DNA, 25 bp, Homo sapien
ttttggagtctcgtcccggagtagc

SEQ ID NO: 2834145 - DNA, 25 bp, Homo sapien
tgtggaaggtaccccaccgcctctg

SEQ ID NO: 2834146 - DNA, 25 bp, Homo sapien
tatttggatcaggttttaaatggac

SEQ ID NO: 2834147 - DNA, 25 bp, Homo sapien
gagagggcctgtggaaggtacccca

SEQ ID NO: 2834148 - DNA, 25 bp, Homo sapien
aatggacatcaccaaggaccctgag

SEQ ID NO: 2834149 - DNA, 25 bp, Homo sapien
agatgcactctgggatggctcattt

SEQ ID NO: 2834150 - DNA, 25 bp, Homo sapien
actctgggatggctcatttgcctca

SEQ ID NO: 2834151 - DNA, 25 bp, Homo sapien
gatgcactctgggatggctcatttg

SEQ ID NO: 2834152 - DNA, 25 bp, Homo sapien
tgcactctgggatggctcatttgcc

SEQ ID NO: 2834153 - DNA, 25 bp, Homo sapien
ttcactattatggtgtgaaggttca

SEQ ID NO: 2834154 - DNA, 25 bp, Homo sapien
ctgtggctactagaatcatccctgg

SEQ ID NO: 2834155 - DNA, 25 bp, Homo sapien
gaatcatccctggagttatctgctc

SEQ ID NO: 2834156 - DNA, 25 bp, Homo sapien
cactattatggtgtgaaggttcaga

SEQ ID NO: 2834157 - DNA, 25 bp, Homo sapien
cttcctggtgtactcctcggcattg

SEQ ID NO: 2834158 - DNA, 25 bp, Homo sapien
tactcctcggcattgtcttatcaca

SEQ ID NO: 2834159 - DNA, 25 bp, Homo sapien
tggtgtactcctcggcattgtctta

SEQ ID NO: 2834160 - DNA, 25 bp, Homo sapien
cctggtgtactcctcggcattgtct

SEQ ID NO: 2834161 - DNA, 25 bp, Homo sapien
cactgctgcttagttttaagtcatc

SEQ ID NO: 2834162 - DNA, 25 bp, Homo sapien
atcactgtcttcactgctgcttagt

SEQ ID NO: 2834163 - DNA, 25 bp, Homo sapien
tcttcactgctgcttagttttaagt

SEQ ID NO: 2834164 - DNA, 25 bp, Homo sapien
ctgctgcttagttttaagtcatctt

SEQ ID NO: 2834165 - DNA, 25 bp, Homo sapien
aatactataagctgacagtttctgg

SEQ ID NO: 2834166 - DNA, 25 bp, Homo sapien
gcttagggagaactacaactaggaa

SEQ ID NO: 2834167 - DNA, 25 bp, Homo sapien
tacatgggaggaaaaattaatacaa

SEQ ID NO: 2834168 - DNA, 25 bp, Homo sapien
caaaatctccgttgatcaaacttca

SEQ ID NO: 2834169 - DNA, 25 bp, Homo sapien
ctttcactctattaactacttgtac

SEQ ID NO: 2834170 - DNA, 25 bp, Homo sapien
aaatttcattacaatctccaatcag

SEQ ID NO: 2834171 - DNA, 25 bp, Homo sapien
ttctatatctgaccctaagttcaaa

SEQ ID NO: 2834172 - DNA, 25 bp, Homo sapien
caccaccttgaaataaagtaaccag

SEQ ID NO: 2834173 - DNA, 25 bp, Homo sapien
tttagactggtgcccatttgaagtt

SEQ ID NO: 2834174 - DNA, 25 bp, Homo sapien
gatttagactggtgcccatttgaag

SEQ ID NO: 2834175 - DNA, 25 bp, Homo sapien
atttagactggtgcccatttgaagt

SEQ ID NO: 2834176 - DNA, 25 bp, Homo sapien
tgcggagttttatcatcatagagcc

SEQ ID NO: 2834177 - DNA, 25 bp, Homo sapien
tctgacaggccaagagagtaagggt

SEQ ID NO: 2834178 - DNA, 25 bp, Homo sapien
gcagcagattttctacccagatcag

SEQ ID NO: 2834179 - DNA, 25 bp, Homo sapien
taactcttgagtttacgaggtgccc

SEQ ID NO: 2834180 - DNA, 25 bp, Homo sapien
taaaaattaggatacgagggcatgg

SEQ ID NO: 2834181 - DNA, 25 bp, Homo sapien
aatttttcagctcaacccactacta

SEQ ID NO: 2834182 - DNA, 25 bp, Homo sapien
cccactactacccattagatcataa

SEQ ID NO: 2834183 - DNA, 25 bp, Homo sapien
cccattagatcataaaaattaggat

SEQ ID NO: 2834184 - DNA, 25 bp, Homo sapien
gtgccaaaattggactgctgagact

SEQ ID NO: 2834185 - DNA, 25 bp, Homo sapien
tgccaaaattggactgctgagactc

SEQ ID NO: 2834186 - DNA, 25 bp, Homo sapien
agtgccaaaattggactgctgagac

SEQ ID NO: 2834187 - DNA, 25 bp, Homo sapien
tggactttcccagagattaatacaa

SEQ ID NO: 2834188 - DNA, 25 bp, Homo sapien
gatcctgtctgatcagccttggcaa

SEQ ID NO: 2834189 - DNA, 25 bp, Homo sapien
taccgaagacagtgtaccaggtgaa

SEQ ID NO: 2834190 - DNA, 25 bp, Homo sapien
tacaaaaagcattaagccacctaat

SEQ ID NO: 2834191 - DNA, 25 bp, Homo sapien
catcatctttactctgaagagagaa

SEQ ID NO: 2834192 - DNA, 25 bp, Homo sapien
ccaacatcatctttactctgaagag

SEQ ID NO: 2834193 - DNA, 25 bp, Homo sapien
accacaataggccaacatcatcttt

SEQ ID NO: 2834194 - DNA, 25 bp, Homo sapien
gagccaccacaataggccaacatca

SEQ ID NO: 2834195 - DNA, 25 bp, Homo sapien
gaattctatagctggcaaaaacact

SEQ ID NO: 2834196 - DNA, 25 bp, Homo sapien
tgaacaaacctcaagcacgagaaag

SEQ ID NO: 2834197 - DNA, 25 bp, Homo sapien
gaactacaggagaacgtatcataac

SEQ ID NO: 2834198 - DNA, 25 bp, Homo sapien
gggcaaggtcctcaatctagaattc

SEQ ID NO: 2834199 - DNA, 25 bp, Homo sapien
gacaatagggtcttatacagcagaa

SEQ ID NO: 2834200 - DNA, 25 bp, Homo sapien
cacaaaagggctgatgagacagaga

SEQ ID NO: 2834201 - DNA, 25 bp, Homo sapien
tctacgacgggagaaatgcaagtat

SEQ ID NO: 2834202 - DNA, 25 bp, Homo sapien
gcaagatagtagatttaagcccaac

SEQ ID NO: 2834203 - DNA, 25 bp, Homo sapien
tagtataacactataagccaacttg

SEQ ID NO: 2834204 - DNA, 25 bp, Homo sapien
aacttgacctaacaggacactccac

SEQ ID NO: 2834205 - DNA, 25 bp, Homo sapien
gagtagttgcaactgcaggtgccca

SEQ ID NO: 2834206 - DNA, 25 bp, Homo sapien
caacagcagaatacgcttctttttg

SEQ ID NO: 2834207 - DNA, 25 bp, Homo sapien
catctcttcgtttggaggccctata

SEQ ID NO: 2834208 - DNA, 25 bp, Homo sapien
tgtgtgcatcagacaacagacctgt

SEQ ID NO: 2834209 - DNA, 25 bp, Homo sapien
tttaagaagggaacaatacagacca

SEQ ID NO: 2834210 - DNA, 25 bp, Homo sapien
cttaaaagccatggtctcaactcct

SEQ ID NO: 2834211 - DNA, 25 bp, Homo sapien
aaatcaaacagggccgggtactgtg

SEQ ID NO: 2834212 - DNA, 25 bp, Homo sapien
taaagatgctaattggatatgtaca

SEQ ID NO: 2834213 - DNA, 25 bp, Homo sapien
tcaagacaggctcatattggcacca

SEQ ID NO: 2834214 - DNA, 25 bp, Homo sapien
gagtcaactacaactgcaaaggcaa

SEQ ID NO: 2834215 - DNA, 25 bp, Homo sapien
taagtctcaaagtcaaatcatcaag

SEQ ID NO: 2834216 - DNA, 25 bp, Homo sapien
aagtctaggaaacaacataggagga

SEQ ID NO: 2834217 - DNA, 25 bp, Homo sapien
aaaagtctaggaaacaacataggag

SEQ ID NO: 2834218 - DNA, 25 bp, Homo sapien
cataggaggatttgggttaggcaaa

SEQ ID NO: 2834219 - DNA, 25 bp, Homo sapien
ataggaggatttgggttaggcaaag

SEQ ID NO: 2834220 - DNA, 25 bp, Homo sapien
ctgcgcccagcatgacagttgtttt

SEQ ID NO: 2834221 - DNA, 25 bp, Homo sapien
ctgagcagtagagtgagacccccgt

SEQ ID NO: 2834222 - DNA, 25 bp, Homo sapien
actataaatttagtggtgggcacag

SEQ ID NO: 2834223 - DNA, 25 bp, Homo sapien
cagtttactataaatttagtggtgg

SEQ ID NO: 2834224 - DNA, 25 bp, Homo sapien
ggtgggcacagtagcttgtgcttgg

SEQ ID NO: 2834225 - DNA, 25 bp, Homo sapien
caccgtgtccggctgtattaatgtc

SEQ ID NO: 2834226 - DNA, 25 bp, Homo sapien
tgatccaagatgctctcagttccat

SEQ ID NO: 2834227 - DNA, 25 bp, Homo sapien
tctctctcgcatattgccttcaaag

SEQ ID NO: 2834228 - DNA, 25 bp, Homo sapien
aatccatatgattttagtcaagcca

SEQ ID NO: 2834229 - DNA, 25 bp, Homo sapien
catggtgtatgaatagccgttagag

SEQ ID NO: 2834230 - DNA, 25 bp, Homo sapien
ttggaaggttctgttttgcatggtg

SEQ ID NO: 2834231 - DNA, 25 bp, Homo sapien
tgttttgcatggtgtatgaatagcc

SEQ ID NO: 2834232 - DNA, 25 bp, Homo sapien
ggggaggccatgaatgcgtcatctc

SEQ ID NO: 2834233 - DNA, 25 bp, Homo sapien
caagcatgggaaaacggtgtactac

SEQ ID NO: 2834234 - DNA, 25 bp, Homo sapien
ccagtttagcaaaagcggtcagtca

SEQ ID NO: 2834235 - DNA, 25 bp, Homo sapien
taattactgaagctcaaggcggcag

SEQ ID NO: 2834236 - DNA, 25 bp, Homo sapien
ccttgaatgggccagacactgtgct

SEQ ID NO: 2834237 - DNA, 25 bp, Homo sapien
acacagctcacatcaccagaagctg

SEQ ID NO: 2834238 - DNA, 25 bp, Homo sapien
ttttaggatttcatccacacagctc

SEQ ID NO: 2834239 - DNA, 25 bp, Homo sapien
agctcacatcaccagaagctgatgc

SEQ ID NO: 2834240 - DNA, 25 bp, Homo sapien
tttaggatttcatccacacagctca

SEQ ID NO: 2834241 - DNA, 25 bp, Homo sapien
tccatgggccgcacataggcagtgg

SEQ ID NO: 2834242 - DNA, 25 bp, Homo sapien
tgttgccatgggattggctgctgta

SEQ ID NO: 2834243 - DNA, 25 bp, Homo sapien
gaggacagctttggttccatggact

SEQ ID NO: 2834244 - DNA, 25 bp, Homo sapien
cagtggttgggaaggtattttcagc

SEQ ID NO: 2834245 - DNA, 25 bp, Homo sapien
ccagtttgcatcagggtcccgaggt

SEQ ID NO: 2834246 - DNA, 25 bp, Homo sapien
taagcctgaggaccgtttctgagac

SEQ ID NO: 2834247 - DNA, 25 bp, Homo sapien
tgttatatgactcacggtcgtgcct

SEQ ID NO: 2834248 - DNA, 25 bp, Homo sapien
caagctttggtatagatctgtctcc

SEQ ID NO: 2834249 - DNA, 25 bp, Homo sapien
gcacattccggtcttcacggttcat

SEQ ID NO: 2834250 - DNA, 25 bp, Homo sapien
cagcacattccggtcttcacggttc

SEQ ID NO: 2834251 - DNA, 25 bp, Homo sapien
ttctttcatacgcagcacattccgg

SEQ ID NO: 2834252 - DNA, 25 bp, Homo sapien
ctttcccgttctttcatacgcagca

SEQ ID NO: 2834253 - DNA, 25 bp, Homo sapien
tattccaaggaaacactagcccaga

SEQ ID NO: 2834254 - DNA, 25 bp, Homo sapien
cagagggaacgtagtatttgaacac

SEQ ID NO: 2834255 - DNA, 25 bp, Homo sapien
agtgtcttccacaactattccaagg

SEQ ID NO: 2834256 - DNA, 25 bp, Homo sapien
tagcccagaatattagaacccaccc

SEQ ID NO: 2834257 - DNA, 25 bp, Homo sapien
aacccaggttttcagtgatagaatc

SEQ ID NO: 2834258 - DNA, 25 bp, Homo sapien
tggaagtcccatctctataatcagg

SEQ ID NO: 2834259 - DNA, 25 bp, Homo sapien
caattaacacctcaataaatggcaa

SEQ ID NO: 2834260 - DNA, 25 bp, Homo sapien
gattagtaacagcaactaaacttgt

SEQ ID NO: 2834261 - DNA, 25 bp, Homo sapien
gctgaagggaaagacggattgccat

SEQ ID NO: 2834262 - DNA, 25 bp, Homo sapien
tagccgccctacaaacagaagagat

SEQ ID NO: 2834263 - DNA, 25 bp, Homo sapien
tatgtaactagttgacgccccaaga

SEQ ID NO: 2834264 - DNA, 25 bp, Homo sapien
cactgatgacagttccctgcggaaa

SEQ ID NO: 2834265 - DNA, 25 bp, Homo sapien
gttcgtcactaagcggcctaactgg

SEQ ID NO: 2834266 - DNA, 25 bp, Homo sapien
gcctcacagtgacgagcatgttctg

SEQ ID NO: 2834267 - DNA, 25 bp, Homo sapien
caaacacagcgttatcatggcctca

SEQ ID NO: 2834268 - DNA, 25 bp, Homo sapien
gactgaaagatgaaaccacctggta

SEQ ID NO: 2834269 - DNA, 25 bp, Homo sapien
caggcacctgccacaacaccaggct

SEQ ID NO: 2834270 - DNA, 25 bp, Homo sapien
gcctaggctggtctcaaactcctga

SEQ ID NO: 2834271 - DNA, 25 bp, Homo sapien
ggcacctgccacaacaccaggctaa

SEQ ID NO: 2834272 - DNA, 25 bp, Homo sapien
cctaggctggtctcaaactcctgac

SEQ ID NO: 2834273 - DNA, 25 bp, Homo sapien
tgtttgagacatcgcctaggttggc

SEQ ID NO: 2834274 - DNA, 25 bp, Homo sapien
ggtagtgtgtacctgcaatcccaac

SEQ ID NO: 2834275 - DNA, 25 bp, Homo sapien
cattctaaaccagtggatggccaca

SEQ ID NO: 2834276 - DNA, 25 bp, Homo sapien
caggtcaggttagctttaggcagtc

SEQ ID NO: 2834277 - DNA, 25 bp, Homo sapien
agtaacaaatcagccgatggaacgt

SEQ ID NO: 2834278 - DNA, 25 bp, Homo sapien
tttctctttaattagacataatttg

SEQ ID NO: 2834279 - DNA, 25 bp, Homo sapien
aaaagtaacaaatcagccgatggaa

SEQ ID NO: 2834280 - DNA, 25 bp, Homo sapien
ttctctttaattagacataatttga

SEQ ID NO: 2834281 - DNA, 25 bp, Homo sapien
gtgggacgcgcagatgagaggaggg

SEQ ID NO: 2834282 - DNA, 25 bp, Homo sapien
cgaggctccccgcagaacttgcggg

SEQ ID NO: 2834283 - DNA, 25 bp, Homo sapien
gggtgacgcctgattgagcagcccc

SEQ ID NO: 2834284 - DNA, 25 bp, Homo sapien
gtgacgcctgattgagcagccccag

SEQ ID NO: 2834285 - DNA, 25 bp, Homo sapien
ccagtcccggctccgctaggcccga

SEQ ID NO: 2834286 - DNA, 25 bp, Homo sapien
cagtcccggctccgctaggcccgaa

SEQ ID NO: 2834287 - DNA, 25 bp, Homo sapien
cgagcccgcccagggggcggtgaca

SEQ ID NO: 2834288 - DNA, 25 bp, Homo sapien
gcctgcaccttcaccggacgcgcat

SEQ ID NO: 2834289 - DNA, 25 bp, Homo sapien
gacgcgcattcgagcccgcccaggg

SEQ ID NO: 2834290 - DNA, 25 bp, Homo sapien
caccttcaccggacgcgcattcgag

SEQ ID NO: 2834291 - DNA, 25 bp, Homo sapien
ctccatgacggtcgggcccgggctg

SEQ ID NO: 2834292 - DNA, 25 bp, Homo sapien
tccggaggcctcgacaaacgaaggc

SEQ ID NO: 2834293 - DNA, 25 bp, Homo sapien
gcgggttaacgaagacctggcacca

SEQ ID NO: 2834294 - DNA, 25 bp, Homo sapien
gcctcacacggaacaggcgtaggcc

SEQ ID NO: 2834295 - DNA, 25 bp, Homo sapien
gaggttgacgcttaccacaaatgat

SEQ ID NO: 2834296 - DNA, 25 bp, Homo sapien
aataaaatgaggttgacgcttacca

SEQ ID NO: 2834297 - DNA, 25 bp, Homo sapien
taaaatgaggttgacgcttaccaca

SEQ ID NO: 2834298 - DNA, 25 bp, Homo sapien
aaatgaggttgacgcttaccacaaa

SEQ ID NO: 2834299 - DNA, 25 bp, Homo sapien
tccactctctgaccaagatgagggg

SEQ ID NO: 2834300 - DNA, 25 bp, Homo sapien
tcctgttttttgaatgcaagttaaa

SEQ ID NO: 2834301 - DNA, 25 bp, Homo sapien
tctctgaccaagatgaggggaaaaa

SEQ ID NO: 2834302 - DNA, 25 bp, Homo sapien
gagatcctgttttttgaatgcaagt

SEQ ID NO: 2834303 - DNA, 25 bp, Homo sapien
taggcatttacagagcaatccacct

SEQ ID NO: 2834304 - DNA, 25 bp, Homo sapien
tctgagagacaattatggcataggc

SEQ ID NO: 2834305 - DNA, 25 bp, Homo sapien
tgcccgtacttcctcttctgagaga

SEQ ID NO: 2834306 - DNA, 25 bp, Homo sapien
cttcctcttctgagagacaattatg

SEQ ID NO: 2834307 - DNA, 25 bp, Homo sapien
cctctgttttgccctctaagtcttc

SEQ ID NO: 2834308 - DNA, 25 bp, Homo sapien
tcttcctctgttttgccctctaagt

SEQ ID NO: 2834309 - DNA, 25 bp, Homo sapien
ttcctctgttttgccctctaagtct

SEQ ID NO: 2834310 - DNA, 25 bp, Homo sapien
tctgttttgccctctaagtcttcct

SEQ ID NO: 2834311 - DNA, 25 bp, Homo sapien
ggttggcgagcggttccttctccca

SEQ ID NO: 2834312 - DNA, 25 bp, Homo sapien
ctctcacgggatgtggaccgggaac

SEQ ID NO: 2834313 - DNA, 25 bp, Homo sapien
gatttatgtcgtcttggagatcggg

SEQ ID NO: 2834314 - DNA, 25 bp, Homo sapien
gagatcgggagcgtcctaggtgcgg

SEQ ID NO: 2834315 - DNA, 25 bp, Homo sapien
tcctccgtggggagccgctgcgact

SEQ ID NO: 2834316 - DNA, 25 bp, Homo sapien
ccgtggggagccgctgcgactgcca

SEQ ID NO: 2834317 - DNA, 25 bp, Homo sapien
tccgtggggagccgctgcgactgcc

SEQ ID NO: 2834318 - DNA, 25 bp, Homo sapien
ctttcctccgtggggagccgctgcg

SEQ ID NO: 2834319 - DNA, 25 bp, Homo sapien
agaaggaacaaagaaatctgtaact

SEQ ID NO: 2834320 - DNA, 25 bp, Homo sapien
aaacaccactggacttggaccagcc

SEQ ID NO: 2834321 - DNA, 25 bp, Homo sapien
taggctagccaaatgaaacaatggg

SEQ ID NO: 2834322 - DNA, 25 bp, Homo sapien
tagccaaatgaaacaatgggagtgg

SEQ ID NO: 2834323 - DNA, 25 bp, Homo sapien
tactgattagcttgaatagcagaca

SEQ ID NO: 2834324 - DNA, 25 bp, Homo sapien
agcttgaatagcagacacaaatgcc

SEQ ID NO: 2834325 - DNA, 25 bp, Homo sapien
ttactgattagcttgaatagcagac

SEQ ID NO: 2834326 - DNA, 25 bp, Homo sapien
gattagcttgaatagcagacacaaa

SEQ ID NO: 2834327 - DNA, 25 bp, Homo sapien
tatttaactgcaagtgatgcaacct

SEQ ID NO: 2834328 - DNA, 25 bp, Homo sapien
gcaacctatgtaacacattcttttc

SEQ ID NO: 2834329 - DNA, 25 bp, Homo sapien
catccgtgttctttaactgctaata

SEQ ID NO: 2834330 - DNA, 25 bp, Homo sapien
tattacctttacagagacaaacatt

SEQ ID NO: 2834331 - DNA, 25 bp, Homo sapien
tttattaactctatctgtcaagtga

SEQ ID NO: 2834332 - DNA, 25 bp, Homo sapien
ggtaatttattaactctatctgtca

SEQ ID NO: 2834333 - DNA, 25 bp, Homo sapien
taactctatctgtcaagtgataata

SEQ ID NO: 2834334 - DNA, 25 bp, Homo sapien
gcctgattggtaatttattaactct

SEQ ID NO: 2834335 - DNA, 25 bp, Homo sapien
taggctccttgaacataccacttag

SEQ ID NO: 2834336 - DNA, 25 bp, Homo sapien
tacaggctccttaaactcacaacat

SEQ ID NO: 2834337 - DNA, 25 bp, Homo sapien
taataaaaggcgaccaacattgccc

SEQ ID NO: 2834338 - DNA, 25 bp, Homo sapien
taacagaaggcaccaagattagact

SEQ ID NO: 2834339 - DNA, 25 bp, Homo sapien
cacatcaatgttttcagtccatcag

SEQ ID NO: 2834340 - DNA, 25 bp, Homo sapien
aaagcattagaaatccactgccaga

SEQ ID NO: 2834341 - DNA, 25 bp, Homo sapien
tgttcaccagttaacctacttggcc

SEQ ID NO: 2834342 - DNA, 25 bp, Homo sapien
gatatcctgacgcaccatcctgaaa

SEQ ID NO: 2834343 - DNA, 25 bp, Homo sapien
cactggcagaactgtcactgctact

SEQ ID NO: 2834344 - DNA, 25 bp, Homo sapien
atcactggcagaactgtcactgcta

SEQ ID NO: 2834345 - DNA, 25 bp, Homo sapien
tcactggcagaactgtcactgctac

SEQ ID NO: 2834346 - DNA, 25 bp, Homo sapien
acaatacagagttatatacatggga

SEQ ID NO: 2834347 - DNA, 25 bp, Homo sapien
gacaatacagagttatatacatggg

SEQ ID NO: 2834348 - DNA, 25 bp, Homo sapien
cttggcctttctttctacattggtt

SEQ ID NO: 2834349 - DNA, 25 bp, Homo sapien
tcttggcctttctttctacattggt

SEQ ID NO: 2834350 - DNA, 25 bp, Homo sapien
aacattctccgccagatcatgggtc

SEQ ID NO: 2834351 - DNA, 25 bp, Homo sapien
tggaggtattggagcagcactgttt

SEQ ID NO: 2834352 - DNA, 25 bp, Homo sapien
caagaagcatgcgaagttgatcccc

SEQ ID NO: 2834353 - DNA, 25 bp, Homo sapien
tcgcctctgacattgttcaatccag

SEQ ID NO: 2834354 - DNA, 25 bp, Homo sapien
ataagtccaatgtccaaattccaag

SEQ ID NO: 2834355 - DNA, 25 bp, Homo sapien
cttgagggcctatgtaggtattttc

SEQ ID NO: 2834356 - DNA, 25 bp, Homo sapien
aagtccaatgtccaaattccaagca

SEQ ID NO: 2834357 - DNA, 25 bp, Homo sapien
ttgagggcctatgtaggtattttct

SEQ ID NO: 2834358 - DNA, 25 bp, Homo sapien
atgcccttgtaaaagaacaagtagg

SEQ ID NO: 2834359 - DNA, 25 bp, Homo sapien
gacaaaatgcccttgtaaaagaaca

SEQ ID NO: 2834360 - DNA, 25 bp, Homo sapien
caaaatgcccttgtaaaagaacaag

SEQ ID NO: 2834361 - DNA, 25 bp, Homo sapien
aattcaaaaggccagtaacagacaa

SEQ ID NO: 2834362 - DNA, 25 bp, Homo sapien
tggatgacctctgcaacctgctgac

SEQ ID NO: 2834363 - DNA, 25 bp, Homo sapien
tgttaaactgcctcgtgtggacacc

SEQ ID NO: 2834364 - DNA, 25 bp, Homo sapien
tgaccctctgcatagacacctagtg

SEQ ID NO: 2834365 - DNA, 25 bp, Homo sapien
tggacacctttgacccagcttggga

SEQ ID NO: 2834366 - DNA, 25 bp, Homo sapien
tattgttataaatacgacattcaca

SEQ ID NO: 2834367 - DNA, 25 bp, Homo sapien
aagctcaggtatgaggctggacgca

SEQ ID NO: 2834368 - DNA, 25 bp, Homo sapien
tcacaaatatcatctaaagctcagg

SEQ ID NO: 2834369 - DNA, 25 bp, Homo sapien
taaatacgacattcacaaatatcat

SEQ ID NO: 2834370 - DNA, 25 bp, Homo sapien
gaattaatatatgggatctgttatg

SEQ ID NO: 2834371 - DNA, 25 bp, Homo sapien
tcttatgggacaaccatagaattaa

SEQ ID NO: 2834372 - DNA, 25 bp, Homo sapien
gagagatccagttatggcctgcatg

SEQ ID NO: 2834373 - DNA, 25 bp, Homo sapien
ctgcatggtttggtattgttcaact

SEQ ID NO: 2834374 - DNA, 25 bp, Homo sapien
ataacgatggatggctgaatcagga

SEQ ID NO: 2834375 - DNA, 25 bp, Homo sapien
ctaataacgatggatggctgaatca

SEQ ID NO: 2834376 - DNA, 25 bp, Homo sapien
ggtcttgacaggctgcaactctgtg

SEQ ID NO: 2834377 - DNA, 25 bp, Homo sapien
gacaggctgcaactctgtgtcgaat

SEQ ID NO: 2834378 - DNA, 25 bp, Homo sapien
tctcaaaatcctcgtatgactgttc

SEQ ID NO: 2834379 - DNA, 25 bp, Homo sapien
tcaaaatcctcgtatgactgttcct

SEQ ID NO: 2834380 - DNA, 25 bp, Homo sapien
tttctcaaaatcctcgtatgactgt

SEQ ID NO: 2834381 - DNA, 25 bp, Homo sapien
aaaatcctcgtatgactgttccttt

SEQ ID NO: 2834382 - DNA, 25 bp, Homo sapien
gactttacgcggctgtcttccgcga

SEQ ID NO: 2834383 - DNA, 25 bp, Homo sapien
tgagaaacggacattctccgccggt

SEQ ID NO: 2834384 - DNA, 25 bp, Homo sapien
gacaccagcccgttgacgcgcgttt

SEQ ID NO: 2834385 - DNA, 25 bp, Homo sapien
gctctgtcccgtgccgcagacttta

SEQ ID NO: 2834386 - DNA, 25 bp, Homo sapien
ttagccgatgcatgggagtcgccat

SEQ ID NO: 2834387 - DNA, 25 bp, Homo sapien
tccgggctattagccgatgcatggg

SEQ ID NO: 2834388 - DNA, 25 bp, Homo sapien
ggctattagccgatgcatgggagtc

SEQ ID NO: 2834389 - DNA, 25 bp, Homo sapien
cttgtctccgggctattagccgatg

SEQ ID NO: 2834390 - DNA, 25 bp, Homo sapien
cttagcgcggtcaaagccggccgcg

SEQ ID NO: 2834391 - DNA, 25 bp, Homo sapien
tcaaagccggccgcgcagggttttg

SEQ ID NO: 2834392 - DNA, 25 bp, Homo sapien
gcggtcaaagccggccgcgcagggt

SEQ ID NO: 2834393 - DNA, 25 bp, Homo sapien
tagcgcggtcaaagccggccgcgca

SEQ ID NO: 2834394 - DNA, 25 bp, Homo sapien
agaacaaagctgattcaatagagaa

SEQ ID NO: 2834395 - DNA, 25 bp, Homo sapien
aagagactcgtgaaagaaagaatgc

SEQ ID NO: 2834396 - DNA, 25 bp, Homo sapien
aaaacttgttattctacagagcata

SEQ ID NO: 2834397 - DNA, 25 bp, Homo sapien
gattcaatagagaattcaagagact

SEQ ID NO: 2834398 - DNA, 25 bp, Homo sapien
ttctacggtaaagggaggtgctcca

SEQ ID NO: 2834399 - DNA, 25 bp, Homo sapien
catgagtggcttagagaacggcgca

SEQ ID NO: 2834400 - DNA, 25 bp, Homo sapien
ttgagagaacccgacataaaggccg

SEQ ID NO: 2834401 - DNA, 25 bp, Homo sapien
tcagtatagtgcctcgagctggctc

SEQ ID NO: 2834402 - DNA, 25 bp, Homo sapien
gacctcaaatgaggccctggcttct

SEQ ID NO: 2834403 - DNA, 25 bp, Homo sapien
atttatgtattgctgagttggttcc

SEQ ID NO: 2834404 - DNA, 25 bp, Homo sapien
agtggccctgtcagcgcaacctcca

SEQ ID NO: 2834405 - DNA, 25 bp, Homo sapien
atgacacccggccttaactagaatt

SEQ ID NO: 2834406 - DNA, 25 bp, Homo sapien
aagatggatagatttgacagtcaaa

SEQ ID NO: 2834407 - DNA, 25 bp, Homo sapien
tatgtagacaaataatacagttaga

SEQ ID NO: 2834408 - DNA, 25 bp, Homo sapien
gacagtcaaaacttatatgtagaca

SEQ ID NO: 2834409 - DNA, 25 bp, Homo sapien
ctagaagagtcgctgtggctcacac

SEQ ID NO: 2834410 - DNA, 25 bp, Homo sapien
gactggtatgggtactcctggactc

SEQ ID NO: 2834411 - DNA, 25 bp, Homo sapien
ggttacatttagaggctccatcaga

SEQ ID NO: 2834412 - DNA, 25 bp, Homo sapien
gaatcagtatccgtatagggctcat

SEQ ID NO: 2834413 - DNA, 25 bp, Homo sapien
tactgtgtatctccattaggaggca

SEQ ID NO: 2834414 - DNA, 25 bp, Homo sapien
tttggttccgaactagcatgctgaa

SEQ ID NO: 2834415 - DNA, 25 bp, Homo sapien
gattttgtataaatcgggtgctgct

SEQ ID NO: 2834416 - DNA, 25 bp, Homo sapien
tggcagaaactagacagtagttgcg

SEQ ID NO: 2834417 - DNA, 25 bp, Homo sapien
cctgggttcacgtcaaaggccttct

SEQ ID NO: 2834418 - DNA, 25 bp, Homo sapien
cagctgtgccttcggattcagacaa

SEQ ID NO: 2834419 - DNA, 25 bp, Homo sapien
cctgaaatggacattgattgattcc

SEQ ID NO: 2834420 - DNA, 25 bp, Homo sapien
acacagctgtgccttcggattcaga

SEQ ID NO: 2834421 - DNA, 25 bp, Homo sapien
tcctgaaatggacattgattgattc

SEQ ID NO: 2834422 - DNA, 25 bp, Homo sapien
taggtaatgtatggagcattttcac

SEQ ID NO: 2834423 - DNA, 25 bp, Homo sapien
tagttagatacagaaattaagtgca

SEQ ID NO: 2834424 - DNA, 25 bp, Homo sapien
gaagcccagttagtcttactgagct

SEQ ID NO: 2834425 - DNA, 25 bp, Homo sapien
tcataatggtactatttagaagccc

SEQ ID NO: 2834426 - DNA, 25 bp, Homo sapien
gctctctgcttagacaggctttaag

SEQ ID NO: 2834427 - DNA, 25 bp, Homo sapien
ttgctctctgcttagacaggcttta

SEQ ID NO: 2834428 - DNA, 25 bp, Homo sapien
tctctgcttagacaggctttaagac

SEQ ID NO: 2834429 - DNA, 25 bp, Homo sapien
tgctctctgcttagacaggctttaa

SEQ ID NO: 2834430 - DNA, 25 bp, Homo sapien
aaagagtctcacagaacgggtggat

SEQ ID NO: 2834431 - DNA, 25 bp, Homo sapien
gctgttttgaagagtgctacttttc

SEQ ID NO: 2834432 - DNA, 25 bp, Homo sapien
atggcagagccaagaattttaatgc

SEQ ID NO: 2834433 - DNA, 25 bp, Homo sapien
agtctcacagaacgggtggatggca

SEQ ID NO: 2834434 - DNA, 25 bp, Homo sapien
gaagtcgccctgagtgtagcattag

SEQ ID NO: 2834435 - DNA, 25 bp, Homo sapien
aaatcgcagtgcttgtgttgccaca

SEQ ID NO: 2834436 - DNA, 25 bp, Homo sapien
ctaagaatctgacgttcccctccgg

SEQ ID NO: 2834437 - DNA, 25 bp, Homo sapien
ggttccgtgcgtagatcagacttca

SEQ ID NO: 2834438 - DNA, 25 bp, Homo sapien
tgacaatctggcgtggctgtcacgg

SEQ ID NO: 2834439 - DNA, 25 bp, Homo sapien
tggcgtggctgtcacggcatccacc

SEQ ID NO: 2834440 - DNA, 25 bp, Homo sapien
cacccccaggaatgggcagctggtg

SEQ ID NO: 2834441 - DNA, 25 bp, Homo sapien
aatctggcgtggctgtcacggcatc

SEQ ID NO: 2834442 - DNA, 25 bp, Homo sapien
tgtccctttcgtaaccattctctga

SEQ ID NO: 2834443 - DNA, 25 bp, Homo sapien
agcggtcagctcttcgtctagcggg

SEQ ID NO: 2834444 - DNA, 25 bp, Homo sapien
ctcaagtgccatggcaaccaaaggg

SEQ ID NO: 2834445 - DNA, 25 bp, Homo sapien
ggagactggacttcgtttgttggct

SEQ ID NO: 2834446 - DNA, 25 bp, Homo sapien
ataaaaggctatccgccccggtgtg

SEQ ID NO: 2834447 - DNA, 25 bp, Homo sapien
tggcctggactttgcccctggtgtc

SEQ ID NO: 2834448 - DNA, 25 bp, Homo sapien
cttctggtgctcggattcccatggg

SEQ ID NO: 2834449 - DNA, 25 bp, Homo sapien
gaagatgggcccgtgtccagttttc

SEQ ID NO: 2834450 - DNA, 25 bp, Homo sapien
agtagtgatttaacttgccatcttc

SEQ ID NO: 2834451 - DNA, 25 bp, Homo sapien
tataatcagcgagatctactacagc

SEQ ID NO: 2834452 - DNA, 25 bp, Homo sapien
tctcagtggggtaatataatcagcg

SEQ ID NO: 2834453 - DNA, 25 bp, Homo sapien
gatttaacttgccatcttcaggatt

SEQ ID NO: 2834454 - DNA, 25 bp, Homo sapien
ccaagggatgtcacttggagcgtga

SEQ ID NO: 2834455 - DNA, 25 bp, Homo sapien
ggaggatgctagagattcatgggaa

SEQ ID NO: 2834456 - DNA, 25 bp, Homo sapien
gatatcccccatacagaaccaaggg

SEQ ID NO: 2834457 - DNA, 25 bp, Homo sapien
gtgacatttgatatcccccatacag

SEQ ID NO: 2834458 - DNA, 25 bp, Homo sapien
ccgtttatttccctgatgcctggat

SEQ ID NO: 2834459 - DNA, 25 bp, Homo sapien
gattttctagcaactgctgagctct

SEQ ID NO: 2834460 - DNA, 25 bp, Homo sapien
ggattttctagcaactgctgagctc

SEQ ID NO: 2834461 - DNA, 25 bp, Homo sapien
cgtttatttccctgatgcctggatt

SEQ ID NO: 2834462 - DNA, 25 bp, Homo sapien
ccagggagatgtgcttctgaggtgc

SEQ ID NO: 2834463 - DNA, 25 bp, Homo sapien
tcctgtcacctctggccagggagat

SEQ ID NO: 2834464 - DNA, 25 bp, Homo sapien
gagatgtgcttctgaggtgcacaca

SEQ ID NO: 2834465 - DNA, 25 bp, Homo sapien
gcaggtaatcttcccaggtaatagg

SEQ ID NO: 2834466 - DNA, 25 bp, Homo sapien
tgagcttgagcccagaatagctgag

SEQ ID NO: 2834467 - DNA, 25 bp, Homo sapien
tcagactctgccttagggatgagcg

SEQ ID NO: 2834468 - DNA, 25 bp, Homo sapien
tgagcccagaatagctgagctgtgg

SEQ ID NO: 2834469 - DNA, 25 bp, Homo sapien
tgctgaccatgagggtgactgcatc

SEQ ID NO: 2834470 - DNA, 25 bp, Homo sapien
gcattcttctggcagtgggatgtcc

SEQ ID NO: 2834471 - DNA, 25 bp, Homo sapien
gagcagcttgtctagccttcttgtt

SEQ ID NO: 2834472 - DNA, 25 bp, Homo sapien
tcttctggcagtgggatgtccgagc

SEQ ID NO: 2834473 - DNA, 25 bp, Homo sapien
gatgtccgagcagcttgtctagcct

SEQ ID NO: 2834474 - DNA, 25 bp, Homo sapien
cccaaactgctcattgatgacaagg

SEQ ID NO: 2834475 - DNA, 25 bp, Homo sapien
actcccaaactgctcattgatgaca

SEQ ID NO: 2834476 - DNA, 25 bp, Homo sapien
caaactgctcattgatgacaaggtc

SEQ ID NO: 2834477 - DNA, 25 bp, Homo sapien
caactcccaaactgctcattgatga

SEQ ID NO: 2834478 - DNA, 25 bp, Homo sapien
ggatactctttggtgtaacacctga

SEQ ID NO: 2834479 - DNA, 25 bp, Homo sapien
tagtaaagtggaactgaaggtcaag

SEQ ID NO: 2834480 - DNA, 25 bp, Homo sapien
cacagggatactctttggtgtaaca

SEQ ID NO: 2834481 - DNA, 25 bp, Homo sapien
ttgctctagtaaagtggaactgaag

SEQ ID NO: 2834482 - DNA, 25 bp, Homo sapien
gaaagaagttgtacccagtcgctag

SEQ ID NO: 2834483 - DNA, 25 bp, Homo sapien
gcagatcactttgctaaagctcaga

SEQ ID NO: 2834484 - DNA, 25 bp, Homo sapien
tcagagagcgttgttggcctggaaa

SEQ ID NO: 2834485 - DNA, 25 bp, Homo sapien
gcagtgcaggcttatagcagatcac

SEQ ID NO: 2834486 - DNA, 25 bp, Homo sapien
tcatatttctctttgtgtgtcaaag

SEQ ID NO: 2834487 - DNA, 25 bp, Homo sapien
atttctctttgtgtgtcaaagatct

SEQ ID NO: 2834488 - DNA, 25 bp, Homo sapien
tctctttgtgtgtcaaagatctcac

SEQ ID NO: 2834489 - DNA, 25 bp, Homo sapien
catatttctctttgtgtgtcaaaga

SEQ ID NO: 2834490 - DNA, 25 bp, Homo sapien
gcttgacgtaagcatcagtgagatt

SEQ ID NO: 2834491 - DNA, 25 bp, Homo sapien
ctgcttgacgtaagcatcagtgaga

SEQ ID NO: 2834492 - DNA, 25 bp, Homo sapien
tgcttgacgtaagcatcagtgagat

SEQ ID NO: 2834493 - DNA, 25 bp, Homo sapien
gctgcttgacgtaagcatcagtgag

SEQ ID NO: 2834494 - DNA, 25 bp, Homo sapien
ggcagctttaaaggtacatcttcag

SEQ ID NO: 2834495 - DNA, 25 bp, Homo sapien
gcagctttaaaggtacatcttcagt

SEQ ID NO: 2834496 - DNA, 25 bp, Homo sapien
tggcagctttaaaggtacatcttca

SEQ ID NO: 2834497 - DNA, 25 bp, Homo sapien
ttcaatcctggatttagtggctgag

SEQ ID NO: 2834498 - DNA, 25 bp, Homo sapien
ctcatcaccaccagttttttggttg

SEQ ID NO: 2834499 - DNA, 25 bp, Homo sapien
gtgtgacagtggcaagaaccttctc

SEQ ID NO: 2834500 - DNA, 25 bp, Homo sapien
ctgggtactaccattctcatcacca

SEQ ID NO: 2834501 - DNA, 25 bp, Homo sapien
gagcacgactatcgcactgtgatga

SEQ ID NO: 2834502 - DNA, 25 bp, Homo sapien
cactctttggactgggccagagcac

SEQ ID NO: 2834503 - DNA, 25 bp, Homo sapien
tggtgggcacttttgaaccggatgt

SEQ ID NO: 2834504 - DNA, 25 bp, Homo sapien
gaagagagacttctgggtccagatg

SEQ ID NO: 2834505 - DNA, 25 bp, Homo sapien
ggtgctggctaaagaagcctcgcta

SEQ ID NO: 2834506 - DNA, 25 bp, Homo sapien
catgctaaatactctggtgctggct

SEQ ID NO: 2834507 - DNA, 25 bp, Homo sapien
cacactctgaagataggcactgtat

SEQ ID NO: 2834508 - DNA, 25 bp, Homo sapien
cctacatgccagtttgggaggacat

SEQ ID NO: 2834509 - DNA, 25 bp, Homo sapien
caaagcaggaaagcggcacgggcaa

SEQ ID NO: 2834510 - DNA, 25 bp, Homo sapien
tccttgaatggtaggagctgttgtg

SEQ ID NO: 2834511 - DNA, 25 bp, Homo sapien
caggtcagttgctccttgaatggta

SEQ ID NO: 2834512 - DNA, 25 bp, Homo sapien
ctcgtgtagcggtcaggtcagttgc

SEQ ID NO: 2834513 - DNA, 25 bp, Homo sapien
cttggctgagatgtcgtggtctcgc

SEQ ID NO: 2834514 - DNA, 25 bp, Homo sapien
gacacaggaatggaacaggaaagag

SEQ ID NO: 2834515 - DNA, 25 bp, Homo sapien
tcgtggtctcgctattcctgctgga

SEQ ID NO: 2834516 - DNA, 25 bp, Homo sapien
ttcctgctggacgacacctgacttc

SEQ ID NO: 2834517 - DNA, 25 bp, Homo sapien
taggcgcacccctaggagttacagg

SEQ ID NO: 2834518 - DNA, 25 bp, Homo sapien
caaagacgtctgtggtgagaccacc

SEQ ID NO: 2834519 - DNA, 25 bp, Homo sapien
tgctgagtctctgatctaggcggtc

SEQ ID NO: 2834520 - DNA, 25 bp, Homo sapien
tcattaggaggattaccggctgggc

SEQ ID NO: 2834521 - DNA, 25 bp, Homo sapien
aggccacccataccttgccaggcaa

SEQ ID NO: 2834522 - DNA, 25 bp, Homo sapien
ccagacctgactaatgagatgtctc

SEQ ID NO: 2834523 - DNA, 25 bp, Homo sapien
cagtctgccctgaatctggggtacc

SEQ ID NO: 2834524 - DNA, 25 bp, Homo sapien
gtccttggggtttctgcattgagcc

SEQ ID NO: 2834525 - DNA, 25 bp, Homo sapien
caatagtcgacagggccagtattct

SEQ ID NO: 2834526 - DNA, 25 bp, Homo sapien
ggatatagttggacctcggagagca

SEQ ID NO: 2834527 - DNA, 25 bp, Homo sapien
tcggcctaaggcagggaaggatata

SEQ ID NO: 2834528 - DNA, 25 bp, Homo sapien
ccttacggatgaggtggcctggtct

SEQ ID NO: 2834529 - DNA, 25 bp, Homo sapien
caatgactatgtgaaggcaactgac

SEQ ID NO: 2834530 - DNA, 25 bp, Homo sapien
tgttctcatcgtagctcaaggcata

SEQ ID NO: 2834531 - DNA, 25 bp, Homo sapien
gtagcagcgcataccttatactagg

SEQ ID NO: 2834532 - DNA, 25 bp, Homo sapien
tgcaaggagaccagtgttgaaccac

SEQ ID NO: 2834533 - DNA, 25 bp, Homo sapien
gccaagtctgagatgcccgagttta

SEQ ID NO: 2834534 - DNA, 25 bp, Homo sapien
agcactgactatgaagcgcccgtcg

SEQ ID NO: 2834535 - DNA, 25 bp, Homo sapien
tccgtgtgcagagccgcgtagatgt

SEQ ID NO: 2834536 - DNA, 25 bp, Homo sapien
cactggatgaagaagtagccgccca

SEQ ID NO: 2834537 - DNA, 25 bp, Homo sapien
cactcctgcaaagggtgtgcggatg

SEQ ID NO: 2834538 - DNA, 25 bp, Homo sapien
aagaaatcatccactcctgcaaagg

SEQ ID NO: 2834539 - DNA, 25 bp, Homo sapien
gaatgaagaaatcatccactcctgc

SEQ ID NO: 2834540 - DNA, 25 bp, Homo sapien
ggtgtgcggatgaggtgctggctct

SEQ ID NO: 2834541 - DNA, 25 bp, Homo sapien
agagaccacctcctctcgtaatggg

SEQ ID NO: 2834542 - DNA, 25 bp, Homo sapien
ctcctctcgtaatggggaatcctac

SEQ ID NO: 2834543 - DNA, 25 bp, Homo sapien
gctcagagaccacctcctctcgtaa

SEQ ID NO: 2834544 - DNA, 25 bp, Homo sapien
cctcctctcgtaatggggaatccta

SEQ ID NO: 2834545 - DNA, 25 bp, Homo sapien
tagtctctgtcggatgctgctcaca

SEQ ID NO: 2834546 - DNA, 25 bp, Homo sapien
cacgtggtggaactgtctactggga

SEQ ID NO: 2834547 - DNA, 25 bp, Homo sapien
tacgggatgccactctgacatgctg

SEQ ID NO: 2834548 - DNA, 25 bp, Homo sapien
tgagagaaagcagacatcctacggg

SEQ ID NO: 2834549 - DNA, 25 bp, Homo sapien
ttgtcataggacagcttagccggca

SEQ ID NO: 2834550 - DNA, 25 bp, Homo sapien
ttggtcgggacttgtgcacgtcccc

SEQ ID NO: 2834551 - DNA, 25 bp, Homo sapien
ctggagacttggtcgggacttgtgc

SEQ ID NO: 2834552 - DNA, 25 bp, Homo sapien
cataggacagcttagccggcagagg

SEQ ID NO: 2834553 - DNA, 25 bp, Homo sapien
taccggttccggacattgactgcag

SEQ ID NO: 2834554 - DNA, 25 bp, Homo sapien
ggatgtcgaccacaaggactctgct

SEQ ID NO: 2834555 - DNA, 25 bp, Homo sapien
tgggccacatagatgtaccggttcc

SEQ ID NO: 2834556 - DNA, 25 bp, Homo sapien
ttgactgcagatacccactggcagg

SEQ ID NO: 2834557 - DNA, 25 bp, Homo sapien
tggatgacgatgataccgtcgtcgg

SEQ ID NO: 2834558 - DNA, 25 bp, Homo sapien
ccgtcgtcggagaagacatagaaca

SEQ ID NO: 2834559 - DNA, 25 bp, Homo sapien
gaagacatagaacatgtttcccacg

SEQ ID NO: 2834560 - DNA, 25 bp, Homo sapien
tggatctcacagtccacaggatgga

SEQ ID NO: 2834561 - DNA, 25 bp, Homo sapien
cattgaacacacaagaaaccggcca

SEQ ID NO: 2834562 - DNA, 25 bp, Homo sapien
ctggtgcaggcacgagatgcaattc

SEQ ID NO: 2834563 - DNA, 25 bp, Homo sapien
gaaaccggccacgtggatgcatctg

SEQ ID NO: 2834564 - DNA, 25 bp, Homo sapien
tgggcagggtcacacgcagcattga

SEQ ID NO: 2834565 - DNA, 25 bp, Homo sapien
ttttttttagcatgctgagaaaact

SEQ ID NO: 2834566 - DNA, 25 bp, Homo sapien
tccaacaactctgcatgcagttttc

SEQ ID NO: 2834567 - DNA, 25 bp, Homo sapien
aaacaacaaaacaggaatcactgtt

SEQ ID NO: 2834568 - DNA, 25 bp, Homo sapien
ctgggcaagtttttagtgagttaga

SEQ ID NO: 2834569 - DNA, 25 bp, Homo sapien
tgttcccagacttatcatgtcagct

SEQ ID NO: 2834570 - DNA, 25 bp, Homo sapien
gatcagcgactgttgctattgacag

SEQ ID NO: 2834571 - DNA, 25 bp, Homo sapien
tatgccagactgcaggtaacaccgt

SEQ ID NO: 2834572 - DNA, 25 bp, Homo sapien
acagcagttcctcgttttctgggct

SEQ ID NO: 2834573 - DNA, 25 bp, Homo sapien
ttcctctcgccacaggatgtttgca

SEQ ID NO: 2834574 - DNA, 25 bp, Homo sapien
cttcctctcgccacaggatgtttgc

SEQ ID NO: 2834575 - DNA, 25 bp, Homo sapien
tcctctcgccacaggatgtttgcaa

SEQ ID NO: 2834576 - DNA, 25 bp, Homo sapien
tatgaggagagcacgcttagcacac

SEQ ID NO: 2834577 - DNA, 25 bp, Homo sapien
tctttgaaatcatgccctaggacca

SEQ ID NO: 2834578 - DNA, 25 bp, Homo sapien
tcctaagatgaccacgtgaaatact

SEQ ID NO: 2834579 - DNA, 25 bp, Homo sapien
aatggcttagcctggagtctttgac

SEQ ID NO: 2834580 - DNA, 25 bp, Homo sapien
gacccctagtgtaaaggctaccaca

SEQ ID NO: 2834581 - DNA, 25 bp, Homo sapien
tagtgtaaaggctaccacactccca

SEQ ID NO: 2834582 - DNA, 25 bp, Homo sapien
cgatgggctggacccctagtgtaaa

SEQ ID NO: 2834583 - DNA, 25 bp, Homo sapien
ggctaccacactcccaatggtgtgc

SEQ ID NO: 2834584 - DNA, 25 bp, Homo sapien
ccagagttgtctaggttgccaggga

SEQ ID NO: 2834585 - DNA, 25 bp, Homo sapien
tcagtgagaagcataaacgcgtgtc

SEQ ID NO: 2834586 - DNA, 25 bp, Homo sapien
gatatgaggcttacccctgtcttca

SEQ ID NO: 2834587 - DNA, 25 bp, Homo sapien
ggtgccctccaattccagctttatg

SEQ ID NO: 2834588 - DNA, 25 bp, Homo sapien
cttcaatgaagagcgaggagatatc

SEQ ID NO: 2834589 - DNA, 25 bp, Homo sapien
ttggcaatgcaggtgtatgcccctg

SEQ ID NO: 2834590 - DNA, 25 bp, Homo sapien
tatgcccctgtgtcttcataccgaa

SEQ ID NO: 2834591 - DNA, 25 bp, Homo sapien
cactgctgatgtggagttcgctccc

SEQ ID NO: 2834592 - DNA, 25 bp, Homo sapien
gggtggactgctcagctggagaccc

SEQ ID NO: 2834593 - DNA, 25 bp, Homo sapien
cagggtggactgctcagctggagac

SEQ ID NO: 2834594 - DNA, 25 bp, Homo sapien
agggtggactgctcagctggagacc

SEQ ID NO: 2834595 - DNA, 25 bp, Homo sapien
ccattgagagtgttagggctgccca

SEQ ID NO: 2834596 - DNA, 25 bp, Homo sapien
tgagagtgttagggctgcccagccc

SEQ ID NO: 2834597 - DNA, 25 bp, Homo sapien
attgagagtgttagggctgcccagc

SEQ ID NO: 2834598 - DNA, 25 bp, Homo sapien
gccattgagagtgttagggctgccc

SEQ ID NO: 2834599 - DNA, 25 bp, Homo sapien
tctggatagacacggatgactggcg

SEQ ID NO: 2834600 - DNA, 25 bp, Homo sapien
gagttgagacatccacgccgttttt

SEQ ID NO: 2834601 - DNA, 25 bp, Homo sapien
catccacgccgtttttcagccaagt

SEQ ID NO: 2834602 - DNA, 25 bp, Homo sapien
agcatggcatcttaggctggctgcc

SEQ ID NO: 2834603 - DNA, 25 bp, Homo sapien
gtgggtgagagtcagtgctggtgag

SEQ ID NO: 2834604 - DNA, 25 bp, Homo sapien
gtgagaaagagacggccctgacctg

SEQ ID NO: 2834605 - DNA, 25 bp, Homo sapien
tgggtgagagtcagtgctggtgaga

SEQ ID NO: 2834606 - DNA, 25 bp, Homo sapien
aaagagacggccctgacctggactt

SEQ ID NO: 2834607 - DNA, 25 bp, Homo sapien
tgcaggacgtgggtctggaacagct

SEQ ID NO: 2834608 - DNA, 25 bp, Homo sapien
gcaggtgtaattgcccatgtggatg

SEQ ID NO: 2834609 - DNA, 25 bp, Homo sapien
cggaagcatggcaggtgtaattgcc

SEQ ID NO: 2834610 - DNA, 25 bp, Homo sapien
ctggaacagctgctcgtggccggaa

SEQ ID NO: 2834611 - DNA, 25 bp, Homo sapien
gttacaagttcagactcagttgaga

SEQ ID NO: 2834612 - DNA, 25 bp, Homo sapien
tcatagtgatccatgggagtcaggt

SEQ ID NO: 2834613 - DNA, 25 bp, Homo sapien
aatgttcaacgcaaggactccagag

SEQ ID NO: 2834614 - DNA, 25 bp, Homo sapien
tattcagagcttttccgacattgcc

SEQ ID NO: 2834615 - DNA, 25 bp, Homo sapien
ggccggaagtggtcactgagtacaa

SEQ ID NO: 2834616 - DNA, 25 bp, Homo sapien
agtacaagtcaagccctgaggccag

SEQ ID NO: 2834617 - DNA, 25 bp, Homo sapien
gaagtggtcactgagtacaagtcaa

SEQ ID NO: 2834618 - DNA, 25 bp, Homo sapien
cactgagtacaagtcaagccctgag

SEQ ID NO: 2834619 - DNA, 25 bp, Homo sapien
catggacggcgcaggtcagcactgt

SEQ ID NO: 2834620 - DNA, 25 bp, Homo sapien
gcccgttgcgcttccagatgattgg

SEQ ID NO: 2834621 - DNA, 25 bp, Homo sapien
agttcagggtgagcccgttgcgctt

SEQ ID NO: 2834622 - DNA, 25 bp, Homo sapien
cttccagatgattggtggcctcagg

SEQ ID NO: 2834623 - DNA, 25 bp, Homo sapien
ccttttctgtgttaggcagacgcat

SEQ ID NO: 2834624 - DNA, 25 bp, Homo sapien
aaaccttttctgtgttaggcagacg

SEQ ID NO: 2834625 - DNA, 25 bp, Homo sapien
tgtcaccacaatttgcctttgccaa

SEQ ID NO: 2834626 - DNA, 25 bp, Homo sapien
aagagtgggtgtcaccacaatttgc

SEQ ID NO: 2834627 - DNA, 25 bp, Homo sapien
ctcgtttcctctccaaagactcctc

SEQ ID NO: 2834628 - DNA, 25 bp, Homo sapien
ctgccatctgtcagtttggaaatct

SEQ ID NO: 2834629 - DNA, 25 bp, Homo sapien
gaatgaacattgatcccaggtaaga

SEQ ID NO: 2834630 - DNA, 25 bp, Homo sapien
tcctgaaacggcgtggcagctgaag

SEQ ID NO: 2834631 - DNA, 25 bp, Homo sapien
gccacagaatgtattagcgctccgt

SEQ ID NO: 2834632 - DNA, 25 bp, Homo sapien
acgatgcagatctagctattgaggc

SEQ ID NO: 2834633 - DNA, 25 bp, Homo sapien
tatctctgagcaggcgggggatgaa

SEQ ID NO: 2834634 - DNA, 25 bp, Homo sapien
ctgggttatctctgagcaggcgggg

SEQ ID NO: 2834635 - DNA, 25 bp, Homo sapien
ggttatctctgagcaggcgggggat

SEQ ID NO: 2834636 - DNA, 25 bp, Homo sapien
ttatctctgagcaggcgggggatga

SEQ ID NO: 2834637 - DNA, 25 bp, Homo sapien
gcttgtgaccacgtatctgtgttca

SEQ ID NO: 2834638 - DNA, 25 bp, Homo sapien
gaggtttcaggaacccagcaggccc

SEQ ID NO: 2834639 - DNA, 25 bp, Homo sapien
caggcctttgcgtagctgaagggaa

SEQ ID NO: 2834640 - DNA, 25 bp, Homo sapien
tgcaaagatgcttgtgaccacgtat

SEQ ID NO: 2834641 - DNA, 25 bp, Homo sapien
agcggaaggagtaacccactccagg

SEQ ID NO: 2834642 - DNA, 25 bp, Homo sapien
ctccagggataacagggagctctgc

SEQ ID NO: 2834643 - DNA, 25 bp, Homo sapien
ttgcaggcagcggaaggagtaaccc

SEQ ID NO: 2834644 - DNA, 25 bp, Homo sapien
ccagggataacagggagctctgccc

SEQ ID NO: 2834645 - DNA, 25 bp, Homo sapien
gcacgcgtaggtggctcctctgagc

SEQ ID NO: 2834646 - DNA, 25 bp, Homo sapien
ggagagggagggcacgcgtaggtgg

SEQ ID NO: 2834647 - DNA, 25 bp, Homo sapien
ggagggcacgcgtaggtggctcctc

SEQ ID NO: 2834648 - DNA, 25 bp, Homo sapien
gagagggagggcacgcgtaggtggc

SEQ ID NO: 2834649 - DNA, 25 bp, Homo sapien
ttgttcatcccaaataatgccagac

SEQ ID NO: 2834650 - DNA, 25 bp, Homo sapien
ttcttgttcatcccaaataatgcca

SEQ ID NO: 2834651 - DNA, 25 bp, Homo sapien
cttgttcatcccaaataatgccaga

SEQ ID NO: 2834652 - DNA, 25 bp, Homo sapien
tcttgttcatcccaaataatgccag

SEQ ID NO: 2834653 - DNA, 25 bp, Homo sapien
cagagggcactcgcaatgcctgcac

SEQ ID NO: 2834654 - DNA, 25 bp, Homo sapien
tcagagggcactcgcaatgcctgca

SEQ ID NO: 2834655 - DNA, 25 bp, Homo sapien
ctctgctgatgccctctgccgccag

SEQ ID NO: 2834656 - DNA, 25 bp, Homo sapien
ctgctgatgccctctgccgccagca

SEQ ID NO: 2834657 - DNA, 25 bp, Homo sapien
tctgctgatgccctctgccgccagc

SEQ ID NO: 2834658 - DNA, 25 bp, Homo sapien
agctcctgtgagggccatcggggag

SEQ ID NO: 2834659 - DNA, 25 bp, Homo sapien
gctcctgtgagggccatcggggagt

SEQ ID NO: 2834660 - DNA, 25 bp, Homo sapien
ctcctgtgagggccatcggggagtc

SEQ ID NO: 2834661 - DNA, 25 bp, Homo sapien
gagctcctgtgagggccatcgggga

SEQ ID NO: 2834662 - DNA, 25 bp, Homo sapien
aggcaaagcttccagcctgggtctt

SEQ ID NO: 2834663 - DNA, 25 bp, Homo sapien
gagcctgggtcaactcgccagttct

SEQ ID NO: 2834664 - DNA, 25 bp, Homo sapien
ttggttacaactgtccagcagcttc

SEQ ID NO: 2834665 - DNA, 25 bp, Homo sapien
tctttgtggcacaagagctcagacc

SEQ ID NO: 2834666 - DNA, 25 bp, Homo sapien
aaacaagtccaccttgccatgcagc

SEQ ID NO: 2834667 - DNA, 25 bp, Homo sapien
gccatcatgattcatcacagtggtg

SEQ ID NO: 2834668 - DNA, 25 bp, Homo sapien
atcatgattcatcacagtggtgcca

SEQ ID NO: 2834669 - DNA, 25 bp, Homo sapien
ctccaggaggggttgagtcagccca

SEQ ID NO: 2834670 - DNA, 25 bp, Homo sapien
gggttgagtcagcccactggcctcc

SEQ ID NO: 2834671 - DNA, 25 bp, Homo sapien
ccctcctttgtgaagactaatagca

SEQ ID NO: 2834672 - DNA, 25 bp, Homo sapien
ttccatggcgttcttttggcaaccg

SEQ ID NO: 2834673 - DNA, 25 bp, Homo sapien
gcacacgtcttgttttcccatagaa

SEQ ID NO: 2834674 - DNA, 25 bp, Homo sapien
tgcctgtgaaatcccatcgtgccct

SEQ ID NO: 2834675 - DNA, 25 bp, Homo sapien
caccctttgatggaaggcattttga

SEQ ID NO: 2834676 - DNA, 25 bp, Homo sapien
tcttccagagttcataattgcaccc

SEQ ID NO: 2834677 - DNA, 25 bp, Homo sapien
taattgcaccctttgatggaaggca

SEQ ID NO: 2834678 - DNA, 25 bp, Homo sapien
cttgatggtatcaggaagtcttcca

SEQ ID NO: 2834679 - DNA, 25 bp, Homo sapien
accgtctgacgaaaaattgcccatg

SEQ ID NO: 2834680 - DNA, 25 bp, Homo sapien
ccatctggagaagaacggctctcca

SEQ ID NO: 2834681 - DNA, 25 bp, Homo sapien
ggatgcgttttgcagtcccaacaag

SEQ ID NO: 2834682 - DNA, 25 bp, Homo sapien
tgttctgcctgaagcaccgtctgac

SEQ ID NO: 2834683 - DNA, 25 bp, Homo sapien
ggtatttgtggctgacggttttgct

SEQ ID NO: 2834684 - DNA, 25 bp, Homo sapien
tgtggctgacggttttgctccagag

SEQ ID NO: 2834685 - DNA, 25 bp, Homo sapien
ctgacggttttgctccagaggcctg

SEQ ID NO: 2834686 - DNA, 25 bp, Homo sapien
tatttgtggctgacggttttgctcc

SEQ ID NO: 2834687 - DNA, 25 bp, Homo sapien
ttctgctgcatcacgagggatgtgg

SEQ ID NO: 2834688 - DNA, 25 bp, Homo sapien
gttctgctgcatcacgagggatgtg

SEQ ID NO: 2834689 - DNA, 25 bp, Homo sapien
gggctaagcgagagccctcctctgc

SEQ ID NO: 2834690 - DNA, 25 bp, Homo sapien
ggagcgggctaagcgagagccctcc

SEQ ID NO: 2834691 - DNA, 25 bp, Homo sapien
gcgggctaagcgagagccctcctct

SEQ ID NO: 2834692 - DNA, 25 bp, Homo sapien
ctgaggagcgggctaagcgagagcc

SEQ ID NO: 2834693 - DNA, 25 bp, Homo sapien
cgtgaagccctttatctgctagctg

SEQ ID NO: 2834694 - DNA, 25 bp, Homo sapien
cacgtgaagccctttatctgctagc

SEQ ID NO: 2834695 - DNA, 25 bp, Homo sapien
acacgtgaagccctttatctgctag

SEQ ID NO: 2834696 - DNA, 25 bp, Homo sapien
tcacacgtgaagccctttatctgct

SEQ ID NO: 2834697 - DNA, 25 bp, Homo sapien
gctttgatctcataggagtaattaa

SEQ ID NO: 2834698 - DNA, 25 bp, Homo sapien
catccaacacattcgtgggctttga

SEQ ID NO: 2834699 - DNA, 25 bp, Homo sapien
gggctttgatctcataggagtaatt

SEQ ID NO: 2834700 - DNA, 25 bp, Homo sapien
ttcccatgcatccaacacattcgtg

SEQ ID NO: 2834701 - DNA, 25 bp, Homo sapien
taggcaatagggatgcttccatttc

SEQ ID NO: 2834702 - DNA, 25 bp, Homo sapien
tcataggcaatagggatgcttccat

SEQ ID NO: 2834703 - DNA, 25 bp, Homo sapien
ataggcaatagggatgcttccattt

SEQ ID NO: 2834704 - DNA, 25 bp, Homo sapien
atcataggcaatagggatgcttcca

SEQ ID NO: 2834705 - DNA, 25 bp, Homo sapien
tatggtaccaggcaccaagatggtg

SEQ ID NO: 2834706 - DNA, 25 bp, Homo sapien
ggaactgtgctcataaagcagaggc

SEQ ID NO: 2834707 - DNA, 25 bp, Homo sapien
gctataatctgcttgatgacggcat

SEQ ID NO: 2834708 - DNA, 25 bp, Homo sapien
tgcccaagcagtgctataatctgct

SEQ ID NO: 2834709 - DNA, 25 bp, Homo sapien
gtgaaggtgtggaatagcaacagcc

SEQ ID NO: 2834710 - DNA, 25 bp, Homo sapien
cgtttagtcttttcttaaagctcag

SEQ ID NO: 2834711 - DNA, 25 bp, Homo sapien
ttgttgcagaacaaattcaccagct

SEQ ID NO: 2834712 - DNA, 25 bp, Homo sapien
aaggaacagggcaagccctctctgg

SEQ ID NO: 2834713 - DNA, 25 bp, Homo sapien
taaagctcaggcttgttgcagaaca

SEQ ID NO: 2834714 - DNA, 25 bp, Homo sapien
gtcactgttgtaatcgtcaaatcgg

SEQ ID NO: 2834715 - DNA, 25 bp, Homo sapien
ggtcacctggtgagcaaccaagtaa

SEQ ID NO: 2834716 - DNA, 25 bp, Homo sapien
atcgtcaaatcggaggaggtcacct

SEQ ID NO: 2834717 - DNA, 25 bp, Homo sapien
gccatgtagaactcgcggagggtca

SEQ ID NO: 2834718 - DNA, 25 bp, Homo sapien
acagagattccaccaggaggcgctt

SEQ ID NO: 2834719 - DNA, 25 bp, Homo sapien
tctaagtccctgaacagagattcca

SEQ ID NO: 2834720 - DNA, 25 bp, Homo sapien
tgagccagttcggagctgctgaggt

SEQ ID NO: 2834721 - DNA, 25 bp, Homo sapien
ggtggccattgccatctgcatctaa

SEQ ID NO: 2834722 - DNA, 25 bp, Homo sapien
tcttcaagcgggcgtagccggccat

SEQ ID NO: 2834723 - DNA, 25 bp, Homo sapien
gacattcttcaagcgggcgtagccg

SEQ ID NO: 2834724 - DNA, 25 bp, Homo sapien
attcttcaagcgggcgtagccggcc

SEQ ID NO: 2834725 - DNA, 25 bp, Homo sapien
ggacattcttcaagcgggcgtagcc

SEQ ID NO: 2834726 - DNA, 25 bp, Homo sapien
cggtggacaatcaggctccgaagaa

SEQ ID NO: 2834727 - DNA, 25 bp, Homo sapien
cagaaacaccggtggacaatcaggc

SEQ ID NO: 2834728 - DNA, 25 bp, Homo sapien
gctccgaagaacatgctgcagcagg

SEQ ID NO: 2834729 - DNA, 25 bp, Homo sapien
caggctccgaagaacatgctgcagc

SEQ ID NO: 2834730 - DNA, 25 bp, Homo sapien
gcaggactgcgcgtgcaggagccat

SEQ ID NO: 2834731 - DNA, 25 bp, Homo sapien
gagcaggactgcgcgtgcaggagcc

SEQ ID NO: 2834732 - DNA, 25 bp, Homo sapien
ggagcaggactgcgcgtgcaggagc

SEQ ID NO: 2834733 - DNA, 25 bp, Homo sapien
agcaggactgcgcgtgcaggagcca

SEQ ID NO: 2834734 - DNA, 25 bp, Homo sapien
aactacatttatcaagcccgttctc

SEQ ID NO: 2834735 - DNA, 25 bp, Homo sapien
cagagtgtgatcctattttcatgtc

SEQ ID NO: 2834736 - DNA, 25 bp, Homo sapien
tgccgaggagcccagagtgtgatcc

SEQ ID NO: 2834737 - DNA, 25 bp, Homo sapien
catgtcagaacttggtaatgaacta

SEQ ID NO: 2834738 - DNA, 25 bp, Homo sapien
cataaggattttggcgtgtgggtac

SEQ ID NO: 2834739 - DNA, 25 bp, Homo sapien
caaggtcctgggatcctacataagg

SEQ ID NO: 2834740 - DNA, 25 bp, Homo sapien
gggtactctagcatccagggactgg

SEQ ID NO: 2834741 - DNA, 25 bp, Homo sapien
ctgaaagggttggttctctcaaagg

SEQ ID NO: 2834742 - DNA, 25 bp, Homo sapien
tgcacctgaatacgcagacaatgcc

SEQ ID NO: 2834743 - DNA, 25 bp, Homo sapien
caaggctggtggcaatatccacctc

SEQ ID NO: 2834744 - DNA, 25 bp, Homo sapien
agcagatccagccgactccaaggct

SEQ ID NO: 2834745 - DNA, 25 bp, Homo sapien
gttccccggctgtgctgcactggag

SEQ ID NO: 2834746 - DNA, 25 bp, Homo sapien
aaggaaatctggaaagatctatgtt

SEQ ID NO: 2834747 - DNA, 25 bp, Homo sapien
caagagggcccttcaatgccccatg

SEQ ID NO: 2834748 - DNA, 25 bp, Homo sapien
agccatgagtacagctgctcttggg

SEQ ID NO: 2834749 - DNA, 25 bp, Homo sapien
gccccacccaggtcccgaggtctca

SEQ ID NO: 2834750 - DNA, 25 bp, Homo sapien
gggcccttcaatgccccatgtctga

SEQ ID NO: 2834751 - DNA, 25 bp, Homo sapien
gcgtagagtctagaaatggttcgag

SEQ ID NO: 2834752 - DNA, 25 bp, Homo sapien
ccaacaggagatctttgttttctgc

SEQ ID NO: 2834753 - DNA, 25 bp, Homo sapien
tgtatcgcttccactcaaaagtctg

SEQ ID NO: 2834754 - DNA, 25 bp, Homo sapien
tctgctccacaggtaatttgtatcg

SEQ ID NO: 2834755 - DNA, 25 bp, Homo sapien
agaaatctcatttcttgtatactga

SEQ ID NO: 2834756 - DNA, 25 bp, Homo sapien
gaagtctaggtacaaaattgtttgc

SEQ ID NO: 2834757 - DNA, 25 bp, Homo sapien
ctatacaactgtgggtcttttttca

SEQ ID NO: 2834758 - DNA, 25 bp, Homo sapien
gaaggtctatatcttagctcagctc

SEQ ID NO: 2834759 - DNA, 25 bp, Homo sapien
tgaaatatcaagaggatacgcaact

SEQ ID NO: 2834760 - DNA, 25 bp, Homo sapien
cttctgtctcagtgggtcattcttt

SEQ ID NO: 2834761 - DNA, 25 bp, Homo sapien
tactattcattaatggcccactctg

SEQ ID NO: 2834762 - DNA, 25 bp, Homo sapien
tcccttgaggtcagatgaacaccac

SEQ ID NO: 2834763 - DNA, 25 bp, Homo sapien
ggaagaacctgagagactagcatat

SEQ ID NO: 2834764 - DNA, 25 bp, Homo sapien
gacctagtttccactttagagatga

SEQ ID NO: 2834765 - DNA, 25 bp, Homo sapien
gatcataaccccataggagttggtg

SEQ ID NO: 2834766 - DNA, 25 bp, Homo sapien
gctagttttccctcccaatgagaga

SEQ ID NO: 2834767 - DNA, 25 bp, Homo sapien
tgcacagagcataaaggtatcaaac

SEQ ID NO: 2834768 - DNA, 25 bp, Homo sapien
aaggtaatttatgtctgaagctgca

SEQ ID NO: 2834769 - DNA, 25 bp, Homo sapien
agtccccacgtcttttgttctcaca

SEQ ID NO: 2834770 - DNA, 25 bp, Homo sapien
gaccaaatccgtcaccttggaagtg

SEQ ID NO: 2834771 - DNA, 25 bp, Homo sapien
gaagagtatttagatctgtcacaat

SEQ ID NO: 2834772 - DNA, 25 bp, Homo sapien
tcctataagtctagtatggctcttt

SEQ ID NO: 2834773 - DNA, 25 bp, Homo sapien
cccatgggaagatggatcgagaact

SEQ ID NO: 2834774 - DNA, 25 bp, Homo sapien
tagtgaggaccgatgtccaggcatc

SEQ ID NO: 2834775 - DNA, 25 bp, Homo sapien
gaactgtctgactcttagtgaggac

SEQ ID NO: 2834776 - DNA, 25 bp, Homo sapien
tcaggaaatcctcgcatggctagtg

SEQ ID NO: 2834777 - DNA, 25 bp, Homo sapien
ttattagatgggctggccatttcaa

SEQ ID NO: 2834778 - DNA, 25 bp, Homo sapien
attctgttattagatgggctggcca

SEQ ID NO: 2834779 - DNA, 25 bp, Homo sapien
gttattagatgggctggccatttca

SEQ ID NO: 2834780 - DNA, 25 bp, Homo sapien
gtgcaactttctcctattcggtcat

SEQ ID NO: 2834781 - DNA, 25 bp, Homo sapien
aattacaggtggttagatgtgcaac

SEQ ID NO: 2834782 - DNA, 25 bp, Homo sapien
gacaagggtccattgtactggtgga

SEQ ID NO: 2834783 - DNA, 25 bp, Homo sapien
gcaaatttattcacgagaagtccct

SEQ ID NO: 2834784 - DNA, 25 bp, Homo sapien
gggcccagggcacacaatgatttta

SEQ ID NO: 2834785 - DNA, 25 bp, Homo sapien
ggcccagggcacacaatgattttac

SEQ ID NO: 2834786 - DNA, 25 bp, Homo sapien
ctcagctctgactcataagatggag

SEQ ID NO: 2834787 - DNA, 25 bp, Homo sapien
tctctttgccagctaaatgtgaagg

SEQ ID NO: 2834788 - DNA, 25 bp, Homo sapien
tcattctggatggaagtgccaagga

SEQ ID NO: 2834789 - DNA, 25 bp, Homo sapien
tgccagcacaactaatccctgccag

SEQ ID NO: 2834790 - DNA, 25 bp, Homo sapien
taaacacgctggccgggatgccgtg

SEQ ID NO: 2834791 - DNA, 25 bp, Homo sapien
gttaaacacgctggccgggatgccg

SEQ ID NO: 2834792 - DNA, 25 bp, Homo sapien
tagttaaacacgctggccgggatgc

SEQ ID NO: 2834793 - DNA, 25 bp, Homo sapien
ctagttaaacacgctggccgggatg

SEQ ID NO: 2834794 - DNA, 25 bp, Homo sapien
tcccagtcacagctcttcctgtggc

SEQ ID NO: 2834795 - DNA, 25 bp, Homo sapien
tgtggcccacatcctgcacttcctc

SEQ ID NO: 2834796 - DNA, 25 bp, Homo sapien
ggctcagcaggtgcttcccaggtac

SEQ ID NO: 2834797 - DNA, 25 bp, Homo sapien
ctgagtttcaaatgtctcccagtca

SEQ ID NO: 2834798 - DNA, 25 bp, Homo sapien
caccaattggcttgtggctccccat

SEQ ID NO: 2834799 - DNA, 25 bp, Homo sapien
tatttggagaaacaccaattggctt

SEQ ID NO: 2834800 - DNA, 25 bp, Homo sapien
tgccctaaactctatatttggagaa

SEQ ID NO: 2834801 - DNA, 25 bp, Homo sapien
tctctgccctaaactctatatttgg

SEQ ID NO: 2834802 - DNA, 25 bp, Homo sapien
gccggtcagctgaaaccactcaaga

SEQ ID NO: 2834803 - DNA, 25 bp, Homo sapien
ttatttgaacccttgcccagcagaa

SEQ ID NO: 2834804 - DNA, 25 bp, Homo sapien
cataccgagtcaaggattatgcagg

SEQ ID NO: 2834805 - DNA, 25 bp, Homo sapien
tttttcccagccaagagtacacgga

SEQ ID NO: 2834806 - DNA, 25 bp, Homo sapien
tctgctgggaagtgtttactcctga

SEQ ID NO: 2834807 - DNA, 25 bp, Homo sapien
gttcctccttcatccaatgagcctg

SEQ ID NO: 2834808 - DNA, 25 bp, Homo sapien
tgtttggtgtggtcttgttcctcct

SEQ ID NO: 2834809 - DNA, 25 bp, Homo sapien
ttatttcagttaacttgacacagtg

SEQ ID NO: 2834810 - DNA, 25 bp, Homo sapien
ggcctgccttccatccgtcaggctc

SEQ ID NO: 2834811 - DNA, 25 bp, Homo sapien
gctcctgtgaatcagtgcccaggtc

SEQ ID NO: 2834812 - DNA, 25 bp, Homo sapien
tcctgtgaatcagtgcccaggtctt

SEQ ID NO: 2834813 - DNA, 25 bp, Homo sapien
ttccatccgtcaggctcctgtgaat

SEQ ID NO: 2834814 - DNA, 25 bp, Homo sapien
ccttgctgtggatgacggtgatcct

SEQ ID NO: 2834815 - DNA, 25 bp, Homo sapien
ggagcttacagtggttttcataaaa

SEQ ID NO: 2834816 - DNA, 25 bp, Homo sapien
cgcacacaggcacgtagctgggcct

SEQ ID NO: 2834817 - DNA, 25 bp, Homo sapien
ggtgatcctctttcccaggaggcaa

SEQ ID NO: 2834818 - DNA, 25 bp, Homo sapien
cacgcaccggctccctcggctgcag

SEQ ID NO: 2834819 - DNA, 25 bp, Homo sapien
tccctcggctgcagaacttcttccc

SEQ ID NO: 2834820 - DNA, 25 bp, Homo sapien
gcaggaggccagcagctcgttgtgg

SEQ ID NO: 2834821 - DNA, 25 bp, Homo sapien
ctcggctgcagaacttcttcccgca

SEQ ID NO: 2834822 - DNA, 25 bp, Homo sapien
ttgtcattctgtaaggtggtgacat

SEQ ID NO: 2834823 - DNA, 25 bp, Homo sapien
tttgtcattctgtaaggtggtgaca

SEQ ID NO: 2834824 - DNA, 25 bp, Homo sapien
ctttccctctttctgactttgtcat

SEQ ID NO: 2834825 - DNA, 25 bp, Homo sapien
tccctctttctgactttgtcattct

SEQ ID NO: 2834826 - DNA, 25 bp, Homo sapien
cacgtttaagtgaaaggcgaaacag

SEQ ID NO: 2834827 - DNA, 25 bp, Homo sapien
gcacgtttaagtgaaaggcgaaaca

SEQ ID NO: 2834828 - DNA, 25 bp, Homo sapien
atgtgttgacccggtaggggtacat

SEQ ID NO: 2834829 - DNA, 25 bp, Homo sapien
catccagggattggacataacggtc

SEQ ID NO: 2834830 - DNA, 25 bp, Homo sapien
agataacttataccctcacacgtgg

SEQ ID NO: 2834831 - DNA, 25 bp, Homo sapien
cagtgtcgactctctcattgcagaa

SEQ ID NO: 2834832 - DNA, 25 bp, Homo sapien
tctcaatgacccagagcgaggcttt

SEQ ID NO: 2834833 - DNA, 25 bp, Homo sapien
gctgaccgagctgaggatgcagctc

SEQ ID NO: 2834834 - DNA, 25 bp, Homo sapien
agctgaccgagctgaggatgcagct

SEQ ID NO: 2834835 - DNA, 25 bp, Homo sapien
ctggatgaggcgcagtcctgaactg

SEQ ID NO: 2834836 - DNA, 25 bp, Homo sapien
ttcagtcctaaatgcatccaggcgg

SEQ ID NO: 2834837 - DNA, 25 bp, Homo sapien
atttccagcattcgttgacatcagc

SEQ ID NO: 2834838 - DNA, 25 bp, Homo sapien
ccaggcggtacctcgtgctgtcctg

SEQ ID NO: 2834839 - DNA, 25 bp, Homo sapien
cgtaagatgcctcaccaagcctgtt

SEQ ID NO: 2834840 - DNA, 25 bp, Homo sapien
ggctggccgaccaagctgcttatgg

SEQ ID NO: 2834841 - DNA, 25 bp, Homo sapien
tggcaagggtttggacttcaaggcc

SEQ ID NO: 2834842 - DNA, 25 bp, Homo sapien
ttcaaggccctttcttgtggaaggc

SEQ ID NO: 2834843 - DNA, 25 bp, Homo sapien
gataataatcagcttttgcggcaaa

SEQ ID NO: 2834844 - DNA, 25 bp, Homo sapien
gtcttccagcagattacacattccg

SEQ ID NO: 2834845 - DNA, 25 bp, Homo sapien
caaaaggatgatattgtcttccagc

SEQ ID NO: 2834846 - DNA, 25 bp, Homo sapien
cacattccgcccacagaaaaggcta

SEQ ID NO: 2834847 - DNA, 25 bp, Homo sapien
tgagagaaaactccgagcaccaggg

SEQ ID NO: 2834848 - DNA, 25 bp, Homo sapien
gtggaaaggactggctcaccaatga

SEQ ID NO: 2834849 - DNA, 25 bp, Homo sapien
caaaaatggttgatgcaatgagaga

SEQ ID NO: 2834850 - DNA, 25 bp, Homo sapien
aataaggaaagcacatctaattgcc

SEQ ID NO: 2834851 - DNA, 25 bp, Homo sapien
taaagaataagtaataggcaagtcg

SEQ ID NO: 2834852 - DNA, 25 bp, Homo sapien
tcgggtggtgcttccatcatgagct

SEQ ID NO: 2834853 - DNA, 25 bp, Homo sapien
caagtcggaattatcgggtggtgct

SEQ ID NO: 2834854 - DNA, 25 bp, Homo sapien
cctctagataaagaataagtaatag

SEQ ID NO: 2834855 - DNA, 25 bp, Homo sapien
gtgaatcaaccagaaggcaccggcc

SEQ ID NO: 2834856 - DNA, 25 bp, Homo sapien
gactccactgatgatgtctataccg

SEQ ID NO: 2834857 - DNA, 25 bp, Homo sapien
aggccgtaagacttctctaggatgc

SEQ ID NO: 2834858 - DNA, 25 bp, Homo sapien
tctctaggatgcagttctttttcca

SEQ ID NO: 2834859 - DNA, 25 bp, Homo sapien
gcaggtgccgcacatcacatttacg

SEQ ID NO: 2834860 - DNA, 25 bp, Homo sapien
cccatgacatagcagcggtccgagt

SEQ ID NO: 2834861 - DNA, 25 bp, Homo sapien
gagtaacccgctgggttccagtgga

SEQ ID NO: 2834862 - DNA, 25 bp, Homo sapien
gcaaaacttccaagaaaagagcagc

SEQ ID NO: 2834863 - DNA, 25 bp, Homo sapien
gctgcttttatctaggcatttatat

SEQ ID NO: 2834864 - DNA, 25 bp, Homo sapien
tcttatagactaccctacttgttct

SEQ ID NO: 2834865 - DNA, 25 bp, Homo sapien
ttttggaaaaggtctagctattatc

SEQ ID NO: 2834866 - DNA, 25 bp, Homo sapien
tactgttcatgatttggagtgctgc

SEQ ID NO: 2834867 - DNA, 25 bp, Homo sapien
tgatgagcccatgctctgctccggg

SEQ ID NO: 2834868 - DNA, 25 bp, Homo sapien
gggaagttaggatcatcacagtgaa

SEQ ID NO: 2834869 - DNA, 25 bp, Homo sapien
tcacagtgaacagcaatgatgagcc

SEQ ID NO: 2834870 - DNA, 25 bp, Homo sapien
tgaacagcaatgatgagcccatgct

SEQ ID NO: 2834871 - DNA, 25 bp, Homo sapien
tccaagctcttctccttagagcttc

SEQ ID NO: 2834872 - DNA, 25 bp, Homo sapien
tcttctccttagagcttccagagct

SEQ ID NO: 2834873 - DNA, 25 bp, Homo sapien
tggggctaatcccacattctctcat

SEQ ID NO: 2834874 - DNA, 25 bp, Homo sapien
ccagagctgctgttggggctaatcc

SEQ ID NO: 2834875 - DNA, 25 bp, Homo sapien
taccggtgagtcagcaaaatggatc

SEQ ID NO: 2834876 - DNA, 25 bp, Homo sapien
tcgataaggtttccgctggttctct

SEQ ID NO: 2834877 - DNA, 25 bp, Homo sapien
aaaatggatctgagcgcaaggctag

SEQ ID NO: 2834878 - DNA, 25 bp, Homo sapien
acagccgtgtcccactcgataaggt

SEQ ID NO: 2834879 - DNA, 25 bp, Homo sapien
tccagctcaaggagtttttgcgagc

SEQ ID NO: 2834880 - DNA, 25 bp, Homo sapien
gcctgagatgagatgtatcccctct

SEQ ID NO: 2834881 - DNA, 25 bp, Homo sapien
ccctctgagttccatcaaggccaca

SEQ ID NO: 2834882 - DNA, 25 bp, Homo sapien
gagtttttgcgagctcagtttctgg

SEQ ID NO: 2834883 - DNA, 25 bp, Homo sapien
gtcttgaccgcagacccaactgaat

SEQ ID NO: 2834884 - DNA, 25 bp, Homo sapien
tgaccacgtctaactggagcaaggg

SEQ ID NO: 2834885 - DNA, 25 bp, Homo sapien
ggaaaactgtcttgaccgcagaccc

SEQ ID NO: 2834886 - DNA, 25 bp, Homo sapien
actgaataagtagctccaggcagcc

SEQ ID NO: 2834887 - DNA, 25 bp, Homo sapien
gatctttggtcccaggaattcgagg

SEQ ID NO: 2834888 - DNA, 25 bp, Homo sapien
aaaatcggccttatagcaaacattg

SEQ ID NO: 2834889 - DNA, 25 bp, Homo sapien
ttaaatcaaatctctgcctctctgc

SEQ ID NO: 2834890 - DNA, 25 bp, Homo sapien
gaagatacatgtaaatagggtgtca

SEQ ID NO: 2834891 - DNA, 25 bp, Homo sapien
gacaattcagacttggaccaacagg

SEQ ID NO: 2834892 - DNA, 25 bp, Homo sapien
tgagcttgagtggacagagttgcca

SEQ ID NO: 2834893 - DNA, 25 bp, Homo sapien
caagctgccagttgtgtaagtccac

SEQ ID NO: 2834894 - DNA, 25 bp, Homo sapien
tttttcctacccaacagagcggcaa

SEQ ID NO: 2834895 - DNA, 25 bp, Homo sapien
ccgtaggacacaacccttcaataat

SEQ ID NO: 2834896 - DNA, 25 bp, Homo sapien
tactgaaagcattccagtgagctca

SEQ ID NO: 2834897 - DNA, 25 bp, Homo sapien
ggtgatagggcggaaatcatcagac

SEQ ID NO: 2834898 - DNA, 25 bp, Homo sapien
cgctcacagtcatattctcaaagga

SEQ ID NO: 2834899 - DNA, 25 bp, Homo sapien
tttaacaacatcagtaggggcaatg

SEQ ID NO: 2834900 - DNA, 25 bp, Homo sapien
ttaacaacatcagtaggggcaatgt

SEQ ID NO: 2834901 - DNA, 25 bp, Homo sapien
ctctgataaccaaggtcagagcctc

SEQ ID NO: 2834902 - DNA, 25 bp, Homo sapien
tctgataaccaaggtcagagcctcc

SEQ ID NO: 2834903 - DNA, 25 bp, Homo sapien
tgtccctcaacatggatttgtttga

SEQ ID NO: 2834904 - DNA, 25 bp, Homo sapien
ccaatattggtgatgctagctttaa

SEQ ID NO: 2834905 - DNA, 25 bp, Homo sapien
gtggagaaacacttgcagaatatgt

SEQ ID NO: 2834906 - DNA, 25 bp, Homo sapien
ttaatatttttgaagggtacaggca

SEQ ID NO: 2834907 - DNA, 25 bp, Homo sapien
ggatccaccgtgagcaatctagccg

SEQ ID NO: 2834908 - DNA, 25 bp, Homo sapien
ccctcatgtggttagagtcagacaa

SEQ ID NO: 2834909 - DNA, 25 bp, Homo sapien
cacgtggtctctacatgttggctca

SEQ ID NO: 2834910 - DNA, 25 bp, Homo sapien
tagccggcaaggtgatgatttgtca

SEQ ID NO: 2834911 - DNA, 25 bp, Homo sapien
taatagcgacactttgagtaaagca

SEQ ID NO: 2834912 - DNA, 25 bp, Homo sapien
tccatagtgtgggtgagtctcatcc

SEQ ID NO: 2834913 - DNA, 25 bp, Homo sapien
gcctccacaattgcaagagataatt

SEQ ID NO: 2834914 - DNA, 25 bp, Homo sapien
cagcttaccccatcagattctggat

SEQ ID NO: 2834915 - DNA, 25 bp, Homo sapien
ggtggagatgtttaactcatcaact

SEQ ID NO: 2834916 - DNA, 25 bp, Homo sapien
gtggagatgtttaactcatcaactt

SEQ ID NO: 2834917 - DNA, 25 bp, Homo sapien
ttttctcaactatacaaggatttca

SEQ ID NO: 2834918 - DNA, 25 bp, Homo sapien
tgactgatctgctatattttcacat

SEQ ID NO: 2834919 - DNA, 25 bp, Homo sapien
cattattatttcaagcaattaatac

SEQ ID NO: 2834920 - DNA, 25 bp, Homo sapien
ttactcattattgcttcttatatct

SEQ ID NO: 2834921 - DNA, 25 bp, Homo sapien
tcagagaaaagtaccggtttgagta

SEQ ID NO: 2834922 - DNA, 25 bp, Homo sapien
gagtagatgaattttggcagtcgca

SEQ ID NO: 2834923 - DNA, 25 bp, Homo sapien
gcaatcagcattggccctcacagtg

SEQ ID NO: 2834924 - DNA, 25 bp, Homo sapien
gccctcacagtggacacgggagtat

SEQ ID NO: 2834925 - DNA, 25 bp, Homo sapien
tctcttcttgtgacttcaaagcttc

SEQ ID NO: 2834926 - DNA, 25 bp, Homo sapien
tcttcttgtgacttcaaagcttctg

SEQ ID NO: 2834927 - DNA, 25 bp, Homo sapien
ttctcttcttgtgacttcaaagctt

SEQ ID NO: 2834928 - DNA, 25 bp, Homo sapien
ttcttgtgacttcaaagcttctggg

SEQ ID NO: 2834929 - DNA, 25 bp, Homo sapien
gtggccacatcaggactagactcaa

SEQ ID NO: 2834930 - DNA, 25 bp, Homo sapien
caaaatattaaccaagtgctacact

SEQ ID NO: 2834931 - DNA, 25 bp, Homo sapien
taacctttgcgaggataatgaccgg

SEQ ID NO: 2834932 - DNA, 25 bp, Homo sapien
caaaaccaatctctgatgacagatg

SEQ ID NO: 2834933 - DNA, 25 bp, Homo sapien
gcaaagcctccagtagatctgaatc

SEQ ID NO: 2834934 - DNA, 25 bp, Homo sapien
gggcaaagcctccagtagatctgaa

SEQ ID NO: 2834935 - DNA, 25 bp, Homo sapien
ggcaaagcctccagtagatctgaat

SEQ ID NO: 2834936 - DNA, 25 bp, Homo sapien
gaagccacccggatacttcccactc

SEQ ID NO: 2834937 - DNA, 25 bp, Homo sapien
agccaggacaattgaggcgatatct

SEQ ID NO: 2834938 - DNA, 25 bp, Homo sapien
gacaattgaggcgatatctcagaaa

SEQ ID NO: 2834939 - DNA, 25 bp, Homo sapien
ttgaggcgatatctcagaaacatgg

SEQ ID NO: 2834940 - DNA, 25 bp, Homo sapien
tccagcagtccatgatccataagaa

SEQ ID NO: 2834941 - DNA, 25 bp, Homo sapien
gtcgatcgaacaagcttctttcctg

SEQ ID NO: 2834942 - DNA, 25 bp, Homo sapien
tgagacgcttcatgtctaccagctg

SEQ ID NO: 2834943 - DNA, 25 bp, Homo sapien
tgatgcgttcctcattctgagacgc

SEQ ID NO: 2834944 - DNA, 25 bp, Homo sapien
taatccagagtataggccataccct

SEQ ID NO: 2834945 - DNA, 25 bp, Homo sapien
tggtgtttacttaggacctggccca

SEQ ID NO: 2834946 - DNA, 25 bp, Homo sapien
gcaatgtcactcctcaagtagagaa

SEQ ID NO: 2834947 - DNA, 25 bp, Homo sapien
agtagagaaatacctgccccacacg

SEQ ID NO: 2834948 - DNA, 25 bp, Homo sapien
ggctcatttgttccaacccacttga

SEQ ID NO: 2834949 - DNA, 25 bp, Homo sapien
tcagtaggcaacagctgggagacac

SEQ ID NO: 2834950 - DNA, 25 bp, Homo sapien
tgctaggctcttacccatgactttc

SEQ ID NO: 2834951 - DNA, 25 bp, Homo sapien
caaagagcactcagtatctggtagc

SEQ ID NO: 2834952 - DNA, 25 bp, Homo sapien
caaggtgcaactctacagcaaggaa

SEQ ID NO: 2834953 - DNA, 25 bp, Homo sapien
ctggaccaaggtgcaactctacagc

SEQ ID NO: 2834954 - DNA, 25 bp, Homo sapien
ggaataagacctccaataggacagt

SEQ ID NO: 2834955 - DNA, 25 bp, Homo sapien
caccggggtggtagtgtcacatgct

SEQ ID NO: 2834956 - DNA, 25 bp, Homo sapien
ggctgcctgccagtgatgctggcct

SEQ ID NO: 2834957 - DNA, 25 bp, Homo sapien
tggattcatggttttggcaagggtc

SEQ ID NO: 2834958 - DNA, 25 bp, Homo sapien
tacatttcactctctggattcatgg

SEQ ID NO: 2834959 - DNA, 25 bp, Homo sapien
gattcatggttttggcaagggtctg

SEQ ID NO: 2834960 - DNA, 25 bp, Homo sapien
attcttcacctctgccaagagcaca

SEQ ID NO: 2834961 - DNA, 25 bp, Homo sapien
tcacctctgccaagagcacacactc

SEQ ID NO: 2834962 - DNA, 25 bp, Homo sapien
tgtgattgagggaagacctcagccc

SEQ ID NO: 2834963 - DNA, 25 bp, Homo sapien
gccccgcaggccactcacactcatt

SEQ ID NO: 2834964 - DNA, 25 bp, Homo sapien
cttgctgagagaccttgcccagggt

SEQ ID NO: 2834965 - DNA, 25 bp, Homo sapien
gggagaccattctcgcctcttgctg

SEQ ID NO: 2834966 - DNA, 25 bp, Homo sapien
ggagaccattctcgcctcttgctga

SEQ ID NO: 2834967 - DNA, 25 bp, Homo sapien
ggggagaccattctcgcctcttgct

SEQ ID NO: 2834968 - DNA, 25 bp, Homo sapien
agccaccgtacctggaagtgttctg

SEQ ID NO: 2834969 - DNA, 25 bp, Homo sapien
ctgggtccatccatcccagcgcagc

SEQ ID NO: 2834970 - DNA, 25 bp, Homo sapien
ggaggctccgagcagtgtgagatgc

SEQ ID NO: 2834971 - DNA, 25 bp, Homo sapien
gttcctgggtccatccatcccagcg

SEQ ID NO: 2834972 - DNA, 25 bp, Homo sapien
aggctccgagcagtgtgagatgcag

SEQ ID NO: 2834973 - DNA, 25 bp, Homo sapien
caagaccaaccattttttgtggcag

SEQ ID NO: 2834974 - DNA, 25 bp, Homo sapien
tctggcacctcatttgcagccgaca

SEQ ID NO: 2834975 - DNA, 25 bp, Homo sapien
tacctctgcactttaacctgggcga

SEQ ID NO: 2834976 - DNA, 25 bp, Homo sapien
gcagccgacacctcagtttataaga

SEQ ID NO: 2834977 - DNA, 25 bp, Homo sapien
gccacggcaggtgcgcggagcaggc

SEQ ID NO: 2834978 - DNA, 25 bp, Homo sapien
cttcggctggtttctcgggctgtcg

SEQ ID NO: 2834979 - DNA, 25 bp, Homo sapien
ggcgcgatgactccggagcgctggg

SEQ ID NO: 2834980 - DNA, 25 bp, Homo sapien
caggtggccggacttgggcgggagg

SEQ ID NO: 2834981 - DNA, 25 bp, Homo sapien
cttcttgatgatctcatagaggaca

SEQ ID NO: 2834982 - DNA, 25 bp, Homo sapien
gaacttgcctcccaatgtgtcctca

SEQ ID NO: 2834983 - DNA, 25 bp, Homo sapien
agaagaacttgcctcccaatgtgtc

SEQ ID NO: 2834984 - DNA, 25 bp, Homo sapien
ttgatgatctcatagaggacaagaa

SEQ ID NO: 2834985 - DNA, 25 bp, Homo sapien
tgagtttgtggaccataccaaaaag

SEQ ID NO: 2834986 - DNA, 25 bp, Homo sapien
gctatcaggagcctcttggtgagtt

SEQ ID NO: 2834987 - DNA, 25 bp, Homo sapien
ttatcaccgacttaatgccccatgg

SEQ ID NO: 2834988 - DNA, 25 bp, Homo sapien
aggcatttttatcaccgacttaatg

SEQ ID NO: 2834989 - DNA, 25 bp, Homo sapien
tgggcagcttctgccctgcaccctc

SEQ ID NO: 2834990 - DNA, 25 bp, Homo sapien
cttgtctgggcagcttctgccctgc

SEQ ID NO: 2834991 - DNA, 25 bp, Homo sapien
tctgggcagcttctgccctgcaccc

SEQ ID NO: 2834992 - DNA, 25 bp, Homo sapien
ggcagcttctgccctgcaccctcac

SEQ ID NO: 2834993 - DNA, 25 bp, Homo sapien
tcctccccgaccctcgcaggtcaat

SEQ ID NO: 2834994 - DNA, 25 bp, Homo sapien
ctccccgaccctcgcaggtcaatgg

SEQ ID NO: 2834995 - DNA, 25 bp, Homo sapien
tctgtcctccccgaccctcgcaggt

SEQ ID NO: 2834996 - DNA, 25 bp, Homo sapien
ttcctctgtcctccccgaccctcgc

SEQ ID NO: 2834997 - DNA, 25 bp, Homo sapien
cttcaatctgcccttgccttagttc

SEQ ID NO: 2834998 - DNA, 25 bp, Homo sapien
ttagttccacaacaatctcctcagg

SEQ ID NO: 2834999 - DNA, 25 bp, Homo sapien
agttccacaacaatctcctcagggc

SEQ ID NO: 2835000 - DNA, 25 bp, Homo sapien
ttcaatctgcccttgccttagttcc

SEQ ID NO: 2835001 - DNA, 25 bp, Homo sapien
gctgcgagagaattcagaggtaatt

SEQ ID NO: 2835002 - DNA, 25 bp, Homo sapien
tatggctgcgagagaattcagaggt

SEQ ID NO: 2835003 - DNA, 25 bp, Homo sapien
tggctgcgagagaattcagaggtaa

SEQ ID NO: 2835004 - DNA, 25 bp, Homo sapien
ggctgcgagagaattcagaggtaat

SEQ ID NO: 2835005 - DNA, 25 bp, Homo sapien
ttttgctcacatctgaatcctggaa

SEQ ID NO: 2835006 - DNA, 25 bp, Homo sapien
acatctgaatcctggaaccattcca

SEQ ID NO: 2835007 - DNA, 25 bp, Homo sapien
tgaaggcccagccaacatcttagct

SEQ ID NO: 2835008 - DNA, 25 bp, Homo sapien
tcttagcttctaagtccaggaagac

SEQ ID NO: 2835009 - DNA, 25 bp, Homo sapien
caggggagccaagagcacgagggct

SEQ ID NO: 2835010 - DNA, 25 bp, Homo sapien
ggacacctatcaccatgtcttgaag

SEQ ID NO: 2835011 - DNA, 25 bp, Homo sapien
tggcctgaggacacctatcaccatg

SEQ ID NO: 2835012 - DNA, 25 bp, Homo sapien
aataaacccttggaacacagtgcca

SEQ ID NO: 2835013 - DNA, 25 bp, Homo sapien
gcttgtccacttctcagatagttga

SEQ ID NO: 2835014 - DNA, 25 bp, Homo sapien
aaacaaccttcagacaattcaggca

SEQ ID NO: 2835015 - DNA, 25 bp, Homo sapien
tcatggccccagaaaacgcaatgtg

SEQ ID NO: 2835016 - DNA, 25 bp, Homo sapien
gccatctggtagactgcttgtccac

SEQ ID NO: 2835017 - DNA, 25 bp, Homo sapien
ctggacaacggtgtccttcatcaag

SEQ ID NO: 2835018 - DNA, 25 bp, Homo sapien
gtccttcatcaagtccagcaaagct

SEQ ID NO: 2835019 - DNA, 25 bp, Homo sapien
tgtccttcatcaagtccagcaaagc

SEQ ID NO: 2835020 - DNA, 25 bp, Homo sapien
ctggaaggaaatatggccaggccca

SEQ ID NO: 2835021 - DNA, 25 bp, Homo sapien
caggcccagatggttgattaaaaac

SEQ ID NO: 2835022 - DNA, 25 bp, Homo sapien
gccaggcccagatggttgattaaaa

SEQ ID NO: 2835023 - DNA, 25 bp, Homo sapien
tggccaggcccagatggttgattaa

SEQ ID NO: 2835024 - DNA, 25 bp, Homo sapien
ttagggtgggcacttgtttcttgcc

SEQ ID NO: 2835025 - DNA, 25 bp, Homo sapien
ggttgtgatcaagtcatctgtgtcc

SEQ ID NO: 2835026 - DNA, 25 bp, Homo sapien
tataacccattcgtactgtggtctg

SEQ ID NO: 2835027 - DNA, 25 bp, Homo sapien
tggacaggactcgactggacgagcc

SEQ ID NO: 2835028 - DNA, 25 bp, Homo sapien
ctgcactgtgggccccgaggaagat

SEQ ID NO: 2835029 - DNA, 25 bp, Homo sapien
cctgcactgtgggccccgaggaaga

SEQ ID NO: 2835030 - DNA, 25 bp, Homo sapien
cagtactgctgactaccccttgcac

SEQ ID NO: 2835031 - DNA, 25 bp, Homo sapien
gcttgcccactaccactgctttcct

SEQ ID NO: 2835032 - DNA, 25 bp, Homo sapien
agctccagatcctgcgcttgcccac

SEQ ID NO: 2835033 - DNA, 25 bp, Homo sapien
gccctccggcagcagtgaattgaga

SEQ ID NO: 2835034 - DNA, 25 bp, Homo sapien
aggccctccggcagcagtgaattga

SEQ ID NO: 2835035 - DNA, 25 bp, Homo sapien
cagcctcacagtccagacaagagac

SEQ ID NO: 2835036 - DNA, 25 bp, Homo sapien
ttagtggtcagtcatttgtgacttg

SEQ ID NO: 2835037 - DNA, 25 bp, Homo sapien
agtccagacaagagacaccacgggt

SEQ ID NO: 2835038 - DNA, 25 bp, Homo sapien
tgacttgtgaccctttttgccacca

SEQ ID NO: 2835039 - DNA, 25 bp, Homo sapien
agcagcccctcaactgcattgcagc

SEQ ID NO: 2835040 - DNA, 25 bp, Homo sapien
gagcagcccctcaactgcattgcag

SEQ ID NO: 2835041 - DNA, 25 bp, Homo sapien
cagcccctcaactgcattgcagcct

SEQ ID NO: 2835042 - DNA, 25 bp, Homo sapien
ctgcagccttgtcagcgtcagtcat

SEQ ID NO: 2835043 - DNA, 25 bp, Homo sapien
gactgactggattacagccttccta

SEQ ID NO: 2835044 - DNA, 25 bp, Homo sapien
cacaatatgcagtcccagagctcag

SEQ ID NO: 2835045 - DNA, 25 bp, Homo sapien
tctccgggctcagggttatcaggta

SEQ ID NO: 2835046 - DNA, 25 bp, Homo sapien
ttatcaggtagctcttgggacgtgc

SEQ ID NO: 2835047 - DNA, 25 bp, Homo sapien
tggtgacacagcagctcattaattt

SEQ ID NO: 2835048 - DNA, 25 bp, Homo sapien
acatggtgacacagcagctcattaa

SEQ ID NO: 2835049 - DNA, 25 bp, Homo sapien
ttgaacacaaacatagtcaatcatc

SEQ ID NO: 2835050 - DNA, 25 bp, Homo sapien
gtgacacagcagctcattaatttga

SEQ ID NO: 2835051 - DNA, 25 bp, Homo sapien
gtggaaagctacactgcttctccaa

SEQ ID NO: 2835052 - DNA, 25 bp, Homo sapien
gtctgtcctgtggatcacaggattg

SEQ ID NO: 2835053 - DNA, 25 bp, Homo sapien
actgcttctccaaataggacacaga

SEQ ID NO: 2835054 - DNA, 25 bp, Homo sapien
tgtgtggaaagctacactgcttctc

SEQ ID NO: 2835055 - DNA, 25 bp, Homo sapien
ccaagccctgctgagccagaaagcc

SEQ ID NO: 2835056 - DNA, 25 bp, Homo sapien
caagccctgctgagccagaaagcca

SEQ ID NO: 2835057 - DNA, 25 bp, Homo sapien
aagccctgctgagccagaaagccat

SEQ ID NO: 2835058 - DNA, 25 bp, Homo sapien
gagggtactcaaatttcaggaagcc

SEQ ID NO: 2835059 - DNA, 25 bp, Homo sapien
gcaaacagatgtttaacagcacagg

SEQ ID NO: 2835060 - DNA, 25 bp, Homo sapien
atgctctgtaaccagcaaagagctg

SEQ ID NO: 2835061 - DNA, 25 bp, Homo sapien
gaattgtgcctctgatagtcagtga

SEQ ID NO: 2835062 - DNA, 25 bp, Homo sapien
gctggctgggtcttcgtgcaaggtt

SEQ ID NO: 2835063 - DNA, 25 bp, Homo sapien
attttgaaacaaattgcaacaatga

SEQ ID NO: 2835064 - DNA, 25 bp, Homo sapien
ggtggccaccgtcagtgtcattttg

SEQ ID NO: 2835065 - DNA, 25 bp, Homo sapien
tcagagggtggccaccgtcagtgtc

SEQ ID NO: 2835066 - DNA, 25 bp, Homo sapien
gaaacaaattgcaacaatgagaaag

SEQ ID NO: 2835067 - DNA, 25 bp, Homo sapien
aagtgtaagaggaccggcttctgtc

SEQ ID NO: 2835068 - DNA, 25 bp, Homo sapien
taagaggaccggcttctgtcccagg

SEQ ID NO: 2835069 - DNA, 25 bp, Homo sapien
ctgaagtgtaagaggaccggcttct

SEQ ID NO: 2835070 - DNA, 25 bp, Homo sapien
aggaccggcttctgtcccaggagct

SEQ ID NO: 2835071 - DNA, 25 bp, Homo sapien
cctcagcatgctccaggtcccagaa

SEQ ID NO: 2835072 - DNA, 25 bp, Homo sapien
tcatcacagccctcagcatgctcca

SEQ ID NO: 2835073 - DNA, 25 bp, Homo sapien
cagcatgctccaggtcccagaaatt

SEQ ID NO: 2835074 - DNA, 25 bp, Homo sapien
tcacagccctcagcatgctccaggt

SEQ ID NO: 2835075 - DNA, 25 bp, Homo sapien
gatagcagcagcaagagtcaacaat

SEQ ID NO: 2835076 - DNA, 25 bp, Homo sapien
gcaagagtcaacaatgggccgtgga

SEQ ID NO: 2835077 - DNA, 25 bp, Homo sapien
ggccgtggattaacagcatttactc

SEQ ID NO: 2835078 - DNA, 25 bp, Homo sapien
caatgggccgtggattaacagcatt

SEQ ID NO: 2835079 - DNA, 25 bp, Homo sapien
gggaacacacagcatggccatgcag

SEQ ID NO: 2835080 - DNA, 25 bp, Homo sapien
ctgttggccagagaagcagccccat

SEQ ID NO: 2835081 - DNA, 25 bp, Homo sapien
ctgggaacacacagcatggccatgc

SEQ ID NO: 2835082 - DNA, 25 bp, Homo sapien
acagcatggccatgcaggggctgtt

SEQ ID NO: 2835083 - DNA, 25 bp, Homo sapien
tttcatccacatcctaaactccact

SEQ ID NO: 2835084 - DNA, 25 bp, Homo sapien
gctgctttgggtcactcccaatttc

SEQ ID NO: 2835085 - DNA, 25 bp, Homo sapien
catcctaaactccactagctctgtg

SEQ ID NO: 2835086 - DNA, 25 bp, Homo sapien
cagctgcaggccagtactgaaggcc

SEQ ID NO: 2835087 - DNA, 25 bp, Homo sapien
tggcacactggaagcacctgcttgt

SEQ ID NO: 2835088 - DNA, 25 bp, Homo sapien
tggaagcacctgcttgtgtaccagc

SEQ ID NO: 2835089 - DNA, 25 bp, Homo sapien
aacaagaggtgatgcatgactcagc

SEQ ID NO: 2835090 - DNA, 25 bp, Homo sapien
tgagtatatttcaccaccattaaac

SEQ ID NO: 2835091 - DNA, 25 bp, Homo sapien
gcccattagctccagctgtcggtga

SEQ ID NO: 2835092 - DNA, 25 bp, Homo sapien
gatgtcccaggttggtccggccctg

SEQ ID NO: 2835093 - DNA, 25 bp, Homo sapien
gctgtcggtgacatctgcctgctct

SEQ ID NO: 2835094 - DNA, 25 bp, Homo sapien
tggcgtcccatgcttgagtgccctc

SEQ ID NO: 2835095 - DNA, 25 bp, Homo sapien
ctgacaggtaatgaatcgttcaacc

SEQ ID NO: 2835096 - DNA, 25 bp, Homo sapien
tgacaggtaatgaatcgttcaacca

SEQ ID NO: 2835097 - DNA, 25 bp, Homo sapien
gacaggtaatgaatcgttcaaccat

SEQ ID NO: 2835098 - DNA, 25 bp, Homo sapien
ttctcatctgggacctccgaaaggc

SEQ ID NO: 2835099 - DNA, 25 bp, Homo sapien
gaaaggcaccatttcttcaggtaat

SEQ ID NO: 2835100 - DNA, 25 bp, Homo sapien
ggagcatggaaacacacggcagagc

SEQ ID NO: 2835101 - DNA, 25 bp, Homo sapien
ggtaatcctcagagggattgctcat

SEQ ID NO: 2835102 - DNA, 25 bp, Homo sapien
ggatgtttccctgacatgcaggccc

SEQ ID NO: 2835103 - DNA, 25 bp, Homo sapien
atgtttccctgacatgcaggcccca

SEQ ID NO: 2835104 - DNA, 25 bp, Homo sapien
gatgtttccctgacatgcaggcccc

SEQ ID NO: 2835105 - DNA, 25 bp, Homo sapien
tctatcctcagttaacccaatgtct

SEQ ID NO: 2835106 - DNA, 25 bp, Homo sapien
aagaagattttgcactggggataaa

SEQ ID NO: 2835107 - DNA, 25 bp, Homo sapien
tatcctcagttaacccaatgtcttt

SEQ ID NO: 2835108 - DNA, 25 bp, Homo sapien
taaatctatcctcagttaacccaat

SEQ ID NO: 2835109 - DNA, 25 bp, Homo sapien
gatgtcataatgaggtttaagggag

SEQ ID NO: 2835110 - DNA, 25 bp, Homo sapien
gggaggcacacctcaagtgagtttg

SEQ ID NO: 2835111 - DNA, 25 bp, Homo sapien
ggcacacctcaagtgagtttgaaaa

SEQ ID NO: 2835112 - DNA, 25 bp, Homo sapien
acacctcaagtgagtttgaaaactc

SEQ ID NO: 2835113 - DNA, 25 bp, Homo sapien
ctttatctgcattctcattgctttg

SEQ ID NO: 2835114 - DNA, 25 bp, Homo sapien
tgtggctgcattcaaattccccagt

SEQ ID NO: 2835115 - DNA, 25 bp, Homo sapien
caagcttgcggcacctccttcattt

SEQ ID NO: 2835116 - DNA, 25 bp, Homo sapien
ggccaggctctcactatcctcctag

SEQ ID NO: 2835117 - DNA, 25 bp, Homo sapien
aagcattcagccagcccttactctg

SEQ ID NO: 2835118 - DNA, 25 bp, Homo sapien
gacaagacaaaacgcatccctgctc

SEQ ID NO: 2835119 - DNA, 25 bp, Homo sapien
gggaacagacaagacaaaacgcatc

SEQ ID NO: 2835120 - DNA, 25 bp, Homo sapien
cgcatccctgctccgagatgttcaa

SEQ ID NO: 2835121 - DNA, 25 bp, Homo sapien
ccaacacagctgccaggtccctcct

SEQ ID NO: 2835122 - DNA, 25 bp, Homo sapien
acagctgccaggtccctcctggtcc

SEQ ID NO: 2835123 - DNA, 25 bp, Homo sapien
tgacctctgggtgaagtaacggtcc

SEQ ID NO: 2835124 - DNA, 25 bp, Homo sapien
cctcctggtcctgacctctgggtga

SEQ ID NO: 2835125 - DNA, 25 bp, Homo sapien
tcagcccagcaacggcttcagacca

SEQ ID NO: 2835126 - DNA, 25 bp, Homo sapien
cttcaaagtctggaaacggactgtg

SEQ ID NO: 2835127 - DNA, 25 bp, Homo sapien
ccacctcggaaggtgatgtggccag

SEQ ID NO: 2835128 - DNA, 25 bp, Homo sapien
taatgcattcaccaattgtcctgtc

SEQ ID NO: 2835129 - DNA, 25 bp, Homo sapien
tgcaagccaacagatgcttgtgctg

SEQ ID NO: 2835130 - DNA, 25 bp, Homo sapien
gcgtcactgtcctggtggaagaggg

SEQ ID NO: 2835131 - DNA, 25 bp, Homo sapien
taagcgtcactgtcctggtggaaga

SEQ ID NO: 2835132 - DNA, 25 bp, Homo sapien
ttaagcgtcactgtcctggtggaag

SEQ ID NO: 2835133 - DNA, 25 bp, Homo sapien
aagcgtcactgtcctggtggaagag

SEQ ID NO: 2835134 - DNA, 25 bp, Homo sapien
cacgaatgtgttcagtttcaggaaa

SEQ ID NO: 2835135 - DNA, 25 bp, Homo sapien
ttcttcacgaatgtgttcagtttca

SEQ ID NO: 2835136 - DNA, 25 bp, Homo sapien
gaatgtgttcagtttcaggaaacgc

SEQ ID NO: 2835137 - DNA, 25 bp, Homo sapien
tgttcagtttcaggaaacgcggcat

SEQ ID NO: 2835138 - DNA, 25 bp, Homo sapien
gagatcctacagaaatccatcctgg

SEQ ID NO: 2835139 - DNA, 25 bp, Homo sapien
gggtgaggagatcctacagaaatcc

SEQ ID NO: 2835140 - DNA, 25 bp, Homo sapien
tggctcccaagttagccatatgcat

SEQ ID NO: 2835141 - DNA, 25 bp, Homo sapien
cccaagttagccatatgcatccaga

SEQ ID NO: 2835142 - DNA, 25 bp, Homo sapien
tgtggatccgcatggccaggtctgt

SEQ ID NO: 2835143 - DNA, 25 bp, Homo sapien
ggttagagcccaagccagctaagct

SEQ ID NO: 2835144 - DNA, 25 bp, Homo sapien
tcattacagaaatggccgaggccca

SEQ ID NO: 2835145 - DNA, 25 bp, Homo sapien
caggcatagtcgtcccagtggtttt

SEQ ID NO: 2835146 - DNA, 25 bp, Homo sapien
caatgccatgattcaaatataaatt

SEQ ID NO: 2835147 - DNA, 25 bp, Homo sapien
tggatcagccggttttctttttcaa

SEQ ID NO: 2835148 - DNA, 25 bp, Homo sapien
taaataccacttttacagtccacac

SEQ ID NO: 2835149 - DNA, 25 bp, Homo sapien
ggaaaatgctggatcagccggtttt

SEQ ID NO: 2835150 - DNA, 25 bp, Homo sapien
gctctttgtccggttctgtgtctcc

SEQ ID NO: 2835151 - DNA, 25 bp, Homo sapien
gtggctcctccttcggttcagtggc

SEQ ID NO: 2835152 - DNA, 25 bp, Homo sapien
tcctccttcggttcagtggctcttc

SEQ ID NO: 2835153 - DNA, 25 bp, Homo sapien
tggctcttcgtccggttctgtggcc

SEQ ID NO: 2835154 - DNA, 25 bp, Homo sapien
catccagcagaaactcgaagatgct

SEQ ID NO: 2835155 - DNA, 25 bp, Homo sapien
atgtgaaattggtgtcctcaagctc

SEQ ID NO: 2835156 - DNA, 25 bp, Homo sapien
tgaaattggtgtcctcaagctcaga

SEQ ID NO: 2835157 - DNA, 25 bp, Homo sapien
gtgaaattggtgtcctcaagctcag

SEQ ID NO: 2835158 - DNA, 25 bp, Homo sapien
tgtgaaattggtgtcctcaagctca

SEQ ID NO: 2835159 - DNA, 25 bp, Homo sapien
gaagaatttagcaatgtaagtggaa

SEQ ID NO: 2835160 - DNA, 25 bp, Homo sapien
ctcgcagtaagttggacctaaagaa

SEQ ID NO: 2835161 - DNA, 25 bp, Homo sapien
caatgtaagtggaattcatagaggc

SEQ ID NO: 2835162 - DNA, 25 bp, Homo sapien
tcatagaggcagagttgcactgctg

SEQ ID NO: 2835163 - DNA, 25 bp, Homo sapien
tattaggaaagtacactgtccgccc

SEQ ID NO: 2835164 - DNA, 25 bp, Homo sapien
tacataaagcgcaagcccactggct

SEQ ID NO: 2835165 - DNA, 25 bp, Homo sapien
caagagacaggatggacggccttct

SEQ ID NO: 2835166 - DNA, 25 bp, Homo sapien
gcttgaaaccttggaggaacccatg

SEQ ID NO: 2835167 - DNA, 25 bp, Homo sapien
tgggatcttttaaaagtagcatcac

SEQ ID NO: 2835168 - DNA, 25 bp, Homo sapien
ttaactcacattttggacacctgat

SEQ ID NO: 2835169 - DNA, 25 bp, Homo sapien
ctaatacttccagaagaagcataat

SEQ ID NO: 2835170 - DNA, 25 bp, Homo sapien
tatccttgtacattacagtttggga

SEQ ID NO: 2835171 - DNA, 25 bp, Homo sapien
acctctcatttaagtaccaattgcc

SEQ ID NO: 2835172 - DNA, 25 bp, Homo sapien
gagagactcacctctcatttaagta

SEQ ID NO: 2835173 - DNA, 25 bp, Homo sapien
tcatttaagtaccaattgcctatgg

SEQ ID NO: 2835174 - DNA, 25 bp, Homo sapien
taagtaccaattgcctatggcaaac

SEQ ID NO: 2835175 - DNA, 25 bp, Homo sapien
aaaaatataatcattggtaatcttc

SEQ ID NO: 2835176 - DNA, 25 bp, Homo sapien
tcaaagaaggcattgcctcattaac

SEQ ID NO: 2835177 - DNA, 25 bp, Homo sapien
aatcattggtaatcttcaaagaagg

SEQ ID NO: 2835178 - DNA, 25 bp, Homo sapien
gaaggcattgcctcattaacattct

SEQ ID NO: 2835179 - DNA, 25 bp, Homo sapien
ctaggcgatggtattccactgtttt

SEQ ID NO: 2835180 - DNA, 25 bp, Homo sapien
gaacaaaggccatcacgccatttcc

SEQ ID NO: 2835181 - DNA, 25 bp, Homo sapien
ttccactgttttggaacaaaggcca

SEQ ID NO: 2835182 - DNA, 25 bp, Homo sapien
tgttttggaacaaaggccatcacgc

SEQ ID NO: 2835183 - DNA, 25 bp, Homo sapien
acagaagtcattaaataggcaaaag

SEQ ID NO: 2835184 - DNA, 25 bp, Homo sapien
aacagaagtcattaaataggcaaaa

SEQ ID NO: 2835185 - DNA, 25 bp, Homo sapien
gcactcaaggttctgtctacccata

SEQ ID NO: 2835186 - DNA, 25 bp, Homo sapien
tcataatagagatggccaaacacta

SEQ ID NO: 2835187 - DNA, 25 bp, Homo sapien
tcttgtaaagaaggctaaacagtgc

SEQ ID NO: 2835188 - DNA, 25 bp, Homo sapien
gattcctaggctctatcttcagaga

SEQ ID NO: 2835189 - DNA, 25 bp, Homo sapien
tttgaggatggcatcttaaaagatt

SEQ ID NO: 2835190 - DNA, 25 bp, Homo sapien
catcagactcgtcgtcgtccctggg

SEQ ID NO: 2835191 - DNA, 25 bp, Homo sapien
tgttttcttccaaggtgtcatcaga

SEQ ID NO: 2835192 - DNA, 25 bp, Homo sapien
gtcatcagactcgtcgtcgtccctg

SEQ ID NO: 2835193 - DNA, 25 bp, Homo sapien
ggtgtcatcagactcgtcgtcgtcc

SEQ ID NO: 2835194 - DNA, 25 bp, Homo sapien
tggttctccataatcgccattgtct

SEQ ID NO: 2835195 - DNA, 25 bp, Homo sapien
taatcgccattgtctagagtgtctt

SEQ ID NO: 2835196 - DNA, 25 bp, Homo sapien
tccataatcgccattgtctagagtg

SEQ ID NO: 2835197 - DNA, 25 bp, Homo sapien
cgccattgtctagagtgtctttggc

SEQ ID NO: 2835198 - DNA, 25 bp, Homo sapien
ccacttttcttggtactcgtcgtgg

SEQ ID NO: 2835199 - DNA, 25 bp, Homo sapien
ttcttggtactcgtcgtgggaggga

SEQ ID NO: 2835200 - DNA, 25 bp, Homo sapien
cacttttcttggtactcgtcgtggg

SEQ ID NO: 2835201 - DNA, 25 bp, Homo sapien
cttttcttggtactcgtcgtgggag

SEQ ID NO: 2835202 - DNA, 25 bp, Homo sapien
ttgagtacggttgggctcggtgaat

SEQ ID NO: 2835203 - DNA, 25 bp, Homo sapien
gagttgagtacggttgggctcggtg

SEQ ID NO: 2835204 - DNA, 25 bp, Homo sapien
gaaatatgtgagttgagtacggttg

SEQ ID NO: 2835205 - DNA, 25 bp, Homo sapien
tgtgagttgagtacggttgggctcg

SEQ ID NO: 2835206 - DNA, 25 bp, Homo sapien
tttccctgtgctgctacctactcag

SEQ ID NO: 2835207 - DNA, 25 bp, Homo sapien
tgaagaacttcaaggacctctacta

SEQ ID NO: 2835208 - DNA, 25 bp, Homo sapien
cagaggaatccctgccgaaatttaa

SEQ ID NO: 2835209 - DNA, 25 bp, Homo sapien
gcatctaggtatagcaaatgacacc

SEQ ID NO: 2835210 - DNA, 25 bp, Homo sapien
cacaagctgatagggtgggaataat

SEQ ID NO: 2835211 - DNA, 25 bp, Homo sapien
ccaccacgcagtatagaattcacag

SEQ ID NO: 2835212 - DNA, 25 bp, Homo sapien
gaattcacagtcatcagcaaatccc

SEQ ID NO: 2835213 - DNA, 25 bp, Homo sapien
taaacaggacctacaactcagtaca

SEQ ID NO: 2835214 - DNA, 25 bp, Homo sapien
taacaacctaggtgaatcttcagag

SEQ ID NO: 2835215 - DNA, 25 bp, Homo sapien
tcctggtcgtgatattgcactattg

SEQ ID NO: 2835216 - DNA, 25 bp, Homo sapien
cttgtggtgatggtaatgccccgta

SEQ ID NO: 2835217 - DNA, 25 bp, Homo sapien
gcctggagtgcaagacttactctcg

SEQ ID NO: 2835218 - DNA, 25 bp, Homo sapien
gagaaacgcaggactgtgtcttggc

SEQ ID NO: 2835219 - DNA, 25 bp, Homo sapien
ggagaaacgcaggactgtgtcttgg

SEQ ID NO: 2835220 - DNA, 25 bp, Homo sapien
tttagggagaaacgcaggactgtgt

SEQ ID NO: 2835221 - DNA, 25 bp, Homo sapien
aaatttagggagaaacgcaggactg

SEQ ID NO: 2835222 - DNA, 25 bp, Homo sapien
aagaccagcggccgcgccaacccca

SEQ ID NO: 2835223 - DNA, 25 bp, Homo sapien
agcggccgcgccaaccccacaaggg

SEQ ID NO: 2835224 - DNA, 25 bp, Homo sapien
accagcggccgcgccaaccccacaa

SEQ ID NO: 2835225 - DNA, 25 bp, Homo sapien
cggccgcgccaaccccacaagggct

SEQ ID NO: 2835226 - DNA, 25 bp, Homo sapien
gggcagcagtttcgcttgtgctggc

SEQ ID NO: 2835227 - DNA, 25 bp, Homo sapien
gcagcagtttcgcttgtgctggccc

SEQ ID NO: 2835228 - DNA, 25 bp, Homo sapien
cagcagtttcgcttgtgctggcccc

SEQ ID NO: 2835229 - DNA, 25 bp, Homo sapien
ccgggcagcagtttcgcttgtgctg

SEQ ID NO: 2835230 - DNA, 25 bp, Homo sapien
gcgctgttgctaggctctacgccat

SEQ ID NO: 2835231 - DNA, 25 bp, Homo sapien
tgttgctaggctctacgccatgagg

SEQ ID NO: 2835232 - DNA, 25 bp, Homo sapien
ggctctacgccatgaggtcagacgc

SEQ ID NO: 2835233 - DNA, 25 bp, Homo sapien
ggagcctgcgctgttgctaggctct

SEQ ID NO: 2835234 - DNA, 25 bp, Homo sapien
ccggaataagaaggaaggattgcag

SEQ ID NO: 2835235 - DNA, 25 bp, Homo sapien
tcccagcgtggtgacgtcgaagcct

SEQ ID NO: 2835236 - DNA, 25 bp, Homo sapien
gacgtgctctggaaaccggaataag

SEQ ID NO: 2835237 - DNA, 25 bp, Homo sapien
gaggagggagttgccgctaggcgaa

SEQ ID NO: 2835238 - DNA, 25 bp, Homo sapien
attaataaagacaacagaagaagga

SEQ ID NO: 2835239 - DNA, 25 bp, Homo sapien
tattaataaagacaacagaagaagg

SEQ ID NO: 2835240 - DNA, 25 bp, Homo sapien
gttgttaattacagcatttgaaggg

SEQ ID NO: 2835241 - DNA, 25 bp, Homo sapien
ttttaagtgttgttaattacagcat

SEQ ID NO: 2835242 - DNA, 25 bp, Homo sapien
agtgttgttaattacagcatttgaa

SEQ ID NO: 2835243 - DNA, 25 bp, Homo sapien
tttttaagtgttgttaattacagca

SEQ ID NO: 2835244 - DNA, 25 bp, Homo sapien
atttagattctgagtgttgtcacca

SEQ ID NO: 2835245 - DNA, 25 bp, Homo sapien
tacaacagaagtccaatttagattc

SEQ ID NO: 2835246 - DNA, 25 bp, Homo sapien
caatcacacagacacttccaagctt

SEQ ID NO: 2835247 - DNA, 25 bp, Homo sapien
gacacttccaagcttatagctggag

SEQ ID NO: 2835248 - DNA, 25 bp, Homo sapien
ctgcagaccttttggtgtaaaagag

SEQ ID NO: 2835249 - DNA, 25 bp, Homo sapien
ccctgcagaccttttggtgtaaaag

SEQ ID NO: 2835250 - DNA, 25 bp, Homo sapien
cctgcagaccttttggtgtaaaaga

SEQ ID NO: 2835251 - DNA, 25 bp, Homo sapien
aaattccagtcctagaccaagcttg

SEQ ID NO: 2835252 - DNA, 25 bp, Homo sapien
tgaaattccagtcctagaccaagct

SEQ ID NO: 2835253 - DNA, 25 bp, Homo sapien
ttatgcttgaaattccagtcctaga

SEQ ID NO: 2835254 - DNA, 25 bp, Homo sapien
tgcttgaaattccagtcctagacca

SEQ ID NO: 2835255 - DNA, 25 bp, Homo sapien
cagcattgacgttcttgccatccag

SEQ ID NO: 2835256 - DNA, 25 bp, Homo sapien
gcattgacgttcttgccatccagaa

SEQ ID NO: 2835257 - DNA, 25 bp, Homo sapien
gacgttcttgccatccagaagagct

SEQ ID NO: 2835258 - DNA, 25 bp, Homo sapien
cagaagagctgacagtgtcagttta

SEQ ID NO: 2835259 - DNA, 25 bp, Homo sapien
caacaggcatactacagtgggctta

SEQ ID NO: 2835260 - DNA, 25 bp, Homo sapien
tatcagcagggtccaaactacatgg

SEQ ID NO: 2835261 - DNA, 25 bp, Homo sapien
tacttagcactatctgaccaacagg

SEQ ID NO: 2835262 - DNA, 25 bp, Homo sapien
tataatacgccgtggactggcctag

SEQ ID NO: 2835263 - DNA, 25 bp, Homo sapien
ttagagtctgagtgtatcctaaacc

SEQ ID NO: 2835264 - DNA, 25 bp, Homo sapien
ctggctttagagtctgagtgtatcc

SEQ ID NO: 2835265 - DNA, 25 bp, Homo sapien
gctttagagtctgagtgtatcctaa

SEQ ID NO: 2835266 - DNA, 25 bp, Homo sapien
tggctttagagtctgagtgtatcct

SEQ ID NO: 2835267 - DNA, 25 bp, Homo sapien
caggcaagattgacagcggtctcca

SEQ ID NO: 2835268 - DNA, 25 bp, Homo sapien
aaatggagccgccaaactctgtccc

SEQ ID NO: 2835269 - DNA, 25 bp, Homo sapien
caggcgtcagggtcaatctgatact

SEQ ID NO: 2835270 - DNA, 25 bp, Homo sapien
cgagaagcaggcgtcagggtcaatc

SEQ ID NO: 2835271 - DNA, 25 bp, Homo sapien
caggtactaaattacaggaagtctg

SEQ ID NO: 2835272 - DNA, 25 bp, Homo sapien
tcagaagttcaccaaatttcacaaa

SEQ ID NO: 2835273 - DNA, 25 bp, Homo sapien
gaaatggactgaaccaatactggta

SEQ ID NO: 2835274 - DNA, 25 bp, Homo sapien
tactggtattaagggaagtcagaag

SEQ ID NO: 2835275 - DNA, 25 bp, Homo sapien
attttcgtttccccatgaaattcag

SEQ ID NO: 2835276 - DNA, 25 bp, Homo sapien
acacgtatgagccacacattgtaaa

SEQ ID NO: 2835277 - DNA, 25 bp, Homo sapien
cgtatgagccacacattgtaaattt

SEQ ID NO: 2835278 - DNA, 25 bp, Homo sapien
cacgtatgagccacacattgtaaat

SEQ ID NO: 2835279 - DNA, 25 bp, Homo sapien
cgaaatccatgtcgcagcccaggtt

SEQ ID NO: 2835280 - DNA, 25 bp, Homo sapien
gcaatgtcgaaatccatgtcgcagc

SEQ ID NO: 2835281 - DNA, 25 bp, Homo sapien
gcagcccaggttaatgtgctcccgc

SEQ ID NO: 2835282 - DNA, 25 bp, Homo sapien
ccctcgtaacctagcaccagagcac

SEQ ID NO: 2835283 - DNA, 25 bp, Homo sapien
agtgtctctactgccggttcctcaa

SEQ ID NO: 2835284 - DNA, 25 bp, Homo sapien
tacatatttcagagaaccgggtact

SEQ ID NO: 2835285 - DNA, 25 bp, Homo sapien
tactgatgtagaacctggaactctg

SEQ ID NO: 2835286 - DNA, 25 bp, Homo sapien
tgcagaaaccccacaataacgaagt

SEQ ID NO: 2835287 - DNA, 25 bp, Homo sapien
cagaggataggaaccatgtgtgccc

SEQ ID NO: 2835288 - DNA, 25 bp, Homo sapien
ggaatgagagtaaatcagccccgta

SEQ ID NO: 2835289 - DNA, 25 bp, Homo sapien
cagcaaattcaagcatgtgggcaca

SEQ ID NO: 2835290 - DNA, 25 bp, Homo sapien
tcttgcaggagaaactacagcagcg

SEQ ID NO: 2835291 - DNA, 25 bp, Homo sapien
gaaggtcagcttcagtccacgtgca

SEQ ID NO: 2835292 - DNA, 25 bp, Homo sapien
tgttaggtgagaaggatgaatcgaa

SEQ ID NO: 2835293 - DNA, 25 bp, Homo sapien
aatcgaaggtcagcttcagtccacg

SEQ ID NO: 2835294 - DNA, 25 bp, Homo sapien
cagtgttaggtgagaaggatgaatc

SEQ ID NO: 2835295 - DNA, 25 bp, Homo sapien
gctggcagatgcgaattaataaatc

SEQ ID NO: 2835296 - DNA, 25 bp, Homo sapien
gcagatgcgaattaataaatccaca

SEQ ID NO: 2835297 - DNA, 25 bp, Homo sapien
caggctggcagatgcgaattaataa

SEQ ID NO: 2835298 - DNA, 25 bp, Homo sapien
aaggcaggctggcagatgcgaatta

SEQ ID NO: 2835299 - DNA, 25 bp, Homo sapien
tcaggccgtactcagtccatctgta

SEQ ID NO: 2835300 - DNA, 25 bp, Homo sapien
tgatcttccacagtaatctcggtgc

SEQ ID NO: 2835301 - DNA, 25 bp, Homo sapien
attccatttctctgtaaacgtcagg

SEQ ID NO: 2835302 - DNA, 25 bp, Homo sapien
tctgtaaacgtcaggccgtactcag

SEQ ID NO: 2835303 - DNA, 25 bp, Homo sapien
gttttcaaatcaagctttattaagc

SEQ ID NO: 2835304 - DNA, 25 bp, Homo sapien
caaatcaagctttattaagccaaat

SEQ ID NO: 2835305 - DNA, 25 bp, Homo sapien
tttcaaatcaagctttattaagcca

SEQ ID NO: 2835306 - DNA, 25 bp, Homo sapien
caatccattctcagattttgttttc

SEQ ID NO: 2835307 - DNA, 25 bp, Homo sapien
ccaagatcggcatacgtgggtggca

SEQ ID NO: 2835308 - DNA, 25 bp, Homo sapien
gatttgccaagatcggcatacgtgg

SEQ ID NO: 2835309 - DNA, 25 bp, Homo sapien
cagatttgccaagatcggcatacgt

SEQ ID NO: 2835310 - DNA, 25 bp, Homo sapien
cggcatacgtgggtggcacagccat

SEQ ID NO: 2835311 - DNA, 25 bp, Homo sapien
tcctttttgtgcacttcggcccatc

SEQ ID NO: 2835312 - DNA, 25 bp, Homo sapien
cggaactaaggaaggcccgagacag

SEQ ID NO: 2835313 - DNA, 25 bp, Homo sapien
tgctgcactgatctgacggaactaa

SEQ ID NO: 2835314 - DNA, 25 bp, Homo sapien
ctctgccgctccgagaagttcagct

SEQ ID NO: 2835315 - DNA, 25 bp, Homo sapien
tgccagaaggctacctagagtgtcc

SEQ ID NO: 2835316 - DNA, 25 bp, Homo sapien
tagagtgtccatacagattgcaaga

SEQ ID NO: 2835317 - DNA, 25 bp, Homo sapien
cctgaaattgagctgtgttgtgtcc

SEQ ID NO: 2835318 - DNA, 25 bp, Homo sapien
taaaagccaaccactgtgcctgaaa

SEQ ID NO: 2835319 - DNA, 25 bp, Homo sapien
gaagcctcgggaatcaaatagacct

SEQ ID NO: 2835320 - DNA, 25 bp, Homo sapien
caagaggttgctgactcagggcagc

SEQ ID NO: 2835321 - DNA, 25 bp, Homo sapien
taaggcacctcaagttccctggagc

SEQ ID NO: 2835322 - DNA, 25 bp, Homo sapien
gctggcagccagtacactatggtct

SEQ ID NO: 2835323 - DNA, 25 bp, Homo sapien
taagcatgttcaaaaggtcaccctg

SEQ ID NO: 2835324 - DNA, 25 bp, Homo sapien
gcattgtttagctgaacaggtcctg

SEQ ID NO: 2835325 - DNA, 25 bp, Homo sapien
caggtcctgaaagaatgcctcccac

SEQ ID NO: 2835326 - DNA, 25 bp, Homo sapien
catgcacaagttcactctgactggt

SEQ ID NO: 2835327 - DNA, 25 bp, Homo sapien
caacgccacgtgtagcaaaatggtc

SEQ ID NO: 2835328 - DNA, 25 bp, Homo sapien
tcatcgaaggagaggtacaattgct

SEQ ID NO: 2835329 - DNA, 25 bp, Homo sapien
caattgctcccgtcctatagatgag

SEQ ID NO: 2835330 - DNA, 25 bp, Homo sapien
tgtacaaaccactaagactgcgggc

SEQ ID NO: 2835331 - DNA, 25 bp, Homo sapien
taagtcgactctcggccggcgcgtt

SEQ ID NO: 2835332 - DNA, 25 bp, Homo sapien
gggccacggtcgtcacgtgagctca

SEQ ID NO: 2835333 - DNA, 25 bp, Homo sapien
gccggatgcacgctggtgggatcca

SEQ ID NO: 2835334 - DNA, 25 bp, Homo sapien
ggcgcgttccgctctagaaggctct

SEQ ID NO: 2835335 - DNA, 25 bp, Homo sapien
ctgccggggcccctcgcccgctcct

SEQ ID NO: 2835336 - DNA, 25 bp, Homo sapien
ggccgctcgcgatccctccccgcgg

SEQ ID NO: 2835337 - DNA, 25 bp, Homo sapien
agcgcctccctctcagctccccagg

SEQ ID NO: 2835338 - DNA, 25 bp, Homo sapien
ccgcgccggccgctcgcgatccctc

SEQ ID NO: 2835339 - DNA, 25 bp, Homo sapien
gcggctacggcgggggctgcgacgc

SEQ ID NO: 2835340 - DNA, 25 bp, Homo sapien
ctcagaggatgtggcggcgggctcg

SEQ ID NO: 2835341 - DNA, 25 bp, Homo sapien
cgggggctgcgacgcggaggcaggg

SEQ ID NO: 2835342 - DNA, 25 bp, Homo sapien
ctacggcgggggctgcgacgcggag

SEQ ID NO: 2835343 - DNA, 25 bp, Homo sapien
ttcttgctggaaacctcggccccag

SEQ ID NO: 2835344 - DNA, 25 bp, Homo sapien
cgccggactgacgtgtgcaccgtgt

SEQ ID NO: 2835345 - DNA, 25 bp, Homo sapien
gggaggaggccttccgattctctga

SEQ ID NO: 2835346 - DNA, 25 bp, Homo sapien
cgtgcgcagggacacgcgggttctt

SEQ ID NO: 2835347 - DNA, 25 bp, Homo sapien
gcgctgctagatcccccgggagttg

SEQ ID NO: 2835348 - DNA, 25 bp, Homo sapien
ttggcctccgcgctgctagatcccc

SEQ ID NO: 2835349 - DNA, 25 bp, Homo sapien
tcgcctgggtggacaaagtggcccc

SEQ ID NO: 2835350 - DNA, 25 bp, Homo sapien
gtggccggcgctggacccaagcctc

SEQ ID NO: 2835351 - DNA, 25 bp, Homo sapien
tgccgggttacagaatcaggacact

SEQ ID NO: 2835352 - DNA, 25 bp, Homo sapien
tgctaggcctaagcgagtggtctcg

SEQ ID NO: 2835353 - DNA, 25 bp, Homo sapien
actgagtgtcccctgtgttacgcgc

SEQ ID NO: 2835354 - DNA, 25 bp, Homo sapien
gaggcccactcgaagcaggtttcga

SEQ ID NO: 2835355 - DNA, 25 bp, Homo sapien
gaggaacaaccacagcacaaacagg

SEQ ID NO: 2835356 - DNA, 25 bp, Homo sapien
gcagaaggtgccctttaacgagtaa

SEQ ID NO: 2835357 - DNA, 25 bp, Homo sapien
acgagtaaccaagtgcaggagaaca

SEQ ID NO: 2835358 - DNA, 25 bp, Homo sapien
aaacaggcaaccatccagagaccag

SEQ ID NO: 2835359 - DNA, 25 bp, Homo sapien
agacttggctgacccgcaggctcct

SEQ ID NO: 2835360 - DNA, 25 bp, Homo sapien
tcaaagacttggctgacccgcaggc

SEQ ID NO: 2835361 - DNA, 25 bp, Homo sapien
aaagacttggctgacccgcaggctc

SEQ ID NO: 2835362 - DNA, 25 bp, Homo sapien
gacttggctgacccgcaggctcctt

SEQ ID NO: 2835363 - DNA, 25 bp, Homo sapien
tggccacgctcactcatcctgggca

SEQ ID NO: 2835364 - DNA, 25 bp, Homo sapien
caggccctgatagcgacaagctttc

SEQ ID NO: 2835365 - DNA, 25 bp, Homo sapien
tggcctggggtcaacagctgccatg

SEQ ID NO: 2835366 - DNA, 25 bp, Homo sapien
gatagcgacaagctttccagtcact

SEQ ID NO: 2835367 - DNA, 25 bp, Homo sapien
gacaccctggacctcacggccccca

SEQ ID NO: 2835368 - DNA, 25 bp, Homo sapien
gtcttgccatcccttgcccacaggc

SEQ ID NO: 2835369 - DNA, 25 bp, Homo sapien
ttgccatcccttgcccacaggccca

SEQ ID NO: 2835370 - DNA, 25 bp, Homo sapien
ctgtcttgccatcccttgcccacag

SEQ ID NO: 2835371 - DNA, 25 bp, Homo sapien
gattcagtgtacctgtttgtgcaat

SEQ ID NO: 2835372 - DNA, 25 bp, Homo sapien
tgtgcaatgtagagatgggcaaaac

SEQ ID NO: 2835373 - DNA, 25 bp, Homo sapien
taagctgcaacccattggggtgttt

SEQ ID NO: 2835374 - DNA, 25 bp, Homo sapien
gagatgggcaaaacaaatctgcaca

SEQ ID NO: 2835375 - DNA, 25 bp, Homo sapien
cctggggatactctgcattttgtca

SEQ ID NO: 2835376 - DNA, 25 bp, Homo sapien
tgggtcaatggacccattgcccaac

SEQ ID NO: 2835377 - DNA, 25 bp, Homo sapien
attttgtcagtttgctgtgggtcaa

SEQ ID NO: 2835378 - DNA, 25 bp, Homo sapien
tcagtttgctgtgggtcaatggacc

SEQ ID NO: 2835379 - DNA, 25 bp, Homo sapien
cagcacacccccgagccatttgggc

SEQ ID NO: 2835380 - DNA, 25 bp, Homo sapien
agcacacccccgagccatttgggca

SEQ ID NO: 2835381 - DNA, 25 bp, Homo sapien
ctctgagcatcagcacacccccgag

SEQ ID NO: 2835382 - DNA, 25 bp, Homo sapien
tgagcatcagcacacccccgagcca

SEQ ID NO: 2835383 - DNA, 25 bp, Homo sapien
taaggtgtgaatgcagctatagaca

SEQ ID NO: 2835384 - DNA, 25 bp, Homo sapien
aatttatacctgctacatgtgttag

SEQ ID NO: 2835385 - DNA, 25 bp, Homo sapien
taactattcaactctggtagtaagg

SEQ ID NO: 2835386 - DNA, 25 bp, Homo sapien
aaagtcctggctagtgtgatagctc

SEQ ID NO: 2835387 - DNA, 25 bp, Homo sapien
cggccacttcaaagcgccgcgtgta

SEQ ID NO: 2835388 - DNA, 25 bp, Homo sapien
tcaaagcgccgcgtgtagggcggca

SEQ ID NO: 2835389 - DNA, 25 bp, Homo sapien
ccactgccaaggtgcggacgcagcg

SEQ ID NO: 2835390 - DNA, 25 bp, Homo sapien
aaagcgccgcgtgtagggcggcagg

SEQ ID NO: 2835391 - DNA, 25 bp, Homo sapien
gacttggaggcccacaaagggactc

SEQ ID NO: 2835392 - DNA, 25 bp, Homo sapien
ttggaggcccacaaagggactcgcc

SEQ ID NO: 2835393 - DNA, 25 bp, Homo sapien
gcccagccgcgccagctgtgcaggt

SEQ ID NO: 2835394 - DNA, 25 bp, Homo sapien
gcgccagctgtgcaggtggcgacat

SEQ ID NO: 2835395 - DNA, 25 bp, Homo sapien
ctctttctcatgatcaaggtggctg

SEQ ID NO: 2835396 - DNA, 25 bp, Homo sapien
agaggaacctgcagttgacgggaat

SEQ ID NO: 2835397 - DNA, 25 bp, Homo sapien
ggctgatgttcatggacagcacact

SEQ ID NO: 2835398 - DNA, 25 bp, Homo sapien
tgcagttgacgggaatcctctttct

SEQ ID NO: 2835399 - DNA, 25 bp, Homo sapien
tctgccccagtgatggtctcctcca

SEQ ID NO: 2835400 - DNA, 25 bp, Homo sapien
tgccccagtgatggtctcctccaac

SEQ ID NO: 2835401 - DNA, 25 bp, Homo sapien
gccccagtgatggtctcctccaacc

SEQ ID NO: 2835402 - DNA, 25 bp, Homo sapien
ctgccccagtgatggtctcctccaa

SEQ ID NO: 2835403 - DNA, 25 bp, Homo sapien
aagggagatttggtattgatggtcc

SEQ ID NO: 2835404 - DNA, 25 bp, Homo sapien
gagatttggtattgatggtcctcac

SEQ ID NO: 2835405 - DNA, 25 bp, Homo sapien
tatatgggatcatgtactgatgcag

SEQ ID NO: 2835406 - DNA, 25 bp, Homo sapien
ctatatgggatcatgtactgatgca

SEQ ID NO: 2835407 - DNA, 25 bp, Homo sapien
caccaccaaaggctcctttgccagg

SEQ ID NO: 2835408 - DNA, 25 bp, Homo sapien
ccaccaaaggctcctttgccaggaa

SEQ ID NO: 2835409 - DNA, 25 bp, Homo sapien
catgaagacatccaccaccaaaggc

SEQ ID NO: 2835410 - DNA, 25 bp, Homo sapien
tgtgccatgaagacatccaccacca

SEQ ID NO: 2835411 - DNA, 25 bp, Homo sapien
cttattaaagcaagccgcatcaggg

SEQ ID NO: 2835412 - DNA, 25 bp, Homo sapien
attaaagcaagccgcatcagggagc

SEQ ID NO: 2835413 - DNA, 25 bp, Homo sapien
tccttattaaagcaagccgcatcag

SEQ ID NO: 2835414 - DNA, 25 bp, Homo sapien
ttattaaagcaagccgcatcaggga

SEQ ID NO: 2835415 - DNA, 25 bp, Homo sapien
cagaatgagcaaagagagcacactg

SEQ ID NO: 2835416 - DNA, 25 bp, Homo sapien
gactatttctaggcccttggacact

SEQ ID NO: 2835417 - DNA, 25 bp, Homo sapien
cggtggccactttcacagtccctgg

SEQ ID NO: 2835418 - DNA, 25 bp, Homo sapien
gtcatttgccctcgataagaaccca

SEQ ID NO: 2835419 - DNA, 25 bp, Homo sapien
cgtcagacacgaaggatttctcaca

SEQ ID NO: 2835420 - DNA, 25 bp, Homo sapien
taactggagcatgatcgtcagcagg

SEQ ID NO: 2835421 - DNA, 25 bp, Homo sapien
ggccaaagtgaatccaagtagtaac

SEQ ID NO: 2835422 - DNA, 25 bp, Homo sapien
cacagggtctagcaaggaagaaaat

SEQ ID NO: 2835423 - DNA, 25 bp, Homo sapien
aggccctcaagagtggtggaatcag

SEQ ID NO: 2835424 - DNA, 25 bp, Homo sapien
ccgtttcatgctggggttcgcgtcc

SEQ ID NO: 2835425 - DNA, 25 bp, Homo sapien
gttgtgggtgccgtttcatgctggg

SEQ ID NO: 2835426 - DNA, 25 bp, Homo sapien
tcatgctggggttcgcgtccctcct

SEQ ID NO: 2835427 - DNA, 25 bp, Homo sapien
tgccgtttcatgctggggttcgcgt

SEQ ID NO: 2835428 - DNA, 25 bp, Homo sapien
ggccctcagatctgtgtgcacctgc

SEQ ID NO: 2835429 - DNA, 25 bp, Homo sapien
gaaaggcagtactcgccttcatgta

SEQ ID NO: 2835430 - DNA, 25 bp, Homo sapien
taaggcaacaatggaaagtttctca

SEQ ID NO: 2835431 - DNA, 25 bp, Homo sapien
aaaacaaaaagagcggccgggcatg

SEQ ID NO: 2835432 - DNA, 25 bp, Homo sapien
cagctgcaccagatccaaagtcatg

SEQ ID NO: 2835433 - DNA, 25 bp, Homo sapien
caccagatccaaagtcatgtttgaa

SEQ ID NO: 2835434 - DNA, 25 bp, Homo sapien
gctcagctgcaccagatccaaagtc

SEQ ID NO: 2835435 - DNA, 25 bp, Homo sapien
gctgcaccagatccaaagtcatgtt

SEQ ID NO: 2835436 - DNA, 25 bp, Homo sapien
caggctctgatcctgaaggagcaat

SEQ ID NO: 2835437 - DNA, 25 bp, Homo sapien
actgggtaaaattctgacacagagg

SEQ ID NO: 2835438 - DNA, 25 bp, Homo sapien
ccaggctctgatcctgaaggagcaa

SEQ ID NO: 2835439 - DNA, 25 bp, Homo sapien
tccttatctgaccagcctggcgcag

SEQ ID NO: 2835440 - DNA, 25 bp, Homo sapien
tcctctggctcatgctccttatctg

SEQ ID NO: 2835441 - DNA, 25 bp, Homo sapien
cttatctgaccagcctggcgcagtc

SEQ ID NO: 2835442 - DNA, 25 bp, Homo sapien
atctgaccagcctggcgcagtccgg

SEQ ID NO: 2835443 - DNA, 25 bp, Homo sapien
ggagcagttgctgccttgcaggccc

SEQ ID NO: 2835444 - DNA, 25 bp, Homo sapien
ctgggagcagttgctgccttgcagg

SEQ ID NO: 2835445 - DNA, 25 bp, Homo sapien
agcagttgctgccttgcaggcccca

SEQ ID NO: 2835446 - DNA, 25 bp, Homo sapien
tgggagcagttgctgccttgcaggc

SEQ ID NO: 2835447 - DNA, 25 bp, Homo sapien
aagctccgcttagaacaggaacaag

SEQ ID NO: 2835448 - DNA, 25 bp, Homo sapien
tgccctctgagctaggtccaccctg

SEQ ID NO: 2835449 - DNA, 25 bp, Homo sapien
aagaatctccagtttataagggtgc

SEQ ID NO: 2835450 - DNA, 25 bp, Homo sapien
tataagggtgccctctgcccgagat

SEQ ID NO: 2835451 - DNA, 25 bp, Homo sapien
ctcctgcttcagctttttccaaaac

SEQ ID NO: 2835452 - DNA, 25 bp, Homo sapien
tcctgcttcagctttttccaaaacc

SEQ ID NO: 2835453 - DNA, 25 bp, Homo sapien
ctgcttcagctttttccaaaaccat

SEQ ID NO: 2835454 - DNA, 25 bp, Homo sapien
cctgcttcagctttttccaaaacca

SEQ ID NO: 2835455 - DNA, 25 bp, Homo sapien
gagtgttcccagtcattcttagggc

SEQ ID NO: 2835456 - DNA, 25 bp, Homo sapien
cacaggaaggtgttctcgctacatg

SEQ ID NO: 2835457 - DNA, 25 bp, Homo sapien
cagtcatgagcaagacggaggagtc

SEQ ID NO: 2835458 - DNA, 25 bp, Homo sapien
tcttagggccaagaggtatttactg

SEQ ID NO: 2835459 - DNA, 25 bp, Homo sapien
ttacaagattccagtgagacaggca

SEQ ID NO: 2835460 - DNA, 25 bp, Homo sapien
gcagtttgccatcgaagtcactcag

SEQ ID NO: 2835461 - DNA, 25 bp, Homo sapien
tagtcagaggaatctctccggcctg

SEQ ID NO: 2835462 - DNA, 25 bp, Homo sapien
tgatccagtagacgcttcacctctg

SEQ ID NO: 2835463 - DNA, 25 bp, Homo sapien
tcaaccgggccaagtgatgggcaaa

SEQ ID NO: 2835464 - DNA, 25 bp, Homo sapien
gggtaagtgacctgccaaagccaca

SEQ ID NO: 2835465 - DNA, 25 bp, Homo sapien
cacaggaagtagaagggactgctca

SEQ ID NO: 2835466 - DNA, 25 bp, Homo sapien
gatgcctgcagtaggctcaaccggg

SEQ ID NO: 2835467 - DNA, 25 bp, Homo sapien
ggagatagtgagctgatcttaggct

SEQ ID NO: 2835468 - DNA, 25 bp, Homo sapien
gatagtgagctgatcttaggctgta

SEQ ID NO: 2835469 - DNA, 25 bp, Homo sapien
ctctgagacctgaaagtaggtggag

SEQ ID NO: 2835470 - DNA, 25 bp, Homo sapien
ctgctctgagacctgaaagtaggtg

SEQ ID NO: 2835471 - DNA, 25 bp, Homo sapien
ctcactgaggcagtggactcatgtt

SEQ ID NO: 2835472 - DNA, 25 bp, Homo sapien
tgaggcagtggactcatgttggggc

SEQ ID NO: 2835473 - DNA, 25 bp, Homo sapien
actgaggcagtggactcatgttggg

SEQ ID NO: 2835474 - DNA, 25 bp, Homo sapien
cactgaggcagtggactcatgttgg

SEQ ID NO: 2835475 - DNA, 25 bp, Homo sapien
gcgtcagttattggtgttgagcacc

SEQ ID NO: 2835476 - DNA, 25 bp, Homo sapien
caagcttggtaccaggtactgggcc

SEQ ID NO: 2835477 - DNA, 25 bp, Homo sapien
tccacacgccccagagcgagctgtg

SEQ ID NO: 2835478 - DNA, 25 bp, Homo sapien
gccttgctgggaagcgtcagttatt

SEQ ID NO: 2835479 - DNA, 25 bp, Homo sapien
cgtagtattggctatcacatttgga

SEQ ID NO: 2835480 - DNA, 25 bp, Homo sapien
gggactttgagggtggctccctcaa

SEQ ID NO: 2835481 - DNA, 25 bp, Homo sapien
tcctgcagacccctggttagagcca

SEQ ID NO: 2835482 - DNA, 25 bp, Homo sapien
tctttccttggaaggctgcgtagta

SEQ ID NO: 2835483 - DNA, 25 bp, Homo sapien
tggggcagcgctggttccagagcct

SEQ ID NO: 2835484 - DNA, 25 bp, Homo sapien
tgggagaagctgatgggcgcatgca

SEQ ID NO: 2835485 - DNA, 25 bp, Homo sapien
ggagaagctgatgggcgcatgcagc

SEQ ID NO: 2835486 - DNA, 25 bp, Homo sapien
agaagctgatgggcgcatgcagcat

SEQ ID NO: 2835487 - DNA, 25 bp, Homo sapien
caggttttcaccatagcctacgtta

SEQ ID NO: 2835488 - DNA, 25 bp, Homo sapien
tttcagcattcagtccgcctggccg

SEQ ID NO: 2835489 - DNA, 25 bp, Homo sapien
tccagtagtggacaacaggttttca

SEQ ID NO: 2835490 - DNA, 25 bp, Homo sapien
cattacaactagatcaaggagccca

SEQ ID NO: 2835491 - DNA, 25 bp, Homo sapien
taacactgcaagaagtcttgagaaa

SEQ ID NO: 2835492 - DNA, 25 bp, Homo sapien
tcttgagaaaaagattattgtagtg

SEQ ID NO: 2835493 - DNA, 25 bp, Homo sapien
gaaaaagattattgtagtgttcaaa

SEQ ID NO: 2835494 - DNA, 25 bp, Homo sapien
caaagatcacatattctagtgtaac

SEQ ID NO: 2835495 - DNA, 25 bp, Homo sapien
aatcaccctggtgcattcctgcgag

SEQ ID NO: 2835496 - DNA, 25 bp, Homo sapien
taaccagggcttatgcaagaccagg

SEQ ID NO: 2835497 - DNA, 25 bp, Homo sapien
tatgtctcccaacgtgaaggtgtct

SEQ ID NO: 2835498 - DNA, 25 bp, Homo sapien
aacatactgggtagcggtgaggtcc

SEQ ID NO: 2835499 - DNA, 25 bp, Homo sapien
cctgcttaggtgtccaaatggctca

SEQ ID NO: 2835500 - DNA, 25 bp, Homo sapien
aatcttgggccaaaggacatgctct

SEQ ID NO: 2835501 - DNA, 25 bp, Homo sapien
tatgtcccgcattggaagtgtgtca

SEQ ID NO: 2835502 - DNA, 25 bp, Homo sapien
gtgtgtcaagcaagagcaccttcga

SEQ ID NO: 2835503 - DNA, 25 bp, Homo sapien
gcagaagttgatcttataatagcag

SEQ ID NO: 2835504 - DNA, 25 bp, Homo sapien
atagcaggaattggtagatgagaca

SEQ ID NO: 2835505 - DNA, 25 bp, Homo sapien
tgaggtggataaggtttttgcagaa

SEQ ID NO: 2835506 - DNA, 25 bp, Homo sapien
gctgctaaggatacttgaggtggat

SEQ ID NO: 2835507 - DNA, 25 bp, Homo sapien
gaagttatggttatgtcagcagcct

SEQ ID NO: 2835508 - DNA, 25 bp, Homo sapien
caagggatgatctgagcctgaacaa

SEQ ID NO: 2835509 - DNA, 25 bp, Homo sapien
gaaggcaaactactgtcaagggatg

SEQ ID NO: 2835510 - DNA, 25 bp, Homo sapien
taaagtactagctccagttaggcat

SEQ ID NO: 2835511 - DNA, 25 bp, Homo sapien
gtatcttgcattcatgatggatgct

SEQ ID NO: 2835512 - DNA, 25 bp, Homo sapien
tatcttgcattcatgatggatgctt

SEQ ID NO: 2835513 - DNA, 25 bp, Homo sapien
tgcaagtagtgtgaataattttctc

SEQ ID NO: 2835514 - DNA, 25 bp, Homo sapien
gcaagtagtgtgaataattttctcc

SEQ ID NO: 2835515 - DNA, 25 bp, Homo sapien
tacagtggtactccttgactgcagg

SEQ ID NO: 2835516 - DNA, 25 bp, Homo sapien
gcaagttgttttatttacaatgcca

SEQ ID NO: 2835517 - DNA, 25 bp, Homo sapien
agttgttttatttacaatgccaact

SEQ ID NO: 2835518 - DNA, 25 bp, Homo sapien
tacaatgccaacttttaaaaggtca

SEQ ID NO: 2835519 - DNA, 25 bp, Homo sapien
caatgccaacttttaaaaggtcact

SEQ ID NO: 2835520 - DNA, 25 bp, Homo sapien
ctggacaataaactaggcagacatt

SEQ ID NO: 2835521 - DNA, 25 bp, Homo sapien
gttaactggacaataaactaggcag

SEQ ID NO: 2835522 - DNA, 25 bp, Homo sapien
agttaactggacaataaactaggca

SEQ ID NO: 2835523 - DNA, 25 bp, Homo sapien
taactggacaataaactaggcagac

SEQ ID NO: 2835524 - DNA, 25 bp, Homo sapien
acttggccgtaaggtttgggatctg

SEQ ID NO: 2835525 - DNA, 25 bp, Homo sapien
gatctgtgctcaaactacacatgca

SEQ ID NO: 2835526 - DNA, 25 bp, Homo sapien
atactagaagaaacttggccgtaag

SEQ ID NO: 2835527 - DNA, 25 bp, Homo sapien
cgtaaggtttgggatctgtgctcaa

SEQ ID NO: 2835528 - DNA, 25 bp, Homo sapien
tcacaccactggttctctttgcgta

SEQ ID NO: 2835529 - DNA, 25 bp, Homo sapien
cttcacaccactggttctctttgcg

SEQ ID NO: 2835530 - DNA, 25 bp, Homo sapien
cacaccactggttctctttgcgtac

SEQ ID NO: 2835531 - DNA, 25 bp, Homo sapien
ctcttcacaccactggttctctttg

SEQ ID NO: 2835532 - DNA, 25 bp, Homo sapien
gctggcatgttataggtgttactcc

SEQ ID NO: 2835533 - DNA, 25 bp, Homo sapien
tgccctgctgaaattatgaacaaag

SEQ ID NO: 2835534 - DNA, 25 bp, Homo sapien
catcgatagccagtgagttgagtca

SEQ ID NO: 2835535 - DNA, 25 bp, Homo sapien
caccaggttaagactatatttccgg

SEQ ID NO: 2835536 - DNA, 25 bp, Homo sapien
aaagacaaaactgtgtgctacctac

SEQ ID NO: 2835537 - DNA, 25 bp, Homo sapien
tcaaagacaaaactgtgtgctacct

SEQ ID NO: 2835538 - DNA, 25 bp, Homo sapien
caaagacaaaactgtgtgctaccta

SEQ ID NO: 2835539 - DNA, 25 bp, Homo sapien
gtcttgcgaatctcctcaggagttt

SEQ ID NO: 2835540 - DNA, 25 bp, Homo sapien
tcttgcgaatctcctcaggagtttt

SEQ ID NO: 2835541 - DNA, 25 bp, Homo sapien
cttgcgaatctcctcaggagttttc

SEQ ID NO: 2835542 - DNA, 25 bp, Homo sapien
aggaggagggtcatccttgtggtgg

SEQ ID NO: 2835543 - DNA, 25 bp, Homo sapien
tcttggtcccaaacagggatatcat

SEQ ID NO: 2835544 - DNA, 25 bp, Homo sapien
tgtggtgggtgcaccactgaatgac

SEQ ID NO: 2835545 - DNA, 25 bp, Homo sapien
gggatatcatctgttcgcttttctt

SEQ ID NO: 2835546 - DNA, 25 bp, Homo sapien
caaataccctagacacatgtgtgag

SEQ ID NO: 2835547 - DNA, 25 bp, Homo sapien
ggacaatgactggaagatacctgca

SEQ ID NO: 2835548 - DNA, 25 bp, Homo sapien
gaggttgacttgagccattaacagc

SEQ ID NO: 2835549 - DNA, 25 bp, Homo sapien
tctgaatagccaaacataaggaacg

SEQ ID NO: 2835550 - DNA, 25 bp, Homo sapien
ccaagaaacattgccaggatccaaa

SEQ ID NO: 2835551 - DNA, 25 bp, Homo sapien
agccaagcaaagggttgtttgtttg

SEQ ID NO: 2835552 - DNA, 25 bp, Homo sapien
gaacaatttcaataaggaaaagcca

SEQ ID NO: 2835553 - DNA, 25 bp, Homo sapien
agaaacattgccaggatccaaaaaa

SEQ ID NO: 2835554 - DNA, 25 bp, Homo sapien
attgctgcattcacatttggtagag

SEQ ID NO: 2835555 - DNA, 25 bp, Homo sapien
cattcacatttggtagaggaactgg

SEQ ID NO: 2835556 - DNA, 25 bp, Homo sapien
ggtagaggaactgggtcatcatctc

SEQ ID NO: 2835557 - DNA, 25 bp, Homo sapien
ttaatattgctgcattcacatttgg

SEQ ID NO: 2835558 - DNA, 25 bp, Homo sapien
gctttcagactaaatgcacaagtag

SEQ ID NO: 2835559 - DNA, 25 bp, Homo sapien
tgtaccctggacctgaactaatcat

SEQ ID NO: 2835560 - DNA, 25 bp, Homo sapien
taaaacccataaccagagatactgc

SEQ ID NO: 2835561 - DNA, 25 bp, Homo sapien
caaagctggcatggtaagtcttcaa

SEQ ID NO: 2835562 - DNA, 25 bp, Homo sapien
tcttcattcaataggtacttgatga

SEQ ID NO: 2835563 - DNA, 25 bp, Homo sapien
tgccttttagggacacttggattgc

SEQ ID NO: 2835564 - DNA, 25 bp, Homo sapien
ttttttagtgagcacaacatactct

SEQ ID NO: 2835565 - DNA, 25 bp, Homo sapien
ctgccttttagggacacttggattg

SEQ ID NO: 2835566 - DNA, 25 bp, Homo sapien
gaaattaaccattgcctaaggcttg

SEQ ID NO: 2835567 - DNA, 25 bp, Homo sapien
tctatcactggaacttatgaattca

SEQ ID NO: 2835568 - DNA, 25 bp, Homo sapien
ttcagccaccattataggacggtat

SEQ ID NO: 2835569 - DNA, 25 bp, Homo sapien
gaaataaggtgttctattcagccac

SEQ ID NO: 2835570 - DNA, 25 bp, Homo sapien
taatgagagaacgaccctcactaat

SEQ ID NO: 2835571 - DNA, 25 bp, Homo sapien
catttaatgagagaacgaccctcac

SEQ ID NO: 2835572 - DNA, 25 bp, Homo sapien
tccatttaatgagagaacgaccctc

SEQ ID NO: 2835573 - DNA, 25 bp, Homo sapien
ttatccatttaatgagagaacgacc

SEQ ID NO: 2835574 - DNA, 25 bp, Homo sapien
tcatactctcaagcaccttatgaca

SEQ ID NO: 2835575 - DNA, 25 bp, Homo sapien
tattcacaaactatctcaaattaca

SEQ ID NO: 2835576 - DNA, 25 bp, Homo sapien
gacaggctgctgctcatataaattt

SEQ ID NO: 2835577 - DNA, 25 bp, Homo sapien
tgtaaactttacctcttcatactct

SEQ ID NO: 2835578 - DNA, 25 bp, Homo sapien
tcaacttcaaatatctctccatcag

SEQ ID NO: 2835579 - DNA, 25 bp, Homo sapien
caacatggtcttaatagtcacagat

SEQ ID NO: 2835580 - DNA, 25 bp, Homo sapien
cacagattgtttggcaatttccaca

SEQ ID NO: 2835581 - DNA, 25 bp, Homo sapien
gaactctgcaacttaattgaaggca

SEQ ID NO: 2835582 - DNA, 25 bp, Homo sapien
gaatactggactccatctgaacagt

SEQ ID NO: 2835583 - DNA, 25 bp, Homo sapien
tactaggaacagaagcttttaaggc

SEQ ID NO: 2835584 - DNA, 25 bp, Homo sapien
tacagtccatcagaaggctctaact

SEQ ID NO: 2835585 - DNA, 25 bp, Homo sapien
taactacatgcgaacctgaggaagg

SEQ ID NO: 2835586 - DNA, 25 bp, Homo sapien
gtacatcagaatatgctcatttatg

SEQ ID NO: 2835587 - DNA, 25 bp, Homo sapien
gagtacatcagaatatgctcattta

SEQ ID NO: 2835588 - DNA, 25 bp, Homo sapien
gttcagatccaaagagtacatcaga

SEQ ID NO: 2835589 - DNA, 25 bp, Homo sapien
tacatcagaatatgctcatttatgt

SEQ ID NO: 2835590 - DNA, 25 bp, Homo sapien
taataacctattacttgctctgaaa

SEQ ID NO: 2835591 - DNA, 25 bp, Homo sapien
gatctcttggcaagatctccataat

SEQ ID NO: 2835592 - DNA, 25 bp, Homo sapien
gataagcagatgtgagtacaattcc

SEQ ID NO: 2835593 - DNA, 25 bp, Homo sapien
cagattaattatgagtcgttaggaa

SEQ ID NO: 2835594 - DNA, 25 bp, Homo sapien
tatggcacctctgaagttttctagg

SEQ ID NO: 2835595 - DNA, 25 bp, Homo sapien
taaaaggcccatgcttctcaagtat

SEQ ID NO: 2835596 - DNA, 25 bp, Homo sapien
ctggtacagattaattcaaggcctc

SEQ ID NO: 2835597 - DNA, 25 bp, Homo sapien
tgagacaattgtcgccaaccccaaa

SEQ ID NO: 2835598 - DNA, 25 bp, Homo sapien
gcttgccaataatgcagttgtccct

SEQ ID NO: 2835599 - DNA, 25 bp, Homo sapien
gtgacaagaccacaacaaaaggtat

SEQ ID NO: 2835600 - DNA, 25 bp, Homo sapien
tccatgttgcttagcgcttgccaat

SEQ ID NO: 2835601 - DNA, 25 bp, Homo sapien
tagaggacccttcctgtgacaagac

SEQ ID NO: 2835602 - DNA, 25 bp, Homo sapien
caagataagtgcttagtcatagtca

SEQ ID NO: 2835603 - DNA, 25 bp, Homo sapien
taaatagcagctggtcaatcggtta

SEQ ID NO: 2835604 - DNA, 25 bp, Homo sapien
ttcgatgcacttggtaatactaaac

SEQ ID NO: 2835605 - DNA, 25 bp, Homo sapien
tcggttaatctgtaattcgatgcac

SEQ ID NO: 2835606 - DNA, 25 bp, Homo sapien
gcgccgtgaggacgcccggccagag

SEQ ID NO: 2835607 - DNA, 25 bp, Homo sapien
gtgaggacgcccggccagaggaggc

SEQ ID NO: 2835608 - DNA, 25 bp, Homo sapien
agcgccgtgaggacgcccggccaga

SEQ ID NO: 2835609 - DNA, 25 bp, Homo sapien
gccgtgaggacgcccggccagagga

SEQ ID NO: 2835610 - DNA, 25 bp, Homo sapien
ggcccaaaccgcagcggtgaggcca

SEQ ID NO: 2835611 - DNA, 25 bp, Homo sapien
ctggtagggtctcccgaagaacagg

SEQ ID NO: 2835612 - DNA, 25 bp, Homo sapien
aggccagccggcacgcaatccggta

SEQ ID NO: 2835613 - DNA, 25 bp, Homo sapien
aagaacagggtcgacaacgcgatcc

SEQ ID NO: 2835614 - DNA, 25 bp, Homo sapien
gacgagagccgggaggcgttagcga

SEQ ID NO: 2835615 - DNA, 25 bp, Homo sapien
ctgctttataggagagggcgcaggc

SEQ ID NO: 2835616 - DNA, 25 bp, Homo sapien
gaagccactacagcgtcgcagcgcg

SEQ ID NO: 2835617 - DNA, 25 bp, Homo sapien
aaaaccgaagacgaagccactacag

SEQ ID NO: 2835618 - DNA, 25 bp, Homo sapien
gaagtggccagattatatttctgct

SEQ ID NO: 2835619 - DNA, 25 bp, Homo sapien
aggaagtggccagattatatttctg

SEQ ID NO: 2835620 - DNA, 25 bp, Homo sapien
caggaagtggccagattatatttct

SEQ ID NO: 2835621 - DNA, 25 bp, Homo sapien
caggtcggacatcacctggatcctt

SEQ ID NO: 2835622 - DNA, 25 bp, Homo sapien
ggtcggacatcacctggatccttcc

SEQ ID NO: 2835623 - DNA, 25 bp, Homo sapien
aggtcggacatcacctggatccttc

SEQ ID NO: 2835624 - DNA, 25 bp, Homo sapien
taaagctcccctttgaccaggcctg

SEQ ID NO: 2835625 - DNA, 25 bp, Homo sapien
gaccttcactgcaaagggacttaca

SEQ ID NO: 2835626 - DNA, 25 bp, Homo sapien
tacattgcaagttggactcaacagc

SEQ ID NO: 2835627 - DNA, 25 bp, Homo sapien
tgtttggatatacctgaccttaaag

SEQ ID NO: 2835628 - DNA, 25 bp, Homo sapien
ttttctagacagtagtacttgtgca

SEQ ID NO: 2835629 - DNA, 25 bp, Homo sapien
caatctatttacaggacagcactgc

SEQ ID NO: 2835630 - DNA, 25 bp, Homo sapien
tgcctacaagccaacaatgctgtgt

SEQ ID NO: 2835631 - DNA, 25 bp, Homo sapien
tatagaaatcaccaggcatgcccaa

SEQ ID NO: 2835632 - DNA, 25 bp, Homo sapien
tgtacttaggaaacagcagtgaggt

SEQ ID NO: 2835633 - DNA, 25 bp, Homo sapien
ctataggcccatttctaagaacaca

SEQ ID NO: 2835634 - DNA, 25 bp, Homo sapien
ccactgaaacagagagtcgcacggt

SEQ ID NO: 2835635 - DNA, 25 bp, Homo sapien
gcctggctgtttttaaccctagatg

SEQ ID NO: 2835636 - DNA, 25 bp, Homo sapien
aaatcatgtctaggatactcaaccc

SEQ ID NO: 2835637 - DNA, 25 bp, Homo sapien
ggactatggtatgccaccaagcccg

SEQ ID NO: 2835638 - DNA, 25 bp, Homo sapien
taattgagacatcagttaacaccca

SEQ ID NO: 2835639 - DNA, 25 bp, Homo sapien
tactcaacccaagacatgagcacat

SEQ ID NO: 2835640 - DNA, 25 bp, Homo sapien
tgaaatgtagaaaccctaatggcct

SEQ ID NO: 2835641 - DNA, 25 bp, Homo sapien
tcaattctgatatcacaggaccgga

SEQ ID NO: 2835642 - DNA, 25 bp, Homo sapien
taagctatttgttcagtcggagaga

SEQ ID NO: 2835643 - DNA, 25 bp, Homo sapien
tttagatggccaaagcccggtcagt

SEQ ID NO: 2835644 - DNA, 25 bp, Homo sapien
tcttcgggtgaatgtacataagact

SEQ ID NO: 2835645 - DNA, 25 bp, Homo sapien
aagtgttcctgtttactctggtagg

SEQ ID NO: 2835646 - DNA, 25 bp, Homo sapien
caaagaacttgacacaggctaatgc

SEQ ID NO: 2835647 - DNA, 25 bp, Homo sapien
tggtttcactagtatcactcaaaga

SEQ ID NO: 2835648 - DNA, 25 bp, Homo sapien
acaattaagtcttactgaagcagca

SEQ ID NO: 2835649 - DNA, 25 bp, Homo sapien
tcctgaagttaatctgaagaatgtc

SEQ ID NO: 2835650 - DNA, 25 bp, Homo sapien
ttaagtcttactgaagcagcacaga

SEQ ID NO: 2835651 - DNA, 25 bp, Homo sapien
aatcctgaagttaatctgaagaatg

SEQ ID NO: 2835652 - DNA, 25 bp, Homo sapien
tacctacaagtctacaaattctaaa

SEQ ID NO: 2835653 - DNA, 25 bp, Homo sapien
gtctacaaattctaaaatttactca

SEQ ID NO: 2835654 - DNA, 25 bp, Homo sapien
tttacctacaagtctacaaattcta

SEQ ID NO: 2835655 - DNA, 25 bp, Homo sapien
tctacaaattctaaaatttactcaa

SEQ ID NO: 2835656 - DNA, 25 bp, Homo sapien
ttaataaacagcaccagtcttgccc

SEQ ID NO: 2835657 - DNA, 25 bp, Homo sapien
aaacagcaccagtcttgcccattga

SEQ ID NO: 2835658 - DNA, 25 bp, Homo sapien
aataaacagcaccagtcttgcccat

SEQ ID NO: 2835659 - DNA, 25 bp, Homo sapien
taaacagcaccagtcttgcccattg

SEQ ID NO: 2835660 - DNA, 25 bp, Homo sapien
cagtcacatcgtcttacaggaaggg

SEQ ID NO: 2835661 - DNA, 25 bp, Homo sapien
caaaactcacaagtagaagggaggc

SEQ ID NO: 2835662 - DNA, 25 bp, Homo sapien
tggttcattctaaagtggtcacggc

SEQ ID NO: 2835663 - DNA, 25 bp, Homo sapien
caaatagcgctatgccagaaactgg

SEQ ID NO: 2835664 - DNA, 25 bp, Homo sapien
taacatgtggctcgcctctacgagg

SEQ ID NO: 2835665 - DNA, 25 bp, Homo sapien
tacgacgagtaacatgtggctcgcc

SEQ ID NO: 2835666 - DNA, 25 bp, Homo sapien
cctctacgaggtgctgggtcaaact

SEQ ID NO: 2835667 - DNA, 25 bp, Homo sapien
tagtctggggtacgacgagtaacat

SEQ ID NO: 2835668 - DNA, 25 bp, Homo sapien
gaaaatgttcaggtagaattactta

SEQ ID NO: 2835669 - DNA, 25 bp, Homo sapien
agaaaatgttcaggtagaattactt

SEQ ID NO: 2835670 - DNA, 25 bp, Homo sapien
tccggtcatggcaccagttatatcc

SEQ ID NO: 2835671 - DNA, 25 bp, Homo sapien
ggagcactgaaaatcgttactacat

SEQ ID NO: 2835672 - DNA, 25 bp, Homo sapien
gattgcagcttggttaccacaacga

SEQ ID NO: 2835673 - DNA, 25 bp, Homo sapien
tattttagagtatcgtcaagttcca

SEQ ID NO: 2835674 - DNA, 25 bp, Homo sapien
tctggatgacttaataatctcctgt

SEQ ID NO: 2835675 - DNA, 25 bp, Homo sapien
tccctcaattcaactaaatgttact

SEQ ID NO: 2835676 - DNA, 25 bp, Homo sapien
aaatgttacttcactcaagagagaa

SEQ ID NO: 2835677 - DNA, 25 bp, Homo sapien
caacctgtaaggtacacatgtattt

SEQ ID NO: 2835678 - DNA, 25 bp, Homo sapien
tcctcgaggagatataccccaacca

SEQ ID NO: 2835679 - DNA, 25 bp, Homo sapien
tatcttgcccaaaggtgtaaccagc

SEQ ID NO: 2835680 - DNA, 25 bp, Homo sapien
tgagctctagacaccaacgtgaggc

SEQ ID NO: 2835681 - DNA, 25 bp, Homo sapien
tccatcactagctggtgagctctag

SEQ ID NO: 2835682 - DNA, 25 bp, Homo sapien
gtgtatctatagatggcgagagacc

SEQ ID NO: 2835683 - DNA, 25 bp, Homo sapien
gggaacttcttgtaggcgatcaagt

SEQ ID NO: 2835684 - DNA, 25 bp, Homo sapien
gatggcgagagaccaccatgtagac

SEQ ID NO: 2835685 - DNA, 25 bp, Homo sapien
gatcaagtgctctgatatgatccag

SEQ ID NO: 2835686 - DNA, 25 bp, Homo sapien
tgcccatccaccaaggcagtgagag

SEQ ID NO: 2835687 - DNA, 25 bp, Homo sapien
ttcatcatagaaaccataaacttgt

SEQ ID NO: 2835688 - DNA, 25 bp, Homo sapien
tggtgatgcgttcacggtaacgaac

SEQ ID NO: 2835689 - DNA, 25 bp, Homo sapien
tgattccctcgaagaatggtgatgc

SEQ ID NO: 2835690 - DNA, 25 bp, Homo sapien
taattgttggatcacctggtaacgt

SEQ ID NO: 2835691 - DNA, 25 bp, Homo sapien
tgaactggcaattatgttactgagg

SEQ ID NO: 2835692 - DNA, 25 bp, Homo sapien
gaggctcacccatgttctggcatag

SEQ ID NO: 2835693 - DNA, 25 bp, Homo sapien
gggtgtttgcccacctcatctcaac

SEQ ID NO: 2835694 - DNA, 25 bp, Homo sapien
ggtattcttttgctaaggctgccac

SEQ ID NO: 2835695 - DNA, 25 bp, Homo sapien
catcagagaataggtggcttaaaca

SEQ ID NO: 2835696 - DNA, 25 bp, Homo sapien
ggctgccacaacaaagcatcagaga

SEQ ID NO: 2835697 - DNA, 25 bp, Homo sapien
caaatgcagtggagtagctcaccgc

SEQ ID NO: 2835698 - DNA, 25 bp, Homo sapien
cccaatttactgaactaaaatatct

SEQ ID NO: 2835699 - DNA, 25 bp, Homo sapien
attatagccacgagccaccgtgacc

SEQ ID NO: 2835700 - DNA, 25 bp, Homo sapien
cccaagttagagtgtagggtggcaa

SEQ ID NO: 2835701 - DNA, 25 bp, Homo sapien
aatatgctcactttgtcctgtcctc

SEQ ID NO: 2835702 - DNA, 25 bp, Homo sapien
tcaacataatctcccataaacaagt

SEQ ID NO: 2835703 - DNA, 25 bp, Homo sapien
tcctctgtcaacataatctcccata

SEQ ID NO: 2835704 - DNA, 25 bp, Homo sapien
aaacaagtaatttgtatctggtgat

SEQ ID NO: 2835705 - DNA, 25 bp, Homo sapien
cataatctcccataaacaagtaatt

SEQ ID NO: 2835706 - DNA, 25 bp, Homo sapien
atcgaacctcttgcacgttggattc

SEQ ID NO: 2835707 - DNA, 25 bp, Homo sapien
ctcttgcacgttggattcttttgtc

SEQ ID NO: 2835708 - DNA, 25 bp, Homo sapien
tgcacgttggattcttttgtcagga

SEQ ID NO: 2835709 - DNA, 25 bp, Homo sapien
tcgaacctcttgcacgttggattct

SEQ ID NO: 2835710 - DNA, 25 bp, Homo sapien
tcttcccacctcagtagtggggacc

SEQ ID NO: 2835711 - DNA, 25 bp, Homo sapien
agacggggtctcacgtgatcctcca

SEQ ID NO: 2835712 - DNA, 25 bp, Homo sapien
cactgtagcctggatcttcttggct

SEQ ID NO: 2835713 - DNA, 25 bp, Homo sapien
cctggatcttcttggctcaggaatc

SEQ ID NO: 2835714 - DNA, 25 bp, Homo sapien
tgtgagaaaatcatttgctcaacca

SEQ ID NO: 2835715 - DNA, 25 bp, Homo sapien
gtgagaaaatcatttgctcaaccat

SEQ ID NO: 2835716 - DNA, 25 bp, Homo sapien
ctgtgagaaaatcatttgctcaacc

SEQ ID NO: 2835717 - DNA, 25 bp, Homo sapien
tggaggcagagtattcccctgacca

SEQ ID NO: 2835718 - DNA, 25 bp, Homo sapien
tatacagtagaagcaaccatccctc

SEQ ID NO: 2835719 - DNA, 25 bp, Homo sapien
tgtcaatctagaaaagccaaccaga

SEQ ID NO: 2835720 - DNA, 25 bp, Homo sapien
gaaacaatattgttcagcagcctgc

SEQ ID NO: 2835721 - DNA, 25 bp, Homo sapien
tccagagcctccagacctttagcaa

SEQ ID NO: 2835722 - DNA, 25 bp, Homo sapien
cagagcctccagacctttagcaacc

SEQ ID NO: 2835723 - DNA, 25 bp, Homo sapien
gagcctccagacctttagcaaccat

SEQ ID NO: 2835724 - DNA, 25 bp, Homo sapien
ctccagagcctccagacctttagca

SEQ ID NO: 2835725 - DNA, 25 bp, Homo sapien
tcagccaggtaagatggcacaggcc

SEQ ID NO: 2835726 - DNA, 25 bp, Homo sapien
ggctgtggcatgagaattattggaa

SEQ ID NO: 2835727 - DNA, 25 bp, Homo sapien
gtggcatgagaattattggaaccca

SEQ ID NO: 2835728 - DNA, 25 bp, Homo sapien
ctgtggcatgagaattattggaacc

SEQ ID NO: 2835729 - DNA, 25 bp, Homo sapien
cttacttataattgactggcatctc

SEQ ID NO: 2835730 - DNA, 25 bp, Homo sapien
tggcatctcattttgtgtcctaaag

SEQ ID NO: 2835731 - DNA, 25 bp, Homo sapien
gggattacagggcaaaatagcatta

SEQ ID NO: 2835732 - DNA, 25 bp, Homo sapien
gcccttctaaatagacctatacgtg

SEQ ID NO: 2835733 - DNA, 25 bp, Homo sapien
tattacaagtggtttcgggtgggca

SEQ ID NO: 2835734 - DNA, 25 bp, Homo sapien
caaatcttaggacttgggtactcca

SEQ ID NO: 2835735 - DNA, 25 bp, Homo sapien
taaaagtctgattattggccgggcg

SEQ ID NO: 2835736 - DNA, 25 bp, Homo sapien
gattatgccattcaacagcaaggcc

SEQ ID NO: 2835737 - DNA, 25 bp, Homo sapien
actacattttgcaggcctttggcca

SEQ ID NO: 2835738 - DNA, 25 bp, Homo sapien
taagttacttgatcaccaccggcac

SEQ ID NO: 2835739 - DNA, 25 bp, Homo sapien
tgcaagagggactggccaactggtc

SEQ ID NO: 2835740 - DNA, 25 bp, Homo sapien
ggttgacagctttctcaggcaagga

SEQ ID NO: 2835741 - DNA, 25 bp, Homo sapien
tgccataaaacagggccacaccaga

SEQ ID NO: 2835742 - DNA, 25 bp, Homo sapien
tgagatagggaacatatttgctgcc

SEQ ID NO: 2835743 - DNA, 25 bp, Homo sapien
catgagatagggaacatatttgctg

SEQ ID NO: 2835744 - DNA, 25 bp, Homo sapien
ctgccataaaacagggccacaccag

SEQ ID NO: 2835745 - DNA, 25 bp, Homo sapien
tatgtagctttcacccagagatgcc

SEQ ID NO: 2835746 - DNA, 25 bp, Homo sapien
aaataatgtcttggccaggcgcgct

SEQ ID NO: 2835747 - DNA, 25 bp, Homo sapien
gcagcgcaagcaatggagatttacc

SEQ ID NO: 2835748 - DNA, 25 bp, Homo sapien
ctgggatacggcctaacaagactgc

SEQ ID NO: 2835749 - DNA, 25 bp, Homo sapien
ggcggcaaccaatccctgcgcggga

SEQ ID NO: 2835750 - DNA, 25 bp, Homo sapien
gtcgttaggaagccgccgccggcca

SEQ ID NO: 2835751 - DNA, 25 bp, Homo sapien
caaccaatccctgcgcgggaggcag

SEQ ID NO: 2835752 - DNA, 25 bp, Homo sapien
ggatgggcgccggtctcggagactc

SEQ ID NO: 2835753 - DNA, 25 bp, Homo sapien
tgtccgcagccgtactacagctcac

SEQ ID NO: 2835754 - DNA, 25 bp, Homo sapien
cccgcggcggctgtccgcagccgta

SEQ ID NO: 2835755 - DNA, 25 bp, Homo sapien
gcggctgtccgcagccgtactacag

SEQ ID NO: 2835756 - DNA, 25 bp, Homo sapien
gcggcggctgtccgcagccgtacta

SEQ ID NO: 2835757 - DNA, 25 bp, Homo sapien
cttctcgcagaggctcttgacctgg

SEQ ID NO: 2835758 - DNA, 25 bp, Homo sapien
agaggctcttgacctgggactcgga

SEQ ID NO: 2835759 - DNA, 25 bp, Homo sapien
tcgcagaggctcttgacctgggact

SEQ ID NO: 2835760 - DNA, 25 bp, Homo sapien
gaggctcttgacctgggactcggac

SEQ ID NO: 2835761 - DNA, 25 bp, Homo sapien
agctccttggtgaacaccttctcgt

SEQ ID NO: 2835762 - DNA, 25 bp, Homo sapien
tcgatccactggtccagctccttgg

SEQ ID NO: 2835763 - DNA, 25 bp, Homo sapien
tccttggtgaacaccttctcgtcca

SEQ ID NO: 2835764 - DNA, 25 bp, Homo sapien
agctgcttgcactcgttcagctgct

SEQ ID NO: 2835765 - DNA, 25 bp, Homo sapien
tcctccgctcgctgaggctccagag

SEQ ID NO: 2835766 - DNA, 25 bp, Homo sapien
cgctggctctcaccgcagtactcgg

SEQ ID NO: 2835767 - DNA, 25 bp, Homo sapien
agtactcggccgtcggccgctgcgc

SEQ ID NO: 2835768 - DNA, 25 bp, Homo sapien
tcgtgtacttctggcggctgttgag

SEQ ID NO: 2835769 - DNA, 25 bp, Homo sapien
cgtggtgacgtcacgcccggcgtca

SEQ ID NO: 2835770 - DNA, 25 bp, Homo sapien
tcaaagcgcaggcgcgacgtagccg

SEQ ID NO: 2835771 - DNA, 25 bp, Homo sapien
gagcaagctgcgcaactgcagagcc

SEQ ID NO: 2835772 - DNA, 25 bp, Homo sapien
cacgaccggagttggggcgcaaact

SEQ ID NO: 2835773 - DNA, 25 bp, Homo sapien
tctgaaaagggtgccatagttgaaa

SEQ ID NO: 2835774 - DNA, 25 bp, Homo sapien
aatgaagtcctgagcagtcaaaatc

SEQ ID NO: 2835775 - DNA, 25 bp, Homo sapien
taccaaggccttttatgccccagaa

SEQ ID NO: 2835776 - DNA, 25 bp, Homo sapien
tcaaaatcttagtggctttggccat

SEQ ID NO: 2835777 - DNA, 25 bp, Homo sapien
cagctgggaagattcagcctgagga

SEQ ID NO: 2835778 - DNA, 25 bp, Homo sapien
tctcagctccaagctgtctagggac

SEQ ID NO: 2835779 - DNA, 25 bp, Homo sapien
tgtttacagagtctatgggtcagga

SEQ ID NO: 2835780 - DNA, 25 bp, Homo sapien
ttcacaactgggagctagaagcagc

SEQ ID NO: 2835781 - DNA, 25 bp, Homo sapien
ttacatagcagcttaggtctacaaa

SEQ ID NO: 2835782 - DNA, 25 bp, Homo sapien
tgctgaccacagcgcctacacatgg

SEQ ID NO: 2835783 - DNA, 25 bp, Homo sapien
cagcttaggtctacaaatgcaagtg

SEQ ID NO: 2835784 - DNA, 25 bp, Homo sapien
cttaggtctacaaatgcaagtgttc

SEQ ID NO: 2835785 - DNA, 25 bp, Homo sapien
ccaaaagagcacgtagggtgggcaa

SEQ ID NO: 2835786 - DNA, 25 bp, Homo sapien
cagccaggaaagatgttgcaaacaa

SEQ ID NO: 2835787 - DNA, 25 bp, Homo sapien
ccccattggagattaggaccatcag

SEQ ID NO: 2835788 - DNA, 25 bp, Homo sapien
tagagtagcaaagttccaaaagagc

SEQ ID NO: 2835789 - DNA, 25 bp, Homo sapien
gcactttatacatgggcagacaaca

SEQ ID NO: 2835790 - DNA, 25 bp, Homo sapien
tttatgtgcgttccacaggaactgg

SEQ ID NO: 2835791 - DNA, 25 bp, Homo sapien
cgatcagtgccatattgcaagagca

SEQ ID NO: 2835792 - DNA, 25 bp, Homo sapien
catgggcagacaacacagtttatgt

SEQ ID NO: 2835793 - DNA, 25 bp, Homo sapien
cattggcttctactccatgtgaatc

SEQ ID NO: 2835794 - DNA, 25 bp, Homo sapien
tcagcattggcttctactccatgtg

SEQ ID NO: 2835795 - DNA, 25 bp, Homo sapien
gcttctactccatgtgaatccagag

SEQ ID NO: 2835796 - DNA, 25 bp, Homo sapien
tggcttctactccatgtgaatccag

SEQ ID NO: 2835797 - DNA, 25 bp, Homo sapien
cggctcctgtagctcattgcaaggt

SEQ ID NO: 2835798 - DNA, 25 bp, Homo sapien
atcttgaagaatcggctcctgtagc

SEQ ID NO: 2835799 - DNA, 25 bp, Homo sapien
cctgtagctcattgcaaggtctcat

SEQ ID NO: 2835800 - DNA, 25 bp, Homo sapien
ttttatcttgaagaatcggctcctg

SEQ ID NO: 2835801 - DNA, 25 bp, Homo sapien
ccttgggctcaggtcatcctaccac

SEQ ID NO: 2835802 - DNA, 25 bp, Homo sapien
tgcaggggtgtcatcacagctccat

SEQ ID NO: 2835803 - DNA, 25 bp, Homo sapien
ctcagcctccttgggctcaggtcat

SEQ ID NO: 2835804 - DNA, 25 bp, Homo sapien
gtgcaggggtgtcatcacagctcca

SEQ ID NO: 2835805 - DNA, 25 bp, Homo sapien
gtggcgcgtgcctgtaatcccagct

SEQ ID NO: 2835806 - DNA, 25 bp, Homo sapien
atacaaacaaaattaactgggtatg

SEQ ID NO: 2835807 - DNA, 25 bp, Homo sapien
acgagaattgcttgaatccaagagg

SEQ ID NO: 2835808 - DNA, 25 bp, Homo sapien
actcgggaggctgaggcacgagaat

SEQ ID NO: 2835809 - DNA, 25 bp, Homo sapien
gcttatcagtttgagtactccaaaa

SEQ ID NO: 2835810 - DNA, 25 bp, Homo sapien
gaagctaggagaatcatataattgc

SEQ ID NO: 2835811 - DNA, 25 bp, Homo sapien
tttcatcctatatatggcttatcag

SEQ ID NO: 2835812 - DNA, 25 bp, Homo sapien
ccaagaagagggttctaagagatta

SEQ ID NO: 2835813 - DNA, 25 bp, Homo sapien
gttctattatgtcaacagagtcaag

SEQ ID NO: 2835814 - DNA, 25 bp, Homo sapien
aatgttgatttgtctatattctcct

SEQ ID NO: 2835815 - DNA, 25 bp, Homo sapien
tatcatgtgcttgttttatcaacta

SEQ ID NO: 2835816 - DNA, 25 bp, Homo sapien
caactattgaaaggttgtgttaaat

SEQ ID NO: 2835817 - DNA, 25 bp, Homo sapien
tgttagagtaagtcaagtaggcctg

SEQ ID NO: 2835818 - DNA, 25 bp, Homo sapien
gaagagtccaggtcacgcaaggaag

SEQ ID NO: 2835819 - DNA, 25 bp, Homo sapien
taaacaatggaatatgggaacctag

SEQ ID NO: 2835820 - DNA, 25 bp, Homo sapien
taagaggtaactagcatcacaaagc

SEQ ID NO: 2835821 - DNA, 25 bp, Homo sapien
aactcacatcacacttctattgtag

SEQ ID NO: 2835822 - DNA, 25 bp, Homo sapien
tctattgtagataaataaaacggga

SEQ ID NO: 2835823 - DNA, 25 bp, Homo sapien
taaaacgggaagagttgtcatcttg

SEQ ID NO: 2835824 - DNA, 25 bp, Homo sapien
tgtattttttggactatgtaaaaga

SEQ ID NO: 2835825 - DNA, 25 bp, Homo sapien
aattcttcccctcgcaatggccatc

SEQ ID NO: 2835826 - DNA, 25 bp, Homo sapien
ttcttcccctcgcaatggccatctc

SEQ ID NO: 2835827 - DNA, 25 bp, Homo sapien
attcttcccctcgcaatggccatct

SEQ ID NO: 2835828 - DNA, 25 bp, Homo sapien
tcttcccctcgcaatggccatctcc

SEQ ID NO: 2835829 - DNA, 25 bp, Homo sapien
cttcctttcagtttgtgcatttcct

SEQ ID NO: 2835830 - DNA, 25 bp, Homo sapien
cctttcagtttgtgcatttcctgta

SEQ ID NO: 2835831 - DNA, 25 bp, Homo sapien
tactctacatctggcaagttcttct

SEQ ID NO: 2835832 - DNA, 25 bp, Homo sapien
ctactctacatctggcaagttcttc

SEQ ID NO: 2835833 - DNA, 25 bp, Homo sapien
gtgaaaataggacagcaggcagaca

SEQ ID NO: 2835834 - DNA, 25 bp, Homo sapien
gcagacagcagagataagggaataa

SEQ ID NO: 2835835 - DNA, 25 bp, Homo sapien
aatatttgtgaaaataggacagcag

SEQ ID NO: 2835836 - DNA, 25 bp, Homo sapien
gatagttagctgagagcaaatattt

SEQ ID NO: 2835837 - DNA, 25 bp, Homo sapien
tacactgagtcaagtcctctaaaca

SEQ ID NO: 2835838 - DNA, 25 bp, Homo sapien
tcctctaaacaacatgccttagtaa

SEQ ID NO: 2835839 - DNA, 25 bp, Homo sapien
aataactaaatttatacactgagtc

SEQ ID NO: 2835840 - DNA, 25 bp, Homo sapien
catgccttagtaaaagctatataca

SEQ ID NO: 2835841 - DNA, 25 bp, Homo sapien
tgattttgatccacgttaagtaaag

SEQ ID NO: 2835842 - DNA, 25 bp, Homo sapien
tggtatcttagatgactctgttttc

SEQ ID NO: 2835843 - DNA, 25 bp, Homo sapien
aaagttggtatcttagatgactctg

SEQ ID NO: 2835844 - DNA, 25 bp, Homo sapien
ttgattttgatccacgttaagtaaa

SEQ ID NO: 2835845 - DNA, 25 bp, Homo sapien
cactgtgacctgttcgctcattaaa

SEQ ID NO: 2835846 - DNA, 25 bp, Homo sapien
tcgctcattaaatatacccttctcc

SEQ ID NO: 2835847 - DNA, 25 bp, Homo sapien
tcctgtcagatctggaaaaattcag

SEQ ID NO: 2835848 - DNA, 25 bp, Homo sapien
tttcctgtcagatctggaaaaattc

SEQ ID NO: 2835849 - DNA, 25 bp, Homo sapien
gcataacttgtccaatagattgtga

SEQ ID NO: 2835850 - DNA, 25 bp, Homo sapien
tagattgtgaagaagtgcgtctctt

SEQ ID NO: 2835851 - DNA, 25 bp, Homo sapien
gaagaagtgcgtctcttttttgctc

SEQ ID NO: 2835852 - DNA, 25 bp, Homo sapien
tcctcttgcctgctattaggcataa

SEQ ID NO: 2835853 - DNA, 25 bp, Homo sapien
caagaagacattagtgaaaatttaa

SEQ ID NO: 2835854 - DNA, 25 bp, Homo sapien
tggcccattatacagctttaatttc

SEQ ID NO: 2835855 - DNA, 25 bp, Homo sapien
ggcccattatacagctttaatttca

SEQ ID NO: 2835856 - DNA, 25 bp, Homo sapien
tatgaacacgattctttgaaatacc

SEQ ID NO: 2835857 - DNA, 25 bp, Homo sapien
catacagacactatgaacacgattc

SEQ ID NO: 2835858 - DNA, 25 bp, Homo sapien
tgtatctggagacataggatgaaca

SEQ ID NO: 2835859 - DNA, 25 bp, Homo sapien
caagccattacagttagtgctggga

SEQ ID NO: 2835860 - DNA, 25 bp, Homo sapien
tggcattgtcacagaacctccgcaa

SEQ ID NO: 2835861 - DNA, 25 bp, Homo sapien
tttgcagccatcaaattactgttag

SEQ ID NO: 2835862 - DNA, 25 bp, Homo sapien
ttttttggttctgagatatctcctc

SEQ ID NO: 2835863 - DNA, 25 bp, Homo sapien
tgtcattagagtctaactataatat

SEQ ID NO: 2835864 - DNA, 25 bp, Homo sapien
aaatctgagtcatcataacagttat

SEQ ID NO: 2835865 - DNA, 25 bp, Homo sapien
ctggaatagatacatccaaaatctg

SEQ ID NO: 2835866 - DNA, 25 bp, Homo sapien
tagatacatccaaaatctgagtcat

SEQ ID NO: 2835867 - DNA, 25 bp, Homo sapien
cccaaaactgaactacttagcagtg

SEQ ID NO: 2835868 - DNA, 25 bp, Homo sapien
ctgaactacttagcagtgtattggt

SEQ ID NO: 2835869 - DNA, 25 bp, Homo sapien
tttcccaaaactgaactacttagca

SEQ ID NO: 2835870 - DNA, 25 bp, Homo sapien
tgaactacttagcagtgtattggta

SEQ ID NO: 2835871 - DNA, 25 bp, Homo sapien
tatcctgtcagcaggatcaatttgt

SEQ ID NO: 2835872 - DNA, 25 bp, Homo sapien
tgcaaaagatcactagatgatatcc

SEQ ID NO: 2835873 - DNA, 25 bp, Homo sapien
ctagtaaaatactcatgatgcaaaa

SEQ ID NO: 2835874 - DNA, 25 bp, Homo sapien
ttcaataaatccatctctagtaaaa

SEQ ID NO: 2835875 - DNA, 25 bp, Homo sapien
caaaaatggggctcttggaaaagat

SEQ ID NO: 2835876 - DNA, 25 bp, Homo sapien
ttctgcaagtgaggtgacaaattgc

SEQ ID NO: 2835877 - DNA, 25 bp, Homo sapien
tattctgcaagtgaggtgacaaatt

SEQ ID NO: 2835878 - DNA, 25 bp, Homo sapien
actaccccagcaaaaatggggctct

SEQ ID NO: 2835879 - DNA, 25 bp, Homo sapien
tcagaactactaggaagatagggat

SEQ ID NO: 2835880 - DNA, 25 bp, Homo sapien
ggagtaaatccaaatcagaactact

SEQ ID NO: 2835881 - DNA, 25 bp, Homo sapien
tctcaatgatcatacagcccaaagc

SEQ ID NO: 2835882 - DNA, 25 bp, Homo sapien
ggccatctcaatgatcatacagccc

SEQ ID NO: 2835883 - DNA, 25 bp, Homo sapien
ttacaactacgtcaataataacatt

SEQ ID NO: 2835884 - DNA, 25 bp, Homo sapien
aaatggcagatgtaattacaactac

SEQ ID NO: 2835885 - DNA, 25 bp, Homo sapien
tggcagatgtaattacaactacgtc

SEQ ID NO: 2835886 - DNA, 25 bp, Homo sapien
gatgtaattacaactacgtcaataa

SEQ ID NO: 2835887 - DNA, 25 bp, Homo sapien
gctgcagtgatccgagatcacacca

SEQ ID NO: 2835888 - DNA, 25 bp, Homo sapien
gatcacttaagctggggaagtcaag

SEQ ID NO: 2835889 - DNA, 25 bp, Homo sapien
gaggatcacttaagctggggaagtc

SEQ ID NO: 2835890 - DNA, 25 bp, Homo sapien
ctgcattccagcctgagcaacagag

SEQ ID NO: 2835891 - DNA, 25 bp, Homo sapien
ttttatgtgatttgggtaggtagtg

SEQ ID NO: 2835892 - DNA, 25 bp, Homo sapien
tgtgatttgggtaggtagtggaaaa

SEQ ID NO: 2835893 - DNA, 25 bp, Homo sapien
aggtagtggaaaattacagtcaaag

SEQ ID NO: 2835894 - DNA, 25 bp, Homo sapien
ggtaggtagtggaaaattacagtca

SEQ ID NO: 2835895 - DNA, 25 bp, Homo sapien
tgagagctgagtgagcgtagcagta

SEQ ID NO: 2835896 - DNA, 25 bp, Homo sapien
gccagcaatgcaggtacctaaagga

SEQ ID NO: 2835897 - DNA, 25 bp, Homo sapien
tagcagtagccagcaatgcaggtac

SEQ ID NO: 2835898 - DNA, 25 bp, Homo sapien
acctaaaggatctgttatgttacct

SEQ ID NO: 2835899 - DNA, 25 bp, Homo sapien
ttaatactaattcgggagctctata

SEQ ID NO: 2835900 - DNA, 25 bp, Homo sapien
tatcttttaatactaattcgggagc

SEQ ID NO: 2835901 - DNA, 25 bp, Homo sapien
ccataagaagtatcttttaatacta

SEQ ID NO: 2835902 - DNA, 25 bp, Homo sapien
tcttttaatactaattcgggagctc

SEQ ID NO: 2835903 - DNA, 25 bp, Homo sapien
tccccaggagctgctagtgttcgtg

SEQ ID NO: 2835904 - DNA, 25 bp, Homo sapien
tagtccgtataaatgtccccaggag

SEQ ID NO: 2835905 - DNA, 25 bp, Homo sapien
cagagcttagtaattcctgactggg

SEQ ID NO: 2835906 - DNA, 25 bp, Homo sapien
tagtgttcgtgcaaaaccaaaatca

SEQ ID NO: 2835907 - DNA, 25 bp, Homo sapien
tgtgcctgacacagtttaaatgctt

SEQ ID NO: 2835908 - DNA, 25 bp, Homo sapien
gattgtgcacgatgcctgatgccca

SEQ ID NO: 2835909 - DNA, 25 bp, Homo sapien
tgtgagctactatagccagcctacc

SEQ ID NO: 2835910 - DNA, 25 bp, Homo sapien
gttgattgaggaggagcaccgtcat

SEQ ID NO: 2835911 - DNA, 25 bp, Homo sapien
gattgaccaggttttcgtgatgaaa

SEQ ID NO: 2835912 - DNA, 25 bp, Homo sapien
gaagaggtattttctaagtcgctta

SEQ ID NO: 2835913 - DNA, 25 bp, Homo sapien
tctagtccatgacaataatgttgta

SEQ ID NO: 2835914 - DNA, 25 bp, Homo sapien
gtcaattgctcgaaggatctggaag

SEQ ID NO: 2835915 - DNA, 25 bp, Homo sapien
aaattactggtttcctgtccagtct

SEQ ID NO: 2835916 - DNA, 25 bp, Homo sapien
agaagatccattcagggatgaggaa

SEQ ID NO: 2835917 - DNA, 25 bp, Homo sapien
tgaataagcattgtagaagatccat

SEQ ID NO: 2835918 - DNA, 25 bp, Homo sapien
ccatattaatcctctacttaaggaa

SEQ ID NO: 2835919 - DNA, 25 bp, Homo sapien
gcattttagcaagggtcctcagaca

SEQ ID NO: 2835920 - DNA, 25 bp, Homo sapien
tctgcacaatagtggtagattaaaa

SEQ ID NO: 2835921 - DNA, 25 bp, Homo sapien
taattgaactcctaacagacctatt

SEQ ID NO: 2835922 - DNA, 25 bp, Homo sapien
tacactgaattcaaaaccttcacga

SEQ ID NO: 2835923 - DNA, 25 bp, Homo sapien
tgttgacagattgttctggtctctc

SEQ ID NO: 2835924 - DNA, 25 bp, Homo sapien
ctctcatcgcaattttgttgacaga

SEQ ID NO: 2835925 - DNA, 25 bp, Homo sapien
taatggccactatctgcccagtatt

SEQ ID NO: 2835926 - DNA, 25 bp, Homo sapien
tttcatgactgttccgtaacttccc

SEQ ID NO: 2835927 - DNA, 25 bp, Homo sapien
tatagaaataaagaaagaaaatgga

SEQ ID NO: 2835928 - DNA, 25 bp, Homo sapien
caaaccacacgtcttaggatgccgg

SEQ ID NO: 2835929 - DNA, 25 bp, Homo sapien
ggtcatgcccatcaacactgagact

SEQ ID NO: 2835930 - DNA, 25 bp, Homo sapien
gggtactcctgctgtctcggtcatg

SEQ ID NO: 2835931 - DNA, 25 bp, Homo sapien
ataggttcccgcactactgcagtcg

SEQ ID NO: 2835932 - DNA, 25 bp, Homo sapien
tggagccaccgaacactgatactac

SEQ ID NO: 2835933 - DNA, 25 bp, Homo sapien
agttgctgcgttctagactcgtgcg

SEQ ID NO: 2835934 - DNA, 25 bp, Homo sapien
tctgcgtagttccagtggagccacc

SEQ ID NO: 2835935 - DNA, 25 bp, Homo sapien
ccattctgtggtcccgctggtctgg

SEQ ID NO: 2835936 - DNA, 25 bp, Homo sapien
cggtcaagatggttcttaaatcaaa

SEQ ID NO: 2835937 - DNA, 25 bp, Homo sapien
aaacttttcttgaacacttgccata

SEQ ID NO: 2835938 - DNA, 25 bp, Homo sapien
caccgcccccggtcaagatggttct

SEQ ID NO: 2835939 - DNA, 25 bp, Homo sapien
ttcttgaacacttgccatatgcctt

SEQ ID NO: 2835940 - DNA, 25 bp, Homo sapien
taataagccactgaaccaaccagag

SEQ ID NO: 2835941 - DNA, 25 bp, Homo sapien
ggtagcttcaaggaaccatttcagg

SEQ ID NO: 2835942 - DNA, 25 bp, Homo sapien
caaggctgccttagaagatcgtgcg

SEQ ID NO: 2835943 - DNA, 25 bp, Homo sapien
ttgccccaagtaccagagttaataa

SEQ ID NO: 2835944 - DNA, 25 bp, Homo sapien
aggcgaggcgctcacgtgacccgtt

SEQ ID NO: 2835945 - DNA, 25 bp, Homo sapien
tgacccgttctaaacgcgtcatagg

SEQ ID NO: 2835946 - DNA, 25 bp, Homo sapien
ctgaaactcacatccaggcgaggcg

SEQ ID NO: 2835947 - DNA, 25 bp, Homo sapien
catagggacacgtggttctagatac

SEQ ID NO: 2835948 - DNA, 25 bp, Homo sapien
cggcggcggcgatccacagtgattc

SEQ ID NO: 2835949 - DNA, 25 bp, Homo sapien
gatccacagtgattcggccgccgcg

SEQ ID NO: 2835950 - DNA, 25 bp, Homo sapien
cgtcattgcagggttgtttgtcagt

SEQ ID NO: 2835951 - DNA, 25 bp, Homo sapien
cggcggagggagacgtcattgcagg

SEQ ID NO: 2835952 - DNA, 25 bp, Homo sapien
cgcggggcagctgcggagcatgtcg

SEQ ID NO: 2835953 - DNA, 25 bp, Homo sapien
agcatgtcgaccccggcccggagga

SEQ ID NO: 2835954 - DNA, 25 bp, Homo sapien
ggcagctgcggagcatgtcgacccc

SEQ ID NO: 2835955 - DNA, 25 bp, Homo sapien
agctgcggagcatgtcgaccccggc

SEQ ID NO: 2835956 - DNA, 25 bp, Homo sapien
gatttcaagcggtaagggccttcac

SEQ ID NO: 2835957 - DNA, 25 bp, Homo sapien
ggatttcaagcggtaagggccttca

SEQ ID NO: 2835958 - DNA, 25 bp, Homo sapien
taagctttgccgctcgttctggcgc

SEQ ID NO: 2835959 - DNA, 25 bp, Homo sapien
tctggcgcccgaagaaattttgata

SEQ ID NO: 2835960 - DNA, 25 bp, Homo sapien
gatcgactggtctagggttccctgc

SEQ ID NO: 2835961 - DNA, 25 bp, Homo sapien
agtcagctttgtttcacggccccgc

SEQ ID NO: 2835962 - DNA, 25 bp, Homo sapien
attaaactttatgctccatcctggc

SEQ ID NO: 2835963 - DNA, 25 bp, Homo sapien
taattaaactttatgctccatcctg

SEQ ID NO: 2835964 - DNA, 25 bp, Homo sapien
aaactttatgctccatcctggctaa

SEQ ID NO: 2835965 - DNA, 25 bp, Homo sapien
taaactttatgctccatcctggcta

SEQ ID NO: 2835966 - DNA, 25 bp, Homo sapien
ctgcagtgagccctggtggagccac

SEQ ID NO: 2835967 - DNA, 25 bp, Homo sapien
agccctggtggagccactgagctcc

SEQ ID NO: 2835968 - DNA, 25 bp, Homo sapien
gcctgggggagcccttctctacaaa

SEQ ID NO: 2835969 - DNA, 25 bp, Homo sapien
tgagccctggtggagccactgagct

SEQ ID NO: 2835970 - DNA, 25 bp, Homo sapien
tctggacccttgagtatctatgtgg

SEQ ID NO: 2835971 - DNA, 25 bp, Homo sapien
tgatagttgtctggaagaaaagcac

SEQ ID NO: 2835972 - DNA, 25 bp, Homo sapien
tatggcagacatattctcagaagta

SEQ ID NO: 2835973 - DNA, 25 bp, Homo sapien
tcagaagtaatgtaataagctcggt

SEQ ID NO: 2835974 - DNA, 25 bp, Homo sapien
tcaaaataaatcttttcagatacta

SEQ ID NO: 2835975 - DNA, 25 bp, Homo sapien
ccggcctcaaaataaatcttttcag

SEQ ID NO: 2835976 - DNA, 25 bp, Homo sapien
gcctcccaaagctgtatatccagct

SEQ ID NO: 2835977 - DNA, 25 bp, Homo sapien
tcccaaagctgtatatccagctaat

SEQ ID NO: 2835978 - DNA, 25 bp, Homo sapien
tacagatagtctcacaattgggcaa

SEQ ID NO: 2835979 - DNA, 25 bp, Homo sapien
acatggatggtaactgaggccacag

SEQ ID NO: 2835980 - DNA, 25 bp, Homo sapien
aataggattgcccagtgtgtgtgta

SEQ ID NO: 2835981 - DNA, 25 bp, Homo sapien
cagtgtttaagtgtgatttgctccc

SEQ ID NO: 2835982 - DNA, 25 bp, Homo sapien
gaaatacggaatttaaatagattgc

SEQ ID NO: 2835983 - DNA, 25 bp, Homo sapien
aatagattgctaaatgatgtgtgtt

SEQ ID NO: 2835984 - DNA, 25 bp, Homo sapien
gatgtgtgttgaagaaatttaactc

SEQ ID NO: 2835985 - DNA, 25 bp, Homo sapien
ctaggagtgtaattgctatgtcaaa

SEQ ID NO: 2835986 - DNA, 25 bp, Homo sapien
cctcccaaagtgttcaggactggcg

SEQ ID NO: 2835987 - DNA, 25 bp, Homo sapien
ctgtgttggcccgactggtctcaga

SEQ ID NO: 2835988 - DNA, 25 bp, Homo sapien
aagtgttcaggactggcgtgagcca

SEQ ID NO: 2835989 - DNA, 25 bp, Homo sapien
cccaaagtgttcaggactggcgtga

SEQ ID NO: 2835990 - DNA, 25 bp, Homo sapien
caggtgcaaaataagagaccttagt

SEQ ID NO: 2835991 - DNA, 25 bp, Homo sapien
gcaggtgcaaaataagagaccttag

SEQ ID NO: 2835992 - DNA, 25 bp, Homo sapien
aggtgcaaaataagagaccttagtt

SEQ ID NO: 2835993 - DNA, 25 bp, Homo sapien
aaaccatagcaggtgcaaaataaga

SEQ ID NO: 2835994 - DNA, 25 bp, Homo sapien
tgagaaaagagtttcggccattgtt

SEQ ID NO: 2835995 - DNA, 25 bp, Homo sapien
tcatcattgttgtgtataatttacc

SEQ ID NO: 2835996 - DNA, 25 bp, Homo sapien
tcggccattgttgaacaaagctgga

SEQ ID NO: 2835997 - DNA, 25 bp, Homo sapien
ggaatgattcataatagacaactgg

SEQ ID NO: 2835998 - DNA, 25 bp, Homo sapien
gagttttcatgacagaatatacaca

SEQ ID NO: 2835999 - DNA, 25 bp, Homo sapien
cataactggtttgactctgtccaac

SEQ ID NO: 2836000 - DNA, 25 bp, Homo sapien
tctgtccaactctgtatttaggcca

SEQ ID NO: 2836001 - DNA, 25 bp, Homo sapien
tgcgatttcacagttggcacttctg

SEQ ID NO: 2836002 - DNA, 25 bp, Homo sapien
ccatgagcagagaactgatgcgact

SEQ ID NO: 2836003 - DNA, 25 bp, Homo sapien
tcttgtgttcacaggatggcctagg

SEQ ID NO: 2836004 - DNA, 25 bp, Homo sapien
cagacttgtgtgagaaacttgcata

SEQ ID NO: 2836005 - DNA, 25 bp, Homo sapien
tgagctgtgcacattacaaaccctg

SEQ ID NO: 2836006 - DNA, 25 bp, Homo sapien
caaaccctgttggttatctgactgc

SEQ ID NO: 2836007 - DNA, 25 bp, Homo sapien
aaactggtaaccttgctgtgtagca

SEQ ID NO: 2836008 - DNA, 25 bp, Homo sapien
tgaaacatcagctggaaagtcgcct

SEQ ID NO: 2836009 - DNA, 25 bp, Homo sapien
caaggcaataccaggacttggaggt

SEQ ID NO: 2836010 - DNA, 25 bp, Homo sapien
cataggagtattcctgcatgggcca

SEQ ID NO: 2836011 - DNA, 25 bp, Homo sapien
ggctgggtcttcttttgcacagggc

SEQ ID NO: 2836012 - DNA, 25 bp, Homo sapien
caaagattgagaactggtttccgga

SEQ ID NO: 2836013 - DNA, 25 bp, Homo sapien
gcttgagactacaatcaccatggct

SEQ ID NO: 2836014 - DNA, 25 bp, Homo sapien
ggtttccggacagcttctagccatg

SEQ ID NO: 2836015 - DNA, 25 bp, Homo sapien
cataactagatgttatagggcacac

SEQ ID NO: 2836016 - DNA, 25 bp, Homo sapien
tgttgaatgaagtttccatatgacc

SEQ ID NO: 2836017 - DNA, 25 bp, Homo sapien
cacaggtctcagataccagaagctg

SEQ ID NO: 2836018 - DNA, 25 bp, Homo sapien
ttaagggtgcactctttgttgaatg

SEQ ID NO: 2836019 - DNA, 25 bp, Homo sapien
tccaaatggatcctgagttcagaca

SEQ ID NO: 2836020 - DNA, 25 bp, Homo sapien
tcattgcccataggtaggccaccga

SEQ ID NO: 2836021 - DNA, 25 bp, Homo sapien
caaactacaaagactcagaggatgg

SEQ ID NO: 2836022 - DNA, 25 bp, Homo sapien
gccacagactaaggaatgtttcaga

SEQ ID NO: 2836023 - DNA, 25 bp, Homo sapien
ttcgttttaaactaaggccagatgc

SEQ ID NO: 2836024 - DNA, 25 bp, Homo sapien
gcctcttcccgtgagctggtgggta

SEQ ID NO: 2836025 - DNA, 25 bp, Homo sapien
ctggtgggtacttcaagtctatgat

SEQ ID NO: 2836026 - DNA, 25 bp, Homo sapien
aatcaactggctgaccggacgaagc

SEQ ID NO: 2836027 - DNA, 25 bp, Homo sapien
tataaaattaattacctgccattat

SEQ ID NO: 2836028 - DNA, 25 bp, Homo sapien
gagccaatactgcacctttgtgctt

SEQ ID NO: 2836029 - DNA, 25 bp, Homo sapien
gccaatactgcacctttgtgcttct

SEQ ID NO: 2836030 - DNA, 25 bp, Homo sapien
tgagccaatactgcacctttgtgct

SEQ ID NO: 2836031 - DNA, 25 bp, Homo sapien
aatgagccaatactgcacctttgtg

SEQ ID NO: 2836032 - DNA, 25 bp, Homo sapien
aagagggcttttacaatgttgatga

SEQ ID NO: 2836033 - DNA, 25 bp, Homo sapien
aaaagagggcttttacaatgttgat

SEQ ID NO: 2836034 - DNA, 25 bp, Homo sapien
gagggcttttacaatgttgatgaac

SEQ ID NO: 2836035 - DNA, 25 bp, Homo sapien
agaaaagagggcttttacaatgttg

SEQ ID NO: 2836036 - DNA, 25 bp, Homo sapien
gagaatgttaaaaaagccaatctag

SEQ ID NO: 2836037 - DNA, 25 bp, Homo sapien
ttaaaaaagccaatctagacagagt

SEQ ID NO: 2836038 - DNA, 25 bp, Homo sapien
aaaagccaatctagacagagtcctt

SEQ ID NO: 2836039 - DNA, 25 bp, Homo sapien
catcttagagtgcatgatttataaa

SEQ ID NO: 2836040 - DNA, 25 bp, Homo sapien
taccaggagtcttaagagagctgct

SEQ ID NO: 2836041 - DNA, 25 bp, Homo sapien
cctttctaatcctgtagctgatgat

SEQ ID NO: 2836042 - DNA, 25 bp, Homo sapien
agcctcctttctaatcctgtagctg

SEQ ID NO: 2836043 - DNA, 25 bp, Homo sapien
ggtaataccaggagtcttaagagag

SEQ ID NO: 2836044 - DNA, 25 bp, Homo sapien
cgctgtttagcccaggccggattgc

SEQ ID NO: 2836045 - DNA, 25 bp, Homo sapien
gtttagcccaggccggattgcagtg

SEQ ID NO: 2836046 - DNA, 25 bp, Homo sapien
gctgtttagcccaggccggattgca

SEQ ID NO: 2836047 - DNA, 25 bp, Homo sapien
ctgtttagcccaggccggattgcag

SEQ ID NO: 2836048 - DNA, 25 bp, Homo sapien
ggtgttctgatctctaatacccaac

SEQ ID NO: 2836049 - DNA, 25 bp, Homo sapien
ttctgatctctaatacccaacatga

SEQ ID NO: 2836050 - DNA, 25 bp, Homo sapien
caatgtcattaggtgttctgatctc

SEQ ID NO: 2836051 - DNA, 25 bp, Homo sapien
cagcccaatgtcattaggtgttctg

SEQ ID NO: 2836052 - DNA, 25 bp, Homo sapien
acttcaatcccatcggccatttcca

SEQ ID NO: 2836053 - DNA, 25 bp, Homo sapien
ggccatttccatcaccttgtctaaa

SEQ ID NO: 2836054 - DNA, 25 bp, Homo sapien
agtaaattgtggcaggtcttccact

SEQ ID NO: 2836055 - DNA, 25 bp, Homo sapien
aggtcttccacttcaatcccatcgg

SEQ ID NO: 2836056 - DNA, 25 bp, Homo sapien
tgcacaataaaaagtagtaaggtaa

SEQ ID NO: 2836057 - DNA, 25 bp, Homo sapien
ctgcacaataaaaagtagtaaggta

SEQ ID NO: 2836058 - DNA, 25 bp, Homo sapien
gaaaatcgaagctctctaataggga

SEQ ID NO: 2836059 - DNA, 25 bp, Homo sapien
gaccttcacaaaaaggcatcggcca

SEQ ID NO: 2836060 - DNA, 25 bp, Homo sapien
gcatcggccattttcataagaggga

SEQ ID NO: 2836061 - DNA, 25 bp, Homo sapien
ttatcaggcacttcaaaagcgggcc

SEQ ID NO: 2836062 - DNA, 25 bp, Homo sapien
tggccccaggtatatcacttctctc

SEQ ID NO: 2836063 - DNA, 25 bp, Homo sapien
aacggacttcgaatgcatactgcaa

SEQ ID NO: 2836064 - DNA, 25 bp, Homo sapien
aaatccatcaatcctgccagaagct

SEQ ID NO: 2836065 - DNA, 25 bp, Homo sapien
tgcacgtttgccatgtaggtgacag

SEQ ID NO: 2836066 - DNA, 25 bp, Homo sapien
cataaccacccttttaccagaagag

SEQ ID NO: 2836067 - DNA, 25 bp, Homo sapien
gctcttcaccctttaattattacag

SEQ ID NO: 2836068 - DNA, 25 bp, Homo sapien
tcaaagataaggatctttccaaggg

SEQ ID NO: 2836069 - DNA, 25 bp, Homo sapien
tcttcgggccgaccaatgcggatgg

SEQ ID NO: 2836070 - DNA, 25 bp, Homo sapien
tcagccggccggcaggggtccgcac

SEQ ID NO: 2836071 - DNA, 25 bp, Homo sapien
tctcgctctctgagtaggagcggaa

SEQ ID NO: 2836072 - DNA, 25 bp, Homo sapien
tctctgagtaggagcggaactgctc

SEQ ID NO: 2836073 - DNA, 25 bp, Homo sapien
cattgcttctcgctctctgagtagg

SEQ ID NO: 2836074 - DNA, 25 bp, Homo sapien
cttccattgcttctcgctctctgag

SEQ ID NO: 2836075 - DNA, 25 bp, Homo sapien
agccgaggaccggatagcccgccgc

SEQ ID NO: 2836076 - DNA, 25 bp, Homo sapien
cgccgcagccgaggaccggatagcc

SEQ ID NO: 2836077 - DNA, 25 bp, Homo sapien
gaggaccggatagcccgccgccttc

SEQ ID NO: 2836078 - DNA, 25 bp, Homo sapien
cgcagccgaggaccggatagcccgc

SEQ ID NO: 2836079 - DNA, 25 bp, Homo sapien
tgaggaatataaccctacctggact

SEQ ID NO: 2836080 - DNA, 25 bp, Homo sapien
gatcatgtctgtttctaaggctcac

SEQ ID NO: 2836081 - DNA, 25 bp, Homo sapien
tatctactgcaaaaaagaagattga

SEQ ID NO: 2836082 - DNA, 25 bp, Homo sapien
tcccatgtatctcattatctactgc

SEQ ID NO: 2836083 - DNA, 25 bp, Homo sapien
ggtttatagacccttcttcatggag

SEQ ID NO: 2836084 - DNA, 25 bp, Homo sapien
gattctctggcaatttaacaggcag

SEQ ID NO: 2836085 - DNA, 25 bp, Homo sapien
cccaatgaggcctagaggtttatag

SEQ ID NO: 2836086 - DNA, 25 bp, Homo sapien
gaagaagtttgtctgggctgtagct

SEQ ID NO: 2836087 - DNA, 25 bp, Homo sapien
gagatcactccacaattgaagaaca

SEQ ID NO: 2836088 - DNA, 25 bp, Homo sapien
ggtgatagagatcactccacaattg

SEQ ID NO: 2836089 - DNA, 25 bp, Homo sapien
ctttagtcactggtgatagagatca

SEQ ID NO: 2836090 - DNA, 25 bp, Homo sapien
tcactggtgatagagatcactccac

SEQ ID NO: 2836091 - DNA, 25 bp, Homo sapien
gggtggaaatgatgccttcgcagag

SEQ ID NO: 2836092 - DNA, 25 bp, Homo sapien
cgccagctccatgtgagtctgggtg

SEQ ID NO: 2836093 - DNA, 25 bp, Homo sapien
ctggctggtcctactctctgcccat

SEQ ID NO: 2836094 - DNA, 25 bp, Homo sapien
gcctggctggtcctactctctgccc

SEQ ID NO: 2836095 - DNA, 25 bp, Homo sapien
tggctggtcctactctctgcccatg

SEQ ID NO: 2836096 - DNA, 25 bp, Homo sapien
tgcctggctggtcctactctctgcc

SEQ ID NO: 2836097 - DNA, 25 bp, Homo sapien
tcctggcactgacctatgggcaggg

SEQ ID NO: 2836098 - DNA, 25 bp, Homo sapien
tctggatggagactcatccctccag

SEQ ID NO: 2836099 - DNA, 25 bp, Homo sapien
cacttgtcaagtccgcaggtttcag

SEQ ID NO: 2836100 - DNA, 25 bp, Homo sapien
gacagacagctcactaccttgcaga

SEQ ID NO: 2836101 - DNA, 25 bp, Homo sapien
tacatttcaagaaccccagtagatg

SEQ ID NO: 2836102 - DNA, 25 bp, Homo sapien
ggataacccagacagcttctaagtg

SEQ ID NO: 2836103 - DNA, 25 bp, Homo sapien
tgcaaaaccatgacagtccattgga

SEQ ID NO: 2836104 - DNA, 25 bp, Homo sapien
ttcccagtgggaagaatcaggacat

SEQ ID NO: 2836105 - DNA, 25 bp, Homo sapien
tggcgtcatctccgctcatggcaag

SEQ ID NO: 2836106 - DNA, 25 bp, Homo sapien
gcgatggcgtcatctccgctcatgg

SEQ ID NO: 2836107 - DNA, 25 bp, Homo sapien
ctcactgcgagctcctaagctggag

SEQ ID NO: 2836108 - DNA, 25 bp, Homo sapien
gatggcgtcatctccgctcatggca

SEQ ID NO: 2836109 - DNA, 25 bp, Homo sapien
ttcatagccttctgagaccgcactg

SEQ ID NO: 2836110 - DNA, 25 bp, Homo sapien
cttcatagccttctgagaccgcact

SEQ ID NO: 2836111 - DNA, 25 bp, Homo sapien
aatctactcctgtgtgcccgtgtca

SEQ ID NO: 2836112 - DNA, 25 bp, Homo sapien
tttcattaaagtgacggaggcccat

SEQ ID NO: 2836113 - DNA, 25 bp, Homo sapien
gatcctaaagcaggacgggcttccc

SEQ ID NO: 2836114 - DNA, 25 bp, Homo sapien
ccaggagtgctatatgccgcagcca

SEQ ID NO: 2836115 - DNA, 25 bp, Homo sapien
ttctctctggtccagtagttcttca

SEQ ID NO: 2836116 - DNA, 25 bp, Homo sapien
gtaaggcaagtcccccgctatcttc

SEQ ID NO: 2836117 - DNA, 25 bp, Homo sapien
aggcaagtcccccgctatcttccca

SEQ ID NO: 2836118 - DNA, 25 bp, Homo sapien
ctctctggtccagtagttcttcaga

SEQ ID NO: 2836119 - DNA, 25 bp, Homo sapien
caaccttgcacagcgtccatgctaa

SEQ ID NO: 2836120 - DNA, 25 bp, Homo sapien
tgcgtgtcaaccttgcacagcgtcc

SEQ ID NO: 2836121 - DNA, 25 bp, Homo sapien
gtcaaccttgcacagcgtccatgct

SEQ ID NO: 2836122 - DNA, 25 bp, Homo sapien
tttgcgtgtcaaccttgcacagcgt

SEQ ID NO: 2836123 - DNA, 25 bp, Homo sapien
tctgctgatccttagttactaggtt

SEQ ID NO: 2836124 - DNA, 25 bp, Homo sapien
ctgctgacgctactgcatgagagaa

SEQ ID NO: 2836125 - DNA, 25 bp, Homo sapien
gctactgcatgagagaattccaggg

SEQ ID NO: 2836126 - DNA, 25 bp, Homo sapien
aaactgagcatctctttcggtggta

SEQ ID NO: 2836127 - DNA, 25 bp, Homo sapien
taggtacttccacacccttgttgaa

SEQ ID NO: 2836128 - DNA, 25 bp, Homo sapien
tgccagagggccctaagagtgcctt

SEQ ID NO: 2836129 - DNA, 25 bp, Homo sapien
cacagtaggtacttccacacccttg

SEQ ID NO: 2836130 - DNA, 25 bp, Homo sapien
ccattcaatgccagagggccctaag

SEQ ID NO: 2836131 - DNA, 25 bp, Homo sapien
cttggctggagttattggctgctgc

SEQ ID NO: 2836132 - DNA, 25 bp, Homo sapien
tgctgccagtttccggggaagcgtt

SEQ ID NO: 2836133 - DNA, 25 bp, Homo sapien
ttgacttggctggagttattggctg

SEQ ID NO: 2836134 - DNA, 25 bp, Homo sapien
gctggagttattggctgctgccagt

SEQ ID NO: 2836135 - DNA, 25 bp, Homo sapien
ggttaaccttaaacagcagcagaga

SEQ ID NO: 2836136 - DNA, 25 bp, Homo sapien
tagggcttccagtcctaagcaagag

SEQ ID NO: 2836137 - DNA, 25 bp, Homo sapien
ttttcaagggctcattagaaggcct

SEQ ID NO: 2836138 - DNA, 25 bp, Homo sapien
gaaactacataggtctcaaggtcag

SEQ ID NO: 2836139 - DNA, 25 bp, Homo sapien
ccctgtcggaggatttgtgctgtta

SEQ ID NO: 2836140 - DNA, 25 bp, Homo sapien
aatgtgttcacaacattccatcggg

SEQ ID NO: 2836141 - DNA, 25 bp, Homo sapien
tgggtagacaatccgccctgtcgga

SEQ ID NO: 2836142 - DNA, 25 bp, Homo sapien
atctccctctttgttgggtagacaa

SEQ ID NO: 2836143 - DNA, 25 bp, Homo sapien
ggacttgcacgggcgcagccgccgc

SEQ ID NO: 2836144 - DNA, 25 bp, Homo sapien
gacttgcacgggcgcagccgccgct

SEQ ID NO: 2836145 - DNA, 25 bp, Homo sapien
ctccggccgggcgtaggggctgcgg

SEQ ID NO: 2836146 - DNA, 25 bp, Homo sapien
ctccgagaacctggagctatctgcc

SEQ ID NO: 2836147 - DNA, 25 bp, Homo sapien
gatgggtacggtggggaggtcgagc

SEQ ID NO: 2836148 - DNA, 25 bp, Homo sapien
tgtctccccgagtttcattttgttg

SEQ ID NO: 2836149 - DNA, 25 bp, Homo sapien
tgagccggtgcacatgacctcgcgc

SEQ ID NO: 2836150 - DNA, 25 bp, Homo sapien
cgtccgggcgccgaaccgggctgag

SEQ ID NO: 2836151 - DNA, 25 bp, Homo sapien
tgcacatgacctcgcgctgggctca

SEQ ID NO: 2836152 - DNA, 25 bp, Homo sapien
ccgaaccgggctgagccggtgcaca

SEQ ID NO: 2836153 - DNA, 25 bp, Homo sapien
gtgcagccggtccggtcccagacac

SEQ ID NO: 2836154 - DNA, 25 bp, Homo sapien
ctcccggcccggtgcacgcgggcgc

SEQ ID NO: 2836155 - DNA, 25 bp, Homo sapien
tcccggcccggtgcacgcgggcgct

SEQ ID NO: 2836156 - DNA, 25 bp, Homo sapien
ccggcccggtgcacgcgggcgctgc

SEQ ID NO: 2836157 - DNA, 25 bp, Homo sapien
cggcccggtgcacgcgggcgctgca

SEQ ID NO: 2836158 - DNA, 25 bp, Homo sapien
caactctgccggttcgcgtcccgct

SEQ ID NO: 2836159 - DNA, 25 bp, Homo sapien
tctcccaactctgccggttcgcgtc

SEQ ID NO: 2836160 - DNA, 25 bp, Homo sapien
gccggttcgcgtcccgcttcaggga

SEQ ID NO: 2836161 - DNA, 25 bp, Homo sapien
ctgccggttcgcgtcccgcttcagg

SEQ ID NO: 2836162 - DNA, 25 bp, Homo sapien
gctcctttcagacagcccataggaa

SEQ ID NO: 2836163 - DNA, 25 bp, Homo sapien
aaagctcctttcagacagcccatag

SEQ ID NO: 2836164 - DNA, 25 bp, Homo sapien
gcccataggaatctagaatacccat

SEQ ID NO: 2836165 - DNA, 25 bp, Homo sapien
acagcccataggaatctagaatacc

SEQ ID NO: 2836166 - DNA, 25 bp, Homo sapien
caataggcagccgatatgggagcga

SEQ ID NO: 2836167 - DNA, 25 bp, Homo sapien
ctgcagaagggatcagaaggatcct

SEQ ID NO: 2836168 - DNA, 25 bp, Homo sapien
tcctgcaggtgccaataggcagccg

SEQ ID NO: 2836169 - DNA, 25 bp, Homo sapien
agcgagtagacggagctctgccctc

SEQ ID NO: 2836170 - DNA, 25 bp, Homo sapien
tgaatcagtcgaatcattctgtgga

SEQ ID NO: 2836171 - DNA, 25 bp, Homo sapien
aaagaaccttgcaaaaagtccagtg

SEQ ID NO: 2836172 - DNA, 25 bp, Homo sapien
cattctgtggatgccaaagaatatt

SEQ ID NO: 2836173 - DNA, 25 bp, Homo sapien
aaagtccagtgaatcagtcgaatca

SEQ ID NO: 2836174 - DNA, 25 bp, Homo sapien
gatactgacggtgaaaccagcatgg

SEQ ID NO: 2836175 - DNA, 25 bp, Homo sapien
aaactatcaaggtacgacagtggca

SEQ ID NO: 2836176 - DNA, 25 bp, Homo sapien
acaaatgtgtctagtccgggtggac

SEQ ID NO: 2836177 - DNA, 25 bp, Homo sapien
tgtagagtttagtctgcctgcccgc

SEQ ID NO: 2836178 - DNA, 25 bp, Homo sapien
gggtgcaacgagtctggccccttgc

SEQ ID NO: 2836179 - DNA, 25 bp, Homo sapien
ctctgctcacattgttggcctctgg

SEQ ID NO: 2836180 - DNA, 25 bp, Homo sapien
ctgttgctttggactggactgttgc

SEQ ID NO: 2836181 - DNA, 25 bp, Homo sapien
ctggcccttcttcattggctgttgc

SEQ ID NO: 2836182 - DNA, 25 bp, Homo sapien
cccagatgtctgttaggctggctgg

SEQ ID NO: 2836183 - DNA, 25 bp, Homo sapien
ccagatgtctgttaggctggctggc

SEQ ID NO: 2836184 - DNA, 25 bp, Homo sapien
tgtatgggcacactgggactagctg

SEQ ID NO: 2836185 - DNA, 25 bp, Homo sapien
tcgtgtgtccgtatgcaggcatgcc

SEQ ID NO: 2836186 - DNA, 25 bp, Homo sapien
gcatttgcaatgtaagggcctcagc

SEQ ID NO: 2836187 - DNA, 25 bp, Homo sapien
aattctaaccaacattggcagcggc

SEQ ID NO: 2836188 - DNA, 25 bp, Homo sapien
tgtatttttcattaacgcaaagacc

SEQ ID NO: 2836189 - DNA, 25 bp, Homo sapien
taacgagcaatagaatgtatggtca

SEQ ID NO: 2836190 - DNA, 25 bp, Homo sapien
cattaacgcaaagacctatttctcc

SEQ ID NO: 2836191 - DNA, 25 bp, Homo sapien
gtacattgtccatgtgcgcaaccct

SEQ ID NO: 2836192 - DNA, 25 bp, Homo sapien
catgattctgtgttgccgctgctgc

SEQ ID NO: 2836193 - DNA, 25 bp, Homo sapien
gcatgattctgtgttgccgctgctg

SEQ ID NO: 2836194 - DNA, 25 bp, Homo sapien
cgctgtgccctgcatgattctgtgt

SEQ ID NO: 2836195 - DNA, 25 bp, Homo sapien
cagtgcccgctgtgccctgcatgat

SEQ ID NO: 2836196 - DNA, 25 bp, Homo sapien
gtgtcatagggagccctttgcactc

SEQ ID NO: 2836197 - DNA, 25 bp, Homo sapien
tcctgtcctgctcactcatgggggc

SEQ ID NO: 2836198 - DNA, 25 bp, Homo sapien
cactcctcgtgtgttggcaaacgca

SEQ ID NO: 2836199 - DNA, 25 bp, Homo sapien
cccaccagggcttgtgtcataggga

SEQ ID NO: 2836200 - DNA, 25 bp, Homo sapien
gaaaaacaggctgtggatgttctct

SEQ ID NO: 2836201 - DNA, 25 bp, Homo sapien
gctgtggatgttctctcagccccag

SEQ ID NO: 2836202 - DNA, 25 bp, Homo sapien
caggattagtcatgggcgtggtcat

SEQ ID NO: 2836203 - DNA, 25 bp, Homo sapien
gtcaccaggtgagtgtgccattagg

SEQ ID NO: 2836204 - DNA, 25 bp, Homo sapien
gccattaggagcacaggattagtca

SEQ ID NO: 2836205 - DNA, 25 bp, Homo sapien
ccaggtcgggctgggatagtgacac

SEQ ID NO: 2836206 - DNA, 25 bp, Homo sapien
gcttgtaacccgagaggctagaggt

SEQ ID NO: 2836207 - DNA, 25 bp, Homo sapien
cccgagaggctagaggtagttgaat

SEQ ID NO: 2836208 - DNA, 25 bp, Homo sapien
tgtaacccgagaggctagaggtagt

SEQ ID NO: 2836209 - DNA, 25 bp, Homo sapien
tgaaagcttgtaacccgagaggcta

SEQ ID NO: 2836210 - DNA, 25 bp, Homo sapien
ggcagagtcacatatcccaagagct

SEQ ID NO: 2836211 - DNA, 25 bp, Homo sapien
agttcaggttaagagcaacaccagg

SEQ ID NO: 2836212 - DNA, 25 bp, Homo sapien
tccagtcactttatacagaggcaga

SEQ ID NO: 2836213 - DNA, 25 bp, Homo sapien
gaagaatccatctactccagtgcag

SEQ ID NO: 2836214 - DNA, 25 bp, Homo sapien
gaaaaagagcagtacccagtgcata

SEQ ID NO: 2836215 - DNA, 25 bp, Homo sapien
gaggctcgggccataaaaatcttat

SEQ ID NO: 2836216 - DNA, 25 bp, Homo sapien
catggacaatggctacagaaaacac

SEQ ID NO: 2836217 - DNA, 25 bp, Homo sapien
cctagcatcttgcagtgtgggacac

SEQ ID NO: 2836218 - DNA, 25 bp, Homo sapien
tgcttgccccagagagtactgttaa

SEQ ID NO: 2836219 - DNA, 25 bp, Homo sapien
gaagaggcacagattaccccattgg

SEQ ID NO: 2836220 - DNA, 25 bp, Homo sapien
cattgggcaccaataagactggagc

SEQ ID NO: 2836221 - DNA, 25 bp, Homo sapien
tctaaatgtggagacactggtgcct

SEQ ID NO: 2836222 - DNA, 25 bp, Homo sapien
aacattagagtttgttttattgcat

SEQ ID NO: 2836223 - DNA, 25 bp, Homo sapien
tattgaaaactgtaaggcatcatgc

SEQ ID NO: 2836224 - DNA, 25 bp, Homo sapien
gaaagttgctctttacaaatggcgc

SEQ ID NO: 2836225 - DNA, 25 bp, Homo sapien
gaaagctaacattgtgatactcaaa

SEQ ID NO: 2836226 - DNA, 25 bp, Homo sapien
ggcatcatgcaatcattgaataagc

SEQ ID NO: 2836227 - DNA, 25 bp, Homo sapien
catgttgagcaatcaaatctctgag

SEQ ID NO: 2836228 - DNA, 25 bp, Homo sapien
agtaagcctgaacgttgagacctgg

SEQ ID NO: 2836229 - DNA, 25 bp, Homo sapien
tataaccagcaaaagtctattgaat

SEQ ID NO: 2836230 - DNA, 25 bp, Homo sapien
tgaattcaagttatgcatgttgagc

SEQ ID NO: 2836231 - DNA, 25 bp, Homo sapien
tcagttctttcagagatatactccc

SEQ ID NO: 2836232 - DNA, 25 bp, Homo sapien
aaacttctaagggtcgggcattcag

SEQ ID NO: 2836233 - DNA, 25 bp, Homo sapien
tccgtaaccttgtcttttgagcaca

SEQ ID NO: 2836234 - DNA, 25 bp, Homo sapien
tcaatgtactgtgccatccagcgga

SEQ ID NO: 2836235 - DNA, 25 bp, Homo sapien
cttagggcaggatggccactcagtg

SEQ ID NO: 2836236 - DNA, 25 bp, Homo sapien
ttagggcaggatggccactcagtgg

SEQ ID NO: 2836237 - DNA, 25 bp, Homo sapien
agggcaggatggccactcagtggga

SEQ ID NO: 2836238 - DNA, 25 bp, Homo sapien
gcaggatggccactcagtgggaaag

SEQ ID NO: 2836239 - DNA, 25 bp, Homo sapien
caggtctgtcgatcttattcccaag

SEQ ID NO: 2836240 - DNA, 25 bp, Homo sapien
cccaagaatcagtataggcacatta

SEQ ID NO: 2836241 - DNA, 25 bp, Homo sapien
tctcgcaacctctcttcactgatgg

SEQ ID NO: 2836242 - DNA, 25 bp, Homo sapien
ctcttcactgatggcttcaggtctg

SEQ ID NO: 2836243 - DNA, 25 bp, Homo sapien
acaatacaaaacaagagttgatatg

SEQ ID NO: 2836244 - DNA, 25 bp, Homo sapien
caatacaaaacaagagttgatatga

SEQ ID NO: 2836245 - DNA, 25 bp, Homo sapien
aacaatacaaaacaagagttgatat

SEQ ID NO: 2836246 - DNA, 25 bp, Homo sapien
taacagcctttcgtggtctgcacaa

SEQ ID NO: 2836247 - DNA, 25 bp, Homo sapien
caggaaggtagtttttccacactct

SEQ ID NO: 2836248 - DNA, 25 bp, Homo sapien
ccattgatagcaggaaggtagtttt

SEQ ID NO: 2836249 - DNA, 25 bp, Homo sapien
tcttttgactctaacagcctttcgt

SEQ ID NO: 2836250 - DNA, 25 bp, Homo sapien
aaacgtcatgccagcaatggtcagt

SEQ ID NO: 2836251 - DNA, 25 bp, Homo sapien
tgtaaacgtcatgccagcaatggtc

SEQ ID NO: 2836252 - DNA, 25 bp, Homo sapien
gttgtaaacgtcatgccagcaatgg

SEQ ID NO: 2836253 - DNA, 25 bp, Homo sapien
agttgtaaacgtcatgccagcaatg

SEQ ID NO: 2836254 - DNA, 25 bp, Homo sapien
gacttcagttgcaggtttgttagac

SEQ ID NO: 2836255 - DNA, 25 bp, Homo sapien
gacagttcacttgcttacagatcag

SEQ ID NO: 2836256 - DNA, 25 bp, Homo sapien
ggccccatgagagctctagtaatta

SEQ ID NO: 2836257 - DNA, 25 bp, Homo sapien
ggagctttacccattgcatgcacag

SEQ ID NO: 2836258 - DNA, 25 bp, Homo sapien
ggatgtaatgttgggacatgttgtc

SEQ ID NO: 2836259 - DNA, 25 bp, Homo sapien
ggacatgttgtccaagtctgtcatc

SEQ ID NO: 2836260 - DNA, 25 bp, Homo sapien
ctgtcatcttttagcatgtgtagca

SEQ ID NO: 2836261 - DNA, 25 bp, Homo sapien
tttcctgcattatccaatccaagaa

SEQ ID NO: 2836262 - DNA, 25 bp, Homo sapien
aaatccaatcaaatatgaaggacat

SEQ ID NO: 2836263 - DNA, 25 bp, Homo sapien
taaaaatcagtacagtggcccactg

SEQ ID NO: 2836264 - DNA, 25 bp, Homo sapien
aatagaaaagttagaccggatgcgg

SEQ ID NO: 2836265 - DNA, 25 bp, Homo sapien
gacgaatttggttctttcagctaac

SEQ ID NO: 2836266 - DNA, 25 bp, Homo sapien
caaacaccttaaattgctgacgaat

SEQ ID NO: 2836267 - DNA, 25 bp, Homo sapien
cctacttggcgttggccgtacacca

SEQ ID NO: 2836268 - DNA, 25 bp, Homo sapien
tacaccaggagaccgaactgcaaag

SEQ ID NO: 2836269 - DNA, 25 bp, Homo sapien
caattccccagttgagcgaggctgc

SEQ ID NO: 2836270 - DNA, 25 bp, Homo sapien
cgactggagggaacgcaatccccta

SEQ ID NO: 2836271 - DNA, 25 bp, Homo sapien
tggaacagttcatgaatttgcctat

SEQ ID NO: 2836272 - DNA, 25 bp, Homo sapien
acagttcatgaatttgcctatcatc

SEQ ID NO: 2836273 - DNA, 25 bp, Homo sapien
cagttcatgaatttgcctatcatcc

SEQ ID NO: 2836274 - DNA, 25 bp, Homo sapien
gaacagttcatgaatttgcctatca

SEQ ID NO: 2836275 - DNA, 25 bp, Homo sapien
agtgagtttgagttccctagatgtc

SEQ ID NO: 2836276 - DNA, 25 bp, Homo sapien
aacataagcagagtaagaggaacac

SEQ ID NO: 2836277 - DNA, 25 bp, Homo sapien
tcaggtaggatatttagagaagccc

SEQ ID NO: 2836278 - DNA, 25 bp, Homo sapien
aatggcaggcttgtgcttgaatagc

SEQ ID NO: 2836279 - DNA, 25 bp, Homo sapien
aaaggagggctttatcgtcagcaca

SEQ ID NO: 2836280 - DNA, 25 bp, Homo sapien
tgttgtccaatcaccgcagtttcga

SEQ ID NO: 2836281 - DNA, 25 bp, Homo sapien
gaggtcacgttcacaacggcgggaa

SEQ ID NO: 2836282 - DNA, 25 bp, Homo sapien
tacaccaacggtgagtgctgtccgg

SEQ ID NO: 2836283 - DNA, 25 bp, Homo sapien
gctgggctgtgactaccattgggaa

SEQ ID NO: 2836284 - DNA, 25 bp, Homo sapien
tagggatgggctacaggaatttaca

SEQ ID NO: 2836285 - DNA, 25 bp, Homo sapien
tcatatagagatgtaccccagccct

SEQ ID NO: 2836286 - DNA, 25 bp, Homo sapien
aggaattccattgccatccgctggg

SEQ ID NO: 2836287 - DNA, 25 bp, Homo sapien
cacaaaccgacaaatattgtatggt

SEQ ID NO: 2836288 - DNA, 25 bp, Homo sapien
taagcaagacacaaaccgacaaata

SEQ ID NO: 2836289 - DNA, 25 bp, Homo sapien
ggagggcgattaatagggagttgtc

SEQ ID NO: 2836290 - DNA, 25 bp, Homo sapien
gggcgattaatagggagttgtcata

SEQ ID NO: 2836291 - DNA, 25 bp, Homo sapien
tagatacctgtatcattgtggtggt

SEQ ID NO: 2836292 - DNA, 25 bp, Homo sapien
catgtaaacagtgctataatagtgg

SEQ ID NO: 2836293 - DNA, 25 bp, Homo sapien
gcagaaaatttgcagtagatacctg

SEQ ID NO: 2836294 - DNA, 25 bp, Homo sapien
taattgggaggctgtaccttttaca

SEQ ID NO: 2836295 - DNA, 25 bp, Homo sapien
gtcttgctggactactgcatgtgca

SEQ ID NO: 2836296 - DNA, 25 bp, Homo sapien
taaactcgctttggaacttacaaga

SEQ ID NO: 2836297 - DNA, 25 bp, Homo sapien
gcaacagggaagagctaaactcgct

SEQ ID NO: 2836298 - DNA, 25 bp, Homo sapien
tgtgcaagaactgtaaggcccaact

SEQ ID NO: 2836299 - DNA, 25 bp, Homo sapien
agtatacatgctgtcgaagtgagta

SEQ ID NO: 2836300 - DNA, 25 bp, Homo sapien
gtatacatgctgtcgaagtgagtac

SEQ ID NO: 2836301 - DNA, 25 bp, Homo sapien
catcagtaacatttttctaaggagt

SEQ ID NO: 2836302 - DNA, 25 bp, Homo sapien
tcttcataaacactgggactagcaa

SEQ ID NO: 2836303 - DNA, 25 bp, Homo sapien
gaagagttggacatactgtcttaat

SEQ ID NO: 2836304 - DNA, 25 bp, Homo sapien
agtgctatccaaatacatcagtaac

SEQ ID NO: 2836305 - DNA, 25 bp, Homo sapien
gcctcactacatccctaagtgggta

SEQ ID NO: 2836306 - DNA, 25 bp, Homo sapien
ggataatcttccttgtgcctcacta

SEQ ID NO: 2836307 - DNA, 25 bp, Homo sapien
tcttctagagggaaacatttgtgct

SEQ ID NO: 2836308 - DNA, 25 bp, Homo sapien
tgtaagtggcacattgaactggaag

SEQ ID NO: 2836309 - DNA, 25 bp, Homo sapien
gatgcataacagctattatctaggg

SEQ ID NO: 2836310 - DNA, 25 bp, Homo sapien
taatgtaacagacaagggcaatctt

SEQ ID NO: 2836311 - DNA, 25 bp, Homo sapien
caatagggcactacctgccatatca

SEQ ID NO: 2836312 - DNA, 25 bp, Homo sapien
tgagcctttggagatactgatataa

SEQ ID NO: 2836313 - DNA, 25 bp, Homo sapien
tcatgaactcggaacagcgcatcaa

SEQ ID NO: 2836314 - DNA, 25 bp, Homo sapien
gggctcaggtctgtcggcttcccag

SEQ ID NO: 2836315 - DNA, 25 bp, Homo sapien
gagctgcgtcggagaaagctgctca

SEQ ID NO: 2836316 - DNA, 25 bp, Homo sapien
gcgcatcaaccggatcatgggcttt

SEQ ID NO: 2836317 - DNA, 25 bp, Homo sapien
ggatacctatagcaaaatgggcgaa

SEQ ID NO: 2836318 - DNA, 25 bp, Homo sapien
tgaagtaccatgaagcctgtagaac

SEQ ID NO: 2836319 - DNA, 25 bp, Homo sapien
gcacttctattgtcgggaattcctg

SEQ ID NO: 2836320 - DNA, 25 bp, Homo sapien
tttgcataacaattagggccctaca

SEQ ID NO: 2836321 - DNA, 25 bp, Homo sapien
gacaggagacgctcaaggagtagaa

SEQ ID NO: 2836322 - DNA, 25 bp, Homo sapien
cagaagccgagagcgaagaagatct

SEQ ID NO: 2836323 - DNA, 25 bp, Homo sapien
ttctttcaatgtgggacagaatccc

SEQ ID NO: 2836324 - DNA, 25 bp, Homo sapien
tagtagctccatttggtcatagaat

SEQ ID NO: 2836325 - DNA, 25 bp, Homo sapien
agttgaagtagatcatcttaaaggt

SEQ ID NO: 2836326 - DNA, 25 bp, Homo sapien
tgtccattaagttgaagtagatcat

SEQ ID NO: 2836327 - DNA, 25 bp, Homo sapien
aagttgaagtagatcatcttaaagg

SEQ ID NO: 2836328 - DNA, 25 bp, Homo sapien
ccattaagttgaagtagatcatctt

SEQ ID NO: 2836329 - DNA, 25 bp, Homo sapien
ggcctatgcagtctacctacctcag

SEQ ID NO: 2836330 - DNA, 25 bp, Homo sapien
ccttgatgcccctcactttattcta

SEQ ID NO: 2836331 - DNA, 25 bp, Homo sapien
tacccttgatgcccctcactttatt

SEQ ID NO: 2836332 - DNA, 25 bp, Homo sapien
cacctcccaggcctatgcagtctac

SEQ ID NO: 2836333 - DNA, 25 bp, Homo sapien
cagcctgttttcagagtatgatgtc

SEQ ID NO: 2836334 - DNA, 25 bp, Homo sapien
aaatgtccggataatattctagagg

SEQ ID NO: 2836335 - DNA, 25 bp, Homo sapien
caataaagtacacaagtcgttaagg

SEQ ID NO: 2836336 - DNA, 25 bp, Homo sapien
tgtgtccccaccttgatgttacatg

SEQ ID NO: 2836337 - DNA, 25 bp, Homo sapien
tactggtaatcttcactgttgctct

SEQ ID NO: 2836338 - DNA, 25 bp, Homo sapien
gggtggtaatcattctatgatacac

SEQ ID NO: 2836339 - DNA, 25 bp, Homo sapien
gactgcctgtgaactaaagctgtgg

SEQ ID NO: 2836340 - DNA, 25 bp, Homo sapien
gggtacgtgacagtaatttattgaa

SEQ ID NO: 2836341 - DNA, 25 bp, Homo sapien
tatattgggagggtacttgaacaac

SEQ ID NO: 2836342 - DNA, 25 bp, Homo sapien
taatcaagtatgtatattgggaggg

SEQ ID NO: 2836343 - DNA, 25 bp, Homo sapien
aacaaccttgggcttgcttaaatgc

SEQ ID NO: 2836344 - DNA, 25 bp, Homo sapien
gttactgtattggtataacagttca

SEQ ID NO: 2836345 - DNA, 25 bp, Homo sapien
gttctccgcaccgtgcagaggcggc

SEQ ID NO: 2836346 - DNA, 25 bp, Homo sapien
gcctgccactccgtcttggcccgtt

SEQ ID NO: 2836347 - DNA, 25 bp, Homo sapien
gcggcctcttcgtactgcgtccggg

SEQ ID NO: 2836348 - DNA, 25 bp, Homo sapien
ctacagggtggtagcggcctcttcg

SEQ ID NO: 2836349 - DNA, 25 bp, Homo sapien
tttgagaggtcagaatccgcagtcc

SEQ ID NO: 2836350 - DNA, 25 bp, Homo sapien
agccgctgggaagcccctagacgcg

SEQ ID NO: 2836351 - DNA, 25 bp, Homo sapien
ggccctagtgtagccggagtgagag

SEQ ID NO: 2836352 - DNA, 25 bp, Homo sapien
aagcctgccggctcgagatcggcgt

SEQ ID NO: 2836353 - DNA, 25 bp, Homo sapien
tggagaacagaacttgggtttcttg

SEQ ID NO: 2836354 - DNA, 25 bp, Homo sapien
gtttcttgaaaggaagctttctcca

SEQ ID NO: 2836355 - DNA, 25 bp, Homo sapien
gtgatctttgatctttggagaacag

SEQ ID NO: 2836356 - DNA, 25 bp, Homo sapien
gagaacagaacttgggtttcttgaa

SEQ ID NO: 2836357 - DNA, 25 bp, Homo sapien
gttggcagtaatgactgccacattc

SEQ ID NO: 2836358 - DNA, 25 bp, Homo sapien
ttctataaagaacggctcattttag

SEQ ID NO: 2836359 - DNA, 25 bp, Homo sapien
ttgttctataaagaacggctcattt

SEQ ID NO: 2836360 - DNA, 25 bp, Homo sapien
atttctttatgttggcagtaatgac

SEQ ID NO: 2836361 - DNA, 25 bp, Homo sapien
ttgccagcagtaatccagctttctg

SEQ ID NO: 2836362 - DNA, 25 bp, Homo sapien
tcagtttgacatatattcctcccag

SEQ ID NO: 2836363 - DNA, 25 bp, Homo sapien
cagtttgacatatattcctcccagc

SEQ ID NO: 2836364 - DNA, 25 bp, Homo sapien
tgaagtcaaaccacccaatgagtga

SEQ ID NO: 2836365 - DNA, 25 bp, Homo sapien
ttaaagctctatcccgtcttgccga

SEQ ID NO: 2836366 - DNA, 25 bp, Homo sapien
ctgggaaccaccaaagcagctggat

SEQ ID NO: 2836367 - DNA, 25 bp, Homo sapien
gggacaactaaagctgcgggataca

SEQ ID NO: 2836368 - DNA, 25 bp, Homo sapien
taatggctgtgtgagtttttgtaac

SEQ ID NO: 2836369 - DNA, 25 bp, Homo sapien
caaaaaagcaaactaatgaatcagg

SEQ ID NO: 2836370 - DNA, 25 bp, Homo sapien
tacctattagtttgtgaagtaagcc

SEQ ID NO: 2836371 - DNA, 25 bp, Homo sapien
taagcctacagtataataaagacac

SEQ ID NO: 2836372 - DNA, 25 bp, Homo sapien
tgcaaactctgattgcaaatggatg

SEQ ID NO: 2836373 - DNA, 25 bp, Homo sapien
ttatgctgctctttacagtaagagg

SEQ ID NO: 2836374 - DNA, 25 bp, Homo sapien
caattgagctggactttatgctgct

SEQ ID NO: 2836375 - DNA, 25 bp, Homo sapien
gggactatgtgcactggcgtctaag

SEQ ID NO: 2836376 - DNA, 25 bp, Homo sapien
tattgataactgctactctgtcggt

SEQ ID NO: 2836377 - DNA, 25 bp, Homo sapien
ggttaaagttgacccattcagtgta

SEQ ID NO: 2836378 - DNA, 25 bp, Homo sapien
tgtccatgaacttgagctactcgtg

SEQ ID NO: 2836379 - DNA, 25 bp, Homo sapien
gctgttaaactctaggatgtatctg

SEQ ID NO: 2836380 - DNA, 25 bp, Homo sapien
gcacctcgatgggacactagaacag

SEQ ID NO: 2836381 - DNA, 25 bp, Homo sapien
tcaaaacgacctgcaacgtctggcg

SEQ ID NO: 2836382 - DNA, 25 bp, Homo sapien
tagccaagctctgacttccgaggga

SEQ ID NO: 2836383 - DNA, 25 bp, Homo sapien
ctctgggaatgaagcgtggaaaacc

SEQ ID NO: 2836384 - DNA, 25 bp, Homo sapien
gccaggaactgtgcatcgtgcttta

SEQ ID NO: 2836385 - DNA, 25 bp, Homo sapien
gaggcataccctctggtgataagca

SEQ ID NO: 2836386 - DNA, 25 bp, Homo sapien
taccgacattgttgtggccgtatta

SEQ ID NO: 2836387 - DNA, 25 bp, Homo sapien
tgcggtaagcgctgctgaggcatac

SEQ ID NO: 2836388 - DNA, 25 bp, Homo sapien
caattaccatgaatgaaagcgctca

SEQ ID NO: 2836389 - DNA, 25 bp, Homo sapien
aaagcgctcactgtgtaccagatgc

SEQ ID NO: 2836390 - DNA, 25 bp, Homo sapien
ttagaccttaacaggaataggcagg

SEQ ID NO: 2836391 - DNA, 25 bp, Homo sapien
gaccctcggtctcgcttgtcattta

SEQ ID NO: 2836392 - DNA, 25 bp, Homo sapien
aacccgggaggtggttgtgccactg

SEQ ID NO: 2836393 - DNA, 25 bp, Homo sapien
aaacaaagacaaaataattagctgg

SEQ ID NO: 2836394 - DNA, 25 bp, Homo sapien
cccgggaggtggttgtgccactgta

SEQ ID NO: 2836395 - DNA, 25 bp, Homo sapien
gtgcagtggctcatgcctgtaatcc

SEQ ID NO: 2836396 - DNA, 25 bp, Homo sapien
tcttcctaacctgggaaatggtgag

SEQ ID NO: 2836397 - DNA, 25 bp, Homo sapien
caaatatgactctgaatgtgctggc

SEQ ID NO: 2836398 - DNA, 25 bp, Homo sapien
tattaatagtacctgcttgtgacct

SEQ ID NO: 2836399 - DNA, 25 bp, Homo sapien
aaagtggtcgcttatggtcagagga

SEQ ID NO: 2836400 - DNA, 25 bp, Homo sapien
ttatgtgtcatgtttccaacagctg

SEQ ID NO: 2836401 - DNA, 25 bp, Homo sapien
ttcagatatgacagctaattacctc

SEQ ID NO: 2836402 - DNA, 25 bp, Homo sapien
tcacaaggcaccctaaattctatag

SEQ ID NO: 2836403 - DNA, 25 bp, Homo sapien
cacagattgtaagttgatgaagctg

SEQ ID NO: 2836404 - DNA, 25 bp, Homo sapien
tgccgctcgttgtgctgaggacgaa

SEQ ID NO: 2836405 - DNA, 25 bp, Homo sapien
acttccgccgaagcctacgaacttg

SEQ ID NO: 2836406 - DNA, 25 bp, Homo sapien
ttgcagaacaattcggtgcccgctg

SEQ ID NO: 2836407 - DNA, 25 bp, Homo sapien
cgaacttgccaaccggaaacaaatg

SEQ ID NO: 2836408 - DNA, 25 bp, Homo sapien
gaatcccattggtacagtaagcctg

SEQ ID NO: 2836409 - DNA, 25 bp, Homo sapien
gtaaatgtcattggctccactgagc

SEQ ID NO: 2836410 - DNA, 25 bp, Homo sapien
gatttgcaccaaagaaaccttcggc

SEQ ID NO: 2836411 - DNA, 25 bp, Homo sapien
cacagttctgggtacaaacaggcat

SEQ ID NO: 2836412 - DNA, 25 bp, Homo sapien
cccttggtggtggtacatgggctct

SEQ ID NO: 2836413 - DNA, 25 bp, Homo sapien
cagttgctgttagcctcctgtttcc

SEQ ID NO: 2836414 - DNA, 25 bp, Homo sapien
gctctgcagtgcgtcaatggacagt

SEQ ID NO: 2836415 - DNA, 25 bp, Homo sapien
cagtatgttggtgacagacagtgac

SEQ ID NO: 2836416 - DNA, 25 bp, Homo sapien
tgtgctgctgccactgaagctttct

SEQ ID NO: 2836417 - DNA, 25 bp, Homo sapien
ctgctgccactgaagctttctggag

SEQ ID NO: 2836418 - DNA, 25 bp, Homo sapien
tgctgctgccactgaagctttctgg

SEQ ID NO: 2836419 - DNA, 25 bp, Homo sapien
cttttggttgctgtgctgctgccac

SEQ ID NO: 2836420 - DNA, 25 bp, Homo sapien
gaggaggagttctctgggtgcccag

SEQ ID NO: 2836421 - DNA, 25 bp, Homo sapien
cagcagtagcaccatatgtgacttt

SEQ ID NO: 2836422 - DNA, 25 bp, Homo sapien
gcagcagtagcaccatatgtgactt

SEQ ID NO: 2836423 - DNA, 25 bp, Homo sapien
cagtagcaccatatgtgactttggg

SEQ ID NO: 2836424 - DNA, 25 bp, Homo sapien
gcagtagcaccatatgtgactttgg

SEQ ID NO: 2836425 - DNA, 25 bp, Homo sapien
catgttggtgttccctttggagttc

SEQ ID NO: 2836426 - DNA, 25 bp, Homo sapien
tgattgtgtcgtacagtaggtctag

SEQ ID NO: 2836427 - DNA, 25 bp, Homo sapien
gacctggcgtgtatttgtaaaagcg

SEQ ID NO: 2836428 - DNA, 25 bp, Homo sapien
tagaatgtcagtgttggcgtccacc

SEQ ID NO: 2836429 - DNA, 25 bp, Homo sapien
aaacaggtgtcaacaatgcaaatat

SEQ ID NO: 2836430 - DNA, 25 bp, Homo sapien
ggagaaatgtaaaacaggtgtcaac

SEQ ID NO: 2836431 - DNA, 25 bp, Homo sapien
atgaggagaaatgtaaaacaggtgt

SEQ ID NO: 2836432 - DNA, 25 bp, Homo sapien
caggtgtcaacaatgcaaatatgac

SEQ ID NO: 2836433 - DNA, 25 bp, Homo sapien
tagggccatgacacagaacttgcat

SEQ ID NO: 2836434 - DNA, 25 bp, Homo sapien
agctttcgggtttgcactgcagttt

SEQ ID NO: 2836435 - DNA, 25 bp, Homo sapien
tgtccatagttgtggtgctttaggg

SEQ ID NO: 2836436 - DNA, 25 bp, Homo sapien
tgctttagggccatgacacagaact

SEQ ID NO: 2836437 - DNA, 25 bp, Homo sapien
ctcaggagggattcggtccagcggt

SEQ ID NO: 2836438 - DNA, 25 bp, Homo sapien
tagcggccagttgctttctgccctc

SEQ ID NO: 2836439 - DNA, 25 bp, Homo sapien
ttcggtccagcggtgtgggcaggtg

SEQ ID NO: 2836440 - DNA, 25 bp, Homo sapien
attcctgtggctgggtagcggccag

SEQ ID NO: 2836441 - DNA, 25 bp, Homo sapien
gatctgttccgatgtatgggacggc

SEQ ID NO: 2836442 - DNA, 25 bp, Homo sapien
tacgtctcgggtgatatgggcgatc

SEQ ID NO: 2836443 - DNA, 25 bp, Homo sapien
gacggcggatagcaggtttgtaatt

SEQ ID NO: 2836444 - DNA, 25 bp, Homo sapien
tctaggtaaagaaatgagccgtaat

SEQ ID NO: 2836445 - DNA, 25 bp, Homo sapien
agggtattcctgccaatgctaggtt

SEQ ID NO: 2836446 - DNA, 25 bp, Homo sapien
gggtattcctgccaatgctaggttg

SEQ ID NO: 2836447 - DNA, 25 bp, Homo sapien
aagggtattcctgccaatgctaggt

SEQ ID NO: 2836448 - DNA, 25 bp, Homo sapien
gaagcggatgagtaggaagactcct

SEQ ID NO: 2836449 - DNA, 25 bp, Homo sapien
gaagactcctgctacaactatagtg

SEQ ID NO: 2836450 - DNA, 25 bp, Homo sapien
gtggaagcggatgagtaggaagact

SEQ ID NO: 2836451 - DNA, 25 bp, Homo sapien
tagggggtggaagcggatgagtagg

SEQ ID NO: 2836452 - DNA, 25 bp, Homo sapien
ttgagtggagtagggctgagacagg

SEQ ID NO: 2836453 - DNA, 25 bp, Homo sapien
gtggagtagggctgagacaggggtg

SEQ ID NO: 2836454 - DNA, 25 bp, Homo sapien
gagtagggctgagacaggggtgggg

SEQ ID NO: 2836455 - DNA, 25 bp, Homo sapien
cttgagtggagtagggctgagacag

SEQ ID NO: 2836456 - DNA, 25 bp, Homo sapien
gaaggcctaattgagctgatttgcc

SEQ ID NO: 2836457 - DNA, 25 bp, Homo sapien
ggggtgaaggcctaattgagctgat

SEQ ID NO: 2836458 - DNA, 25 bp, Homo sapien
ggtgaaggcctaattgagctgattt

SEQ ID NO: 2836459 - DNA, 25 bp, Homo sapien
tgaaggcctaattgagctgatttgc

SEQ ID NO: 2836460 - DNA, 25 bp, Homo sapien
caacggatggctgttatcctttaaa

SEQ ID NO: 2836461 - DNA, 25 bp, Homo sapien
acggatggctgttatcctttaaaag

SEQ ID NO: 2836462 - DNA, 25 bp, Homo sapien
agaccaacggatggctgttatcctt

SEQ ID NO: 2836463 - DNA, 25 bp, Homo sapien
taagaccaacggatggctgttatcc

SEQ ID NO: 2836464 - DNA, 25 bp, Homo sapien
ttagacatggggatatgagttagca

SEQ ID NO: 2836465 - DNA, 25 bp, Homo sapien
gagttagcagttcttatgcgctttc

SEQ ID NO: 2836466 - DNA, 25 bp, Homo sapien
catgttgttagacatggggatatga

SEQ ID NO: 2836467 - DNA, 25 bp, Homo sapien
agttagcagttcttatgcgctttct

SEQ ID NO: 2836468 - DNA, 25 bp, Homo sapien
gtaaataaggggtcgtgagcctctg

SEQ ID NO: 2836469 - DNA, 25 bp, Homo sapien
gggtcgtgagcctctgttgtcagat

SEQ ID NO: 2836470 - DNA, 25 bp, Homo sapien
taaggggtcgtgagcctctgttgtc

SEQ ID NO: 2836471 - DNA, 25 bp, Homo sapien
ggtcgtgagcctctgttgtcagatt

SEQ ID NO: 2836472 - DNA, 25 bp, Homo sapien
ggcagtaagagtgagtaatagaata

SEQ ID NO: 2836473 - DNA, 25 bp, Homo sapien
tgagtaatagaatattcagtgagcc

SEQ ID NO: 2836474 - DNA, 25 bp, Homo sapien
tacgctagccatattaagttattgg

SEQ ID NO: 2836475 - DNA, 25 bp, Homo sapien
ccataggtggagaccgtaaagaggt

SEQ ID NO: 2836476 - DNA, 25 bp, Homo sapien
ctgcgttcaggcgttctggttggtt

SEQ ID NO: 2836477 - DNA, 25 bp, Homo sapien
ttcaggcgttctggttggttgcctc

SEQ ID NO: 2836478 - DNA, 25 bp, Homo sapien
cgttcaggcgttctggttggttgcc

SEQ ID NO: 2836479 - DNA, 25 bp, Homo sapien
caggcgttctggttggttgcctcat

SEQ ID NO: 2836480 - DNA, 25 bp, Homo sapien
gccttgcaggcagcaaagactagta

SEQ ID NO: 2836481 - DNA, 25 bp, Homo sapien
cttgcaggcagcaaagactagtatg

SEQ ID NO: 2836482 - DNA, 25 bp, Homo sapien
gagtggctataatgaatagtgatag

SEQ ID NO: 2836483 - DNA, 25 bp, Homo sapien
tatgagagtggctataatgaatagt

SEQ ID NO: 2836484 - DNA, 25 bp, Homo sapien
cgaaatcattcgttttgtttgaact

SEQ ID NO: 2836485 - DNA, 25 bp, Homo sapien
aatcattcgttttgtttgaactata

SEQ ID NO: 2836486 - DNA, 25 bp, Homo sapien
gagtcgaaatcattcgttttgtttg

SEQ ID NO: 2836487 - DNA, 25 bp, Homo sapien
ttcgttttgtttgaactatatacca

SEQ ID NO: 2836488 - DNA, 25 bp, Homo sapien
aaatgctccgtattaatgctgtcag

SEQ ID NO: 2836489 - DNA, 25 bp, Homo sapien
gctggcttaccacacgattttgaat

SEQ ID NO: 2836490 - DNA, 25 bp, Homo sapien
cagcttagtgcaatggtgtaggaaa

SEQ ID NO: 2836491 - DNA, 25 bp, Homo sapien
tatgttatagggctttgtagccacc

SEQ ID NO: 2836492 - DNA, 25 bp, Homo sapien
tcactaaggaagtggaacggcagcc

SEQ ID NO: 2836493 - DNA, 25 bp, Homo sapien
tgcgtagccctgagtggaaatgcct

SEQ ID NO: 2836494 - DNA, 25 bp, Homo sapien
cattaatagttgcaattggcttggc

SEQ ID NO: 2836495 - DNA, 25 bp, Homo sapien
tcatgttaagtgttggcgccgaggc

SEQ ID NO: 2836496 - DNA, 25 bp, Homo sapien
tgctgtgcaggttccccttggacat

SEQ ID NO: 2836497 - DNA, 25 bp, Homo sapien
tttgtgtacttaggatcagttgagc

SEQ ID NO: 2836498 - DNA, 25 bp, Homo sapien
cagttgagccccgtgggtaacttgg

SEQ ID NO: 2836499 - DNA, 25 bp, Homo sapien
tatttcttggcgaattttaatgtct

SEQ ID NO: 2836500 - DNA, 25 bp, Homo sapien
tgctccttcactccttaatagctct

SEQ ID NO: 2836501 - DNA, 25 bp, Homo sapien
tcctcagtcgcactggacgctcctt

SEQ ID NO: 2836502 - DNA, 25 bp, Homo sapien
tccttgaggaacgggagctgtgacc

SEQ ID NO: 2836503 - DNA, 25 bp, Homo sapien
cttgaggaacgggagctgtgaccag

SEQ ID NO: 2836504 - DNA, 25 bp, Homo sapien
ttggtaactgtttatatcacatgct

SEQ ID NO: 2836505 - DNA, 25 bp, Homo sapien
actgtttatatcacatgctttcagg

SEQ ID NO: 2836506 - DNA, 25 bp, Homo sapien
cagattggtaactgtttatatcaca

SEQ ID NO: 2836507 - DNA, 25 bp, Homo sapien
tgtttatatcacatgctttcaggaa

SEQ ID NO: 2836508 - DNA, 25 bp, Homo sapien
ccaaagacagaaccttagaaggttg

SEQ ID NO: 2836509 - DNA, 25 bp, Homo sapien
aagacctgcttgttttcagggagaa

SEQ ID NO: 2836510 - DNA, 25 bp, Homo sapien
cagaaccttagaaggttgattttga

SEQ ID NO: 2836511 - DNA, 25 bp, Homo sapien
gacctgcttgttttcagggagaagc

SEQ ID NO: 2836512 - DNA, 25 bp, Homo sapien
ggtggttctgtttctcacacgagga

SEQ ID NO: 2836513 - DNA, 25 bp, Homo sapien
gaacaaaattatccagttgggagcc

SEQ ID NO: 2836514 - DNA, 25 bp, Homo sapien
aacgttttagccttgtgagtgtggg

SEQ ID NO: 2836515 - DNA, 25 bp, Homo sapien
gtctgaagccgcttgaagactttgg

SEQ ID NO: 2836516 - DNA, 25 bp, Homo sapien
gatgtcgctgccttttggtatttat

SEQ ID NO: 2836517 - DNA, 25 bp, Homo sapien
cgctgccttttggtatttatcataa

SEQ ID NO: 2836518 - DNA, 25 bp, Homo sapien
taaggcatgtctccagatccgtcat

SEQ ID NO: 2836519 - DNA, 25 bp, Homo sapien
tatcataaggcatgtctccagatcc

SEQ ID NO: 2836520 - DNA, 25 bp, Homo sapien
ttctcactaaggaacagcagcagag

SEQ ID NO: 2836521 - DNA, 25 bp, Homo sapien
gaaaccagtcctgcttcagtagact

SEQ ID NO: 2836522 - DNA, 25 bp, Homo sapien
tgttgccatcgactttggtgccaga

SEQ ID NO: 2836523 - DNA, 25 bp, Homo sapien
agtcattttctcactaaggaacagc

SEQ ID NO: 2836524 - DNA, 25 bp, Homo sapien
ccagagggtagtggagactttgacc

SEQ ID NO: 2836525 - DNA, 25 bp, Homo sapien
taagattaggcagacccagagggta

SEQ ID NO: 2836526 - DNA, 25 bp, Homo sapien
acaatcccttggtgagtggccctct

SEQ ID NO: 2836527 - DNA, 25 bp, Homo sapien
gaggttgagtgtcatgtccacagac

SEQ ID NO: 2836528 - DNA, 25 bp, Homo sapien
ggaattcttggactgttttctatct

SEQ ID NO: 2836529 - DNA, 25 bp, Homo sapien
ccataaatgattttgagggtggaat

SEQ ID NO: 2836530 - DNA, 25 bp, Homo sapien
ggatgaatccatatttgctttgcca

SEQ ID NO: 2836531 - DNA, 25 bp, Homo sapien
ggtccagattgtactggatgaatcc

SEQ ID NO: 2836532 - DNA, 25 bp, Homo sapien
tcttggcctgagttattggaaatgt

SEQ ID NO: 2836533 - DNA, 25 bp, Homo sapien
gctaagggggactcatttcgtctgg

SEQ ID NO: 2836534 - DNA, 25 bp, Homo sapien
atttcatagttggatattcttggcc

SEQ ID NO: 2836535 - DNA, 25 bp, Homo sapien
cagtagcttgtggatgttgtcttca

SEQ ID NO: 2836536 - DNA, 25 bp, Homo sapien
tctgagccttgtaaaggtgaatttc

SEQ ID NO: 2836537 - DNA, 25 bp, Homo sapien
ttggctgagatgctcgctgacagat

SEQ ID NO: 2836538 - DNA, 25 bp, Homo sapien
caaggaaatcttcccgtgccgacac

SEQ ID NO: 2836539 - DNA, 25 bp, Homo sapien
gacagattgccagttccgcaaggaa

SEQ ID NO: 2836540 - DNA, 25 bp, Homo sapien
ctcaggcttagggtagaggacaatg

SEQ ID NO: 2836541 - DNA, 25 bp, Homo sapien
tccagcagtaggtcacagtcctgct

SEQ ID NO: 2836542 - DNA, 25 bp, Homo sapien
cttgcctgcctttatgtggttggat

SEQ ID NO: 2836543 - DNA, 25 bp, Homo sapien
gagagcagtcctttcatagttgatt

SEQ ID NO: 2836544 - DNA, 25 bp, Homo sapien
tgttgaattgttcttaaggcatcat

SEQ ID NO: 2836545 - DNA, 25 bp, Homo sapien
ggcatcatatctagaagcaaagaaa

SEQ ID NO: 2836546 - DNA, 25 bp, Homo sapien
aaggcatcatatctagaagcaaaga

SEQ ID NO: 2836547 - DNA, 25 bp, Homo sapien
ctggctgttgaattgttcttaaggc

SEQ ID NO: 2836548 - DNA, 25 bp, Homo sapien
gaattaggaactcgacagatagtga

SEQ ID NO: 2836549 - DNA, 25 bp, Homo sapien
gtggcaggatcacggtttattgcag

SEQ ID NO: 2836550 - DNA, 25 bp, Homo sapien
caagcaattctggtgactacaaatg

SEQ ID NO: 2836551 - DNA, 25 bp, Homo sapien
gccagaagtggcattcttaaattca

SEQ ID NO: 2836552 - DNA, 25 bp, Homo sapien
tgtcacgtgtagcacagtggagaaa

SEQ ID NO: 2836553 - DNA, 25 bp, Homo sapien
tctgagaggctaaacttgatggctg

SEQ ID NO: 2836554 - DNA, 25 bp, Homo sapien
atatgtcacgtgtagcacagtggag

SEQ ID NO: 2836555 - DNA, 25 bp, Homo sapien
agaagtctgagaggctaaacttgat

SEQ ID NO: 2836556 - DNA, 25 bp, Homo sapien
gacagtggtttctctgatgtggtaa

SEQ ID NO: 2836557 - DNA, 25 bp, Homo sapien
agatattgtcaaaattggaggcccc

SEQ ID NO: 2836558 - DNA, 25 bp, Homo sapien
tcaatttgaaagagatattgtcaaa

SEQ ID NO: 2836559 - DNA, 25 bp, Homo sapien
tctctgatgtggtaagctttggctt

SEQ ID NO: 2836560 - DNA, 25 bp, Homo sapien
gcaaaccgggccgacacatggttga

SEQ ID NO: 2836561 - DNA, 25 bp, Homo sapien
tgacctccacagatagcaaaccggg

SEQ ID NO: 2836562 - DNA, 25 bp, Homo sapien
gacctcttgcatgacctccacagat

SEQ ID NO: 2836563 - DNA, 25 bp, Homo sapien
ttgacgatgtccttttctacaatga

SEQ ID NO: 2836564 - DNA, 25 bp, Homo sapien
ctgaaaatagtgattactttctgac

SEQ ID NO: 2836565 - DNA, 25 bp, Homo sapien
aatagtgattactttctgacattga

SEQ ID NO: 2836566 - DNA, 25 bp, Homo sapien
cattgataggatttaggaaacctct

SEQ ID NO: 2836567 - DNA, 25 bp, Homo sapien
tctgacattgataggatttaggaaa

SEQ ID NO: 2836568 - DNA, 25 bp, Homo sapien
gctgcttaggtcacgcagagcatga

SEQ ID NO: 2836569 - DNA, 25 bp, Homo sapien
tgagatggtgctgcttaggtcacgc

SEQ ID NO: 2836570 - DNA, 25 bp, Homo sapien
ctatctgtggctgagatggtgctgc

SEQ ID NO: 2836571 - DNA, 25 bp, Homo sapien
attggctgactctccccggctatct

SEQ ID NO: 2836572 - DNA, 25 bp, Homo sapien
agggcacaggagatggcccttgggc

SEQ ID NO: 2836573 - DNA, 25 bp, Homo sapien
gcacaggagatggcccttgggcttc

SEQ ID NO: 2836574 - DNA, 25 bp, Homo sapien
tgaaagggcacaggagatggccctt

SEQ ID NO: 2836575 - DNA, 25 bp, Homo sapien
ctgaaagggcacaggagatggccct

SEQ ID NO: 2836576 - DNA, 25 bp, Homo sapien
tggtttcctgtttgctttccactca

SEQ ID NO: 2836577 - DNA, 25 bp, Homo sapien
ggtttcctgtttgctttccactcac

SEQ ID NO: 2836578 - DNA, 25 bp, Homo sapien
ctctggtttcctgtttgctttccac

SEQ ID NO: 2836579 - DNA, 25 bp, Homo sapien
tctggtttcctgtttgctttccact

SEQ ID NO: 2836580 - DNA, 25 bp, Homo sapien
tcatttccagactaaagtcttcatc

SEQ ID NO: 2836581 - DNA, 25 bp, Homo sapien
cctttttgctgaatggaggcactca

SEQ ID NO: 2836582 - DNA, 25 bp, Homo sapien
taaagcaaggattcccttcgtggcc

SEQ ID NO: 2836583 - DNA, 25 bp, Homo sapien
cactggtaatgcaacagaatgccca

SEQ ID NO: 2836584 - DNA, 25 bp, Homo sapien
gcctcatgattgctgggtgcccata

SEQ ID NO: 2836585 - DNA, 25 bp, Homo sapien
tgagctctcactcatcacgaagtgg

SEQ ID NO: 2836586 - DNA, 25 bp, Homo sapien
ggcaagctgactttaagggcacaag

SEQ ID NO: 2836587 - DNA, 25 bp, Homo sapien
tgcagagcaaacacggcagattgga

SEQ ID NO: 2836588 - DNA, 25 bp, Homo sapien
aaagcagagcccgtgtgtgtcatgt

SEQ ID NO: 2836589 - DNA, 25 bp, Homo sapien
ttattttcgtagcaccagctgggga

SEQ ID NO: 2836590 - DNA, 25 bp, Homo sapien
cctgagatatgccagctttagaatc

SEQ ID NO: 2836591 - DNA, 25 bp, Homo sapien
attttcgtagcaccagctggggagg

SEQ ID NO: 2836592 - DNA, 25 bp, Homo sapien
tgcctgagatatgccagctttagaa

SEQ ID NO: 2836593 - DNA, 25 bp, Homo sapien
cagagaagttctgtggcagtgaatg

SEQ ID NO: 2836594 - DNA, 25 bp, Homo sapien
ggtgctgtgagttaaacccaggctc

SEQ ID NO: 2836595 - DNA, 25 bp, Homo sapien
gtgctgtgagttaaacccaggctct

SEQ ID NO: 2836596 - DNA, 25 bp, Homo sapien
tccaaagttcgtgctcttaacctcc

SEQ ID NO: 2836597 - DNA, 25 bp, Homo sapien
tccataaatttctctgtgcatatat

SEQ ID NO: 2836598 - DNA, 25 bp, Homo sapien
agaaaaagggcaatagtgaatctat

SEQ ID NO: 2836599 - DNA, 25 bp, Homo sapien
cagagaagctcggttaagaaaaagg

SEQ ID NO: 2836600 - DNA, 25 bp, Homo sapien
actgtgcttaagactgttttgttac

SEQ ID NO: 2836601 - DNA, 25 bp, Homo sapien
gacgctagataaaggaagtgtcctt

SEQ ID NO: 2836602 - DNA, 25 bp, Homo sapien
aaagaaaagtcatgcatcccgggtt

SEQ ID NO: 2836603 - DNA, 25 bp, Homo sapien
gaaaagtcatgcatcccgggttgct

SEQ ID NO: 2836604 - DNA, 25 bp, Homo sapien
tcttggccacatagtagacgctaga

SEQ ID NO: 2836605 - DNA, 25 bp, Homo sapien
aagagtcaggatgagggccatgcaa

SEQ ID NO: 2836606 - DNA, 25 bp, Homo sapien
gagtcaggatgagggccatgcaagg

SEQ ID NO: 2836607 - DNA, 25 bp, Homo sapien
caggatgagggccatgcaaggggtc

SEQ ID NO: 2836608 - DNA, 25 bp, Homo sapien
gatgagggccatgcaaggggtcagc

SEQ ID NO: 2836609 - DNA, 25 bp, Homo sapien
gcagtcaggctagggattgagtccc

SEQ ID NO: 2836610 - DNA, 25 bp, Homo sapien
tctgggaggcagtgcttatagtcac

SEQ ID NO: 2836611 - DNA, 25 bp, Homo sapien
tggctgtctgactacactgatcctg

SEQ ID NO: 2836612 - DNA, 25 bp, Homo sapien
acagcttaggacaggttacatgacc

SEQ ID NO: 2836613 - DNA, 25 bp, Homo sapien
cagctgcttgacaggtagaggtaga

SEQ ID NO: 2836614 - DNA, 25 bp, Homo sapien
cctctctcgtgagtgctctgcagct

SEQ ID NO: 2836615 - DNA, 25 bp, Homo sapien
tcagcagtggtctgattcatggaat

SEQ ID NO: 2836616 - DNA, 25 bp, Homo sapien
cctgggcagtaccagccagtcagga

SEQ ID NO: 2836617 - DNA, 25 bp, Homo sapien
ttggccacagtccttgatggatgac

SEQ ID NO: 2836618 - DNA, 25 bp, Homo sapien
gccacagtccttgatggatgacggg

SEQ ID NO: 2836619 - DNA, 25 bp, Homo sapien
cagtccttgatggatgacggggtca

SEQ ID NO: 2836620 - DNA, 25 bp, Homo sapien
acagtccttgatggatgacggggtc

SEQ ID NO: 2836621 - DNA, 25 bp, Homo sapien
tctgggactacttctgcccttcgac

SEQ ID NO: 2836622 - DNA, 25 bp, Homo sapien
cttctgcccttcgacccgtctgcag

SEQ ID NO: 2836623 - DNA, 25 bp, Homo sapien
cttcgacccgtctgcagctgtttgg

SEQ ID NO: 2836624 - DNA, 25 bp, Homo sapien
gcccttcgacccgtctgcagctgtt

SEQ ID NO: 2836625 - DNA, 25 bp, Homo sapien
ggttttaatagacgtacatggacaa

SEQ ID NO: 2836626 - DNA, 25 bp, Homo sapien
tatggttttaatagacgtacatgga

SEQ ID NO: 2836627 - DNA, 25 bp, Homo sapien
ttagcacgctcggactatggtttta

SEQ ID NO: 2836628 - DNA, 25 bp, Homo sapien
gcacgctcggactatggttttaata

SEQ ID NO: 2836629 - DNA, 25 bp, Homo sapien
gctgtcgctccgtggccttaatata

SEQ ID NO: 2836630 - DNA, 25 bp, Homo sapien
tcgggaaatcctaggcaagtccagg

SEQ ID NO: 2836631 - DNA, 25 bp, Homo sapien
cgcgccatcccgagagaaattgcaa

SEQ ID NO: 2836632 - DNA, 25 bp, Homo sapien
tacagtcagtccaacatacacaggg

SEQ ID NO: 2836633 - DNA, 25 bp, Homo sapien
gccgtagccaaacgacgagtgctgt

SEQ ID NO: 2836634 - DNA, 25 bp, Homo sapien
gctcgagttgcacgtgtcccggtag

SEQ ID NO: 2836635 - DNA, 25 bp, Homo sapien
ctgttgtactggcacgcgttgaggc

SEQ ID NO: 2836636 - DNA, 25 bp, Homo sapien
gcgtacacgtcctcgtagggctgca

SEQ ID NO: 2836637 - DNA, 25 bp, Homo sapien
gcagaaggcaaagggtcctactgat

SEQ ID NO: 2836638 - DNA, 25 bp, Homo sapien
cagaaggcaaagggtcctactgatg

SEQ ID NO: 2836639 - DNA, 25 bp, Homo sapien
agaaggcaaagggtcctactgatgg

SEQ ID NO: 2836640 - DNA, 25 bp, Homo sapien
cttgcaactgctggcttgtgaagtg

SEQ ID NO: 2836641 - DNA, 25 bp, Homo sapien
tgtgaagtgcgtacgttgccgccgc

SEQ ID NO: 2836642 - DNA, 25 bp, Homo sapien
ttcttggctgggtcgtctgcgccgc

SEQ ID NO: 2836643 - DNA, 25 bp, Homo sapien
tctggaacgtggcctctagctcttg

SEQ ID NO: 2836644 - DNA, 25 bp, Homo sapien
caggacggggagcgggtcacctggg

SEQ ID NO: 2836645 - DNA, 25 bp, Homo sapien
gggagcgggtcacctgggcttacgc

SEQ ID NO: 2836646 - DNA, 25 bp, Homo sapien
tcacctgggcttacgccccgttgca

SEQ ID NO: 2836647 - DNA, 25 bp, Homo sapien
gagcgggtcacctgggcttacgccc

SEQ ID NO: 2836648 - DNA, 25 bp, Homo sapien
tccagctcggacaaaaaaaggcagc

SEQ ID NO: 2836649 - DNA, 25 bp, Homo sapien
gaaacattcagctgtgtattaagaa

SEQ ID NO: 2836650 - DNA, 25 bp, Homo sapien
aagaaatgaacgcagaagaggcgcc

SEQ ID NO: 2836651 - DNA, 25 bp, Homo sapien
ggcccagttcgctgctggaaaaaag

SEQ ID NO: 2836652 - DNA, 25 bp, Homo sapien
agctccgtgtcagacgactcgctgg

SEQ ID NO: 2836653 - DNA, 25 bp, Homo sapien
ggcggagttctcgagcggctcgcgg

SEQ ID NO: 2836654 - DNA, 25 bp, Homo sapien
ctggcagctccgtgtcagacgactc

SEQ ID NO: 2836655 - DNA, 25 bp, Homo sapien
agacgactcgctggcggagttctcg

SEQ ID NO: 2836656 - DNA, 25 bp, Homo sapien
tggggaccgcggcgggcgctccagg

SEQ ID NO: 2836657 - DNA, 25 bp, Homo sapien
gaggtggggaccgcggcgggcgctc

SEQ ID NO: 2836658 - DNA, 25 bp, Homo sapien
ggctgggcgcgccccgccgccctgg

SEQ ID NO: 2836659 - DNA, 25 bp, Homo sapien
ggaccgcggcgggcgctccaggggc

SEQ ID NO: 2836660 - DNA, 25 bp, Homo sapien
ccgtgcccgccccatggaccgcccg

SEQ ID NO: 2836661 - DNA, 25 bp, Homo sapien
gcgcctgcagcgacgccgtgcccgc

SEQ ID NO: 2836662 - DNA, 25 bp, Homo sapien
cgtgcccgccccatggaccgcccgg

SEQ ID NO: 2836663 - DNA, 25 bp, Homo sapien
cagcgacgccgtgcccgccccatgg

SEQ ID NO: 2836664 - DNA, 25 bp, Homo sapien
gcttctcgcgactgggcgcctggct

SEQ ID NO: 2836665 - DNA, 25 bp, Homo sapien
tctaaggctccggacggcgccggca

SEQ ID NO: 2836666 - DNA, 25 bp, Homo sapien
gtctgtcttaaagcgacagcgcgca

SEQ ID NO: 2836667 - DNA, 25 bp, Homo sapien
gcagcttctcgcgactgggcgcctg

SEQ ID NO: 2836668 - DNA, 25 bp, Homo sapien
ttgtttcgcctagaatcaactcccg

SEQ ID NO: 2836669 - DNA, 25 bp, Homo sapien
tttcgcctagaatcaactcccgtct

SEQ ID NO: 2836670 - DNA, 25 bp, Homo sapien
caaatgacttgtttcgcctagaatc

SEQ ID NO: 2836671 - DNA, 25 bp, Homo sapien
gacttgtttcgcctagaatcaactc

SEQ ID NO: 2836672 - DNA, 25 bp, Homo sapien
caacaattgttagctggccccgaga

SEQ ID NO: 2836673 - DNA, 25 bp, Homo sapien
tccaatgggccttcactgggcacag

SEQ ID NO: 2836674 - DNA, 25 bp, Homo sapien
tcagcgtcttgagcaaacaggccac

SEQ ID NO: 2836675 - DNA, 25 bp, Homo sapien
cctcgagtccttgcacgtaggtgaa

SEQ ID NO: 2836676 - DNA, 25 bp, Homo sapien
ctgtgatcagctccaccagacacag

SEQ ID NO: 2836677 - DNA, 25 bp, Homo sapien
gcaacccaagggagctgcgccagga

SEQ ID NO: 2836678 - DNA, 25 bp, Homo sapien
aacccaagggagctgcgccaggatt

SEQ ID NO: 2836679 - DNA, 25 bp, Homo sapien
cccaagggagctgcgccaggattgt

SEQ ID NO: 2836680 - DNA, 25 bp, Homo sapien
gaagatccctcctttcaaggagata

SEQ ID NO: 2836681 - DNA, 25 bp, Homo sapien
gatattcaggtgttgcagcgtgcta

SEQ ID NO: 2836682 - DNA, 25 bp, Homo sapien
tgctagggagtgtcccttcacagac

SEQ ID NO: 2836683 - DNA, 25 bp, Homo sapien
gagtctcctgcagtagaagatccct

SEQ ID NO: 2836684 - DNA, 25 bp, Homo sapien
tcagaaatccgagacccggttcttg

SEQ ID NO: 2836685 - DNA, 25 bp, Homo sapien
ccattactgcgatcccggctttggg

SEQ ID NO: 2836686 - DNA, 25 bp, Homo sapien
cctttgccgcgggagaataggctcc

SEQ ID NO: 2836687 - DNA, 25 bp, Homo sapien
taggctccaatttacgaagctggtc

SEQ ID NO: 2836688 - DNA, 25 bp, Homo sapien
atgtctttattggacgttacgaagg

SEQ ID NO: 2836689 - DNA, 25 bp, Homo sapien
gaagccgcgggaatgtctttattgg

SEQ ID NO: 2836690 - DNA, 25 bp, Homo sapien
gccgcgggaatgtctttattggacg

SEQ ID NO: 2836691 - DNA, 25 bp, Homo sapien
ggaatgtctttattggacgttacga

SEQ ID NO: 2836692 - DNA, 25 bp, Homo sapien
cggaccgacgtctgctgcttttctg

SEQ ID NO: 2836693 - DNA, 25 bp, Homo sapien
ggcgaagagagccagggcgcggacc

SEQ ID NO: 2836694 - DNA, 25 bp, Homo sapien
ctgggggcacctccgagcgctgcgg

SEQ ID NO: 2836695 - DNA, 25 bp, Homo sapien
tgtgccggcgagagcaggctgcctt

SEQ ID NO: 2836696 - DNA, 25 bp, Homo sapien
cgaagccacggctgaagtcccgggc

SEQ ID NO: 2836697 - DNA, 25 bp, Homo sapien
cagaggggccagcaattccatgggt

SEQ ID NO: 2836698 - DNA, 25 bp, Homo sapien
gccctccatccctggacgcagcggg

SEQ ID NO: 2836699 - DNA, 25 bp, Homo sapien
gaaaaataccctcttgacgcgaagc

SEQ ID NO: 2836700 - DNA, 25 bp, Homo sapien
tgggggtgggggagccctgtgtcac

SEQ ID NO: 2836701 - DNA, 25 bp, Homo sapien
ctgggggtgggggagccctgtgtca

SEQ ID NO: 2836702 - DNA, 25 bp, Homo sapien
aaagcagagggttgatcccgccggt

SEQ ID NO: 2836703 - DNA, 25 bp, Homo sapien
cggtgacggcggctatgactgtgcc

SEQ ID NO: 2836704 - DNA, 25 bp, Homo sapien
tgctaccctcttgaggtgcccggag

SEQ ID NO: 2836705 - DNA, 25 bp, Homo sapien
tgccacgggcttctcaggttgtgcc

SEQ ID NO: 2836706 - DNA, 25 bp, Homo sapien
caggagcaaactgcgcaggactcgg

SEQ ID NO: 2836707 - DNA, 25 bp, Homo sapien
ctgggcgcaggaacgagctcctcgc

SEQ ID NO: 2836708 - DNA, 25 bp, Homo sapien
ggctcctgaccttccgcgccttgcg

SEQ ID NO: 2836709 - DNA, 25 bp, Homo sapien
acacacgccaggagcaaactgcgca

SEQ ID NO: 2836710 - DNA, 25 bp, Homo sapien
ggactctggctcaggtttcggctcc

SEQ ID NO: 2836711 - DNA, 25 bp, Homo sapien
ctggctcaggtttcggctccggctg

SEQ ID NO: 2836712 - DNA, 25 bp, Homo sapien
tctggcactgcacggttcttcggcc

SEQ ID NO: 2836713 - DNA, 25 bp, Homo sapien
tgcgtctgcggctcgtgggctccgg

SEQ ID NO: 2836714 - DNA, 25 bp, Homo sapien
ccagatatctgactgctgcacagga

SEQ ID NO: 2836715 - DNA, 25 bp, Homo sapien
ctagtgagtctctctcatgatcaca

SEQ ID NO: 2836716 - DNA, 25 bp, Homo sapien
tccctccagatatctgactgctgca

SEQ ID NO: 2836717 - DNA, 25 bp, Homo sapien
ctcatgatcacaagctctgcagcca

SEQ ID NO: 2836718 - DNA, 25 bp, Homo sapien
cttttcctctgcagattatttgaag

SEQ ID NO: 2836719 - DNA, 25 bp, Homo sapien
ttcctctgcagattatttgaagtac

SEQ ID NO: 2836720 - DNA, 25 bp, Homo sapien
tctgcagattatttgaagtactctg

SEQ ID NO: 2836721 - DNA, 25 bp, Homo sapien
gcagattatttgaagtactctgtat

SEQ ID NO: 2836722 - DNA, 25 bp, Homo sapien
tgctgattgtcctctctgggcttta

SEQ ID NO: 2836723 - DNA, 25 bp, Homo sapien
tgctgccatgaggagcctaaagagg

SEQ ID NO: 2836724 - DNA, 25 bp, Homo sapien
gctccaaggtgctggattccttgct

SEQ ID NO: 2836725 - DNA, 25 bp, Homo sapien
accaagaagggtttccatggctcca

SEQ ID NO: 2836726 - DNA, 25 bp, Homo sapien
cgcaggtccagagcggcgcgttgca

SEQ ID NO: 2836727 - DNA, 25 bp, Homo sapien
ctgtgccaccggagaaccgtggagc

SEQ ID NO: 2836728 - DNA, 25 bp, Homo sapien
gccagggccgcactcgggcgtctgt

SEQ ID NO: 2836729 - DNA, 25 bp, Homo sapien
tcttccgcgcgaggtgccgggtggc

SEQ ID NO: 2836730 - DNA, 25 bp, Homo sapien
tgtgggcactgtgtccttcgccaga

SEQ ID NO: 2836731 - DNA, 25 bp, Homo sapien
gcatcttctgatagtgggcagctgt

SEQ ID NO: 2836732 - DNA, 25 bp, Homo sapien
ggtcttggctgagggcatcttctga

SEQ ID NO: 2836733 - DNA, 25 bp, Homo sapien
gagacatgaacgtttccctgaaagg

SEQ ID NO: 2836734 - DNA, 25 bp, Homo sapien
tgttggcaaccttgcacaggtgcat

SEQ ID NO: 2836735 - DNA, 25 bp, Homo sapien
ctggtgggtcctggcgccgatggtt

SEQ ID NO: 2836736 - DNA, 25 bp, Homo sapien
gccgatggttgttggcaaccttgca

SEQ ID NO: 2836737 - DNA, 25 bp, Homo sapien
tcctggcgccgatggttgttggcaa

SEQ ID NO: 2836738 - DNA, 25 bp, Homo sapien
ggtgacatggccgtcttggtttttc

SEQ ID NO: 2836739 - DNA, 25 bp, Homo sapien
gggaatctctataccccagagctga

SEQ ID NO: 2836740 - DNA, 25 bp, Homo sapien
ctgcagtgacctggcatgcatgagc

SEQ ID NO: 2836741 - DNA, 25 bp, Homo sapien
tccaggtgaatcctctcaccctttg

SEQ ID NO: 2836742 - DNA, 25 bp, Homo sapien
gccaaagatgggcttcccgaaggtc

SEQ ID NO: 2836743 - DNA, 25 bp, Homo sapien
agtaggcctttcctcggtcagcaca

SEQ ID NO: 2836744 - DNA, 25 bp, Homo sapien
cattggctgaacacacagtaggcct

SEQ ID NO: 2836745 - DNA, 25 bp, Homo sapien
agcacattcagtggggtctgccaga

SEQ ID NO: 2836746 - DNA, 25 bp, Homo sapien
cagcctgtgaacgagccgctcctcg

SEQ ID NO: 2836747 - DNA, 25 bp, Homo sapien
ccgctcctcgtaggctgagcctgcc

SEQ ID NO: 2836748 - DNA, 25 bp, Homo sapien
tgtgggagtgggctgccgttgggcc

SEQ ID NO: 2836749 - DNA, 25 bp, Homo sapien
cagtgtgtgggagtgggctgccgtt

SEQ ID NO: 2836750 - DNA, 25 bp, Homo sapien
ccagtagtacggaggaagggcagag

SEQ ID NO: 2836751 - DNA, 25 bp, Homo sapien
gaaccagtagtacggaggaagggca

SEQ ID NO: 2836752 - DNA, 25 bp, Homo sapien
ctgcgaaccagtagtacggaggaag

SEQ ID NO: 2836753 - DNA, 25 bp, Homo sapien
tgcgaaccagtagtacggaggaagg

SEQ ID NO: 2836754 - DNA, 25 bp, Homo sapien
tgcgtggggcaagagcgtcacagga

SEQ ID NO: 2836755 - DNA, 25 bp, Homo sapien
gagaacggcagtgtgagttttggta

SEQ ID NO: 2836756 - DNA, 25 bp, Homo sapien
ggggcaagagcgtcacaggagctgg

SEQ ID NO: 2836757 - DNA, 25 bp, Homo sapien
ggagagaacggcagtgtgagttttg

SEQ ID NO: 2836758 - DNA, 25 bp, Homo sapien
ctggtgggtagttctggcattggcc

SEQ ID NO: 2836759 - DNA, 25 bp, Homo sapien
catggctccatcagtgcctgaagcc

SEQ ID NO: 2836760 - DNA, 25 bp, Homo sapien
ggctccatcagtgcctgaagcctgg

SEQ ID NO: 2836761 - DNA, 25 bp, Homo sapien
gtgggtagttctggcattggcctga

SEQ ID NO: 2836762 - DNA, 25 bp, Homo sapien
gggaggagggttgtcccagcctcta

SEQ ID NO: 2836763 - DNA, 25 bp, Homo sapien
ggaggagggttgtcccagcctctag

SEQ ID NO: 2836764 - DNA, 25 bp, Homo sapien
cacagcgcctgaattggccaggagc

SEQ ID NO: 2836765 - DNA, 25 bp, Homo sapien
agcgcctgaattggccaggagcatg

SEQ ID NO: 2836766 - DNA, 25 bp, Homo sapien
caggagcatggtgcaggccaggtga

SEQ ID NO: 2836767 - DNA, 25 bp, Homo sapien
cagccacagcgcctgaattggccag

SEQ ID NO: 2836768 - DNA, 25 bp, Homo sapien
caggtccgctgcccctcccatggaa

SEQ ID NO: 2836769 - DNA, 25 bp, Homo sapien
tccgctgcccctcccatggaaagct

SEQ ID NO: 2836770 - DNA, 25 bp, Homo sapien
ggtccgctgcccctcccatggaaag

SEQ ID NO: 2836771 - DNA, 25 bp, Homo sapien
ccgctgcccctcccatggaaagctc

SEQ ID NO: 2836772 - DNA, 25 bp, Homo sapien
ttcctgagatgttggggcacagcca

SEQ ID NO: 2836773 - DNA, 25 bp, Homo sapien
ggtcttcctgagatgttggggcaca

SEQ ID NO: 2836774 - DNA, 25 bp, Homo sapien
ttggggcacagccatagtacccacc

SEQ ID NO: 2836775 - DNA, 25 bp, Homo sapien
ggcacagccatagtacccacccttg

SEQ ID NO: 2836776 - DNA, 25 bp, Homo sapien
cagggtaccgactacaaagaatgcc

SEQ ID NO: 2836777 - DNA, 25 bp, Homo sapien
tctgctacatagtaccaacttggct

SEQ ID NO: 2836778 - DNA, 25 bp, Homo sapien
tacttgttcatgtctgttgtcaggc

SEQ ID NO: 2836779 - DNA, 25 bp, Homo sapien
aacttggctcctacacagggtaccg

SEQ ID NO: 2836780 - DNA, 25 bp, Homo sapien
ccaggctgctctaggttctctgttt

SEQ ID NO: 2836781 - DNA, 25 bp, Homo sapien
gataacacccgggatcctaaggcta

SEQ ID NO: 2836782 - DNA, 25 bp, Homo sapien
aggtctaacgttgtggtttctgcca

SEQ ID NO: 2836783 - DNA, 25 bp, Homo sapien
tgtagaacttcttatggccctgctg

SEQ ID NO: 2836784 - DNA, 25 bp, Homo sapien
tgtaagtggccgcacgagagaaatc

SEQ ID NO: 2836785 - DNA, 25 bp, Homo sapien
ccattatcgggaaagagctagacta

SEQ ID NO: 2836786 - DNA, 25 bp, Homo sapien
tcccttccgggcaatgaacttatct

SEQ ID NO: 2836787 - DNA, 25 bp, Homo sapien
taccggctgtgttgtatccagcagg

SEQ ID NO: 2836788 - DNA, 25 bp, Homo sapien
ggctttccccagatatgaccattgt

SEQ ID NO: 2836789 - DNA, 25 bp, Homo sapien
gagctgagcatattgtgtttctgag

SEQ ID NO: 2836790 - DNA, 25 bp, Homo sapien
tgatcaggatcaccagaactggggc

SEQ ID NO: 2836791 - DNA, 25 bp, Homo sapien
cattgtgtggatcttgtgtggcaga

SEQ ID NO: 2836792 - DNA, 25 bp, Homo sapien
gacctcatggcctgtagagtgagga

SEQ ID NO: 2836793 - DNA, 25 bp, Homo sapien
tcatcataccgtggtacaaaaaggt

SEQ ID NO: 2836794 - DNA, 25 bp, Homo sapien
cttatagacaatgcaaagtgtgtcc

SEQ ID NO: 2836795 - DNA, 25 bp, Homo sapien
tgcgttgagatgaggcactgactcc

SEQ ID NO: 2836796 - DNA, 25 bp, Homo sapien
tgtagtctcgtagtatgtatctagc

SEQ ID NO: 2836797 - DNA, 25 bp, Homo sapien
tgagctcccacggacccatatgtgt

SEQ ID NO: 2836798 - DNA, 25 bp, Homo sapien
tctcgtagtatgtatctagctgcag

SEQ ID NO: 2836799 - DNA, 25 bp, Homo sapien
gacccatatgtgtagtctcgtagta

SEQ ID NO: 2836800 - DNA, 25 bp, Homo sapien
caggagaggaaacatgagcttaaca

SEQ ID NO: 2836801 - DNA, 25 bp, Homo sapien
cttattgtgaggtgcagcctcgggc

SEQ ID NO: 2836802 - DNA, 25 bp, Homo sapien
gcagagccccaggatttacagacat

SEQ ID NO: 2836803 - DNA, 25 bp, Homo sapien
gttccctgcaatccggctgctctgt

SEQ ID NO: 2836804 - DNA, 25 bp, Homo sapien
tgggccgtgactcctgttgagaact

SEQ ID NO: 2836805 - DNA, 25 bp, Homo sapien
aactgggtggaaaggcattcccagt

SEQ ID NO: 2836806 - DNA, 25 bp, Homo sapien
caggtgagagccagatagagaaaga

SEQ ID NO: 2836807 - DNA, 25 bp, Homo sapien
tgggcactctgtcatccttccctct

SEQ ID NO: 2836808 - DNA, 25 bp, Homo sapien
catcagtgactctaacaagggtggg

SEQ ID NO: 2836809 - DNA, 25 bp, Homo sapien
ccctgggtatgacgtgtcttcagca

SEQ ID NO: 2836810 - DNA, 25 bp, Homo sapien
tccagccctgggtatgacgtgtctt

SEQ ID NO: 2836811 - DNA, 25 bp, Homo sapien
gacgctcaggcggaatggttccagc

SEQ ID NO: 2836812 - DNA, 25 bp, Homo sapien
aagggcatgtcctggcgcttgtcca

SEQ ID NO: 2836813 - DNA, 25 bp, Homo sapien
gctgggtggccaatgcatgacttca

SEQ ID NO: 2836814 - DNA, 25 bp, Homo sapien
cttccatccaaaggccaggccgtgg

SEQ ID NO: 2836815 - DNA, 25 bp, Homo sapien
cacctgcccacctattgctgggtgg

SEQ ID NO: 2836816 - DNA, 25 bp, Homo sapien
ctttgaggggaacatagggctgctt

SEQ ID NO: 2836817 - DNA, 25 bp, Homo sapien
ctgggtgtcctttgaggggaacata

SEQ ID NO: 2836818 - DNA, 25 bp, Homo sapien
gtcctttgaggggaacatagggctg

SEQ ID NO: 2836819 - DNA, 25 bp, Homo sapien
tttgaggggaacatagggctgcttt

SEQ ID NO: 2836820 - DNA, 25 bp, Homo sapien
cctcatcttggcctcattggttgtt

SEQ ID NO: 2836821 - DNA, 25 bp, Homo sapien
tgtgtagatcctcatcttggcctca

SEQ ID NO: 2836822 - DNA, 25 bp, Homo sapien
agatcctcatcttggcctcattggt

SEQ ID NO: 2836823 - DNA, 25 bp, Homo sapien
gatcctcatcttggcctcattggtt

SEQ ID NO: 2836824 - DNA, 25 bp, Homo sapien
tggccgagtcagctgcagccttcat

SEQ ID NO: 2836825 - DNA, 25 bp, Homo sapien
ctggccgagtcagctgcagccttca

SEQ ID NO: 2836826 - DNA, 25 bp, Homo sapien
cagcttctacctcgcagcaggagga

SEQ ID NO: 2836827 - DNA, 25 bp, Homo sapien
ttctacctcgcagcaggaggaggga

SEQ ID NO: 2836828 - DNA, 25 bp, Homo sapien
tgggccctgcgtgtttccggcaggg

SEQ ID NO: 2836829 - DNA, 25 bp, Homo sapien
tcacagcttctacctcgcagcagga

SEQ ID NO: 2836830 - DNA, 25 bp, Homo sapien
tagtcataggccctcaaagctagag

SEQ ID NO: 2836831 - DNA, 25 bp, Homo sapien
gaacctggtggctcaaaggtccaac

SEQ ID NO: 2836832 - DNA, 25 bp, Homo sapien
tgtcctgcgatgtccacagtgcgag

SEQ ID NO: 2836833 - DNA, 25 bp, Homo sapien
ggtgtgcgtaccatctcaggaggcc

SEQ ID NO: 2836834 - DNA, 25 bp, Homo sapien
tttctactctggtcagacttttggc

SEQ ID NO: 2836835 - DNA, 25 bp, Homo sapien
tctactctggtcagacttttggcag

SEQ ID NO: 2836836 - DNA, 25 bp, Homo sapien
ttggcagccttgaatacgaagtgtt

SEQ ID NO: 2836837 - DNA, 25 bp, Homo sapien
ccttgaatacgaagtgttctagaag

SEQ ID NO: 2836838 - DNA, 25 bp, Homo sapien
cagaccccaacaagaatcttgccag

SEQ ID NO: 2836839 - DNA, 25 bp, Homo sapien
tcctcttctagggtaaacaaggcag

SEQ ID NO: 2836840 - DNA, 25 bp, Homo sapien
tctagggtaaacaaggcagacccca

SEQ ID NO: 2836841 - DNA, 25 bp, Homo sapien
aggcagaccccaacaagaatcttgc

SEQ ID NO: 2836842 - DNA, 25 bp, Homo sapien
gagcttcggtttctcagtgagggtt

SEQ ID NO: 2836843 - DNA, 25 bp, Homo sapien
tctcagtgagggtttcagtggataa

SEQ ID NO: 2836844 - DNA, 25 bp, Homo sapien
tctcctttgcaatgaaactgagctt

SEQ ID NO: 2836845 - DNA, 25 bp, Homo sapien
tgcaatgaaactgagcttcggtttc

SEQ ID NO: 2836846 - DNA, 25 bp, Homo sapien
gaactcctgacacgtggcttgattt

SEQ ID NO: 2836847 - DNA, 25 bp, Homo sapien
taaatcctggcttccgaagaagctg

SEQ ID NO: 2836848 - DNA, 25 bp, Homo sapien
ggagcccttataaaccctgatcagc

SEQ ID NO: 2836849 - DNA, 25 bp, Homo sapien
tctgatgttaccacctagagaatgc

SEQ ID NO: 2836850 - DNA, 25 bp, Homo sapien
ctgttgcctgccctttgggcccgct

SEQ ID NO: 2836851 - DNA, 25 bp, Homo sapien
cctagtgtccagctgctttctgcct

SEQ ID NO: 2836852 - DNA, 25 bp, Homo sapien
ccagctgctttctgcctgttgcctg

SEQ ID NO: 2836853 - DNA, 25 bp, Homo sapien
tgccatggatgggagaggtgcgcat

SEQ ID NO: 2836854 - DNA, 25 bp, Homo sapien
gagagtggacttatcccaggcccaa

SEQ ID NO: 2836855 - DNA, 25 bp, Homo sapien
tccagatggatggttcccggaactc

SEQ ID NO: 2836856 - DNA, 25 bp, Homo sapien
ccttgtagagacatgcagtgtgggc

SEQ ID NO: 2836857 - DNA, 25 bp, Homo sapien
gcttgacttattggaaggagccaca

SEQ ID NO: 2836858 - DNA, 25 bp, Homo sapien
acagtcccagtggatcccggtggct

SEQ ID NO: 2836859 - DNA, 25 bp, Homo sapien
aggcaggtgacggcagaccccagcc

SEQ ID NO: 2836860 - DNA, 25 bp, Homo sapien
gtcttcttggcaggagggtcacagt

SEQ ID NO: 2836861 - DNA, 25 bp, Homo sapien
gcctctcatcgacagtggccagcag

SEQ ID NO: 2836862 - DNA, 25 bp, Homo sapien
cttctcaatcttcatatgttctctc

SEQ ID NO: 2836863 - DNA, 25 bp, Homo sapien
tcttttccacatctgcctccacttg

SEQ ID NO: 2836864 - DNA, 25 bp, Homo sapien
ccacttgttccacctttgatatttg

SEQ ID NO: 2836865 - DNA, 25 bp, Homo sapien
ccacatctgcctccacttgttccac

SEQ ID NO: 2836866 - DNA, 25 bp, Homo sapien
cgtgattcatgcttgtgaggaaggc

SEQ ID NO: 2836867 - DNA, 25 bp, Homo sapien
ggttttgatgattcgtgattcatgc

SEQ ID NO: 2836868 - DNA, 25 bp, Homo sapien
gatgattcgtgattcatgcttgtga

SEQ ID NO: 2836869 - DNA, 25 bp, Homo sapien
ttgcttgggttttgatgattcgtga

SEQ ID NO: 2836870 - DNA, 25 bp, Homo sapien
tgagctaatagcatgaggcgccttt

SEQ ID NO: 2836871 - DNA, 25 bp, Homo sapien
tgccagcgccaagtgctcagaaatc

SEQ ID NO: 2836872 - DNA, 25 bp, Homo sapien
cctgagaagtggctgataaagtgcc

SEQ ID NO: 2836873 - DNA, 25 bp, Homo sapien
actgcgaagtgcaccggtggccttg

SEQ ID NO: 2836874 - DNA, 25 bp, Homo sapien
tttcaaatggctcgccagcagccca

SEQ ID NO: 2836875 - DNA, 25 bp, Homo sapien
gacattgggattaaccctgtgggtc

SEQ ID NO: 2836876 - DNA, 25 bp, Homo sapien
catctagcaggtattgacattggga

SEQ ID NO: 2836877 - DNA, 25 bp, Homo sapien
gattcctcatgtgcctctgcgtcag

SEQ ID NO: 2836878 - DNA, 25 bp, Homo sapien
ctgtttagagtgcagcctctcctcc

SEQ ID NO: 2836879 - DNA, 25 bp, Homo sapien
tctcctcccactttcctctcctctc

SEQ ID NO: 2836880 - DNA, 25 bp, Homo sapien
cctctcctcccactttcctctcctc

SEQ ID NO: 2836881 - DNA, 25 bp, Homo sapien
tcctcccactttcctctcctctccc

SEQ ID NO: 2836882 - DNA, 25 bp, Homo sapien
gtgactaagctccacatgcaaggag

SEQ ID NO: 2836883 - DNA, 25 bp, Homo sapien
tgtgactaagctccacatgcaagga

SEQ ID NO: 2836884 - DNA, 25 bp, Homo sapien
cgctgatgtggacgtgggattcatt

SEQ ID NO: 2836885 - DNA, 25 bp, Homo sapien
gcttggctctgctaggatttggagc

SEQ ID NO: 2836886 - DNA, 25 bp, Homo sapien
tttggagcaaagctctcctgcttgc

SEQ ID NO: 2836887 - DNA, 25 bp, Homo sapien
ccagaggcctcgctgatgtggacgt

SEQ ID NO: 2836888 - DNA, 25 bp, Homo sapien
cccagaccctggtggtagtatccgt

SEQ ID NO: 2836889 - DNA, 25 bp, Homo sapien
cccttatgcagccttcccttggaag

SEQ ID NO: 2836890 - DNA, 25 bp, Homo sapien
caggaggtaggcagcttttggcttg

SEQ ID NO: 2836891 - DNA, 25 bp, Homo sapien
ccttatttctattagtctccacttt

SEQ ID NO: 2836892 - DNA, 25 bp, Homo sapien
cagcctatcgacagggggctaaagg

SEQ ID NO: 2836893 - DNA, 25 bp, Homo sapien
gatcccgggcttgcaatgaagaaag

SEQ ID NO: 2836894 - DNA, 25 bp, Homo sapien
cttggacattggtcatctggcctct

SEQ ID NO: 2836895 - DNA, 25 bp, Homo sapien
cacggcaggccttggacattggtca

SEQ ID NO: 2836896 - DNA, 25 bp, Homo sapien
gggcttggctgtagactagaacttg

SEQ ID NO: 2836897 - DNA, 25 bp, Homo sapien
tttccccagggagacacgtcaagtg

SEQ ID NO: 2836898 - DNA, 25 bp, Homo sapien
gagacacgtcaagtgttgtccaata

SEQ ID NO: 2836899 - DNA, 25 bp, Homo sapien
cacgtcaagtgttgtccaataaaat

SEQ ID NO: 2836900 - DNA, 25 bp, Homo sapien
ccagggagacacgtcaagtgttgtc

SEQ ID NO: 2836901 - DNA, 25 bp, Homo sapien
ttctttcttgcgtcccagagttggt

SEQ ID NO: 2836902 - DNA, 25 bp, Homo sapien
tctctttacggaggaactcagcgct

SEQ ID NO: 2836903 - DNA, 25 bp, Homo sapien
tcagcgctgtgctcaaaaataccac

SEQ ID NO: 2836904 - DNA, 25 bp, Homo sapien
caaaccgttctcagggtttcaggag

SEQ ID NO: 2836905 - DNA, 25 bp, Homo sapien
ctatggtggtattgaggactgcttt

SEQ ID NO: 2836906 - DNA, 25 bp, Homo sapien
gactgctttgctgacggatattgga

SEQ ID NO: 2836907 - DNA, 25 bp, Homo sapien
gccagggcttgtgtcacactgacca

SEQ ID NO: 2836908 - DNA, 25 bp, Homo sapien
ctgacggatattggagggtcatctg

SEQ ID NO: 2836909 - DNA, 25 bp, Homo sapien
tgtctgcacccgcttgctagaggaa

SEQ ID NO: 2836910 - DNA, 25 bp, Homo sapien
ctttcagtgcatggaagttgtgaca

SEQ ID NO: 2836911 - DNA, 25 bp, Homo sapien
tcttggcccctaaaacatcctgaag

SEQ ID NO: 2836912 - DNA, 25 bp, Homo sapien
ggaagcatcactggctctcacggag

SEQ ID NO: 2836913 - DNA, 25 bp, Homo sapien
tgagggcacaggatgctccttccaa

SEQ ID NO: 2836914 - DNA, 25 bp, Homo sapien
gagggcacaggatgctccttccaag

SEQ ID NO: 2836915 - DNA, 25 bp, Homo sapien
atgctccttccaagggtggacaatg

SEQ ID NO: 2836916 - DNA, 25 bp, Homo sapien
cctgagggcacaggatgctccttcc

SEQ ID NO: 2836917 - DNA, 25 bp, Homo sapien
agctggctgcccaaccacctgcagt

SEQ ID NO: 2836918 - DNA, 25 bp, Homo sapien
ctgccgtacccaggccactgttcct

SEQ ID NO: 2836919 - DNA, 25 bp, Homo sapien
gccccgctgccgtacccaggccact

SEQ ID NO: 2836920 - DNA, 25 bp, Homo sapien
aggccactgttcctaagtgctcttt

SEQ ID NO: 2836921 - DNA, 25 bp, Homo sapien
gttgttctccatggatccatccatt

SEQ ID NO: 2836922 - DNA, 25 bp, Homo sapien
catttctgacttgtacaactggtta

SEQ ID NO: 2836923 - DNA, 25 bp, Homo sapien
aactggttaattccaggctggaaca

SEQ ID NO: 2836924 - DNA, 25 bp, Homo sapien
agttgttctccatggatccatccat

SEQ ID NO: 2836925 - DNA, 25 bp, Homo sapien
tcttgatgcattcaggggtaaggag

SEQ ID NO: 2836926 - DNA, 25 bp, Homo sapien
aatcccagtcctagctttatacgtt

SEQ ID NO: 2836927 - DNA, 25 bp, Homo sapien
cagtcctagctttatacgttaacac

SEQ ID NO: 2836928 - DNA, 25 bp, Homo sapien
gctttatacgttaacactgaggact

SEQ ID NO: 2836929 - DNA, 25 bp, Homo sapien
tccttctgggtaggcaggcactttt

SEQ ID NO: 2836930 - DNA, 25 bp, Homo sapien
gactgttccaggacaaggcttggca

SEQ ID NO: 2836931 - DNA, 25 bp, Homo sapien
cacttttggagtccgagtctggacc

SEQ ID NO: 2836932 - DNA, 25 bp, Homo sapien
tggcaagtgggcagacgatgtcctt

SEQ ID NO: 2836933 - DNA, 25 bp, Homo sapien
tgctctgaggctgccgggctgtttc

SEQ ID NO: 2836934 - DNA, 25 bp, Homo sapien
ccgggctgtttctggtgagtccctg

SEQ ID NO: 2836935 - DNA, 25 bp, Homo sapien
tggtgagtccctgctggagactgac

SEQ ID NO: 2836936 - DNA, 25 bp, Homo sapien
ggtctggatgtgaaggctgctctga

SEQ ID NO: 2836937 - DNA, 25 bp, Homo sapien
gaaatgtcctgtgtgcagtactcag

SEQ ID NO: 2836938 - DNA, 25 bp, Homo sapien
caatcatcctccctggtgacttggg

SEQ ID NO: 2836939 - DNA, 25 bp, Homo sapien
gagagagttcccgtgcccgggaata

SEQ ID NO: 2836940 - DNA, 25 bp, Homo sapien
tatgagggtgagagagttcccgtgc

SEQ ID NO: 2836941 - DNA, 25 bp, Homo sapien
aggggtgagggaggatggcaggcct

SEQ ID NO: 2836942 - DNA, 25 bp, Homo sapien
ggtgagggaggatggcaggcctggg

SEQ ID NO: 2836943 - DNA, 25 bp, Homo sapien
ctgcaggggtgagggaggatggcag

SEQ ID NO: 2836944 - DNA, 25 bp, Homo sapien
gcaggggtgagggaggatggcaggc

SEQ ID NO: 2836945 - DNA, 25 bp, Homo sapien
agccatagagcccacagttgcgcgc

SEQ ID NO: 2836946 - DNA, 25 bp, Homo sapien
ctggagctgtccctctggtgaactc

SEQ ID NO: 2836947 - DNA, 25 bp, Homo sapien
gtgaactcgtttggccttgggagcc

SEQ ID NO: 2836948 - DNA, 25 bp, Homo sapien
tgtccctctggtgaactcgtttggc

SEQ ID NO: 2836949 - DNA, 25 bp, Homo sapien
tggcgttgagcaggagcatgtgggc

SEQ ID NO: 2836950 - DNA, 25 bp, Homo sapien
catggcgttgagcaggagcatgtgg

SEQ ID NO: 2836951 - DNA, 25 bp, Homo sapien
cgttgagcaggagcatgtgggccat

SEQ ID NO: 2836952 - DNA, 25 bp, Homo sapien
gcgttgagcaggagcatgtgggcca

SEQ ID NO: 2836953 - DNA, 25 bp, Homo sapien
gctgctggtaagcacgtgccatccg

SEQ ID NO: 2836954 - DNA, 25 bp, Homo sapien
tacaaggagagcagaaatcgcagcc

SEQ ID NO: 2836955 - DNA, 25 bp, Homo sapien
tctgaccagctaacagtggccacaa

SEQ ID NO: 2836956 - DNA, 25 bp, Homo sapien
ccctatagggttattgcaaggacca

SEQ ID NO: 2836957 - DNA, 25 bp, Homo sapien
aagagacggaaagagtcttctgtgt

SEQ ID NO: 2836958 - DNA, 25 bp, Homo sapien
tggctgaggtcttcctagataatca

SEQ ID NO: 2836959 - DNA, 25 bp, Homo sapien
tatattttagctactctggcttggc

SEQ ID NO: 2836960 - DNA, 25 bp, Homo sapien
ccctcaacagccttggcggtgagaa

SEQ ID NO: 2836961 - DNA, 25 bp, Homo sapien
gagtaaaaagaacgccactggagga

SEQ ID NO: 2836962 - DNA, 25 bp, Homo sapien
cactggaggatgtacaataaagcac

SEQ ID NO: 2836963 - DNA, 25 bp, Homo sapien
cttcggtgacaggtaaaagacgctg

SEQ ID NO: 2836964 - DNA, 25 bp, Homo sapien
ttacactaagtcagacacggtctgg

SEQ ID NO: 2836965 - DNA, 25 bp, Homo sapien
tgtcaaaaagcacgaagtacaccgt

SEQ ID NO: 2836966 - DNA, 25 bp, Homo sapien
cattgtagacacgaagtaactggag

SEQ ID NO: 2836967 - DNA, 25 bp, Homo sapien
gcacatagatgcctatactctcgct

SEQ ID NO: 2836968 - DNA, 25 bp, Homo sapien
tttgatggaagaggacattgtagac

SEQ ID NO: 2836969 - DNA, 25 bp, Homo sapien
cactcagcaactgggatgccacggg

SEQ ID NO: 2836970 - DNA, 25 bp, Homo sapien
agcactcagcaactgggatgccacg

SEQ ID NO: 2836971 - DNA, 25 bp, Homo sapien
caactgggatgccacgggggctgca

SEQ ID NO: 2836972 - DNA, 25 bp, Homo sapien
taagcactcagcaactgggatgcca

SEQ ID NO: 2836973 - DNA, 25 bp, Homo sapien
catgatacctttgactagcacagtg

SEQ ID NO: 2836974 - DNA, 25 bp, Homo sapien
ggtgtctgttgagccccgtgtctgc

SEQ ID NO: 2836975 - DNA, 25 bp, Homo sapien
cccgaagtacagtgtaagctcctga

SEQ ID NO: 2836976 - DNA, 25 bp, Homo sapien
tgttttgtggtgtgcattaagcccc

SEQ ID NO: 2836977 - DNA, 25 bp, Homo sapien
ccacccacacagaagagttacccct

SEQ ID NO: 2836978 - DNA, 25 bp, Homo sapien
cacacagaagagttaccccttcaca

SEQ ID NO: 2836979 - DNA, 25 bp, Homo sapien
acagaagagttaccccttcacacca

SEQ ID NO: 2836980 - DNA, 25 bp, Homo sapien
cccacacagaagagttaccccttca

SEQ ID NO: 2836981 - DNA, 25 bp, Homo sapien
gggctcttcaactctgggctatcat

SEQ ID NO: 2836982 - DNA, 25 bp, Homo sapien
ctctaacacacaccagcggtaccac

SEQ ID NO: 2836983 - DNA, 25 bp, Homo sapien
tgggctatcatccaagtttccaagc

SEQ ID NO: 2836984 - DNA, 25 bp, Homo sapien
cagaggccagaacgcagggagctgt

SEQ ID NO: 2836985 - DNA, 25 bp, Homo sapien
tgtgactttcagtgaggaaatattc

SEQ ID NO: 2836986 - DNA, 25 bp, Homo sapien
caatagttctcaagctttagcctgc

SEQ ID NO: 2836987 - DNA, 25 bp, Homo sapien
tgccttggacccttacaaaagagta

SEQ ID NO: 2836988 - DNA, 25 bp, Homo sapien
ggagagcttgtcaaaacacaacagt

SEQ ID NO: 2836989 - DNA, 25 bp, Homo sapien
ccccatcctgtgaaatggaatcaga

SEQ ID NO: 2836990 - DNA, 25 bp, Homo sapien
tgagttgtggtcccacttcggtgcc

SEQ ID NO: 2836991 - DNA, 25 bp, Homo sapien
cccatcctgtgaaatggaatcagag

SEQ ID NO: 2836992 - DNA, 25 bp, Homo sapien
tgggccagggtgttaacctctctaa

SEQ ID NO: 2836993 - DNA, 25 bp, Homo sapien
tgatgaggctgccagtactgcggcc

SEQ ID NO: 2836994 - DNA, 25 bp, Homo sapien
actaagggcttccactctagagtca

SEQ ID NO: 2836995 - DNA, 25 bp, Homo sapien
cagctgggttcacttgctacttgca

SEQ ID NO: 2836996 - DNA, 25 bp, Homo sapien
caggctaggagctcattagggacct

SEQ ID NO: 2836997 - DNA, 25 bp, Homo sapien
attagggacctcagagagtcacagc

SEQ ID NO: 2836998 - DNA, 25 bp, Homo sapien
gccaggcaggtatgcagcaaatcca

SEQ ID NO: 2836999 - DNA, 25 bp, Homo sapien
ggagcagacagattgcgagcttgca

SEQ ID NO: 2837000 - DNA, 25 bp, Homo sapien
gaagaccttggtgagtctacctggg

SEQ ID NO: 2837001 - DNA, 25 bp, Homo sapien
gcatcatcagctgtcgaaaaactag

SEQ ID NO: 2837002 - DNA, 25 bp, Homo sapien
ggcaactgtgttggtcgtgaagacc

SEQ ID NO: 2837003 - DNA, 25 bp, Homo sapien
gacttctcctgtggtggtcctccgg

SEQ ID NO: 2837004 - DNA, 25 bp, Homo sapien
caaactggactattacagtggatca

SEQ ID NO: 2837005 - DNA, 25 bp, Homo sapien
ttccagaagttcttcacacttgtct

SEQ ID NO: 2837006 - DNA, 25 bp, Homo sapien
tgccgctgccgatggatggaaatgc

SEQ ID NO: 2837007 - DNA, 25 bp, Homo sapien
acacttgtctgcaccccaaactgga

SEQ ID NO: 2837008 - DNA, 25 bp, Homo sapien
aatgccctgtgtccgaggagttcca

SEQ ID NO: 2837009 - DNA, 25 bp, Homo sapien
cgtgtcagaacatttgcagcctcaa

SEQ ID NO: 2837010 - DNA, 25 bp, Homo sapien
tgaccaagttcgtagtaagcctctc

SEQ ID NO: 2837011 - DNA, 25 bp, Homo sapien
aaagcatacacggttctcccagagg

SEQ ID NO: 2837012 - DNA, 25 bp, Homo sapien
tgccagatctaaggacacaggcctg

SEQ ID NO: 2837013 - DNA, 25 bp, Homo sapien
cagggcactgggtttagctgcatgc

SEQ ID NO: 2837014 - DNA, 25 bp, Homo sapien
tcactgtgtgaataacggatcctgt

SEQ ID NO: 2837015 - DNA, 25 bp, Homo sapien
caaagctactaggaaagcaactgct

SEQ ID NO: 2837016 - DNA, 25 bp, Homo sapien
tgtgtcacaaccagataagcacggt

SEQ ID NO: 2837017 - DNA, 25 bp, Homo sapien
tactggatcctgagactagcctgga

SEQ ID NO: 2837018 - DNA, 25 bp, Homo sapien
tcactgggaatagaggtgcacggcc

SEQ ID NO: 2837019 - DNA, 25 bp, Homo sapien
cagcagagtttggtacatggcagca

SEQ ID NO: 2837020 - DNA, 25 bp, Homo sapien
ctccagctacttccaagggcccgtt

SEQ ID NO: 2837021 - DNA, 25 bp, Homo sapien
cagctacttccaagggcccgttctt

SEQ ID NO: 2837022 - DNA, 25 bp, Homo sapien
ccagctacttccaagggcccgttct

SEQ ID NO: 2837023 - DNA, 25 bp, Homo sapien
tccagctacttccaagggcccgttc

SEQ ID NO: 2837024 - DNA, 25 bp, Homo sapien
ttagcatgtcaggtgattacatact

SEQ ID NO: 2837025 - DNA, 25 bp, Homo sapien
aaacaggaactaagccttggctaag

SEQ ID NO: 2837026 - DNA, 25 bp, Homo sapien
tgtcaggtgattacatacttcaaat

SEQ ID NO: 2837027 - DNA, 25 bp, Homo sapien
catgtcaggtgattacatacttcaa

SEQ ID NO: 2837028 - DNA, 25 bp, Homo sapien
tggtttccaagactaatgcctgcct

SEQ ID NO: 2837029 - DNA, 25 bp, Homo sapien
caaattgctgcttcatctggctgtc

SEQ ID NO: 2837030 - DNA, 25 bp, Homo sapien
tgccccttatttgggtctgactcag

SEQ ID NO: 2837031 - DNA, 25 bp, Homo sapien
tcattggcatgagatactagctggt

SEQ ID NO: 2837032 - DNA, 25 bp, Homo sapien
ggcacaattctggtatgggacggtc

SEQ ID NO: 2837033 - DNA, 25 bp, Homo sapien
caccaacacctatgagaactctggg

SEQ ID NO: 2837034 - DNA, 25 bp, Homo sapien
ccccaagtaaggaggtttcagcagc

SEQ ID NO: 2837035 - DNA, 25 bp, Homo sapien
ggatgtctaactgctcaggaccaga

SEQ ID NO: 2837036 - DNA, 25 bp, Homo sapien
caggccgggggcttagagcccaact

SEQ ID NO: 2837037 - DNA, 25 bp, Homo sapien
gcatgtttctagtaaagtcagcatc

SEQ ID NO: 2837038 - DNA, 25 bp, Homo sapien
gccgggggcttagagcccaactcca

SEQ ID NO: 2837039 - DNA, 25 bp, Homo sapien
tgtttctagtaaagtcagcatcaga

SEQ ID NO: 2837040 - DNA, 25 bp, Homo sapien
gtctcaggacttcacaccaaatatg

SEQ ID NO: 2837041 - DNA, 25 bp, Homo sapien
taagtatcagtgttcaaaacagcct

SEQ ID NO: 2837042 - DNA, 25 bp, Homo sapien
ggctaagcattcctgcactcggatt

SEQ ID NO: 2837043 - DNA, 25 bp, Homo sapien
ttggacaaatgtcaggctaggcctg

SEQ ID NO: 2837044 - DNA, 25 bp, Homo sapien
ttcaccaccgatgtagaagtcagtg

SEQ ID NO: 2837045 - DNA, 25 bp, Homo sapien
actgtcgatcgaggcaatgtcagcc

SEQ ID NO: 2837046 - DNA, 25 bp, Homo sapien
tagaagtcagtgtttgtcgggtgaa

SEQ ID NO: 2837047 - DNA, 25 bp, Homo sapien
tcgggtgaacgacagcatcactgtc

SEQ ID NO: 2837048 - DNA, 25 bp, Homo sapien
acatttactaatgccccaatggcag

SEQ ID NO: 2837049 - DNA, 25 bp, Homo sapien
gagacccacgcacaggcacatttac

SEQ ID NO: 2837050 - DNA, 25 bp, Homo sapien
tcaactgtgttggaccgagacccac

SEQ ID NO: 2837051 - DNA, 25 bp, Homo sapien
ggtaaacaaatgtatatcaactgtg

SEQ ID NO: 2837052 - DNA, 25 bp, Homo sapien
gggcaatcagtccacgcagtgtgcg

SEQ ID NO: 2837053 - DNA, 25 bp, Homo sapien
tccacgcagtgtgcgcacatgtgga

SEQ ID NO: 2837054 - DNA, 25 bp, Homo sapien
ctggtcgattccaacatatgagccc

SEQ ID NO: 2837055 - DNA, 25 bp, Homo sapien
cgattccaacatatgagcccaaggg

SEQ ID NO: 2837056 - DNA, 25 bp, Homo sapien
gcagcagtcaacttgcaggctttga

SEQ ID NO: 2837057 - DNA, 25 bp, Homo sapien
aaaaagtggaccatcaggccaacca

SEQ ID NO: 2837058 - DNA, 25 bp, Homo sapien
cttcgcaaaagcctataaagctggc

SEQ ID NO: 2837059 - DNA, 25 bp, Homo sapien
tattgatatatgtagaggactgcct

SEQ ID NO: 2837060 - DNA, 25 bp, Homo sapien
ccgtttacacttggaatggcctgga

SEQ ID NO: 2837061 - DNA, 25 bp, Homo sapien
gaatgagtgtatctcccagtaagga

SEQ ID NO: 2837062 - DNA, 25 bp, Homo sapien
ggcttgaccactgtaaagtctggga

SEQ ID NO: 2837063 - DNA, 25 bp, Homo sapien
tgaggagagagtagccaatcacact

SEQ ID NO: 2837064 - DNA, 25 bp, Homo sapien
cctcaaagccggctaaattactgat

SEQ ID NO: 2837065 - DNA, 25 bp, Homo sapien
ggtcaatgtcagcattggtaggatt

SEQ ID NO: 2837066 - DNA, 25 bp, Homo sapien
taggattgattatggcctccacctc

SEQ ID NO: 2837067 - DNA, 25 bp, Homo sapien
ctaggtcatctttaaggtcaatgtc

SEQ ID NO: 2837068 - DNA, 25 bp, Homo sapien
tacaggtaaaggacagtggacactc

SEQ ID NO: 2837069 - DNA, 25 bp, Homo sapien
cacaagacacttggcagggaagctc

SEQ ID NO: 2837070 - DNA, 25 bp, Homo sapien
gggtgatctcacaaagcgaagctct

SEQ ID NO: 2837071 - DNA, 25 bp, Homo sapien
taagactcaaatgctgctcgggatg

SEQ ID NO: 2837072 - DNA, 25 bp, Homo sapien
tgaagactgttagccactgaggaaa

SEQ ID NO: 2837073 - DNA, 25 bp, Homo sapien
gaaagtaatcatagggcactgccag

SEQ ID NO: 2837074 - DNA, 25 bp, Homo sapien
tagagccaagacagaggtccagtcc

SEQ ID NO: 2837075 - DNA, 25 bp, Homo sapien
gaagtgcagactacagtacctcagg

SEQ ID NO: 2837076 - DNA, 25 bp, Homo sapien
taaggagactcatcacagcctcaga

SEQ ID NO: 2837077 - DNA, 25 bp, Homo sapien
catggtacgttatgcccgccttgaa

SEQ ID NO: 2837078 - DNA, 25 bp, Homo sapien
tatgtggatcaaagggagaaaaccc

SEQ ID NO: 2837079 - DNA, 25 bp, Homo sapien
cgggcagaatctagtgtgtccagct

SEQ ID NO: 2837080 - DNA, 25 bp, Homo sapien
tgagattcataggacacagggtacc

SEQ ID NO: 2837081 - DNA, 25 bp, Homo sapien
taatggctatgatgactcctgagac

SEQ ID NO: 2837082 - DNA, 25 bp, Homo sapien
taacactggtgcttaggctgactta

SEQ ID NO: 2837083 - DNA, 25 bp, Homo sapien
cagggctgtagcatgcacaatatca

SEQ ID NO: 2837084 - DNA, 25 bp, Homo sapien
ccagggctaacaaacagagcccaga

SEQ ID NO: 2837085 - DNA, 25 bp, Homo sapien
gctttttgtatcctcaccctaccaa

SEQ ID NO: 2837086 - DNA, 25 bp, Homo sapien
tttttattcgtgtgatgcctggccc

SEQ ID NO: 2837087 - DNA, 25 bp, Homo sapien
catgttcctggctcttgggagaagc

SEQ ID NO: 2837088 - DNA, 25 bp, Homo sapien
ttgcaatgacgtgagcgagggaacc

SEQ ID NO: 2837089 - DNA, 25 bp, Homo sapien
cagaccttaagatgacaactagtgc

SEQ ID NO: 2837090 - DNA, 25 bp, Homo sapien
tgcaattagtgacagaaagagggaa

SEQ ID NO: 2837091 - DNA, 25 bp, Homo sapien
caccacaggaattgcatcatgagag

SEQ ID NO: 2837092 - DNA, 25 bp, Homo sapien
gcagcttcagatccaagtttgttac

SEQ ID NO: 2837093 - DNA, 25 bp, Homo sapien
aattgtcttttacaaaaccatggcg

SEQ ID NO: 2837094 - DNA, 25 bp, Homo sapien
cacagattaacttggaacgtcaaat

SEQ ID NO: 2837095 - DNA, 25 bp, Homo sapien
tggcgtcctggcaaagttgcatcac

SEQ ID NO: 2837096 - DNA, 25 bp, Homo sapien
ccttggggccctcgagtagactgag

SEQ ID NO: 2837097 - DNA, 25 bp, Homo sapien
gccctcgagtagactgaggccgcgc

SEQ ID NO: 2837098 - DNA, 25 bp, Homo sapien
cgagtagactgaggccgcgcatctg

SEQ ID NO: 2837099 - DNA, 25 bp, Homo sapien
tcccttggggccctcgagtagactg

SEQ ID NO: 2837100 - DNA, 25 bp, Homo sapien
tgccctcggttgtgctgtcggcgct

SEQ ID NO: 2837101 - DNA, 25 bp, Homo sapien
agaggactgtgaagccgtcggcagg

SEQ ID NO: 2837102 - DNA, 25 bp, Homo sapien
gctgtcggcgctggctgccttactg

SEQ ID NO: 2837103 - DNA, 25 bp, Homo sapien
gccgtcggcaggtgtgccctcggtt

SEQ ID NO: 2837104 - DNA, 25 bp, Homo sapien
cattttgaggtacaagagttctgtg

SEQ ID NO: 2837105 - DNA, 25 bp, Homo sapien
aaccagttctcagcgtttctccaag

SEQ ID NO: 2837106 - DNA, 25 bp, Homo sapien
gcatcctaatagagaggcagctccc

SEQ ID NO: 2837107 - DNA, 25 bp, Homo sapien
cttgcacagacggaagggtcagaat

SEQ ID NO: 2837108 - DNA, 25 bp, Homo sapien
cctttgtcagatggcctttgtaggg

SEQ ID NO: 2837109 - DNA, 25 bp, Homo sapien
cagggcctgtgggagggtgtggggc

SEQ ID NO: 2837110 - DNA, 25 bp, Homo sapien
cacaccagggcctgtgggagggtgt

SEQ ID NO: 2837111 - DNA, 25 bp, Homo sapien
ccctttgtcagatggcctttgtagg

SEQ ID NO: 2837112 - DNA, 25 bp, Homo sapien
gaaaacctgttaggtcagagtcagc

SEQ ID NO: 2837113 - DNA, 25 bp, Homo sapien
ttccatgtattggacactcgcccag

SEQ ID NO: 2837114 - DNA, 25 bp, Homo sapien
taagaaactgtagaactgagcatcc

SEQ ID NO: 2837115 - DNA, 25 bp, Homo sapien
tagcaagcaattctgtcagctccag

SEQ ID NO: 2837116 - DNA, 25 bp, Homo sapien
ccaggtggtaaggagcaagcctata

SEQ ID NO: 2837117 - DNA, 25 bp, Homo sapien
taacctgagggacaaaattaggcat

SEQ ID NO: 2837118 - DNA, 25 bp, Homo sapien
aaacgttagggattccacaggcaag

SEQ ID NO: 2837119 - DNA, 25 bp, Homo sapien
gagatcccctgaaagttatcctatg

SEQ ID NO: 2837120 - DNA, 25 bp, Homo sapien
gagagacccactcaagtatcaacag

SEQ ID NO: 2837121 - DNA, 25 bp, Homo sapien
ttagcaggaatgagcagtggcgcat

SEQ ID NO: 2837122 - DNA, 25 bp, Homo sapien
caggaacaagattcagcccaggttt

SEQ ID NO: 2837123 - DNA, 25 bp, Homo sapien
caaaggctaagctgaggacgtggtc

SEQ ID NO: 2837124 - DNA, 25 bp, Homo sapien
ctttggatccccgcttcttcgctag

SEQ ID NO: 2837125 - DNA, 25 bp, Homo sapien
tggatccccgcttcttcgctagcaa

SEQ ID NO: 2837126 - DNA, 25 bp, Homo sapien
tcttcgctagcaactcggggtggat

SEQ ID NO: 2837127 - DNA, 25 bp, Homo sapien
tcgctagcaactcggggtggatgtt

SEQ ID NO: 2837128 - DNA, 25 bp, Homo sapien
ccagcaggatgtgccggggtgtgac

SEQ ID NO: 2837129 - DNA, 25 bp, Homo sapien
gattcagctcttcatcattggccac

SEQ ID NO: 2837130 - DNA, 25 bp, Homo sapien
gtgtgacccgtcccttcttgttgtc

SEQ ID NO: 2837131 - DNA, 25 bp, Homo sapien
cttgttgtctctcgctgcattgcca

SEQ ID NO: 2837132 - DNA, 25 bp, Homo sapien
gcaccactgagctgtagcccacttt

SEQ ID NO: 2837133 - DNA, 25 bp, Homo sapien
gaaggcctgagaggcatatcaagca

SEQ ID NO: 2837134 - DNA, 25 bp, Homo sapien
tggaggccacaacgaagttttgggc

SEQ ID NO: 2837135 - DNA, 25 bp, Homo sapien
cacaacgaagttttgggccatcggt

SEQ ID NO: 2837136 - DNA, 25 bp, Homo sapien
ccccaatcggaaggtgactgctaag

SEQ ID NO: 2837137 - DNA, 25 bp, Homo sapien
caaatgttcacgtaatcccaaggag

SEQ ID NO: 2837138 - DNA, 25 bp, Homo sapien
gtggctctgagtgtttgcagccgca

SEQ ID NO: 2837139 - DNA, 25 bp, Homo sapien
gaaaacatgtttgctacaaggccaa

SEQ ID NO: 2837140 - DNA, 25 bp, Homo sapien
gaaagatgactcctgctttggcaga

SEQ ID NO: 2837141 - DNA, 25 bp, Homo sapien
ggcctttcttgatgtaccgcagcat

SEQ ID NO: 2837142 - DNA, 25 bp, Homo sapien
agcatccgccccacgggaaagatga

SEQ ID NO: 2837143 - DNA, 25 bp, Homo sapien
ctgtcaggtattccaggacggcggc

SEQ ID NO: 2837144 - DNA, 25 bp, Homo sapien
gcactccgctggagcagtttgatcc

SEQ ID NO: 2837145 - DNA, 25 bp, Homo sapien
gatgccactgtctgtagctgcaggg

SEQ ID NO: 2837146 - DNA, 25 bp, Homo sapien
agcacatgtcccctttccaggtaca

SEQ ID NO: 2837147 - DNA, 25 bp, Homo sapien
tccgggtccaggtgatgcactccgc

SEQ ID NO: 2837148 - DNA, 25 bp, Homo sapien
actgggcaggtctcccatgtactga

SEQ ID NO: 2837149 - DNA, 25 bp, Homo sapien
gataaactgacgtcacactccatgg

SEQ ID NO: 2837150 - DNA, 25 bp, Homo sapien
cctgttactctgatgctcaacctat

SEQ ID NO: 2837151 - DNA, 25 bp, Homo sapien
ggaggccacagggataggagtccct

SEQ ID NO: 2837152 - DNA, 25 bp, Homo sapien
gccgctcgcgccttttctctccgcg

SEQ ID NO: 2837153 - DNA, 25 bp, Homo sapien
tgcaaggtgtctcggcctgagccct

SEQ ID NO: 2837154 - DNA, 25 bp, Homo sapien
gaactggaaccagtcctcgcggccg

SEQ ID NO: 2837155 - DNA, 25 bp, Homo sapien
cggcagctgcaaggtgtctcggcct

SEQ ID NO: 2837156 - DNA, 25 bp, Homo sapien
tggggtccttcagttaatcctcctc

SEQ ID NO: 2837157 - DNA, 25 bp, Homo sapien
ctggggtccttcagttaatcctcct

SEQ ID NO: 2837158 - DNA, 25 bp, Homo sapien
ggttagctacttcgcttcagcaaaa

SEQ ID NO: 2837159 - DNA, 25 bp, Homo sapien
cccaagttgggaattactaatgtag

SEQ ID NO: 2837160 - DNA, 25 bp, Homo sapien
cttgcacatggaagcggttagctac

SEQ ID NO: 2837161 - DNA, 25 bp, Homo sapien
cagcaaaagttcactttcggaccca

SEQ ID NO: 2837162 - DNA, 25 bp, Homo sapien
ctgtgcctttgggcaaggactctcc

SEQ ID NO: 2837163 - DNA, 25 bp, Homo sapien
gtgcctttgggcaaggactctccgt

SEQ ID NO: 2837164 - DNA, 25 bp, Homo sapien
tgcctttgggcaaggactctccgtt

SEQ ID NO: 2837165 - DNA, 25 bp, Homo sapien
tgtgcctttgggcaaggactctccg

SEQ ID NO: 2837166 - DNA, 25 bp, Homo sapien
tttgcacggctcttgaatgtctggt

SEQ ID NO: 2837167 - DNA, 25 bp, Homo sapien
taccacaccaaaatgcaaggagtcg

SEQ ID NO: 2837168 - DNA, 25 bp, Homo sapien
gatagctggtttcatgcctcctcct

SEQ ID NO: 2837169 - DNA, 25 bp, Homo sapien
tgtctggtgtaatagaagatagctg

SEQ ID NO: 2837170 - DNA, 25 bp, Homo sapien
ccccttgtgtatgcatgtctttatg

SEQ ID NO: 2837171 - DNA, 25 bp, Homo sapien
tattacaagttgcatccttaacagt

SEQ ID NO: 2837172 - DNA, 25 bp, Homo sapien
cacatgtattcatctcctagctaca

SEQ ID NO: 2837173 - DNA, 25 bp, Homo sapien
ttccttaaataaaggcttgcacaca

SEQ ID NO: 2837174 - DNA, 25 bp, Homo sapien
gcactttcagaattttgcagtcatt

SEQ ID NO: 2837175 - DNA, 25 bp, Homo sapien
cttgagcactttcagaattttgcag

SEQ ID NO: 2837176 - DNA, 25 bp, Homo sapien
tgagcactttcagaattttgcagtc

SEQ ID NO: 2837177 - DNA, 25 bp, Homo sapien
gagcactttcagaattttgcagtca

SEQ ID NO: 2837178 - DNA, 25 bp, Homo sapien
aattgcatcttgctgcccaccagtg

SEQ ID NO: 2837179 - DNA, 25 bp, Homo sapien
tggtttttccaagcagtcagcaggc

SEQ ID NO: 2837180 - DNA, 25 bp, Homo sapien
atcattacaagaagactaactgtgt

SEQ ID NO: 2837181 - DNA, 25 bp, Homo sapien
gactaactgtgtacagaaccagtcc

SEQ ID NO: 2837182 - DNA, 25 bp, Homo sapien
aatctgcctgtactcggactccttc

SEQ ID NO: 2837183 - DNA, 25 bp, Homo sapien
ttggattcaaatctgcctgtactcg

SEQ ID NO: 2837184 - DNA, 25 bp, Homo sapien
ccccttaaagaagtgggcatggttg

SEQ ID NO: 2837185 - DNA, 25 bp, Homo sapien
ttgtcaggtaacacacagggagggt

SEQ ID NO: 2837186 - DNA, 25 bp, Homo sapien
cacgttaaaggtaagaggaatcaca

SEQ ID NO: 2837187 - DNA, 25 bp, Homo sapien
tccggtgaacggctgcaatgcaggt

SEQ ID NO: 2837188 - DNA, 25 bp, Homo sapien
ggcatctcctcttaactgggctggg

SEQ ID NO: 2837189 - DNA, 25 bp, Homo sapien
taacctcatggtactgtggcgacat

SEQ ID NO: 2837190 - DNA, 25 bp, Homo sapien
tctgctatttagacaccgggagacc

SEQ ID NO: 2837191 - DNA, 25 bp, Homo sapien
cagactagaacctatggagacttgg

SEQ ID NO: 2837192 - DNA, 25 bp, Homo sapien
cccagggttctgcttgagttagagc

SEQ ID NO: 2837193 - DNA, 25 bp, Homo sapien
gggttaagcatcacgttctcagtcc

SEQ ID NO: 2837194 - DNA, 25 bp, Homo sapien
tggcttcccaccactatgggcctcg

SEQ ID NO: 2837195 - DNA, 25 bp, Homo sapien
aaggccaccgggaacacaagagcca

SEQ ID NO: 2837196 - DNA, 25 bp, Homo sapien
gagccaacaacccatggcctttgtc

SEQ ID NO: 2837197 - DNA, 25 bp, Homo sapien
tggctcagactttagtatccaaggg

SEQ ID NO: 2837198 - DNA, 25 bp, Homo sapien
cagacaggcacggagtgagtgctcc

SEQ ID NO: 2837199 - DNA, 25 bp, Homo sapien
gctgtctagcgtgtctgctgtgact

SEQ ID NO: 2837200 - DNA, 25 bp, Homo sapien
catccaggactatgctgtctagcgt

SEQ ID NO: 2837201 - DNA, 25 bp, Homo sapien
gctgtgacttcctcatggcagagcc

SEQ ID NO: 2837202 - DNA, 25 bp, Homo sapien
ttatggagcatttgcaagtctccct

SEQ ID NO: 2837203 - DNA, 25 bp, Homo sapien
agcatttgcaagtctccctcgaggg

SEQ ID NO: 2837204 - DNA, 25 bp, Homo sapien
ctcacggacagcttggcaagattca

SEQ ID NO: 2837205 - DNA, 25 bp, Homo sapien
cggacagcttggcaagattcacatt

SEQ ID NO: 2837206 - DNA, 25 bp, Homo sapien
gcagaggaatgcgagggttaaaata

SEQ ID NO: 2837207 - DNA, 25 bp, Homo sapien
aagcagaggaatgcgagggttaaaa

SEQ ID NO: 2837208 - DNA, 25 bp, Homo sapien
aaaagcagaggaatgcgagggttaa

SEQ ID NO: 2837209 - DNA, 25 bp, Homo sapien
cagaggaatgcgagggttaaaatac

SEQ ID NO: 2837210 - DNA, 25 bp, Homo sapien
caaactggacagtgatagctaaccc

SEQ ID NO: 2837211 - DNA, 25 bp, Homo sapien
tctacaagaagaaactgtggcacgg

SEQ ID NO: 2837212 - DNA, 25 bp, Homo sapien
gacaagaattctaacccaggcagca

SEQ ID NO: 2837213 - DNA, 25 bp, Homo sapien
tgtgcctgagtgtagactgggtcca

SEQ ID NO: 2837214 - DNA, 25 bp, Homo sapien
tgccctgcggtgggagctgagagaa

SEQ ID NO: 2837215 - DNA, 25 bp, Homo sapien
gtggaggttgttgggaggaactcac

SEQ ID NO: 2837216 - DNA, 25 bp, Homo sapien
cctgcggtgggagctgagagaatgc

SEQ ID NO: 2837217 - DNA, 25 bp, Homo sapien
ccctgcggtgggagctgagagaatg

SEQ ID NO: 2837218 - DNA, 25 bp, Homo sapien
aagtgcgaagaccaggccctgaagc

SEQ ID NO: 2837219 - DNA, 25 bp, Homo sapien
gagggatagtgatatcaagtgcgaa

SEQ ID NO: 2837220 - DNA, 25 bp, Homo sapien
agcaggtgagggatagtgatatcaa

SEQ ID NO: 2837221 - DNA, 25 bp, Homo sapien
tagtgatatcaagtgcgaagaccag

SEQ ID NO: 2837222 - DNA, 25 bp, Homo sapien
tcccctgtggaggaattgaactgcc

SEQ ID NO: 2837223 - DNA, 25 bp, Homo sapien
gctatgcagttcatcctgggtccct

SEQ ID NO: 2837224 - DNA, 25 bp, Homo sapien
gaaagattggagttgcagagtcccc

SEQ ID NO: 2837225 - DNA, 25 bp, Homo sapien
caaggtgtgagtttcccggtgagac

SEQ ID NO: 2837226 - DNA, 25 bp, Homo sapien
caggtccgtggctacaactaaatcc

SEQ ID NO: 2837227 - DNA, 25 bp, Homo sapien
tatcttacccattttccagcgggag

SEQ ID NO: 2837228 - DNA, 25 bp, Homo sapien
tccctattggagaggaagcttccca

SEQ ID NO: 2837229 - DNA, 25 bp, Homo sapien
ttaatacacacagcacctagcagag

SEQ ID NO: 2837230 - DNA, 25 bp, Homo sapien
ggcctgtgagtgaagttggacctcc

SEQ ID NO: 2837231 - DNA, 25 bp, Homo sapien
ggacctccttgtagcttgccctggg

SEQ ID NO: 2837232 - DNA, 25 bp, Homo sapien
ttgccctgggtgcaaaacgatcatc

SEQ ID NO: 2837233 - DNA, 25 bp, Homo sapien
aaaacgatcatccttttgggcagaa

SEQ ID NO: 2837234 - DNA, 25 bp, Homo sapien
ccttctcagcatggcgtggcaaata

SEQ ID NO: 2837235 - DNA, 25 bp, Homo sapien
ccaaggccttgatccagaagtgaca

SEQ ID NO: 2837236 - DNA, 25 bp, Homo sapien
tggtgaccatgtagatccctccctg

SEQ ID NO: 2837237 - DNA, 25 bp, Homo sapien
tcaccctgagcgaaataactgctgg

SEQ ID NO: 2837238 - DNA, 25 bp, Homo sapien
cccgcgtgcctgtgggtatttgaaa

SEQ ID NO: 2837239 - DNA, 25 bp, Homo sapien
gcagggctagcagagtgcactgtct

SEQ ID NO: 2837240 - DNA, 25 bp, Homo sapien
tggttcattatgagcaaggcagcca

SEQ ID NO: 2837241 - DNA, 25 bp, Homo sapien
caaaggcttgctctagtggcagggc

SEQ ID NO: 2837242 - DNA, 25 bp, Homo sapien
gaggctgcccctgggagatgccttc

SEQ ID NO: 2837243 - DNA, 25 bp, Homo sapien
tgccttcccattcgtcagtttcctc

SEQ ID NO: 2837244 - DNA, 25 bp, Homo sapien
aagggctgacatggaaatagcagac

SEQ ID NO: 2837245 - DNA, 25 bp, Homo sapien
tcctcagcctcaggtctgtaaatca

SEQ ID NO: 2837246 - DNA, 25 bp, Homo sapien
gacattggcaaaggcagatgggccc

SEQ ID NO: 2837247 - DNA, 25 bp, Homo sapien
tatcatgctgcagccgtggtgggac

SEQ ID NO: 2837248 - DNA, 25 bp, Homo sapien
ccagcgtgggatggtacaggctcac

SEQ ID NO: 2837249 - DNA, 25 bp, Homo sapien
tcttctacgcgaaccagcatctgga

SEQ ID NO: 2837250 - DNA, 25 bp, Homo sapien
aacttggccctgcttcttggaaagg

SEQ ID NO: 2837251 - DNA, 25 bp, Homo sapien
tggttatttggagacaacttggccc

SEQ ID NO: 2837252 - DNA, 25 bp, Homo sapien
gaagcagattcaacaacgaaccgag

SEQ ID NO: 2837253 - DNA, 25 bp, Homo sapien
aaccgagccctgactcttgggagca

SEQ ID NO: 2837254 - DNA, 25 bp, Homo sapien
agctcttgagagggagtaggctggt

SEQ ID NO: 2837255 - DNA, 25 bp, Homo sapien
gagctcttgagagggagtaggctgg

SEQ ID NO: 2837256 - DNA, 25 bp, Homo sapien
gtttctgctgtattagccccgagcc

SEQ ID NO: 2837257 - DNA, 25 bp, Homo sapien
caggacacaggaggccatcaaagta

SEQ ID NO: 2837258 - DNA, 25 bp, Homo sapien
tccaaagccctagaggccggatgat

SEQ ID NO: 2837259 - DNA, 25 bp, Homo sapien
tcctacatcttagggcacagccaca

SEQ ID NO: 2837260 - DNA, 25 bp, Homo sapien
tcggaatcgaatgttgagggaaata

SEQ ID NO: 2837261 - DNA, 25 bp, Homo sapien
catgacatgtttcacatatgcttta

SEQ ID NO: 2837262 - DNA, 25 bp, Homo sapien
ctttcgtgcatgacatgtttcacat

SEQ ID NO: 2837263 - DNA, 25 bp, Homo sapien
tatgctttacaaacgtgcgttttca

SEQ ID NO: 2837264 - DNA, 25 bp, Homo sapien
ccagtccgacgaactgccggtagat

SEQ ID NO: 2837265 - DNA, 25 bp, Homo sapien
tcttctcaagtaggcggcaaagttt

SEQ ID NO: 2837266 - DNA, 25 bp, Homo sapien
ggtagatggcactctgaacccgttc

SEQ ID NO: 2837267 - DNA, 25 bp, Homo sapien
aatggatccggagcagcgtagcaaa

SEQ ID NO: 2837268 - DNA, 25 bp, Homo sapien
ctgcgccggtgcgggactccccggg

SEQ ID NO: 2837269 - DNA, 25 bp, Homo sapien
tgcgccggtgcgggactccccggga

SEQ ID NO: 2837270 - DNA, 25 bp, Homo sapien
gatgagggcattctggagactgcat

SEQ ID NO: 2837271 - DNA, 25 bp, Homo sapien
gaatgggagtagatgagggcattct

SEQ ID NO: 2837272 - DNA, 25 bp, Homo sapien
atgaatgggagtagatgagggcatt

SEQ ID NO: 2837273 - DNA, 25 bp, Homo sapien
tgaatgggagtagatgagggcattc

SEQ ID NO: 2837274 - DNA, 25 bp, Homo sapien
ttgttctttccggttgcacctctag

SEQ ID NO: 2837275 - DNA, 25 bp, Homo sapien
gacttgttctttccggttgcacctc

SEQ ID NO: 2837276 - DNA, 25 bp, Homo sapien
cagcagcggggtcgtttccagggga

SEQ ID NO: 2837277 - DNA, 25 bp, Homo sapien
ttctttccggttgcacctctaggct

SEQ ID NO: 2837278 - DNA, 25 bp, Homo sapien
tcagcaccacgaggactgcatgctt

SEQ ID NO: 2837279 - DNA, 25 bp, Homo sapien
atgagcccctgatggcggtcagcac

SEQ ID NO: 2837280 - DNA, 25 bp, Homo sapien
cctcatgagcccctgatggcggtca

SEQ ID NO: 2837281 - DNA, 25 bp, Homo sapien
gtcagcaccacgaggactgcatgct

SEQ ID NO: 2837282 - DNA, 25 bp, Homo sapien
caggtcccaattcaacaaggtcagt

SEQ ID NO: 2837283 - DNA, 25 bp, Homo sapien
gtcgtttcaatcttgcaggccgtca

SEQ ID NO: 2837284 - DNA, 25 bp, Homo sapien
tggcttcacagtttccttgcctgct

SEQ ID NO: 2837285 - DNA, 25 bp, Homo sapien
tggccttcttgcctatcagagcctc

SEQ ID NO: 2837286 - DNA, 25 bp, Homo sapien
gggtgaaggcccacataattccgta

SEQ ID NO: 2837287 - DNA, 25 bp, Homo sapien
gccgcaggtgtgctccgttagctct

SEQ ID NO: 2837288 - DNA, 25 bp, Homo sapien
taatagagaacgtagcctggttggg

SEQ ID NO: 2837289 - DNA, 25 bp, Homo sapien
cactggatcctgacgtctgatgtgg

SEQ ID NO: 2837290 - DNA, 25 bp, Homo sapien
gatttccgcactcttggggtacaag

SEQ ID NO: 2837291 - DNA, 25 bp, Homo sapien
gctccggtgatttccgcactcttgg

SEQ ID NO: 2837292 - DNA, 25 bp, Homo sapien
caggctccggtgatttccgcactct

SEQ ID NO: 2837293 - DNA, 25 bp, Homo sapien
ctcaggctccggtgatttccgcact

SEQ ID NO: 2837294 - DNA, 25 bp, Homo sapien
tgatcagatactgagatcttcagag

SEQ ID NO: 2837295 - DNA, 25 bp, Homo sapien
ggctgttactatcatcactgtcatc

SEQ ID NO: 2837296 - DNA, 25 bp, Homo sapien
gaagactgcctaggtcaatgtggct

SEQ ID NO: 2837297 - DNA, 25 bp, Homo sapien
cagggtgagaactggttgtctgatc

SEQ ID NO: 2837298 - DNA, 25 bp, Homo sapien
cagtgctatagtgcaccagtcagga

SEQ ID NO: 2837299 - DNA, 25 bp, Homo sapien
gtggcaacccagaggtgtgcgcttc

SEQ ID NO: 2837300 - DNA, 25 bp, Homo sapien
tgcgcttcatgcagaatggacacac

SEQ ID NO: 2837301 - DNA, 25 bp, Homo sapien
gggatattatcctacctgcctgcct

SEQ ID NO: 2837302 - DNA, 25 bp, Homo sapien
ccaaggctacacctttgatgggcat

SEQ ID NO: 2837303 - DNA, 25 bp, Homo sapien
accaaggctacacctttgatgggca

SEQ ID NO: 2837304 - DNA, 25 bp, Homo sapien
caccaaggctacacctttgatgggc

SEQ ID NO: 2837305 - DNA, 25 bp, Homo sapien
acaggctgaacttttccccctgcag

SEQ ID NO: 2837306 - DNA, 25 bp, Homo sapien
gtgagcaagacccggtggagaagga

SEQ ID NO: 2837307 - DNA, 25 bp, Homo sapien
cattcagaggagtgctcaaactgtc

SEQ ID NO: 2837308 - DNA, 25 bp, Homo sapien
tctgttcccattcagaggagtgctc

SEQ ID NO: 2837309 - DNA, 25 bp, Homo sapien
tcccatcttggtgggtcaaaggaag

SEQ ID NO: 2837310 - DNA, 25 bp, Homo sapien
ttccaggactgtggaggagtcccat

SEQ ID NO: 2837311 - DNA, 25 bp, Homo sapien
gaggagtcccatcttggtgggtcaa

SEQ ID NO: 2837312 - DNA, 25 bp, Homo sapien
catcttggtgggtcaaaggaaggca

SEQ ID NO: 2837313 - DNA, 25 bp, Homo sapien
cttcatccgtgaagaagggtggagg

SEQ ID NO: 2837314 - DNA, 25 bp, Homo sapien
ttcatccgtgaagaagggtggaggg

SEQ ID NO: 2837315 - DNA, 25 bp, Homo sapien
tcatccgtgaagaagggtggagggg

SEQ ID NO: 2837316 - DNA, 25 bp, Homo sapien
ccagtgccgcatcttctcggagggt

SEQ ID NO: 2837317 - DNA, 25 bp, Homo sapien
caggcgctccacagcctgtgacagg

SEQ ID NO: 2837318 - DNA, 25 bp, Homo sapien
gagccctgtggtaatctcctcaaaa

SEQ ID NO: 2837319 - DNA, 25 bp, Homo sapien
gttgagcgacaaggcaaccctgttc

SEQ ID NO: 2837320 - DNA, 25 bp, Homo sapien
tcagaagacgatgtcgggacctcta

SEQ ID NO: 2837321 - DNA, 25 bp, Homo sapien
cgtaggcgcggtcttagccagctgt

SEQ ID NO: 2837322 - DNA, 25 bp, Homo sapien
gctccagtaaaagatgccagcgtag

SEQ ID NO: 2837323 - DNA, 25 bp, Homo sapien
gctgagcgaggaagaagctccagta

SEQ ID NO: 2837324 - DNA, 25 bp, Homo sapien
agtgttcaggcaacacttgttgctg

SEQ ID NO: 2837325 - DNA, 25 bp, Homo sapien
ggctcctgcgggtagggctggagca

SEQ ID NO: 2837326 - DNA, 25 bp, Homo sapien
ttgttgctggttagggctactggac

SEQ ID NO: 2837327 - DNA, 25 bp, Homo sapien
ccatctggcatggttgtgtggttga

SEQ ID NO: 2837328 - DNA, 25 bp, Homo sapien
tgaggaagcaggctgaaccgtggtg

SEQ ID NO: 2837329 - DNA, 25 bp, Homo sapien
gaggaagcaggctgaaccgtggtgt

SEQ ID NO: 2837330 - DNA, 25 bp, Homo sapien
tgccctatttcttgatgatgagtca

SEQ ID NO: 2837331 - DNA, 25 bp, Homo sapien
agtgccctatttcttgatgatgagt

SEQ ID NO: 2837332 - DNA, 25 bp, Homo sapien
gtgccctatttcttgatgatgagtc

SEQ ID NO: 2837333 - DNA, 25 bp, Homo sapien
cagtgccctatttcttgatgatgag

SEQ ID NO: 2837334 - DNA, 25 bp, Homo sapien
caggcttcaagacttgaaatctgtt

SEQ ID NO: 2837335 - DNA, 25 bp, Homo sapien
gttttggctgattcaggcttcaaga

SEQ ID NO: 2837336 - DNA, 25 bp, Homo sapien
agctcctgttagcagtggccattaa

SEQ ID NO: 2837337 - DNA, 25 bp, Homo sapien
ctcctgttagcagtggccattaacg

SEQ ID NO: 2837338 - DNA, 25 bp, Homo sapien
gaaccaggtcctgaacatcttgagg

SEQ ID NO: 2837339 - DNA, 25 bp, Homo sapien
aatttaaccacccagagttgctggc

SEQ ID NO: 2837340 - DNA, 25 bp, Homo sapien
aacatcttgaggtgaagagtcagga

SEQ ID NO: 2837341 - DNA, 25 bp, Homo sapien
gaggaatttaaccacccagagttgc

SEQ ID NO: 2837342 - DNA, 25 bp, Homo sapien
ggagaagccctgttgagggtgggtg

SEQ ID NO: 2837343 - DNA, 25 bp, Homo sapien
ctggagaagccctgttgagggtggg

SEQ ID NO: 2837344 - DNA, 25 bp, Homo sapien
tgaggctgtcaggacacttccagag

SEQ ID NO: 2837345 - DNA, 25 bp, Homo sapien
tgagggtgggtggaaaaagctatac

SEQ ID NO: 2837346 - DNA, 25 bp, Homo sapien
cctcaatgggatgggctggccctgt

SEQ ID NO: 2837347 - DNA, 25 bp, Homo sapien
tcatcacttcgctttttctctcagg

SEQ ID NO: 2837348 - DNA, 25 bp, Homo sapien
tcatctacttcagggctggcctcaa

SEQ ID NO: 2837349 - DNA, 25 bp, Homo sapien
tagccttccccgtcaaaaatgagca

SEQ ID NO: 2837350 - DNA, 25 bp, Homo sapien
acatttgtaaatgccagcgcgctgc

SEQ ID NO: 2837351 - DNA, 25 bp, Homo sapien
gaagtccagtgtcttgggacccagt

SEQ ID NO: 2837352 - DNA, 25 bp, Homo sapien
gctgctaagcacgtccccgtgaata

SEQ ID NO: 2837353 - DNA, 25 bp, Homo sapien
ttctctgagtctcgcggtgccgcgt

SEQ ID NO: 2837354 - DNA, 25 bp, Homo sapien
cttctgcagtatggtcatccttgtt

SEQ ID NO: 2837355 - DNA, 25 bp, Homo sapien
tgttactggggctgataggatctga

SEQ ID NO: 2837356 - DNA, 25 bp, Homo sapien
ttactggggctgataggatctgatg

SEQ ID NO: 2837357 - DNA, 25 bp, Homo sapien
cagtatggtcatccttgttactggg

SEQ ID NO: 2837358 - DNA, 25 bp, Homo sapien
aatctgaagagaacaaggtgctttg

SEQ ID NO: 2837359 - DNA, 25 bp, Homo sapien
cctgttgagatggtaagaaatctga

SEQ ID NO: 2837360 - DNA, 25 bp, Homo sapien
atccttggtgttagccctgttgaga

SEQ ID NO: 2837361 - DNA, 25 bp, Homo sapien
ctgaagagaacaaggtgctttgggc

SEQ ID NO: 2837362 - DNA, 25 bp, Homo sapien
gctaaaatcttcaccattggtctct

SEQ ID NO: 2837363 - DNA, 25 bp, Homo sapien
caggagcatcttctgtgctaaaatc

SEQ ID NO: 2837364 - DNA, 25 bp, Homo sapien
tttggtgttgaactttgcagccttg

SEQ ID NO: 2837365 - DNA, 25 bp, Homo sapien
aactttgcagccttgattccctgct

SEQ ID NO: 2837366 - DNA, 25 bp, Homo sapien
ctgaggttggagcaactgcatacat

SEQ ID NO: 2837367 - DNA, 25 bp, Homo sapien
caacgatgttgttaaagacgtttct

SEQ ID NO: 2837368 - DNA, 25 bp, Homo sapien
tacggctggactctccataggagac

SEQ ID NO: 2837369 - DNA, 25 bp, Homo sapien
aatctggcccgtgcccttcagaaag

SEQ ID NO: 2837370 - DNA, 25 bp, Homo sapien
tcagaaagctacagcgagtcacttc

SEQ ID NO: 2837371 - DNA, 25 bp, Homo sapien
gagtcacttccaagcatcctaggca

SEQ ID NO: 2837372 - DNA, 25 bp, Homo sapien
tttcattgtattgtcagccggctca

SEQ ID NO: 2837373 - DNA, 25 bp, Homo sapien
ggtcagttctgagccagtcacaaag

SEQ ID NO: 2837374 - DNA, 25 bp, Homo sapien
gagtctccagttcttcctagagcga

SEQ ID NO: 2837375 - DNA, 25 bp, Homo sapien
ggtatccccgactgctttaaagctc

SEQ ID NO: 2837376 - DNA, 25 bp, Homo sapien
aggaatgaaacagggcgttgtgtgg

SEQ ID NO: 2837377 - DNA, 25 bp, Homo sapien
aatgaaacagggcgttgtgtggagc

SEQ ID NO: 2837378 - DNA, 25 bp, Homo sapien
tgggctactggggtcagagagcggg

SEQ ID NO: 2837379 - DNA, 25 bp, Homo sapien
gtaggtgaagtcttcggaggcggct

SEQ ID NO: 2837380 - DNA, 25 bp, Homo sapien
tccagggccgcgttcaagttgtgca

SEQ ID NO: 2837381 - DNA, 25 bp, Homo sapien
cagcacgctgcgcagtgcgtccagg

SEQ ID NO: 2837382 - DNA, 25 bp, Homo sapien
ttgcgctcgcgatcgttggccttga

SEQ ID NO: 2837383 - DNA, 25 bp, Homo sapien
cagcgagtgcagcagcgcctcggag

SEQ ID NO: 2837384 - DNA, 25 bp, Homo sapien
cccgggagatattgggcgcgcccct

SEQ ID NO: 2837385 - DNA, 25 bp, Homo sapien
agacgcccgggagatattgggcgcg

SEQ ID NO: 2837386 - DNA, 25 bp, Homo sapien
gcgggcggccccgaagcggaggctg

SEQ ID NO: 2837387 - DNA, 25 bp, Homo sapien
ccccgaagcggaggctgcctgttgg

SEQ ID NO: 2837388 - DNA, 25 bp, Homo sapien
tgctgctggcgcagtcgaggtcgga

SEQ ID NO: 2837389 - DNA, 25 bp, Homo sapien
agtcttcctcgtcggtgaggaagcc

SEQ ID NO: 2837390 - DNA, 25 bp, Homo sapien
aagccggataggtcactgccgctgc

SEQ ID NO: 2837391 - DNA, 25 bp, Homo sapien
cagtcgaggtcggagatgcaggtct

SEQ ID NO: 2837392 - DNA, 25 bp, Homo sapien
gaccgacggacagatagaaaggcgc

SEQ ID NO: 2837393 - DNA, 25 bp, Homo sapien
tgtgcaggaccgacggacagataga

SEQ ID NO: 2837394 - DNA, 25 bp, Homo sapien
gacagatagaaaggcgctcagagcg

SEQ ID NO: 2837395 - DNA, 25 bp, Homo sapien
gacggacagatagaaaggcgctcag

SEQ ID NO: 2837396 - DNA, 25 bp, Homo sapien
tctgtgccagttgcgggtgcgagag

SEQ ID NO: 2837397 - DNA, 25 bp, Homo sapien
agcctggggttgttactctgtgcca

SEQ ID NO: 2837398 - DNA, 25 bp, Homo sapien
cctggggttgttactctgtgccagt

SEQ ID NO: 2837399 - DNA, 25 bp, Homo sapien
acagcctggggttgttactctgtgc

SEQ ID NO: 2837400 - DNA, 25 bp, Homo sapien
gggcgcacggagaacttggcctggc

SEQ ID NO: 2837401 - DNA, 25 bp, Homo sapien
caggggcgcacggagaacttggcct

SEQ ID NO: 2837402 - DNA, 25 bp, Homo sapien
cgcacggagaacttggcctggcctc

SEQ ID NO: 2837403 - DNA, 25 bp, Homo sapien
tgcaggggcgcacggagaacttggc

SEQ ID NO: 2837404 - DNA, 25 bp, Homo sapien
gatcagatcagctcgtgtgagcacc

SEQ ID NO: 2837405 - DNA, 25 bp, Homo sapien
tgtgagcaccgagtgtggcacacga

SEQ ID NO: 2837406 - DNA, 25 bp, Homo sapien
aagtacccggcgcaacaatgggcgc

SEQ ID NO: 2837407 - DNA, 25 bp, Homo sapien
ctcctgagtgatgtcgccggcgatc

SEQ ID NO: 2837408 - DNA, 25 bp, Homo sapien
gcagcccgggtgaatggagcgaggc

SEQ ID NO: 2837409 - DNA, 25 bp, Homo sapien
gcggcagcccgggtgaatggagcga

SEQ ID NO: 2837410 - DNA, 25 bp, Homo sapien
gcccgggtgaatggagcgaggcggc

SEQ ID NO: 2837411 - DNA, 25 bp, Homo sapien
ccgggtgaatggagcgaggcggcag

SEQ ID NO: 2837412 - DNA, 25 bp, Homo sapien
tctgagtttggttctcttagagtac

SEQ ID NO: 2837413 - DNA, 25 bp, Homo sapien
aaaaaccctaaccatagccctgctg

SEQ ID NO: 2837414 - DNA, 25 bp, Homo sapien
ttgctgtcactaggtttagctcccc

SEQ ID NO: 2837415 - DNA, 25 bp, Homo sapien
ggttctcttagagtacttgaagtta

SEQ ID NO: 2837416 - DNA, 25 bp, Homo sapien
atccctggatgcttgtgggtcaagt

SEQ ID NO: 2837417 - DNA, 25 bp, Homo sapien
cttgagaaggtctttactagagatt

SEQ ID NO: 2837418 - DNA, 25 bp, Homo sapien
cttgtgggtcaagtgtgggaaaact

SEQ ID NO: 2837419 - DNA, 25 bp, Homo sapien
gaaggtctttactagagattataaa

SEQ ID NO: 2837420 - DNA, 25 bp, Homo sapien
tcccagactacttaggggcagtgaa

SEQ ID NO: 2837421 - DNA, 25 bp, Homo sapien
ttcccagactacttaggggcagtga

SEQ ID NO: 2837422 - DNA, 25 bp, Homo sapien
ataacatacatgaattattagtact

SEQ ID NO: 2837423 - DNA, 25 bp, Homo sapien
aacatacatgaattattagtactcc

SEQ ID NO: 2837424 - DNA, 25 bp, Homo sapien
ggcaaggtcctacagtccttggtga

SEQ ID NO: 2837425 - DNA, 25 bp, Homo sapien
gaccaccacgcctgcaaaaagcggt

SEQ ID NO: 2837426 - DNA, 25 bp, Homo sapien
cttagaaaactaccaacacgcgcat

SEQ ID NO: 2837427 - DNA, 25 bp, Homo sapien
gggcctgcaatgacgatctacccca

SEQ ID NO: 2837428 - DNA, 25 bp, Homo sapien
ccttccgaggttgggagggcattct

SEQ ID NO: 2837429 - DNA, 25 bp, Homo sapien
tttccatatgaagggtcgagccggc

SEQ ID NO: 2837430 - DNA, 25 bp, Homo sapien
gccgcatttgcatagcaggtgctga

SEQ ID NO: 2837431 - DNA, 25 bp, Homo sapien
cactggagaggtgcagatagtcccc

SEQ ID NO: 2837432 - DNA, 25 bp, Homo sapien
tcttgcccgtggtagtctagaacgt

SEQ ID NO: 2837433 - DNA, 25 bp, Homo sapien
ttccctaaaggacagcgttctggct

SEQ ID NO: 2837434 - DNA, 25 bp, Homo sapien
gaatctttgggaggactttagacag

SEQ ID NO: 2837435 - DNA, 25 bp, Homo sapien
tcgataagcctagggctgcctgacc

SEQ ID NO: 2837436 - DNA, 25 bp, Homo sapien
catatcctttgagtatagttgacgc

SEQ ID NO: 2837437 - DNA, 25 bp, Homo sapien
tgggcaccaggtgttcatgcctgca

SEQ ID NO: 2837438 - DNA, 25 bp, Homo sapien
gttgacgctcaagggatatttgtgg

SEQ ID NO: 2837439 - DNA, 25 bp, Homo sapien
ggtgctgacatgcatggatacatgc

SEQ ID NO: 2837440 - DNA, 25 bp, Homo sapien
cacgcctttgctgctgcggatcact

SEQ ID NO: 2837441 - DNA, 25 bp, Homo sapien
gtcaggcaagggcagatagaaaccc

SEQ ID NO: 2837442 - DNA, 25 bp, Homo sapien
tggccacgcctttgctgctgcggat

SEQ ID NO: 2837443 - DNA, 25 bp, Homo sapien
gatagaaaccctggccacgcctttg

SEQ ID NO: 2837444 - DNA, 25 bp, Homo sapien
aagccacttgtgagcgcacctccat

SEQ ID NO: 2837445 - DNA, 25 bp, Homo sapien
gagcagtggctgagtgcggggcaca

SEQ ID NO: 2837446 - DNA, 25 bp, Homo sapien
gcctggaactggctttaaggaaagc

SEQ ID NO: 2837447 - DNA, 25 bp, Homo sapien
aggaaagccacttgtgagcgcacct

SEQ ID NO: 2837448 - DNA, 25 bp, Homo sapien
acagcactgggctgtatgtataaga

SEQ ID NO: 2837449 - DNA, 25 bp, Homo sapien
aatcatccattgggtacaggaccca

SEQ ID NO: 2837450 - DNA, 25 bp, Homo sapien
cacagcactgggctgtatgtataag

SEQ ID NO: 2837451 - DNA, 25 bp, Homo sapien
ttaatcatccattgggtacaggacc

SEQ ID NO: 2837452 - DNA, 25 bp, Homo sapien
cagttctatgtagaattttaaccat

SEQ ID NO: 2837453 - DNA, 25 bp, Homo sapien
ccaacaaagactggcttggtggctg

SEQ ID NO: 2837454 - DNA, 25 bp, Homo sapien
aaacccaacaaagactggcttggtg

SEQ ID NO: 2837455 - DNA, 25 bp, Homo sapien
tgcctagaaacccaacaaagactgg

SEQ ID NO: 2837456 - DNA, 25 bp, Homo sapien
ctaggagccgcatggggtacaccat

SEQ ID NO: 2837457 - DNA, 25 bp, Homo sapien
ttggaatcttgggaccctaggagcc

SEQ ID NO: 2837458 - DNA, 25 bp, Homo sapien
aatcttgggaccctaggagccgcat

SEQ ID NO: 2837459 - DNA, 25 bp, Homo sapien
gctgtttggaatcttgggaccctag

SEQ ID NO: 2837460 - DNA, 25 bp, Homo sapien
gatggcgctttcgacctttctcctt

SEQ ID NO: 2837461 - DNA, 25 bp, Homo sapien
cgccaagcggcacgcaagttgcaaa

SEQ ID NO: 2837462 - DNA, 25 bp, Homo sapien
tccttaatgtgagctctgggcccgg

SEQ ID NO: 2837463 - DNA, 25 bp, Homo sapien
gcaaaggcaccacaagatggcgctt

SEQ ID NO: 2837464 - DNA, 25 bp, Homo sapien
tgctgcttgacggttttccgcagaa

SEQ ID NO: 2837465 - DNA, 25 bp, Homo sapien
gctgcttgacggttttccgcagaat

SEQ ID NO: 2837466 - DNA, 25 bp, Homo sapien
gcttgacggttttccgcagaattaa

SEQ ID NO: 2837467 - DNA, 25 bp, Homo sapien
gctgctgcttgacggttttccgcag

SEQ ID NO: 2837468 - DNA, 25 bp, Homo sapien
cctccaagaatatccatgtaacttt

SEQ ID NO: 2837469 - DNA, 25 bp, Homo sapien
tcttccttgtgtggaggttgagcag

SEQ ID NO: 2837470 - DNA, 25 bp, Homo sapien
gctctaaaaagcagcacggtgtctt

SEQ ID NO: 2837471 - DNA, 25 bp, Homo sapien
gtgtgggcttctttgcctttgaggt

SEQ ID NO: 2837472 - DNA, 25 bp, Homo sapien
ctggcaggacaggcagagagaaggg

SEQ ID NO: 2837473 - DNA, 25 bp, Homo sapien
ggcaggacaggcagagagaagggag

SEQ ID NO: 2837474 - DNA, 25 bp, Homo sapien
tggcaggacaggcagagagaaggga

SEQ ID NO: 2837475 - DNA, 25 bp, Homo sapien
tataacacagcagtacaatgcggca

SEQ ID NO: 2837476 - DNA, 25 bp, Homo sapien
gatcatttgtctcgccatcacagga

SEQ ID NO: 2837477 - DNA, 25 bp, Homo sapien
tgttgggaacctcacatgcttctga

SEQ ID NO: 2837478 - DNA, 25 bp, Homo sapien
gaaagggcgcatggtcatcttagct

SEQ ID NO: 2837479 - DNA, 25 bp, Homo sapien
gcgccaggacctctaagcggaagct

SEQ ID NO: 2837480 - DNA, 25 bp, Homo sapien
gacctctaagcggaagcttcccaag

SEQ ID NO: 2837481 - DNA, 25 bp, Homo sapien
gcttgcccggctacaggggccactg

SEQ ID NO: 2837482 - DNA, 25 bp, Homo sapien
caggacctctaagcggaagcttccc

SEQ ID NO: 2837483 - DNA, 25 bp, Homo sapien
tcccgggcgcttataaagctcagat

SEQ ID NO: 2837484 - DNA, 25 bp, Homo sapien
gagcacaagagagatgggtctccca

SEQ ID NO: 2837485 - DNA, 25 bp, Homo sapien
aaaagcagcctgtgatgaagtctgg

SEQ ID NO: 2837486 - DNA, 25 bp, Homo sapien
tctggaagcctttcgcacgcagcta

SEQ ID NO: 2837487 - DNA, 25 bp, Homo sapien
tgaggcaggccgttcacaagatgct

SEQ ID NO: 2837488 - DNA, 25 bp, Homo sapien
gctaagcggcttcattcacgtctgg

SEQ ID NO: 2837489 - DNA, 25 bp, Homo sapien
gaacaaacccgctttgcatatgagg

SEQ ID NO: 2837490 - DNA, 25 bp, Homo sapien
gacttaagatttgcccagtggccac

SEQ ID NO: 2837491 - DNA, 25 bp, Homo sapien
cagaagaatgctagctctagaagct

SEQ ID NO: 2837492 - DNA, 25 bp, Homo sapien
ttttgcccaaataatgcatgtcctc

SEQ ID NO: 2837493 - DNA, 25 bp, Homo sapien
ttgcccaaataatgcatgtcctcca

SEQ ID NO: 2837494 - DNA, 25 bp, Homo sapien
tgcatgtcctccagaagaatgctag

SEQ ID NO: 2837495 - DNA, 25 bp, Homo sapien
agggacctcaacactctaagaaaga

SEQ ID NO: 2837496 - DNA, 25 bp, Homo sapien
ttcttctagttctgccccatggctg

SEQ ID NO: 2837497 - DNA, 25 bp, Homo sapien
aaagcagggccatgtttagacctgt

SEQ ID NO: 2837498 - DNA, 25 bp, Homo sapien
cacctctcaagctgtgcccagttag

SEQ ID NO: 2837499 - DNA, 25 bp, Homo sapien
gggcaatgcaggcacccactatggc

SEQ ID NO: 2837500 - DNA, 25 bp, Homo sapien
gggagggcaatgcaggcacccacta

SEQ ID NO: 2837501 - DNA, 25 bp, Homo sapien
aggcacccactatggctgtaccttc

SEQ ID NO: 2837502 - DNA, 25 bp, Homo sapien
aatgcaggcacccactatggctgta

SEQ ID NO: 2837503 - DNA, 25 bp, Homo sapien
gttccaggcgttgtaccacttgatg

SEQ ID NO: 2837504 - DNA, 25 bp, Homo sapien
ctcgttccaggcgttgtaccacttg

SEQ ID NO: 2837505 - DNA, 25 bp, Homo sapien
tgtaccacttgatgaagcgcttggt

SEQ ID NO: 2837506 - DNA, 25 bp, Homo sapien
caggcgttgtaccacttgatgaagc

SEQ ID NO: 2837507 - DNA, 25 bp, Homo sapien
ctcctgacctcggtacctggacacg

SEQ ID NO: 2837508 - DNA, 25 bp, Homo sapien
agtgctcctgacctcggtacctgga

SEQ ID NO: 2837509 - DNA, 25 bp, Homo sapien
tgctcctgacctcggtacctggaca

SEQ ID NO: 2837510 - DNA, 25 bp, Homo sapien
tcctgacctcggtacctggacacgc

SEQ ID NO: 2837511 - DNA, 25 bp, Homo sapien
ctgtagcggatcttgggtcccttcc

SEQ ID NO: 2837512 - DNA, 25 bp, Homo sapien
tcccttccgggagcacttgcatttg

SEQ ID NO: 2837513 - DNA, 25 bp, Homo sapien
gcagtgcgggtactttggcttcatt

SEQ ID NO: 2837514 - DNA, 25 bp, Homo sapien
ttccagcttcttcacgtcgctgtag

SEQ ID NO: 2837515 - DNA, 25 bp, Homo sapien
ccacacgcgcggtgtacagcgccag

SEQ ID NO: 2837516 - DNA, 25 bp, Homo sapien
acgcgcggtgtacagcgccagcagc

SEQ ID NO: 2837517 - DNA, 25 bp, Homo sapien
cgtccacacgcgcggtgtacagcgc

SEQ ID NO: 2837518 - DNA, 25 bp, Homo sapien
acacgcgcggtgtacagcgccagca

SEQ ID NO: 2837519 - DNA, 25 bp, Homo sapien
cggaggggcgcggcgtgggagcagg

SEQ ID NO: 2837520 - DNA, 25 bp, Homo sapien
gctgaccggaggggcgcggcgtggg

SEQ ID NO: 2837521 - DNA, 25 bp, Homo sapien
ctgaccggaggggcgcggcgtggga

SEQ ID NO: 2837522 - DNA, 25 bp, Homo sapien
accggaggggcgcggcgtgggagca

SEQ ID NO: 2837523 - DNA, 25 bp, Homo sapien
cgcagcgagcgagctcattaatatg

SEQ ID NO: 2837524 - DNA, 25 bp, Homo sapien
gaaccactcggtgactcactgagat

SEQ ID NO: 2837525 - DNA, 25 bp, Homo sapien
cattaatatgcagaaccactcggtg

SEQ ID NO: 2837526 - DNA, 25 bp, Homo sapien
ctgtctgtggccgtgcgctgcgctc

SEQ ID NO: 2837527 - DNA, 25 bp, Homo sapien
tttctgaatcgtgtggttctctctc

SEQ ID NO: 2837528 - DNA, 25 bp, Homo sapien
ggaaaggacccgctatcgcagcggc

SEQ ID NO: 2837529 - DNA, 25 bp, Homo sapien
cacagcgcgcacacatttccagcgt

SEQ ID NO: 2837530 - DNA, 25 bp, Homo sapien
gggttttggagcaggtgccaagtgt

SEQ ID NO: 2837531 - DNA, 25 bp, Homo sapien
taacagcaactcaggagcagttgat

SEQ ID NO: 2837532 - DNA, 25 bp, Homo sapien
ataacagcaactcaggagcagttga

SEQ ID NO: 2837533 - DNA, 25 bp, Homo sapien
ttataacagcaactcaggagcagtt

SEQ ID NO: 2837534 - DNA, 25 bp, Homo sapien
tataacagcaactcaggagcagttg

SEQ ID NO: 2837535 - DNA, 25 bp, Homo sapien
agcgagggcttgggcagccttcagc

SEQ ID NO: 2837536 - DNA, 25 bp, Homo sapien
cagcgagggcttgggcagccttcag

SEQ ID NO: 2837537 - DNA, 25 bp, Homo sapien
tcagcgagggcttgggcagccttca

SEQ ID NO: 2837538 - DNA, 25 bp, Homo sapien
gcgagggcttgggcagccttcagcc

SEQ ID NO: 2837539 - DNA, 25 bp, Homo sapien
tggcgatgggcgatgagcacctgtg

SEQ ID NO: 2837540 - DNA, 25 bp, Homo sapien
actgagcagacgctggcgatgggcg

SEQ ID NO: 2837541 - DNA, 25 bp, Homo sapien
tgagcagacgctggcgatgggcgat

SEQ ID NO: 2837542 - DNA, 25 bp, Homo sapien
tcactgagcagacgctggcgatggg

SEQ ID NO: 2837543 - DNA, 25 bp, Homo sapien
ccatggtgagggtctaggcccatct

SEQ ID NO: 2837544 - DNA, 25 bp, Homo sapien
agggtctaggcccatctttagagct

SEQ ID NO: 2837545 - DNA, 25 bp, Homo sapien
gggtgagtcccatggtgagggtcta

SEQ ID NO: 2837546 - DNA, 25 bp, Homo sapien
caggtagagttgttggtggcttggg

SEQ ID NO: 2837547 - DNA, 25 bp, Homo sapien
tcacacttgtaaaggctcctatgag

SEQ ID NO: 2837548 - DNA, 25 bp, Homo sapien
ctgctgtccgcgtggctcgtagacc

SEQ ID NO: 2837549 - DNA, 25 bp, Homo sapien
cgcgtggctcgtagaccttgttgtc

SEQ ID NO: 2837550 - DNA, 25 bp, Homo sapien
tgtaaaggctcctatgaggtcttct

SEQ ID NO: 2837551 - DNA, 25 bp, Homo sapien
tgccagcaggctgagagaatacttc

SEQ ID NO: 2837552 - DNA, 25 bp, Homo sapien
cttgccagcaggctgagagaatact

SEQ ID NO: 2837553 - DNA, 25 bp, Homo sapien
cagcaggctgagagaatacttcaaa

SEQ ID NO: 2837554 - DNA, 25 bp, Homo sapien
ggggctgcgggccagaggctcggca

SEQ ID NO: 2837555 - DNA, 25 bp, Homo sapien
atggggggctgtaaggcagtcccat

SEQ ID NO: 2837556 - DNA, 25 bp, Homo sapien
gggggctgtaaggcagtcccatcca

SEQ ID NO: 2837557 - DNA, 25 bp, Homo sapien
tacggatgcgaggattccagatggg

SEQ ID NO: 2837558 - DNA, 25 bp, Homo sapien
ttacggatgcgaggattccagatgg

SEQ ID NO: 2837559 - DNA, 25 bp, Homo sapien
ggatgaggaagactgctcaggtaga

SEQ ID NO: 2837560 - DNA, 25 bp, Homo sapien
tgagtgaaggtgacccgcagggaca

SEQ ID NO: 2837561 - DNA, 25 bp, Homo sapien
aaggatgaggaagactgctcaggta

SEQ ID NO: 2837562 - DNA, 25 bp, Homo sapien
atgaggaagactgctcaggtagaga

SEQ ID NO: 2837563 - DNA, 25 bp, Homo sapien
gctcccattgcttttcctcaaacag

SEQ ID NO: 2837564 - DNA, 25 bp, Homo sapien
gctttcttctgcagcgcttgctcca

SEQ ID NO: 2837565 - DNA, 25 bp, Homo sapien
gagtgttccatgtatcctgctttct

SEQ ID NO: 2837566 - DNA, 25 bp, Homo sapien
agcgcttgctccagcctacgcagct

SEQ ID NO: 2837567 - DNA, 25 bp, Homo sapien
tgtggaaggggctttgggtggccag

SEQ ID NO: 2837568 - DNA, 25 bp, Homo sapien
ctttgggtggccagagtgcatacct

SEQ ID NO: 2837569 - DNA, 25 bp, Homo sapien
aaggggctttgggtggccagagtgc

SEQ ID NO: 2837570 - DNA, 25 bp, Homo sapien
gctttgggtggccagagtgcatacc

SEQ ID NO: 2837571 - DNA, 25 bp, Homo sapien
ctgtcaagaccgagggtttagcctc

SEQ ID NO: 2837572 - DNA, 25 bp, Homo sapien
tgtcaagaccgagggtttagcctcc

SEQ ID NO: 2837573 - DNA, 25 bp, Homo sapien
ctaccactgcctgactttcttgctg

SEQ ID NO: 2837574 - DNA, 25 bp, Homo sapien
ccactgcctgactttcttgctggga

SEQ ID NO: 2837575 - DNA, 25 bp, Homo sapien
tttaacatcttcttcactacctcta

SEQ ID NO: 2837576 - DNA, 25 bp, Homo sapien
ttaacatcttcttcactacctctac

SEQ ID NO: 2837577 - DNA, 25 bp, Homo sapien
tttttcttccacataaaatgtctgc

SEQ ID NO: 2837578 - DNA, 25 bp, Homo sapien
tttcttccacataaaatgtctgcat

SEQ ID NO: 2837579 - DNA, 25 bp, Homo sapien
ctttttcttccacataaaatgtctg

SEQ ID NO: 2837580 - DNA, 25 bp, Homo sapien
ttttcttccacataaaatgtctgca

SEQ ID NO: 2837581 - DNA, 25 bp, Homo sapien
tgtcagggaggtggtctgggttgca

SEQ ID NO: 2837582 - DNA, 25 bp, Homo sapien
gaggtggtctgggttgcaaggctat

SEQ ID NO: 2837583 - DNA, 25 bp, Homo sapien
tcagggaggtggtctgggttgcaag

SEQ ID NO: 2837584 - DNA, 25 bp, Homo sapien
agggaggtggtctgggttgcaaggc

SEQ ID NO: 2837585 - DNA, 25 bp, Homo sapien
ttggtgcttgtttgaagcgcgtttg

SEQ ID NO: 2837586 - DNA, 25 bp, Homo sapien
gtgcttgtttgaagcgcgtttgagt

SEQ ID NO: 2837587 - DNA, 25 bp, Homo sapien
gttggtgcttgtttgaagcgcgttt

SEQ ID NO: 2837588 - DNA, 25 bp, Homo sapien
tggtgcttgtttgaagcgcgtttga

SEQ ID NO: 2837589 - DNA, 25 bp, Homo sapien
tgccttcttgcaacagacccataga

SEQ ID NO: 2837590 - DNA, 25 bp, Homo sapien
cttatggcctggcttggcacaggag

SEQ ID NO: 2837591 - DNA, 25 bp, Homo sapien
tagaagtagccccacttatggcctg

SEQ ID NO: 2837592 - DNA, 25 bp, Homo sapien
cagacccatagaagtagccccactt

SEQ ID NO: 2837593 - DNA, 25 bp, Homo sapien
catttgtggagcaactcttctcagc

SEQ ID NO: 2837594 - DNA, 25 bp, Homo sapien
ttaacatttgtggagcaactcttct

SEQ ID NO: 2837595 - DNA, 25 bp, Homo sapien
ctcttctcagcaaaaagactctatg

SEQ ID NO: 2837596 - DNA, 25 bp, Homo sapien
ttctcagcaaaaagactctatgcat

SEQ ID NO: 2837597 - DNA, 25 bp, Homo sapien
tgccaaagcctttgagtccttgtct

SEQ ID NO: 2837598 - DNA, 25 bp, Homo sapien
tctacactgttggaccagatagaag

SEQ ID NO: 2837599 - DNA, 25 bp, Homo sapien
ttgtcttcctgcatcgaccctgaac

SEQ ID NO: 2837600 - DNA, 25 bp, Homo sapien
cagcagaaagcctcgagttagatgc

SEQ ID NO: 2837601 - DNA, 25 bp, Homo sapien
tgcagggagggactttccaccaagg

SEQ ID NO: 2837602 - DNA, 25 bp, Homo sapien
cagggagggactttccaccaaggct

SEQ ID NO: 2837603 - DNA, 25 bp, Homo sapien
gcagggagggactttccaccaaggc

SEQ ID NO: 2837604 - DNA, 25 bp, Homo sapien
tgtaaacagtgcttagaaagtcccc

SEQ ID NO: 2837605 - DNA, 25 bp, Homo sapien
gagtagagacaatagcgggaaccct

SEQ ID NO: 2837606 - DNA, 25 bp, Homo sapien
gagaccttggaatggacatgcccta

SEQ ID NO: 2837607 - DNA, 25 bp, Homo sapien
tgtgtgtacccatcagagaccttgg

SEQ ID NO: 2837608 - DNA, 25 bp, Homo sapien
tagcgttgcttctgatccaagaacc

SEQ ID NO: 2837609 - DNA, 25 bp, Homo sapien
ggattcacaaaatgcctatccacca

SEQ ID NO: 2837610 - DNA, 25 bp, Homo sapien
gcgttgcttctgatccaagaaccca

SEQ ID NO: 2837611 - DNA, 25 bp, Homo sapien
gcctatccaccattatgacattctc

SEQ ID NO: 2837612 - DNA, 25 bp, Homo sapien
agccacagggcaagcatatactcag

SEQ ID NO: 2837613 - DNA, 25 bp, Homo sapien
tactcagggttctcatagggaatgt

SEQ ID NO: 2837614 - DNA, 25 bp, Homo sapien
gttgttccaggaattgtatagccag

SEQ ID NO: 2837615 - DNA, 25 bp, Homo sapien
tccaggaattgtatagccagacaca

SEQ ID NO: 2837616 - DNA, 25 bp, Homo sapien
catgagtctgaagctatgctggaca

SEQ ID NO: 2837617 - DNA, 25 bp, Homo sapien
tagtggctaactatgcaggctccag

SEQ ID NO: 2837618 - DNA, 25 bp, Homo sapien
tcgtgtcatacaattacctgggtct

SEQ ID NO: 2837619 - DNA, 25 bp, Homo sapien
gcatgtctaacaagtccccgggtgc

SEQ ID NO: 2837620 - DNA, 25 bp, Homo sapien
gaaactccaatgtgtgatttgactc

SEQ ID NO: 2837621 - DNA, 25 bp, Homo sapien
agacttgccttaaacccactgtgag

SEQ ID NO: 2837622 - DNA, 25 bp, Homo sapien
gacttgccttaaacccactgtgagc

SEQ ID NO: 2837623 - DNA, 25 bp, Homo sapien
actccttgagcatatagcggtcatc

SEQ ID NO: 2837624 - DNA, 25 bp, Homo sapien
tagctagcttatttttggtgaacac

SEQ ID NO: 2837625 - DNA, 25 bp, Homo sapien
ttcttcttgatccaatcttagtatg

SEQ ID NO: 2837626 - DNA, 25 bp, Homo sapien
tggtgaacacgaatgctactgattt

SEQ ID NO: 2837627 - DNA, 25 bp, Homo sapien
tataaattggattgccttattgatt

SEQ ID NO: 2837628 - DNA, 25 bp, Homo sapien
gtctccactgttaacactgcttcca

SEQ ID NO: 2837629 - DNA, 25 bp, Homo sapien
gcttccatttgtggcgtcaatctca

SEQ ID NO: 2837630 - DNA, 25 bp, Homo sapien
gctgtggctgtttctacgatctgaa

SEQ ID NO: 2837631 - DNA, 25 bp, Homo sapien
gagggtggaccagaataactctcca

SEQ ID NO: 2837632 - DNA, 25 bp, Homo sapien
acttagcaattcttgagaaatcacc

SEQ ID NO: 2837633 - DNA, 25 bp, Homo sapien
tggaaagtcccaatcccaatctcat

SEQ ID NO: 2837634 - DNA, 25 bp, Homo sapien
cttttgctaactggcattcttgctg

SEQ ID NO: 2837635 - DNA, 25 bp, Homo sapien
tcttgagaaatcaccctgatccctc

SEQ ID NO: 2837636 - DNA, 25 bp, Homo sapien
gatgctggatttagacttcgtgccc

SEQ ID NO: 2837637 - DNA, 25 bp, Homo sapien
cacacctctagagctgtaaagtgga

SEQ ID NO: 2837638 - DNA, 25 bp, Homo sapien
ccttgctcaagtgtggttggtgtca

SEQ ID NO: 2837639 - DNA, 25 bp, Homo sapien
tgggacacggactctgacacagttg

SEQ ID NO: 2837640 - DNA, 25 bp, Homo sapien
gtgaatgtacttgagcttattcatc

SEQ ID NO: 2837641 - DNA, 25 bp, Homo sapien
agtgaatgtacttgagcttattcat

SEQ ID NO: 2837642 - DNA, 25 bp, Homo sapien
ttagcatcctttttctgcgtactgt

SEQ ID NO: 2837643 - DNA, 25 bp, Homo sapien
tagcatcctttttctgcgtactgtg

SEQ ID NO: 2837644 - DNA, 25 bp, Homo sapien
ggctgcccttctggtcatcggccca

SEQ ID NO: 2837645 - DNA, 25 bp, Homo sapien
tgcccagactttgaggccgccccac

SEQ ID NO: 2837646 - DNA, 25 bp, Homo sapien
ggtaaacatagcctttctcctggcc

SEQ ID NO: 2837647 - DNA, 25 bp, Homo sapien
ctgcgccctttacacctggcacctg

SEQ ID NO: 2837648 - DNA, 25 bp, Homo sapien
gtctgcttgaaaacttcccacgtct

SEQ ID NO: 2837649 - DNA, 25 bp, Homo sapien
acagttctcccaacttctcgcaagt

SEQ ID NO: 2837650 - DNA, 25 bp, Homo sapien
ttggccttgaccctgaattgtcgat

SEQ ID NO: 2837651 - DNA, 25 bp, Homo sapien
tcagtccctctgaagcacagttctc

SEQ ID NO: 2837652 - DNA, 25 bp, Homo sapien
ggttggtcgtgtgggaaaccatgca

SEQ ID NO: 2837653 - DNA, 25 bp, Homo sapien
tgtgggaaaccatgcagggagctgt

SEQ ID NO: 2837654 - DNA, 25 bp, Homo sapien
ccctcgaggagcctccgttgggttg

SEQ ID NO: 2837655 - DNA, 25 bp, Homo sapien
caggagatggaaacacttgcttctc

SEQ ID NO: 2837656 - DNA, 25 bp, Homo sapien
catctgcattgacccactgccctcc

SEQ ID NO: 2837657 - DNA, 25 bp, Homo sapien
caccttccacactgacttggtggga

SEQ ID NO: 2837658 - DNA, 25 bp, Homo sapien
cacactgacttggtgggaggtcacg

SEQ ID NO: 2837659 - DNA, 25 bp, Homo sapien
tcctgcagtagagatgacaccacct

SEQ ID NO: 2837660 - DNA, 25 bp, Homo sapien
tggagttgttccacttgtgtctcat

SEQ ID NO: 2837661 - DNA, 25 bp, Homo sapien
tgttccacttgtgtctcattacact

SEQ ID NO: 2837662 - DNA, 25 bp, Homo sapien
caaaggattccacagctgaagctgt

SEQ ID NO: 2837663 - DNA, 25 bp, Homo sapien
ctgtgtaaaagctaccagctggatg

SEQ ID NO: 2837664 - DNA, 25 bp, Homo sapien
tctccaaaagcaagcgtaagagctg

SEQ ID NO: 2837665 - DNA, 25 bp, Homo sapien
gatccctgctctccaaaagcaagcg

SEQ ID NO: 2837666 - DNA, 25 bp, Homo sapien
taattgaaatggatccctgctctcc

SEQ ID NO: 2837667 - DNA, 25 bp, Homo sapien
caaaagcaagcgtaagagctgggag

SEQ ID NO: 2837668 - DNA, 25 bp, Homo sapien
ctcctttgcctctatagtcattact

SEQ ID NO: 2837669 - DNA, 25 bp, Homo sapien
tcctcctttgcctctatagtcatta

SEQ ID NO: 2837670 - DNA, 25 bp, Homo sapien
cctcctttgcctctatagtcattac

SEQ ID NO: 2837671 - DNA, 25 bp, Homo sapien
tcctttgcctctatagtcattactg

SEQ ID NO: 2837672 - DNA, 25 bp, Homo sapien
cactggaggcctctgatgaagcccc

SEQ ID NO: 2837673 - DNA, 25 bp, Homo sapien
atgaagccccagcagtgtagcagca

SEQ ID NO: 2837674 - DNA, 25 bp, Homo sapien
ggccagcagtgcctgagtgcacact

SEQ ID NO: 2837675 - DNA, 25 bp, Homo sapien
agcagtgcctgagtgcacactggag

SEQ ID NO: 2837676 - DNA, 25 bp, Homo sapien
taaggtgctcaatgggggagatttt

SEQ ID NO: 2837677 - DNA, 25 bp, Homo sapien
tcagcataagcattgtcttgagcga

SEQ ID NO: 2837678 - DNA, 25 bp, Homo sapien
taagcattgtcttgagcgatgggat

SEQ ID NO: 2837679 - DNA, 25 bp, Homo sapien
gcataagcattgtcttgagcgatgg

SEQ ID NO: 2837680 - DNA, 25 bp, Homo sapien
agcattgtcttgagcgatgggatct

SEQ ID NO: 2837681 - DNA, 25 bp, Homo sapien
gacccaaagcatctcctttactcct

SEQ ID NO: 2837682 - DNA, 25 bp, Homo sapien
ttactccttttactctcaaactgcc

SEQ ID NO: 2837683 - DNA, 25 bp, Homo sapien
gatgctacagggctatcaggaccca

SEQ ID NO: 2837684 - DNA, 25 bp, Homo sapien
cctgggcccgtgtttgcagctgatg

SEQ ID NO: 2837685 - DNA, 25 bp, Homo sapien
tcatcctctgctaggccatgggcaa

SEQ ID NO: 2837686 - DNA, 25 bp, Homo sapien
caaacaataccaagattttgtgttt

SEQ ID NO: 2837687 - DNA, 25 bp, Homo sapien
gggcactgaatgtgcttttcccaac

SEQ ID NO: 2837688 - DNA, 25 bp, Homo sapien
gccatgggcaaggtgggcactgaat

SEQ ID NO: 2837689 - DNA, 25 bp, Homo sapien
cttctagcccgtacccatcactcat

SEQ ID NO: 2837690 - DNA, 25 bp, Homo sapien
ctgttgaggccttgcctttttctta

SEQ ID NO: 2837691 - DNA, 25 bp, Homo sapien
tgttgaggccttgcctttttcttac

SEQ ID NO: 2837692 - DNA, 25 bp, Homo sapien
cctgttgaggccttgcctttttctt

SEQ ID NO: 2837693 - DNA, 25 bp, Homo sapien
tccctgacatgaagcaccttggcct

SEQ ID NO: 2837694 - DNA, 25 bp, Homo sapien
gggtagcccccactccagaagtgca

SEQ ID NO: 2837695 - DNA, 25 bp, Homo sapien
gttggggcatccctgacatgaagca

SEQ ID NO: 2837696 - DNA, 25 bp, Homo sapien
tggggtagcccccactccagaagtg

SEQ ID NO: 2837697 - DNA, 25 bp, Homo sapien
gctgcctttgtggtcaccggaactg

SEQ ID NO: 2837698 - DNA, 25 bp, Homo sapien
ccattctgtcgcctttgctgccttt

SEQ ID NO: 2837699 - DNA, 25 bp, Homo sapien
tgtcgcctttgctgcctttgtggtc

SEQ ID NO: 2837700 - DNA, 25 bp, Homo sapien
tgctgcctttgtggtcaccggaact

SEQ ID NO: 2837701 - DNA, 25 bp, Homo sapien
ggtacaatccgattctccggtgcaa

SEQ ID NO: 2837702 - DNA, 25 bp, Homo sapien
ttccgccttgcaggtacaatccgat

SEQ ID NO: 2837703 - DNA, 25 bp, Homo sapien
ccgattctccggtgcaaaataagtc

SEQ ID NO: 2837704 - DNA, 25 bp, Homo sapien
ggtgcaaaataagtctccaaaagag

SEQ ID NO: 2837705 - DNA, 25 bp, Homo sapien
tatcatacatacttcggcagtgcat

SEQ ID NO: 2837706 - DNA, 25 bp, Homo sapien
atttcctatcatacatacttcggca

SEQ ID NO: 2837707 - DNA, 25 bp, Homo sapien
tcctatcatacatacttcggcagtg

SEQ ID NO: 2837708 - DNA, 25 bp, Homo sapien
ctatcatacatacttcggcagtgca

SEQ ID NO: 2837709 - DNA, 25 bp, Homo sapien
taaaccgtattcatgggaaacacat

SEQ ID NO: 2837710 - DNA, 25 bp, Homo sapien
tgcttagaggcctctcgtccatcac

SEQ ID NO: 2837711 - DNA, 25 bp, Homo sapien
aatctctcttaaaccgtattcatgg

SEQ ID NO: 2837712 - DNA, 25 bp, Homo sapien
catcaccagaagattgttttcaatc

SEQ ID NO: 2837713 - DNA, 25 bp, Homo sapien
caggagcaggattccagatcctgcg

SEQ ID NO: 2837714 - DNA, 25 bp, Homo sapien
gagcaggattccagatcctgcgccc

SEQ ID NO: 2837715 - DNA, 25 bp, Homo sapien
tgtccccaggagcaggattccagat

SEQ ID NO: 2837716 - DNA, 25 bp, Homo sapien
tccccaggagcaggattccagatcc

SEQ ID NO: 2837717 - DNA, 25 bp, Homo sapien
ttggatgctccaggccaaggttgat

SEQ ID NO: 2837718 - DNA, 25 bp, Homo sapien
ctccaggccaaggttgatgggccat

SEQ ID NO: 2837719 - DNA, 25 bp, Homo sapien
gatgctccaggccaaggttgatggg

SEQ ID NO: 2837720 - DNA, 25 bp, Homo sapien
tttggatgctccaggccaaggttga

SEQ ID NO: 2837721 - DNA, 25 bp, Homo sapien
aatggcatctgttaggttttgagcc

SEQ ID NO: 2837722 - DNA, 25 bp, Homo sapien
tggcatctgttaggttttgagcccc

SEQ ID NO: 2837723 - DNA, 25 bp, Homo sapien
cagcaatggcatctgttaggttttg

SEQ ID NO: 2837724 - DNA, 25 bp, Homo sapien
gcaatggcatctgttaggttttgag

SEQ ID NO: 2837725 - DNA, 25 bp, Homo sapien
acttggaagctgtccggcccctctg

SEQ ID NO: 2837726 - DNA, 25 bp, Homo sapien
ctgacttggaagctgtccggcccct

SEQ ID NO: 2837727 - DNA, 25 bp, Homo sapien
ggggcacagcaaaccaagatgtgtg

SEQ ID NO: 2837728 - DNA, 25 bp, Homo sapien
gggcacagcaaaccaagatgtgtgc

SEQ ID NO: 2837729 - DNA, 25 bp, Homo sapien
ttgtccttcggacacgacaaacttc

SEQ ID NO: 2837730 - DNA, 25 bp, Homo sapien
ggacacgacaaacttcttatctgaa

SEQ ID NO: 2837731 - DNA, 25 bp, Homo sapien
caacatcaatcctttcaggcagaaa

SEQ ID NO: 2837732 - DNA, 25 bp, Homo sapien
cagtgttgaaaaggggacattactc

SEQ ID NO: 2837733 - DNA, 25 bp, Homo sapien
ccatgagcaccattgccatggatgt

SEQ ID NO: 2837734 - DNA, 25 bp, Homo sapien
cccatgagcaccattgccatggatg

SEQ ID NO: 2837735 - DNA, 25 bp, Homo sapien
tgcccatgagcaccattgccatgga

SEQ ID NO: 2837736 - DNA, 25 bp, Homo sapien
gcccatgagcaccattgccatggat

SEQ ID NO: 2837737 - DNA, 25 bp, Homo sapien
tgacagtgaccgggatgcccctctc

SEQ ID NO: 2837738 - DNA, 25 bp, Homo sapien
ccgtgacagtgaccgggatgcccct

SEQ ID NO: 2837739 - DNA, 25 bp, Homo sapien
cccccgtgacagtgaccgggatgcc

SEQ ID NO: 2837740 - DNA, 25 bp, Homo sapien
gacagtgaccgggatgcccctctct

SEQ ID NO: 2837741 - DNA, 25 bp, Homo sapien
tcttgatgagacctccgcagctgat

SEQ ID NO: 2837742 - DNA, 25 bp, Homo sapien
gcgcatcttgatgagacctccgcag

SEQ ID NO: 2837743 - DNA, 25 bp, Homo sapien
atgagacctccgcagctgatatccc

SEQ ID NO: 2837744 - DNA, 25 bp, Homo sapien
tcctggcgcatcttgatgagacctc

SEQ ID NO: 2837745 - DNA, 25 bp, Homo sapien
gagaagctcgaaaatcgtgtgctcc

SEQ ID NO: 2837746 - DNA, 25 bp, Homo sapien
caagctgaacaggtgatgggccaga

SEQ ID NO: 2837747 - DNA, 25 bp, Homo sapien
aatcctgctcccaatgagaagctcg

SEQ ID NO: 2837748 - DNA, 25 bp, Homo sapien
catcagagtcaaggagggagctcag

SEQ ID NO: 2837749 - DNA, 25 bp, Homo sapien
ctgaggccagtgcaggaatgatgca

SEQ ID NO: 2837750 - DNA, 25 bp, Homo sapien
tgaggccagtgcaggaatgatgcag

SEQ ID NO: 2837751 - DNA, 25 bp, Homo sapien
cacccagagtgctgtgcctttaagg

SEQ ID NO: 2837752 - DNA, 25 bp, Homo sapien
aggacctgcggcgtgctcgagactc

SEQ ID NO: 2837753 - DNA, 25 bp, Homo sapien
gacttcggtcttgcggcgcgctcgc

SEQ ID NO: 2837754 - DNA, 25 bp, Homo sapien
cgccctccggcacttggagaggtga

SEQ ID NO: 2837755 - DNA, 25 bp, Homo sapien
actgatttagagtagcttacttgat

SEQ ID NO: 2837756 - DNA, 25 bp, Homo sapien
ttaaattgtagcaacttaaagagaa

SEQ ID NO: 2837757 - DNA, 25 bp, Homo sapien
tttaaattgtagcaacttaaagaga

SEQ ID NO: 2837758 - DNA, 25 bp, Homo sapien
tgatactgatttagagtagcttact

SEQ ID NO: 2837759 - DNA, 25 bp, Homo sapien
ccgtggtttggttgcatggctgttc

SEQ ID NO: 2837760 - DNA, 25 bp, Homo sapien
cgttgcctgccgtggtttggttgca

SEQ ID NO: 2837761 - DNA, 25 bp, Homo sapien
cttgcctctcatccctctcatcttt

SEQ ID NO: 2837762 - DNA, 25 bp, Homo sapien
cttcagaaatgtcagcgcgttgcct

SEQ ID NO: 2837763 - DNA, 25 bp, Homo sapien
tttcacccgactgaaaatcagtggg

SEQ ID NO: 2837764 - DNA, 25 bp, Homo sapien
ggtattggtcatctgagacagtctc

SEQ ID NO: 2837765 - DNA, 25 bp, Homo sapien
tgttctttagtacttcaactgattt

SEQ ID NO: 2837766 - DNA, 25 bp, Homo sapien
tgaagcatggtctggtgcagttgtc

SEQ ID NO: 2837767 - DNA, 25 bp, Homo sapien
agagggcagcattcaaaccaacagt

SEQ ID NO: 2837768 - DNA, 25 bp, Homo sapien
gggaatgcccaaacagagacaactg

SEQ ID NO: 2837769 - DNA, 25 bp, Homo sapien
agggaatgcccaaacagagacaact

SEQ ID NO: 2837770 - DNA, 25 bp, Homo sapien
gagggaatgcccaaacagagacaac

SEQ ID NO: 2837771 - DNA, 25 bp, Homo sapien
cagtggcacttggaagctggatctt

SEQ ID NO: 2837772 - DNA, 25 bp, Homo sapien
cactgcagtggcacttggaagctgg

SEQ ID NO: 2837773 - DNA, 25 bp, Homo sapien
tagcactgcagtggcacttggaagc

SEQ ID NO: 2837774 - DNA, 25 bp, Homo sapien
attagcactgcagtggcacttggaa

SEQ ID NO: 2837775 - DNA, 25 bp, Homo sapien
ttgttgatgaggaagttgatgtcca

SEQ ID NO: 2837776 - DNA, 25 bp, Homo sapien
caggatccccgccaaggttggacac

SEQ ID NO: 2837777 - DNA, 25 bp, Homo sapien
ggaagttgatgtccaggatccccgc

SEQ ID NO: 2837778 - DNA, 25 bp, Homo sapien
gatgtccaggatccccgccaaggtt

SEQ ID NO: 2837779 - DNA, 25 bp, Homo sapien
gatgtcacatttacctgaacaagga

SEQ ID NO: 2837780 - DNA, 25 bp, Homo sapien
tactaactgcatgaggaaggcatgc

SEQ ID NO: 2837781 - DNA, 25 bp, Homo sapien
tgaaaagtgattaaccaacaaggga

SEQ ID NO: 2837782 - DNA, 25 bp, Homo sapien
cacatggttcccagtagacaggtaa

SEQ ID NO: 2837783 - DNA, 25 bp, Homo sapien
cctggctatgcgctgaaggctcctt

SEQ ID NO: 2837784 - DNA, 25 bp, Homo sapien
ggatcttgattcctccctggctatg

SEQ ID NO: 2837785 - DNA, 25 bp, Homo sapien
cccgcaaggctgtagttaaggtgtt

SEQ ID NO: 2837786 - DNA, 25 bp, Homo sapien
tctgattcagggtctcccgcaaggc

SEQ ID NO: 2837787 - DNA, 25 bp, Homo sapien
gcaggagcctcacccacaaaaccat

SEQ ID NO: 2837788 - DNA, 25 bp, Homo sapien
tctggttatgttcctgccattgcca

SEQ ID NO: 2837789 - DNA, 25 bp, Homo sapien
agaatgcctgagacaccaagcacag

SEQ ID NO: 2837790 - DNA, 25 bp, Homo sapien
tgcctgagacaccaagcacaggacc

SEQ ID NO: 2837791 - DNA, 25 bp, Homo sapien
aacagcagttagttctaagcaggaa

SEQ ID NO: 2837792 - DNA, 25 bp, Homo sapien
aaacagcagttagttctaagcagga

SEQ ID NO: 2837793 - DNA, 25 bp, Homo sapien
agcagttagttctaagcaggaaata

SEQ ID NO: 2837794 - DNA, 25 bp, Homo sapien
cagcagttagttctaagcaggaaat

SEQ ID NO: 2837795 - DNA, 25 bp, Homo sapien
ctaagaagacgctgtagggagcaag

SEQ ID NO: 2837796 - DNA, 25 bp, Homo sapien
ttttaacaggactcctagctgtgta

SEQ ID NO: 2837797 - DNA, 25 bp, Homo sapien
tgtgtactaagaagacgctgtaggg

SEQ ID NO: 2837798 - DNA, 25 bp, Homo sapien
tcctagctgtgtactaagaagacgc

SEQ ID NO: 2837799 - DNA, 25 bp, Homo sapien
gtggaggatctcgtcttgatgttga

SEQ ID NO: 2837800 - DNA, 25 bp, Homo sapien
ttgaagattggggtgtctgtggtaa

SEQ ID NO: 2837801 - DNA, 25 bp, Homo sapien
gaggatctcgtcttgatgttgacgg

SEQ ID NO: 2837802 - DNA, 25 bp, Homo sapien
gctggtggaggatctcgtcttgatg

SEQ ID NO: 2837803 - DNA, 25 bp, Homo sapien
ttttcctgaaatttggcaaacctca

SEQ ID NO: 2837804 - DNA, 25 bp, Homo sapien
caaagagtatgactgaatcaatgcc

SEQ ID NO: 2837805 - DNA, 25 bp, Homo sapien
ttcctgctagctctgacaagtcatt

SEQ ID NO: 2837806 - DNA, 25 bp, Homo sapien
tgtgagttttatcctgctgtagacc

SEQ ID NO: 2837807 - DNA, 25 bp, Homo sapien
aattatggtagttggtaaagctggc

SEQ ID NO: 2837808 - DNA, 25 bp, Homo sapien
aaactgagtcatggcactcttctag

SEQ ID NO: 2837809 - DNA, 25 bp, Homo sapien
aatagtacctgatatatgataggca

SEQ ID NO: 2837810 - DNA, 25 bp, Homo sapien
ggaatagcagcctctctcttataaa

SEQ ID NO: 2837811 - DNA, 25 bp, Homo sapien
tcttgtggccaataatagtgacact

SEQ ID NO: 2837812 - DNA, 25 bp, Homo sapien
gactcccaaagatgagtagctgtcc

SEQ ID NO: 2837813 - DNA, 25 bp, Homo sapien
caccagtggatgatccttcattgaa

SEQ ID NO: 2837814 - DNA, 25 bp, Homo sapien
tcaaaattgaagatacaccagtgga

SEQ ID NO: 2837815 - DNA, 25 bp, Homo sapien
ccataggtgacagatcaaagagccc

SEQ ID NO: 2837816 - DNA, 25 bp, Homo sapien
gagcccgaagcaaccagttcacatg

SEQ ID NO: 2837817 - DNA, 25 bp, Homo sapien
ttcttgaagagaagggtatgcatcc

SEQ ID NO: 2837818 - DNA, 25 bp, Homo sapien
tattttgaagatctgaccattggcc

SEQ ID NO: 2837819 - DNA, 25 bp, Homo sapien
caggataaactttctgcaagggcaa

SEQ ID NO: 2837820 - DNA, 25 bp, Homo sapien
catgcgattgtatgccaggataaac

SEQ ID NO: 2837821 - DNA, 25 bp, Homo sapien
tcgagtcacagttttcaatgtgcac

SEQ ID NO: 2837822 - DNA, 25 bp, Homo sapien
tgcaagggcaatagagttccaagtt

SEQ ID NO: 2837823 - DNA, 25 bp, Homo sapien
tataccttgatggagtaaccaaaca

SEQ ID NO: 2837824 - DNA, 25 bp, Homo sapien
tgaaattcacggagctatacatgga

SEQ ID NO: 2837825 - DNA, 25 bp, Homo sapien
tacctggagtaccaggagatctagc

SEQ ID NO: 2837826 - DNA, 25 bp, Homo sapien
taatgactaagtggtagcacaaggg

SEQ ID NO: 2837827 - DNA, 25 bp, Homo sapien
gtctgtgacatgtggtttacctata

SEQ ID NO: 2837828 - DNA, 25 bp, Homo sapien
aaaatctctacgtatggaacctgca

SEQ ID NO: 2837829 - DNA, 25 bp, Homo sapien
aatgcatcagctagtttgggtacac

SEQ ID NO: 2837830 - DNA, 25 bp, Homo sapien
acgtccttgaaagtgcctcagctgg

SEQ ID NO: 2837831 - DNA, 25 bp, Homo sapien
tccagtgaatggtgcgtacacagta

SEQ ID NO: 2837832 - DNA, 25 bp, Homo sapien
tacacagtagatccagcagagcaca

SEQ ID NO: 2837833 - DNA, 25 bp, Homo sapien
ctggcccacaatcattccagtgaat

SEQ ID NO: 2837834 - DNA, 25 bp, Homo sapien
tattcgaacaccattattgatagca

SEQ ID NO: 2837835 - DNA, 25 bp, Homo sapien
acagccatggcggtcacacgtccgg

SEQ ID NO: 2837836 - DNA, 25 bp, Homo sapien
gaagacttgccagcacatatattag

SEQ ID NO: 2837837 - DNA, 25 bp, Homo sapien
cacacgtccggatctcattggaaga

SEQ ID NO: 2837838 - DNA, 25 bp, Homo sapien
acatatattagcccatggccctgcc

SEQ ID NO: 2837839 - DNA, 25 bp, Homo sapien
gatcctgacaattctgttttcactg

SEQ ID NO: 2837840 - DNA, 25 bp, Homo sapien
tatttatgggaagatcgtccttcca

SEQ ID NO: 2837841 - DNA, 25 bp, Homo sapien
tcagtcacacagttgatcctgacaa

SEQ ID NO: 2837842 - DNA, 25 bp, Homo sapien
tcctatccccatttgccttatcagt

SEQ ID NO: 2837843 - DNA, 25 bp, Homo sapien
caaacaagcaaaagcgagagcctgg

SEQ ID NO: 2837844 - DNA, 25 bp, Homo sapien
gatacagtgagcacactcaaccttg

SEQ ID NO: 2837845 - DNA, 25 bp, Homo sapien
tacctatcctgtgaagagaacctac

SEQ ID NO: 2837846 - DNA, 25 bp, Homo sapien
aaagttttatgccttggagccaagc

SEQ ID NO: 2837847 - DNA, 25 bp, Homo sapien
cagccaaaaggagggctttggtgga

SEQ ID NO: 2837848 - DNA, 25 bp, Homo sapien
aatcagaccagccaaaaggagggct

SEQ ID NO: 2837849 - DNA, 25 bp, Homo sapien
cggtagaaatcagaccagccaaaag

SEQ ID NO: 2837850 - DNA, 25 bp, Homo sapien
accagccaaaaggagggctttggtg

SEQ ID NO: 2837851 - DNA, 25 bp, Homo sapien
tgaatacttcctagctatttagcct

SEQ ID NO: 2837852 - DNA, 25 bp, Homo sapien
aaagtttaagaggatggagcaagtc

SEQ ID NO: 2837853 - DNA, 25 bp, Homo sapien
ttcttcctctgattagagttgcccc

SEQ ID NO: 2837854 - DNA, 25 bp, Homo sapien
tctttagtgtgagacacaaaaagtt

SEQ ID NO: 2837855 - DNA, 25 bp, Homo sapien
tgccatgtttcatgggggcaaaggg

SEQ ID NO: 2837856 - DNA, 25 bp, Homo sapien
ctttgccatgtttcatgggggcaaa

SEQ ID NO: 2837857 - DNA, 25 bp, Homo sapien
tttgccatgtttcatgggggcaaag

SEQ ID NO: 2837858 - DNA, 25 bp, Homo sapien
ttgccatgtttcatgggggcaaagg

SEQ ID NO: 2837859 - DNA, 25 bp, Homo sapien
tgattttgggtttagctgtgtagct

SEQ ID NO: 2837860 - DNA, 25 bp, Homo sapien
ccttgattttgggtttagctgtgta

SEQ ID NO: 2837861 - DNA, 25 bp, Homo sapien
gggtttagctgtgtagctttgacca

SEQ ID NO: 2837862 - DNA, 25 bp, Homo sapien
ttgggtttagctgtgtagctttgac

SEQ ID NO: 2837863 - DNA, 25 bp, Homo sapien
ttctggggccttagtctttgcacac

SEQ ID NO: 2837864 - DNA, 25 bp, Homo sapien
tacatcgccgtgaggcagatgatcc

SEQ ID NO: 2837865 - DNA, 25 bp, Homo sapien
tcctgtgtttctacatcgccgtgag

SEQ ID NO: 2837866 - DNA, 25 bp, Homo sapien
gtgtttctacatcgccgtgaggcag

SEQ ID NO: 2837867 - DNA, 25 bp, Homo sapien
aactgtttccaatgtatcttcccct

SEQ ID NO: 2837868 - DNA, 25 bp, Homo sapien
taactgtttccaatgtatcttcccc

SEQ ID NO: 2837869 - DNA, 25 bp, Homo sapien
attaactgtttccaatgtatcttcc

SEQ ID NO: 2837870 - DNA, 25 bp, Homo sapien
tctgaagccagtgccgtcctctaaa

SEQ ID NO: 2837871 - DNA, 25 bp, Homo sapien
tgaagttgtgtgactgtatctcaca

SEQ ID NO: 2837872 - DNA, 25 bp, Homo sapien
tgactgtatctcacaaccagatcca

SEQ ID NO: 2837873 - DNA, 25 bp, Homo sapien
ttgtgtgactgtatctcacaaccag

SEQ ID NO: 2837874 - DNA, 25 bp, Homo sapien
tgtgactgtatctcacaaccagatc

SEQ ID NO: 2837875 - DNA, 25 bp, Homo sapien
agcattgcctggactatggtcctct

SEQ ID NO: 2837876 - DNA, 25 bp, Homo sapien
ggcagcattgcctggactatggtcc

SEQ ID NO: 2837877 - DNA, 25 bp, Homo sapien
gccttcatatttgttagaaacttca

SEQ ID NO: 2837878 - DNA, 25 bp, Homo sapien
catatttgttagaaacttcatgcct

SEQ ID NO: 2837879 - DNA, 25 bp, Homo sapien
tgaggcatatctttgctctcagcct

SEQ ID NO: 2837880 - DNA, 25 bp, Homo sapien
atatctttgctctcagcctgggagc

SEQ ID NO: 2837881 - DNA, 25 bp, Homo sapien
ggcatatctttgctctcagcctggg

SEQ ID NO: 2837882 - DNA, 25 bp, Homo sapien
cttttgaggcatatctttgctctca

SEQ ID NO: 2837883 - DNA, 25 bp, Homo sapien
gacaatggggcagtatgcagcctgc

SEQ ID NO: 2837884 - DNA, 25 bp, Homo sapien
tggggagtggccctcctctgccttg

SEQ ID NO: 2837885 - DNA, 25 bp, Homo sapien
gccatgcttagacaatggggcagta

SEQ ID NO: 2837886 - DNA, 25 bp, Homo sapien
tctgtttctcgttgacttcagtggg

SEQ ID NO: 2837887 - DNA, 25 bp, Homo sapien
ggaggcagaggaacctcgcctgctt

SEQ ID NO: 2837888 - DNA, 25 bp, Homo sapien
agaggaacctcgcctgcttcaccat

SEQ ID NO: 2837889 - DNA, 25 bp, Homo sapien
ggcagaggaacctcgcctgcttcac

SEQ ID NO: 2837890 - DNA, 25 bp, Homo sapien
gaggaacctcgcctgcttcaccatc

SEQ ID NO: 2837891 - DNA, 25 bp, Homo sapien
cagggtcttctgggagtaagtgtcc

SEQ ID NO: 2837892 - DNA, 25 bp, Homo sapien
ggagtaagtgtccacttttgcattt

SEQ ID NO: 2837893 - DNA, 25 bp, Homo sapien
ctgctccaaagcagtcaagggtggc

SEQ ID NO: 2837894 - DNA, 25 bp, Homo sapien
gcattttaacgtattgaaggcttca

SEQ ID NO: 2837895 - DNA, 25 bp, Homo sapien
agcaaggcggaacagctgctcagtg

SEQ ID NO: 2837896 - DNA, 25 bp, Homo sapien
ttctggattgtaggccgcccgagag

SEQ ID NO: 2837897 - DNA, 25 bp, Homo sapien
gtcaagggacaagaagacgattctg

SEQ ID NO: 2837898 - DNA, 25 bp, Homo sapien
tcagtggtccgcaaccgggtcaagg

SEQ ID NO: 2837899 - DNA, 25 bp, Homo sapien
gaagtttctaattgtttacttcgca

SEQ ID NO: 2837900 - DNA, 25 bp, Homo sapien
tctaattgtttacttcgcaacactt

SEQ ID NO: 2837901 - DNA, 25 bp, Homo sapien
tgtttacttcgcaacacttgaattt

SEQ ID NO: 2837902 - DNA, 25 bp, Homo sapien
aattgtttacttcgcaacacttgaa

SEQ ID NO: 2837903 - DNA, 25 bp, Homo sapien
cagtgttggagtccaggaagtccat

SEQ ID NO: 2837904 - DNA, 25 bp, Homo sapien
tgctgggctggcagtgttggagtcc

SEQ ID NO: 2837905 - DNA, 25 bp, Homo sapien
tggcagtgttggagtccaggaagtc

SEQ ID NO: 2837906 - DNA, 25 bp, Homo sapien
ttgtgtgctgggctggcagtgttgg

SEQ ID NO: 2837907 - DNA, 25 bp, Homo sapien
cattcactcatgcttctatgctggg

SEQ ID NO: 2837908 - DNA, 25 bp, Homo sapien
ccaattctcccagtagggtatgcag

SEQ ID NO: 2837909 - DNA, 25 bp, Homo sapien
ggaggagtcatacaaacttcgccat

SEQ ID NO: 2837910 - DNA, 25 bp, Homo sapien
aaaagtctttgaagtggctaccagg

SEQ ID NO: 2837911 - DNA, 25 bp, Homo sapien
tgtgaccggctactgcaatcagctg

SEQ ID NO: 2837912 - DNA, 25 bp, Homo sapien
tgtttcaaagataaggatccgcgct

SEQ ID NO: 2837913 - DNA, 25 bp, Homo sapien
cttgataggactgcggtgctcggcc

SEQ ID NO: 2837914 - DNA, 25 bp, Homo sapien
tatcggtgggaattacactctgggc

SEQ ID NO: 2837915 - DNA, 25 bp, Homo sapien
agccaaaacagatttttggttgcag

SEQ ID NO: 2837916 - DNA, 25 bp, Homo sapien
tggtggtgatggcattggagaatgg

SEQ ID NO: 2837917 - DNA, 25 bp, Homo sapien
cagaatgttccggttctggtggtga

SEQ ID NO: 2837918 - DNA, 25 bp, Homo sapien
cagaactcgggcgaggatacttggg

SEQ ID NO: 2837919 - DNA, 25 bp, Homo sapien
gtttatcttgattgtaaagacaatg

SEQ ID NO: 2837920 - DNA, 25 bp, Homo sapien
ggagggagcaattttggttgcttgt

SEQ ID NO: 2837921 - DNA, 25 bp, Homo sapien
gaggaatggctgaacaccctgagcc

SEQ ID NO: 2837922 - DNA, 25 bp, Homo sapien
aaagacaatgtttcctgaccagctg

SEQ ID NO: 2837923 - DNA, 25 bp, Homo sapien
cgtggcttggcctcacagaagttga

SEQ ID NO: 2837924 - DNA, 25 bp, Homo sapien
tgttgcctagcactaccaaaagggt

SEQ ID NO: 2837925 - DNA, 25 bp, Homo sapien
tagagtacctgaattgcccagagtg

SEQ ID NO: 2837926 - DNA, 25 bp, Homo sapien
ccaaaagggttgttatctagcagca

SEQ ID NO: 2837927 - DNA, 25 bp, Homo sapien
tggtgtctgtcgtgctacgttattc

SEQ ID NO: 2837928 - DNA, 25 bp, Homo sapien
tgtcgtgctacgttattctgtgaag

SEQ ID NO: 2837929 - DNA, 25 bp, Homo sapien
tatagtttggtgtctgtcgtgctac

SEQ ID NO: 2837930 - DNA, 25 bp, Homo sapien
ttattctgtgaagggagattctgtc

SEQ ID NO: 2837931 - DNA, 25 bp, Homo sapien
cttcttgaaatacctcttcgaacat

SEQ ID NO: 2837932 - DNA, 25 bp, Homo sapien
tatacagtgaagagtaagttttccc

SEQ ID NO: 2837933 - DNA, 25 bp, Homo sapien
ttatgccccagttcagaaatttggc

SEQ ID NO: 2837934 - DNA, 25 bp, Homo sapien
gatgcagagtaagtattatgcccca

SEQ ID NO: 2837935 - DNA, 25 bp, Homo sapien
tagtagcttataagagggcatatac

SEQ ID NO: 2837936 - DNA, 25 bp, Homo sapien
ctttatagctagtgacagtgcatgc

SEQ ID NO: 2837937 - DNA, 25 bp, Homo sapien
tagatgcttatccttacgtccttgg

SEQ ID NO: 2837938 - DNA, 25 bp, Homo sapien
cagtgcatgcacagccttgttcaac

SEQ ID NO: 2837939 - DNA, 25 bp, Homo sapien
caactatgtttgctgcttttggaca

SEQ ID NO: 2837940 - DNA, 25 bp, Homo sapien
gaaaagacatgaacgaactccaaaa

SEQ ID NO: 2837941 - DNA, 25 bp, Homo sapien
tgaaagctttattttctggtgcctt

SEQ ID NO: 2837942 - DNA, 25 bp, Homo sapien
tgtcctttctgctcttgtgaagaaa

SEQ ID NO: 2837943 - DNA, 25 bp, Homo sapien
ttttctcaggagctgtcaaatggac

SEQ ID NO: 2837944 - DNA, 25 bp, Homo sapien
tgcctggctgacgtgaaatgtaaac

SEQ ID NO: 2837945 - DNA, 25 bp, Homo sapien
actagtaggcgtgttattgatctgc

SEQ ID NO: 2837946 - DNA, 25 bp, Homo sapien
cagctattcttacagtccctaagga

SEQ ID NO: 2837947 - DNA, 25 bp, Homo sapien
tggtctggtcagtattgcctggctg

SEQ ID NO: 2837948 - DNA, 25 bp, Homo sapien
gatcccttctttgtcttactagtta

SEQ ID NO: 2837949 - DNA, 25 bp, Homo sapien
gatgattatcacctttgccacttaa

SEQ ID NO: 2837950 - DNA, 25 bp, Homo sapien
tgtacttctgtgatagagaacatct

SEQ ID NO: 2837951 - DNA, 25 bp, Homo sapien
tatattgttcagctagatgagcaag

SEQ ID NO: 2837952 - DNA, 25 bp, Homo sapien
tctattcaagcttgtccagcctgca

SEQ ID NO: 2837953 - DNA, 25 bp, Homo sapien
agtgagcactaagaggatgttggct

SEQ ID NO: 2837954 - DNA, 25 bp, Homo sapien
gtaaggtattttgtagcaacatcac

SEQ ID NO: 2837955 - DNA, 25 bp, Homo sapien
gcacacttgtcctagcggaagaagg

SEQ ID NO: 2837956 - DNA, 25 bp, Homo sapien
tctctttgaacttttggacttttgc

SEQ ID NO: 2837957 - DNA, 25 bp, Homo sapien
gctaagaaagcactcatatcctttc

SEQ ID NO: 2837958 - DNA, 25 bp, Homo sapien
tcagctaagaaagcactcatatcct

SEQ ID NO: 2837959 - DNA, 25 bp, Homo sapien
tctttgaacttttggacttttgctc

SEQ ID NO: 2837960 - DNA, 25 bp, Homo sapien
ttcttggaattgttgcttgtagaac

SEQ ID NO: 2837961 - DNA, 25 bp, Homo sapien
aattcttggaattgttgcttgtaga

SEQ ID NO: 2837962 - DNA, 25 bp, Homo sapien
caaattcttggaattgttgcttgta

SEQ ID NO: 2837963 - DNA, 25 bp, Homo sapien
aaattcttggaattgttgcttgtag

SEQ ID NO: 2837964 - DNA, 25 bp, Homo sapien
cctctttactgtttcctgatagcac

SEQ ID NO: 2837965 - DNA, 25 bp, Homo sapien
tgttgggaagtacagacctctttac

SEQ ID NO: 2837966 - DNA, 25 bp, Homo sapien
cagacctctttactgtttcctgata

SEQ ID NO: 2837967 - DNA, 25 bp, Homo sapien
ctgttgggaagtacagacctcttta

SEQ ID NO: 2837968 - DNA, 25 bp, Homo sapien
ggtggaaggaactgccctgcagaaa

SEQ ID NO: 2837969 - DNA, 25 bp, Homo sapien
caccagacggttctggtccagatag

SEQ ID NO: 2837970 - DNA, 25 bp, Homo sapien
actgccctgcagaaagggtccccag

SEQ ID NO: 2837971 - DNA, 25 bp, Homo sapien
gctcttccttcaccagacggttctg

SEQ ID NO: 2837972 - DNA, 25 bp, Homo sapien
tactgggatcgagaccctacacagg

SEQ ID NO: 2837973 - DNA, 25 bp, Homo sapien
gaaatgcgcccctgaagatgtgaga

SEQ ID NO: 2837974 - DNA, 25 bp, Homo sapien
caggtgagttcacgacgctcggatc

SEQ ID NO: 2837975 - DNA, 25 bp, Homo sapien
tggcgcgccgtctttcaggaaggtt

SEQ ID NO: 2837976 - DNA, 25 bp, Homo sapien
agctccagcggcaaagcgccttctg

SEQ ID NO: 2837977 - DNA, 25 bp, Homo sapien
gcaaccgatgaagaggacgacgagc

SEQ ID NO: 2837978 - DNA, 25 bp, Homo sapien
acgagcgccaccgagagcagcagca

SEQ ID NO: 2837979 - DNA, 25 bp, Homo sapien
gccgcccgtggcgttgaatatgtcg

SEQ ID NO: 2837980 - DNA, 25 bp, Homo sapien
ccgaccccagccggaccgcttcact

SEQ ID NO: 2837981 - DNA, 25 bp, Homo sapien
accccagccggaccgcttcacttgg

SEQ ID NO: 2837982 - DNA, 25 bp, Homo sapien
cgccgaccccagccggaccgcttca

SEQ ID NO: 2837983 - DNA, 25 bp, Homo sapien
gaccccagccggaccgcttcacttg

SEQ ID NO: 2837984 - DNA, 25 bp, Homo sapien
gcgcctccatggcgcgcccctcccg

SEQ ID NO: 2837985 - DNA, 25 bp, Homo sapien
catactggcgcgacccggcgcctcc

SEQ ID NO: 2837986 - DNA, 25 bp, Homo sapien
gagcatactggcgcgacccggcgcc

SEQ ID NO: 2837987 - DNA, 25 bp, Homo sapien
ctggagcatactggcgcgacccggc

SEQ ID NO: 2837988 - DNA, 25 bp, Homo sapien
tgcaaagaccccgggacgcgtccgc

SEQ ID NO: 2837989 - DNA, 25 bp, Homo sapien
gactgcaaagaccccgggacgcgtc

SEQ ID NO: 2837990 - DNA, 25 bp, Homo sapien
cgagagtcggtgccttggggccggc

SEQ ID NO: 2837991 - DNA, 25 bp, Homo sapien
gagagtcggtgccttggggccggcg

SEQ ID NO: 2837992 - DNA, 25 bp, Homo sapien
tcgagacgcccagtgttcagcgagc

SEQ ID NO: 2837993 - DNA, 25 bp, Homo sapien
gactgagctttctggcggctctgag

SEQ ID NO: 2837994 - DNA, 25 bp, Homo sapien
ggacagaggtcccagtcactgactc

SEQ ID NO: 2837995 - DNA, 25 bp, Homo sapien
gcggaccccagttctcggagctgga

SEQ ID NO: 2837996 - DNA, 25 bp, Homo sapien
catggcctggtttgttccgagtgcc

SEQ ID NO: 2837997 - DNA, 25 bp, Homo sapien
tgcagacgcgctcccagacaagcat

SEQ ID NO: 2837998 - DNA, 25 bp, Homo sapien
tccaggcatggcctggtttgttccg

SEQ ID NO: 2837999 - DNA, 25 bp, Homo sapien
caagggtgtgcagacgcgctcccag

SEQ ID NO: 2838000 - DNA, 25 bp, Homo sapien
gtcagcaatgtcaggcccacgtgtg

SEQ ID NO: 2838001 - DNA, 25 bp, Homo sapien
ctgagactatagcagcctcttgcct

SEQ ID NO: 2838002 - DNA, 25 bp, Homo sapien
aatgtcaggcccacgtgtgtcctgg

SEQ ID NO: 2838003 - DNA, 25 bp, Homo sapien
ttgctggacactgagactatagcag

SEQ ID NO: 2838004 - DNA, 25 bp, Homo sapien
tggtagaagtcacagacgccgatgt

SEQ ID NO: 2838005 - DNA, 25 bp, Homo sapien
ggagatccccttcgtgtcctagagg

SEQ ID NO: 2838006 - DNA, 25 bp, Homo sapien
ccagcgggctggagatgtcagtcat

SEQ ID NO: 2838007 - DNA, 25 bp, Homo sapien
caacctggccttggaatgctggtag

SEQ ID NO: 2838008 - DNA, 25 bp, Homo sapien
tcaccagtagcttgagatttttcct

SEQ ID NO: 2838009 - DNA, 25 bp, Homo sapien
cttctcgctgagttgttgaatcagg

SEQ ID NO: 2838010 - DNA, 25 bp, Homo sapien
ctcaggtggtctttgtttaagttct

SEQ ID NO: 2838011 - DNA, 25 bp, Homo sapien
ttcctcaagaagctcatagcgcagg

SEQ ID NO: 2838012 - DNA, 25 bp, Homo sapien
ctggagatatcttgcttgatttcct

SEQ ID NO: 2838013 - DNA, 25 bp, Homo sapien
atatcttgcttgatttccttcagct

SEQ ID NO: 2838014 - DNA, 25 bp, Homo sapien
tggagatatcttgcttgatttcctt

SEQ ID NO: 2838015 - DNA, 25 bp, Homo sapien
tcttgcttgatttccttcagctcgc

SEQ ID NO: 2838016 - DNA, 25 bp, Homo sapien
ctgtccacctgggctttcaggacgt

SEQ ID NO: 2838017 - DNA, 25 bp, Homo sapien
acgtatctttttatgagccgtttca

SEQ ID NO: 2838018 - DNA, 25 bp, Homo sapien
tcattgacttcgtcattttctctgt

SEQ ID NO: 2838019 - DNA, 25 bp, Homo sapien
attgacttcgtcattttctctgtcc

SEQ ID NO: 2838020 - DNA, 25 bp, Homo sapien
tgtacactgatgatggccaatgagg

SEQ ID NO: 2838021 - DNA, 25 bp, Homo sapien
gtacactgatgatggccaatgaggt

SEQ ID NO: 2838022 - DNA, 25 bp, Homo sapien
ggcttgctcaaagtgttatttgctg

SEQ ID NO: 2838023 - DNA, 25 bp, Homo sapien
tgggcttgctcaaagtgttatttgc

SEQ ID NO: 2838024 - DNA, 25 bp, Homo sapien
tcatgccagcctggtagcgagtctt

SEQ ID NO: 2838025 - DNA, 25 bp, Homo sapien
tgctcaaagtgttatttgctgtcag

SEQ ID NO: 2838026 - DNA, 25 bp, Homo sapien
agcatgcccatttcaaggtcatttt

SEQ ID NO: 2838027 - DNA, 25 bp, Homo sapien
ttggccttagatttgcagagtttta

SEQ ID NO: 2838028 - DNA, 25 bp, Homo sapien
tttggccttagatttgcagagtttt

SEQ ID NO: 2838029 - DNA, 25 bp, Homo sapien
attttcacagcttttggccttagat

SEQ ID NO: 2838030 - DNA, 25 bp, Homo sapien
cactagattaaaaggagcaggtaga

SEQ ID NO: 2838031 - DNA, 25 bp, Homo sapien
tttgctcgggcgaacttccattcca

SEQ ID NO: 2838032 - DNA, 25 bp, Homo sapien
cttggcactagattaaaaggagcag

SEQ ID NO: 2838033 - DNA, 25 bp, Homo sapien
aagacagccagagttttgctcgggc

SEQ ID NO: 2838034 - DNA, 25 bp, Homo sapien
aacaacggagcccaacctgaggagc

SEQ ID NO: 2838035 - DNA, 25 bp, Homo sapien
ccaacattcggaaagcagacttcta

SEQ ID NO: 2838036 - DNA, 25 bp, Homo sapien
acagccccaacattcggaaagcaga

SEQ ID NO: 2838037 - DNA, 25 bp, Homo sapien
cctcaaaggccacgatttaacaacg

SEQ ID NO: 2838038 - DNA, 25 bp, Homo sapien
cattctgattgattgccatgggtca

SEQ ID NO: 2838039 - DNA, 25 bp, Homo sapien
ttctgattgattgccatgggtcatc

SEQ ID NO: 2838040 - DNA, 25 bp, Homo sapien
tcattctgattgattgccatgggtc

SEQ ID NO: 2838041 - DNA, 25 bp, Homo sapien
attctgattgattgccatgggtcat

SEQ ID NO: 2838042 - DNA, 25 bp, Homo sapien
tacttcagataagccgaatatggac

SEQ ID NO: 2838043 - DNA, 25 bp, Homo sapien
caccatggtgacgttataaacgccg

SEQ ID NO: 2838044 - DNA, 25 bp, Homo sapien
taaacgccgtagagaacgtagccaa

SEQ ID NO: 2838045 - DNA, 25 bp, Homo sapien
gaatttgtggtcgtatttcagcacc

SEQ ID NO: 2838046 - DNA, 25 bp, Homo sapien
gcctggaatgctgatatgttcaatt

SEQ ID NO: 2838047 - DNA, 25 bp, Homo sapien
ctcaggacaattaacctggcctgga

SEQ ID NO: 2838048 - DNA, 25 bp, Homo sapien
tctgtggtttaaggagtaactcctg

SEQ ID NO: 2838049 - DNA, 25 bp, Homo sapien
gacaattaacctggcctggaatgct

SEQ ID NO: 2838050 - DNA, 25 bp, Homo sapien
ctttttatggtgattagagctctac

SEQ ID NO: 2838051 - DNA, 25 bp, Homo sapien
aacaatggatgatatccttacacta

SEQ ID NO: 2838052 - DNA, 25 bp, Homo sapien
tacactaagggctgataaatcaata

SEQ ID NO: 2838053 - DNA, 25 bp, Homo sapien
tatgaaaatgacagacgtcctggta

SEQ ID NO: 2838054 - DNA, 25 bp, Homo sapien
taccctgagtgggaaatgacttgtg

SEQ ID NO: 2838055 - DNA, 25 bp, Homo sapien
tgaaacttgacctcactaccctgag

SEQ ID NO: 2838056 - DNA, 25 bp, Homo sapien
cttaacatgtggcaggaaataaatg

SEQ ID NO: 2838057 - DNA, 25 bp, Homo sapien
cttgggcacccatagtaatatattc

SEQ ID NO: 2838058 - DNA, 25 bp, Homo sapien
tcagcacgacggctatcgcgtagag

SEQ ID NO: 2838059 - DNA, 25 bp, Homo sapien
tatgcaatgcgagagaagctcagca

SEQ ID NO: 2838060 - DNA, 25 bp, Homo sapien
taaacgctgggttgtatttggcacc

SEQ ID NO: 2838061 - DNA, 25 bp, Homo sapien
caaaactctcgttggctggcagaat

SEQ ID NO: 2838062 - DNA, 25 bp, Homo sapien
aatctgggttactcacgaggccaca

SEQ ID NO: 2838063 - DNA, 25 bp, Homo sapien
ggttactcacgaggccacaggatct

SEQ ID NO: 2838064 - DNA, 25 bp, Homo sapien
aagaaaacaatctgggttactcacg

SEQ ID NO: 2838065 - DNA, 25 bp, Homo sapien
tactcacgaggccacaggatctatt

SEQ ID NO: 2838066 - DNA, 25 bp, Homo sapien
cccggaagcgccaaaatggagtagg

SEQ ID NO: 2838067 - DNA, 25 bp, Homo sapien
gtcccggaagcgccaaaatggagta

SEQ ID NO: 2838068 - DNA, 25 bp, Homo sapien
tcccggaagcgccaaaatggagtag

SEQ ID NO: 2838069 - DNA, 25 bp, Homo sapien
cggaagcgccaaaatggagtagggg

SEQ ID NO: 2838070 - DNA, 25 bp, Homo sapien
taggtgaagtatgccacttccggcg

SEQ ID NO: 2838071 - DNA, 25 bp, Homo sapien
tccggcggaagcgagacattgtgca

SEQ ID NO: 2838072 - DNA, 25 bp, Homo sapien
cagatttccttgcattcggaccaaa

SEQ ID NO: 2838073 - DNA, 25 bp, Homo sapien
gacagcatcccgaaatctagcaggt

SEQ ID NO: 2838074 - DNA, 25 bp, Homo sapien
ttttcgtttctcttggcatttgtga

SEQ ID NO: 2838075 - DNA, 25 bp, Homo sapien
cgtttctcttggcatttgtgaccgc

SEQ ID NO: 2838076 - DNA, 25 bp, Homo sapien
tttctcttggcatttgtgaccgcat

SEQ ID NO: 2838077 - DNA, 25 bp, Homo sapien
ttcgtttctcttggcatttgtgacc

SEQ ID NO: 2838078 - DNA, 25 bp, Homo sapien
ttagcaaggagagaataaaaataga

SEQ ID NO: 2838079 - DNA, 25 bp, Homo sapien
agagaataaaaatagagtgacttgc

SEQ ID NO: 2838080 - DNA, 25 bp, Homo sapien
aataaaaatagagtgacttgcttac

SEQ ID NO: 2838081 - DNA, 25 bp, Homo sapien
gagaataaaaatagagtgacttgct

SEQ ID NO: 2838082 - DNA, 25 bp, Homo sapien
tagtctgtgaaggtttcgtttggca

SEQ ID NO: 2838083 - DNA, 25 bp, Homo sapien
taacaccttcaaatcggtcagatgc

SEQ ID NO: 2838084 - DNA, 25 bp, Homo sapien
gagcatttctgtccaggagaactgt

SEQ ID NO: 2838085 - DNA, 25 bp, Homo sapien
gcattcacaactaataatcccaaga

SEQ ID NO: 2838086 - DNA, 25 bp, Homo sapien
tcacattgtttcttgtcactgtgtc

SEQ ID NO: 2838087 - DNA, 25 bp, Homo sapien
cagccttaggtagtcatcacattgt

SEQ ID NO: 2838088 - DNA, 25 bp, Homo sapien
ttgggatattttggcatatccagga

SEQ ID NO: 2838089 - DNA, 25 bp, Homo sapien
ttttggcatatccaggagacagcct

SEQ ID NO: 2838090 - DNA, 25 bp, Homo sapien
ggcagtcagttcattgactgtctgg

SEQ ID NO: 2838091 - DNA, 25 bp, Homo sapien
tgactgtctggttaggtggcctcac

SEQ ID NO: 2838092 - DNA, 25 bp, Homo sapien
tgtgaggcagtcagttcattgactg

SEQ ID NO: 2838093 - DNA, 25 bp, Homo sapien
tcagttcattgactgtctggttagg

SEQ ID NO: 2838094 - DNA, 25 bp, Homo sapien
gctgtcattctggtatgagttactc

SEQ ID NO: 2838095 - DNA, 25 bp, Homo sapien
agccccgaagtctcgcagctgtcat

SEQ ID NO: 2838096 - DNA, 25 bp, Homo sapien
tcgcagctgtcattctggtatgagt

SEQ ID NO: 2838097 - DNA, 25 bp, Homo sapien
gaagtctcgcagctgtcattctggt

SEQ ID NO: 2838098 - DNA, 25 bp, Homo sapien
gcaaacgacatgcaccttaagcagt

SEQ ID NO: 2838099 - DNA, 25 bp, Homo sapien
gacatgcaccttaagcagtctgtac

SEQ ID NO: 2838100 - DNA, 25 bp, Homo sapien
gagagaagaaataaccgcaaacgac

SEQ ID NO: 2838101 - DNA, 25 bp, Homo sapien
gaaataaccgcaaacgacatgcacc

SEQ ID NO: 2838102 - DNA, 25 bp, Homo sapien
tgctgcacggagcaatccaataggc

SEQ ID NO: 2838103 - DNA, 25 bp, Homo sapien
cgatagactgttgacgtaagcctga

SEQ ID NO: 2838104 - DNA, 25 bp, Homo sapien
gaaaagggaggcctatggagactcc

SEQ ID NO: 2838105 - DNA, 25 bp, Homo sapien
tccaataggctatggcgagaaaagg

SEQ ID NO: 2838106 - DNA, 25 bp, Homo sapien
tgctgacagttaggatgagcaacga

SEQ ID NO: 2838107 - DNA, 25 bp, Homo sapien
gctgacagttaggatgagcaacgaa

SEQ ID NO: 2838108 - DNA, 25 bp, Homo sapien
ctgctgacagttaggatgagcaacg

SEQ ID NO: 2838109 - DNA, 25 bp, Homo sapien
tcagcaccgcagattgggcagaagg

SEQ ID NO: 2838110 - DNA, 25 bp, Homo sapien
gggcagaaggccagaagagcagaag

SEQ ID NO: 2838111 - DNA, 25 bp, Homo sapien
tggctccctgcactactgctgcctg

SEQ ID NO: 2838112 - DNA, 25 bp, Homo sapien
gaaggatgcctgtcacaatccccat

SEQ ID NO: 2838113 - DNA, 25 bp, Homo sapien
tttttgcagcactgccttcaaaatt

SEQ ID NO: 2838114 - DNA, 25 bp, Homo sapien
ttttgcagcactgccttcaaaattt

SEQ ID NO: 2838115 - DNA, 25 bp, Homo sapien
agcatctgtcacatagctccttcat

SEQ ID NO: 2838116 - DNA, 25 bp, Homo sapien
gagcatctgtcacatagctccttca

SEQ ID NO: 2838117 - DNA, 25 bp, Homo sapien
tgagcatctgtcacatagctccttc

SEQ ID NO: 2838118 - DNA, 25 bp, Homo sapien
gctcctgtctctagatgtccatcta

SEQ ID NO: 2838119 - DNA, 25 bp, Homo sapien
agcagagttgctggaagtgaaaccc

SEQ ID NO: 2838120 - DNA, 25 bp, Homo sapien
gaaatgcctgtctcttctcatgccc

SEQ ID NO: 2838121 - DNA, 25 bp, Homo sapien
tgaaacccagagtgaagtaatgcct

SEQ ID NO: 2838122 - DNA, 25 bp, Homo sapien
gtccttggtgttggagagatgtttc

SEQ ID NO: 2838123 - DNA, 25 bp, Homo sapien
ggagtccttggtgttggagagatgt

SEQ ID NO: 2838124 - DNA, 25 bp, Homo sapien
gattagggcttggtgaagaggagtc

SEQ ID NO: 2838125 - DNA, 25 bp, Homo sapien
gggattagggcttggtgaagaggag

SEQ ID NO: 2838126 - DNA, 25 bp, Homo sapien
gatgtagctgataatgggtgtcaca

SEQ ID NO: 2838127 - DNA, 25 bp, Homo sapien
ggtgtcacaggatgatcccctcctt

SEQ ID NO: 2838128 - DNA, 25 bp, Homo sapien
taaagggttggattcagatctctgt

SEQ ID NO: 2838129 - DNA, 25 bp, Homo sapien
caagcttggatctgcctagcaacac

SEQ ID NO: 2838130 - DNA, 25 bp, Homo sapien
gtttcatctgctaggagtttttcca

SEQ ID NO: 2838131 - DNA, 25 bp, Homo sapien
atagtttcatctgctaggagttttt

SEQ ID NO: 2838132 - DNA, 25 bp, Homo sapien
catctgctaggagtttttccaggta

SEQ ID NO: 2838133 - DNA, 25 bp, Homo sapien
ttcatctgctaggagtttttccagg

SEQ ID NO: 2838134 - DNA, 25 bp, Homo sapien
tggaagttcacatcaccgtttaaaa

SEQ ID NO: 2838135 - DNA, 25 bp, Homo sapien
cttgcattgcatagataacttcctg

SEQ ID NO: 2838136 - DNA, 25 bp, Homo sapien
tatttaatggcgagtttgatccggc

SEQ ID NO: 2838137 - DNA, 25 bp, Homo sapien
tctgtgtctcggcacaggtccagca

SEQ ID NO: 2838138 - DNA, 25 bp, Homo sapien
tgggctggaaggcaataagcgttct

SEQ ID NO: 2838139 - DNA, 25 bp, Homo sapien
cctgccatcaataggagaggcaaca

SEQ ID NO: 2838140 - DNA, 25 bp, Homo sapien
gaacagaaggtgacacttcattaga

SEQ ID NO: 2838141 - DNA, 25 bp, Homo sapien
tgggctctttcagccagcctgccat

SEQ ID NO: 2838142 - DNA, 25 bp, Homo sapien
tcaatcaaatgcagtgctctcagtt

SEQ ID NO: 2838143 - DNA, 25 bp, Homo sapien
tcttgattggcattaaatgggaccc

SEQ ID NO: 2838144 - DNA, 25 bp, Homo sapien
cagggctacaatggcattttccagc

SEQ ID NO: 2838145 - DNA, 25 bp, Homo sapien
ccctatcttggatcccagggctaca

SEQ ID NO: 2838146 - DNA, 25 bp, Homo sapien
tctagatatcatagcaggtggcaaa

SEQ ID NO: 2838147 - DNA, 25 bp, Homo sapien
ggcaaattggtctgatttatcatta

SEQ ID NO: 2838148 - DNA, 25 bp, Homo sapien
cttccacaatgggatctctctagat

SEQ ID NO: 2838149 - DNA, 25 bp, Homo sapien
gcaggtggcaaattggtctgattta

SEQ ID NO: 2838150 - DNA, 25 bp, Homo sapien
acccatttcacactggacacacgtg

SEQ ID NO: 2838151 - DNA, 25 bp, Homo sapien
tggacacacgtggaagagccccctg

SEQ ID NO: 2838152 - DNA, 25 bp, Homo sapien
acacgtggaagagccccctgggcaa

SEQ ID NO: 2838153 - DNA, 25 bp, Homo sapien
agccccctgggcaacctgcctgcag

SEQ ID NO: 2838154 - DNA, 25 bp, Homo sapien
tctcgttgaacatgtaggcgggacc

SEQ ID NO: 2838155 - DNA, 25 bp, Homo sapien
tttgtaggcgttcatgcgcgagcgc

SEQ ID NO: 2838156 - DNA, 25 bp, Homo sapien
cagggtcttcgctggacagggacaa

SEQ ID NO: 2838157 - DNA, 25 bp, Homo sapien
taggcatagaagtcgtcgtcgcgca

SEQ ID NO: 2838158 - DNA, 25 bp, Homo sapien
ctttcgacctgctcaaacctttttg

SEQ ID NO: 2838159 - DNA, 25 bp, Homo sapien
tagccaaggatgtaccgctctccgt

SEQ ID NO: 2838160 - DNA, 25 bp, Homo sapien
gcttgttcctcctctagatgaccgg

SEQ ID NO: 2838161 - DNA, 25 bp, Homo sapien
gggtgtaatacgcaggcttgttcct

SEQ ID NO: 2838162 - DNA, 25 bp, Homo sapien
aatccggtgttgagtcgccagaagc

SEQ ID NO: 2838163 - DNA, 25 bp, Homo sapien
ctggtcaagtgagttaagttgcaac

SEQ ID NO: 2838164 - DNA, 25 bp, Homo sapien
agttgcaacgatgtgaaagcgcgct

SEQ ID NO: 2838165 - DNA, 25 bp, Homo sapien
gtgaaagcgcgctcctctgttcttt

SEQ ID NO: 2838166 - DNA, 25 bp, Homo sapien
ctttgtgttgcagtggtaaaaactc

SEQ ID NO: 2838167 - DNA, 25 bp, Homo sapien
tcgccagacatctggaggatctgat

SEQ ID NO: 2838168 - DNA, 25 bp, Homo sapien
ggatgagaggctcgccagacatctg

SEQ ID NO: 2838169 - DNA, 25 bp, Homo sapien
gatctgatcttccatcccatataga

SEQ ID NO: 2838170 - DNA, 25 bp, Homo sapien
ttctaagtctcccttcaggatgaga

SEQ ID NO: 2838171 - DNA, 25 bp, Homo sapien
ctaagcctaaaagaaggggactgtg

SEQ ID NO: 2838172 - DNA, 25 bp, Homo sapien
gggactgtggtagactctgatgtac

SEQ ID NO: 2838173 - DNA, 25 bp, Homo sapien
gaaggggactgtggtagactctgat

SEQ ID NO: 2838174 - DNA, 25 bp, Homo sapien
aggggactgtggtagactctgatgt

SEQ ID NO: 2838175 - DNA, 25 bp, Homo sapien
cagtggaggtaattgcatcgcagat

SEQ ID NO: 2838176 - DNA, 25 bp, Homo sapien
taattgcatcgcagatcatctccat

SEQ ID NO: 2838177 - DNA, 25 bp, Homo sapien
gaggtaattgcatcgcagatcatct

SEQ ID NO: 2838178 - DNA, 25 bp, Homo sapien
gctgctcagtggaggtaattgcatc

SEQ ID NO: 2838179 - DNA, 25 bp, Homo sapien
ctgaatcgcaaactagcaaggtgtt

SEQ ID NO: 2838180 - DNA, 25 bp, Homo sapien
tctaagagattatacagatatgcca

SEQ ID NO: 2838181 - DNA, 25 bp, Homo sapien
cactggtacagataagctactggtt

SEQ ID NO: 2838182 - DNA, 25 bp, Homo sapien
gcctagagagtcctccaactgcaga

SEQ ID NO: 2838183 - DNA, 25 bp, Homo sapien
taggaatttgtgtgactgcaacttg

SEQ ID NO: 2838184 - DNA, 25 bp, Homo sapien
aatttgtgtgactgcaacttgtgct

SEQ ID NO: 2838185 - DNA, 25 bp, Homo sapien
tttgtgtgactgcaacttgtgctgc

SEQ ID NO: 2838186 - DNA, 25 bp, Homo sapien
tgtgtgactgcaacttgtgctgcag

SEQ ID NO: 2838187 - DNA, 25 bp, Homo sapien
caccatattcgcaaaatcttcaata

SEQ ID NO: 2838188 - DNA, 25 bp, Homo sapien
ccatattcgcaaaatcttcaatata

SEQ ID NO: 2838189 - DNA, 25 bp, Homo sapien
ccaccatattcgcaaaatcttcaat

SEQ ID NO: 2838190 - DNA, 25 bp, Homo sapien
accatattcgcaaaatcttcaatat

SEQ ID NO: 2838191 - DNA, 25 bp, Homo sapien
tcatccctttggtaaaaggtggcca

SEQ ID NO: 2838192 - DNA, 25 bp, Homo sapien
taaaaggtggccaaatctgaattac

SEQ ID NO: 2838193 - DNA, 25 bp, Homo sapien
tggtaaaaggtggccaaatctgaat

SEQ ID NO: 2838194 - DNA, 25 bp, Homo sapien
tttggtaaaaggtggccaaatctga

SEQ ID NO: 2838195 - DNA, 25 bp, Homo sapien
aggaatctccttggcgtcatgaaga

SEQ ID NO: 2838196 - DNA, 25 bp, Homo sapien
gaaaaaggaatctccttggcgtcat

SEQ ID NO: 2838197 - DNA, 25 bp, Homo sapien
agcagggaaattgaaaaaggaatct

SEQ ID NO: 2838198 - DNA, 25 bp, Homo sapien
aaaaggaatctccttggcgtcatga

SEQ ID NO: 2838199 - DNA, 25 bp, Homo sapien
ccatggaaagatctctggatggtcc

SEQ ID NO: 2838200 - DNA, 25 bp, Homo sapien
cgatgcttgatctttaccatggaaa

SEQ ID NO: 2838201 - DNA, 25 bp, Homo sapien
gcaatcctcaaatggaactccacaa

SEQ ID NO: 2838202 - DNA, 25 bp, Homo sapien
tgacaatagatcatggcaacccacg

SEQ ID NO: 2838203 - DNA, 25 bp, Homo sapien
taggggctcaacaggacactgcatt

SEQ ID NO: 2838204 - DNA, 25 bp, Homo sapien
cataggggctcaacaggacactgca

SEQ ID NO: 2838205 - DNA, 25 bp, Homo sapien
ttcataggggctcaacaggacactg

SEQ ID NO: 2838206 - DNA, 25 bp, Homo sapien
agttcataggggctcaacaggacac

SEQ ID NO: 2838207 - DNA, 25 bp, Homo sapien
tgctcgcaggtaaggttattgttct

SEQ ID NO: 2838208 - DNA, 25 bp, Homo sapien
tcgctggtccacacatgtatggcca

SEQ ID NO: 2838209 - DNA, 25 bp, Homo sapien
tgcacaaggccttgttgcttcttgc

SEQ ID NO: 2838210 - DNA, 25 bp, Homo sapien
aaggccttgttgcttcttgctcgca

SEQ ID NO: 2838211 - DNA, 25 bp, Homo sapien
cagcagtggaggcttatggcctcct

SEQ ID NO: 2838212 - DNA, 25 bp, Homo sapien
agtggaggcttatggcctcctgcag

SEQ ID NO: 2838213 - DNA, 25 bp, Homo sapien
catgggacaatgcttgggcacttag

SEQ ID NO: 2838214 - DNA, 25 bp, Homo sapien
cagagatctggtttgggctcttccc

SEQ ID NO: 2838215 - DNA, 25 bp, Homo sapien
cctcttttatagaacaaccttccat

SEQ ID NO: 2838216 - DNA, 25 bp, Homo sapien
gaagtcacctcttttatagaacaac

SEQ ID NO: 2838217 - DNA, 25 bp, Homo sapien
cttagatgaagtcacctcttttata

SEQ ID NO: 2838218 - DNA, 25 bp, Homo sapien
tagatgaagtcacctcttttataga

SEQ ID NO: 2838219 - DNA, 25 bp, Homo sapien
agattaatttgctgaactccgttca

SEQ ID NO: 2838220 - DNA, 25 bp, Homo sapien
tgcagcattcaggacccataaaata

SEQ ID NO: 2838221 - DNA, 25 bp, Homo sapien
gaactccgttcaggcttccaacagc

SEQ ID NO: 2838222 - DNA, 25 bp, Homo sapien
tcactggtggagtcggtaatcaaca

SEQ ID NO: 2838223 - DNA, 25 bp, Homo sapien
gcaaattcattctgaacctccacta

SEQ ID NO: 2838224 - DNA, 25 bp, Homo sapien
attctgaacctccactagtttcaag

SEQ ID NO: 2838225 - DNA, 25 bp, Homo sapien
gaacctccactagtttcaagatatc

SEQ ID NO: 2838226 - DNA, 25 bp, Homo sapien
cagcaaattcattctgaacctccac

SEQ ID NO: 2838227 - DNA, 25 bp, Homo sapien
gctgtcttctgcagtgcgtctctgc

SEQ ID NO: 2838228 - DNA, 25 bp, Homo sapien
cttctgcagtgcgtctctgcctttg

SEQ ID NO: 2838229 - DNA, 25 bp, Homo sapien
cagtgcgtctctgcctttgcagata

SEQ ID NO: 2838230 - DNA, 25 bp, Homo sapien
gtcgctgtcttctgcagtgcgtctc

SEQ ID NO: 2838231 - DNA, 25 bp, Homo sapien
tacaatcttctgggtagaaaaccca

SEQ ID NO: 2838232 - DNA, 25 bp, Homo sapien
ttctgggcccataaacctatatccc

SEQ ID NO: 2838233 - DNA, 25 bp, Homo sapien
ctgatgactggcagtagttgctgaa

SEQ ID NO: 2838234 - DNA, 25 bp, Homo sapien
caacagtggtgcaagtttgggcttc

SEQ ID NO: 2838235 - DNA, 25 bp, Homo sapien
gaattctaccctcaacagtggtgca

SEQ ID NO: 2838236 - DNA, 25 bp, Homo sapien
tctgatgggaacatgtgaaccacct

SEQ ID NO: 2838237 - DNA, 25 bp, Homo sapien
aacatgtgaaccaccttctcctgtg

SEQ ID NO: 2838238 - DNA, 25 bp, Homo sapien
gagagctctgatgggaacatgtgaa

SEQ ID NO: 2838239 - DNA, 25 bp, Homo sapien
ctgaggtgtctccagagagctctga

SEQ ID NO: 2838240 - DNA, 25 bp, Homo sapien
cagttccaccacgaaccaatcatca

SEQ ID NO: 2838241 - DNA, 25 bp, Homo sapien
agttccaccacgaaccaatcatcac

SEQ ID NO: 2838242 - DNA, 25 bp, Homo sapien
tcagttccaccacgaaccaatcatc

SEQ ID NO: 2838243 - DNA, 25 bp, Homo sapien
cagatccctgggaatgtataatttc

SEQ ID NO: 2838244 - DNA, 25 bp, Homo sapien
tgatgacaagacagctttattcatg

SEQ ID NO: 2838245 - DNA, 25 bp, Homo sapien
cattgcttagcaaccgttccgttat

SEQ ID NO: 2838246 - DNA, 25 bp, Homo sapien
tttattcatgccatgctctgggcca

SEQ ID NO: 2838247 - DNA, 25 bp, Homo sapien
gcctggcctgttcacattttgttat

SEQ ID NO: 2838248 - DNA, 25 bp, Homo sapien
ggcctgttcacattttgttattctt

SEQ ID NO: 2838249 - DNA, 25 bp, Homo sapien
cgcctggcctgttcacattttgtta

SEQ ID NO: 2838250 - DNA, 25 bp, Homo sapien
ctggcctgttcacattttgttattc

SEQ ID NO: 2838251 - DNA, 25 bp, Homo sapien
tctccttgtcattgaacgtggacat

SEQ ID NO: 2838252 - DNA, 25 bp, Homo sapien
ttctccttgtcattgaacgtggaca

SEQ ID NO: 2838253 - DNA, 25 bp, Homo sapien
cagaatagtctaagccttctgggaa

SEQ ID NO: 2838254 - DNA, 25 bp, Homo sapien
tagccttgtgcaattgtggggtaca

SEQ ID NO: 2838255 - DNA, 25 bp, Homo sapien
tttcttgtcagtgaacattgtttcc

SEQ ID NO: 2838256 - DNA, 25 bp, Homo sapien
tacaaggatgatgcccatggaagag

SEQ ID NO: 2838257 - DNA, 25 bp, Homo sapien
tctggatccttgtagcctttttcct

SEQ ID NO: 2838258 - DNA, 25 bp, Homo sapien
ctggatccttgtagcctttttcctc

SEQ ID NO: 2838259 - DNA, 25 bp, Homo sapien
ctctggatccttgtagcctttttcc

SEQ ID NO: 2838260 - DNA, 25 bp, Homo sapien
tggatccttgtagcctttttcctcc

SEQ ID NO: 2838261 - DNA, 25 bp, Homo sapien
tatcttgcactgtgcctagagtacc

SEQ ID NO: 2838262 - DNA, 25 bp, Homo sapien
ttgcactgtgcctagagtacccttt

SEQ ID NO: 2838263 - DNA, 25 bp, Homo sapien
cttgcactgtgcctagagtaccctt

SEQ ID NO: 2838264 - DNA, 25 bp, Homo sapien
atcttgcactgtgcctagagtaccc

SEQ ID NO: 2838265 - DNA, 25 bp, Homo sapien
gctgctaagactgagaattcacaag

SEQ ID NO: 2838266 - DNA, 25 bp, Homo sapien
gctaagactgagaattcacaaggga

SEQ ID NO: 2838267 - DNA, 25 bp, Homo sapien
ctgctgctaagactgagaattcaca

SEQ ID NO: 2838268 - DNA, 25 bp, Homo sapien
tgctaagactgagaattcacaaggg

SEQ ID NO: 2838269 - DNA, 25 bp, Homo sapien
cacgaagcaagctcctatgggagga

SEQ ID NO: 2838270 - DNA, 25 bp, Homo sapien
tctggcacacgaagcaagctcctat

SEQ ID NO: 2838271 - DNA, 25 bp, Homo sapien
atttctggcacacgaagcaagctcc

SEQ ID NO: 2838272 - DNA, 25 bp, Homo sapien
tttctggcacacgaagcaagctcct

SEQ ID NO: 2838273 - DNA, 25 bp, Homo sapien
gatgaaacagagcctaaacacttct

SEQ ID NO: 2838274 - DNA, 25 bp, Homo sapien
gaaacagagcctaaacacttctgat

SEQ ID NO: 2838275 - DNA, 25 bp, Homo sapien
atgaaactgtgagccagaccaggtg

SEQ ID NO: 2838276 - DNA, 25 bp, Homo sapien
aatgaaactgtgagccagaccaggt

SEQ ID NO: 2838277 - DNA, 25 bp, Homo sapien
tctggtctctagaaaactgtgtctc

SEQ ID NO: 2838278 - DNA, 25 bp, Homo sapien
ttacccatctcagcaaactccagag

SEQ ID NO: 2838279 - DNA, 25 bp, Homo sapien
ggtgcccaaggatacctggtctggt

SEQ ID NO: 2838280 - DNA, 25 bp, Homo sapien
cagtgaggtacttagcaaaggagac

SEQ ID NO: 2838281 - DNA, 25 bp, Homo sapien
aaatgcttcaggacttaacctgaag

SEQ ID NO: 2838282 - DNA, 25 bp, Homo sapien
acattcatacgtgggaggaaaaatg

SEQ ID NO: 2838283 - DNA, 25 bp, Homo sapien
tttgaaacattcatacgtgggagga

SEQ ID NO: 2838284 - DNA, 25 bp, Homo sapien
tgcttcaggacttaacctgaaggca

SEQ ID NO: 2838285 - DNA, 25 bp, Homo sapien
tgcaatattatttagggctttattt

SEQ ID NO: 2838286 - DNA, 25 bp, Homo sapien
ctgcaatattatttagggctttatt

SEQ ID NO: 2838287 - DNA, 25 bp, Homo sapien
ctctttttccagaagccttgggttg

SEQ ID NO: 2838288 - DNA, 25 bp, Homo sapien
ttgccaaatctaggacacaattctg

SEQ ID NO: 2838289 - DNA, 25 bp, Homo sapien
cagcccatcaatgaaggactgtgcc

SEQ ID NO: 2838290 - DNA, 25 bp, Homo sapien
agcccatcaatgaaggactgtgcca

SEQ ID NO: 2838291 - DNA, 25 bp, Homo sapien
gcccatcaatgaaggactgtgccat

SEQ ID NO: 2838292 - DNA, 25 bp, Homo sapien
tgctaatggcatttgctgccctggt

SEQ ID NO: 2838293 - DNA, 25 bp, Homo sapien
acaccgctttgttgttctgcttctg

SEQ ID NO: 2838294 - DNA, 25 bp, Homo sapien
agtagaaaagggcatggaagatggt

SEQ ID NO: 2838295 - DNA, 25 bp, Homo sapien
tggacctcaattgcctcaaaggtag

SEQ ID NO: 2838296 - DNA, 25 bp, Homo sapien
gcctgagaagccttcaacctgggca

SEQ ID NO: 2838297 - DNA, 25 bp, Homo sapien
aggtaaacatgcatgtcctggagac

SEQ ID NO: 2838298 - DNA, 25 bp, Homo sapien
acaaagaagctttcctcagaaaggc

SEQ ID NO: 2838299 - DNA, 25 bp, Homo sapien
ctggagacaaagaagctttcctcag

SEQ ID NO: 2838300 - DNA, 25 bp, Homo sapien
caatcagagcattaagggtacagga

SEQ ID NO: 2838301 - DNA, 25 bp, Homo sapien
taatccaatcagagcattaagggta

SEQ ID NO: 2838302 - DNA, 25 bp, Homo sapien
gagcattaagggtacaggactccat

SEQ ID NO: 2838303 - DNA, 25 bp, Homo sapien
cagtgcaggcaatgaattctaatcc

SEQ ID NO: 2838304 - DNA, 25 bp, Homo sapien
cagcttggcattgaggtgtggaaac

SEQ ID NO: 2838305 - DNA, 25 bp, Homo sapien
caacccaagtctcatggacaaaggg

SEQ ID NO: 2838306 - DNA, 25 bp, Homo sapien
tgaattctaaaagccaacagcatcc

SEQ ID NO: 2838307 - DNA, 25 bp, Homo sapien
cactgctaggaaggtcccaggcagc

SEQ ID NO: 2838308 - DNA, 25 bp, Homo sapien
gctcctcccactgtagtagttgcct

SEQ ID NO: 2838309 - DNA, 25 bp, Homo sapien
cacgctcctcccactgtagtagttg

SEQ ID NO: 2838310 - DNA, 25 bp, Homo sapien
ctggacccaaaggccacgctcctcc

SEQ ID NO: 2838311 - DNA, 25 bp, Homo sapien
aaaggccacgctcctcccactgtag

SEQ ID NO: 2838312 - DNA, 25 bp, Homo sapien
tgagtgaacacttgcttggttctgt

SEQ ID NO: 2838313 - DNA, 25 bp, Homo sapien
gctgcttcccgcaggattcttctgc

SEQ ID NO: 2838314 - DNA, 25 bp, Homo sapien
ggttctgtccttgtcttgctgcttc

SEQ ID NO: 2838315 - DNA, 25 bp, Homo sapien
tattctaggcttggctgcataccca

SEQ ID NO: 2838316 - DNA, 25 bp, Homo sapien
tgagcggcataagcgggctgcttca

SEQ ID NO: 2838317 - DNA, 25 bp, Homo sapien
caacccttctttgggtgtaaggcat

SEQ ID NO: 2838318 - DNA, 25 bp, Homo sapien
tctggtgcagcgctgagcggcataa

SEQ ID NO: 2838319 - DNA, 25 bp, Homo sapien
gctgcttcaacccttctttgggtgt

SEQ ID NO: 2838320 - DNA, 25 bp, Homo sapien
cctctgagtggccacctgcaacccc

SEQ ID NO: 2838321 - DNA, 25 bp, Homo sapien
cacctgcaaccccataccactcatt

SEQ ID NO: 2838322 - DNA, 25 bp, Homo sapien
ctgcaaccccataccactcattcat

SEQ ID NO: 2838323 - DNA, 25 bp, Homo sapien
tcctctgagtggccacctgcaaccc

SEQ ID NO: 2838324 - DNA, 25 bp, Homo sapien
cctcagaatcatccctctgtttgac

SEQ ID NO: 2838325 - DNA, 25 bp, Homo sapien
tgtcagcaatgtgatcttcagtaaa

SEQ ID NO: 2838326 - DNA, 25 bp, Homo sapien
ctctgtttgactgtcagcaatgtga

SEQ ID NO: 2838327 - DNA, 25 bp, Homo sapien
tcttcagtaaaatctgcagacccat

SEQ ID NO: 2838328 - DNA, 25 bp, Homo sapien
tgagtgttcagtatcctttggtgac

SEQ ID NO: 2838329 - DNA, 25 bp, Homo sapien
tttgtgatccagtaaagaacatcct

SEQ ID NO: 2838330 - DNA, 25 bp, Homo sapien
gtttctgatacagaacgcctgccat

SEQ ID NO: 2838331 - DNA, 25 bp, Homo sapien
gccatagagtgagtgttcagtatcc

SEQ ID NO: 2838332 - DNA, 25 bp, Homo sapien
tcagtgtttaggatacagccaggct

SEQ ID NO: 2838333 - DNA, 25 bp, Homo sapien
agtgtttaggatacagccaggctct

SEQ ID NO: 2838334 - DNA, 25 bp, Homo sapien
cagtgtttaggatacagccaggctc

SEQ ID NO: 2838335 - DNA, 25 bp, Homo sapien
ccctctcagggccatactatggctt

SEQ ID NO: 2838336 - DNA, 25 bp, Homo sapien
tctgccacaagagtaatgtaagtgc

SEQ ID NO: 2838337 - DNA, 25 bp, Homo sapien
tactgatgggagagaagctcaatct

SEQ ID NO: 2838338 - DNA, 25 bp, Homo sapien
cagaggctcctactttctgtgacag

SEQ ID NO: 2838339 - DNA, 25 bp, Homo sapien
cactcttgatcaactttataatcca

SEQ ID NO: 2838340 - DNA, 25 bp, Homo sapien
cctctgaaccagtgagctatggcaa

SEQ ID NO: 2838341 - DNA, 25 bp, Homo sapien
ggcaaatgctccactcttgatcaac

SEQ ID NO: 2838342 - DNA, 25 bp, Homo sapien
gctggggcagcgtatagcctgccat

SEQ ID NO: 2838343 - DNA, 25 bp, Homo sapien
aggatgttacggctagtgtcaacca

SEQ ID NO: 2838344 - DNA, 25 bp, Homo sapien
tctcaaaggatgtcatgagttgact

SEQ ID NO: 2838345 - DNA, 25 bp, Homo sapien
ttgatgttgaatccccaggatgtta

SEQ ID NO: 2838346 - DNA, 25 bp, Homo sapien
ctgaggtcagggtaaaattgggact

SEQ ID NO: 2838347 - DNA, 25 bp, Homo sapien
tagaaaaggcaagtgacgggacgtc

SEQ ID NO: 2838348 - DNA, 25 bp, Homo sapien
gggacgtcagcactgcatcattgca

SEQ ID NO: 2838349 - DNA, 25 bp, Homo sapien
tcattgcattctgggagccaaacgc

SEQ ID NO: 2838350 - DNA, 25 bp, Homo sapien
cacctgtggtctgcgagtgagccat

SEQ ID NO: 2838351 - DNA, 25 bp, Homo sapien
ccccatcatgaatgtatgtggaaga

SEQ ID NO: 2838352 - DNA, 25 bp, Homo sapien
tgcccagtccggtccctgcccattg

SEQ ID NO: 2838353 - DNA, 25 bp, Homo sapien
ctgcccagtccggtccctgcccatt

SEQ ID NO: 2838354 - DNA, 25 bp, Homo sapien
ctccctgccgtctagctcaggaaat

SEQ ID NO: 2838355 - DNA, 25 bp, Homo sapien
tgccgtctagctcaggaaatggcca

SEQ ID NO: 2838356 - DNA, 25 bp, Homo sapien
gcctggttcctcttgtcctctaaca

SEQ ID NO: 2838357 - DNA, 25 bp, Homo sapien
gcctcttgaggaagcctggttcctc

SEQ ID NO: 2838358 - DNA, 25 bp, Homo sapien
tgactggcagacatgtgcacaggac

SEQ ID NO: 2838359 - DNA, 25 bp, Homo sapien
ccctgcacacgaatccaatttccct

SEQ ID NO: 2838360 - DNA, 25 bp, Homo sapien
ggtgactggcagacatgtgcacagg

SEQ ID NO: 2838361 - DNA, 25 bp, Homo sapien
tagttccctgcacacgaatccaatt

SEQ ID NO: 2838362 - DNA, 25 bp, Homo sapien
ggtcataagattgggccaccagaaa

SEQ ID NO: 2838363 - DNA, 25 bp, Homo sapien
taagattgggccaccagaaatatcc

SEQ ID NO: 2838364 - DNA, 25 bp, Homo sapien
tcataagattgggccaccagaaata

SEQ ID NO: 2838365 - DNA, 25 bp, Homo sapien
ataagattgggccaccagaaatatc

SEQ ID NO: 2838366 - DNA, 25 bp, Homo sapien
ttgtcataggacagcgagcttctcc

SEQ ID NO: 2838367 - DNA, 25 bp, Homo sapien
tgtcataggacagcgagcttctccc

SEQ ID NO: 2838368 - DNA, 25 bp, Homo sapien
tcataggacagcgagcttctccctg

SEQ ID NO: 2838369 - DNA, 25 bp, Homo sapien
taggacagcgagcttctccctggtc

SEQ ID NO: 2838370 - DNA, 25 bp, Homo sapien
gcgacttcctgtacatccccatagg

SEQ ID NO: 2838371 - DNA, 25 bp, Homo sapien
gaaggactaccaaacaataggagac

SEQ ID NO: 2838372 - DNA, 25 bp, Homo sapien
tacgaggcatgtgaagaaccctttc

SEQ ID NO: 2838373 - DNA, 25 bp, Homo sapien
tcatggtcctggatctcagacagct

SEQ ID NO: 2838374 - DNA, 25 bp, Homo sapien
cagcatttacccatgagctgaactg

SEQ ID NO: 2838375 - DNA, 25 bp, Homo sapien
ttacccatgagctgaactgtgaggc

SEQ ID NO: 2838376 - DNA, 25 bp, Homo sapien
agatgctgtgcctcaggttgcagaa

SEQ ID NO: 2838377 - DNA, 25 bp, Homo sapien
tgctgtgcctcaggttgcagaagga

SEQ ID NO: 2838378 - DNA, 25 bp, Homo sapien
gagcagggcacacatgggccttgtc

SEQ ID NO: 2838379 - DNA, 25 bp, Homo sapien
tgtctctagacaccaacaaaatgca

SEQ ID NO: 2838380 - DNA, 25 bp, Homo sapien
ccagaggaggatcattgatatactg

SEQ ID NO: 2838381 - DNA, 25 bp, Homo sapien
tatactgtgtgcctcgtgcatctgc

SEQ ID NO: 2838382 - DNA, 25 bp, Homo sapien
tagctttagcccctgctgaaacttc

SEQ ID NO: 2838383 - DNA, 25 bp, Homo sapien
aactgtagccttaagaagctggaag

SEQ ID NO: 2838384 - DNA, 25 bp, Homo sapien
tcagaaggaagcacaataaaaactg

SEQ ID NO: 2838385 - DNA, 25 bp, Homo sapien
ggagacccatcacccctttcaaata

SEQ ID NO: 2838386 - DNA, 25 bp, Homo sapien
tacttacttccatggcctaggcttt

SEQ ID NO: 2838387 - DNA, 25 bp, Homo sapien
gtctactatctcctgaacccacaaa

SEQ ID NO: 2838388 - DNA, 25 bp, Homo sapien
gctttgtctactatctcctgaaccc

SEQ ID NO: 2838389 - DNA, 25 bp, Homo sapien
ctgtatacttacttccatggcctag

SEQ ID NO: 2838390 - DNA, 25 bp, Homo sapien
actaggctcaaccctgttcagcttt

SEQ ID NO: 2838391 - DNA, 25 bp, Homo sapien
actaactaggctcaaccctgttcag

SEQ ID NO: 2838392 - DNA, 25 bp, Homo sapien
aactaggctcaaccctgttcagctt

SEQ ID NO: 2838393 - DNA, 25 bp, Homo sapien
taactaggctcaaccctgttcagct

SEQ ID NO: 2838394 - DNA, 25 bp, Homo sapien
ccttaggtcgggtatagagagcaac

SEQ ID NO: 2838395 - DNA, 25 bp, Homo sapien
tgtgcatgccttagaaaaagccctt

SEQ ID NO: 2838396 - DNA, 25 bp, Homo sapien
gatgatgaccctaccaaatttggaa

SEQ ID NO: 2838397 - DNA, 25 bp, Homo sapien
tatttacgaagccaaaggactttgc

SEQ ID NO: 2838398 - DNA, 25 bp, Homo sapien
cctctgtcacggctcgggtgtgcac

SEQ ID NO: 2838399 - DNA, 25 bp, Homo sapien
tctgtcacggctcgggtgtgcaccc

SEQ ID NO: 2838400 - DNA, 25 bp, Homo sapien
tcacggctcgggtgtgcaccctcag

SEQ ID NO: 2838401 - DNA, 25 bp, Homo sapien
tgtcacggctcgggtgtgcaccctc

SEQ ID NO: 2838402 - DNA, 25 bp, Homo sapien
agcaggaccacggacccaccactgc

SEQ ID NO: 2838403 - DNA, 25 bp, Homo sapien
ccactgccaaaatcccctgaggttt

SEQ ID NO: 2838404 - DNA, 25 bp, Homo sapien
tattctaggtcatccagcaggacca

SEQ ID NO: 2838405 - DNA, 25 bp, Homo sapien
ctcccgttcatattctaggtcatcc

SEQ ID NO: 2838406 - DNA, 25 bp, Homo sapien
gccaagctagctacacgggagctca

SEQ ID NO: 2838407 - DNA, 25 bp, Homo sapien
caaactttgttctcgtaagagccct

SEQ ID NO: 2838408 - DNA, 25 bp, Homo sapien
gagttcctgccacttgccaagctag

SEQ ID NO: 2838409 - DNA, 25 bp, Homo sapien
tgaaggcagcctaagtcaccctttg

SEQ ID NO: 2838410 - DNA, 25 bp, Homo sapien
actgtgtggctttgtaatagccctc

SEQ ID NO: 2838411 - DNA, 25 bp, Homo sapien
cactgtgtggctttgtaatagccct

SEQ ID NO: 2838412 - DNA, 25 bp, Homo sapien
tcattacaccgaggtatgaaggccc

SEQ ID NO: 2838413 - DNA, 25 bp, Homo sapien
ctcattacaccgaggtatgaaggcc

SEQ ID NO: 2838414 - DNA, 25 bp, Homo sapien
caggcttttccccttactcagcttc

SEQ ID NO: 2838415 - DNA, 25 bp, Homo sapien
aggcttttccccttactcagcttct

SEQ ID NO: 2838416 - DNA, 25 bp, Homo sapien
gaatccacagacgaactaaccagag

SEQ ID NO: 2838417 - DNA, 25 bp, Homo sapien
taggaatggttacttcagacctcac

SEQ ID NO: 2838418 - DNA, 25 bp, Homo sapien
gactgcacaatgctacctggtcttg

SEQ ID NO: 2838419 - DNA, 25 bp, Homo sapien
taaaataggctttgagggacaacta

SEQ ID NO: 2838420 - DNA, 25 bp, Homo sapien
gagtcacacgagttgaaaagaggct

SEQ ID NO: 2838421 - DNA, 25 bp, Homo sapien
gatgggcaggatgctagtgtcaaac

SEQ ID NO: 2838422 - DNA, 25 bp, Homo sapien
cagggctcgtacttatccaggtaga

SEQ ID NO: 2838423 - DNA, 25 bp, Homo sapien
gtagcaccactcattgttagaaagc

SEQ ID NO: 2838424 - DNA, 25 bp, Homo sapien
ggtgggcttgatgactctgttcgca

SEQ ID NO: 2838425 - DNA, 25 bp, Homo sapien
cgtggagagctccaaaccaatcctt

SEQ ID NO: 2838426 - DNA, 25 bp, Homo sapien
gcaaggttccgcaactccttgtctg

SEQ ID NO: 2838427 - DNA, 25 bp, Homo sapien
tccttcagccgggaggcaaggttcc

SEQ ID NO: 2838428 - DNA, 25 bp, Homo sapien
gcaggtctaaattcaattccagcac

SEQ ID NO: 2838429 - DNA, 25 bp, Homo sapien
aattccagcactccctaaatcagac

SEQ ID NO: 2838430 - DNA, 25 bp, Homo sapien
cttgggcaggtctaaattcaattcc

SEQ ID NO: 2838431 - DNA, 25 bp, Homo sapien
taaattcaattccagcactccctaa

SEQ ID NO: 2838432 - DNA, 25 bp, Homo sapien
atatgttcagtggcctcttggagca

SEQ ID NO: 2838433 - DNA, 25 bp, Homo sapien
caatatgttcagtggcctcttggag

SEQ ID NO: 2838434 - DNA, 25 bp, Homo sapien
aatatgttcagtggcctcttggagc

SEQ ID NO: 2838435 - DNA, 25 bp, Homo sapien
tatgttcagtggcctcttggagcag

SEQ ID NO: 2838436 - DNA, 25 bp, Homo sapien
ctgccagaccatccctcagggtggg

SEQ ID NO: 2838437 - DNA, 25 bp, Homo sapien
ccagaccatccctcagggtggggct

SEQ ID NO: 2838438 - DNA, 25 bp, Homo sapien
cctgtctgccagaccatccctcagg

SEQ ID NO: 2838439 - DNA, 25 bp, Homo sapien
gggtggggcttccagtctgagactc

SEQ ID NO: 2838440 - DNA, 25 bp, Homo sapien
ggcccacaccatcagtaggaaaggc

SEQ ID NO: 2838441 - DNA, 25 bp, Homo sapien
cagatcatccatgcaacaggtccca

SEQ ID NO: 2838442 - DNA, 25 bp, Homo sapien
ccacaccatcagtaggaaaggcttt

SEQ ID NO: 2838443 - DNA, 25 bp, Homo sapien
tggctctcctacaaaccagatcatc

SEQ ID NO: 2838444 - DNA, 25 bp, Homo sapien
gtctcgatggtctttacattttggc

SEQ ID NO: 2838445 - DNA, 25 bp, Homo sapien
tctcgatggtctttacattttggca

SEQ ID NO: 2838446 - DNA, 25 bp, Homo sapien
gttgactttctgtctcatggatctg

SEQ ID NO: 2838447 - DNA, 25 bp, Homo sapien
ttgactttctgtctcatggatctgt

SEQ ID NO: 2838448 - DNA, 25 bp, Homo sapien
gaagtcaccatgatcacatttagat

SEQ ID NO: 2838449 - DNA, 25 bp, Homo sapien
gtttacaacgtccttccacatcctg

SEQ ID NO: 2838450 - DNA, 25 bp, Homo sapien
catggtttacaacgtccttccacat

SEQ ID NO: 2838451 - DNA, 25 bp, Homo sapien
cctaaagagcctttaaacacaatat

SEQ ID NO: 2838452 - DNA, 25 bp, Homo sapien
agaacaagcatggaactccaatttg

SEQ ID NO: 2838453 - DNA, 25 bp, Homo sapien
cttttgccagtagaacaagcatgga

SEQ ID NO: 2838454 - DNA, 25 bp, Homo sapien
gtggcgaggcttttgccagtagaac

SEQ ID NO: 2838455 - DNA, 25 bp, Homo sapien
aacaagcatggaactccaatttgca

SEQ ID NO: 2838456 - DNA, 25 bp, Homo sapien
cccagcctatcattggagtatgagc

SEQ ID NO: 2838457 - DNA, 25 bp, Homo sapien
atcattggagtatgagcctctctgg

SEQ ID NO: 2838458 - DNA, 25 bp, Homo sapien
gggtggccttgccatgactgtgggc

SEQ ID NO: 2838459 - DNA, 25 bp, Homo sapien
gcctatcattggagtatgagcctct

SEQ ID NO: 2838460 - DNA, 25 bp, Homo sapien
caacagtgaggggtttggcaaagcc

SEQ ID NO: 2838461 - DNA, 25 bp, Homo sapien
ctatgtgtaatgactcacagacttc

SEQ ID NO: 2838462 - DNA, 25 bp, Homo sapien
tcacagacttctacaacagtgaggg

SEQ ID NO: 2838463 - DNA, 25 bp, Homo sapien
tccagtgctatgtgtaatgactcac

SEQ ID NO: 2838464 - DNA, 25 bp, Homo sapien
acaccagctacaacatgatagcaga

SEQ ID NO: 2838465 - DNA, 25 bp, Homo sapien
catgatagcagagggccttggagcc

SEQ ID NO: 2838466 - DNA, 25 bp, Homo sapien
tcttctctgtacctaggacctgggg

SEQ ID NO: 2838467 - DNA, 25 bp, Homo sapien
tacaacatgatagcagagggccttg

SEQ ID NO: 2838468 - DNA, 25 bp, Homo sapien
ctgagccttcagaaagtcatgacct

SEQ ID NO: 2838469 - DNA, 25 bp, Homo sapien
tgagccttcagaaagtcatgacctt

SEQ ID NO: 2838470 - DNA, 25 bp, Homo sapien
cgggcagaacatggtgcaatcccac

SEQ ID NO: 2838471 - DNA, 25 bp, Homo sapien
ccagccagtgcctgctaaagagtct

SEQ ID NO: 2838472 - DNA, 25 bp, Homo sapien
gttaccaccaccatcgggcagaaca

SEQ ID NO: 2838473 - DNA, 25 bp, Homo sapien
gccagtgcctgctaaagagtctgcc

SEQ ID NO: 2838474 - DNA, 25 bp, Homo sapien
cgagagcagaaggcagagaaggctt

SEQ ID NO: 2838475 - DNA, 25 bp, Homo sapien
ccgagagcagaaggcagagaaggct

SEQ ID NO: 2838476 - DNA, 25 bp, Homo sapien
gagagcagaaggcagagaaggcttt

SEQ ID NO: 2838477 - DNA, 25 bp, Homo sapien
gacctgtgaaactatctacatttac

SEQ ID NO: 2838478 - DNA, 25 bp, Homo sapien
ctggctgacctgtgaaactatctac

SEQ ID NO: 2838479 - DNA, 25 bp, Homo sapien
ctacttccagcactcccctcacctg

SEQ ID NO: 2838480 - DNA, 25 bp, Homo sapien
gctgacctgtgaaactatctacatt

SEQ ID NO: 2838481 - DNA, 25 bp, Homo sapien
gaattagtggatggagcctgaacac

SEQ ID NO: 2838482 - DNA, 25 bp, Homo sapien
tggactaaaggtctgagcatggaat

SEQ ID NO: 2838483 - DNA, 25 bp, Homo sapien
aaggtctgagcatggaattagtgga

SEQ ID NO: 2838484 - DNA, 25 bp, Homo sapien
tcatccaactctatggactaaaggt

SEQ ID NO: 2838485 - DNA, 25 bp, Homo sapien
gaagaagggcaacaccaacaaatga

SEQ ID NO: 2838486 - DNA, 25 bp, Homo sapien
caggctttgttcccaaagggatgtt

SEQ ID NO: 2838487 - DNA, 25 bp, Homo sapien
ggaagaagggcaacaccaacaaatg

SEQ ID NO: 2838488 - DNA, 25 bp, Homo sapien
caggacatgcttcaagtacagactt

SEQ ID NO: 2838489 - DNA, 25 bp, Homo sapien
ctgatacatatcatcttttggcctc

SEQ ID NO: 2838490 - DNA, 25 bp, Homo sapien
tacatatcatcttttggcctctcca

SEQ ID NO: 2838491 - DNA, 25 bp, Homo sapien
gatacatatcatcttttggcctctc

SEQ ID NO: 2838492 - DNA, 25 bp, Homo sapien
tcactgatacatatcatcttttggc

SEQ ID NO: 2838493 - DNA, 25 bp, Homo sapien
tagcagctcaagaaggacacccttg

SEQ ID NO: 2838494 - DNA, 25 bp, Homo sapien
gaaaactcgcttatttggacacagg

SEQ ID NO: 2838495 - DNA, 25 bp, Homo sapien
cctttcctgctactggaggtttgct

SEQ ID NO: 2838496 - DNA, 25 bp, Homo sapien
tgcctgccattgtacagcctgactt

SEQ ID NO: 2838497 - DNA, 25 bp, Homo sapien
taacgccattgctattgccattgtg

SEQ ID NO: 2838498 - DNA, 25 bp, Homo sapien
ctgcacagatgggaacatccagtga

SEQ ID NO: 2838499 - DNA, 25 bp, Homo sapien
gctgctctcatccttaacgccattg

SEQ ID NO: 2838500 - DNA, 25 bp, Homo sapien
atccagtgacttgcctaattgctgc

SEQ ID NO: 2838501 - DNA, 25 bp, Homo sapien
gactgcccacttgggtgaagcctgg

SEQ ID NO: 2838502 - DNA, 25 bp, Homo sapien
gcaggcaggaggacttgcaagtccc

SEQ ID NO: 2838503 - DNA, 25 bp, Homo sapien
aagtcccgccaagctgaagacggtg

SEQ ID NO: 2838504 - DNA, 25 bp, Homo sapien
caggacctggagcagtagcaacctc

SEQ ID NO: 2838505 - DNA, 25 bp, Homo sapien
gctaagaccagctgtagcttcccaa

SEQ ID NO: 2838506 - DNA, 25 bp, Homo sapien
tgctaagaccagctgtagcttccca

SEQ ID NO: 2838507 - DNA, 25 bp, Homo sapien
agaccagctgtagcttcccaaatac

SEQ ID NO: 2838508 - DNA, 25 bp, Homo sapien
taagaccagctgtagcttcccaaat

SEQ ID NO: 2838509 - DNA, 25 bp, Homo sapien
gatgaaacccaaggacagataccag

SEQ ID NO: 2838510 - DNA, 25 bp, Homo sapien
agccatggaacccatcttgaaggag

SEQ ID NO: 2838511 - DNA, 25 bp, Homo sapien
ctggtatcagggcattagaagaggc

SEQ ID NO: 2838512 - DNA, 25 bp, Homo sapien
gaagaggcctgctgtagacaaagac

SEQ ID NO: 2838513 - DNA, 25 bp, Homo sapien
gtgattatgtattatggagtgtggg

SEQ ID NO: 2838514 - DNA, 25 bp, Homo sapien
gattatgtattatggagtgtgggtt

SEQ ID NO: 2838515 - DNA, 25 bp, Homo sapien
ttatgtattatggagtgtgggtttc

SEQ ID NO: 2838516 - DNA, 25 bp, Homo sapien
tgattatgtattatggagtgtgggt

SEQ ID NO: 2838517 - DNA, 25 bp, Homo sapien
aagcttgtctagattaacttcagga

SEQ ID NO: 2838518 - DNA, 25 bp, Homo sapien
cttggatgtgtaggagtggccatct

SEQ ID NO: 2838519 - DNA, 25 bp, Homo sapien
tgaccaaattcgaaggtccaaccca

SEQ ID NO: 2838520 - DNA, 25 bp, Homo sapien
tcgaaggtccaacccagtgtttctg

SEQ ID NO: 2838521 - DNA, 25 bp, Homo sapien
cttgcacttgaccaaattcgaaggt

SEQ ID NO: 2838522 - DNA, 25 bp, Homo sapien
caaattcgaaggtccaacccagtgt

SEQ ID NO: 2838523 - DNA, 25 bp, Homo sapien
actgaccacgaccaacatcaatttt

SEQ ID NO: 2838524 - DNA, 25 bp, Homo sapien
agccagctctttcccatgtgccatc

SEQ ID NO: 2838525 - DNA, 25 bp, Homo sapien
cactctcagccgtttcccagagcca

SEQ ID NO: 2838526 - DNA, 25 bp, Homo sapien
tgtgccatcatgtgggttttccttg

SEQ ID NO: 2838527 - DNA, 25 bp, Homo sapien
tagactgtggttcatttcaacttgg

SEQ ID NO: 2838528 - DNA, 25 bp, Homo sapien
ggtgtacccgaatgttgaactctag

SEQ ID NO: 2838529 - DNA, 25 bp, Homo sapien
tcaggcccaccagaaggatatgtgt

SEQ ID NO: 2838530 - DNA, 25 bp, Homo sapien
tcaacttgggactccacgatgtacc

SEQ ID NO: 2838531 - DNA, 25 bp, Homo sapien
cctgttgcctcctattctgaagggc

SEQ ID NO: 2838532 - DNA, 25 bp, Homo sapien
ctggctgagtgcgcaacacaggcct

SEQ ID NO: 2838533 - DNA, 25 bp, Homo sapien
gacataaagcgaacccctgaggatg

SEQ ID NO: 2838534 - DNA, 25 bp, Homo sapien
gctgagtgcgcaacacaggcctcag

SEQ ID NO: 2838535 - DNA, 25 bp, Homo sapien
cctggggagtttcatagacacattc

SEQ ID NO: 2838536 - DNA, 25 bp, Homo sapien
gggagtttcatagacacattctgag

SEQ ID NO: 2838537 - DNA, 25 bp, Homo sapien
gagtttcatagacacattctgagta

SEQ ID NO: 2838538 - DNA, 25 bp, Homo sapien
tttccctggggagtttcatagacac

SEQ ID NO: 2838539 - DNA, 25 bp, Homo sapien
gatgatgctgggagtggaattaggg

SEQ ID NO: 2838540 - DNA, 25 bp, Homo sapien
ttgtgaaagcctaaatccactggat

SEQ ID NO: 2838541 - DNA, 25 bp, Homo sapien
tggaattaggggtaaaagcaatggc

SEQ ID NO: 2838542 - DNA, 25 bp, Homo sapien
tgaaagcctaaatccactggataga

SEQ ID NO: 2838543 - DNA, 25 bp, Homo sapien
aagtttcctgggtcgtggcatcact

SEQ ID NO: 2838544 - DNA, 25 bp, Homo sapien
taagtttcctgggtcgtggcatcac

SEQ ID NO: 2838545 - DNA, 25 bp, Homo sapien
tgtaagtttcctgggtcgtggcatc

SEQ ID NO: 2838546 - DNA, 25 bp, Homo sapien
gttgtaagtttcctgggtcgtggca

SEQ ID NO: 2838547 - DNA, 25 bp, Homo sapien
gagcaggtgcttgcggctgacacac

SEQ ID NO: 2838548 - DNA, 25 bp, Homo sapien
gcattttaccttcaggcaggggtcc

SEQ ID NO: 2838549 - DNA, 25 bp, Homo sapien
cggtctggtagtcctgggtcacaca

SEQ ID NO: 2838550 - DNA, 25 bp, Homo sapien
cacacacactttgtgagggctgcat

SEQ ID NO: 2838551 - DNA, 25 bp, Homo sapien
gtcctgaacacacaacatccaaaag

SEQ ID NO: 2838552 - DNA, 25 bp, Homo sapien
tgcgaatttctcaagggtcctgaac

SEQ ID NO: 2838553 - DNA, 25 bp, Homo sapien
aatgcctgctgcgaatttctcaagg

SEQ ID NO: 2838554 - DNA, 25 bp, Homo sapien
agggtcctgaacacacaacatccaa

SEQ ID NO: 2838555 - DNA, 25 bp, Homo sapien
tccaccagttaaagatgccttgttg

SEQ ID NO: 2838556 - DNA, 25 bp, Homo sapien
ctctggtgagttccagaatcttcct

SEQ ID NO: 2838557 - DNA, 25 bp, Homo sapien
tgttgagaccagtaagcaaaagatt

SEQ ID NO: 2838558 - DNA, 25 bp, Homo sapien
cagaggccactcgatttgcaaaaag

SEQ ID NO: 2838559 - DNA, 25 bp, Homo sapien
gcatccttggtgcaattagtctcca

SEQ ID NO: 2838560 - DNA, 25 bp, Homo sapien
caggaccaggaagtatctttagaat

SEQ ID NO: 2838561 - DNA, 25 bp, Homo sapien
gatgggttctcacatcaacatgtgc

SEQ ID NO: 2838562 - DNA, 25 bp, Homo sapien
atcagcaccaatgggctggccttgc

SEQ ID NO: 2838563 - DNA, 25 bp, Homo sapien
ttgccatgtagaaaaaccaattatc

SEQ ID NO: 2838564 - DNA, 25 bp, Homo sapien
tgccatgtagaaaaaccaattatcc

SEQ ID NO: 2838565 - DNA, 25 bp, Homo sapien
gttgccatgtagaaaaaccaattat

SEQ ID NO: 2838566 - DNA, 25 bp, Homo sapien
cagttgccatgtagaaaaaccaatt

SEQ ID NO: 2838567 - DNA, 25 bp, Homo sapien
tctaaatcgggctgggcagatgcct

SEQ ID NO: 2838568 - DNA, 25 bp, Homo sapien
gcctgggaaatctgattaggatttg

SEQ ID NO: 2838569 - DNA, 25 bp, Homo sapien
ggatttgcttgatgattccctttca

SEQ ID NO: 2838570 - DNA, 25 bp, Homo sapien
taatgtatgataatctaaatcgggc

SEQ ID NO: 2838571 - DNA, 25 bp, Homo sapien
tgccaccttattgcgatgacagcca

SEQ ID NO: 2838572 - DNA, 25 bp, Homo sapien
cacattgtgacccaggagaacacag

SEQ ID NO: 2838573 - DNA, 25 bp, Homo sapien
cactgtttactgagcttttaaggag

SEQ ID NO: 2838574 - DNA, 25 bp, Homo sapien
tgtcttagaaccagcccacacgttg

SEQ ID NO: 2838575 - DNA, 25 bp, Homo sapien
ggccattggcagtcaacagatgatc

SEQ ID NO: 2838576 - DNA, 25 bp, Homo sapien
cagatgatctagtgtgtcccagcgc

SEQ ID NO: 2838577 - DNA, 25 bp, Homo sapien
gagctcagcctcatcatcgagggaa

SEQ ID NO: 2838578 - DNA, 25 bp, Homo sapien
cactgataaggttcacgagagcttc

SEQ ID NO: 2838579 - DNA, 25 bp, Homo sapien
tcaccaactgatcgaagtctggagt

SEQ ID NO: 2838580 - DNA, 25 bp, Homo sapien
catggctttacagagaggcagcctg

SEQ ID NO: 2838581 - DNA, 25 bp, Homo sapien
aagtctatacgatcttgtccaggcc

SEQ ID NO: 2838582 - DNA, 25 bp, Homo sapien
aataatatatgtagacgctggtccc

SEQ ID NO: 2838583 - DNA, 25 bp, Homo sapien
gattccagtttctgaaataatcatc

SEQ ID NO: 2838584 - DNA, 25 bp, Homo sapien
gttgggattccagtttctgaaataa

SEQ ID NO: 2838585 - DNA, 25 bp, Homo sapien
ttggtcaaagggcttgttgggattc

SEQ ID NO: 2838586 - DNA, 25 bp, Homo sapien
ggtcaaagggcttgttgggattcca

SEQ ID NO: 2838587 - DNA, 25 bp, Homo sapien
tcctcccagcgctcagaggcctgca

SEQ ID NO: 2838588 - DNA, 25 bp, Homo sapien
cggtgcaccaatcccctcctcccag

SEQ ID NO: 2838589 - DNA, 25 bp, Homo sapien
aacacagccccggtgcaccaatccc

SEQ ID NO: 2838590 - DNA, 25 bp, Homo sapien
aaccatccttacatagtgcccatga

SEQ ID NO: 2838591 - DNA, 25 bp, Homo sapien
cagaaatcacgtttacccacaaggc

SEQ ID NO: 2838592 - DNA, 25 bp, Homo sapien
ggcccatgccagaaatatgcaggag

SEQ ID NO: 2838593 - DNA, 25 bp, Homo sapien
ccacaaggcggtgacagctcctgca

SEQ ID NO: 2838594 - DNA, 25 bp, Homo sapien
aattgtggctcgatttgttcaagca

SEQ ID NO: 2838595 - DNA, 25 bp, Homo sapien
atcaaatcctgatgggcccacactc

SEQ ID NO: 2838596 - DNA, 25 bp, Homo sapien
ctcagagctgcaagcaaacacgcat

SEQ ID NO: 2838597 - DNA, 25 bp, Homo sapien
tctgcaggcgtcctgcctaggaacg

SEQ ID NO: 2838598 - DNA, 25 bp, Homo sapien
ggaacgtctacatcaaatcctgatg

SEQ ID NO: 2838599 - DNA, 25 bp, Homo sapien
cccttcactactgctaaatgcaatg

SEQ ID NO: 2838600 - DNA, 25 bp, Homo sapien
gagcccttcactactgctaaatgca

SEQ ID NO: 2838601 - DNA, 25 bp, Homo sapien
atgtggaaaattacccagaaaacag

SEQ ID NO: 2838602 - DNA, 25 bp, Homo sapien
ccagagcccttcactactgctaaat

SEQ ID NO: 2838603 - DNA, 25 bp, Homo sapien
ttgattttcattccatacaggattc

SEQ ID NO: 2838604 - DNA, 25 bp, Homo sapien
tgattttcattccatacaggattca

SEQ ID NO: 2838605 - DNA, 25 bp, Homo sapien
ctacagcgtaatgcactgacgcatc

SEQ ID NO: 2838606 - DNA, 25 bp, Homo sapien
ctttgattttcattccatacaggat

SEQ ID NO: 2838607 - DNA, 25 bp, Homo sapien
ctgatttatcactggacaaacacga

SEQ ID NO: 2838608 - DNA, 25 bp, Homo sapien
gctgctgcaaacacggcggaaaatc

SEQ ID NO: 2838609 - DNA, 25 bp, Homo sapien
gacaaacacgaaactggcaccatga

SEQ ID NO: 2838610 - DNA, 25 bp, Homo sapien
gtcgctgctgcaaacacggcggaaa

SEQ ID NO: 2838611 - DNA, 25 bp, Homo sapien
tgtctatgcctccattggaattaag

SEQ ID NO: 2838612 - DNA, 25 bp, Homo sapien
aggacctatagagggacctcctcca

SEQ ID NO: 2838613 - DNA, 25 bp, Homo sapien
ctttgtctatgcctccattggaatt

SEQ ID NO: 2838614 - DNA, 25 bp, Homo sapien
gaatgcccaggacctatagagggac

SEQ ID NO: 2838615 - DNA, 25 bp, Homo sapien
ctgctgtaatcaacaacaccgacag

SEQ ID NO: 2838616 - DNA, 25 bp, Homo sapien
caccgacaggtttcgggatggccat

SEQ ID NO: 2838617 - DNA, 25 bp, Homo sapien
ggaagtgctccatgggatgtcagcc

SEQ ID NO: 2838618 - DNA, 25 bp, Homo sapien
gctccatgggatgtcagccactctg

SEQ ID NO: 2838619 - DNA, 25 bp, Homo sapien
cagtaaattgtccacttgcaggaga

SEQ ID NO: 2838620 - DNA, 25 bp, Homo sapien
gaaggatgacagctaccatcaggcc

SEQ ID NO: 2838621 - DNA, 25 bp, Homo sapien
ttaggaggacttctctgaagactaa

SEQ ID NO: 2838622 - DNA, 25 bp, Homo sapien
agatctgaaggatgacagctaccat

SEQ ID NO: 2838623 - DNA, 25 bp, Homo sapien
gaatcccaaccaggagtatcctggg

SEQ ID NO: 2838624 - DNA, 25 bp, Homo sapien
caaccaggagtatcctgggttgctg

SEQ ID NO: 2838625 - DNA, 25 bp, Homo sapien
catgaatcccaaccaggagtatcct

SEQ ID NO: 2838626 - DNA, 25 bp, Homo sapien
caggagtatcctgggttgctgtctt

SEQ ID NO: 2838627 - DNA, 25 bp, Homo sapien
atttacaaaagggttgcattcatgc

SEQ ID NO: 2838628 - DNA, 25 bp, Homo sapien
tttacaaaagggttgcattcatgca

SEQ ID NO: 2838629 - DNA, 25 bp, Homo sapien
cagagctccttggaccaagggcatt

SEQ ID NO: 2838630 - DNA, 25 bp, Homo sapien
ttacaaaagggttgcattcatgcat

SEQ ID NO: 2838631 - DNA, 25 bp, Homo sapien
ctctttctgatcatatactgcaagg

SEQ ID NO: 2838632 - DNA, 25 bp, Homo sapien
gatcatatactgcaaggctccacat

SEQ ID NO: 2838633 - DNA, 25 bp, Homo sapien
aggaaccattttcctacctagctct

SEQ ID NO: 2838634 - DNA, 25 bp, Homo sapien
tctgatcatatactgcaaggctcca

SEQ ID NO: 2838635 - DNA, 25 bp, Homo sapien
gactctggctagagcctgctttttg

SEQ ID NO: 2838636 - DNA, 25 bp, Homo sapien
agataaggagactctggctagagcc

SEQ ID NO: 2838637 - DNA, 25 bp, Homo sapien
aacagggagataaggagactctggc

SEQ ID NO: 2838638 - DNA, 25 bp, Homo sapien
taaggagactctggctagagcctgc

SEQ ID NO: 2838639 - DNA, 25 bp, Homo sapien
taaaaggacatatgggatcctgcca

SEQ ID NO: 2838640 - DNA, 25 bp, Homo sapien
cataaattaggctctcaggacaacc

SEQ ID NO: 2838641 - DNA, 25 bp, Homo sapien
cttagctatcggtttactgcctggc

SEQ ID NO: 2838642 - DNA, 25 bp, Homo sapien
ttagagtgcatggaccacgttttcc

SEQ ID NO: 2838643 - DNA, 25 bp, Homo sapien
tgagtaaagaggatttctgcagcca

SEQ ID NO: 2838644 - DNA, 25 bp, Homo sapien
catttaaattggtagctgtcgacta

SEQ ID NO: 2838645 - DNA, 25 bp, Homo sapien
tttcctatcgtaacattccactggg

SEQ ID NO: 2838646 - DNA, 25 bp, Homo sapien
gcatacgttacaagcaatcttcctg

SEQ ID NO: 2838647 - DNA, 25 bp, Homo sapien
aaaagtacagtgtatctccagggag

SEQ ID NO: 2838648 - DNA, 25 bp, Homo sapien
catttggcagatacatcaagcctat

SEQ ID NO: 2838649 - DNA, 25 bp, Homo sapien
tacatcaagcctatttgcagagcta

SEQ ID NO: 2838650 - DNA, 25 bp, Homo sapien
gagcaggtaacgaccccatttggca

SEQ ID NO: 2838651 - DNA, 25 bp, Homo sapien
cacacataaccccagcatacagcca

SEQ ID NO: 2838652 - DNA, 25 bp, Homo sapien
cagcatacagccagtgaccagagga

SEQ ID NO: 2838653 - DNA, 25 bp, Homo sapien
gtcagaagtgtacaccagattctcc

SEQ ID NO: 2838654 - DNA, 25 bp, Homo sapien
agattctccccacacagcacacata

SEQ ID NO: 2838655 - DNA, 25 bp, Homo sapien
gtggttgaggaaggagtcagagaac

SEQ ID NO: 2838656 - DNA, 25 bp, Homo sapien
gttgaggaaggagtcagagaacctt

SEQ ID NO: 2838657 - DNA, 25 bp, Homo sapien
tgtggttgaggaaggagtcagagaa

SEQ ID NO: 2838658 - DNA, 25 bp, Homo sapien
gaggaaggagtcagagaaccttgcc

SEQ ID NO: 2838659 - DNA, 25 bp, Homo sapien
gatgtccaagctcaacactcccatt

SEQ ID NO: 2838660 - DNA, 25 bp, Homo sapien
ccagagcagaagaggtgcataggcc

SEQ ID NO: 2838661 - DNA, 25 bp, Homo sapien
aagaggtgcataggccagctcttct

SEQ ID NO: 2838662 - DNA, 25 bp, Homo sapien
agatgtccaagctcaacactcccat

SEQ ID NO: 2838663 - DNA, 25 bp, Homo sapien
catcacccacatcgtagctgaagtg

SEQ ID NO: 2838664 - DNA, 25 bp, Homo sapien
tctgtatcctgggtagccctccacc

SEQ ID NO: 2838665 - DNA, 25 bp, Homo sapien
gcagcgtcattaccttggtccaggc

SEQ ID NO: 2838666 - DNA, 25 bp, Homo sapien
tcccctgcagcgtcattaccttggt

SEQ ID NO: 2838667 - DNA, 25 bp, Homo sapien
gattttccacctcttaatcacgtcc

SEQ ID NO: 2838668 - DNA, 25 bp, Homo sapien
ggtgattttccacctcttaatcacg

SEQ ID NO: 2838669 - DNA, 25 bp, Homo sapien
tcatgccacgatcagacagtcacac

SEQ ID NO: 2838670 - DNA, 25 bp, Homo sapien
cacgccgaccgagtccggtgatttt

SEQ ID NO: 2838671 - DNA, 25 bp, Homo sapien
ttttttctcttcatgccagtttctt

SEQ ID NO: 2838672 - DNA, 25 bp, Homo sapien
tctcttcatgccagtttcttcttta

SEQ ID NO: 2838673 - DNA, 25 bp, Homo sapien
ttttctcttcatgccagtttcttct

SEQ ID NO: 2838674 - DNA, 25 bp, Homo sapien
tcttcatgccagtttcttctttaaa

SEQ ID NO: 2838675 - DNA, 25 bp, Homo sapien
agcaactcagtttccttgtggggag

SEQ ID NO: 2838676 - DNA, 25 bp, Homo sapien
ctggagagactacccaggacaccgt

SEQ ID NO: 2838677 - DNA, 25 bp, Homo sapien
tagggtcaatcctcggtagcctgga

SEQ ID NO: 2838678 - DNA, 25 bp, Homo sapien
tctgcaaaccttagtgaggaagcct

SEQ ID NO: 2838679 - DNA, 25 bp, Homo sapien
ggaagatgaactactaggatggcga

SEQ ID NO: 2838680 - DNA, 25 bp, Homo sapien
catacaaccagaggcgagaaaccag

SEQ ID NO: 2838681 - DNA, 25 bp, Homo sapien
tgtaccaaatccaacatacaaccag

SEQ ID NO: 2838682 - DNA, 25 bp, Homo sapien
ggttccagcaggtcgagtaataatg

SEQ ID NO: 2838683 - DNA, 25 bp, Homo sapien
tgtctctcaacaggggctatcaagc

SEQ ID NO: 2838684 - DNA, 25 bp, Homo sapien
taaatatcgttggtacaggccaaac

SEQ ID NO: 2838685 - DNA, 25 bp, Homo sapien
catcaagccagagttaacccatggg

SEQ ID NO: 2838686 - DNA, 25 bp, Homo sapien
gctaattagtttgatgaatcactga

SEQ ID NO: 2838687 - DNA, 25 bp, Homo sapien
gggtttgtcacctctggtgctccca

SEQ ID NO: 2838688 - DNA, 25 bp, Homo sapien
caatggccgagtctccacctctcct

SEQ ID NO: 2838689 - DNA, 25 bp, Homo sapien
ttcgccacaccatccgggaactcag

SEQ ID NO: 2838690 - DNA, 25 bp, Homo sapien
tcaacagtacatcttcgccacacca

SEQ ID NO: 2838691 - DNA, 25 bp, Homo sapien
ccgggaactcagaccaggcaaacag

SEQ ID NO: 2838692 - DNA, 25 bp, Homo sapien
tggataattggcccagaagatatcc

SEQ ID NO: 2838693 - DNA, 25 bp, Homo sapien
tattccaaacaagttccgttctgtg

SEQ ID NO: 2838694 - DNA, 25 bp, Homo sapien
tcaggttctgttattggtttcatta

SEQ ID NO: 2838695 - DNA, 25 bp, Homo sapien
tcattggctgcatggatcacggctg

SEQ ID NO: 2838696 - DNA, 25 bp, Homo sapien
gccatctgcaggaaaatgtcaacat

SEQ ID NO: 2838697 - DNA, 25 bp, Homo sapien
ttcaagcttccccttctgctgagcc

SEQ ID NO: 2838698 - DNA, 25 bp, Homo sapien
catctgcaggaaaatgtcaacatgt

SEQ ID NO: 2838699 - DNA, 25 bp, Homo sapien
tgctgagccatctgcaggaaaatgt

SEQ ID NO: 2838700 - DNA, 25 bp, Homo sapien
ttccccatattaaatggaagacatt

SEQ ID NO: 2838701 - DNA, 25 bp, Homo sapien
ttattaatgattttaaagcctgaag

SEQ ID NO: 2838702 - DNA, 25 bp, Homo sapien
tccccatattaaatggaagacattc

SEQ ID NO: 2838703 - DNA, 25 bp, Homo sapien
gacttttgacattcacatacactgt

SEQ ID NO: 2838704 - DNA, 25 bp, Homo sapien
aattgataaatgttacctgctctag

SEQ ID NO: 2838705 - DNA, 25 bp, Homo sapien
tgtgtaaccaccacaccaatcagtc

SEQ ID NO: 2838706 - DNA, 25 bp, Homo sapien
caatcagtcaagatattataggaca

SEQ ID NO: 2838707 - DNA, 25 bp, Homo sapien
gttcgacatatttctaacaagggca

SEQ ID NO: 2838708 - DNA, 25 bp, Homo sapien
tttctatggaacgaatgtggatcat

SEQ ID NO: 2838709 - DNA, 25 bp, Homo sapien
gcaatcttgatgttcgacatatttc

SEQ ID NO: 2838710 - DNA, 25 bp, Homo sapien
tgagttattctcctacatttgtagg

SEQ ID NO: 2838711 - DNA, 25 bp, Homo sapien
tccctaatgtcagagttaaccacaa

SEQ ID NO: 2838712 - DNA, 25 bp, Homo sapien
taaaccctctttcacattaggctct

SEQ ID NO: 2838713 - DNA, 25 bp, Homo sapien
aaccacgtggtcttaattagcatca

SEQ ID NO: 2838714 - DNA, 25 bp, Homo sapien
tctggaaatgtaaatctcctctatt

SEQ ID NO: 2838715 - DNA, 25 bp, Homo sapien
ggcttcacttattacatgactgttg

SEQ ID NO: 2838716 - DNA, 25 bp, Homo sapien
tcaggaggcttcacttattacatga

SEQ ID NO: 2838717 - DNA, 25 bp, Homo sapien
tacatgactgttggagggcagtaat

SEQ ID NO: 2838718 - DNA, 25 bp, Homo sapien
gagggcagtaatagttctttaataa

SEQ ID NO: 2838719 - DNA, 25 bp, Homo sapien
tttctcaggcaataggaccagcctt

SEQ ID NO: 2838720 - DNA, 25 bp, Homo sapien
ttctcaggcaataggaccagccttg

SEQ ID NO: 2838721 - DNA, 25 bp, Homo sapien
tctcaggcaataggaccagccttgg

SEQ ID NO: 2838722 - DNA, 25 bp, Homo sapien
ctcaggcaataggaccagccttgga

SEQ ID NO: 2838723 - DNA, 25 bp, Homo sapien
ttccctgtgatgtctttctgctccc

SEQ ID NO: 2838724 - DNA, 25 bp, Homo sapien
accctctcaagtgcctgagcatgca

SEQ ID NO: 2838725 - DNA, 25 bp, Homo sapien
cctgtgatgtctttctgctccctgg

SEQ ID NO: 2838726 - DNA, 25 bp, Homo sapien
cccaccctctcaagtgcctgagcat

SEQ ID NO: 2838727 - DNA, 25 bp, Homo sapien
aggcatctgtaaacctatcaccata

SEQ ID NO: 2838728 - DNA, 25 bp, Homo sapien
caggcatctgtaaacctatcaccat

SEQ ID NO: 2838729 - DNA, 25 bp, Homo sapien
ggcatctgtaaacctatcaccatac

SEQ ID NO: 2838730 - DNA, 25 bp, Homo sapien
tatactcccaccctgacctgaagga

SEQ ID NO: 2838731 - DNA, 25 bp, Homo sapien
gaaactatctgaagagctgaccgga

SEQ ID NO: 2838732 - DNA, 25 bp, Homo sapien
gacaaagactgtaagcactagagcc

SEQ ID NO: 2838733 - DNA, 25 bp, Homo sapien
gctgaccggaacaccaagaaattta

SEQ ID NO: 2838734 - DNA, 25 bp, Homo sapien
tccttgagtaaatgctcctgatggc

SEQ ID NO: 2838735 - DNA, 25 bp, Homo sapien
gatgagctactgcatggaaatgcct

SEQ ID NO: 2838736 - DNA, 25 bp, Homo sapien
tttaactatagaacaccttggagcc

SEQ ID NO: 2838737 - DNA, 25 bp, Homo sapien
tggaagctgtggacactactcagtc

SEQ ID NO: 2838738 - DNA, 25 bp, Homo sapien
cactgttctatgttgccggttaaag

SEQ ID NO: 2838739 - DNA, 25 bp, Homo sapien
cactcaccctcatgaatatgccgga

SEQ ID NO: 2838740 - DNA, 25 bp, Homo sapien
tctgcagccctatgaaagagtgcga

SEQ ID NO: 2838741 - DNA, 25 bp, Homo sapien
gcaaaatggttcagccccatggaga

SEQ ID NO: 2838742 - DNA, 25 bp, Homo sapien
cattaattaaaggaaattcaagcag

SEQ ID NO: 2838743 - DNA, 25 bp, Homo sapien
tcccctttccaagagaagcagtcca

SEQ ID NO: 2838744 - DNA, 25 bp, Homo sapien
tccaagagaagcagtccaacatcaa

SEQ ID NO: 2838745 - DNA, 25 bp, Homo sapien
cctttccaagagaagcagtccaaca

SEQ ID NO: 2838746 - DNA, 25 bp, Homo sapien
ttgaaatcccctttccaagagaagc

SEQ ID NO: 2838747 - DNA, 25 bp, Homo sapien
tggaaagactgcaccagatgcctct

SEQ ID NO: 2838748 - DNA, 25 bp, Homo sapien
caggaattcctaatgttaagtacca

SEQ ID NO: 2838749 - DNA, 25 bp, Homo sapien
cataaaacatggtactcccaagtcc

SEQ ID NO: 2838750 - DNA, 25 bp, Homo sapien
tcccaagtcccctagaagggcatgg

SEQ ID NO: 2838751 - DNA, 25 bp, Homo sapien
tcgaaagcggttccagtacttgtcc

SEQ ID NO: 2838752 - DNA, 25 bp, Homo sapien
tgccggctctcgacttggaggaagc

SEQ ID NO: 2838753 - DNA, 25 bp, Homo sapien
tacttgtcccggtcgtactgggaga

SEQ ID NO: 2838754 - DNA, 25 bp, Homo sapien
ttgtctaggaaattgccgtggttgg

SEQ ID NO: 2838755 - DNA, 25 bp, Homo sapien
tagacccagggacccctctcacgaa

SEQ ID NO: 2838756 - DNA, 25 bp, Homo sapien
tggggcgcctgtcgcgcctctagac

SEQ ID NO: 2838757 - DNA, 25 bp, Homo sapien
cgctcgcgcacctggggcgcctgtc

SEQ ID NO: 2838758 - DNA, 25 bp, Homo sapien
ggcgcgcagggcgatgagcgaagag

SEQ ID NO: 2838759 - DNA, 25 bp, Homo sapien
gttgctcgagctcccgcggcacggt

SEQ ID NO: 2838760 - DNA, 25 bp, Homo sapien
cgggaaggctgatcgccggctcgcg

SEQ ID NO: 2838761 - DNA, 25 bp, Homo sapien
cacggtcgccgggaaggctgatcgc

SEQ ID NO: 2838762 - DNA, 25 bp, Homo sapien
cgggtcccctagtccgagttgctcg

SEQ ID NO: 2838763 - DNA, 25 bp, Homo sapien
ccgccgccgagcgtctggccgcttt

SEQ ID NO: 2838764 - DNA, 25 bp, Homo sapien
tgccacacgccgccgccgagcgtct

SEQ ID NO: 2838765 - DNA, 25 bp, Homo sapien
cgagcgtctggccgctttgtgagcc

SEQ ID NO: 2838766 - DNA, 25 bp, Homo sapien
cgccgagcgtctggccgctttgtga

SEQ ID NO: 2838767 - DNA, 25 bp, Homo sapien
tgaccccagtggaaatgggctccct

SEQ ID NO: 2838768 - DNA, 25 bp, Homo sapien
cagtcccagcacaagtctcattaat

SEQ ID NO: 2838769 - DNA, 25 bp, Homo sapien
tcctgggtattcacttctgcctggg

SEQ ID NO: 2838770 - DNA, 25 bp, Homo sapien
tcctctgaccttctggacgggctgg

SEQ ID NO: 2838771 - DNA, 25 bp, Homo sapien
tttgttaccattacacctgccttgt

SEQ ID NO: 2838772 - DNA, 25 bp, Homo sapien
tgttaacaatgattacggcttatgc

SEQ ID NO: 2838773 - DNA, 25 bp, Homo sapien
ttacggcttatgcataagtgaaatg

SEQ ID NO: 2838774 - DNA, 25 bp, Homo sapien
ttacacctgccttgtaagaaatgct

SEQ ID NO: 2838775 - DNA, 25 bp, Homo sapien
tgcctatgggcatctttgtacgtga

SEQ ID NO: 2838776 - DNA, 25 bp, Homo sapien
ctcttcgaattctcttgtaaacaca

SEQ ID NO: 2838777 - DNA, 25 bp, Homo sapien
ggcatctttgtacgtgaaacactaa

SEQ ID NO: 2838778 - DNA, 25 bp, Homo sapien
ctttgtacgtgaaacactaagaggg

SEQ ID NO: 2838779 - DNA, 25 bp, Homo sapien
cctgtttgaatgtagaattgaagaa

SEQ ID NO: 2838780 - DNA, 25 bp, Homo sapien
cattgatgtcctctacctgctctga

SEQ ID NO: 2838781 - DNA, 25 bp, Homo sapien
gatgtcctctacctgctctgatttc

SEQ ID NO: 2838782 - DNA, 25 bp, Homo sapien
tttcctgtttgaatgtagaattgaa

SEQ ID NO: 2838783 - DNA, 25 bp, Homo sapien
actgcaaggctcacatcgggacaat

SEQ ID NO: 2838784 - DNA, 25 bp, Homo sapien
caagtcccaacgagcttttcctctt

SEQ ID NO: 2838785 - DNA, 25 bp, Homo sapien
tcacatcgggacaatgagacaacct

SEQ ID NO: 2838786 - DNA, 25 bp, Homo sapien
caatgagacaacctctacctgggct

SEQ ID NO: 2838787 - DNA, 25 bp, Homo sapien
ggtgcctggtgacggttcttcattg

SEQ ID NO: 2838788 - DNA, 25 bp, Homo sapien
tggtgacggttcttcattgatggta

SEQ ID NO: 2838789 - DNA, 25 bp, Homo sapien
attcggtgcctggtgacggttcttc

SEQ ID NO: 2838790 - DNA, 25 bp, Homo sapien
agattcggtgcctggtgacggttct

SEQ ID NO: 2838791 - DNA, 25 bp, Homo sapien
ccacacagagtattttgattaactg

SEQ ID NO: 2838792 - DNA, 25 bp, Homo sapien
cacagagtattttgattaactggcc

SEQ ID NO: 2838793 - DNA, 25 bp, Homo sapien
cacacagagtattttgattaactgg

SEQ ID NO: 2838794 - DNA, 25 bp, Homo sapien
cagagtattttgattaactggccac

SEQ ID NO: 2838795 - DNA, 25 bp, Homo sapien
tgcagccgatatatctctgctatcc

SEQ ID NO: 2838796 - DNA, 25 bp, Homo sapien
ggtcactgcagccgatatatctctg

SEQ ID NO: 2838797 - DNA, 25 bp, Homo sapien
gcagccgatatatctctgctatccc

SEQ ID NO: 2838798 - DNA, 25 bp, Homo sapien
cactgcagccgatatatctctgcta

SEQ ID NO: 2838799 - DNA, 25 bp, Homo sapien
ctgggtagcttccatgaccagctgc

SEQ ID NO: 2838800 - DNA, 25 bp, Homo sapien
cagatgctttccgaactggtactgg

SEQ ID NO: 2838801 - DNA, 25 bp, Homo sapien
tccgaactggtactgggtagcttcc

SEQ ID NO: 2838802 - DNA, 25 bp, Homo sapien
tgcctggaaatgtgttgtggtgtct

SEQ ID NO: 2838803 - DNA, 25 bp, Homo sapien
gatggtccttacttctatcccctcg

SEQ ID NO: 2838804 - DNA, 25 bp, Homo sapien
gacagcaagccttctgttgcctgct

SEQ ID NO: 2838805 - DNA, 25 bp, Homo sapien
tgttggctacatcagctgaagggag

SEQ ID NO: 2838806 - DNA, 25 bp, Homo sapien
gatgaaggaagggccgacagttccc

SEQ ID NO: 2838807 - DNA, 25 bp, Homo sapien
cttccaccctggaagatggtccatc

SEQ ID NO: 2838808 - DNA, 25 bp, Homo sapien
ttccaccctggaagatggtccatcc

SEQ ID NO: 2838809 - DNA, 25 bp, Homo sapien
ccaccctggaagatggtccatccat

SEQ ID NO: 2838810 - DNA, 25 bp, Homo sapien
tccaccctggaagatggtccatcca

SEQ ID NO: 2838811 - DNA, 25 bp, Homo sapien
gaggtagcaatcagccctgctaggg

SEQ ID NO: 2838812 - DNA, 25 bp, Homo sapien
aaggagggtcaaaagcagaggctgc

SEQ ID NO: 2838813 - DNA, 25 bp, Homo sapien
gctgcctgagccacgtaaacaaatg

SEQ ID NO: 2838814 - DNA, 25 bp, Homo sapien
cctgcacaaggtcccttagggacac

SEQ ID NO: 2838815 - DNA, 25 bp, Homo sapien
cttgtattcccctccagggctgctt

SEQ ID NO: 2838816 - DNA, 25 bp, Homo sapien
ttctgggctgggagctggggaccat

SEQ ID NO: 2838817 - DNA, 25 bp, Homo sapien
tgcttctgggctgggagctggggac

SEQ ID NO: 2838818 - DNA, 25 bp, Homo sapien
agggctgcttctgggctgggagctg

SEQ ID NO: 2838819 - DNA, 25 bp, Homo sapien
aatcagatcaccaggatcatgagaa

SEQ ID NO: 2838820 - DNA, 25 bp, Homo sapien
aatctatgtgtgttggatcccagag

SEQ ID NO: 2838821 - DNA, 25 bp, Homo sapien
tcaccaggatcatgagaaacaacag

SEQ ID NO: 2838822 - DNA, 25 bp, Homo sapien
tggaatagacccagaggcaaatcta

SEQ ID NO: 2838823 - DNA, 25 bp, Homo sapien
ctgcaggcttccgtgtgtacctgac

SEQ ID NO: 2838824 - DNA, 25 bp, Homo sapien
gcttccgtgtgtacctgactttctc

SEQ ID NO: 2838825 - DNA, 25 bp, Homo sapien
caggcttccgtgtgtacctgacttt

SEQ ID NO: 2838826 - DNA, 25 bp, Homo sapien
ttccgtgtgtacctgactttctccc

SEQ ID NO: 2838827 - DNA, 25 bp, Homo sapien
aggatttgtggagtgcccgtgttcc

SEQ ID NO: 2838828 - DNA, 25 bp, Homo sapien
tactcagatgcattgaagcgaaaca

SEQ ID NO: 2838829 - DNA, 25 bp, Homo sapien
tcctggtgtagactgtggcaaaggt

SEQ ID NO: 2838830 - DNA, 25 bp, Homo sapien
cattgaagcgaaacagagtgggcac

SEQ ID NO: 2838831 - DNA, 25 bp, Homo sapien
ccaccagagactcagagtgcctcat

SEQ ID NO: 2838832 - DNA, 25 bp, Homo sapien
cacccaccaccagagactcagagtg

SEQ ID NO: 2838833 - DNA, 25 bp, Homo sapien
gagcatgcacgcaatcagcacatct

SEQ ID NO: 2838834 - DNA, 25 bp, Homo sapien
agcccctcgagcatgcacgcaatca

SEQ ID NO: 2838835 - DNA, 25 bp, Homo sapien
tagggtcaaaagacactatttgtaa

SEQ ID NO: 2838836 - DNA, 25 bp, Homo sapien
ggagaaaccaggccaacagcatagt

SEQ ID NO: 2838837 - DNA, 25 bp, Homo sapien
tgaaacttctcctgtaaggagaaac

SEQ ID NO: 2838838 - DNA, 25 bp, Homo sapien
aatatgtgcgccctgagacaaagtc

SEQ ID NO: 2838839 - DNA, 25 bp, Homo sapien
gagctactgacatcccaaaagggcc

SEQ ID NO: 2838840 - DNA, 25 bp, Homo sapien
tctggctaagggttcccactggtcc

SEQ ID NO: 2838841 - DNA, 25 bp, Homo sapien
gataagtccaacacctctgtgctgt

SEQ ID NO: 2838842 - DNA, 25 bp, Homo sapien
taactagagagggagctaaggtctc

SEQ ID NO: 2838843 - DNA, 25 bp, Homo sapien
tccttttcatgtttgagacatagca

SEQ ID NO: 2838844 - DNA, 25 bp, Homo sapien
aaagacatacaggaataagtctgtc

SEQ ID NO: 2838845 - DNA, 25 bp, Homo sapien
catgtttgagacatagcagagagac

SEQ ID NO: 2838846 - DNA, 25 bp, Homo sapien
tacaggaataagtctgtccttttca

SEQ ID NO: 2838847 - DNA, 25 bp, Homo sapien
caagaagtacaacaagggtcctcta

SEQ ID NO: 2838848 - DNA, 25 bp, Homo sapien
tctgactggctatgacaaccacagg

SEQ ID NO: 2838849 - DNA, 25 bp, Homo sapien
tgctgtaactgatcaagcatgtgac

SEQ ID NO: 2838850 - DNA, 25 bp, Homo sapien
cgcagagaacaccagatcgaggatc

SEQ ID NO: 2838851 - DNA, 25 bp, Homo sapien
caatcaatacagacgggcaagtgct

SEQ ID NO: 2838852 - DNA, 25 bp, Homo sapien
tcactgagtcccatgacgaaggctg

SEQ ID NO: 2838853 - DNA, 25 bp, Homo sapien
tgcttaacacacagggatcatgagg

SEQ ID NO: 2838854 - DNA, 25 bp, Homo sapien
gcaactggcttgtcgggaactagaa

SEQ ID NO: 2838855 - DNA, 25 bp, Homo sapien
tcagtatccaagtggcgtctcggct

SEQ ID NO: 2838856 - DNA, 25 bp, Homo sapien
gctgcttctaaccttgggcctcaat

SEQ ID NO: 2838857 - DNA, 25 bp, Homo sapien
tactgcaactttgtagatggagaga

SEQ ID NO: 2838858 - DNA, 25 bp, Homo sapien
tttcaccaccgcaatcagatgacag

SEQ ID NO: 2838859 - DNA, 25 bp, Homo sapien
tgaagagatagcaggttttggtggc

SEQ ID NO: 2838860 - DNA, 25 bp, Homo sapien
gatgaagagatagcaggttttggtg

SEQ ID NO: 2838861 - DNA, 25 bp, Homo sapien
tgatgaagagatagcaggttttggt

SEQ ID NO: 2838862 - DNA, 25 bp, Homo sapien
ggtgatgaagagatagcaggttttg

SEQ ID NO: 2838863 - DNA, 25 bp, Homo sapien
tctggtccccgtgaaaaaggataca

SEQ ID NO: 2838864 - DNA, 25 bp, Homo sapien
gaagtagcccagtcgtatcagaagt

SEQ ID NO: 2838865 - DNA, 25 bp, Homo sapien
taaaagtagcctctcccgcatgaaa

SEQ ID NO: 2838866 - DNA, 25 bp, Homo sapien
gctttagtagtctcagggtccccat

SEQ ID NO: 2838867 - DNA, 25 bp, Homo sapien
ccaagtcagaggagagcggttctca

SEQ ID NO: 2838868 - DNA, 25 bp, Homo sapien
gtccacactgcgatgaacaacacca

SEQ ID NO: 2838869 - DNA, 25 bp, Homo sapien
caagttgaatccagtcaccaaggtc

SEQ ID NO: 2838870 - DNA, 25 bp, Homo sapien
gaacaacaccagtctgccaagtcag

SEQ ID NO: 2838871 - DNA, 25 bp, Homo sapien
tgtgttggaggcctctcggatgggc

SEQ ID NO: 2838872 - DNA, 25 bp, Homo sapien
tgttggaggcctctcggatgggcat

SEQ ID NO: 2838873 - DNA, 25 bp, Homo sapien
ttggaggcctctcggatgggcatgg

SEQ ID NO: 2838874 - DNA, 25 bp, Homo sapien
ccagtgtgttggaggcctctcggat

SEQ ID NO: 2838875 - DNA, 25 bp, Homo sapien
cagtgacaggattgtagtactccac

SEQ ID NO: 2838876 - DNA, 25 bp, Homo sapien
gaagcagcgtccatttgtcagtgac

SEQ ID NO: 2838877 - DNA, 25 bp, Homo sapien
gaagccaagttgcaggatccatcat

SEQ ID NO: 2838878 - DNA, 25 bp, Homo sapien
cgccccgtgctcatgttcgttggaa

SEQ ID NO: 2838879 - DNA, 25 bp, Homo sapien
aaccagaggactttcccaggtctgt

SEQ ID NO: 2838880 - DNA, 25 bp, Homo sapien
cactgatggcaaccagaggactttc

SEQ ID NO: 2838881 - DNA, 25 bp, Homo sapien
tggcaaccagaggactttcccaggt

SEQ ID NO: 2838882 - DNA, 25 bp, Homo sapien
tgctcatctgtgtgcggtaaaagtc

SEQ ID NO: 2838883 - DNA, 25 bp, Homo sapien
tttgttccaggatcgtaaacctcaa

SEQ ID NO: 2838884 - DNA, 25 bp, Homo sapien
cgttgcgccggcacatgttcatgtc

SEQ ID NO: 2838885 - DNA, 25 bp, Homo sapien
atgcccacctgtggcgtacagctgt

SEQ ID NO: 2838886 - DNA, 25 bp, Homo sapien
tacagctgtccgctaagcactccaa

SEQ ID NO: 2838887 - DNA, 25 bp, Homo sapien
tctctgacttgctcactgggtgacc

SEQ ID NO: 2838888 - DNA, 25 bp, Homo sapien
tcagtagttcacatggaccacagac

SEQ ID NO: 2838889 - DNA, 25 bp, Homo sapien
tgcatctcaatcgactgggaagctt

SEQ ID NO: 2838890 - DNA, 25 bp, Homo sapien
tgtgcagtcaggtttcagacccaag

SEQ ID NO: 2838891 - DNA, 25 bp, Homo sapien
catgtccgccacgtatatccattca

SEQ ID NO: 2838892 - DNA, 25 bp, Homo sapien
tcgctgggttgtactgctccacagt

SEQ ID NO: 2838893 - DNA, 25 bp, Homo sapien
cactggcgggaagctccatcataac

SEQ ID NO: 2838894 - DNA, 25 bp, Homo sapien
tccacagtgctcagacactggcggg

SEQ ID NO: 2838895 - DNA, 25 bp, Homo sapien
ccacagctgtaaattgaactctgct

SEQ ID NO: 2838896 - DNA, 25 bp, Homo sapien
tcaacagggcatgctacaagacagc

SEQ ID NO: 2838897 - DNA, 25 bp, Homo sapien
ggtgcccacagctgaaagagcttca

SEQ ID NO: 2838898 - DNA, 25 bp, Homo sapien
gaaacaaattcccagcctgtcttcc

SEQ ID NO: 2838899 - DNA, 25 bp, Homo sapien
agaaccactcgttggtcttgtagct

SEQ ID NO: 2838900 - DNA, 25 bp, Homo sapien
ctgtaggcttccaccgatgctaggc

SEQ ID NO: 2838901 - DNA, 25 bp, Homo sapien
ttcatcggggccacaaagaaccact

SEQ ID NO: 2838902 - DNA, 25 bp, Homo sapien
actgctccgccgcgtgttcatcggg

SEQ ID NO: 2838903 - DNA, 25 bp, Homo sapien
acggcatacacgtggccagccatga

SEQ ID NO: 2838904 - DNA, 25 bp, Homo sapien
agcaagtcattgagcaccgctgcgc

SEQ ID NO: 2838905 - DNA, 25 bp, Homo sapien
agtgagccattaaaccctcccacgg

SEQ ID NO: 2838906 - DNA, 25 bp, Homo sapien
tgctggcaatggacgtccactggtc

SEQ ID NO: 2838907 - DNA, 25 bp, Homo sapien
aagctcagcaatctgatcccaccgg

SEQ ID NO: 2838908 - DNA, 25 bp, Homo sapien
gaaatcatagcactccacactgcgg

SEQ ID NO: 2838909 - DNA, 25 bp, Homo sapien
cacactgcggattgccttgggtgcc

SEQ ID NO: 2838910 - DNA, 25 bp, Homo sapien
gtgcctggccgccaaccacaatcat

SEQ ID NO: 2838911 - DNA, 25 bp, Homo sapien
tcactctcactcaacggcattccaa

SEQ ID NO: 2838912 - DNA, 25 bp, Homo sapien
actctcactcaacggcattccaata

SEQ ID NO: 2838913 - DNA, 25 bp, Homo sapien
ctcactcaacggcattccaatatgc

SEQ ID NO: 2838914 - DNA, 25 bp, Homo sapien
tctcactcaacggcattccaatatg

SEQ ID NO: 2838915 - DNA, 25 bp, Homo sapien
acttgcattgtctttccggttttga

SEQ ID NO: 2838916 - DNA, 25 bp, Homo sapien
gtaaatatgcccagaacttgcattg

SEQ ID NO: 2838917 - DNA, 25 bp, Homo sapien
tgcattgtctttccggttttgagtt

SEQ ID NO: 2838918 - DNA, 25 bp, Homo sapien
tcaagggcagaatgacatgttcgta

SEQ ID NO: 2838919 - DNA, 25 bp, Homo sapien
ttaatcactctcgtgaactgcagca

SEQ ID NO: 2838920 - DNA, 25 bp, Homo sapien
gcagggtgcctcaaagttctgatcc

SEQ ID NO: 2838921 - DNA, 25 bp, Homo sapien
actgcagcatacttaggagtttggc

SEQ ID NO: 2838922 - DNA, 25 bp, Homo sapien
gttctgatcccaagtctcaactgtc

SEQ ID NO: 2838923 - DNA, 25 bp, Homo sapien
ttgacagaatatgagtgagctgaac

SEQ ID NO: 2838924 - DNA, 25 bp, Homo sapien
ggttgacagaatatgagtgagctga

SEQ ID NO: 2838925 - DNA, 25 bp, Homo sapien
ctggttgacagaatatgagtgagct

SEQ ID NO: 2838926 - DNA, 25 bp, Homo sapien
cagaatatgagtgagctgaactcca

SEQ ID NO: 2838927 - DNA, 25 bp, Homo sapien
gcaagagtagaatgcatgtccaaac

SEQ ID NO: 2838928 - DNA, 25 bp, Homo sapien
agagtagaatgcatgtccaaactct

SEQ ID NO: 2838929 - DNA, 25 bp, Homo sapien
cgggcaagagtagaatgcatgtcca

SEQ ID NO: 2838930 - DNA, 25 bp, Homo sapien
gagtagaatgcatgtccaaactctc

SEQ ID NO: 2838931 - DNA, 25 bp, Homo sapien
gggccgcagggctaacaccaacaat

SEQ ID NO: 2838932 - DNA, 25 bp, Homo sapien
tcatccgatggagcatgtcgaggtc

SEQ ID NO: 2838933 - DNA, 25 bp, Homo sapien
tgtcgaggtcgagccagaagacttg

SEQ ID NO: 2838934 - DNA, 25 bp, Homo sapien
ctgagcaacagttgctctaggcaag

SEQ ID NO: 2838935 - DNA, 25 bp, Homo sapien
ctgatagcaaggtgcagagaaaatg

SEQ ID NO: 2838936 - DNA, 25 bp, Homo sapien
gatagcaaggtgcagagaaaatggg

SEQ ID NO: 2838937 - DNA, 25 bp, Homo sapien
agcaaggtgcagagaaaatgggggt

SEQ ID NO: 2838938 - DNA, 25 bp, Homo sapien
tagcaaggtgcagagaaaatggggg

SEQ ID NO: 2838939 - DNA, 25 bp, Homo sapien
taataaaacagttcagagcacaggg

SEQ ID NO: 2838940 - DNA, 25 bp, Homo sapien
cagacgtggaacttaatacctctcc

SEQ ID NO: 2838941 - DNA, 25 bp, Homo sapien
taaaagacagaagtgatgggacatg

SEQ ID NO: 2838942 - DNA, 25 bp, Homo sapien
tgatactactacactcagacgtgga

SEQ ID NO: 2838943 - DNA, 25 bp, Homo sapien
catgataaatgcatataacttttgt

SEQ ID NO: 2838944 - DNA, 25 bp, Homo sapien
catgttgtacatgataaatgcatat

SEQ ID NO: 2838945 - DNA, 25 bp, Homo sapien
aacctcatgttgtacatgataaatg

SEQ ID NO: 2838946 - DNA, 25 bp, Homo sapien
cttgaaaatagttaagagaatggat

SEQ ID NO: 2838947 - DNA, 25 bp, Homo sapien
ggaggagatggtatttcatggcctc

SEQ ID NO: 2838948 - DNA, 25 bp, Homo sapien
agagggaggagatggtatttcatgg

SEQ ID NO: 2838949 - DNA, 25 bp, Homo sapien
taggtagtccctaggtaagagagga

SEQ ID NO: 2838950 - DNA, 25 bp, Homo sapien
gctttgccatgtgctctaaacgggt

SEQ ID NO: 2838951 - DNA, 25 bp, Homo sapien
tctcataattgatccatgagatcac

SEQ ID NO: 2838952 - DNA, 25 bp, Homo sapien
taagagaggaagtcggacatgttcc

SEQ ID NO: 2838953 - DNA, 25 bp, Homo sapien
caaagatgactaaggtaccctcaca

SEQ ID NO: 2838954 - DNA, 25 bp, Homo sapien
ctgagtcaggtactgcatgtgatac

SEQ ID NO: 2838955 - DNA, 25 bp, Homo sapien
tgctgagtccttccgtggcacctcc

SEQ ID NO: 2838956 - DNA, 25 bp, Homo sapien
taaggtaccctcacagccctcaagg

SEQ ID NO: 2838957 - DNA, 25 bp, Homo sapien
agaaaagattggccaagcatggtgg

SEQ ID NO: 2838958 - DNA, 25 bp, Homo sapien
aagaaaagaaaagattggccaagca

SEQ ID NO: 2838959 - DNA, 25 bp, Homo sapien
aaaagaaaagattggccaagcatgg

SEQ ID NO: 2838960 - DNA, 25 bp, Homo sapien
aaagaaaagattggccaagcatggt

SEQ ID NO: 2838961 - DNA, 25 bp, Homo sapien
cacctgacgagtgaggttcccgttt

SEQ ID NO: 2838962 - DNA, 25 bp, Homo sapien
tgaggttcccgtttccccagtgagc

SEQ ID NO: 2838963 - DNA, 25 bp, Homo sapien
catgaccacctgacgagtgaggttc

SEQ ID NO: 2838964 - DNA, 25 bp, Homo sapien
ttcccatgaccacctgacgagtgag

SEQ ID NO: 2838965 - DNA, 25 bp, Homo sapien
tggtccagactcaggctaagaaatt

SEQ ID NO: 2838966 - DNA, 25 bp, Homo sapien
gtcgctggatatcaagctgcacacc

SEQ ID NO: 2838967 - DNA, 25 bp, Homo sapien
cttctgaagaaacggtcagcttgtc

SEQ ID NO: 2838968 - DNA, 25 bp, Homo sapien
acacctggtccagactcaggctaag

SEQ ID NO: 2838969 - DNA, 25 bp, Homo sapien
gaaagaagacttgtttgtgccttca

SEQ ID NO: 2838970 - DNA, 25 bp, Homo sapien
ggagacatgagagtctctgcaggct

SEQ ID NO: 2838971 - DNA, 25 bp, Homo sapien
tcagaaagaagacttgtttgtgcct

SEQ ID NO: 2838972 - DNA, 25 bp, Homo sapien
agaagacttgtttgtgccttcagaa

SEQ ID NO: 2838973 - DNA, 25 bp, Homo sapien
gatccacaaactcggaggaggtgca

SEQ ID NO: 2838974 - DNA, 25 bp, Homo sapien
acagcagagaccacttctcataatc

SEQ ID NO: 2838975 - DNA, 25 bp, Homo sapien
agaagaccaggtgattagatccaca

SEQ ID NO: 2838976 - DNA, 25 bp, Homo sapien
cagagaccacttctcataatctttg

SEQ ID NO: 2838977 - DNA, 25 bp, Homo sapien
tgcacggatgcccaggcaattggtg

SEQ ID NO: 2838978 - DNA, 25 bp, Homo sapien
ttctgccgaacatccatgagctgca

SEQ ID NO: 2838979 - DNA, 25 bp, Homo sapien
caattggtgggatgcaactgagact

SEQ ID NO: 2838980 - DNA, 25 bp, Homo sapien
cattggcctgctgcagaaggtcagt

SEQ ID NO: 2838981 - DNA, 25 bp, Homo sapien
cactatcagtgctcgaactcctgag

SEQ ID NO: 2838982 - DNA, 25 bp, Homo sapien
cactgggtttaccaacagtcctagt

SEQ ID NO: 2838983 - DNA, 25 bp, Homo sapien
tgcctacgctcaacaaggaaagctg

SEQ ID NO: 2838984 - DNA, 25 bp, Homo sapien
caattaacctgtgagcttgctcagc

SEQ ID NO: 2838985 - DNA, 25 bp, Homo sapien
ttctaaggctttcaggaaagcccca

SEQ ID NO: 2838986 - DNA, 25 bp, Homo sapien
cggtgcaccaaatcctcaatacctc

SEQ ID NO: 2838987 - DNA, 25 bp, Homo sapien
tgcaccaaatcctcaatacctcctg

SEQ ID NO: 2838988 - DNA, 25 bp, Homo sapien
catctcctcggtgcaccaaatcctc

SEQ ID NO: 2838989 - DNA, 25 bp, Homo sapien
ttgaattctgagatgagacgatgac

SEQ ID NO: 2838990 - DNA, 25 bp, Homo sapien
gtttgaattctgagatgagacgatg

SEQ ID NO: 2838991 - DNA, 25 bp, Homo sapien
tttgaattctgagatgagacgatga

SEQ ID NO: 2838992 - DNA, 25 bp, Homo sapien
ctgtttgaattctgagatgagacga

SEQ ID NO: 2838993 - DNA, 25 bp, Homo sapien
tcttcagtcacctcgatttcagcag

SEQ ID NO: 2838994 - DNA, 25 bp, Homo sapien
aatcagcttactcagcgtctgccca

SEQ ID NO: 2838995 - DNA, 25 bp, Homo sapien
ttcagcagtatagatgtagtcaatc

SEQ ID NO: 2838996 - DNA, 25 bp, Homo sapien
tgtagtcaatcagcttactcagcgt

SEQ ID NO: 2838997 - DNA, 25 bp, Homo sapien
agaagaggataaaccaggtaacatc

SEQ ID NO: 2838998 - DNA, 25 bp, Homo sapien
taaaccaggtaacatcaaggtcaca

SEQ ID NO: 2838999 - DNA, 25 bp, Homo sapien
ggtaacatcaaggtcacatcagctt

SEQ ID NO: 2839000 - DNA, 25 bp, Homo sapien
gaggataaaccaggtaacatcaagg

SEQ ID NO: 2839001 - DNA, 25 bp, Homo sapien
cccatcctgacacagttctagagct

SEQ ID NO: 2839002 - DNA, 25 bp, Homo sapien
ctccaagctgcacggactgcacatg

SEQ ID NO: 2839003 - DNA, 25 bp, Homo sapien
gctgcacggactgcacatgattcct

SEQ ID NO: 2839004 - DNA, 25 bp, Homo sapien
catcctgacacagttctagagctga

SEQ ID NO: 2839005 - DNA, 25 bp, Homo sapien
taactgccagatcaggtggacctga

SEQ ID NO: 2839006 - DNA, 25 bp, Homo sapien
accccgcctgctcccttaactgcca

SEQ ID NO: 2839007 - DNA, 25 bp, Homo sapien
gggagacattccaaaccccgcctgc

SEQ ID NO: 2839008 - DNA, 25 bp, Homo sapien
gatcaggtggacctgagaccctcca

SEQ ID NO: 2839009 - DNA, 25 bp, Homo sapien
gatttgaactttggcctaactctag

SEQ ID NO: 2839010 - DNA, 25 bp, Homo sapien
tgtttgtggtcaacccaagtgctct

SEQ ID NO: 2839011 - DNA, 25 bp, Homo sapien
aagatgagccctgtaagcccttcca

SEQ ID NO: 2839012 - DNA, 25 bp, Homo sapien
caagcggcttatcctcaacacgtaa

SEQ ID NO: 2839013 - DNA, 25 bp, Homo sapien
gcaccttaatggagaaaccactgga

SEQ ID NO: 2839014 - DNA, 25 bp, Homo sapien
cattattagacaggactactggctc

SEQ ID NO: 2839015 - DNA, 25 bp, Homo sapien
gtcctctgttgaaccacaagccaaa

SEQ ID NO: 2839016 - DNA, 25 bp, Homo sapien
ccactggaagtgaatagcagtctct

SEQ ID NO: 2839017 - DNA, 25 bp, Homo sapien
gaaatggatctaacgagagtcagcc

SEQ ID NO: 2839018 - DNA, 25 bp, Homo sapien
ttggaaccacctcaggacatttggg

SEQ ID NO: 2839019 - DNA, 25 bp, Homo sapien
catttgggcaacatgaactcggaag

SEQ ID NO: 2839020 - DNA, 25 bp, Homo sapien
gactggttggattgggacactctct

SEQ ID NO: 2839021 - DNA, 25 bp, Homo sapien
tgcttgcccacagtttctggttttt

SEQ ID NO: 2839022 - DNA, 25 bp, Homo sapien
tttgcttgcccacagtttctggttt

SEQ ID NO: 2839023 - DNA, 25 bp, Homo sapien
ttgcttgcccacagtttctggtttt

SEQ ID NO: 2839024 - DNA, 25 bp, Homo sapien
gcttgcccacagtttctggttttta

SEQ ID NO: 2839025 - DNA, 25 bp, Homo sapien
ttctatctcgacatcttctgccaca

SEQ ID NO: 2839026 - DNA, 25 bp, Homo sapien
caatcatcacgtcacacaacagctg

SEQ ID NO: 2839027 - DNA, 25 bp, Homo sapien
tgccaggaccacacggtgggcttct

SEQ ID NO: 2839028 - DNA, 25 bp, Homo sapien
catcacgtcacacaacagctgttta

SEQ ID NO: 2839029 - DNA, 25 bp, Homo sapien
acaggatgggttgcagcaaggacac

SEQ ID NO: 2839030 - DNA, 25 bp, Homo sapien
gacaggatgggttgcagcaaggaca

SEQ ID NO: 2839031 - DNA, 25 bp, Homo sapien
taagtcaggagtaagagtcactaga

SEQ ID NO: 2839032 - DNA, 25 bp, Homo sapien
ctattctaagaaggcccacagcccc

SEQ ID NO: 2839033 - DNA, 25 bp, Homo sapien
aagagtcactagagctctgccatcc

SEQ ID NO: 2839034 - DNA, 25 bp, Homo sapien
tttgcttgctggatggtaagtcagg

SEQ ID NO: 2839035 - DNA, 25 bp, Homo sapien
ggaatttatgctgagcaaggcggcc

SEQ ID NO: 2839036 - DNA, 25 bp, Homo sapien
tacagtcacaaactccaatgcccaa

SEQ ID NO: 2839037 - DNA, 25 bp, Homo sapien
aatgcccaactaaggcatatgtttg

SEQ ID NO: 2839038 - DNA, 25 bp, Homo sapien
aagccagaaacaagatactttgaga

SEQ ID NO: 2839039 - DNA, 25 bp, Homo sapien
tgcaagggcacggacaagatagaaa

SEQ ID NO: 2839040 - DNA, 25 bp, Homo sapien
tcatggacaagttccttctgcaagg

SEQ ID NO: 2839041 - DNA, 25 bp, Homo sapien
gacaagttccttctgcaagggcacg

SEQ ID NO: 2839042 - DNA, 25 bp, Homo sapien
caagggcacggacaagatagaaaaa

SEQ ID NO: 2839043 - DNA, 25 bp, Homo sapien
tcataaccttgaatgctttccccat

SEQ ID NO: 2839044 - DNA, 25 bp, Homo sapien
ctccgcagttcattcataaccttga

SEQ ID NO: 2839045 - DNA, 25 bp, Homo sapien
gcagttcattcataaccttgaatgc

SEQ ID NO: 2839046 - DNA, 25 bp, Homo sapien
attcataaccttgaatgctttcccc

SEQ ID NO: 2839047 - DNA, 25 bp, Homo sapien
gttgacagtgatcgtcctctggttc

SEQ ID NO: 2839048 - DNA, 25 bp, Homo sapien
cagggttgacagtgatcgtcctctg

SEQ ID NO: 2839049 - DNA, 25 bp, Homo sapien
tgggcagggttgacagtgatcgtcc

SEQ ID NO: 2839050 - DNA, 25 bp, Homo sapien
gacagtgatcgtcctctggttcttc

SEQ ID NO: 2839051 - DNA, 25 bp, Homo sapien
cagagtctgggagctcagcttgaca

SEQ ID NO: 2839052 - DNA, 25 bp, Homo sapien
ctgtatcagagtctgggagctcagc

SEQ ID NO: 2839053 - DNA, 25 bp, Homo sapien
atcagagtctgggagctcagcttga

SEQ ID NO: 2839054 - DNA, 25 bp, Homo sapien
gtatcagagtctgggagctcagctt

SEQ ID NO: 2839055 - DNA, 25 bp, Homo sapien
gaaagacaatgtactgggaatttct

SEQ ID NO: 2839056 - DNA, 25 bp, Homo sapien
tgttctcacacagacccaataggaa

SEQ ID NO: 2839057 - DNA, 25 bp, Homo sapien
atcttccaaagcaaagtgcattcct

SEQ ID NO: 2839058 - DNA, 25 bp, Homo sapien
cagaggcatctatcagcctgttctc

SEQ ID NO: 2839059 - DNA, 25 bp, Homo sapien
caaagtgtgttcaaagtactggcag

SEQ ID NO: 2839060 - DNA, 25 bp, Homo sapien
actcgtcccagtgatagcaggttga

SEQ ID NO: 2839061 - DNA, 25 bp, Homo sapien
taaacaagcatttactggaggctac

SEQ ID NO: 2839062 - DNA, 25 bp, Homo sapien
tcataggagctacagaagcacaggg

SEQ ID NO: 2839063 - DNA, 25 bp, Homo sapien
atctgtcatgccatcttaggtcaca

SEQ ID NO: 2839064 - DNA, 25 bp, Homo sapien
gtgccaggccctgatactgatattt

SEQ ID NO: 2839065 - DNA, 25 bp, Homo sapien
tgacttactaacttattccactggt

SEQ ID NO: 2839066 - DNA, 25 bp, Homo sapien
tctgatatctgacagggaaagtccc

SEQ ID NO: 2839067 - DNA, 25 bp, Homo sapien
tcctccatgaaaccctcgggataca

SEQ ID NO: 2839068 - DNA, 25 bp, Homo sapien
cctcctccatgaaaccctcgggata

SEQ ID NO: 2839069 - DNA, 25 bp, Homo sapien
ccaattaaactttacctcctccatg

SEQ ID NO: 2839070 - DNA, 25 bp, Homo sapien
ctgttctttgaggaccaattaaact

SEQ ID NO: 2839071 - DNA, 25 bp, Homo sapien
aagccatagacatcagccatcccag

SEQ ID NO: 2839072 - DNA, 25 bp, Homo sapien
ctgggtgacctggtgaacattggaa

SEQ ID NO: 2839073 - DNA, 25 bp, Homo sapien
tacaagaacatgtgcaacctggtgt

SEQ ID NO: 2839074 - DNA, 25 bp, Homo sapien
gaagctgctcggtttggatttcttg

SEQ ID NO: 2839075 - DNA, 25 bp, Homo sapien
tcttgattctcccagcagaccagtg

SEQ ID NO: 2839076 - DNA, 25 bp, Homo sapien
gacttactcgcagcagcttctaccg

SEQ ID NO: 2839077 - DNA, 25 bp, Homo sapien
ccttggtctcctaggaacggcggca

SEQ ID NO: 2839078 - DNA, 25 bp, Homo sapien
gaccagtgggaaatctgatcagcaa

SEQ ID NO: 2839079 - DNA, 25 bp, Homo sapien
ttaaatttcttcactactacaaagc

SEQ ID NO: 2839080 - DNA, 25 bp, Homo sapien
taaatttcttcactactacaaagcc

SEQ ID NO: 2839081 - DNA, 25 bp, Homo sapien
tacatattcgccatacaggaaggtg

SEQ ID NO: 2839082 - DNA, 25 bp, Homo sapien
ccacgtttacatattcgccatacag

SEQ ID NO: 2839083 - DNA, 25 bp, Homo sapien
cgtttacatattcgccatacaggaa

SEQ ID NO: 2839084 - DNA, 25 bp, Homo sapien
tattcgccatacaggaaggtgtgga

SEQ ID NO: 2839085 - DNA, 25 bp, Homo sapien
gaacagtctaggtacagtgaaccac

SEQ ID NO: 2839086 - DNA, 25 bp, Homo sapien
taaatccacgtgttcagataagggc

SEQ ID NO: 2839087 - DNA, 25 bp, Homo sapien
tagggactcagtatgcaaggttttc

SEQ ID NO: 2839088 - DNA, 25 bp, Homo sapien
gataagggccaaccatgcaagtagg

SEQ ID NO: 2839089 - DNA, 25 bp, Homo sapien
tctttatttgtcagcctcccaggaa

SEQ ID NO: 2839090 - DNA, 25 bp, Homo sapien
aaagacctagagctataagagggcc

SEQ ID NO: 2839091 - DNA, 25 bp, Homo sapien
taggagacagttacgagaagccaga

SEQ ID NO: 2839092 - DNA, 25 bp, Homo sapien
aactatttacaagggtatgggcaca

SEQ ID NO: 2839093 - DNA, 25 bp, Homo sapien
aatccgtgtagtctagatgcagttc

SEQ ID NO: 2839094 - DNA, 25 bp, Homo sapien
cgtgtagtctagatgcagttctgct

SEQ ID NO: 2839095 - DNA, 25 bp, Homo sapien
tgggtaaaatccgtgtagtctagat

SEQ ID NO: 2839096 - DNA, 25 bp, Homo sapien
taaaatccgtgtagtctagatgcag

SEQ ID NO: 2839097 - DNA, 25 bp, Homo sapien
tataccatgaacagaacaggttgcc

SEQ ID NO: 2839098 - DNA, 25 bp, Homo sapien
gcatataaactgacaagaggaaccc

SEQ ID NO: 2839099 - DNA, 25 bp, Homo sapien
gaagccactatattcccatgttggg

SEQ ID NO: 2839100 - DNA, 25 bp, Homo sapien
acatccaccccgtttgtcatagagg

SEQ ID NO: 2839101 - DNA, 25 bp, Homo sapien
tgagccttcaacgtcaacatgtaag

SEQ ID NO: 2839102 - DNA, 25 bp, Homo sapien
taacatcaagttaagcatactagat

SEQ ID NO: 2839103 - DNA, 25 bp, Homo sapien
gcttcttagtatagctttgagcctt

SEQ ID NO: 2839104 - DNA, 25 bp, Homo sapien
tagattaaaaggtactctgaaccca

SEQ ID NO: 2839105 - DNA, 25 bp, Homo sapien
taattcaacacgcaactagcagggc

SEQ ID NO: 2839106 - DNA, 25 bp, Homo sapien
tagatggtgctacaaagatcgggaa

SEQ ID NO: 2839107 - DNA, 25 bp, Homo sapien
gcttagtacaagagatggatgcaca

SEQ ID NO: 2839108 - DNA, 25 bp, Homo sapien
gaaagggatttccatgaggccaaca

SEQ ID NO: 2839109 - DNA, 25 bp, Homo sapien
caaatttcaggcatgggatccaagt

SEQ ID NO: 2839110 - DNA, 25 bp, Homo sapien
gcttaggagttgaccccacttgggc

SEQ ID NO: 2839111 - DNA, 25 bp, Homo sapien
cacccaggttttgctacagaatcag

SEQ ID NO: 2839112 - DNA, 25 bp, Homo sapien
tttcatagaaaacgctgtagccagg

SEQ ID NO: 2839113 - DNA, 25 bp, Homo sapien
ccgccatagccgcctctgtaaggtc

SEQ ID NO: 2839114 - DNA, 25 bp, Homo sapien
accgccatagccgcctctgtaaggt

SEQ ID NO: 2839115 - DNA, 25 bp, Homo sapien
cgccatagccgcctctgtaaggtcc

SEQ ID NO: 2839116 - DNA, 25 bp, Homo sapien
tattactgcgaccgccccagctact

SEQ ID NO: 2839117 - DNA, 25 bp, Homo sapien
gatgctggctgtagctgccgaagcc

SEQ ID NO: 2839118 - DNA, 25 bp, Homo sapien
gcccataggaggactgatgctggct

SEQ ID NO: 2839119 - DNA, 25 bp, Homo sapien
gcctccgtaggcattgtagccgccg

SEQ ID NO: 2839120 - DNA, 25 bp, Homo sapien
gccgaagccgttaccgtagtcgctc

SEQ ID NO: 2839121 - DNA, 25 bp, Homo sapien
ccttggaaaggccgttctggtctcg

SEQ ID NO: 2839122 - DNA, 25 bp, Homo sapien
cgccgcccttggaaaggccgttctg

SEQ ID NO: 2839123 - DNA, 25 bp, Homo sapien
tggaaaggccgttctggtctcgacc

SEQ ID NO: 2839124 - DNA, 25 bp, Homo sapien
cgggaggatcgggagccgcctccac

SEQ ID NO: 2839125 - DNA, 25 bp, Homo sapien
gagtagatatcctccttggggactg

SEQ ID NO: 2839126 - DNA, 25 bp, Homo sapien
cggagtagatatcctccttggggac

SEQ ID NO: 2839127 - DNA, 25 bp, Homo sapien
gatatcctccttggggactgctttc

SEQ ID NO: 2839128 - DNA, 25 bp, Homo sapien
gtagatatcctccttggggactgct

SEQ ID NO: 2839129 - DNA, 25 bp, Homo sapien
cgagaagtgctcgatcaggtcgccc

SEQ ID NO: 2839130 - DNA, 25 bp, Homo sapien
tccacggtgccaaactgcgagaagt

SEQ ID NO: 2839131 - DNA, 25 bp, Homo sapien
gaaatacacgaagccgaatccacgc

SEQ ID NO: 2839132 - DNA, 25 bp, Homo sapien
tccacattggagtaggtcacgaagc

SEQ ID NO: 2839133 - DNA, 25 bp, Homo sapien
ggccgccgatgaacagcttacacaa

SEQ ID NO: 2839134 - DNA, 25 bp, Homo sapien
actcactcgtctgcacattgaggcc

SEQ ID NO: 2839135 - DNA, 25 bp, Homo sapien
tctgcacattgaggccgccgatgaa

SEQ ID NO: 2839136 - DNA, 25 bp, Homo sapien
aaagtggccgcgcaggcccgactca

SEQ ID NO: 2839137 - DNA, 25 bp, Homo sapien
ggttaaggcctctacacagcttggg

SEQ ID NO: 2839138 - DNA, 25 bp, Homo sapien
tgcgagctccgaggtttcgccgtcg

SEQ ID NO: 2839139 - DNA, 25 bp, Homo sapien
cagcttgggcccagccgttgctgga

SEQ ID NO: 2839140 - DNA, 25 bp, Homo sapien
tatctgggcaccacacaaagaggcc

SEQ ID NO: 2839141 - DNA, 25 bp, Homo sapien
ggcctcccaaaagtagaatgttagc

SEQ ID NO: 2839142 - DNA, 25 bp, Homo sapien
taaagatgttgggttagacgaatgt

SEQ ID NO: 2839143 - DNA, 25 bp, Homo sapien
cctcccaaaagtagaatgttagctt

SEQ ID NO: 2839144 - DNA, 25 bp, Homo sapien
tgggttagacgaatgttttacagag

SEQ ID NO: 2839145 - DNA, 25 bp, Homo sapien
cagaagtgacctctttgacctgagt

SEQ ID NO: 2839146 - DNA, 25 bp, Homo sapien
ggtgacaattttcggctacccggca

SEQ ID NO: 2839147 - DNA, 25 bp, Homo sapien
gagttgcgcaaacagacattgagtt

SEQ ID NO: 2839148 - DNA, 25 bp, Homo sapien
tatacacatctcacagagttgcgca

SEQ ID NO: 2839149 - DNA, 25 bp, Homo sapien
tggtactagccgaaaaaggaacatg

SEQ ID NO: 2839150 - DNA, 25 bp, Homo sapien
cattaatcctaacaattgtgcccca

SEQ ID NO: 2839151 - DNA, 25 bp, Homo sapien
gcaggaacaattcttcaccaacggt

SEQ ID NO: 2839152 - DNA, 25 bp, Homo sapien
cagcctctcctaaaagttcatgata

SEQ ID NO: 2839153 - DNA, 25 bp, Homo sapien
gcacatacccatgcacagactcata

SEQ ID NO: 2839154 - DNA, 25 bp, Homo sapien
taattaagcctacaagaaggtacag

SEQ ID NO: 2839155 - DNA, 25 bp, Homo sapien
tacacaactccagtaataacagggt

SEQ ID NO: 2839156 - DNA, 25 bp, Homo sapien
taacagggtttgaattaccagccag

SEQ ID NO: 2839157 - DNA, 25 bp, Homo sapien
cataatggttcagggattctatcca

SEQ ID NO: 2839158 - DNA, 25 bp, Homo sapien
tcagggattctatccaggtggtaga

SEQ ID NO: 2839159 - DNA, 25 bp, Homo sapien
tatggatgactgttgttgcaaattt

SEQ ID NO: 2839160 - DNA, 25 bp, Homo sapien
gaaaatatgccataatggttcaggg

SEQ ID NO: 2839161 - DNA, 25 bp, Homo sapien
tattgtgaatagttgtgcggccact

SEQ ID NO: 2839162 - DNA, 25 bp, Homo sapien
aatgcctatcaactaatagatatgg

SEQ ID NO: 2839163 - DNA, 25 bp, Homo sapien
taatgggcacagagttccacttagg

SEQ ID NO: 2839164 - DNA, 25 bp, Homo sapien
cattcagttaccatatgagctagca

SEQ ID NO: 2839165 - DNA, 25 bp, Homo sapien
gactacaggcgcacaccatcacacc

SEQ ID NO: 2839166 - DNA, 25 bp, Homo sapien
ctacaggcgcacaccatcacacctg

SEQ ID NO: 2839167 - DNA, 25 bp, Homo sapien
tggtacgatctcggcactgcaagct

SEQ ID NO: 2839168 - DNA, 25 bp, Homo sapien
tctccaggttagagtgcagtggtac

SEQ ID NO: 2839169 - DNA, 25 bp, Homo sapien
ccacaaatgaccatgcaagtcctga

SEQ ID NO: 2839170 - DNA, 25 bp, Homo sapien
gatatacagaagtccctcgctctgg

SEQ ID NO: 2839171 - DNA, 25 bp, Homo sapien
atacagaatccttgaatgaggctca

SEQ ID NO: 2839172 - DNA, 25 bp, Homo sapien
caattgggaacgagtcatcaggtga

SEQ ID NO: 2839173 - DNA, 25 bp, Homo sapien
tctgtcccgcctagggtatgaatca

SEQ ID NO: 2839174 - DNA, 25 bp, Homo sapien
tatccatgctgcatatgcaacccat

SEQ ID NO: 2839175 - DNA, 25 bp, Homo sapien
tatgaatcaccgctttgtccagtat

SEQ ID NO: 2839176 - DNA, 25 bp, Homo sapien
tatccctcaatgataagggaggact

SEQ ID NO: 2839177 - DNA, 25 bp, Homo sapien
taatgttgatgagctggcagtgtct

SEQ ID NO: 2839178 - DNA, 25 bp, Homo sapien
ttttgttatgctgcccatgcttgaa

SEQ ID NO: 2839179 - DNA, 25 bp, Homo sapien
tattgccagtaagtatccaaaggat

SEQ ID NO: 2839180 - DNA, 25 bp, Homo sapien
tatatcaaaacgtcatagtgtacac

SEQ ID NO: 2839181 - DNA, 25 bp, Homo sapien
tctctatgtgtacctaggtgagcaa

SEQ ID NO: 2839182 - DNA, 25 bp, Homo sapien
gaagtattaatcagtaggcttccct

SEQ ID NO: 2839183 - DNA, 25 bp, Homo sapien
tttcctggtgattctggagaaaaca

SEQ ID NO: 2839184 - DNA, 25 bp, Homo sapien
cccaaccttgatgacaaagaagtgt

SEQ ID NO: 2839185 - DNA, 25 bp, Homo sapien
ctttatacccataagtgagaatata

SEQ ID NO: 2839186 - DNA, 25 bp, Homo sapien
agaatatattgagagaagaggaagc

SEQ ID NO: 2839187 - DNA, 25 bp, Homo sapien
atatattgagagaagaggaagcatc

SEQ ID NO: 2839188 - DNA, 25 bp, Homo sapien
taagtgagaatatattgagagaaga

SEQ ID NO: 2839189 - DNA, 25 bp, Homo sapien
cctgaagccacccatgcaataaatg

SEQ ID NO: 2839190 - DNA, 25 bp, Homo sapien
aagaggggagtatttcaagactgat

SEQ ID NO: 2839191 - DNA, 25 bp, Homo sapien
gaagaggggagtatttcaagactga

SEQ ID NO: 2839192 - DNA, 25 bp, Homo sapien
agaagaggggagtatttcaagactg

SEQ ID NO: 2839193 - DNA, 25 bp, Homo sapien
gtttctgtgcccaaatcaagctcct

SEQ ID NO: 2839194 - DNA, 25 bp, Homo sapien
ctcctgtttctgtgcccaaatcaag

SEQ ID NO: 2839195 - DNA, 25 bp, Homo sapien
tgtttctgtgcccaaatcaagctcc

SEQ ID NO: 2839196 - DNA, 25 bp, Homo sapien
tcctgtttctgtgcccaaatcaagc

SEQ ID NO: 2839197 - DNA, 25 bp, Homo sapien
tgtgacccaaacaactgtgagctat

SEQ ID NO: 2839198 - DNA, 25 bp, Homo sapien
gaaagctggaactgcatcaactaga

SEQ ID NO: 2839199 - DNA, 25 bp, Homo sapien
cagtttatgctccttcttgccagag

SEQ ID NO: 2839200 - DNA, 25 bp, Homo sapien
tcctgttgggaagatgagcacttct

SEQ ID NO: 2839201 - DNA, 25 bp, Homo sapien
ccaatctcggtgagtgggagactag

SEQ ID NO: 2839202 - DNA, 25 bp, Homo sapien
gaggccaggtagaatctgctgctga

SEQ ID NO: 2839203 - DNA, 25 bp, Homo sapien
ggccaggtagaatctgctgctgact

SEQ ID NO: 2839204 - DNA, 25 bp, Homo sapien
gaagccagtgccaatctcggtgagt

SEQ ID NO: 2839205 - DNA, 25 bp, Homo sapien
tcactttgtaccttcggtactctga

SEQ ID NO: 2839206 - DNA, 25 bp, Homo sapien
ctttgtaccttcggtactctgaatt

SEQ ID NO: 2839207 - DNA, 25 bp, Homo sapien
cactttgtaccttcggtactctgaa

SEQ ID NO: 2839208 - DNA, 25 bp, Homo sapien
actttgtaccttcggtactctgaat

SEQ ID NO: 2839209 - DNA, 25 bp, Homo sapien
agcatcagactgggtgggataacta

SEQ ID NO: 2839210 - DNA, 25 bp, Homo sapien
aagcatcagactgggtgggataact

SEQ ID NO: 2839211 - DNA, 25 bp, Homo sapien
caagcatcagactgggtgggataac

SEQ ID NO: 2839212 - DNA, 25 bp, Homo sapien
ggttgcagtaacatatggtcgtgcc

SEQ ID NO: 2839213 - DNA, 25 bp, Homo sapien
ggatcacccatatgaacagctactg

SEQ ID NO: 2839214 - DNA, 25 bp, Homo sapien
cacaatatctggtgctttatggaca

SEQ ID NO: 2839215 - DNA, 25 bp, Homo sapien
taaaggttacctagtatggcatctg

SEQ ID NO: 2839216 - DNA, 25 bp, Homo sapien
catttacgtgagacatgaagccggc

SEQ ID NO: 2839217 - DNA, 25 bp, Homo sapien
tagggttacactcagcaaaggttac

SEQ ID NO: 2839218 - DNA, 25 bp, Homo sapien
ttcaggataggtcacacgtagggcc

SEQ ID NO: 2839219 - DNA, 25 bp, Homo sapien
tgaagccggctagcgtaacgcatca

SEQ ID NO: 2839220 - DNA, 25 bp, Homo sapien
taaccagcttcaatcagccagtggc

SEQ ID NO: 2839221 - DNA, 25 bp, Homo sapien
cacatattttgctagccctatttca

SEQ ID NO: 2839222 - DNA, 25 bp, Homo sapien
gcccaagttccctaattcagggctc

SEQ ID NO: 2839223 - DNA, 25 bp, Homo sapien
tcagggctcttaagaaattacaaca

SEQ ID NO: 2839224 - DNA, 25 bp, Homo sapien
tgtggtttcaataacccacggtcaa

SEQ ID NO: 2839225 - DNA, 25 bp, Homo sapien
tcgttatccagtttcactttctgtg

SEQ ID NO: 2839226 - DNA, 25 bp, Homo sapien
gtttcaataacccacggtcaactgc

SEQ ID NO: 2839227 - DNA, 25 bp, Homo sapien
tcaataacccacggtcaactgcagt

SEQ ID NO: 2839228 - DNA, 25 bp, Homo sapien
tcaagacatccctacaaccagaggt

SEQ ID NO: 2839229 - DNA, 25 bp, Homo sapien
cagagagaacgtgcagatagccaac

SEQ ID NO: 2839230 - DNA, 25 bp, Homo sapien
cagttggtcatgtttgaatgcggaa

SEQ ID NO: 2839231 - DNA, 25 bp, Homo sapien
tagccaactcagatgactttcggat

SEQ ID NO: 2839232 - DNA, 25 bp, Homo sapien
taggccaatatcaacatgtacaaga

SEQ ID NO: 2839233 - DNA, 25 bp, Homo sapien
cactaattattaacaatgtaggcca

SEQ ID NO: 2839234 - DNA, 25 bp, Homo sapien
ggatcacctgcgtaaatgtctgcat

SEQ ID NO: 2839235 - DNA, 25 bp, Homo sapien
tgtacaagacagttgccattctgaa

SEQ ID NO: 2839236 - DNA, 25 bp, Homo sapien
tgctaaaaatcagcccatatgaacc

SEQ ID NO: 2839237 - DNA, 25 bp, Homo sapien
caatcactggacaaaagagccatta

SEQ ID NO: 2839238 - DNA, 25 bp, Homo sapien
tttgtgatatttaccgatttccctg

SEQ ID NO: 2839239 - DNA, 25 bp, Homo sapien
aagaaactgtcattactttagaagt

SEQ ID NO: 2839240 - DNA, 25 bp, Homo sapien
tcttcataatggaaatcaagtgggc

SEQ ID NO: 2839241 - DNA, 25 bp, Homo sapien
gatctaggtccatatatcaacaagg

SEQ ID NO: 2839242 - DNA, 25 bp, Homo sapien
taaggaagttctagctcacagatct

SEQ ID NO: 2839243 - DNA, 25 bp, Homo sapien
tgctaagcccataccaagaactcct

SEQ ID NO: 2839244 - DNA, 25 bp, Homo sapien
ttgtgccacgagctaaaaagagaag

SEQ ID NO: 2839245 - DNA, 25 bp, Homo sapien
cacttttgagcagcaggcataatac

SEQ ID NO: 2839246 - DNA, 25 bp, Homo sapien
cgtggagtccatcaggattttgtgc

SEQ ID NO: 2839247 - DNA, 25 bp, Homo sapien
ttccagtctaatatgtgtttactgc

SEQ ID NO: 2839248 - DNA, 25 bp, Homo sapien
tctaggtgagtggactgccagctcc

SEQ ID NO: 2839249 - DNA, 25 bp, Homo sapien
tggtaagcctccaaagagacccttg

SEQ ID NO: 2839250 - DNA, 25 bp, Homo sapien
aatcgcaaacccactcagatacggg

SEQ ID NO: 2839251 - DNA, 25 bp, Homo sapien
aaattacgcattagatcaggaagcc

SEQ ID NO: 2839252 - DNA, 25 bp, Homo sapien
ggctgtggcaggagacttccttgaa

SEQ ID NO: 2839253 - DNA, 25 bp, Homo sapien
ggaggcggaggttgcagtgaaccaa

SEQ ID NO: 2839254 - DNA, 25 bp, Homo sapien
ccagcctgggcaaaagagcgagact

SEQ ID NO: 2839255 - DNA, 25 bp, Homo sapien
accaagatcacgccactgcgctcca

SEQ ID NO: 2839256 - DNA, 25 bp, Homo sapien
aatttgacagcccggtagtcccagc

SEQ ID NO: 2839257 - DNA, 25 bp, Homo sapien
attctcatagttaatgtaaatttga

SEQ ID NO: 2839258 - DNA, 25 bp, Homo sapien
tgtaaatttgacagcccggtagtcc

SEQ ID NO: 2839259 - DNA, 25 bp, Homo sapien
aatgtaaatttgacagcccggtagt

SEQ ID NO: 2839260 - DNA, 25 bp, Homo sapien
tcctggtcttacatcctggagggct

SEQ ID NO: 2839261 - DNA, 25 bp, Homo sapien
ggactcctgtgtcggcctgaccttt

SEQ ID NO: 2839262 - DNA, 25 bp, Homo sapien
agcaacagctctcggttaataacca

SEQ ID NO: 2839263 - DNA, 25 bp, Homo sapien
cagcgtagggtcacggttaggaatt

SEQ ID NO: 2839264 - DNA, 25 bp, Homo sapien
ttattcccagaagttggccctccgc

SEQ ID NO: 2839265 - DNA, 25 bp, Homo sapien
tacgatttttaagcccacagccagg

SEQ ID NO: 2839266 - DNA, 25 bp, Homo sapien
aaaggtattcgagagagagaagccc

SEQ ID NO: 2839267 - DNA, 25 bp, Homo sapien
gagaagcccgtgataatgaatgact

SEQ ID NO: 2839268 - DNA, 25 bp, Homo sapien
accaccacgcttggttgattacatt

SEQ ID NO: 2839269 - DNA, 25 bp, Homo sapien
tcactgatggctaaatatctgtcac

SEQ ID NO: 2839270 - DNA, 25 bp, Homo sapien
ctgatggctaaatatctgtcacatt

SEQ ID NO: 2839271 - DNA, 25 bp, Homo sapien
cactgatggctaaatatctgtcaca

SEQ ID NO: 2839272 - DNA, 25 bp, Homo sapien
tgatagccacgtaaaatgagtttgg

SEQ ID NO: 2839273 - DNA, 25 bp, Homo sapien
ggtttcaaggtaatgatagccacgt

SEQ ID NO: 2839274 - DNA, 25 bp, Homo sapien
tctggcttaggtttcaaggtaatga

SEQ ID NO: 2839275 - DNA, 25 bp, Homo sapien
gtctttgtctggcttaggtttcaag

SEQ ID NO: 2839276 - DNA, 25 bp, Homo sapien
tgtgatgagctgtcaagattctctg

SEQ ID NO: 2839277 - DNA, 25 bp, Homo sapien
atgagctgtcaagattctctgtctt

SEQ ID NO: 2839278 - DNA, 25 bp, Homo sapien
tgatgagctgtcaagattctctgtc

SEQ ID NO: 2839279 - DNA, 25 bp, Homo sapien
gatgagctgtcaagattctctgtct

SEQ ID NO: 2839280 - DNA, 25 bp, Homo sapien
tcccagccatgaggctaatgagtag

SEQ ID NO: 2839281 - DNA, 25 bp, Homo sapien
caaacatgtgcatggatcccagcca

SEQ ID NO: 2839282 - DNA, 25 bp, Homo sapien
gacatagtatttattccccacatgg

SEQ ID NO: 2839283 - DNA, 25 bp, Homo sapien
tcccataagctacatgcaagctgct

SEQ ID NO: 2839284 - DNA, 25 bp, Homo sapien
cagggtaggcgtatcactgtcataa

SEQ ID NO: 2839285 - DNA, 25 bp, Homo sapien
ccagtagttcagtcagtaggtagag

SEQ ID NO: 2839286 - DNA, 25 bp, Homo sapien
tgatgctatcaagtgcgtcaggtac

SEQ ID NO: 2839287 - DNA, 25 bp, Homo sapien
gcttctagttcaggcggcaggtctc

SEQ ID NO: 2839288 - DNA, 25 bp, Homo sapien
aaaacaaacatacatttacaatgac

SEQ ID NO: 2839289 - DNA, 25 bp, Homo sapien
gcccagtggaaaaacaaacatacat

SEQ ID NO: 2839290 - DNA, 25 bp, Homo sapien
gtggaaaaacaaacatacatttaca

SEQ ID NO: 2839291 - DNA, 25 bp, Homo sapien
gaaaaacaaacatacatttacaatg

SEQ ID NO: 2839292 - DNA, 25 bp, Homo sapien
gaaaaaggcattgcacacacgggtg

SEQ ID NO: 2839293 - DNA, 25 bp, Homo sapien
tgaaaatgcagtggtagagcccttg

SEQ ID NO: 2839294 - DNA, 25 bp, Homo sapien
caactgttatcttcatccgggagct

SEQ ID NO: 2839295 - DNA, 25 bp, Homo sapien
taactgaagtcccataggcagcatg

SEQ ID NO: 2839296 - DNA, 25 bp, Homo sapien
agaatcttgtttgcttataagaact

SEQ ID NO: 2839297 - DNA, 25 bp, Homo sapien
cactggaacacgatcctctttctgg

SEQ ID NO: 2839298 - DNA, 25 bp, Homo sapien
aagaagcctaagcttggctttaatt

SEQ ID NO: 2839299 - DNA, 25 bp, Homo sapien
tctctgtactcctcaagcactggaa

SEQ ID NO: 2839300 - DNA, 25 bp, Homo sapien
taaggataccactcctgtcatggga

SEQ ID NO: 2839301 - DNA, 25 bp, Homo sapien
caaggctccctaggacaatccgaaa

SEQ ID NO: 2839302 - DNA, 25 bp, Homo sapien
cactgttagacaccttggaaacggg

SEQ ID NO: 2839303 - DNA, 25 bp, Homo sapien
taggagactcacaaagcaaagggaa

SEQ ID NO: 2839304 - DNA, 25 bp, Homo sapien
ccaaagttgttccaataattcaggc

SEQ ID NO: 2839305 - DNA, 25 bp, Homo sapien
caaattcccgcaacgttttgcgtag

SEQ ID NO: 2839306 - DNA, 25 bp, Homo sapien
tccaaagttgttccaataattcagg

SEQ ID NO: 2839307 - DNA, 25 bp, Homo sapien
tcttcaaattcccgcaacgttttgc

SEQ ID NO: 2839308 - DNA, 25 bp, Homo sapien
taagagaggttctatttctggctgc

SEQ ID NO: 2839309 - DNA, 25 bp, Homo sapien
gtctaccaatgcctaagctccactg

SEQ ID NO: 2839310 - DNA, 25 bp, Homo sapien
ggtaaaatactgaagggcacacttg

SEQ ID NO: 2839311 - DNA, 25 bp, Homo sapien
gatcaactcgcaactagttcctgta

SEQ ID NO: 2839312 - DNA, 25 bp, Homo sapien
ttcaacatatcacctaactcagagg

SEQ ID NO: 2839313 - DNA, 25 bp, Homo sapien
cttgacaatcggagatccagagcca

SEQ ID NO: 2839314 - DNA, 25 bp, Homo sapien
tctaatgaagactgtacctgtactg

SEQ ID NO: 2839315 - DNA, 25 bp, Homo sapien
tagaagctgctcgagaacttgacaa

SEQ ID NO: 2839316 - DNA, 25 bp, Homo sapien
tgaccccttcgcttggtggatggag

SEQ ID NO: 2839317 - DNA, 25 bp, Homo sapien
ggctgtaacatctgaccccttcgct

SEQ ID NO: 2839318 - DNA, 25 bp, Homo sapien
ccccttcgcttggtggatggagatc

SEQ ID NO: 2839319 - DNA, 25 bp, Homo sapien
tccttctatgattggctgtaacatc

SEQ ID NO: 2839320 - DNA, 25 bp, Homo sapien
cggaacgtttcattacctcagaaga

SEQ ID NO: 2839321 - DNA, 25 bp, Homo sapien
tattttgagtgtacgggttaccaca

SEQ ID NO: 2839322 - DNA, 25 bp, Homo sapien
aaagaacaaaatcggcagggcacgg

SEQ ID NO: 2839323 - DNA, 25 bp, Homo sapien
ataacacggatgtaggtggaggcca

SEQ ID NO: 2839324 - DNA, 25 bp, Homo sapien
acaggagtgatgctagctcttgtca

SEQ ID NO: 2839325 - DNA, 25 bp, Homo sapien
ggacaggagtgatgctagctcttgt

SEQ ID NO: 2839326 - DNA, 25 bp, Homo sapien
aggagtgatgctagctcttgtcagc

SEQ ID NO: 2839327 - DNA, 25 bp, Homo sapien
aaggacaggagtgatgctagctctt

SEQ ID NO: 2839328 - DNA, 25 bp, Homo sapien
catagagaggtttaacaatgtgcct

SEQ ID NO: 2839329 - DNA, 25 bp, Homo sapien
tcatagagaggtttaacaatgtgcc

SEQ ID NO: 2839330 - DNA, 25 bp, Homo sapien
atctatcatagagaggtttaacaat

SEQ ID NO: 2839331 - DNA, 25 bp, Homo sapien
tatcatagagaggtttaacaatgtg

SEQ ID NO: 2839332 - DNA, 25 bp, Homo sapien
aacaatgacttattcgcccaatttc

SEQ ID NO: 2839333 - DNA, 25 bp, Homo sapien
aaaaagaaattgtctagtcatcaca

SEQ ID NO: 2839334 - DNA, 25 bp, Homo sapien
caatgacttattcgcccaatttcaa

SEQ ID NO: 2839335 - DNA, 25 bp, Homo sapien
tcatcacaaatctaaaatgtccaaa

SEQ ID NO: 2839336 - DNA, 25 bp, Homo sapien
atgttgactttcatagtaaagaaga

SEQ ID NO: 2839337 - DNA, 25 bp, Homo sapien
tcttctaccaaatgatctttggtca

SEQ ID NO: 2839338 - DNA, 25 bp, Homo sapien
gttgactttcatagtaaagaagact

SEQ ID NO: 2839339 - DNA, 25 bp, Homo sapien
ttctcttctaccaaatgatctttgg

SEQ ID NO: 2839340 - DNA, 25 bp, Homo sapien
gcaccgcgcctggccaaaagaaatt

SEQ ID NO: 2839341 - DNA, 25 bp, Homo sapien
accacaacctgctaatttctttgtg

SEQ ID NO: 2839342 - DNA, 25 bp, Homo sapien
ccaccacaacctgctaatttctttg

SEQ ID NO: 2839343 - DNA, 25 bp, Homo sapien
caacctgctaatttctttgtgtatt

SEQ ID NO: 2839344 - DNA, 25 bp, Homo sapien
taagaataagttcaagggttgcttc

SEQ ID NO: 2839345 - DNA, 25 bp, Homo sapien
tctgaggtacaaattctccatcaga

SEQ ID NO: 2839346 - DNA, 25 bp, Homo sapien
tacgtggacgtgtctgaggtacaaa

SEQ ID NO: 2839347 - DNA, 25 bp, Homo sapien
gaagtgtgttactacgtggacgtgt

SEQ ID NO: 2839348 - DNA, 25 bp, Homo sapien
agagccaaagctttttggaagtgtg

SEQ ID NO: 2839349 - DNA, 25 bp, Homo sapien
ttggcagcaatatcactgtaggagg

SEQ ID NO: 2839350 - DNA, 25 bp, Homo sapien
cctttggattggcagcaatatcact

SEQ ID NO: 2839351 - DNA, 25 bp, Homo sapien
tttaatacctttggattggcagcaa

SEQ ID NO: 2839352 - DNA, 25 bp, Homo sapien
tgcttccgcagttttgtaagctctg

SEQ ID NO: 2839353 - DNA, 25 bp, Homo sapien
gaccagctgataaggtgttctgtcc

SEQ ID NO: 2839354 - DNA, 25 bp, Homo sapien
ccagctgataaggtgttctgtcctc

SEQ ID NO: 2839355 - DNA, 25 bp, Homo sapien
ttcttgaccagctgataaggtgttc

SEQ ID NO: 2839356 - DNA, 25 bp, Homo sapien
catcttttgaactaaaggatgatct

SEQ ID NO: 2839357 - DNA, 25 bp, Homo sapien
agacagtgctttagatgaggaatcc

SEQ ID NO: 2839358 - DNA, 25 bp, Homo sapien
taaactgcggtgtgataatactgga

SEQ ID NO: 2839359 - DNA, 25 bp, Homo sapien
gagtcctcctgccaagacttaaaag

SEQ ID NO: 2839360 - DNA, 25 bp, Homo sapien
ggctttgaccaaaatctaaactgcg

SEQ ID NO: 2839361 - DNA, 25 bp, Homo sapien
tgatgtcaggtgtatgacctgtccc

SEQ ID NO: 2839362 - DNA, 25 bp, Homo sapien
aaatacaacattaagcacaggaggg

SEQ ID NO: 2839363 - DNA, 25 bp, Homo sapien
tgcagttatcctgtatgccctcaaa

SEQ ID NO: 2839364 - DNA, 25 bp, Homo sapien
ggaggagctaattcacctgacagca

SEQ ID NO: 2839365 - DNA, 25 bp, Homo sapien
tcaatgaggggaaaagtgatagggc

SEQ ID NO: 2839366 - DNA, 25 bp, Homo sapien
aatcaatgaggggaaaagtgatagg

SEQ ID NO: 2839367 - DNA, 25 bp, Homo sapien
aatgaggggaaaagtgatagggcat

SEQ ID NO: 2839368 - DNA, 25 bp, Homo sapien
caatgaggggaaaagtgatagggca

SEQ ID NO: 2839369 - DNA, 25 bp, Homo sapien
ttccccttgaacaccaacactctga

SEQ ID NO: 2839370 - DNA, 25 bp, Homo sapien
acttctgattcagtgttggcattca

SEQ ID NO: 2839371 - DNA, 25 bp, Homo sapien
aacattcttcagatctaaatgtgga

SEQ ID NO: 2839372 - DNA, 25 bp, Homo sapien
tgtggaatactgacacacgctgctt

SEQ ID NO: 2839373 - DNA, 25 bp, Homo sapien
caatttatcactgtcaaataacaaa

SEQ ID NO: 2839374 - DNA, 25 bp, Homo sapien
cagaatcaagtgtgacaatttatca

SEQ ID NO: 2839375 - DNA, 25 bp, Homo sapien
tcaagtgtgacaatttatcactgtc

SEQ ID NO: 2839376 - DNA, 25 bp, Homo sapien
agtgtgacaatttatcactgtcaaa

SEQ ID NO: 2839377 - DNA, 25 bp, Homo sapien
agcccatagctccaatacttcctgg

SEQ ID NO: 2839378 - DNA, 25 bp, Homo sapien
taaatgggtccttattgttctacca

SEQ ID NO: 2839379 - DNA, 25 bp, Homo sapien
cagatgtcactattctgggggtgcc

SEQ ID NO: 2839380 - DNA, 25 bp, Homo sapien
ctgggggtgcctgttaatgttgtta

SEQ ID NO: 2839381 - DNA, 25 bp, Homo sapien
actatcaccacggtcactgcatggc

SEQ ID NO: 2839382 - DNA, 25 bp, Homo sapien
caccacggtcactgcatggctctaa

SEQ ID NO: 2839383 - DNA, 25 bp, Homo sapien
cacggtcactgcatggctctaacaa

SEQ ID NO: 2839384 - DNA, 25 bp, Homo sapien
tatcaccacggtcactgcatggctc

SEQ ID NO: 2839385 - DNA, 25 bp, Homo sapien
atgtgcccttccacaaacattaagg

SEQ ID NO: 2839386 - DNA, 25 bp, Homo sapien
ccatgtgcccttccacaaacattaa

SEQ ID NO: 2839387 - DNA, 25 bp, Homo sapien
tgtgcccttccacaaacattaaggt

SEQ ID NO: 2839388 - DNA, 25 bp, Homo sapien
ctcccatgtgcccttccacaaacat

SEQ ID NO: 2839389 - DNA, 25 bp, Homo sapien
gtgtggccatcttctatggtcaaga

SEQ ID NO: 2839390 - DNA, 25 bp, Homo sapien
tgtggccatcttctatggtcaagac

SEQ ID NO: 2839391 - DNA, 25 bp, Homo sapien
atggcctccttgggtgtggccatct

SEQ ID NO: 2839392 - DNA, 25 bp, Homo sapien
ggccatcttctatggtcaagactgt

SEQ ID NO: 2839393 - DNA, 25 bp, Homo sapien
tagacttttaaccaccctagcaagc

SEQ ID NO: 2839394 - DNA, 25 bp, Homo sapien
tctttgcatacacctctgatttgta

SEQ ID NO: 2839395 - DNA, 25 bp, Homo sapien
gcaatttatacttccgatgtctgta

SEQ ID NO: 2839396 - DNA, 25 bp, Homo sapien
gatgtctgtataagaccacttacct

SEQ ID NO: 2839397 - DNA, 25 bp, Homo sapien
aaatcccatcctctttgacattccc

SEQ ID NO: 2839398 - DNA, 25 bp, Homo sapien
cattcccaactgctatggtcatggc

SEQ ID NO: 2839399 - DNA, 25 bp, Homo sapien
ggcaatggcattcactcacagacaa

SEQ ID NO: 2839400 - DNA, 25 bp, Homo sapien
tctattcaagtcactgctttggcaa

SEQ ID NO: 2839401 - DNA, 25 bp, Homo sapien
tcaatccccgtttattctattcaag

SEQ ID NO: 2839402 - DNA, 25 bp, Homo sapien
ctagaatacagaggttccccaaggg

SEQ ID NO: 2839403 - DNA, 25 bp, Homo sapien
ctacaggcgtacgccacctagcctg

SEQ ID NO: 2839404 - DNA, 25 bp, Homo sapien
ggcgtacgccacctagcctggctaa

SEQ ID NO: 2839405 - DNA, 25 bp, Homo sapien
gactacaggcgtacgccacctagcc

SEQ ID NO: 2839406 - DNA, 25 bp, Homo sapien
caggcgtacgccacctagcctggct

SEQ ID NO: 2839407 - DNA, 25 bp, Homo sapien
gaatgtaagctaaggagatatccac

SEQ ID NO: 2839408 - DNA, 25 bp, Homo sapien
tgaggaagtatctgcaagactaggt

SEQ ID NO: 2839409 - DNA, 25 bp, Homo sapien
gactatcacagccaatattccgtag

SEQ ID NO: 2839410 - DNA, 25 bp, Homo sapien
tattttgatagctagaaggcactgg

SEQ ID NO: 2839411 - DNA, 25 bp, Homo sapien
caaaggcagaatacaaaacctaagt

SEQ ID NO: 2839412 - DNA, 25 bp, Homo sapien
tcctctaatataggtattaccccca

SEQ ID NO: 2839413 - DNA, 25 bp, Homo sapien
taagtcttcctactctaaattcctc

SEQ ID NO: 2839414 - DNA, 25 bp, Homo sapien
gccctactttagtggatggtttaga

SEQ ID NO: 2839415 - DNA, 25 bp, Homo sapien
tggtcatctcattacaactaggtct

SEQ ID NO: 2839416 - DNA, 25 bp, Homo sapien
tatcccatcctaagaagtgtatgag

SEQ ID NO: 2839417 - DNA, 25 bp, Homo sapien
tattctgttacagggatctatccca

SEQ ID NO: 2839418 - DNA, 25 bp, Homo sapien
ctcctaagaaatacggaagctgtct

SEQ ID NO: 2839419 - DNA, 25 bp, Homo sapien
tacacaatcttgctgcatagcttca

SEQ ID NO: 2839420 - DNA, 25 bp, Homo sapien
tcttgctgcatagcttcattgtcta

SEQ ID NO: 2839421 - DNA, 25 bp, Homo sapien
acagtctctgttactttcactggca

SEQ ID NO: 2839422 - DNA, 25 bp, Homo sapien
tgtctaaattagtgctagccacagg

SEQ ID NO: 2839423 - DNA, 25 bp, Homo sapien
tgtaaattcttaagatcatgatcta

SEQ ID NO: 2839424 - DNA, 25 bp, Homo sapien
gctgctctaattgttctttctaaaa

SEQ ID NO: 2839425 - DNA, 25 bp, Homo sapien
aagatcatgatctatgctgctctga

SEQ ID NO: 2839426 - DNA, 25 bp, Homo sapien
tccccatcacaatgaatactttctg

SEQ ID NO: 2839427 - DNA, 25 bp, Homo sapien
ctggtaggatgctgatgggagatat

SEQ ID NO: 2839428 - DNA, 25 bp, Homo sapien
taggatgctgatgggagatatatgg

SEQ ID NO: 2839429 - DNA, 25 bp, Homo sapien
gatgctgatgggagatatatgggtg

SEQ ID NO: 2839430 - DNA, 25 bp, Homo sapien
ggtaggatgctgatgggagatatat

SEQ ID NO: 2839431 - DNA, 25 bp, Homo sapien
gaaagactaacatctaaaccatggt

SEQ ID NO: 2839432 - DNA, 25 bp, Homo sapien
gacaagtaatactgtggccactgca

SEQ ID NO: 2839433 - DNA, 25 bp, Homo sapien
gggtcttagcataagtccagacaag

SEQ ID NO: 2839434 - DNA, 25 bp, Homo sapien
ggttattaggacttgaacactggca

SEQ ID NO: 2839435 - DNA, 25 bp, Homo sapien
cagaatgttaaatcgggcaacagag

SEQ ID NO: 2839436 - DNA, 25 bp, Homo sapien
aagctagctgaaacaactcaaaata

SEQ ID NO: 2839437 - DNA, 25 bp, Homo sapien
gaatgttagaatacagttaaatatc

SEQ ID NO: 2839438 - DNA, 25 bp, Homo sapien
taaattagaaggtcatgtaaacaca

SEQ ID NO: 2839439 - DNA, 25 bp, Homo sapien
cttgttgccgtaacactatttgatt

SEQ ID NO: 2839440 - DNA, 25 bp, Homo sapien
taccacctctggcatgtcatttgat

SEQ ID NO: 2839441 - DNA, 25 bp, Homo sapien
tcatccttaattgtaccacctctgg

SEQ ID NO: 2839442 - DNA, 25 bp, Homo sapien
cgtaacactatttgattccaggatg

SEQ ID NO: 2839443 - DNA, 25 bp, Homo sapien
agtccagccattatcctgctcacta

SEQ ID NO: 2839444 - DNA, 25 bp, Homo sapien
gccattatcctgctcactatttctt

SEQ ID NO: 2839445 - DNA, 25 bp, Homo sapien
ctgttcagtaattgaactcaaatca

SEQ ID NO: 2839446 - DNA, 25 bp, Homo sapien
caaaaaactcatagtagttttccag

SEQ ID NO: 2839447 - DNA, 25 bp, Homo sapien
gcagccaaagaatttgcggaccaaa

SEQ ID NO: 2839448 - DNA, 25 bp, Homo sapien
acagcagccaaagaatttgcggacc

SEQ ID NO: 2839449 - DNA, 25 bp, Homo sapien
tgatgctacattggctaaaaatcta

SEQ ID NO: 2839450 - DNA, 25 bp, Homo sapien
tcttcatgatgtgatgctacattgg

SEQ ID NO: 2839451 - DNA, 25 bp, Homo sapien
aactgccagggataacaggttcagg

SEQ ID NO: 2839452 - DNA, 25 bp, Homo sapien
taatagctgagggaacatctgcttc

SEQ ID NO: 2839453 - DNA, 25 bp, Homo sapien
tcaagtgaatatgtaaactgccagg

SEQ ID NO: 2839454 - DNA, 25 bp, Homo sapien
cgctgtcgtatctctgccgaagcca

SEQ ID NO: 2839455 - DNA, 25 bp, Homo sapien
tcctcaatatagtccacaacgtggc

SEQ ID NO: 2839456 - DNA, 25 bp, Homo sapien
caacgtggcggactatgaatggaac

SEQ ID NO: 2839457 - DNA, 25 bp, Homo sapien
gaacggagttgcagttactcaagga

SEQ ID NO: 2839458 - DNA, 25 bp, Homo sapien
gcagctcatcaagtggaattccaaa

SEQ ID NO: 2839459 - DNA, 25 bp, Homo sapien
tgcagccagaaatcaaagctgtctt

SEQ ID NO: 2839460 - DNA, 25 bp, Homo sapien
atcttttttgcagccagaaatcaaa

SEQ ID NO: 2839461 - DNA, 25 bp, Homo sapien
gcagccagaaatcaaagctgtcttt

SEQ ID NO: 2839462 - DNA, 25 bp, Homo sapien
tttttgcagccagaaatcaaagctg

SEQ ID NO: 2839463 - DNA, 25 bp, Homo sapien
tgatctgcccgtctcggcccccaaa

SEQ ID NO: 2839464 - DNA, 25 bp, Homo sapien
gatctgcccgtctcggcccccaaag

SEQ ID NO: 2839465 - DNA, 25 bp, Homo sapien
gtgatctgcccgtctcggcccccaa

SEQ ID NO: 2839466 - DNA, 25 bp, Homo sapien
cgtgatctgcccgtctcggccccca

SEQ ID NO: 2839467 - DNA, 25 bp, Homo sapien
tcacaacatgactaggaaacaatgc

SEQ ID NO: 2839468 - DNA, 25 bp, Homo sapien
tatagagcacgagatagttaccatt

SEQ ID NO: 2839469 - DNA, 25 bp, Homo sapien
tagtctcagacaagcaacatccatt

SEQ ID NO: 2839470 - DNA, 25 bp, Homo sapien
tggtgccagctaagaactataaaac

SEQ ID NO: 2839471 - DNA, 25 bp, Homo sapien
ctcgatcagtacttcagcagttaat

SEQ ID NO: 2839472 - DNA, 25 bp, Homo sapien
taccctcactgagcaagcattcttt

SEQ ID NO: 2839473 - DNA, 25 bp, Homo sapien
ctgtttgagattatggcagaagatc

SEQ ID NO: 2839474 - DNA, 25 bp, Homo sapien
gaaatgcagaactcgatcagtactt

SEQ ID NO: 2839475 - DNA, 25 bp, Homo sapien
tattgaaaggtattcttctgtctga

SEQ ID NO: 2839476 - DNA, 25 bp, Homo sapien
ggcaaaaccttgcaacggtttcaga

SEQ ID NO: 2839477 - DNA, 25 bp, Homo sapien
ccttgcaacggtttcagatgatgat

SEQ ID NO: 2839478 - DNA, 25 bp, Homo sapien
aatctatctgtaacctaaaggcaaa

SEQ ID NO: 2839479 - DNA, 25 bp, Homo sapien
gacacatcttcaaggactacaccat

SEQ ID NO: 2839480 - DNA, 25 bp, Homo sapien
caaggactacaccattcaaataatc

SEQ ID NO: 2839481 - DNA, 25 bp, Homo sapien
aaataaacgaattgcaaaggaggat

SEQ ID NO: 2839482 - DNA, 25 bp, Homo sapien
attgcaaaggaggatatgtgacagg

SEQ ID NO: 2839483 - DNA, 25 bp, Homo sapien
agagcctccctaacggcgagcggga

SEQ ID NO: 2839484 - DNA, 25 bp, Homo sapien
ctgacgggaggttaaagctacggct

SEQ ID NO: 2839485 - DNA, 25 bp, Homo sapien
caagagggcgagaactgaggcccca

SEQ ID NO: 2839486 - DNA, 25 bp, Homo sapien
gtggtggcgacgcagacgcggaaca

SEQ ID NO: 2839487 - DNA, 25 bp, Homo sapien
ctgaattagggtgcgagcagccagg

SEQ ID NO: 2839488 - DNA, 25 bp, Homo sapien
gggtcctgaattagggtgcgagcag

SEQ ID NO: 2839489 - DNA, 25 bp, Homo sapien
aattagggtgcgagcagccaggcgc

SEQ ID NO: 2839490 - DNA, 25 bp, Homo sapien
gtcctgaattagggtgcgagcagcc

SEQ ID NO: 2839491 - DNA, 25 bp, Homo sapien
tggtaaacatcctttacggcacagg

SEQ ID NO: 2839492 - DNA, 25 bp, Homo sapien
tctttacctgtagatggaaacgtca

SEQ ID NO: 2839493 - DNA, 25 bp, Homo sapien
tgttacagagatgagagaatacctc

SEQ ID NO: 2839494 - DNA, 25 bp, Homo sapien
tcaccactggagaggtgctattggc

SEQ ID NO: 2839495 - DNA, 25 bp, Homo sapien
caaaatgcgagaagtaatggtgaac

SEQ ID NO: 2839496 - DNA, 25 bp, Homo sapien
ttaagaggaggctaaataagtctat

SEQ ID NO: 2839497 - DNA, 25 bp, Homo sapien
cctttcaatagtaacaatagaagcc

SEQ ID NO: 2839498 - DNA, 25 bp, Homo sapien
gaaaagataatttggctgacagctg

SEQ ID NO: 2839499 - DNA, 25 bp, Homo sapien
tatggagcactcaccagtggtacag

SEQ ID NO: 2839500 - DNA, 25 bp, Homo sapien
gagtggattcggctactttagtgca

SEQ ID NO: 2839501 - DNA, 25 bp, Homo sapien
tacagagcacattaacgaaaagaca

SEQ ID NO: 2839502 - DNA, 25 bp, Homo sapien
taacaaggcacagcaagcagaaaca

SEQ ID NO: 2839503 - DNA, 25 bp, Homo sapien
agtatatgcactgtcacagcaagca

SEQ ID NO: 2839504 - DNA, 25 bp, Homo sapien
tcccagactgtcttcagatacatga

SEQ ID NO: 2839505 - DNA, 25 bp, Homo sapien
cagtggtgctttggaaagtgccggc

SEQ ID NO: 2839506 - DNA, 25 bp, Homo sapien
tgccggcagggggtaggcaataaaa

SEQ ID NO: 2839507 - DNA, 25 bp, Homo sapien
gctgcccatttgtctgcaagttgct

SEQ ID NO: 2839508 - DNA, 25 bp, Homo sapien
ctgcccatttgtctgcaagttgctt

SEQ ID NO: 2839509 - DNA, 25 bp, Homo sapien
ccaccaagaccggccgtgattgtgg

SEQ ID NO: 2839510 - DNA, 25 bp, Homo sapien
ccagcctaatagttatccaagtgat

SEQ ID NO: 2839511 - DNA, 25 bp, Homo sapien
caagaccggccgtgattgtggtttt

SEQ ID NO: 2839512 - DNA, 25 bp, Homo sapien
gcctaatagttatccaagtgattag

SEQ ID NO: 2839513 - DNA, 25 bp, Homo sapien
agggaagcatatctgacacatgagc

SEQ ID NO: 2839514 - DNA, 25 bp, Homo sapien
gggaagcatatctgacacatgagca

SEQ ID NO: 2839515 - DNA, 25 bp, Homo sapien
catactctaagcctatattttacct

SEQ ID NO: 2839516 - DNA, 25 bp, Homo sapien
tacatgagttttccattacctagtg

SEQ ID NO: 2839517 - DNA, 25 bp, Homo sapien
caaaaacatctagcaacatcttaca

SEQ ID NO: 2839518 - DNA, 25 bp, Homo sapien
gatataggatatgtgcttgggaaaa

SEQ ID NO: 2839519 - DNA, 25 bp, Homo sapien
tttcaaacagtagaagtacagcctt

SEQ ID NO: 2839520 - DNA, 25 bp, Homo sapien
gccttttataataagatagttcatg

SEQ ID NO: 2839521 - DNA, 25 bp, Homo sapien
ttataataagatagttcatgatttg

SEQ ID NO: 2839522 - DNA, 25 bp, Homo sapien
agaagtacagccttttataataaga

SEQ ID NO: 2839523 - DNA, 25 bp, Homo sapien
ttaataaggttcttctacaattgga

SEQ ID NO: 2839524 - DNA, 25 bp, Homo sapien
ttttcagcagccaatcagctagcca

SEQ ID NO: 2839525 - DNA, 25 bp, Homo sapien
ggttcttctacaattggatggtgac

SEQ ID NO: 2839526 - DNA, 25 bp, Homo sapien
caattggatggtgacaaagtttggg

SEQ ID NO: 2839527 - DNA, 25 bp, Homo sapien
cctaagttaagaaacagttacatat

SEQ ID NO: 2839528 - DNA, 25 bp, Homo sapien
tcaatatatactatatcaattggaa

SEQ ID NO: 2839529 - DNA, 25 bp, Homo sapien
tatatcaattggaaacttaaacagt

SEQ ID NO: 2839530 - DNA, 25 bp, Homo sapien
tactatatcaattggaaacttaaac

SEQ ID NO: 2839531 - DNA, 25 bp, Homo sapien
gacatgcagaccaatagaatggacc

SEQ ID NO: 2839532 - DNA, 25 bp, Homo sapien
tagtcagcacagtgtggtaatgaca

SEQ ID NO: 2839533 - DNA, 25 bp, Homo sapien
tgacatccttatgccagacatgcag

SEQ ID NO: 2839534 - DNA, 25 bp, Homo sapien
agttggaggactgatttgtactctc

SEQ ID NO: 2839535 - DNA, 25 bp, Homo sapien
gtaaatttaaatagtccttagcagc

SEQ ID NO: 2839536 - DNA, 25 bp, Homo sapien
tgtgagtccttcaagcagagttggc

SEQ ID NO: 2839537 - DNA, 25 bp, Homo sapien
ttgcttacaaagctctgtgagtcct

SEQ ID NO: 2839538 - DNA, 25 bp, Homo sapien
tccaattggaatgggctcaacaatc

SEQ ID NO: 2839539 - DNA, 25 bp, Homo sapien
gtgcccgccactaattagtccggct

SEQ ID NO: 2839540 - DNA, 25 bp, Homo sapien
cccgccactaattagtccggctaat

SEQ ID NO: 2839541 - DNA, 25 bp, Homo sapien
ggtgcccgccactaattagtccggc

SEQ ID NO: 2839542 - DNA, 25 bp, Homo sapien
tgcccgccactaattagtccggcta

SEQ ID NO: 2839543 - DNA, 25 bp, Homo sapien
caattttagcatatgtgctgaagtg

SEQ ID NO: 2839544 - DNA, 25 bp, Homo sapien
tccaattttagcatatgtgctgaag

SEQ ID NO: 2839545 - DNA, 25 bp, Homo sapien
gttccaattttagcatatgtgctga

SEQ ID NO: 2839546 - DNA, 25 bp, Homo sapien
cgttccaattttagcatatgtgctg

SEQ ID NO: 2839547 - DNA, 25 bp, Homo sapien
cacttctcaaaggtttacaacttct

SEQ ID NO: 2839548 - DNA, 25 bp, Homo sapien
aatatccagtggaaaatactgagga

SEQ ID NO: 2839549 - DNA, 25 bp, Homo sapien
tcctcgtatgtccacttctcaaagg

SEQ ID NO: 2839550 - DNA, 25 bp, Homo sapien
tactgaggaacagatctaaatgact

SEQ ID NO: 2839551 - DNA, 25 bp, Homo sapien
ttcaggataactagaaagaactgtt

SEQ ID NO: 2839552 - DNA, 25 bp, Homo sapien
cagaagacggtaaatcaaatgtagt

SEQ ID NO: 2839553 - DNA, 25 bp, Homo sapien
caggcatctgagagtatgctgggca

SEQ ID NO: 2839554 - DNA, 25 bp, Homo sapien
gagactttgttaggcaaacagtaaa

SEQ ID NO: 2839555 - DNA, 25 bp, Homo sapien
atgaagtgcattccttaggtcatct

SEQ ID NO: 2839556 - DNA, 25 bp, Homo sapien
tcatctgtgccataaattgccctca

SEQ ID NO: 2839557 - DNA, 25 bp, Homo sapien
tcaggaaacataaaacgtatttctc

SEQ ID NO: 2839558 - DNA, 25 bp, Homo sapien
agtcattactcccatgaagtgcatt

SEQ ID NO: 2839559 - DNA, 25 bp, Homo sapien
caatctaacgtctattccttacttt

SEQ ID NO: 2839560 - DNA, 25 bp, Homo sapien
taaaaacaagttagagatgacgtcc

SEQ ID NO: 2839561 - DNA, 25 bp, Homo sapien
acaagttagagatgacgtccatcca

SEQ ID NO: 2839562 - DNA, 25 bp, Homo sapien
tgacgtccatccaatctaacgtcta

SEQ ID NO: 2839563 - DNA, 25 bp, Homo sapien
ctactaagctattatttggtcccaa

SEQ ID NO: 2839564 - DNA, 25 bp, Homo sapien
ctaagctattatttggtcccaaaag

SEQ ID NO: 2839565 - DNA, 25 bp, Homo sapien
tactaagctattatttggtcccaaa

SEQ ID NO: 2839566 - DNA, 25 bp, Homo sapien
tatgtctagctaatatcatggcgac

SEQ ID NO: 2839567 - DNA, 25 bp, Homo sapien
aactcatgtaagctgttaagttggg

SEQ ID NO: 2839568 - DNA, 25 bp, Homo sapien
taatatcatggcgacaagtggtcca

SEQ ID NO: 2839569 - DNA, 25 bp, Homo sapien
caagtggtccagaactcatgtaagc

SEQ ID NO: 2839570 - DNA, 25 bp, Homo sapien
ctgaggcaggccaacagcttgaacc

SEQ ID NO: 2839571 - DNA, 25 bp, Homo sapien
tgaaatctcgtctctaccgaaaata

SEQ ID NO: 2839572 - DNA, 25 bp, Homo sapien
gtgaaatctcgtctctaccgaaaat

SEQ ID NO: 2839573 - DNA, 25 bp, Homo sapien
ggcaggccaacagcttgaacccggg

SEQ ID NO: 2839574 - DNA, 25 bp, Homo sapien
cacagagaagcagtgataccaagta

SEQ ID NO: 2839575 - DNA, 25 bp, Homo sapien
gataccaagtactatcagaacagaa

SEQ ID NO: 2839576 - DNA, 25 bp, Homo sapien
tttgaaattaggttgaatagtctac

SEQ ID NO: 2839577 - DNA, 25 bp, Homo sapien
aattaggttgaatagtctacagcca

SEQ ID NO: 2839578 - DNA, 25 bp, Homo sapien
aacagaaagtgttaagtggttgcct

SEQ ID NO: 2839579 - DNA, 25 bp, Homo sapien
aatgggtaggcacatttacataagc

SEQ ID NO: 2839580 - DNA, 25 bp, Homo sapien
taaatgggtaggcacatttacataa

SEQ ID NO: 2839581 - DNA, 25 bp, Homo sapien
agtgttaagtggttgcctctctctg

SEQ ID NO: 2839582 - DNA, 25 bp, Homo sapien
gaatccggatctaagaataatatct

SEQ ID NO: 2839583 - DNA, 25 bp, Homo sapien
ctgaacaatggtgaatccggatcta

SEQ ID NO: 2839584 - DNA, 25 bp, Homo sapien
gataatggccagagttttttctaca

SEQ ID NO: 2839585 - DNA, 25 bp, Homo sapien
acaatatctggtttgataatggcca

SEQ ID NO: 2839586 - DNA, 25 bp, Homo sapien
gaggtggaggcattgatatctccat

SEQ ID NO: 2839587 - DNA, 25 bp, Homo sapien
ctgaggtggaggcattgatatctcc

SEQ ID NO: 2839588 - DNA, 25 bp, Homo sapien
tgaggtggaggcattgatatctcca

SEQ ID NO: 2839589 - DNA, 25 bp, Homo sapien
caggtatcaactgcaatgacatgca

SEQ ID NO: 2839590 - DNA, 25 bp, Homo sapien
ggcacaaattaagagtttcttaaca

SEQ ID NO: 2839591 - DNA, 25 bp, Homo sapien
taagagtttcttaacaggtatcaac

SEQ ID NO: 2839592 - DNA, 25 bp, Homo sapien
caactgcaatgacatgcatttcccc

SEQ ID NO: 2839593 - DNA, 25 bp, Homo sapien
catatggtacaacttgttgctagga

SEQ ID NO: 2839594 - DNA, 25 bp, Homo sapien
gcggccgtcctcatatggtacaact

SEQ ID NO: 2839595 - DNA, 25 bp, Homo sapien
tcctcatatggtacaacttgttgct

SEQ ID NO: 2839596 - DNA, 25 bp, Homo sapien
ctcagcggccgtcctcatatggtac

SEQ ID NO: 2839597 - DNA, 25 bp, Homo sapien
tcagagttccgggagagattcaaac

SEQ ID NO: 2839598 - DNA, 25 bp, Homo sapien
catgcatctttgactcgttggttgt

SEQ ID NO: 2839599 - DNA, 25 bp, Homo sapien
aaaaagtcaggatagcagctccagg

SEQ ID NO: 2839600 - DNA, 25 bp, Homo sapien
ggcaaagaagtaccaggatcctctc

SEQ ID NO: 2839601 - DNA, 25 bp, Homo sapien
cactgggttagctggttctccttcc

SEQ ID NO: 2839602 - DNA, 25 bp, Homo sapien
agccttttcttttgtctaaccagat

SEQ ID NO: 2839603 - DNA, 25 bp, Homo sapien
gccttttcttttgtctaaccagata

SEQ ID NO: 2839604 - DNA, 25 bp, Homo sapien
ctttattctcataggcgttctgaaa

SEQ ID NO: 2839605 - DNA, 25 bp, Homo sapien
gaggctacaggtatctgcatacagt

SEQ ID NO: 2839606 - DNA, 25 bp, Homo sapien
tctcataggcgttctgaaatcaaga

SEQ ID NO: 2839607 - DNA, 25 bp, Homo sapien
ttccagaggctacaggtatctgcat

SEQ ID NO: 2839608 - DNA, 25 bp, Homo sapien
gaacatcagcatcaggtctcgcagg

SEQ ID NO: 2839609 - DNA, 25 bp, Homo sapien
gatcagagtcattgtacattacagc

SEQ ID NO: 2839610 - DNA, 25 bp, Homo sapien
tcttcaggctagttaagtccatggg

SEQ ID NO: 2839611 - DNA, 25 bp, Homo sapien
gtgcgaatccgacccttagagagat

SEQ ID NO: 2839612 - DNA, 25 bp, Homo sapien
ggcctgcctttctgacacaggcttc

SEQ ID NO: 2839613 - DNA, 25 bp, Homo sapien
tttcaccacatccttgtaccctggg

SEQ ID NO: 2839614 - DNA, 25 bp, Homo sapien
acacaggcttcagaaatggactgct

SEQ ID NO: 2839615 - DNA, 25 bp, Homo sapien
cttttcaccacatccttgtaccctg

SEQ ID NO: 2839616 - DNA, 25 bp, Homo sapien
gactggcaatcatcttccagactgg

SEQ ID NO: 2839617 - DNA, 25 bp, Homo sapien
tgatcctgaacagggtcatcctggc

SEQ ID NO: 2839618 - DNA, 25 bp, Homo sapien
taaatagcaaatgatcctgaacagg

SEQ ID NO: 2839619 - DNA, 25 bp, Homo sapien
gcaggagagtcttcttaaatagcaa

SEQ ID NO: 2839620 - DNA, 25 bp, Homo sapien
tctgacacatatacttcaccctggt

SEQ ID NO: 2839621 - DNA, 25 bp, Homo sapien
ggcatcatcacactcgcctgaaggg

SEQ ID NO: 2839622 - DNA, 25 bp, Homo sapien
gaaaagtgtatccaccaagggagtc

SEQ ID NO: 2839623 - DNA, 25 bp, Homo sapien
gggagtctccttaatgttaaaggca

SEQ ID NO: 2839624 - DNA, 25 bp, Homo sapien
tcttgtctggtaccagatggagggc

SEQ ID NO: 2839625 - DNA, 25 bp, Homo sapien
tctgtgagtagtccctgaactgtac

SEQ ID NO: 2839626 - DNA, 25 bp, Homo sapien
ctgtacaaataactgagggagctga

SEQ ID NO: 2839627 - DNA, 25 bp, Homo sapien
gcagcagccttcacttgattcgttg

SEQ ID NO: 2839628 - DNA, 25 bp, Homo sapien
tgccgcttcctgagattcctcactg

SEQ ID NO: 2839629 - DNA, 25 bp, Homo sapien
gaaagtggaggaggttctggtggct

SEQ ID NO: 2839630 - DNA, 25 bp, Homo sapien
agaaagtggaggaggttctggtggc

SEQ ID NO: 2839631 - DNA, 25 bp, Homo sapien
ttccttgccgcttcctgagattcct

SEQ ID NO: 2839632 - DNA, 25 bp, Homo sapien
cattgctcaactcagagtcattggg

SEQ ID NO: 2839633 - DNA, 25 bp, Homo sapien
cactaggttctctctccgggctgct

SEQ ID NO: 2839634 - DNA, 25 bp, Homo sapien
gtcccatgagctgaagagggacctg

SEQ ID NO: 2839635 - DNA, 25 bp, Homo sapien
ctcagagtcattgggatgatcttgt

SEQ ID NO: 2839636 - DNA, 25 bp, Homo sapien
ttccagctcatgtcgtgtggcccag

SEQ ID NO: 2839637 - DNA, 25 bp, Homo sapien
taaaacaggcaattgtgctactcca

SEQ ID NO: 2839638 - DNA, 25 bp, Homo sapien
tacgatctgctagctacacattagg

SEQ ID NO: 2839639 - DNA, 25 bp, Homo sapien
gacaatacaaactagctacgatctg

SEQ ID NO: 2839640 - DNA, 25 bp, Homo sapien
ttcaatggcacagcggcgtcccctg

SEQ ID NO: 2839641 - DNA, 25 bp, Homo sapien
ctgcttcaatggcacagcggcgtcc

SEQ ID NO: 2839642 - DNA, 25 bp, Homo sapien
gcacagcggcgtcccctggttcctc

SEQ ID NO: 2839643 - DNA, 25 bp, Homo sapien
tatctgcttcaatggcacagcggcg

SEQ ID NO: 2839644 - DNA, 25 bp, Homo sapien
ataactattagtcatcccacccagg

SEQ ID NO: 2839645 - DNA, 25 bp, Homo sapien
tatcttgctcatgcccactacagag

SEQ ID NO: 2839646 - DNA, 25 bp, Homo sapien
acccaggcccaaatcatgtgcaaag

SEQ ID NO: 2839647 - DNA, 25 bp, Homo sapien
tcaggagacaagagacggtgcaaca

SEQ ID NO: 2839648 - DNA, 25 bp, Homo sapien
ctgttggtccctataagaaaggcct

SEQ ID NO: 2839649 - DNA, 25 bp, Homo sapien
gcagactgaccctggcactagttcc

SEQ ID NO: 2839650 - DNA, 25 bp, Homo sapien
aaggcctttcctgcagactgaccct

SEQ ID NO: 2839651 - DNA, 25 bp, Homo sapien
tgtccaactgttggtccctataaga

SEQ ID NO: 2839652 - DNA, 25 bp, Homo sapien
aaatgctttgcttgggggatccaga

SEQ ID NO: 2839653 - DNA, 25 bp, Homo sapien
aaccagccttgcaatagccagccaa

SEQ ID NO: 2839654 - DNA, 25 bp, Homo sapien
attaaccagccttgcaatagccagc

SEQ ID NO: 2839655 - DNA, 25 bp, Homo sapien
cagccttgcaatagccagccaaatg

SEQ ID NO: 2839656 - DNA, 25 bp, Homo sapien
taagaccatgtagttttctagcctg

SEQ ID NO: 2839657 - DNA, 25 bp, Homo sapien
tagaatacatttcagcccagtgatc

SEQ ID NO: 2839658 - DNA, 25 bp, Homo sapien
gaaatgacgagcaggtacatcctag

SEQ ID NO: 2839659 - DNA, 25 bp, Homo sapien
gagtagcttgtagttagggaccaca

SEQ ID NO: 2839660 - DNA, 25 bp, Homo sapien
ggcaggagagcccattgggacactg

SEQ ID NO: 2839661 - DNA, 25 bp, Homo sapien
caggagagcccattgggacactgtc

SEQ ID NO: 2839662 - DNA, 25 bp, Homo sapien
gaaggcaggagagcccattgggaca

SEQ ID NO: 2839663 - DNA, 25 bp, Homo sapien
aaggcaggagagcccattgggacac

SEQ ID NO: 2839664 - DNA, 25 bp, Homo sapien
gaggacaaacaaacactgatcaggt

SEQ ID NO: 2839665 - DNA, 25 bp, Homo sapien
tacgcctctagcacagaaactgatg

SEQ ID NO: 2839666 - DNA, 25 bp, Homo sapien
caaaagcaatctgtccattacgcct

SEQ ID NO: 2839667 - DNA, 25 bp, Homo sapien
ccaactgctgcaggctaagccattt

SEQ ID NO: 2839668 - DNA, 25 bp, Homo sapien
tcctgtttgcgggtagaatctctcc

SEQ ID NO: 2839669 - DNA, 25 bp, Homo sapien
gaatctctccctcgaagacttttag

SEQ ID NO: 2839670 - DNA, 25 bp, Homo sapien
cagactcggatgtttgcataatcaa

SEQ ID NO: 2839671 - DNA, 25 bp, Homo sapien
gcataatcaactgcgtggccaagaa

SEQ ID NO: 2839672 - DNA, 25 bp, Homo sapien
tgtgatagacatcatggtctgagct

SEQ ID NO: 2839673 - DNA, 25 bp, Homo sapien
aagacatctcgctgcatctccactg

SEQ ID NO: 2839674 - DNA, 25 bp, Homo sapien
gaaacatcagcataatgtcacgctg

SEQ ID NO: 2839675 - DNA, 25 bp, Homo sapien
gaaattcagctgtgcttcggatcag

SEQ ID NO: 2839676 - DNA, 25 bp, Homo sapien
gacgcacctagatctatgaatacat

SEQ ID NO: 2839677 - DNA, 25 bp, Homo sapien
caggacttaaatgctaaccccttat

SEQ ID NO: 2839678 - DNA, 25 bp, Homo sapien
ggatggaaagaggacgcacctagat

SEQ ID NO: 2839679 - DNA, 25 bp, Homo sapien
tcccagctgccaggacttaaatgct

SEQ ID NO: 2839680 - DNA, 25 bp, Homo sapien
tgtggtagccaggtgctatgtcatc

SEQ ID NO: 2839681 - DNA, 25 bp, Homo sapien
tgtcatctgtaacaggctgcaggaa

SEQ ID NO: 2839682 - DNA, 25 bp, Homo sapien
ggtagtaagaactaataccagcagt

SEQ ID NO: 2839683 - DNA, 25 bp, Homo sapien
aaggaataaggtgcaattactgaca

SEQ ID NO: 2839684 - DNA, 25 bp, Homo sapien
attactgacattctccagaagtgca

SEQ ID NO: 2839685 - DNA, 25 bp, Homo sapien
gcagttccacagaagcctactcaga

SEQ ID NO: 2839686 - DNA, 25 bp, Homo sapien
gctctccatacaagcatgatggctt

SEQ ID NO: 2839687 - DNA, 25 bp, Homo sapien
gcagctctccatacaagcatgatgg

SEQ ID NO: 2839688 - DNA, 25 bp, Homo sapien
tccatacaagcatgatggctttctt

SEQ ID NO: 2839689 - DNA, 25 bp, Homo sapien
tctccatacaagcatgatggctttc

SEQ ID NO: 2839690 - DNA, 25 bp, Homo sapien
gcaattccactaggcacaagttaaa

SEQ ID NO: 2839691 - DNA, 25 bp, Homo sapien
tacagcaattccactaggcacaagt

SEQ ID NO: 2839692 - DNA, 25 bp, Homo sapien
gagatacagcaattccactaggcac

SEQ ID NO: 2839693 - DNA, 25 bp, Homo sapien
gaaacagagatacagcaattccact

SEQ ID NO: 2839694 - DNA, 25 bp, Homo sapien
tgtgactgcagtgtagcattgtgta

SEQ ID NO: 2839695 - DNA, 25 bp, Homo sapien
gcattgtgtatgctgaagccatcat

SEQ ID NO: 2839696 - DNA, 25 bp, Homo sapien
catcatcactctcgctcacaggagg

SEQ ID NO: 2839697 - DNA, 25 bp, Homo sapien
gagtctgccagtgtgtgtgactgca

SEQ ID NO: 2839698 - DNA, 25 bp, Homo sapien
agacactgcgttaagtaatttagaa

SEQ ID NO: 2839699 - DNA, 25 bp, Homo sapien
gacactgcgttaagtaatttagaac

SEQ ID NO: 2839700 - DNA, 25 bp, Homo sapien
tccaaaaatagtccctgattcttct

SEQ ID NO: 2839701 - DNA, 25 bp, Homo sapien
ttccaaaaatagtccctgattcttc

SEQ ID NO: 2839702 - DNA, 25 bp, Homo sapien
gcttccaaaaatagtccctgattct

SEQ ID NO: 2839703 - DNA, 25 bp, Homo sapien
ggcttccaaaaatagtccctgattc

SEQ ID NO: 2839704 - DNA, 25 bp, Homo sapien
gcctctaaaggatcttcaatgggat

SEQ ID NO: 2839705 - DNA, 25 bp, Homo sapien
tctctgcctctaaaggatcttcaat

SEQ ID NO: 2839706 - DNA, 25 bp, Homo sapien
tcaatgggatttgagccatgtgatg

SEQ ID NO: 2839707 - DNA, 25 bp, Homo sapien
gagacaacatgctttcaggggatgc

SEQ ID NO: 2839708 - DNA, 25 bp, Homo sapien
tgaccgtcatttctggtgcagggag

SEQ ID NO: 2839709 - DNA, 25 bp, Homo sapien
ggaacaactccagctactatttcgg

SEQ ID NO: 2839710 - DNA, 25 bp, Homo sapien
catttgtaagtggagtctcatcgcc

SEQ ID NO: 2839711 - DNA, 25 bp, Homo sapien
tttcggctcctgaaatgactggctc

SEQ ID NO: 2839712 - DNA, 25 bp, Homo sapien
caaatgtgatggcttgaatctgcag

SEQ ID NO: 2839713 - DNA, 25 bp, Homo sapien
tgactagtatgttagcaccaaaggg

SEQ ID NO: 2839714 - DNA, 25 bp, Homo sapien
tcctgtgcaaaccagtaacatgggt

SEQ ID NO: 2839715 - DNA, 25 bp, Homo sapien
catgggtagacctgaggagatgact

SEQ ID NO: 2839716 - DNA, 25 bp, Homo sapien
cctcaatgatggcaatgatgtctcc

SEQ ID NO: 2839717 - DNA, 25 bp, Homo sapien
gaaacagtcacagtatgtggatccc

SEQ ID NO: 2839718 - DNA, 25 bp, Homo sapien
gcctccatgggaacacagttgtcgg

SEQ ID NO: 2839719 - DNA, 25 bp, Homo sapien
tctgctacccctgatcgaaaacact

SEQ ID NO: 2839720 - DNA, 25 bp, Homo sapien
gaccaccttgagatcacataagcgc

SEQ ID NO: 2839721 - DNA, 25 bp, Homo sapien
cataagcgctacagacagatgtcaa

SEQ ID NO: 2839722 - DNA, 25 bp, Homo sapien
tattgggtacaaagcgaccaccttg

SEQ ID NO: 2839723 - DNA, 25 bp, Homo sapien
tctcagaagcttattgggtacaaag

SEQ ID NO: 2839724 - DNA, 25 bp, Homo sapien
gctacactttcagtagtggagacag

SEQ ID NO: 2839725 - DNA, 25 bp, Homo sapien
aggcatcatgacaatggtagcttgg

SEQ ID NO: 2839726 - DNA, 25 bp, Homo sapien
acaatggtagcttgggacacagact

SEQ ID NO: 2839727 - DNA, 25 bp, Homo sapien
ctggagctacactttcagtagtgga

SEQ ID NO: 2839728 - DNA, 25 bp, Homo sapien
gcaagaggtgtggtgaactgtgtag

SEQ ID NO: 2839729 - DNA, 25 bp, Homo sapien
ggtggcacaagtttaactggaggct

SEQ ID NO: 2839730 - DNA, 25 bp, Homo sapien
acaagtttaactggaggctcactgg

SEQ ID NO: 2839731 - DNA, 25 bp, Homo sapien
gctcactggcaacagtagtgaagga

SEQ ID NO: 2839732 - DNA, 25 bp, Homo sapien
taaaagccgggaaagagtgggagca

SEQ ID NO: 2839733 - DNA, 25 bp, Homo sapien
gaagcaatagctacttgaagactca

SEQ ID NO: 2839734 - DNA, 25 bp, Homo sapien
tataaagaggtacacaaaatgaagt

SEQ ID NO: 2839735 - DNA, 25 bp, Homo sapien
tactctaaccttacttaagatcttc

SEQ ID NO: 2839736 - DNA, 25 bp, Homo sapien
gagagcaactcctgcattgaataag

SEQ ID NO: 2839737 - DNA, 25 bp, Homo sapien
caaggtcacaaaaccaatgtgtggc

SEQ ID NO: 2839738 - DNA, 25 bp, Homo sapien
ggcaggcctgagattcaagcccaat

SEQ ID NO: 2839739 - DNA, 25 bp, Homo sapien
caaaagctaagttacctatccaagg

SEQ ID NO: 2839740 - DNA, 25 bp, Homo sapien
gaataaatctgtcgcttctgctgaa

SEQ ID NO: 2839741 - DNA, 25 bp, Homo sapien
tagtaacagtgaaactgaggtcagt

SEQ ID NO: 2839742 - DNA, 25 bp, Homo sapien
aagttgggctttaaatctagcactg

SEQ ID NO: 2839743 - DNA, 25 bp, Homo sapien
tgtttaccaggtaaagtagctccaa

SEQ ID NO: 2839744 - DNA, 25 bp, Homo sapien
tggagactacattgtttaccaggta

SEQ ID NO: 2839745 - DNA, 25 bp, Homo sapien
ctccccaccatgtatcatgggaagg

SEQ ID NO: 2839746 - DNA, 25 bp, Homo sapien
ggacacctgtactgttcaggtggcc

SEQ ID NO: 2839747 - DNA, 25 bp, Homo sapien
ggggaggctgcaacagtattgggtg

SEQ ID NO: 2839748 - DNA, 25 bp, Homo sapien
aggaggacacctgtactgttcaggt

SEQ ID NO: 2839749 - DNA, 25 bp, Homo sapien
ggacccatgggtactatcaacttac

SEQ ID NO: 2839750 - DNA, 25 bp, Homo sapien
caaagctccagcagttgatcaaact

SEQ ID NO: 2839751 - DNA, 25 bp, Homo sapien
tgtgattcagatacctcaggaccca

SEQ ID NO: 2839752 - DNA, 25 bp, Homo sapien
catgtcacattttaggtcccaggca

SEQ ID NO: 2839753 - DNA, 25 bp, Homo sapien
tgactggggtactcggcaaagtccc

SEQ ID NO: 2839754 - DNA, 25 bp, Homo sapien
gggtcatgggggcttctaagggtgc

SEQ ID NO: 2839755 - DNA, 25 bp, Homo sapien
caggaatcccaggaaacgaggtgac

SEQ ID NO: 2839756 - DNA, 25 bp, Homo sapien
ctgtccaagcatctttttctggggt

SEQ ID NO: 2839757 - DNA, 25 bp, Homo sapien
tcaagtccccaagtggataatcacc

SEQ ID NO: 2839758 - DNA, 25 bp, Homo sapien
ggagagcgaaccatcacagtgggta

SEQ ID NO: 2839759 - DNA, 25 bp, Homo sapien
gaggtagcctcttccatagtggttg

SEQ ID NO: 2839760 - DNA, 25 bp, Homo sapien
gaggcagaatctataggagagcgaa

SEQ ID NO: 2839761 - DNA, 25 bp, Homo sapien
aattatcccaaaggtccttggagtg

SEQ ID NO: 2839762 - DNA, 25 bp, Homo sapien
tctagagatggataactttttagcc

SEQ ID NO: 2839763 - DNA, 25 bp, Homo sapien
ttggattagaaagctttaacacttc

SEQ ID NO: 2839764 - DNA, 25 bp, Homo sapien
tttttcctaagggcaattctcacac

SEQ ID NO: 2839765 - DNA, 25 bp, Homo sapien
gtagccttcctctttacttcagcct

SEQ ID NO: 2839766 - DNA, 25 bp, Homo sapien
ctgtagccttcctctttacttcagc

SEQ ID NO: 2839767 - DNA, 25 bp, Homo sapien
cctggtatgcagcatctgtagcctt

SEQ ID NO: 2839768 - DNA, 25 bp, Homo sapien
acttcagcctcctcttcttccaatt

SEQ ID NO: 2839769 - DNA, 25 bp, Homo sapien
tgtgtccagcttgaattagttctgc

SEQ ID NO: 2839770 - DNA, 25 bp, Homo sapien
tccagcttgaattagttctgcatct

SEQ ID NO: 2839771 - DNA, 25 bp, Homo sapien
tgtccagcttgaattagttctgcat

SEQ ID NO: 2839772 - DNA, 25 bp, Homo sapien
catgtgtccagcttgaattagttct

SEQ ID NO: 2839773 - DNA, 25 bp, Homo sapien
taacatcttcaacagtttccaccac

SEQ ID NO: 2839774 - DNA, 25 bp, Homo sapien
aactcgctcagcagtcaatttccga

SEQ ID NO: 2839775 - DNA, 25 bp, Homo sapien
tctttagttcttcaactcgctcagc

SEQ ID NO: 2839776 - DNA, 25 bp, Homo sapien
cagtcaatttccgaacaataacatc

SEQ ID NO: 2839777 - DNA, 25 bp, Homo sapien
ggtctctaaaagctccgagtactgg

SEQ ID NO: 2839778 - DNA, 25 bp, Homo sapien
tggtctctaaaagctccgagtactg

SEQ ID NO: 2839779 - DNA, 25 bp, Homo sapien
tctctaaaagctccgagtactggga

SEQ ID NO: 2839780 - DNA, 25 bp, Homo sapien
tctaaaagctccgagtactgggaag

SEQ ID NO: 2839781 - DNA, 25 bp, Homo sapien
cttgattgctctgctaactgatacc

SEQ ID NO: 2839782 - DNA, 25 bp, Homo sapien
ctgcagtgagcccaaatcgcgccac

SEQ ID NO: 2839783 - DNA, 25 bp, Homo sapien
cccttgagcccaggaagtcaagagg

SEQ ID NO: 2839784 - DNA, 25 bp, Homo sapien
aggctgcagtgagcccaaatcgcgc

SEQ ID NO: 2839785 - DNA, 25 bp, Homo sapien
agcccaggaagtcaagaggctgcag

SEQ ID NO: 2839786 - DNA, 25 bp, Homo sapien
gattaactatagaaatctaccgatg

SEQ ID NO: 2839787 - DNA, 25 bp, Homo sapien
gagtatctaacaatttctaagaccc

SEQ ID NO: 2839788 - DNA, 25 bp, Homo sapien
attagctgggcgtgtccgcaccact

SEQ ID NO: 2839789 - DNA, 25 bp, Homo sapien
gaaagtctacttacagcttaatatg

SEQ ID NO: 2839790 - DNA, 25 bp, Homo sapien
ctctcggatggaccatggctctgtg

SEQ ID NO: 2839791 - DNA, 25 bp, Homo sapien
tagcttctctcggatggaccatggc

SEQ ID NO: 2839792 - DNA, 25 bp, Homo sapien
ttctctcggatggaccatggctctg

SEQ ID NO: 2839793 - DNA, 25 bp, Homo sapien
aaacatagcttctctcggatggacc

SEQ ID NO: 2839794 - DNA, 25 bp, Homo sapien
tcttcacgatgctgtagagcgcagg

SEQ ID NO: 2839795 - DNA, 25 bp, Homo sapien
tcggatctacaaaggcctttcacgc

SEQ ID NO: 2839796 - DNA, 25 bp, Homo sapien
aatatggtgcctagcctcggatcta

SEQ ID NO: 2839797 - DNA, 25 bp, Homo sapien
cactccctaagcgtgtaacaaaaat

SEQ ID NO: 2839798 - DNA, 25 bp, Homo sapien
gagagacggtctggaagggccgaaa

SEQ ID NO: 2839799 - DNA, 25 bp, Homo sapien
cttggccccgaagtctccaaccctg

SEQ ID NO: 2839800 - DNA, 25 bp, Homo sapien
tgaggagagacggtctggaagggcc

SEQ ID NO: 2839801 - DNA, 25 bp, Homo sapien
accctgaggagagacggtctggaag

SEQ ID NO: 2839802 - DNA, 25 bp, Homo sapien
aaaccagttaccctgtgcactcctg

SEQ ID NO: 2839803 - DNA, 25 bp, Homo sapien
taggtaagaaatgtctaaggttcaa

SEQ ID NO: 2839804 - DNA, 25 bp, Homo sapien
ggctgctgaagcctcaagatttcct

SEQ ID NO: 2839805 - DNA, 25 bp, Homo sapien
cactcctgttaagattgttgctaag

SEQ ID NO: 2839806 - DNA, 25 bp, Homo sapien
tctgaattggccctacggcggtcac

SEQ ID NO: 2839807 - DNA, 25 bp, Homo sapien
ggttttcaagggatcagtgtcacaa

SEQ ID NO: 2839808 - DNA, 25 bp, Homo sapien
tctgcttccctcttaggagcgggat

SEQ ID NO: 2839809 - DNA, 25 bp, Homo sapien
tggccaggaaatcgtattaagtgct

SEQ ID NO: 2839810 - DNA, 25 bp, Homo sapien
tcagcaaatccaagagcaaggtcat

SEQ ID NO: 2839811 - DNA, 25 bp, Homo sapien
cagtaagggctatcagcagttccaa

SEQ ID NO: 2839812 - DNA, 25 bp, Homo sapien
taagaataaagtctggaccctgagc

SEQ ID NO: 2839813 - DNA, 25 bp, Homo sapien
tcagaatagggatcatgctcagcaa

SEQ ID NO: 2839814 - DNA, 25 bp, Homo sapien
tatggcgtgacagaagacaagttga

SEQ ID NO: 2839815 - DNA, 25 bp, Homo sapien
caggcacctcggtggtaggagtctc

SEQ ID NO: 2839816 - DNA, 25 bp, Homo sapien
taggagtctcgccttggttccgaag

SEQ ID NO: 2839817 - DNA, 25 bp, Homo sapien
caagttgagtggagaaactctgcgt

SEQ ID NO: 2839818 - DNA, 25 bp, Homo sapien
aatatcttatgttctagcctaaaat

SEQ ID NO: 2839819 - DNA, 25 bp, Homo sapien
cagcctcgacctcactgcagaggat

SEQ ID NO: 2839820 - DNA, 25 bp, Homo sapien
ggctttccacttaaatatcttatgt

SEQ ID NO: 2839821 - DNA, 25 bp, Homo sapien
ctcactgcagaggatcaagtgatcc

SEQ ID NO: 2839822 - DNA, 25 bp, Homo sapien
agtttgcacttaaaatagtactggg

SEQ ID NO: 2839823 - DNA, 25 bp, Homo sapien
gcacaagttgaagcttcatcccaca

SEQ ID NO: 2839824 - DNA, 25 bp, Homo sapien
gccagatagcgaaaggcagtgcttt

SEQ ID NO: 2839825 - DNA, 25 bp, Homo sapien
tagtactgggccagatagcgaaagg

SEQ ID NO: 2839826 - DNA, 25 bp, Homo sapien
acaattctcatggtatgatacatac

SEQ ID NO: 2839827 - DNA, 25 bp, Homo sapien
taatatcagcagtacaattctcatg

SEQ ID NO: 2839828 - DNA, 25 bp, Homo sapien
aagcaaaattactgaggtgacagta

SEQ ID NO: 2839829 - DNA, 25 bp, Homo sapien
gcagtacaattctcatggtatgata

SEQ ID NO: 2839830 - DNA, 25 bp, Homo sapien
gatatatttgatgtaacactgggca

SEQ ID NO: 2839831 - DNA, 25 bp, Homo sapien
tgactcagtcaactgttcatgaagc

SEQ ID NO: 2839832 - DNA, 25 bp, Homo sapien
tcttggatatatttgatgtaacact

SEQ ID NO: 2839833 - DNA, 25 bp, Homo sapien
cccacaggaatagatatcttggata

SEQ ID NO: 2839834 - DNA, 25 bp, Homo sapien
aagcaacggccctccttcaagagaa

SEQ ID NO: 2839835 - DNA, 25 bp, Homo sapien
aaagcaacggccctccttcaagaga

SEQ ID NO: 2839836 - DNA, 25 bp, Homo sapien
gaagtggcattctctaggaacaaga

SEQ ID NO: 2839837 - DNA, 25 bp, Homo sapien
agaagtggcattctctaggaacaag

SEQ ID NO: 2839838 - DNA, 25 bp, Homo sapien
aagtggcattctctaggaacaagat

SEQ ID NO: 2839839 - DNA, 25 bp, Homo sapien
cagagaagccaacagaaatatcaat

SEQ ID NO: 2839840 - DNA, 25 bp, Homo sapien
accatcccagagaagccaacagaaa

SEQ ID NO: 2839841 - DNA, 25 bp, Homo sapien
gaaatatcaatagcatttcactcct

SEQ ID NO: 2839842 - DNA, 25 bp, Homo sapien
caatagcatttcactcctttcactc

SEQ ID NO: 2839843 - DNA, 25 bp, Homo sapien
ccacggcgtaagctctccaataaca

SEQ ID NO: 2839844 - DNA, 25 bp, Homo sapien
gccagtttcaccagagccattttct

SEQ ID NO: 2839845 - DNA, 25 bp, Homo sapien
ctccacatctcccacggcgtaagct

SEQ ID NO: 2839846 - DNA, 25 bp, Homo sapien
tttgccagtttcaccagagccattt

SEQ ID NO: 2839847 - DNA, 25 bp, Homo sapien
tttggcttccactagttgattgagt

SEQ ID NO: 2839848 - DNA, 25 bp, Homo sapien
ttttggcttccactagttgattgag

SEQ ID NO: 2839849 - DNA, 25 bp, Homo sapien
tttttggcttccactagttgattga

SEQ ID NO: 2839850 - DNA, 25 bp, Homo sapien
ctgatgctccatataatagattact

SEQ ID NO: 2839851 - DNA, 25 bp, Homo sapien
tattaacccattagtgaaatatact

SEQ ID NO: 2839852 - DNA, 25 bp, Homo sapien
ttcaaatctatgcaacaactggtct

SEQ ID NO: 2839853 - DNA, 25 bp, Homo sapien
tcttttgaggaaccagtacaccact

SEQ ID NO: 2839854 - DNA, 25 bp, Homo sapien
tagcccttcccatatcagacgcatt

SEQ ID NO: 2839855 - DNA, 25 bp, Homo sapien
tatcagacgcattgtcaagtgacca

SEQ ID NO: 2839856 - DNA, 25 bp, Homo sapien
ccactgtgatttgtcaatagctatc

SEQ ID NO: 2839857 - DNA, 25 bp, Homo sapien
tccccaagagccaaaaccatccact

SEQ ID NO: 2839858 - DNA, 25 bp, Homo sapien
ataggtctgcccgaggccataccaa

SEQ ID NO: 2839859 - DNA, 25 bp, Homo sapien
catcttaaggatttcataggtctgc

SEQ ID NO: 2839860 - DNA, 25 bp, Homo sapien
aagctctgtagtcccgtttgttgac

SEQ ID NO: 2839861 - DNA, 25 bp, Homo sapien
gaagctggtgggcccgtctataata

SEQ ID NO: 2839862 - DNA, 25 bp, Homo sapien
ccaggcaccaagataccgaggattt

SEQ ID NO: 2839863 - DNA, 25 bp, Homo sapien
ggctctctggaaatataaggctgct

SEQ ID NO: 2839864 - DNA, 25 bp, Homo sapien
tataagcctggatagcagcagacgt

SEQ ID NO: 2839865 - DNA, 25 bp, Homo sapien
tactcatgtcccattagtgtccagg

SEQ ID NO: 2839866 - DNA, 25 bp, Homo sapien
gtctcactgtctaaagccagatggg

SEQ ID NO: 2839867 - DNA, 25 bp, Homo sapien
acctcccaagtcactaagactactg

SEQ ID NO: 2839868 - DNA, 25 bp, Homo sapien
tactgaagctagtaattatgcctgg

SEQ ID NO: 2839869 - DNA, 25 bp, Homo sapien
gaatcgttgtagtagtagaaaccca

SEQ ID NO: 2839870 - DNA, 25 bp, Homo sapien
cacgtttctacacgatatttatcaa

SEQ ID NO: 2839871 - DNA, 25 bp, Homo sapien
caattacacagcacgtttctacacg

SEQ ID NO: 2839872 - DNA, 25 bp, Homo sapien
aatctcacagaggttatgagccaga

SEQ ID NO: 2839873 - DNA, 25 bp, Homo sapien
tatcaatctcacagaggttatgagc

SEQ ID NO: 2839874 - DNA, 25 bp, Homo sapien
tgtaagggtcttgtttccttagctc

SEQ ID NO: 2839875 - DNA, 25 bp, Homo sapien
ctgtaagggtcttgtttccttagct

SEQ ID NO: 2839876 - DNA, 25 bp, Homo sapien
aaggttggagaatgtgtccatattt

SEQ ID NO: 2839877 - DNA, 25 bp, Homo sapien
gaatgtgtccatattttcaatcctg

SEQ ID NO: 2839878 - DNA, 25 bp, Homo sapien
gagattctgatacttttgcagggcc

SEQ ID NO: 2839879 - DNA, 25 bp, Homo sapien
tctgatattgtgataggcaactgca

SEQ ID NO: 2839880 - DNA, 25 bp, Homo sapien
gaagcccacatcaatgagattctga

SEQ ID NO: 2839881 - DNA, 25 bp, Homo sapien
gggaaacaatatacgagctcttaga

SEQ ID NO: 2839882 - DNA, 25 bp, Homo sapien
gaactataaccaaagccctgccaaa

SEQ ID NO: 2839883 - DNA, 25 bp, Homo sapien
cagaattacaaaaggcttgaagcag

SEQ ID NO: 2839884 - DNA, 25 bp, Homo sapien
tccaaaacagcgaaaagacaccaga

SEQ ID NO: 2839885 - DNA, 25 bp, Homo sapien
tttcacatagctcatcacaatttac

SEQ ID NO: 2839886 - DNA, 25 bp, Homo sapien
gggcaaaacatgagtagcttccaca

SEQ ID NO: 2839887 - DNA, 25 bp, Homo sapien
catctctttgtctgtgatcaggtta

SEQ ID NO: 2839888 - DNA, 25 bp, Homo sapien
cagttttcgaagcaccacaccatac

SEQ ID NO: 2839889 - DNA, 25 bp, Homo sapien
aatggcctctttaaccaagtccagt

SEQ ID NO: 2839890 - DNA, 25 bp, Homo sapien
tcgagcttggtgttttttgctgagc

SEQ ID NO: 2839891 - DNA, 25 bp, Homo sapien
tctaagcgcctcatttttcacttgt

SEQ ID NO: 2839892 - DNA, 25 bp, Homo sapien
gataaagtccaaatccatcaagttc

SEQ ID NO: 2839893 - DNA, 25 bp, Homo sapien
aaatccatcaagttctcgagcttgg

SEQ ID NO: 2839894 - DNA, 25 bp, Homo sapien
tatcaactgtttcatcgtccttctt

SEQ ID NO: 2839895 - DNA, 25 bp, Homo sapien
ctaagctatcaactgtttcatcgtc

SEQ ID NO: 2839896 - DNA, 25 bp, Homo sapien
aagctatcaactgtttcatcgtcct

SEQ ID NO: 2839897 - DNA, 25 bp, Homo sapien
gctatcaactgtttcatcgtccttc

SEQ ID NO: 2839898 - DNA, 25 bp, Homo sapien
acttatcctgttagtcattcctaag

SEQ ID NO: 2839899 - DNA, 25 bp, Homo sapien
tattaattcacaggcatgaagaacc

SEQ ID NO: 2839900 - DNA, 25 bp, Homo sapien
tactaggaaatgagaagtacataaa

SEQ ID NO: 2839901 - DNA, 25 bp, Homo sapien
taagttggtttacttgcattgtcct

SEQ ID NO: 2839902 - DNA, 25 bp, Homo sapien
tctaaatatggatgtttcactaaag

SEQ ID NO: 2839903 - DNA, 25 bp, Homo sapien
aatatggatgtttcactaaaggcag

SEQ ID NO: 2839904 - DNA, 25 bp, Homo sapien
tcactaaaggcagaatgacatttta

SEQ ID NO: 2839905 - DNA, 25 bp, Homo sapien
ttggttctaaatatggatgtttcac

SEQ ID NO: 2839906 - DNA, 25 bp, Homo sapien
atgcaggaaatgtgctgcccgatca

SEQ ID NO: 2839907 - DNA, 25 bp, Homo sapien
agatatctggaatacatatacagaa

SEQ ID NO: 2839908 - DNA, 25 bp, Homo sapien
caggaaatgtgctgcccgatcatac

SEQ ID NO: 2839909 - DNA, 25 bp, Homo sapien
tttcttgctattgcagccatgcagg

SEQ ID NO: 2839910 - DNA, 25 bp, Homo sapien
gggtataggcatccatatcctgggc

SEQ ID NO: 2839911 - DNA, 25 bp, Homo sapien
taggccttggccagggtataggcat

SEQ ID NO: 2839912 - DNA, 25 bp, Homo sapien
tggccagggtataggcatccatatc

SEQ ID NO: 2839913 - DNA, 25 bp, Homo sapien
ttaacgtcaaagtaggccttggcca

SEQ ID NO: 2839914 - DNA, 25 bp, Homo sapien
aaattcacagttttggccaggcacg

SEQ ID NO: 2839915 - DNA, 25 bp, Homo sapien
aaaaattcacagttttggccaggca

SEQ ID NO: 2839916 - DNA, 25 bp, Homo sapien
aaaattcacagttttggccaggcac

SEQ ID NO: 2839917 - DNA, 25 bp, Homo sapien
tctagtttacactttagatcaaaac

SEQ ID NO: 2839918 - DNA, 25 bp, Homo sapien
actttagatcaaaacattactctgg

SEQ ID NO: 2839919 - DNA, 25 bp, Homo sapien
gtttacactttagatcaaaacatta

SEQ ID NO: 2839920 - DNA, 25 bp, Homo sapien
tttactctagtttacactttagatc

SEQ ID NO: 2839921 - DNA, 25 bp, Homo sapien
gagagagaaagccaactccgccgac

SEQ ID NO: 2839922 - DNA, 25 bp, Homo sapien
ctctgtaataggcggaggcggttgc

SEQ ID NO: 2839923 - DNA, 25 bp, Homo sapien
gtaataggcggaggcggttgcagct

SEQ ID NO: 2839924 - DNA, 25 bp, Homo sapien
cggaggcggttgcagctcggccaga

SEQ ID NO: 2839925 - DNA, 25 bp, Homo sapien
cacaaactagatcagctcgacaagc

SEQ ID NO: 2839926 - DNA, 25 bp, Homo sapien
acaaactagatcagctcgacaagcc

SEQ ID NO: 2839927 - DNA, 25 bp, Homo sapien
ccacacaaactagatcagctcgaca

SEQ ID NO: 2839928 - DNA, 25 bp, Homo sapien
aaactagatcagctcgacaagcccc

SEQ ID NO: 2839929 - DNA, 25 bp, Homo sapien
ggtaaggcccgcaataagcagcagt

SEQ ID NO: 2839930 - DNA, 25 bp, Homo sapien
tttatggacaggacaggcgccactg

SEQ ID NO: 2839931 - DNA, 25 bp, Homo sapien
catttgctactgtgtagtaggcccc

SEQ ID NO: 2839932 - DNA, 25 bp, Homo sapien
ttcccgcaaatctgagaaatcgctg

SEQ ID NO: 2839933 - DNA, 25 bp, Homo sapien
gggccgtgtcaagcatgtaaatttc

SEQ ID NO: 2839934 - DNA, 25 bp, Homo sapien
tggacattaacctgtctcctagaag

SEQ ID NO: 2839935 - DNA, 25 bp, Homo sapien
tatcacattctggatacatccatgg

SEQ ID NO: 2839936 - DNA, 25 bp, Homo sapien
aaagagttgaaaatacctgtggaca

SEQ ID NO: 2839937 - DNA, 25 bp, Homo sapien
tgttcattcatcaaggacagtttct

SEQ ID NO: 2839938 - DNA, 25 bp, Homo sapien
gacctccacagattctctagtcttc

SEQ ID NO: 2839939 - DNA, 25 bp, Homo sapien
cagcaaactttggtctctgtaaccc

SEQ ID NO: 2839940 - DNA, 25 bp, Homo sapien
tgtgagttgagctcctatccgtaac

SEQ ID NO: 2839941 - DNA, 25 bp, Homo sapien
gtttaatggcattaaccatcccaga

SEQ ID NO: 2839942 - DNA, 25 bp, Homo sapien
tcccagacagccataacaccattaa

SEQ ID NO: 2839943 - DNA, 25 bp, Homo sapien
cacattgttgcccagaagctagttt

SEQ ID NO: 2839944 - DNA, 25 bp, Homo sapien
tgctgccgaaagtccttcccacatt

SEQ ID NO: 2839945 - DNA, 25 bp, Homo sapien
ggatctggaggtcataacccttagc

SEQ ID NO: 2839946 - DNA, 25 bp, Homo sapien
cagatgacatggctaaattgtggcc

SEQ ID NO: 2839947 - DNA, 25 bp, Homo sapien
tgcccagatgttcggcaggatccgg

SEQ ID NO: 2839948 - DNA, 25 bp, Homo sapien
gaatgactttctaggctgcctcaga

SEQ ID NO: 2839949 - DNA, 25 bp, Homo sapien
taggctcaggagcagaatcaaggga

SEQ ID NO: 2839950 - DNA, 25 bp, Homo sapien
tcaggagcagaatcaagggaagcgt

SEQ ID NO: 2839951 - DNA, 25 bp, Homo sapien
cataggctcaggagcagaatcaagg

SEQ ID NO: 2839952 - DNA, 25 bp, Homo sapien
ctaccataggctcaggagcagaatc

SEQ ID NO: 2839953 - DNA, 25 bp, Homo sapien
tggtgtgccatcacagcaaaggtag

SEQ ID NO: 2839954 - DNA, 25 bp, Homo sapien
cgcatcttagctgcaatggcctccg

SEQ ID NO: 2839955 - DNA, 25 bp, Homo sapien
tggctgtgaaaacgcatcttagctg

SEQ ID NO: 2839956 - DNA, 25 bp, Homo sapien
tgccatcacagcaaaggtagggtgt

SEQ ID NO: 2839957 - DNA, 25 bp, Homo sapien
aggtgcagcttaaggcaacactggt

SEQ ID NO: 2839958 - DNA, 25 bp, Homo sapien
gggagaagaacccttccagcatttc

SEQ ID NO: 2839959 - DNA, 25 bp, Homo sapien
gcaacactggtgttgacattgctga

SEQ ID NO: 2839960 - DNA, 25 bp, Homo sapien
cattgctgacaaagttgggggtcat

SEQ ID NO: 2839961 - DNA, 25 bp, Homo sapien
atctggactgctctgttgcacaagt

SEQ ID NO: 2839962 - DNA, 25 bp, Homo sapien
caatcagccccaggtatgctcgtag

SEQ ID NO: 2839963 - DNA, 25 bp, Homo sapien
gttgcacaagttcctaggatgtcca

SEQ ID NO: 2839964 - DNA, 25 bp, Homo sapien
tgctcgtagacatctggactgctct

SEQ ID NO: 2839965 - DNA, 25 bp, Homo sapien
tctcgaagaaagtgagcagctgcct

SEQ ID NO: 2839966 - DNA, 25 bp, Homo sapien
gtaggccttgcgcagccggtcacac

SEQ ID NO: 2839967 - DNA, 25 bp, Homo sapien
tgtcattgagagtacacagcatggc

SEQ ID NO: 2839968 - DNA, 25 bp, Homo sapien
catggcaaacttgaggcagaggtct

SEQ ID NO: 2839969 - DNA, 25 bp, Homo sapien
tgtgtcttcatagggggagacatcc

SEQ ID NO: 2839970 - DNA, 25 bp, Homo sapien
tagggggagacatccagctcatagt

SEQ ID NO: 2839971 - DNA, 25 bp, Homo sapien
ctggtttgagcatgttcagtttgct

SEQ ID NO: 2839972 - DNA, 25 bp, Homo sapien
ggtttgagcatgttcagtttgctga

SEQ ID NO: 2839973 - DNA, 25 bp, Homo sapien
cttcatgcgccggtggcacatgcag

SEQ ID NO: 2839974 - DNA, 25 bp, Homo sapien
ggtccaatagatgtccaagcaggca

SEQ ID NO: 2839975 - DNA, 25 bp, Homo sapien
agtcagcagggaccgaaggctcctc

SEQ ID NO: 2839976 - DNA, 25 bp, Homo sapien
cagcctatcagagagctgttcctga

SEQ ID NO: 2839977 - DNA, 25 bp, Homo sapien
cagctgttcatgagtcggctttctg

SEQ ID NO: 2839978 - DNA, 25 bp, Homo sapien
acagctgttcatgagtcggctttct

SEQ ID NO: 2839979 - DNA, 25 bp, Homo sapien
ctgttcatgagtcggctttctgtgg

SEQ ID NO: 2839980 - DNA, 25 bp, Homo sapien
gtggtggtaggcagcactgcaggtg

SEQ ID NO: 2839981 - DNA, 25 bp, Homo sapien
tttgttgaagcaataggtcagacgt

SEQ ID NO: 2839982 - DNA, 25 bp, Homo sapien
ggtcagacgtttgccaaaataatgt

SEQ ID NO: 2839983 - DNA, 25 bp, Homo sapien
cctgacgaaggtgactatttttgct

SEQ ID NO: 2839984 - DNA, 25 bp, Homo sapien
tcatctgaagggtactcctgacgaa

SEQ ID NO: 2839985 - DNA, 25 bp, Homo sapien
gatttaggggcattcatctcaacaa

SEQ ID NO: 2839986 - DNA, 25 bp, Homo sapien
ctcaacaaggtggaacctgtgtttc

SEQ ID NO: 2839987 - DNA, 25 bp, Homo sapien
caagtttgagcagtgatggatttag

SEQ ID NO: 2839988 - DNA, 25 bp, Homo sapien
tgggggccacgttaaatttcatctc

SEQ ID NO: 2839989 - DNA, 25 bp, Homo sapien
ctaaaaccaggccttgaactacatc

SEQ ID NO: 2839990 - DNA, 25 bp, Homo sapien
ccttccagggatctcggatcccagg

SEQ ID NO: 2839991 - DNA, 25 bp, Homo sapien
aaaccaggccttgaactacatctac

SEQ ID NO: 2839992 - DNA, 25 bp, Homo sapien
ttccagggatctcggatcccaggct

SEQ ID NO: 2839993 - DNA, 25 bp, Homo sapien
aaagcagatggaagagttaaagccc

SEQ ID NO: 2839994 - DNA, 25 bp, Homo sapien
tgatctgattctccccgcctcttag

SEQ ID NO: 2839995 - DNA, 25 bp, Homo sapien
gtttcttcctcagtccttaaagcag

SEQ ID NO: 2839996 - DNA, 25 bp, Homo sapien
tagagacgctgtcttggtagtgacc

SEQ ID NO: 2839997 - DNA, 25 bp, Homo sapien
ggagatgcttgggtggccaggccat

SEQ ID NO: 2839998 - DNA, 25 bp, Homo sapien
cgaggaggagatgcttgggtggcca

SEQ ID NO: 2839999 - DNA, 25 bp, Homo sapien
ggcgaggaggagatgcttgggtggc

SEQ ID NO: 2840000 - DNA, 25 bp, Homo sapien
ggaggagatgcttgggtggccaggc

SEQ ID NO: 2840001 - DNA, 25 bp, Homo sapien
aacatcaggactacgggcggcagcg

SEQ ID NO: 2840002 - DNA, 25 bp, Homo sapien
cagcggtcgcgggttcagggggcgc

SEQ ID NO: 2840003 - DNA, 25 bp, Homo sapien
agcaacatcaggactacgggcggca

SEQ ID NO: 2840004 - DNA, 25 bp, Homo sapien
gcagcaacatcaggactacgggcgg

SEQ ID NO: 2840005 - DNA, 25 bp, Homo sapien
cctccagcgcgacgcacacactctc

SEQ ID NO: 2840006 - DNA, 25 bp, Homo sapien
cgccctccaactccgaagcgcgcgt

SEQ ID NO: 2840007 - DNA, 25 bp, Homo sapien
tccagcgctggtccgagggaccgcg

SEQ ID NO: 2840008 - DNA, 25 bp, Homo sapien
aagcgcgcgtccacaccacgcgcct

SEQ ID NO: 2840009 - DNA, 25 bp, Homo sapien
caagttcgactagcaagacattgtg

SEQ ID NO: 2840010 - DNA, 25 bp, Homo sapien
gaagctgccgctggaaactcgccat

SEQ ID NO: 2840011 - DNA, 25 bp, Homo sapien
tgtctgacaagttcgactagcaaga

SEQ ID NO: 2840012 - DNA, 25 bp, Homo sapien
ttcgactagcaagacattgtggaag

SEQ ID NO: 2840013 - DNA, 25 bp, Homo sapien
agtactgagaatcgcaatataaacc

SEQ ID NO: 2840014 - DNA, 25 bp, Homo sapien
agggagtactgagaatcgcaatata

SEQ ID NO: 2840015 - DNA, 25 bp, Homo sapien
aacctctgagatttattggctgctg

SEQ ID NO: 2840016 - DNA, 25 bp, Homo sapien
gagaatcgcaatataaacctctgag

SEQ ID NO: 2840017 - DNA, 25 bp, Homo sapien
tgggggtgtaaatcacccttggcaa

SEQ ID NO: 2840018 - DNA, 25 bp, Homo sapien
ggcatttgccgatgtaatcagccca

SEQ ID NO: 2840019 - DNA, 25 bp, Homo sapien
ttccagctgggggtgtaaatcaccc

SEQ ID NO: 2840020 - DNA, 25 bp, Homo sapien
gccgatgtaatcagcccagaaagag

SEQ ID NO: 2840021 - DNA, 25 bp, Homo sapien
tgcatagcccgaagcccagagagaa

SEQ ID NO: 2840022 - DNA, 25 bp, Homo sapien
caaatctctatgcaactcaaggctg

SEQ ID NO: 2840023 - DNA, 25 bp, Homo sapien
gaaggtagacaacgctcttgcatag

SEQ ID NO: 2840024 - DNA, 25 bp, Homo sapien
tcaaggctgccttatagagccagct

SEQ ID NO: 2840025 - DNA, 25 bp, Homo sapien
tgctcagggtttctgcagtgtcttt

SEQ ID NO: 2840026 - DNA, 25 bp, Homo sapien
actttgctctggcttcgacacctca

SEQ ID NO: 2840027 - DNA, 25 bp, Homo sapien
acctcagcaactcagtcttgtggtc

SEQ ID NO: 2840028 - DNA, 25 bp, Homo sapien
ctgatgatgcatagggcagtagctc

SEQ ID NO: 2840029 - DNA, 25 bp, Homo sapien
tgatgatgcatagggcagtagctct

SEQ ID NO: 2840030 - DNA, 25 bp, Homo sapien
atgcatagggcagtagctctgtggt

SEQ ID NO: 2840031 - DNA, 25 bp, Homo sapien
tgatgcatagggcagtagctctgtg

SEQ ID NO: 2840032 - DNA, 25 bp, Homo sapien
cctatgaaggataatagagatgctg

SEQ ID NO: 2840033 - DNA, 25 bp, Homo sapien
taaagtttggctccccgcatgcccc

SEQ ID NO: 2840034 - DNA, 25 bp, Homo sapien
tatgaaggataatagagatgctgct

SEQ ID NO: 2840035 - DNA, 25 bp, Homo sapien
tacctatgaaggataatagagatgc

SEQ ID NO: 2840036 - DNA, 25 bp, Homo sapien
gaagtctctgtagccgcctttaagg

SEQ ID NO: 2840037 - DNA, 25 bp, Homo sapien
aggatactggttcagagacctgtcc

SEQ ID NO: 2840038 - DNA, 25 bp, Homo sapien
tagctctgggtagtacaatgcagga

SEQ ID NO: 2840039 - DNA, 25 bp, Homo sapien
tgtcctcttcacgcagacagcggca

SEQ ID NO: 2840040 - DNA, 25 bp, Homo sapien
caaaaaggactttccaatctccctg

SEQ ID NO: 2840041 - DNA, 25 bp, Homo sapien
gggagaggagtagactattgccaac

SEQ ID NO: 2840042 - DNA, 25 bp, Homo sapien
gagaggagtagactattgccaacct

SEQ ID NO: 2840043 - DNA, 25 bp, Homo sapien
ggagtagactattgccaacctcaaa

SEQ ID NO: 2840044 - DNA, 25 bp, Homo sapien
cagtggaacacgatgattattctct

SEQ ID NO: 2840045 - DNA, 25 bp, Homo sapien
gcccctctctgaggagaattcacag

SEQ ID NO: 2840046 - DNA, 25 bp, Homo sapien
tgtccaaagggacgatgggcttctt

SEQ ID NO: 2840047 - DNA, 25 bp, Homo sapien
gggacgatgggcttcttcagaaaga

SEQ ID NO: 2840048 - DNA, 25 bp, Homo sapien
tggaacttccccgacagtaaggcag

SEQ ID NO: 2840049 - DNA, 25 bp, Homo sapien
tatggatagcgacaatcaatgacat

SEQ ID NO: 2840050 - DNA, 25 bp, Homo sapien
cataaaacttctcaatcagaccctg

SEQ ID NO: 2840051 - DNA, 25 bp, Homo sapien
tggatgtgtcctcccagatactcat

SEQ ID NO: 2840052 - DNA, 25 bp, Homo sapien
tagataccttattgatatagaaaga

SEQ ID NO: 2840053 - DNA, 25 bp, Homo sapien
agatgtctataatgtctcactaagc

SEQ ID NO: 2840054 - DNA, 25 bp, Homo sapien
caatactatacgttcatcatgatcc

SEQ ID NO: 2840055 - DNA, 25 bp, Homo sapien
tacatgtcagtagaatagagcggca

SEQ ID NO: 2840056 - DNA, 25 bp, Homo sapien
ggttgacatacttcagatcttggtg

SEQ ID NO: 2840057 - DNA, 25 bp, Homo sapien
cctgacacggttggcagcgcacata

SEQ ID NO: 2840058 - DNA, 25 bp, Homo sapien
ttctgggttgacatacttcagatct

SEQ ID NO: 2840059 - DNA, 25 bp, Homo sapien
ggtgtttccctgacacggttggcag

SEQ ID NO: 2840060 - DNA, 25 bp, Homo sapien
tacaccaggcattctcggcaaacag

SEQ ID NO: 2840061 - DNA, 25 bp, Homo sapien
ttctgcaattacacagacagtaggg

SEQ ID NO: 2840062 - DNA, 25 bp, Homo sapien
ggcttagggcctggatctaccacta

SEQ ID NO: 2840063 - DNA, 25 bp, Homo sapien
tacttggtgaggatgcatatttaca

SEQ ID NO: 2840064 - DNA, 25 bp, Homo sapien
ccagcatctgagtgatagtaatgtc

SEQ ID NO: 2840065 - DNA, 25 bp, Homo sapien
ggtgcccctggttagaatcttcctc

SEQ ID NO: 2840066 - DNA, 25 bp, Homo sapien
aaaatcaccaatcaggtgcccctgg

SEQ ID NO: 2840067 - DNA, 25 bp, Homo sapien
tgagtgatagtaatgtcacacagag

SEQ ID NO: 2840068 - DNA, 25 bp, Homo sapien
ttctctggcatcgacggggagcgat

SEQ ID NO: 2840069 - DNA, 25 bp, Homo sapien
catcgacggggagcgatataggcca

SEQ ID NO: 2840070 - DNA, 25 bp, Homo sapien
agcgatataggccacttctgctcac

SEQ ID NO: 2840071 - DNA, 25 bp, Homo sapien
ttaactttatctggtattgtgttgt

SEQ ID NO: 2840072 - DNA, 25 bp, Homo sapien
taaggttacgacaatctccaaggag

SEQ ID NO: 2840073 - DNA, 25 bp, Homo sapien
taacttaataccagcttgtccggga

SEQ ID NO: 2840074 - DNA, 25 bp, Homo sapien
caagtggtggcatcctgagctcaat

SEQ ID NO: 2840075 - DNA, 25 bp, Homo sapien
catagcctaaagaccctgcgtgatc

SEQ ID NO: 2840076 - DNA, 25 bp, Homo sapien
cacctgggtttaagttcaagcgatt

SEQ ID NO: 2840077 - DNA, 25 bp, Homo sapien
caattttggaacagtagtaatggga

SEQ ID NO: 2840078 - DNA, 25 bp, Homo sapien
agggaaaactccattaattcatctg

SEQ ID NO: 2840079 - DNA, 25 bp, Homo sapien
aatgggactgcccaaatatttcatt

SEQ ID NO: 2840080 - DNA, 25 bp, Homo sapien
ttcagggaaaactccattaattcat

SEQ ID NO: 2840081 - DNA, 25 bp, Homo sapien
acctgtccattcactgcactggagt

SEQ ID NO: 2840082 - DNA, 25 bp, Homo sapien
gtccattcactgcactggagtgcag

SEQ ID NO: 2840083 - DNA, 25 bp, Homo sapien
ctggagtgcagtggtgtaatctcag

SEQ ID NO: 2840084 - DNA, 25 bp, Homo sapien
ctgtccattcactgcactggagtgc

SEQ ID NO: 2840085 - DNA, 25 bp, Homo sapien
gaagagcagctatcttttatggtaa

SEQ ID NO: 2840086 - DNA, 25 bp, Homo sapien
ctatcttagtgatgaggtggctccg

SEQ ID NO: 2840087 - DNA, 25 bp, Homo sapien
tagatgagggattagatacagaact

SEQ ID NO: 2840088 - DNA, 25 bp, Homo sapien
tccggagaggctagatttaacttgg

SEQ ID NO: 2840089 - DNA, 25 bp, Homo sapien
gccacggtccaaaccattcggagtg

SEQ ID NO: 2840090 - DNA, 25 bp, Homo sapien
agatgaactacacattgcatctctc

SEQ ID NO: 2840091 - DNA, 25 bp, Homo sapien
tctttctatggccacggtccaaacc

SEQ ID NO: 2840092 - DNA, 25 bp, Homo sapien
tgaactacacattgcatctctcttt

SEQ ID NO: 2840093 - DNA, 25 bp, Homo sapien
gctgagaacgtccagcatcctcaag

SEQ ID NO: 2840094 - DNA, 25 bp, Homo sapien
ttgctgagaacgtccagcatcctca

SEQ ID NO: 2840095 - DNA, 25 bp, Homo sapien
tgctgagaacgtccagcatcctcaa

SEQ ID NO: 2840096 - DNA, 25 bp, Homo sapien
tttgctgagaacgtccagcatcctc

SEQ ID NO: 2840097 - DNA, 25 bp, Homo sapien
acatttcattaggtgctggtcatga

SEQ ID NO: 2840098 - DNA, 25 bp, Homo sapien
tacatttcattaggtgctggtcatg

SEQ ID NO: 2840099 - DNA, 25 bp, Homo sapien
tttcattaggtgctggtcatgattc

SEQ ID NO: 2840100 - DNA, 25 bp, Homo sapien
catttcattaggtgctggtcatgat

SEQ ID NO: 2840101 - DNA, 25 bp, Homo sapien
tcccagctaaatgcacttcctgaag

SEQ ID NO: 2840102 - DNA, 25 bp, Homo sapien
tgaagtcctgaagaatccaggtgac

SEQ ID NO: 2840103 - DNA, 25 bp, Homo sapien
atcccagctaaatgcacttcctgaa

SEQ ID NO: 2840104 - DNA, 25 bp, Homo sapien
cccagctaaatgcacttcctgaagt

SEQ ID NO: 2840105 - DNA, 25 bp, Homo sapien
tacaaagcctctcgattggtaccca

SEQ ID NO: 2840106 - DNA, 25 bp, Homo sapien
acactacactatgctacctatggag

SEQ ID NO: 2840107 - DNA, 25 bp, Homo sapien
caaggactgagcttttgaatacaaa

SEQ ID NO: 2840108 - DNA, 25 bp, Homo sapien
tacaaggtacaatttcacagaaacg

SEQ ID NO: 2840109 - DNA, 25 bp, Homo sapien
tccccactgctaagattcgaaagat

SEQ ID NO: 2840110 - DNA, 25 bp, Homo sapien
ctgcagaagtggtaagctgagtggc

SEQ ID NO: 2840111 - DNA, 25 bp, Homo sapien
tcgaaagatcgaggcaacgttttgg

SEQ ID NO: 2840112 - DNA, 25 bp, Homo sapien
tgagtggcagttatctccccactgc

SEQ ID NO: 2840113 - DNA, 25 bp, Homo sapien
tctagggacatctggacagacggta

SEQ ID NO: 2840114 - DNA, 25 bp, Homo sapien
tcttgtggatgagaagagttccgta

SEQ ID NO: 2840115 - DNA, 25 bp, Homo sapien
gacggtaaaggaagtgtctctctcc

SEQ ID NO: 2840116 - DNA, 25 bp, Homo sapien
gaaatttgcccactggagttctagg

SEQ ID NO: 2840117 - DNA, 25 bp, Homo sapien
ggtcttcgaattctcaccaggagaa

SEQ ID NO: 2840118 - DNA, 25 bp, Homo sapien
ttcgaattctcaccaggagaaaaac

SEQ ID NO: 2840119 - DNA, 25 bp, Homo sapien
tcttcgaattctcaccaggagaaaa

SEQ ID NO: 2840120 - DNA, 25 bp, Homo sapien
gaattctcaccaggagaaaaacaaa

SEQ ID NO: 2840121 - DNA, 25 bp, Homo sapien
gacgagaggcaaccttaggacctta

SEQ ID NO: 2840122 - DNA, 25 bp, Homo sapien
ttttgacttgttccacgccacacag

SEQ ID NO: 2840123 - DNA, 25 bp, Homo sapien
cacacagctcgagactcctgactag

SEQ ID NO: 2840124 - DNA, 25 bp, Homo sapien
agctcgagactcctgactagaaaga

SEQ ID NO: 2840125 - DNA, 25 bp, Homo sapien
ctcaagcctggagtctgaggcttgc

SEQ ID NO: 2840126 - DNA, 25 bp, Homo sapien
ggtaggccaacgtcggactcagagt

SEQ ID NO: 2840127 - DNA, 25 bp, Homo sapien
tcggacacaggcgaagacttgagca

SEQ ID NO: 2840128 - DNA, 25 bp, Homo sapien
tccctgagcagaaggccaaagttac

SEQ ID NO: 2840129 - DNA, 25 bp, Homo sapien
gcaagaatatcaacagccgcaggcg

SEQ ID NO: 2840130 - DNA, 25 bp, Homo sapien
gaagtggaaatatagcgccgtcaac

SEQ ID NO: 2840131 - DNA, 25 bp, Homo sapien
tgtctccctaaaccatctgtgatgc

SEQ ID NO: 2840132 - DNA, 25 bp, Homo sapien
gcaagcaactgaaccgcctatgatg

SEQ ID NO: 2840133 - DNA, 25 bp, Homo sapien
taagagccagaaaccatcaacccaa

SEQ ID NO: 2840134 - DNA, 25 bp, Homo sapien
gagcaggccctaatccgcgcttgga

SEQ ID NO: 2840135 - DNA, 25 bp, Homo sapien
aaggttcaggccgatccggcagctg

SEQ ID NO: 2840136 - DNA, 25 bp, Homo sapien
gtccccgcaaccattataagtcctg

SEQ ID NO: 2840137 - DNA, 25 bp, Homo sapien
gcactgtggctaattgcgtgacgcg

SEQ ID NO: 2840138 - DNA, 25 bp, Homo sapien
gacactttgagagagacacgacacg

SEQ ID NO: 2840139 - DNA, 25 bp, Homo sapien
tgactcgttagtgaggaaaccaccc

SEQ ID NO: 2840140 - DNA, 25 bp, Homo sapien
tcagggactcgttggttcgcgccag

SEQ ID NO: 2840141 - DNA, 25 bp, Homo sapien
gtttcaagatgtgcctccaactggg

SEQ ID NO: 2840142 - DNA, 25 bp, Homo sapien
gagctggaggaaccgcggtaggtgg

SEQ ID NO: 2840143 - DNA, 25 bp, Homo sapien
ggggcgaaccgagcgctcagagctg

SEQ ID NO: 2840144 - DNA, 25 bp, Homo sapien
ggagctggaggaaccgcggtaggtg

SEQ ID NO: 2840145 - DNA, 25 bp, Homo sapien
cgtggggcgaaccgagcgctcagag

SEQ ID NO: 2840146 - DNA, 25 bp, Homo sapien
tgcatagatgtacagtggcttattt

SEQ ID NO: 2840147 - DNA, 25 bp, Homo sapien
tatatagctacatattattacactg

SEQ ID NO: 2840148 - DNA, 25 bp, Homo sapien
cttgtttggatacataaaactgtag

SEQ ID NO: 2840149 - DNA, 25 bp, Homo sapien
gatctttccctatcagaatgctgag

SEQ ID NO: 2840150 - DNA, 25 bp, Homo sapien
taagtaccttggtagggctggcacc

SEQ ID NO: 2840151 - DNA, 25 bp, Homo sapien
tcttgagtagagttgcacacagcac

SEQ ID NO: 2840152 - DNA, 25 bp, Homo sapien
gaaggccctatattggtccccagca

SEQ ID NO: 2840153 - DNA, 25 bp, Homo sapien
agaagtggcattcagtccccagcag

SEQ ID NO: 2840154 - DNA, 25 bp, Homo sapien
ggtagaaggccacctaactgttcca

SEQ ID NO: 2840155 - DNA, 25 bp, Homo sapien
ccaagcaaccttgtgtactacagtg

SEQ ID NO: 2840156 - DNA, 25 bp, Homo sapien
gaattcagattccatagacctaggc

SEQ ID NO: 2840157 - DNA, 25 bp, Homo sapien
gcaggatgttatactgtggcccagg

SEQ ID NO: 2840158 - DNA, 25 bp, Homo sapien
gcagtggcatgtggttaaagaagct

SEQ ID NO: 2840159 - DNA, 25 bp, Homo sapien
ctgccctggaaacaaaggaagggct

SEQ ID NO: 2840160 - DNA, 25 bp, Homo sapien
tggttaaagaagcttagaattacag

SEQ ID NO: 2840161 - DNA, 25 bp, Homo sapien
catgtggttaaagaagcttagaatt

SEQ ID NO: 2840162 - DNA, 25 bp, Homo sapien
aaatctctgtatgggagaaaatccc

SEQ ID NO: 2840163 - DNA, 25 bp, Homo sapien
caactacagcttatgggccatgtgc

SEQ ID NO: 2840164 - DNA, 25 bp, Homo sapien
tgagaaactagccttggacattggg

SEQ ID NO: 2840165 - DNA, 25 bp, Homo sapien
agttcctggcacatgaaaagtgctg

SEQ ID NO: 2840166 - DNA, 25 bp, Homo sapien
agattggggcggagcgctgcgaggg

SEQ ID NO: 2840167 - DNA, 25 bp, Homo sapien
tgcgctgcgccggtggttggtggtg

SEQ ID NO: 2840168 - DNA, 25 bp, Homo sapien
ctgtcgccccgctccagagcgcggg

SEQ ID NO: 2840169 - DNA, 25 bp, Homo sapien
cccggggagattggggcggagcgct

SEQ ID NO: 2840170 - DNA, 25 bp, Homo sapien
ctagcggtgagtggcggccgagtcg

SEQ ID NO: 2840171 - DNA, 25 bp, Homo sapien
gccgagtcgggcactcgaggccggg

SEQ ID NO: 2840172 - DNA, 25 bp, Homo sapien
tggcggccgagtcgggcactcgagg

SEQ ID NO: 2840173 - DNA, 25 bp, Homo sapien
tgagtggcggccgagtcgggcactc

SEQ ID NO: 2840174 - DNA, 25 bp, Homo sapien
gaagtgaaagcatatccgccctatt

SEQ ID NO: 2840175 - DNA, 25 bp, Homo sapien
ggcaagtgagatgagggacctaatt

SEQ ID NO: 2840176 - DNA, 25 bp, Homo sapien
tatccagaagttaccagagaagtga

SEQ ID NO: 2840177 - DNA, 25 bp, Homo sapien
gagtgaccagttgtggcaacactaa

SEQ ID NO: 2840178 - DNA, 25 bp, Homo sapien
tattttatatgtgctaatcttctgc

SEQ ID NO: 2840179 - DNA, 25 bp, Homo sapien
tcttctgcctacatgatgaaaaaga

SEQ ID NO: 2840180 - DNA, 25 bp, Homo sapien
ggcgtgtgcctatactctcatctat

SEQ ID NO: 2840181 - DNA, 25 bp, Homo sapien
ggtacagtttaccaatgagagaatg

SEQ ID NO: 2840182 - DNA, 25 bp, Homo sapien
tcattggcccataggtacattggaa

SEQ ID NO: 2840183 - DNA, 25 bp, Homo sapien
cagctgtactgtagtgccctgcagg

SEQ ID NO: 2840184 - DNA, 25 bp, Homo sapien
tagtcttaccttgagggaacagtca

SEQ ID NO: 2840185 - DNA, 25 bp, Homo sapien
ggaagtctgatagcgtctctgcacg

SEQ ID NO: 2840186 - DNA, 25 bp, Homo sapien
gtgtggggagggcaccgagcctggg

SEQ ID NO: 2840187 - DNA, 25 bp, Homo sapien
tgaggacagtgtggggagggcaccg

SEQ ID NO: 2840188 - DNA, 25 bp, Homo sapien
ggagggcaccgagcctggggctgct

SEQ ID NO: 2840189 - DNA, 25 bp, Homo sapien
ggactgggtgaggacagtgtgggga

SEQ ID NO: 2840190 - DNA, 25 bp, Homo sapien
tccgcagcttcagcatgcaggacct

SEQ ID NO: 2840191 - DNA, 25 bp, Homo sapien
agcatgcaggacctgaccctgatcc

SEQ ID NO: 2840192 - DNA, 25 bp, Homo sapien
atgcaggacctgaccctgatccggg

SEQ ID NO: 2840193 - DNA, 25 bp, Homo sapien
acctgaccctgatccgggacgagga

SEQ ID NO: 2840194 - DNA, 25 bp, Homo sapien
ggctggactcccgtgctcctcaggg

SEQ ID NO: 2840195 - DNA, 25 bp, Homo sapien
tcaaccctccatcctaggctctgag

SEQ ID NO: 2840196 - DNA, 25 bp, Homo sapien
tctgtctggtacaggcccctgctga

SEQ ID NO: 2840197 - DNA, 25 bp, Homo sapien
ccacatgttcccacattaaaaaggg

SEQ ID NO: 2840198 - DNA, 25 bp, Homo sapien
agggtccccatcctgtaccaagcag

SEQ ID NO: 2840199 - DNA, 25 bp, Homo sapien
tgtaccaagcagactgggccctaag

SEQ ID NO: 2840200 - DNA, 25 bp, Homo sapien
tgggccctaagacccctggcagaac

SEQ ID NO: 2840201 - DNA, 25 bp, Homo sapien
agactgggccctaagacccctggca

SEQ ID NO: 2840202 - DNA, 25 bp, Homo sapien
tgcccattggacctttggcactgga

SEQ ID NO: 2840203 - DNA, 25 bp, Homo sapien
aagagggtgcccattggacctttgg

SEQ ID NO: 2840204 - DNA, 25 bp, Homo sapien
ccagcttctgccacggcttcagtca

SEQ ID NO: 2840205 - DNA, 25 bp, Homo sapien
gagggtgcccattggacctttggca

SEQ ID NO: 2840206 - DNA, 25 bp, Homo sapien
caggctcgcttgcagtcagggttga

SEQ ID NO: 2840207 - DNA, 25 bp, Homo sapien
cgctttccatctggacggttgtccc

SEQ ID NO: 2840208 - DNA, 25 bp, Homo sapien
atcacccgctttccatctggacggt

SEQ ID NO: 2840209 - DNA, 25 bp, Homo sapien
caaggcaggcgacatgacagtcact

SEQ ID NO: 2840210 - DNA, 25 bp, Homo sapien
tcagttctcgctttaattcaaatgc

SEQ ID NO: 2840211 - DNA, 25 bp, Homo sapien
ttcagttctcgctttaattcaaatg

SEQ ID NO: 2840212 - DNA, 25 bp, Homo sapien
attcagttctcgctttaattcaaat

SEQ ID NO: 2840213 - DNA, 25 bp, Homo sapien
acattcagttctcgctttaattcaa

SEQ ID NO: 2840214 - DNA, 25 bp, Homo sapien
tgcataactaaaaagctcaggctga

SEQ ID NO: 2840215 - DNA, 25 bp, Homo sapien
tcactacagctagggaaatgaacca

SEQ ID NO: 2840216 - DNA, 25 bp, Homo sapien
tattggcttagtaccatcagggaaa

SEQ ID NO: 2840217 - DNA, 25 bp, Homo sapien
tccagggaccttctgtacgtttgtc

SEQ ID NO: 2840218 - DNA, 25 bp, Homo sapien
cgagagatcccagcgcgcagaactt

SEQ ID NO: 2840219 - DNA, 25 bp, Homo sapien
cccttcaaatagaggcggatccggg

SEQ ID NO: 2840220 - DNA, 25 bp, Homo sapien
gccggtcctgccatattagggcttc

SEQ ID NO: 2840221 - DNA, 25 bp, Homo sapien
tatatggccatgtacgtcacgacgg

SEQ ID NO: 2840222 - DNA, 25 bp, Homo sapien
caagatccacttgcggcagaaggac

SEQ ID NO: 2840223 - DNA, 25 bp, Homo sapien
gatgaacgcaagaggcataccaaga

SEQ ID NO: 2840224 - DNA, 25 bp, Homo sapien
tacgcttgcccagtggagtcctgtg

SEQ ID NO: 2840225 - DNA, 25 bp, Homo sapien
aagtttgccaggagcgatgaacgca

SEQ ID NO: 2840226 - DNA, 25 bp, Homo sapien
tccacagggctttcggacatgacag

SEQ ID NO: 2840227 - DNA, 25 bp, Homo sapien
gacatgctcacctctagccttaagg

SEQ ID NO: 2840228 - DNA, 25 bp, Homo sapien
tgagctgagcttcggttctccagaa

SEQ ID NO: 2840229 - DNA, 25 bp, Homo sapien
ccttttgtgtgatgcgccttgctga

SEQ ID NO: 2840230 - DNA, 25 bp, Homo sapien
ccagatttgtgatgactcccctgca

SEQ ID NO: 2840231 - DNA, 25 bp, Homo sapien
cagtcccattacagcagcctcagaa

SEQ ID NO: 2840232 - DNA, 25 bp, Homo sapien
tttgtgatgactcccctgcattgtc

SEQ ID NO: 2840233 - DNA, 25 bp, Homo sapien
gcctcagaaccaattttgtcaccag

SEQ ID NO: 2840234 - DNA, 25 bp, Homo sapien
tggccggtgagcagatgtttttatc

SEQ ID NO: 2840235 - DNA, 25 bp, Homo sapien
ccggtgagcagatgtttttatcatt

SEQ ID NO: 2840236 - DNA, 25 bp, Homo sapien
ggccggtgagcagatgtttttatca

SEQ ID NO: 2840237 - DNA, 25 bp, Homo sapien
ctgtggccggtgagcagatgttttt

SEQ ID NO: 2840238 - DNA, 25 bp, Homo sapien
gggcctggttctagcgaagatatgt

SEQ ID NO: 2840239 - DNA, 25 bp, Homo sapien
tcactatgagatcccaagagtctcc

SEQ ID NO: 2840240 - DNA, 25 bp, Homo sapien
aagagtctcccgaaatattctgggc

SEQ ID NO: 2840241 - DNA, 25 bp, Homo sapien
tggcagagtatcagaacacagggca

SEQ ID NO: 2840242 - DNA, 25 bp, Homo sapien
aggcgcttccttcccggcgcggctg

SEQ ID NO: 2840243 - DNA, 25 bp, Homo sapien
ggcgcttccttcccggcgcggctgg

SEQ ID NO: 2840244 - DNA, 25 bp, Homo sapien
aaggcgcttccttcccggcgcggct

SEQ ID NO: 2840245 - DNA, 25 bp, Homo sapien
cccgctggtttcgtattttgcctcg

SEQ ID NO: 2840246 - DNA, 25 bp, Homo sapien
gccctgccggaggtctttcagcggc

SEQ ID NO: 2840247 - DNA, 25 bp, Homo sapien
ttttctcccctagcccggagcacag

SEQ ID NO: 2840248 - DNA, 25 bp, Homo sapien
gccggaggtctttcagcggccccag

SEQ ID NO: 2840249 - DNA, 25 bp, Homo sapien
cgtggtctgaggctcatgaccccac

SEQ ID NO: 2840250 - DNA, 25 bp, Homo sapien
atgaccccacaaccctacttgagta

SEQ ID NO: 2840251 - DNA, 25 bp, Homo sapien
tcatttttgactttaggtctggtcc

SEQ ID NO: 2840252 - DNA, 25 bp, Homo sapien
tccacctgctatggctccccgtggt

SEQ ID NO: 2840253 - DNA, 25 bp, Homo sapien
gggctgccagcaacagttcccgagc

SEQ ID NO: 2840254 - DNA, 25 bp, Homo sapien
tctgatctgccatgagaaaggtcac

SEQ ID NO: 2840255 - DNA, 25 bp, Homo sapien
cagggactggatctcagcacagagg

SEQ ID NO: 2840256 - DNA, 25 bp, Homo sapien
catgttccagcaggacagctgtcac

SEQ ID NO: 2840257 - DNA, 25 bp, Homo sapien
ccaggaaaggagtggagcaaagacc

SEQ ID NO: 2840258 - DNA, 25 bp, Homo sapien
ccccagtcatcagtaatcatattag

SEQ ID NO: 2840259 - DNA, 25 bp, Homo sapien
taatcacgttttggtcgttctggtg

SEQ ID NO: 2840260 - DNA, 25 bp, Homo sapien
ataaaaatgaacatgcaacaggctg

SEQ ID NO: 2840261 - DNA, 25 bp, Homo sapien
gcataagcttcagggtttcaggcca

SEQ ID NO: 2840262 - DNA, 25 bp, Homo sapien
cctagtcagtgtggaggtgatacca

SEQ ID NO: 2840263 - DNA, 25 bp, Homo sapien
ggttcagaccaataaagctacgagt

SEQ ID NO: 2840264 - DNA, 25 bp, Homo sapien
cagacagtatttggacctcagagta

SEQ ID NO: 2840265 - DNA, 25 bp, Homo sapien
acaaggattgacccaagcaaaataa

SEQ ID NO: 2840266 - DNA, 25 bp, Homo sapien
caaggattgacccaagcaaaataaa

SEQ ID NO: 2840267 - DNA, 25 bp, Homo sapien
aggattgacccaagcaaaataaaat

SEQ ID NO: 2840268 - DNA, 25 bp, Homo sapien
gaacttagttgtaggctgctgcgct

SEQ ID NO: 2840269 - DNA, 25 bp, Homo sapien
tgtaaatgggtcactgcgaaatgca

SEQ ID NO: 2840270 - DNA, 25 bp, Homo sapien
gatggaagtaaacagtgcactggcc

SEQ ID NO: 2840271 - DNA, 25 bp, Homo sapien
tcagaacattgatacaaagggctcc

SEQ ID NO: 2840272 - DNA, 25 bp, Homo sapien
ctagtagtcatcaaggtcaaaaaat

SEQ ID NO: 2840273 - DNA, 25 bp, Homo sapien
cattccctggaaatctactcggtac

SEQ ID NO: 2840274 - DNA, 25 bp, Homo sapien
cgataagctcatgttcctgtccggt

SEQ ID NO: 2840275 - DNA, 25 bp, Homo sapien
gggcatgctctcgataagctcatgt

SEQ ID NO: 2840276 - DNA, 25 bp, Homo sapien
gagacccttcttgtgatttatctgt

SEQ ID NO: 2840277 - DNA, 25 bp, Homo sapien
gtgacaatttccaacgtagctccaa

SEQ ID NO: 2840278 - DNA, 25 bp, Homo sapien
gctctggagttagatagagaatttt

SEQ ID NO: 2840279 - DNA, 25 bp, Homo sapien
ttttcttgctctggagttagataga

SEQ ID NO: 2840280 - DNA, 25 bp, Homo sapien
cttgctctggagttagatagagaat

SEQ ID NO: 2840281 - DNA, 25 bp, Homo sapien
tcttgctctggagttagatagagaa

SEQ ID NO: 2840282 - DNA, 25 bp, Homo sapien
ttggcaatgaagaacatatctcatt

SEQ ID NO: 2840283 - DNA, 25 bp, Homo sapien
caatgaagaacatatctcattatat

SEQ ID NO: 2840284 - DNA, 25 bp, Homo sapien
ggcaatgaagaacatatctcattat

SEQ ID NO: 2840285 - DNA, 25 bp, Homo sapien
tggcaatgaagaacatatctcatta

SEQ ID NO: 2840286 - DNA, 25 bp, Homo sapien
tcaccaccataggatatatcaacta

SEQ ID NO: 2840287 - DNA, 25 bp, Homo sapien
tttcaccaccataggatatatcaac

SEQ ID NO: 2840288 - DNA, 25 bp, Homo sapien
attttcaccaccataggatatatca

SEQ ID NO: 2840289 - DNA, 25 bp, Homo sapien
caccaccataggatatatcaactaa

SEQ ID NO: 2840290 - DNA, 25 bp, Homo sapien
tcctacctagggtcttacataataa

SEQ ID NO: 2840291 - DNA, 25 bp, Homo sapien
tagggtcttacataataaagcatct

SEQ ID NO: 2840292 - DNA, 25 bp, Homo sapien
cctagggtcttacataataaagcat

SEQ ID NO: 2840293 - DNA, 25 bp, Homo sapien
tacctagggtcttacataataaagc

SEQ ID NO: 2840294 - DNA, 25 bp, Homo sapien
aacatagttatgtcgcttttccatt

SEQ ID NO: 2840295 - DNA, 25 bp, Homo sapien
agttatgtcgcttttccattcttaa

SEQ ID NO: 2840296 - DNA, 25 bp, Homo sapien
ctgctactttccgaacatagttatg

SEQ ID NO: 2840297 - DNA, 25 bp, Homo sapien
tactttccgaacatagttatgtcgc

SEQ ID NO: 2840298 - DNA, 25 bp, Homo sapien
tacaatgaatccaaacttgctatca

SEQ ID NO: 2840299 - DNA, 25 bp, Homo sapien
ttccttggagtgtgccaaaaagtgc

SEQ ID NO: 2840300 - DNA, 25 bp, Homo sapien
gtttctttgggagatccacagtgaa

SEQ ID NO: 2840301 - DNA, 25 bp, Homo sapien
atttgtgcaggacttctcttgtgtt

SEQ ID NO: 2840302 - DNA, 25 bp, Homo sapien
cattatataaaatgtccaggctggg

SEQ ID NO: 2840303 - DNA, 25 bp, Homo sapien
atataaaatgtccaggctgggcggg

SEQ ID NO: 2840304 - DNA, 25 bp, Homo sapien
ttccattatataaaatgtccaggct

SEQ ID NO: 2840305 - DNA, 25 bp, Homo sapien
tcacaaaaggccacaaactatatga

SEQ ID NO: 2840306 - DNA, 25 bp, Homo sapien
agtatacaaccagaccatttggagg

SEQ ID NO: 2840307 - DNA, 25 bp, Homo sapien
tgttacaattgttccacagtataca

SEQ ID NO: 2840308 - DNA, 25 bp, Homo sapien
tctgttacaattgttccacagtata

SEQ ID NO: 2840309 - DNA, 25 bp, Homo sapien
ttccacagtatacaaccagaccatt

SEQ ID NO: 2840310 - DNA, 25 bp, Homo sapien
gactgaaaggcggtttactcgtgac

SEQ ID NO: 2840311 - DNA, 25 bp, Homo sapien
aaggcggtttactcgtgacttaatg

SEQ ID NO: 2840312 - DNA, 25 bp, Homo sapien
aggactgaaaggcggtttactcgtg

SEQ ID NO: 2840313 - DNA, 25 bp, Homo sapien
ctgaaaggcggtttactcgtgactt

SEQ ID NO: 2840314 - DNA, 25 bp, Homo sapien
tttgggaggaatgatcaatgatatc

SEQ ID NO: 2840315 - DNA, 25 bp, Homo sapien
ttttgccactcgtgaaatctggtct

SEQ ID NO: 2840316 - DNA, 25 bp, Homo sapien
ggtctttgggaggaatgatcaatga

SEQ ID NO: 2840317 - DNA, 25 bp, Homo sapien
cactcgtgaaatctggtctttggga

SEQ ID NO: 2840318 - DNA, 25 bp, Homo sapien
tctgacttacagagaatagtttcct

SEQ ID NO: 2840319 - DNA, 25 bp, Homo sapien
gaatggaatgaaaacggatggcaaa

SEQ ID NO: 2840320 - DNA, 25 bp, Homo sapien
tagtttcctaagatgcagtcggcag

SEQ ID NO: 2840321 - DNA, 25 bp, Homo sapien
ttaaaaagccgacatgctctgactt

SEQ ID NO: 2840322 - DNA, 25 bp, Homo sapien
tcattggttttaggggcactttggc

SEQ ID NO: 2840323 - DNA, 25 bp, Homo sapien
gggcctctgcactcagattctcttc

SEQ ID NO: 2840324 - DNA, 25 bp, Homo sapien
caatgcttcgcccagagggttaacg

SEQ ID NO: 2840325 - DNA, 25 bp, Homo sapien
gggcactttggcttatcaaagcttt

SEQ ID NO: 2840326 - DNA, 25 bp, Homo sapien
gccttaaattgactaactgtcccca

SEQ ID NO: 2840327 - DNA, 25 bp, Homo sapien
tcagtccttggagaggaactaatgt

SEQ ID NO: 2840328 - DNA, 25 bp, Homo sapien
aaaccaacccttatgaagtgtcatt

SEQ ID NO: 2840329 - DNA, 25 bp, Homo sapien
catcatactatattaggcgtttacc

SEQ ID NO: 2840330 - DNA, 25 bp, Homo sapien
cttagttgaacagatccagcagtgg

SEQ ID NO: 2840331 - DNA, 25 bp, Homo sapien
ataaaaccgtatcagagggagcttc

SEQ ID NO: 2840332 - DNA, 25 bp, Homo sapien
ggacagtacccagtgagaaacctca

SEQ ID NO: 2840333 - DNA, 25 bp, Homo sapien
gataagaaccagttgccaggcacct

SEQ ID NO: 2840334 - DNA, 25 bp, Homo sapien
tgcaaagctgacactaactttttta

SEQ ID NO: 2840335 - DNA, 25 bp, Homo sapien
cgatcctcaatctcaagttcaaaga

SEQ ID NO: 2840336 - DNA, 25 bp, Homo sapien
tgtactgggccgatcctcaatctca

SEQ ID NO: 2840337 - DNA, 25 bp, Homo sapien
gtggtgctgtactgggccgatcctc

SEQ ID NO: 2840338 - DNA, 25 bp, Homo sapien
gggccgatcctcaatctcaagttca

SEQ ID NO: 2840339 - DNA, 25 bp, Homo sapien
tgcaatatgtccagagtaagccttc

SEQ ID NO: 2840340 - DNA, 25 bp, Homo sapien
gcaatatgtccagagtaagccttcc

SEQ ID NO: 2840341 - DNA, 25 bp, Homo sapien
cttgcaatatgtccagagtaagcct

SEQ ID NO: 2840342 - DNA, 25 bp, Homo sapien
caatatgtccagagtaagccttcct

SEQ ID NO: 2840343 - DNA, 25 bp, Homo sapien
gggatcaagatgcaaccaaatcctg

SEQ ID NO: 2840344 - DNA, 25 bp, Homo sapien
ccacaatgtgtagcggaaggtcctc

SEQ ID NO: 2840345 - DNA, 25 bp, Homo sapien
agtctgactttaacacaagttggca

SEQ ID NO: 2840346 - DNA, 25 bp, Homo sapien
tcccttaccaatactcagagatggc

SEQ ID NO: 2840347 - DNA, 25 bp, Homo sapien
taactggtcactctatcatacggca

SEQ ID NO: 2840348 - DNA, 25 bp, Homo sapien
aaacctaaggactaacaagccgctg

SEQ ID NO: 2840349 - DNA, 25 bp, Homo sapien
taaaccgaaggagtgagcacaagcc

SEQ ID NO: 2840350 - DNA, 25 bp, Homo sapien
gcagtaagaacaaatccagaggtca

SEQ ID NO: 2840351 - DNA, 25 bp, Homo sapien
tgggccttcagtacaattaagcaca

SEQ ID NO: 2840352 - DNA, 25 bp, Homo sapien
tctaagaatgctcagacatacaagt

SEQ ID NO: 2840353 - DNA, 25 bp, Homo sapien
tgtcaaattcttgtgctgaaatcaa

SEQ ID NO: 2840354 - DNA, 25 bp, Homo sapien
caacttttcacatggcctgaggcag

SEQ ID NO: 2840355 - DNA, 25 bp, Homo sapien
cccaatggacacacctacagtttct

SEQ ID NO: 2840356 - DNA, 25 bp, Homo sapien
tctacagcgatatccccacaagttt

SEQ ID NO: 2840357 - DNA, 25 bp, Homo sapien
tcactcaacaagcatcaagcacatc

SEQ ID NO: 2840358 - DNA, 25 bp, Homo sapien
aatgtacaagactcaaagcccattt

SEQ ID NO: 2840359 - DNA, 25 bp, Homo sapien
ccattttaatgaggcctggctgaga

SEQ ID NO: 2840360 - DNA, 25 bp, Homo sapien
aaaagtagcggtggcctaccacgag

SEQ ID NO: 2840361 - DNA, 25 bp, Homo sapien
tttgccacaatagcacccgagtcgg

SEQ ID NO: 2840362 - DNA, 25 bp, Homo sapien
gaaaggaaggccgaacactttgcca

SEQ ID NO: 2840363 - DNA, 25 bp, Homo sapien
catgcggggaaaggaccccttctcg

SEQ ID NO: 2840364 - DNA, 25 bp, Homo sapien
tcgcccctgggtcaggggctactac

SEQ ID NO: 2840365 - DNA, 25 bp, Homo sapien
ctcgcccctgggtcaggggctacta

SEQ ID NO: 2840366 - DNA, 25 bp, Homo sapien
cctcgcccctgggtcaggggctact

SEQ ID NO: 2840367 - DNA, 25 bp, Homo sapien
ctggttctcctcatccggccatgcg

SEQ ID NO: 2840368 - DNA, 25 bp, Homo sapien
tggttctcctcatccggccatgcgg

SEQ ID NO: 2840369 - DNA, 25 bp, Homo sapien
cagagatccagaaggcgggagttgg

SEQ ID NO: 2840370 - DNA, 25 bp, Homo sapien
aaggcgggagttggctagtgcctgg

SEQ ID NO: 2840371 - DNA, 25 bp, Homo sapien
ggagggtgccggacgcggcgctcac

SEQ ID NO: 2840372 - DNA, 25 bp, Homo sapien
ggcacggagggtgccggacgcggcg

SEQ ID NO: 2840373 - DNA, 25 bp, Homo sapien
cacggagggtgccggacgcggcgct

SEQ ID NO: 2840374 - DNA, 25 bp, Homo sapien
cggagggtgccggacgcggcgctca

SEQ ID NO: 2840375 - DNA, 25 bp, Homo sapien
gatcttccagatctccacgttcctg

SEQ ID NO: 2840376 - DNA, 25 bp, Homo sapien
agatctccacgttcctgtcggcagc

SEQ ID NO: 2840377 - DNA, 25 bp, Homo sapien
ttccagatctccacgttcctgtcgg

SEQ ID NO: 2840378 - DNA, 25 bp, Homo sapien
ccgcgggccgcctccaagctcttaa

SEQ ID NO: 2840379 - DNA, 25 bp, Homo sapien
ggtgcagctcgccacaaaggtcacc

SEQ ID NO: 2840380 - DNA, 25 bp, Homo sapien
gcggggcccggagacaccaagacca
